United States Patent Application Publication US 2015/0232836 A1 - sequence listing, part 13

SEQ ID NO: 401986 - DNA, 15 bp, Homo sapiens
atatcaagatatcaa

SEQ ID NO: 401987 - DNA, 15 bp, Homo sapiens
tatatcaagatatca

SEQ ID NO: 401988 - DNA, 15 bp, Homo sapiens
ttatatcaagatatc

SEQ ID NO: 401989 - DNA, 15 bp, Homo sapiens
cttatatcaagatat

SEQ ID NO: 401990 - DNA, 15 bp, Homo sapiens
gcttatatcaagata

SEQ ID NO: 401991 - DNA, 15 bp, Homo sapiens
agcttatatcaagat

SEQ ID NO: 401992 - DNA, 15 bp, Homo sapiens
cagcttatatcaaga

SEQ ID NO: 401993 - DNA, 15 bp, Homo sapiens
acagcttatatcaag

SEQ ID NO: 401994 - DNA, 15 bp, Homo sapiens
cacagcttatatcaa

SEQ ID NO: 401995 - DNA, 15 bp, Homo sapiens
acacagcttatatca

SEQ ID NO: 401996 - DNA, 15 bp, Homo sapiens
aacacagcttatatc

SEQ ID NO: 401997 - DNA, 15 bp, Homo sapiens
gaacacagcttatat

SEQ ID NO: 401998 - DNA, 15 bp, Homo sapiens
agaacacagcttata

SEQ ID NO: 401999 - DNA, 15 bp, Homo sapiens
aagaacacagcttat

SEQ ID NO: 402000 - DNA, 15 bp, Homo sapiens
aaagaacacagctta

SEQ ID NO: 402001 - DNA, 15 bp, Homo sapiens
taaagaacacagctt

SEQ ID NO: 402002 - DNA, 15 bp, Homo sapiens
ttaaagaacacagct

SEQ ID NO: 402003 - DNA, 15 bp, Homo sapiens
tttaaagaacacagc

SEQ ID NO: 402004 - DNA, 15 bp, Homo sapiens
ctttaaagaacacag

SEQ ID NO: 402005 - DNA, 15 bp, Homo sapiens
cctttaaagaacaca

SEQ ID NO: 402006 - DNA, 15 bp, Homo sapiens
ccctttaaagaacac

SEQ ID NO: 402007 - DNA, 15 bp, Homo sapiens
cccctttaaagaaca

SEQ ID NO: 402008 - DNA, 15 bp, Homo sapiens
tcccctttaaagaac

SEQ ID NO: 402009 - DNA, 15 bp, Homo sapiens
gtcccctttaaagaa

SEQ ID NO: 402010 - DNA, 15 bp, Homo sapiens
agtcccctttaaaga

SEQ ID NO: 402011 - DNA, 15 bp, Homo sapiens
cagtcccctttaaag

SEQ ID NO: 402012 - DNA, 15 bp, Homo sapiens
gcagtcccctttaaa

SEQ ID NO: 402013 - DNA, 15 bp, Homo sapiens
agcagtcccctttaa

SEQ ID NO: 402014 - DNA, 15 bp, Homo sapiens
aagcagtccccttta

SEQ ID NO: 402015 - DNA, 15 bp, Homo sapiens
taagcagtccccttt

SEQ ID NO: 402016 - DNA, 15 bp, Homo sapiens
ctaagcagtcccctt

SEQ ID NO: 402017 - DNA, 15 bp, Homo sapiens
cctaagcagtcccct

SEQ ID NO: 402018 - DNA, 15 bp, Homo sapiens
tcctaagcagtcccc

SEQ ID NO: 402019 - DNA, 15 bp, Homo sapiens
ctcctaagcagtccc

SEQ ID NO: 402020 - DNA, 15 bp, Homo sapiens
tctcctaagcagtcc

SEQ ID NO: 402021 - DNA, 15 bp, Homo sapiens
ttctcctaagcagtc

SEQ ID NO: 402022 - DNA, 15 bp, Homo sapiens
cttctcctaagcagt

SEQ ID NO: 402023 - DNA, 15 bp, Homo sapiens
ccttctcctaagcag

SEQ ID NO: 402024 - DNA, 15 bp, Homo sapiens
cccttctcctaagca

SEQ ID NO: 402025 - DNA, 15 bp, Homo sapiens
ccccttctcctaagc

SEQ ID NO: 402026 - DNA, 15 bp, Homo sapiens
gccccttctcctaag

SEQ ID NO: 402027 - DNA, 15 bp, Homo sapiens
agccccttctcctaa

SEQ ID NO: 402028 - DNA, 15 bp, Homo sapiens
cagccccttctccta

SEQ ID NO: 402029 - DNA, 15 bp, Homo sapiens
ccagccccttctcct

SEQ ID NO: 402030 - DNA, 15 bp, Homo sapiens
tccagccccttctcc

SEQ ID NO: 402031 - DNA, 15 bp, Homo sapiens
gtccagccccttctc

SEQ ID NO: 402032 - DNA, 15 bp, Homo sapiens
agtccagccccttct

SEQ ID NO: 402033 - DNA, 15 bp, Homo sapiens
aagtccagccccttc

SEQ ID NO: 402034 - DNA, 15 bp, Homo sapiens
aaagtccagcccctt

SEQ ID NO: 402035 - DNA, 15 bp, Homo sapiens
aaaagtccagcccct

SEQ ID NO: 402036 - DNA, 15 bp, Homo sapiens
aaaaagtccagcccc

SEQ ID NO: 402037 - DNA, 15 bp, Homo sapiens
taaaaagtccagccc

SEQ ID NO: 402038 - DNA, 15 bp, Homo sapiens
ataaaaagtccagcc

SEQ ID NO: 402039 - DNA, 15 bp, Homo sapiens
aataaaaagtccagc

SEQ ID NO: 402040 - DNA, 15 bp, Homo sapiens
caataaaaagtccag

SEQ ID NO: 402041 - DNA, 15 bp, Homo sapiens
gcaataaaaagtcca

SEQ ID NO: 402042 - DNA, 15 bp, Homo sapiens
agcaataaaaagtcc

SEQ ID NO: 402043 - DNA, 15 bp, Homo sapiens
tagcaataaaaagtc

SEQ ID NO: 402044 - DNA, 15 bp, Homo sapiens
atagcaataaaaagt

SEQ ID NO: 402045 - DNA, 15 bp, Homo sapiens
tatagcaataaaaag

SEQ ID NO: 402046 - DNA, 15 bp, Homo sapiens
ctatagcaataaaaa

SEQ ID NO: 402047 - DNA, 15 bp, Homo sapiens
gctatagcaataaaa

SEQ ID NO: 402048 - DNA, 15 bp, Homo sapiens
ggctatagcaataaa

SEQ ID NO: 402049 - DNA, 15 bp, Homo sapiens
aggctatagcaataa

SEQ ID NO: 402050 - DNA, 15 bp, Homo sapiens
aaggctatagcaata

SEQ ID NO: 402051 - DNA, 15 bp, Homo sapiens
taaggctatagcaat

SEQ ID NO: 402052 - DNA, 15 bp, Homo sapiens
ttaaggctatagcaa

SEQ ID NO: 402053 - DNA, 15 bp, Homo sapiens
gttaaggctatagca

SEQ ID NO: 402054 - DNA, 15 bp, Homo sapiens
agttaaggctatagc

SEQ ID NO: 402055 - DNA, 15 bp, Homo sapiens
cagttaaggctatag

SEQ ID NO: 402056 - DNA, 15 bp, Homo sapiens
tcagttaaggctata

SEQ ID NO: 402057 - DNA, 15 bp, Homo sapiens
ttcagttaaggctat

SEQ ID NO: 402058 - DNA, 15 bp, Homo sapiens
tttcagttaaggcta

SEQ ID NO: 402059 - DNA, 15 bp, Homo sapiens
ttttcagttaaggct

SEQ ID NO: 402060 - DNA, 15 bp, Homo sapiens
tttttcagttaaggc

SEQ ID NO: 402061 - DNA, 15 bp, Homo sapiens
ttttttcagttaagg

SEQ ID NO: 402062 - DNA, 15 bp, Homo sapiens
tttttttcagttaag

SEQ ID NO: 402063 - DNA, 15 bp, Homo sapiens
ttttttttcagttaa

SEQ ID NO: 402064 - DNA, 15 bp, Homo sapiens
attttttttcagtta

SEQ ID NO: 402065 - DNA, 15 bp, Homo sapiens
gattttttttcagtt

SEQ ID NO: 402066 - DNA, 15 bp, Homo sapiens
agattttttttcagt

SEQ ID NO: 402067 - DNA, 15 bp, Homo sapiens
cagattttttttcag

SEQ ID NO: 402068 - DNA, 15 bp, Homo sapiens
tcagattttttttca

SEQ ID NO: 402069 - DNA, 15 bp, Homo sapiens
atcagattttttttc

SEQ ID NO: 402070 - DNA, 15 bp, Homo sapiens
catcagatttttttt

SEQ ID NO: 402071 - DNA, 15 bp, Homo sapiens
ccatcagattttttt

SEQ ID NO: 402072 - DNA, 15 bp, Homo sapiens
accatcagatttttt

SEQ ID NO: 402073 - DNA, 15 bp, Homo sapiens
taccatcagattttt

SEQ ID NO: 402074 - DNA, 15 bp, Homo sapiens
ctaccatcagatttt

SEQ ID NO: 402075 - DNA, 15 bp, Homo sapiens
tctaccatcagattt

SEQ ID NO: 402076 - DNA, 15 bp, Homo sapiens
atctaccatcagatt

SEQ ID NO: 402077 - DNA, 15 bp, Homo sapiens
catctaccatcagat

SEQ ID NO: 402078 - DNA, 15 bp, Homo sapiens
acatctaccatcaga

SEQ ID NO: 402079 - DNA, 15 bp, Homo sapiens
aacatctaccatcag

SEQ ID NO: 402080 - DNA, 15 bp, Homo sapiens
aaacatctaccatca

SEQ ID NO: 402081 - DNA, 15 bp, Homo sapiens
caaacatctaccatc

SEQ ID NO: 402082 - DNA, 15 bp, Homo sapiens
tcaaacatctaccat

SEQ ID NO: 402083 - DNA, 15 bp, Homo sapiens
gtcaaacatctacca

SEQ ID NO: 402084 - DNA, 15 bp, Homo sapiens
tgtcaaacatctacc

SEQ ID NO: 402085 - DNA, 15 bp, Homo sapiens
ttgtcaaacatctac

SEQ ID NO: 402086 - DNA, 15 bp, Homo sapiens
attgtcaaacatcta

SEQ ID NO: 402087 - DNA, 15 bp, Homo sapiens
tattgtcaaacatct

SEQ ID NO: 402088 - DNA, 15 bp, Homo sapiens
ttattgtcaaacatc

SEQ ID NO: 402089 - DNA, 15 bp, Homo sapiens
tttattgtcaaacat

SEQ ID NO: 402090 - DNA, 15 bp, Homo sapiens
ttttattgtcaaaca

SEQ ID NO: 402091 - DNA, 15 bp, Homo sapiens
tttttattgtcaaac

SEQ ID NO: 402092 - DNA, 15 bp, Homo sapiens
ctttttattgtcaaa

SEQ ID NO: 402093 - DNA, 15 bp, Homo sapiens
tctttttattgtcaa

SEQ ID NO: 402094 - DNA, 15 bp, Homo sapiens
atctttttattgtca

SEQ ID NO: 402095 - DNA, 15 bp, Homo sapiens
tatctttttattgtc

SEQ ID NO: 402096 - DNA, 15 bp, Homo sapiens
ctatctttttattgt

SEQ ID NO: 402097 - DNA, 15 bp, Homo sapiens
tctatctttttattg

SEQ ID NO: 402098 - DNA, 15 bp, Homo sapiens
atctatctttttatt

SEQ ID NO: 402099 - DNA, 15 bp, Homo sapiens
gatctatctttttat

SEQ ID NO: 402100 - DNA, 15 bp, Homo sapiens
ggatctatcttttta

SEQ ID NO: 402101 - DNA, 15 bp, Homo sapiens
tggatctatcttttt

SEQ ID NO: 402102 - DNA, 15 bp, Homo sapiens
ttggatctatctttt

SEQ ID NO: 402103 - DNA, 15 bp, Homo sapiens
attggatctatcttt

SEQ ID NO: 402104 - DNA, 15 bp, Homo sapiens
cattggatctatctt

SEQ ID NO: 402105 - DNA, 15 bp, Homo sapiens
acattggatctatct

SEQ ID NO: 402106 - DNA, 15 bp, Homo sapiens
cacattggatctatc

SEQ ID NO: 402107 - DNA, 15 bp, Homo sapiens
tcacattggatctat

SEQ ID NO: 402108 - DNA, 15 bp, Homo sapiens
atcacattggatcta

SEQ ID NO: 402109 - DNA, 15 bp, Homo sapiens
tatcacattggatct

SEQ ID NO: 402110 - DNA, 15 bp, Homo sapiens
ttatcacattggatc

SEQ ID NO: 402111 - DNA, 15 bp, Homo sapiens
gttatcacattggat

SEQ ID NO: 402112 - DNA, 15 bp, Homo sapiens
agttatcacattgga

SEQ ID NO: 402113 - DNA, 15 bp, Homo sapiens
aagttatcacattgg

SEQ ID NO: 402114 - DNA, 15 bp, Homo sapiens
aaagttatcacattg

SEQ ID NO: 402115 - DNA, 15 bp, Homo sapiens
aaaagttatcacatt

SEQ ID NO: 402116 - DNA, 15 bp, Homo sapiens
aaaaagttatcacat

SEQ ID NO: 402117 - DNA, 15 bp, Homo sapiens
taaaaagttatcaca

SEQ ID NO: 402118 - DNA, 15 bp, Homo sapiens
ttaaaaagttatcac

SEQ ID NO: 402119 - DNA, 15 bp, Homo sapiens
tttaaaaagttatca

SEQ ID NO: 402120 - DNA, 15 bp, Homo sapiens
ctttaaaaagttatc

SEQ ID NO: 402121 - DNA, 15 bp, Homo sapiens
tctttaaaaagttat

SEQ ID NO: 402122 - DNA, 15 bp, Homo sapiens
ttctttaaaaagtta

SEQ ID NO: 402123 - DNA, 15 bp, Homo sapiens
attctttaaaaagtt

SEQ ID NO: 402124 - DNA, 15 bp, Homo sapiens
tattctttaaaaagt

SEQ ID NO: 402125 - DNA, 15 bp, Homo sapiens
ttattctttaaaaag

SEQ ID NO: 402126 - DNA, 15 bp, Homo sapiens
attattctttaaaaa

SEQ ID NO: 402127 - DNA, 15 bp, Homo sapiens
aattattctttaaaa

SEQ ID NO: 402128 - DNA, 15 bp, Homo sapiens
aaattattctttaaa

SEQ ID NO: 402129 - DNA, 15 bp, Homo sapiens
aaaattattctttaa

SEQ ID NO: 402130 - DNA, 15 bp, Homo sapiens
gaaaattattcttta

SEQ ID NO: 402131 - DNA, 15 bp, Homo sapiens
agaaaattattcttt

SEQ ID NO: 402132 - DNA, 15 bp, Homo sapiens
cagaaaattattctt

SEQ ID NO: 402133 - DNA, 15 bp, Homo sapiens
acagaaaattattct

SEQ ID NO: 402134 - DNA, 15 bp, Homo sapiens
tacagaaaattattc

SEQ ID NO: 402135 - DNA, 15 bp, Homo sapiens
ttacagaaaattatt

SEQ ID NO: 402136 - DNA, 15 bp, Homo sapiens
attacagaaaattat

SEQ ID NO: 402137 - DNA, 15 bp, Homo sapiens
aattacagaaaatta

SEQ ID NO: 402138 - DNA, 15 bp, Homo sapiens
aaattacagaaaatt

SEQ ID NO: 402139 - DNA, 15 bp, Homo sapiens
aaaattacagaaaat

SEQ ID NO: 402140 - DNA, 15 bp, Homo sapiens
gaaaattacagaaaa

SEQ ID NO: 402141 - DNA, 15 bp, Homo sapiens
ggaaaattacagaaa

SEQ ID NO: 402142 - DNA, 15 bp, Homo sapiens
aggaaaattacagaa

SEQ ID NO: 402143 - DNA, 15 bp, Homo sapiens
caggaaaattacaga

SEQ ID NO: 402144 - DNA, 15 bp, Homo sapiens
ccaggaaaattacag

SEQ ID NO: 402145 - DNA, 15 bp, Homo sapiens
tccaggaaaattaca

SEQ ID NO: 402146 - DNA, 15 bp, Homo sapiens
ctccaggaaaattac

SEQ ID NO: 402147 - DNA, 15 bp, Homo sapiens
actccaggaaaatta

SEQ ID NO: 402148 - DNA, 15 bp, Homo sapiens
gactccaggaaaatt

SEQ ID NO: 402149 - DNA, 15 bp, Homo sapiens
tgactccaggaaaat

SEQ ID NO: 402150 - DNA, 15 bp, Homo sapiens
atgactccaggaaaa

SEQ ID NO: 402151 - DNA, 15 bp, Homo sapiens
gatgactccaggaaa

SEQ ID NO: 402152 - DNA, 15 bp, Homo sapiens
agatgactccaggaa

SEQ ID NO: 402153 - DNA, 15 bp, Homo sapiens
aagatgactccagga

SEQ ID NO: 402154 - DNA, 15 bp, Homo sapiens
gaagatgactccagg

SEQ ID NO: 402155 - DNA, 15 bp, Homo sapiens
tgaagatgactccag

SEQ ID NO: 402156 - DNA, 15 bp, Homo sapiens
atgaagatgactcca

SEQ ID NO: 402157 - DNA, 15 bp, Homo sapiens
aatgaagatgactcc

SEQ ID NO: 402158 - DNA, 15 bp, Homo sapiens
taatgaagatgactc

SEQ ID NO: 402159 - DNA, 15 bp, Homo sapiens
gtaatgaagatgact

SEQ ID NO: 402160 - DNA, 15 bp, Homo sapiens
agtaatgaagatgac

SEQ ID NO: 402161 - DNA, 15 bp, Homo sapiens
tagtaatgaagatga

SEQ ID NO: 402162 - DNA, 15 bp, Homo sapiens
ttagtaatgaagatg

SEQ ID NO: 402163 - DNA, 15 bp, Homo sapiens
tttagtaatgaagat

SEQ ID NO: 402164 - DNA, 15 bp, Homo sapiens
ctttagtaatgaaga

SEQ ID NO: 402165 - DNA, 15 bp, Homo sapiens
cctttagtaatgaag

SEQ ID NO: 402166 - DNA, 15 bp, Homo sapiens
acctttagtaatgaa

SEQ ID NO: 402167 - DNA, 15 bp, Homo sapiens
gacctttagtaatga

SEQ ID NO: 402168 - DNA, 15 bp, Homo sapiens
tgacctttagtaatg

SEQ ID NO: 402169 - DNA, 15 bp, Homo sapiens
atgacctttagtaat

SEQ ID NO: 402170 - DNA, 15 bp, Homo sapiens
aatgacctttagtaa

SEQ ID NO: 402171 - DNA, 15 bp, Homo sapiens
gaatgacctttagta

SEQ ID NO: 402172 - DNA, 15 bp, Homo sapiens
ggaatgacctttagt

SEQ ID NO: 402173 - DNA, 15 bp, Homo sapiens
gggaatgacctttag

SEQ ID NO: 402174 - DNA, 15 bp, Homo sapiens
tgggaatgaccttta

SEQ ID NO: 402175 - DNA, 15 bp, Homo sapiens
ttgggaatgaccttt

SEQ ID NO: 402176 - DNA, 15 bp, Homo sapiens
cttgggaatgacctt

SEQ ID NO: 402177 - DNA, 15 bp, Homo sapiens
gcttgggaatgacct

SEQ ID NO: 402178 - DNA, 15 bp, Homo sapiens
agcttgggaatgacc

SEQ ID NO: 402179 - DNA, 15 bp, Homo sapiens
tagcttgggaatgac

SEQ ID NO: 402180 - DNA, 15 bp, Homo sapiens
ttagcttgggaatga

SEQ ID NO: 402181 - DNA, 15 bp, Homo sapiens
attagcttgggaatg

SEQ ID NO: 402182 - DNA, 15 bp, Homo sapiens
cattagcttgggaat

SEQ ID NO: 402183 - DNA, 15 bp, Homo sapiens
ccattagcttgggaa

SEQ ID NO: 402184 - DNA, 15 bp, Homo sapiens
gccattagcttggga

SEQ ID NO: 402185 - DNA, 15 bp, Homo sapiens
tgccattagcttggg

SEQ ID NO: 402186 - DNA, 15 bp, Homo sapiens
ttgccattagcttgg

SEQ ID NO: 402187 - DNA, 15 bp, Homo sapiens
tttgccattagcttg

SEQ ID NO: 402188 - DNA, 15 bp, Homo sapiens
ttttgccattagctt

SEQ ID NO: 402189 - DNA, 15 bp, Homo sapiens
tttttgccattagct

SEQ ID NO: 402190 - DNA, 15 bp, Homo sapiens
gtttttgccattagc

SEQ ID NO: 402191 - DNA, 15 bp, Homo sapiens
agtttttgccattag

SEQ ID NO: 402192 - DNA, 15 bp, Homo sapiens
gagtttttgccatta

SEQ ID NO: 402193 - DNA, 15 bp, Homo sapiens
ggagtttttgccatt

SEQ ID NO: 402194 - DNA, 15 bp, Homo sapiens
gggagtttttgccat

SEQ ID NO: 402195 - DNA, 15 bp, Homo sapiens
tgggagtttttgcca

SEQ ID NO: 402196 - DNA, 15 bp, Homo sapiens
ctgggagtttttgcc

SEQ ID NO: 402197 - DNA, 15 bp, Homo sapiens
actgggagtttttgc

SEQ ID NO: 402198 - DNA, 15 bp, Homo sapiens
tactgggagtttttg

SEQ ID NO: 402199 - DNA, 15 bp, Homo sapiens
gtactgggagttttt

SEQ ID NO: 402200 - DNA, 15 bp, Homo sapiens
tgtactgggagtttt

SEQ ID NO: 402201 - DNA, 15 bp, Homo sapiens
gtgtactgggagttt

SEQ ID NO: 402202 - DNA, 15 bp, Homo sapiens
agtgtactgggagtt

SEQ ID NO: 402203 - DNA, 15 bp, Homo sapiens
tagtgtactgggagt

SEQ ID NO: 402204 - DNA, 15 bp, Homo sapiens
ttagtgtactgggag

SEQ ID NO: 402205 - DNA, 15 bp, Homo sapiens
tttagtgtactggga

SEQ ID NO: 402206 - DNA, 15 bp, Homo sapiens
atttagtgtactggg

SEQ ID NO: 402207 - DNA, 15 bp, Homo sapiens
tatttagtgtactgg

SEQ ID NO: 402208 - DNA, 15 bp, Homo sapiens
ttatttagtgtactg

SEQ ID NO: 402209 - DNA, 15 bp, Homo sapiens
tttatttagtgtact

SEQ ID NO: 402210 - DNA, 15 bp, Homo sapiens
ctttatttagtgtac

SEQ ID NO: 402211 - DNA, 15 bp, Homo sapiens
cctttatttagtgta

SEQ ID NO: 402212 - DNA, 15 bp, Homo sapiens
ccctttatttagtgt

SEQ ID NO: 402213 - DNA, 15 bp, Homo sapiens
tccctttatttagtg

SEQ ID NO: 402214 - DNA, 15 bp, Homo sapiens
gtccctttatttagt

SEQ ID NO: 402215 - DNA, 15 bp, Homo sapiens
ggtccctttatttag

SEQ ID NO: 402216 - DNA, 15 bp, Homo sapiens
tggtccctttattta

SEQ ID NO: 402217 - DNA, 15 bp, Homo sapiens
gtggtccctttattt

SEQ ID NO: 402218 - DNA, 15 bp, Homo sapiens
tgtggtccctttatt

SEQ ID NO: 402219 - DNA, 15 bp, Homo sapiens
ctgtggtccctttat

SEQ ID NO: 402220 - DNA, 15 bp, Homo sapiens
gctgtggtcccttta

SEQ ID NO: 402221 - DNA, 15 bp, Homo sapiens
tgctgtggtcccttt

SEQ ID NO: 402222 - DNA, 15 bp, Homo sapiens
ttgctgtggtccctt

SEQ ID NO: 402223 - DNA, 15 bp, Homo sapiens
tttgctgtggtccct

SEQ ID NO: 402224 - DNA, 15 bp, Homo sapiens
atttgctgtggtccc

SEQ ID NO: 402225 - DNA, 15 bp, Homo sapiens
aatttgctgtggtcc

SEQ ID NO: 402226 - DNA, 15 bp, Homo sapiens
caatttgctgtggtc

SEQ ID NO: 402227 - DNA, 15 bp, Homo sapiens
acaatttgctgtggt

SEQ ID NO: 402228 - DNA, 15 bp, Homo sapiens
tacaatttgctgtgg

SEQ ID NO: 402229 - DNA, 15 bp, Homo sapiens
ctacaatttgctgtg

SEQ ID NO: 402230 - DNA, 15 bp, Homo sapiens
cctacaatttgctgt

SEQ ID NO: 402231 - DNA, 15 bp, Homo sapiens
ccctacaatttgctg

SEQ ID NO: 402232 - DNA, 15 bp, Homo sapiens
accctacaatttgct

SEQ ID NO: 402233 - DNA, 15 bp, Homo sapiens
aaccctacaatttgc

SEQ ID NO: 402234 - DNA, 15 bp, Homo sapiens
aaaccctacaatttg

SEQ ID NO: 402235 - DNA, 15 bp, Homo sapiens
caaaccctacaattt

SEQ ID NO: 402236 - DNA, 15 bp, Homo sapiens
acaaaccctacaatt

SEQ ID NO: 402237 - DNA, 15 bp, Homo sapiens
cacaaaccctacaat

SEQ ID NO: 402238 - DNA, 15 bp, Homo sapiens
tcacaaaccctacaa

SEQ ID NO: 402239 - DNA, 15 bp, Homo sapiens
gtcacaaaccctaca

SEQ ID NO: 402240 - DNA, 15 bp, Homo sapiens
tgtcacaaaccctac

SEQ ID NO: 402241 - DNA, 15 bp, Homo sapiens
ctgtcacaaacccta

SEQ ID NO: 402242 - DNA, 15 bp, Homo sapiens
actgtcacaaaccct

SEQ ID NO: 402243 - DNA, 15 bp, Homo sapiens
aactgtcacaaaccc

SEQ ID NO: 402244 - DNA, 15 bp, Homo sapiens
gaactgtcacaaacc

SEQ ID NO: 402245 - DNA, 15 bp, Homo sapiens
ggaactgtcacaaac

SEQ ID NO: 402246 - DNA, 15 bp, Homo sapiens
aggaactgtcacaaa

SEQ ID NO: 402247 - DNA, 15 bp, Homo sapiens
taggaactgtcacaa

SEQ ID NO: 402248 - DNA, 15 bp, Homo sapiens
gtaggaactgtcaca

SEQ ID NO: 402249 - DNA, 15 bp, Homo sapiens
agtaggaactgtcac

SEQ ID NO: 402250 - DNA, 15 bp, Homo sapiens
cagtaggaactgtca

SEQ ID NO: 402251 - DNA, 15 bp, Homo sapiens
gcagtaggaactgtc

SEQ ID NO: 402252 - DNA, 15 bp, Homo sapiens
agcagtaggaactgt

SEQ ID NO: 402253 - DNA, 15 bp, Homo sapiens
cagcagtaggaactg

SEQ ID NO: 402254 - DNA, 15 bp, Homo sapiens
ccagcagtaggaact

SEQ ID NO: 402255 - DNA, 15 bp, Homo sapiens
cccagcagtaggaac

SEQ ID NO: 402256 - DNA, 15 bp, Homo sapiens
tcccagcagtaggaa

SEQ ID NO: 402257 - DNA, 15 bp, Homo sapiens
ttcccagcagtagga

SEQ ID NO: 402258 - DNA, 15 bp, Homo sapiens
tttcccagcagtagg

SEQ ID NO: 402259 - DNA, 15 bp, Homo sapiens
ctttcccagcagtag

SEQ ID NO: 402260 - DNA, 15 bp, Homo sapiens
cctttcccagcagta

SEQ ID NO: 402261 - DNA, 15 bp, Homo sapiens
gcctttcccagcagt

SEQ ID NO: 402262 - DNA, 15 bp, Homo sapiens
agcctttcccagcag

SEQ ID NO: 402263 - DNA, 15 bp, Homo sapiens
aagcctttcccagca

SEQ ID NO: 402264 - DNA, 15 bp, Homo sapiens
caagcctttcccagc

SEQ ID NO: 402265 - DNA, 15 bp, Homo sapiens
acaagcctttcccag

SEQ ID NO: 402266 - DNA, 15 bp, Homo sapiens
aacaagcctttccca

SEQ ID NO: 402267 - DNA, 15 bp, Homo sapiens
gaacaagcctttccc

SEQ ID NO: 402268 - DNA, 15 bp, Homo sapiens
tgaacaagcctttcc

SEQ ID NO: 402269 - DNA, 15 bp, Homo sapiens
gtgaacaagcctttc

SEQ ID NO: 402270 - DNA, 15 bp, Homo sapiens
agtgaacaagccttt

SEQ ID NO: 402271 - DNA, 15 bp, Homo sapiens
gagtgaacaagcctt

SEQ ID NO: 402272 - DNA, 15 bp, Homo sapiens
agagtgaacaagcct

SEQ ID NO: 402273 - DNA, 15 bp, Homo sapiens
aagagtgaacaagcc

SEQ ID NO: 402274 - DNA, 15 bp, Homo sapiens
caagagtgaacaagc

SEQ ID NO: 402275 - DNA, 15 bp, Homo sapiens
ccaagagtgaacaag

SEQ ID NO: 402276 - DNA, 15 bp, Homo sapiens
accaagagtgaacaa

SEQ ID NO: 402277 - DNA, 15 bp, Homo sapiens
aaccaagagtgaaca

SEQ ID NO: 402278 - DNA, 15 bp, Homo sapiens
gaaccaagagtgaac

SEQ ID NO: 402279 - DNA, 15 bp, Homo sapiens
ggaaccaagagtgaa

SEQ ID NO: 402280 - DNA, 15 bp, Homo sapiens
aggaaccaagagtga

SEQ ID NO: 402281 - DNA, 15 bp, Homo sapiens
caggaaccaagagtg

SEQ ID NO: 402282 - DNA, 15 bp, Homo sapiens
gcaggaaccaagagt

SEQ ID NO: 402283 - DNA, 15 bp, Homo sapiens
tgcaggaaccaagag

SEQ ID NO: 402284 - DNA, 15 bp, Homo sapiens
atgcaggaaccaaga

SEQ ID NO: 402285 - DNA, 15 bp, Homo sapiens
aatgcaggaaccaag

SEQ ID NO: 402286 - DNA, 15 bp, Homo sapiens
taatgcaggaaccaa

SEQ ID NO: 402287 - DNA, 15 bp, Homo sapiens
ttaatgcaggaacca

SEQ ID NO: 402288 - DNA, 15 bp, Homo sapiens
gttaatgcaggaacc

SEQ ID NO: 402289 - DNA, 15 bp, Homo sapiens
ggttaatgcaggaac

SEQ ID NO: 402290 - DNA, 15 bp, Homo sapiens
aggttaatgcaggaa

SEQ ID NO: 402291 - DNA, 15 bp, Homo sapiens
taggttaatgcagga

SEQ ID NO: 402292 - DNA, 15 bp, Homo sapiens
ataggttaatgcagg

SEQ ID NO: 402293 - DNA, 15 bp, Homo sapiens
cataggttaatgcag

SEQ ID NO: 402294 - DNA, 15 bp, Homo sapiens
gcataggttaatgca

SEQ ID NO: 402295 - DNA, 15 bp, Homo sapiens
tgcataggttaatgc

SEQ ID NO: 402296 - DNA, 15 bp, Homo sapiens
ctgcataggttaatg

SEQ ID NO: 402297 - DNA, 15 bp, Homo sapiens
cctgcataggttaat

SEQ ID NO: 402298 - DNA, 15 bp, Homo sapiens
ccctgcataggttaa

SEQ ID NO: 402299 - DNA, 15 bp, Homo sapiens
accctgcataggtta

SEQ ID NO: 402300 - DNA, 15 bp, Homo sapiens
taccctgcataggtt

SEQ ID NO: 402301 - DNA, 15 bp, Homo sapiens
ctaccctgcataggt

SEQ ID NO: 402302 - DNA, 15 bp, Homo sapiens
actaccctgcatagg

SEQ ID NO: 402303 - DNA, 15 bp, Homo sapiens
aactaccctgcatag

SEQ ID NO: 402304 - DNA, 15 bp, Homo sapiens
aaactaccctgcata

SEQ ID NO: 402305 - DNA, 15 bp, Homo sapiens
aaaactaccctgcat

SEQ ID NO: 402306 - DNA, 15 bp, Homo sapiens
taaaactaccctgca

SEQ ID NO: 402307 - DNA, 15 bp, Homo sapiens
ctaaaactaccctgc

SEQ ID NO: 402308 - DNA, 15 bp, Homo sapiens
actaaaactaccctg

SEQ ID NO: 402309 - DNA, 15 bp, Homo sapiens
gactaaaactaccct

SEQ ID NO: 402310 - DNA, 15 bp, Homo sapiens
agactaaaactaccc

SEQ ID NO: 402311 - DNA, 15 bp, Homo sapiens
tagactaaaactacc

SEQ ID NO: 402312 - DNA, 15 bp, Homo sapiens
gtagactaaaactac

SEQ ID NO: 402313 - DNA, 15 bp, Homo sapiens
ggtagactaaaacta

SEQ ID NO: 402314 - DNA, 15 bp, Homo sapiens
aggtagactaaaact

SEQ ID NO: 402315 - DNA, 15 bp, Homo sapiens
aaggtagactaaaac

SEQ ID NO: 402316 - DNA, 15 bp, Homo sapiens
caaggtagactaaaa

SEQ ID NO: 402317 - DNA, 15 bp, Homo sapiens
acaaggtagactaaa

SEQ ID NO: 402318 - DNA, 15 bp, Homo sapiens
aacaaggtagactaa

SEQ ID NO: 402319 - DNA, 15 bp, Homo sapiens
taacaaggtagacta

SEQ ID NO: 402320 - DNA, 15 bp, Homo sapiens
ttaacaaggtagact

SEQ ID NO: 402321 - DNA, 15 bp, Homo sapiens
attaacaaggtagac

SEQ ID NO: 402322 - DNA, 15 bp, Homo sapiens
tattaacaaggtaga

SEQ ID NO: 402323 - DNA, 15 bp, Homo sapiens
gtattaacaaggtag

SEQ ID NO: 402324 - DNA, 15 bp, Homo sapiens
agtattaacaaggta

SEQ ID NO: 402325 - DNA, 15 bp, Homo sapiens
tagtattaacaaggt

SEQ ID NO: 402326 - DNA, 15 bp, Homo sapiens
gtagtattaacaagg

SEQ ID NO: 402327 - DNA, 15 bp, Homo sapiens
agtagtattaacaag

SEQ ID NO: 402328 - DNA, 15 bp, Homo sapiens
aagtagtattaacaa

SEQ ID NO: 402329 - DNA, 15 bp, Homo sapiens
aaagtagtattaaca

SEQ ID NO: 402330 - DNA, 15 bp, Homo sapiens
aaaagtagtattaac

SEQ ID NO: 402331 - DNA, 15 bp, Homo sapiens
aaaaagtagtattaa

SEQ ID NO: 402332 - DNA, 15 bp, Homo sapiens
gaaaaagtagtatta

SEQ ID NO: 402333 - DNA, 15 bp, Homo sapiens
agaaaaagtagtatt

SEQ ID NO: 402334 - DNA, 15 bp, Homo sapiens
gagaaaaagtagtat

SEQ ID NO: 402335 - DNA, 15 bp, Homo sapiens
agagaaaaagtagta

SEQ ID NO: 402336 - DNA, 15 bp, Homo sapiens
cagagaaaaagtagt

SEQ ID NO: 402337 - DNA, 15 bp, Homo sapiens
acagagaaaaagtag

SEQ ID NO: 402338 - DNA, 15 bp, Homo sapiens
aacagagaaaaagta

SEQ ID NO: 402339 - DNA, 15 bp, Homo sapiens
caacagagaaaaagt

SEQ ID NO: 402340 - DNA, 15 bp, Homo sapiens
ccaacagagaaaaag

SEQ ID NO: 402341 - DNA, 15 bp, Homo sapiens
cccaacagagaaaaa

SEQ ID NO: 402342 - DNA, 15 bp, Homo sapiens
acccaacagagaaaa

SEQ ID NO: 402343 - DNA, 15 bp, Homo sapiens
tacccaacagagaaa

SEQ ID NO: 402344 - DNA, 15 bp, Homo sapiens
atacccaacagagaa

SEQ ID NO: 402345 - DNA, 15 bp, Homo sapiens
aatacccaacagaga

SEQ ID NO: 402346 - DNA, 15 bp, Homo sapiens
caatacccaacagag

SEQ ID NO: 402347 - DNA, 15 bp, Homo sapiens
tcaatacccaacaga

SEQ ID NO: 402348 - DNA, 15 bp, Homo sapiens
atcaatacccaacag

SEQ ID NO: 402349 - DNA, 15 bp, Homo sapiens
aatcaatacccaaca

SEQ ID NO: 402350 - DNA, 15 bp, Homo sapiens
taatcaatacccaac

SEQ ID NO: 402351 - DNA, 15 bp, Homo sapiens
ttaatcaatacccaa

SEQ ID NO: 402352 - DNA, 15 bp, Homo sapiens
gttaatcaataccca

SEQ ID NO: 402353 - DNA, 15 bp, Homo sapiens
tgttaatcaataccc

SEQ ID NO: 402354 - DNA, 15 bp, Homo sapiens
gtgttaatcaatacc

SEQ ID NO: 402355 - DNA, 15 bp, Homo sapiens
ggtgttaatcaatac

SEQ ID NO: 402356 - DNA, 15 bp, Homo sapiens
aggtgttaatcaata

SEQ ID NO: 402357 - DNA, 15 bp, Homo sapiens
taggtgttaatcaat

SEQ ID NO: 402358 - DNA, 15 bp, Homo sapiens
ctaggtgttaatcaa

SEQ ID NO: 402359 - DNA, 15 bp, Homo sapiens
actaggtgttaatca

SEQ ID NO: 402360 - DNA, 15 bp, Homo sapiens
cactaggtgttaatc

SEQ ID NO: 402361 - DNA, 15 bp, Homo sapiens
tcactaggtgttaat

SEQ ID NO: 402362 - DNA, 15 bp, Homo sapiens
atcactaggtgttaa

SEQ ID NO: 402363 - DNA, 15 bp, Homo sapiens
catcactaggtgtta

SEQ ID NO: 402364 - DNA, 15 bp, Homo sapiens
gcatcactaggtgtt

SEQ ID NO: 402365 - DNA, 15 bp, Homo sapiens
agcatcactaggtgt

SEQ ID NO: 402366 - DNA, 15 bp, Homo sapiens
cagcatcactaggtg

SEQ ID NO: 402367 - DNA, 15 bp, Homo sapiens
acagcatcactaggt

SEQ ID NO: 402368 - DNA, 15 bp, Homo sapiens
gacagcatcactagg

SEQ ID NO: 402369 - DNA, 15 bp, Homo sapiens
tgacagcatcactag

SEQ ID NO: 402370 - DNA, 15 bp, Homo sapiens
atgacagcatcacta

SEQ ID NO: 402371 - DNA, 15 bp, Homo sapiens
aatgacagcatcact

SEQ ID NO: 402372 - DNA, 15 bp, Homo sapiens
aaatgacagcatcac

SEQ ID NO: 402373 - DNA, 15 bp, Homo sapiens
gaaatgacagcatca

SEQ ID NO: 402374 - DNA, 15 bp, Homo sapiens
agaaatgacagcatc

SEQ ID NO: 402375 - DNA, 15 bp, Homo sapiens
aagaaatgacagcat

SEQ ID NO: 402376 - DNA, 15 bp, Homo sapiens
taagaaatgacagca

SEQ ID NO: 402377 - DNA, 15 bp, Homo sapiens
ttaagaaatgacagc

SEQ ID NO: 402378 - DNA, 15 bp, Homo sapiens
attaagaaatgacag

SEQ ID NO: 402379 - DNA, 15 bp, Homo sapiens
cattaagaaatgaca

SEQ ID NO: 402380 - DNA, 15 bp, Homo sapiens
gcattaagaaatgac

SEQ ID NO: 402381 - DNA, 15 bp, Homo sapiens
agcattaagaaatga

SEQ ID NO: 402382 - DNA, 15 bp, Homo sapiens
tagcattaagaaatg

SEQ ID NO: 402383 - DNA, 15 bp, Homo sapiens
ctagcattaagaaat

SEQ ID NO: 402384 - DNA, 15 bp, Homo sapiens
cctagcattaagaaa

SEQ ID NO: 402385 - DNA, 15 bp, Homo sapiens
ccctagcattaagaa

SEQ ID NO: 402386 - DNA, 15 bp, Homo sapiens
accctagcattaaga

SEQ ID NO: 402387 - DNA, 15 bp, Homo sapiens
caccctagcattaag

SEQ ID NO: 402388 - DNA, 15 bp, Homo sapiens
tcaccctagcattaa

SEQ ID NO: 402389 - DNA, 15 bp, Homo sapiens
ctcaccctagcatta

SEQ ID NO: 402390 - DNA, 15 bp, Homo sapiens
tctcaccctagcatt

SEQ ID NO: 402391 - DNA, 15 bp, Homo sapiens
ctctcaccctagcat

SEQ ID NO: 402392 - DNA, 15 bp, Homo sapiens
gctctcaccctagca

SEQ ID NO: 402393 - DNA, 15 bp, Homo sapiens
agctctcaccctagc

SEQ ID NO: 402394 - DNA, 15 bp, Homo sapiens
tagctctcaccctag

SEQ ID NO: 402395 - DNA, 15 bp, Homo sapiens
atagctctcacccta

SEQ ID NO: 402396 - DNA, 15 bp, Homo sapiens
aatagctctcaccct

SEQ ID NO: 402397 - DNA, 15 bp, Homo sapiens
aaatagctctcaccc

SEQ ID NO: 402398 - DNA, 15 bp, Homo sapiens
aaaatagctctcacc

SEQ ID NO: 402399 - DNA, 15 bp, Homo sapiens
aaaaatagctctcac

SEQ ID NO: 402400 - DNA, 15 bp, Homo sapiens
aaaaaatagctctca

SEQ ID NO: 402401 - DNA, 15 bp, Homo sapiens
taaaaaatagctctc

SEQ ID NO: 402402 - DNA, 15 bp, Homo sapiens
ctaaaaaatagctct

SEQ ID NO: 402403 - DNA, 15 bp, Homo sapiens
tctaaaaaatagctc

SEQ ID NO: 402404 - DNA, 15 bp, Homo sapiens
ttctaaaaaatagct

SEQ ID NO: 402405 - DNA, 15 bp, Homo sapiens
gttctaaaaaatagc

SEQ ID NO: 402406 - DNA, 15 bp, Homo sapiens
tgttctaaaaaatag

SEQ ID NO: 402407 - DNA, 15 bp, Homo sapiens
gtgttctaaaaaata

SEQ ID NO: 402408 - DNA, 15 bp, Homo sapiens
tgtgttctaaaaaat

SEQ ID NO: 402409 - DNA, 15 bp, Homo sapiens
ttgtgttctaaaaaa

SEQ ID NO: 402410 - DNA, 15 bp, Homo sapiens
gttgtgttctaaaaa

SEQ ID NO: 402411 - DNA, 15 bp, Homo sapiens
tgttgtgttctaaaa

SEQ ID NO: 402412 - DNA, 15 bp, Homo sapiens
ctgttgtgttctaaa

SEQ ID NO: 402413 - DNA, 15 bp, Homo sapiens
gctgttgtgttctaa

SEQ ID NO: 402414 - DNA, 15 bp, Homo sapiens
tgctgttgtgttcta

SEQ ID NO: 402415 - DNA, 15 bp, Homo sapiens
atgctgttgtgttct

SEQ ID NO: 402416 - DNA, 15 bp, Homo sapiens
aatgctgttgtgttc

SEQ ID NO: 402417 - DNA, 15 bp, Homo sapiens
aaatgctgttgtgtt

SEQ ID NO: 402418 - DNA, 15 bp, Homo sapiens
aaaatgctgttgtgt

SEQ ID NO: 402419 - DNA, 15 bp, Homo sapiens
taaaatgctgttgtg

SEQ ID NO: 402420 - DNA, 15 bp, Homo sapiens
ttaaaatgctgttgt

SEQ ID NO: 402421 - DNA, 15 bp, Homo sapiens
attaaaatgctgttg

SEQ ID NO: 402422 - DNA, 15 bp, Homo sapiens
gattaaaatgctgtt

SEQ ID NO: 402423 - DNA, 15 bp, Homo sapiens
agattaaaatgctgt

SEQ ID NO: 402424 - DNA, 15 bp, Homo sapiens
aagattaaaatgctg

SEQ ID NO: 402425 - DNA, 15 bp, Homo sapiens
aaagattaaaatgct

SEQ ID NO: 402426 - DNA, 15 bp, Homo sapiens
gaaagattaaaatgc

SEQ ID NO: 402427 - DNA, 15 bp, Homo sapiens
ggaaagattaaaatg

SEQ ID NO: 402428 - DNA, 15 bp, Homo sapiens
tggaaagattaaaat

SEQ ID NO: 402429 - DNA, 15 bp, Homo sapiens
ctggaaagattaaaa

SEQ ID NO: 402430 - DNA, 15 bp, Homo sapiens
actggaaagattaaa

SEQ ID NO: 402431 - DNA, 15 bp, Homo sapiens
cactggaaagattaa

SEQ ID NO: 402432 - DNA, 15 bp, Homo sapiens
acactggaaagatta

SEQ ID NO: 402433 - DNA, 15 bp, Homo sapiens
gacactggaaagatt

SEQ ID NO: 402434 - DNA, 15 bp, Homo sapiens
agacactggaaagat

SEQ ID NO: 402435 - DNA, 15 bp, Homo sapiens
tagacactggaaaga

SEQ ID NO: 402436 - DNA, 15 bp, Homo sapiens
ttagacactggaaag

SEQ ID NO: 402437 - DNA, 15 bp, Homo sapiens
tttagacactggaaa

SEQ ID NO: 402438 - DNA, 15 bp, Homo sapiens
ctttagacactggaa

SEQ ID NO: 402439 - DNA, 15 bp, Homo sapiens
gctttagacactgga

SEQ ID NO: 402440 - DNA, 15 bp, Homo sapiens
tgctttagacactgg

SEQ ID NO: 402441 - DNA, 15 bp, Homo sapiens
ttgctttagacactg

SEQ ID NO: 402442 - DNA, 15 bp, Homo sapiens
attgctttagacact

SEQ ID NO: 402443 - DNA, 15 bp, Homo sapiens
aattgctttagacac

SEQ ID NO: 402444 - DNA, 15 bp, Homo sapiens
aaattgctttagaca

SEQ ID NO: 402445 - DNA, 15 bp, Homo sapiens
aaaattgctttagac

SEQ ID NO: 402446 - DNA, 15 bp, Homo sapiens
aaaaattgctttaga

SEQ ID NO: 402447 - DNA, 15 bp, Homo sapiens
aaaaaattgctttag

SEQ ID NO: 402448 - DNA, 15 bp, Homo sapiens
aaaaaaattgcttta

SEQ ID NO: 402449 - DNA, 15 bp, Homo sapiens
aaaaaaaattgcttt

SEQ ID NO: 402450 - DNA, 15 bp, Homo sapiens
taaaaaaaattgctt

SEQ ID NO: 402451 - DNA, 15 bp, Homo sapiens
ttaaaaaaaattgct

SEQ ID NO: 402452 - DNA, 15 bp, Homo sapiens
gttaaaaaaaattgc

SEQ ID NO: 402453 - DNA, 15 bp, Homo sapiens
tgttaaaaaaaattg

SEQ ID NO: 402454 - DNA, 15 bp, Homo sapiens
atgttaaaaaaaatt

SEQ ID NO: 402455 - DNA, 15 bp, Homo sapiens
catgttaaaaaaaat

SEQ ID NO: 402456 - DNA, 15 bp, Homo sapiens
acatgttaaaaaaaa

SEQ ID NO: 402457 - DNA, 15 bp, Homo sapiens
gacatgttaaaaaaa

SEQ ID NO: 402458 - DNA, 15 bp, Homo sapiens
tgacatgttaaaaaa

SEQ ID NO: 402459 - DNA, 15 bp, Homo sapiens
ctgacatgttaaaaa

SEQ ID NO: 402460 - DNA, 15 bp, Homo sapiens
tctgacatgttaaaa

SEQ ID NO: 402461 - DNA, 15 bp, Homo sapiens
ctctgacatgttaaa

SEQ ID NO: 402462 - DNA, 15 bp, Homo sapiens
actctgacatgttaa

SEQ ID NO: 402463 - DNA, 15 bp, Homo sapiens
aactctgacatgtta

SEQ ID NO: 402464 - DNA, 15 bp, Homo sapiens
gaactctgacatgtt

SEQ ID NO: 402465 - DNA, 15 bp, Homo sapiens
tgaactctgacatgt

SEQ ID NO: 402466 - DNA, 15 bp, Homo sapiens
atgaactctgacatg

SEQ ID NO: 402467 - DNA, 15 bp, Homo sapiens
aatgaactctgacat

SEQ ID NO: 402468 - DNA, 15 bp, Homo sapiens
aaatgaactctgaca

SEQ ID NO: 402469 - DNA, 15 bp, Homo sapiens
aaaatgaactctgac

SEQ ID NO: 402470 - DNA, 15 bp, Homo sapiens
gaaaatgaactctga

SEQ ID NO: 402471 - DNA, 15 bp, Homo sapiens
tgaaaatgaactctg

SEQ ID NO: 402472 - DNA, 15 bp, Homo sapiens
atgaaaatgaactct

SEQ ID NO: 402473 - DNA, 15 bp, Homo sapiens
aatgaaaatgaactc

SEQ ID NO: 402474 - DNA, 15 bp, Homo sapiens
caatgaaaatgaact

SEQ ID NO: 402475 - DNA, 15 bp, Homo sapiens
acaatgaaaatgaac

SEQ ID NO: 402476 - DNA, 15 bp, Homo sapiens
cacaatgaaaatgaa

SEQ ID NO: 402477 - DNA, 15 bp, Homo sapiens
ccacaatgaaaatga

SEQ ID NO: 402478 - DNA, 15 bp, Homo sapiens
tccacaatgaaaatg

SEQ ID NO: 402479 - DNA, 15 bp, Homo sapiens
atccacaatgaaaat

SEQ ID NO: 402480 - DNA, 15 bp, Homo sapiens
catccacaatgaaaa

SEQ ID NO: 402481 - DNA, 15 bp, Homo sapiens
acatccacaatgaaa

SEQ ID NO: 402482 - DNA, 15 bp, Homo sapiens
gacatccacaatgaa

SEQ ID NO: 402483 - DNA, 15 bp, Homo sapiens
agacatccacaatga

SEQ ID NO: 402484 - DNA, 15 bp, Homo sapiens
aagacatccacaatg

SEQ ID NO: 402485 - DNA, 15 bp, Homo sapiens
taagacatccacaat

SEQ ID NO: 402486 - DNA, 15 bp, Homo sapiens
ttaagacatccacaa

SEQ ID NO: 402487 - DNA, 15 bp, Homo sapiens
attaagacatccaca

SEQ ID NO: 402488 - DNA, 15 bp, Homo sapiens
tattaagacatccac

SEQ ID NO: 402489 - DNA, 15 bp, Homo sapiens
gtattaagacatcca

SEQ ID NO: 402490 - DNA, 15 bp, Homo sapiens
ggtattaagacatcc

SEQ ID NO: 402491 - DNA, 15 bp, Homo sapiens
tggtattaagacatc

SEQ ID NO: 402492 - DNA, 15 bp, Homo sapiens
ttggtattaagacat

SEQ ID NO: 402493 - DNA, 15 bp, Homo sapiens
attggtattaagaca

SEQ ID NO: 402494 - DNA, 15 bp, Homo sapiens
tattggtattaagac

SEQ ID NO: 402495 - DNA, 15 bp, Homo sapiens
ttattggtattaaga

SEQ ID NO: 402496 - DNA, 15 bp, Homo sapiens
tttattggtattaag

SEQ ID NO: 402497 - DNA, 15 bp, Homo sapiens
ttttattggtattaa

SEQ ID NO: 402498 - DNA, 15 bp, Homo sapiens
tttttattggtatta

SEQ ID NO: 402499 - DNA, 15 bp, Homo sapiens
ttttttattggtatt

SEQ ID NO: 402500 - DNA, 15 bp, Homo sapiens
cttttttattggtat

SEQ ID NO: 402501 - DNA, 15 bp, Homo sapiens
ccttttttattggta

SEQ ID NO: 402502 - DNA, 15 bp, Homo sapiens
tccttttttattggt

SEQ ID NO: 402503 - DNA, 15 bp, Homo sapiens
ttccttttttattgg

SEQ ID NO: 402504 - DNA, 15 bp, Homo sapiens
cttccttttttattg

SEQ ID NO: 402505 - DNA, 15 bp, Homo sapiens
ccttccttttttatt

SEQ ID NO: 402506 - DNA, 15 bp, Homo sapiens
tccttccttttttat

SEQ ID NO: 402507 - DNA, 15 bp, Homo sapiens
ttccttcctttttta

SEQ ID NO: 402508 - DNA, 15 bp, Homo sapiens
cttccttcctttttt

SEQ ID NO: 402509 - DNA, 15 bp, Homo sapiens
tcttccttccttttt

SEQ ID NO: 402510 - DNA, 15 bp, Homo sapiens
ttcttccttcctttt

SEQ ID NO: 402511 - DNA, 15 bp, Homo sapiens
cttcttccttccttt

SEQ ID NO: 402512 - DNA, 15 bp, Homo sapiens
tcttcttccttcctt

SEQ ID NO: 402513 - DNA, 15 bp, Homo sapiens
ttcttcttccttcct

SEQ ID NO: 402514 - DNA, 15 bp, Homo sapiens
tttcttcttccttcc

SEQ ID NO: 402515 - DNA, 15 bp, Homo sapiens
ttttcttcttccttc

SEQ ID NO: 402516 - DNA, 15 bp, Homo sapiens
tttttcttcttcctt

SEQ ID NO: 402517 - DNA, 15 bp, Homo sapiens
ctttttcttcttcct

SEQ ID NO: 402518 - DNA, 15 bp, Homo sapiens
tctttttcttcttcc

SEQ ID NO: 402519 - DNA, 15 bp, Homo sapiens
ttctttttcttcttc

SEQ ID NO: 402520 - DNA, 15 bp, Homo sapiens
cttctttttcttctt

SEQ ID NO: 402521 - DNA, 15 bp, Homo sapiens
ccttctttttcttct

SEQ ID NO: 402522 - DNA, 15 bp, Homo sapiens
tccttctttttcttc

SEQ ID NO: 402523 - DNA, 15 bp, Homo sapiens
atccttctttttctt

SEQ ID NO: 402524 - DNA, 15 bp, Homo sapiens
gatccttctttttct

SEQ ID NO: 402525 - DNA, 15 bp, Homo sapiens
agatccttctttttc

SEQ ID NO: 402526 - DNA, 15 bp, Homo sapiens
cagatccttcttttt

SEQ ID NO: 402527 - DNA, 15 bp, Homo sapiens
tcagatccttctttt

SEQ ID NO: 402528 - DNA, 15 bp, Homo sapiens
ctcagatccttcttt

SEQ ID NO: 402529 - DNA, 15 bp, Homo sapiens
gctcagatccttctt

SEQ ID NO: 402530 - DNA, 15 bp, Homo sapiens
agctcagatccttct

SEQ ID NO: 402531 - DNA, 15 bp, Homo sapiens
tagctcagatccttc

SEQ ID NO: 402532 - DNA, 15 bp, Homo sapiens
atagctcagatcctt

SEQ ID NO: 402533 - DNA, 15 bp, Homo sapiens
catagctcagatcct

SEQ ID NO: 402534 - DNA, 15 bp, Homo sapiens
tcatagctcagatcc

SEQ ID NO: 402535 - DNA, 15 bp, Homo sapiens
ttcatagctcagatc

SEQ ID NO: 402536 - DNA, 15 bp, Homo sapiens
cttcatagctcagat

SEQ ID NO: 402537 - DNA, 15 bp, Homo sapiens
acttcatagctcaga

SEQ ID NO: 402538 - DNA, 15 bp, Homo sapiens
gacttcatagctcag

SEQ ID NO: 402539 - DNA, 15 bp, Homo sapiens
tgacttcatagctca

SEQ ID NO: 402540 - DNA, 15 bp, Homo sapiens
ctgacttcatagctc

SEQ ID NO: 402541 - DNA, 15 bp, Homo sapiens
tctgacttcatagct

SEQ ID NO: 402542 - DNA, 15 bp, Homo sapiens
gtctgacttcatagc

SEQ ID NO: 402543 - DNA, 15 bp, Homo sapiens
tgtctgacttcatag

SEQ ID NO: 402544 - DNA, 15 bp, Homo sapiens
ctgtctgacttcata

SEQ ID NO: 402545 - DNA, 15 bp, Homo sapiens
tctgtctgacttcat

SEQ ID NO: 402546 - DNA, 15 bp, Homo sapiens
atctgtctgacttca

SEQ ID NO: 402547 - DNA, 15 bp, Homo sapiens
aatctgtctgacttc

SEQ ID NO: 402548 - DNA, 15 bp, Homo sapiens
caatctgtctgactt

SEQ ID NO: 402549 - DNA, 15 bp, Homo sapiens
ccaatctgtctgact

SEQ ID NO: 402550 - DNA, 15 bp, Homo sapiens
cccaatctgtctgac

SEQ ID NO: 402551 - DNA, 15 bp, Homo sapiens
tcccaatctgtctga

SEQ ID NO: 402552 - DNA, 15 bp, Homo sapiens
atcccaatctgtctg

SEQ ID NO: 402553 - DNA, 15 bp, Homo sapiens
aatcccaatctgtct

SEQ ID NO: 402554 - DNA, 15 bp, Homo sapiens
caatcccaatctgtc

SEQ ID NO: 402555 - DNA, 15 bp, Homo sapiens
tcaatcccaatctgt

SEQ ID NO: 402556 - DNA, 15 bp, Homo sapiens
atcaatcccaatctg

SEQ ID NO: 402557 - DNA, 15 bp, Homo sapiens
aatcaatcccaatct

SEQ ID NO: 402558 - DNA, 15 bp, Homo sapiens
aaatcaatcccaatc

SEQ ID NO: 402559 - DNA, 15 bp, Homo sapiens
aaaatcaatcccaat

SEQ ID NO: 402560 - DNA, 15 bp, Homo sapiens
caaaatcaatcccaa

SEQ ID NO: 402561 - DNA, 15 bp, Homo sapiens
ccaaaatcaatccca

SEQ ID NO: 402562 - DNA, 15 bp, Homo sapiens
accaaaatcaatccc

SEQ ID NO: 402563 - DNA, 15 bp, Homo sapiens
aaccaaaatcaatcc

SEQ ID NO: 402564 - DNA, 15 bp, Homo sapiens
gaaccaaaatcaatc

SEQ ID NO: 402565 - DNA, 15 bp, Homo sapiens
agaaccaaaatcaat

SEQ ID NO: 402566 - DNA, 15 bp, Homo sapiens
cagaaccaaaatcaa

SEQ ID NO: 402567 - DNA, 15 bp, Homo sapiens
gcagaaccaaaatca

SEQ ID NO: 402568 - DNA, 15 bp, Homo sapiens
ggcagaaccaaaatc

SEQ ID NO: 402569 - DNA, 15 bp, Homo sapiens
gggcagaaccaaaat

SEQ ID NO: 402570 - DNA, 15 bp, Homo sapiens
agggcagaaccaaaa

SEQ ID NO: 402571 - DNA, 15 bp, Homo sapiens
aagggcagaaccaaa

SEQ ID NO: 402572 - DNA, 15 bp, Homo sapiens
caagggcagaaccaa

SEQ ID NO: 402573 - DNA, 15 bp, Homo sapiens
tcaagggcagaacca

SEQ ID NO: 402574 - DNA, 15 bp, Homo sapiens
gtcaagggcagaacc

SEQ ID NO: 402575 - DNA, 15 bp, Homo sapiens
agtcaagggcagaac

SEQ ID NO: 402576 - DNA, 15 bp, Homo sapiens
cagtcaagggcagaa

SEQ ID NO: 402577 - DNA, 15 bp, Homo sapiens
ccagtcaagggcaga

SEQ ID NO: 402578 - DNA, 15 bp, Homo sapiens
cccagtcaagggcag

SEQ ID NO: 402579 - DNA, 15 bp, Homo sapiens
gcccagtcaagggca

SEQ ID NO: 402580 - DNA, 15 bp, Homo sapiens
agcccagtcaagggc

SEQ ID NO: 402581 - DNA, 15 bp, Homo sapiens
tagcccagtcaaggg

SEQ ID NO: 402582 - DNA, 15 bp, Homo sapiens
ctagcccagtcaagg

SEQ ID NO: 402583 - DNA, 15 bp, Homo sapiens
actagcccagtcaag

SEQ ID NO: 402584 - DNA, 15 bp, Homo sapiens
gactagcccagtcaa

SEQ ID NO: 402585 - DNA, 15 bp, Homo sapiens
tgactagcccagtca

SEQ ID NO: 402586 - DNA, 15 bp, Homo sapiens
atgactagcccagtc

SEQ ID NO: 402587 - DNA, 15 bp, Homo sapiens
gatgactagcccagt

SEQ ID NO: 402588 - DNA, 15 bp, Homo sapiens
agatgactagcccag

SEQ ID NO: 402589 - DNA, 15 bp, Homo sapiens
aagatgactagccca

SEQ ID NO: 402590 - DNA, 15 bp, Homo sapiens
caagatgactagccc

SEQ ID NO: 402591 - DNA, 15 bp, Homo sapiens
ccaagatgactagcc

SEQ ID NO: 402592 - DNA, 15 bp, Homo sapiens
cccaagatgactagc

SEQ ID NO: 402593 - DNA, 15 bp, Homo sapiens
gcccaagatgactag

SEQ ID NO: 402594 - DNA, 15 bp, Homo sapiens
tgcccaagatgacta

SEQ ID NO: 402595 - DNA, 15 bp, Homo sapiens
ttgcccaagatgact

SEQ ID NO: 402596 - DNA, 15 bp, Homo sapiens
attgcccaagatgac

SEQ ID NO: 402597 - DNA, 15 bp, Homo sapiens
aattgcccaagatga

SEQ ID NO: 402598 - DNA, 15 bp, Homo sapiens
aaattgcccaagatg

SEQ ID NO: 402599 - DNA, 15 bp, Homo sapiens
aaaattgcccaagat

SEQ ID NO: 402600 - DNA, 15 bp, Homo sapiens
taaaattgcccaaga

SEQ ID NO: 402601 - DNA, 15 bp, Homo sapiens
ataaaattgcccaag

SEQ ID NO: 402602 - DNA, 15 bp, Homo sapiens
tataaaattgcccaa

SEQ ID NO: 402603 - DNA, 15 bp, Homo sapiens
ttataaaattgccca

SEQ ID NO: 402604 - DNA, 15 bp, Homo sapiens
attataaaattgccc

SEQ ID NO: 402605 - DNA, 15 bp, Homo sapiens
gattataaaattgcc

SEQ ID NO: 402606 - DNA, 15 bp, Homo sapiens
agattataaaattgc

SEQ ID NO: 402607 - DNA, 15 bp, Homo sapiens
aagattataaaattg

SEQ ID NO: 402608 - DNA, 15 bp, Homo sapiens
aaagattataaaatt

SEQ ID NO: 402609 - DNA, 15 bp, Homo sapiens
gaaagattataaaat

SEQ ID NO: 402610 - DNA, 15 bp, Homo sapiens
tgaaagattataaaa

SEQ ID NO: 402611 - DNA, 15 bp, Homo sapiens
ttgaaagattataaa

SEQ ID NO: 402612 - DNA, 15 bp, Homo sapiens
attgaaagattataa

SEQ ID NO: 402613 - DNA, 15 bp, Homo sapiens
aattgaaagattata

SEQ ID NO: 402614 - DNA, 15 bp, Homo sapiens
caattgaaagattat

SEQ ID NO: 402615 - DNA, 15 bp, Homo sapiens
tcaattgaaagatta

SEQ ID NO: 402616 - DNA, 15 bp, Homo sapiens
ctcaattgaaagatt

SEQ ID NO: 402617 - DNA, 15 bp, Homo sapiens
cctcaattgaaagat

SEQ ID NO: 402618 - DNA, 15 bp, Homo sapiens
tcctcaattgaaaga

SEQ ID NO: 402619 - DNA, 15 bp, Homo sapiens
gtcctcaattgaaag

SEQ ID NO: 402620 - DNA, 15 bp, Homo sapiens
tgtcctcaattgaaa

SEQ ID NO: 402621 - DNA, 15 bp, Homo sapiens
ttgtcctcaattgaa

SEQ ID NO: 402622 - DNA, 15 bp, Homo sapiens
attgtcctcaattga

SEQ ID NO: 402623 - DNA, 15 bp, Homo sapiens
tattgtcctcaattg

SEQ ID NO: 402624 - DNA, 15 bp, Homo sapiens
atattgtcctcaatt

SEQ ID NO: 402625 - DNA, 15 bp, Homo sapiens
aatattgtcctcaat

SEQ ID NO: 402626 - DNA, 15 bp, Homo sapiens
gaatattgtcctcaa

SEQ ID NO: 402627 - DNA, 15 bp, Homo sapiens
agaatattgtcctca

SEQ ID NO: 402628 - DNA, 15 bp, Homo sapiens
cagaatattgtcctc

SEQ ID NO: 402629 - DNA, 15 bp, Homo sapiens
gcagaatattgtcct

SEQ ID NO: 402630 - DNA, 15 bp, Homo sapiens
agcagaatattgtcc

SEQ ID NO: 402631 - DNA, 15 bp, Homo sapiens
gagcagaatattgtc

SEQ ID NO: 402632 - DNA, 15 bp, Homo sapiens
tgagcagaatattgt

SEQ ID NO: 402633 - DNA, 15 bp, Homo sapiens
atgagcagaatattg

SEQ ID NO: 402634 - DNA, 15 bp, Homo sapiens
tatgagcagaatatt

SEQ ID NO: 402635 - DNA, 15 bp, Homo sapiens
ttatgagcagaatat

SEQ ID NO: 402636 - DNA, 15 bp, Homo sapiens
tttatgagcagaata

SEQ ID NO: 402637 - DNA, 15 bp, Homo sapiens
gtttatgagcagaat

SEQ ID NO: 402638 - DNA, 15 bp, Homo sapiens
agtttatgagcagaa

SEQ ID NO: 402639 - DNA, 15 bp, Homo sapiens
aagtttatgagcaga

SEQ ID NO: 402640 - DNA, 15 bp, Homo sapiens
caagtttatgagcag

SEQ ID NO: 402641 - DNA, 15 bp, Homo sapiens
gcaagtttatgagca

SEQ ID NO: 402642 - DNA, 15 bp, Homo sapiens
agcaagtttatgagc

SEQ ID NO: 402643 - DNA, 15 bp, Homo sapiens
cagcaagtttatgag

SEQ ID NO: 402644 - DNA, 15 bp, Homo sapiens
acagcaagtttatga

SEQ ID NO: 402645 - DNA, 15 bp, Homo sapiens
tacagcaagtttatg

SEQ ID NO: 402646 - DNA, 15 bp, Homo sapiens
ttacagcaagtttat

SEQ ID NO: 402647 - DNA, 15 bp, Homo sapiens
tttacagcaagttta

SEQ ID NO: 402648 - DNA, 15 bp, Homo sapiens
ctttacagcaagttt

SEQ ID NO: 402649 - DNA, 15 bp, Homo sapiens
cctttacagcaagtt

SEQ ID NO: 402650 - DNA, 15 bp, Homo sapiens
acctttacagcaagt

SEQ ID NO: 402651 - DNA, 15 bp, Homo sapiens
tacctttacagcaag

SEQ ID NO: 402652 - DNA, 15 bp, Homo sapiens
ttacctttacagcaa

SEQ ID NO: 402653 - DNA, 15 bp, Homo sapiens
tttacctttacagca

SEQ ID NO: 402654 - DNA, 15 bp, Homo sapiens
atttacctttacagc

SEQ ID NO: 402655 - DNA, 15 bp, Homo sapiens
catttacctttacag

SEQ ID NO: 402656 - DNA, 15 bp, Homo sapiens
tcatttacctttaca

SEQ ID NO: 402657 - DNA, 15 bp, Homo sapiens
ctcatttacctttac

SEQ ID NO: 402658 - DNA, 15 bp, Homo sapiens
tctcatttaccttta

SEQ ID NO: 402659 - DNA, 15 bp, Homo sapiens
gtctcatttaccttt

SEQ ID NO: 402660 - DNA, 15 bp, Homo sapiens
tgtctcatttacctt

SEQ ID NO: 402661 - DNA, 15 bp, Homo sapiens
ctgtctcatttacct

SEQ ID NO: 402662 - DNA, 15 bp, Homo sapiens
gctgtctcatttacc

SEQ ID NO: 402663 - DNA, 15 bp, Homo sapiens
tgctgtctcatttac

SEQ ID NO: 402664 - DNA, 15 bp, Homo sapiens
atgctgtctcattta

SEQ ID NO: 402665 - DNA, 15 bp, Homo sapiens
tatgctgtctcattt

SEQ ID NO: 402666 - DNA, 15 bp, Homo sapiens
atatgctgtctcatt

SEQ ID NO: 402667 - DNA, 15 bp, Homo sapiens
catatgctgtctcat

SEQ ID NO: 402668 - DNA, 15 bp, Homo sapiens
acatatgctgtctca

SEQ ID NO: 402669 - DNA, 15 bp, Homo sapiens
tacatatgctgtctc

SEQ ID NO: 402670 - DNA, 15 bp, Homo sapiens
ttacatatgctgtct

SEQ ID NO: 402671 - DNA, 15 bp, Homo sapiens
tttacatatgctgtc

SEQ ID NO: 402672 - DNA, 15 bp, Homo sapiens
atttacatatgctgt

SEQ ID NO: 402673 - DNA, 15 bp, Homo sapiens
tatttacatatgctg

SEQ ID NO: 402674 - DNA, 15 bp, Homo sapiens
atatttacatatgct

SEQ ID NO: 402675 - DNA, 15 bp, Homo sapiens
tatatttacatatgc

SEQ ID NO: 402676 - DNA, 15 bp, Homo sapiens
atatatttacatatg

SEQ ID NO: 402677 - DNA, 15 bp, Homo sapiens
catatatttacatat

SEQ ID NO: 402678 - DNA, 15 bp, Homo sapiens
gcatatatttacata

SEQ ID NO: 402679 - DNA, 15 bp, Homo sapiens
agcatatatttacat

SEQ ID NO: 402680 - DNA, 15 bp, Homo sapiens
aagcatatatttaca

SEQ ID NO: 402681 - DNA, 15 bp, Homo sapiens
taagcatatatttac

SEQ ID NO: 402682 - DNA, 15 bp, Homo sapiens
ctaagcatatattta

SEQ ID NO: 402683 - DNA, 15 bp, Homo sapiens
actaagcatatattt

SEQ ID NO: 402684 - DNA, 15 bp, Homo sapiens
tactaagcatatatt

SEQ ID NO: 402685 - DNA, 15 bp, Homo sapiens
gtactaagcatatat

SEQ ID NO: 402686 - DNA, 15 bp, Homo sapiens
tgtactaagcatata

SEQ ID NO: 402687 - DNA, 15 bp, Homo sapiens
ctgtactaagcatat

SEQ ID NO: 402688 - DNA, 15 bp, Homo sapiens
actgtactaagcata

SEQ ID NO: 402689 - DNA, 15 bp, Homo sapiens
cactgtactaagcat

SEQ ID NO: 402690 - DNA, 15 bp, Homo sapiens
gcactgtactaagca

SEQ ID NO: 402691 - DNA, 15 bp, Homo sapiens
agcactgtactaagc

SEQ ID NO: 402692 - DNA, 15 bp, Homo sapiens
gagcactgtactaag

SEQ ID NO: 402693 - DNA, 15 bp, Homo sapiens
ggagcactgtactaa

SEQ ID NO: 402694 - DNA, 15 bp, Homo sapiens
tggagcactgtacta

SEQ ID NO: 402695 - DNA, 15 bp, Homo sapiens
gtggagcactgtact

SEQ ID NO: 402696 - DNA, 15 bp, Homo sapiens
tgtggagcactgtac

SEQ ID NO: 402697 - DNA, 15 bp, Homo sapiens
atgtggagcactgta

SEQ ID NO: 402698 - DNA, 15 bp, Homo sapiens
tatgtggagcactgt

SEQ ID NO: 402699 - DNA, 15 bp, Homo sapiens
atatgtggagcactg

SEQ ID NO: 402700 - DNA, 15 bp, Homo sapiens
tatatgtggagcact

SEQ ID NO: 402701 - DNA, 15 bp, Homo sapiens
ctatatgtggagcac

SEQ ID NO: 402702 - DNA, 15 bp, Homo sapiens
actatatgtggagca

SEQ ID NO: 402703 - DNA, 15 bp, Homo sapiens
tactatatgtggagc

SEQ ID NO: 402704 - DNA, 15 bp, Homo sapiens
ttactatatgtggag

SEQ ID NO: 402705 - DNA, 15 bp, Homo sapiens
cttactatatgtgga

SEQ ID NO: 402706 - DNA, 15 bp, Homo sapiens
acttactatatgtgg

SEQ ID NO: 402707 - DNA, 15 bp, Homo sapiens
cacttactatatgtg

SEQ ID NO: 402708 - DNA, 15 bp, Homo sapiens
acacttactatatgt

SEQ ID NO: 402709 - DNA, 15 bp, Homo sapiens
aacacttactatatg

SEQ ID NO: 402710 - DNA, 15 bp, Homo sapiens
caacacttactatat

SEQ ID NO: 402711 - DNA, 15 bp, Homo sapiens
tcaacacttactata

SEQ ID NO: 402712 - DNA, 15 bp, Homo sapiens
ttcaacacttactat

SEQ ID NO: 402713 - DNA, 15 bp, Homo sapiens
attcaacacttacta

SEQ ID NO: 402714 - DNA, 15 bp, Homo sapiens
cattcaacacttact

SEQ ID NO: 402715 - DNA, 15 bp, Homo sapiens
gcattcaacacttac

SEQ ID NO: 402716 - DNA, 15 bp, Homo sapiens
tgcattcaacactta

SEQ ID NO: 402717 - DNA, 15 bp, Homo sapiens
atgcattcaacactt

SEQ ID NO: 402718 - DNA, 15 bp, Homo sapiens
tatgcattcaacact

SEQ ID NO: 402719 - DNA, 15 bp, Homo sapiens
ctatgcattcaacac

SEQ ID NO: 402720 - DNA, 15 bp, Homo sapiens
actatgcattcaaca

SEQ ID NO: 402721 - DNA, 15 bp, Homo sapiens
aactatgcattcaac

SEQ ID NO: 402722 - DNA, 15 bp, Homo sapiens
taactatgcattcaa

SEQ ID NO: 402723 - DNA, 15 bp, Homo sapiens
ataactatgcattca

SEQ ID NO: 402724 - DNA, 15 bp, Homo sapiens
tataactatgcattc

SEQ ID NO: 402725 - DNA, 15 bp, Homo sapiens
atataactatgcatt

SEQ ID NO: 402726 - DNA, 15 bp, Homo sapiens
tatataactatgcat

SEQ ID NO: 402727 - DNA, 15 bp, Homo sapiens
ttatataactatgca

SEQ ID NO: 402728 - DNA, 15 bp, Homo sapiens
cttatataactatgc

SEQ ID NO: 402729 - DNA, 15 bp, Homo sapiens
acttatataactatg

SEQ ID NO: 402730 - DNA, 15 bp, Homo sapiens
tacttatataactat

SEQ ID NO: 402731 - DNA, 15 bp, Homo sapiens
atacttatataacta

SEQ ID NO: 402732 - DNA, 15 bp, Homo sapiens
tatacttatataact

SEQ ID NO: 402733 - DNA, 15 bp, Homo sapiens
ttatacttatataac

SEQ ID NO: 402734 - DNA, 15 bp, Homo sapiens
tttatacttatataa

SEQ ID NO: 402735 - DNA, 15 bp, Homo sapiens
atttatacttatata

SEQ ID NO: 402736 - DNA, 15 bp, Homo sapiens
catttatacttatat

SEQ ID NO: 402737 - DNA, 15 bp, Homo sapiens
acatttatacttata

SEQ ID NO: 402738 - DNA, 15 bp, Homo sapiens
cacatttatacttat

SEQ ID NO: 402739 - DNA, 15 bp, Homo sapiens
ccacatttatactta

SEQ ID NO: 402740 - DNA, 15 bp, Homo sapiens
tccacatttatactt

SEQ ID NO: 402741 - DNA, 15 bp, Homo sapiens
atccacatttatact

SEQ ID NO: 402742 - DNA, 15 bp, Homo sapiens
tatccacatttatac

SEQ ID NO: 402743 - DNA, 15 bp, Homo sapiens
ttatccacatttata

SEQ ID NO: 402744 - DNA, 15 bp, Homo sapiens
tttatccacatttat

SEQ ID NO: 402745 - DNA, 15 bp, Homo sapiens
gtttatccacattta

SEQ ID NO: 402746 - DNA, 15 bp, Homo sapiens
tgtttatccacattt

SEQ ID NO: 402747 - DNA, 15 bp, Homo sapiens
atgtttatccacatt

SEQ ID NO: 402748 - DNA, 15 bp, Homo sapiens
catgtttatccacat

SEQ ID NO: 402749 - DNA, 15 bp, Homo sapiens
acatgtttatccaca

SEQ ID NO: 402750 - DNA, 15 bp, Homo sapiens
tacatgtttatccac

SEQ ID NO: 402751 - DNA, 15 bp, Homo sapiens
atacatgtttatcca

SEQ ID NO: 402752 - DNA, 15 bp, Homo sapiens
gatacatgtttatcc

SEQ ID NO: 402753 - DNA, 15 bp, Homo sapiens
cgatacatgtttatc

SEQ ID NO: 402754 - DNA, 15 bp, Homo sapiens
tcgatacatgtttat

SEQ ID NO: 402755 - DNA, 15 bp, Homo sapiens
ctcgatacatgttta

SEQ ID NO: 402756 - DNA, 15 bp, Homo sapiens
gctcgatacatgttt

SEQ ID NO: 402757 - DNA, 15 bp, Homo sapiens
tgctcgatacatgtt

SEQ ID NO: 402758 - DNA, 15 bp, Homo sapiens
gtgctcgatacatgt

SEQ ID NO: 402759 - DNA, 15 bp, Homo sapiens
agtgctcgatacatg

SEQ ID NO: 402760 - DNA, 15 bp, Homo sapiens
aagtgctcgatacat

SEQ ID NO: 402761 - DNA, 15 bp, Homo sapiens
caagtgctcgataca

SEQ ID NO: 402762 - DNA, 15 bp, Homo sapiens
ccaagtgctcgatac

SEQ ID NO: 402763 - DNA, 15 bp, Homo sapiens
tccaagtgctcgata

SEQ ID NO: 402764 - DNA, 15 bp, Homo sapiens
ttccaagtgctcgat

SEQ ID NO: 402765 - DNA, 15 bp, Homo sapiens
cttccaagtgctcga

SEQ ID NO: 402766 - DNA, 15 bp, Homo sapiens
ccttccaagtgctcg

SEQ ID NO: 402767 - DNA, 15 bp, Homo sapiens
gccttccaagtgctc

SEQ ID NO: 402768 - DNA, 15 bp, Homo sapiens
tgccttccaagtgct

SEQ ID NO: 402769 - DNA, 15 bp, Homo sapiens
ctgccttccaagtgc

SEQ ID NO: 402770 - DNA, 15 bp, Homo sapiens
actgccttccaagtg

SEQ ID NO: 402771 - DNA, 15 bp, Homo sapiens
cactgccttccaagt

SEQ ID NO: 402772 - DNA, 15 bp, Homo sapiens
acactgccttccaag

SEQ ID NO: 402773 - DNA, 15 bp, Homo sapiens
tacactgccttccaa

SEQ ID NO: 402774 - DNA, 15 bp, Homo sapiens
atacactgccttcca

SEQ ID NO: 402775 - DNA, 15 bp, Homo sapiens
aatacactgccttcc

SEQ ID NO: 402776 - DNA, 15 bp, Homo sapiens
taatacactgccttc

SEQ ID NO: 402777 - DNA, 15 bp, Homo sapiens
ctaatacactgcctt

SEQ ID NO: 402778 - DNA, 15 bp, Homo sapiens
cctaatacactgcct

SEQ ID NO: 402779 - DNA, 15 bp, Homo sapiens
ccctaatacactgcc

SEQ ID NO: 402780 - DNA, 15 bp, Homo sapiens
cccctaatacactgc

SEQ ID NO: 402781 - DNA, 15 bp, Homo sapiens
tcccctaatacactg

SEQ ID NO: 402782 - DNA, 15 bp, Homo sapiens
atcccctaatacact

SEQ ID NO: 402783 - DNA, 15 bp, Homo sapiens
aatcccctaatacac

SEQ ID NO: 402784 - DNA, 15 bp, Homo sapiens
aaatcccctaataca

SEQ ID NO: 402785 - DNA, 15 bp, Homo sapiens
taaatcccctaatac

SEQ ID NO: 402786 - DNA, 15 bp, Homo sapiens
gtaaatcccctaata

SEQ ID NO: 402787 - DNA, 15 bp, Homo sapiens
tgtaaatcccctaat

SEQ ID NO: 402788 - DNA, 15 bp, Homo sapiens
gtgtaaatcccctaa

SEQ ID NO: 402789 - DNA, 15 bp, Homo sapiens
agtgtaaatccccta

SEQ ID NO: 402790 - DNA, 15 bp, Homo sapiens
tagtgtaaatcccct

SEQ ID NO: 402791 - DNA, 15 bp, Homo sapiens
atagtgtaaatcccc

SEQ ID NO: 402792 - DNA, 15 bp, Homo sapiens
tatagtgtaaatccc

SEQ ID NO: 402793 - DNA, 15 bp, Homo sapiens
ctatagtgtaaatcc

SEQ ID NO: 402794 - DNA, 15 bp, Homo sapiens
cctatagtgtaaatc

SEQ ID NO: 402795 - DNA, 15 bp, Homo sapiens
gcctatagtgtaaat

SEQ ID NO: 402796 - DNA, 15 bp, Homo sapiens
tgcctatagtgtaaa

SEQ ID NO: 402797 - DNA, 15 bp, Homo sapiens
ctgcctatagtgtaa

SEQ ID NO: 402798 - DNA, 15 bp, Homo sapiens
tctgcctatagtgta

SEQ ID NO: 402799 - DNA, 15 bp, Homo sapiens
atctgcctatagtgt

SEQ ID NO: 402800 - DNA, 15 bp, Homo sapiens
tatctgcctatagtg

SEQ ID NO: 402801 - DNA, 15 bp, Homo sapiens
gtatctgcctatagt

SEQ ID NO: 402802 - DNA, 15 bp, Homo sapiens
tgtatctgcctatag

SEQ ID NO: 402803 - DNA, 15 bp, Homo sapiens
gtgtatctgcctata

SEQ ID NO: 402804 - DNA, 15 bp, Homo sapiens
tgtgtatctgcctat

SEQ ID NO: 402805 - DNA, 15 bp, Homo sapiens
ctgtgtatctgccta

SEQ ID NO: 402806 - DNA, 15 bp, Homo sapiens
tctgtgtatctgcct

SEQ ID NO: 402807 - DNA, 15 bp, Homo sapiens
atctgtgtatctgcc

SEQ ID NO: 402808 - DNA, 15 bp, Homo sapiens
tatctgtgtatctgc

SEQ ID NO: 402809 - DNA, 15 bp, Homo sapiens
atatctgtgtatctg

SEQ ID NO: 402810 - DNA, 15 bp, Homo sapiens
tatatctgtgtatct

SEQ ID NO: 402811 - DNA, 15 bp, Homo sapiens
atatatctgtgtatc

SEQ ID NO: 402812 - DNA, 15 bp, Homo sapiens
catatatctgtgtat

SEQ ID NO: 402813 - DNA, 15 bp, Homo sapiens
acatatatctgtgta

SEQ ID NO: 402814 - DNA, 15 bp, Homo sapiens
tacatatatctgtgt

SEQ ID NO: 402815 - DNA, 15 bp, Homo sapiens
ttacatatatctgtg

SEQ ID NO: 402816 - DNA, 15 bp, Homo sapiens
tttacatatatctgt

SEQ ID NO: 402817 - DNA, 15 bp, Homo sapiens
ctttacatatatctg

SEQ ID NO: 402818 - DNA, 15 bp, Homo sapiens
cctttacatatatct

SEQ ID NO: 402819 - DNA, 15 bp, Homo sapiens
ccctttacatatatc

SEQ ID NO: 402820 - DNA, 15 bp, Homo sapiens
cccctttacatatat

SEQ ID NO: 402821 - DNA, 15 bp, Homo sapiens
ccccctttacatata

SEQ ID NO: 402822 - DNA, 15 bp, Homo sapiens
cccccctttacatat

SEQ ID NO: 402823 - DNA, 15 bp, Homo sapiens
tcccccctttacata

SEQ ID NO: 402824 - DNA, 15 bp, Homo sapiens
ctcccccctttacat

SEQ ID NO: 402825 - DNA, 15 bp, Homo sapiens
actcccccctttaca

SEQ ID NO: 402826 - DNA, 15 bp, Homo sapiens
cactcccccctttac

SEQ ID NO: 402827 - DNA, 15 bp, Homo sapiens
acactccccccttta

SEQ ID NO: 402828 - DNA, 15 bp, Homo sapiens
cacactccccccttt

SEQ ID NO: 402829 - DNA, 15 bp, Homo sapiens
acacactcccccctt

SEQ ID NO: 402830 - DNA, 15 bp, Homo sapiens
cacacactcccccct

SEQ ID NO: 402831 - DNA, 15 bp, Homo sapiens
acacacactcccccc

SEQ ID NO: 402832 - DNA, 15 bp, Homo sapiens
tacacacactccccc

SEQ ID NO: 402833 - DNA, 15 bp, Homo sapiens
atacacacactcccc

SEQ ID NO: 402834 - DNA, 15 bp, Homo sapiens
tatacacacactccc

SEQ ID NO: 402835 - DNA, 15 bp, Homo sapiens
ttatacacacactcc

SEQ ID NO: 402836 - DNA, 15 bp, Homo sapiens
tttatacacacactc

SEQ ID NO: 402837 - DNA, 15 bp, Homo sapiens
ttttatacacacact

SEQ ID NO: 402838 - DNA, 15 bp, Homo sapiens
attttatacacacac

SEQ ID NO: 402839 - DNA, 15 bp, Homo sapiens
aattttatacacaca

SEQ ID NO: 402840 - DNA, 15 bp, Homo sapiens
aaattttatacacac

SEQ ID NO: 402841 - DNA, 15 bp, Homo sapiens
taaattttatacaca

SEQ ID NO: 402842 - DNA, 15 bp, Homo sapiens
ctaaattttatacac

SEQ ID NO: 402843 - DNA, 15 bp, Homo sapiens
actaaattttataca

SEQ ID NO: 402844 - DNA, 15 bp, Homo sapiens
cactaaattttatac

SEQ ID NO: 402845 - DNA, 15 bp, Homo sapiens
tcactaaattttata

SEQ ID NO: 402846 - DNA, 15 bp, Homo sapiens
ttcactaaattttat

SEQ ID NO: 402847 - DNA, 15 bp, Homo sapiens
gttcactaaatttta

SEQ ID NO: 402848 - DNA, 15 bp, Homo sapiens
cgttcactaaatttt

SEQ ID NO: 402849 - DNA, 15 bp, Homo sapiens
acgttcactaaattt

SEQ ID NO: 402850 - DNA, 15 bp, Homo sapiens
aacgttcactaaatt

SEQ ID NO: 402851 - DNA, 15 bp, Homo sapiens
aaacgttcactaaat

SEQ ID NO: 402852 - DNA, 15 bp, Homo sapiens
gaaacgttcactaaa

SEQ ID NO: 402853 - DNA, 15 bp, Homo sapiens
agaaacgttcactaa

SEQ ID NO: 402854 - DNA, 15 bp, Homo sapiens
tagaaacgttcacta

SEQ ID NO: 402855 - DNA, 15 bp, Homo sapiens
ctagaaacgttcact

SEQ ID NO: 402856 - DNA, 15 bp, Homo sapiens
gctagaaacgttcac

SEQ ID NO: 402857 - DNA, 15 bp, Homo sapiens
agctagaaacgttca

SEQ ID NO: 402858 - DNA, 15 bp, Homo sapiens
cagctagaaacgttc

SEQ ID NO: 402859 - DNA, 15 bp, Homo sapiens
acagctagaaacgtt

SEQ ID NO: 402860 - DNA, 15 bp, Homo sapiens
cacagctagaaacgt

SEQ ID NO: 402861 - DNA, 15 bp, Homo sapiens
acacagctagaaacg

SEQ ID NO: 402862 - DNA, 15 bp, Homo sapiens
gacacagctagaaac

SEQ ID NO: 402863 - DNA, 15 bp, Homo sapiens
agacacagctagaaa

SEQ ID NO: 402864 - DNA, 15 bp, Homo sapiens
aagacacagctagaa

SEQ ID NO: 402865 - DNA, 15 bp, Homo sapiens
aaagacacagctaga

SEQ ID NO: 402866 - DNA, 15 bp, Homo sapiens
taaagacacagctag

SEQ ID NO: 402867 - DNA, 15 bp, Homo sapiens
ttaaagacacagcta

SEQ ID NO: 402868 - DNA, 15 bp, Homo sapiens
tttaaagacacagct

SEQ ID NO: 402869 - DNA, 15 bp, Homo sapiens
ctttaaagacacagc

SEQ ID NO: 402870 - DNA, 15 bp, Homo sapiens
gctttaaagacacag

SEQ ID NO: 402871 - DNA, 15 bp, Homo sapiens
tgctttaaagacaca

SEQ ID NO: 402872 - DNA, 15 bp, Homo sapiens
ctgctttaaagacac

SEQ ID NO: 402873 - DNA, 15 bp, Homo sapiens
tctgctttaaagaca

SEQ ID NO: 402874 - DNA, 15 bp, Homo sapiens
ctctgctttaaagac

SEQ ID NO: 402875 - DNA, 15 bp, Homo sapiens
actctgctttaaaga

SEQ ID NO: 402876 - DNA, 15 bp, Homo sapiens
cactctgctttaaag

SEQ ID NO: 402877 - DNA, 15 bp, Homo sapiens
gcactctgctttaaa

SEQ ID NO: 402878 - DNA, 15 bp, Homo sapiens
ggcactctgctttaa

SEQ ID NO: 402879 - DNA, 15 bp, Homo sapiens
gggcactctgcttta

SEQ ID NO: 402880 - DNA, 15 bp, Homo sapiens
agggcactctgcttt

SEQ ID NO: 402881 - DNA, 15 bp, Homo sapiens
cagggcactctgctt

SEQ ID NO: 402882 - DNA, 15 bp, Homo sapiens
gcagggcactctgct

SEQ ID NO: 402883 - DNA, 15 bp, Homo sapiens
agcagggcactctgc

SEQ ID NO: 402884 - DNA, 15 bp, Homo sapiens
gagcagggcactctg

SEQ ID NO: 402885 - DNA, 15 bp, Homo sapiens
tgagcagggcactct

SEQ ID NO: 402886 - DNA, 15 bp, Homo sapiens
ttgagcagggcactc

SEQ ID NO: 402887 - DNA, 15 bp, Homo sapiens
cttgagcagggcact

SEQ ID NO: 402888 - DNA, 15 bp, Homo sapiens
tcttgagcagggcac

SEQ ID NO: 402889 - DNA, 15 bp, Homo sapiens
ttcttgagcagggca

SEQ ID NO: 402890 - DNA, 15 bp, Homo sapiens
tttcttgagcagggc

SEQ ID NO: 402891 - DNA, 15 bp, Homo sapiens
atttcttgagcaggg

SEQ ID NO: 402892 - DNA, 15 bp, Homo sapiens
catttcttgagcagg

SEQ ID NO: 402893 - DNA, 15 bp, Homo sapiens
tcatttcttgagcag

SEQ ID NO: 402894 - DNA, 15 bp, Homo sapiens
ttcatttcttgagca

SEQ ID NO: 402895 - DNA, 15 bp, Homo sapiens
tttcatttcttgagc

SEQ ID NO: 402896 - DNA, 15 bp, Homo sapiens
ctttcatttcttgag

SEQ ID NO: 402897 - DNA, 15 bp, Homo sapiens
tctttcatttcttga

SEQ ID NO: 402898 - DNA, 15 bp, Homo sapiens
atctttcatttcttg

SEQ ID NO: 402899 - DNA, 15 bp, Homo sapiens
aatctttcatttctt

SEQ ID NO: 402900 - DNA, 15 bp, Homo sapiens
aaatctttcatttct

SEQ ID NO: 402901 - DNA, 15 bp, Homo sapiens
aaaatctttcatttc

SEQ ID NO: 402902 - DNA, 15 bp, Homo sapiens
taaaatctttcattt

SEQ ID NO: 402903 - DNA, 15 bp, Homo sapiens
ataaaatctttcatt

SEQ ID NO: 402904 - DNA, 15 bp, Homo sapiens
cataaaatctttcat

SEQ ID NO: 402905 - DNA, 15 bp, Homo sapiens
tcataaaatctttca

SEQ ID NO: 402906 - DNA, 15 bp, Homo sapiens
atcataaaatctttc

SEQ ID NO: 402907 - DNA, 15 bp, Homo sapiens
catcataaaatcttt

SEQ ID NO: 402908 - DNA, 15 bp, Homo sapiens
tcatcataaaatctt

SEQ ID NO: 402909 - DNA, 15 bp, Homo sapiens
atcatcataaaatct

SEQ ID NO: 402910 - DNA, 15 bp, Homo sapiens
aatcatcataaaatc

SEQ ID NO: 402911 - DNA, 15 bp, Homo sapiens
taatcatcataaaat

SEQ ID NO: 402912 - DNA, 15 bp, Homo sapiens
ttaatcatcataaaa

SEQ ID NO: 402913 - DNA, 15 bp, Homo sapiens
attaatcatcataaa

SEQ ID NO: 402914 - DNA, 15 bp, Homo sapiens
tattaatcatcataa

SEQ ID NO: 402915 - DNA, 15 bp, Homo sapiens
ttattaatcatcata

SEQ ID NO: 402916 - DNA, 15 bp, Homo sapiens
gttattaatcatcat

SEQ ID NO: 402917 - DNA, 15 bp, Homo sapiens
tgttattaatcatca

SEQ ID NO: 402918 - DNA, 15 bp, Homo sapiens
atgttattaatcatc

SEQ ID NO: 402919 - DNA, 15 bp, Homo sapiens
gatgttattaatcat

SEQ ID NO: 402920 - DNA, 15 bp, Homo sapiens
ggatgttattaatca

SEQ ID NO: 402921 - DNA, 15 bp, Homo sapiens
tggatgttattaatc

SEQ ID NO: 402922 - DNA, 15 bp, Homo sapiens
ttggatgttattaat

SEQ ID NO: 402923 - DNA, 15 bp, Homo sapiens
tttggatgttattaa

SEQ ID NO: 402924 - DNA, 15 bp, Homo sapiens
atttggatgttatta

SEQ ID NO: 402925 - DNA, 15 bp, Homo sapiens
gatttggatgttatt

SEQ ID NO: 402926 - DNA, 15 bp, Homo sapiens
ggatttggatgttat

SEQ ID NO: 402927 - DNA, 15 bp, Homo sapiens
aggatttggatgtta

SEQ ID NO: 402928 - DNA, 15 bp, Homo sapiens
aaggatttggatgtt

SEQ ID NO: 402929 - DNA, 15 bp, Homo sapiens
gaaggatttggatgt

SEQ ID NO: 402930 - DNA, 15 bp, Homo sapiens
ggaaggatttggatg

SEQ ID NO: 402931 - DNA, 15 bp, Homo sapiens
tggaaggatttggat

SEQ ID NO: 402932 - DNA, 15 bp, Homo sapiens
gtggaaggatttgga

SEQ ID NO: 402933 - DNA, 15 bp, Homo sapiens
agtggaaggatttgg

SEQ ID NO: 402934 - DNA, 15 bp, Homo sapiens
gagtggaaggatttg

SEQ ID NO: 402935 - DNA, 15 bp, Homo sapiens
tgagtggaaggattt

SEQ ID NO: 402936 - DNA, 15 bp, Homo sapiens
ttgagtggaaggatt

SEQ ID NO: 402937 - DNA, 15 bp, Homo sapiens
attgagtggaaggat

SEQ ID NO: 402938 - DNA, 15 bp, Homo sapiens
cattgagtggaagga

SEQ ID NO: 402939 - DNA, 15 bp, Homo sapiens
tcattgagtggaagg

SEQ ID NO: 402940 - DNA, 15 bp, Homo sapiens
atcattgagtggaag

SEQ ID NO: 402941 - DNA, 15 bp, Homo sapiens
tatcattgagtggaa

SEQ ID NO: 402942 - DNA, 15 bp, Homo sapiens
atatcattgagtgga

SEQ ID NO: 402943 - DNA, 15 bp, Homo sapiens
gatatcattgagtgg

SEQ ID NO: 402944 - DNA, 15 bp, Homo sapiens
agatatcattgagtg

SEQ ID NO: 402945 - DNA, 15 bp, Homo sapiens
aagatatcattgagt

SEQ ID NO: 402946 - DNA, 15 bp, Homo sapiens
gaagatatcattgag

SEQ ID NO: 402947 - DNA, 15 bp, Homo sapiens
agaagatatcattga

SEQ ID NO: 402948 - DNA, 15 bp, Homo sapiens
gagaagatatcattg

SEQ ID NO: 402949 - DNA, 15 bp, Homo sapiens
agagaagatatcatt

SEQ ID NO: 402950 - DNA, 15 bp, Homo sapiens
aagagaagatatcat

SEQ ID NO: 402951 - DNA, 15 bp, Homo sapiens
taagagaagatatca

SEQ ID NO: 402952 - DNA, 15 bp, Homo sapiens
ttaagagaagatatc

SEQ ID NO: 402953 - DNA, 15 bp, Homo sapiens
attaagagaagatat

SEQ ID NO: 402954 - DNA, 15 bp, Homo sapiens
tattaagagaagata

SEQ ID NO: 402955 - DNA, 15 bp, Homo sapiens
atattaagagaagat

SEQ ID NO: 402956 - DNA, 15 bp, Homo sapiens
catattaagagaaga

SEQ ID NO: 402957 - DNA, 15 bp, Homo sapiens
acatattaagagaag

SEQ ID NO: 402958 - DNA, 15 bp, Homo sapiens
gacatattaagagaa

SEQ ID NO: 402959 - DNA, 15 bp, Homo sapiens
agacatattaagaga

SEQ ID NO: 402960 - DNA, 15 bp, Homo sapiens
aagacatattaagag

SEQ ID NO: 402961 - DNA, 15 bp, Homo sapiens
taagacatattaaga

SEQ ID NO: 402962 - DNA, 15 bp, Homo sapiens
gtaagacatattaag

SEQ ID NO: 402963 - DNA, 15 bp, Homo sapiens
tgtaagacatattaa

SEQ ID NO: 402964 - DNA, 15 bp, Homo sapiens
ctgtaagacatatta

SEQ ID NO: 402965 - DNA, 15 bp, Homo sapiens
actgtaagacatatt

SEQ ID NO: 402966 - DNA, 15 bp, Homo sapiens
aactgtaagacatat

SEQ ID NO: 402967 - DNA, 15 bp, Homo sapiens
aaactgtaagacata

SEQ ID NO: 402968 - DNA, 15 bp, Homo sapiens
aaaactgtaagacat

SEQ ID NO: 402969 - DNA, 15 bp, Homo sapiens
aaaaactgtaagaca

SEQ ID NO: 402970 - DNA, 15 bp, Homo sapiens
caaaaactgtaagac

SEQ ID NO: 402971 - DNA, 15 bp, Homo sapiens
tcaaaaactgtaaga

SEQ ID NO: 402972 - DNA, 15 bp, Homo sapiens
ctcaaaaactgtaag

SEQ ID NO: 402973 - DNA, 15 bp, Homo sapiens
actcaaaaactgtaa

SEQ ID NO: 402974 - DNA, 15 bp, Homo sapiens
cactcaaaaactgta

SEQ ID NO: 402975 - DNA, 15 bp, Homo sapiens
tcactcaaaaactgt

SEQ ID NO: 402976 - DNA, 15 bp, Homo sapiens
atcactcaaaaactg

SEQ ID NO: 402977 - DNA, 15 bp, Homo sapiens
aatcactcaaaaact

SEQ ID NO: 402978 - DNA, 15 bp, Homo sapiens
aaatcactcaaaaac

SEQ ID NO: 402979 - DNA, 15 bp, Homo sapiens
caaatcactcaaaaa

SEQ ID NO: 402980 - DNA, 15 bp, Homo sapiens
acaaatcactcaaaa

SEQ ID NO: 402981 - DNA, 15 bp, Homo sapiens
cacaaatcactcaaa

SEQ ID NO: 402982 - DNA, 15 bp, Homo sapiens
acacaaatcactcaa

SEQ ID NO: 402983 - DNA, 15 bp, Homo sapiens
tacacaaatcactca

SEQ ID NO: 402984 - DNA, 15 bp, Homo sapiens
ttacacaaatcactc

SEQ ID NO: 402985 - DNA, 15 bp, Homo sapiens
tttacacaaatcact

SEQ ID NO: 402986 - DNA, 15 bp, Homo sapiens
ttttacacaaatcac

SEQ ID NO: 402987 - DNA, 15 bp, Homo sapiens
cttttacacaaatca

SEQ ID NO: 402988 - DNA, 15 bp, Homo sapiens
ccttttacacaaatc

SEQ ID NO: 402989 - DNA, 15 bp, Homo sapiens
tccttttacacaaat

SEQ ID NO: 402990 - DNA, 15 bp, Homo sapiens
atccttttacacaaa

SEQ ID NO: 402991 - DNA, 15 bp, Homo sapiens
tatccttttacacaa

SEQ ID NO: 402992 - DNA, 15 bp, Homo sapiens
atatccttttacaca

SEQ ID NO: 402993 - DNA, 15 bp, Homo sapiens
aatatccttttacac

SEQ ID NO: 402994 - DNA, 15 bp, Homo sapiens
taatatccttttaca

SEQ ID NO: 402995 - DNA, 15 bp, Homo sapiens
ataatatccttttac

SEQ ID NO: 402996 - DNA, 15 bp, Homo sapiens
aataatatcctttta

SEQ ID NO: 402997 - DNA, 15 bp, Homo sapiens
aaataatatcctttt

SEQ ID NO: 402998 - DNA, 15 bp, Homo sapiens
aaaataatatccttt

SEQ ID NO: 402999 - DNA, 15 bp, Homo sapiens
taaaataatatcctt

SEQ ID NO: 403000 - DNA, 15 bp, Homo sapiens
ataaaataatatcct

SEQ ID NO: 403001 - DNA, 15 bp, Homo sapiens
tataaaataatatcc

SEQ ID NO: 403002 - DNA, 15 bp, Homo sapiens
atataaaataatatc

SEQ ID NO: 403003 - DNA, 15 bp, Homo sapiens
tatataaaataatat

SEQ ID NO: 403004 - DNA, 15 bp, Homo sapiens
atatataaaataata

SEQ ID NO: 403005 - DNA, 15 bp, Homo sapiens
tatatataaaataat

SEQ ID NO: 403006 - DNA, 15 bp, Homo sapiens
atatatataaaataa

SEQ ID NO: 403007 - DNA, 15 bp, Homo sapiens
aatatatataaaata

SEQ ID NO: 403008 - DNA, 15 bp, Homo sapiens
taatatatataaaat

SEQ ID NO: 403009 - DNA, 15 bp, Homo sapiens
gtaatatatataaaa

SEQ ID NO: 403010 - DNA, 15 bp, Homo sapiens
agtaatatatataaa

SEQ ID NO: 403011 - DNA, 15 bp, Homo sapiens
aagtaatatatataa

SEQ ID NO: 403012 - DNA, 15 bp, Homo sapiens
taagtaatatatata

SEQ ID NO: 403013 - DNA, 15 bp, Homo sapiens
gtaagtaatatatat

SEQ ID NO: 403014 - DNA, 15 bp, Homo sapiens
tgtaagtaatatata

SEQ ID NO: 403015 - DNA, 15 bp, Homo sapiens
ttgtaagtaatatat

SEQ ID NO: 403016 - DNA, 15 bp, Homo sapiens
attgtaagtaatata

SEQ ID NO: 403017 - DNA, 15 bp, Homo sapiens
gattgtaagtaatat

SEQ ID NO: 403018 - DNA, 15 bp, Homo sapiens
agattgtaagtaata

SEQ ID NO: 403019 - DNA, 15 bp, Homo sapiens
cagattgtaagtaat

SEQ ID NO: 403020 - DNA, 15 bp, Homo sapiens
gcagattgtaagtaa

SEQ ID NO: 403021 - DNA, 15 bp, Homo sapiens
ggcagattgtaagta

SEQ ID NO: 403022 - DNA, 15 bp, Homo sapiens
aggcagattgtaagt

SEQ ID NO: 403023 - DNA, 15 bp, Homo sapiens
aaggcagattgtaag

SEQ ID NO: 403024 - DNA, 15 bp, Homo sapiens
aaaggcagattgtaa

SEQ ID NO: 403025 - DNA, 15 bp, Homo sapiens
aaaaggcagattgta

SEQ ID NO: 403026 - DNA, 15 bp, Homo sapiens
aaaaaggcagattgt

SEQ ID NO: 403027 - DNA, 15 bp, Homo sapiens
aaaaaaggcagattg

SEQ ID NO: 403028 - DNA, 15 bp, Homo sapiens
gaaaaaaggcagatt

SEQ ID NO: 403029 - DNA, 15 bp, Homo sapiens
taaattttttctgaa

SEQ ID NO: 403030 - DNA, 15 bp, Homo sapiens
ttaaattttttctga

SEQ ID NO: 403031 - DNA, 15 bp, Homo sapiens
tttaaattttttctg

SEQ ID NO: 403032 - DNA, 15 bp, Homo sapiens
ctttaaattttttct

SEQ ID NO: 403033 - DNA, 15 bp, Homo sapiens
tctttaaattttttc

SEQ ID NO: 403034 - DNA, 15 bp, Homo sapiens
atctttaaatttttt

SEQ ID NO: 403035 - DNA, 15 bp, Homo sapiens
catctttaaattttt

SEQ ID NO: 403036 - DNA, 15 bp, Homo sapiens
gcatctttaaatttt

SEQ ID NO: 403037 - DNA, 15 bp, Homo sapiens
agcatctttaaattt

SEQ ID NO: 403038 - DNA, 15 bp, Homo sapiens
aagcatctttaaatt

SEQ ID NO: 403039 - DNA, 15 bp, Homo sapiens
caagcatctttaaat

SEQ ID NO: 403040 - DNA, 15 bp, Homo sapiens
acaagcatctttaaa

SEQ ID NO: 403041 - DNA, 15 bp, Homo sapiens
cacaagcatctttaa

SEQ ID NO: 403042 - DNA, 15 bp, Homo sapiens
acacaagcatcttta

SEQ ID NO: 403043 - DNA, 15 bp, Homo sapiens
tacacaagcatcttt

SEQ ID NO: 403044 - DNA, 15 bp, Homo sapiens
ttacacaagcatctt

SEQ ID NO: 403045 - DNA, 15 bp, Homo sapiens
cttacacaagcatct

SEQ ID NO: 403046 - DNA, 15 bp, Homo sapiens
ccttacacaagcatc

SEQ ID NO: 403047 - DNA, 15 bp, Homo sapiens
accttacacaagcat

SEQ ID NO: 403048 - DNA, 15 bp, Homo sapiens
gaccttacacaagca

SEQ ID NO: 403049 - DNA, 15 bp, Homo sapiens
tgaccttacacaagc

SEQ ID NO: 403050 - DNA, 15 bp, Homo sapiens
gtgaccttacacaag

SEQ ID NO: 403051 - DNA, 15 bp, Homo sapiens
tgtgaccttacacaa

SEQ ID NO: 403052 - DNA, 15 bp, Homo sapiens
gtgtgaccttacaca

SEQ ID NO: 403053 - DNA, 15 bp, Homo sapiens
tgtgtgaccttacac

SEQ ID NO: 403054 - DNA, 15 bp, Homo sapiens
ttgtgtgaccttaca

SEQ ID NO: 403055 - DNA, 15 bp, Homo sapiens
gttgtgtgaccttac

SEQ ID NO: 403056 - DNA, 15 bp, Homo sapiens
agttgtgtgacctta

SEQ ID NO: 403057 - DNA, 15 bp, Homo sapiens
cagttgtgtgacctt

SEQ ID NO: 403058 - DNA, 15 bp, Homo sapiens
acagttgtgtgacct

SEQ ID NO: 403059 - DNA, 15 bp, Homo sapiens
aacagttgtgtgacc

SEQ ID NO: 403060 - DNA, 15 bp, Homo sapiens
caacagttgtgtgac

SEQ ID NO: 403061 - DNA, 15 bp, Homo sapiens
acaacagttgtgtga

SEQ ID NO: 403062 - DNA, 15 bp, Homo sapiens
gacaacagttgtgtg

SEQ ID NO: 403063 - DNA, 15 bp, Homo sapiens
tgacaacagttgtgt

SEQ ID NO: 403064 - DNA, 15 bp, Homo sapiens
ctgacaacagttgtg

SEQ ID NO: 403065 - DNA, 15 bp, Homo sapiens
actgacaacagttgt

SEQ ID NO: 403066 - DNA, 15 bp, Homo sapiens
cactgacaacagttg

SEQ ID NO: 403067 - DNA, 15 bp, Homo sapiens
gcactgacaacagtt

SEQ ID NO: 403068 - DNA, 15 bp, Homo sapiens
ggcactgacaacagt

SEQ ID NO: 403069 - DNA, 15 bp, Homo sapiens
tggcactgacaacag

SEQ ID NO: 403070 - DNA, 15 bp, Homo sapiens
ttggcactgacaaca

SEQ ID NO: 403071 - DNA, 15 bp, Homo sapiens
cttggcactgacaac

SEQ ID NO: 403072 - DNA, 15 bp, Homo sapiens
tcttggcactgacaa

SEQ ID NO: 403073 - DNA, 15 bp, Homo sapiens
ctcttggcactgaca

SEQ ID NO: 403074 - DNA, 15 bp, Homo sapiens
actcttggcactgac

SEQ ID NO: 403075 - DNA, 15 bp, Homo sapiens
gactcttggcactga

SEQ ID NO: 403076 - DNA, 15 bp, Homo sapiens
tgactcttggcactg

SEQ ID NO: 403077 - DNA, 15 bp, Homo sapiens
ttgactcttggcact

SEQ ID NO: 403078 - DNA, 15 bp, Homo sapiens
tttgactcttggcac

SEQ ID NO: 403079 - DNA, 15 bp, Homo sapiens
gtttgactcttggca

SEQ ID NO: 403080 - DNA, 15 bp, Homo sapiens
ggtttgactcttggc

SEQ ID NO: 403081 - DNA, 15 bp, Homo sapiens
gggtttgactcttgg

SEQ ID NO: 403082 - DNA, 15 bp, Homo sapiens
tgggtttgactcttg

SEQ ID NO: 403083 - DNA, 15 bp, Homo sapiens
ctgggtttgactctt

SEQ ID NO: 403084 - DNA, 15 bp, Homo sapiens
gctgggtttgactct

SEQ ID NO: 403085 - DNA, 15 bp, Homo sapiens
cgctgggtttgactc

SEQ ID NO: 403086 - DNA, 15 bp, Homo sapiens
acgctgggtttgact

SEQ ID NO: 403087 - DNA, 15 bp, Homo sapiens
aacgctgggtttgac

SEQ ID NO: 403088 - DNA, 15 bp, Homo sapiens
gaacgctgggtttga

SEQ ID NO: 403089 - DNA, 15 bp, Homo sapiens
agaacgctgggtttg

SEQ ID NO: 403090 - DNA, 15 bp, Homo sapiens
cagaacgctgggttt

SEQ ID NO: 403091 - DNA, 15 bp, Homo sapiens
acagaacgctgggtt

SEQ ID NO: 403092 - DNA, 15 bp, Homo sapiens
cacagaacgctgggt

SEQ ID NO: 403093 - DNA, 15 bp, Homo sapiens
tcacagaacgctggg

SEQ ID NO: 403094 - DNA, 15 bp, Homo sapiens
gtcacagaacgctgg

SEQ ID NO: 403095 - DNA, 15 bp, Homo sapiens
agtcacagaacgctg

SEQ ID NO: 403096 - DNA, 15 bp, Homo sapiens
aagtcacagaacgct

SEQ ID NO: 403097 - DNA, 15 bp, Homo sapiens
gaagtcacagaacgc

SEQ ID NO: 403098 - DNA, 15 bp, Homo sapiens
tgaagtcacagaacg

SEQ ID NO: 403099 - DNA, 15 bp, Homo sapiens
ttgaagtcacagaac

SEQ ID NO: 403100 - DNA, 15 bp, Homo sapiens
tttgaagtcacagaa

SEQ ID NO: 403101 - DNA, 15 bp, Homo sapiens
ctttgaagtcacaga

SEQ ID NO: 403102 - DNA, 15 bp, Homo sapiens
actttgaagtcacag

SEQ ID NO: 403103 - DNA, 15 bp, Homo sapiens
aactttgaagtcaca

SEQ ID NO: 403104 - DNA, 15 bp, Homo sapiens
taactttgaagtcac

SEQ ID NO: 403105 - DNA, 15 bp, Homo sapiens
ttaactttgaagtca

SEQ ID NO: 403106 - DNA, 15 bp, Homo sapiens
attaactttgaagtc

SEQ ID NO: 403107 - DNA, 15 bp, Homo sapiens
cattaactttgaagt

SEQ ID NO: 403108 - DNA, 15 bp, Homo sapiens
acattaactttgaag

SEQ ID NO: 403109 - DNA, 15 bp, Homo sapiens
aacattaactttgaa

SEQ ID NO: 403110 - DNA, 15 bp, Homo sapiens
aaacattaactttga

SEQ ID NO: 403111 - DNA, 15 bp, Homo sapiens
caaacattaactttg

SEQ ID NO: 403112 - DNA, 15 bp, Homo sapiens
acaaacattaacttt

SEQ ID NO: 403113 - DNA, 15 bp, Homo sapiens
aacaaacattaactt

SEQ ID NO: 403114 - DNA, 15 bp, Homo sapiens
gaacaaacattaact

SEQ ID NO: 403115 - DNA, 15 bp, Homo sapiens
tgaacaaacattaac

SEQ ID NO: 403116 - DNA, 15 bp, Homo sapiens
atgaacaaacattaa

SEQ ID NO: 403117 - DNA, 15 bp, Homo sapiens
aatgaacaaacatta

SEQ ID NO: 403118 - DNA, 15 bp, Homo sapiens
gaatgaacaaacatt

SEQ ID NO: 403119 - DNA, 15 bp, Homo sapiens
tgaatgaacaaacat

SEQ ID NO: 403120 - DNA, 15 bp, Homo sapiens
atgaatgaacaaaca

SEQ ID NO: 403121 - DNA, 15 bp, Homo sapiens
aatgaatgaacaaac

SEQ ID NO: 403122 - DNA, 15 bp, Homo sapiens
aaatgaatgaacaaa

SEQ ID NO: 403123 - DNA, 15 bp, Homo sapiens
taaatgaatgaacaa

SEQ ID NO: 403124 - DNA, 15 bp, Homo sapiens
ctaaatgaatgaaca

SEQ ID NO: 403125 - DNA, 15 bp, Homo sapiens
actaaatgaatgaac

SEQ ID NO: 403126 - DNA, 15 bp, Homo sapiens
gactaaatgaatgaa

SEQ ID NO: 403127 - DNA, 15 bp, Homo sapiens
agactaaatgaatga

SEQ ID NO: 403128 - DNA, 15 bp, Homo sapiens
gagactaaatgaatg

SEQ ID NO: 403129 - DNA, 15 bp, Homo sapiens
tgagactaaatgaat

SEQ ID NO: 403130 - DNA, 15 bp, Homo sapiens
gtgagactaaatgaa

SEQ ID NO: 403131 - DNA, 15 bp, Homo sapiens
ggtgagactaaatga

SEQ ID NO: 403132 - DNA, 15 bp, Homo sapiens
aggtgagactaaatg

SEQ ID NO: 403133 - DNA, 15 bp, Homo sapiens
gaggtgagactaaat

SEQ ID NO: 403134 - DNA, 15 bp, Homo sapiens
agaggtgagactaaa

SEQ ID NO: 403135 - DNA, 15 bp, Homo sapiens
gagaggtgagactaa

SEQ ID NO: 403136 - DNA, 15 bp, Homo sapiens
agagaggtgagacta

SEQ ID NO: 403137 - DNA, 15 bp, Homo sapiens
tagagaggtgagact

SEQ ID NO: 403138 - DNA, 15 bp, Homo sapiens
ttagagaggtgagac

SEQ ID NO: 403139 - DNA, 15 bp, Homo sapiens
tttagagaggtgaga

SEQ ID NO: 403140 - DNA, 15 bp, Homo sapiens
gtttagagaggtgag

SEQ ID NO: 403141 - DNA, 15 bp, Homo sapiens
tgtttagagaggtga

SEQ ID NO: 403142 - DNA, 15 bp, Homo sapiens
gtgtttagagaggtg

SEQ ID NO: 403143 - DNA, 15 bp, Homo sapiens
agtgtttagagaggt

SEQ ID NO: 403144 - DNA, 15 bp, Homo sapiens
cagtgtttagagagg

SEQ ID NO: 403145 - DNA, 15 bp, Homo sapiens
acagtgtttagagag

SEQ ID NO: 403146 - DNA, 15 bp, Homo sapiens
cacagtgtttagaga

SEQ ID NO: 403147 - DNA, 15 bp, Homo sapiens
acacagtgtttagag

SEQ ID NO: 403148 - DNA, 15 bp, Homo sapiens
tacacagtgtttaga

SEQ ID NO: 403149 - DNA, 15 bp, Homo sapiens
atacacagtgtttag

SEQ ID NO: 403150 - DNA, 15 bp, Homo sapiens
aatacacagtgttta

SEQ ID NO: 403151 - DNA, 15 bp, Homo sapiens
aaatacacagtgttt

SEQ ID NO: 403152 - DNA, 15 bp, Homo sapiens
caaatacacagtgtt

SEQ ID NO: 403153 - DNA, 15 bp, Homo sapiens
gcaaatacacagtgt

SEQ ID NO: 403154 - DNA, 15 bp, Homo sapiens
tgcaaatacacagtg

SEQ ID NO: 403155 - DNA, 15 bp, Homo sapiens
ctgcaaatacacagt

SEQ ID NO: 403156 - DNA, 15 bp, Homo sapiens
tctgcaaatacacag

SEQ ID NO: 403157 - DNA, 15 bp, Homo sapiens
gtctgcaaatacaca

SEQ ID NO: 403158 - DNA, 15 bp, Homo sapiens
tgtctgcaaatacac

SEQ ID NO: 403159 - DNA, 15 bp, Homo sapiens
atgtctgcaaataca

SEQ ID NO: 403160 - DNA, 15 bp, Homo sapiens
gatgtctgcaaatac

SEQ ID NO: 403161 - DNA, 15 bp, Homo sapiens
agatgtctgcaaata

SEQ ID NO: 403162 - DNA, 15 bp, Homo sapiens
gagatgtctgcaaat

SEQ ID NO: 403163 - DNA, 15 bp, Homo sapiens
ggagatgtctgcaaa

SEQ ID NO: 403164 - DNA, 15 bp, Homo sapiens
gggagatgtctgcaa

SEQ ID NO: 403165 - DNA, 15 bp, Homo sapiens
cgggagatgtctgca

SEQ ID NO: 403166 - DNA, 15 bp, Homo sapiens
tcgggagatgtctgc

SEQ ID NO: 403167 - DNA, 15 bp, Homo sapiens
ttcgggagatgtctg

SEQ ID NO: 403168 - DNA, 15 bp, Homo sapiens
attcgggagatgtct

SEQ ID NO: 403169 - DNA, 15 bp, Homo sapiens
aattcgggagatgtc

SEQ ID NO: 403170 - DNA, 15 bp, Homo sapiens
gaattcgggagatgt

SEQ ID NO: 403171 - DNA, 15 bp, Homo sapiens
tgaattcgggagatg

SEQ ID NO: 403172 - DNA, 15 bp, Homo sapiens
atgaattcgggagat

SEQ ID NO: 403173 - DNA, 15 bp, Homo sapiens
tatgaattcgggaga

SEQ ID NO: 403174 - DNA, 15 bp, Homo sapiens
atatgaattcgggag

SEQ ID NO: 403175 - DNA, 15 bp, Homo sapiens
gatatgaattcggga

SEQ ID NO: 403176 - DNA, 15 bp, Homo sapiens
agatatgaattcggg

SEQ ID NO: 403177 - DNA, 15 bp, Homo sapiens
gagatatgaattcgg

SEQ ID NO: 403178 - DNA, 15 bp, Homo sapiens
agagatatgaattcg

SEQ ID NO: 403179 - DNA, 15 bp, Homo sapiens
tagagatatgaattc

SEQ ID NO: 403180 - DNA, 15 bp, Homo sapiens
ctagagatatgaatt

SEQ ID NO: 403181 - DNA, 15 bp, Homo sapiens
actagagatatgaat

SEQ ID NO: 403182 - DNA, 15 bp, Homo sapiens
gactagagatatgaa

SEQ ID NO: 403183 - DNA, 15 bp, Homo sapiens
agactagagatatga

SEQ ID NO: 403184 - DNA, 15 bp, Homo sapiens
tagactagagatatg

SEQ ID NO: 403185 - DNA, 15 bp, Homo sapiens
ctagactagagatat

SEQ ID NO: 403186 - DNA, 15 bp, Homo sapiens
tctagactagagata

SEQ ID NO: 403187 - DNA, 15 bp, Homo sapiens
gtctagactagagat

SEQ ID NO: 403188 - DNA, 15 bp, Homo sapiens
ggtctagactagaga

SEQ ID NO: 403189 - DNA, 15 bp, Homo sapiens
aggtctagactagag

SEQ ID NO: 403190 - DNA, 15 bp, Homo sapiens
gaggtctagactaga

SEQ ID NO: 403191 - DNA, 15 bp, Homo sapiens
ggaggtctagactag

SEQ ID NO: 403192 - DNA, 15 bp, Homo sapiens
gggaggtctagacta

SEQ ID NO: 403193 - DNA, 15 bp, Homo sapiens
agggaggtctagact

SEQ ID NO: 403194 - DNA, 15 bp, Homo sapiens
cagggaggtctagac

SEQ ID NO: 403195 - DNA, 15 bp, Homo sapiens
tcagggaggtctaga

SEQ ID NO: 403196 - DNA, 15 bp, Homo sapiens
ctcagggaggtctag

SEQ ID NO: 403197 - DNA, 15 bp, Homo sapiens
gctcagggaggtcta

SEQ ID NO: 403198 - DNA, 15 bp, Homo sapiens
agctcagggaggtct

SEQ ID NO: 403199 - DNA, 15 bp, Homo sapiens
gagctcagggaggtc

SEQ ID NO: 403200 - DNA, 15 bp, Homo sapiens
tgagctcagggaggt

SEQ ID NO: 403201 - DNA, 15 bp, Homo sapiens
ttgagctcagggagg

SEQ ID NO: 403202 - DNA, 15 bp, Homo sapiens
tttgagctcagggag

SEQ ID NO: 403203 - DNA, 15 bp, Homo sapiens
gtttgagctcaggga

SEQ ID NO: 403204 - DNA, 15 bp, Homo sapiens
ggtttgagctcaggg

SEQ ID NO: 403205 - DNA, 15 bp, Homo sapiens
aggtttgagctcagg

SEQ ID NO: 403206 - DNA, 15 bp, Homo sapiens
caggtttgagctcag

SEQ ID NO: 403207 - DNA, 15 bp, Homo sapiens
gcaggtttgagctca

SEQ ID NO: 403208 - DNA, 15 bp, Homo sapiens
agcaggtttgagctc

SEQ ID NO: 403209 - DNA, 15 bp, Homo sapiens
gagcaggtttgagct

SEQ ID NO: 403210 - DNA, 15 bp, Homo sapiens
tgagcaggtttgagc

SEQ ID NO: 403211 - DNA, 15 bp, Homo sapiens
gtgagcaggtttgag

SEQ ID NO: 403212 - DNA, 15 bp, Homo sapiens
ggtgagcaggtttga

SEQ ID NO: 403213 - DNA, 15 bp, Homo sapiens
gggtgagcaggtttg

SEQ ID NO: 403214 - DNA, 15 bp, Homo sapiens
tgggtgagcaggttt

SEQ ID NO: 403215 - DNA, 15 bp, Homo sapiens
ctgggtgagcaggtt

SEQ ID NO: 403216 - DNA, 15 bp, Homo sapiens
actgggtgagcaggt

SEQ ID NO: 403217 - DNA, 15 bp, Homo sapiens
aactgggtgagcagg

SEQ ID NO: 403218 - DNA, 15 bp, Homo sapiens
caactgggtgagcag

SEQ ID NO: 403219 - DNA, 15 bp, Homo sapiens
gcaactgggtgagca

SEQ ID NO: 403220 - DNA, 15 bp, Homo sapiens
ggcaactgggtgagc

SEQ ID NO: 403221 - DNA, 15 bp, Homo sapiens
aggcaactgggtgag

SEQ ID NO: 403222 - DNA, 15 bp, Homo sapiens
taggcaactgggtga

SEQ ID NO: 403223 - DNA, 15 bp, Homo sapiens
ctaggcaactgggtg

SEQ ID NO: 403224 - DNA, 15 bp, Homo sapiens
actaggcaactgggt

SEQ ID NO: 403225 - DNA, 15 bp, Homo sapiens
gactaggcaactggg

SEQ ID NO: 403226 - DNA, 15 bp, Homo sapiens
tgactaggcaactgg

SEQ ID NO: 403227 - DNA, 15 bp, Homo sapiens
ctgactaggcaactg

SEQ ID NO: 403228 - DNA, 15 bp, Homo sapiens
gctgactaggcaact

SEQ ID NO: 403229 - DNA, 15 bp, Homo sapiens
tgctgactaggcaac

SEQ ID NO: 403230 - DNA, 15 bp, Homo sapiens
atgctgactaggcaa

SEQ ID NO: 403231 - DNA, 15 bp, Homo sapiens
gatgctgactaggca

SEQ ID NO: 403232 - DNA, 15 bp, Homo sapiens
agatgctgactaggc

SEQ ID NO: 403233 - DNA, 15 bp, Homo sapiens
aagatgctgactagg

SEQ ID NO: 403234 - DNA, 15 bp, Homo sapiens
gaagatgctgactag

SEQ ID NO: 403235 - DNA, 15 bp, Homo sapiens
tgaagatgctgacta

SEQ ID NO: 403236 - DNA, 15 bp, Homo sapiens
ctgaagatgctgact

SEQ ID NO: 403237 - DNA, 15 bp, Homo sapiens
gctgaagatgctgac

SEQ ID NO: 403238 - DNA, 15 bp, Homo sapiens
agctgaagatgctga

SEQ ID NO: 403239 - DNA, 15 bp, Homo sapiens
cagctgaagatgctg

SEQ ID NO: 403240 - DNA, 15 bp, Homo sapiens
ccagctgaagatgct

SEQ ID NO: 403241 - DNA, 15 bp, Homo sapiens
tccagctgaagatgc

SEQ ID NO: 403242 - DNA, 15 bp, Homo sapiens
atccagctgaagatg

SEQ ID NO: 403243 - DNA, 15 bp, Homo sapiens
catccagctgaagat

SEQ ID NO: 403244 - DNA, 15 bp, Homo sapiens
acatccagctgaaga

SEQ ID NO: 403245 - DNA, 15 bp, Homo sapiens
gacatccagctgaag

SEQ ID NO: 403246 - DNA, 15 bp, Homo sapiens
agacatccagctgaa

SEQ ID NO: 403247 - DNA, 15 bp, Homo sapiens
gagacatccagctga

SEQ ID NO: 403248 - DNA, 15 bp, Homo sapiens
tgagacatccagctg

SEQ ID NO: 403249 - DNA, 15 bp, Homo sapiens
gtgagacatccagct

SEQ ID NO: 403250 - DNA, 15 bp, Homo sapiens
tgtgagacatccagc

SEQ ID NO: 403251 - DNA, 15 bp, Homo sapiens
ttgtgagacatccag

SEQ ID NO: 403252 - DNA, 15 bp, Homo sapiens
tttgtgagacatcca

SEQ ID NO: 403253 - DNA, 15 bp, Homo sapiens
atttgtgagacatcc

SEQ ID NO: 403254 - DNA, 15 bp, Homo sapiens
tatttgtgagacatc

SEQ ID NO: 403255 - DNA, 15 bp, Homo sapiens
gtatttgtgagacat

SEQ ID NO: 403256 - DNA, 15 bp, Homo sapiens
agtatttgtgagaca

SEQ ID NO: 403257 - DNA, 15 bp, Homo sapiens
tagtatttgtgagac

SEQ ID NO: 403258 - DNA, 15 bp, Homo sapiens
atagtatttgtgaga

SEQ ID NO: 403259 - DNA, 15 bp, Homo sapiens
tatagtatttgtgag

SEQ ID NO: 403260 - DNA, 15 bp, Homo sapiens
atatagtatttgtga

SEQ ID NO: 403261 - DNA, 15 bp, Homo sapiens
catatagtatttgtg

SEQ ID NO: 403262 - DNA, 15 bp, Homo sapiens
acatatagtatttgt

SEQ ID NO: 403263 - DNA, 15 bp, Homo sapiens
cacatatagtatttg

SEQ ID NO: 403264 - DNA, 15 bp, Homo sapiens
tcacatatagtattt

SEQ ID NO: 403265 - DNA, 15 bp, Homo sapiens
ctcacatatagtatt

SEQ ID NO: 403266 - DNA, 15 bp, Homo sapiens
tctcacatatagtat

SEQ ID NO: 403267 - DNA, 15 bp, Homo sapiens
atctcacatatagta

SEQ ID NO: 403268 - DNA, 15 bp, Homo sapiens
catctcacatatagt

SEQ ID NO: 403269 - DNA, 15 bp, Homo sapiens
acatctcacatatag

SEQ ID NO: 403270 - DNA, 15 bp, Homo sapiens
cacatctcacatata

SEQ ID NO: 403271 - DNA, 15 bp, Homo sapiens
acacatctcacatat

SEQ ID NO: 403272 - DNA, 15 bp, Homo sapiens
aacacatctcacata

SEQ ID NO: 403273 - DNA, 15 bp, Homo sapiens
gaacacatctcacat

SEQ ID NO: 403274 - DNA, 15 bp, Homo sapiens
ggaacacatctcaca

SEQ ID NO: 403275 - DNA, 15 bp, Homo sapiens
tggaacacatctcac

SEQ ID NO: 403276 - DNA, 15 bp, Homo sapiens
ttggaacacatctca

SEQ ID NO: 403277 - DNA, 15 bp, Homo sapiens
tttggaacacatctc

SEQ ID NO: 403278 - DNA, 15 bp, Homo sapiens
ttttggaacacatct

SEQ ID NO: 403279 - DNA, 15 bp, Homo sapiens
gttttggaacacatc

SEQ ID NO: 403280 - DNA, 15 bp, Homo sapiens
agttttggaacacat

SEQ ID NO: 403281 - DNA, 15 bp, Homo sapiens
cagttttggaacaca

SEQ ID NO: 403282 - DNA, 15 bp, Homo sapiens
tcagttttggaacac

SEQ ID NO: 403283 - DNA, 15 bp, Homo sapiens
atcagttttggaaca

SEQ ID NO: 403284 - DNA, 15 bp, Homo sapiens
aatcagttttggaac

SEQ ID NO: 403285 - DNA, 15 bp, Homo sapiens
aaatcagttttggaa

SEQ ID NO: 403286 - DNA, 15 bp, Homo sapiens
gaaatcagttttgga

SEQ ID NO: 403287 - DNA, 15 bp, Homo sapiens
agaaatcagttttgg

SEQ ID NO: 403288 - DNA, 15 bp, Homo sapiens
tagaaatcagttttg

SEQ ID NO: 403289 - DNA, 15 bp, Homo sapiens
ttagaaatcagtttt

SEQ ID NO: 403290 - DNA, 15 bp, Homo sapiens
attagaaatcagttt

SEQ ID NO: 403291 - DNA, 15 bp, Homo sapiens
cattagaaatcagtt

SEQ ID NO: 403292 - DNA, 15 bp, Homo sapiens
gcattagaaatcagt

SEQ ID NO: 403293 - DNA, 15 bp, Homo sapiens
ggcattagaaatcag

SEQ ID NO: 403294 - DNA, 15 bp, Homo sapiens
aggcattagaaatca

SEQ ID NO: 403295 - DNA, 15 bp, Homo sapiens
gaggcattagaaatc

SEQ ID NO: 403296 - DNA, 15 bp, Homo sapiens
agaggcattagaaat

SEQ ID NO: 403297 - DNA, 15 bp, Homo sapiens
gagaggcattagaaa

SEQ ID NO: 403298 - DNA, 15 bp, Homo sapiens
ggagaggcattagaa

SEQ ID NO: 403299 - DNA, 15 bp, Homo sapiens
gggagaggcattaga

SEQ ID NO: 403300 - DNA, 15 bp, Homo sapiens
ggggagaggcattag

SEQ ID NO: 403301 - DNA, 15 bp, Homo sapiens
gggggagaggcatta

SEQ ID NO: 403302 - DNA, 15 bp, Homo sapiens
ggggggagaggcatt

SEQ ID NO: 403303 - DNA, 15 bp, Homo sapiens
aggggggagaggcat

SEQ ID NO: 403304 - DNA, 15 bp, Homo sapiens
taggggggagaggca

SEQ ID NO: 403305 - DNA, 15 bp, Homo sapiens
gtaggggggagaggc

SEQ ID NO: 403306 - DNA, 15 bp, Homo sapiens
agtaggggggagagg

SEQ ID NO: 403307 - DNA, 15 bp, Homo sapiens
tagtaggggggagag

SEQ ID NO: 403308 - DNA, 15 bp, Homo sapiens
gtagtaggggggaga

SEQ ID NO: 403309 - DNA, 15 bp, Homo sapiens
agtagtaggggggag

SEQ ID NO: 403310 - DNA, 15 bp, Homo sapiens
gagtagtagggggga

SEQ ID NO: 403311 - DNA, 15 bp, Homo sapiens
tgagtagtagggggg

SEQ ID NO: 403312 - DNA, 15 bp, Homo sapiens
gtgagtagtaggggg

SEQ ID NO: 403313 - DNA, 15 bp, Homo sapiens
ggtgagtagtagggg

SEQ ID NO: 403314 - DNA, 15 bp, Homo sapiens
gggtgagtagtaggg

SEQ ID NO: 403315 - DNA, 15 bp, Homo sapiens
tgggtgagtagtagg

SEQ ID NO: 403316 - DNA, 15 bp, Homo sapiens
ctgggtgagtagtag

SEQ ID NO: 403317 - DNA, 15 bp, Homo sapiens
actgggtgagtagta

SEQ ID NO: 403318 - DNA, 15 bp, Homo sapiens
gactgggtgagtagt

SEQ ID NO: 403319 - DNA, 15 bp, Homo sapiens
tgactgggtgagtag

SEQ ID NO: 403320 - DNA, 15 bp, Homo sapiens
atgactgggtgagta

SEQ ID NO: 403321 - DNA, 15 bp, Homo sapiens
gatgactgggtgagt

SEQ ID NO: 403322 - DNA, 15 bp, Homo sapiens
tgatgactgggtgag

SEQ ID NO: 403323 - DNA, 15 bp, Homo sapiens
gtgatgactgggtga

SEQ ID NO: 403324 - DNA, 15 bp, Homo sapiens
ggtgatgactgggtg

SEQ ID NO: 403325 - DNA, 15 bp, Homo sapiens
aggtgatgactgggt

SEQ ID NO: 403326 - DNA, 15 bp, Homo sapiens
aaggtgatgactggg

SEQ ID NO: 403327 - DNA, 15 bp, Homo sapiens
gaaggtgatgactgg

SEQ ID NO: 403328 - DNA, 15 bp, Homo sapiens
agaaggtgatgactg

SEQ ID NO: 403329 - DNA, 15 bp, Homo sapiens
gagaaggtgatgact

SEQ ID NO: 403330 - DNA, 15 bp, Homo sapiens
tgagaaggtgatgac

SEQ ID NO: 403331 - DNA, 15 bp, Homo sapiens
ctgagaaggtgatga

SEQ ID NO: 403332 - DNA, 15 bp, Homo sapiens
cctgagaaggtgatg

SEQ ID NO: 403333 - DNA, 15 bp, Homo sapiens
acctgagaaggtgat

SEQ ID NO: 403334 - DNA, 15 bp, Homo sapiens
aacctgagaaggtga

SEQ ID NO: 403335 - DNA, 15 bp, Homo sapiens
caacctgagaaggtg

SEQ ID NO: 403336 - DNA, 15 bp, Homo sapiens
acaacctgagaaggt

SEQ ID NO: 403337 - DNA, 15 bp, Homo sapiens
cacaacctgagaagg

SEQ ID NO: 403338 - DNA, 15 bp, Homo sapiens
ccacaacctgagaag

SEQ ID NO: 403339 - DNA, 15 bp, Homo sapiens
gccacaacctgagaa

SEQ ID NO: 403340 - DNA, 15 bp, Homo sapiens
agccacaacctgaga

SEQ ID NO: 403341 - DNA, 15 bp, Homo sapiens
cagccacaacctgag

SEQ ID NO: 403342 - DNA, 15 bp, Homo sapiens
gcagccacaacctga

SEQ ID NO: 403343 - DNA, 15 bp, Homo sapiens
agcagccacaacctg

SEQ ID NO: 403344 - DNA, 15 bp, Homo sapiens
aagcagccacaacct

SEQ ID NO: 403345 - DNA, 15 bp, Homo sapiens
gaagcagccacaacc

SEQ ID NO: 403346 - DNA, 15 bp, Homo sapiens
tgaagcagccacaac

SEQ ID NO: 403347 - DNA, 15 bp, Homo sapiens
atgaagcagccacaa

SEQ ID NO: 403348 - DNA, 15 bp, Homo sapiens
gatgaagcagccaca

SEQ ID NO: 403349 - DNA, 15 bp, Homo sapiens
ggatgaagcagccac

SEQ ID NO: 403350 - DNA, 15 bp, Homo sapiens
aggatgaagcagcca

SEQ ID NO: 403351 - DNA, 15 bp, Homo sapiens
aaggatgaagcagcc

SEQ ID NO: 403352 - DNA, 15 bp, Homo sapiens
gaaggatgaagcagc

SEQ ID NO: 403353 - DNA, 15 bp, Homo sapiens
ggaaggatgaagcag

SEQ ID NO: 403354 - DNA, 15 bp, Homo sapiens
tggaaggatgaagca

SEQ ID NO: 403355 - DNA, 15 bp, Homo sapiens
ctggaaggatgaagc

SEQ ID NO: 403356 - DNA, 15 bp, Homo sapiens
actggaaggatgaag

SEQ ID NO: 403357 - DNA, 15 bp, Homo sapiens
aactggaaggatgaa

SEQ ID NO: 403358 - DNA, 15 bp, Homo sapiens
taactggaaggatga

SEQ ID NO: 403359 - DNA, 15 bp, Homo sapiens
ataactggaaggatg

SEQ ID NO: 403360 - DNA, 15 bp, Homo sapiens
aataactggaaggat

SEQ ID NO: 403361 - DNA, 15 bp, Homo sapiens
caataactggaagga

SEQ ID NO: 403362 - DNA, 15 bp, Homo sapiens
tcaataactggaagg

SEQ ID NO: 403363 - DNA, 15 bp, Homo sapiens
ctcaataactggaag

SEQ ID NO: 403364 - DNA, 15 bp, Homo sapiens
tctcaataactggaa

SEQ ID NO: 403365 - DNA, 15 bp, Homo sapiens
gtctcaataactgga

SEQ ID NO: 403366 - DNA, 15 bp, Homo sapiens
ggtctcaataactgg

SEQ ID NO: 403367 - DNA, 15 bp, Homo sapiens
tggtctcaataactg

SEQ ID NO: 403368 - DNA, 15 bp, Homo sapiens
ttggtctcaataact

SEQ ID NO: 403369 - DNA, 15 bp, Homo sapiens
tttggtctcaataac

SEQ ID NO: 403370 - DNA, 15 bp, Homo sapiens
atttggtctcaataa

SEQ ID NO: 403371 - DNA, 15 bp, Homo sapiens
tatttggtctcaata

SEQ ID NO: 403372 - DNA, 15 bp, Homo sapiens
gtatttggtctcaat

SEQ ID NO: 403373 - DNA, 15 bp, Homo sapiens
agtatttggtctcaa

SEQ ID NO: 403374 - DNA, 15 bp, Homo sapiens
aagtatttggtctca

SEQ ID NO: 403375 - DNA, 15 bp, Homo sapiens
aaagtatttggtctc

SEQ ID NO: 403376 - DNA, 15 bp, Homo sapiens
caaagtatttggtct

SEQ ID NO: 403377 - DNA, 15 bp, Homo sapiens
tcaaagtatttggtc

SEQ ID NO: 403378 - DNA, 15 bp, Homo sapiens
ctcaaagtatttggt

SEQ ID NO: 403379 - DNA, 15 bp, Homo sapiens
cctcaaagtatttgg

SEQ ID NO: 403380 - DNA, 15 bp, Homo sapiens
acctcaaagtatttg

SEQ ID NO: 403381 - DNA, 15 bp, Homo sapiens
aacctcaaagtattt

SEQ ID NO: 403382 - DNA, 15 bp, Homo sapiens
taacctcaaagtatt

SEQ ID NO: 403383 - DNA, 15 bp, Homo sapiens
ataacctcaaagtat

SEQ ID NO: 403384 - DNA, 15 bp, Homo sapiens
gataacctcaaagta

SEQ ID NO: 403385 - DNA, 15 bp, Homo sapiens
ggataacctcaaagt

SEQ ID NO: 403386 - DNA, 15 bp, Homo sapiens
tggataacctcaaag

SEQ ID NO: 403387 - DNA, 15 bp, Homo sapiens
atggataacctcaaa

SEQ ID NO: 403388 - DNA, 15 bp, Homo sapiens
catggataacctcaa

SEQ ID NO: 403389 - DNA, 15 bp, Homo sapiens
tcatggataacctca

SEQ ID NO: 403390 - DNA, 15 bp, Homo sapiens
gtcatggataacctc

SEQ ID NO: 403391 - DNA, 15 bp, Homo sapiens
agtcatggataacct

SEQ ID NO: 403392 - DNA, 15 bp, Homo sapiens
gagtcatggataacc

SEQ ID NO: 403393 - DNA, 15 bp, Homo sapiens
ggagtcatggataac

SEQ ID NO: 403394 - DNA, 15 bp, Homo sapiens
aggagtcatggataa

SEQ ID NO: 403395 - DNA, 15 bp, Homo sapiens
aaggagtcatggata

SEQ ID NO: 403396 - DNA, 15 bp, Homo sapiens
aaaggagtcatggat

SEQ ID NO: 403397 - DNA, 15 bp, Homo sapiens
taaaggagtcatgga

SEQ ID NO: 403398 - DNA, 15 bp, Homo sapiens
ataaaggagtcatgg

SEQ ID NO: 403399 - DNA, 15 bp, Homo sapiens
aataaaggagtcatg

SEQ ID NO: 403400 - DNA, 15 bp, Homo sapiens
aaataaaggagtcat

SEQ ID NO: 403401 - DNA, 15 bp, Homo sapiens
gaaataaaggagtca

SEQ ID NO: 403402 - DNA, 15 bp, Homo sapiens
agaaataaaggagtc

SEQ ID NO: 403403 - DNA, 15 bp, Homo sapiens
cagaaataaaggagt

SEQ ID NO: 403404 - DNA, 15 bp, Homo sapiens
tcagaaataaaggag

SEQ ID NO: 403405 - DNA, 15 bp, Homo sapiens
gtcagaaataaagga

SEQ ID NO: 403406 - DNA, 15 bp, Homo sapiens
tgtcagaaataaagg

SEQ ID NO: 403407 - DNA, 15 bp, Homo sapiens
gtgtcagaaataaag

SEQ ID NO: 403408 - DNA, 15 bp, Homo sapiens
agtgtcagaaataaa

SEQ ID NO: 403409 - DNA, 15 bp, Homo sapiens
gagtgtcagaaataa

SEQ ID NO: 403410 - DNA, 15 bp, Homo sapiens
ggagtgtcagaaata

SEQ ID NO: 403411 - DNA, 15 bp, Homo sapiens
tggagtgtcagaaat

SEQ ID NO: 403412 - DNA, 15 bp, Homo sapiens
gtggagtgtcagaaa

SEQ ID NO: 403413 - DNA, 15 bp, Homo sapiens
tgtggagtgtcagaa

SEQ ID NO: 403414 - DNA, 15 bp, Homo sapiens
atgtggagtgtcaga

SEQ ID NO: 403415 - DNA, 15 bp, Homo sapiens
catgtggagtgtcag

SEQ ID NO: 403416 - DNA, 15 bp, Homo sapiens
gcatgtggagtgtca

SEQ ID NO: 403417 - DNA, 15 bp, Homo sapiens
tgcatgtggagtgtc

SEQ ID NO: 403418 - DNA, 15 bp, Homo sapiens
gtgcatgtggagtgt

SEQ ID NO: 403419 - DNA, 15 bp, Homo sapiens
agtgcatgtggagtg

SEQ ID NO: 403420 - DNA, 15 bp, Homo sapiens
cagtgcatgtggagt

SEQ ID NO: 403421 - DNA, 15 bp, Homo sapiens
gcagtgcatgtggag

SEQ ID NO: 403422 - DNA, 15 bp, Homo sapiens
ggcagtgcatgtgga

SEQ ID NO: 403423 - DNA, 15 bp, Homo sapiens
tggcagtgcatgtgg

SEQ ID NO: 403424 - DNA, 15 bp, Homo sapiens
ctggcagtgcatgtg

SEQ ID NO: 403425 - DNA, 15 bp, Homo sapiens
actggcagtgcatgt

SEQ ID NO: 403426 - DNA, 15 bp, Homo sapiens
tactggcagtgcatg

SEQ ID NO: 403427 - DNA, 15 bp, Homo sapiens
ttactggcagtgcat

SEQ ID NO: 403428 - DNA, 15 bp, Homo sapiens
cttactggcagtgca

SEQ ID NO: 403429 - DNA, 15 bp, Homo sapiens
acttactggcagtgc

SEQ ID NO: 403430 - DNA, 15 bp, Homo sapiens
cacttactggcagtg

SEQ ID NO: 403431 - DNA, 15 bp, Homo sapiens
acacttactggcagt

SEQ ID NO: 403432 - DNA, 15 bp, Homo sapiens
aacacttactggcag

SEQ ID NO: 403433 - DNA, 15 bp, Homo sapiens
caacacttactggca

SEQ ID NO: 403434 - DNA, 15 bp, Homo sapiens
acaacacttactggc

SEQ ID NO: 403435 - DNA, 15 bp, Homo sapiens
aacaacacttactgg

SEQ ID NO: 403436 - DNA, 15 bp, Homo sapiens
caacaacacttactg

SEQ ID NO: 403437 - DNA, 15 bp, Homo sapiens
tcaacaacacttact

SEQ ID NO: 403438 - DNA, 15 bp, Homo sapiens
gtcaacaacacttac

SEQ ID NO: 403439 - DNA, 15 bp, Homo sapiens
agtcaacaacactta

SEQ ID NO: 403440 - DNA, 15 bp, Homo sapiens
aagtcaacaacactt

SEQ ID NO: 403441 - DNA, 15 bp, Homo sapiens
aaagtcaacaacact

SEQ ID NO: 403442 - DNA, 15 bp, Homo sapiens
taaagtcaacaacac

SEQ ID NO: 403443 - DNA, 15 bp, Homo sapiens
gtaaagtcaacaaca

SEQ ID NO: 403444 - DNA, 15 bp, Homo sapiens
ggtaaagtcaacaac

SEQ ID NO: 403445 - DNA, 15 bp, Homo sapiens
aggtaaagtcaacaa

SEQ ID NO: 403446 - DNA, 15 bp, Homo sapiens
aaggtaaagtcaaca

SEQ ID NO: 403447 - DNA, 15 bp, Homo sapiens
gaaggtaaagtcaac

SEQ ID NO: 403448 - DNA, 15 bp, Homo sapiens
tgaaggtaaagtcaa

SEQ ID NO: 403449 - DNA, 15 bp, Homo sapiens
ttgaaggtaaagtca

SEQ ID NO: 403450 - DNA, 15 bp, Homo sapiens
tttgaaggtaaagtc

SEQ ID NO: 403451 - DNA, 15 bp, Homo sapiens
atttgaaggtaaagt

SEQ ID NO: 403452 - DNA, 15 bp, Homo sapiens
catttgaaggtaaag

SEQ ID NO: 403453 - DNA, 15 bp, Homo sapiens
acatttgaaggtaaa

SEQ ID NO: 403454 - DNA, 15 bp, Homo sapiens
tacatttgaaggtaa

SEQ ID NO: 403455 - DNA, 15 bp, Homo sapiens
atacatttgaaggta

SEQ ID NO: 403456 - DNA, 15 bp, Homo sapiens
gatacatttgaaggt

SEQ ID NO: 403457 - DNA, 15 bp, Homo sapiens
tgatacatttgaagg

SEQ ID NO: 403458 - DNA, 15 bp, Homo sapiens
gtgatacatttgaag

SEQ ID NO: 403459 - DNA, 15 bp, Homo sapiens
ggtgatacatttgaa

SEQ ID NO: 403460 - DNA, 15 bp, Homo sapiens
tggtgatacatttga

SEQ ID NO: 403461 - DNA, 15 bp, Homo sapiens
atggtgatacatttg

SEQ ID NO: 403462 - DNA, 15 bp, Homo sapiens
aatggtgatacattt

SEQ ID NO: 403463 - DNA, 15 bp, Homo sapiens
caatggtgatacatt

SEQ ID NO: 403464 - DNA, 15 bp, Homo sapiens
gcaatggtgatacat

SEQ ID NO: 403465 - DNA, 15 bp, Homo sapiens
ggcaatggtgataca

SEQ ID NO: 403466 - DNA, 15 bp, Homo sapiens
aggcaatggtgatac

SEQ ID NO: 403467 - DNA, 15 bp, Homo sapiens
gaggcaatggtgata

SEQ ID NO: 403468 - DNA, 15 bp, Homo sapiens
ggaggcaatggtgat

SEQ ID NO: 403469 - DNA, 15 bp, Homo sapiens
tggaggcaatggtga

SEQ ID NO: 403470 - DNA, 15 bp, Homo sapiens
gtggaggcaatggtg

SEQ ID NO: 403471 - DNA, 15 bp, Homo sapiens
ggtggaggcaatggt

SEQ ID NO: 403472 - DNA, 15 bp, Homo sapiens
tggtggaggcaatgg

SEQ ID NO: 403473 - DNA, 15 bp, Homo sapiens
atggtggaggcaatg

SEQ ID NO: 403474 - DNA, 15 bp, Homo sapiens
aatggtggaggcaat

SEQ ID NO: 403475 - DNA, 15 bp, Homo sapiens
taatggtggaggcaa

SEQ ID NO: 403476 - DNA, 15 bp, Homo sapiens
gtaatggtggaggca

SEQ ID NO: 403477 - DNA, 15 bp, Homo sapiens
agtaatggtggaggc

SEQ ID NO: 403478 - DNA, 15 bp, Homo sapiens
tagtaatggtggagg

SEQ ID NO: 403479 - DNA, 15 bp, Homo sapiens
gtagtaatggtggag

SEQ ID NO: 403480 - DNA, 15 bp, Homo sapiens
ggtagtaatggtgga

SEQ ID NO: 403481 - DNA, 15 bp, Homo sapiens
aggtagtaatggtgg

SEQ ID NO: 403482 - DNA, 15 bp, Homo sapiens
aaggtagtaatggtg

SEQ ID NO: 403483 - DNA, 15 bp, Homo sapiens
taaggtagtaatggt

SEQ ID NO: 403484 - DNA, 15 bp, Homo sapiens
ctaaggtagtaatgg

SEQ ID NO: 403485 - DNA, 15 bp, Homo sapiens
actaaggtagtaatg

SEQ ID NO: 403486 - DNA, 15 bp, Homo sapiens
gactaaggtagtaat

SEQ ID NO: 403487 - DNA, 15 bp, Homo sapiens
ggactaaggtagtaa

SEQ ID NO: 403488 - DNA, 15 bp, Homo sapiens
tggactaaggtagta

SEQ ID NO: 403489 - DNA, 15 bp, Homo sapiens
ttggactaaggtagt

SEQ ID NO: 403490 - DNA, 15 bp, Homo sapiens
cttggactaaggtag

SEQ ID NO: 403491 - DNA, 15 bp, Homo sapiens
tcttggactaaggta

SEQ ID NO: 403492 - DNA, 15 bp, Homo sapiens
gtcttggactaaggt

SEQ ID NO: 403493 - DNA, 15 bp, Homo sapiens
tgtcttggactaagg

SEQ ID NO: 403494 - DNA, 15 bp, Homo sapiens
gtgtcttggactaag

SEQ ID NO: 403495 - DNA, 15 bp, Homo sapiens
ggtgtcttggactaa

SEQ ID NO: 403496 - DNA, 15 bp, Homo sapiens
cggtgtcttggacta

SEQ ID NO: 403497 - DNA, 15 bp, Homo sapiens
acggtgtcttggact

SEQ ID NO: 403498 - DNA, 15 bp, Homo sapiens
gacggtgtcttggac

SEQ ID NO: 403499 - DNA, 15 bp, Homo sapiens
agacggtgtcttgga

SEQ ID NO: 403500 - DNA, 15 bp, Homo sapiens
aagacggtgtcttgg

SEQ ID NO: 403501 - DNA, 15 bp, Homo sapiens
gaagacggtgtcttg

SEQ ID NO: 403502 - DNA, 15 bp, Homo sapiens
agaagacggtgtctt

SEQ ID NO: 403503 - DNA, 15 bp, Homo sapiens
cagaagacggtgtct

SEQ ID NO: 403504 - DNA, 15 bp, Homo sapiens
gcagaagacggtgtc

SEQ ID NO: 403505 - DNA, 15 bp, Homo sapiens
ggcagaagacggtgt

SEQ ID NO: 403506 - DNA, 15 bp, Homo sapiens
aggcagaagacggtg

SEQ ID NO: 403507 - DNA, 15 bp, Homo sapiens
caggcagaagacggt

SEQ ID NO: 403508 - DNA, 15 bp, Homo sapiens
ccaggcagaagacgg

SEQ ID NO: 403509 - DNA, 15 bp, Homo sapiens
cccaggcagaagacg

SEQ ID NO: 403510 - DNA, 15 bp, Homo sapiens
acccaggcagaagac

SEQ ID NO: 403511 - DNA, 15 bp, Homo sapiens
aacccaggcagaaga

SEQ ID NO: 403512 - DNA, 15 bp, Homo sapiens
taacccaggcagaag

SEQ ID NO: 403513 - DNA, 15 bp, Homo sapiens
gtaacccaggcagaa

SEQ ID NO: 403514 - DNA, 15 bp, Homo sapiens
agtaacccaggcaga

SEQ ID NO: 403515 - DNA, 15 bp, Homo sapiens
tagtaacccaggcag

SEQ ID NO: 403516 - DNA, 15 bp, Homo sapiens
gtagtaacccaggca

SEQ ID NO: 403517 - DNA, 15 bp, Homo sapiens
tgtagtaacccaggc

SEQ ID NO: 403518 - DNA, 15 bp, Homo sapiens
ctgtagtaacccagg

SEQ ID NO: 403519 - DNA, 15 bp, Homo sapiens
tctgtagtaacccag

SEQ ID NO: 403520 - DNA, 15 bp, Homo sapiens
ctctgtagtaaccca

SEQ ID NO: 403521 - DNA, 15 bp, Homo sapiens
cctctgtagtaaccc

SEQ ID NO: 403522 - DNA, 15 bp, Homo sapiens
acctctgtagtaacc

SEQ ID NO: 403523 - DNA, 15 bp, Homo sapiens
gacctctgtagtaac

SEQ ID NO: 403524 - DNA, 15 bp, Homo sapiens
agacctctgtagtaa

SEQ ID NO: 403525 - DNA, 15 bp, Homo sapiens
aagacctctgtagta

SEQ ID NO: 403526 - DNA, 15 bp, Homo sapiens
taagacctctgtagt

SEQ ID NO: 403527 - DNA, 15 bp, Homo sapiens
ataagacctctgtag

SEQ ID NO: 403528 - DNA, 15 bp, Homo sapiens
aataagacctctgta

SEQ ID NO: 403529 - DNA, 15 bp, Homo sapiens
taataagacctctgt

SEQ ID NO: 403530 - DNA, 15 bp, Homo sapiens
ataataagacctctg

SEQ ID NO: 403531 - DNA, 15 bp, Homo sapiens
aataataagacctct

SEQ ID NO: 403532 - DNA, 15 bp, Homo sapiens
caataataagacctc

SEQ ID NO: 403533 - DNA, 15 bp, Homo sapiens
ccaataataagacct

SEQ ID NO: 403534 - DNA, 15 bp, Homo sapiens
accaataataagacc

SEQ ID NO: 403535 - DNA, 15 bp, Homo sapiens
caccaataataagac

SEQ ID NO: 403536 - DNA, 15 bp, Homo sapiens
tcaccaataataaga

SEQ ID NO: 403537 - DNA, 15 bp, Homo sapiens
gtcaccaataataag

SEQ ID NO: 403538 - DNA, 15 bp, Homo sapiens
tgtcaccaataataa

SEQ ID NO: 403539 - DNA, 15 bp, Homo sapiens
gtgtcaccaataata

SEQ ID NO: 403540 - DNA, 15 bp, Homo sapiens
agtgtcaccaataat

SEQ ID NO: 403541 - DNA, 15 bp, Homo sapiens
cagtgtcaccaataa

SEQ ID NO: 403542 - DNA, 15 bp, Homo sapiens
acagtgtcaccaata

SEQ ID NO: 403543 - DNA, 15 bp, Homo sapiens
gacagtgtcaccaat

SEQ ID NO: 403544 - DNA, 15 bp, Homo sapiens
agacagtgtcaccaa

SEQ ID NO: 403545 - DNA, 15 bp, Homo sapiens
aagacagtgtcacca

SEQ ID NO: 403546 - DNA, 15 bp, Homo sapiens
gaagacagtgtcacc

SEQ ID NO: 403547 - DNA, 15 bp, Homo sapiens
tgaagacagtgtcac

SEQ ID NO: 403548 - DNA, 15 bp, Homo sapiens
gtgaagacagtgtca

SEQ ID NO: 403549 - DNA, 15 bp, Homo sapiens
ggtgaagacagtgtc

SEQ ID NO: 403550 - DNA, 15 bp, Homo sapiens
aggtgaagacagtgt

SEQ ID NO: 403551 - DNA, 15 bp, Homo sapiens
aaggtgaagacagtg

SEQ ID NO: 403552 - DNA, 15 bp, Homo sapiens
aaaggtgaagacagt

SEQ ID NO: 403553 - DNA, 15 bp, Homo sapiens
caaaggtgaagacag

SEQ ID NO: 403554 - DNA, 15 bp, Homo sapiens
gcaaaggtgaagaca

SEQ ID NO: 403555 - DNA, 15 bp, Homo sapiens
agcaaaggtgaagac

SEQ ID NO: 403556 - DNA, 15 bp, Homo sapiens
aagcaaaggtgaaga

SEQ ID NO: 403557 - DNA, 15 bp, Homo sapiens
gaagcaaaggtgaag

SEQ ID NO: 403558 - DNA, 15 bp, Homo sapiens
ggaagcaaaggtgaa

SEQ ID NO: 403559 - DNA, 15 bp, Homo sapiens
gggaagcaaaggtga

SEQ ID NO: 403560 - DNA, 15 bp, Homo sapiens
tgggaagcaaaggtg

SEQ ID NO: 403561 - DNA, 15 bp, Homo sapiens
atgggaagcaaaggt

SEQ ID NO: 403562 - DNA, 15 bp, Homo sapiens
gatgggaagcaaagg

SEQ ID NO: 403563 - DNA, 15 bp, Homo sapiens
tgatgggaagcaaag

SEQ ID NO: 403564 - DNA, 15 bp, Homo sapiens
ctgatgggaagcaaa

SEQ ID NO: 403565 - DNA, 15 bp, Homo sapiens
gctgatgggaagcaa

SEQ ID NO: 403566 - DNA, 15 bp, Homo sapiens
ggctgatgggaagca

SEQ ID NO: 403567 - DNA, 15 bp, Homo sapiens
tggctgatgggaagc

SEQ ID NO: 403568 - DNA, 15 bp, Homo sapiens
ctggctgatgggaag

SEQ ID NO: 403569 - DNA, 15 bp, Homo sapiens
tctggctgatgggaa

SEQ ID NO: 403570 - DNA, 15 bp, Homo sapiens
ctctggctgatggga

SEQ ID NO: 403571 - DNA, 15 bp, Homo sapiens
tctctggctgatggg

SEQ ID NO: 403572 - DNA, 15 bp, Homo sapiens
ctctctggctgatgg

SEQ ID NO: 403573 - DNA, 15 bp, Homo sapiens
tctctctggctgatg

SEQ ID NO: 403574 - DNA, 15 bp, Homo sapiens
ctctctctggctgat

SEQ ID NO: 403575 - DNA, 15 bp, Homo sapiens
gctctctctggctga

SEQ ID NO: 403576 - DNA, 15 bp, Homo sapiens
agctctctctggctg

SEQ ID NO: 403577 - DNA, 15 bp, Homo sapiens
aagctctctctggct

SEQ ID NO: 403578 - DNA, 15 bp, Homo sapiens
aaagctctctctggc

SEQ ID NO: 403579 - DNA, 15 bp, Homo sapiens
aaaagctctctctgg

SEQ ID NO: 403580 - DNA, 15 bp, Homo sapiens
aaaaagctctctctg

SEQ ID NO: 403581 - DNA, 15 bp, Homo sapiens
gaaaaagctctctct

SEQ ID NO: 403582 - DNA, 15 bp, Homo sapiens
agaaaaagctctctc

SEQ ID NO: 403583 - DNA, 15 bp, Homo sapiens
tagaaaaagctctct

SEQ ID NO: 403584 - DNA, 15 bp, Homo sapiens
ttagaaaaagctctc

SEQ ID NO: 403585 - DNA, 15 bp, Homo sapiens
gttagaaaaagctct

SEQ ID NO: 403586 - DNA, 15 bp, Homo sapiens
agttagaaaaagctc

SEQ ID NO: 403587 - DNA, 15 bp, Homo sapiens
gagttagaaaaagct

SEQ ID NO: 403588 - DNA, 15 bp, Homo sapiens
ggagttagaaaaagc

SEQ ID NO: 403589 - DNA, 15 bp, Homo sapiens
tggagttagaaaaag

SEQ ID NO: 403590 - DNA, 15 bp, Homo sapiens
ctggagttagaaaaa

SEQ ID NO: 403591 - DNA, 15 bp, Homo sapiens
actggagttagaaaa

SEQ ID NO: 403592 - DNA, 15 bp, Homo sapiens
gactggagttagaaa

SEQ ID NO: 403593 - DNA, 15 bp, Homo sapiens
tgactggagttagaa

SEQ ID NO: 403594 - DNA, 15 bp, Homo sapiens
ctgactggagttaga

SEQ ID NO: 403595 - DNA, 15 bp, Homo sapiens
tctgactggagttag

SEQ ID NO: 403596 - DNA, 15 bp, Homo sapiens
gtctgactggagtta

SEQ ID NO: 403597 - DNA, 15 bp, Homo sapiens
ggtctgactggagtt

SEQ ID NO: 403598 - DNA, 15 bp, Homo sapiens
aggtctgactggagt

SEQ ID NO: 403599 - DNA, 15 bp, Homo sapiens
aaggtctgactggag

SEQ ID NO: 403600 - DNA, 15 bp, Homo sapiens
caaggtctgactgga

SEQ ID NO: 403601 - DNA, 15 bp, Homo sapiens
acaaggtctgactgg

SEQ ID NO: 403602 - DNA, 15 bp, Homo sapiens
gacaaggtctgactg

SEQ ID NO: 403603 - DNA, 15 bp, Homo sapiens
tgacaaggtctgact

SEQ ID NO: 403604 - DNA, 15 bp, Homo sapiens
gtgacaaggtctgac

SEQ ID NO: 403605 - DNA, 15 bp, Homo sapiens
agtgacaaggtctga

SEQ ID NO: 403606 - DNA, 15 bp, Homo sapiens
gagtgacaaggtctg

SEQ ID NO: 403607 - DNA, 15 bp, Homo sapiens
agagtgacaaggtct

SEQ ID NO: 403608 - DNA, 15 bp, Homo sapiens
aagagtgacaaggtc

SEQ ID NO: 403609 - DNA, 15 bp, Homo sapiens
gaagagtgacaaggt

SEQ ID NO: 403610 - DNA, 15 bp, Homo sapiens
agaagagtgacaagg

SEQ ID NO: 403611 - DNA, 15 bp, Homo sapiens
cagaagagtgacaag

SEQ ID NO: 403612 - DNA, 15 bp, Homo sapiens
gcagaagagtgacaa

SEQ ID NO: 403613 - DNA, 15 bp, Homo sapiens
agcagaagagtgaca

SEQ ID NO: 403614 - DNA, 15 bp, Homo sapiens
aagcagaagagtgac

SEQ ID NO: 403615 - DNA, 15 bp, Homo sapiens
taagcagaagagtga

SEQ ID NO: 403616 - DNA, 15 bp, Homo sapiens
ttaagcagaagagtg

SEQ ID NO: 403617 - DNA, 15 bp, Homo sapiens
tttaagcagaagagt

SEQ ID NO: 403618 - DNA, 15 bp, Homo sapiens
gtttaagcagaagag

SEQ ID NO: 403619 - DNA, 15 bp, Homo sapiens
ggtttaagcagaaga

SEQ ID NO: 403620 - DNA, 15 bp, Homo sapiens
gggtttaagcagaag

SEQ ID NO: 403621 - DNA, 15 bp, Homo sapiens
agggtttaagcagaa

SEQ ID NO: 403622 - DNA, 15 bp, Homo sapiens
gagggtttaagcaga

SEQ ID NO: 403623 - DNA, 15 bp, Homo sapiens
ggagggtttaagcag

SEQ ID NO: 403624 - DNA, 15 bp, Homo sapiens
tggagggtttaagca

SEQ ID NO: 403625 - DNA, 15 bp, Homo sapiens
ctggagggtttaagc

SEQ ID NO: 403626 - DNA, 15 bp, Homo sapiens
actggagggtttaag

SEQ ID NO: 403627 - DNA, 15 bp, Homo sapiens
tactggagggtttaa

SEQ ID NO: 403628 - DNA, 15 bp, Homo sapiens
ctactggagggttta

SEQ ID NO: 403629 - DNA, 15 bp, Homo sapiens
actactggagggttt

SEQ ID NO: 403630 - DNA, 15 bp, Homo sapiens
aactactggagggtt

SEQ ID NO: 403631 - DNA, 15 bp, Homo sapiens
aaactactggagggt

SEQ ID NO: 403632 - DNA, 15 bp, Homo sapiens
aaaactactggaggg

SEQ ID NO: 403633 - DNA, 15 bp, Homo sapiens
gaaaactactggagg

SEQ ID NO: 403634 - DNA, 15 bp, Homo sapiens
ggaaaactactggag

SEQ ID NO: 403635 - DNA, 15 bp, Homo sapiens
tggaaaactactgga

SEQ ID NO: 403636 - DNA, 15 bp, Homo sapiens
atggaaaactactgg

SEQ ID NO: 403637 - DNA, 15 bp, Homo sapiens
gatggaaaactactg

SEQ ID NO: 403638 - DNA, 15 bp, Homo sapiens
tgatggaaaactact

SEQ ID NO: 403639 - DNA, 15 bp, Homo sapiens
gtgatggaaaactac

SEQ ID NO: 403640 - DNA, 15 bp, Homo sapiens
ggtgatggaaaacta

SEQ ID NO: 403641 - DNA, 15 bp, Homo sapiens
gggtgatggaaaact

SEQ ID NO: 403642 - DNA, 15 bp, Homo sapiens
agggtgatggaaaac

SEQ ID NO: 403643 - DNA, 15 bp, Homo sapiens
gagggtgatggaaaa

SEQ ID NO: 403644 - DNA, 15 bp, Homo sapiens
tgagggtgatggaaa

SEQ ID NO: 403645 - DNA, 15 bp, Homo sapiens
ctgagggtgatggaa

SEQ ID NO: 403646 - DNA, 15 bp, Homo sapiens
tctgagggtgatgga

SEQ ID NO: 403647 - DNA, 15 bp, Homo sapiens
ttctgagggtgatgg

SEQ ID NO: 403648 - DNA, 15 bp, Homo sapiens
attctgagggtgatg

SEQ ID NO: 403649 - DNA, 15 bp, Homo sapiens
aattctgagggtgat

SEQ ID NO: 403650 - DNA, 15 bp, Homo sapiens
taattctgagggtga

SEQ ID NO: 403651 - DNA, 15 bp, Homo sapiens
ctaattctgagggtg

SEQ ID NO: 403652 - DNA, 15 bp, Homo sapiens
tctaattctgagggt

SEQ ID NO: 403653 - DNA, 15 bp, Homo sapiens
ctctaattctgaggg

SEQ ID NO: 403654 - DNA, 15 bp, Homo sapiens
gctctaattctgagg

SEQ ID NO: 403655 - DNA, 15 bp, Homo sapiens
ggctctaattctgag

SEQ ID NO: 403656 - DNA, 15 bp, Homo sapiens
gggctctaattctga

SEQ ID NO: 403657 - DNA, 15 bp, Homo sapiens
agggctctaattctg

SEQ ID NO: 403658 - DNA, 15 bp, Homo sapiens
tagggctctaattct

SEQ ID NO: 403659 - DNA, 15 bp, Homo sapiens
ctagggctctaattc

SEQ ID NO: 403660 - DNA, 15 bp, Homo sapiens
gctagggctctaatt

SEQ ID NO: 403661 - DNA, 15 bp, Homo sapiens
tgctagggctctaat

SEQ ID NO: 403662 - DNA, 15 bp, Homo sapiens
ctgctagggctctaa

SEQ ID NO: 403663 - DNA, 15 bp, Homo sapiens
tctgctagggctcta

SEQ ID NO: 403664 - DNA, 15 bp, Homo sapiens
atctgctagggctct

SEQ ID NO: 403665 - DNA, 15 bp, Homo sapiens
gatctgctagggctc

SEQ ID NO: 403666 - DNA, 15 bp, Homo sapiens
agatctgctagggct

SEQ ID NO: 403667 - DNA, 15 bp, Homo sapiens
cagatctgctagggc

SEQ ID NO: 403668 - DNA, 15 bp, Homo sapiens
ccagatctgctaggg

SEQ ID NO: 403669 - DNA, 15 bp, Homo sapiens
gccagatctgctagg

SEQ ID NO: 403670 - DNA, 15 bp, Homo sapiens
ggccagatctgctag

SEQ ID NO: 403671 - DNA, 15 bp, Homo sapiens
tggccagatctgcta

SEQ ID NO: 403672 - DNA, 15 bp, Homo sapiens
atggccagatctgct

SEQ ID NO: 403673 - DNA, 15 bp, Homo sapiens
catggccagatctgc

SEQ ID NO: 403674 - DNA, 15 bp, Homo sapiens
tcatggccagatctg

SEQ ID NO: 403675 - DNA, 15 bp, Homo sapiens
atcatggccagatct

SEQ ID NO: 403676 - DNA, 15 bp, Homo sapiens
tatcatggccagatc

SEQ ID NO: 403677 - DNA, 15 bp, Homo sapiens
gtatcatggccagat

SEQ ID NO: 403678 - DNA, 15 bp, Homo sapiens
ggtatcatggccaga

SEQ ID NO: 403679 - DNA, 15 bp, Homo sapiens
aggtatcatggccag

SEQ ID NO: 403680 - DNA, 15 bp, Homo sapiens
gaggtatcatggcca

SEQ ID NO: 403681 - DNA, 15 bp, Homo sapiens
agaggtatcatggcc

SEQ ID NO: 403682 - DNA, 15 bp, Homo sapiens
gagaggtatcatggc

SEQ ID NO: 403683 - DNA, 15 bp, Homo sapiens
agagaggtatcatgg

SEQ ID NO: 403684 - DNA, 15 bp, Homo sapiens
cagagaggtatcatg

SEQ ID NO: 403685 - DNA, 15 bp, Homo sapiens
tcagagaggtatcat

SEQ ID NO: 403686 - DNA, 15 bp, Homo sapiens
atcagagaggtatca

SEQ ID NO: 403687 - DNA, 15 bp, Homo sapiens
catcagagaggtatc

SEQ ID NO: 403688 - DNA, 15 bp, Homo sapiens
acatcagagaggtat

SEQ ID NO: 403689 - DNA, 15 bp, Homo sapiens
aacatcagagaggta

SEQ ID NO: 403690 - DNA, 15 bp, Homo sapiens
taacatcagagaggt

SEQ ID NO: 403691 - DNA, 15 bp, Homo sapiens
gtaacatcagagagg

SEQ ID NO: 403692 - DNA, 15 bp, Homo sapiens
ggtaacatcagagag

SEQ ID NO: 403693 - DNA, 15 bp, Homo sapiens
aggtaacatcagaga

SEQ ID NO: 403694 - DNA, 15 bp, Homo sapiens
aaggtaacatcagag

SEQ ID NO: 403695 - DNA, 15 bp, Homo sapiens
gaaggtaacatcaga

SEQ ID NO: 403696 - DNA, 15 bp, Homo sapiens
ggaaggtaacatcag

SEQ ID NO: 403697 - DNA, 15 bp, Homo sapiens
tggaaggtaacatca

SEQ ID NO: 403698 - DNA, 15 bp, Homo sapiens
atggaaggtaacatc

SEQ ID NO: 403699 - DNA, 15 bp, Homo sapiens
tatggaaggtaacat

SEQ ID NO: 403700 - DNA, 15 bp, Homo sapiens
ctatggaaggtaaca

SEQ ID NO: 403701 - DNA, 15 bp, Homo sapiens
actatggaaggtaac

SEQ ID NO: 403702 - DNA, 15 bp, Homo sapiens
tactatggaaggtaa

SEQ ID NO: 403703 - DNA, 15 bp, Homo sapiens
atactatggaaggta

SEQ ID NO: 403704 - DNA, 15 bp, Homo sapiens
aatactatggaaggt

SEQ ID NO: 403705 - DNA, 15 bp, Homo sapiens
gaatactatggaagg

SEQ ID NO: 403706 - DNA, 15 bp, Homo sapiens
ggaatactatggaag

SEQ ID NO: 403707 - DNA, 15 bp, Homo sapiens
gggaatactatggaa

SEQ ID NO: 403708 - DNA, 15 bp, Homo sapiens
agggaatactatgga

SEQ ID NO: 403709 - DNA, 15 bp, Homo sapiens
gagggaatactatgg

SEQ ID NO: 403710 - DNA, 15 bp, Homo sapiens
agagggaatactatg

SEQ ID NO: 403711 - DNA, 15 bp, Homo sapiens
aagagggaatactat

SEQ ID NO: 403712 - DNA, 15 bp, Homo sapiens
gaagagggaatacta

SEQ ID NO: 403713 - DNA, 15 bp, Homo sapiens
agaagagggaatact

SEQ ID NO: 403714 - DNA, 15 bp, Homo sapiens
aagaagagggaatac

SEQ ID NO: 403715 - DNA, 15 bp, Homo sapiens
taagaagagggaata

SEQ ID NO: 403716 - DNA, 15 bp, Homo sapiens
ttaagaagagggaat

SEQ ID NO: 403717 - DNA, 15 bp, Homo sapiens
attaagaagagggaa

SEQ ID NO: 403718 - DNA, 15 bp, Homo sapiens
gattaagaagaggga

SEQ ID NO: 403719 - DNA, 15 bp, Homo sapiens
tgattaagaagaggg

SEQ ID NO: 403720 - DNA, 15 bp, Homo sapiens
ctgattaagaagagg

SEQ ID NO: 403721 - DNA, 15 bp, Homo sapiens
gctgattaagaagag

SEQ ID NO: 403722 - DNA, 15 bp, Homo sapiens
agctgattaagaaga

SEQ ID NO: 403723 - DNA, 15 bp, Homo sapiens
gagctgattaagaag

SEQ ID NO: 403724 - DNA, 15 bp, Homo sapiens
agagctgattaagaa

SEQ ID NO: 403725 - DNA, 15 bp, Homo sapiens
tagagctgattaaga

SEQ ID NO: 403726 - DNA, 15 bp, Homo sapiens
ctagagctgattaag

SEQ ID NO: 403727 - DNA, 15 bp, Homo sapiens
actagagctgattaa

SEQ ID NO: 403728 - DNA, 15 bp, Homo sapiens
gactagagctgatta

SEQ ID NO: 403729 - DNA, 15 bp, Homo sapiens
tgactagagctgatt

SEQ ID NO: 403730 - DNA, 15 bp, Homo sapiens
gtgactagagctgat

SEQ ID NO: 403731 - DNA, 15 bp, Homo sapiens
tgtgactagagctga

SEQ ID NO: 403732 - DNA, 15 bp, Homo sapiens
atgtgactagagctg

SEQ ID NO: 403733 - DNA, 15 bp, Homo sapiens
tatgtgactagagct

SEQ ID NO: 403734 - DNA, 15 bp, Homo sapiens
ctatgtgactagagc

SEQ ID NO: 403735 - DNA, 15 bp, Homo sapiens
cctatgtgactagag

SEQ ID NO: 403736 - DNA, 15 bp, Homo sapiens
gcctatgtgactaga

SEQ ID NO: 403737 - DNA, 15 bp, Homo sapiens
ggcctatgtgactag

SEQ ID NO: 403738 - DNA, 15 bp, Homo sapiens
aggcctatgtgacta

SEQ ID NO: 403739 - DNA, 15 bp, Homo sapiens
caggcctatgtgact

SEQ ID NO: 403740 - DNA, 15 bp, Homo sapiens
gcaggcctatgtgac

SEQ ID NO: 403741 - DNA, 15 bp, Homo sapiens
ggcaggcctatgtga

SEQ ID NO: 403742 - DNA, 15 bp, Homo sapiens
aggcaggcctatgtg

SEQ ID NO: 403743 - DNA, 15 bp, Homo sapiens
caggcaggcctatgt

SEQ ID NO: 403744 - DNA, 15 bp, Homo sapiens
gcaggcaggcctatg

SEQ ID NO: 403745 - DNA, 15 bp, Homo sapiens
agcaggcaggcctat

SEQ ID NO: 403746 - DNA, 15 bp, Homo sapiens
gagcaggcaggccta

SEQ ID NO: 403747 - DNA, 15 bp, Homo sapiens
agagcaggcaggcct

SEQ ID NO: 403748 - DNA, 15 bp, Homo sapiens
gagagcaggcaggcc

SEQ ID NO: 403749 - DNA, 15 bp, Homo sapiens
ggagagcaggcaggc

SEQ ID NO: 403750 - DNA, 15 bp, Homo sapiens
aggagagcaggcagg

SEQ ID NO: 403751 - DNA, 15 bp, Homo sapiens
aaggagagcaggcag

SEQ ID NO: 403752 - DNA, 15 bp, Homo sapiens
caaggagagcaggca

SEQ ID NO: 403753 - DNA, 15 bp, Homo sapiens
ccaaggagagcaggc

SEQ ID NO: 403754 - DNA, 15 bp, Homo sapiens
tccaaggagagcagg

SEQ ID NO: 403755 - DNA, 15 bp, Homo sapiens
atccaaggagagcag

SEQ ID NO: 403756 - DNA, 15 bp, Homo sapiens
tatccaaggagagca

SEQ ID NO: 403757 - DNA, 15 bp, Homo sapiens
gtatccaaggagagc

SEQ ID NO: 403758 - DNA, 15 bp, Homo sapiens
tgtatccaaggagag

SEQ ID NO: 403759 - DNA, 15 bp, Homo sapiens
gtgtatccaaggaga

SEQ ID NO: 403760 - DNA, 15 bp, Homo sapiens
ggtgtatccaaggag

SEQ ID NO: 403761 - DNA, 15 bp, Homo sapiens
tggtgtatccaagga

SEQ ID NO: 403762 - DNA, 15 bp, Homo sapiens
ctggtgtatccaagg

SEQ ID NO: 403763 - DNA, 15 bp, Homo sapiens
cctggtgtatccaag

SEQ ID NO: 403764 - DNA, 15 bp, Homo sapiens
acctggtgtatccaa

SEQ ID NO: 403765 - DNA, 15 bp, Homo sapiens
tacctggtgtatcca

SEQ ID NO: 403766 - DNA, 15 bp, Homo sapiens
gtacctggtgtatcc

SEQ ID NO: 403767 - DNA, 15 bp, Homo sapiens
tgtacctggtgtatc

SEQ ID NO: 403768 - DNA, 15 bp, Homo sapiens
gtgtacctggtgtat

SEQ ID NO: 403769 - DNA, 15 bp, Homo sapiens
agtgtacctggtgta

SEQ ID NO: 403770 - DNA, 15 bp, Homo sapiens
cagtgtacctggtgt

SEQ ID NO: 403771 - DNA, 15 bp, Homo sapiens
gcagtgtacctggtg

SEQ ID NO: 403772 - DNA, 15 bp, Homo sapiens
agcagtgtacctggt

SEQ ID NO: 403773 - DNA, 15 bp, Homo sapiens
cagcagtgtacctgg

SEQ ID NO: 403774 - DNA, 15 bp, Homo sapiens
gcagcagtgtacctg

SEQ ID NO: 403775 - DNA, 15 bp, Homo sapiens
ggcagcagtgtacct

SEQ ID NO: 403776 - DNA, 15 bp, Homo sapiens
aggcagcagtgtacc

SEQ ID NO: 403777 - DNA, 15 bp, Homo sapiens
aaggcagcagtgtac

SEQ ID NO: 403778 - DNA, 15 bp, Homo sapiens
taaggcagcagtgta

SEQ ID NO: 403779 - DNA, 15 bp, Homo sapiens
ctaaggcagcagtgt

SEQ ID NO: 403780 - DNA, 15 bp, Homo sapiens
cctaaggcagcagtg

SEQ ID NO: 403781 - DNA, 15 bp, Homo sapiens
ccctaaggcagcagt

SEQ ID NO: 403782 - DNA, 15 bp, Homo sapiens
tccctaaggcagcag

SEQ ID NO: 403783 - DNA, 15 bp, Homo sapiens
gtccctaaggcagca

SEQ ID NO: 403784 - DNA, 15 bp, Homo sapiens
agtccctaaggcagc

SEQ ID NO: 403785 - DNA, 15 bp, Homo sapiens
aagtccctaaggcag

SEQ ID NO: 403786 - DNA, 15 bp, Homo sapiens
aaagtccctaaggca

SEQ ID NO: 403787 - DNA, 15 bp, Homo sapiens
caaagtccctaaggc

SEQ ID NO: 403788 - DNA, 15 bp, Homo sapiens
gcaaagtccctaagg

SEQ ID NO: 403789 - DNA, 15 bp, Homo sapiens
cgcaaagtccctaag

SEQ ID NO: 403790 - DNA, 15 bp, Homo sapiens
gcgcaaagtccctaa

SEQ ID NO: 403791 - DNA, 15 bp, Homo sapiens
agcgcaaagtcccta

SEQ ID NO: 403792 - DNA, 15 bp, Homo sapiens
aagcgcaaagtccct

SEQ ID NO: 403793 - DNA, 15 bp, Homo sapiens
gaagcgcaaagtccc

SEQ ID NO: 403794 - DNA, 15 bp, Homo sapiens
tgaagcgcaaagtcc

SEQ ID NO: 403795 - DNA, 15 bp, Homo sapiens
atgaagcgcaaagtc

SEQ ID NO: 403796 - DNA, 15 bp, Homo sapiens
catgaagcgcaaagt

SEQ ID NO: 403797 - DNA, 15 bp, Homo sapiens
ccatgaagcgcaaag

SEQ ID NO: 403798 - DNA, 15 bp, Homo sapiens
accatgaagcgcaaa

SEQ ID NO: 403799 - DNA, 15 bp, Homo sapiens
gaccatgaagcgcaa

SEQ ID NO: 403800 - DNA, 15 bp, Homo sapiens
ggaccatgaagcgca

SEQ ID NO: 403801 - DNA, 15 bp, Homo sapiens
gggaccatgaagcgc

SEQ ID NO: 403802 - DNA, 15 bp, Homo sapiens
agggaccatgaagcg

SEQ ID NO: 403803 - DNA, 15 bp, Homo sapiens
gagggaccatgaagc

SEQ ID NO: 403804 - DNA, 15 bp, Homo sapiens
agagggaccatgaag

SEQ ID NO: 403805 - DNA, 15 bp, Homo sapiens
aagagggaccatgaa

SEQ ID NO: 403806 - DNA, 15 bp, Homo sapiens
aaagagggaccatga

SEQ ID NO: 403807 - DNA, 15 bp, Homo sapiens
gaaagagggaccatg

SEQ ID NO: 403808 - DNA, 15 bp, Homo sapiens
ggaaagagggaccat

SEQ ID NO: 403809 - DNA, 15 bp, Homo sapiens
cggaaagagggacca

SEQ ID NO: 403810 - DNA, 15 bp, Homo sapiens
ccggaaagagggacc

SEQ ID NO: 403811 - DNA, 15 bp, Homo sapiens
tccggaaagagggac

SEQ ID NO: 403812 - DNA, 15 bp, Homo sapiens
ttccggaaagaggga

SEQ ID NO: 403813 - DNA, 15 bp, Homo sapiens
attccggaaagaggg

SEQ ID NO: 403814 - DNA, 15 bp, Homo sapiens
cattccggaaagagg

SEQ ID NO: 403815 - DNA, 15 bp, Homo sapiens
acattccggaaagag

SEQ ID NO: 403816 - DNA, 15 bp, Homo sapiens
aacattccggaaaga

SEQ ID NO: 403817 - DNA, 15 bp, Homo sapiens
gaacattccggaaag

SEQ ID NO: 403818 - DNA, 15 bp, Homo sapiens
agaacattccggaaa

SEQ ID NO: 403819 - DNA, 15 bp, Homo sapiens
aagaacattccggaa

SEQ ID NO: 403820 - DNA, 15 bp, Homo sapiens
aaagaacattccgga

SEQ ID NO: 403821 - DNA, 15 bp, Homo sapiens
gaaagaacattccgg

SEQ ID NO: 403822 - DNA, 15 bp, Homo sapiens
agaaagaacattccg

SEQ ID NO: 403823 - DNA, 15 bp, Homo sapiens
gagaaagaacattcc

SEQ ID NO: 403824 - DNA, 15 bp, Homo sapiens
ggagaaagaacattc

SEQ ID NO: 403825 - DNA, 15 bp, Homo sapiens
tggagaaagaacatt

SEQ ID NO: 403826 - DNA, 15 bp, Homo sapiens
atggagaaagaacat

SEQ ID NO: 403827 - DNA, 15 bp, Homo sapiens
tatggagaaagaaca

SEQ ID NO: 403828 - DNA, 15 bp, Homo sapiens
atatggagaaagaac

SEQ ID NO: 403829 - DNA, 15 bp, Homo sapiens
gatatggagaaagaa

SEQ ID NO: 403830 - DNA, 15 bp, Homo sapiens
agatatggagaaaga

SEQ ID NO: 403831 - DNA, 15 bp, Homo sapiens
cagatatggagaaag

SEQ ID NO: 403832 - DNA, 15 bp, Homo sapiens
gcagatatggagaaa

SEQ ID NO: 403833 - DNA, 15 bp, Homo sapiens
tgcagatatggagaa

SEQ ID NO: 403834 - DNA, 15 bp, Homo sapiens
atgcagatatggaga

SEQ ID NO: 403835 - DNA, 15 bp, Homo sapiens
catgcagatatggag

SEQ ID NO: 403836 - DNA, 15 bp, Homo sapiens
ccatgcagatatgga

SEQ ID NO: 403837 - DNA, 15 bp, Homo sapiens
gccatgcagatatgg

SEQ ID NO: 403838 - DNA, 15 bp, Homo sapiens
agccatgcagatatg

SEQ ID NO: 403839 - DNA, 15 bp, Homo sapiens
gagccatgcagatat

SEQ ID NO: 403840 - DNA, 15 bp, Homo sapiens
tgagccatgcagata

SEQ ID NO: 403841 - DNA, 15 bp, Homo sapiens
gtgagccatgcagat

SEQ ID NO: 403842 - DNA, 15 bp, Homo sapiens
agtgagccatgcaga

SEQ ID NO: 403843 - DNA, 15 bp, Homo sapiens
gagtgagccatgcag

SEQ ID NO: 403844 - DNA, 15 bp, Homo sapiens
ggagtgagccatgca

SEQ ID NO: 403845 - DNA, 15 bp, Homo sapiens
gggagtgagccatgc

SEQ ID NO: 403846 - DNA, 15 bp, Homo sapiens
agggagtgagccatg

SEQ ID NO: 403847 - DNA, 15 bp, Homo sapiens
aagggagtgagccat

SEQ ID NO: 403848 - DNA, 15 bp, Homo sapiens
taagggagtgagcca

SEQ ID NO: 403849 - DNA, 15 bp, Homo sapiens
ataagggagtgagcc

SEQ ID NO: 403850 - DNA, 15 bp, Homo sapiens
aataagggagtgagc

SEQ ID NO: 403851 - DNA, 15 bp, Homo sapiens
aaataagggagtgag

SEQ ID NO: 403852 - DNA, 15 bp, Homo sapiens
gaaataagggagtga

SEQ ID NO: 403853 - DNA, 15 bp, Homo sapiens
agaaataagggagtg

SEQ ID NO: 403854 - DNA, 15 bp, Homo sapiens
aagaaataagggagt

SEQ ID NO: 403855 - DNA, 15 bp, Homo sapiens
aaagaaataagggag

SEQ ID NO: 403856 - DNA, 15 bp, Homo sapiens
taaagaaataaggga

SEQ ID NO: 403857 - DNA, 15 bp, Homo sapiens
ttaaagaaataaggg

SEQ ID NO: 403858 - DNA, 15 bp, Homo sapiens
cttaaagaaataagg

SEQ ID NO: 403859 - DNA, 15 bp, Homo sapiens
acttaaagaaataag

SEQ ID NO: 403860 - DNA, 15 bp, Homo sapiens
gacttaaagaaataa

SEQ ID NO: 403861 - DNA, 15 bp, Homo sapiens
agacttaaagaaata

SEQ ID NO: 403862 - DNA, 15 bp, Homo sapiens
aagacttaaagaaat

SEQ ID NO: 403863 - DNA, 15 bp, Homo sapiens
aaagacttaaagaaa

SEQ ID NO: 403864 - DNA, 15 bp, Homo sapiens
caaagacttaaagaa

SEQ ID NO: 403865 - DNA, 15 bp, Homo sapiens
tcaaagacttaaaga

SEQ ID NO: 403866 - DNA, 15 bp, Homo sapiens
ctcaaagacttaaag

SEQ ID NO: 403867 - DNA, 15 bp, Homo sapiens
gctcaaagacttaaa

SEQ ID NO: 403868 - DNA, 15 bp, Homo sapiens
tgctcaaagacttaa

SEQ ID NO: 403869 - DNA, 15 bp, Homo sapiens
ttgctcaaagactta

SEQ ID NO: 403870 - DNA, 15 bp, Homo sapiens
tttgctcaaagactt

SEQ ID NO: 403871 - DNA, 15 bp, Homo sapiens
gtttgctcaaagact

SEQ ID NO: 403872 - DNA, 15 bp, Homo sapiens
cgtttgctcaaagac

SEQ ID NO: 403873 - DNA, 15 bp, Homo sapiens
ccgtttgctcaaaga

SEQ ID NO: 403874 - DNA, 15 bp, Homo sapiens
accgtttgctcaaag

SEQ ID NO: 403875 - DNA, 15 bp, Homo sapiens
taccgtttgctcaaa

SEQ ID NO: 403876 - DNA, 15 bp, Homo sapiens
ataccgtttgctcaa

SEQ ID NO: 403877 - DNA, 15 bp, Homo sapiens
gataccgtttgctca

SEQ ID NO: 403878 - DNA, 15 bp, Homo sapiens
agataccgtttgctc

SEQ ID NO: 403879 - DNA, 15 bp, Homo sapiens
aagataccgtttgct

SEQ ID NO: 403880 - DNA, 15 bp, Homo sapiens
gaagataccgtttgc

SEQ ID NO: 403881 - DNA, 15 bp, Homo sapiens
agaagataccgtttg

SEQ ID NO: 403882 - DNA, 15 bp, Homo sapiens
gagaagataccgttt

SEQ ID NO: 403883 - DNA, 15 bp, Homo sapiens
tgagaagataccgtt

SEQ ID NO: 403884 - DNA, 15 bp, Homo sapiens
ttgagaagataccgt

SEQ ID NO: 403885 - DNA, 15 bp, Homo sapiens
attgagaagataccg

SEQ ID NO: 403886 - DNA, 15 bp, Homo sapiens
cattgagaagatacc

SEQ ID NO: 403887 - DNA, 15 bp, Homo sapiens
tcattgagaagatac

SEQ ID NO: 403888 - DNA, 15 bp, Homo sapiens
ctcattgagaagata

SEQ ID NO: 403889 - DNA, 15 bp, Homo sapiens
cctcattgagaagat

SEQ ID NO: 403890 - DNA, 15 bp, Homo sapiens
gcctcattgagaaga

SEQ ID NO: 403891 - DNA, 15 bp, Homo sapiens
ggcctcattgagaag

SEQ ID NO: 403892 - DNA, 15 bp, Homo sapiens
aggcctcattgagaa

SEQ ID NO: 403893 - DNA, 15 bp, Homo sapiens
caggcctcattgaga

SEQ ID NO: 403894 - DNA, 15 bp, Homo sapiens
gcaggcctcattgag

SEQ ID NO: 403895 - DNA, 15 bp, Homo sapiens
ggcaggcctcattga

SEQ ID NO: 403896 - DNA, 15 bp, Homo sapiens
gggcaggcctcattg

SEQ ID NO: 403897 - DNA, 15 bp, Homo sapiens
agggcaggcctcatt

SEQ ID NO: 403898 - DNA, 15 bp, Homo sapiens
cagggcaggcctcat

SEQ ID NO: 403899 - DNA, 15 bp, Homo sapiens
tcagggcaggcctca

SEQ ID NO: 403900 - DNA, 15 bp, Homo sapiens
gtcagggcaggcctc

SEQ ID NO: 403901 - DNA, 15 bp, Homo sapiens
ggtcagggcaggcct

SEQ ID NO: 403902 - DNA, 15 bp, Homo sapiens
tggtcagggcaggcc

SEQ ID NO: 403903 - DNA, 15 bp, Homo sapiens
atggtcagggcaggc

SEQ ID NO: 403904 - DNA, 15 bp, Homo sapiens
gatggtcagggcagg

SEQ ID NO: 403905 - DNA, 15 bp, Homo sapiens
ggatggtcagggcag

SEQ ID NO: 403906 - DNA, 15 bp, Homo sapiens
aggatggtcagggca

SEQ ID NO: 403907 - DNA, 15 bp, Homo sapiens
taggatggtcagggc

SEQ ID NO: 403908 - DNA, 15 bp, Homo sapiens
gtaggatggtcaggg

SEQ ID NO: 403909 - DNA, 15 bp, Homo sapiens
agtaggatggtcagg

SEQ ID NO: 403910 - DNA, 15 bp, Homo sapiens
aagtaggatggtcag

SEQ ID NO: 403911 - DNA, 15 bp, Homo sapiens
caagtaggatggtca

SEQ ID NO: 403912 - DNA, 15 bp, Homo sapiens
gcaagtaggatggtc

SEQ ID NO: 403913 - DNA, 15 bp, Homo sapiens
agcaagtaggatggt

SEQ ID NO: 403914 - DNA, 15 bp, Homo sapiens
tagcaagtaggatgg

SEQ ID NO: 403915 - DNA, 15 bp, Homo sapiens
ctagcaagtaggatg

SEQ ID NO: 403916 - DNA, 15 bp, Homo sapiens
gctagcaagtaggat

SEQ ID NO: 403917 - DNA, 15 bp, Homo sapiens
tgctagcaagtagga

SEQ ID NO: 403918 - DNA, 15 bp, Homo sapiens
gtgctagcaagtagg

SEQ ID NO: 403919 - DNA, 15 bp, Homo sapiens
agtgctagcaagtag

SEQ ID NO: 403920 - DNA, 15 bp, Homo sapiens
gagtgctagcaagta

SEQ ID NO: 403921 - DNA, 15 bp, Homo sapiens
tgagtgctagcaagt

SEQ ID NO: 403922 - DNA, 15 bp, Homo sapiens
atgagtgctagcaag

SEQ ID NO: 403923 - DNA, 15 bp, Homo sapiens
gatgagtgctagcaa

SEQ ID NO: 403924 - DNA, 15 bp, Homo sapiens
agatgagtgctagca

SEQ ID NO: 403925 - DNA, 15 bp, Homo sapiens
gagatgagtgctagc

SEQ ID NO: 403926 - DNA, 15 bp, Homo sapiens
agagatgagtgctag

SEQ ID NO: 403927 - DNA, 15 bp, Homo sapiens
gagagatgagtgcta

SEQ ID NO: 403928 - DNA, 15 bp, Homo sapiens
cgagagatgagtgct

SEQ ID NO: 403929 - DNA, 15 bp, Homo sapiens
acgagagatgagtgc

SEQ ID NO: 403930 - DNA, 15 bp, Homo sapiens
tacgagagatgagtg

SEQ ID NO: 403931 - DNA, 15 bp, Homo sapiens
gtacgagagatgagt

SEQ ID NO: 403932 - DNA, 15 bp, Homo sapiens
ggtacgagagatgag

SEQ ID NO: 403933 - DNA, 15 bp, Homo sapiens
gggtacgagagatga

SEQ ID NO: 403934 - DNA, 15 bp, Homo sapiens
agggtacgagagatg

SEQ ID NO: 403935 - DNA, 15 bp, Homo sapiens
tagggtacgagagat

SEQ ID NO: 403936 - DNA, 15 bp, Homo sapiens
atagggtacgagaga

SEQ ID NO: 403937 - DNA, 15 bp, Homo sapiens
aatagggtacgagag

SEQ ID NO: 403938 - DNA, 15 bp, Homo sapiens
aaatagggtacgaga

SEQ ID NO: 403939 - DNA, 15 bp, Homo sapiens
taaatagggtacgag

SEQ ID NO: 403940 - DNA, 15 bp, Homo sapiens
ttaaatagggtacga

SEQ ID NO: 403941 - DNA, 15 bp, Homo sapiens
attaaatagggtacg

SEQ ID NO: 403942 - DNA, 15 bp, Homo sapiens
aattaaatagggtac

SEQ ID NO: 403943 - DNA, 15 bp, Homo sapiens
aaattaaatagggta

SEQ ID NO: 403944 - DNA, 15 bp, Homo sapiens
aaaattaaatagggt

SEQ ID NO: 403945 - DNA, 15 bp, Homo sapiens
gaaaattaaataggg

SEQ ID NO: 403946 - DNA, 15 bp, Homo sapiens
ggaaaattaaatagg

SEQ ID NO: 403947 - DNA, 15 bp, Homo sapiens
aggaaaattaaatag

SEQ ID NO: 403948 - DNA, 15 bp, Homo sapiens
gaggaaaattaaata

SEQ ID NO: 403949 - DNA, 15 bp, Homo sapiens
ggaggaaaattaaat

SEQ ID NO: 403950 - DNA, 15 bp, Homo sapiens
tggaggaaaattaaa

SEQ ID NO: 403951 - DNA, 15 bp, Homo sapiens
atggaggaaaattaa

SEQ ID NO: 403952 - DNA, 15 bp, Homo sapiens
aatggaggaaaatta

SEQ ID NO: 403953 - DNA, 15 bp, Homo sapiens
caatggaggaaaatt

SEQ ID NO: 403954 - DNA, 15 bp, Homo sapiens
gcaatggaggaaaat

SEQ ID NO: 403955 - DNA, 15 bp, Homo sapiens
tgcaatggaggaaaa

SEQ ID NO: 403956 - DNA, 15 bp, Homo sapiens
gtgcaatggaggaaa

SEQ ID NO: 403957 - DNA, 15 bp, Homo sapiens
agtgcaatggaggaa

SEQ ID NO: 403958 - DNA, 15 bp, Homo sapiens
aagtgcaatggagga

SEQ ID NO: 403959 - DNA, 15 bp, Homo sapiens
taagtgcaatggagg

SEQ ID NO: 403960 - DNA, 15 bp, Homo sapiens
ataagtgcaatggag

SEQ ID NO: 403961 - DNA, 15 bp, Homo sapiens
gataagtgcaatgga

SEQ ID NO: 403962 - DNA, 15 bp, Homo sapiens
tgataagtgcaatgg

SEQ ID NO: 403963 - DNA, 15 bp, Homo sapiens
gtgataagtgcaatg

SEQ ID NO: 403964 - DNA, 15 bp, Homo sapiens
agtgataagtgcaat

SEQ ID NO: 403965 - DNA, 15 bp, Homo sapiens
aagtgataagtgcaa

SEQ ID NO: 403966 - DNA, 15 bp, Homo sapiens
aaagtgataagtgca

SEQ ID NO: 403967 - DNA, 15 bp, Homo sapiens
gaaagtgataagtgc

SEQ ID NO: 403968 - DNA, 15 bp, Homo sapiens
agaaagtgataagtg

SEQ ID NO: 403969 - DNA, 15 bp, Homo sapiens
tagaaagtgataagt

SEQ ID NO: 403970 - DNA, 15 bp, Homo sapiens
ttagaaagtgataag

SEQ ID NO: 403971 - DNA, 15 bp, Homo sapiens
attagaaagtgataa

SEQ ID NO: 403972 - DNA, 15 bp, Homo sapiens
tattagaaagtgata

SEQ ID NO: 403973 - DNA, 15 bp, Homo sapiens
ctattagaaagtgat

SEQ ID NO: 403974 - DNA, 15 bp, Homo sapiens
tctattagaaagtga

SEQ ID NO: 403975 - DNA, 15 bp, Homo sapiens
atctattagaaagtg

SEQ ID NO: 403976 - DNA, 15 bp, Homo sapiens
catctattagaaagt

SEQ ID NO: 403977 - DNA, 15 bp, Homo sapiens
tcatctattagaaag

SEQ ID NO: 403978 - DNA, 15 bp, Homo sapiens
atcatctattagaaa

SEQ ID NO: 403979 - DNA, 15 bp, Homo sapiens
tatcatctattagaa

SEQ ID NO: 403980 - DNA, 15 bp, Homo sapiens
gtatcatctattaga

SEQ ID NO: 403981 - DNA, 15 bp, Homo sapiens
tgtatcatctattag

SEQ ID NO: 403982 - DNA, 15 bp, Homo sapiens
ttgtatcatctatta

SEQ ID NO: 403983 - DNA, 15 bp, Homo sapiens
attgtatcatctatt

SEQ ID NO: 403984 - DNA, 15 bp, Homo sapiens
aattgtatcatctat

SEQ ID NO: 403985 - DNA, 15 bp, Homo sapiens
aaattgtatcatcta

SEQ ID NO: 403986 - DNA, 15 bp, Homo sapiens
taaattgtatcatct

SEQ ID NO: 403987 - DNA, 15 bp, Homo sapiens
gtaaattgtatcatc

SEQ ID NO: 403988 - DNA, 15 bp, Homo sapiens
ggtaaattgtatcat

SEQ ID NO: 403989 - DNA, 15 bp, Homo sapiens
aggtaaattgtatca

SEQ ID NO: 403990 - DNA, 15 bp, Homo sapiens
taggtaaattgtatc

SEQ ID NO: 403991 - DNA, 15 bp, Homo sapiens
ataggtaaattgtat

SEQ ID NO: 403992 - DNA, 15 bp, Homo sapiens
aataggtaaattgta

SEQ ID NO: 403993 - DNA, 15 bp, Homo sapiens
taataggtaaattgt

SEQ ID NO: 403994 - DNA, 15 bp, Homo sapiens
ttaataggtaaattg

SEQ ID NO: 403995 - DNA, 15 bp, Homo sapiens
attaataggtaaatt

SEQ ID NO: 403996 - DNA, 15 bp, Homo sapiens
cattaataggtaaat

SEQ ID NO: 403997 - DNA, 15 bp, Homo sapiens
gcattaataggtaaa

SEQ ID NO: 403998 - DNA, 15 bp, Homo sapiens
tgcattaataggtaa

SEQ ID NO: 403999 - DNA, 15 bp, Homo sapiens
atgcattaataggta

SEQ ID NO: 404000 - DNA, 15 bp, Homo sapiens
tatgcattaataggt

SEQ ID NO: 404001 - DNA, 15 bp, Homo sapiens
atatgcattaatagg

SEQ ID NO: 404002 - DNA, 15 bp, Homo sapiens
aatatgcattaatag

SEQ ID NO: 404003 - DNA, 15 bp, Homo sapiens
taatatgcattaata

SEQ ID NO: 404004 - DNA, 15 bp, Homo sapiens
ataatatgcattaat

SEQ ID NO: 404005 - DNA, 15 bp, Homo sapiens
gataatatgcattaa

SEQ ID NO: 404006 - DNA, 15 bp, Homo sapiens
agataatatgcatta

SEQ ID NO: 404007 - DNA, 15 bp, Homo sapiens
tagataatatgcatt

SEQ ID NO: 404008 - DNA, 15 bp, Homo sapiens
atagataatatgcat

SEQ ID NO: 404009 - DNA, 15 bp, Homo sapiens
gatagataatatgca

SEQ ID NO: 404010 - DNA, 15 bp, Homo sapiens
agatagataatatgc

SEQ ID NO: 404011 - DNA, 15 bp, Homo sapiens
aagatagataatatg

SEQ ID NO: 404012 - DNA, 15 bp, Homo sapiens
gaagatagataatat

SEQ ID NO: 404013 - DNA, 15 bp, Homo sapiens
ggaagatagataata

SEQ ID NO: 404014 - DNA, 15 bp, Homo sapiens
gggaagatagataat

SEQ ID NO: 404015 - DNA, 15 bp, Homo sapiens
ggggaagatagataa

SEQ ID NO: 404016 - DNA, 15 bp, Homo sapiens
tggggaagatagata

SEQ ID NO: 404017 - DNA, 15 bp, Homo sapiens
ctggggaagatagat

SEQ ID NO: 404018 - DNA, 15 bp, Homo sapiens
gctggggaagataga

SEQ ID NO: 404019 - DNA, 15 bp, Homo sapiens
agctggggaagatag

SEQ ID NO: 404020 - DNA, 15 bp, Homo sapiens
aagctggggaagata

SEQ ID NO: 404021 - DNA, 15 bp, Homo sapiens
gaagctggggaagat

SEQ ID NO: 404022 - DNA, 15 bp, Homo sapiens
agaagctggggaaga

SEQ ID NO: 404023 - DNA, 15 bp, Homo sapiens
tagaagctggggaag

SEQ ID NO: 404024 - DNA, 15 bp, Homo sapiens
ctagaagctggggaa

SEQ ID NO: 404025 - DNA, 15 bp, Homo sapiens
gctagaagctgggga

SEQ ID NO: 404026 - DNA, 15 bp, Homo sapiens
ggctagaagctgggg

SEQ ID NO: 404027 - DNA, 15 bp, Homo sapiens
aggctagaagctggg

SEQ ID NO: 404028 - DNA, 15 bp, Homo sapiens
gaggctagaagctgg

SEQ ID NO: 404029 - DNA, 15 bp, Homo sapiens
ggaggctagaagctg

SEQ ID NO: 404030 - DNA, 15 bp, Homo sapiens
gggaggctagaagct

SEQ ID NO: 404031 - DNA, 15 bp, Homo sapiens
tgggaggctagaagc

SEQ ID NO: 404032 - DNA, 15 bp, Homo sapiens
atgggaggctagaag

SEQ ID NO: 404033 - DNA, 15 bp, Homo sapiens
aatgggaggctagaa

SEQ ID NO: 404034 - DNA, 15 bp, Homo sapiens
gaatgggaggctaga

SEQ ID NO: 404035 - DNA, 15 bp, Homo sapiens
ggaatgggaggctag

SEQ ID NO: 404036 - DNA, 15 bp, Homo sapiens
gggaatgggaggcta

SEQ ID NO: 404037 - DNA, 15 bp, Homo sapiens
tgggaatgggaggct

SEQ ID NO: 404038 - DNA, 15 bp, Homo sapiens
ttgggaatgggaggc

SEQ ID NO: 404039 - DNA, 15 bp, Homo sapiens
tttgggaatgggagg

SEQ ID NO: 404040 - DNA, 15 bp, Homo sapiens
atttgggaatgggag

SEQ ID NO: 404041 - DNA, 15 bp, Homo sapiens
catttgggaatggga

SEQ ID NO: 404042 - DNA, 15 bp, Homo sapiens
tcatttgggaatggg

SEQ ID NO: 404043 - DNA, 15 bp, Homo sapiens
ttcatttgggaatgg

SEQ ID NO: 404044 - DNA, 15 bp, Homo sapiens
tttcatttgggaatg

SEQ ID NO: 404045 - DNA, 15 bp, Homo sapiens
ctttcatttgggaat

SEQ ID NO: 404046 - DNA, 15 bp, Homo sapiens
gctttcatttgggaa

SEQ ID NO: 404047 - DNA, 15 bp, Homo sapiens
agctttcatttggga

SEQ ID NO: 404048 - DNA, 15 bp, Homo sapiens
gagctttcatttggg

SEQ ID NO: 404049 - DNA, 15 bp, Homo sapiens
ggagctttcatttgg

SEQ ID NO: 404050 - DNA, 15 bp, Homo sapiens
tggagctttcatttg

SEQ ID NO: 404051 - DNA, 15 bp, Homo sapiens
gtggagctttcattt

SEQ ID NO: 404052 - DNA, 15 bp, Homo sapiens
tgtggagctttcatt

SEQ ID NO: 404053 - DNA, 15 bp, Homo sapiens
ttgtggagctttcat

SEQ ID NO: 404054 - DNA, 15 bp, Homo sapiens
cttgtggagctttca

SEQ ID NO: 404055 - DNA, 15 bp, Homo sapiens
ccttgtggagctttc

SEQ ID NO: 404056 - DNA, 15 bp, Homo sapiens
tccttgtggagcttt

SEQ ID NO: 404057 - DNA, 15 bp, Homo sapiens
gtccttgtggagctt

SEQ ID NO: 404058 - DNA, 15 bp, Homo sapiens
tgtccttgtggagct

SEQ ID NO: 404059 - DNA, 15 bp, Homo sapiens
ttgtccttgtggagc

SEQ ID NO: 404060 - DNA, 15 bp, Homo sapiens
cttgtccttgtggag

SEQ ID NO: 404061 - DNA, 15 bp, Homo sapiens
ccttgtccttgtgga

SEQ ID NO: 404062 - DNA, 15 bp, Homo sapiens
cccttgtccttgtgg

SEQ ID NO: 404063 - DNA, 15 bp, Homo sapiens
acccttgtccttgtg

SEQ ID NO: 404064 - DNA, 15 bp, Homo sapiens
aacccttgtccttgt

SEQ ID NO: 404065 - DNA, 15 bp, Homo sapiens
aaacccttgtccttg

SEQ ID NO: 404066 - DNA, 15 bp, Homo sapiens
aaaacccttgtcctt

SEQ ID NO: 404067 - DNA, 15 bp, Homo sapiens
aaaaacccttgtcct

SEQ ID NO: 404068 - DNA, 15 bp, Homo sapiens
caaaaacccttgtcc

SEQ ID NO: 404069 - DNA, 15 bp, Homo sapiens
acaaaaacccttgtc

SEQ ID NO: 404070 - DNA, 15 bp, Homo sapiens
gacaaaaacccttgt

SEQ ID NO: 404071 - DNA, 15 bp, Homo sapiens
agacaaaaacccttg

SEQ ID NO: 404072 - DNA, 15 bp, Homo sapiens
cagacaaaaaccctt

SEQ ID NO: 404073 - DNA, 15 bp, Homo sapiens
gcagacaaaaaccct

SEQ ID NO: 404074 - DNA, 15 bp, Homo sapiens
agcagacaaaaaccc

SEQ ID NO: 404075 - DNA, 15 bp, Homo sapiens
aagcagacaaaaacc

SEQ ID NO: 404076 - DNA, 15 bp, Homo sapiens
caagcagacaaaaac

SEQ ID NO: 404077 - DNA, 15 bp, Homo sapiens
ccaagcagacaaaaa

SEQ ID NO: 404078 - DNA, 15 bp, Homo sapiens
gccaagcagacaaaa

SEQ ID NO: 404079 - DNA, 15 bp, Homo sapiens
ggccaagcagacaaa

SEQ ID NO: 404080 - DNA, 15 bp, Homo sapiens
gggccaagcagacaa

SEQ ID NO: 404081 - DNA, 15 bp, Homo sapiens
tgggccaagcagaca

SEQ ID NO: 404082 - DNA, 15 bp, Homo sapiens
atgggccaagcagac

SEQ ID NO: 404083 - DNA, 15 bp, Homo sapiens
aatgggccaagcaga

SEQ ID NO: 404084 - DNA, 15 bp, Homo sapiens
caatgggccaagcag

SEQ ID NO: 404085 - DNA, 15 bp, Homo sapiens
acaatgggccaagca

SEQ ID NO: 404086 - DNA, 15 bp, Homo sapiens
tacaatgggccaagc

SEQ ID NO: 404087 - DNA, 15 bp, Homo sapiens
atacaatgggccaag

SEQ ID NO: 404088 - DNA, 15 bp, Homo sapiens
catacaatgggccaa

SEQ ID NO: 404089 - DNA, 15 bp, Homo sapiens
gcatacaatgggcca

SEQ ID NO: 404090 - DNA, 15 bp, Homo sapiens
ggcatacaatgggcc

SEQ ID NO: 404091 - DNA, 15 bp, Homo sapiens
aggcatacaatgggc

SEQ ID NO: 404092 - DNA, 15 bp, Homo sapiens
caggcatacaatggg

SEQ ID NO: 404093 - DNA, 15 bp, Homo sapiens
ccaggcatacaatgg

SEQ ID NO: 404094 - DNA, 15 bp, Homo sapiens
gccaggcatacaatg

SEQ ID NO: 404095 - DNA, 15 bp, Homo sapiens
tgccaggcatacaat

SEQ ID NO: 404096 - DNA, 15 bp, Homo sapiens
atgccaggcatacaa

SEQ ID NO: 404097 - DNA, 15 bp, Homo sapiens
aatgccaggcataca

SEQ ID NO: 404098 - DNA, 15 bp, Homo sapiens
taatgccaggcatac

SEQ ID NO: 404099 - DNA, 15 bp, Homo sapiens
ctaatgccaggcata

SEQ ID NO: 404100 - DNA, 15 bp, Homo sapiens
cctaatgccaggcat

SEQ ID NO: 404101 - DNA, 15 bp, Homo sapiens
acctaatgccaggca

SEQ ID NO: 404102 - DNA, 15 bp, Homo sapiens
gacctaatgccaggc

SEQ ID NO: 404103 - DNA, 15 bp, Homo sapiens
tgacctaatgccagg

SEQ ID NO: 404104 - DNA, 15 bp, Homo sapiens
ttgacctaatgccag

SEQ ID NO: 404105 - DNA, 15 bp, Homo sapiens
cttgacctaatgcca

SEQ ID NO: 404106 - DNA, 15 bp, Homo sapiens
tcttgacctaatgcc

SEQ ID NO: 404107 - DNA, 15 bp, Homo sapiens
gtcttgacctaatgc

SEQ ID NO: 404108 - DNA, 15 bp, Homo sapiens
ggtcttgacctaatg

SEQ ID NO: 404109 - DNA, 15 bp, Homo sapiens
aggtcttgacctaat

SEQ ID NO: 404110 - DNA, 15 bp, Homo sapiens
caggtcttgacctaa

SEQ ID NO: 404111 - DNA, 15 bp, Homo sapiens
ccaggtcttgaccta

SEQ ID NO: 404112 - DNA, 15 bp, Homo sapiens
gccaggtcttgacct

SEQ ID NO: 404113 - DNA, 15 bp, Homo sapiens
tgccaggtcttgacc

SEQ ID NO: 404114 - DNA, 15 bp, Homo sapiens
gtgccaggtcttgac

SEQ ID NO: 404115 - DNA, 15 bp, Homo sapiens
cgtgccaggtcttga

SEQ ID NO: 404116 - DNA, 15 bp, Homo sapiens
acgtgccaggtcttg

SEQ ID NO: 404117 - DNA, 15 bp, Homo sapiens
aacgtgccaggtctt

SEQ ID NO: 404118 - DNA, 15 bp, Homo sapiens
caacgtgccaggtct

SEQ ID NO: 404119 - DNA, 15 bp, Homo sapiens
acaacgtgccaggtc

SEQ ID NO: 404120 - DNA, 15 bp, Homo sapiens
aacaacgtgccaggt

SEQ ID NO: 404121 - DNA, 15 bp, Homo sapiens
caacaacgtgccagg

SEQ ID NO: 404122 - DNA, 15 bp, Homo sapiens
gcaacaacgtgccag

SEQ ID NO: 404123 - DNA, 15 bp, Homo sapiens
agcaacaacgtgcca

SEQ ID NO: 404124 - DNA, 15 bp, Homo sapiens
cagcaacaacgtgcc

SEQ ID NO: 404125 - DNA, 15 bp, Homo sapiens
tcagcaacaacgtgc

SEQ ID NO: 404126 - DNA, 15 bp, Homo sapiens
gtcagcaacaacgtg

SEQ ID NO: 404127 - DNA, 15 bp, Homo sapiens
ggtcagcaacaacgt

SEQ ID NO: 404128 - DNA, 15 bp, Homo sapiens
tggtcagcaacaacg

SEQ ID NO: 404129 - DNA, 15 bp, Homo sapiens
ttggtcagcaacaac

SEQ ID NO: 404130 - DNA, 15 bp, Homo sapiens
attggtcagcaacaa

SEQ ID NO: 404131 - DNA, 15 bp, Homo sapiens
tattggtcagcaaca

SEQ ID NO: 404132 - DNA, 15 bp, Homo sapiens
ttattggtcagcaac

SEQ ID NO: 404133 - DNA, 15 bp, Homo sapiens
tttattggtcagcaa

SEQ ID NO: 404134 - DNA, 15 bp, Homo sapiens
ttttattggtcagca

SEQ ID NO: 404135 - DNA, 15 bp, Homo sapiens
gttttattggtcagc

SEQ ID NO: 404136 - DNA, 15 bp, Homo sapiens
ggttttattggtcag

SEQ ID NO: 404137 - DNA, 15 bp, Homo sapiens
aggttttattggtca

SEQ ID NO: 404138 - DNA, 15 bp, Homo sapiens
caggttttattggtc

SEQ ID NO: 404139 - DNA, 15 bp, Homo sapiens
acaggttttattggt

SEQ ID NO: 404140 - DNA, 15 bp, Homo sapiens
cacaggttttattgg

SEQ ID NO: 404141 - DNA, 15 bp, Homo sapiens
ccacaggttttattg

SEQ ID NO: 404142 - DNA, 15 bp, Homo sapiens
tccacaggttttatt

SEQ ID NO: 404143 - DNA, 15 bp, Homo sapiens
ttccacaggttttat

SEQ ID NO: 404144 - DNA, 15 bp, Homo sapiens
attccacaggtttta

SEQ ID NO: 404145 - DNA, 15 bp, Homo sapiens
cattccacaggtttt

SEQ ID NO: 404146 - DNA, 15 bp, Homo sapiens
tcattccacaggttt

SEQ ID NO: 404147 - DNA, 15 bp, Homo sapiens
ttcattccacaggtt

SEQ ID NO: 404148 - DNA, 15 bp, Homo sapiens
attcattccacaggt

SEQ ID NO: 404149 - DNA, 15 bp, Homo sapiens
tattcattccacagg

SEQ ID NO: 404150 - DNA, 15 bp, Homo sapiens
ttattcattccacag

SEQ ID NO: 404151 - DNA, 15 bp, Homo sapiens
tttattcattccaca

SEQ ID NO: 404152 - DNA, 15 bp, Homo sapiens
atttattcattccac

SEQ ID NO: 404153 - DNA, 15 bp, Homo sapiens
aatttattcattcca

SEQ ID NO: 404154 - DNA, 15 bp, Homo sapiens
aaatttattcattcc

SEQ ID NO: 404155 - DNA, 15 bp, Homo sapiens
taaatttattcattc

SEQ ID NO: 404156 - DNA, 15 bp, Homo sapiens
gtaaatttattcatt

SEQ ID NO: 404157 - DNA, 15 bp, Homo sapiens
agtaaatttattcat

SEQ ID NO: 404158 - DNA, 15 bp, Homo sapiens
gagtaaatttattca

SEQ ID NO: 404159 - DNA, 15 bp, Homo sapiens
tgagtaaatttattc

SEQ ID NO: 404160 - DNA, 15 bp, Homo sapiens
gtgagtaaatttatt

SEQ ID NO: 404161 - DNA, 15 bp, Homo sapiens
tgtgagtaaatttat

SEQ ID NO: 404162 - DNA, 15 bp, Homo sapiens
ttgtgagtaaattta

SEQ ID NO: 404163 - DNA, 15 bp, Homo sapiens
tttgtgagtaaattt

SEQ ID NO: 404164 - DNA, 15 bp, Homo sapiens
ctttgtgagtaaatt

SEQ ID NO: 404165 - DNA, 15 bp, Homo sapiens
actttgtgagtaaat

SEQ ID NO: 404166 - DNA, 15 bp, Homo sapiens
tactttgtgagtaaa

SEQ ID NO: 404167 - DNA, 15 bp, Homo sapiens
atactttgtgagtaa

SEQ ID NO: 404168 - DNA, 15 bp, Homo sapiens
aatactttgtgagta

SEQ ID NO: 404169 - DNA, 15 bp, Homo sapiens
taatactttgtgagt

SEQ ID NO: 404170 - DNA, 15 bp, Homo sapiens
ttaatactttgtgag

SEQ ID NO: 404171 - DNA, 15 bp, Homo sapiens
cttaatactttgtga

SEQ ID NO: 404172 - DNA, 15 bp, Homo sapiens
gcttaatactttgtg

SEQ ID NO: 404173 - DNA, 15 bp, Homo sapiens
agcttaatactttgt

SEQ ID NO: 404174 - DNA, 15 bp, Homo sapiens
gagcttaatactttg

SEQ ID NO: 404175 - DNA, 15 bp, Homo sapiens
agagcttaatacttt

SEQ ID NO: 404176 - DNA, 15 bp, Homo sapiens
cagagcttaatactt

SEQ ID NO: 404177 - DNA, 15 bp, Homo sapiens
acagagcttaatact

SEQ ID NO: 404178 - DNA, 15 bp, Homo sapiens
cacagagcttaatac

SEQ ID NO: 404179 - DNA, 15 bp, Homo sapiens
gcacagagcttaata

SEQ ID NO: 404180 - DNA, 15 bp, Homo sapiens
agcacagagcttaat

SEQ ID NO: 404181 - DNA, 15 bp, Homo sapiens
cagcacagagcttaa

SEQ ID NO: 404182 - DNA, 15 bp, Homo sapiens
tcagcacagagctta

SEQ ID NO: 404183 - DNA, 15 bp, Homo sapiens
ctcagcacagagctt

SEQ ID NO: 404184 - DNA, 15 bp, Homo sapiens
tctcagcacagagct

SEQ ID NO: 404185 - DNA, 15 bp, Homo sapiens
gtctcagcacagagc

SEQ ID NO: 404186 - DNA, 15 bp, Homo sapiens
agtctcagcacagag

SEQ ID NO: 404187 - DNA, 15 bp, Homo sapiens
cagtctcagcacaga

SEQ ID NO: 404188 - DNA, 15 bp, Homo sapiens
tcagtctcagcacag

SEQ ID NO: 404189 - DNA, 15 bp, Homo sapiens
ctcagtctcagcaca

SEQ ID NO: 404190 - DNA, 15 bp, Homo sapiens
cctcagtctcagcac

SEQ ID NO: 404191 - DNA, 15 bp, Homo sapiens
ccctcagtctcagca

SEQ ID NO: 404192 - DNA, 15 bp, Homo sapiens
tccctcagtctcagc

SEQ ID NO: 404193 - DNA, 15 bp, Homo sapiens
atccctcagtctcag

SEQ ID NO: 404194 - DNA, 15 bp, Homo sapiens
tatccctcagtctca

SEQ ID NO: 404195 - DNA, 15 bp, Homo sapiens
gtatccctcagtctc

SEQ ID NO: 404196 - DNA, 15 bp, Homo sapiens
tgtatccctcagtct

SEQ ID NO: 404197 - DNA, 15 bp, Homo sapiens
ctgtatccctcagtc

SEQ ID NO: 404198 - DNA, 15 bp, Homo sapiens
cctgtatccctcagt

SEQ ID NO: 404199 - DNA, 15 bp, Homo sapiens
ccctgtatccctcag

SEQ ID NO: 404200 - DNA, 15 bp, Homo sapiens
tccctgtatccctca

SEQ ID NO: 404201 - DNA, 15 bp, Homo sapiens
gtccctgtatccctc

SEQ ID NO: 404202 - DNA, 15 bp, Homo sapiens
ggtccctgtatccct

SEQ ID NO: 404203 - DNA, 15 bp, Homo sapiens
tggtccctgtatccc

SEQ ID NO: 404204 - DNA, 15 bp, Homo sapiens
atggtccctgtatcc

SEQ ID NO: 404205 - DNA, 15 bp, Homo sapiens
gatggtccctgtatc

SEQ ID NO: 404206 - DNA, 15 bp, Homo sapiens
agatggtccctgtat

SEQ ID NO: 404207 - DNA, 15 bp, Homo sapiens
gagatggtccctgta

SEQ ID NO: 404208 - DNA, 15 bp, Homo sapiens
agagatggtccctgt

SEQ ID NO: 404209 - DNA, 15 bp, Homo sapiens
cagagatggtccctg

SEQ ID NO: 404210 - DNA, 15 bp, Homo sapiens
ccagagatggtccct

SEQ ID NO: 404211 - DNA, 15 bp, Homo sapiens
gccagagatggtccc

SEQ ID NO: 404212 - DNA, 15 bp, Homo sapiens
agccagagatggtcc

SEQ ID NO: 404213 - DNA, 15 bp, Homo sapiens
aagccagagatggtc

SEQ ID NO: 404214 - DNA, 15 bp, Homo sapiens
aaagccagagatggt

SEQ ID NO: 404215 - DNA, 15 bp, Homo sapiens
gaaagccagagatgg

SEQ ID NO: 404216 - DNA, 15 bp, Homo sapiens
tgaaagccagagatg

SEQ ID NO: 404217 - DNA, 15 bp, Homo sapiens
ttgaaagccagagat

SEQ ID NO: 404218 - DNA, 15 bp, Homo sapiens
cttgaaagccagaga

SEQ ID NO: 404219 - DNA, 15 bp, Homo sapiens
acttgaaagccagag

SEQ ID NO: 404220 - DNA, 15 bp, Homo sapiens
aacttgaaagccaga

SEQ ID NO: 404221 - DNA, 15 bp, Homo sapiens
aaacttgaaagccag

SEQ ID NO: 404222 - DNA, 15 bp, Homo sapiens
aaaacttgaaagcca

SEQ ID NO: 404223 - DNA, 15 bp, Homo sapiens
aaaaacttgaaagcc

SEQ ID NO: 404224 - DNA, 15 bp, Homo sapiens
taaaaacttgaaagc

SEQ ID NO: 404225 - DNA, 15 bp, Homo sapiens
ttaaaaacttgaaag

SEQ ID NO: 404226 - DNA, 15 bp, Homo sapiens
attaaaaacttgaaa

SEQ ID NO: 404227 - DNA, 15 bp, Homo sapiens
cattaaaaacttgaa

SEQ ID NO: 404228 - DNA, 15 bp, Homo sapiens
ccattaaaaacttga

SEQ ID NO: 404229 - DNA, 15 bp, Homo sapiens
tccattaaaaacttg

SEQ ID NO: 404230 - DNA, 15 bp, Homo sapiens
atccattaaaaactt

SEQ ID NO: 404231 - DNA, 15 bp, Homo sapiens
aatccattaaaaact

SEQ ID NO: 404232 - DNA, 15 bp, Homo sapiens
gaatccattaaaaac

SEQ ID NO: 404233 - DNA, 15 bp, Homo sapiens
agaatccattaaaaa

SEQ ID NO: 404234 - DNA, 15 bp, Homo sapiens
cagaatccattaaaa

SEQ ID NO: 404235 - DNA, 15 bp, Homo sapiens
gcagaatccattaaa

SEQ ID NO: 404236 - DNA, 15 bp, Homo sapiens
agcagaatccattaa

SEQ ID NO: 404237 - DNA, 15 bp, Homo sapiens
aagcagaatccatta

SEQ ID NO: 404238 - DNA, 15 bp, Homo sapiens
aaagcagaatccatt

SEQ ID NO: 404239 - DNA, 15 bp, Homo sapiens
aaaagcagaatccat

SEQ ID NO: 404240 - DNA, 15 bp, Homo sapiens
aaaaagcagaatcca

SEQ ID NO: 404241 - DNA, 15 bp, Homo sapiens
taaaaagcagaatcc

SEQ ID NO: 404242 - DNA, 15 bp, Homo sapiens
ctaaaaagcagaatc

SEQ ID NO: 404243 - DNA, 15 bp, Homo sapiens
cctaaaaagcagaat

SEQ ID NO: 404244 - DNA, 15 bp, Homo sapiens
tcctaaaaagcagaa

SEQ ID NO: 404245 - DNA, 15 bp, Homo sapiens
atcctaaaaagcaga

SEQ ID NO: 404246 - DNA, 15 bp, Homo sapiens
aatcctaaaaagcag

SEQ ID NO: 404247 - DNA, 15 bp, Homo sapiens
aaatcctaaaaagca

SEQ ID NO: 404248 - DNA, 15 bp, Homo sapiens
gaaatcctaaaaagc

SEQ ID NO: 404249 - DNA, 15 bp, Homo sapiens
agaaatcctaaaaag

SEQ ID NO: 404250 - DNA, 15 bp, Homo sapiens
tagaaatcctaaaaa

SEQ ID NO: 404251 - DNA, 15 bp, Homo sapiens
gtagaaatcctaaaa

SEQ ID NO: 404252 - DNA, 15 bp, Homo sapiens
ggtagaaatcctaaa

SEQ ID NO: 404253 - DNA, 15 bp, Homo sapiens
aggtagaaatcctaa

SEQ ID NO: 404254 - DNA, 15 bp, Homo sapiens
aaggtagaaatccta

SEQ ID NO: 404255 - DNA, 15 bp, Homo sapiens
aaaggtagaaatcct

SEQ ID NO: 404256 - DNA, 15 bp, Homo sapiens
gaaaggtagaaatcc

SEQ ID NO: 404257 - DNA, 15 bp, Homo sapiens
tgaaaggtagaaatc

SEQ ID NO: 404258 - DNA, 15 bp, Homo sapiens
ctgaaaggtagaaat

SEQ ID NO: 404259 - DNA, 15 bp, Homo sapiens
actgaaaggtagaaa

SEQ ID NO: 404260 - DNA, 15 bp, Homo sapiens
aactgaaaggtagaa

SEQ ID NO: 404261 - DNA, 15 bp, Homo sapiens
taactgaaaggtaga

SEQ ID NO: 404262 - DNA, 15 bp, Homo sapiens
ttaactgaaaggtag

SEQ ID NO: 404263 - DNA, 15 bp, Homo sapiens
tttaactgaaaggta

SEQ ID NO: 404264 - DNA, 15 bp, Homo sapiens
ctttaactgaaaggt

SEQ ID NO: 404265 - DNA, 15 bp, Homo sapiens
cctttaactgaaagg

SEQ ID NO: 404266 - DNA, 15 bp, Homo sapiens
ccctttaactgaaag

SEQ ID NO: 404267 - DNA, 15 bp, Homo sapiens
tccctttaactgaaa

SEQ ID NO: 404268 - DNA, 15 bp, Homo sapiens
ttccctttaactgaa

SEQ ID NO: 404269 - DNA, 15 bp, Homo sapiens
tttccctttaactga

SEQ ID NO: 404270 - DNA, 15 bp, Homo sapiens
atttccctttaactg

SEQ ID NO: 404271 - DNA, 15 bp, Homo sapiens
gatttccctttaact

SEQ ID NO: 404272 - DNA, 15 bp, Homo sapiens
tgatttccctttaac

SEQ ID NO: 404273 - DNA, 15 bp, Homo sapiens
ttgatttccctttaa

SEQ ID NO: 404274 - DNA, 15 bp, Homo sapiens
cttgatttcccttta

SEQ ID NO: 404275 - DNA, 15 bp, Homo sapiens
acttgatttcccttt

SEQ ID NO: 404276 - DNA, 15 bp, Homo sapiens
aacttgatttccctt

SEQ ID NO: 404277 - DNA, 15 bp, Homo sapiens
gaacttgatttccct

SEQ ID NO: 404278 - DNA, 15 bp, Homo sapiens
agaacttgatttccc

SEQ ID NO: 404279 - DNA, 15 bp, Homo sapiens
tagaacttgatttcc

SEQ ID NO: 404280 - DNA, 15 bp, Homo sapiens
ctagaacttgatttc

SEQ ID NO: 404281 - DNA, 15 bp, Homo sapiens
tctagaacttgattt

SEQ ID NO: 404282 - DNA, 15 bp, Homo sapiens
ctctagaacttgatt

SEQ ID NO: 404283 - DNA, 15 bp, Homo sapiens
cctctagaacttgat

SEQ ID NO: 404284 - DNA, 15 bp, Homo sapiens
ccctctagaacttga

SEQ ID NO: 404285 - DNA, 15 bp, Homo sapiens
cccctctagaacttg

SEQ ID NO: 404286 - DNA, 15 bp, Homo sapiens
acccctctagaactt

SEQ ID NO: 404287 - DNA, 15 bp, Homo sapiens
aacccctctagaact

SEQ ID NO: 404288 - DNA, 15 bp, Homo sapiens
gaacccctctagaac

SEQ ID NO: 404289 - DNA, 15 bp, Homo sapiens
agaacccctctagaa

SEQ ID NO: 404290 - DNA, 15 bp, Homo sapiens
tagaacccctctaga

SEQ ID NO: 404291 - DNA, 15 bp, Homo sapiens
ttagaacccctctag

SEQ ID NO: 404292 - DNA, 15 bp, Homo sapiens
gttagaacccctcta

SEQ ID NO: 404293 - DNA, 15 bp, Homo sapiens
ggttagaacccctct

SEQ ID NO: 404294 - DNA, 15 bp, Homo sapiens
gggttagaacccctc

SEQ ID NO: 404295 - DNA, 15 bp, Homo sapiens
ggggttagaacccct

SEQ ID NO: 404296 - DNA, 15 bp, Homo sapiens
gggggttagaacccc

SEQ ID NO: 404297 - DNA, 15 bp, Homo sapiens
tgggggttagaaccc

SEQ ID NO: 404298 - DNA, 15 bp, Homo sapiens
ctgggggttagaacc

SEQ ID NO: 404299 - DNA, 15 bp, Homo sapiens
actgggggttagaac

SEQ ID NO: 404300 - DNA, 15 bp, Homo sapiens
cactgggggttagaa

SEQ ID NO: 404301 - DNA, 15 bp, Homo sapiens
ccactgggggttaga

SEQ ID NO: 404302 - DNA, 15 bp, Homo sapiens
accactgggggttag

SEQ ID NO: 404303 - DNA, 15 bp, Homo sapiens
caccactgggggtta

SEQ ID NO: 404304 - DNA, 15 bp, Homo sapiens
tcaccactgggggtt

SEQ ID NO: 404305 - DNA, 15 bp, Homo sapiens
ttcaccactgggggt

SEQ ID NO: 404306 - DNA, 15 bp, Homo sapiens
tttcaccactggggg

SEQ ID NO: 404307 - DNA, 15 bp, Homo sapiens
ctttcaccactgggg

SEQ ID NO: 404308 - DNA, 15 bp, Homo sapiens
gctttcaccactggg

SEQ ID NO: 404309 - DNA, 15 bp, Homo sapiens
tgctttcaccactgg

SEQ ID NO: 404310 - DNA, 15 bp, Homo sapiens
ttgctttcaccactg

SEQ ID NO: 404311 - DNA, 15 bp, Homo sapiens
gttgctttcaccact

SEQ ID NO: 404312 - DNA, 15 bp, Homo sapiens
ggttgctttcaccac

SEQ ID NO: 404313 - DNA, 15 bp, Homo sapiens
tggttgctttcacca

SEQ ID NO: 404314 - DNA, 15 bp, Homo sapiens
ctggttgctttcacc

SEQ ID NO: 404315 - DNA, 15 bp, Homo sapiens
gctggttgctttcac

SEQ ID NO: 404316 - DNA, 15 bp, Homo sapiens
tgctggttgctttca

SEQ ID NO: 404317 - DNA, 15 bp, Homo sapiens
atgctggttgctttc

SEQ ID NO: 404318 - DNA, 15 bp, Homo sapiens
catgctggttgcttt

SEQ ID NO: 404319 - DNA, 15 bp, Homo sapiens
acatgctggttgctt

SEQ ID NO: 404320 - DNA, 15 bp, Homo sapiens
cacatgctggttgct

SEQ ID NO: 404321 - DNA, 15 bp, Homo sapiens
acacatgctggttgc

SEQ ID NO: 404322 - DNA, 15 bp, Homo sapiens
aacacatgctggttg

SEQ ID NO: 404323 - DNA, 15 bp, Homo sapiens
caacacatgctggtt

SEQ ID NO: 404324 - DNA, 15 bp, Homo sapiens
tcaacacatgctggt

SEQ ID NO: 404325 - DNA, 15 bp, Homo sapiens
ctcaacacatgctgg

SEQ ID NO: 404326 - DNA, 15 bp, Homo sapiens
gctcaacacatgctg

SEQ ID NO: 404327 - DNA, 15 bp, Homo sapiens
tgctcaacacatgct

SEQ ID NO: 404328 - DNA, 15 bp, Homo sapiens
ctgctcaacacatgc

SEQ ID NO: 404329 - DNA, 15 bp, Homo sapiens
actgctcaacacatg

SEQ ID NO: 404330 - DNA, 15 bp, Homo sapiens
aactgctcaacacat

SEQ ID NO: 404331 - DNA, 15 bp, Homo sapiens
caactgctcaacaca

SEQ ID NO: 404332 - DNA, 15 bp, Homo sapiens
acaactgctcaacac

SEQ ID NO: 404333 - DNA, 15 bp, Homo sapiens
aacaactgctcaaca

SEQ ID NO: 404334 - DNA, 15 bp, Homo sapiens
aaacaactgctcaac

SEQ ID NO: 404335 - DNA, 15 bp, Homo sapiens
aaaacaactgctcaa

SEQ ID NO: 404336 - DNA, 15 bp, Homo sapiens
taaaacaactgctca

SEQ ID NO: 404337 - DNA, 15 bp, Homo sapiens
ataaaacaactgctc

SEQ ID NO: 404338 - DNA, 15 bp, Homo sapiens
tataaaacaactgct

SEQ ID NO: 404339 - DNA, 15 bp, Homo sapiens
gtataaaacaactgc

SEQ ID NO: 404340 - DNA, 15 bp, Homo sapiens
ggtataaaacaactg

SEQ ID NO: 404341 - DNA, 15 bp, Homo sapiens
tggtataaaacaact

SEQ ID NO: 404342 - DNA, 15 bp, Homo sapiens
ctggtataaaacaac

SEQ ID NO: 404343 - DNA, 15 bp, Homo sapiens
tctggtataaaacaa

SEQ ID NO: 404344 - DNA, 15 bp, Homo sapiens
atctggtataaaaca

SEQ ID NO: 404345 - DNA, 15 bp, Homo sapiens
catctggtataaaac

SEQ ID NO: 404346 - DNA, 15 bp, Homo sapiens
acatctggtataaaa

SEQ ID NO: 404347 - DNA, 15 bp, Homo sapiens
aacatctggtataaa

SEQ ID NO: 404348 - DNA, 15 bp, Homo sapiens
aaacatctggtataa

SEQ ID NO: 404349 - DNA, 15 bp, Homo sapiens
gaaacatctggtata

SEQ ID NO: 404350 - DNA, 15 bp, Homo sapiens
tgaaacatctggtat

SEQ ID NO: 404351 - DNA, 15 bp, Homo sapiens
atgaaacatctggta

SEQ ID NO: 404352 - DNA, 15 bp, Homo sapiens
tatgaaacatctggt

SEQ ID NO: 404353 - DNA, 15 bp, Homo sapiens
atatgaaacatctgg

SEQ ID NO: 404354 - DNA, 15 bp, Homo sapiens
tatatgaaacatctg

SEQ ID NO: 404355 - DNA, 15 bp, Homo sapiens
ctatatgaaacatct

SEQ ID NO: 404356 - DNA, 15 bp, Homo sapiens
tctatatgaaacatc

SEQ ID NO: 404357 - DNA, 15 bp, Homo sapiens
ctctatatgaaacat

SEQ ID NO: 404358 - DNA, 15 bp, Homo sapiens
cctctatatgaaaca

SEQ ID NO: 404359 - DNA, 15 bp, Homo sapiens
ccctctatatgaaac

SEQ ID NO: 404360 - DNA, 15 bp, Homo sapiens
tccctctatatgaaa

SEQ ID NO: 404361 - DNA, 15 bp, Homo sapiens
atccctctatatgaa

SEQ ID NO: 404362 - DNA, 15 bp, Homo sapiens
tatccctctatatga

SEQ ID NO: 404363 - DNA, 15 bp, Homo sapiens
ttatccctctatatg

SEQ ID NO: 404364 - DNA, 15 bp, Homo sapiens
attatccctctatat

SEQ ID NO: 404365 - DNA, 15 bp, Homo sapiens
cattatccctctata

SEQ ID NO: 404366 - DNA, 15 bp, Homo sapiens
acattatccctctat

SEQ ID NO: 404367 - DNA, 15 bp, Homo sapiens
tacattatccctcta

SEQ ID NO: 404368 - DNA, 15 bp, Homo sapiens
atacattatccctct

SEQ ID NO: 404369 - DNA, 15 bp, Homo sapiens
aatacattatccctc

SEQ ID NO: 404370 - DNA, 15 bp, Homo sapiens
gaatacattatccct

SEQ ID NO: 404371 - DNA, 15 bp, Homo sapiens
tgaatacattatccc

SEQ ID NO: 404372 - DNA, 15 bp, Homo sapiens
atgaatacattatcc

SEQ ID NO: 404373 - DNA, 15 bp, Homo sapiens
aatgaatacattatc

SEQ ID NO: 404374 - DNA, 15 bp, Homo sapiens
gaatgaatacattat

SEQ ID NO: 404375 - DNA, 15 bp, Homo sapiens
tgaatgaatacatta

SEQ ID NO: 404376 - DNA, 15 bp, Homo sapiens
gtgaatgaatacatt

SEQ ID NO: 404377 - DNA, 15 bp, Homo sapiens
tgtgaatgaatacat

SEQ ID NO: 404378 - DNA, 15 bp, Homo sapiens
gtgtgaatgaataca

SEQ ID NO: 404379 - DNA, 15 bp, Homo sapiens
ggtgtgaatgaatac

SEQ ID NO: 404380 - DNA, 15 bp, Homo sapiens
aggtgtgaatgaata

SEQ ID NO: 404381 - DNA, 15 bp, Homo sapiens
aaggtgtgaatgaat

SEQ ID NO: 404382 - DNA, 15 bp, Homo sapiens
taaggtgtgaatgaa

SEQ ID NO: 404383 - DNA, 15 bp, Homo sapiens
gtaaggtgtgaatga

SEQ ID NO: 404384 - DNA, 15 bp, Homo sapiens
tgtaaggtgtgaatg

SEQ ID NO: 404385 - DNA, 15 bp, Homo sapiens
ttgtaaggtgtgaat

SEQ ID NO: 404386 - DNA, 15 bp, Homo sapiens
gttgtaaggtgtgaa

SEQ ID NO: 404387 - DNA, 15 bp, Homo sapiens
tgttgtaaggtgtga

SEQ ID NO: 404388 - DNA, 15 bp, Homo sapiens
ttgttgtaaggtgtg

SEQ ID NO: 404389 - DNA, 15 bp, Homo sapiens
attgttgtaaggtgt

SEQ ID NO: 404390 - DNA, 15 bp, Homo sapiens
gattgttgtaaggtg

SEQ ID NO: 404391 - DNA, 15 bp, Homo sapiens
ggattgttgtaaggt

SEQ ID NO: 404392 - DNA, 15 bp, Homo sapiens
gggattgttgtaagg

SEQ ID NO: 404393 - DNA, 15 bp, Homo sapiens
tgggattgttgtaag

SEQ ID NO: 404394 - DNA, 15 bp, Homo sapiens
atgggattgttgtaa

SEQ ID NO: 404395 - DNA, 15 bp, Homo sapiens
catgggattgttgta

SEQ ID NO: 404396 - DNA, 15 bp, Homo sapiens
tcatgggattgttgt

SEQ ID NO: 404397 - DNA, 15 bp, Homo sapiens
ctcatgggattgttg

SEQ ID NO: 404398 - DNA, 15 bp, Homo sapiens
cctcatgggattgtt

SEQ ID NO: 404399 - DNA, 15 bp, Homo sapiens
tcctcatgggattgt

SEQ ID NO: 404400 - DNA, 15 bp, Homo sapiens
ttcctcatgggattg

SEQ ID NO: 404401 - DNA, 15 bp, Homo sapiens
attcctcatgggatt

SEQ ID NO: 404402 - DNA, 15 bp, Homo sapiens
tattcctcatgggat

SEQ ID NO: 404403 - DNA, 15 bp, Homo sapiens
atattcctcatggga

SEQ ID NO: 404404 - DNA, 15 bp, Homo sapiens
catattcctcatggg

SEQ ID NO: 404405 - DNA, 15 bp, Homo sapiens
acatattcctcatgg

SEQ ID NO: 404406 - DNA, 15 bp, Homo sapiens
aacatattcctcatg

SEQ ID NO: 404407 - DNA, 15 bp, Homo sapiens
taacatattcctcat

SEQ ID NO: 404408 - DNA, 15 bp, Homo sapiens
ataacatattcctca

SEQ ID NO: 404409 - DNA, 15 bp, Homo sapiens
gataacatattcctc

SEQ ID NO: 404410 - DNA, 15 bp, Homo sapiens
agataacatattcct

SEQ ID NO: 404411 - DNA, 15 bp, Homo sapiens
tagataacatattcc

SEQ ID NO: 404412 - DNA, 15 bp, Homo sapiens
atagataacatattc

SEQ ID NO: 404413 - DNA, 15 bp, Homo sapiens
catagataacatatt

SEQ ID NO: 404414 - DNA, 15 bp, Homo sapiens
acatagataacatat

SEQ ID NO: 404415 - DNA, 15 bp, Homo sapiens
aacatagataacata

SEQ ID NO: 404416 - DNA, 15 bp, Homo sapiens
aaacatagataacat

SEQ ID NO: 404417 - DNA, 15 bp, Homo sapiens
aaaacatagataaca

SEQ ID NO: 404418 - DNA, 15 bp, Homo sapiens
caaaacatagataac

SEQ ID NO: 404419 - DNA, 15 bp, Homo sapiens
gcaaaacatagataa

SEQ ID NO: 404420 - DNA, 15 bp, Homo sapiens
tgcaaaacatagata

SEQ ID NO: 404421 - DNA, 15 bp, Homo sapiens
ctgcaaaacatagat

SEQ ID NO: 404422 - DNA, 15 bp, Homo sapiens
tctgcaaaacataga

SEQ ID NO: 404423 - DNA, 15 bp, Homo sapiens
atctgcaaaacatag

SEQ ID NO: 404424 - DNA, 15 bp, Homo sapiens
catctgcaaaacata

SEQ ID NO: 404425 - DNA, 15 bp, Homo sapiens
tcatctgcaaaacat

SEQ ID NO: 404426 - DNA, 15 bp, Homo sapiens
ctcatctgcaaaaca

SEQ ID NO: 404427 - DNA, 15 bp, Homo sapiens
cctcatctgcaaaac

SEQ ID NO: 404428 - DNA, 15 bp, Homo sapiens
tcctcatctgcaaaa

SEQ ID NO: 404429 - DNA, 15 bp, Homo sapiens
ttcctcatctgcaaa

SEQ ID NO: 404430 - DNA, 15 bp, Homo sapiens
tttcctcatctgcaa

SEQ ID NO: 404431 - DNA, 15 bp, Homo sapiens
gtttcctcatctgca

SEQ ID NO: 404432 - DNA, 15 bp, Homo sapiens
agtttcctcatctgc

SEQ ID NO: 404433 - DNA, 15 bp, Homo sapiens
cagtttcctcatctg

SEQ ID NO: 404434 - DNA, 15 bp, Homo sapiens
acagtttcctcatct

SEQ ID NO: 404435 - DNA, 15 bp, Homo sapiens
cacagtttcctcatc

SEQ ID NO: 404436 - DNA, 15 bp, Homo sapiens
ccacagtttcctcat

SEQ ID NO: 404437 - DNA, 15 bp, Homo sapiens
accacagtttcctca

SEQ ID NO: 404438 - DNA, 15 bp, Homo sapiens
aaccacagtttcctc

SEQ ID NO: 404439 - DNA, 15 bp, Homo sapiens
aaaccacagtttcct

SEQ ID NO: 404440 - DNA, 15 bp, Homo sapiens
taaaccacagtttcc

SEQ ID NO: 404441 - DNA, 15 bp, Homo sapiens
ctaaaccacagtttc

SEQ ID NO: 404442 - DNA, 15 bp, Homo sapiens
cctaaaccacagttt

SEQ ID NO: 404443 - DNA, 15 bp, Homo sapiens
ccctaaaccacagtt

SEQ ID NO: 404444 - DNA, 15 bp, Homo sapiens
tccctaaaccacagt

SEQ ID NO: 404445 - DNA, 15 bp, Homo sapiens
ttccctaaaccacag

SEQ ID NO: 404446 - DNA, 15 bp, Homo sapiens
tttccctaaaccaca

SEQ ID NO: 404447 - DNA, 15 bp, Homo sapiens
atttccctaaaccac

SEQ ID NO: 404448 - DNA, 15 bp, Homo sapiens
aatttccctaaacca

SEQ ID NO: 404449 - DNA, 15 bp, Homo sapiens
taatttccctaaacc

SEQ ID NO: 404450 - DNA, 15 bp, Homo sapiens
ataatttccctaaac

SEQ ID NO: 404451 - DNA, 15 bp, Homo sapiens
cataatttccctaaa

SEQ ID NO: 404452 - DNA, 15 bp, Homo sapiens
acataatttccctaa

SEQ ID NO: 404453 - DNA, 15 bp, Homo sapiens
tacataatttcccta

SEQ ID NO: 404454 - DNA, 15 bp, Homo sapiens
gtacataatttccct

SEQ ID NO: 404455 - DNA, 15 bp, Homo sapiens
ggtacataatttccc

SEQ ID NO: 404456 - DNA, 15 bp, Homo sapiens
aggtacataatttcc

SEQ ID NO: 404457 - DNA, 15 bp, Homo sapiens
aaggtacataatttc

SEQ ID NO: 404458 - DNA, 15 bp, Homo sapiens
caaggtacataattt

SEQ ID NO: 404459 - DNA, 15 bp, Homo sapiens
gcaaggtacataatt

SEQ ID NO: 404460 - DNA, 15 bp, Homo sapiens
agcaaggtacataat

SEQ ID NO: 404461 - DNA, 15 bp, Homo sapiens
cagcaaggtacataa

SEQ ID NO: 404462 - DNA, 15 bp, Homo sapiens
tcagcaaggtacata

SEQ ID NO: 404463 - DNA, 15 bp, Homo sapiens
ttcagcaaggtacat

SEQ ID NO: 404464 - DNA, 15 bp, Homo sapiens
tttcagcaaggtaca

SEQ ID NO: 404465 - DNA, 15 bp, Homo sapiens
ttttcagcaaggtac

SEQ ID NO: 404466 - DNA, 15 bp, Homo sapiens
gttttcagcaaggta

SEQ ID NO: 404467 - DNA, 15 bp, Homo sapiens
ggttttcagcaaggt

SEQ ID NO: 404468 - DNA, 15 bp, Homo sapiens
tggttttcagcaagg

SEQ ID NO: 404469 - DNA, 15 bp, Homo sapiens
ctggttttcagcaag

SEQ ID NO: 404470 - DNA, 15 bp, Homo sapiens
gctggttttcagcaa

SEQ ID NO: 404471 - DNA, 15 bp, Homo sapiens
agctggttttcagca

SEQ ID NO: 404472 - DNA, 15 bp, Homo sapiens
aagctggttttcagc

SEQ ID NO: 404473 - DNA, 15 bp, Homo sapiens
gaagctggttttcag

SEQ ID NO: 404474 - DNA, 15 bp, Homo sapiens
ggaagctggttttca

SEQ ID NO: 404475 - DNA, 15 bp, Homo sapiens
gggaagctggttttc

SEQ ID NO: 404476 - DNA, 15 bp, Homo sapiens
agggaagctggtttt

SEQ ID NO: 404477 - DNA, 15 bp, Homo sapiens
cagggaagctggttt

SEQ ID NO: 404478 - DNA, 15 bp, Homo sapiens
acagggaagctggtt

SEQ ID NO: 404479 - DNA, 15 bp, Homo sapiens
tacagggaagctggt

SEQ ID NO: 404480 - DNA, 15 bp, Homo sapiens
ttacagggaagctgg

SEQ ID NO: 404481 - DNA, 15 bp, Homo sapiens
cttacagggaagctg

SEQ ID NO: 404482 - DNA, 15 bp, Homo sapiens
acttacagggaagct

SEQ ID NO: 404483 - DNA, 15 bp, Homo sapiens
cacttacagggaagc

SEQ ID NO: 404484 - DNA, 15 bp, Homo sapiens
ccacttacagggaag

SEQ ID NO: 404485 - DNA, 15 bp, Homo sapiens
accacttacagggaa

SEQ ID NO: 404486 - DNA, 15 bp, Homo sapiens
taccacttacaggga

SEQ ID NO: 404487 - DNA, 15 bp, Homo sapiens
ataccacttacaggg

SEQ ID NO: 404488 - DNA, 15 bp, Homo sapiens
tataccacttacagg

SEQ ID NO: 404489 - DNA, 15 bp, Homo sapiens
ttataccacttacag

SEQ ID NO: 404490 - DNA, 15 bp, Homo sapiens
cttataccacttaca

SEQ ID NO: 404491 - DNA, 15 bp, Homo sapiens
ccttataccacttac

SEQ ID NO: 404492 - DNA, 15 bp, Homo sapiens
tccttataccactta

SEQ ID NO: 404493 - DNA, 15 bp, Homo sapiens
ttccttataccactt

SEQ ID NO: 404494 - DNA, 15 bp, Homo sapiens
cttccttataccact

SEQ ID NO: 404495 - DNA, 15 bp, Homo sapiens
tcttccttataccac

SEQ ID NO: 404496 - DNA, 15 bp, Homo sapiens
ctcttccttatacca

SEQ ID NO: 404497 - DNA, 15 bp, Homo sapiens
actcttccttatacc

SEQ ID NO: 404498 - DNA, 15 bp, Homo sapiens
gactcttccttatac

SEQ ID NO: 404499 - DNA, 15 bp, Homo sapiens
tgactcttccttata

SEQ ID NO: 404500 - DNA, 15 bp, Homo sapiens
ctgactcttccttat

SEQ ID NO: 404501 - DNA, 15 bp, Homo sapiens
tctgactcttcctta

SEQ ID NO: 404502 - DNA, 15 bp, Homo sapiens
gtctgactcttcctt

SEQ ID NO: 404503 - DNA, 15 bp, Homo sapiens
ggtctgactcttcct

SEQ ID NO: 404504 - DNA, 15 bp, Homo sapiens
gggtctgactcttcc

SEQ ID NO: 404505 - DNA, 15 bp, Homo sapiens
tgggtctgactcttc

SEQ ID NO: 404506 - DNA, 15 bp, Homo sapiens
atgggtctgactctt

SEQ ID NO: 404507 - DNA, 15 bp, Homo sapiens
tatgggtctgactct

SEQ ID NO: 404508 - DNA, 15 bp, Homo sapiens
atatgggtctgactc

SEQ ID NO: 404509 - DNA, 15 bp, Homo sapiens
gatatgggtctgact

SEQ ID NO: 404510 - DNA, 15 bp, Homo sapiens
agatatgggtctgac

SEQ ID NO: 404511 - DNA, 15 bp, Homo sapiens
cagatatgggtctga

SEQ ID NO: 404512 - DNA, 15 bp, Homo sapiens
acagatatgggtctg

SEQ ID NO: 404513 - DNA, 15 bp, Homo sapiens
gacagatatgggtct

SEQ ID NO: 404514 - DNA, 15 bp, Homo sapiens
agacagatatgggtc

SEQ ID NO: 404515 - DNA, 15 bp, Homo sapiens
cagacagatatgggt

SEQ ID NO: 404516 - DNA, 15 bp, Homo sapiens
acagacagatatggg

SEQ ID NO: 404517 - DNA, 15 bp, Homo sapiens
aacagacagatatgg

SEQ ID NO: 404518 - DNA, 15 bp, Homo sapiens
caacagacagatatg

SEQ ID NO: 404519 - DNA, 15 bp, Homo sapiens
ccaacagacagatat

SEQ ID NO: 404520 - DNA, 15 bp, Homo sapiens
accaacagacagata

SEQ ID NO: 404521 - DNA, 15 bp, Homo sapiens
caccaacagacagat

SEQ ID NO: 404522 - DNA, 15 bp, Homo sapiens
ccaccaacagacaga

SEQ ID NO: 404523 - DNA, 15 bp, Homo sapiens
accaccaacagacag

SEQ ID NO: 404524 - DNA, 15 bp, Homo sapiens
caccaccaacagaca

SEQ ID NO: 404525 - DNA, 15 bp, Homo sapiens
acaccaccaacagac

SEQ ID NO: 404526 - DNA, 15 bp, Homo sapiens
aacaccaccaacaga

SEQ ID NO: 404527 - DNA, 15 bp, Homo sapiens
aaacaccaccaacag

SEQ ID NO: 404528 - DNA, 15 bp, Homo sapiens
aaaacaccaccaaca

SEQ ID NO: 404529 - DNA, 15 bp, Homo sapiens
aaaaacaccaccaac

SEQ ID NO: 404530 - DNA, 15 bp, Homo sapiens
aaaaaacaccaccaa

SEQ ID NO: 404531 - DNA, 15 bp, Homo sapiens
aaaaaaacaccacca

SEQ ID NO: 404532 - DNA, 15 bp, Homo sapiens
aaaaaaaacaccacc

SEQ ID NO: 404533 - DNA, 15 bp, Homo sapiens
aaaaaaaaacaccac

SEQ ID NO: 404534 - DNA, 15 bp, Homo sapiens
caaaaaaaaacacca

SEQ ID NO: 404535 - DNA, 15 bp, Homo sapiens
tcaaaaaaaaacacc

SEQ ID NO: 404536 - DNA, 15 bp, Homo sapiens
gtcaaaaaaaaacac

SEQ ID NO: 404537 - DNA, 15 bp, Homo sapiens
agtcaaaaaaaaaca

SEQ ID NO: 404538 - DNA, 15 bp, Homo sapiens
cagtcaaaaaaaaac

SEQ ID NO: 404539 - DNA, 15 bp, Homo sapiens
acagtcaaaaaaaaa

SEQ ID NO: 404540 - DNA, 15 bp, Homo sapiens
cacagtcaaaaaaaa

SEQ ID NO: 404541 - DNA, 15 bp, Homo sapiens
acacagtcaaaaaaa

SEQ ID NO: 404542 - DNA, 15 bp, Homo sapiens
gacacagtcaaaaaa

SEQ ID NO: 404543 - DNA, 15 bp, Homo sapiens
tgacacagtcaaaaa

SEQ ID NO: 404544 - DNA, 15 bp, Homo sapiens
atgacacagtcaaaa

SEQ ID NO: 404545 - DNA, 15 bp, Homo sapiens
catgacacagtcaaa

SEQ ID NO: 404546 - DNA, 15 bp, Homo sapiens
gcatgacacagtcaa

SEQ ID NO: 404547 - DNA, 15 bp, Homo sapiens
agcatgacacagtca

SEQ ID NO: 404548 - DNA, 15 bp, Homo sapiens
cagcatgacacagtc

SEQ ID NO: 404549 - DNA, 15 bp, Homo sapiens
gcagcatgacacagt

SEQ ID NO: 404550 - DNA, 15 bp, Homo sapiens
agcagcatgacacag

SEQ ID NO: 404551 - DNA, 15 bp, Homo sapiens
aagcagcatgacaca

SEQ ID NO: 404552 - DNA, 15 bp, Homo sapiens
aaagcagcatgacac

SEQ ID NO: 404553 - DNA, 15 bp, Homo sapiens
aaaagcagcatgaca

SEQ ID NO: 404554 - DNA, 15 bp, Homo sapiens
gaaaagcagcatgac

SEQ ID NO: 404555 - DNA, 15 bp, Homo sapiens
agaaaagcagcatga

SEQ ID NO: 404556 - DNA, 15 bp, Homo sapiens
tagaaaagcagcatg

SEQ ID NO: 404557 - DNA, 15 bp, Homo sapiens
ttagaaaagcagcat

SEQ ID NO: 404558 - DNA, 15 bp, Homo sapiens
gttagaaaagcagca

SEQ ID NO: 404559 - DNA, 15 bp, Homo sapiens
tgttagaaaagcagc

SEQ ID NO: 404560 - DNA, 15 bp, Homo sapiens
ctgttagaaaagcag

SEQ ID NO: 404561 - DNA, 15 bp, Homo sapiens
gctgttagaaaagca

SEQ ID NO: 404562 - DNA, 15 bp, Homo sapiens
agctgttagaaaagc

SEQ ID NO: 404563 - DNA, 15 bp, Homo sapiens
gagctgttagaaaag

SEQ ID NO: 404564 - DNA, 15 bp, Homo sapiens
ggagctgttagaaaa

SEQ ID NO: 404565 - DNA, 15 bp, Homo sapiens
tggagctgttagaaa

SEQ ID NO: 404566 - DNA, 15 bp, Homo sapiens
gtggagctgttagaa

SEQ ID NO: 404567 - DNA, 15 bp, Homo sapiens
ggtggagctgttaga

SEQ ID NO: 404568 - DNA, 15 bp, Homo sapiens
tggtggagctgttag

SEQ ID NO: 404569 - DNA, 15 bp, Homo sapiens
atggtggagctgtta

SEQ ID NO: 404570 - DNA, 15 bp, Homo sapiens
gatggtggagctgtt

SEQ ID NO: 404571 - DNA, 15 bp, Homo sapiens
tgatggtggagctgt

SEQ ID NO: 404572 - DNA, 15 bp, Homo sapiens
gtgatggtggagctg

SEQ ID NO: 404573 - DNA, 15 bp, Homo sapiens
ggtgatggtggagct

SEQ ID NO: 404574 - DNA, 15 bp, Homo sapiens
aggtgatggtggagc

SEQ ID NO: 404575 - DNA, 15 bp, Homo sapiens
caggtgatggtggag

SEQ ID NO: 404576 - DNA, 15 bp, Homo sapiens
acaggtgatggtgga

SEQ ID NO: 404577 - DNA, 15 bp, Homo sapiens
tacaggtgatggtgg

SEQ ID NO: 404578 - DNA, 15 bp, Homo sapiens
ctacaggtgatggtg

SEQ ID NO: 404579 - DNA, 15 bp, Homo sapiens
cctacaggtgatggt

SEQ ID NO: 404580 - DNA, 15 bp, Homo sapiens
ccctacaggtgatgg

SEQ ID NO: 404581 - DNA, 15 bp, Homo sapiens
accctacaggtgatg

SEQ ID NO: 404582 - DNA, 15 bp, Homo sapiens
caccctacaggtgat

SEQ ID NO: 404583 - DNA, 15 bp, Homo sapiens
tcaccctacaggtga

SEQ ID NO: 404584 - DNA, 15 bp, Homo sapiens
ttcaccctacaggtg

SEQ ID NO: 404585 - DNA, 15 bp, Homo sapiens
gttcaccctacaggt

SEQ ID NO: 404586 - DNA, 15 bp, Homo sapiens
ggttcaccctacagg

SEQ ID NO: 404587 - DNA, 15 bp, Homo sapiens
gggttcaccctacag

SEQ ID NO: 404588 - DNA, 15 bp, Homo sapiens
agggttcaccctaca

SEQ ID NO: 404589 - DNA, 15 bp, Homo sapiens
cagggttcaccctac

SEQ ID NO: 404590 - DNA, 15 bp, Homo sapiens
acagggttcacccta

SEQ ID NO: 404591 - DNA, 15 bp, Homo sapiens
aacagggttcaccct

SEQ ID NO: 404592 - DNA, 15 bp, Homo sapiens
aaacagggttcaccc

SEQ ID NO: 404593 - DNA, 15 bp, Homo sapiens
gaaacagggttcacc

SEQ ID NO: 404594 - DNA, 15 bp, Homo sapiens
agaaacagggttcac

SEQ ID NO: 404595 - DNA, 15 bp, Homo sapiens
aagaaacagggttca

SEQ ID NO: 404596 - DNA, 15 bp, Homo sapiens
aaagaaacagggttc

SEQ ID NO: 404597 - DNA, 15 bp, Homo sapiens
gaaagaaacagggtt

SEQ ID NO: 404598 - DNA, 15 bp, Homo sapiens
ggaaagaaacagggt

SEQ ID NO: 404599 - DNA, 15 bp, Homo sapiens
gggaaagaaacaggg

SEQ ID NO: 404600 - DNA, 15 bp, Homo sapiens
cgggaaagaaacagg

SEQ ID NO: 404601 - DNA, 15 bp, Homo sapiens
gcgggaaagaaacag

SEQ ID NO: 404602 - DNA, 15 bp, Homo sapiens
tgcgggaaagaaaca

SEQ ID NO: 404603 - DNA, 15 bp, Homo sapiens
ctgcgggaaagaaac

SEQ ID NO: 404604 - DNA, 15 bp, Homo sapiens
gctgcgggaaagaaa

SEQ ID NO: 404605 - DNA, 15 bp, Homo sapiens
tgctgcgggaaagaa

SEQ ID NO: 404606 - DNA, 15 bp, Homo sapiens
atgctgcgggaaaga

SEQ ID NO: 404607 - DNA, 15 bp, Homo sapiens
tatgctgcgggaaag

SEQ ID NO: 404608 - DNA, 15 bp, Homo sapiens
atatgctgcgggaaa

SEQ ID NO: 404609 - DNA, 15 bp, Homo sapiens
tatatgctgcgggaa

SEQ ID NO: 404610 - DNA, 15 bp, Homo sapiens
ttatatgctgcggga

SEQ ID NO: 404611 - DNA, 15 bp, Homo sapiens
cttatatgctgcggg

SEQ ID NO: 404612 - DNA, 15 bp, Homo sapiens
tcttatatgctgcgg

SEQ ID NO: 404613 - DNA, 15 bp, Homo sapiens
gtcttatatgctgcg

SEQ ID NO: 404614 - DNA, 15 bp, Homo sapiens
cgtcttatatgctgc

SEQ ID NO: 404615 - DNA, 15 bp, Homo sapiens
gcgtcttatatgctg

SEQ ID NO: 404616 - DNA, 15 bp, Homo sapiens
agcgtcttatatgct

SEQ ID NO: 404617 - DNA, 15 bp, Homo sapiens
aagcgtcttatatgc

SEQ ID NO: 404618 - DNA, 15 bp, Homo sapiens
gaagcgtcttatatg

SEQ ID NO: 404619 - DNA, 15 bp, Homo sapiens
ggaagcgtcttatat

SEQ ID NO: 404620 - DNA, 15 bp, Homo sapiens
gggaagcgtcttata

SEQ ID NO: 404621 - DNA, 15 bp, Homo sapiens
agggaagcgtcttat

SEQ ID NO: 404622 - DNA, 15 bp, Homo sapiens
cagggaagcgtctta

SEQ ID NO: 404623 - DNA, 15 bp, Homo sapiens
acagggaagcgtctt

SEQ ID NO: 404624 - DNA, 15 bp, Homo sapiens
gacagggaagcgtct

SEQ ID NO: 404625 - DNA, 15 bp, Homo sapiens
agacagggaagcgtc

SEQ ID NO: 404626 - DNA, 15 bp, Homo sapiens
cagacagggaagcgt

SEQ ID NO: 404627 - DNA, 15 bp, Homo sapiens
acagacagggaagcg

SEQ ID NO: 404628 - DNA, 15 bp, Homo sapiens
tacagacagggaagc

SEQ ID NO: 404629 - DNA, 15 bp, Homo sapiens
atacagacagggaag

SEQ ID NO: 404630 - DNA, 15 bp, Homo sapiens
aatacagacagggaa

SEQ ID NO: 404631 - DNA, 15 bp, Homo sapiens
gaatacagacaggga

SEQ ID NO: 404632 - DNA, 15 bp, Homo sapiens
tgaatacagacaggg

SEQ ID NO: 404633 - DNA, 15 bp, Homo sapiens
ctgaatacagacagg

SEQ ID NO: 404634 - DNA, 15 bp, Homo sapiens
gctgaatacagacag

SEQ ID NO: 404635 - DNA, 15 bp, Homo sapiens
ggctgaatacagaca

SEQ ID NO: 404636 - DNA, 15 bp, Homo sapiens
aggctgaatacagac

SEQ ID NO: 404637 - DNA, 15 bp, Homo sapiens
caggctgaatacaga

SEQ ID NO: 404638 - DNA, 15 bp, Homo sapiens
acaggctgaatacag

SEQ ID NO: 404639 - DNA, 15 bp, Homo sapiens
gacaggctgaataca

SEQ ID NO: 404640 - DNA, 15 bp, Homo sapiens
cgacaggctgaatac

SEQ ID NO: 404641 - DNA, 15 bp, Homo sapiens
ccgacaggctgaata

SEQ ID NO: 404642 - DNA, 15 bp, Homo sapiens
cccgacaggctgaat

SEQ ID NO: 404643 - DNA, 15 bp, Homo sapiens
gcccgacaggctgaa

SEQ ID NO: 404644 - DNA, 15 bp, Homo sapiens
tgcccgacaggctga

SEQ ID NO: 404645 - DNA, 15 bp, Homo sapiens
ttgcccgacaggctg

SEQ ID NO: 404646 - DNA, 15 bp, Homo sapiens
cttgcccgacaggct

SEQ ID NO: 404647 - DNA, 15 bp, Homo sapiens
ccttgcccgacaggc

SEQ ID NO: 404648 - DNA, 15 bp, Homo sapiens
gccttgcccgacagg

SEQ ID NO: 404649 - DNA, 15 bp, Homo sapiens
agccttgcccgacag

SEQ ID NO: 404650 - DNA, 15 bp, Homo sapiens
aagccttgcccgaca

SEQ ID NO: 404651 - DNA, 15 bp, Homo sapiens
gaagccttgcccgac

SEQ ID NO: 404652 - DNA, 15 bp, Homo sapiens
cgaagccttgcccga

SEQ ID NO: 404653 - DNA, 15 bp, Homo sapiens
acgaagccttgcccg

SEQ ID NO: 404654 - DNA, 15 bp, Homo sapiens
aacgaagccttgccc

SEQ ID NO: 404655 - DNA, 15 bp, Homo sapiens
aaacgaagccttgcc

SEQ ID NO: 404656 - DNA, 15 bp, Homo sapiens
aaaacgaagccttgc

SEQ ID NO: 404657 - DNA, 15 bp, Homo sapiens
aaaaacgaagccttg

SEQ ID NO: 404658 - DNA, 15 bp, Homo sapiens
gaaaaacgaagcctt

SEQ ID NO: 404659 - DNA, 15 bp, Homo sapiens
agaaaaacgaagcct

SEQ ID NO: 404660 - DNA, 15 bp, Homo sapiens
cagaaaaacgaagcc

SEQ ID NO: 404661 - DNA, 15 bp, Homo sapiens
acagaaaaacgaagc

SEQ ID NO: 404662 - DNA, 15 bp, Homo sapiens
gacagaaaaacgaag

SEQ ID NO: 404663 - DNA, 15 bp, Homo sapiens
agacagaaaaacgaa

SEQ ID NO: 404664 - DNA, 15 bp, Homo sapiens
gagacagaaaaacga

SEQ ID NO: 404665 - DNA, 15 bp, Homo sapiens
ggagacagaaaaacg

SEQ ID NO: 404666 - DNA, 15 bp, Homo sapiens
aggagacagaaaaac

SEQ ID NO: 404667 - DNA, 15 bp, Homo sapiens
gaggagacagaaaaa

SEQ ID NO: 404668 - DNA, 15 bp, Homo sapiens
agaggagacagaaaa

SEQ ID NO: 404669 - DNA, 15 bp, Homo sapiens
cagaggagacagaaa

SEQ ID NO: 404670 - DNA, 15 bp, Homo sapiens
ccagaggagacagaa

SEQ ID NO: 404671 - DNA, 15 bp, Homo sapiens
cccagaggagacaga

SEQ ID NO: 404672 - DNA, 15 bp, Homo sapiens
tcccagaggagacag

SEQ ID NO: 404673 - DNA, 15 bp, Homo sapiens
gtcccagaggagaca

SEQ ID NO: 404674 - DNA, 15 bp, Homo sapiens
tgtcccagaggagac

SEQ ID NO: 404675 - DNA, 15 bp, Homo sapiens
gtgtcccagaggaga

SEQ ID NO: 404676 - DNA, 15 bp, Homo sapiens
agtgtcccagaggag

SEQ ID NO: 404677 - DNA, 15 bp, Homo sapiens
cagtgtcccagagga

SEQ ID NO: 404678 - DNA, 15 bp, Homo sapiens
gcagtgtcccagagg

SEQ ID NO: 404679 - DNA, 15 bp, Homo sapiens
ggcagtgtcccagag

SEQ ID NO: 404680 - DNA, 15 bp, Homo sapiens
tggcagtgtcccaga

SEQ ID NO: 404681 - DNA, 15 bp, Homo sapiens
ttggcagtgtcccag

SEQ ID NO: 404682 - DNA, 15 bp, Homo sapiens
gttggcagtgtccca

SEQ ID NO: 404683 - DNA, 15 bp, Homo sapiens
agttggcagtgtccc

SEQ ID NO: 404684 - DNA, 15 bp, Homo sapiens
gagttggcagtgtcc

SEQ ID NO: 404685 - DNA, 15 bp, Homo sapiens
ggagttggcagtgtc

SEQ ID NO: 404686 - DNA, 15 bp, Homo sapiens
tggagttggcagtgt

SEQ ID NO: 404687 - DNA, 15 bp, Homo sapiens
ttggagttggcagtg

SEQ ID NO: 404688 - DNA, 15 bp, Homo sapiens
gttggagttggcagt

SEQ ID NO: 404689 - DNA, 15 bp, Homo sapiens
agttggagttggcag

SEQ ID NO: 404690 - DNA, 15 bp, Homo sapiens
aagttggagttggca

SEQ ID NO: 404691 - DNA, 15 bp, Homo sapiens
gaagttggagttggc

SEQ ID NO: 404692 - DNA, 15 bp, Homo sapiens
agaagttggagttgg

SEQ ID NO: 404693 - DNA, 15 bp, Homo sapiens
gagaagttggagttg

SEQ ID NO: 404694 - DNA, 15 bp, Homo sapiens
agagaagttggagtt

SEQ ID NO: 404695 - DNA, 15 bp, Homo sapiens
tagagaagttggagt

SEQ ID NO: 404696 - DNA, 15 bp, Homo sapiens
atagagaagttggag

SEQ ID NO: 404697 - DNA, 15 bp, Homo sapiens
catagagaagttgga

SEQ ID NO: 404698 - DNA, 15 bp, Homo sapiens
tcatagagaagttgg

SEQ ID NO: 404699 - DNA, 15 bp, Homo sapiens
ttcatagagaagttg

SEQ ID NO: 404700 - DNA, 15 bp, Homo sapiens
cttcatagagaagtt

SEQ ID NO: 404701 - DNA, 15 bp, Homo sapiens
acttcatagagaagt

SEQ ID NO: 404702 - DNA, 15 bp, Homo sapiens
gacttcatagagaag

SEQ ID NO: 404703 - DNA, 15 bp, Homo sapiens
agacttcatagagaa

SEQ ID NO: 404704 - DNA, 15 bp, Homo sapiens
aagacttcatagaga

SEQ ID NO: 404705 - DNA, 15 bp, Homo sapiens
caagacttcatagag

SEQ ID NO: 404706 - DNA, 15 bp, Homo sapiens
gcaagacttcataga

SEQ ID NO: 404707 - DNA, 15 bp, Homo sapiens
agcaagacttcatag

SEQ ID NO: 404708 - DNA, 15 bp, Homo sapiens
aagcaagacttcata

SEQ ID NO: 404709 - DNA, 15 bp, Homo sapiens
aaagcaagacttcat

SEQ ID NO: 404710 - DNA, 15 bp, Homo sapiens
aaaagcaagacttca

SEQ ID NO: 404711 - DNA, 15 bp, Homo sapiens
gaaaagcaagacttc

SEQ ID NO: 404712 - DNA, 15 bp, Homo sapiens
tgaaaagcaagactt

SEQ ID NO: 404713 - DNA, 15 bp, Homo sapiens
gtgaaaagcaagact

SEQ ID NO: 404714 - DNA, 15 bp, Homo sapiens
ggtgaaaagcaagac

SEQ ID NO: 404715 - DNA, 15 bp, Homo sapiens
aggtgaaaagcaaga

SEQ ID NO: 404716 - DNA, 15 bp, Homo sapiens
taggtgaaaagcaag

SEQ ID NO: 404717 - DNA, 15 bp, Homo sapiens
ttaggtgaaaagcaa

SEQ ID NO: 404718 - DNA, 15 bp, Homo sapiens
tttaggtgaaaagca

SEQ ID NO: 404719 - DNA, 15 bp, Homo sapiens
ttttaggtgaaaagc

SEQ ID NO: 404720 - DNA, 15 bp, Homo sapiens
cttttaggtgaaaag

SEQ ID NO: 404721 - DNA, 15 bp, Homo sapiens
tcttttaggtgaaaa

SEQ ID NO: 404722 - DNA, 15 bp, Homo sapiens
gtcttttaggtgaaa

SEQ ID NO: 404723 - DNA, 15 bp, Homo sapiens
ggtcttttaggtgaa

SEQ ID NO: 404724 - DNA, 15 bp, Homo sapiens
tggtcttttaggtga

SEQ ID NO: 404725 - DNA, 15 bp, Homo sapiens
atggtcttttaggtg

SEQ ID NO: 404726 - DNA, 15 bp, Homo sapiens
tatggtcttttaggt

SEQ ID NO: 404727 - DNA, 15 bp, Homo sapiens
atatggtcttttagg

SEQ ID NO: 404728 - DNA, 15 bp, Homo sapiens
catatggtcttttag

SEQ ID NO: 404729 - DNA, 15 bp, Homo sapiens
gcatatggtctttta

SEQ ID NO: 404730 - DNA, 15 bp, Homo sapiens
agcatatggtctttt

SEQ ID NO: 404731 - DNA, 15 bp, Homo sapiens
aagcatatggtcttt

SEQ ID NO: 404732 - DNA, 15 bp, Homo sapiens
caagcatatggtctt

SEQ ID NO: 404733 - DNA, 15 bp, Homo sapiens
gcaagcatatggtct

SEQ ID NO: 404734 - DNA, 15 bp, Homo sapiens
tgcaagcatatggtc

SEQ ID NO: 404735 - DNA, 15 bp, Homo sapiens
ctgcaagcatatggt

SEQ ID NO: 404736 - DNA, 15 bp, Homo sapiens
actgcaagcatatgg

SEQ ID NO: 404737 - DNA, 15 bp, Homo sapiens
aactgcaagcatatg

SEQ ID NO: 404738 - DNA, 15 bp, Homo sapiens
aaactgcaagcatat

SEQ ID NO: 404739 - DNA, 15 bp, Homo sapiens
gaaactgcaagcata

SEQ ID NO: 404740 - DNA, 15 bp, Homo sapiens
tgaaactgcaagcat

SEQ ID NO: 404741 - DNA, 15 bp, Homo sapiens
gtgaaactgcaagca

SEQ ID NO: 404742 - DNA, 15 bp, Homo sapiens
tgtgaaactgcaagc

SEQ ID NO: 404743 - DNA, 15 bp, Homo sapiens
gtgtgaaactgcaag

SEQ ID NO: 404744 - DNA, 15 bp, Homo sapiens
ggtgtgaaactgcaa

SEQ ID NO: 404745 - DNA, 15 bp, Homo sapiens
aggtgtgaaactgca

SEQ ID NO: 404746 - DNA, 15 bp, Homo sapiens
gaggtgtgaaactgc

SEQ ID NO: 404747 - DNA, 15 bp, Homo sapiens
agaggtgtgaaactg

SEQ ID NO: 404748 - DNA, 15 bp, Homo sapiens
cagaggtgtgaaact

SEQ ID NO: 404749 - DNA, 15 bp, Homo sapiens
gcagaggtgtgaaac

SEQ ID NO: 404750 - DNA, 15 bp, Homo sapiens
tgcagaggtgtgaaa

SEQ ID NO: 404751 - DNA, 15 bp, Homo sapiens
ttgcagaggtgtgaa

SEQ ID NO: 404752 - DNA, 15 bp, Homo sapiens
tttgcagaggtgtga

SEQ ID NO: 404753 - DNA, 15 bp, Homo sapiens
ctttgcagaggtgtg

SEQ ID NO: 404754 - DNA, 15 bp, Homo sapiens
actttgcagaggtgt

SEQ ID NO: 404755 - DNA, 15 bp, Homo sapiens
cactttgcagaggtg

SEQ ID NO: 404756 - DNA, 15 bp, Homo sapiens
acactttgcagaggt

SEQ ID NO: 404757 - DNA, 15 bp, Homo sapiens
aacactttgcagagg

SEQ ID NO: 404758 - DNA, 15 bp, Homo sapiens
aaacactttgcagag

SEQ ID NO: 404759 - DNA, 15 bp, Homo sapiens
aaaacactttgcaga

SEQ ID NO: 404760 - DNA, 15 bp, Homo sapiens
gaaaacactttgcag

SEQ ID NO: 404761 - DNA, 15 bp, Homo sapiens
ggaaaacactttgca

SEQ ID NO: 404762 - DNA, 15 bp, Homo sapiens
gggaaaacactttgc

SEQ ID NO: 404763 - DNA, 15 bp, Homo sapiens
agggaaaacactttg

SEQ ID NO: 404764 - DNA, 15 bp, Homo sapiens
gagggaaaacacttt

SEQ ID NO: 404765 - DNA, 15 bp, Homo sapiens
agagggaaaacactt

SEQ ID NO: 404766 - DNA, 15 bp, Homo sapiens
tagagggaaaacact

SEQ ID NO: 404767 - DNA, 15 bp, Homo sapiens
ttagagggaaaacac

SEQ ID NO: 404768 - DNA, 15 bp, Homo sapiens
gttagagggaaaaca

SEQ ID NO: 404769 - DNA, 15 bp, Homo sapiens
agttagagggaaaac

SEQ ID NO: 404770 - DNA, 15 bp, Homo sapiens
cagttagagggaaaa

SEQ ID NO: 404771 - DNA, 15 bp, Homo sapiens
tcagttagagggaaa

SEQ ID NO: 404772 - DNA, 15 bp, Homo sapiens
ttcagttagagggaa

SEQ ID NO: 404773 - DNA, 15 bp, Homo sapiens
tttcagttagaggga

SEQ ID NO: 404774 - DNA, 15 bp, Homo sapiens
atttcagttagaggg

SEQ ID NO: 404775 - DNA, 15 bp, Homo sapiens
catttcagttagagg

SEQ ID NO: 404776 - DNA, 15 bp, Homo sapiens
ccatttcagttagag

SEQ ID NO: 404777 - DNA, 15 bp, Homo sapiens
gccatttcagttaga

SEQ ID NO: 404778 - DNA, 15 bp, Homo sapiens
agccatttcagttag

SEQ ID NO: 404779 - DNA, 15 bp, Homo sapiens
aagccatttcagtta

SEQ ID NO: 404780 - DNA, 15 bp, Homo sapiens
aaagccatttcagtt

SEQ ID NO: 404781 - DNA, 15 bp, Homo sapiens
aaaagccatttcagt

SEQ ID NO: 404782 - DNA, 15 bp, Homo sapiens
gaaaagccatttcag

SEQ ID NO: 404783 - DNA, 15 bp, Homo sapiens
agaaaagccatttca

SEQ ID NO: 404784 - DNA, 15 bp, Homo sapiens
aagaaaagccatttc

SEQ ID NO: 404785 - DNA, 15 bp, Homo sapiens
gaagaaaagccattt

SEQ ID NO: 404786 - DNA, 15 bp, Homo sapiens
ggaagaaaagccatt

SEQ ID NO: 404787 - DNA, 15 bp, Homo sapiens
gggaagaaaagccat

SEQ ID NO: 404788 - DNA, 15 bp, Homo sapiens
agggaagaaaagcca

SEQ ID NO: 404789 - DNA, 15 bp, Homo sapiens
aagggaagaaaagcc

SEQ ID NO: 404790 - DNA, 15 bp, Homo sapiens
aaagggaagaaaagc

SEQ ID NO: 404791 - DNA, 15 bp, Homo sapiens
aaaagggaagaaaag

SEQ ID NO: 404792 - DNA, 15 bp, Homo sapiens
gaaaagggaagaaaa

SEQ ID NO: 404793 - DNA, 15 bp, Homo sapiens
agaaaagggaagaaa

SEQ ID NO: 404794 - DNA, 15 bp, Homo sapiens
cagaaaagggaagaa

SEQ ID NO: 404795 - DNA, 15 bp, Homo sapiens
gcagaaaagggaaga

SEQ ID NO: 404796 - DNA, 15 bp, Homo sapiens
agcagaaaagggaag

SEQ ID NO: 404797 - DNA, 15 bp, Homo sapiens
aagcagaaaagggaa

SEQ ID NO: 404798 - DNA, 15 bp, Homo sapiens
caagcagaaaaggga

SEQ ID NO: 404799 - DNA, 15 bp, Homo sapiens
ccaagcagaaaaggg

SEQ ID NO: 404800 - DNA, 15 bp, Homo sapiens
accaagcagaaaagg

SEQ ID NO: 404801 - DNA, 15 bp, Homo sapiens
caccaagcagaaaag

SEQ ID NO: 404802 - DNA, 15 bp, Homo sapiens
tcaccaagcagaaaa

SEQ ID NO: 404803 - DNA, 15 bp, Homo sapiens
ttcaccaagcagaaa

SEQ ID NO: 404804 - DNA, 15 bp, Homo sapiens
attcaccaagcagaa

SEQ ID NO: 404805 - DNA, 15 bp, Homo sapiens
gattcaccaagcaga

SEQ ID NO: 404806 - DNA, 15 bp, Homo sapiens
agattcaccaagcag

SEQ ID NO: 404807 - DNA, 15 bp, Homo sapiens
tagattcaccaagca

SEQ ID NO: 404808 - DNA, 15 bp, Homo sapiens
atagattcaccaagc

SEQ ID NO: 404809 - DNA, 15 bp, Homo sapiens
catagattcaccaag

SEQ ID NO: 404810 - DNA, 15 bp, Homo sapiens
gcatagattcaccaa

SEQ ID NO: 404811 - DNA, 15 bp, Homo sapiens
agcatagattcacca

SEQ ID NO: 404812 - DNA, 15 bp, Homo sapiens
aagcatagattcacc

SEQ ID NO: 404813 - DNA, 15 bp, Homo sapiens
caagcatagattcac

SEQ ID NO: 404814 - DNA, 15 bp, Homo sapiens
acaagcatagattca

SEQ ID NO: 404815 - DNA, 15 bp, Homo sapiens
gacaagcatagattc

SEQ ID NO: 404816 - DNA, 15 bp, Homo sapiens
ggacaagcatagatt

SEQ ID NO: 404817 - DNA, 15 bp, Homo sapiens
aggacaagcatagat

SEQ ID NO: 404818 - DNA, 15 bp, Homo sapiens
aaggacaagcataga

SEQ ID NO: 404819 - DNA, 15 bp, Homo sapiens
aaaggacaagcatag

SEQ ID NO: 404820 - DNA, 15 bp, Homo sapiens
caaaggacaagcata

SEQ ID NO: 404821 - DNA, 15 bp, Homo sapiens
gcaaaggacaagcat

SEQ ID NO: 404822 - DNA, 15 bp, Homo sapiens
tgcaaaggacaagca

SEQ ID NO: 404823 - DNA, 15 bp, Homo sapiens
atgcaaaggacaagc

SEQ ID NO: 404824 - DNA, 15 bp, Homo sapiens
aatgcaaaggacaag

SEQ ID NO: 404825 - DNA, 15 bp, Homo sapiens
gaatgcaaaggacaa

SEQ ID NO: 404826 - DNA, 15 bp, Homo sapiens
ggaatgcaaaggaca

SEQ ID NO: 404827 - DNA, 15 bp, Homo sapiens
tggaatgcaaaggac

SEQ ID NO: 404828 - DNA, 15 bp, Homo sapiens
ctggaatgcaaagga

SEQ ID NO: 404829 - DNA, 15 bp, Homo sapiens
gctggaatgcaaagg

SEQ ID NO: 404830 - DNA, 15 bp, Homo sapiens
agctggaatgcaaag

SEQ ID NO: 404831 - DNA, 15 bp, Homo sapiens
gagctggaatgcaaa

SEQ ID NO: 404832 - DNA, 15 bp, Homo sapiens
tgagctggaatgcaa

SEQ ID NO: 404833 - DNA, 15 bp, Homo sapiens
atgagctggaatgca

SEQ ID NO: 404834 - DNA, 15 bp, Homo sapiens
catgagctggaatgc

SEQ ID NO: 404835 - DNA, 15 bp, Homo sapiens
acatgagctggaatg

SEQ ID NO: 404836 - DNA, 15 bp, Homo sapiens
cacatgagctggaat

SEQ ID NO: 404837 - DNA, 15 bp, Homo sapiens
acacatgagctggaa

SEQ ID NO: 404838 - DNA, 15 bp, Homo sapiens
aacacatgagctgga

SEQ ID NO: 404839 - DNA, 15 bp, Homo sapiens
taacacatgagctgg

SEQ ID NO: 404840 - DNA, 15 bp, Homo sapiens
gtaacacatgagctg

SEQ ID NO: 404841 - DNA, 15 bp, Homo sapiens
agtaacacatgagct

SEQ ID NO: 404842 - DNA, 15 bp, Homo sapiens
aagtaacacatgagc

SEQ ID NO: 404843 - DNA, 15 bp, Homo sapiens
gaagtaacacatgag

SEQ ID NO: 404844 - DNA, 15 bp, Homo sapiens
ggaagtaacacatga

SEQ ID NO: 404845 - DNA, 15 bp, Homo sapiens
tggaagtaacacatg

SEQ ID NO: 404846 - DNA, 15 bp, Homo sapiens
atggaagtaacacat

SEQ ID NO: 404847 - DNA, 15 bp, Homo sapiens
catggaagtaacaca

SEQ ID NO: 404848 - DNA, 15 bp, Homo sapiens
tcatggaagtaacac

SEQ ID NO: 404849 - DNA, 15 bp, Homo sapiens
ttcatggaagtaaca

SEQ ID NO: 404850 - DNA, 15 bp, Homo sapiens
cttcatggaagtaac

SEQ ID NO: 404851 - DNA, 15 bp, Homo sapiens
gcttcatggaagtaa

SEQ ID NO: 404852 - DNA, 15 bp, Homo sapiens
ggcttcatggaagta

SEQ ID NO: 404853 - DNA, 15 bp, Homo sapiens
aggcttcatggaagt

SEQ ID NO: 404854 - DNA, 15 bp, Homo sapiens
aaggcttcatggaag

SEQ ID NO: 404855 - DNA, 15 bp, Homo sapiens
aaaggcttcatggaa

SEQ ID NO: 404856 - DNA, 15 bp, Homo sapiens
aaaaggcttcatgga

SEQ ID NO: 404857 - DNA, 15 bp, Homo sapiens
aaaaaggcttcatgg

SEQ ID NO: 404858 - DNA, 15 bp, Homo sapiens
aaaaaaggcttcatg

SEQ ID NO: 404859 - DNA, 15 bp, Homo sapiens
taaaaaaggcttcat

SEQ ID NO: 404860 - DNA, 15 bp, Homo sapiens
ctaaaaaaggcttca

SEQ ID NO: 404861 - DNA, 15 bp, Homo sapiens
gctaaaaaaggcttc

SEQ ID NO: 404862 - DNA, 15 bp, Homo sapiens
agctaaaaaaggctt

SEQ ID NO: 404863 - DNA, 15 bp, Homo sapiens
aagctaaaaaaggct

SEQ ID NO: 404864 - DNA, 15 bp, Homo sapiens
gaagctaaaaaaggc

SEQ ID NO: 404865 - DNA, 15 bp, Homo sapiens
agaagctaaaaaagg

SEQ ID NO: 404866 - DNA, 15 bp, Homo sapiens
gagaagctaaaaaag

SEQ ID NO: 404867 - DNA, 15 bp, Homo sapiens
agagaagctaaaaaa

SEQ ID NO: 404868 - DNA, 15 bp, Homo sapiens
gagagaagctaaaaa

SEQ ID NO: 404869 - DNA, 15 bp, Homo sapiens
tgagagaagctaaaa

SEQ ID NO: 404870 - DNA, 15 bp, Homo sapiens
ctgagagaagctaaa

SEQ ID NO: 404871 - DNA, 15 bp, Homo sapiens
cctgagagaagctaa

SEQ ID NO: 404872 - DNA, 15 bp, Homo sapiens
ccctgagagaagcta

SEQ ID NO: 404873 - DNA, 15 bp, Homo sapiens
tccctgagagaagct

SEQ ID NO: 404874 - DNA, 15 bp, Homo sapiens
gtccctgagagaagc

SEQ ID NO: 404875 - DNA, 15 bp, Homo sapiens
tgtccctgagagaag

SEQ ID NO: 404876 - DNA, 15 bp, Homo sapiens
atgtccctgagagaa

SEQ ID NO: 404877 - DNA, 15 bp, Homo sapiens
tatgtccctgagaga

SEQ ID NO: 404878 - DNA, 15 bp, Homo sapiens
ctatgtccctgagag

SEQ ID NO: 404879 - DNA, 15 bp, Homo sapiens
actatgtccctgaga

SEQ ID NO: 404880 - DNA, 15 bp, Homo sapiens
cactatgtccctgag

SEQ ID NO: 404881 - DNA, 15 bp, Homo sapiens
ccactatgtccctga

SEQ ID NO: 404882 - DNA, 15 bp, Homo sapiens
cccactatgtccctg

SEQ ID NO: 404883 - DNA, 15 bp, Homo sapiens
acccactatgtccct

SEQ ID NO: 404884 - DNA, 15 bp, Homo sapiens
gacccactatgtccc

SEQ ID NO: 404885 - DNA, 15 bp, Homo sapiens
tgacccactatgtcc

SEQ ID NO: 404886 - DNA, 15 bp, Homo sapiens
gtgacccactatgtc

SEQ ID NO: 404887 - DNA, 15 bp, Homo sapiens
agtgacccactatgt

SEQ ID NO: 404888 - DNA, 15 bp, Homo sapiens
cagtgacccactatg

SEQ ID NO: 404889 - DNA, 15 bp, Homo sapiens
gcagtgacccactat

SEQ ID NO: 404890 - DNA, 15 bp, Homo sapiens
tgcagtgacccacta

SEQ ID NO: 404891 - DNA, 15 bp, Homo sapiens
atgcagtgacccact

SEQ ID NO: 404892 - DNA, 15 bp, Homo sapiens
catgcagtgacccac

SEQ ID NO: 404893 - DNA, 15 bp, Homo sapiens
gcatgcagtgaccca

SEQ ID NO: 404894 - DNA, 15 bp, Homo sapiens
agcatgcagtgaccc

SEQ ID NO: 404895 - DNA, 15 bp, Homo sapiens
cagcatgcagtgacc

SEQ ID NO: 404896 - DNA, 15 bp, Homo sapiens
gcagcatgcagtgac

SEQ ID NO: 404897 - DNA, 15 bp, Homo sapiens
agcagcatgcagtga

SEQ ID NO: 404898 - DNA, 15 bp, Homo sapiens
gagcagcatgcagtg

SEQ ID NO: 404899 - DNA, 15 bp, Homo sapiens
ggagcagcatgcagt

SEQ ID NO: 404900 - DNA, 15 bp, Homo sapiens
gggagcagcatgcag

SEQ ID NO: 404901 - DNA, 15 bp, Homo sapiens
tgggagcagcatgca

SEQ ID NO: 404902 - DNA, 15 bp, Homo sapiens
gtgggagcagcatgc

SEQ ID NO: 404903 - DNA, 15 bp, Homo sapiens
tgtgggagcagcatg

SEQ ID NO: 404904 - DNA, 15 bp, Homo sapiens
gtgtgggagcagcat

SEQ ID NO: 404905 - DNA, 15 bp, Homo sapiens
tgtgtgggagcagca

SEQ ID NO: 404906 - DNA, 15 bp, Homo sapiens
ctgtgtgggagcagc

SEQ ID NO: 404907 - DNA, 15 bp, Homo sapiens
actgtgtgggagcag

SEQ ID NO: 404908 - DNA, 15 bp, Homo sapiens
tactgtgtgggagca

SEQ ID NO: 404909 - DNA, 15 bp, Homo sapiens
gtactgtgtgggagc

SEQ ID NO: 404910 - DNA, 15 bp, Homo sapiens
ggtactgtgtgggag

SEQ ID NO: 404911 - DNA, 15 bp, Homo sapiens
tggtactgtgtggga

SEQ ID NO: 404912 - DNA, 15 bp, Homo sapiens
gtggtactgtgtggg

SEQ ID NO: 404913 - DNA, 15 bp, Homo sapiens
ggtggtactgtgtgg

SEQ ID NO: 404914 - DNA, 15 bp, Homo sapiens
aggtggtactgtgtg

SEQ ID NO: 404915 - DNA, 15 bp, Homo sapiens
caggtggtactgtgt

SEQ ID NO: 404916 - DNA, 15 bp, Homo sapiens
acaggtggtactgtg

SEQ ID NO: 404917 - DNA, 15 bp, Homo sapiens
aacaggtggtactgt

SEQ ID NO: 404918 - DNA, 15 bp, Homo sapiens
taacaggtggtactg

SEQ ID NO: 404919 - DNA, 15 bp, Homo sapiens
ataacaggtggtact

SEQ ID NO: 404920 - DNA, 15 bp, Homo sapiens
aataacaggtggtac

SEQ ID NO: 404921 - DNA, 15 bp, Homo sapiens
gaataacaggtggta

SEQ ID NO: 404922 - DNA, 15 bp, Homo sapiens
ggaataacaggtggt

SEQ ID NO: 404923 - DNA, 15 bp, Homo sapiens
aggaataacaggtgg

SEQ ID NO: 404924 - DNA, 15 bp, Homo sapiens
taggaataacaggtg

SEQ ID NO: 404925 - DNA, 15 bp, Homo sapiens
gtaggaataacaggt

SEQ ID NO: 404926 - DNA, 15 bp, Homo sapiens
tgtaggaataacagg

SEQ ID NO: 404927 - DNA, 15 bp, Homo sapiens
gtgtaggaataacag

SEQ ID NO: 404928 - DNA, 15 bp, Homo sapiens
agtgtaggaataaca

SEQ ID NO: 404929 - DNA, 15 bp, Homo sapiens
cagtgtaggaataac

SEQ ID NO: 404930 - DNA, 15 bp, Homo sapiens
acagtgtaggaataa

SEQ ID NO: 404931 - DNA, 15 bp, Homo sapiens
cacagtgtaggaata

SEQ ID NO: 404932 - DNA, 15 bp, Homo sapiens
acacagtgtaggaat

SEQ ID NO: 404933 - DNA, 15 bp, Homo sapiens
aacacagtgtaggaa

SEQ ID NO: 404934 - DNA, 15 bp, Homo sapiens
gaacacagtgtagga

SEQ ID NO: 404935 - DNA, 15 bp, Homo sapiens
ggaacacagtgtagg

SEQ ID NO: 404936 - DNA, 15 bp, Homo sapiens
tggaacacagtgtag

SEQ ID NO: 404937 - DNA, 15 bp, Homo sapiens
ctggaacacagtgta

SEQ ID NO: 404938 - DNA, 15 bp, Homo sapiens
actggaacacagtgt

SEQ ID NO: 404939 - DNA, 15 bp, Homo sapiens
aactggaacacagtg

SEQ ID NO: 404940 - DNA, 15 bp, Homo sapiens
taactggaacacagt

SEQ ID NO: 404941 - DNA, 15 bp, Homo sapiens
ctaactggaacacag

SEQ ID NO: 404942 - DNA, 15 bp, Homo sapiens
actaactggaacaca

SEQ ID NO: 404943 - DNA, 15 bp, Homo sapiens
gactaactggaacac

SEQ ID NO: 404944 - DNA, 15 bp, Homo sapiens
agactaactggaaca

SEQ ID NO: 404945 - DNA, 15 bp, Homo sapiens
tagactaactggaac

SEQ ID NO: 404946 - DNA, 15 bp, Homo sapiens
gtagactaactggaa

SEQ ID NO: 404947 - DNA, 15 bp, Homo sapiens
ggtagactaactgga

SEQ ID NO: 404948 - DNA, 15 bp, Homo sapiens
tggtagactaactgg

SEQ ID NO: 404949 - DNA, 15 bp, Homo sapiens
ctggtagactaactg

SEQ ID NO: 404950 - DNA, 15 bp, Homo sapiens
tctggtagactaact

SEQ ID NO: 404951 - DNA, 15 bp, Homo sapiens
ttctggtagactaac

SEQ ID NO: 404952 - DNA, 15 bp, Homo sapiens
tttctggtagactaa

SEQ ID NO: 404953 - DNA, 15 bp, Homo sapiens
atttctggtagacta

SEQ ID NO: 404954 - DNA, 15 bp, Homo sapiens
catttctggtagact

SEQ ID NO: 404955 - DNA, 15 bp, Homo sapiens
ccatttctggtagac

SEQ ID NO: 404956 - DNA, 15 bp, Homo sapiens
cccatttctggtaga

SEQ ID NO: 404957 - DNA, 15 bp, Homo sapiens
ccccatttctggtag

SEQ ID NO: 404958 - DNA, 15 bp, Homo sapiens
gccccatttctggta

SEQ ID NO: 404959 - DNA, 15 bp, Homo sapiens
agccccatttctggt

SEQ ID NO: 404960 - DNA, 15 bp, Homo sapiens
aagccccatttctgg

SEQ ID NO: 404961 - DNA, 15 bp, Homo sapiens
aaagccccatttctg

SEQ ID NO: 404962 - DNA, 15 bp, Homo sapiens
gaaagccccatttct

SEQ ID NO: 404963 - DNA, 15 bp, Homo sapiens
agaaagccccatttc

SEQ ID NO: 404964 - DNA, 15 bp, Homo sapiens
aagaaagccccattt

SEQ ID NO: 404965 - DNA, 15 bp, Homo sapiens
gaagaaagccccatt

SEQ ID NO: 404966 - DNA, 15 bp, Homo sapiens
agaagaaagccccat

SEQ ID NO: 404967 - DNA, 15 bp, Homo sapiens
tagaagaaagcccca

SEQ ID NO: 404968 - DNA, 15 bp, Homo sapiens
atagaagaaagcccc

SEQ ID NO: 404969 - DNA, 15 bp, Homo sapiens
aatagaagaaagccc

SEQ ID NO: 404970 - DNA, 15 bp, Homo sapiens
gaatagaagaaagcc

SEQ ID NO: 404971 - DNA, 15 bp, Homo sapiens
agaatagaagaaagc

SEQ ID NO: 404972 - DNA, 15 bp, Homo sapiens
aagaatagaagaaag

SEQ ID NO: 404973 - DNA, 15 bp, Homo sapiens
gaagaatagaagaaa

SEQ ID NO: 404974 - DNA, 15 bp, Homo sapiens
agaagaatagaagaa

SEQ ID NO: 404975 - DNA, 15 bp, Homo sapiens
aagaagaatagaaga

SEQ ID NO: 404976 - DNA, 15 bp, Homo sapiens
aaagaagaatagaag

SEQ ID NO: 404977 - DNA, 15 bp, Homo sapiens
caaagaagaatagaa

SEQ ID NO: 404978 - DNA, 15 bp, Homo sapiens
acaaagaagaataga

SEQ ID NO: 404979 - DNA, 15 bp, Homo sapiens
aacaaagaagaatag

SEQ ID NO: 404980 - DNA, 15 bp, Homo sapiens
aaacaaagaagaata

SEQ ID NO: 404981 - DNA, 15 bp, Homo sapiens
aaaacaaagaagaat

SEQ ID NO: 404982 - DNA, 15 bp, Homo sapiens
taaaacaaagaagaa

SEQ ID NO: 404983 - DNA, 15 bp, Homo sapiens
gtaaaacaaagaaga

SEQ ID NO: 404984 - DNA, 15 bp, Homo sapiens
ggtaaaacaaagaag

SEQ ID NO: 404985 - DNA, 15 bp, Homo sapiens
tggtaaaacaaagaa

SEQ ID NO: 404986 - DNA, 15 bp, Homo sapiens
ttggtaaaacaaaga

SEQ ID NO: 404987 - DNA, 15 bp, Homo sapiens
attggtaaaacaaag

SEQ ID NO: 404988 - DNA, 15 bp, Homo sapiens
cattggtaaaacaaa

SEQ ID NO: 404989 - DNA, 15 bp, Homo sapiens
gcattggtaaaacaa

SEQ ID NO: 404990 - DNA, 15 bp, Homo sapiens
ggcattggtaaaaca

SEQ ID NO: 404991 - DNA, 15 bp, Homo sapiens
aggcattggtaaaac

SEQ ID NO: 404992 - DNA, 15 bp, Homo sapiens
taggcattggtaaaa

SEQ ID NO: 404993 - DNA, 15 bp, Homo sapiens
ctaggcattggtaaa

SEQ ID NO: 404994 - DNA, 15 bp, Homo sapiens
cctaggcattggtaa

SEQ ID NO: 404995 - DNA, 15 bp, Homo sapiens
tcctaggcattggta

SEQ ID NO: 404996 - DNA, 15 bp, Homo sapiens
gtcctaggcattggt

SEQ ID NO: 404997 - DNA, 15 bp, Homo sapiens
tgtcctaggcattgg

SEQ ID NO: 404998 - DNA, 15 bp, Homo sapiens
ctgtcctaggcattg

SEQ ID NO: 404999 - DNA, 15 bp, Homo sapiens
cctgtcctaggcatt

SEQ ID NO: 405000 - DNA, 15 bp, Homo sapiens
ccctgtcctaggcat

SEQ ID NO: 405001 - DNA, 15 bp, Homo sapiens
gccctgtcctaggca

SEQ ID NO: 405002 - DNA, 15 bp, Homo sapiens
ggccctgtcctaggc

SEQ ID NO: 405003 - DNA, 15 bp, Homo sapiens
aggccctgtcctagg

SEQ ID NO: 405004 - DNA, 15 bp, Homo sapiens
caggccctgtcctag

SEQ ID NO: 405005 - DNA, 15 bp, Homo sapiens
ccaggccctgtccta

SEQ ID NO: 405006 - DNA, 15 bp, Homo sapiens
tccaggccctgtcct

SEQ ID NO: 405007 - DNA, 15 bp, Homo sapiens
gtccaggccctgtcc

SEQ ID NO: 405008 - DNA, 15 bp, Homo sapiens
agtccaggccctgtc

SEQ ID NO: 405009 - DNA, 15 bp, Homo sapiens
tagtccaggccctgt

SEQ ID NO: 405010 - DNA, 15 bp, Homo sapiens
atagtccaggccctg

SEQ ID NO: 405011 - DNA, 15 bp, Homo sapiens
tatagtccaggccct

SEQ ID NO: 405012 - DNA, 15 bp, Homo sapiens
gtatagtccaggccc

SEQ ID NO: 405013 - DNA, 15 bp, Homo sapiens
ggtatagtccaggcc

SEQ ID NO: 405014 - DNA, 15 bp, Homo sapiens
tggtatagtccaggc

SEQ ID NO: 405015 - DNA, 15 bp, Homo sapiens
atggtatagtccagg

SEQ ID NO: 405016 - DNA, 15 bp, Homo sapiens
tatggtatagtccag

SEQ ID NO: 405017 - DNA, 15 bp, Homo sapiens
atatggtatagtcca

SEQ ID NO: 405018 - DNA, 15 bp, Homo sapiens
tatatggtatagtcc

SEQ ID NO: 405019 - DNA, 15 bp, Homo sapiens
ttatatggtatagtc

SEQ ID NO: 405020 - DNA, 15 bp, Homo sapiens
gttatatggtatagt

SEQ ID NO: 405021 - DNA, 15 bp, Homo sapiens
tgttatatggtatag

SEQ ID NO: 405022 - DNA, 15 bp, Homo sapiens
ttgttatatggtata

SEQ ID NO: 405023 - DNA, 15 bp, Homo sapiens
cttgttatatggtat

SEQ ID NO: 405024 - DNA, 15 bp, Homo sapiens
acttgttatatggta

SEQ ID NO: 405025 - DNA, 15 bp, Homo sapiens
tacttgttatatggt

SEQ ID NO: 405026 - DNA, 15 bp, Homo sapiens
ttacttgttatatgg

SEQ ID NO: 405027 - DNA, 15 bp, Homo sapiens
tttacttgttatatg

SEQ ID NO: 405028 - DNA, 15 bp, Homo sapiens
atttacttgttatat

SEQ ID NO: 405029 - DNA, 15 bp, Homo sapiens
catttacttgttata

SEQ ID NO: 405030 - DNA, 15 bp, Homo sapiens
acatttacttgttat

SEQ ID NO: 405031 - DNA, 15 bp, Homo sapiens
aacatttacttgtta

SEQ ID NO: 405032 - DNA, 15 bp, Homo sapiens
aaacatttacttgtt

SEQ ID NO: 405033 - DNA, 15 bp, Homo sapiens
taaacatttacttgt

SEQ ID NO: 405034 - DNA, 15 bp, Homo sapiens
ataaacatttacttg

SEQ ID NO: 405035 - DNA, 15 bp, Homo sapiens
aataaacatttactt

SEQ ID NO: 405036 - DNA, 15 bp, Homo sapiens
aaataaacatttact

SEQ ID NO: 405037 - DNA, 15 bp, Homo sapiens
aaaataaacatttac

SEQ ID NO: 405038 - DNA, 15 bp, Homo sapiens
caaaataaacattta

SEQ ID NO: 405039 - DNA, 15 bp, Homo sapiens
acaaaataaacattt

SEQ ID NO: 405040 - DNA, 15 bp, Homo sapiens
cacaaaataaacatt

SEQ ID NO: 405041 - DNA, 15 bp, Homo sapiens
tcacaaaataaacat

SEQ ID NO: 405042 - DNA, 15 bp, Homo sapiens
atcacaaaataaaca

SEQ ID NO: 405043 - DNA, 15 bp, Homo sapiens
catcacaaaataaac

SEQ ID NO: 405044 - DNA, 15 bp, Homo sapiens
acatcacaaaataaa

SEQ ID NO: 405045 - DNA, 15 bp, Homo sapiens
tacatcacaaaataa

SEQ ID NO: 405046 - DNA, 15 bp, Homo sapiens
ttacatcacaaaata

SEQ ID NO: 405047 - DNA, 15 bp, Homo sapiens
tttacatcacaaaat

SEQ ID NO: 405048 - DNA, 15 bp, Homo sapiens
ctttacatcacaaaa

SEQ ID NO: 405049 - DNA, 15 bp, Homo sapiens
cctttacatcacaaa

SEQ ID NO: 405050 - DNA, 15 bp, Homo sapiens
acctttacatcacaa

SEQ ID NO: 405051 - DNA, 15 bp, Homo sapiens
cacctttacatcaca

SEQ ID NO: 405052 - DNA, 15 bp, Homo sapiens
tcacctttacatcac

SEQ ID NO: 405053 - DNA, 15 bp, Homo sapiens
atcacctttacatca

SEQ ID NO: 405054 - DNA, 15 bp, Homo sapiens
aatcacctttacatc

SEQ ID NO: 405055 - DNA, 15 bp, Homo sapiens
aaatcacctttacat

SEQ ID NO: 405056 - DNA, 15 bp, Homo sapiens
caaatcacctttaca

SEQ ID NO: 405057 - DNA, 15 bp, Homo sapiens
acaaatcacctttac

SEQ ID NO: 405058 - DNA, 15 bp, Homo sapiens
cacaaatcaccttta

SEQ ID NO: 405059 - DNA, 15 bp, Homo sapiens
gcacaaatcaccttt

SEQ ID NO: 405060 - DNA, 15 bp, Homo sapiens
tgcacaaatcacctt

SEQ ID NO: 405061 - DNA, 15 bp, Homo sapiens
ttgcacaaatcacct

SEQ ID NO: 405062 - DNA, 15 bp, Homo sapiens
attgcacaaatcacc

SEQ ID NO: 405063 - DNA, 15 bp, Homo sapiens
tattgcacaaatcac

SEQ ID NO: 405064 - DNA, 15 bp, Homo sapiens
ttattgcacaaatca

SEQ ID NO: 405065 - DNA, 15 bp, Homo sapiens
attattgcacaaatc

SEQ ID NO: 405066 - DNA, 15 bp, Homo sapiens
cattattgcacaaat

SEQ ID NO: 405067 - DNA, 15 bp, Homo sapiens
ccattattgcacaaa

SEQ ID NO: 405068 - DNA, 15 bp, Homo sapiens
cccattattgcacaa

SEQ ID NO: 405069 - DNA, 15 bp, Homo sapiens
acccattattgcaca

SEQ ID NO: 405070 - DNA, 15 bp, Homo sapiens
tacccattattgcac

SEQ ID NO: 405071 - DNA, 15 bp, Homo sapiens
ttacccattattgca

SEQ ID NO: 405072 - DNA, 15 bp, Homo sapiens
attacccattattgc

SEQ ID NO: 405073 - DNA, 15 bp, Homo sapiens
cattacccattattg

SEQ ID NO: 405074 - DNA, 15 bp, Homo sapiens
ccattacccattatt

SEQ ID NO: 405075 - DNA, 15 bp, Homo sapiens
tccattacccattat

SEQ ID NO: 405076 - DNA, 15 bp, Homo sapiens
ttccattacccatta

SEQ ID NO: 405077 - DNA, 15 bp, Homo sapiens
tttccattacccatt

SEQ ID NO: 405078 - DNA, 15 bp, Homo sapiens
gtttccattacccat

SEQ ID NO: 405079 - DNA, 15 bp, Homo sapiens
tgtttccattaccca

SEQ ID NO: 405080 - DNA, 15 bp, Homo sapiens
gtgtttccattaccc

SEQ ID NO: 405081 - DNA, 15 bp, Homo sapiens
agtgtttccattacc

SEQ ID NO: 405082 - DNA, 15 bp, Homo sapiens
aagtgtttccattac

SEQ ID NO: 405083 - DNA, 15 bp, Homo sapiens
taagtgtttccatta

SEQ ID NO: 405084 - DNA, 15 bp, Homo sapiens
ctaagtgtttccatt

SEQ ID NO: 405085 - DNA, 15 bp, Homo sapiens
cctaagtgtttccat

SEQ ID NO: 405086 - DNA, 15 bp, Homo sapiens
ccctaagtgtttcca

SEQ ID NO: 405087 - DNA, 15 bp, Homo sapiens
tccctaagtgtttcc

SEQ ID NO: 405088 - DNA, 15 bp, Homo sapiens
atccctaagtgtttc

SEQ ID NO: 405089 - DNA, 15 bp, Homo sapiens
aatccctaagtgttt

SEQ ID NO: 405090 - DNA, 15 bp, Homo sapiens
aaatccctaagtgtt

SEQ ID NO: 405091 - DNA, 15 bp, Homo sapiens
taaatccctaagtgt

SEQ ID NO: 405092 - DNA, 15 bp, Homo sapiens
ctaaatccctaagtg

SEQ ID NO: 405093 - DNA, 15 bp, Homo sapiens
tctaaatccctaagt

SEQ ID NO: 405094 - DNA, 15 bp, Homo sapiens
ttctaaatccctaag

SEQ ID NO: 405095 - DNA, 15 bp, Homo sapiens
attctaaatccctaa

SEQ ID NO: 405096 - DNA, 15 bp, Homo sapiens
aattctaaatcccta

SEQ ID NO: 405097 - DNA, 15 bp, Homo sapiens
aaattctaaatccct

SEQ ID NO: 405098 - DNA, 15 bp, Homo sapiens
taaattctaaatccc

SEQ ID NO: 405099 - DNA, 15 bp, Homo sapiens
ttaaattctaaatcc

SEQ ID NO: 405100 - DNA, 15 bp, Homo sapiens
tttaaattctaaatc

SEQ ID NO: 405101 - DNA, 15 bp, Homo sapiens
gtttaaattctaaat

SEQ ID NO: 405102 - DNA, 15 bp, Homo sapiens
tgtttaaattctaaa

SEQ ID NO: 405103 - DNA, 15 bp, Homo sapiens
atgtttaaattctaa

SEQ ID NO: 405104 - DNA, 15 bp, Homo sapiens
catgtttaaattcta

SEQ ID NO: 405105 - DNA, 15 bp, Homo sapiens
ccatgtttaaattct

SEQ ID NO: 405106 - DNA, 15 bp, Homo sapiens
tccatgtttaaattc

SEQ ID NO: 405107 - DNA, 15 bp, Homo sapiens
ttccatgtttaaatt

SEQ ID NO: 405108 - DNA, 15 bp, Homo sapiens
cttccatgtttaaat

SEQ ID NO: 405109 - DNA, 15 bp, Homo sapiens
tcttccatgtttaaa

SEQ ID NO: 405110 - DNA, 15 bp, Homo sapiens
ttcttccatgtttaa

SEQ ID NO: 405111 - DNA, 15 bp, Homo sapiens
attcttccatgttta

SEQ ID NO: 405112 - DNA, 15 bp, Homo sapiens
cattcttccatgttt

SEQ ID NO: 405113 - DNA, 15 bp, Homo sapiens
tcattcttccatgtt

SEQ ID NO: 405114 - DNA, 15 bp, Homo sapiens
gtcattcttccatgt

SEQ ID NO: 405115 - DNA, 15 bp, Homo sapiens
tgtcattcttccatg

SEQ ID NO: 405116 - DNA, 15 bp, Homo sapiens
ctgtcattcttccat

SEQ ID NO: 405117 - DNA, 15 bp, Homo sapiens
cctgtcattcttcca

SEQ ID NO: 405118 - DNA, 15 bp, Homo sapiens
acctgtcattcttcc

SEQ ID NO: 405119 - DNA, 15 bp, Homo sapiens
tacctgtcattcttc

SEQ ID NO: 405120 - DNA, 15 bp, Homo sapiens
atacctgtcattctt

SEQ ID NO: 405121 - DNA, 15 bp, Homo sapiens
tatacctgtcattct

SEQ ID NO: 405122 - DNA, 15 bp, Homo sapiens
ttatacctgtcattc

SEQ ID NO: 405123 - DNA, 15 bp, Homo sapiens
attatacctgtcatt

SEQ ID NO: 405124 - DNA, 15 bp, Homo sapiens
gattatacctgtcat

SEQ ID NO: 405125 - DNA, 15 bp, Homo sapiens
agattatacctgtca

SEQ ID NO: 405126 - DNA, 15 bp, Homo sapiens
cagattatacctgtc

SEQ ID NO: 405127 - DNA, 15 bp, Homo sapiens
tcagattatacctgt

SEQ ID NO: 405128 - DNA, 15 bp, Homo sapiens
atcagattatacctg

SEQ ID NO: 405129 - DNA, 15 bp, Homo sapiens
tatcagattatacct

SEQ ID NO: 405130 - DNA, 15 bp, Homo sapiens
ttatcagattatacc

SEQ ID NO: 405131 - DNA, 15 bp, Homo sapiens
tttatcagattatac

SEQ ID NO: 405132 - DNA, 15 bp, Homo sapiens
ttttatcagattata

SEQ ID NO: 405133 - DNA, 15 bp, Homo sapiens
cttttatcagattat

SEQ ID NO: 405134 - DNA, 15 bp, Homo sapiens
acttttatcagatta

SEQ ID NO: 405135 - DNA, 15 bp, Homo sapiens
gacttttatcagatt

SEQ ID NO: 405136 - DNA, 15 bp, Homo sapiens
agacttttatcagat

SEQ ID NO: 405137 - DNA, 15 bp, Homo sapiens
tagacttttatcaga

SEQ ID NO: 405138 - DNA, 15 bp, Homo sapiens
ttagacttttatcag

SEQ ID NO: 405139 - DNA, 15 bp, Homo sapiens
tttagacttttatca

SEQ ID NO: 405140 - DNA, 15 bp, Homo sapiens
atttagacttttatc

SEQ ID NO: 405141 - DNA, 15 bp, Homo sapiens
catttagacttttat

SEQ ID NO: 405142 - DNA, 15 bp, Homo sapiens
tcatttagactttta

SEQ ID NO: 405143 - DNA, 15 bp, Homo sapiens
gtcatttagactttt

SEQ ID NO: 405144 - DNA, 15 bp, Homo sapiens
tgtcatttagacttt

SEQ ID NO: 405145 - DNA, 15 bp, Homo sapiens
gtgtcatttagactt

SEQ ID NO: 405146 - DNA, 15 bp, Homo sapiens
ggtgtcatttagact

SEQ ID NO: 405147 - DNA, 15 bp, Homo sapiens
aggtgtcatttagac

SEQ ID NO: 405148 - DNA, 15 bp, Homo sapiens
gaggtgtcatttaga

SEQ ID NO: 405149 - DNA, 15 bp, Homo sapiens
tgaggtgtcatttag

SEQ ID NO: 405150 - DNA, 15 bp, Homo sapiens
ctgaggtgtcattta

SEQ ID NO: 405151 - DNA, 15 bp, Homo sapiens
tctgaggtgtcattt

SEQ ID NO: 405152 - DNA, 15 bp, Homo sapiens
ttctgaggtgtcatt

SEQ ID NO: 405153 - DNA, 15 bp, Homo sapiens
tttctgaggtgtcat

SEQ ID NO: 405154 - DNA, 15 bp, Homo sapiens
atttctgaggtgtca

SEQ ID NO: 405155 - DNA, 15 bp, Homo sapiens
aatttctgaggtgtc

SEQ ID NO: 405156 - DNA, 15 bp, Homo sapiens
gaatttctgaggtgt

SEQ ID NO: 405157 - DNA, 15 bp, Homo sapiens
agaatttctgaggtg

SEQ ID NO: 405158 - DNA, 15 bp, Homo sapiens
gagaatttctgaggt

SEQ ID NO: 405159 - DNA, 15 bp, Homo sapiens
agagaatttctgagg

SEQ ID NO: 405160 - DNA, 15 bp, Homo sapiens
cagagaatttctgag

SEQ ID NO: 405161 - DNA, 15 bp, Homo sapiens
acagagaatttctga

SEQ ID NO: 405162 - DNA, 15 bp, Homo sapiens
tacagagaatttctg

SEQ ID NO: 405163 - DNA, 15 bp, Homo sapiens
ctacagagaatttct

SEQ ID NO: 405164 - DNA, 15 bp, Homo sapiens
tctacagagaatttc

SEQ ID NO: 405165 - DNA, 15 bp, Homo sapiens
atctacagagaattt

SEQ ID NO: 405166 - DNA, 15 bp, Homo sapiens
catctacagagaatt

SEQ ID NO: 405167 - DNA, 15 bp, Homo sapiens
tcatctacagagaat

SEQ ID NO: 405168 - DNA, 15 bp, Homo sapiens
ctcatctacagagaa

SEQ ID NO: 405169 - DNA, 15 bp, Homo sapiens
cctcatctacagaga

SEQ ID NO: 405170 - DNA, 15 bp, Homo sapiens
gcctcatctacagag

SEQ ID NO: 405171 - DNA, 15 bp, Homo sapiens
cgcctcatctacaga

SEQ ID NO: 405172 - DNA, 15 bp, Homo sapiens
gcgcctcatctacag

SEQ ID NO: 405173 - DNA, 15 bp, Homo sapiens
agcgcctcatctaca

SEQ ID NO: 405174 - DNA, 15 bp, Homo sapiens
gagcgcctcatctac

SEQ ID NO: 405175 - DNA, 15 bp, Homo sapiens
tgagcgcctcatcta

SEQ ID NO: 405176 - DNA, 15 bp, Homo sapiens
atgagcgcctcatct

SEQ ID NO: 405177 - DNA, 15 bp, Homo sapiens
aatgagcgcctcatc

SEQ ID NO: 405178 - DNA, 15 bp, Homo sapiens
gaatgagcgcctcat

SEQ ID NO: 405179 - DNA, 15 bp, Homo sapiens
tgaatgagcgcctca

SEQ ID NO: 405180 - DNA, 15 bp, Homo sapiens
atgaatgagcgcctc

SEQ ID NO: 405181 - DNA, 15 bp, Homo sapiens
catgaatgagcgcct

SEQ ID NO: 405182 - DNA, 15 bp, Homo sapiens
acatgaatgagcgcc

SEQ ID NO: 405183 - DNA, 15 bp, Homo sapiens
tacatgaatgagcgc

SEQ ID NO: 405184 - DNA, 15 bp, Homo sapiens
atacatgaatgagcg

SEQ ID NO: 405185 - DNA, 15 bp, Homo sapiens
aatacatgaatgagc

SEQ ID NO: 405186 - DNA, 15 bp, Homo sapiens
gaatacatgaatgag

SEQ ID NO: 405187 - DNA, 15 bp, Homo sapiens
tgaatacatgaatga

SEQ ID NO: 405188 - DNA, 15 bp, Homo sapiens
atgaatacatgaatg

SEQ ID NO: 405189 - DNA, 15 bp, Homo sapiens
catgaatacatgaat

SEQ ID NO: 405190 - DNA, 15 bp, Homo sapiens
ccatgaatacatgaa

SEQ ID NO: 405191 - DNA, 15 bp, Homo sapiens
gccatgaatacatga

SEQ ID NO: 405192 - DNA, 15 bp, Homo sapiens
agccatgaatacatg

SEQ ID NO: 405193 - DNA, 15 bp, Homo sapiens
tagccatgaatacat

SEQ ID NO: 405194 - DNA, 15 bp, Homo sapiens
atagccatgaataca

SEQ ID NO: 405195 - DNA, 15 bp, Homo sapiens
tatagccatgaatac

SEQ ID NO: 405196 - DNA, 15 bp, Homo sapiens
ttatagccatgaata

SEQ ID NO: 405197 - DNA, 15 bp, Homo sapiens
tttatagccatgaat

SEQ ID NO: 405198 - DNA, 15 bp, Homo sapiens
ctttatagccatgaa

SEQ ID NO: 405199 - DNA, 15 bp, Homo sapiens
actttatagccatga

SEQ ID NO: 405200 - DNA, 15 bp, Homo sapiens
tactttatagccatg

SEQ ID NO: 405201 - DNA, 15 bp, Homo sapiens
ctactttatagccat

SEQ ID NO: 405202 - DNA, 15 bp, Homo sapiens
actactttatagcca

SEQ ID NO: 405203 - DNA, 15 bp, Homo sapiens
aactactttatagcc

SEQ ID NO: 405204 - DNA, 15 bp, Homo sapiens
taactactttatagc

SEQ ID NO: 405205 - DNA, 15 bp, Homo sapiens
ataactactttatag

SEQ ID NO: 405206 - DNA, 15 bp, Homo sapiens
aataactactttata

SEQ ID NO: 405207 - DNA, 15 bp, Homo sapiens
taataactactttat

SEQ ID NO: 405208 - DNA, 15 bp, Homo sapiens
ttaataactacttta

SEQ ID NO: 405209 - DNA, 15 bp, Homo sapiens
cttaataactacttt

SEQ ID NO: 405210 - DNA, 15 bp, Homo sapiens
acttaataactactt

SEQ ID NO: 405211 - DNA, 15 bp, Homo sapiens
tacttaataactact

SEQ ID NO: 405212 - DNA, 15 bp, Homo sapiens
gtacttaataactac

SEQ ID NO: 405213 - DNA, 15 bp, Homo sapiens
tgtacttaataacta

SEQ ID NO: 405214 - DNA, 15 bp, Homo sapiens
atgtacttaataact

SEQ ID NO: 405215 - DNA, 15 bp, Homo sapiens
catgtacttaataac

SEQ ID NO: 405216 - DNA, 15 bp, Homo sapiens
ccatgtacttaataa

SEQ ID NO: 405217 - DNA, 15 bp, Homo sapiens
tccatgtacttaata

SEQ ID NO: 405218 - DNA, 15 bp, Homo sapiens
gtccatgtacttaat

SEQ ID NO: 405219 - DNA, 15 bp, Homo sapiens
agtccatgtacttaa

SEQ ID NO: 405220 - DNA, 15 bp, Homo sapiens
aagtccatgtactta

SEQ ID NO: 405221 - DNA, 15 bp, Homo sapiens
taagtccatgtactt

SEQ ID NO: 405222 - DNA, 15 bp, Homo sapiens
ttaagtccatgtact

SEQ ID NO: 405223 - DNA, 15 bp, Homo sapiens
attaagtccatgtac

SEQ ID NO: 405224 - DNA, 15 bp, Homo sapiens
ccattaagtccatgt

SEQ ID NO: 405225 - DNA, 15 bp, Homo sapiens
cccattaagtccatg

SEQ ID NO: 405226 - DNA, 15 bp, Homo sapiens
acccattaagtccat

SEQ ID NO: 405227 - DNA, 15 bp, Homo sapiens
aacccattaagtcca

SEQ ID NO: 405228 - DNA, 15 bp, Homo sapiens
gaacccattaagtcc

SEQ ID NO: 405229 - DNA, 15 bp, Homo sapiens
tgaacccattaagtc

SEQ ID NO: 405230 - DNA, 15 bp, Homo sapiens
ttgaacccattaagt

SEQ ID NO: 405231 - DNA, 15 bp, Homo sapiens
tttgaacccattaag

SEQ ID NO: 405232 - DNA, 15 bp, Homo sapiens
ttttgaacccattaa

SEQ ID NO: 405233 - DNA, 15 bp, Homo sapiens
gttttgaacccatta

SEQ ID NO: 405234 - DNA, 15 bp, Homo sapiens
ggttttgaacccatt

SEQ ID NO: 405235 - DNA, 15 bp, Homo sapiens
gggttttgaacccat

SEQ ID NO: 405236 - DNA, 15 bp, Homo sapiens
tgggttttgaaccca

SEQ ID NO: 405237 - DNA, 15 bp, Homo sapiens
ctgggttttgaaccc

SEQ ID NO: 405238 - DNA, 15 bp, Homo sapiens
actgggttttgaacc

SEQ ID NO: 405239 - DNA, 15 bp, Homo sapiens
gactgggttttgaac

SEQ ID NO: 405240 - DNA, 15 bp, Homo sapiens
ggactgggttttgaa

SEQ ID NO: 405241 - DNA, 15 bp, Homo sapiens
aggactgggttttga

SEQ ID NO: 405242 - DNA, 15 bp, Homo sapiens
aaggactgggttttg

SEQ ID NO: 405243 - DNA, 15 bp, Homo sapiens
taaggactgggtttt

SEQ ID NO: 405244 - DNA, 15 bp, Homo sapiens
gtaaggactgggttt

SEQ ID NO: 405245 - DNA, 15 bp, Homo sapiens
tgtaaggactgggtt

SEQ ID NO: 405246 - DNA, 15 bp, Homo sapiens
atgtaaggactgggt

SEQ ID NO: 405247 - DNA, 15 bp, Homo sapiens
aatgtaaggactggg

SEQ ID NO: 405248 - DNA, 15 bp, Homo sapiens
aaatgtaaggactgg

SEQ ID NO: 405249 - DNA, 15 bp, Homo sapiens
taaatgtaaggactg

SEQ ID NO: 405250 - DNA, 15 bp, Homo sapiens
gtaaatgtaaggact

SEQ ID NO: 405251 - DNA, 15 bp, Homo sapiens
agtaaatgtaaggac

SEQ ID NO: 405252 - DNA, 15 bp, Homo sapiens
cagtaaatgtaagga

SEQ ID NO: 405253 - DNA, 15 bp, Homo sapiens
gcagtaaatgtaagg

SEQ ID NO: 405254 - DNA, 15 bp, Homo sapiens
tgcagtaaatgtaag

SEQ ID NO: 405255 - DNA, 15 bp, Homo sapiens
ctgcagtaaatgtaa

SEQ ID NO: 405256 - DNA, 15 bp, Homo sapiens
cctgcagtaaatgta

SEQ ID NO: 405257 - DNA, 15 bp, Homo sapiens
acctgcagtaaatgt

SEQ ID NO: 405258 - DNA, 15 bp, Homo sapiens
aacctgcagtaaatg

SEQ ID NO: 405259 - DNA, 15 bp, Homo sapiens
aaacctgcagtaaat

SEQ ID NO: 405260 - DNA, 15 bp, Homo sapiens
taaacctgcagtaaa

SEQ ID NO: 405261 - DNA, 15 bp, Homo sapiens
ttaaacctgcagtaa

SEQ ID NO: 405262 - DNA, 15 bp, Homo sapiens
attaaacctgcagta

SEQ ID NO: 405263 - DNA, 15 bp, Homo sapiens
cattaaacctgcagt

SEQ ID NO: 405264 - DNA, 15 bp, Homo sapiens
acattaaacctgcag

SEQ ID NO: 405265 - DNA, 15 bp, Homo sapiens
aacattaaacctgca

SEQ ID NO: 405266 - DNA, 15 bp, Homo sapiens
taacattaaacctgc

SEQ ID NO: 405267 - DNA, 15 bp, Homo sapiens
ttaacattaaacctg

SEQ ID NO: 405268 - DNA, 15 bp, Homo sapiens
tttaacattaaacct

SEQ ID NO: 405269 - DNA, 15 bp, Homo sapiens
atttaacattaaacc

SEQ ID NO: 405270 - DNA, 15 bp, Homo sapiens
aatttaacattaaac

SEQ ID NO: 405271 - DNA, 15 bp, Homo sapiens
taatttaacattaaa

SEQ ID NO: 405272 - DNA, 15 bp, Homo sapiens
ataatttaacattaa

SEQ ID NO: 405273 - DNA, 15 bp, Homo sapiens
aataatttaacatta

SEQ ID NO: 405274 - DNA, 15 bp, Homo sapiens
aaataatttaacatt

SEQ ID NO: 405275 - DNA, 15 bp, Homo sapiens
taaataatttaacat

SEQ ID NO: 405276 - DNA, 15 bp, Homo sapiens
gtaaataatttaaca

SEQ ID NO: 405277 - DNA, 15 bp, Homo sapiens
ggtaaataatttaac

SEQ ID NO: 405278 - DNA, 15 bp, Homo sapiens
aggtaaataatttaa

SEQ ID NO: 405279 - DNA, 15 bp, Homo sapiens
gaggtaaataattta

SEQ ID NO: 405280 - DNA, 15 bp, Homo sapiens
agaggtaaataattt

SEQ ID NO: 405281 - DNA, 15 bp, Homo sapiens
gagaggtaaataatt

SEQ ID NO: 405282 - DNA, 15 bp, Homo sapiens
agagaggtaaataat

SEQ ID NO: 405283 - DNA, 15 bp, Homo sapiens
cagagaggtaaataa

SEQ ID NO: 405284 - DNA, 15 bp, Homo sapiens
tcagagaggtaaata

SEQ ID NO: 405285 - DNA, 15 bp, Homo sapiens
ctcagagaggtaaat

SEQ ID NO: 405286 - DNA, 15 bp, Homo sapiens
gctcagagaggtaaa

SEQ ID NO: 405287 - DNA, 15 bp, Homo sapiens
ggctcagagaggtaa

SEQ ID NO: 405288 - DNA, 15 bp, Homo sapiens
aggctcagagaggta

SEQ ID NO: 405289 - DNA, 15 bp, Homo sapiens
gaggctcagagaggt

SEQ ID NO: 405290 - DNA, 15 bp, Homo sapiens
agaggctcagagagg

SEQ ID NO: 405291 - DNA, 15 bp, Homo sapiens
aagaggctcagagag

SEQ ID NO: 405292 - DNA, 15 bp, Homo sapiens
gaagaggctcagaga

SEQ ID NO: 405293 - DNA, 15 bp, Homo sapiens
agaagaggctcagag

SEQ ID NO: 405294 - DNA, 15 bp, Homo sapiens
aagaagaggctcaga

SEQ ID NO: 405295 - DNA, 15 bp, Homo sapiens
gaagaagaggctcag

SEQ ID NO: 405296 - DNA, 15 bp, Homo sapiens
tgaagaagaggctca

SEQ ID NO: 405297 - DNA, 15 bp, Homo sapiens
atgaagaagaggctc

SEQ ID NO: 405298 - DNA, 15 bp, Homo sapiens
gatgaagaagaggct

SEQ ID NO: 405299 - DNA, 15 bp, Homo sapiens
agatgaagaagaggc

SEQ ID NO: 405300 - DNA, 15 bp, Homo sapiens
tagatgaagaagagg

SEQ ID NO: 405301 - DNA, 15 bp, Homo sapiens
atagatgaagaagag

SEQ ID NO: 405302 - DNA, 15 bp, Homo sapiens
catagatgaagaaga

SEQ ID NO: 405303 - DNA, 15 bp, Homo sapiens
tcatagatgaagaag

SEQ ID NO: 405304 - DNA, 15 bp, Homo sapiens
ttcatagatgaagaa

SEQ ID NO: 405305 - DNA, 15 bp, Homo sapiens
tttcatagatgaaga

SEQ ID NO: 405306 - DNA, 15 bp, Homo sapiens
atttcatagatgaag

SEQ ID NO: 405307 - DNA, 15 bp, Homo sapiens
catttcatagatgaa

SEQ ID NO: 405308 - DNA, 15 bp, Homo sapiens
ccatttcatagatga

SEQ ID NO: 405309 - DNA, 15 bp, Homo sapiens
tccatttcatagatg

SEQ ID NO: 405310 - DNA, 15 bp, Homo sapiens
ctccatttcatagat

SEQ ID NO: 405311 - DNA, 15 bp, Homo sapiens
cctccatttcataga

SEQ ID NO: 405312 - DNA, 15 bp, Homo sapiens
tcctccatttcatag

SEQ ID NO: 405313 - DNA, 15 bp, Homo sapiens
atcctccatttcata

SEQ ID NO: 405314 - DNA, 15 bp, Homo sapiens
tatcctccatttcat

SEQ ID NO: 405315 - DNA, 15 bp, Homo sapiens
ttatcctccatttca

SEQ ID NO: 405316 - DNA, 15 bp, Homo sapiens
attatcctccatttc

SEQ ID NO: 405317 - DNA, 15 bp, Homo sapiens
tattatcctccattt

SEQ ID NO: 405318 - DNA, 15 bp, Homo sapiens
atattatcctccatt

SEQ ID NO: 405319 - DNA, 15 bp, Homo sapiens
aatattatcctccat

SEQ ID NO: 405320 - DNA, 15 bp, Homo sapiens
caatattatcctcca

SEQ ID NO: 405321 - DNA, 15 bp, Homo sapiens
acaatattatcctcc

SEQ ID NO: 405322 - DNA, 15 bp, Homo sapiens
tacaatattatcctc

SEQ ID NO: 405323 - DNA, 15 bp, Homo sapiens
gtacaatattatcct

SEQ ID NO: 405324 - DNA, 15 bp, Homo sapiens
agtacaatattatcc

SEQ ID NO: 405325 - DNA, 15 bp, Homo sapiens
aagtacaatattatc

SEQ ID NO: 405326 - DNA, 15 bp, Homo sapiens
taagtacaatattat

SEQ ID NO: 405327 - DNA, 15 bp, Homo sapiens
gtaagtacaatatta

SEQ ID NO: 405328 - DNA, 15 bp, Homo sapiens
ggtaagtacaatatt

SEQ ID NO: 405329 - DNA, 15 bp, Homo sapiens
aggtaagtacaatat

SEQ ID NO: 405330 - DNA, 15 bp, Homo sapiens
taggtaagtacaata

SEQ ID NO: 405331 - DNA, 15 bp, Homo sapiens
ttaggtaagtacaat

SEQ ID NO: 405332 - DNA, 15 bp, Homo sapiens
gttaggtaagtacaa

SEQ ID NO: 405333 - DNA, 15 bp, Homo sapiens
tgttaggtaagtaca

SEQ ID NO: 405334 - DNA, 15 bp, Homo sapiens
ctgttaggtaagtac

SEQ ID NO: 405335 - DNA, 15 bp, Homo sapiens
actgttaggtaagta

SEQ ID NO: 405336 - DNA, 15 bp, Homo sapiens
cactgttaggtaagt

SEQ ID NO: 405337 - DNA, 15 bp, Homo sapiens
acactgttaggtaag

SEQ ID NO: 405338 - DNA, 15 bp, Homo sapiens
aacactgttaggtaa

SEQ ID NO: 405339 - DNA, 15 bp, Homo sapiens
caacactgttaggta

SEQ ID NO: 405340 - DNA, 15 bp, Homo sapiens
gcaacactgttaggt

SEQ ID NO: 405341 - DNA, 15 bp, Homo sapiens
ggcaacactgttagg

SEQ ID NO: 405342 - DNA, 15 bp, Homo sapiens
tggcaacactgttag

SEQ ID NO: 405343 - DNA, 15 bp, Homo sapiens
ctggcaacactgtta

SEQ ID NO: 405344 - DNA, 15 bp, Homo sapiens
cctggcaacactgtt

SEQ ID NO: 405345 - DNA, 15 bp, Homo sapiens
tcctggcaacactgt

SEQ ID NO: 405346 - DNA, 15 bp, Homo sapiens
ctcctggcaacactg

SEQ ID NO: 405347 - DNA, 15 bp, Homo sapiens
cctcctggcaacact

SEQ ID NO: 405348 - DNA, 15 bp, Homo sapiens
tcctcctggcaacac

SEQ ID NO: 405349 - DNA, 15 bp, Homo sapiens
atcctcctggcaaca

SEQ ID NO: 405350 - DNA, 15 bp, Homo sapiens
aatcctcctggcaac

SEQ ID NO: 405351 - DNA, 15 bp, Homo sapiens
aaatcctcctggcaa

SEQ ID NO: 405352 - DNA, 15 bp, Homo sapiens
taaatcctcctggca

SEQ ID NO: 405353 - DNA, 15 bp, Homo sapiens
ttaaatcctcctggc

SEQ ID NO: 405354 - DNA, 15 bp, Homo sapiens
attaaatcctcctgg

SEQ ID NO: 405355 - DNA, 15 bp, Homo sapiens
cattaaatcctcctg

SEQ ID NO: 405356 - DNA, 15 bp, Homo sapiens
tcattaaatcctcct

SEQ ID NO: 405357 - DNA, 15 bp, Homo sapiens
gtcattaaatcctcc

SEQ ID NO: 405358 - DNA, 15 bp, Homo sapiens
tgtcattaaatcctc

SEQ ID NO: 405359 - DNA, 15 bp, Homo sapiens
ctgtcattaaatcct

SEQ ID NO: 405360 - DNA, 15 bp, Homo sapiens
tctgtcattaaatcc

SEQ ID NO: 405361 - DNA, 15 bp, Homo sapiens
ctctgtcattaaatc

SEQ ID NO: 405362 - DNA, 15 bp, Homo sapiens
gctctgtcattaaat

SEQ ID NO: 405363 - DNA, 15 bp, Homo sapiens
ggctctgtcattaaa

SEQ ID NO: 405364 - DNA, 15 bp, Homo sapiens
aggctctgtcattaa

SEQ ID NO: 405365 - DNA, 15 bp, Homo sapiens
caggctctgtcatta

SEQ ID NO: 405366 - DNA, 15 bp, Homo sapiens
gcaggctctgtcatt

SEQ ID NO: 405367 - DNA, 15 bp, Homo sapiens
ggcaggctctgtcat

SEQ ID NO: 405368 - DNA, 15 bp, Homo sapiens
cggcaggctctgtca

SEQ ID NO: 405369 - DNA, 15 bp, Homo sapiens
gcggcaggctctgtc

SEQ ID NO: 405370 - DNA, 15 bp, Homo sapiens
tgcggcaggctctgt

SEQ ID NO: 405371 - DNA, 15 bp, Homo sapiens
atgcggcaggctctg

SEQ ID NO: 405372 - DNA, 15 bp, Homo sapiens
tatgcggcaggctct

SEQ ID NO: 405373 - DNA, 15 bp, Homo sapiens
atatgcggcaggctc

SEQ ID NO: 405374 - DNA, 15 bp, Homo sapiens
aatatgcggcaggct

SEQ ID NO: 405375 - DNA, 15 bp, Homo sapiens
caatatgcggcaggc

SEQ ID NO: 405376 - DNA, 15 bp, Homo sapiens
tcaatatgcggcagg

SEQ ID NO: 405377 - DNA, 15 bp, Homo sapiens
ttcaatatgcggcag

SEQ ID NO: 405378 - DNA, 15 bp, Homo sapiens
gttcaatatgcggca

SEQ ID NO: 405379 - DNA, 15 bp, Homo sapiens
tgttcaatatgcggc

SEQ ID NO: 405380 - DNA, 15 bp, Homo sapiens
atgttcaatatgcgg

SEQ ID NO: 405381 - DNA, 15 bp, Homo sapiens
aatgttcaatatgcg

SEQ ID NO: 405382 - DNA, 15 bp, Homo sapiens
taatgttcaatatgc

SEQ ID NO: 405383 - DNA, 15 bp, Homo sapiens
ttaatgttcaatatg

SEQ ID NO: 405384 - DNA, 15 bp, Homo sapiens
cttaatgttcaatat

SEQ ID NO: 405385 - DNA, 15 bp, Homo sapiens
acttaatgttcaata

SEQ ID NO: 405386 - DNA, 15 bp, Homo sapiens
tacttaatgttcaat

SEQ ID NO: 405387 - DNA, 15 bp, Homo sapiens
ttacttaatgttcaa

SEQ ID NO: 405388 - DNA, 15 bp, Homo sapiens
tttacttaatgttca

SEQ ID NO: 405389 - DNA, 15 bp, Homo sapiens
atttacttaatgttc

SEQ ID NO: 405390 - DNA, 15 bp, Homo sapiens
tatttacttaatgtt

SEQ ID NO: 405391 - DNA, 15 bp, Homo sapiens
atatttacttaatgt

SEQ ID NO: 405392 - DNA, 15 bp, Homo sapiens
tatatttacttaatg

SEQ ID NO: 405393 - DNA, 15 bp, Homo sapiens
atatatttacttaat

SEQ ID NO: 405394 - DNA, 15 bp, Homo sapiens
tatatatttacttaa

SEQ ID NO: 405395 - DNA, 15 bp, Homo sapiens
atatatatttactta

SEQ ID NO: 405396 - DNA, 15 bp, Homo sapiens
tatatatatttactt

SEQ ID NO: 405397 - DNA, 15 bp, Homo sapiens
ttatatatatttact

SEQ ID NO: 405398 - DNA, 15 bp, Homo sapiens
attatatatatttac

SEQ ID NO: 405399 - DNA, 15 bp, Homo sapiens
aattatatatattta

SEQ ID NO: 405400 - DNA, 15 bp, Homo sapiens
taattatatatattt

SEQ ID NO: 405401 - DNA, 15 bp, Homo sapiens
gtaattatatatatt

SEQ ID NO: 405402 - DNA, 15 bp, Homo sapiens
tgtaattatatatat

SEQ ID NO: 405403 - DNA, 15 bp, Homo sapiens
ctgtaattatatata

SEQ ID NO: 405404 - DNA, 15 bp, Homo sapiens
gctgtaattatatat

SEQ ID NO: 405405 - DNA, 15 bp, Homo sapiens
tgctgtaattatata

SEQ ID NO: 405406 - DNA, 15 bp, Homo sapiens
ttgctgtaattatat

SEQ ID NO: 405407 - DNA, 15 bp, Homo sapiens
tttgctgtaattata

SEQ ID NO: 405408 - DNA, 15 bp, Homo sapiens
ctttgctgtaattat

SEQ ID NO: 405409 - DNA, 15 bp, Homo sapiens
actttgctgtaatta

SEQ ID NO: 405410 - DNA, 15 bp, Homo sapiens
aactttgctgtaatt

SEQ ID NO: 405411 - DNA, 15 bp, Homo sapiens
aaactttgctgtaat

SEQ ID NO: 405412 - DNA, 15 bp, Homo sapiens
aaaactttgctgtaa

SEQ ID NO: 405413 - DNA, 15 bp, Homo sapiens
gaaaactttgctgta

SEQ ID NO: 405414 - DNA, 15 bp, Homo sapiens
agaaaactttgctgt

SEQ ID NO: 405415 - DNA, 15 bp, Homo sapiens
cagaaaactttgctg

SEQ ID NO: 405416 - DNA, 15 bp, Homo sapiens
ccagaaaactttgct

SEQ ID NO: 405417 - DNA, 15 bp, Homo sapiens
tccagaaaactttgc

SEQ ID NO: 405418 - DNA, 15 bp, Homo sapiens
ctccagaaaactttg

SEQ ID NO: 405419 - DNA, 15 bp, Homo sapiens
cctccagaaaacttt

SEQ ID NO: 405420 - DNA, 15 bp, Homo sapiens
tcctccagaaaactt

SEQ ID NO: 405421 - DNA, 15 bp, Homo sapiens
ctcctccagaaaact

SEQ ID NO: 405422 - DNA, 15 bp, Homo sapiens
actcctccagaaaac

SEQ ID NO: 405423 - DNA, 15 bp, Homo sapiens
aactcctccagaaaa

SEQ ID NO: 405424 - DNA, 15 bp, Homo sapiens
taactcctccagaaa

SEQ ID NO: 405425 - DNA, 15 bp, Homo sapiens
ctaactcctccagaa

SEQ ID NO: 405426 - DNA, 15 bp, Homo sapiens
actaactcctccaga

SEQ ID NO: 405427 - DNA, 15 bp, Homo sapiens
tactaactcctccag

SEQ ID NO: 405428 - DNA, 15 bp, Homo sapiens
atactaactcctcca

SEQ ID NO: 405429 - DNA, 15 bp, Homo sapiens
aatactaactcctcc

SEQ ID NO: 405430 - DNA, 15 bp, Homo sapiens
aaatactaactcctc

SEQ ID NO: 405431 - DNA, 15 bp, Homo sapiens
caaatactaactcct

SEQ ID NO: 405432 - DNA, 15 bp, Homo sapiens
acaaatactaactcc

SEQ ID NO: 405433 - DNA, 15 bp, Homo sapiens
tacaaatactaactc

SEQ ID NO: 405434 - DNA, 15 bp, Homo sapiens
gtacaaatactaact

SEQ ID NO: 405435 - DNA, 15 bp, Homo sapiens
agtacaaatactaac

SEQ ID NO: 405436 - DNA, 15 bp, Homo sapiens
tagtacaaatactaa

SEQ ID NO: 405437 - DNA, 15 bp, Homo sapiens
gtagtacaaatacta

SEQ ID NO: 405438 - DNA, 15 bp, Homo sapiens
tgtagtacaaatact

SEQ ID NO: 405439 - DNA, 15 bp, Homo sapiens
atgtagtacaaatac

SEQ ID NO: 405440 - DNA, 15 bp, Homo sapiens
catgtagtacaaata

SEQ ID NO: 405441 - DNA, 15 bp, Homo sapiens
ccatgtagtacaaat

SEQ ID NO: 405442 - DNA, 15 bp, Homo sapiens
accatgtagtacaaa

SEQ ID NO: 405443 - DNA, 15 bp, Homo sapiens
gaccatgtagtacaa

SEQ ID NO: 405444 - DNA, 15 bp, Homo sapiens
agaccatgtagtaca

SEQ ID NO: 405445 - DNA, 15 bp, Homo sapiens
aagaccatgtagtac

SEQ ID NO: 405446 - DNA, 15 bp, Homo sapiens
caagaccatgtagta

SEQ ID NO: 405447 - DNA, 15 bp, Homo sapiens
ccaagaccatgtagt

SEQ ID NO: 405448 - DNA, 15 bp, Homo sapiens
tccaagaccatgtag

SEQ ID NO: 405449 - DNA, 15 bp, Homo sapiens
atccaagaccatgta

SEQ ID NO: 405450 - DNA, 15 bp, Homo sapiens
gatccaagaccatgt

SEQ ID NO: 405451 - DNA, 15 bp, Homo sapiens
agatccaagaccatg

SEQ ID NO: 405452 - DNA, 15 bp, Homo sapiens
tagatccaagaccat

SEQ ID NO: 405453 - DNA, 15 bp, Homo sapiens
ttagatccaagacca

SEQ ID NO: 405454 - DNA, 15 bp, Homo sapiens
tttagatccaagacc

SEQ ID NO: 405455 - DNA, 15 bp, Homo sapiens
atttagatccaagac

SEQ ID NO: 405456 - DNA, 15 bp, Homo sapiens
aatttagatccaaga

SEQ ID NO: 405457 - DNA, 15 bp, Homo sapiens
caatttagatccaag

SEQ ID NO: 405458 - DNA, 15 bp, Homo sapiens
gcaatttagatccaa

SEQ ID NO: 405459 - DNA, 15 bp, Homo sapiens
tgcaatttagatcca

SEQ ID NO: 405460 - DNA, 15 bp, Homo sapiens
atgcaatttagatcc

SEQ ID NO: 405461 - DNA, 15 bp, Homo sapiens
aatgcaatttagatc

SEQ ID NO: 405462 - DNA, 15 bp, Homo sapiens
caatgcaatttagat

SEQ ID NO: 405463 - DNA, 15 bp, Homo sapiens
ccaatgcaatttaga

SEQ ID NO: 405464 - DNA, 15 bp, Homo sapiens
tccaatgcaatttag

SEQ ID NO: 405465 - DNA, 15 bp, Homo sapiens
atccaatgcaattta

SEQ ID NO: 405466 - DNA, 15 bp, Homo sapiens
tatccaatgcaattt

SEQ ID NO: 405467 - DNA, 15 bp, Homo sapiens
gtatccaatgcaatt

SEQ ID NO: 405468 - DNA, 15 bp, Homo sapiens
tgtatccaatgcaat

SEQ ID NO: 405469 - DNA, 15 bp, Homo sapiens
atgtatccaatgcaa

SEQ ID NO: 405470 - DNA, 15 bp, Homo sapiens
aatgtatccaatgca

SEQ ID NO: 405471 - DNA, 15 bp, Homo sapiens
caatgtatccaatgc

SEQ ID NO: 405472 - DNA, 15 bp, Homo sapiens
tcaatgtatccaatg

SEQ ID NO: 405473 - DNA, 15 bp, Homo sapiens
ttcaatgtatccaat

SEQ ID NO: 405474 - DNA, 15 bp, Homo sapiens
attcaatgtatccaa

SEQ ID NO: 405475 - DNA, 15 bp, Homo sapiens
cattcaatgtatcca

SEQ ID NO: 405476 - DNA, 15 bp, Homo sapiens
tcattcaatgtatcc

SEQ ID NO: 405477 - DNA, 15 bp, Homo sapiens
ttcattcaatgtatc

SEQ ID NO: 405478 - DNA, 15 bp, Homo sapiens
tttcattcaatgtat

SEQ ID NO: 405479 - DNA, 15 bp, Homo sapiens
atttcattcaatgta

SEQ ID NO: 405480 - DNA, 15 bp, Homo sapiens
tatttcattcaatgt

SEQ ID NO: 405481 - DNA, 15 bp, Homo sapiens
gtatttcattcaatg

SEQ ID NO: 405482 - DNA, 15 bp, Homo sapiens
agtatttcattcaat

SEQ ID NO: 405483 - DNA, 15 bp, Homo sapiens
tagtatttcattcaa

SEQ ID NO: 405484 - DNA, 15 bp, Homo sapiens
ttagtatttcattca

SEQ ID NO: 405485 - DNA, 15 bp, Homo sapiens
tttagtatttcattc

SEQ ID NO: 405486 - DNA, 15 bp, Homo sapiens
gtttagtatttcatt

SEQ ID NO: 405487 - DNA, 15 bp, Homo sapiens
agtttagtatttcat

SEQ ID NO: 405488 - DNA, 15 bp, Homo sapiens
tagtttagtatttca

SEQ ID NO: 405489 - DNA, 15 bp, Homo sapiens
ttagtttagtatttc

SEQ ID NO: 405490 - DNA, 15 bp, Homo sapiens
cttagtttagtattt

SEQ ID NO: 405491 - DNA, 15 bp, Homo sapiens
ccttagtttagtatt

SEQ ID NO: 405492 - DNA, 15 bp, Homo sapiens
tccttagtttagtat

SEQ ID NO: 405493 - DNA, 15 bp, Homo sapiens
gtccttagtttagta

SEQ ID NO: 405494 - DNA, 15 bp, Homo sapiens
tgtccttagtttagt

SEQ ID NO: 405495 - DNA, 15 bp, Homo sapiens
atgtccttagtttag

SEQ ID NO: 405496 - DNA, 15 bp, Homo sapiens
gatgtccttagttta

SEQ ID NO: 405497 - DNA, 15 bp, Homo sapiens
cgatgtccttagttt

SEQ ID NO: 405498 - DNA, 15 bp, Homo sapiens
ccgatgtccttagtt

SEQ ID NO: 405499 - DNA, 15 bp, Homo sapiens
accgatgtccttagt

SEQ ID NO: 405500 - DNA, 15 bp, Homo sapiens
gaccgatgtccttag

SEQ ID NO: 405501 - DNA, 15 bp, Homo sapiens
tgaccgatgtcctta

SEQ ID NO: 405502 - DNA, 15 bp, Homo sapiens
atgaccgatgtcctt

SEQ ID NO: 405503 - DNA, 15 bp, Homo sapiens
aatgaccgatgtcct

SEQ ID NO: 405504 - DNA, 15 bp, Homo sapiens
taatgaccgatgtcc

SEQ ID NO: 405505 - DNA, 15 bp, Homo sapiens
ttaatgaccgatgtc

SEQ ID NO: 405506 - DNA, 15 bp, Homo sapiens
tttaatgaccgatgt

SEQ ID NO: 405507 - DNA, 15 bp, Homo sapiens
ttttaatgaccgatg

SEQ ID NO: 405508 - DNA, 15 bp, Homo sapiens
tttttaatgaccgat

SEQ ID NO: 405509 - DNA, 15 bp, Homo sapiens
gtttttaatgaccga

SEQ ID NO: 405510 - DNA, 15 bp, Homo sapiens
agtttttaatgaccg

SEQ ID NO: 405511 - DNA, 15 bp, Homo sapiens
tagtttttaatgacc

SEQ ID NO: 405512 - DNA, 15 bp, Homo sapiens
ctagtttttaatgac

SEQ ID NO: 405513 - DNA, 15 bp, Homo sapiens
cctagtttttaatga

SEQ ID NO: 405514 - DNA, 15 bp, Homo sapiens
ccctagtttttaatg

SEQ ID NO: 405515 - DNA, 15 bp, Homo sapiens
tccctagtttttaat

SEQ ID NO: 405516 - DNA, 15 bp, Homo sapiens
ttccctagtttttaa

SEQ ID NO: 405517 - DNA, 15 bp, Homo sapiens
cttccctagttttta

SEQ ID NO: 405518 - DNA, 15 bp, Homo sapiens
gcttccctagttttt

SEQ ID NO: 405519 - DNA, 15 bp, Homo sapiens
ggcttccctagtttt

SEQ ID NO: 405520 - DNA, 15 bp, Homo sapiens
gggcttccctagttt

SEQ ID NO: 405521 - DNA, 15 bp, Homo sapiens
tgggcttccctagtt

SEQ ID NO: 405522 - DNA, 15 bp, Homo sapiens
atgggcttccctagt

SEQ ID NO: 405523 - DNA, 15 bp, Homo sapiens
catgggcttccctag

SEQ ID NO: 405524 - DNA, 15 bp, Homo sapiens
ccatgggcttcccta

SEQ ID NO: 405525 - DNA, 15 bp, Homo sapiens
accatgggcttccct

SEQ ID NO: 405526 - DNA, 15 bp, Homo sapiens
aaccatgggcttccc

SEQ ID NO: 405527 - DNA, 15 bp, Homo sapiens
aaaccatgggcttcc

SEQ ID NO: 405528 - DNA, 15 bp, Homo sapiens
aaaaccatgggcttc

SEQ ID NO: 405529 - DNA, 15 bp, Homo sapiens
aaaaaccatgggctt

SEQ ID NO: 405530 - DNA, 15 bp, Homo sapiens
caaaaaccatgggct

SEQ ID NO: 405531 - DNA, 15 bp, Homo sapiens
tcaaaaaccatgggc

SEQ ID NO: 405532 - DNA, 15 bp, Homo sapiens
atcaaaaaccatggg

SEQ ID NO: 405533 - DNA, 15 bp, Homo sapiens
catcaaaaaccatgg

SEQ ID NO: 405534 - DNA, 15 bp, Homo sapiens
acatcaaaaaccatg

SEQ ID NO: 405535 - DNA, 15 bp, Homo sapiens
aacatcaaaaaccat

SEQ ID NO: 405536 - DNA, 15 bp, Homo sapiens
gaacatcaaaaacca

SEQ ID NO: 405537 - DNA, 15 bp, Homo sapiens
agaacatcaaaaacc

SEQ ID NO: 405538 - DNA, 15 bp, Homo sapiens
aagaacatcaaaaac

SEQ ID NO: 405539 - DNA, 15 bp, Homo sapiens
taagaacatcaaaaa

SEQ ID NO: 405540 - DNA, 15 bp, Homo sapiens
ataagaacatcaaaa

SEQ ID NO: 405541 - DNA, 15 bp, Homo sapiens
cataagaacatcaaa

SEQ ID NO: 405542 - DNA, 15 bp, Homo sapiens
ccataagaacatcaa

SEQ ID NO: 405543 - DNA, 15 bp, Homo sapiens
cccataagaacatca

SEQ ID NO: 405544 - DNA, 15 bp, Homo sapiens
acccataagaacatc

SEQ ID NO: 405545 - DNA, 15 bp, Homo sapiens
aacccataagaacat

SEQ ID NO: 405546 - DNA, 15 bp, Homo sapiens
gaacccataagaaca

SEQ ID NO: 405547 - DNA, 15 bp, Homo sapiens
tgaacccataagaac

SEQ ID NO: 405548 - DNA, 15 bp, Homo sapiens
atgaacccataagaa

SEQ ID NO: 405549 - DNA, 15 bp, Homo sapiens
gatgaacccataaga

SEQ ID NO: 405550 - DNA, 15 bp, Homo sapiens
ggatgaacccataag

SEQ ID NO: 405551 - DNA, 15 bp, Homo sapiens
aggatgaacccataa

SEQ ID NO: 405552 - DNA, 15 bp, Homo sapiens
aaggatgaacccata

SEQ ID NO: 405553 - DNA, 15 bp, Homo sapiens
gaaggatgaacccat

SEQ ID NO: 405554 - DNA, 15 bp, Homo sapiens
tgaaggatgaaccca

SEQ ID NO: 405555 - DNA, 15 bp, Homo sapiens
ctgaaggatgaaccc

SEQ ID NO: 405556 - DNA, 15 bp, Homo sapiens
tctgaaggatgaacc

SEQ ID NO: 405557 - DNA, 15 bp, Homo sapiens
ctctgaaggatgaac

SEQ ID NO: 405558 - DNA, 15 bp, Homo sapiens
actctgaaggatgaa

SEQ ID NO: 405559 - DNA, 15 bp, Homo sapiens
cactctgaaggatga

SEQ ID NO: 405560 - DNA, 15 bp, Homo sapiens
tcactctgaaggatg

SEQ ID NO: 405561 - DNA, 15 bp, Homo sapiens
atcactctgaaggat

SEQ ID NO: 405562 - DNA, 15 bp, Homo sapiens
aatcactctgaagga

SEQ ID NO: 405563 - DNA, 15 bp, Homo sapiens
gaatcactctgaagg

SEQ ID NO: 405564 - DNA, 15 bp, Homo sapiens
ggaatcactctgaag

SEQ ID NO: 405565 - DNA, 15 bp, Homo sapiens
aggaatcactctgaa

SEQ ID NO: 405566 - DNA, 15 bp, Homo sapiens
taggaatcactctga

SEQ ID NO: 405567 - DNA, 15 bp, Homo sapiens
gtaggaatcactctg

SEQ ID NO: 405568 - DNA, 15 bp, Homo sapiens
ggtaggaatcactct

SEQ ID NO: 405569 - DNA, 15 bp, Homo sapiens
tggtaggaatcactc

SEQ ID NO: 405570 - DNA, 15 bp, Homo sapiens
gtggtaggaatcact

SEQ ID NO: 405571 - DNA, 15 bp, Homo sapiens
agtggtaggaatcac

SEQ ID NO: 405572 - DNA, 15 bp, Homo sapiens
gagtggtaggaatca

SEQ ID NO: 405573 - DNA, 15 bp, Homo sapiens
tgagtggtaggaatc

SEQ ID NO: 405574 - DNA, 15 bp, Homo sapiens
atgagtggtaggaat

SEQ ID NO: 405575 - DNA, 15 bp, Homo sapiens
gatgagtggtaggaa

SEQ ID NO: 405576 - DNA, 15 bp, Homo sapiens
agatgagtggtagga

SEQ ID NO: 405577 - DNA, 15 bp, Homo sapiens
aagatgagtggtagg

SEQ ID NO: 405578 - DNA, 15 bp, Homo sapiens
aaagatgagtggtag

SEQ ID NO: 405579 - DNA, 15 bp, Homo sapiens
aaaagatgagtggta

SEQ ID NO: 405580 - DNA, 15 bp, Homo sapiens
aaaaagatgagtggt

SEQ ID NO: 405581 - DNA, 15 bp, Homo sapiens
aaaaaagatgagtgg

SEQ ID NO: 405582 - DNA, 15 bp, Homo sapiens
aaaaaaagatgagtg

SEQ ID NO: 405583 - DNA, 15 bp, Homo sapiens
gaaaaaaagatgagt

SEQ ID NO: 405584 - DNA, 15 bp, Homo sapiens
ggaaaaaaagatgag

SEQ ID NO: 405585 - DNA, 15 bp, Homo sapiens
gggaaaaaaagatga

SEQ ID NO: 405586 - DNA, 15 bp, Homo sapiens
agggaaaaaaagatg

SEQ ID NO: 405587 - DNA, 15 bp, Homo sapiens
tagggaaaaaaagat

SEQ ID NO: 405588 - DNA, 15 bp, Homo sapiens
ctagggaaaaaaaga

SEQ ID NO: 405589 - DNA, 15 bp, Homo sapiens
cctagggaaaaaaag

SEQ ID NO: 405590 - DNA, 15 bp, Homo sapiens
acctagggaaaaaaa

SEQ ID NO: 405591 - DNA, 15 bp, Homo sapiens
tacctagggaaaaaa

SEQ ID NO: 405592 - DNA, 15 bp, Homo sapiens
ttacctagggaaaaa

SEQ ID NO: 405593 - DNA, 15 bp, Homo sapiens
tttacctagggaaaa

SEQ ID NO: 405594 - DNA, 15 bp, Homo sapiens
ttttacctagggaaa

SEQ ID NO: 405595 - DNA, 15 bp, Homo sapiens
tttttacctagggaa

SEQ ID NO: 405596 - DNA, 15 bp, Homo sapiens
ctttttacctaggga

SEQ ID NO: 405597 - DNA, 15 bp, Homo sapiens
gctttttacctaggg

SEQ ID NO: 405598 - DNA, 15 bp, Homo sapiens
ggctttttacctagg

SEQ ID NO: 405599 - DNA, 15 bp, Homo sapiens
gggctttttacctag

SEQ ID NO: 405600 - DNA, 15 bp, Homo sapiens
ggggctttttaccta

SEQ ID NO: 405601 - DNA, 15 bp, Homo sapiens
tggggctttttacct

SEQ ID NO: 405602 - DNA, 15 bp, Homo sapiens
atggggctttttacc

SEQ ID NO: 405603 - DNA, 15 bp, Homo sapiens
aatggggctttttac

SEQ ID NO: 405604 - DNA, 15 bp, Homo sapiens
aaatggggcttttta

SEQ ID NO: 405605 - DNA, 15 bp, Homo sapiens
caaatggggcttttt

SEQ ID NO: 405606 - DNA, 15 bp, Homo sapiens
tcaaatggggctttt

SEQ ID NO: 405607 - DNA, 15 bp, Homo sapiens
ttcaaatggggcttt

SEQ ID NO: 405608 - DNA, 15 bp, Homo sapiens
cttcaaatggggctt

SEQ ID NO: 405609 - DNA, 15 bp, Homo sapiens
acttcaaatggggct

SEQ ID NO: 405610 - DNA, 15 bp, Homo sapiens
aacttcaaatggggc

SEQ ID NO: 405611 - DNA, 15 bp, Homo sapiens
taacttcaaatgggg

SEQ ID NO: 405612 - DNA, 15 bp, Homo sapiens
ataacttcaaatggg

SEQ ID NO: 405613 - DNA, 15 bp, Homo sapiens
tataacttcaaatgg

SEQ ID NO: 405614 - DNA, 15 bp, Homo sapiens
ttataacttcaaatg

SEQ ID NO: 405615 - DNA, 15 bp, Homo sapiens
cttataacttcaaat

SEQ ID NO: 405616 - DNA, 15 bp, Homo sapiens
acttataacttcaaa

SEQ ID NO: 405617 - DNA, 15 bp, Homo sapiens
aacttataacttcaa

SEQ ID NO: 405618 - DNA, 15 bp, Homo sapiens
caacttataacttca

SEQ ID NO: 405619 - DNA, 15 bp, Homo sapiens
tcaacttataacttc

SEQ ID NO: 405620 - DNA, 15 bp, Homo sapiens
ttcaacttataactt

SEQ ID NO: 405621 - DNA, 15 bp, Homo sapiens
tttcaacttataact

SEQ ID NO: 405622 - DNA, 15 bp, Homo sapiens
ttttcaacttataac

SEQ ID NO: 405623 - DNA, 15 bp, Homo sapiens
attttcaacttataa

SEQ ID NO: 405624 - DNA, 15 bp, Homo sapiens
cattttcaacttata

SEQ ID NO: 405625 - DNA, 15 bp, Homo sapiens
acattttcaacttat

SEQ ID NO: 405626 - DNA, 15 bp, Homo sapiens
aacattttcaactta

SEQ ID NO: 405627 - DNA, 15 bp, Homo sapiens
taacattttcaactt

SEQ ID NO: 405628 - DNA, 15 bp, Homo sapiens
ttaacattttcaact

SEQ ID NO: 405629 - DNA, 15 bp, Homo sapiens
tttaacattttcaac

SEQ ID NO: 405630 - DNA, 15 bp, Homo sapiens
gtttaacattttcaa

SEQ ID NO: 405631 - DNA, 15 bp, Homo sapiens
tgtttaacattttca

SEQ ID NO: 405632 - DNA, 15 bp, Homo sapiens
atgtttaacattttc

SEQ ID NO: 405633 - DNA, 15 bp, Homo sapiens
aatgtttaacatttt

SEQ ID NO: 405634 - DNA, 15 bp, Homo sapiens
aaatgtttaacattt

SEQ ID NO: 405635 - DNA, 15 bp, Homo sapiens
taaatgtttaacatt

SEQ ID NO: 405636 - DNA, 15 bp, Homo sapiens
ttaaatgtttaacat

SEQ ID NO: 405637 - DNA, 15 bp, Homo sapiens
cttaaatgtttaaca

SEQ ID NO: 405638 - DNA, 15 bp, Homo sapiens
gcttaaatgtttaac

SEQ ID NO: 405639 - DNA, 15 bp, Homo sapiens
tgcttaaatgtttaa

SEQ ID NO: 405640 - DNA, 15 bp, Homo sapiens
ttgcttaaatgttta

SEQ ID NO: 405641 - DNA, 15 bp, Homo sapiens
tttgcttaaatgttt

SEQ ID NO: 405642 - DNA, 15 bp, Homo sapiens
ctttgcttaaatgtt

SEQ ID NO: 405643 - DNA, 15 bp, Homo sapiens
tctttgcttaaatgt

SEQ ID NO: 405644 - DNA, 15 bp, Homo sapiens
ctctttgcttaaatg

SEQ ID NO: 405645 - DNA, 15 bp, Homo sapiens
cctctttgcttaaat

SEQ ID NO: 405646 - DNA, 15 bp, Homo sapiens
tcctctttgcttaaa

SEQ ID NO: 405647 - DNA, 15 bp, Homo sapiens
atcctctttgcttaa

SEQ ID NO: 405648 - DNA, 15 bp, Homo sapiens
aatcctctttgctta

SEQ ID NO: 405649 - DNA, 15 bp, Homo sapiens
aaatcctctttgctt

SEQ ID NO: 405650 - DNA, 15 bp, Homo sapiens
taaatcctctttgct

SEQ ID NO: 405651 - DNA, 15 bp, Homo sapiens
ctaaatcctctttgc

SEQ ID NO: 405652 - DNA, 15 bp, Homo sapiens
tctaaatcctctttg

SEQ ID NO: 405653 - DNA, 15 bp, Homo sapiens
ttctaaatcctcttt

SEQ ID NO: 405654 - DNA, 15 bp, Homo sapiens
tttctaaatcctctt

SEQ ID NO: 405655 - DNA, 15 bp, Homo sapiens
atttctaaatcctct

SEQ ID NO: 405656 - DNA, 15 bp, Homo sapiens
aatttctaaatcctc

SEQ ID NO: 405657 - DNA, 15 bp, Homo sapiens
caatttctaaatcct

SEQ ID NO: 405658 - DNA, 15 bp, Homo sapiens
acaatttctaaatcc

SEQ ID NO: 405659 - DNA, 15 bp, Homo sapiens
aacaatttctaaatc

SEQ ID NO: 405660 - DNA, 15 bp, Homo sapiens
aaacaatttctaaat

SEQ ID NO: 405661 - DNA, 15 bp, Homo sapiens
aaaacaatttctaaa

SEQ ID NO: 405662 - DNA, 15 bp, Homo sapiens
aaaaacaatttctaa

SEQ ID NO: 405663 - DNA, 15 bp, Homo sapiens
taaaaacaatttcta

SEQ ID NO: 405664 - DNA, 15 bp, Homo sapiens
ataaaaacaatttct

SEQ ID NO: 405665 - DNA, 15 bp, Homo sapiens
cataaaaacaatttc

SEQ ID NO: 405666 - DNA, 15 bp, Homo sapiens
tcataaaaacaattt

SEQ ID NO: 405667 - DNA, 15 bp, Homo sapiens
gtcataaaaacaatt

SEQ ID NO: 405668 - DNA, 15 bp, Homo sapiens
tgtcataaaaacaat

SEQ ID NO: 405669 - DNA, 15 bp, Homo sapiens
ctgtcataaaaacaa

SEQ ID NO: 405670 - DNA, 15 bp, Homo sapiens
tctgtcataaaaaca

SEQ ID NO: 405671 - DNA, 15 bp, Homo sapiens
ctctgtcataaaaac

SEQ ID NO: 405672 - DNA, 15 bp, Homo sapiens
cctctgtcataaaaa

SEQ ID NO: 405673 - DNA, 15 bp, Homo sapiens
tcctctgtcataaaa

SEQ ID NO: 405674 - DNA, 15 bp, Homo sapiens
ttcctctgtcataaa

SEQ ID NO: 405675 - DNA, 15 bp, Homo sapiens
tttcctctgtcataa

SEQ ID NO: 405676 - DNA, 15 bp, Homo sapiens
gtttcctctgtcata

SEQ ID NO: 405677 - DNA, 15 bp, Homo sapiens
tgtttcctctgtcat

SEQ ID NO: 405678 - DNA, 15 bp, Homo sapiens
ctgtttcctctgtca

SEQ ID NO: 405679 - DNA, 15 bp, Homo sapiens
tctgtttcctctgtc

SEQ ID NO: 405680 - DNA, 15 bp, Homo sapiens
ttctgtttcctctgt

SEQ ID NO: 405681 - DNA, 15 bp, Homo sapiens
gttctgtttcctctg

SEQ ID NO: 405682 - DNA, 15 bp, Homo sapiens
ggttctgtttcctct

SEQ ID NO: 405683 - DNA, 15 bp, Homo sapiens
aggttctgtttcctc

SEQ ID NO: 405684 - DNA, 15 bp, Homo sapiens
caggttctgtttcct

SEQ ID NO: 405685 - DNA, 15 bp, Homo sapiens
ccaggttctgtttcc

SEQ ID NO: 405686 - DNA, 15 bp, Homo sapiens
cccaggttctgtttc

SEQ ID NO: 405687 - DNA, 15 bp, Homo sapiens
tcccaggttctgttt

SEQ ID NO: 405688 - DNA, 15 bp, Homo sapiens
ttcccaggttctgtt

SEQ ID NO: 405689 - DNA, 15 bp, Homo sapiens
attcccaggttctgt

SEQ ID NO: 405690 - DNA, 15 bp, Homo sapiens
aattcccaggttctg

SEQ ID NO: 405691 - DNA, 15 bp, Homo sapiens
caattcccaggttct

SEQ ID NO: 405692 - DNA, 15 bp, Homo sapiens
acaattcccaggttc

SEQ ID NO: 405693 - DNA, 15 bp, Homo sapiens
cacaattcccaggtt

SEQ ID NO: 405694 - DNA, 15 bp, Homo sapiens
acacaattcccaggt

SEQ ID NO: 405695 - DNA, 15 bp, Homo sapiens
cacacaattcccagg

SEQ ID NO: 405696 - DNA, 15 bp, Homo sapiens
acacacaattcccag

SEQ ID NO: 405697 - DNA, 15 bp, Homo sapiens
aacacacaattccca

SEQ ID NO: 405698 - DNA, 15 bp, Homo sapiens
aaacacacaattccc

SEQ ID NO: 405699 - DNA, 15 bp, Homo sapiens
gaaacacacaattcc

SEQ ID NO: 405700 - DNA, 15 bp, Homo sapiens
agaaacacacaattc

SEQ ID NO: 405701 - DNA, 15 bp, Homo sapiens
aagaaacacacaatt

SEQ ID NO: 405702 - DNA, 15 bp, Homo sapiens
gaagaaacacacaat

SEQ ID NO: 405703 - DNA, 15 bp, Homo sapiens
tgaagaaacacacaa

SEQ ID NO: 405704 - DNA, 15 bp, Homo sapiens
ctgaagaaacacaca

SEQ ID NO: 405705 - DNA, 15 bp, Homo sapiens
tctgaagaaacacac

SEQ ID NO: 405706 - DNA, 15 bp, Homo sapiens
ttctgaagaaacaca

SEQ ID NO: 405707 - DNA, 15 bp, Homo sapiens
gttctgaagaaacac

SEQ ID NO: 405708 - DNA, 15 bp, Homo sapiens
cgttctgaagaaaca

SEQ ID NO: 405709 - DNA, 15 bp, Homo sapiens
tcgttctgaagaaac

SEQ ID NO: 405710 - DNA, 15 bp, Homo sapiens
gtcgttctgaagaaa

SEQ ID NO: 405711 - DNA, 15 bp, Homo sapiens
agtcgttctgaagaa

SEQ ID NO: 405712 - DNA, 15 bp, Homo sapiens
aagtcgttctgaaga

SEQ ID NO: 405713 - DNA, 15 bp, Homo sapiens
taagtcgttctgaag

SEQ ID NO: 405714 - DNA, 15 bp, Homo sapiens
ttaagtcgttctgaa

SEQ ID NO: 405715 - DNA, 15 bp, Homo sapiens
attaagtcgttctga

SEQ ID NO: 405716 - DNA, 15 bp, Homo sapiens
aattaagtcgttctg

SEQ ID NO: 405717 - DNA, 15 bp, Homo sapiens
taattaagtcgttct

SEQ ID NO: 405718 - DNA, 15 bp, Homo sapiens
gtaattaagtcgttc

SEQ ID NO: 405719 - DNA, 15 bp, Homo sapiens
tgtaattaagtcgtt

SEQ ID NO: 405720 - DNA, 15 bp, Homo sapiens
ctgtaattaagtcgt

SEQ ID NO: 405721 - DNA, 15 bp, Homo sapiens
cctgtaattaagtcg

SEQ ID NO: 405722 - DNA, 15 bp, Homo sapiens
ccctgtaattaagtc

SEQ ID NO: 405723 - DNA, 15 bp, Homo sapiens
tccctgtaattaagt

SEQ ID NO: 405724 - DNA, 15 bp, Homo sapiens
ctccctgtaattaag

SEQ ID NO: 405725 - DNA, 15 bp, Homo sapiens
actccctgtaattaa

SEQ ID NO: 405726 - DNA, 15 bp, Homo sapiens
cactccctgtaatta

SEQ ID NO: 405727 - DNA, 15 bp, Homo sapiens
tcactccctgtaatt

SEQ ID NO: 405728 - DNA, 15 bp, Homo sapiens
gtcactccctgtaat

SEQ ID NO: 405729 - DNA, 15 bp, Homo sapiens
tgtcactccctgtaa

SEQ ID NO: 405730 - DNA, 15 bp, Homo sapiens
ttgtcactccctgta

SEQ ID NO: 405731 - DNA, 15 bp, Homo sapiens
gttgtcactccctgt

SEQ ID NO: 405732 - DNA, 15 bp, Homo sapiens
agttgtcactccctg

SEQ ID NO: 405733 - DNA, 15 bp, Homo sapiens
aagttgtcactccct

SEQ ID NO: 405734 - DNA, 15 bp, Homo sapiens
aaagttgtcactccc

SEQ ID NO: 405735 - DNA, 15 bp, Homo sapiens
caaagttgtcactcc

SEQ ID NO: 405736 - DNA, 15 bp, Homo sapiens
acaaagttgtcactc

SEQ ID NO: 405737 - DNA, 15 bp, Homo sapiens
aacaaagttgtcact

SEQ ID NO: 405738 - DNA, 15 bp, Homo sapiens
caacaaagttgtcac

SEQ ID NO: 405739 - DNA, 15 bp, Homo sapiens
acaacaaagttgtca

SEQ ID NO: 405740 - DNA, 15 bp, Homo sapiens
aacaacaaagttgtc

SEQ ID NO: 405741 - DNA, 15 bp, Homo sapiens
gaacaacaaagttgt

SEQ ID NO: 405742 - DNA, 15 bp, Homo sapiens
tgaacaacaaagttg

SEQ ID NO: 405743 - DNA, 15 bp, Homo sapiens
atgaacaacaaagtt

SEQ ID NO: 405744 - DNA, 15 bp, Homo sapiens
catgaacaacaaagt

SEQ ID NO: 405745 - DNA, 15 bp, Homo sapiens
tcatgaacaacaaag

SEQ ID NO: 405746 - DNA, 15 bp, Homo sapiens
ctcatgaacaacaaa

SEQ ID NO: 405747 - DNA, 15 bp, Homo sapiens
tctcatgaacaacaa

SEQ ID NO: 405748 - DNA, 15 bp, Homo sapiens
atctcatgaacaaca

SEQ ID NO: 405749 - DNA, 15 bp, Homo sapiens
catctcatgaacaac

SEQ ID NO: 405750 - DNA, 15 bp, Homo sapiens
ccatctcatgaacaa

SEQ ID NO: 405751 - DNA, 15 bp, Homo sapiens
tccatctcatgaaca

SEQ ID NO: 405752 - DNA, 15 bp, Homo sapiens
atccatctcatgaac

SEQ ID NO: 405753 - DNA, 15 bp, Homo sapiens
aatccatctcatgaa

SEQ ID NO: 405754 - DNA, 15 bp, Homo sapiens
caatccatctcatga

SEQ ID NO: 405755 - DNA, 15 bp, Homo sapiens
acaatccatctcatg

SEQ ID NO: 405756 - DNA, 15 bp, Homo sapiens
aacaatccatctcat

SEQ ID NO: 405757 - DNA, 15 bp, Homo sapiens
aaacaatccatctca

SEQ ID NO: 405758 - DNA, 15 bp, Homo sapiens
aaaacaatccatctc

SEQ ID NO: 405759 - DNA, 15 bp, Homo sapiens
taaaacaatccatct

SEQ ID NO: 405760 - DNA, 15 bp, Homo sapiens
gtaaaacaatccatc

SEQ ID NO: 405761 - DNA, 15 bp, Homo sapiens
cgtaaaacaatccat

SEQ ID NO: 405762 - DNA, 15 bp, Homo sapiens
tcgtaaaacaatcca

SEQ ID NO: 405763 - DNA, 15 bp, Homo sapiens
ttcgtaaaacaatcc

SEQ ID NO: 405764 - DNA, 15 bp, Homo sapiens
tttcgtaaaacaatc

SEQ ID NO: 405765 - DNA, 15 bp, Homo sapiens
atttcgtaaaacaat

SEQ ID NO: 405766 - DNA, 15 bp, Homo sapiens
tatttcgtaaaacaa

SEQ ID NO: 405767 - DNA, 15 bp, Homo sapiens
ctatttcgtaaaaca

SEQ ID NO: 405768 - DNA, 15 bp, Homo sapiens
tctatttcgtaaaac

SEQ ID NO: 405769 - DNA, 15 bp, Homo sapiens
ctctatttcgtaaaa

SEQ ID NO: 405770 - DNA, 15 bp, Homo sapiens
gctctatttcgtaaa

SEQ ID NO: 405771 - DNA, 15 bp, Homo sapiens
tgctctatttcgtaa

SEQ ID NO: 405772 - DNA, 15 bp, Homo sapiens
atgctctatttcgta

SEQ ID NO: 405773 - DNA, 15 bp, Homo sapiens
aatgctctatttcgt

SEQ ID NO: 405774 - DNA, 15 bp, Homo sapiens
aaatgctctatttcg

SEQ ID NO: 405775 - DNA, 15 bp, Homo sapiens
caaatgctctatttc

SEQ ID NO: 405776 - DNA, 15 bp, Homo sapiens
tcaaatgctctattt

SEQ ID NO: 405777 - DNA, 15 bp, Homo sapiens
atcaaatgctctatt

SEQ ID NO: 405778 - DNA, 15 bp, Homo sapiens
aatcaaatgctctat

SEQ ID NO: 405779 - DNA, 15 bp, Homo sapiens
caatcaaatgctcta

SEQ ID NO: 405780 - DNA, 15 bp, Homo sapiens
acaatcaaatgctct

SEQ ID NO: 405781 - DNA, 15 bp, Homo sapiens
tacaatcaaatgctc

SEQ ID NO: 405782 - DNA, 15 bp, Homo sapiens
ttacaatcaaatgct

SEQ ID NO: 405783 - DNA, 15 bp, Homo sapiens
cttacaatcaaatgc

SEQ ID NO: 405784 - DNA, 15 bp, Homo sapiens
tcttacaatcaaatg

SEQ ID NO: 405785 - DNA, 15 bp, Homo sapiens
ttcttacaatcaaat

SEQ ID NO: 405786 - DNA, 15 bp, Homo sapiens
gttcttacaatcaaa

SEQ ID NO: 405787 - DNA, 15 bp, Homo sapiens
agttcttacaatcaa

SEQ ID NO: 405788 - DNA, 15 bp, Homo sapiens
cagttcttacaatca

SEQ ID NO: 405789 - DNA, 15 bp, Homo sapiens
tcagttcttacaatc

SEQ ID NO: 405790 - DNA, 15 bp, Homo sapiens
ttcagttcttacaat

SEQ ID NO: 405791 - DNA, 15 bp, Homo sapiens
attcagttcttacaa

SEQ ID NO: 405792 - DNA, 15 bp, Homo sapiens
gattcagttcttaca

SEQ ID NO: 405793 - DNA, 15 bp, Homo sapiens
ggattcagttcttac

SEQ ID NO: 405794 - DNA, 15 bp, Homo sapiens
aggattcagttctta

SEQ ID NO: 405795 - DNA, 15 bp, Homo sapiens
caggattcagttctt

SEQ ID NO: 405796 - DNA, 15 bp, Homo sapiens
gcaggattcagttct

SEQ ID NO: 405797 - DNA, 15 bp, Homo sapiens
ggcaggattcagttc

SEQ ID NO: 405798 - DNA, 15 bp, Homo sapiens
gggcaggattcagtt

SEQ ID NO: 405799 - DNA, 15 bp, Homo sapiens
tgggcaggattcagt

SEQ ID NO: 405800 - DNA, 15 bp, Homo sapiens
ctgggcaggattcag

SEQ ID NO: 405801 - DNA, 15 bp, Homo sapiens
tctgggcaggattca

SEQ ID NO: 405802 - DNA, 15 bp, Homo sapiens
ttctgggcaggattc

SEQ ID NO: 405803 - DNA, 15 bp, Homo sapiens
attctgggcaggatt

SEQ ID NO: 405804 - DNA, 15 bp, Homo sapiens
gattctgggcaggat

SEQ ID NO: 405805 - DNA, 15 bp, Homo sapiens
agattctgggcagga

SEQ ID NO: 405806 - DNA, 15 bp, Homo sapiens
cagattctgggcagg

SEQ ID NO: 405807 - DNA, 15 bp, Homo sapiens
acagattctgggcag

SEQ ID NO: 405808 - DNA, 15 bp, Homo sapiens
gacagattctgggca

SEQ ID NO: 405809 - DNA, 15 bp, Homo sapiens
agacagattctgggc

SEQ ID NO: 405810 - DNA, 15 bp, Homo sapiens
cagacagattctggg

SEQ ID NO: 405811 - DNA, 15 bp, Homo sapiens
ccagacagattctgg

SEQ ID NO: 405812 - DNA, 15 bp, Homo sapiens
tccagacagattctg

SEQ ID NO: 405813 - DNA, 15 bp, Homo sapiens
ctccagacagattct

SEQ ID NO: 405814 - DNA, 15 bp, Homo sapiens
cctccagacagattc

SEQ ID NO: 405815 - DNA, 15 bp, Homo sapiens
ccctccagacagatt

SEQ ID NO: 405816 - DNA, 15 bp, Homo sapiens
gccctccagacagat

SEQ ID NO: 405817 - DNA, 15 bp, Homo sapiens
ggccctccagacaga

SEQ ID NO: 405818 - DNA, 15 bp, Homo sapiens
gggccctccagacag

SEQ ID NO: 405819 - DNA, 15 bp, Homo sapiens
agggccctccagaca

SEQ ID NO: 405820 - DNA, 15 bp, Homo sapiens
aagggccctccagac

SEQ ID NO: 405821 - DNA, 15 bp, Homo sapiens
aaagggccctccaga

SEQ ID NO: 405822 - DNA, 15 bp, Homo sapiens
caaagggccctccag

SEQ ID NO: 405823 - DNA, 15 bp, Homo sapiens
tcaaagggccctcca

SEQ ID NO: 405824 - DNA, 15 bp, Homo sapiens
atcaaagggccctcc

SEQ ID NO: 405825 - DNA, 15 bp, Homo sapiens
tatcaaagggccctc

SEQ ID NO: 405826 - DNA, 15 bp, Homo sapiens
atatcaaagggccct

SEQ ID NO: 405827 - DNA, 15 bp, Homo sapiens
catatcaaagggccc

SEQ ID NO: 405828 - DNA, 15 bp, Homo sapiens
ccatatcaaagggcc

SEQ ID NO: 405829 - DNA, 15 bp, Homo sapiens
accatatcaaagggc

SEQ ID NO: 405830 - DNA, 15 bp, Homo sapiens
taccatatcaaaggg

SEQ ID NO: 405831 - DNA, 15 bp, Homo sapiens
ataccatatcaaagg

SEQ ID NO: 405832 - DNA, 15 bp, Homo sapiens
aataccatatcaaag

SEQ ID NO: 405833 - DNA, 15 bp, Homo sapiens
gaataccatatcaaa

SEQ ID NO: 405834 - DNA, 15 bp, Homo sapiens
tgaataccatatcaa

SEQ ID NO: 405835 - DNA, 15 bp, Homo sapiens
gtgaataccatatca

SEQ ID NO: 405836 - DNA, 15 bp, Homo sapiens
tgtgaataccatatc

SEQ ID NO: 405837 - DNA, 15 bp, Homo sapiens
atgtgaataccatat

SEQ ID NO: 405838 - DNA, 15 bp, Homo sapiens
catgtgaataccata

SEQ ID NO: 405839 - DNA, 15 bp, Homo sapiens
tcatgtgaataccat

SEQ ID NO: 405840 - DNA, 15 bp, Homo sapiens
atcatgtgaatacca

SEQ ID NO: 405841 - DNA, 15 bp, Homo sapiens
tatcatgtgaatacc

SEQ ID NO: 405842 - DNA, 15 bp, Homo sapiens
atatcatgtgaatac

SEQ ID NO: 405843 - DNA, 15 bp, Homo sapiens
tatatcatgtgaata

SEQ ID NO: 405844 - DNA, 15 bp, Homo sapiens
ttatatcatgtgaat

SEQ ID NO: 405845 - DNA, 15 bp, Homo sapiens
attatatcatgtgaa

SEQ ID NO: 405846 - DNA, 15 bp, Homo sapiens
aattatatcatgtga

SEQ ID NO: 405847 - DNA, 15 bp, Homo sapiens
taattatatcatgtg

SEQ ID NO: 405848 - DNA, 15 bp, Homo sapiens
ataattatatcatgt

SEQ ID NO: 405849 - DNA, 15 bp, Homo sapiens
tataattatatcatg

SEQ ID NO: 405850 - DNA, 15 bp, Homo sapiens
atataattatatcat

SEQ ID NO: 405851 - DNA, 15 bp, Homo sapiens
aatataattatatca

SEQ ID NO: 405852 - DNA, 15 bp, Homo sapiens
aaatataattatatc

SEQ ID NO: 405853 - DNA, 15 bp, Homo sapiens
taaatataattatat

SEQ ID NO: 405854 - DNA, 15 bp, Homo sapiens
ctaaatataattata

SEQ ID NO: 405855 - DNA, 15 bp, Homo sapiens
tctaaatataattat

SEQ ID NO: 405856 - DNA, 15 bp, Homo sapiens
ctctaaatataatta

SEQ ID NO: 405857 - DNA, 15 bp, Homo sapiens
tctctaaatataatt

SEQ ID NO: 405858 - DNA, 15 bp, Homo sapiens
ctctctaaatataat

SEQ ID NO: 405859 - DNA, 15 bp, Homo sapiens
actctctaaatataa

SEQ ID NO: 405860 - DNA, 15 bp, Homo sapiens
gactctctaaatata

SEQ ID NO: 405861 - DNA, 15 bp, Homo sapiens
ggactctctaaatat

SEQ ID NO: 405862 - DNA, 15 bp, Homo sapiens
aggactctctaaata

SEQ ID NO: 405863 - DNA, 15 bp, Homo sapiens
gaggactctctaaat

SEQ ID NO: 405864 - DNA, 15 bp, Homo sapiens
agaggactctctaaa

SEQ ID NO: 405865 - DNA, 15 bp, Homo sapiens
tagaggactctctaa

SEQ ID NO: 405866 - DNA, 15 bp, Homo sapiens
ctagaggactctcta

SEQ ID NO: 405867 - DNA, 15 bp, Homo sapiens
cctagaggactctct

SEQ ID NO: 405868 - DNA, 15 bp, Homo sapiens
tcctagaggactctc

SEQ ID NO: 405869 - DNA, 15 bp, Homo sapiens
ttcctagaggactct

SEQ ID NO: 405870 - DNA, 15 bp, Homo sapiens
tttcctagaggactc

SEQ ID NO: 405871 - DNA, 15 bp, Homo sapiens
ttttcctagaggact

SEQ ID NO: 405872 - DNA, 15 bp, Homo sapiens
attttcctagaggac

SEQ ID NO: 405873 - DNA, 15 bp, Homo sapiens
aattttcctagagga

SEQ ID NO: 405874 - DNA, 15 bp, Homo sapiens
aaattttcctagagg

SEQ ID NO: 405875 - DNA, 15 bp, Homo sapiens
aaaattttcctagag

SEQ ID NO: 405876 - DNA, 15 bp, Homo sapiens
taaaattttcctaga

SEQ ID NO: 405877 - DNA, 15 bp, Homo sapiens
ctaaaattttcctag

SEQ ID NO: 405878 - DNA, 15 bp, Homo sapiens
tctaaaattttccta

SEQ ID NO: 405879 - DNA, 15 bp, Homo sapiens
ttctaaaattttcct

SEQ ID NO: 405880 - DNA, 15 bp, Homo sapiens
gttctaaaattttcc

SEQ ID NO: 405881 - DNA, 15 bp, Homo sapiens
ggttctaaaattttc

SEQ ID NO: 405882 - DNA, 15 bp, Homo sapiens
tggttctaaaatttt

SEQ ID NO: 405883 - DNA, 15 bp, Homo sapiens
atggttctaaaattt

SEQ ID NO: 405884 - DNA, 15 bp, Homo sapiens
catggttctaaaatt

SEQ ID NO: 405885 - DNA, 15 bp, Homo sapiens
gcatggttctaaaat

SEQ ID NO: 405886 - DNA, 15 bp, Homo sapiens
tgcatggttctaaaa

SEQ ID NO: 405887 - DNA, 15 bp, Homo sapiens
ttgcatggttctaaa

SEQ ID NO: 405888 - DNA, 15 bp, Homo sapiens
tttgcatggttctaa

SEQ ID NO: 405889 - DNA, 15 bp, Homo sapiens
atttgcatggttcta

SEQ ID NO: 405890 - DNA, 15 bp, Homo sapiens
catttgcatggttct

SEQ ID NO: 405891 - DNA, 15 bp, Homo sapiens
acatttgcatggttc

SEQ ID NO: 405892 - DNA, 15 bp, Homo sapiens
cacatttgcatggtt

SEQ ID NO: 405893 - DNA, 15 bp, Homo sapiens
gcacatttgcatggt

SEQ ID NO: 405894 - DNA, 15 bp, Homo sapiens
tgcacatttgcatgg

SEQ ID NO: 405895 - DNA, 15 bp, Homo sapiens
atgcacatttgcatg

SEQ ID NO: 405896 - DNA, 15 bp, Homo sapiens
catgcacatttgcat

SEQ ID NO: 405897 - DNA, 15 bp, Homo sapiens
acatgcacatttgca

SEQ ID NO: 405898 - DNA, 15 bp, Homo sapiens
gacatgcacatttgc

SEQ ID NO: 405899 - DNA, 15 bp, Homo sapiens
agacatgcacatttg

SEQ ID NO: 405900 - DNA, 15 bp, Homo sapiens
tagacatgcacattt

SEQ ID NO: 405901 - DNA, 15 bp, Homo sapiens
ctagacatgcacatt

SEQ ID NO: 405902 - DNA, 15 bp, Homo sapiens
gctagacatgcacat

SEQ ID NO: 405903 - DNA, 15 bp, Homo sapiens
agctagacatgcaca

SEQ ID NO: 405904 - DNA, 15 bp, Homo sapiens
cagctagacatgcac

SEQ ID NO: 405905 - DNA, 15 bp, Homo sapiens
gcagctagacatgca

SEQ ID NO: 405906 - DNA, 15 bp, Homo sapiens
tgcagctagacatgc

SEQ ID NO: 405907 - DNA, 15 bp, Homo sapiens
ttgcagctagacatg

SEQ ID NO: 405908 - DNA, 15 bp, Homo sapiens
attgcagctagacat

SEQ ID NO: 405909 - DNA, 15 bp, Homo sapiens
gattgcagctagaca

SEQ ID NO: 405910 - DNA, 15 bp, Homo sapiens
ggattgcagctagac

SEQ ID NO: 405911 - DNA, 15 bp, Homo sapiens
tggattgcagctaga

SEQ ID NO: 405912 - DNA, 15 bp, Homo sapiens
ttggattgcagctag

SEQ ID NO: 405913 - DNA, 15 bp, Homo sapiens
attggattgcagcta

SEQ ID NO: 405914 - DNA, 15 bp, Homo sapiens
aattggattgcagct

SEQ ID NO: 405915 - DNA, 15 bp, Homo sapiens
aaattggattgcagc

SEQ ID NO: 405916 - DNA, 15 bp, Homo sapiens
aaaattggattgcag

SEQ ID NO: 405917 - DNA, 15 bp, Homo sapiens
taaaattggattgca

SEQ ID NO: 405918 - DNA, 15 bp, Homo sapiens
gtaaaattggattgc

SEQ ID NO: 405919 - DNA, 15 bp, Homo sapiens
tgtaaaattggattg

SEQ ID NO: 405920 - DNA, 15 bp, Homo sapiens
atgtaaaattggatt

SEQ ID NO: 405921 - DNA, 15 bp, Homo sapiens
aatgtaaaattggat

SEQ ID NO: 405922 - DNA, 15 bp, Homo sapiens
taatgtaaaattgga

SEQ ID NO: 405923 - DNA, 15 bp, Homo sapiens
ttaatgtaaaattgg

SEQ ID NO: 405924 - DNA, 15 bp, Homo sapiens
attaatgtaaaattg

SEQ ID NO: 405925 - DNA, 15 bp, Homo sapiens
gattaatgtaaaatt

SEQ ID NO: 405926 - DNA, 15 bp, Homo sapiens
agattaatgtaaaat

SEQ ID NO: 405927 - DNA, 15 bp, Homo sapiens
tagattaatgtaaaa

SEQ ID NO: 405928 - DNA, 15 bp, Homo sapiens
ctagattaatgtaaa

SEQ ID NO: 405929 - DNA, 15 bp, Homo sapiens
actagattaatgtaa

SEQ ID NO: 405930 - DNA, 15 bp, Homo sapiens
cactagattaatgta

SEQ ID NO: 405931 - DNA, 15 bp, Homo sapiens
acactagattaatgt

SEQ ID NO: 405932 - DNA, 15 bp, Homo sapiens
gacactagattaatg

SEQ ID NO: 405933 - DNA, 15 bp, Homo sapiens
agacactagattaat

SEQ ID NO: 405934 - DNA, 15 bp, Homo sapiens
tagacactagattaa

SEQ ID NO: 405935 - DNA, 15 bp, Homo sapiens
ctagacactagatta

SEQ ID NO: 405936 - DNA, 15 bp, Homo sapiens
gctagacactagatt

SEQ ID NO: 405937 - DNA, 15 bp, Homo sapiens
ggctagacactagat

SEQ ID NO: 405938 - DNA, 15 bp, Homo sapiens
cggctagacactaga

SEQ ID NO: 405939 - DNA, 15 bp, Homo sapiens
acggctagacactag

SEQ ID NO: 405940 - DNA, 15 bp, Homo sapiens
aacggctagacacta

SEQ ID NO: 405941 - DNA, 15 bp, Homo sapiens
aaacggctagacact

SEQ ID NO: 405942 - DNA, 15 bp, Homo sapiens
taaacggctagacac

SEQ ID NO: 405943 - DNA, 15 bp, Homo sapiens
ataaacggctagaca

SEQ ID NO: 405944 - DNA, 15 bp, Homo sapiens
tataaacggctagac

SEQ ID NO: 405945 - DNA, 15 bp, Homo sapiens
gtataaacggctaga

SEQ ID NO: 405946 - DNA, 15 bp, Homo sapiens
agtataaacggctag

SEQ ID NO: 405947 - DNA, 15 bp, Homo sapiens
gagtataaacggcta

SEQ ID NO: 405948 - DNA, 15 bp, Homo sapiens
agagtataaacggct

SEQ ID NO: 405949 - DNA, 15 bp, Homo sapiens
cagagtataaacggc

SEQ ID NO: 405950 - DNA, 15 bp, Homo sapiens
acagagtataaacgg

SEQ ID NO: 405951 - DNA, 15 bp, Homo sapiens
cacagagtataaacg

SEQ ID NO: 405952 - DNA, 15 bp, Homo sapiens
gcacagagtataaac

SEQ ID NO: 405953 - DNA, 15 bp, Homo sapiens
tgcacagagtataaa

SEQ ID NO: 405954 - DNA, 15 bp, Homo sapiens
atgcacagagtataa

SEQ ID NO: 405955 - DNA, 15 bp, Homo sapiens
aatgcacagagtata

SEQ ID NO: 405956 - DNA, 15 bp, Homo sapiens
caatgcacagagtat

SEQ ID NO: 405957 - DNA, 15 bp, Homo sapiens
acaatgcacagagta

SEQ ID NO: 405958 - DNA, 15 bp, Homo sapiens
aacaatgcacagagt

SEQ ID NO: 405959 - DNA, 15 bp, Homo sapiens
taacaatgcacagag

SEQ ID NO: 405960 - DNA, 15 bp, Homo sapiens
ctaacaatgcacaga

SEQ ID NO: 405961 - DNA, 15 bp, Homo sapiens
tctaacaatgcacag

SEQ ID NO: 405962 - DNA, 15 bp, Homo sapiens
atctaacaatgcaca

SEQ ID NO: 405963 - DNA, 15 bp, Homo sapiens
tatctaacaatgcac

SEQ ID NO: 405964 - DNA, 15 bp, Homo sapiens
ctatctaacaatgca

SEQ ID NO: 405965 - DNA, 15 bp, Homo sapiens
gctatctaacaatgc

SEQ ID NO: 405966 - DNA, 15 bp, Homo sapiens
agctatctaacaatg

SEQ ID NO: 405967 - DNA, 15 bp, Homo sapiens
aagctatctaacaat

SEQ ID NO: 405968 - DNA, 15 bp, Homo sapiens
gaagctatctaacaa

SEQ ID NO: 405969 - DNA, 15 bp, Homo sapiens
ggaagctatctaaca

SEQ ID NO: 405970 - DNA, 15 bp, Homo sapiens
aggaagctatctaac

SEQ ID NO: 405971 - DNA, 15 bp, Homo sapiens
taggaagctatctaa

SEQ ID NO: 405972 - DNA, 15 bp, Homo sapiens
ctaggaagctatcta

SEQ ID NO: 405973 - DNA, 15 bp, Homo sapiens
cctaggaagctatct

SEQ ID NO: 405974 - DNA, 15 bp, Homo sapiens
gcctaggaagctatc

SEQ ID NO: 405975 - DNA, 15 bp, Homo sapiens
agcctaggaagctat

SEQ ID NO: 405976 - DNA, 15 bp, Homo sapiens
cagcctaggaagcta

SEQ ID NO: 405977 - DNA, 15 bp, Homo sapiens
ccagcctaggaagct

SEQ ID NO: 405978 - DNA, 15 bp, Homo sapiens
gccagcctaggaagc

SEQ ID NO: 405979 - DNA, 15 bp, Homo sapiens
tgccagcctaggaag

SEQ ID NO: 405980 - DNA, 15 bp, Homo sapiens
ttgccagcctaggaa

SEQ ID NO: 405981 - DNA, 15 bp, Homo sapiens
attgccagcctagga

SEQ ID NO: 405982 - DNA, 15 bp, Homo sapiens
tattgccagcctagg

SEQ ID NO: 405983 - DNA, 15 bp, Homo sapiens
ttattgccagcctag

SEQ ID NO: 405984 - DNA, 15 bp, Homo sapiens
attattgccagccta

SEQ ID NO: 405985 - DNA, 15 bp, Homo sapiens
aattattgccagcct

SEQ ID NO: 405986 - DNA, 15 bp, Homo sapiens
taattattgccagcc

SEQ ID NO: 405987 - DNA, 15 bp, Homo sapiens
ttaattattgccagc

SEQ ID NO: 405988 - DNA, 15 bp, Homo sapiens
tttaattattgccag

SEQ ID NO: 405989 - DNA, 15 bp, Homo sapiens
ctttaattattgcca

SEQ ID NO: 405990 - DNA, 15 bp, Homo sapiens
cctttaattattgcc

SEQ ID NO: 405991 - DNA, 15 bp, Homo sapiens
ccctttaattattgc

SEQ ID NO: 405992 - DNA, 15 bp, Homo sapiens
accctttaattattg

SEQ ID NO: 405993 - DNA, 15 bp, Homo sapiens
aaccctttaattatt

SEQ ID NO: 405994 - DNA, 15 bp, Homo sapiens
aaaccctttaattat

SEQ ID NO: 405995 - DNA, 15 bp, Homo sapiens
taaaccctttaatta

SEQ ID NO: 405996 - DNA, 15 bp, Homo sapiens
ctaaaccctttaatt

SEQ ID NO: 405997 - DNA, 15 bp, Homo sapiens
tctaaaccctttaat

SEQ ID NO: 405998 - DNA, 15 bp, Homo sapiens
atctaaaccctttaa

SEQ ID NO: 405999 - DNA, 15 bp, Homo sapiens
aatctaaacccttta

SEQ ID NO: 406000 - DNA, 15 bp, Homo sapiens
taatctaaacccttt

SEQ ID NO: 406001 - DNA, 15 bp, Homo sapiens
ttaatctaaaccctt

SEQ ID NO: 406002 - DNA, 15 bp, Homo sapiens
tttaatctaaaccct

SEQ ID NO: 406003 - DNA, 15 bp, Homo sapiens
gtttaatctaaaccc

SEQ ID NO: 406004 - DNA, 15 bp, Homo sapiens
tgtttaatctaaacc

SEQ ID NO: 406005 - DNA, 15 bp, Homo sapiens
ctgtttaatctaaac

SEQ ID NO: 406006 - DNA, 15 bp, Homo sapiens
tctgtttaatctaaa

SEQ ID NO: 406007 - DNA, 15 bp, Homo sapiens
atctgtttaatctaa

SEQ ID NO: 406008 - DNA, 15 bp, Homo sapiens
catctgtttaatcta

SEQ ID NO: 406009 - DNA, 15 bp, Homo sapiens
acatctgtttaatct

SEQ ID NO: 406010 - DNA, 15 bp, Homo sapiens
tacatctgtttaatc

SEQ ID NO: 406011 - DNA, 15 bp, Homo sapiens
ttacatctgtttaat

SEQ ID NO: 406012 - DNA, 15 bp, Homo sapiens
attacatctgtttaa

SEQ ID NO: 406013 - DNA, 15 bp, Homo sapiens
cattacatctgttta

SEQ ID NO: 406014 - DNA, 15 bp, Homo sapiens
acattacatctgttt

SEQ ID NO: 406015 - DNA, 15 bp, Homo sapiens
cacattacatctgtt

SEQ ID NO: 406016 - DNA, 15 bp, Homo sapiens
tcacattacatctgt

SEQ ID NO: 406017 - DNA, 15 bp, Homo sapiens
ttcacattacatctg

SEQ ID NO: 406018 - DNA, 15 bp, Homo sapiens
tttcacattacatct

SEQ ID NO: 406019 - DNA, 15 bp, Homo sapiens
atttcacattacatc

SEQ ID NO: 406020 - DNA, 15 bp, Homo sapiens
gatttcacattacat

SEQ ID NO: 406021 - DNA, 15 bp, Homo sapiens
agatttcacattaca

SEQ ID NO: 406022 - DNA, 15 bp, Homo sapiens
cagatttcacattac

SEQ ID NO: 406023 - DNA, 15 bp, Homo sapiens
acagatttcacatta

SEQ ID NO: 406024 - DNA, 15 bp, Homo sapiens
cacagatttcacatt

SEQ ID NO: 406025 - DNA, 15 bp, Homo sapiens
tcacagatttcacat

SEQ ID NO: 406026 - DNA, 15 bp, Homo sapiens
gtcacagatttcaca

SEQ ID NO: 406027 - DNA, 15 bp, Homo sapiens
tgtcacagatttcac

SEQ ID NO: 406028 - DNA, 15 bp, Homo sapiens
atgtcacagatttca

SEQ ID NO: 406029 - DNA, 15 bp, Homo sapiens
aatgtcacagatttc

SEQ ID NO: 406030 - DNA, 15 bp, Homo sapiens
aaatgtcacagattt

SEQ ID NO: 406031 - DNA, 15 bp, Homo sapiens
caaatgtcacagatt

SEQ ID NO: 406032 - DNA, 15 bp, Homo sapiens
tcaaatgtcacagat

SEQ ID NO: 406033 - DNA, 15 bp, Homo sapiens
ctcaaatgtcacaga

SEQ ID NO: 406034 - DNA, 15 bp, Homo sapiens
cctcaaatgtcacag

SEQ ID NO: 406035 - DNA, 15 bp, Homo sapiens
gcctcaaatgtcaca

SEQ ID NO: 406036 - DNA, 15 bp, Homo sapiens
agcctcaaatgtcac

SEQ ID NO: 406037 - DNA, 15 bp, Homo sapiens
tagcctcaaatgtca

SEQ ID NO: 406038 - DNA, 15 bp, Homo sapiens
ctagcctcaaatgtc

SEQ ID NO: 406039 - DNA, 15 bp, Homo sapiens
cctagcctcaaatgt

SEQ ID NO: 406040 - DNA, 15 bp, Homo sapiens
acctagcctcaaatg

SEQ ID NO: 406041 - DNA, 15 bp, Homo sapiens
aacctagcctcaaat

SEQ ID NO: 406042 - DNA, 15 bp, Homo sapiens
taacctagcctcaaa

SEQ ID NO: 406043 - DNA, 15 bp, Homo sapiens
ctaacctagcctcaa

SEQ ID NO: 406044 - DNA, 15 bp, Homo sapiens
gctaacctagcctca

SEQ ID NO: 406045 - DNA, 15 bp, Homo sapiens
agctaacctagcctc

SEQ ID NO: 406046 - DNA, 15 bp, Homo sapiens
tagctaacctagcct

SEQ ID NO: 406047 - DNA, 15 bp, Homo sapiens
ctagctaacctagcc

SEQ ID NO: 406048 - DNA, 15 bp, Homo sapiens
gctagctaacctagc

SEQ ID NO: 406049 - DNA, 15 bp, Homo sapiens
agctagctaacctag

SEQ ID NO: 406050 - DNA, 15 bp, Homo sapiens
aagctagctaaccta

SEQ ID NO: 406051 - DNA, 15 bp, Homo sapiens
taagctagctaacct

SEQ ID NO: 406052 - DNA, 15 bp, Homo sapiens
ttaagctagctaacc

SEQ ID NO: 406053 - DNA, 15 bp, Homo sapiens
attaagctagctaac

SEQ ID NO: 406054 - DNA, 15 bp, Homo sapiens
tattaagctagctaa

SEQ ID NO: 406055 - DNA, 15 bp, Homo sapiens
gtattaagctagcta

SEQ ID NO: 406056 - DNA, 15 bp, Homo sapiens
ggtattaagctagct

SEQ ID NO: 406057 - DNA, 15 bp, Homo sapiens
tggtattaagctagc

SEQ ID NO: 406058 - DNA, 15 bp, Homo sapiens
ctggtattaagctag

SEQ ID NO: 406059 - DNA, 15 bp, Homo sapiens
cctggtattaagcta

SEQ ID NO: 406060 - DNA, 15 bp, Homo sapiens
acctggtattaagct

SEQ ID NO: 406061 - DNA, 15 bp, Homo sapiens
cacctggtattaagc

SEQ ID NO: 406062 - DNA, 15 bp, Homo sapiens
acacctggtattaag

SEQ ID NO: 406063 - DNA, 15 bp, Homo sapiens
aacacctggtattaa

SEQ ID NO: 406064 - DNA, 15 bp, Homo sapiens
aaacacctggtatta

SEQ ID NO: 406065 - DNA, 15 bp, Homo sapiens
caaacacctggtatt

SEQ ID NO: 406066 - DNA, 15 bp, Homo sapiens
ccaaacacctggtat

SEQ ID NO: 406067 - DNA, 15 bp, Homo sapiens
tccaaacacctggta

SEQ ID NO: 406068 - DNA, 15 bp, Homo sapiens
ctccaaacacctggt

SEQ ID NO: 406069 - DNA, 15 bp, Homo sapiens
cctccaaacacctgg

SEQ ID NO: 406070 - DNA, 15 bp, Homo sapiens
gcctccaaacacctg

SEQ ID NO: 406071 - DNA, 15 bp, Homo sapiens
agcctccaaacacct

SEQ ID NO: 406072 - DNA, 15 bp, Homo sapiens
cagcctccaaacacc

SEQ ID NO: 406073 - DNA, 15 bp, Homo sapiens
ccagcctccaaacac

SEQ ID NO: 406074 - DNA, 15 bp, Homo sapiens
cccagcctccaaaca

SEQ ID NO: 406075 - DNA, 15 bp, Homo sapiens
ccccagcctccaaac

SEQ ID NO: 406076 - DNA, 15 bp, Homo sapiens
tccccagcctccaaa

SEQ ID NO: 406077 - DNA, 15 bp, Homo sapiens
atccccagcctccaa

SEQ ID NO: 406078 - DNA, 15 bp, Homo sapiens
catccccagcctcca

SEQ ID NO: 406079 - DNA, 15 bp, Homo sapiens
acatccccagcctcc

SEQ ID NO: 406080 - DNA, 15 bp, Homo sapiens
aacatccccagcctc

SEQ ID NO: 406081 - DNA, 15 bp, Homo sapiens
aaacatccccagcct

SEQ ID NO: 406082 - DNA, 15 bp, Homo sapiens
aaaacatccccagcc

SEQ ID NO: 406083 - DNA, 15 bp, Homo sapiens
aaaaacatccccagc

SEQ ID NO: 406084 - DNA, 15 bp, Homo sapiens
gaaaaacatccccag

SEQ ID NO: 406085 - DNA, 15 bp, Homo sapiens
cgaaaaacatcccca

SEQ ID NO: 406086 - DNA, 15 bp, Homo sapiens
acgaaaaacatcccc

SEQ ID NO: 406087 - DNA, 15 bp, Homo sapiens
cacgaaaaacatccc

SEQ ID NO: 406088 - DNA, 15 bp, Homo sapiens
ccacgaaaaacatcc

SEQ ID NO: 406089 - DNA, 15 bp, Homo sapiens
accacgaaaaacatc

SEQ ID NO: 406090 - DNA, 15 bp, Homo sapiens
aaccacgaaaaacat

SEQ ID NO: 406091 - DNA, 15 bp, Homo sapiens
taaccacgaaaaaca

SEQ ID NO: 406092 - DNA, 15 bp, Homo sapiens
ataaccacgaaaaac

SEQ ID NO: 406093 - DNA, 15 bp, Homo sapiens
tataaccacgaaaaa

SEQ ID NO: 406094 - DNA, 15 bp, Homo sapiens
ttataaccacgaaaa

SEQ ID NO: 406095 - DNA, 15 bp, Homo sapiens
cttataaccacgaaa

SEQ ID NO: 406096 - DNA, 15 bp, Homo sapiens
acttataaccacgaa

SEQ ID NO: 406097 - DNA, 15 bp, Homo sapiens
gacttataaccacga

SEQ ID NO: 406098 - DNA, 15 bp, Homo sapiens
agacttataaccacg

SEQ ID NO: 406099 - DNA, 15 bp, Homo sapiens
gagacttataaccac

SEQ ID NO: 406100 - DNA, 15 bp, Homo sapiens
ggagacttataacca

SEQ ID NO: 406101 - DNA, 15 bp, Homo sapiens
tggagacttataacc

SEQ ID NO: 406102 - DNA, 15 bp, Homo sapiens
atggagacttataac

SEQ ID NO: 406103 - DNA, 15 bp, Homo sapiens
catggagacttataa

SEQ ID NO: 406104 - DNA, 15 bp, Homo sapiens
gcatggagacttata

SEQ ID NO: 406105 - DNA, 15 bp, Homo sapiens
ggcatggagacttat

SEQ ID NO: 406106 - DNA, 15 bp, Homo sapiens
tggcatggagactta

SEQ ID NO: 406107 - DNA, 15 bp, Homo sapiens
ttggcatggagactt

SEQ ID NO: 406108 - DNA, 15 bp, Homo sapiens
tttggcatggagact

SEQ ID NO: 406109 - DNA, 15 bp, Homo sapiens
atttggcatggagac

SEQ ID NO: 406110 - DNA, 15 bp, Homo sapiens
aatttggcatggaga

SEQ ID NO: 406111 - DNA, 15 bp, Homo sapiens
aaatttggcatggag

SEQ ID NO: 406112 - DNA, 15 bp, Homo sapiens
aaaatttggcatgga

SEQ ID NO: 406113 - DNA, 15 bp, Homo sapiens
aaaaatttggcatgg

SEQ ID NO: 406114 - DNA, 15 bp, Homo sapiens
taaaaatttggcatg

SEQ ID NO: 406115 - DNA, 15 bp, Homo sapiens
ataaaaatttggcat

SEQ ID NO: 406116 - DNA, 15 bp, Homo sapiens
aataaaaatttggca

SEQ ID NO: 406117 - DNA, 15 bp, Homo sapiens
gaataaaaatttggc

SEQ ID NO: 406118 - DNA, 15 bp, Homo sapiens
agaataaaaatttgg

SEQ ID NO: 406119 - DNA, 15 bp, Homo sapiens
tagaataaaaatttg

SEQ ID NO: 406120 - DNA, 15 bp, Homo sapiens
ctagaataaaaattt

SEQ ID NO: 406121 - DNA, 15 bp, Homo sapiens
tctagaataaaaatt

SEQ ID NO: 406122 - DNA, 15 bp, Homo sapiens
ttctagaataaaaat

SEQ ID NO: 406123 - DNA, 15 bp, Homo sapiens
tttctagaataaaaa

SEQ ID NO: 406124 - DNA, 15 bp, Homo sapiens
atttctagaataaaa

SEQ ID NO: 406125 - DNA, 15 bp, Homo sapiens
aatttctagaataaa

SEQ ID NO: 406126 - DNA, 15 bp, Homo sapiens
caatttctagaataa

SEQ ID NO: 406127 - DNA, 15 bp, Homo sapiens
ccaatttctagaata

SEQ ID NO: 406128 - DNA, 15 bp, Homo sapiens
gccaatttctagaat

SEQ ID NO: 406129 - DNA, 15 bp, Homo sapiens
ggccaatttctagaa

SEQ ID NO: 406130 - DNA, 15 bp, Homo sapiens
aggccaatttctaga

SEQ ID NO: 406131 - DNA, 15 bp, Homo sapiens
caggccaatttctag

SEQ ID NO: 406132 - DNA, 15 bp, Homo sapiens
tcaggccaatttcta

SEQ ID NO: 406133 - DNA, 15 bp, Homo sapiens
ctcaggccaatttct

SEQ ID NO: 406134 - DNA, 15 bp, Homo sapiens
tctcaggccaatttc

SEQ ID NO: 406135 - DNA, 15 bp, Homo sapiens
ctctcaggccaattt

SEQ ID NO: 406136 - DNA, 15 bp, Homo sapiens
cctctcaggccaatt

SEQ ID NO: 406137 - DNA, 15 bp, Homo sapiens
ccctctcaggccaat

SEQ ID NO: 406138 - DNA, 15 bp, Homo sapiens
gccctctcaggccaa

SEQ ID NO: 406139 - DNA, 15 bp, Homo sapiens
tgccctctcaggcca

SEQ ID NO: 406140 - DNA, 15 bp, Homo sapiens
atgccctctcaggcc

SEQ ID NO: 406141 - DNA, 15 bp, Homo sapiens
catgccctctcaggc

SEQ ID NO: 406142 - DNA, 15 bp, Homo sapiens
acatgccctctcagg

SEQ ID NO: 406143 - DNA, 15 bp, Homo sapiens
aacatgccctctcag

SEQ ID NO: 406144 - DNA, 15 bp, Homo sapiens
caacatgccctctca

SEQ ID NO: 406145 - DNA, 15 bp, Homo sapiens
tcaacatgccctctc

SEQ ID NO: 406146 - DNA, 15 bp, Homo sapiens
ctcaacatgccctct

SEQ ID NO: 406147 - DNA, 15 bp, Homo sapiens
tctcaacatgccctc

SEQ ID NO: 406148 - DNA, 15 bp, Homo sapiens
ttctcaacatgccct

SEQ ID NO: 406149 - DNA, 15 bp, Homo sapiens
tttctcaacatgccc

SEQ ID NO: 406150 - DNA, 15 bp, Homo sapiens
atttctcaacatgcc

SEQ ID NO: 406151 - DNA, 15 bp, Homo sapiens
gatttctcaacatgc

SEQ ID NO: 406152 - DNA, 15 bp, Homo sapiens
cgatttctcaacatg

SEQ ID NO: 406153 - DNA, 15 bp, Homo sapiens
tcgatttctcaacat

SEQ ID NO: 406154 - DNA, 15 bp, Homo sapiens
ttcgatttctcaaca

SEQ ID NO: 406155 - DNA, 15 bp, Homo sapiens
attcgatttctcaac

SEQ ID NO: 406156 - DNA, 15 bp, Homo sapiens
cattcgatttctcaa

SEQ ID NO: 406157 - DNA, 15 bp, Homo sapiens
gcattcgatttctca

SEQ ID NO: 406158 - DNA, 15 bp, Homo sapiens
tgcattcgatttctc

SEQ ID NO: 406159 - DNA, 15 bp, Homo sapiens
ctgcattcgatttct

SEQ ID NO: 406160 - DNA, 15 bp, Homo sapiens
tctgcattcgatttc

SEQ ID NO: 406161 - DNA, 15 bp, Homo sapiens
ttctgcattcgattt

SEQ ID NO: 406162 - DNA, 15 bp, Homo sapiens
cttctgcattcgatt

SEQ ID NO: 406163 - DNA, 15 bp, Homo sapiens
acttctgcattcgat

SEQ ID NO: 406164 - DNA, 15 bp, Homo sapiens
tacttctgcattcga

SEQ ID NO: 406165 - DNA, 15 bp, Homo sapiens
ttacttctgcattcg

SEQ ID NO: 406166 - DNA, 15 bp, Homo sapiens
tttacttctgcattc

SEQ ID NO: 406167 - DNA, 15 bp, Homo sapiens
gtttacttctgcatt

SEQ ID NO: 406168 - DNA, 15 bp, Homo sapiens
tgtttacttctgcat

SEQ ID NO: 406169 - DNA, 15 bp, Homo sapiens
ttgtttacttctgca

SEQ ID NO: 406170 - DNA, 15 bp, Homo sapiens
attgtttacttctgc

SEQ ID NO: 406171 - DNA, 15 bp, Homo sapiens
cattgtttacttctg

SEQ ID NO: 406172 - DNA, 15 bp, Homo sapiens
tcattgtttacttct

SEQ ID NO: 406173 - DNA, 15 bp, Homo sapiens
gtcattgtttacttc

SEQ ID NO: 406174 - DNA, 15 bp, Homo sapiens
agtcattgtttactt

SEQ ID NO: 406175 - DNA, 15 bp, Homo sapiens
aagtcattgtttact

SEQ ID NO: 406176 - DNA, 15 bp, Homo sapiens
gaagtcattgtttac

SEQ ID NO: 406177 - DNA, 15 bp, Homo sapiens
tgaagtcattgttta

SEQ ID NO: 406178 - DNA, 15 bp, Homo sapiens
ctgaagtcattgttt

SEQ ID NO: 406179 - DNA, 15 bp, Homo sapiens
tctgaagtcattgtt

SEQ ID NO: 406180 - DNA, 15 bp, Homo sapiens
ttctgaagtcattgt

SEQ ID NO: 406181 - DNA, 15 bp, Homo sapiens
tttctgaagtcattg

SEQ ID NO: 406182 - DNA, 15 bp, Homo sapiens
atttctgaagtcatt

SEQ ID NO: 406183 - DNA, 15 bp, Homo sapiens
gatttctgaagtcat

SEQ ID NO: 406184 - DNA, 15 bp, Homo sapiens
tgatttctgaagtca

SEQ ID NO: 406185 - DNA, 15 bp, Homo sapiens
ctgatttctgaagtc

SEQ ID NO: 406186 - DNA, 15 bp, Homo sapiens
gctgatttctgaagt

SEQ ID NO: 406187 - DNA, 15 bp, Homo sapiens
agctgatttctgaag

SEQ ID NO: 406188 - DNA, 15 bp, Homo sapiens
aagctgatttctgaa

SEQ ID NO: 406189 - DNA, 15 bp, Homo sapiens
caagctgatttctga

SEQ ID NO: 406190 - DNA, 15 bp, Homo sapiens
ccaagctgatttctg

SEQ ID NO: 406191 - DNA, 15 bp, Homo sapiens
tccaagctgatttct

SEQ ID NO: 406192 - DNA, 15 bp, Homo sapiens
ttccaagctgatttc

SEQ ID NO: 406193 - DNA, 15 bp, Homo sapiens
cttccaagctgattt

SEQ ID NO: 406194 - DNA, 15 bp, Homo sapiens
acttccaagctgatt

SEQ ID NO: 406195 - DNA, 15 bp, Homo sapiens
gacttccaagctgat

SEQ ID NO: 406196 - DNA, 15 bp, Homo sapiens
tgacttccaagctga

SEQ ID NO: 406197 - DNA, 15 bp, Homo sapiens
ctgacttccaagctg

SEQ ID NO: 406198 - DNA, 15 bp, Homo sapiens
cctgacttccaagct

SEQ ID NO: 406199 - DNA, 15 bp, Homo sapiens
ccctgacttccaagc

SEQ ID NO: 406200 - DNA, 15 bp, Homo sapiens
tccctgacttccaag

SEQ ID NO: 406201 - DNA, 15 bp, Homo sapiens
atccctgacttccaa

SEQ ID NO: 406202 - DNA, 15 bp, Homo sapiens
aatccctgacttcca

SEQ ID NO: 406203 - DNA, 15 bp, Homo sapiens
aaatccctgacttcc

SEQ ID NO: 406204 - DNA, 15 bp, Homo sapiens
taaatccctgacttc

SEQ ID NO: 406205 - DNA, 15 bp, Homo sapiens
ataaatccctgactt

SEQ ID NO: 406206 - DNA, 15 bp, Homo sapiens
aataaatccctgact

SEQ ID NO: 406207 - DNA, 15 bp, Homo sapiens
aaataaatccctgac

SEQ ID NO: 406208 - DNA, 15 bp, Homo sapiens
aaaataaatccctga

SEQ ID NO: 406209 - DNA, 15 bp, Homo sapiens
gaaaataaatccctg

SEQ ID NO: 406210 - DNA, 15 bp, Homo sapiens
agaaaataaatccct

SEQ ID NO: 406211 - DNA, 15 bp, Homo sapiens
tagaaaataaatccc

SEQ ID NO: 406212 - DNA, 15 bp, Homo sapiens
atagaaaataaatcc

SEQ ID NO: 406213 - DNA, 15 bp, Homo sapiens
catagaaaataaatc

SEQ ID NO: 406214 - DNA, 15 bp, Homo sapiens
acatagaaaataaat

SEQ ID NO: 406215 - DNA, 15 bp, Homo sapiens
aacatagaaaataaa

SEQ ID NO: 406216 - DNA, 15 bp, Homo sapiens
caacatagaaaataa

SEQ ID NO: 406217 - DNA, 15 bp, Homo sapiens
acaacatagaaaata

SEQ ID NO: 406218 - DNA, 15 bp, Homo sapiens
cacaacatagaaaat

SEQ ID NO: 406219 - DNA, 15 bp, Homo sapiens
gcacaacatagaaaa

SEQ ID NO: 406220 - DNA, 15 bp, Homo sapiens
tgcacaacatagaaa

SEQ ID NO: 406221 - DNA, 15 bp, Homo sapiens
gtgcacaacatagaa

SEQ ID NO: 406222 - DNA, 15 bp, Homo sapiens
agtgcacaacataga

SEQ ID NO: 406223 - DNA, 15 bp, Homo sapiens
tagtgcacaacatag

SEQ ID NO: 406224 - DNA, 15 bp, Homo sapiens
atagtgcacaacata

SEQ ID NO: 406225 - DNA, 15 bp, Homo sapiens
aatagtgcacaacat

SEQ ID NO: 406226 - DNA, 15 bp, Homo sapiens
taatagtgcacaaca

SEQ ID NO: 406227 - DNA, 15 bp, Homo sapiens
ttaatagtgcacaac

SEQ ID NO: 406228 - DNA, 15 bp, Homo sapiens
attaatagtgcacaa

SEQ ID NO: 406229 - DNA, 15 bp, Homo sapiens
tattaatagtgcaca

SEQ ID NO: 406230 - DNA, 15 bp, Homo sapiens
atattaatagtgcac

SEQ ID NO: 406231 - DNA, 15 bp, Homo sapiens
tatattaatagtgca

SEQ ID NO: 406232 - DNA, 15 bp, Homo sapiens
gtatattaatagtgc

SEQ ID NO: 406233 - DNA, 15 bp, Homo sapiens
tgtatattaatagtg

SEQ ID NO: 406234 - DNA, 15 bp, Homo sapiens
ctgtatattaatagt

SEQ ID NO: 406235 - DNA, 15 bp, Homo sapiens
actgtatattaatag

SEQ ID NO: 406236 - DNA, 15 bp, Homo sapiens
aactgtatattaata

SEQ ID NO: 406237 - DNA, 15 bp, Homo sapiens
caactgtatattaat

SEQ ID NO: 406238 - DNA, 15 bp, Homo sapiens
tcaactgtatattaa

SEQ ID NO: 406239 - DNA, 15 bp, Homo sapiens
gtcaactgtatatta

SEQ ID NO: 406240 - DNA, 15 bp, Homo sapiens
ggtcaactgtatatt

SEQ ID NO: 406241 - DNA, 15 bp, Homo sapiens
gggtcaactgtatat

SEQ ID NO: 406242 - DNA, 15 bp, Homo sapiens
aagggtcaactgtat

SEQ ID NO: 406243 - DNA, 15 bp, Homo sapiens
caagggtcaactgta

SEQ ID NO: 406244 - DNA, 15 bp, Homo sapiens
tcaagggtcaactgt

SEQ ID NO: 406245 - DNA, 15 bp, Homo sapiens
ttcaagggtcaactg

SEQ ID NO: 406246 - DNA, 15 bp, Homo sapiens
gttcaagggtcaact

SEQ ID NO: 406247 - DNA, 15 bp, Homo sapiens
tgttcaagggtcaac

SEQ ID NO: 406248 - DNA, 15 bp, Homo sapiens
ctgttcaagggtcaa

SEQ ID NO: 406249 - DNA, 15 bp, Homo sapiens
actgttcaagggtca

SEQ ID NO: 406250 - DNA, 15 bp, Homo sapiens
cactgttcaagggtc

SEQ ID NO: 406251 - DNA, 15 bp, Homo sapiens
gcactgttcaagggt

SEQ ID NO: 406252 - DNA, 15 bp, Homo sapiens
tgcactgttcaaggg

SEQ ID NO: 406253 - DNA, 15 bp, Homo sapiens
ctgcactgttcaagg

SEQ ID NO: 406254 - DNA, 15 bp, Homo sapiens
cctgcactgttcaag

SEQ ID NO: 406255 - DNA, 15 bp, Homo sapiens
ccctgcactgttcaa

SEQ ID NO: 406256 - DNA, 15 bp, Homo sapiens
cccctgcactgttca

SEQ ID NO: 406257 - DNA, 15 bp, Homo sapiens
acccctgcactgttc

SEQ ID NO: 406258 - DNA, 15 bp, Homo sapiens
aacccctgcactgtt

SEQ ID NO: 406259 - DNA, 15 bp, Homo sapiens
taacccctgcactgt

SEQ ID NO: 406260 - DNA, 15 bp, Homo sapiens
ctaacccctgcactg

SEQ ID NO: 406261 - DNA, 15 bp, Homo sapiens
cctaacccctgcact

SEQ ID NO: 406262 - DNA, 15 bp, Homo sapiens
ccctaacccctgcac

SEQ ID NO: 406263 - DNA, 15 bp, Homo sapiens
tccctaacccctgca

SEQ ID NO: 406264 - DNA, 15 bp, Homo sapiens
atccctaacccctgc

SEQ ID NO: 406265 - DNA, 15 bp, Homo sapiens
catccctaacccctg

SEQ ID NO: 406266 - DNA, 15 bp, Homo sapiens
gcatccctaacccct

SEQ ID NO: 406267 - DNA, 15 bp, Homo sapiens
agcatccctaacccc

SEQ ID NO: 406268 - DNA, 15 bp, Homo sapiens
tagcatccctaaccc

SEQ ID NO: 406269 - DNA, 15 bp, Homo sapiens
ttagcatccctaacc

SEQ ID NO: 406270 - DNA, 15 bp, Homo sapiens
gttagcatccctaac

SEQ ID NO: 406271 - DNA, 15 bp, Homo sapiens
ggttagcatccctaa

SEQ ID NO: 406272 - DNA, 15 bp, Homo sapiens
gggttagcatcccta

SEQ ID NO: 406273 - DNA, 15 bp, Homo sapiens
tgggttagcatccct

SEQ ID NO: 406274 - DNA, 15 bp, Homo sapiens
atgggttagcatccc

SEQ ID NO: 406275 - DNA, 15 bp, Homo sapiens
catgggttagcatcc

SEQ ID NO: 406276 - DNA, 15 bp, Homo sapiens
acatgggttagcatc

SEQ ID NO: 406277 - DNA, 15 bp, Homo sapiens
cacatgggttagcat

SEQ ID NO: 406278 - DNA, 15 bp, Homo sapiens
gcacatgggttagca

SEQ ID NO: 406279 - DNA, 15 bp, Homo sapiens
tgcacatgggttagc

SEQ ID NO: 406280 - DNA, 15 bp, Homo sapiens
ctgcacatgggttag

SEQ ID NO: 406281 - DNA, 15 bp, Homo sapiens
actgcacatgggtta

SEQ ID NO: 406282 - DNA, 15 bp, Homo sapiens
gactgcacatgggtt

SEQ ID NO: 406283 - DNA, 15 bp, Homo sapiens
tgactgcacatgggt

SEQ ID NO: 406284 - DNA, 15 bp, Homo sapiens
ttgactgcacatggg

SEQ ID NO: 406285 - DNA, 15 bp, Homo sapiens
tttgactgcacatgg

SEQ ID NO: 406286 - DNA, 15 bp, Homo sapiens
ttttgactgcacatg

SEQ ID NO: 406287 - DNA, 15 bp, Homo sapiens
tttttgactgcacat

SEQ ID NO: 406288 - DNA, 15 bp, Homo sapiens
atttttgactgcaca

SEQ ID NO: 406289 - DNA, 15 bp, Homo sapiens
gatttttgactgcac

SEQ ID NO: 406290 - DNA, 15 bp, Homo sapiens
agatttttgactgca

SEQ ID NO: 406291 - DNA, 15 bp, Homo sapiens
cagatttttgactgc

SEQ ID NO: 406292 - DNA, 15 bp, Homo sapiens
tcagatttttgactg

SEQ ID NO: 406293 - DNA, 15 bp, Homo sapiens
ttcagatttttgact

SEQ ID NO: 406294 - DNA, 15 bp, Homo sapiens
attcagatttttgac

SEQ ID NO: 406295 - DNA, 15 bp, Homo sapiens
tattcagatttttga

SEQ ID NO: 406296 - DNA, 15 bp, Homo sapiens
atattcagatttttg

SEQ ID NO: 406297 - DNA, 15 bp, Homo sapiens
tatattcagattttt

SEQ ID NO: 406298 - DNA, 15 bp, Homo sapiens
ttatattcagatttt

SEQ ID NO: 406299 - DNA, 15 bp, Homo sapiens
gttatattcagattt

SEQ ID NO: 406300 - DNA, 15 bp, Homo sapiens
agttatattcagatt

SEQ ID NO: 406301 - DNA, 15 bp, Homo sapiens
aagttatattcagat

SEQ ID NO: 406302 - DNA, 15 bp, Homo sapiens
aaagttatattcaga

SEQ ID NO: 406303 - DNA, 15 bp, Homo sapiens
aaaagttatattcag

SEQ ID NO: 406304 - DNA, 15 bp, Homo sapiens
caaaagttatattca

SEQ ID NO: 406305 - DNA, 15 bp, Homo sapiens
ccaaaagttatattc

SEQ ID NO: 406306 - DNA, 15 bp, Homo sapiens
gccaaaagttatatt

SEQ ID NO: 406307 - DNA, 15 bp, Homo sapiens
agccaaaagttatat

SEQ ID NO: 406308 - DNA, 15 bp, Homo sapiens
gagccaaaagttata

SEQ ID NO: 406309 - DNA, 15 bp, Homo sapiens
ggagccaaaagttat

SEQ ID NO: 406310 - DNA, 15 bp, Homo sapiens
gggagccaaaagtta

SEQ ID NO: 406311 - DNA, 15 bp, Homo sapiens
tgggagccaaaagtt

SEQ ID NO: 406312 - DNA, 15 bp, Homo sapiens
gtgggagccaaaagt

SEQ ID NO: 406313 - DNA, 15 bp, Homo sapiens
tgtgggagccaaaag

SEQ ID NO: 406314 - DNA, 15 bp, Homo sapiens
ttgtgggagccaaaa

SEQ ID NO: 406315 - DNA, 15 bp, Homo sapiens
tttgtgggagccaaa

SEQ ID NO: 406316 - DNA, 15 bp, Homo sapiens
ttttgtgggagccaa

SEQ ID NO: 406317 - DNA, 15 bp, Homo sapiens
gttttgtgggagcca

SEQ ID NO: 406318 - DNA, 15 bp, Homo sapiens
agttttgtgggagcc

SEQ ID NO: 406319 - DNA, 15 bp, Homo sapiens
aagttttgtgggagc

SEQ ID NO: 406320 - DNA, 15 bp, Homo sapiens
taagttttgtgggag

SEQ ID NO: 406321 - DNA, 15 bp, Homo sapiens
ttaagttttgtggga

SEQ ID NO: 406322 - DNA, 15 bp, Homo sapiens
gttaagttttgtggg

SEQ ID NO: 406323 - DNA, 15 bp, Homo sapiens
agttaagttttgtgg

SEQ ID NO: 406324 - DNA, 15 bp, Homo sapiens
tagttaagttttgtg

SEQ ID NO: 406325 - DNA, 15 bp, Homo sapiens
gtagttaagttttgt

SEQ ID NO: 406326 - DNA, 15 bp, Homo sapiens
agtagttaagttttg

SEQ ID NO: 406327 - DNA, 15 bp, Homo sapiens
tagtagttaagtttt

SEQ ID NO: 406328 - DNA, 15 bp, Homo sapiens
ctagtagttaagttt

SEQ ID NO: 406329 - DNA, 15 bp, Homo sapiens
actagtagttaagtt

SEQ ID NO: 406330 - DNA, 15 bp, Homo sapiens
tactagtagttaagt

SEQ ID NO: 406331 - DNA, 15 bp, Homo sapiens
ctactagtagttaag

SEQ ID NO: 406332 - DNA, 15 bp, Homo sapiens
gctactagtagttaa

SEQ ID NO: 406333 - DNA, 15 bp, Homo sapiens
ggctactagtagtta

SEQ ID NO: 406334 - DNA, 15 bp, Homo sapiens
aggctactagtagtt

SEQ ID NO: 406335 - DNA, 15 bp, Homo sapiens
taggctactagtagt

SEQ ID NO: 406336 - DNA, 15 bp, Homo sapiens
gtaggctactagtag

SEQ ID NO: 406337 - DNA, 15 bp, Homo sapiens
agtaggctactagta

SEQ ID NO: 406338 - DNA, 15 bp, Homo sapiens
aagtaggctactagt

SEQ ID NO: 406339 - DNA, 15 bp, Homo sapiens
caagtaggctactag

SEQ ID NO: 406340 - DNA, 15 bp, Homo sapiens
tcaagtaggctacta

SEQ ID NO: 406341 - DNA, 15 bp, Homo sapiens
gtcaagtaggctact

SEQ ID NO: 406342 - DNA, 15 bp, Homo sapiens
agtcaagtaggctac

SEQ ID NO: 406343 - DNA, 15 bp, Homo sapiens
cagtcaagtaggcta

SEQ ID NO: 406344 - DNA, 15 bp, Homo sapiens
ccagtcaagtaggct

SEQ ID NO: 406345 - DNA, 15 bp, Homo sapiens
tccagtcaagtaggc

SEQ ID NO: 406346 - DNA, 15 bp, Homo sapiens
ttccagtcaagtagg

SEQ ID NO: 406347 - DNA, 15 bp, Homo sapiens
cttccagtcaagtag

SEQ ID NO: 406348 - DNA, 15 bp, Homo sapiens
gcttccagtcaagta

SEQ ID NO: 406349 - DNA, 15 bp, Homo sapiens
ggcttccagtcaagt

SEQ ID NO: 406350 - DNA, 15 bp, Homo sapiens
gggcttccagtcaag

SEQ ID NO: 406351 - DNA, 15 bp, Homo sapiens
agggcttccagtcaa

SEQ ID NO: 406352 - DNA, 15 bp, Homo sapiens
tagggcttccagtca

SEQ ID NO: 406353 - DNA, 15 bp, Homo sapiens
gtagggcttccagtc

SEQ ID NO: 406354 - DNA, 15 bp, Homo sapiens
agtagggcttccagt

SEQ ID NO: 406355 - DNA, 15 bp, Homo sapiens
cagtagggcttccag

SEQ ID NO: 406356 - DNA, 15 bp, Homo sapiens
tcagtagggcttcca

SEQ ID NO: 406357 - DNA, 15 bp, Homo sapiens
atcagtagggcttcc

SEQ ID NO: 406358 - DNA, 15 bp, Homo sapiens
tatcagtagggcttc

SEQ ID NO: 406359 - DNA, 15 bp, Homo sapiens
ttatcagtagggctt

SEQ ID NO: 406360 - DNA, 15 bp, Homo sapiens
gttatcagtagggct

SEQ ID NO: 406361 - DNA, 15 bp, Homo sapiens
ggttatcagtagggc

SEQ ID NO: 406362 - DNA, 15 bp, Homo sapiens
aggttatcagtaggg

SEQ ID NO: 406363 - DNA, 15 bp, Homo sapiens
taggttatcagtagg

SEQ ID NO: 406364 - DNA, 15 bp, Homo sapiens
ttaggttatcagtag

SEQ ID NO: 406365 - DNA, 15 bp, Homo sapiens
tttaggttatcagta

SEQ ID NO: 406366 - DNA, 15 bp, Homo sapiens
atttaggttatcagt

SEQ ID NO: 406367 - DNA, 15 bp, Homo sapiens
catttaggttatcag

SEQ ID NO: 406368 - DNA, 15 bp, Homo sapiens
ccatttaggttatca

SEQ ID NO: 406369 - DNA, 15 bp, Homo sapiens
accatttaggttatc

SEQ ID NO: 406370 - DNA, 15 bp, Homo sapiens
gaccatttaggttat

SEQ ID NO: 406371 - DNA, 15 bp, Homo sapiens
tgaccatttaggtta

SEQ ID NO: 406372 - DNA, 15 bp, Homo sapiens
ttgaccatttaggtt

SEQ ID NO: 406373 - DNA, 15 bp, Homo sapiens
attgaccatttaggt

SEQ ID NO: 406374 - DNA, 15 bp, Homo sapiens
gattgaccatttagg

SEQ ID NO: 406375 - DNA, 15 bp, Homo sapiens
tgattgaccatttag

SEQ ID NO: 406376 - DNA, 15 bp, Homo sapiens
ttgattgaccattta

SEQ ID NO: 406377 - DNA, 15 bp, Homo sapiens
gttgattgaccattt

SEQ ID NO: 406378 - DNA, 15 bp, Homo sapiens
cgttgattgaccatt

SEQ ID NO: 406379 - DNA, 15 bp, Homo sapiens
gcgttgattgaccat

SEQ ID NO: 406380 - DNA, 15 bp, Homo sapiens
tgcgttgattgacca

SEQ ID NO: 406381 - DNA, 15 bp, Homo sapiens
atgcgttgattgacc

SEQ ID NO: 406382 - DNA, 15 bp, Homo sapiens
tatgcgttgattgac

SEQ ID NO: 406383 - DNA, 15 bp, Homo sapiens
atatgcgttgattga

SEQ ID NO: 406384 - DNA, 15 bp, Homo sapiens
aatatgcgttgattg

SEQ ID NO: 406385 - DNA, 15 bp, Homo sapiens
aaatatgcgttgatt

SEQ ID NO: 406386 - DNA, 15 bp, Homo sapiens
aaaatatgcgttgat

SEQ ID NO: 406387 - DNA, 15 bp, Homo sapiens
caaaatatgcgttga

SEQ ID NO: 406388 - DNA, 15 bp, Homo sapiens
acaaaatatgcgttg

SEQ ID NO: 406389 - DNA, 15 bp, Homo sapiens
tacaaaatatgcgtt

SEQ ID NO: 406390 - DNA, 15 bp, Homo sapiens
atacaaaatatgcgt

SEQ ID NO: 406391 - DNA, 15 bp, Homo sapiens
tatacaaaatatgcg

SEQ ID NO: 406392 - DNA, 15 bp, Homo sapiens
ttatacaaaatatgc

SEQ ID NO: 406393 - DNA, 15 bp, Homo sapiens
cttatacaaaatatg

SEQ ID NO: 406394 - DNA, 15 bp, Homo sapiens
acttatacaaaatat

SEQ ID NO: 406395 - DNA, 15 bp, Homo sapiens
tacttatacaaaata

SEQ ID NO: 406396 - DNA, 15 bp, Homo sapiens
atacttatacaaaat

SEQ ID NO: 406397 - DNA, 15 bp, Homo sapiens
aatacttatacaaaa

SEQ ID NO: 406398 - DNA, 15 bp, Homo sapiens
taatacttatacaaa

SEQ ID NO: 406399 - DNA, 15 bp, Homo sapiens
ataatacttatacaa

SEQ ID NO: 406400 - DNA, 15 bp, Homo sapiens
tataatacttataca

SEQ ID NO: 406401 - DNA, 15 bp, Homo sapiens
atataatacttatac

SEQ ID NO: 406402 - DNA, 15 bp, Homo sapiens
tatataatacttata

SEQ ID NO: 406403 - DNA, 15 bp, Homo sapiens
gtatataatacttat

SEQ ID NO: 406404 - DNA, 15 bp, Homo sapiens
agtatataatactta

SEQ ID NO: 406405 - DNA, 15 bp, Homo sapiens
tagtatataatactt

SEQ ID NO: 406406 - DNA, 15 bp, Homo sapiens
atagtatataatact

SEQ ID NO: 406407 - DNA, 15 bp, Homo sapiens
tatagtatataatac

SEQ ID NO: 406408 - DNA, 15 bp, Homo sapiens
atatagtatataata

SEQ ID NO: 406409 - DNA, 15 bp, Homo sapiens
aatatagtatataat

SEQ ID NO: 406410 - DNA, 15 bp, Homo sapiens
gaatatagtatataa

SEQ ID NO: 406411 - DNA, 15 bp, Homo sapiens
agaatatagtatata

SEQ ID NO: 406412 - DNA, 15 bp, Homo sapiens
gagaatatagtatat

SEQ ID NO: 406413 - DNA, 15 bp, Homo sapiens
tgagaatatagtata

SEQ ID NO: 406414 - DNA, 15 bp, Homo sapiens
atgagaatatagtat

SEQ ID NO: 406415 - DNA, 15 bp, Homo sapiens
tatgagaatatagta

SEQ ID NO: 406416 - DNA, 15 bp, Homo sapiens
ttatgagaatatagt

SEQ ID NO: 406417 - DNA, 15 bp, Homo sapiens
attatgagaatatag

SEQ ID NO: 406418 - DNA, 15 bp, Homo sapiens
tattatgagaatata

SEQ ID NO: 406419 - DNA, 15 bp, Homo sapiens
ttattatgagaatat

SEQ ID NO: 406420 - DNA, 15 bp, Homo sapiens
cttattatgagaata

SEQ ID NO: 406421 - DNA, 15 bp, Homo sapiens
tcttattatgagaat

SEQ ID NO: 406422 - DNA, 15 bp, Homo sapiens
ttcttattatgagaa

SEQ ID NO: 406423 - DNA, 15 bp, Homo sapiens
tttcttattatgaga

SEQ ID NO: 406424 - DNA, 15 bp, Homo sapiens
ttttcttattatgag

SEQ ID NO: 406425 - DNA, 15 bp, Homo sapiens
attttcttattatga

SEQ ID NO: 406426 - DNA, 15 bp, Homo sapiens
gattttcttattatg

SEQ ID NO: 406427 - DNA, 15 bp, Homo sapiens
tgattttcttattat

SEQ ID NO: 406428 - DNA, 15 bp, Homo sapiens
atgattttcttatta

SEQ ID NO: 406429 - DNA, 15 bp, Homo sapiens
tatgattttcttatt

SEQ ID NO: 406430 - DNA, 15 bp, Homo sapiens
ttatgattttcttat

SEQ ID NO: 406431 - DNA, 15 bp, Homo sapiens
cttatgattttctta

SEQ ID NO: 406432 - DNA, 15 bp, Homo sapiens
ccttatgattttctt

SEQ ID NO: 406433 - DNA, 15 bp, Homo sapiens
tccttatgattttct

SEQ ID NO: 406434 - DNA, 15 bp, Homo sapiens
ttccttatgattttc

SEQ ID NO: 406435 - DNA, 15 bp, Homo sapiens
cttccttatgatttt

SEQ ID NO: 406436 - DNA, 15 bp, Homo sapiens
tcttccttatgattt

SEQ ID NO: 406437 - DNA, 15 bp, Homo sapiens
ctcttccttatgatt

SEQ ID NO: 406438 - DNA, 15 bp, Homo sapiens
tctcttccttatgat

SEQ ID NO: 406439 - DNA, 15 bp, Homo sapiens
ttctcttccttatga

SEQ ID NO: 406440 - DNA, 15 bp, Homo sapiens
tttctcttccttatg

SEQ ID NO: 406441 - DNA, 15 bp, Homo sapiens
ttttctcttccttat

SEQ ID NO: 406442 - DNA, 15 bp, Homo sapiens
attttctcttcctta

SEQ ID NO: 406443 - DNA, 15 bp, Homo sapiens
tattttctcttcctt

SEQ ID NO: 406444 - DNA, 15 bp, Homo sapiens
atattttctcttcct

SEQ ID NO: 406445 - DNA, 15 bp, Homo sapiens
tatattttctcttcc

SEQ ID NO: 406446 - DNA, 15 bp, Homo sapiens
atatattttctcttc

SEQ ID NO: 406447 - DNA, 15 bp, Homo sapiens
aatatattttctctt

SEQ ID NO: 406448 - DNA, 15 bp, Homo sapiens
aaatatattttctct

SEQ ID NO: 406449 - DNA, 15 bp, Homo sapiens
taaatatattttctc

SEQ ID NO: 406450 - DNA, 15 bp, Homo sapiens
gtaaatatattttct

SEQ ID NO: 406451 - DNA, 15 bp, Homo sapiens
agtaaatatattttc

SEQ ID NO: 406452 - DNA, 15 bp, Homo sapiens
cagtaaatatatttt

SEQ ID NO: 406453 - DNA, 15 bp, Homo sapiens
acagtaaatatattt

SEQ ID NO: 406454 - DNA, 15 bp, Homo sapiens
aacagtaaatatatt

SEQ ID NO: 406455 - DNA, 15 bp, Homo sapiens
gaacagtaaatatat

SEQ ID NO: 406456 - DNA, 15 bp, Homo sapiens
tgaacagtaaatata

SEQ ID NO: 406457 - DNA, 15 bp, Homo sapiens
atgaacagtaaatat

SEQ ID NO: 406458 - DNA, 15 bp, Homo sapiens
aatgaacagtaaata

SEQ ID NO: 406459 - DNA, 15 bp, Homo sapiens
taatgaacagtaaat

SEQ ID NO: 406460 - DNA, 15 bp, Homo sapiens
ttaatgaacagtaaa

SEQ ID NO: 406461 - DNA, 15 bp, Homo sapiens
cttaatgaacagtaa

SEQ ID NO: 406462 - DNA, 15 bp, Homo sapiens
acttaatgaacagta

SEQ ID NO: 406463 - DNA, 15 bp, Homo sapiens
cacttaatgaacagt

SEQ ID NO: 406464 - DNA, 15 bp, Homo sapiens
ccacttaatgaacag

SEQ ID NO: 406465 - DNA, 15 bp, Homo sapiens
tccacttaatgaaca

SEQ ID NO: 406466 - DNA, 15 bp, Homo sapiens
ttccacttaatgaac

SEQ ID NO: 406467 - DNA, 15 bp, Homo sapiens
cttccacttaatgaa

SEQ ID NO: 406468 - DNA, 15 bp, Homo sapiens
acttccacttaatga

SEQ ID NO: 406469 - DNA, 15 bp, Homo sapiens
cacttccacttaatg

SEQ ID NO: 406470 - DNA, 15 bp, Homo sapiens
ccacttccacttaat

SEQ ID NO: 406471 - DNA, 15 bp, Homo sapiens
tccacttccacttaa

SEQ ID NO: 406472 - DNA, 15 bp, Homo sapiens
atccacttccactta

SEQ ID NO: 406473 - DNA, 15 bp, Homo sapiens
gatccacttccactt

SEQ ID NO: 406474 - DNA, 15 bp, Homo sapiens
tgatccacttccact

SEQ ID NO: 406475 - DNA, 15 bp, Homo sapiens
atgatccacttccac

SEQ ID NO: 406476 - DNA, 15 bp, Homo sapiens
aatgatccacttcca

SEQ ID NO: 406477 - DNA, 15 bp, Homo sapiens
taatgatccacttcc

SEQ ID NO: 406478 - DNA, 15 bp, Homo sapiens
gtaatgatccacttc

SEQ ID NO: 406479 - DNA, 15 bp, Homo sapiens
tgtaatgatccactt

SEQ ID NO: 406480 - DNA, 15 bp, Homo sapiens
ttgtaatgatccact

SEQ ID NO: 406481 - DNA, 15 bp, Homo sapiens
tttgtaatgatccac

SEQ ID NO: 406482 - DNA, 15 bp, Homo sapiens
ctttgtaatgatcca

SEQ ID NO: 406483 - DNA, 15 bp, Homo sapiens
cctttgtaatgatcc

SEQ ID NO: 406484 - DNA, 15 bp, Homo sapiens
acctttgtaatgatc

SEQ ID NO: 406485 - DNA, 15 bp, Homo sapiens
aacctttgtaatgat

SEQ ID NO: 406486 - DNA, 15 bp, Homo sapiens
aaacctttgtaatga

SEQ ID NO: 406487 - DNA, 15 bp, Homo sapiens
aaaacctttgtaatg

SEQ ID NO: 406488 - DNA, 15 bp, Homo sapiens
gaaaacctttgtaat

SEQ ID NO: 406489 - DNA, 15 bp, Homo sapiens
agaaaacctttgtaa

SEQ ID NO: 406490 - DNA, 15 bp, Homo sapiens
aagaaaacctttgta

SEQ ID NO: 406491 - DNA, 15 bp, Homo sapiens
gaagaaaacctttgt

SEQ ID NO: 406492 - DNA, 15 bp, Homo sapiens
agaagaaaacctttg

SEQ ID NO: 406493 - DNA, 15 bp, Homo sapiens
aagaagaaaaccttt

SEQ ID NO: 406494 - DNA, 15 bp, Homo sapiens
gaagaagaaaacctt

SEQ ID NO: 406495 - DNA, 15 bp, Homo sapiens
tgaagaagaaaacct

SEQ ID NO: 406496 - DNA, 15 bp, Homo sapiens
atgaagaagaaaacc

SEQ ID NO: 406497 - DNA, 15 bp, Homo sapiens
gatgaagaagaaaac

SEQ ID NO: 406498 - DNA, 15 bp, Homo sapiens
tgatgaagaagaaaa

SEQ ID NO: 406499 - DNA, 15 bp, Homo sapiens
atgatgaagaagaaa

SEQ ID NO: 406500 - DNA, 15 bp, Homo sapiens
aatgatgaagaagaa

SEQ ID NO: 406501 - DNA, 15 bp, Homo sapiens
aaatgatgaagaaga

SEQ ID NO: 406502 - DNA, 15 bp, Homo sapiens
aaaatgatgaagaag

SEQ ID NO: 406503 - DNA, 15 bp, Homo sapiens
gaaaatgatgaagaa

SEQ ID NO: 406504 - DNA, 15 bp, Homo sapiens
tgaaaatgatgaaga

SEQ ID NO: 406505 - DNA, 15 bp, Homo sapiens
atgaaaatgatgaag

SEQ ID NO: 406506 - DNA, 15 bp, Homo sapiens
catgaaaatgatgaa

SEQ ID NO: 406507 - DNA, 15 bp, Homo sapiens
acatgaaaatgatga

SEQ ID NO: 406508 - DNA, 15 bp, Homo sapiens
aacatgaaaatgatg

SEQ ID NO: 406509 - DNA, 15 bp, Homo sapiens
aaacatgaaaatgat

SEQ ID NO: 406510 - DNA, 15 bp, Homo sapiens
taaacatgaaaatga

SEQ ID NO: 406511 - DNA, 15 bp, Homo sapiens
ctaaacatgaaaatg

SEQ ID NO: 406512 - DNA, 15 bp, Homo sapiens
actaaacatgaaaat

SEQ ID NO: 406513 - DNA, 15 bp, Homo sapiens
tactaaacatgaaaa

SEQ ID NO: 406514 - DNA, 15 bp, Homo sapiens
ctactaaacatgaaa

SEQ ID NO: 406515 - DNA, 15 bp, Homo sapiens
cctactaaacatgaa

SEQ ID NO: 406516 - DNA, 15 bp, Homo sapiens
gcctactaaacatga

SEQ ID NO: 406517 - DNA, 15 bp, Homo sapiens
ggcctactaaacatg

SEQ ID NO: 406518 - DNA, 15 bp, Homo sapiens
cggcctactaaacat

SEQ ID NO: 406519 - DNA, 15 bp, Homo sapiens
tcggcctactaaaca

SEQ ID NO: 406520 - DNA, 15 bp, Homo sapiens
ctcggcctactaaac

SEQ ID NO: 406521 - DNA, 15 bp, Homo sapiens
tctcggcctactaaa

SEQ ID NO: 406522 - DNA, 15 bp, Homo sapiens
ttctcggcctactaa

SEQ ID NO: 406523 - DNA, 15 bp, Homo sapiens
cttctcggcctacta

SEQ ID NO: 406524 - DNA, 15 bp, Homo sapiens
ccttctcggcctact

SEQ ID NO: 406525 - DNA, 15 bp, Homo sapiens
tccttctcggcctac

SEQ ID NO: 406526 - DNA, 15 bp, Homo sapiens
ctccttctcggccta

SEQ ID NO: 406527 - DNA, 15 bp, Homo sapiens
cctccttctcggcct

SEQ ID NO: 406528 - DNA, 15 bp, Homo sapiens
tcctccttctcggcc

SEQ ID NO: 406529 - DNA, 15 bp, Homo sapiens
ctcctccttctcggc

SEQ ID NO: 406530 - DNA, 15 bp, Homo sapiens
cctcctccttctcgg

SEQ ID NO: 406531 - DNA, 15 bp, Homo sapiens
tcctcctccttctcg

SEQ ID NO: 406532 - DNA, 15 bp, Homo sapiens
ttcctcctccttctc

SEQ ID NO: 406533 - DNA, 15 bp, Homo sapiens
tttcctcctccttct

SEQ ID NO: 406534 - DNA, 15 bp, Homo sapiens
ttttcctcctccttc

SEQ ID NO: 406535 - DNA, 15 bp, Homo sapiens
cttttcctcctcctt

SEQ ID NO: 406536 - DNA, 15 bp, Homo sapiens
ccttttcctcctcct

SEQ ID NO: 406537 - DNA, 15 bp, Homo sapiens
tccttttcctcctcc

SEQ ID NO: 406538 - DNA, 15 bp, Homo sapiens
ctccttttcctcctc

SEQ ID NO: 406539 - DNA, 15 bp, Homo sapiens
cctccttttcctcct

SEQ ID NO: 406540 - DNA, 15 bp, Homo sapiens
tcctccttttcctcc

SEQ ID NO: 406541 - DNA, 15 bp, Homo sapiens
ctcctccttttcctc

SEQ ID NO: 406542 - DNA, 15 bp, Homo sapiens
actcctccttttcct

SEQ ID NO: 406543 - DNA, 15 bp, Homo sapiens
aactcctccttttcc

SEQ ID NO: 406544 - DNA, 15 bp, Homo sapiens
caactcctccttttc

SEQ ID NO: 406545 - DNA, 15 bp, Homo sapiens
tcaactcctcctttt

SEQ ID NO: 406546 - DNA, 15 bp, Homo sapiens
atcaactcctccttt

SEQ ID NO: 406547 - DNA, 15 bp, Homo sapiens
gatcaactcctcctt

SEQ ID NO: 406548 - DNA, 15 bp, Homo sapiens
agatcaactcctcct

SEQ ID NO: 406549 - DNA, 15 bp, Homo sapiens
aagatcaactcctcc

SEQ ID NO: 406550 - DNA, 15 bp, Homo sapiens
caagatcaactcctc

SEQ ID NO: 406551 - DNA, 15 bp, Homo sapiens
gcaagatcaactcct

SEQ ID NO: 406552 - DNA, 15 bp, Homo sapiens
agcaagatcaactcc

SEQ ID NO: 406553 - DNA, 15 bp, Homo sapiens
cagcaagatcaactc

SEQ ID NO: 406554 - DNA, 15 bp, Homo sapiens
acagcaagatcaact

SEQ ID NO: 406555 - DNA, 15 bp, Homo sapiens
gacagcaagatcaac

SEQ ID NO: 406556 - DNA, 15 bp, Homo sapiens
agacagcaagatcaa

SEQ ID NO: 406557 - DNA, 15 bp, Homo sapiens
gagacagcaagatca

SEQ ID NO: 406558 - DNA, 15 bp, Homo sapiens
tgagacagcaagatc

SEQ ID NO: 406559 - DNA, 15 bp, Homo sapiens
ctgagacagcaagat

SEQ ID NO: 406560 - DNA, 15 bp, Homo sapiens
cctgagacagcaaga

SEQ ID NO: 406561 - DNA, 15 bp, Homo sapiens
ccctgagacagcaag

SEQ ID NO: 406562 - DNA, 15 bp, Homo sapiens
cccctgagacagcaa

SEQ ID NO: 406563 - DNA, 15 bp, Homo sapiens
acccctgagacagca

SEQ ID NO: 406564 - DNA, 15 bp, Homo sapiens
cacccctgagacagc

SEQ ID NO: 406565 - DNA, 15 bp, Homo sapiens
ccacccctgagacag

SEQ ID NO: 406566 - DNA, 15 bp, Homo sapiens
gccacccctgagaca

SEQ ID NO: 406567 - DNA, 15 bp, Homo sapiens
tgccacccctgagac

SEQ ID NO: 406568 - DNA, 15 bp, Homo sapiens
ctgccacccctgaga

SEQ ID NO: 406569 - DNA, 15 bp, Homo sapiens
tctgccacccctgag

SEQ ID NO: 406570 - DNA, 15 bp, Homo sapiens
ctctgccacccctga

SEQ ID NO: 406571 - DNA, 15 bp, Homo sapiens
tctctgccacccctg

SEQ ID NO: 406572 - DNA, 15 bp, Homo sapiens
atctctgccacccct

SEQ ID NO: 406573 - DNA, 15 bp, Homo sapiens
catctctgccacccc

SEQ ID NO: 406574 - DNA, 15 bp, Homo sapiens
ccatctctgccaccc

SEQ ID NO: 406575 - DNA, 15 bp, Homo sapiens
tccatctctgccacc

SEQ ID NO: 406576 - DNA, 15 bp, Homo sapiens
ctccatctctgccac

SEQ ID NO: 406577 - DNA, 15 bp, Homo sapiens
cctccatctctgcca

SEQ ID NO: 406578 - DNA, 15 bp, Homo sapiens
tcctccatctctgcc

SEQ ID NO: 406579 - DNA, 15 bp, Homo sapiens
ctcctccatctctgc

SEQ ID NO: 406580 - DNA, 15 bp, Homo sapiens
cctcctccatctctg

SEQ ID NO: 406581 - DNA, 15 bp, Homo sapiens
acctcctccatctct

SEQ ID NO: 406582 - DNA, 15 bp, Homo sapiens
cacctcctccatctc

SEQ ID NO: 406583 - DNA, 15 bp, Homo sapiens
tcacctcctccatct

SEQ ID NO: 406584 - DNA, 15 bp, Homo sapiens
ttcacctcctccatc

SEQ ID NO: 406585 - DNA, 15 bp, Homo sapiens
tttcacctcctccat

SEQ ID NO: 406586 - DNA, 15 bp, Homo sapiens
ctttcacctcctcca

SEQ ID NO: 406587 - DNA, 15 bp, Homo sapiens
cctttcacctcctcc

SEQ ID NO: 406588 - DNA, 15 bp, Homo sapiens
ccctttcacctcctc

SEQ ID NO: 406589 - DNA, 15 bp, Homo sapiens
cccctttcacctcct

SEQ ID NO: 406590 - DNA, 15 bp, Homo sapiens
tcccctttcacctcc

SEQ ID NO: 406591 - DNA, 15 bp, Homo sapiens
ctcccctttcacctc

SEQ ID NO: 406592 - DNA, 15 bp, Homo sapiens
cctcccctttcacct

SEQ ID NO: 406593 - DNA, 15 bp, Homo sapiens
gcctcccctttcacc

SEQ ID NO: 406594 - DNA, 15 bp, Homo sapiens
tgcctcccctttcac

SEQ ID NO: 406595 - DNA, 15 bp, Homo sapiens
ctgcctcccctttca

SEQ ID NO: 406596 - DNA, 15 bp, Homo sapiens
cctgcctcccctttc

SEQ ID NO: 406597 - DNA, 15 bp, Homo sapiens
tcctgcctccccttt

SEQ ID NO: 406598 - DNA, 15 bp, Homo sapiens
ctcctgcctcccctt

SEQ ID NO: 406599 - DNA, 15 bp, Homo sapiens
tctcctgcctcccct

SEQ ID NO: 406600 - DNA, 15 bp, Homo sapiens
ctctcctgcctcccc

SEQ ID NO: 406601 - DNA, 15 bp, Homo sapiens
cctctcctgcctccc

SEQ ID NO: 406602 - DNA, 15 bp, Homo sapiens
gcctctcctgcctcc

SEQ ID NO: 406603 - DNA, 15 bp, Homo sapiens
tgcctctcctgcctc

SEQ ID NO: 406604 - DNA, 15 bp, Homo sapiens
ctgcctctcctgcct

SEQ ID NO: 406605 - DNA, 15 bp, Homo sapiens
cctgcctctcctgcc

SEQ ID NO: 406606 - DNA, 15 bp, Homo sapiens
ccctgcctctcctgc

SEQ ID NO: 406607 - DNA, 15 bp, Homo sapiens
tccctgcctctcctg

SEQ ID NO: 406608 - DNA, 15 bp, Homo sapiens
gtccctgcctctcct

SEQ ID NO: 406609 - DNA, 15 bp, Homo sapiens
tgtccctgcctctcc

SEQ ID NO: 406610 - DNA, 15 bp, Homo sapiens
atgtccctgcctctc

SEQ ID NO: 406611 - DNA, 15 bp, Homo sapiens
aatgtccctgcctct

SEQ ID NO: 406612 - DNA, 15 bp, Homo sapiens
gaatgtccctgcctc

SEQ ID NO: 406613 - DNA, 15 bp, Homo sapiens
cgaatgtccctgcct

SEQ ID NO: 406614 - DNA, 15 bp, Homo sapiens
ccgaatgtccctgcc

SEQ ID NO: 406615 - DNA, 15 bp, Homo sapiens
accgaatgtccctgc

SEQ ID NO: 406616 - DNA, 15 bp, Homo sapiens
taccgaatgtccctg

SEQ ID NO: 406617 - DNA, 15 bp, Homo sapiens
ataccgaatgtccct

SEQ ID NO: 406618 - DNA, 15 bp, Homo sapiens
tataccgaatgtccc

SEQ ID NO: 406619 - DNA, 15 bp, Homo sapiens
ttataccgaatgtcc

SEQ ID NO: 406620 - DNA, 15 bp, Homo sapiens
gttataccgaatgtc

SEQ ID NO: 406621 - DNA, 15 bp, Homo sapiens
agttataccgaatgt

SEQ ID NO: 406622 - DNA, 15 bp, Homo sapiens
aagttataccgaatg

SEQ ID NO: 406623 - DNA, 15 bp, Homo sapiens
aaagttataccgaat

SEQ ID NO: 406624 - DNA, 15 bp, Homo sapiens
taaagttataccgaa

SEQ ID NO: 406625 - DNA, 15 bp, Homo sapiens
gtaaagttataccga

SEQ ID NO: 406626 - DNA, 15 bp, Homo sapiens
tgtaaagttataccg

SEQ ID NO: 406627 - DNA, 15 bp, Homo sapiens
ttgtaaagttatacc

SEQ ID NO: 406628 - DNA, 15 bp, Homo sapiens
tttgtaaagttatac

SEQ ID NO: 406629 - DNA, 15 bp, Homo sapiens
ttttgtaaagttata

SEQ ID NO: 406630 - DNA, 15 bp, Homo sapiens
tttttgtaaagttat

SEQ ID NO: 406631 - DNA, 15 bp, Homo sapiens
atttttgtaaagtta

SEQ ID NO: 406632 - DNA, 15 bp, Homo sapiens
tatttttgtaaagtt

SEQ ID NO: 406633 - DNA, 15 bp, Homo sapiens
gtatttttgtaaagt

SEQ ID NO: 406634 - DNA, 15 bp, Homo sapiens
tgtatttttgtaaag

SEQ ID NO: 406635 - DNA, 15 bp, Homo sapiens
atgtatttttgtaaa

SEQ ID NO: 406636 - DNA, 15 bp, Homo sapiens
gatgtatttttgtaa

SEQ ID NO: 406637 - DNA, 15 bp, Homo sapiens
tgatgtatttttgta

SEQ ID NO: 406638 - DNA, 15 bp, Homo sapiens
atgatgtatttttgt

SEQ ID NO: 406639 - DNA, 15 bp, Homo sapiens
tatgatgtatttttg

SEQ ID NO: 406640 - DNA, 15 bp, Homo sapiens
ttatgatgtattttt

SEQ ID NO: 406641 - DNA, 15 bp, Homo sapiens
attatgatgtatttt

SEQ ID NO: 406642 - DNA, 15 bp, Homo sapiens
aattatgatgtattt

SEQ ID NO: 406643 - DNA, 15 bp, Homo sapiens
aaattatgatgtatt

SEQ ID NO: 406644 - DNA, 15 bp, Homo sapiens
gaaattatgatgtat

SEQ ID NO: 406645 - DNA, 15 bp, Homo sapiens
agaaattatgatgta

SEQ ID NO: 406646 - DNA, 15 bp, Homo sapiens
cagaaattatgatgt

SEQ ID NO: 406647 - DNA, 15 bp, Homo sapiens
acagaaattatgatg

SEQ ID NO: 406648 - DNA, 15 bp, Homo sapiens
gacagaaattatgat

SEQ ID NO: 406649 - DNA, 15 bp, Homo sapiens
agacagaaattatga

SEQ ID NO: 406650 - DNA, 15 bp, Homo sapiens
cagacagaaattatg

SEQ ID NO: 406651 - DNA, 15 bp, Homo sapiens
tcagacagaaattat

SEQ ID NO: 406652 - DNA, 15 bp, Homo sapiens
ttcagacagaaatta

SEQ ID NO: 406653 - DNA, 15 bp, Homo sapiens
attcagacagaaatt

SEQ ID NO: 406654 - DNA, 15 bp, Homo sapiens
aattcagacagaaat

SEQ ID NO: 406655 - DNA, 15 bp, Homo sapiens
aaattcagacagaaa

SEQ ID NO: 406656 - DNA, 15 bp, Homo sapiens
aaaattcagacagaa

SEQ ID NO: 406657 - DNA, 15 bp, Homo sapiens
aaaaattcagacaga

SEQ ID NO: 406658 - DNA, 15 bp, Homo sapiens
caaaaattcagacag

SEQ ID NO: 406659 - DNA, 15 bp, Homo sapiens
gcaaaaattcagaca

SEQ ID NO: 406660 - DNA, 15 bp, Homo sapiens
agcaaaaattcagac

SEQ ID NO: 406661 - DNA, 15 bp, Homo sapiens
aagcaaaaattcaga

SEQ ID NO: 406662 - DNA, 15 bp, Homo sapiens
aaagcaaaaattcag

SEQ ID NO: 406663 - DNA, 15 bp, Homo sapiens
caaagcaaaaattca

SEQ ID NO: 406664 - DNA, 15 bp, Homo sapiens
acaaagcaaaaattc

SEQ ID NO: 406665 - DNA, 15 bp, Homo sapiens
gacaaagcaaaaatt

SEQ ID NO: 406666 - DNA, 15 bp, Homo sapiens
tgacaaagcaaaaat

SEQ ID NO: 406667 - DNA, 15 bp, Homo sapiens
atgacaaagcaaaaa

SEQ ID NO: 406668 - DNA, 15 bp, Homo sapiens
aatgacaaagcaaaa

SEQ ID NO: 406669 - DNA, 15 bp, Homo sapiens
aaatgacaaagcaaa

SEQ ID NO: 406670 - DNA, 15 bp, Homo sapiens
taaatgacaaagcaa

SEQ ID NO: 406671 - DNA, 15 bp, Homo sapiens
ataaatgacaaagca

SEQ ID NO: 406672 - DNA, 15 bp, Homo sapiens
gataaatgacaaagc

SEQ ID NO: 406673 - DNA, 15 bp, Homo sapiens
agataaatgacaaag

SEQ ID NO: 406674 - DNA, 15 bp, Homo sapiens
tagataaatgacaaa

SEQ ID NO: 406675 - DNA, 15 bp, Homo sapiens
ttagataaatgacaa

SEQ ID NO: 406676 - DNA, 15 bp, Homo sapiens
tttagataaatgaca

SEQ ID NO: 406677 - DNA, 15 bp, Homo sapiens
ttttagataaatgac

SEQ ID NO: 406678 - DNA, 15 bp, Homo sapiens
tttttagataaatga

SEQ ID NO: 406679 - DNA, 15 bp, Homo sapiens
atttttagataaatg

SEQ ID NO: 406680 - DNA, 15 bp, Homo sapiens
tatttttagataaat

SEQ ID NO: 406681 - DNA, 15 bp, Homo sapiens
atatttttagataaa

SEQ ID NO: 406682 - DNA, 15 bp, Homo sapiens
aatatttttagataa

SEQ ID NO: 406683 - DNA, 15 bp, Homo sapiens
aaatatttttagata

SEQ ID NO: 406684 - DNA, 15 bp, Homo sapiens
caaatatttttagat

SEQ ID NO: 406685 - DNA, 15 bp, Homo sapiens
acaaatatttttaga

SEQ ID NO: 406686 - DNA, 15 bp, Homo sapiens
tacaaatatttttag

SEQ ID NO: 406687 - DNA, 15 bp, Homo sapiens
atacaaatattttta

SEQ ID NO: 406688 - DNA, 15 bp, Homo sapiens
tatacaaatattttt

SEQ ID NO: 406689 - DNA, 15 bp, Homo sapiens
atatacaaatatttt

SEQ ID NO: 406690 - DNA, 15 bp, Homo sapiens
catatacaaatattt

SEQ ID NO: 406691 - DNA, 15 bp, Homo sapiens
tcatatacaaatatt

SEQ ID NO: 406692 - DNA, 15 bp, Homo sapiens
atcatatacaaatat

SEQ ID NO: 406693 - DNA, 15 bp, Homo sapiens
tatcatatacaaata

SEQ ID NO: 406694 - DNA, 15 bp, Homo sapiens
gtatcatatacaaat

SEQ ID NO: 406695 - DNA, 15 bp, Homo sapiens
tgtatcatatacaaa

SEQ ID NO: 406696 - DNA, 15 bp, Homo sapiens
ttgtatcatatacaa

SEQ ID NO: 406697 - DNA, 15 bp, Homo sapiens
tttgtatcatataca

SEQ ID NO: 406698 - DNA, 15 bp, Homo sapiens
atttgtatcatatac

SEQ ID NO: 406699 - DNA, 15 bp, Homo sapiens
aatttgtatcatata

SEQ ID NO: 406700 - DNA, 15 bp, Homo sapiens
aaatttgtatcatat

SEQ ID NO: 406701 - DNA, 15 bp, Homo sapiens
caaatttgtatcata

SEQ ID NO: 406702 - DNA, 15 bp, Homo sapiens
gcaaatttgtatcat

SEQ ID NO: 406703 - DNA, 15 bp, Homo sapiens
tgcaaatttgtatca

SEQ ID NO: 406704 - DNA, 15 bp, Homo sapiens
ttgcaaatttgtatc

SEQ ID NO: 406705 - DNA, 15 bp, Homo sapiens
cttgcaaatttgtat

SEQ ID NO: 406706 - DNA, 15 bp, Homo sapiens
acttgcaaatttgta

SEQ ID NO: 406707 - DNA, 15 bp, Homo sapiens
aacttgcaaatttgt

SEQ ID NO: 406708 - DNA, 15 bp, Homo sapiens
aaacttgcaaatttg

SEQ ID NO: 406709 - DNA, 15 bp, Homo sapiens
gaaacttgcaaattt

SEQ ID NO: 406710 - DNA, 15 bp, Homo sapiens
tgaaacttgcaaatt

SEQ ID NO: 406711 - DNA, 15 bp, Homo sapiens
ctgaaacttgcaaat

SEQ ID NO: 406712 - DNA, 15 bp, Homo sapiens
gctgaaacttgcaaa

SEQ ID NO: 406713 - DNA, 15 bp, Homo sapiens
cgctgaaacttgcaa

SEQ ID NO: 406714 - DNA, 15 bp, Homo sapiens
acgctgaaacttgca

SEQ ID NO: 406715 - DNA, 15 bp, Homo sapiens
gacgctgaaacttgc

SEQ ID NO: 406716 - DNA, 15 bp, Homo sapiens
agacgctgaaacttg

SEQ ID NO: 406717 - DNA, 15 bp, Homo sapiens
cagacgctgaaactt

SEQ ID NO: 406718 - DNA, 15 bp, Homo sapiens
ccagacgctgaaact

SEQ ID NO: 406719 - DNA, 15 bp, Homo sapiens
tccagacgctgaaac

SEQ ID NO: 406720 - DNA, 15 bp, Homo sapiens
atccagacgctgaaa

SEQ ID NO: 406721 - DNA, 15 bp, Homo sapiens
gatccagacgctgaa

SEQ ID NO: 406722 - DNA, 15 bp, Homo sapiens
tgatccagacgctga

SEQ ID NO: 406723 - DNA, 15 bp, Homo sapiens
atgatccagacgctg

SEQ ID NO: 406724 - DNA, 15 bp, Homo sapiens
tatgatccagacgct

SEQ ID NO: 406725 - DNA, 15 bp, Homo sapiens
ctatgatccagacgc

SEQ ID NO: 406726 - DNA, 15 bp, Homo sapiens
tctatgatccagacg

SEQ ID NO: 406727 - DNA, 15 bp, Homo sapiens
ttctatgatccagac

SEQ ID NO: 406728 - DNA, 15 bp, Homo sapiens
attctatgatccaga

SEQ ID NO: 406729 - DNA, 15 bp, Homo sapiens
cattctatgatccag

SEQ ID NO: 406730 - DNA, 15 bp, Homo sapiens
ccattctatgatcca

SEQ ID NO: 406731 - DNA, 15 bp, Homo sapiens
accattctatgatcc

SEQ ID NO: 406732 - DNA, 15 bp, Homo sapiens
gaccattctatgatc

SEQ ID NO: 406733 - DNA, 15 bp, Homo sapiens
ggaccattctatgat

SEQ ID NO: 406734 - DNA, 15 bp, Homo sapiens
tggaccattctatga

SEQ ID NO: 406735 - DNA, 15 bp, Homo sapiens
atggaccattctatg

SEQ ID NO: 406736 - DNA, 15 bp, Homo sapiens
catggaccattctat

SEQ ID NO: 406737 - DNA, 15 bp, Homo sapiens
acatggaccattcta

SEQ ID NO: 406738 - DNA, 15 bp, Homo sapiens
aacatggaccattct

SEQ ID NO: 406739 - DNA, 15 bp, Homo sapiens
caacatggaccattc

SEQ ID NO: 406740 - DNA, 15 bp, Homo sapiens
acaacatggaccatt

SEQ ID NO: 406741 - DNA, 15 bp, Homo sapiens
tacaacatggaccat

SEQ ID NO: 406742 - DNA, 15 bp, Homo sapiens
ttacaacatggacca

SEQ ID NO: 406743 - DNA, 15 bp, Homo sapiens
tttacaacatggacc

SEQ ID NO: 406744 - DNA, 15 bp, Homo sapiens
ttttacaacatggac

SEQ ID NO: 406745 - DNA, 15 bp, Homo sapiens
cttttacaacatgga

SEQ ID NO: 406746 - DNA, 15 bp, Homo sapiens
tcttttacaacatgg

SEQ ID NO: 406747 - DNA, 15 bp, Homo sapiens
ttcttttacaacatg

SEQ ID NO: 406748 - DNA, 15 bp, Homo sapiens
cttcttttacaacat

SEQ ID NO: 406749 - DNA, 15 bp, Homo sapiens
gcttcttttacaaca

SEQ ID NO: 406750 - DNA, 15 bp, Homo sapiens
ggcttcttttacaac

SEQ ID NO: 406751 - DNA, 15 bp, Homo sapiens
gggcttcttttacaa

SEQ ID NO: 406752 - DNA, 15 bp, Homo sapiens
tgggcttcttttaca

SEQ ID NO: 406753 - DNA, 15 bp, Homo sapiens
ttgggcttcttttac

SEQ ID NO: 406754 - DNA, 15 bp, Homo sapiens
tttgggcttctttta

SEQ ID NO: 406755 - DNA, 15 bp, Homo sapiens
ctttgggcttctttt

SEQ ID NO: 406756 - DNA, 15 bp, Homo sapiens
gctttgggcttcttt

SEQ ID NO: 406757 - DNA, 15 bp, Homo sapiens
tgctttgggcttctt

SEQ ID NO: 406758 - DNA, 15 bp, Homo sapiens
ctgctttgggcttct

SEQ ID NO: 406759 - DNA, 15 bp, Homo sapiens
actgctttgggcttc

SEQ ID NO: 406760 - DNA, 15 bp, Homo sapiens
gactgctttgggctt

SEQ ID NO: 406761 - DNA, 15 bp, Homo sapiens
agactgctttgggct

SEQ ID NO: 406762 - DNA, 15 bp, Homo sapiens
aagactgctttgggc

SEQ ID NO: 406763 - DNA, 15 bp, Homo sapiens
caagactgctttggg

SEQ ID NO: 406764 - DNA, 15 bp, Homo sapiens
tcaagactgctttgg

SEQ ID NO: 406765 - DNA, 15 bp, Homo sapiens
ttcaagactgctttg

SEQ ID NO: 406766 - DNA, 15 bp, Homo sapiens
attcaagactgcttt

SEQ ID NO: 406767 - DNA, 15 bp, Homo sapiens
tattcaagactgctt

SEQ ID NO: 406768 - DNA, 15 bp, Homo sapiens
ttattcaagactgct

SEQ ID NO: 406769 - DNA, 15 bp, Homo sapiens
attattcaagactgc

SEQ ID NO: 406770 - DNA, 15 bp, Homo sapiens
gattattcaagactg

SEQ ID NO: 406771 - DNA, 15 bp, Homo sapiens
tgattattcaagact

SEQ ID NO: 406772 - DNA, 15 bp, Homo sapiens
ctgattattcaagac

SEQ ID NO: 406773 - DNA, 15 bp, Homo sapiens
tctgattattcaaga

SEQ ID NO: 406774 - DNA, 15 bp, Homo sapiens
ttctgattattcaag

SEQ ID NO: 406775 - DNA, 15 bp, Homo sapiens
attctgattattcaa

SEQ ID NO: 406776 - DNA, 15 bp, Homo sapiens
gattctgattattca

SEQ ID NO: 406777 - DNA, 15 bp, Homo sapiens
agattctgattattc

SEQ ID NO: 406778 - DNA, 15 bp, Homo sapiens
aagattctgattatt

SEQ ID NO: 406779 - DNA, 15 bp, Homo sapiens
gaagattctgattat

SEQ ID NO: 406780 - DNA, 15 bp, Homo sapiens
agaagattctgatta

SEQ ID NO: 406781 - DNA, 15 bp, Homo sapiens
cagaagattctgatt

SEQ ID NO: 406782 - DNA, 15 bp, Homo sapiens
ccagaagattctgat

SEQ ID NO: 406783 - DNA, 15 bp, Homo sapiens
accagaagattctga

SEQ ID NO: 406784 - DNA, 15 bp, Homo sapiens
taccagaagattctg

SEQ ID NO: 406785 - DNA, 15 bp, Homo sapiens
ctaccagaagattct

SEQ ID NO: 406786 - DNA, 15 bp, Homo sapiens
tctaccagaagattc

SEQ ID NO: 406787 - DNA, 15 bp, Homo sapiens
atctaccagaagatt

SEQ ID NO: 406788 - DNA, 15 bp, Homo sapiens
aatctaccagaagat

SEQ ID NO: 406789 - DNA, 15 bp, Homo sapiens
taatctaccagaaga

SEQ ID NO: 406790 - DNA, 15 bp, Homo sapiens
ataatctaccagaag

SEQ ID NO: 406791 - DNA, 15 bp, Homo sapiens
gataatctaccagaa

SEQ ID NO: 406792 - DNA, 15 bp, Homo sapiens
agataatctaccaga

SEQ ID NO: 406793 - DNA, 15 bp, Homo sapiens
tagataatctaccag

SEQ ID NO: 406794 - DNA, 15 bp, Homo sapiens
ttagataatctacca

SEQ ID NO: 406795 - DNA, 15 bp, Homo sapiens
attagataatctacc

SEQ ID NO: 406796 - DNA, 15 bp, Homo sapiens
cattagataatctac

SEQ ID NO: 406797 - DNA, 15 bp, Homo sapiens
acattagataatcta

SEQ ID NO: 406798 - DNA, 15 bp, Homo sapiens
gacattagataatct

SEQ ID NO: 406799 - DNA, 15 bp, Homo sapiens
tgacattagataatc

SEQ ID NO: 406800 - DNA, 15 bp, Homo sapiens
ctgacattagataat

SEQ ID NO: 406801 - DNA, 15 bp, Homo sapiens
actgacattagataa

SEQ ID NO: 406802 - DNA, 15 bp, Homo sapiens
aactgacattagata

SEQ ID NO: 406803 - DNA, 15 bp, Homo sapiens
aaactgacattagat

SEQ ID NO: 406804 - DNA, 15 bp, Homo sapiens
caaactgacattaga

SEQ ID NO: 406805 - DNA, 15 bp, Homo sapiens
acaaactgacattag

SEQ ID NO: 406806 - DNA, 15 bp, Homo sapiens
aacaaactgacatta

SEQ ID NO: 406807 - DNA, 15 bp, Homo sapiens
aaacaaactgacatt

SEQ ID NO: 406808 - DNA, 15 bp, Homo sapiens
aaaacaaactgacat

SEQ ID NO: 406809 - DNA, 15 bp, Homo sapiens
gaaaacaaactgaca

SEQ ID NO: 406810 - DNA, 15 bp, Homo sapiens
agaaaacaaactgac

SEQ ID NO: 406811 - DNA, 15 bp, Homo sapiens
cagaaaacaaactga

SEQ ID NO: 406812 - DNA, 15 bp, Homo sapiens
ccagaaaacaaactg

SEQ ID NO: 406813 - DNA, 15 bp, Homo sapiens
gccagaaaacaaact

SEQ ID NO: 406814 - DNA, 15 bp, Homo sapiens
tgccagaaaacaaac

SEQ ID NO: 406815 - DNA, 15 bp, Homo sapiens
atgccagaaaacaaa

SEQ ID NO: 406816 - DNA, 15 bp, Homo sapiens
aatgccagaaaacaa

SEQ ID NO: 406817 - DNA, 15 bp, Homo sapiens
aaatgccagaaaaca

SEQ ID NO: 406818 - DNA, 15 bp, Homo sapiens
aaaatgccagaaaac

SEQ ID NO: 406819 - DNA, 15 bp, Homo sapiens
aaaaatgccagaaaa

SEQ ID NO: 406820 - DNA, 15 bp, Homo sapiens
taaaaatgccagaaa

SEQ ID NO: 406821 - DNA, 15 bp, Homo sapiens
ataaaaatgccagaa

SEQ ID NO: 406822 - DNA, 15 bp, Homo sapiens
cataaaaatgccaga

SEQ ID NO: 406823 - DNA, 15 bp, Homo sapiens
acataaaaatgccag

SEQ ID NO: 406824 - DNA, 15 bp, Homo sapiens
gacataaaaatgcca

SEQ ID NO: 406825 - DNA, 15 bp, Homo sapiens
agacataaaaatgcc

SEQ ID NO: 406826 - DNA, 15 bp, Homo sapiens
aagacataaaaatgc

SEQ ID NO: 406827 - DNA, 15 bp, Homo sapiens
gaagacataaaaatg

SEQ ID NO: 406828 - DNA, 15 bp, Homo sapiens
agaagacataaaaat

SEQ ID NO: 406829 - DNA, 15 bp, Homo sapiens
aagaagacataaaaa

SEQ ID NO: 406830 - DNA, 15 bp, Homo sapiens
gaagaagacataaaa

SEQ ID NO: 406831 - DNA, 15 bp, Homo sapiens
tgaagaagacataaa

SEQ ID NO: 406832 - DNA, 15 bp, Homo sapiens
atgaagaagacataa

SEQ ID NO: 406833 - DNA, 15 bp, Homo sapiens
gatgaagaagacata

SEQ ID NO: 406834 - DNA, 15 bp, Homo sapiens
tgatgaagaagacat

SEQ ID NO: 406835 - DNA, 15 bp, Homo sapiens
atgatgaagaagaca

SEQ ID NO: 406836 - DNA, 15 bp, Homo sapiens
aatgatgaagaagac

SEQ ID NO: 406837 - DNA, 15 bp, Homo sapiens
caaaatgatgaagaa

SEQ ID NO: 406838 - DNA, 15 bp, Homo sapiens
gcaaaatgatgaaga

SEQ ID NO: 406839 - DNA, 15 bp, Homo sapiens
tgcaaaatgatgaag

SEQ ID NO: 406840 - DNA, 15 bp, Homo sapiens
atgcaaaatgatgaa

SEQ ID NO: 406841 - DNA, 15 bp, Homo sapiens
aatgcaaaatgatga

SEQ ID NO: 406842 - DNA, 15 bp, Homo sapiens
caatgcaaaatgatg

SEQ ID NO: 406843 - DNA, 15 bp, Homo sapiens
ccaatgcaaaatgat

SEQ ID NO: 406844 - DNA, 15 bp, Homo sapiens
accaatgcaaaatga

SEQ ID NO: 406845 - DNA, 15 bp, Homo sapiens
aaccaatgcaaaatg

SEQ ID NO: 406846 - DNA, 15 bp, Homo sapiens
aaaccaatgcaaaat

SEQ ID NO: 406847 - DNA, 15 bp, Homo sapiens
caaaccaatgcaaaa

SEQ ID NO: 406848 - DNA, 15 bp, Homo sapiens
ccaaaccaatgcaaa

SEQ ID NO: 406849 - DNA, 15 bp, Homo sapiens
tccaaaccaatgcaa

SEQ ID NO: 406850 - DNA, 15 bp, Homo sapiens
ttccaaaccaatgca

SEQ ID NO: 406851 - DNA, 15 bp, Homo sapiens
cttccaaaccaatgc

SEQ ID NO: 406852 - DNA, 15 bp, Homo sapiens
gcttccaaaccaatg

SEQ ID NO: 406853 - DNA, 15 bp, Homo sapiens
tgcttccaaaccaat

SEQ ID NO: 406854 - DNA, 15 bp, Homo sapiens
gtgcttccaaaccaa

SEQ ID NO: 406855 - DNA, 15 bp, Homo sapiens
agtgcttccaaacca

SEQ ID NO: 406856 - DNA, 15 bp, Homo sapiens
gagtgcttccaaacc

SEQ ID NO: 406857 - DNA, 15 bp, Homo sapiens
tgagtgcttccaaac

SEQ ID NO: 406858 - DNA, 15 bp, Homo sapiens
atgagtgcttccaaa

SEQ ID NO: 406859 - DNA, 15 bp, Homo sapiens
gatgagtgcttccaa

SEQ ID NO: 406860 - DNA, 15 bp, Homo sapiens
agatgagtgcttcca

SEQ ID NO: 406861 - DNA, 15 bp, Homo sapiens
aagatgagtgcttcc

SEQ ID NO: 406862 - DNA, 15 bp, Homo sapiens
aaagatgagtgcttc

SEQ ID NO: 406863 - DNA, 15 bp, Homo sapiens
taaagatgagtgctt

SEQ ID NO: 406864 - DNA, 15 bp, Homo sapiens
ataaagatgagtgct

SEQ ID NO: 406865 - DNA, 15 bp, Homo sapiens
gataaagatgagtgc

SEQ ID NO: 406866 - DNA, 15 bp, Homo sapiens
ggataaagatgagtg

SEQ ID NO: 406867 - DNA, 15 bp, Homo sapiens
tggataaagatgagt

SEQ ID NO: 406868 - DNA, 15 bp, Homo sapiens
ctggataaagatgag

SEQ ID NO: 406869 - DNA, 15 bp, Homo sapiens
actggataaagatga

SEQ ID NO: 406870 - DNA, 15 bp, Homo sapiens
aactggataaagatg

SEQ ID NO: 406871 - DNA, 15 bp, Homo sapiens
caactggataaagat

SEQ ID NO: 406872 - DNA, 15 bp, Homo sapiens
gcaactggataaaga

SEQ ID NO: 406873 - DNA, 15 bp, Homo sapiens
ggcaactggataaag

SEQ ID NO: 406874 - DNA, 15 bp, Homo sapiens
aggcaactggataaa

SEQ ID NO: 406875 - DNA, 15 bp, Homo sapiens
aaggcaactggataa

SEQ ID NO: 406876 - DNA, 15 bp, Homo sapiens
gaaggcaactggata

SEQ ID NO: 406877 - DNA, 15 bp, Homo sapiens
agaaggcaactggat

SEQ ID NO: 406878 - DNA, 15 bp, Homo sapiens
cagaaggcaactgga

SEQ ID NO: 406879 - DNA, 15 bp, Homo sapiens
acagaaggcaactgg

SEQ ID NO: 406880 - DNA, 15 bp, Homo sapiens
aacagaaggcaactg

SEQ ID NO: 406881 - DNA, 15 bp, Homo sapiens
aaacagaaggcaact

SEQ ID NO: 406882 - DNA, 15 bp, Homo sapiens
aaaacagaaggcaac

SEQ ID NO: 406883 - DNA, 15 bp, Homo sapiens
taaaacagaaggcaa

SEQ ID NO: 406884 - DNA, 15 bp, Homo sapiens
ataaaacagaaggca

SEQ ID NO: 406885 - DNA, 15 bp, Homo sapiens
aataaaacagaaggc

SEQ ID NO: 406886 - DNA, 15 bp, Homo sapiens
gaataaaacagaagg

SEQ ID NO: 406887 - DNA, 15 bp, Homo sapiens
ggaataaaacagaag

SEQ ID NO: 406888 - DNA, 15 bp, Homo sapiens
aggaataaaacagaa

SEQ ID NO: 406889 - DNA, 15 bp, Homo sapiens
gaggaataaaacaga

SEQ ID NO: 406890 - DNA, 15 bp, Homo sapiens
agaggaataaaacag

SEQ ID NO: 406891 - DNA, 15 bp, Homo sapiens
cagaggaataaaaca

SEQ ID NO: 406892 - DNA, 15 bp, Homo sapiens
ccagaggaataaaac

SEQ ID NO: 406893 - DNA, 15 bp, Homo sapiens
accagaggaataaaa

SEQ ID NO: 406894 - DNA, 15 bp, Homo sapiens
caccagaggaataaa

SEQ ID NO: 406895 - DNA, 15 bp, Homo sapiens
acaccagaggaataa

SEQ ID NO: 406896 - DNA, 15 bp, Homo sapiens
cacaccagaggaata

SEQ ID NO: 406897 - DNA, 15 bp, Homo sapiens
ccacaccagaggaat

SEQ ID NO: 406898 - DNA, 15 bp, Homo sapiens
accacaccagaggaa

SEQ ID NO: 406899 - DNA, 15 bp, Homo sapiens
caccacaccagagga

SEQ ID NO: 406900 - DNA, 15 bp, Homo sapiens
acaccacaccagagg

SEQ ID NO: 406901 - DNA, 15 bp, Homo sapiens
gacaccacaccagag

SEQ ID NO: 406902 - DNA, 15 bp, Homo sapiens
agacaccacaccaga

SEQ ID NO: 406903 - DNA, 15 bp, Homo sapiens
tagacaccacaccag

SEQ ID NO: 406904 - DNA, 15 bp, Homo sapiens
atagacaccacacca

SEQ ID NO: 406905 - DNA, 15 bp, Homo sapiens
aatagacaccacacc

SEQ ID NO: 406906 - DNA, 15 bp, Homo sapiens
taatagacaccacac

SEQ ID NO: 406907 - DNA, 15 bp, Homo sapiens
ctaatagacaccaca

SEQ ID NO: 406908 - DNA, 15 bp, Homo sapiens
gctaatagacaccac

SEQ ID NO: 406909 - DNA, 15 bp, Homo sapiens
agctaatagacacca

SEQ ID NO: 406910 - DNA, 15 bp, Homo sapiens
aagctaatagacacc

SEQ ID NO: 406911 - DNA, 15 bp, Homo sapiens
aaagctaatagacac

SEQ ID NO: 406912 - DNA, 15 bp, Homo sapiens
aaaagctaatagaca

SEQ ID NO: 406913 - DNA, 15 bp, Homo sapiens
caaaagctaatagac

SEQ ID NO: 406914 - DNA, 15 bp, Homo sapiens
tcaaaagctaataga

SEQ ID NO: 406915 - DNA, 15 bp, Homo sapiens
ttcaaaagctaatag

SEQ ID NO: 406916 - DNA, 15 bp, Homo sapiens
attcaaaagctaata

SEQ ID NO: 406917 - DNA, 15 bp, Homo sapiens
aattcaaaagctaat

SEQ ID NO: 406918 - DNA, 15 bp, Homo sapiens
aaattcaaaagctaa

SEQ ID NO: 406919 - DNA, 15 bp, Homo sapiens
gaaattcaaaagcta

SEQ ID NO: 406920 - DNA, 15 bp, Homo sapiens
agaaattcaaaagct

SEQ ID NO: 406921 - DNA, 15 bp, Homo sapiens
gagaaattcaaaagc

SEQ ID NO: 406922 - DNA, 15 bp, Homo sapiens
ggagaaattcaaaag

SEQ ID NO: 406923 - DNA, 15 bp, Homo sapiens
tggagaaattcaaaa

SEQ ID NO: 406924 - DNA, 15 bp, Homo sapiens
ttggagaaattcaaa

SEQ ID NO: 406925 - DNA, 15 bp, Homo sapiens
cttggagaaattcaa

SEQ ID NO: 406926 - DNA, 15 bp, Homo sapiens
tcttggagaaattca

SEQ ID NO: 406927 - DNA, 15 bp, Homo sapiens
atcttggagaaattc

SEQ ID NO: 406928 - DNA, 15 bp, Homo sapiens
gatcttggagaaatt

SEQ ID NO: 406929 - DNA, 15 bp, Homo sapiens
ggatcttggagaaat

SEQ ID NO: 406930 - DNA, 15 bp, Homo sapiens
tggatcttggagaaa

SEQ ID NO: 406931 - DNA, 15 bp, Homo sapiens
atggatcttggagaa

SEQ ID NO: 406932 - DNA, 15 bp, Homo sapiens
tatggatcttggaga

SEQ ID NO: 406933 - DNA, 15 bp, Homo sapiens
atatggatcttggag

SEQ ID NO: 406934 - DNA, 15 bp, Homo sapiens
gatatggatcttgga

SEQ ID NO: 406935 - DNA, 15 bp, Homo sapiens
agatatggatcttgg

SEQ ID NO: 406936 - DNA, 15 bp, Homo sapiens
aagatatggatcttg

SEQ ID NO: 406937 - DNA, 15 bp, Homo sapiens
caagatatggatctt

SEQ ID NO: 406938 - DNA, 15 bp, Homo sapiens
tcaagatatggatct

SEQ ID NO: 406939 - DNA, 15 bp, Homo sapiens
ttcaagatatggatc

SEQ ID NO: 406940 - DNA, 15 bp, Homo sapiens
tttcaagatatggat

SEQ ID NO: 406941 - DNA, 15 bp, Homo sapiens
gtttcaagatatgga

SEQ ID NO: 406942 - DNA, 15 bp, Homo sapiens
ggtttcaagatatgg

SEQ ID NO: 406943 - DNA, 15 bp, Homo sapiens
gggtttcaagatatg

SEQ ID NO: 406944 - DNA, 15 bp, Homo sapiens
agggtttcaagatat

SEQ ID NO: 406945 - DNA, 15 bp, Homo sapiens
aagggtttcaagata

SEQ ID NO: 406946 - DNA, 15 bp, Homo sapiens
aaagggtttcaagat

SEQ ID NO: 406947 - DNA, 15 bp, Homo sapiens
taaagggtttcaaga

SEQ ID NO: 406948 - DNA, 15 bp, Homo sapiens
gtaaagggtttcaag

SEQ ID NO: 406949 - DNA, 15 bp, Homo sapiens
ggtaaagggtttcaa

SEQ ID NO: 406950 - DNA, 15 bp, Homo sapiens
gggtaaagggtttca

SEQ ID NO: 406951 - DNA, 15 bp, Homo sapiens
tgggtaaagggtttc

SEQ ID NO: 406952 - DNA, 15 bp, Homo sapiens
gtgggtaaagggttt

SEQ ID NO: 406953 - DNA, 15 bp, Homo sapiens
ggtgggtaaagggtt

SEQ ID NO: 406954 - DNA, 15 bp, Homo sapiens
gggtgggtaaagggt

SEQ ID NO: 406955 - DNA, 15 bp, Homo sapiens
ggggtgggtaaaggg

SEQ ID NO: 406956 - DNA, 15 bp, Homo sapiens
tggggtgggtaaagg

SEQ ID NO: 406957 - DNA, 15 bp, Homo sapiens
gtggggtgggtaaag

SEQ ID NO: 406958 - DNA, 15 bp, Homo sapiens
ggtggggtgggtaaa

SEQ ID NO: 406959 - DNA, 15 bp, Homo sapiens
gggtggggtgggtaa

SEQ ID NO: 406960 - DNA, 15 bp, Homo sapiens
ggggtggggtgggta

SEQ ID NO: 406961 - DNA, 15 bp, Homo sapiens
tggggtggggtgggt

SEQ ID NO: 406962 - DNA, 15 bp, Homo sapiens
gtggggtggggtggg

SEQ ID NO: 406963 - DNA, 15 bp, Homo sapiens
ggtggggtggggtgg

SEQ ID NO: 406964 - DNA, 15 bp, Homo sapiens
aggtggggtggggtg

SEQ ID NO: 406965 - DNA, 15 bp, Homo sapiens
caggtggggtggggt

SEQ ID NO: 406966 - DNA, 15 bp, Homo sapiens
gcaggtggggtgggg

SEQ ID NO: 406967 - DNA, 15 bp, Homo sapiens
agcaggtggggtggg

SEQ ID NO: 406968 - DNA, 15 bp, Homo sapiens
gagcaggtggggtgg

SEQ ID NO: 406969 - DNA, 15 bp, Homo sapiens
ggagcaggtggggtg

SEQ ID NO: 406970 - DNA, 15 bp, Homo sapiens
aggagcaggtggggt

SEQ ID NO: 406971 - DNA, 15 bp, Homo sapiens
aaggagcaggtgggg

SEQ ID NO: 406972 - DNA, 15 bp, Homo sapiens
aaaggagcaggtggg

SEQ ID NO: 406973 - DNA, 15 bp, Homo sapiens
aaaaggagcaggtgg

SEQ ID NO: 406974 - DNA, 15 bp, Homo sapiens
aaaaaggagcaggtg

SEQ ID NO: 406975 - DNA, 15 bp, Homo sapiens
caaaaaggagcaggt

SEQ ID NO: 406976 - DNA, 15 bp, Homo sapiens
gcaaaaaggagcagg

SEQ ID NO: 406977 - DNA, 15 bp, Homo sapiens
ggcaaaaaggagcag

SEQ ID NO: 406978 - DNA, 15 bp, Homo sapiens
tggcaaaaaggagca

SEQ ID NO: 406979 - DNA, 15 bp, Homo sapiens
atggcaaaaaggagc

SEQ ID NO: 406980 - DNA, 15 bp, Homo sapiens
tatggcaaaaaggag

SEQ ID NO: 406981 - DNA, 15 bp, Homo sapiens
atatggcaaaaagga

SEQ ID NO: 406982 - DNA, 15 bp, Homo sapiens
gatatggcaaaaagg

SEQ ID NO: 406983 - DNA, 15 bp, Homo sapiens
agatatggcaaaaag

SEQ ID NO: 406984 - DNA, 15 bp, Homo sapiens
cagatatggcaaaaa

SEQ ID NO: 406985 - DNA, 15 bp, Homo sapiens
gcagatatggcaaaa

SEQ ID NO: 406986 - DNA, 15 bp, Homo sapiens
cgcagatatggcaaa

SEQ ID NO: 406987 - DNA, 15 bp, Homo sapiens
ccgcagatatggcaa

SEQ ID NO: 406988 - DNA, 15 bp, Homo sapiens
accgcagatatggca

SEQ ID NO: 406989 - DNA, 15 bp, Homo sapiens
gaccgcagatatggc

SEQ ID NO: 406990 - DNA, 15 bp, Homo sapiens
agaccgcagatatgg

SEQ ID NO: 406991 - DNA, 15 bp, Homo sapiens
gagaccgcagatatg

SEQ ID NO: 406992 - DNA, 15 bp, Homo sapiens
agagaccgcagatat

SEQ ID NO: 406993 - DNA, 15 bp, Homo sapiens
aagagaccgcagata

SEQ ID NO: 406994 - DNA, 15 bp, Homo sapiens
aaagagaccgcagat

SEQ ID NO: 406995 - DNA, 15 bp, Homo sapiens
gaaagagaccgcaga

SEQ ID NO: 406996 - DNA, 15 bp, Homo sapiens
tgaaagagaccgcag

SEQ ID NO: 406997 - DNA, 15 bp, Homo sapiens
atgaaagagaccgca

SEQ ID NO: 406998 - DNA, 15 bp, Homo sapiens
catgaaagagaccgc

SEQ ID NO: 406999 - DNA, 15 bp, Homo sapiens
ccatgaaagagaccg

SEQ ID NO: 407000 - DNA, 15 bp, Homo sapiens
accatgaaagagacc

SEQ ID NO: 407001 - DNA, 15 bp, Homo sapiens
aaccatgaaagagac

SEQ ID NO: 407002 - DNA, 15 bp, Homo sapiens
aaaccatgaaagaga

SEQ ID NO: 407003 - DNA, 15 bp, Homo sapiens
gaaaccatgaaagag

SEQ ID NO: 407004 - DNA, 15 bp, Homo sapiens
ggaaaccatgaaaga

SEQ ID NO: 407005 - DNA, 15 bp, Homo sapiens
aggaaaccatgaaag

SEQ ID NO: 407006 - DNA, 15 bp, Homo sapiens
aaggaaaccatgaaa

SEQ ID NO: 407007 - DNA, 15 bp, Homo sapiens
caaggaaaccatgaa

SEQ ID NO: 407008 - DNA, 15 bp, Homo sapiens
tcaaggaaaccatga

SEQ ID NO: 407009 - DNA, 15 bp, Homo sapiens
atcaaggaaaccatg

SEQ ID NO: 407010 - DNA, 15 bp, Homo sapiens
tatcaaggaaaccat

SEQ ID NO: 407011 - DNA, 15 bp, Homo sapiens
ctatcaaggaaacca

SEQ ID NO: 407012 - DNA, 15 bp, Homo sapiens
cctatcaaggaaacc

SEQ ID NO: 407013 - DNA, 15 bp, Homo sapiens
gcctatcaaggaaac

SEQ ID NO: 407014 - DNA, 15 bp, Homo sapiens
agcctatcaaggaaa

SEQ ID NO: 407015 - DNA, 15 bp, Homo sapiens
gagcctatcaaggaa

SEQ ID NO: 407016 - DNA, 15 bp, Homo sapiens
agagcctatcaagga

SEQ ID NO: 407017 - DNA, 15 bp, Homo sapiens
cagagcctatcaagg

SEQ ID NO: 407018 - DNA, 15 bp, Homo sapiens
acagagcctatcaag

SEQ ID NO: 407019 - DNA, 15 bp, Homo sapiens
gacagagcctatcaa

SEQ ID NO: 407020 - DNA, 15 bp, Homo sapiens
cgacagagcctatca

SEQ ID NO: 407021 - DNA, 15 bp, Homo sapiens
acgacagagcctatc

SEQ ID NO: 407022 - DNA, 15 bp, Homo sapiens
tacgacagagcctat

SEQ ID NO: 407023 - DNA, 15 bp, Homo sapiens
ttacgacagagccta

SEQ ID NO: 407024 - DNA, 15 bp, Homo sapiens
tttacgacagagcct

SEQ ID NO: 407025 - DNA, 15 bp, Homo sapiens
atttacgacagagcc

SEQ ID NO: 407026 - DNA, 15 bp, Homo sapiens
aatttacgacagagc

SEQ ID NO: 407027 - DNA, 15 bp, Homo sapiens
gaatttacgacagag

SEQ ID NO: 407028 - DNA, 15 bp, Homo sapiens
agaatttacgacaga

SEQ ID NO: 407029 - DNA, 15 bp, Homo sapiens
cagaatttacgacag

SEQ ID NO: 407030 - DNA, 15 bp, Homo sapiens
ccagaatttacgaca

SEQ ID NO: 407031 - DNA, 15 bp, Homo sapiens
cccagaatttacgac

SEQ ID NO: 407032 - DNA, 15 bp, Homo sapiens
tcccagaatttacga

SEQ ID NO: 407033 - DNA, 15 bp, Homo sapiens
ttcccagaatttacg

SEQ ID NO: 407034 - DNA, 15 bp, Homo sapiens
cttcccagaatttac

SEQ ID NO: 407035 - DNA, 15 bp, Homo sapiens
acttcccagaattta

SEQ ID NO: 407036 - DNA, 15 bp, Homo sapiens
gacttcccagaattt

SEQ ID NO: 407037 - DNA, 15 bp, Homo sapiens
tgacttcccagaatt

SEQ ID NO: 407038 - DNA, 15 bp, Homo sapiens
atgacttcccagaat

SEQ ID NO: 407039 - DNA, 15 bp, Homo sapiens
catgacttcccagaa

SEQ ID NO: 407040 - DNA, 15 bp, Homo sapiens
gcatgacttcccaga

SEQ ID NO: 407041 - DNA, 15 bp, Homo sapiens
tgcatgacttcccag

SEQ ID NO: 407042 - DNA, 15 bp, Homo sapiens
gtgcatgacttccca

SEQ ID NO: 407043 - DNA, 15 bp, Homo sapiens
tgtgcatgacttccc

SEQ ID NO: 407044 - DNA, 15 bp, Homo sapiens
ttgtgcatgacttcc

SEQ ID NO: 407045 - DNA, 15 bp, Homo sapiens
gttgtgcatgacttc

SEQ ID NO: 407046 - DNA, 15 bp, Homo sapiens
tgttgtgcatgactt

SEQ ID NO: 407047 - DNA, 15 bp, Homo sapiens
atgttgtgcatgact

SEQ ID NO: 407048 - DNA, 15 bp, Homo sapiens
gatgttgtgcatgac

SEQ ID NO: 407049 - DNA, 15 bp, Homo sapiens
agatgttgtgcatga

SEQ ID NO: 407050 - DNA, 15 bp, Homo sapiens
cagatgttgtgcatg

SEQ ID NO: 407051 - DNA, 15 bp, Homo sapiens
tcagatgttgtgcat

SEQ ID NO: 407052 - DNA, 15 bp, Homo sapiens
ttcagatgttgtgca

SEQ ID NO: 407053 - DNA, 15 bp, Homo sapiens
gttcagatgttgtgc

SEQ ID NO: 407054 - DNA, 15 bp, Homo sapiens
tgttcagatgttgtg

SEQ ID NO: 407055 - DNA, 15 bp, Homo sapiens
gtgttcagatgttgt

SEQ ID NO: 407056 - DNA, 15 bp, Homo sapiens
tgtgttcagatgttg

SEQ ID NO: 407057 - DNA, 15 bp, Homo sapiens
ctgtgttcagatgtt

SEQ ID NO: 407058 - DNA, 15 bp, Homo sapiens
actgtgttcagatgt

SEQ ID NO: 407059 - DNA, 15 bp, Homo sapiens
aactgtgttcagatg

SEQ ID NO: 407060 - DNA, 15 bp, Homo sapiens
aaactgtgttcagat

SEQ ID NO: 407061 - DNA, 15 bp, Homo sapiens
aaaactgtgttcaga

SEQ ID NO: 407062 - DNA, 15 bp, Homo sapiens
gaaaactgtgttcag

SEQ ID NO: 407063 - DNA, 15 bp, Homo sapiens
agaaaactgtgttca

SEQ ID NO: 407064 - DNA, 15 bp, Homo sapiens
gagaaaactgtgttc

SEQ ID NO: 407065 - DNA, 15 bp, Homo sapiens
agagaaaactgtgtt

SEQ ID NO: 407066 - DNA, 15 bp, Homo sapiens
tagagaaaactgtgt

SEQ ID NO: 407067 - DNA, 15 bp, Homo sapiens
ctagagaaaactgtg

SEQ ID NO: 407068 - DNA, 15 bp, Homo sapiens
gctagagaaaactgt

SEQ ID NO: 407069 - DNA, 15 bp, Homo sapiens
tgctagagaaaactg

SEQ ID NO: 407070 - DNA, 15 bp, Homo sapiens
ctgctagagaaaact

SEQ ID NO: 407071 - DNA, 15 bp, Homo sapiens
cctgctagagaaaac

SEQ ID NO: 407072 - DNA, 15 bp, Homo sapiens
tcctgctagagaaaa

SEQ ID NO: 407073 - DNA, 15 bp, Homo sapiens
ttcctgctagagaaa

SEQ ID NO: 407074 - DNA, 15 bp, Homo sapiens
cttcctgctagagaa

SEQ ID NO: 407075 - DNA, 15 bp, Homo sapiens
acttcctgctagaga

SEQ ID NO: 407076 - DNA, 15 bp, Homo sapiens
aacttcctgctagag

SEQ ID NO: 407077 - DNA, 15 bp, Homo sapiens
taacttcctgctaga

SEQ ID NO: 407078 - DNA, 15 bp, Homo sapiens
ataacttcctgctag

SEQ ID NO: 407079 - DNA, 15 bp, Homo sapiens
aataacttcctgcta

SEQ ID NO: 407080 - DNA, 15 bp, Homo sapiens
caataacttcctgct

SEQ ID NO: 407081 - DNA, 15 bp, Homo sapiens
acaataacttcctgc

SEQ ID NO: 407082 - DNA, 15 bp, Homo sapiens
aacaataacttcctg

SEQ ID NO: 407083 - DNA, 15 bp, Homo sapiens
aaacaataacttcct

SEQ ID NO: 407084 - DNA, 15 bp, Homo sapiens
gaaacaataacttcc

SEQ ID NO: 407085 - DNA, 15 bp, Homo sapiens
tgaaacaataacttc

SEQ ID NO: 407086 - DNA, 15 bp, Homo sapiens
ctgaaacaataactt

SEQ ID NO: 407087 - DNA, 15 bp, Homo sapiens
tcctgaggcaaggaa

SEQ ID NO: 407088 - DNA, 15 bp, Homo sapiens
ttcctgaggcaagga

SEQ ID NO: 407089 - DNA, 15 bp, Homo sapiens
gttcctgaggcaagg

SEQ ID NO: 407090 - DNA, 15 bp, Homo sapiens
agttcctgaggcaag

SEQ ID NO: 407091 - DNA, 15 bp, Homo sapiens
aagttcctgaggcaa

SEQ ID NO: 407092 - DNA, 15 bp, Homo sapiens
aaagttcctgaggca

SEQ ID NO: 407093 - DNA, 15 bp, Homo sapiens
caaagttcctgaggc

SEQ ID NO: 407094 - DNA, 15 bp, Homo sapiens
gcaaagttcctgagg

SEQ ID NO: 407095 - DNA, 15 bp, Homo sapiens
tgcaaagttcctgag

SEQ ID NO: 407096 - DNA, 15 bp, Homo sapiens
gtgcaaagttcctga

SEQ ID NO: 407097 - DNA, 15 bp, Homo sapiens
agtgcaaagttcctg

SEQ ID NO: 407098 - DNA, 15 bp, Homo sapiens
aagtgcaaagttcct

SEQ ID NO: 407099 - DNA, 15 bp, Homo sapiens
taagtgcaaagttcc

SEQ ID NO: 407100 - DNA, 15 bp, Homo sapiens
ttaagtgcaaagttc

SEQ ID NO: 407101 - DNA, 15 bp, Homo sapiens
tttaagtgcaaagtt

SEQ ID NO: 407102 - DNA, 15 bp, Homo sapiens
gtttaagtgcaaagt

SEQ ID NO: 407103 - DNA, 15 bp, Homo sapiens
agtttaagtgcaaag

SEQ ID NO: 407104 - DNA, 15 bp, Homo sapiens
aagtttaagtgcaaa

SEQ ID NO: 407105 - DNA, 15 bp, Homo sapiens
aaagtttaagtgcaa

SEQ ID NO: 407106 - DNA, 15 bp, Homo sapiens
gaaagtttaagtgca

SEQ ID NO: 407107 - DNA, 15 bp, Homo sapiens
ggaaagtttaagtgc

SEQ ID NO: 407108 - DNA, 15 bp, Homo sapiens
aggaaagtttaagtg

SEQ ID NO: 407109 - DNA, 15 bp, Homo sapiens
aaggaaagtttaagt

SEQ ID NO: 407110 - DNA, 15 bp, Homo sapiens
aaaggaaagtttaag

SEQ ID NO: 407111 - DNA, 15 bp, Homo sapiens
caaaggaaagtttaa

SEQ ID NO: 407112 - DNA, 15 bp, Homo sapiens
acaaaggaaagttta

SEQ ID NO: 407113 - DNA, 15 bp, Homo sapiens
gacaaaggaaagttt

SEQ ID NO: 407114 - DNA, 15 bp, Homo sapiens
agacaaaggaaagtt

SEQ ID NO: 407115 - DNA, 15 bp, Homo sapiens
cagacaaaggaaagt

SEQ ID NO: 407116 - DNA, 15 bp, Homo sapiens
gcagacaaaggaaag

SEQ ID NO: 407117 - DNA, 15 bp, Homo sapiens
tgcagacaaaggaaa

SEQ ID NO: 407118 - DNA, 15 bp, Homo sapiens
ctgcagacaaaggaa

SEQ ID NO: 407119 - DNA, 15 bp, Homo sapiens
cctgcagacaaagga

SEQ ID NO: 407120 - DNA, 15 bp, Homo sapiens
acctgcagacaaagg

SEQ ID NO: 407121 - DNA, 15 bp, Homo sapiens
gacctgcagacaaag

SEQ ID NO: 407122 - DNA, 15 bp, Homo sapiens
agacctgcagacaaa

SEQ ID NO: 407123 - DNA, 15 bp, Homo sapiens
aagacctgcagacaa

SEQ ID NO: 407124 - DNA, 15 bp, Homo sapiens
gaagacctgcagaca

SEQ ID NO: 407125 - DNA, 15 bp, Homo sapiens
tgaagacctgcagac

SEQ ID NO: 407126 - DNA, 15 bp, Homo sapiens
ttgaagacctgcaga

SEQ ID NO: 407127 - DNA, 15 bp, Homo sapiens
cttgaagacctgcag

SEQ ID NO: 407128 - DNA, 15 bp, Homo sapiens
acttgaagacctgca

SEQ ID NO: 407129 - DNA, 15 bp, Homo sapiens
aacttgaagacctgc

SEQ ID NO: 407130 - DNA, 15 bp, Homo sapiens
gaacttgaagacctg

SEQ ID NO: 407131 - DNA, 15 bp, Homo sapiens
ggaacttgaagacct

SEQ ID NO: 407132 - DNA, 15 bp, Homo sapiens
aggaacttgaagacc

SEQ ID NO: 407133 - DNA, 15 bp, Homo sapiens
aaggaacttgaagac

SEQ ID NO: 407134 - DNA, 15 bp, Homo sapiens
taaggaacttgaaga

SEQ ID NO: 407135 - DNA, 15 bp, Homo sapiens
ttaaggaacttgaag

SEQ ID NO: 407136 - DNA, 15 bp, Homo sapiens
tttaaggaacttgaa

SEQ ID NO: 407137 - DNA, 15 bp, Homo sapiens
atttaaggaacttga

SEQ ID NO: 407138 - DNA, 15 bp, Homo sapiens
aatttaaggaacttg

SEQ ID NO: 407139 - DNA, 15 bp, Homo sapiens
gaatttaaggaactt

SEQ ID NO: 407140 - DNA, 15 bp, Homo sapiens
agaatttaaggaact

SEQ ID NO: 407141 - DNA, 15 bp, Homo sapiens
aagaatttaaggaac

SEQ ID NO: 407142 - DNA, 15 bp, Homo sapiens
aaagaatttaaggaa

SEQ ID NO: 407143 - DNA, 15 bp, Homo sapiens
caaagaatttaagga

SEQ ID NO: 407144 - DNA, 15 bp, Homo sapiens
tcaaagaatttaagg

SEQ ID NO: 407145 - DNA, 15 bp, Homo sapiens
gtcaaagaatttaag

SEQ ID NO: 407146 - DNA, 15 bp, Homo sapiens
agtcaaagaatttaa

SEQ ID NO: 407147 - DNA, 15 bp, Homo sapiens
gagtcaaagaattta

SEQ ID NO: 407148 - DNA, 15 bp, Homo sapiens
ggagtcaaagaattt

SEQ ID NO: 407149 - DNA, 15 bp, Homo sapiens
gggagtcaaagaatt

SEQ ID NO: 407150 - DNA, 15 bp, Homo sapiens
agggagtcaaagaat

SEQ ID NO: 407151 - DNA, 15 bp, Homo sapiens
gagggagtcaaagaa

SEQ ID NO: 407152 - DNA, 15 bp, Homo sapiens
ggagggagtcaaaga

SEQ ID NO: 407153 - DNA, 15 bp, Homo sapiens
tggagggagtcaaag

SEQ ID NO: 407154 - DNA, 15 bp, Homo sapiens
ttggagggagtcaaa

SEQ ID NO: 407155 - DNA, 15 bp, Homo sapiens
gttggagggagtcaa

SEQ ID NO: 407156 - DNA, 15 bp, Homo sapiens
agttggagggagtca

SEQ ID NO: 407157 - DNA, 15 bp, Homo sapiens
cagttggagggagtc

SEQ ID NO: 407158 - DNA, 15 bp, Homo sapiens
tcagttggagggagt

SEQ ID NO: 407159 - DNA, 15 bp, Homo sapiens
atcagttggagggag

SEQ ID NO: 407160 - DNA, 15 bp, Homo sapiens
gatcagttggaggga

SEQ ID NO: 407161 - DNA, 15 bp, Homo sapiens
ggatcagttggaggg

SEQ ID NO: 407162 - DNA, 15 bp, Homo sapiens
aggatcagttggagg

SEQ ID NO: 407163 - DNA, 15 bp, Homo sapiens
aaggatcagttggag

SEQ ID NO: 407164 - DNA, 15 bp, Homo sapiens
gaaggatcagttgga

SEQ ID NO: 407165 - DNA, 15 bp, Homo sapiens
tgaaggatcagttgg

SEQ ID NO: 407166 - DNA, 15 bp, Homo sapiens
ctgaaggatcagttg

SEQ ID NO: 407167 - DNA, 15 bp, Homo sapiens
tctgaaggatcagtt

SEQ ID NO: 407168 - DNA, 15 bp, Homo sapiens
atctgaaggatcagt

SEQ ID NO: 407169 - DNA, 15 bp, Homo sapiens
aatctgaaggatcag

SEQ ID NO: 407170 - DNA, 15 bp, Homo sapiens
aaatctgaaggatca

SEQ ID NO: 407171 - DNA, 15 bp, Homo sapiens
gaaatctgaaggatc

SEQ ID NO: 407172 - DNA, 15 bp, Homo sapiens
tgaaatctgaaggat

SEQ ID NO: 407173 - DNA, 15 bp, Homo sapiens
ctgaaatctgaagga

SEQ ID NO: 407174 - DNA, 15 bp, Homo sapiens
gctgaaatctgaagg

SEQ ID NO: 407175 - DNA, 15 bp, Homo sapiens
ggctgaaatctgaag

SEQ ID NO: 407176 - DNA, 15 bp, Homo sapiens
gggctgaaatctgaa

SEQ ID NO: 407177 - DNA, 15 bp, Homo sapiens
tgggctgaaatctga

SEQ ID NO: 407178 - DNA, 15 bp, Homo sapiens
ttgggctgaaatctg

SEQ ID NO: 407179 - DNA, 15 bp, Homo sapiens
tttgggctgaaatct

SEQ ID NO: 407180 - DNA, 15 bp, Homo sapiens
atttgggctgaaatc

SEQ ID NO: 407181 - DNA, 15 bp, Homo sapiens
catttgggctgaaat

SEQ ID NO: 407182 - DNA, 15 bp, Homo sapiens
acatttgggctgaaa

SEQ ID NO: 407183 - DNA, 15 bp, Homo sapiens
gacatttgggctgaa

SEQ ID NO: 407184 - DNA, 15 bp, Homo sapiens
tgacatttgggctga

SEQ ID NO: 407185 - DNA, 15 bp, Homo sapiens
atgacatttgggctg

SEQ ID NO: 407186 - DNA, 15 bp, Homo sapiens
aatgacatttgggct

SEQ ID NO: 407187 - DNA, 15 bp, Homo sapiens
aaatgacatttgggc

SEQ ID NO: 407188 - DNA, 15 bp, Homo sapiens
gaaatgacatttggg

SEQ ID NO: 407189 - DNA, 15 bp, Homo sapiens
ggaaatgacatttgg

SEQ ID NO: 407190 - DNA, 15 bp, Homo sapiens
aggaaatgacatttg

SEQ ID NO: 407191 - DNA, 15 bp, Homo sapiens
caggaaatgacattt

SEQ ID NO: 407192 - DNA, 15 bp, Homo sapiens
tcaggaaatgacatt

SEQ ID NO: 407193 - DNA, 15 bp, Homo sapiens
ttcaggaaatgacat

SEQ ID NO: 407194 - DNA, 15 bp, Homo sapiens
cttcaggaaatgaca

SEQ ID NO: 407195 - DNA, 15 bp, Homo sapiens
tcttcaggaaatgac

SEQ ID NO: 407196 - DNA, 15 bp, Homo sapiens
ttcttcaggaaatga

SEQ ID NO: 407197 - DNA, 15 bp, Homo sapiens
tttcttcaggaaatg

SEQ ID NO: 407198 - DNA, 15 bp, Homo sapiens
atttcttcaggaaat

SEQ ID NO: 407199 - DNA, 15 bp, Homo sapiens
tatttcttcaggaaa

SEQ ID NO: 407200 - DNA, 15 bp, Homo sapiens
gtatttcttcaggaa

SEQ ID NO: 407201 - DNA, 15 bp, Homo sapiens
tgtatttcttcagga

SEQ ID NO: 407202 - DNA, 15 bp, Homo sapiens
atgtatttcttcagg

SEQ ID NO: 407203 - DNA, 15 bp, Homo sapiens
aatgtatttcttcag

SEQ ID NO: 407204 - DNA, 15 bp, Homo sapiens
gaatgtatttcttca

SEQ ID NO: 407205 - DNA, 15 bp, Homo sapiens
agaatgtatttcttc

SEQ ID NO: 407206 - DNA, 15 bp, Homo sapiens
gagaatgtatttctt

SEQ ID NO: 407207 - DNA, 15 bp, Homo sapiens
ggagaatgtatttct

SEQ ID NO: 407208 - DNA, 15 bp, Homo sapiens
aggagaatgtatttc

SEQ ID NO: 407209 - DNA, 15 bp, Homo sapiens
taggagaatgtattt

SEQ ID NO: 407210 - DNA, 15 bp, Homo sapiens
gtaggagaatgtatt

SEQ ID NO: 407211 - DNA, 15 bp, Homo sapiens
agtaggagaatgtat

SEQ ID NO: 407212 - DNA, 15 bp, Homo sapiens
aagtaggagaatgta

SEQ ID NO: 407213 - DNA, 15 bp, Homo sapiens
gaagtaggagaatgt

SEQ ID NO: 407214 - DNA, 15 bp, Homo sapiens
ggaagtaggagaatg

SEQ ID NO: 407215 - DNA, 15 bp, Homo sapiens
aggaagtaggagaat

SEQ ID NO: 407216 - DNA, 15 bp, Homo sapiens
taggaagtaggagaa

SEQ ID NO: 407217 - DNA, 15 bp, Homo sapiens
ttaggaagtaggaga

SEQ ID NO: 407218 - DNA, 15 bp, Homo sapiens
tttaggaagtaggag

SEQ ID NO: 407219 - DNA, 15 bp, Homo sapiens
gtttaggaagtagga

SEQ ID NO: 407220 - DNA, 15 bp, Homo sapiens
agtttaggaagtagg

SEQ ID NO: 407221 - DNA, 15 bp, Homo sapiens
tagtttaggaagtag

SEQ ID NO: 407222 - DNA, 15 bp, Homo sapiens
ttagtttaggaagta

SEQ ID NO: 407223 - DNA, 15 bp, Homo sapiens
cttagtttaggaagt

SEQ ID NO: 407224 - DNA, 15 bp, Homo sapiens
acttagtttaggaag

SEQ ID NO: 407225 - DNA, 15 bp, Homo sapiens
gacttagtttaggaa

SEQ ID NO: 407226 - DNA, 15 bp, Homo sapiens
ggacttagtttagga

SEQ ID NO: 407227 - DNA, 15 bp, Homo sapiens
aggacttagtttagg

SEQ ID NO: 407228 - DNA, 15 bp, Homo sapiens
gaggacttagtttag

SEQ ID NO: 407229 - DNA, 15 bp, Homo sapiens
ggaggacttagttta

SEQ ID NO: 407230 - DNA, 15 bp, Homo sapiens
aggaggacttagttt

SEQ ID NO: 407231 - DNA, 15 bp, Homo sapiens
caggaggacttagtt

SEQ ID NO: 407232 - DNA, 15 bp, Homo sapiens
tcaggaggacttagt

SEQ ID NO: 407233 - DNA, 15 bp, Homo sapiens
atcaggaggacttag

SEQ ID NO: 407234 - DNA, 15 bp, Homo sapiens
aatcaggaggactta

SEQ ID NO: 407235 - DNA, 15 bp, Homo sapiens
aaatcaggaggactt

SEQ ID NO: 407236 - DNA, 15 bp, Homo sapiens
taaatcaggaggact

SEQ ID NO: 407237 - DNA, 15 bp, Homo sapiens
ataaatcaggaggac

SEQ ID NO: 407238 - DNA, 15 bp, Homo sapiens
aataaatcaggagga

SEQ ID NO: 407239 - DNA, 15 bp, Homo sapiens
gaataaatcaggagg

SEQ ID NO: 407240 - DNA, 15 bp, Homo sapiens
tgaataaatcaggag

SEQ ID NO: 407241 - DNA, 15 bp, Homo sapiens
atgaataaatcagga

SEQ ID NO: 407242 - DNA, 15 bp, Homo sapiens
catgaataaatcagg

SEQ ID NO: 407243 - DNA, 15 bp, Homo sapiens
acatgaataaatcag

SEQ ID NO: 407244 - DNA, 15 bp, Homo sapiens
aacatgaataaatca

SEQ ID NO: 407245 - DNA, 15 bp, Homo sapiens
aaacatgaataaatc

SEQ ID NO: 407246 - DNA, 15 bp, Homo sapiens
aaaacatgaataaat

SEQ ID NO: 407247 - DNA, 15 bp, Homo sapiens
aaaaacatgaataaa

SEQ ID NO: 407248 - DNA, 15 bp, Homo sapiens
aaaaaacatgaataa

SEQ ID NO: 407249 - DNA, 15 bp, Homo sapiens
gaaaaaacatgaata

SEQ ID NO: 407250 - DNA, 15 bp, Homo sapiens
agaaaaaacatgaat

SEQ ID NO: 407251 - DNA, 15 bp, Homo sapiens
gagaaaaaacatgaa

SEQ ID NO: 407252 - DNA, 15 bp, Homo sapiens
agagaaaaaacatga

SEQ ID NO: 407253 - DNA, 15 bp, Homo sapiens
gagagaaaaaacatg

SEQ ID NO: 407254 - DNA, 15 bp, Homo sapiens
agagagaaaaaacat

SEQ ID NO: 407255 - DNA, 15 bp, Homo sapiens
gagagagaaaaaaca

SEQ ID NO: 407256 - DNA, 15 bp, Homo sapiens
ggagagagaaaaaac

SEQ ID NO: 407257 - DNA, 15 bp, Homo sapiens
aggagagagaaaaaa

SEQ ID NO: 407258 - DNA, 15 bp, Homo sapiens
caggagagagaaaaa

SEQ ID NO: 407259 - DNA, 15 bp, Homo sapiens
tcaggagagagaaaa

SEQ ID NO: 407260 - DNA, 15 bp, Homo sapiens
gtcaggagagagaaa

SEQ ID NO: 407261 - DNA, 15 bp, Homo sapiens
tgtcaggagagagaa

SEQ ID NO: 407262 - DNA, 15 bp, Homo sapiens
atgtcaggagagaga

SEQ ID NO: 407263 - DNA, 15 bp, Homo sapiens
aatgtcaggagagag

SEQ ID NO: 407264 - DNA, 15 bp, Homo sapiens
aaatgtcaggagaga

SEQ ID NO: 407265 - DNA, 15 bp, Homo sapiens
taaatgtcaggagag

SEQ ID NO: 407266 - DNA, 15 bp, Homo sapiens
ataaatgtcaggaga

SEQ ID NO: 407267 - DNA, 15 bp, Homo sapiens
tataaatgtcaggag

SEQ ID NO: 407268 - DNA, 15 bp, Homo sapiens
ttataaatgtcagga

SEQ ID NO: 407269 - DNA, 15 bp, Homo sapiens
attataaatgtcagg

SEQ ID NO: 407270 - DNA, 15 bp, Homo sapiens
aattataaatgtcag

SEQ ID NO: 407271 - DNA, 15 bp, Homo sapiens
aaattataaatgtca

SEQ ID NO: 407272 - DNA, 15 bp, Homo sapiens
caaattataaatgtc

SEQ ID NO: 407273 - DNA, 15 bp, Homo sapiens
gcaaattataaatgt

SEQ ID NO: 407274 - DNA, 15 bp, Homo sapiens
ggcaaattataaatg

SEQ ID NO: 407275 - DNA, 15 bp, Homo sapiens
aggcaaattataaat

SEQ ID NO: 407276 - DNA, 15 bp, Homo sapiens
aaggcaaattataaa

SEQ ID NO: 407277 - DNA, 15 bp, Homo sapiens
aaaggcaaattataa

SEQ ID NO: 407278 - DNA, 15 bp, Homo sapiens
taaaggcaaattata

SEQ ID NO: 407279 - DNA, 15 bp, Homo sapiens
ataaaggcaaattat

SEQ ID NO: 407280 - DNA, 15 bp, Homo sapiens
tataaaggcaaatta

SEQ ID NO: 407281 - DNA, 15 bp, Homo sapiens
gtataaaggcaaatt

SEQ ID NO: 407282 - DNA, 15 bp, Homo sapiens
agtataaaggcaaat

SEQ ID NO: 407283 - DNA, 15 bp, Homo sapiens
gagtataaaggcaaa

SEQ ID NO: 407284 - DNA, 15 bp, Homo sapiens
tgagtataaaggcaa

SEQ ID NO: 407285 - DNA, 15 bp, Homo sapiens
atgagtataaaggca

SEQ ID NO: 407286 - DNA, 15 bp, Homo sapiens
aatgagtataaaggc

SEQ ID NO: 407287 - DNA, 15 bp, Homo sapiens
aaatgagtataaagg

SEQ ID NO: 407288 - DNA, 15 bp, Homo sapiens
taaatgagtataaag

SEQ ID NO: 407289 - DNA, 15 bp, Homo sapiens
ctaaatgagtataaa

SEQ ID NO: 407290 - DNA, 15 bp, Homo sapiens
tctaaatgagtataa

SEQ ID NO: 407291 - DNA, 15 bp, Homo sapiens
ttctaaatgagtata

SEQ ID NO: 407292 - DNA, 15 bp, Homo sapiens
tttctaaatgagtat

SEQ ID NO: 407293 - DNA, 15 bp, Homo sapiens
atttctaaatgagta

SEQ ID NO: 407294 - DNA, 15 bp, Homo sapiens
tatttctaaatgagt

SEQ ID NO: 407295 - DNA, 15 bp, Homo sapiens
ttatttctaaatgag

SEQ ID NO: 407296 - DNA, 15 bp, Homo sapiens
gttatttctaaatga

SEQ ID NO: 407297 - DNA, 15 bp, Homo sapiens
tgttatttctaaatg

SEQ ID NO: 407298 - DNA, 15 bp, Homo sapiens
atgttatttctaaat

SEQ ID NO: 407299 - DNA, 15 bp, Homo sapiens
aatgttatttctaaa

SEQ ID NO: 407300 - DNA, 15 bp, Homo sapiens
aaatgttatttctaa

SEQ ID NO: 407301 - DNA, 15 bp, Homo sapiens
taaatgttatttcta

SEQ ID NO: 407302 - DNA, 15 bp, Homo sapiens
ctaaatgttatttct

SEQ ID NO: 407303 - DNA, 15 bp, Homo sapiens
gctaaatgttatttc

SEQ ID NO: 407304 - DNA, 15 bp, Homo sapiens
tgctaaatgttattt

SEQ ID NO: 407305 - DNA, 15 bp, Homo sapiens
ttgctaaatgttatt

SEQ ID NO: 407306 - DNA, 15 bp, Homo sapiens
cttgctaaatgttat

SEQ ID NO: 407307 - DNA, 15 bp, Homo sapiens
gcttgctaaatgtta

SEQ ID NO: 407308 - DNA, 15 bp, Homo sapiens
ggcttgctaaatgtt

SEQ ID NO: 407309 - DNA, 15 bp, Homo sapiens
gggcttgctaaatgt

SEQ ID NO: 407310 - DNA, 15 bp, Homo sapiens
agggcttgctaaatg

SEQ ID NO: 407311 - DNA, 15 bp, Homo sapiens
aagggcttgctaaat

SEQ ID NO: 407312 - DNA, 15 bp, Homo sapiens
gaagggcttgctaaa

SEQ ID NO: 407313 - DNA, 15 bp, Homo sapiens
ggaagggcttgctaa

SEQ ID NO: 407314 - DNA, 15 bp, Homo sapiens
tggaagggcttgcta

SEQ ID NO: 407315 - DNA, 15 bp, Homo sapiens
ctggaagggcttgct

SEQ ID NO: 407316 - DNA, 15 bp, Homo sapiens
actggaagggcttgc

SEQ ID NO: 407317 - DNA, 15 bp, Homo sapiens
cactggaagggcttg

SEQ ID NO: 407318 - DNA, 15 bp, Homo sapiens
acactggaagggctt

SEQ ID NO: 407319 - DNA, 15 bp, Homo sapiens
cacactggaagggct

SEQ ID NO: 407320 - DNA, 15 bp, Homo sapiens
gcacactggaagggc

SEQ ID NO: 407321 - DNA, 15 bp, Homo sapiens
ggcacactggaaggg

SEQ ID NO: 407322 - DNA, 15 bp, Homo sapiens
tggcacactggaagg

SEQ ID NO: 407323 - DNA, 15 bp, Homo sapiens
ttggcacactggaag

SEQ ID NO: 407324 - DNA, 15 bp, Homo sapiens
attggcacactggaa

SEQ ID NO: 407325 - DNA, 15 bp, Homo sapiens
gattggcacactgga

SEQ ID NO: 407326 - DNA, 15 bp, Homo sapiens
tgattggcacactgg

SEQ ID NO: 407327 - DNA, 15 bp, Homo sapiens
gtgattggcacactg

SEQ ID NO: 407328 - DNA, 15 bp, Homo sapiens
ggtgattggcacact

SEQ ID NO: 407329 - DNA, 15 bp, Homo sapiens
aggtgattggcacac

SEQ ID NO: 407330 - DNA, 15 bp, Homo sapiens
caggtgattggcaca

SEQ ID NO: 407331 - DNA, 15 bp, Homo sapiens
gcaggtgattggcac

SEQ ID NO: 407332 - DNA, 15 bp, Homo sapiens
ggcaggtgattggca

SEQ ID NO: 407333 - DNA, 15 bp, Homo sapiens
aggcaggtgattggc

SEQ ID NO: 407334 - DNA, 15 bp, Homo sapiens
aaggcaggtgattgg

SEQ ID NO: 407335 - DNA, 15 bp, Homo sapiens
aaaggcaggtgattg

SEQ ID NO: 407336 - DNA, 15 bp, Homo sapiens
taaaggcaggtgatt

SEQ ID NO: 407337 - DNA, 15 bp, Homo sapiens
ttaaaggcaggtgat

SEQ ID NO: 407338 - DNA, 15 bp, Homo sapiens
tttaaaggcaggtga

SEQ ID NO: 407339 - DNA, 15 bp, Homo sapiens
gtttaaaggcaggtg

SEQ ID NO: 407340 - DNA, 15 bp, Homo sapiens
ggtttaaaggcaggt

SEQ ID NO: 407341 - DNA, 15 bp, Homo sapiens
aggtttaaaggcagg

SEQ ID NO: 407342 - DNA, 15 bp, Homo sapiens
aaggtttaaaggcag

SEQ ID NO: 407343 - DNA, 15 bp, Homo sapiens
taaggtttaaaggca

SEQ ID NO: 407344 - DNA, 15 bp, Homo sapiens
ataaggtttaaaggc

SEQ ID NO: 407345 - DNA, 15 bp, Homo sapiens
aataaggtttaaagg

SEQ ID NO: 407346 - DNA, 15 bp, Homo sapiens
aaataaggtttaaag

SEQ ID NO: 407347 - DNA, 15 bp, Homo sapiens
caaataaggtttaaa

SEQ ID NO: 407348 - DNA, 15 bp, Homo sapiens
acaaataaggtttaa

SEQ ID NO: 407349 - DNA, 15 bp, Homo sapiens
tacaaataaggttta

SEQ ID NO: 407350 - DNA, 15 bp, Homo sapiens
ctacaaataaggttt

SEQ ID NO: 407351 - DNA, 15 bp, Homo sapiens
tctacaaataaggtt

SEQ ID NO: 407352 - DNA, 15 bp, Homo sapiens
atctacaaataaggt

SEQ ID NO: 407353 - DNA, 15 bp, Homo sapiens
catctacaaataagg

SEQ ID NO: 407354 - DNA, 15 bp, Homo sapiens
tcatctacaaataag

SEQ ID NO: 407355 - DNA, 15 bp, Homo sapiens
ctcatctacaaataa

SEQ ID NO: 407356 - DNA, 15 bp, Homo sapiens
cctcatctacaaata

SEQ ID NO: 407357 - DNA, 15 bp, Homo sapiens
tcctcatctacaaat

SEQ ID NO: 407358 - DNA, 15 bp, Homo sapiens
ttcctcatctacaaa

SEQ ID NO: 407359 - DNA, 15 bp, Homo sapiens
cttcctcatctacaa

SEQ ID NO: 407360 - DNA, 15 bp, Homo sapiens
acttcctcatctaca

SEQ ID NO: 407361 - DNA, 15 bp, Homo sapiens
tacttcctcatctac

SEQ ID NO: 407362 - DNA, 15 bp, Homo sapiens
ttacttcctcatcta

SEQ ID NO: 407363 - DNA, 15 bp, Homo sapiens
tttacttcctcatct

SEQ ID NO: 407364 - DNA, 15 bp, Homo sapiens
ttttacttcctcatc

SEQ ID NO: 407365 - DNA, 15 bp, Homo sapiens
attttacttcctcat

SEQ ID NO: 407366 - DNA, 15 bp, Homo sapiens
tattttacttcctca

SEQ ID NO: 407367 - DNA, 15 bp, Homo sapiens
gtattttacttcctc

SEQ ID NO: 407368 - DNA, 15 bp, Homo sapiens
agtattttacttcct

SEQ ID NO: 407369 - DNA, 15 bp, Homo sapiens
aagtattttacttcc

SEQ ID NO: 407370 - DNA, 15 bp, Homo sapiens
aaagtattttacttc

SEQ ID NO: 407371 - DNA, 15 bp, Homo sapiens
gaaagtattttactt

SEQ ID NO: 407372 - DNA, 15 bp, Homo sapiens
ggaaagtattttact

SEQ ID NO: 407373 - DNA, 15 bp, Homo sapiens
gggaaagtattttac

SEQ ID NO: 407374 - DNA, 15 bp, Homo sapiens
tgggaaagtatttta

SEQ ID NO: 407375 - DNA, 15 bp, Homo sapiens
ctgggaaagtatttt

SEQ ID NO: 407376 - DNA, 15 bp, Homo sapiens
tctgggaaagtattt

SEQ ID NO: 407377 - DNA, 15 bp, Homo sapiens
atctgggaaagtatt

SEQ ID NO: 407378 - DNA, 15 bp, Homo sapiens
aatctgggaaagtat

SEQ ID NO: 407379 - DNA, 15 bp, Homo sapiens
gaatctgggaaagta

SEQ ID NO: 407380 - DNA, 15 bp, Homo sapiens
ggaatctgggaaagt

SEQ ID NO: 407381 - DNA, 15 bp, Homo sapiens
gggaatctgggaaag

SEQ ID NO: 407382 - DNA, 15 bp, Homo sapiens
tgggaatctgggaaa

SEQ ID NO: 407383 - DNA, 15 bp, Homo sapiens
gtgggaatctgggaa

SEQ ID NO: 407384 - DNA, 15 bp, Homo sapiens
tgtgggaatctggga

SEQ ID NO: 407385 - DNA, 15 bp, Homo sapiens
ttgtgggaatctggg

SEQ ID NO: 407386 - DNA, 15 bp, Homo sapiens
cttgtgggaatctgg

SEQ ID NO: 407387 - DNA, 15 bp, Homo sapiens
acttgtgggaatctg

SEQ ID NO: 407388 - DNA, 15 bp, Homo sapiens
cacttgtgggaatct

SEQ ID NO: 407389 - DNA, 15 bp, Homo sapiens
acacttgtgggaatc

SEQ ID NO: 407390 - DNA, 15 bp, Homo sapiens
aacacttgtgggaat

SEQ ID NO: 407391 - DNA, 15 bp, Homo sapiens
caacacttgtgggaa

SEQ ID NO: 407392 - DNA, 15 bp, Homo sapiens
tcaacacttgtggga

SEQ ID NO: 407393 - DNA, 15 bp, Homo sapiens
ttcaacacttgtggg

SEQ ID NO: 407394 - DNA, 15 bp, Homo sapiens
gttcaacacttgtgg

SEQ ID NO: 407395 - DNA, 15 bp, Homo sapiens
ggttcaacacttgtg

SEQ ID NO: 407396 - DNA, 15 bp, Homo sapiens
tggttcaacacttgt

SEQ ID NO: 407397 - DNA, 15 bp, Homo sapiens
ctggttcaacacttg

SEQ ID NO: 407398 - DNA, 15 bp, Homo sapiens
cctggttcaacactt

SEQ ID NO: 407399 - DNA, 15 bp, Homo sapiens
ccctggttcaacact

SEQ ID NO: 407400 - DNA, 15 bp, Homo sapiens
accctggttcaacac

SEQ ID NO: 407401 - DNA, 15 bp, Homo sapiens
aaccctggttcaaca

SEQ ID NO: 407402 - DNA, 15 bp, Homo sapiens
aaaccctggttcaac

SEQ ID NO: 407403 - DNA, 15 bp, Homo sapiens
taaaccctggttcaa

SEQ ID NO: 407404 - DNA, 15 bp, Homo sapiens
ttaaaccctggttca

SEQ ID NO: 407405 - DNA, 15 bp, Homo sapiens
tttaaaccctggttc

SEQ ID NO: 407406 - DNA, 15 bp, Homo sapiens
gtttaaaccctggtt

SEQ ID NO: 407407 - DNA, 15 bp, Homo sapiens
ggtttaaaccctggt

SEQ ID NO: 407408 - DNA, 15 bp, Homo sapiens
gggtttaaaccctgg

SEQ ID NO: 407409 - DNA, 15 bp, Homo sapiens
tgggtttaaaccctg

SEQ ID NO: 407410 - DNA, 15 bp, Homo sapiens
ctgggtttaaaccct

SEQ ID NO: 407411 - DNA, 15 bp, Homo sapiens
cctgggtttaaaccc

SEQ ID NO: 407412 - DNA, 15 bp, Homo sapiens
acctgggtttaaacc

SEQ ID NO: 407413 - DNA, 15 bp, Homo sapiens
aacctgggtttaaac

SEQ ID NO: 407414 - DNA, 15 bp, Homo sapiens
aaacctgggtttaaa

SEQ ID NO: 407415 - DNA, 15 bp, Homo sapiens
gaaacctgggtttaa

SEQ ID NO: 407416 - DNA, 15 bp, Homo sapiens
ggaaacctgggttta

SEQ ID NO: 407417 - DNA, 15 bp, Homo sapiens
aggaaacctgggttt

SEQ ID NO: 407418 - DNA, 15 bp, Homo sapiens
gaggaaacctgggtt

SEQ ID NO: 407419 - DNA, 15 bp, Homo sapiens
tgaggaaacctgggt

SEQ ID NO: 407420 - DNA, 15 bp, Homo sapiens
ttgaggaaacctggg

SEQ ID NO: 407421 - DNA, 15 bp, Homo sapiens
gttgaggaaacctgg

SEQ ID NO: 407422 - DNA, 15 bp, Homo sapiens
tgttgaggaaacctg

SEQ ID NO: 407423 - DNA, 15 bp, Homo sapiens
ttgttgaggaaacct

SEQ ID NO: 407424 - DNA, 15 bp, Homo sapiens
tttgttgaggaaacc

SEQ ID NO: 407425 - DNA, 15 bp, Homo sapiens
ttttgttgaggaaac

SEQ ID NO: 407426 - DNA, 15 bp, Homo sapiens
gttttgttgaggaaa

SEQ ID NO: 407427 - DNA, 15 bp, Homo sapiens
agttttgttgaggaa

SEQ ID NO: 407428 - DNA, 15 bp, Homo sapiens
tagttttgttgagga

SEQ ID NO: 407429 - DNA, 15 bp, Homo sapiens
atagttttgttgagg

SEQ ID NO: 407430 - DNA, 15 bp, Homo sapiens
tatagttttgttgag

SEQ ID NO: 407431 - DNA, 15 bp, Homo sapiens
ttatagttttgttga

SEQ ID NO: 407432 - DNA, 15 bp, Homo sapiens
tttatagttttgttg

SEQ ID NO: 407433 - DNA, 15 bp, Homo sapiens
gtttatagttttgtt

SEQ ID NO: 407434 - DNA, 15 bp, Homo sapiens
agtttatagttttgt

SEQ ID NO: 407435 - DNA, 15 bp, Homo sapiens
gagtttatagttttg

SEQ ID NO: 407436 - DNA, 15 bp, Homo sapiens
agagtttatagtttt

SEQ ID NO: 407437 - DNA, 15 bp, Homo sapiens
cagagtttatagttt

SEQ ID NO: 407438 - DNA, 15 bp, Homo sapiens
ccagagtttatagtt

SEQ ID NO: 407439 - DNA, 15 bp, Homo sapiens
cccagagtttatagt

SEQ ID NO: 407440 - DNA, 15 bp, Homo sapiens
tcccagagtttatag

SEQ ID NO: 407441 - DNA, 15 bp, Homo sapiens
ttcccagagtttata

SEQ ID NO: 407442 - DNA, 15 bp, Homo sapiens
tttcccagagtttat

SEQ ID NO: 407443 - DNA, 15 bp, Homo sapiens
atttcccagagttta

SEQ ID NO: 407444 - DNA, 15 bp, Homo sapiens
tatttcccagagttt

SEQ ID NO: 407445 - DNA, 15 bp, Homo sapiens
ctatttcccagagtt

SEQ ID NO: 407446 - DNA, 15 bp, Homo sapiens
tctatttcccagagt

SEQ ID NO: 407447 - DNA, 15 bp, Homo sapiens
gtctatttcccagag

SEQ ID NO: 407448 - DNA, 15 bp, Homo sapiens
ggtctatttcccaga

SEQ ID NO: 407449 - DNA, 15 bp, Homo sapiens
cggtctatttcccag

SEQ ID NO: 407450 - DNA, 15 bp, Homo sapiens
acggtctatttccca

SEQ ID NO: 407451 - DNA, 15 bp, Homo sapiens
cacggtctatttccc

SEQ ID NO: 407452 - DNA, 15 bp, Homo sapiens
acacggtctatttcc

SEQ ID NO: 407453 - DNA, 15 bp, Homo sapiens
gacacggtctatttc

SEQ ID NO: 407454 - DNA, 15 bp, Homo sapiens
agacacggtctattt

SEQ ID NO: 407455 - DNA, 15 bp, Homo sapiens
tagacacggtctatt

SEQ ID NO: 407456 - DNA, 15 bp, Homo sapiens
atagacacggtctat

SEQ ID NO: 407457 - DNA, 15 bp, Homo sapiens
catagacacggtcta

SEQ ID NO: 407458 - DNA, 15 bp, Homo sapiens
acatagacacggtct

SEQ ID NO: 407459 - DNA, 15 bp, Homo sapiens
tacatagacacggtc

SEQ ID NO: 407460 - DNA, 15 bp, Homo sapiens
atacatagacacggt

SEQ ID NO: 407461 - DNA, 15 bp, Homo sapiens
aatacatagacacgg

SEQ ID NO: 407462 - DNA, 15 bp, Homo sapiens
taatacatagacacg

SEQ ID NO: 407463 - DNA, 15 bp, Homo sapiens
ataatacatagacac

SEQ ID NO: 407464 - DNA, 15 bp, Homo sapiens
aataatacatagaca

SEQ ID NO: 407465 - DNA, 15 bp, Homo sapiens
caataatacatagac

SEQ ID NO: 407466 - DNA, 15 bp, Homo sapiens
acaataatacataga

SEQ ID NO: 407467 - DNA, 15 bp, Homo sapiens
tacaataatacatag

SEQ ID NO: 407468 - DNA, 15 bp, Homo sapiens
ctacaataatacata

SEQ ID NO: 407469 - DNA, 15 bp, Homo sapiens
gctacaataatacat

SEQ ID NO: 407470 - DNA, 15 bp, Homo sapiens
agctacaataataca

SEQ ID NO: 407471 - DNA, 15 bp, Homo sapiens
gagctacaataatac

SEQ ID NO: 407472 - DNA, 15 bp, Homo sapiens
ggagctacaataata

SEQ ID NO: 407473 - DNA, 15 bp, Homo sapiens
tggagctacaataat

SEQ ID NO: 407474 - DNA, 15 bp, Homo sapiens
ctggagctacaataa

SEQ ID NO: 407475 - DNA, 15 bp, Homo sapiens
actggagctacaata

SEQ ID NO: 407476 - DNA, 15 bp, Homo sapiens
cactggagctacaat

SEQ ID NO: 407477 - DNA, 15 bp, Homo sapiens
gcactggagctacaa

SEQ ID NO: 407478 - DNA, 15 bp, Homo sapiens
ggcactggagctaca

SEQ ID NO: 407479 - DNA, 15 bp, Homo sapiens
aggcactggagctac

SEQ ID NO: 407480 - DNA, 15 bp, Homo sapiens
caggcactggagcta

SEQ ID NO: 407481 - DNA, 15 bp, Homo sapiens
ccaggcactggagct

SEQ ID NO: 407482 - DNA, 15 bp, Homo sapiens
accaggcactggagc

SEQ ID NO: 407483 - DNA, 15 bp, Homo sapiens
taccaggcactggag

SEQ ID NO: 407484 - DNA, 15 bp, Homo sapiens
ataccaggcactgga

SEQ ID NO: 407485 - DNA, 15 bp, Homo sapiens
aataccaggcactgg

SEQ ID NO: 407486 - DNA, 15 bp, Homo sapiens
aaataccaggcactg

SEQ ID NO: 407487 - DNA, 15 bp, Homo sapiens
taaataccaggcact

SEQ ID NO: 407488 - DNA, 15 bp, Homo sapiens
ctaaataccaggcac

SEQ ID NO: 407489 - DNA, 15 bp, Homo sapiens
actaaataccaggca

SEQ ID NO: 407490 - DNA, 15 bp, Homo sapiens
aactaaataccaggc

SEQ ID NO: 407491 - DNA, 15 bp, Homo sapiens
caactaaataccagg

SEQ ID NO: 407492 - DNA, 15 bp, Homo sapiens
ccaactaaataccag

SEQ ID NO: 407493 - DNA, 15 bp, Homo sapiens
gccaactaaatacca

SEQ ID NO: 407494 - DNA, 15 bp, Homo sapiens
ggccaactaaatacc

SEQ ID NO: 407495 - DNA, 15 bp, Homo sapiens
gggccaactaaatac

SEQ ID NO: 407496 - DNA, 15 bp, Homo sapiens
agggccaactaaata

SEQ ID NO: 407497 - DNA, 15 bp, Homo sapiens
gagggccaactaaat

SEQ ID NO: 407498 - DNA, 15 bp, Homo sapiens
tgagggccaactaaa

SEQ ID NO: 407499 - DNA, 15 bp, Homo sapiens
ttgagggccaactaa

SEQ ID NO: 407500 - DNA, 15 bp, Homo sapiens
gttgagggccaacta

SEQ ID NO: 407501 - DNA, 15 bp, Homo sapiens
tgttgagggccaact

SEQ ID NO: 407502 - DNA, 15 bp, Homo sapiens
ttgttgagggccaac

SEQ ID NO: 407503 - DNA, 15 bp, Homo sapiens
tttgttgagggccaa

SEQ ID NO: 407504 - DNA, 15 bp, Homo sapiens
atttgttgagggcca

SEQ ID NO: 407505 - DNA, 15 bp, Homo sapiens
tatttgttgagggcc

SEQ ID NO: 407506 - DNA, 15 bp, Homo sapiens
ctatttgttgagggc

SEQ ID NO: 407507 - DNA, 15 bp, Homo sapiens
tctatttgttgaggg

SEQ ID NO: 407508 - DNA, 15 bp, Homo sapiens
atctatttgttgagg

SEQ ID NO: 407509 - DNA, 15 bp, Homo sapiens
tatctatttgttgag

SEQ ID NO: 407510 - DNA, 15 bp, Homo sapiens
atatctatttgttga

SEQ ID NO: 407511 - DNA, 15 bp, Homo sapiens
aatatctatttgttg

SEQ ID NO: 407512 - DNA, 15 bp, Homo sapiens
caatatctatttgtt

SEQ ID NO: 407513 - DNA, 15 bp, Homo sapiens
tcaatatctatttgt

SEQ ID NO: 407514 - DNA, 15 bp, Homo sapiens
ttcaatatctatttg

SEQ ID NO: 407515 - DNA, 15 bp, Homo sapiens
gttcaatatctattt

SEQ ID NO: 407516 - DNA, 15 bp, Homo sapiens
tgttcaatatctatt

SEQ ID NO: 407517 - DNA, 15 bp, Homo sapiens
ttgttcaatatctat

SEQ ID NO: 407518 - DNA, 15 bp, Homo sapiens
tttgttcaatatcta

SEQ ID NO: 407519 - DNA, 15 bp, Homo sapiens
atttgttcaatatct

SEQ ID NO: 407520 - DNA, 15 bp, Homo sapiens
catttgttcaatatc

SEQ ID NO: 407521 - DNA, 15 bp, Homo sapiens
tcatttgttcaatat

SEQ ID NO: 407522 - DNA, 15 bp, Homo sapiens
ttcatttgttcaata

SEQ ID NO: 407523 - DNA, 15 bp, Homo sapiens
gttcatttgttcaat

SEQ ID NO: 407524 - DNA, 15 bp, Homo sapiens
ggttcatttgttcaa

SEQ ID NO: 407525 - DNA, 15 bp, Homo sapiens
aggttcatttgttca

SEQ ID NO: 407526 - DNA, 15 bp, Homo sapiens
caggttcatttgttc

SEQ ID NO: 407527 - DNA, 15 bp, Homo sapiens
acaggttcatttgtt

SEQ ID NO: 407528 - DNA, 15 bp, Homo sapiens
tacaggttcatttgt

SEQ ID NO: 407529 - DNA, 15 bp, Homo sapiens
ctacaggttcatttg

SEQ ID NO: 407530 - DNA, 15 bp, Homo sapiens
gctacaggttcattt

SEQ ID NO: 407531 - DNA, 15 bp, Homo sapiens
tgctacaggttcatt

SEQ ID NO: 407532 - DNA, 15 bp, Homo sapiens
ttgctacaggttcat

SEQ ID NO: 407533 - DNA, 15 bp, Homo sapiens
attgctacaggttca

SEQ ID NO: 407534 - DNA, 15 bp, Homo sapiens
cattgctacaggttc

SEQ ID NO: 407535 - DNA, 15 bp, Homo sapiens
tcattgctacaggtt

SEQ ID NO: 407536 - DNA, 15 bp, Homo sapiens
gtcattgctacaggt

SEQ ID NO: 407537 - DNA, 15 bp, Homo sapiens
agtcattgctacagg

SEQ ID NO: 407538 - DNA, 15 bp, Homo sapiens
aagtcattgctacag

SEQ ID NO: 407539 - DNA, 15 bp, Homo sapiens
aaagtcattgctaca

SEQ ID NO: 407540 - DNA, 15 bp, Homo sapiens
aaaagtcattgctac

SEQ ID NO: 407541 - DNA, 15 bp, Homo sapiens
aaaaagtcattgcta

SEQ ID NO: 407542 - DNA, 15 bp, Homo sapiens
aaaaaagtcattgct

SEQ ID NO: 407543 - DNA, 15 bp, Homo sapiens
aaaaaaagtcattgc

SEQ ID NO: 407544 - DNA, 15 bp, Homo sapiens
aaaaaaaagtcattg

SEQ ID NO: 407545 - DNA, 15 bp, Homo sapiens
aaaaaaaaagtcatt

SEQ ID NO: 407546 - DNA, 15 bp, Homo sapiens
gaaaaaaaaagtcat

SEQ ID NO: 407547 - DNA, 15 bp, Homo sapiens
agaaaaaaaaagtca

SEQ ID NO: 407548 - DNA, 15 bp, Homo sapiens
tagaaaaaaaaagtc

SEQ ID NO: 407549 - DNA, 15 bp, Homo sapiens
ttagaaaaaaaaagt

SEQ ID NO: 407550 - DNA, 15 bp, Homo sapiens
tttagaaaaaaaaag

SEQ ID NO: 407551 - DNA, 15 bp, Homo sapiens
atttagaaaaaaaaa

SEQ ID NO: 407552 - DNA, 15 bp, Homo sapiens
tatttagaaaaaaaa

SEQ ID NO: 407553 - DNA, 15 bp, Homo sapiens
ctatttagaaaaaaa

SEQ ID NO: 407554 - DNA, 15 bp, Homo sapiens
gctatttagaaaaaa

SEQ ID NO: 407555 - DNA, 15 bp, Homo sapiens
agctatttagaaaaa

SEQ ID NO: 407556 - DNA, 15 bp, Homo sapiens
aagctatttagaaaa

SEQ ID NO: 407557 - DNA, 15 bp, Homo sapiens
aaagctatttagaaa

SEQ ID NO: 407558 - DNA, 15 bp, Homo sapiens
taaagctatttagaa

SEQ ID NO: 407559 - DNA, 15 bp, Homo sapiens
ataaagctatttaga

SEQ ID NO: 407560 - DNA, 15 bp, Homo sapiens
aataaagctatttag

SEQ ID NO: 407561 - DNA, 15 bp, Homo sapiens
caataaagctattta

SEQ ID NO: 407562 - DNA, 15 bp, Homo sapiens
tcaataaagctattt

SEQ ID NO: 407563 - DNA, 15 bp, Homo sapiens
ttcaataaagctatt

SEQ ID NO: 407564 - DNA, 15 bp, Homo sapiens
tttcaataaagctat

SEQ ID NO: 407565 - DNA, 15 bp, Homo sapiens
atttcaataaagcta

SEQ ID NO: 407566 - DNA, 15 bp, Homo sapiens
tatttcaataaagct

SEQ ID NO: 407567 - DNA, 15 bp, Homo sapiens
atatttcaataaagc

SEQ ID NO: 407568 - DNA, 15 bp, Homo sapiens
tatatttcaataaag

SEQ ID NO: 407569 - DNA, 15 bp, Homo sapiens
ttatatttcaataaa

SEQ ID NO: 407570 - DNA, 15 bp, Homo sapiens
attatatttcaataa

SEQ ID NO: 407571 - DNA, 15 bp, Homo sapiens
aattatatttcaata

SEQ ID NO: 407572 - DNA, 15 bp, Homo sapiens
gaattatatttcaat

SEQ ID NO: 407573 - DNA, 15 bp, Homo sapiens
tgaattatatttcaa

SEQ ID NO: 407574 - DNA, 15 bp, Homo sapiens
gtgaattatatttca

SEQ ID NO: 407575 - DNA, 15 bp, Homo sapiens
tgtgaattatatttc

SEQ ID NO: 407576 - DNA, 15 bp, Homo sapiens
atgtgaattatattt

SEQ ID NO: 407577 - DNA, 15 bp, Homo sapiens
tatgtgaattatatt

SEQ ID NO: 407578 - DNA, 15 bp, Homo sapiens
gtatgtgaattatat

SEQ ID NO: 407579 - DNA, 15 bp, Homo sapiens
tgtatgtgaattata

SEQ ID NO: 407580 - DNA, 15 bp, Homo sapiens
ctgtatgtgaattat

SEQ ID NO: 407581 - DNA, 15 bp, Homo sapiens
gctgtatgtgaatta

SEQ ID NO: 407582 - DNA, 15 bp, Homo sapiens
tgctgtatgtgaatt

SEQ ID NO: 407583 - DNA, 15 bp, Homo sapiens
ttgctgtatgtgaat

SEQ ID NO: 407584 - DNA, 15 bp, Homo sapiens
attgctgtatgtgaa

SEQ ID NO: 407585 - DNA, 15 bp, Homo sapiens
tattgctgtatgtga

SEQ ID NO: 407586 - DNA, 15 bp, Homo sapiens
atattgctgtatgtg

SEQ ID NO: 407587 - DNA, 15 bp, Homo sapiens
gatattgctgtatgt

SEQ ID NO: 407588 - DNA, 15 bp, Homo sapiens
agatattgctgtatg

SEQ ID NO: 407589 - DNA, 15 bp, Homo sapiens
cagatattgctgtat

SEQ ID NO: 407590 - DNA, 15 bp, Homo sapiens
gcagatattgctgta

SEQ ID NO: 407591 - DNA, 15 bp, Homo sapiens
ggcagatattgctgt

SEQ ID NO: 407592 - DNA, 15 bp, Homo sapiens
gggcagatattgctg

SEQ ID NO: 407593 - DNA, 15 bp, Homo sapiens
agggcagatattgct

SEQ ID NO: 407594 - DNA, 15 bp, Homo sapiens
aagggcagatattgc

SEQ ID NO: 407595 - DNA, 15 bp, Homo sapiens
aaagggcagatattg

SEQ ID NO: 407596 - DNA, 15 bp, Homo sapiens
taaagggcagatatt

SEQ ID NO: 407597 - DNA, 15 bp, Homo sapiens
ttaaagggcagatat

SEQ ID NO: 407598 - DNA, 15 bp, Homo sapiens
tttaaagggcagata

SEQ ID NO: 407599 - DNA, 15 bp, Homo sapiens
ttttaaagggcagat

SEQ ID NO: 407600 - DNA, 15 bp, Homo sapiens
tttttaaagggcaga

SEQ ID NO: 407601 - DNA, 15 bp, Homo sapiens
atttttaaagggcag

SEQ ID NO: 407602 - DNA, 15 bp, Homo sapiens
catttttaaagggca

SEQ ID NO: 407603 - DNA, 15 bp, Homo sapiens
acatttttaaagggc

SEQ ID NO: 407604 - DNA, 15 bp, Homo sapiens
cacatttttaaaggg

SEQ ID NO: 407605 - DNA, 15 bp, Homo sapiens
tcacatttttaaagg

SEQ ID NO: 407606 - DNA, 15 bp, Homo sapiens
ctcacatttttaaag

SEQ ID NO: 407607 - DNA, 15 bp, Homo sapiens
tctcacatttttaaa

SEQ ID NO: 407608 - DNA, 15 bp, Homo sapiens
atctcacatttttaa

SEQ ID NO: 407609 - DNA, 15 bp, Homo sapiens
aatctcacattttta

SEQ ID NO: 407610 - DNA, 15 bp, Homo sapiens
gaatctcacattttt

SEQ ID NO: 407611 - DNA, 15 bp, Homo sapiens
tgaatctcacatttt

SEQ ID NO: 407612 - DNA, 15 bp, Homo sapiens
ctgaatctcacattt

SEQ ID NO: 407613 - DNA, 15 bp, Homo sapiens
gctgaatctcacatt

SEQ ID NO: 407614 - DNA, 15 bp, Homo sapiens
ggctgaatctcacat

SEQ ID NO: 407615 - DNA, 15 bp, Homo sapiens
tggctgaatctcaca

SEQ ID NO: 407616 - DNA, 15 bp, Homo sapiens
ctggctgaatctcac

SEQ ID NO: 407617 - DNA, 15 bp, Homo sapiens
cctggctgaatctca

SEQ ID NO: 407618 - DNA, 15 bp, Homo sapiens
gcctggctgaatctc

SEQ ID NO: 407619 - DNA, 15 bp, Homo sapiens
cgcctggctgaatct

SEQ ID NO: 407620 - DNA, 15 bp, Homo sapiens
acgcctggctgaatc

SEQ ID NO: 407621 - DNA, 15 bp, Homo sapiens
cacgcctggctgaat

SEQ ID NO: 407622 - DNA, 15 bp, Homo sapiens
ccacgcctggctgaa

SEQ ID NO: 407623 - DNA, 15 bp, Homo sapiens
accacgcctggctga

SEQ ID NO: 407624 - DNA, 15 bp, Homo sapiens
caccacgcctggctg

SEQ ID NO: 407625 - DNA, 15 bp, Homo sapiens
ccaccacgcctggct

SEQ ID NO: 407626 - DNA, 15 bp, Homo sapiens
tagccaccacgcctg

SEQ ID NO: 407627 - DNA, 15 bp, Homo sapiens
ttagccaccacgcct

SEQ ID NO: 407628 - DNA, 15 bp, Homo sapiens
gttagccaccacgcc

SEQ ID NO: 407629 - DNA, 15 bp, Homo sapiens
cgttagccaccacgc

SEQ ID NO: 407630 - DNA, 15 bp, Homo sapiens
gcgttagccaccacg

SEQ ID NO: 407631 - DNA, 15 bp, Homo sapiens
ggcgttagccaccac

SEQ ID NO: 407632 - DNA, 15 bp, Homo sapiens
aggcgttagccacca

SEQ ID NO: 407633 - DNA, 15 bp, Homo sapiens
caggcgttagccacc

SEQ ID NO: 407634 - DNA, 15 bp, Homo sapiens
acaggcgttagccac

SEQ ID NO: 407635 - DNA, 15 bp, Homo sapiens
tacaggcgttagcca

SEQ ID NO: 407636 - DNA, 15 bp, Homo sapiens
ttacaggcgttagcc

SEQ ID NO: 407637 - DNA, 15 bp, Homo sapiens
attacaggcgttagc

SEQ ID NO: 407638 - DNA, 15 bp, Homo sapiens
gattacaggcgttag

SEQ ID NO: 407639 - DNA, 15 bp, Homo sapiens
ggattacaggcgtta

SEQ ID NO: 407640 - DNA, 15 bp, Homo sapiens
ggtgctgggattaca

SEQ ID NO: 407641 - DNA, 15 bp, Homo sapiens
aggtgctgggattac

SEQ ID NO: 407642 - DNA, 15 bp, Homo sapiens
aaggtgctgggatta

SEQ ID NO: 407643 - DNA, 15 bp, Homo sapiens
caaggtgctgggatt

SEQ ID NO: 407644 - DNA, 15 bp, Homo sapiens
ccaaggtgctgggat

SEQ ID NO: 407645 - DNA, 15 bp, Homo sapiens
cccaaggtgctggga

SEQ ID NO: 407646 - DNA, 15 bp, Homo sapiens
tcccaaggtgctggg

SEQ ID NO: 407647 - DNA, 15 bp, Homo sapiens
ctcccaaggtgctgg

SEQ ID NO: 407648 - DNA, 15 bp, Homo sapiens
cctcccaaggtgctg

SEQ ID NO: 407649 - DNA, 15 bp, Homo sapiens
gcctcccaaggtgct

SEQ ID NO: 407650 - DNA, 15 bp, Homo sapiens
agcctcccaaggtgc

SEQ ID NO: 407651 - DNA, 15 bp, Homo sapiens
cagcctcccaaggtg

SEQ ID NO: 407652 - DNA, 15 bp, Homo sapiens
tcagcctcccaaggt

SEQ ID NO: 407653 - DNA, 15 bp, Homo sapiens
ctcagcctcccaagg

SEQ ID NO: 407654 - DNA, 15 bp, Homo sapiens
gatccacctgcctca

SEQ ID NO: 407655 - DNA, 15 bp, Homo sapiens
actcctgacctcgtg

SEQ ID NO: 407656 - DNA, 15 bp, Homo sapiens
aactcctgacctcgt

SEQ ID NO: 407657 - DNA, 15 bp, Homo sapiens
gaactcctgacctcg

SEQ ID NO: 407658 - DNA, 15 bp, Homo sapiens
attggccaggctggt

SEQ ID NO: 407659 - DNA, 15 bp, Homo sapiens
tattggccaggctgg

SEQ ID NO: 407660 - DNA, 15 bp, Homo sapiens
atattggccaggctg

SEQ ID NO: 407661 - DNA, 15 bp, Homo sapiens
catattggccaggct

SEQ ID NO: 407662 - DNA, 15 bp, Homo sapiens
ccatattggccaggc

SEQ ID NO: 407663 - DNA, 15 bp, Homo sapiens
accatattggccagg

SEQ ID NO: 407664 - DNA, 15 bp, Homo sapiens
caccatattggccag

SEQ ID NO: 407665 - DNA, 15 bp, Homo sapiens
tcaccatattggcca

SEQ ID NO: 407666 - DNA, 15 bp, Homo sapiens
ttcaccatattggcc

SEQ ID NO: 407667 - DNA, 15 bp, Homo sapiens
tttcaccatattggc

SEQ ID NO: 407668 - DNA, 15 bp, Homo sapiens
atttcaccatattgg

SEQ ID NO: 407669 - DNA, 15 bp, Homo sapiens
gatttcaccatattg

SEQ ID NO: 407670 - DNA, 15 bp, Homo sapiens
ggatttcaccatatt

SEQ ID NO: 407671 - DNA, 15 bp, Homo sapiens
gggatttcaccatat

SEQ ID NO: 407672 - DNA, 15 bp, Homo sapiens
tgggatttcaccata

SEQ ID NO: 407673 - DNA, 15 bp, Homo sapiens
atgggatttcaccat

SEQ ID NO: 407674 - DNA, 15 bp, Homo sapiens
gatgggatttcacca

SEQ ID NO: 407675 - DNA, 15 bp, Homo sapiens
agatgggatttcacc

SEQ ID NO: 407676 - DNA, 15 bp, Homo sapiens
gagatgggatttcac

SEQ ID NO: 407677 - DNA, 15 bp, Homo sapiens
agagatgggatttca

SEQ ID NO: 407678 - DNA, 15 bp, Homo sapiens
tagagatgggatttc

SEQ ID NO: 407679 - DNA, 15 bp, Homo sapiens
gtagagatgggattt

SEQ ID NO: 407680 - DNA, 15 bp, Homo sapiens
agtagagatgggatt

SEQ ID NO: 407681 - DNA, 15 bp, Homo sapiens
tagtagagatgggat

SEQ ID NO: 407682 - DNA, 15 bp, Homo sapiens
ttagtagagatggga

SEQ ID NO: 407683 - DNA, 15 bp, Homo sapiens
attttttagtagaga

SEQ ID NO: 407684 - DNA, 15 bp, Homo sapiens
tattttttagtagag

SEQ ID NO: 407685 - DNA, 15 bp, Homo sapiens
gtattttttagtaga

SEQ ID NO: 407686 - DNA, 15 bp, Homo sapiens
tgtattttttagtag

SEQ ID NO: 407687 - DNA, 15 bp, Homo sapiens
ttgtattttttagta

SEQ ID NO: 407688 - DNA, 15 bp, Homo sapiens
tttgtattttttagt

SEQ ID NO: 407689 - DNA, 15 bp, Homo sapiens
atttgtattttttag

SEQ ID NO: 407690 - DNA, 15 bp, Homo sapiens
tatttgtatttttta

SEQ ID NO: 407691 - DNA, 15 bp, Homo sapiens
atatttgtatttttt

SEQ ID NO: 407692 - DNA, 15 bp, Homo sapiens
aatatttgtattttt

SEQ ID NO: 407693 - DNA, 15 bp, Homo sapiens
taatatttgtatttt

SEQ ID NO: 407694 - DNA, 15 bp, Homo sapiens
ctaatatttgtattt

SEQ ID NO: 407695 - DNA, 15 bp, Homo sapiens
gctaatatttgtatt

SEQ ID NO: 407696 - DNA, 15 bp, Homo sapiens
agctaatatttgtat

SEQ ID NO: 407697 - DNA, 15 bp, Homo sapiens
cagctaatatttgta

SEQ ID NO: 407698 - DNA, 15 bp, Homo sapiens
ccagctaatatttgt

SEQ ID NO: 407699 - DNA, 15 bp, Homo sapiens
cccagctaatatttg

SEQ ID NO: 407700 - DNA, 15 bp, Homo sapiens
acccagctaatattt

SEQ ID NO: 407701 - DNA, 15 bp, Homo sapiens
cacccagctaatatt

SEQ ID NO: 407702 - DNA, 15 bp, Homo sapiens
acacccagctaatat

SEQ ID NO: 407703 - DNA, 15 bp, Homo sapiens
cacacccagctaata

SEQ ID NO: 407704 - DNA, 15 bp, Homo sapiens
accaccacacccagc

SEQ ID NO: 407705 - DNA, 15 bp, Homo sapiens
caccaccacacccag

SEQ ID NO: 407706 - DNA, 15 bp, Homo sapiens
acaccaccacaccca

SEQ ID NO: 407707 - DNA, 15 bp, Homo sapiens
cacaccaccacaccc

SEQ ID NO: 407708 - DNA, 15 bp, Homo sapiens
gcacaccaccacacc

SEQ ID NO: 407709 - DNA, 15 bp, Homo sapiens
tgcacaccaccacac

SEQ ID NO: 407710 - DNA, 15 bp, Homo sapiens
gtgcacaccaccaca

SEQ ID NO: 407711 - DNA, 15 bp, Homo sapiens
ggtgcacaccaccac

SEQ ID NO: 407712 - DNA, 15 bp, Homo sapiens
aggtgcacaccacca

SEQ ID NO: 407713 - DNA, 15 bp, Homo sapiens
caggtgcacaccacc

SEQ ID NO: 407714 - DNA, 15 bp, Homo sapiens
acaggtgcacaccac

SEQ ID NO: 407715 - DNA, 15 bp, Homo sapiens
tacaggtgcacacca

SEQ ID NO: 407716 - DNA, 15 bp, Homo sapiens
ctacaggtgcacacc

SEQ ID NO: 407717 - DNA, 15 bp, Homo sapiens
gctacaggtgcacac

SEQ ID NO: 407718 - DNA, 15 bp, Homo sapiens
ggctacaggtgcaca

SEQ ID NO: 407719 - DNA, 15 bp, Homo sapiens
gggctacaggtgcac

SEQ ID NO: 407720 - DNA, 15 bp, Homo sapiens
ggggctacaggtgca

SEQ ID NO: 407721 - DNA, 15 bp, Homo sapiens
tggggctacaggtgc

SEQ ID NO: 407722 - DNA, 15 bp, Homo sapiens
ctggggctacaggtg

SEQ ID NO: 407723 - DNA, 15 bp, Homo sapiens
gctggggctacaggt

SEQ ID NO: 407724 - DNA, 15 bp, Homo sapiens
agctggggctacagg

SEQ ID NO: 407725 - DNA, 15 bp, Homo sapiens
tagctggggctacag

SEQ ID NO: 407726 - DNA, 15 bp, Homo sapiens
gtagctggggctaca

SEQ ID NO: 407727 - DNA, 15 bp, Homo sapiens
agtagctggggctac

SEQ ID NO: 407728 - DNA, 15 bp, Homo sapiens
gagtagctggggcta

SEQ ID NO: 407729 - DNA, 15 bp, Homo sapiens
cgagtagctggggct

SEQ ID NO: 407730 - DNA, 15 bp, Homo sapiens
ccgagtagctggggc

SEQ ID NO: 407731 - DNA, 15 bp, Homo sapiens
cccgagtagctgggg

SEQ ID NO: 407732 - DNA, 15 bp, Homo sapiens
gcgattctcctgcct

SEQ ID NO: 407733 - DNA, 15 bp, Homo sapiens
agcgattctcctgcc

SEQ ID NO: 407734 - DNA, 15 bp, Homo sapiens
aagcgattctcctgc

SEQ ID NO: 407735 - DNA, 15 bp, Homo sapiens
caagcgattctcctg

SEQ ID NO: 407736 - DNA, 15 bp, Homo sapiens
aggttcaagcgattc

SEQ ID NO: 407737 - DNA, 15 bp, Homo sapiens
tccaggttcaagcga

SEQ ID NO: 407738 - DNA, 15 bp, Homo sapiens
ttccaggttcaagcg

SEQ ID NO: 407739 - DNA, 15 bp, Homo sapiens
cttccaggttcaagc

SEQ ID NO: 407740 - DNA, 15 bp, Homo sapiens
ccttccaggttcaag

SEQ ID NO: 407741 - DNA, 15 bp, Homo sapiens
gccttccaggttcaa

SEQ ID NO: 407742 - DNA, 15 bp, Homo sapiens
tgccttccaggttca

SEQ ID NO: 407743 - DNA, 15 bp, Homo sapiens
ctgccttccaggttc

SEQ ID NO: 407744 - DNA, 15 bp, Homo sapiens
tctgccttccaggtt

SEQ ID NO: 407745 - DNA, 15 bp, Homo sapiens
ctctgccttccaggt

SEQ ID NO: 407746 - DNA, 15 bp, Homo sapiens
tctctgccttccagg

SEQ ID NO: 407747 - DNA, 15 bp, Homo sapiens
atctctgccttccag

SEQ ID NO: 407748 - DNA, 15 bp, Homo sapiens
aatctctgccttcca

SEQ ID NO: 407749 - DNA, 15 bp, Homo sapiens
caatctctgccttcc

SEQ ID NO: 407750 - DNA, 15 bp, Homo sapiens
gcaatctctgccttc

SEQ ID NO: 407751 - DNA, 15 bp, Homo sapiens
tgcaatctctgcctt

SEQ ID NO: 407752 - DNA, 15 bp, Homo sapiens
ctgcaatctctgcct

SEQ ID NO: 407753 - DNA, 15 bp, Homo sapiens
actgcaatctctgcc

SEQ ID NO: 407754 - DNA, 15 bp, Homo sapiens
cactgcaatctctgc

SEQ ID NO: 407755 - DNA, 15 bp, Homo sapiens
tcactgcaatctctg

SEQ ID NO: 407756 - DNA, 15 bp, Homo sapiens
ctcactgcaatctct

SEQ ID NO: 407757 - DNA, 15 bp, Homo sapiens
gctcactgcaatctc

SEQ ID NO: 407758 - DNA, 15 bp, Homo sapiens
ggctcactgcaatct

SEQ ID NO: 407759 - DNA, 15 bp, Homo sapiens
cggctcactgcaatc

SEQ ID NO: 407760 - DNA, 15 bp, Homo sapiens
ccggctcactgcaat

SEQ ID NO: 407761 - DNA, 15 bp, Homo sapiens
cccggctcactgcaa

SEQ ID NO: 407762 - DNA, 15 bp, Homo sapiens
tcccggctcactgca

SEQ ID NO: 407763 - DNA, 15 bp, Homo sapiens
atcccggctcactgc

SEQ ID NO: 407764 - DNA, 15 bp, Homo sapiens
gatcccggctcactg

SEQ ID NO: 407765 - DNA, 15 bp, Homo sapiens
tgatcccggctcact

SEQ ID NO: 407766 - DNA, 15 bp, Homo sapiens
atgatcccggctcac

SEQ ID NO: 407767 - DNA, 15 bp, Homo sapiens
catgatcccggctca

SEQ ID NO: 407768 - DNA, 15 bp, Homo sapiens
acatgatcccggctc

SEQ ID NO: 407769 - DNA, 15 bp, Homo sapiens
gacatgatcccggct

SEQ ID NO: 407770 - DNA, 15 bp, Homo sapiens
tgacatgatcccggc

SEQ ID NO: 407771 - DNA, 15 bp, Homo sapiens
gtgacatgatcccgg

SEQ ID NO: 407772 - DNA, 15 bp, Homo sapiens
agtgacatgatcccg

SEQ ID NO: 407773 - DNA, 15 bp, Homo sapiens
cagtgacatgatccc

SEQ ID NO: 407774 - DNA, 15 bp, Homo sapiens
gcagtgacatgatcc

SEQ ID NO: 407775 - DNA, 15 bp, Homo sapiens
tgcagtgacatgatc

SEQ ID NO: 407776 - DNA, 15 bp, Homo sapiens
gtgcagtgacatgat

SEQ ID NO: 407777 - DNA, 15 bp, Homo sapiens
agtgcagtgacatga

SEQ ID NO: 407778 - DNA, 15 bp, Homo sapiens
gagtgcagtgacatg

SEQ ID NO: 407779 - DNA, 15 bp, Homo sapiens
ggagtgcagtgacat

SEQ ID NO: 407780 - DNA, 15 bp, Homo sapiens
tggagtgcagtgaca

SEQ ID NO: 407781 - DNA, 15 bp, Homo sapiens
ctggagtgcagtgac

SEQ ID NO: 407782 - DNA, 15 bp, Homo sapiens
gctggagtgcagtga

SEQ ID NO: 407783 - DNA, 15 bp, Homo sapiens
cagtctcactctgtt

SEQ ID NO: 407784 - DNA, 15 bp, Homo sapiens
tcagtctcactctgt

SEQ ID NO: 407785 - DNA, 15 bp, Homo sapiens
gtcagtctcactctg

SEQ ID NO: 407786 - DNA, 15 bp, Homo sapiens
agtcagtctcactct

SEQ ID NO: 407787 - DNA, 15 bp, Homo sapiens
gagtcagtctcactc

SEQ ID NO: 407788 - DNA, 15 bp, Homo sapiens
ggagtcagtctcact

SEQ ID NO: 407789 - DNA, 15 bp, Homo sapiens
cggagtcagtctcac

SEQ ID NO: 407790 - DNA, 15 bp, Homo sapiens
acggagtcagtctca

SEQ ID NO: 407791 - DNA, 15 bp, Homo sapiens
gacggagtcagtctc

SEQ ID NO: 407792 - DNA, 15 bp, Homo sapiens
agacggagtcagtct

SEQ ID NO: 407793 - DNA, 15 bp, Homo sapiens
gagacggagtcagtc

SEQ ID NO: 407794 - DNA, 15 bp, Homo sapiens
tgagacggagtcagt

SEQ ID NO: 407795 - DNA, 15 bp, Homo sapiens
ttgagacggagtcag

SEQ ID NO: 407796 - DNA, 15 bp, Homo sapiens
tttgagacggagtca

SEQ ID NO: 407797 - DNA, 15 bp, Homo sapiens
acttttttttttttt

SEQ ID NO: 407798 - DNA, 15 bp, Homo sapiens
cactttttttttttt

SEQ ID NO: 407799 - DNA, 15 bp, Homo sapiens
ccacttttttttttt

SEQ ID NO: 407800 - DNA, 15 bp, Homo sapiens
cccactttttttttt

SEQ ID NO: 407801 - DNA, 15 bp, Homo sapiens
tcccacttttttttt

SEQ ID NO: 407802 - DNA, 15 bp, Homo sapiens
atcccactttttttt

SEQ ID NO: 407803 - DNA, 15 bp, Homo sapiens
aatcccacttttttt

SEQ ID NO: 407804 - DNA, 15 bp, Homo sapiens
gaatcccactttttt

SEQ ID NO: 407805 - DNA, 15 bp, Homo sapiens
tgaatcccacttttt

SEQ ID NO: 407806 - DNA, 15 bp, Homo sapiens
ctgaatcccactttt

SEQ ID NO: 407807 - DNA, 15 bp, Homo sapiens
actgaatcccacttt

SEQ ID NO: 407808 - DNA, 15 bp, Homo sapiens
cactgaatcccactt

SEQ ID NO: 407809 - DNA, 15 bp, Homo sapiens
ccactgaatcccact

SEQ ID NO: 407810 - DNA, 15 bp, Homo sapiens
accactgaatcccac

SEQ ID NO: 407811 - DNA, 15 bp, Homo sapiens
aaccactgaatccca

SEQ ID NO: 407812 - DNA, 15 bp, Homo sapiens
aaaccactgaatccc

SEQ ID NO: 407813 - DNA, 15 bp, Homo sapiens
aaaaccactgaatcc

SEQ ID NO: 407814 - DNA, 15 bp, Homo sapiens
aaaaaccactgaatc

SEQ ID NO: 407815 - DNA, 15 bp, Homo sapiens
taaaaaccactgaat

SEQ ID NO: 407816 - DNA, 15 bp, Homo sapiens
ctaaaaaccactgaa

SEQ ID NO: 407817 - DNA, 15 bp, Homo sapiens
actaaaaaccactga

SEQ ID NO: 407818 - DNA, 15 bp, Homo sapiens
tactaaaaaccactg

SEQ ID NO: 407819 - DNA, 15 bp, Homo sapiens
atactaaaaaccact

SEQ ID NO: 407820 - DNA, 15 bp, Homo sapiens
catactaaaaaccac

SEQ ID NO: 407821 - DNA, 15 bp, Homo sapiens
acatactaaaaacca

SEQ ID NO: 407822 - DNA, 15 bp, Homo sapiens
aacatactaaaaacc

SEQ ID NO: 407823 - DNA, 15 bp, Homo sapiens
gaacatactaaaaac

SEQ ID NO: 407824 - DNA, 15 bp, Homo sapiens
tgaacatactaaaaa

SEQ ID NO: 407825 - DNA, 15 bp, Homo sapiens
gtgaacatactaaaa

SEQ ID NO: 407826 - DNA, 15 bp, Homo sapiens
tgtgaacatactaaa

SEQ ID NO: 407827 - DNA, 15 bp, Homo sapiens
ctgtgaacatactaa

SEQ ID NO: 407828 - DNA, 15 bp, Homo sapiens
tctgtgaacatacta

SEQ ID NO: 407829 - DNA, 15 bp, Homo sapiens
ctctgtgaacatact

SEQ ID NO: 407830 - DNA, 15 bp, Homo sapiens
actctgtgaacatac

SEQ ID NO: 407831 - DNA, 15 bp, Homo sapiens
aactctgtgaacata

SEQ ID NO: 407832 - DNA, 15 bp, Homo sapiens
caactctgtgaacat

SEQ ID NO: 407833 - DNA, 15 bp, Homo sapiens
acaactctgtgaaca

SEQ ID NO: 407834 - DNA, 15 bp, Homo sapiens
cacaactctgtgaac

SEQ ID NO: 407835 - DNA, 15 bp, Homo sapiens
gcacaactctgtgaa

SEQ ID NO: 407836 - DNA, 15 bp, Homo sapiens
tgcacaactctgtga

SEQ ID NO: 407837 - DNA, 15 bp, Homo sapiens
ttgcacaactctgtg

SEQ ID NO: 407838 - DNA, 15 bp, Homo sapiens
gttgcacaactctgt

SEQ ID NO: 407839 - DNA, 15 bp, Homo sapiens
ggttgcacaactctg

SEQ ID NO: 407840 - DNA, 15 bp, Homo sapiens
tggttgcacaactct

SEQ ID NO: 407841 - DNA, 15 bp, Homo sapiens
atggttgcacaactc

SEQ ID NO: 407842 - DNA, 15 bp, Homo sapiens
gatggttgcacaact

SEQ ID NO: 407843 - DNA, 15 bp, Homo sapiens
tgatggttgcacaac

SEQ ID NO: 407844 - DNA, 15 bp, Homo sapiens
atgatggttgcacaa

SEQ ID NO: 407845 - DNA, 15 bp, Homo sapiens
gatgatggttgcaca

SEQ ID NO: 407846 - DNA, 15 bp, Homo sapiens
tgatgatggttgcac

SEQ ID NO: 407847 - DNA, 15 bp, Homo sapiens
gtgatgatggttgca

SEQ ID NO: 407848 - DNA, 15 bp, Homo sapiens
agtgatgatggttgc

SEQ ID NO: 407849 - DNA, 15 bp, Homo sapiens
tagtgatgatggttg

SEQ ID NO: 407850 - DNA, 15 bp, Homo sapiens
atagtgatgatggtt

SEQ ID NO: 407851 - DNA, 15 bp, Homo sapiens
gatagtgatgatggt

SEQ ID NO: 407852 - DNA, 15 bp, Homo sapiens
agatagtgatgatgg

SEQ ID NO: 407853 - DNA, 15 bp, Homo sapiens
tagatagtgatgatg

SEQ ID NO: 407854 - DNA, 15 bp, Homo sapiens
ttagatagtgatgat

SEQ ID NO: 407855 - DNA, 15 bp, Homo sapiens
attagatagtgatga

SEQ ID NO: 407856 - DNA, 15 bp, Homo sapiens
aattagatagtgatg

SEQ ID NO: 407857 - DNA, 15 bp, Homo sapiens
aaattagatagtgat

SEQ ID NO: 407858 - DNA, 15 bp, Homo sapiens
aaaattagatagtga

SEQ ID NO: 407859 - DNA, 15 bp, Homo sapiens
taaaattagatagtg

SEQ ID NO: 407860 - DNA, 15 bp, Homo sapiens
ctaaaattagatagt

SEQ ID NO: 407861 - DNA, 15 bp, Homo sapiens
tctaaaattagatag

SEQ ID NO: 407862 - DNA, 15 bp, Homo sapiens
ctctaaaattagata

SEQ ID NO: 407863 - DNA, 15 bp, Homo sapiens
actctaaaattagat

SEQ ID NO: 407864 - DNA, 15 bp, Homo sapiens
tactctaaaattaga

SEQ ID NO: 407865 - DNA, 15 bp, Homo sapiens
atactctaaaattag

SEQ ID NO: 407866 - DNA, 15 bp, Homo sapiens
aatactctaaaatta

SEQ ID NO: 407867 - DNA, 15 bp, Homo sapiens
aaatactctaaaatt

SEQ ID NO: 407868 - DNA, 15 bp, Homo sapiens
aaaatactctaaaat

SEQ ID NO: 407869 - DNA, 15 bp, Homo sapiens
gaaaatactctaaaa

SEQ ID NO: 407870 - DNA, 15 bp, Homo sapiens
tgaaaatactctaaa

SEQ ID NO: 407871 - DNA, 15 bp, Homo sapiens
atgaaaatactctaa

SEQ ID NO: 407872 - DNA, 15 bp, Homo sapiens
gatgaaaatactcta

SEQ ID NO: 407873 - DNA, 15 bp, Homo sapiens
tgatgaaaatactct

SEQ ID NO: 407874 - DNA, 15 bp, Homo sapiens
gtgatgaaaatactc

SEQ ID NO: 407875 - DNA, 15 bp, Homo sapiens
ggtgatgaaaatact

SEQ ID NO: 407876 - DNA, 15 bp, Homo sapiens
gggtgatgaaaatac

SEQ ID NO: 407877 - DNA, 15 bp, Homo sapiens
ggggtgatgaaaata

SEQ ID NO: 407878 - DNA, 15 bp, Homo sapiens
tggggtgatgaaaat

SEQ ID NO: 407879 - DNA, 15 bp, Homo sapiens
ctggggtgatgaaaa

SEQ ID NO: 407880 - DNA, 15 bp, Homo sapiens
tctggggtgatgaaa

SEQ ID NO: 407881 - DNA, 15 bp, Homo sapiens
ttctggggtgatgaa

SEQ ID NO: 407882 - DNA, 15 bp, Homo sapiens
tttctggggtgatga

SEQ ID NO: 407883 - DNA, 15 bp, Homo sapiens
ctttctggggtgatg

SEQ ID NO: 407884 - DNA, 15 bp, Homo sapiens
tctttctggggtgat

SEQ ID NO: 407885 - DNA, 15 bp, Homo sapiens
ctctttctggggtga

SEQ ID NO: 407886 - DNA, 15 bp, Homo sapiens
tctctttctggggtg

SEQ ID NO: 407887 - DNA, 15 bp, Homo sapiens
gtctctttctggggt

SEQ ID NO: 407888 - DNA, 15 bp, Homo sapiens
agtctctttctgggg

SEQ ID NO: 407889 - DNA, 15 bp, Homo sapiens
gagtctctttctggg

SEQ ID NO: 407890 - DNA, 15 bp, Homo sapiens
agagtctctttctgg

SEQ ID NO: 407891 - DNA, 15 bp, Homo sapiens
tagagtctctttctg

SEQ ID NO: 407892 - DNA, 15 bp, Homo sapiens
atagagtctctttct

SEQ ID NO: 407893 - DNA, 15 bp, Homo sapiens
tatagagtctctttc

SEQ ID NO: 407894 - DNA, 15 bp, Homo sapiens
gtatagagtctcttt

SEQ ID NO: 407895 - DNA, 15 bp, Homo sapiens
ggtatagagtctctt

SEQ ID NO: 407896 - DNA, 15 bp, Homo sapiens
gggtatagagtctct

SEQ ID NO: 407897 - DNA, 15 bp, Homo sapiens
tgggtatagagtctc

SEQ ID NO: 407898 - DNA, 15 bp, Homo sapiens
atgggtatagagtct

SEQ ID NO: 407899 - DNA, 15 bp, Homo sapiens
aatgggtatagagtc

SEQ ID NO: 407900 - DNA, 15 bp, Homo sapiens
taatgggtatagagt

SEQ ID NO: 407901 - DNA, 15 bp, Homo sapiens
ctaatgggtatagag

SEQ ID NO: 407902 - DNA, 15 bp, Homo sapiens
gctaatgggtataga

SEQ ID NO: 407903 - DNA, 15 bp, Homo sapiens
tgctaatgggtatag

SEQ ID NO: 407904 - DNA, 15 bp, Homo sapiens
ctgctaatgggtata

SEQ ID NO: 407905 - DNA, 15 bp, Homo sapiens
actgctaatgggtat

SEQ ID NO: 407906 - DNA, 15 bp, Homo sapiens
aactgctaatgggta

SEQ ID NO: 407907 - DNA, 15 bp, Homo sapiens
taactgctaatgggt

SEQ ID NO: 407908 - DNA, 15 bp, Homo sapiens
gtaactgctaatggg

SEQ ID NO: 407909 - DNA, 15 bp, Homo sapiens
agtaactgctaatgg

SEQ ID NO: 407910 - DNA, 15 bp, Homo sapiens
aagtaactgctaatg

SEQ ID NO: 407911 - DNA, 15 bp, Homo sapiens
aaagtaactgctaat

SEQ ID NO: 407912 - DNA, 15 bp, Homo sapiens
gaaagtaactgctaa

SEQ ID NO: 407913 - DNA, 15 bp, Homo sapiens
ggaaagtaactgcta

SEQ ID NO: 407914 - DNA, 15 bp, Homo sapiens
tggaaagtaactgct

SEQ ID NO: 407915 - DNA, 15 bp, Homo sapiens
gtggaaagtaactgc

SEQ ID NO: 407916 - DNA, 15 bp, Homo sapiens
agtggaaagtaactg

SEQ ID NO: 407917 - DNA, 15 bp, Homo sapiens
aagtggaaagtaact

SEQ ID NO: 407918 - DNA, 15 bp, Homo sapiens
gaagtggaaagtaac

SEQ ID NO: 407919 - DNA, 15 bp, Homo sapiens
ggaagtggaaagtaa

SEQ ID NO: 407920 - DNA, 15 bp, Homo sapiens
aggaagtggaaagta

SEQ ID NO: 407921 - DNA, 15 bp, Homo sapiens
gaggaagtggaaagt

SEQ ID NO: 407922 - DNA, 15 bp, Homo sapiens
agaggaagtggaaag

SEQ ID NO: 407923 - DNA, 15 bp, Homo sapiens
gagaggaagtggaaa

SEQ ID NO: 407924 - DNA, 15 bp, Homo sapiens
tgagaggaagtggaa

SEQ ID NO: 407925 - DNA, 15 bp, Homo sapiens
gtgagaggaagtgga

SEQ ID NO: 407926 - DNA, 15 bp, Homo sapiens
ggtgagaggaagtgg

SEQ ID NO: 407927 - DNA, 15 bp, Homo sapiens
tggtgagaggaagtg

SEQ ID NO: 407928 - DNA, 15 bp, Homo sapiens
atggtgagaggaagt

SEQ ID NO: 407929 - DNA, 15 bp, Homo sapiens
aatggtgagaggaag

SEQ ID NO: 407930 - DNA, 15 bp, Homo sapiens
gaatggtgagaggaa

SEQ ID NO: 407931 - DNA, 15 bp, Homo sapiens
agaatggtgagagga

SEQ ID NO: 407932 - DNA, 15 bp, Homo sapiens
gagaatggtgagagg

SEQ ID NO: 407933 - DNA, 15 bp, Homo sapiens
agagaatggtgagag

SEQ ID NO: 407934 - DNA, 15 bp, Homo sapiens
cagagaatggtgaga

SEQ ID NO: 407935 - DNA, 15 bp, Homo sapiens
ccagagaatggtgag

SEQ ID NO: 407936 - DNA, 15 bp, Homo sapiens
tccagagaatggtga

SEQ ID NO: 407937 - DNA, 15 bp, Homo sapiens
ttccagagaatggtg

SEQ ID NO: 407938 - DNA, 15 bp, Homo sapiens
tttccagagaatggt

SEQ ID NO: 407939 - DNA, 15 bp, Homo sapiens
gtttccagagaatgg

SEQ ID NO: 407940 - DNA, 15 bp, Homo sapiens
ggtttccagagaatg

SEQ ID NO: 407941 - DNA, 15 bp, Homo sapiens
tggtttccagagaat

SEQ ID NO: 407942 - DNA, 15 bp, Homo sapiens
gtggtttccagagaa

SEQ ID NO: 407943 - DNA, 15 bp, Homo sapiens
agtggtttccagaga

SEQ ID NO: 407944 - DNA, 15 bp, Homo sapiens
tagtggtttccagag

SEQ ID NO: 407945 - DNA, 15 bp, Homo sapiens
ttagtggtttccaga

SEQ ID NO: 407946 - DNA, 15 bp, Homo sapiens
attagtggtttccag

SEQ ID NO: 407947 - DNA, 15 bp, Homo sapiens
gattagtggtttcca

SEQ ID NO: 407948 - DNA, 15 bp, Homo sapiens
agattagtggtttcc

SEQ ID NO: 407949 - DNA, 15 bp, Homo sapiens
tagattagtggtttc

SEQ ID NO: 407950 - DNA, 15 bp, Homo sapiens
gtagattagtggttt

SEQ ID NO: 407951 - DNA, 15 bp, Homo sapiens
agtagattagtggtt

SEQ ID NO: 407952 - DNA, 15 bp, Homo sapiens
aagtagattagtggt

SEQ ID NO: 407953 - DNA, 15 bp, Homo sapiens
aaagtagattagtgg

SEQ ID NO: 407954 - DNA, 15 bp, Homo sapiens
gaaagtagattagtg

SEQ ID NO: 407955 - DNA, 15 bp, Homo sapiens
agaaagtagattagt

SEQ ID NO: 407956 - DNA, 15 bp, Homo sapiens
cagaaagtagattag

SEQ ID NO: 407957 - DNA, 15 bp, Homo sapiens
acagaaagtagatta

SEQ ID NO: 407958 - DNA, 15 bp, Homo sapiens
gacagaaagtagatt

SEQ ID NO: 407959 - DNA, 15 bp, Homo sapiens
agacagaaagtagat

SEQ ID NO: 407960 - DNA, 15 bp, Homo sapiens
cagagacagaaagta

SEQ ID NO: 407961 - DNA, 15 bp, Homo sapiens
acagagacagaaagt

SEQ ID NO: 407962 - DNA, 15 bp, Homo sapiens
cacagagacagaaag

SEQ ID NO: 407963 - DNA, 15 bp, Homo sapiens
ccacagagacagaaa

SEQ ID NO: 407964 - DNA, 15 bp, Homo sapiens
tccacagagacagaa

SEQ ID NO: 407965 - DNA, 15 bp, Homo sapiens
atccacagagacaga

SEQ ID NO: 407966 - DNA, 15 bp, Homo sapiens
aatccacagagacag

SEQ ID NO: 407967 - DNA, 15 bp, Homo sapiens
aaatccacagagaca

SEQ ID NO: 407968 - DNA, 15 bp, Homo sapiens
caaatccacagagac

SEQ ID NO: 407969 - DNA, 15 bp, Homo sapiens
gcaaatccacagaga

SEQ ID NO: 407970 - DNA, 15 bp, Homo sapiens
agcaaatccacagag

SEQ ID NO: 407971 - DNA, 15 bp, Homo sapiens
aagcaaatccacaga

SEQ ID NO: 407972 - DNA, 15 bp, Homo sapiens
taagcaaatccacag

SEQ ID NO: 407973 - DNA, 15 bp, Homo sapiens
ctaagcaaatccaca

SEQ ID NO: 407974 - DNA, 15 bp, Homo sapiens
actaagcaaatccac

SEQ ID NO: 407975 - DNA, 15 bp, Homo sapiens
gactaagcaaatcca

SEQ ID NO: 407976 - DNA, 15 bp, Homo sapiens
agactaagcaaatcc

SEQ ID NO: 407977 - DNA, 15 bp, Homo sapiens
tagactaagcaaatc

SEQ ID NO: 407978 - DNA, 15 bp, Homo sapiens
ctagactaagcaaat

SEQ ID NO: 407979 - DNA, 15 bp, Homo sapiens
tctagactaagcaaa

SEQ ID NO: 407980 - DNA, 15 bp, Homo sapiens
ttctagactaagcaa

SEQ ID NO: 407981 - DNA, 15 bp, Homo sapiens
tttctagactaagca

SEQ ID NO: 407982 - DNA, 15 bp, Homo sapiens
atttctagactaagc

SEQ ID NO: 407983 - DNA, 15 bp, Homo sapiens
aatttctagactaag

SEQ ID NO: 407984 - DNA, 15 bp, Homo sapiens
aaatttctagactaa

SEQ ID NO: 407985 - DNA, 15 bp, Homo sapiens
aaaatttctagacta

SEQ ID NO: 407986 - DNA, 15 bp, Homo sapiens
taaaatttctagact

SEQ ID NO: 407987 - DNA, 15 bp, Homo sapiens
ataaaatttctagac

SEQ ID NO: 407988 - DNA, 15 bp, Homo sapiens
tataaaatttctaga

SEQ ID NO: 407989 - DNA, 15 bp, Homo sapiens
atataaaatttctag

SEQ ID NO: 407990 - DNA, 15 bp, Homo sapiens
tatataaaatttcta

SEQ ID NO: 407991 - DNA, 15 bp, Homo sapiens
ttatataaaatttct

SEQ ID NO: 407992 - DNA, 15 bp, Homo sapiens
tttatataaaatttc

SEQ ID NO: 407993 - DNA, 15 bp, Homo sapiens
atttatataaaattt

SEQ ID NO: 407994 - DNA, 15 bp, Homo sapiens
catttatataaaatt

SEQ ID NO: 407995 - DNA, 15 bp, Homo sapiens
ccatttatataaaat

SEQ ID NO: 407996 - DNA, 15 bp, Homo sapiens
tccatttatataaaa

SEQ ID NO: 407997 - DNA, 15 bp, Homo sapiens
ttccatttatataaa

SEQ ID NO: 407998 - DNA, 15 bp, Homo sapiens
cttccatttatataa

SEQ ID NO: 407999 - DNA, 15 bp, Homo sapiens
acttccatttatata

SEQ ID NO: 408000 - DNA, 15 bp, Homo sapiens
tacttccatttatat

SEQ ID NO: 408001 - DNA, 15 bp, Homo sapiens
atacttccatttata

SEQ ID NO: 408002 - DNA, 15 bp, Homo sapiens
tatacttccatttat

SEQ ID NO: 408003 - DNA, 15 bp, Homo sapiens
ttatacttccattta

SEQ ID NO: 408004 - DNA, 15 bp, Homo sapiens
tttatacttccattt

SEQ ID NO: 408005 - DNA, 15 bp, Homo sapiens
ttttatacttccatt

SEQ ID NO: 408006 - DNA, 15 bp, Homo sapiens
gttttatacttccat

SEQ ID NO: 408007 - DNA, 15 bp, Homo sapiens
tgttttatacttcca

SEQ ID NO: 408008 - DNA, 15 bp, Homo sapiens
atgttttatacttcc

SEQ ID NO: 408009 - DNA, 15 bp, Homo sapiens
aatgttttatacttc

SEQ ID NO: 408010 - DNA, 15 bp, Homo sapiens
aaatgttttatactt

SEQ ID NO: 408011 - DNA, 15 bp, Homo sapiens
caaatgttttatact

SEQ ID NO: 408012 - DNA, 15 bp, Homo sapiens
ccaaatgttttatac

SEQ ID NO: 408013 - DNA, 15 bp, Homo sapiens
gccaaatgttttata

SEQ ID NO: 408014 - DNA, 15 bp, Homo sapiens
ggccaaatgttttat

SEQ ID NO: 408015 - DNA, 15 bp, Homo sapiens
aggccaaatgtttta

SEQ ID NO: 408016 - DNA, 15 bp, Homo sapiens
aaggccaaatgtttt

SEQ ID NO: 408017 - DNA, 15 bp, Homo sapiens
aaaggccaaatgttt

SEQ ID NO: 408018 - DNA, 15 bp, Homo sapiens
aaaaggccaaatgtt

SEQ ID NO: 408019 - DNA, 15 bp, Homo sapiens
caaaaggccaaatgt

SEQ ID NO: 408020 - DNA, 15 bp, Homo sapiens
acaaaaggccaaatg

SEQ ID NO: 408021 - DNA, 15 bp, Homo sapiens
cacaaaaggccaaat

SEQ ID NO: 408022 - DNA, 15 bp, Homo sapiens
tcacaaaaggccaaa

SEQ ID NO: 408023 - DNA, 15 bp, Homo sapiens
ttcacaaaaggccaa

SEQ ID NO: 408024 - DNA, 15 bp, Homo sapiens
attcacaaaaggcca

SEQ ID NO: 408025 - DNA, 15 bp, Homo sapiens
cattcacaaaaggcc

SEQ ID NO: 408026 - DNA, 15 bp, Homo sapiens
ccattcacaaaaggc

SEQ ID NO: 408027 - DNA, 15 bp, Homo sapiens
gccattcacaaaagg

SEQ ID NO: 408028 - DNA, 15 bp, Homo sapiens
agccattcacaaaag

SEQ ID NO: 408029 - DNA, 15 bp, Homo sapiens
aagccattcacaaaa

SEQ ID NO: 408030 - DNA, 15 bp, Homo sapiens
gaagccattcacaaa

SEQ ID NO: 408031 - DNA, 15 bp, Homo sapiens
agaagccattcacaa

SEQ ID NO: 408032 - DNA, 15 bp, Homo sapiens
aagaagccattcaca

SEQ ID NO: 408033 - DNA, 15 bp, Homo sapiens
aaagaagccattcac

SEQ ID NO: 408034 - DNA, 15 bp, Homo sapiens
gaaagaagccattca

SEQ ID NO: 408035 - DNA, 15 bp, Homo sapiens
tgaaagaagccattc

SEQ ID NO: 408036 - DNA, 15 bp, Homo sapiens
atgaaagaagccatt

SEQ ID NO: 408037 - DNA, 15 bp, Homo sapiens
aatgaaagaagccat

SEQ ID NO: 408038 - DNA, 15 bp, Homo sapiens
aaatgaaagaagcca

SEQ ID NO: 408039 - DNA, 15 bp, Homo sapiens
taaatgaaagaagcc

SEQ ID NO: 408040 - DNA, 15 bp, Homo sapiens
ctaaatgaaagaagc

SEQ ID NO: 408041 - DNA, 15 bp, Homo sapiens
gctaaatgaaagaag

SEQ ID NO: 408042 - DNA, 15 bp, Homo sapiens
ggctaaatgaaagaa

SEQ ID NO: 408043 - DNA, 15 bp, Homo sapiens
aggctaaatgaaaga

SEQ ID NO: 408044 - DNA, 15 bp, Homo sapiens
taggctaaatgaaag

SEQ ID NO: 408045 - DNA, 15 bp, Homo sapiens
ttaggctaaatgaaa

SEQ ID NO: 408046 - DNA, 15 bp, Homo sapiens
attaggctaaatgaa

SEQ ID NO: 408047 - DNA, 15 bp, Homo sapiens
cattaggctaaatga

SEQ ID NO: 408048 - DNA, 15 bp, Homo sapiens
acattaggctaaatg

SEQ ID NO: 408049 - DNA, 15 bp, Homo sapiens
aacattaggctaaat

SEQ ID NO: 408050 - DNA, 15 bp, Homo sapiens
aaacattaggctaaa

SEQ ID NO: 408051 - DNA, 15 bp, Homo sapiens
aaaacattaggctaa

SEQ ID NO: 408052 - DNA, 15 bp, Homo sapiens
gaaaacattaggcta

SEQ ID NO: 408053 - DNA, 15 bp, Homo sapiens
tgaaaacattaggct

SEQ ID NO: 408054 - DNA, 15 bp, Homo sapiens
ttgaaaacattaggc

SEQ ID NO: 408055 - DNA, 15 bp, Homo sapiens
cttgaaaacattagg

SEQ ID NO: 408056 - DNA, 15 bp, Homo sapiens
ccttgaaaacattag

SEQ ID NO: 408057 - DNA, 15 bp, Homo sapiens
accttgaaaacatta

SEQ ID NO: 408058 - DNA, 15 bp, Homo sapiens
gaccttgaaaacatt

SEQ ID NO: 408059 - DNA, 15 bp, Homo sapiens
ggaccttgaaaacat

SEQ ID NO: 408060 - DNA, 15 bp, Homo sapiens
tggaccttgaaaaca

SEQ ID NO: 408061 - DNA, 15 bp, Homo sapiens
atggaccttgaaaac

SEQ ID NO: 408062 - DNA, 15 bp, Homo sapiens
gatggaccttgaaaa

SEQ ID NO: 408063 - DNA, 15 bp, Homo sapiens
ggatggaccttgaaa

SEQ ID NO: 408064 - DNA, 15 bp, Homo sapiens
tggatggaccttgaa

SEQ ID NO: 408065 - DNA, 15 bp, Homo sapiens
atggatggaccttga

SEQ ID NO: 408066 - DNA, 15 bp, Homo sapiens
aatggatggaccttg

SEQ ID NO: 408067 - DNA, 15 bp, Homo sapiens
aaatggatggacctt

SEQ ID NO: 408068 - DNA, 15 bp, Homo sapiens
aaaatggatggacct

SEQ ID NO: 408069 - DNA, 15 bp, Homo sapiens
caaaatggatggacc

SEQ ID NO: 408070 - DNA, 15 bp, Homo sapiens
acaaaatggatggac

SEQ ID NO: 408071 - DNA, 15 bp, Homo sapiens
tacaaaatggatgga

SEQ ID NO: 408072 - DNA, 15 bp, Homo sapiens
ttacaaaatggatgg

SEQ ID NO: 408073 - DNA, 15 bp, Homo sapiens
gttacaaaatggatg

SEQ ID NO: 408074 - DNA, 15 bp, Homo sapiens
tgttacaaaatggat

SEQ ID NO: 408075 - DNA, 15 bp, Homo sapiens
atgttacaaaatgga

SEQ ID NO: 408076 - DNA, 15 bp, Homo sapiens
catgttacaaaatgg

SEQ ID NO: 408077 - DNA, 15 bp, Homo sapiens
acatgttacaaaatg

SEQ ID NO: 408078 - DNA, 15 bp, Homo sapiens
tacatgttacaaaat

SEQ ID NO: 408079 - DNA, 15 bp, Homo sapiens
atacatgttacaaaa

SEQ ID NO: 408080 - DNA, 15 bp, Homo sapiens
gatacatgttacaaa

SEQ ID NO: 408081 - DNA, 15 bp, Homo sapiens
tgatacatgttacaa

SEQ ID NO: 408082 - DNA, 15 bp, Homo sapiens
ctgatacatgttaca

SEQ ID NO: 408083 - DNA, 15 bp, Homo sapiens
actgatacatgttac

SEQ ID NO: 408084 - DNA, 15 bp, Homo sapiens
cactgatacatgtta

SEQ ID NO: 408085 - DNA, 15 bp, Homo sapiens
gcactgatacatgtt

SEQ ID NO: 408086 - DNA, 15 bp, Homo sapiens
agcactgatacatgt

SEQ ID NO: 408087 - DNA, 15 bp, Homo sapiens
gagcactgatacatg

SEQ ID NO: 408088 - DNA, 15 bp, Homo sapiens
ggagcactgatacat

SEQ ID NO: 408089 - DNA, 15 bp, Homo sapiens
cggagcactgataca

SEQ ID NO: 408090 - DNA, 15 bp, Homo sapiens
acggagcactgatac

SEQ ID NO: 408091 - DNA, 15 bp, Homo sapiens
aacggagcactgata

SEQ ID NO: 408092 - DNA, 15 bp, Homo sapiens
caacggagcactgat

SEQ ID NO: 408093 - DNA, 15 bp, Homo sapiens
gcaacggagcactga

SEQ ID NO: 408094 - DNA, 15 bp, Homo sapiens
agcaacggagcactg

SEQ ID NO: 408095 - DNA, 15 bp, Homo sapiens
tagcaacggagcact

SEQ ID NO: 408096 - DNA, 15 bp, Homo sapiens
atagcaacggagcac

SEQ ID NO: 408097 - DNA, 15 bp, Homo sapiens
aatagcaacggagca

SEQ ID NO: 408098 - DNA, 15 bp, Homo sapiens
taatagcaacggagc

SEQ ID NO: 408099 - DNA, 15 bp, Homo sapiens
gtaatagcaacggag

SEQ ID NO: 408100 - DNA, 15 bp, Homo sapiens
agtaatagcaacgga

SEQ ID NO: 408101 - DNA, 15 bp, Homo sapiens
tagtaatagcaacgg

SEQ ID NO: 408102 - DNA, 15 bp, Homo sapiens
atagtaatagcaacg

SEQ ID NO: 408103 - DNA, 15 bp, Homo sapiens
aatagtaatagcaac

SEQ ID NO: 408104 - DNA, 15 bp, Homo sapiens
taatagtaatagcaa

SEQ ID NO: 408105 - DNA, 15 bp, Homo sapiens
ataatagtaatagca

SEQ ID NO: 408106 - DNA, 15 bp, Homo sapiens
aataatagtaatagc

SEQ ID NO: 408107 - DNA, 15 bp, Homo sapiens
aaataatagtaatag

SEQ ID NO: 408108 - DNA, 15 bp, Homo sapiens
aaaataatagtaata

SEQ ID NO: 408109 - DNA, 15 bp, Homo sapiens
taaaataatagtaat

SEQ ID NO: 408110 - DNA, 15 bp, Homo sapiens
ataaaataatagtaa

SEQ ID NO: 408111 - DNA, 15 bp, Homo sapiens
aataaaataatagta

SEQ ID NO: 408112 - DNA, 15 bp, Homo sapiens
taataaaataatagt

SEQ ID NO: 408113 - DNA, 15 bp, Homo sapiens
ataataaaataatag

SEQ ID NO: 408114 - DNA, 15 bp, Homo sapiens
tataataaaataata

SEQ ID NO: 408115 - DNA, 15 bp, Homo sapiens
atataataaaataat

SEQ ID NO: 408116 - DNA, 15 bp, Homo sapiens
catataataaaataa

SEQ ID NO: 408117 - DNA, 15 bp, Homo sapiens
ccatataataaaata

SEQ ID NO: 408118 - DNA, 15 bp, Homo sapiens
tccatataataaaat

SEQ ID NO: 408119 - DNA, 15 bp, Homo sapiens
atccatataataaaa

SEQ ID NO: 408120 - DNA, 15 bp, Homo sapiens
tatccatataataaa

SEQ ID NO: 408121 - DNA, 15 bp, Homo sapiens
atatccatataataa

SEQ ID NO: 408122 - DNA, 15 bp, Homo sapiens
tatatccatataata

SEQ ID NO: 408123 - DNA, 15 bp, Homo sapiens
gtatatccatataat

SEQ ID NO: 408124 - DNA, 15 bp, Homo sapiens
ggtatatccatataa

SEQ ID NO: 408125 - DNA, 15 bp, Homo sapiens
tggtatatccatata

SEQ ID NO: 408126 - DNA, 15 bp, Homo sapiens
atggtatatccatat

SEQ ID NO: 408127 - DNA, 15 bp, Homo sapiens
catggtatatccata

SEQ ID NO: 408128 - DNA, 15 bp, Homo sapiens
acatggtatatccat

SEQ ID NO: 408129 - DNA, 15 bp, Homo sapiens
aacatggtatatcca

SEQ ID NO: 408130 - DNA, 15 bp, Homo sapiens
aaacatggtatatcc

SEQ ID NO: 408131 - DNA, 15 bp, Homo sapiens
aaaacatggtatatc

SEQ ID NO: 408132 - DNA, 15 bp, Homo sapiens
taaaacatggtatat

SEQ ID NO: 408133 - DNA, 15 bp, Homo sapiens
ataaaacatggtata

SEQ ID NO: 408134 - DNA, 15 bp, Homo sapiens
aataaaacatggtat

SEQ ID NO: 408135 - DNA, 15 bp, Homo sapiens
aaataaaacatggta

SEQ ID NO: 408136 - DNA, 15 bp, Homo sapiens
taaataaaacatggt

SEQ ID NO: 408137 - DNA, 15 bp, Homo sapiens
ataaataaaacatgg

SEQ ID NO: 408138 - DNA, 15 bp, Homo sapiens
gataaataaaacatg

SEQ ID NO: 408139 - DNA, 15 bp, Homo sapiens
ggataaataaaacat

SEQ ID NO: 408140 - DNA, 15 bp, Homo sapiens
gggataaataaaaca

SEQ ID NO: 408141 - DNA, 15 bp, Homo sapiens
agggataaataaaac

SEQ ID NO: 408142 - DNA, 15 bp, Homo sapiens
aagggataaataaaa

SEQ ID NO: 408143 - DNA, 15 bp, Homo sapiens
gaagggataaataaa

SEQ ID NO: 408144 - DNA, 15 bp, Homo sapiens
agaagggataaataa

SEQ ID NO: 408145 - DNA, 15 bp, Homo sapiens
aagaagggataaata

SEQ ID NO: 408146 - DNA, 15 bp, Homo sapiens
gaagaagggataaat

SEQ ID NO: 408147 - DNA, 15 bp, Homo sapiens
tgaagaagggataaa

SEQ ID NO: 408148 - DNA, 15 bp, Homo sapiens
gtgaagaagggataa

SEQ ID NO: 408149 - DNA, 15 bp, Homo sapiens
agtgaagaagggata

SEQ ID NO: 408150 - DNA, 15 bp, Homo sapiens
aagtgaagaagggat

SEQ ID NO: 408151 - DNA, 15 bp, Homo sapiens
caagtgaagaaggga

SEQ ID NO: 408152 - DNA, 15 bp, Homo sapiens
ccaagtgaagaaggg

SEQ ID NO: 408153 - DNA, 15 bp, Homo sapiens
accaagtgaagaagg

SEQ ID NO: 408154 - DNA, 15 bp, Homo sapiens
caccaagtgaagaag

SEQ ID NO: 408155 - DNA, 15 bp, Homo sapiens
tcaccaagtgaagaa

SEQ ID NO: 408156 - DNA, 15 bp, Homo sapiens
ttcaccaagtgaaga

SEQ ID NO: 408157 - DNA, 15 bp, Homo sapiens
gttcaccaagtgaag

SEQ ID NO: 408158 - DNA, 15 bp, Homo sapiens
tgttcaccaagtgaa

SEQ ID NO: 408159 - DNA, 15 bp, Homo sapiens
atgttcaccaagtga

SEQ ID NO: 408160 - DNA, 15 bp, Homo sapiens
aatgttcaccaagtg

SEQ ID NO: 408161 - DNA, 15 bp, Homo sapiens
aaatgttcaccaagt

SEQ ID NO: 408162 - DNA, 15 bp, Homo sapiens
caaatgttcaccaag

SEQ ID NO: 408163 - DNA, 15 bp, Homo sapiens
ccaaatgttcaccaa

SEQ ID NO: 408164 - DNA, 15 bp, Homo sapiens
cccaaatgttcacca

SEQ ID NO: 408165 - DNA, 15 bp, Homo sapiens
acccaaatgttcacc

SEQ ID NO: 408166 - DNA, 15 bp, Homo sapiens
aacccaaatgttcac

SEQ ID NO: 408167 - DNA, 15 bp, Homo sapiens
caacccaaatgttca

SEQ ID NO: 408168 - DNA, 15 bp, Homo sapiens
acaacccaaatgttc

SEQ ID NO: 408169 - DNA, 15 bp, Homo sapiens
aacaacccaaatgtt

SEQ ID NO: 408170 - DNA, 15 bp, Homo sapiens
aaacaacccaaatgt

SEQ ID NO: 408171 - DNA, 15 bp, Homo sapiens
gaaacaacccaaatg

SEQ ID NO: 408172 - DNA, 15 bp, Homo sapiens
agaaacaacccaaat

SEQ ID NO: 408173 - DNA, 15 bp, Homo sapiens
tagaaacaacccaaa

SEQ ID NO: 408174 - DNA, 15 bp, Homo sapiens
gtagaaacaacccaa

SEQ ID NO: 408175 - DNA, 15 bp, Homo sapiens
agtagaaacaaccca

SEQ ID NO: 408176 - DNA, 15 bp, Homo sapiens
aagtagaaacaaccc

SEQ ID NO: 408177 - DNA, 15 bp, Homo sapiens
aaagtagaaacaacc

SEQ ID NO: 408178 - DNA, 15 bp, Homo sapiens
aaaagtagaaacaac

SEQ ID NO: 408179 - DNA, 15 bp, Homo sapiens
aaaaagtagaaacaa

SEQ ID NO: 408180 - DNA, 15 bp, Homo sapiens
caaaaagtagaaaca

SEQ ID NO: 408181 - DNA, 15 bp, Homo sapiens
ccaaaaagtagaaac

SEQ ID NO: 408182 - DNA, 15 bp, Homo sapiens
cccaaaaagtagaaa

SEQ ID NO: 408183 - DNA, 15 bp, Homo sapiens
gcccaaaaagtagaa

SEQ ID NO: 408184 - DNA, 15 bp, Homo sapiens
agcccaaaaagtaga

SEQ ID NO: 408185 - DNA, 15 bp, Homo sapiens
aagcccaaaaagtag

SEQ ID NO: 408186 - DNA, 15 bp, Homo sapiens
taagcccaaaaagta

SEQ ID NO: 408187 - DNA, 15 bp, Homo sapiens
ataagcccaaaaagt

SEQ ID NO: 408188 - DNA, 15 bp, Homo sapiens
cataagcccaaaaag

SEQ ID NO: 408189 - DNA, 15 bp, Homo sapiens
tcataagcccaaaaa

SEQ ID NO: 408190 - DNA, 15 bp, Homo sapiens
ttcataagcccaaaa

SEQ ID NO: 408191 - DNA, 15 bp, Homo sapiens
gttcataagcccaaa

SEQ ID NO: 408192 - DNA, 15 bp, Homo sapiens
cgttcataagcccaa

SEQ ID NO: 408193 - DNA, 15 bp, Homo sapiens
tcgttcataagccca

SEQ ID NO: 408194 - DNA, 15 bp, Homo sapiens
atcgttcataagccc

SEQ ID NO: 408195 - DNA, 15 bp, Homo sapiens
tatcgttcataagcc

SEQ ID NO: 408196 - DNA, 15 bp, Homo sapiens
gtatcgttcataagc

SEQ ID NO: 408197 - DNA, 15 bp, Homo sapiens
agtatcgttcataag

SEQ ID NO: 408198 - DNA, 15 bp, Homo sapiens
aagtatcgttcataa

SEQ ID NO: 408199 - DNA, 15 bp, Homo sapiens
gaagtatcgttcata

SEQ ID NO: 408200 - DNA, 15 bp, Homo sapiens
agaagtatcgttcat

SEQ ID NO: 408201 - DNA, 15 bp, Homo sapiens
gagaagtatcgttca

SEQ ID NO: 408202 - DNA, 15 bp, Homo sapiens
agagaagtatcgttc

SEQ ID NO: 408203 - DNA, 15 bp, Homo sapiens
cagagaagtatcgtt

SEQ ID NO: 408204 - DNA, 15 bp, Homo sapiens
tcagagaagtatcgt

SEQ ID NO: 408205 - DNA, 15 bp, Homo sapiens
ttcagagaagtatcg

SEQ ID NO: 408206 - DNA, 15 bp, Homo sapiens
gttcagagaagtatc

SEQ ID NO: 408207 - DNA, 15 bp, Homo sapiens
tgttcagagaagtat

SEQ ID NO: 408208 - DNA, 15 bp, Homo sapiens
atgttcagagaagta

SEQ ID NO: 408209 - DNA, 15 bp, Homo sapiens
aatgttcagagaagt

SEQ ID NO: 408210 - DNA, 15 bp, Homo sapiens
aaatgttcagagaag

SEQ ID NO: 408211 - DNA, 15 bp, Homo sapiens
aaaatgttcagagaa

SEQ ID NO: 408212 - DNA, 15 bp, Homo sapiens
aaaaatgttcagaga

SEQ ID NO: 408213 - DNA, 15 bp, Homo sapiens
taaaaatgttcagag

SEQ ID NO: 408214 - DNA, 15 bp, Homo sapiens
ataaaaatgttcaga

SEQ ID NO: 408215 - DNA, 15 bp, Homo sapiens
tataaaaatgttcag

SEQ ID NO: 408216 - DNA, 15 bp, Homo sapiens
gtataaaaatgttca

SEQ ID NO: 408217 - DNA, 15 bp, Homo sapiens
tgtataaaaatgttc

SEQ ID NO: 408218 - DNA, 15 bp, Homo sapiens
ttgtataaaaatgtt

SEQ ID NO: 408219 - DNA, 15 bp, Homo sapiens
cttgtataaaaatgt

SEQ ID NO: 408220 - DNA, 15 bp, Homo sapiens
acttgtataaaaatg

SEQ ID NO: 408221 - DNA, 15 bp, Homo sapiens
aacttgtataaaaat

SEQ ID NO: 408222 - DNA, 15 bp, Homo sapiens
aaacttgtataaaaa

SEQ ID NO: 408223 - DNA, 15 bp, Homo sapiens
aaaacttgtataaaa

SEQ ID NO: 408224 - DNA, 15 bp, Homo sapiens
aaaaacttgtataaa

SEQ ID NO: 408225 - DNA, 15 bp, Homo sapiens
caaaaacttgtataa

SEQ ID NO: 408226 - DNA, 15 bp, Homo sapiens
gcaaaaacttgtata

SEQ ID NO: 408227 - DNA, 15 bp, Homo sapiens
tgcaaaaacttgtat

SEQ ID NO: 408228 - DNA, 15 bp, Homo sapiens
atgcaaaaacttgta

SEQ ID NO: 408229 - DNA, 15 bp, Homo sapiens
catgcaaaaacttgt

SEQ ID NO: 408230 - DNA, 15 bp, Homo sapiens
ccatgcaaaaacttg

SEQ ID NO: 408231 - DNA, 15 bp, Homo sapiens
tccatgcaaaaactt

SEQ ID NO: 408232 - DNA, 15 bp, Homo sapiens
gtccatgcaaaaact

SEQ ID NO: 408233 - DNA, 15 bp, Homo sapiens
tgtccatgcaaaaac

SEQ ID NO: 408234 - DNA, 15 bp, Homo sapiens
atgtccatgcaaaaa

SEQ ID NO: 408235 - DNA, 15 bp, Homo sapiens
catgtccatgcaaaa

SEQ ID NO: 408236 - DNA, 15 bp, Homo sapiens
acatgtccatgcaaa

SEQ ID NO: 408237 - DNA, 15 bp, Homo sapiens
cacatgtccatgcaa

SEQ ID NO: 408238 - DNA, 15 bp, Homo sapiens
acacatgtccatgca

SEQ ID NO: 408239 - DNA, 15 bp, Homo sapiens
aacacatgtccatgc

SEQ ID NO: 408240 - DNA, 15 bp, Homo sapiens
aaacacatgtccatg

SEQ ID NO: 408241 - DNA, 15 bp, Homo sapiens
aaaacacatgtccat

SEQ ID NO: 408242 - DNA, 15 bp, Homo sapiens
gaaaacacatgtcca

SEQ ID NO: 408243 - DNA, 15 bp, Homo sapiens
tgaaaacacatgtcc

SEQ ID NO: 408244 - DNA, 15 bp, Homo sapiens
ttgaaaacacatgtc

SEQ ID NO: 408245 - DNA, 15 bp, Homo sapiens
attgaaaacacatgt

SEQ ID NO: 408246 - DNA, 15 bp, Homo sapiens
gattgaaaacacatg

SEQ ID NO: 408247 - DNA, 15 bp, Homo sapiens
ggattgaaaacacat

SEQ ID NO: 408248 - DNA, 15 bp, Homo sapiens
aggattgaaaacaca

SEQ ID NO: 408249 - DNA, 15 bp, Homo sapiens
aaggattgaaaacac

SEQ ID NO: 408250 - DNA, 15 bp, Homo sapiens
caaggattgaaaaca

SEQ ID NO: 408251 - DNA, 15 bp, Homo sapiens
acaaggattgaaaac

SEQ ID NO: 408252 - DNA, 15 bp, Homo sapiens
cacaaggattgaaaa

SEQ ID NO: 408253 - DNA, 15 bp, Homo sapiens
tcacaaggattgaaa

SEQ ID NO: 408254 - DNA, 15 bp, Homo sapiens
ctcacaaggattgaa

SEQ ID NO: 408255 - DNA, 15 bp, Homo sapiens
gctcacaaggattga

SEQ ID NO: 408256 - DNA, 15 bp, Homo sapiens
cgctcacaaggattg

SEQ ID NO: 408257 - DNA, 15 bp, Homo sapiens
acgctcacaaggatt

SEQ ID NO: 408258 - DNA, 15 bp, Homo sapiens
tacgctcacaaggat

SEQ ID NO: 408259 - DNA, 15 bp, Homo sapiens
atacgctcacaagga

SEQ ID NO: 408260 - DNA, 15 bp, Homo sapiens
tatacgctcacaagg

SEQ ID NO: 408261 - DNA, 15 bp, Homo sapiens
gtatacgctcacaag

SEQ ID NO: 408262 - DNA, 15 bp, Homo sapiens
ggtatacgctcacaa

SEQ ID NO: 408263 - DNA, 15 bp, Homo sapiens
aggtatacgctcaca

SEQ ID NO: 408264 - DNA, 15 bp, Homo sapiens
taggtatacgctcac

SEQ ID NO: 408265 - DNA, 15 bp, Homo sapiens
ctaggtatacgctca

SEQ ID NO: 408266 - DNA, 15 bp, Homo sapiens
actaggtatacgctc

SEQ ID NO: 408267 - DNA, 15 bp, Homo sapiens
tactaggtatacgct

SEQ ID NO: 408268 - DNA, 15 bp, Homo sapiens
ctactaggtatacgc

SEQ ID NO: 408269 - DNA, 15 bp, Homo sapiens
actactaggtatacg

SEQ ID NO: 408270 - DNA, 15 bp, Homo sapiens
tactactaggtatac

SEQ ID NO: 408271 - DNA, 15 bp, Homo sapiens
ctactactaggtata

SEQ ID NO: 408272 - DNA, 15 bp, Homo sapiens
tctactactaggtat

SEQ ID NO: 408273 - DNA, 15 bp, Homo sapiens
ttctactactaggta

SEQ ID NO: 408274 - DNA, 15 bp, Homo sapiens
attctactactaggt

SEQ ID NO: 408275 - DNA, 15 bp, Homo sapiens
aattctactactagg

SEQ ID NO: 408276 - DNA, 15 bp, Homo sapiens
caattctactactag

SEQ ID NO: 408277 - DNA, 15 bp, Homo sapiens
gcaattctactacta

SEQ ID NO: 408278 - DNA, 15 bp, Homo sapiens
agcaattctactact

SEQ ID NO: 408279 - DNA, 15 bp, Homo sapiens
cagcaattctactac

SEQ ID NO: 408280 - DNA, 15 bp, Homo sapiens
ccagcaattctacta

SEQ ID NO: 408281 - DNA, 15 bp, Homo sapiens
tccagcaattctact

SEQ ID NO: 408282 - DNA, 15 bp, Homo sapiens
atccagcaattctac

SEQ ID NO: 408283 - DNA, 15 bp, Homo sapiens
gatccagcaattcta

SEQ ID NO: 408284 - DNA, 15 bp, Homo sapiens
tgatccagcaattct

SEQ ID NO: 408285 - DNA, 15 bp, Homo sapiens
atgatccagcaattc

SEQ ID NO: 408286 - DNA, 15 bp, Homo sapiens
catgatccagcaatt

SEQ ID NO: 408287 - DNA, 15 bp, Homo sapiens
acatgatccagcaat

SEQ ID NO: 408288 - DNA, 15 bp, Homo sapiens
cacatgatccagcaa

SEQ ID NO: 408289 - DNA, 15 bp, Homo sapiens
tcacatgatccagca

SEQ ID NO: 408290 - DNA, 15 bp, Homo sapiens
atcacatgatccagc

SEQ ID NO: 408291 - DNA, 15 bp, Homo sapiens
tatcacatgatccag

SEQ ID NO: 408292 - DNA, 15 bp, Homo sapiens
ttatcacatgatcca

SEQ ID NO: 408293 - DNA, 15 bp, Homo sapiens
gttatcacatgatcc

SEQ ID NO: 408294 - DNA, 15 bp, Homo sapiens
agttatcacatgatc

SEQ ID NO: 408295 - DNA, 15 bp, Homo sapiens
gagttatcacatgat

SEQ ID NO: 408296 - DNA, 15 bp, Homo sapiens
agagttatcacatga

SEQ ID NO: 408297 - DNA, 15 bp, Homo sapiens
tagagttatcacatg

SEQ ID NO: 408298 - DNA, 15 bp, Homo sapiens
atagagttatcacat

SEQ ID NO: 408299 - DNA, 15 bp, Homo sapiens
gatagagttatcaca

SEQ ID NO: 408300 - DNA, 15 bp, Homo sapiens
tgatagagttatcac

SEQ ID NO: 408301 - DNA, 15 bp, Homo sapiens
atgatagagttatca

SEQ ID NO: 408302 - DNA, 15 bp, Homo sapiens
aatgatagagttatc

SEQ ID NO: 408303 - DNA, 15 bp, Homo sapiens
aaatgatagagttat

SEQ ID NO: 408304 - DNA, 15 bp, Homo sapiens
taaatgatagagtta

SEQ ID NO: 408305 - DNA, 15 bp, Homo sapiens
gtaaatgatagagtt

SEQ ID NO: 408306 - DNA, 15 bp, Homo sapiens
tgtaaatgatagagt

SEQ ID NO: 408307 - DNA, 15 bp, Homo sapiens
atgtaaatgatagag

SEQ ID NO: 408308 - DNA, 15 bp, Homo sapiens
aatgtaaatgataga

SEQ ID NO: 408309 - DNA, 15 bp, Homo sapiens
aaatgtaaatgatag

SEQ ID NO: 408310 - DNA, 15 bp, Homo sapiens
aaaatgtaaatgata

SEQ ID NO: 408311 - DNA, 15 bp, Homo sapiens
caaaatgtaaatgat

SEQ ID NO: 408312 - DNA, 15 bp, Homo sapiens
tcaaaatgtaaatga

SEQ ID NO: 408313 - DNA, 15 bp, Homo sapiens
ttcaaaatgtaaatg

SEQ ID NO: 408314 - DNA, 15 bp, Homo sapiens
cttcaaaatgtaaat

SEQ ID NO: 408315 - DNA, 15 bp, Homo sapiens
tcttcaaaatgtaaa

SEQ ID NO: 408316 - DNA, 15 bp, Homo sapiens
ttcttcaaaatgtaa

SEQ ID NO: 408317 - DNA, 15 bp, Homo sapiens
gttcttcaaaatgta

SEQ ID NO: 408318 - DNA, 15 bp, Homo sapiens
agttcttcaaaatgt

SEQ ID NO: 408319 - DNA, 15 bp, Homo sapiens
cagttcttcaaaatg

SEQ ID NO: 408320 - DNA, 15 bp, Homo sapiens
gcagttcttcaaaat

SEQ ID NO: 408321 - DNA, 15 bp, Homo sapiens
agcagttcttcaaaa

SEQ ID NO: 408322 - DNA, 15 bp, Homo sapiens
cagcagttcttcaaa

SEQ ID NO: 408323 - DNA, 15 bp, Homo sapiens
tcagcagttcttcaa

SEQ ID NO: 408324 - DNA, 15 bp, Homo sapiens
ttcagcagttcttca

SEQ ID NO: 408325 - DNA, 15 bp, Homo sapiens
gttcagcagttcttc

SEQ ID NO: 408326 - DNA, 15 bp, Homo sapiens
agttcagcagttctt

SEQ ID NO: 408327 - DNA, 15 bp, Homo sapiens
cagttcagcagttct

SEQ ID NO: 408328 - DNA, 15 bp, Homo sapiens
acagttcagcagttc

SEQ ID NO: 408329 - DNA, 15 bp, Homo sapiens
aacagttcagcagtt

SEQ ID NO: 408330 - DNA, 15 bp, Homo sapiens
aaacagttcagcagt

SEQ ID NO: 408331 - DNA, 15 bp, Homo sapiens
aaaacagttcagcag

SEQ ID NO: 408332 - DNA, 15 bp, Homo sapiens
gaaaacagttcagca

SEQ ID NO: 408333 - DNA, 15 bp, Homo sapiens
ggaaaacagttcagc

SEQ ID NO: 408334 - DNA, 15 bp, Homo sapiens
tggaaaacagttcag

SEQ ID NO: 408335 - DNA, 15 bp, Homo sapiens
ttggaaaacagttca

SEQ ID NO: 408336 - DNA, 15 bp, Homo sapiens
tttggaaaacagttc

SEQ ID NO: 408337 - DNA, 15 bp, Homo sapiens
ctttggaaaacagtt

SEQ ID NO: 408338 - DNA, 15 bp, Homo sapiens
actttggaaaacagt

SEQ ID NO: 408339 - DNA, 15 bp, Homo sapiens
cactttggaaaacag

SEQ ID NO: 408340 - DNA, 15 bp, Homo sapiens
ccactttggaaaaca

SEQ ID NO: 408341 - DNA, 15 bp, Homo sapiens
gccactttggaaaac

SEQ ID NO: 408342 - DNA, 15 bp, Homo sapiens
tgccactttggaaaa

SEQ ID NO: 408343 - DNA, 15 bp, Homo sapiens
gtgccactttggaaa

SEQ ID NO: 408344 - DNA, 15 bp, Homo sapiens
tgtgccactttggaa

SEQ ID NO: 408345 - DNA, 15 bp, Homo sapiens
ttgtgccactttgga

SEQ ID NO: 408346 - DNA, 15 bp, Homo sapiens
attgtgccactttgg

SEQ ID NO: 408347 - DNA, 15 bp, Homo sapiens
cattgtgccactttg

SEQ ID NO: 408348 - DNA, 15 bp, Homo sapiens
tcattgtgccacttt

SEQ ID NO: 408349 - DNA, 15 bp, Homo sapiens
gtcattgtgccactt

SEQ ID NO: 408350 - DNA, 15 bp, Homo sapiens
agtcattgtgccact

SEQ ID NO: 408351 - DNA, 15 bp, Homo sapiens
tagtcattgtgccac

SEQ ID NO: 408352 - DNA, 15 bp, Homo sapiens
ttagtcattgtgcca

SEQ ID NO: 408353 - DNA, 15 bp, Homo sapiens
cttagtcattgtgcc

SEQ ID NO: 408354 - DNA, 15 bp, Homo sapiens
tcttagtcattgtgc

SEQ ID NO: 408355 - DNA, 15 bp, Homo sapiens
ttcttagtcattgtg

SEQ ID NO: 408356 - DNA, 15 bp, Homo sapiens
tttcttagtcattgt

SEQ ID NO: 408357 - DNA, 15 bp, Homo sapiens
ttttcttagtcattg

SEQ ID NO: 408358 - DNA, 15 bp, Homo sapiens
gttttcttagtcatt

SEQ ID NO: 408359 - DNA, 15 bp, Homo sapiens
ggttttcttagtcat

SEQ ID NO: 408360 - DNA, 15 bp, Homo sapiens
tggttttcttagtca

SEQ ID NO: 408361 - DNA, 15 bp, Homo sapiens
ctggttttcttagtc

SEQ ID NO: 408362 - DNA, 15 bp, Homo sapiens
tctggttttcttagt

SEQ ID NO: 408363 - DNA, 15 bp, Homo sapiens
ctctggttttcttag

SEQ ID NO: 408364 - DNA, 15 bp, Homo sapiens
gctctggttttctta

SEQ ID NO: 408365 - DNA, 15 bp, Homo sapiens
agctctggttttctt

SEQ ID NO: 408366 - DNA, 15 bp, Homo sapiens
aagctctggttttct

SEQ ID NO: 408367 - DNA, 15 bp, Homo sapiens
caagctctggttttc

SEQ ID NO: 408368 - DNA, 15 bp, Homo sapiens
tcaagctctggtttt

SEQ ID NO: 408369 - DNA, 15 bp, Homo sapiens
gtcaagctctggttt

SEQ ID NO: 408370 - DNA, 15 bp, Homo sapiens
tgtcaagctctggtt

SEQ ID NO: 408371 - DNA, 15 bp, Homo sapiens
ctgtcaagctctggt

SEQ ID NO: 408372 - DNA, 15 bp, Homo sapiens
gctgtcaagctctgg

SEQ ID NO: 408373 - DNA, 15 bp, Homo sapiens
tgctgtcaagctctg

SEQ ID NO: 408374 - DNA, 15 bp, Homo sapiens
atgctgtcaagctct

SEQ ID NO: 408375 - DNA, 15 bp, Homo sapiens
aatgctgtcaagctc

SEQ ID NO: 408376 - DNA, 15 bp, Homo sapiens
aaatgctgtcaagct

SEQ ID NO: 408377 - DNA, 15 bp, Homo sapiens
taaatgctgtcaagc

SEQ ID NO: 408378 - DNA, 15 bp, Homo sapiens
ttaaatgctgtcaag

SEQ ID NO: 408379 - DNA, 15 bp, Homo sapiens
tttaaatgctgtcaa

SEQ ID NO: 408380 - DNA, 15 bp, Homo sapiens
ctttaaatgctgtca

SEQ ID NO: 408381 - DNA, 15 bp, Homo sapiens
actttaaatgctgtc

SEQ ID NO: 408382 - DNA, 15 bp, Homo sapiens
tactttaaatgctgt

SEQ ID NO: 408383 - DNA, 15 bp, Homo sapiens
ctactttaaatgctg

SEQ ID NO: 408384 - DNA, 15 bp, Homo sapiens
actactttaaatgct

SEQ ID NO: 408385 - DNA, 15 bp, Homo sapiens
tactactttaaatgc

SEQ ID NO: 408386 - DNA, 15 bp, Homo sapiens
ttactactttaaatg

SEQ ID NO: 408387 - DNA, 15 bp, Homo sapiens
tttactactttaaat

SEQ ID NO: 408388 - DNA, 15 bp, Homo sapiens
ttttactactttaaa

SEQ ID NO: 408389 - DNA, 15 bp, Homo sapiens
cttttactactttaa

SEQ ID NO: 408390 - DNA, 15 bp, Homo sapiens
gcttttactacttta

SEQ ID NO: 408391 - DNA, 15 bp, Homo sapiens
tgcttttactacttt

SEQ ID NO: 408392 - DNA, 15 bp, Homo sapiens
ctgcttttactactt

SEQ ID NO: 408393 - DNA, 15 bp, Homo sapiens
tctgcttttactact

SEQ ID NO: 408394 - DNA, 15 bp, Homo sapiens
atctgcttttactac

SEQ ID NO: 408395 - DNA, 15 bp, Homo sapiens
aatctgcttttacta

SEQ ID NO: 408396 - DNA, 15 bp, Homo sapiens
aaatctgcttttact

SEQ ID NO: 408397 - DNA, 15 bp, Homo sapiens
taaaatctgctttta

SEQ ID NO: 408398 - DNA, 15 bp, Homo sapiens
ataaaatctgctttt

SEQ ID NO: 408399 - DNA, 15 bp, Homo sapiens
aataaaatctgcttt

SEQ ID NO: 408400 - DNA, 15 bp, Homo sapiens
gaataaaatctgctt

SEQ ID NO: 408401 - DNA, 15 bp, Homo sapiens
tgaataaaatctgct

SEQ ID NO: 408402 - DNA, 15 bp, Homo sapiens
ctgaataaaatctgc

SEQ ID NO: 408403 - DNA, 15 bp, Homo sapiens
cctgaataaaatctg

SEQ ID NO: 408404 - DNA, 15 bp, Homo sapiens
tcctgaataaaatct

SEQ ID NO: 408405 - DNA, 15 bp, Homo sapiens
gtcctgaataaaatc

SEQ ID NO: 408406 - DNA, 15 bp, Homo sapiens
agtcctgaataaaat

SEQ ID NO: 408407 - DNA, 15 bp, Homo sapiens
tagtcctgaataaaa

SEQ ID NO: 408408 - DNA, 15 bp, Homo sapiens
atagtcctgaataaa

SEQ ID NO: 408409 - DNA, 15 bp, Homo sapiens
aatagtcctgaataa

SEQ ID NO: 408410 - DNA, 15 bp, Homo sapiens
caatagtcctgaata

SEQ ID NO: 408411 - DNA, 15 bp, Homo sapiens
gcaatagtcctgaat

SEQ ID NO: 408412 - DNA, 15 bp, Homo sapiens
tgcaatagtcctgaa

SEQ ID NO: 408413 - DNA, 15 bp, Homo sapiens
ctgcaatagtcctga

SEQ ID NO: 408414 - DNA, 15 bp, Homo sapiens
cctgcaatagtcctg

SEQ ID NO: 408415 - DNA, 15 bp, Homo sapiens
tcctgcaatagtcct

SEQ ID NO: 408416 - DNA, 15 bp, Homo sapiens
ctcctgcaatagtcc

SEQ ID NO: 408417 - DNA, 15 bp, Homo sapiens
cctcctgcaatagtc

SEQ ID NO: 408418 - DNA, 15 bp, Homo sapiens
ccctcctgcaatagt

SEQ ID NO: 408419 - DNA, 15 bp, Homo sapiens
cccctcctgcaatag

SEQ ID NO: 408420 - DNA, 15 bp, Homo sapiens
tcccctcctgcaata

SEQ ID NO: 408421 - DNA, 15 bp, Homo sapiens
ttcccctcctgcaat

SEQ ID NO: 408422 - DNA, 15 bp, Homo sapiens
tttcccctcctgcaa

SEQ ID NO: 408423 - DNA, 15 bp, Homo sapiens
ttttcccctcctgca

SEQ ID NO: 408424 - DNA, 15 bp, Homo sapiens
cttttcccctcctgc

SEQ ID NO: 408425 - DNA, 15 bp, Homo sapiens
tcttttcccctcctg

SEQ ID NO: 408426 - DNA, 15 bp, Homo sapiens
ctcttttcccctcct

SEQ ID NO: 408427 - DNA, 15 bp, Homo sapiens
tctcttttcccctcc

SEQ ID NO: 408428 - DNA, 15 bp, Homo sapiens
gtctcttttcccctc

SEQ ID NO: 408429 - DNA, 15 bp, Homo sapiens
ggtctcttttcccct

SEQ ID NO: 408430 - DNA, 15 bp, Homo sapiens
gggtctcttttcccc

SEQ ID NO: 408431 - DNA, 15 bp, Homo sapiens
ggggtctcttttccc

SEQ ID NO: 408432 - DNA, 15 bp, Homo sapiens
tggggtctcttttcc

SEQ ID NO: 408433 - DNA, 15 bp, Homo sapiens
ctggggtctcttttc

SEQ ID NO: 408434 - DNA, 15 bp, Homo sapiens
actggggtctctttt

SEQ ID NO: 408435 - DNA, 15 bp, Homo sapiens
tactggggtctcttt

SEQ ID NO: 408436 - DNA, 15 bp, Homo sapiens
atactggggtctctt

SEQ ID NO: 408437 - DNA, 15 bp, Homo sapiens
tatactggggtctct

SEQ ID NO: 408438 - DNA, 15 bp, Homo sapiens
ctatactggggtctc

SEQ ID NO: 408439 - DNA, 15 bp, Homo sapiens
tctatactggggtct

SEQ ID NO: 408440 - DNA, 15 bp, Homo sapiens
ttctatactggggtc

SEQ ID NO: 408441 - DNA, 15 bp, Homo sapiens
gttctatactggggt

SEQ ID NO: 408442 - DNA, 15 bp, Homo sapiens
agttctatactgggg

SEQ ID NO: 408443 - DNA, 15 bp, Homo sapiens
cagttctatactggg

SEQ ID NO: 408444 - DNA, 15 bp, Homo sapiens
tcagttctatactgg

SEQ ID NO: 408445 - DNA, 15 bp, Homo sapiens
ctcagttctatactg

SEQ ID NO: 408446 - DNA, 15 bp, Homo sapiens
gctcagttctatact

SEQ ID NO: 408447 - DNA, 15 bp, Homo sapiens
agctcagttctatac

SEQ ID NO: 408448 - DNA, 15 bp, Homo sapiens
aagctcagttctata

SEQ ID NO: 408449 - DNA, 15 bp, Homo sapiens
caagctcagttctat

SEQ ID NO: 408450 - DNA, 15 bp, Homo sapiens
ccaagctcagttcta

SEQ ID NO: 408451 - DNA, 15 bp, Homo sapiens
accaagctcagttct

SEQ ID NO: 408452 - DNA, 15 bp, Homo sapiens
aaccaagctcagttc

SEQ ID NO: 408453 - DNA, 15 bp, Homo sapiens
gaaccaagctcagtt

SEQ ID NO: 408454 - DNA, 15 bp, Homo sapiens
agaaccaagctcagt

SEQ ID NO: 408455 - DNA, 15 bp, Homo sapiens
cagaaccaagctcag

SEQ ID NO: 408456 - DNA, 15 bp, Homo sapiens
tcagaaccaagctca

SEQ ID NO: 408457 - DNA, 15 bp, Homo sapiens
ctcagaaccaagctc

SEQ ID NO: 408458 - DNA, 15 bp, Homo sapiens
actcagaaccaagct

SEQ ID NO: 408459 - DNA, 15 bp, Homo sapiens
tactcagaaccaagc

SEQ ID NO: 408460 - DNA, 15 bp, Homo sapiens
gtactcagaaccaag

SEQ ID NO: 408461 - DNA, 15 bp, Homo sapiens
tgtactcagaaccaa

SEQ ID NO: 408462 - DNA, 15 bp, Homo sapiens
ttgtactcagaacca

SEQ ID NO: 408463 - DNA, 15 bp, Homo sapiens
cttgtactcagaacc

SEQ ID NO: 408464 - DNA, 15 bp, Homo sapiens
ccttgtactcagaac

SEQ ID NO: 408465 - DNA, 15 bp, Homo sapiens
tccttgtactcagaa

SEQ ID NO: 408466 - DNA, 15 bp, Homo sapiens
ttccttgtactcaga

SEQ ID NO: 408467 - DNA, 15 bp, Homo sapiens
tttccttgtactcag

SEQ ID NO: 408468 - DNA, 15 bp, Homo sapiens
ttttccttgtactca

SEQ ID NO: 408469 - DNA, 15 bp, Homo sapiens
cttttccttgtactc

SEQ ID NO: 408470 - DNA, 15 bp, Homo sapiens
acttttccttgtact

SEQ ID NO: 408471 - DNA, 15 bp, Homo sapiens
tacttttccttgtac

SEQ ID NO: 408472 - DNA, 15 bp, Homo sapiens
ctacttttccttgta

SEQ ID NO: 408473 - DNA, 15 bp, Homo sapiens
cctacttttccttgt

SEQ ID NO: 408474 - DNA, 15 bp, Homo sapiens
ccctacttttccttg

SEQ ID NO: 408475 - DNA, 15 bp, Homo sapiens
cccctacttttcctt

SEQ ID NO: 408476 - DNA, 15 bp, Homo sapiens
acccctacttttcct

SEQ ID NO: 408477 - DNA, 15 bp, Homo sapiens
aacccctacttttcc

SEQ ID NO: 408478 - DNA, 15 bp, Homo sapiens
aaacccctacttttc

SEQ ID NO: 408479 - DNA, 15 bp, Homo sapiens
aaaacccctactttt

SEQ ID NO: 408480 - DNA, 15 bp, Homo sapiens
taaaacccctacttt

SEQ ID NO: 408481 - DNA, 15 bp, Homo sapiens
ataaaacccctactt

SEQ ID NO: 408482 - DNA, 15 bp, Homo sapiens
tataaaacccctact

SEQ ID NO: 408483 - DNA, 15 bp, Homo sapiens
ctataaaacccctac

SEQ ID NO: 408484 - DNA, 15 bp, Homo sapiens
gctataaaaccccta

SEQ ID NO: 408485 - DNA, 15 bp, Homo sapiens
ggctataaaacccct

SEQ ID NO: 408486 - DNA, 15 bp, Homo sapiens
tggctataaaacccc

SEQ ID NO: 408487 - DNA, 15 bp, Homo sapiens
ctggctataaaaccc

SEQ ID NO: 408488 - DNA, 15 bp, Homo sapiens
cctggctataaaacc

SEQ ID NO: 408489 - DNA, 15 bp, Homo sapiens
ccctggctataaaac

SEQ ID NO: 408490 - DNA, 15 bp, Homo sapiens
tccctggctataaaa

SEQ ID NO: 408491 - DNA, 15 bp, Homo sapiens
ctccctggctataaa

SEQ ID NO: 408492 - DNA, 15 bp, Homo sapiens
gctccctggctataa

SEQ ID NO: 408493 - DNA, 15 bp, Homo sapiens
tgctccctggctata

SEQ ID NO: 408494 - DNA, 15 bp, Homo sapiens
ctgctccctggctat

SEQ ID NO: 408495 - DNA, 15 bp, Homo sapiens
cctgctccctggcta

SEQ ID NO: 408496 - DNA, 15 bp, Homo sapiens
ccctgctccctggct

SEQ ID NO: 408497 - DNA, 15 bp, Homo sapiens
accctgctccctggc

SEQ ID NO: 408498 - DNA, 15 bp, Homo sapiens
caccctgctccctgg

SEQ ID NO: 408499 - DNA, 15 bp, Homo sapiens
ccaccctgctccctg

SEQ ID NO: 408500 - DNA, 15 bp, Homo sapiens
cccaccctgctccct

SEQ ID NO: 408501 - DNA, 15 bp, Homo sapiens
acccaccctgctccc

SEQ ID NO: 408502 - DNA, 15 bp, Homo sapiens
tacccaccctgctcc

SEQ ID NO: 408503 - DNA, 15 bp, Homo sapiens
ctacccaccctgctc

SEQ ID NO: 408504 - DNA, 15 bp, Homo sapiens
cctacccaccctgct

SEQ ID NO: 408505 - DNA, 15 bp, Homo sapiens
acctacccaccctgc

SEQ ID NO: 408506 - DNA, 15 bp, Homo sapiens
cacctacccaccctg

SEQ ID NO: 408507 - DNA, 15 bp, Homo sapiens
acacctacccaccct

SEQ ID NO: 408508 - DNA, 15 bp, Homo sapiens
cacacctacccaccc

SEQ ID NO: 408509 - DNA, 15 bp, Homo sapiens
acacacctacccacc

SEQ ID NO: 408510 - DNA, 15 bp, Homo sapiens
cacacacctacccac

SEQ ID NO: 408511 - DNA, 15 bp, Homo sapiens
acacacacctaccca

SEQ ID NO: 408512 - DNA, 15 bp, Homo sapiens
gacacacacctaccc

SEQ ID NO: 408513 - DNA, 15 bp, Homo sapiens
tgacacacacctacc

SEQ ID NO: 408514 - DNA, 15 bp, Homo sapiens
ctgacacacacctac

SEQ ID NO: 408515 - DNA, 15 bp, Homo sapiens
actgacacacaccta

SEQ ID NO: 408516 - DNA, 15 bp, Homo sapiens
cactgacacacacct

SEQ ID NO: 408517 - DNA, 15 bp, Homo sapiens
ccactgacacacacc

SEQ ID NO: 408518 - DNA, 15 bp, Homo sapiens
tccactgacacacac

SEQ ID NO: 408519 - DNA, 15 bp, Homo sapiens
atccactgacacaca

SEQ ID NO: 408520 - DNA, 15 bp, Homo sapiens
aatccactgacacac

SEQ ID NO: 408521 - DNA, 15 bp, Homo sapiens
caatccactgacaca

SEQ ID NO: 408522 - DNA, 15 bp, Homo sapiens
tcaatccactgacac

SEQ ID NO: 408523 - DNA, 15 bp, Homo sapiens
ttcaatccactgaca

SEQ ID NO: 408524 - DNA, 15 bp, Homo sapiens
tttcaatccactgac

SEQ ID NO: 408525 - DNA, 15 bp, Homo sapiens
ttttcaatccactga

SEQ ID NO: 408526 - DNA, 15 bp, Homo sapiens
attttcaatccactg

SEQ ID NO: 408527 - DNA, 15 bp, Homo sapiens
aattttcaatccact

SEQ ID NO: 408528 - DNA, 15 bp, Homo sapiens
taattttcaatccac

SEQ ID NO: 408529 - DNA, 15 bp, Homo sapiens
gtaattttcaatcca

SEQ ID NO: 408530 - DNA, 15 bp, Homo sapiens
agtaattttcaatcc

SEQ ID NO: 408531 - DNA, 15 bp, Homo sapiens
cagtaattttcaatc

SEQ ID NO: 408532 - DNA, 15 bp, Homo sapiens
tcagtaattttcaat

SEQ ID NO: 408533 - DNA, 15 bp, Homo sapiens
ctcagtaattttcaa

SEQ ID NO: 408534 - DNA, 15 bp, Homo sapiens
tctcagtaattttca

SEQ ID NO: 408535 - DNA, 15 bp, Homo sapiens
ttctcagtaattttc

SEQ ID NO: 408536 - DNA, 15 bp, Homo sapiens
cttctcagtaatttt

SEQ ID NO: 408537 - DNA, 15 bp, Homo sapiens
tcttctcagtaattt

SEQ ID NO: 408538 - DNA, 15 bp, Homo sapiens
atcttctcagtaatt

SEQ ID NO: 408539 - DNA, 15 bp, Homo sapiens
tatcttctcagtaat

SEQ ID NO: 408540 - DNA, 15 bp, Homo sapiens
ttatcttctcagtaa

SEQ ID NO: 408541 - DNA, 15 bp, Homo sapiens
tttatcttctcagta

SEQ ID NO: 408542 - DNA, 15 bp, Homo sapiens
ttttatcttctcagt

SEQ ID NO: 408543 - DNA, 15 bp, Homo sapiens
attttatcttctcag

SEQ ID NO: 408544 - DNA, 15 bp, Homo sapiens
cattttatcttctca

SEQ ID NO: 408545 - DNA, 15 bp, Homo sapiens
tcattttatcttctc

SEQ ID NO: 408546 - DNA, 15 bp, Homo sapiens
gtcattttatcttct

SEQ ID NO: 408547 - DNA, 15 bp, Homo sapiens
ggtcattttatcttc

SEQ ID NO: 408548 - DNA, 15 bp, Homo sapiens
aggtcattttatctt

SEQ ID NO: 408549 - DNA, 15 bp, Homo sapiens
taggtcattttatct

SEQ ID NO: 408550 - DNA, 15 bp, Homo sapiens
ttaggtcattttatc

SEQ ID NO: 408551 - DNA, 15 bp, Homo sapiens
gttaggtcattttat

SEQ ID NO: 408552 - DNA, 15 bp, Homo sapiens
tgttaggtcatttta

SEQ ID NO: 408553 - DNA, 15 bp, Homo sapiens
ctgttaggtcatttt

SEQ ID NO: 408554 - DNA, 15 bp, Homo sapiens
cctgttaggtcattt

SEQ ID NO: 408555 - DNA, 15 bp, Homo sapiens
tcctgttaggtcatt

SEQ ID NO: 408556 - DNA, 15 bp, Homo sapiens
ctcctgttaggtcat

SEQ ID NO: 408557 - DNA, 15 bp, Homo sapiens
actcctgttaggtca

SEQ ID NO: 408558 - DNA, 15 bp, Homo sapiens
gactcctgttaggtc

SEQ ID NO: 408559 - DNA, 15 bp, Homo sapiens
agactcctgttaggt

SEQ ID NO: 408560 - DNA, 15 bp, Homo sapiens
cagactcctgttagg

SEQ ID NO: 408561 - DNA, 15 bp, Homo sapiens
ccagactcctgttag

SEQ ID NO: 408562 - DNA, 15 bp, Homo sapiens
gccagactcctgtta

SEQ ID NO: 408563 - DNA, 15 bp, Homo sapiens
agccagactcctgtt

SEQ ID NO: 408564 - DNA, 15 bp, Homo sapiens
cagccagactcctgt

SEQ ID NO: 408565 - DNA, 15 bp, Homo sapiens
tcagccagactcctg

SEQ ID NO: 408566 - DNA, 15 bp, Homo sapiens
ttcagccagactcct

SEQ ID NO: 408567 - DNA, 15 bp, Homo sapiens
attcagccagactcc

SEQ ID NO: 408568 - DNA, 15 bp, Homo sapiens
tattcagccagactc

SEQ ID NO: 408569 - DNA, 15 bp, Homo sapiens
atattcagccagact

SEQ ID NO: 408570 - DNA, 15 bp, Homo sapiens
catattcagccagac

SEQ ID NO: 408571 - DNA, 15 bp, Homo sapiens
ccatattcagccaga

SEQ ID NO: 408572 - DNA, 15 bp, Homo sapiens
cccatattcagccag

SEQ ID NO: 408573 - DNA, 15 bp, Homo sapiens
gcccatattcagcca

SEQ ID NO: 408574 - DNA, 15 bp, Homo sapiens
ggcccatattcagcc

SEQ ID NO: 408575 - DNA, 15 bp, Homo sapiens
tggcccatattcagc

SEQ ID NO: 408576 - DNA, 15 bp, Homo sapiens
ctggcccatattcag

SEQ ID NO: 408577 - DNA, 15 bp, Homo sapiens
tctggcccatattca

SEQ ID NO: 408578 - DNA, 15 bp, Homo sapiens
ctctggcccatattc

SEQ ID NO: 408579 - DNA, 15 bp, Homo sapiens
actctggcccatatt

SEQ ID NO: 408580 - DNA, 15 bp, Homo sapiens
cactctggcccatat

SEQ ID NO: 408581 - DNA, 15 bp, Homo sapiens
tcactctggcccata

SEQ ID NO: 408582 - DNA, 15 bp, Homo sapiens
atcactctggcccat

SEQ ID NO: 408583 - DNA, 15 bp, Homo sapiens
catcactctggccca

SEQ ID NO: 408584 - DNA, 15 bp, Homo sapiens
tcatcactctggccc

SEQ ID NO: 408585 - DNA, 15 bp, Homo sapiens
ctcatcactctggcc

SEQ ID NO: 408586 - DNA, 15 bp, Homo sapiens
gctcatcactctggc

SEQ ID NO: 408587 - DNA, 15 bp, Homo sapiens
agctcatcactctgg

SEQ ID NO: 408588 - DNA, 15 bp, Homo sapiens
cagctcatcactctg

SEQ ID NO: 408589 - DNA, 15 bp, Homo sapiens
acagctcatcactct

SEQ ID NO: 408590 - DNA, 15 bp, Homo sapiens
gacagctcatcactc

SEQ ID NO: 408591 - DNA, 15 bp, Homo sapiens
agacagctcatcact

SEQ ID NO: 408592 - DNA, 15 bp, Homo sapiens
gagacagctcatcac

SEQ ID NO: 408593 - DNA, 15 bp, Homo sapiens
ggagacagctcatca

SEQ ID NO: 408594 - DNA, 15 bp, Homo sapiens
aggagacagctcatc

SEQ ID NO: 408595 - DNA, 15 bp, Homo sapiens
caggagacagctcat

SEQ ID NO: 408596 - DNA, 15 bp, Homo sapiens
ccaggagacagctca

SEQ ID NO: 408597 - DNA, 15 bp, Homo sapiens
cccaggagacagctc

SEQ ID NO: 408598 - DNA, 15 bp, Homo sapiens
ccccaggagacagct

SEQ ID NO: 408599 - DNA, 15 bp, Homo sapiens
cccccaggagacagc

SEQ ID NO: 408600 - DNA, 15 bp, Homo sapiens
tcccccaggagacag

SEQ ID NO: 408601 - DNA, 15 bp, Homo sapiens
atcccccaggagaca

SEQ ID NO: 408602 - DNA, 15 bp, Homo sapiens
catcccccaggagac

SEQ ID NO: 408603 - DNA, 15 bp, Homo sapiens
ccatcccccaggaga

SEQ ID NO: 408604 - DNA, 15 bp, Homo sapiens
accatcccccaggag

SEQ ID NO: 408605 - DNA, 15 bp, Homo sapiens
aaccatcccccagga

SEQ ID NO: 408606 - DNA, 15 bp, Homo sapiens
caaccatcccccagg

SEQ ID NO: 408607 - DNA, 15 bp, Homo sapiens
ccaaccatcccccag

SEQ ID NO: 408608 - DNA, 15 bp, Homo sapiens
cccaaccatccccca

SEQ ID NO: 408609 - DNA, 15 bp, Homo sapiens
ccccaaccatccccc

SEQ ID NO: 408610 - DNA, 15 bp, Homo sapiens
accccaaccatcccc

SEQ ID NO: 408611 - DNA, 15 bp, Homo sapiens
aaccccaaccatccc

SEQ ID NO: 408612 - DNA, 15 bp, Homo sapiens
caaccccaaccatcc

SEQ ID NO: 408613 - DNA, 15 bp, Homo sapiens
ccaaccccaaccatc

SEQ ID NO: 408614 - DNA, 15 bp, Homo sapiens
cccaaccccaaccat

SEQ ID NO: 408615 - DNA, 15 bp, Homo sapiens
ccccaaccccaacca

SEQ ID NO: 408616 - DNA, 15 bp, Homo sapiens
tccccaaccccaacc

SEQ ID NO: 408617 - DNA, 15 bp, Homo sapiens
ttccccaaccccaac

SEQ ID NO: 408618 - DNA, 15 bp, Homo sapiens
attccccaaccccaa

SEQ ID NO: 408619 - DNA, 15 bp, Homo sapiens
aattccccaacccca

SEQ ID NO: 408620 - DNA, 15 bp, Homo sapiens
aaattccccaacccc

SEQ ID NO: 408621 - DNA, 15 bp, Homo sapiens
caaattccccaaccc

SEQ ID NO: 408622 - DNA, 15 bp, Homo sapiens
ccaaattccccaacc

SEQ ID NO: 408623 - DNA, 15 bp, Homo sapiens
accaaattccccaac

SEQ ID NO: 408624 - DNA, 15 bp, Homo sapiens
gaccaaattccccaa

SEQ ID NO: 408625 - DNA, 15 bp, Homo sapiens
tgaccaaattcccca

SEQ ID NO: 408626 - DNA, 15 bp, Homo sapiens
ctgaccaaattcccc

SEQ ID NO: 408627 - DNA, 15 bp, Homo sapiens
tctgaccaaattccc

SEQ ID NO: 408628 - DNA, 15 bp, Homo sapiens
atctgaccaaattcc

SEQ ID NO: 408629 - DNA, 15 bp, Homo sapiens
aatctgaccaaattc

SEQ ID NO: 408630 - DNA, 15 bp, Homo sapiens
aaatctgaccaaatt

SEQ ID NO: 408631 - DNA, 15 bp, Homo sapiens
aaaatctgaccaaat

SEQ ID NO: 408632 - DNA, 15 bp, Homo sapiens
caaaatctgaccaaa

SEQ ID NO: 408633 - DNA, 15 bp, Homo sapiens
tcaaaatctgaccaa

SEQ ID NO: 408634 - DNA, 15 bp, Homo sapiens
ctcaaaatctgacca

SEQ ID NO: 408635 - DNA, 15 bp, Homo sapiens
cctcaaaatctgacc

SEQ ID NO: 408636 - DNA, 15 bp, Homo sapiens
ccctcaaaatctgac

SEQ ID NO: 408637 - DNA, 15 bp, Homo sapiens
accctcaaaatctga

SEQ ID NO: 408638 - DNA, 15 bp, Homo sapiens
caccctcaaaatctg

SEQ ID NO: 408639 - DNA, 15 bp, Homo sapiens
tcaccctcaaaatct

SEQ ID NO: 408640 - DNA, 15 bp, Homo sapiens
gtcaccctcaaaatc

SEQ ID NO: 408641 - DNA, 15 bp, Homo sapiens
agtcaccctcaaaat

SEQ ID NO: 408642 - DNA, 15 bp, Homo sapiens
tagtcaccctcaaaa

SEQ ID NO: 408643 - DNA, 15 bp, Homo sapiens
ctagtcaccctcaaa

SEQ ID NO: 408644 - DNA, 15 bp, Homo sapiens
tctagtcaccctcaa

SEQ ID NO: 408645 - DNA, 15 bp, Homo sapiens
ttctagtcaccctca

SEQ ID NO: 408646 - DNA, 15 bp, Homo sapiens
cttctagtcaccctc

SEQ ID NO: 408647 - DNA, 15 bp, Homo sapiens
ccttctagtcaccct

SEQ ID NO: 408648 - DNA, 15 bp, Homo sapiens
cccttctagtcaccc

SEQ ID NO: 408649 - DNA, 15 bp, Homo sapiens
acccttctagtcacc

SEQ ID NO: 408650 - DNA, 15 bp, Homo sapiens
cacccttctagtcac

SEQ ID NO: 408651 - DNA, 15 bp, Homo sapiens
ccacccttctagtca

SEQ ID NO: 408652 - DNA, 15 bp, Homo sapiens
cccacccttctagtc

SEQ ID NO: 408653 - DNA, 15 bp, Homo sapiens
tcccacccttctagt

SEQ ID NO: 408654 - DNA, 15 bp, Homo sapiens
ctcccacccttctag

SEQ ID NO: 408655 - DNA, 15 bp, Homo sapiens
tctcccacccttcta

SEQ ID NO: 408656 - DNA, 15 bp, Homo sapiens
atctcccacccttct

SEQ ID NO: 408657 - DNA, 15 bp, Homo sapiens
aatctcccacccttc

SEQ ID NO: 408658 - DNA, 15 bp, Homo sapiens
caatctcccaccctt

SEQ ID NO: 408659 - DNA, 15 bp, Homo sapiens
acaatctcccaccct

SEQ ID NO: 408660 - DNA, 15 bp, Homo sapiens
cacaatctcccaccc

SEQ ID NO: 408661 - DNA, 15 bp, Homo sapiens
ccacaatctcccacc

SEQ ID NO: 408662 - DNA, 15 bp, Homo sapiens
gccacaatctcccac

SEQ ID NO: 408663 - DNA, 15 bp, Homo sapiens
agccacaatctccca

SEQ ID NO: 408664 - DNA, 15 bp, Homo sapiens
tagccacaatctccc

SEQ ID NO: 408665 - DNA, 15 bp, Homo sapiens
ttagccacaatctcc

SEQ ID NO: 408666 - DNA, 15 bp, Homo sapiens
tttagccacaatctc

SEQ ID NO: 408667 - DNA, 15 bp, Homo sapiens
ctttagccacaatct

SEQ ID NO: 408668 - DNA, 15 bp, Homo sapiens
tctttagccacaatc

SEQ ID NO: 408669 - DNA, 15 bp, Homo sapiens
atctttagccacaat

SEQ ID NO: 408670 - DNA, 15 bp, Homo sapiens
aatctttagccacaa

SEQ ID NO: 408671 - DNA, 15 bp, Homo sapiens
aaatctttagccaca

SEQ ID NO: 408672 - DNA, 15 bp, Homo sapiens
aaaatctttagccac

SEQ ID NO: 408673 - DNA, 15 bp, Homo sapiens
aaaaatctttagcca

SEQ ID NO: 408674 - DNA, 15 bp, Homo sapiens
caaaaatctttagcc

SEQ ID NO: 408675 - DNA, 15 bp, Homo sapiens
gcaaaaatctttagc

SEQ ID NO: 408676 - DNA, 15 bp, Homo sapiens
tgcaaaaatctttag

SEQ ID NO: 408677 - DNA, 15 bp, Homo sapiens
ttgcaaaaatcttta

SEQ ID NO: 408678 - DNA, 15 bp, Homo sapiens
attgcaaaaatcttt

SEQ ID NO: 408679 - DNA, 15 bp, Homo sapiens
tattgcaaaaatctt

SEQ ID NO: 408680 - DNA, 15 bp, Homo sapiens
ttattgcaaaaatct

SEQ ID NO: 408681 - DNA, 15 bp, Homo sapiens
attattgcaaaaatc

SEQ ID NO: 408682 - DNA, 15 bp, Homo sapiens
aattattgcaaaaat

SEQ ID NO: 408683 - DNA, 15 bp, Homo sapiens
caattattgcaaaaa

SEQ ID NO: 408684 - DNA, 15 bp, Homo sapiens
ccaattattgcaaaa

SEQ ID NO: 408685 - DNA, 15 bp, Homo sapiens
tccaattattgcaaa

SEQ ID NO: 408686 - DNA, 15 bp, Homo sapiens
gtccaattattgcaa

SEQ ID NO: 408687 - DNA, 15 bp, Homo sapiens
cgtccaattattgca

SEQ ID NO: 408688 - DNA, 15 bp, Homo sapiens
tcgtccaattattgc

SEQ ID NO: 408689 - DNA, 15 bp, Homo sapiens
atcgtccaattattg

SEQ ID NO: 408690 - DNA, 15 bp, Homo sapiens
catcgtccaattatt

SEQ ID NO: 408691 - DNA, 15 bp, Homo sapiens
gcatcgtccaattat

SEQ ID NO: 408692 - DNA, 15 bp, Homo sapiens
tgcatcgtccaatta

SEQ ID NO: 408693 - DNA, 15 bp, Homo sapiens
ttgcatcgtccaatt

SEQ ID NO: 408694 - DNA, 15 bp, Homo sapiens
tttgcatcgtccaat

SEQ ID NO: 408695 - DNA, 15 bp, Homo sapiens
ctttgcatcgtccaa

SEQ ID NO: 408696 - DNA, 15 bp, Homo sapiens
tctttgcatcgtcca

SEQ ID NO: 408697 - DNA, 15 bp, Homo sapiens
atctttgcatcgtcc

SEQ ID NO: 408698 - DNA, 15 bp, Homo sapiens
catctttgcatcgtc

SEQ ID NO: 408699 - DNA, 15 bp, Homo sapiens
ccatctttgcatcgt

SEQ ID NO: 408700 - DNA, 15 bp, Homo sapiens
tccatctttgcatcg

SEQ ID NO: 408701 - DNA, 15 bp, Homo sapiens
gtccatctttgcatc

SEQ ID NO: 408702 - DNA, 15 bp, Homo sapiens
tgtccatctttgcat

SEQ ID NO: 408703 - DNA, 15 bp, Homo sapiens
gtgtccatctttgca

SEQ ID NO: 408704 - DNA, 15 bp, Homo sapiens
tgtgtccatctttgc

SEQ ID NO: 408705 - DNA, 15 bp, Homo sapiens
ttgtgtccatctttg

SEQ ID NO: 408706 - DNA, 15 bp, Homo sapiens
tttgtgtccatcttt

SEQ ID NO: 408707 - DNA, 15 bp, Homo sapiens
ctttgtgtccatctt

SEQ ID NO: 408708 - DNA, 15 bp, Homo sapiens
actttgtgtccatct

SEQ ID NO: 408709 - DNA, 15 bp, Homo sapiens
aactttgtgtccatc

SEQ ID NO: 408710 - DNA, 15 bp, Homo sapiens
aaactttgtgtccat

SEQ ID NO: 408711 - DNA, 15 bp, Homo sapiens
taaactttgtgtcca

SEQ ID NO: 408712 - DNA, 15 bp, Homo sapiens
ttaaactttgtgtcc

SEQ ID NO: 408713 - DNA, 15 bp, Homo sapiens
tttaaactttgtgtc

SEQ ID NO: 408714 - DNA, 15 bp, Homo sapiens
ttttaaactttgtgt

SEQ ID NO: 408715 - DNA, 15 bp, Homo sapiens
cttttaaactttgtg

SEQ ID NO: 408716 - DNA, 15 bp, Homo sapiens
acttttaaactttgt

SEQ ID NO: 408717 - DNA, 15 bp, Homo sapiens
aacttttaaactttg

SEQ ID NO: 408718 - DNA, 15 bp, Homo sapiens
caacttttaaacttt

SEQ ID NO: 408719 - DNA, 15 bp, Homo sapiens
tcaacttttaaactt

SEQ ID NO: 408720 - DNA, 15 bp, Homo sapiens
ctcaacttttaaact

SEQ ID NO: 408721 - DNA, 15 bp, Homo sapiens
tctcaacttttaaac

SEQ ID NO: 408722 - DNA, 15 bp, Homo sapiens
atctcaacttttaaa

SEQ ID NO: 408723 - DNA, 15 bp, Homo sapiens
gatctcaacttttaa

SEQ ID NO: 408724 - DNA, 15 bp, Homo sapiens
agatctcaactttta

SEQ ID NO: 408725 - DNA, 15 bp, Homo sapiens
tagatctcaactttt

SEQ ID NO: 408726 - DNA, 15 bp, Homo sapiens
gtagatctcaacttt

SEQ ID NO: 408727 - DNA, 15 bp, Homo sapiens
agtagatctcaactt

SEQ ID NO: 408728 - DNA, 15 bp, Homo sapiens
aagtagatctcaact

SEQ ID NO: 408729 - DNA, 15 bp, Homo sapiens
caagtagatctcaac

SEQ ID NO: 408730 - DNA, 15 bp, Homo sapiens
ccaagtagatctcaa

SEQ ID NO: 408731 - DNA, 15 bp, Homo sapiens
cccaagtagatctca

SEQ ID NO: 408732 - DNA, 15 bp, Homo sapiens
tcccaagtagatctc

SEQ ID NO: 408733 - DNA, 15 bp, Homo sapiens
ttcccaagtagatct

SEQ ID NO: 408734 - DNA, 15 bp, Homo sapiens
cttcccaagtagatc

SEQ ID NO: 408735 - DNA, 15 bp, Homo sapiens
tcttcccaagtagat

SEQ ID NO: 408736 - DNA, 15 bp, Homo sapiens
ctcttcccaagtaga

SEQ ID NO: 408737 - DNA, 15 bp, Homo sapiens
cctcttcccaagtag

SEQ ID NO: 408738 - DNA, 15 bp, Homo sapiens
tcctcttcccaagta

SEQ ID NO: 408739 - DNA, 15 bp, Homo sapiens
atcctcttcccaagt

SEQ ID NO: 408740 - DNA, 15 bp, Homo sapiens
aatcctcttcccaag

SEQ ID NO: 408741 - DNA, 15 bp, Homo sapiens
aaatcctcttcccaa

SEQ ID NO: 408742 - DNA, 15 bp, Homo sapiens
aaaatcctcttccca

SEQ ID NO: 408743 - DNA, 15 bp, Homo sapiens
caaaatcctcttccc

SEQ ID NO: 408744 - DNA, 15 bp, Homo sapiens
tcaaaatcctcttcc

SEQ ID NO: 408745 - DNA, 15 bp, Homo sapiens
ctcaaaatcctcttc

SEQ ID NO: 408746 - DNA, 15 bp, Homo sapiens
cctcaaaatcctctt

SEQ ID NO: 408747 - DNA, 15 bp, Homo sapiens
tcctcaaaatcctct

SEQ ID NO: 408748 - DNA, 15 bp, Homo sapiens
ctcctcaaaatcctc

SEQ ID NO: 408749 - DNA, 15 bp, Homo sapiens
gctcctcaaaatcct

SEQ ID NO: 408750 - DNA, 15 bp, Homo sapiens
ggctcctcaaaatcc

SEQ ID NO: 408751 - DNA, 15 bp, Homo sapiens
aggctcctcaaaatc

SEQ ID NO: 408752 - DNA, 15 bp, Homo sapiens
caggctcctcaaaat

SEQ ID NO: 408753 - DNA, 15 bp, Homo sapiens
tcaggctcctcaaaa

SEQ ID NO: 408754 - DNA, 15 bp, Homo sapiens
gtcaggctcctcaaa

SEQ ID NO: 408755 - DNA, 15 bp, Homo sapiens
agtcaggctcctcaa

SEQ ID NO: 408756 - DNA, 15 bp, Homo sapiens
tagtcaggctcctca

SEQ ID NO: 408757 - DNA, 15 bp, Homo sapiens
ttagtcaggctcctc

SEQ ID NO: 408758 - DNA, 15 bp, Homo sapiens
tttagtcaggctcct

SEQ ID NO: 408759 - DNA, 15 bp, Homo sapiens
ctttagtcaggctcc

SEQ ID NO: 408760 - DNA, 15 bp, Homo sapiens
actttagtcaggctc

SEQ ID NO: 408761 - DNA, 15 bp, Homo sapiens
aactttagtcaggct

SEQ ID NO: 408762 - DNA, 15 bp, Homo sapiens
aaactttagtcaggc

SEQ ID NO: 408763 - DNA, 15 bp, Homo sapiens
caaactttagtcagg

SEQ ID NO: 408764 - DNA, 15 bp, Homo sapiens
ccaaactttagtcag

SEQ ID NO: 408765 - DNA, 15 bp, Homo sapiens
accaaactttagtca

SEQ ID NO: 408766 - DNA, 15 bp, Homo sapiens
gaccaaactttagtc

SEQ ID NO: 408767 - DNA, 15 bp, Homo sapiens
tgaccaaactttagt

SEQ ID NO: 408768 - DNA, 15 bp, Homo sapiens
ttgaccaaactttag

SEQ ID NO: 408769 - DNA, 15 bp, Homo sapiens
tttgaccaaacttta

SEQ ID NO: 408770 - DNA, 15 bp, Homo sapiens
ctttgaccaaacttt

SEQ ID NO: 408771 - DNA, 15 bp, Homo sapiens
tctttgaccaaactt

SEQ ID NO: 408772 - DNA, 15 bp, Homo sapiens
gtctttgaccaaact

SEQ ID NO: 408773 - DNA, 15 bp, Homo sapiens
agtctttgaccaaac

SEQ ID NO: 408774 - DNA, 15 bp, Homo sapiens
gagtctttgaccaaa

SEQ ID NO: 408775 - DNA, 15 bp, Homo sapiens
tgagtctttgaccaa

SEQ ID NO: 408776 - DNA, 15 bp, Homo sapiens
atgagtctttgacca

SEQ ID NO: 408777 - DNA, 15 bp, Homo sapiens
tatgagtctttgacc

SEQ ID NO: 408778 - DNA, 15 bp, Homo sapiens
gtatgagtctttgac

SEQ ID NO: 408779 - DNA, 15 bp, Homo sapiens
tgtatgagtctttga

SEQ ID NO: 408780 - DNA, 15 bp, Homo sapiens
ttgtatgagtctttg

SEQ ID NO: 408781 - DNA, 15 bp, Homo sapiens
attgtatgagtcttt

SEQ ID NO: 408782 - DNA, 15 bp, Homo sapiens
gattgtatgagtctt

SEQ ID NO: 408783 - DNA, 15 bp, Homo sapiens
agattgtatgagtct

SEQ ID NO: 408784 - DNA, 15 bp, Homo sapiens
aagattgtatgagtc

SEQ ID NO: 408785 - DNA, 15 bp, Homo sapiens
aaagattgtatgagt

SEQ ID NO: 408786 - DNA, 15 bp, Homo sapiens
caaagattgtatgag

SEQ ID NO: 408787 - DNA, 15 bp, Homo sapiens
acaaagattgtatga

SEQ ID NO: 408788 - DNA, 15 bp, Homo sapiens
gacaaagattgtatg

SEQ ID NO: 408789 - DNA, 15 bp, Homo sapiens
tgacaaagattgtat

SEQ ID NO: 408790 - DNA, 15 bp, Homo sapiens
ctgacaaagattgta

SEQ ID NO: 408791 - DNA, 15 bp, Homo sapiens
tctgacaaagattgt

SEQ ID NO: 408792 - DNA, 15 bp, Homo sapiens
gtctgacaaagattg

SEQ ID NO: 408793 - DNA, 15 bp, Homo sapiens
ggtctgacaaagatt

SEQ ID NO: 408794 - DNA, 15 bp, Homo sapiens
gggtctgacaaagat

SEQ ID NO: 408795 - DNA, 15 bp, Homo sapiens
tgggtctgacaaaga

SEQ ID NO: 408796 - DNA, 15 bp, Homo sapiens
ttgggtctgacaaag

SEQ ID NO: 408797 - DNA, 15 bp, Homo sapiens
tttgggtctgacaaa

SEQ ID NO: 408798 - DNA, 15 bp, Homo sapiens
ttttgggtctgacaa

SEQ ID NO: 408799 - DNA, 15 bp, Homo sapiens
gttttgggtctgaca

SEQ ID NO: 408800 - DNA, 15 bp, Homo sapiens
tgttttgggtctgac

SEQ ID NO: 408801 - DNA, 15 bp, Homo sapiens
ctgttttgggtctga

SEQ ID NO: 408802 - DNA, 15 bp, Homo sapiens
tctgttttgggtctg

SEQ ID NO: 408803 - DNA, 15 bp, Homo sapiens
gtctgttttgggtct

SEQ ID NO: 408804 - DNA, 15 bp, Homo sapiens
tgtctgttttgggtc

SEQ ID NO: 408805 - DNA, 15 bp, Homo sapiens
ttgtctgttttgggt

SEQ ID NO: 408806 - DNA, 15 bp, Homo sapiens
attgtctgttttggg

SEQ ID NO: 408807 - DNA, 15 bp, Homo sapiens
aattgtctgttttgg

SEQ ID NO: 408808 - DNA, 15 bp, Homo sapiens
gaattgtctgttttg

SEQ ID NO: 408809 - DNA, 15 bp, Homo sapiens
tgaattgtctgtttt

SEQ ID NO: 408810 - DNA, 15 bp, Homo sapiens
ctgaattgtctgttt

SEQ ID NO: 408811 - DNA, 15 bp, Homo sapiens
gctgaattgtctgtt

SEQ ID NO: 408812 - DNA, 15 bp, Homo sapiens
agctgaattgtctgt

SEQ ID NO: 408813 - DNA, 15 bp, Homo sapiens
tagctgaattgtctg

SEQ ID NO: 408814 - DNA, 15 bp, Homo sapiens
gtagctgaattgtct

SEQ ID NO: 408815 - DNA, 15 bp, Homo sapiens
tgtagctgaattgtc

SEQ ID NO: 408816 - DNA, 15 bp, Homo sapiens
ctgtagctgaattgt

SEQ ID NO: 408817 - DNA, 15 bp, Homo sapiens
actgtagctgaattg

SEQ ID NO: 408818 - DNA, 15 bp, Homo sapiens
cactgtagctgaatt

SEQ ID NO: 408819 - DNA, 15 bp, Homo sapiens
gcactgtagctgaat

SEQ ID NO: 408820 - DNA, 15 bp, Homo sapiens
agcactgtagctgaa

SEQ ID NO: 408821 - DNA, 15 bp, Homo sapiens
aagcactgtagctga

SEQ ID NO: 408822 - DNA, 15 bp, Homo sapiens
aaagcactgtagctg

SEQ ID NO: 408823 - DNA, 15 bp, Homo sapiens
caaagcactgtagct

SEQ ID NO: 408824 - DNA, 15 bp, Homo sapiens
acaaagcactgtagc

SEQ ID NO: 408825 - DNA, 15 bp, Homo sapiens
gacaaagcactgtag

SEQ ID NO: 408826 - DNA, 15 bp, Homo sapiens
agacaaagcactgta

SEQ ID NO: 408827 - DNA, 15 bp, Homo sapiens
gagacaaagcactgt

SEQ ID NO: 408828 - DNA, 15 bp, Homo sapiens
tgagacaaagcactg

SEQ ID NO: 408829 - DNA, 15 bp, Homo sapiens
ttgagacaaagcact

SEQ ID NO: 408830 - DNA, 15 bp, Homo sapiens
gttgagacaaagcac

SEQ ID NO: 408831 - DNA, 15 bp, Homo sapiens
agttgagacaaagca

SEQ ID NO: 408832 - DNA, 15 bp, Homo sapiens
aagttgagacaaagc

SEQ ID NO: 408833 - DNA, 15 bp, Homo sapiens
aaagttgagacaaag

SEQ ID NO: 408834 - DNA, 15 bp, Homo sapiens
taaagttgagacaaa

SEQ ID NO: 408835 - DNA, 15 bp, Homo sapiens
ataaagttgagacaa

SEQ ID NO: 408836 - DNA, 15 bp, Homo sapiens
cataaagttgagaca

SEQ ID NO: 408837 - DNA, 15 bp, Homo sapiens
tcataaagttgagac

SEQ ID NO: 408838 - DNA, 15 bp, Homo sapiens
ctcataaagttgaga

SEQ ID NO: 408839 - DNA, 15 bp, Homo sapiens
gctcataaagttgag

SEQ ID NO: 408840 - DNA, 15 bp, Homo sapiens
tgctcataaagttga

SEQ ID NO: 408841 - DNA, 15 bp, Homo sapiens
ttgctcataaagttg

SEQ ID NO: 408842 - DNA, 15 bp, Homo sapiens
cttgctcataaagtt

SEQ ID NO: 408843 - DNA, 15 bp, Homo sapiens
ccttgctcataaagt

SEQ ID NO: 408844 - DNA, 15 bp, Homo sapiens
tccttgctcataaag

SEQ ID NO: 408845 - DNA, 15 bp, Homo sapiens
atccttgctcataaa

SEQ ID NO: 408846 - DNA, 15 bp, Homo sapiens
catccttgctcataa

SEQ ID NO: 408847 - DNA, 15 bp, Homo sapiens
gcatccttgctcata

SEQ ID NO: 408848 - DNA, 15 bp, Homo sapiens
agcatccttgctcat

SEQ ID NO: 408849 - DNA, 15 bp, Homo sapiens
aagcatccttgctca

SEQ ID NO: 408850 - DNA, 15 bp, Homo sapiens
gaagcatccttgctc

SEQ ID NO: 408851 - DNA, 15 bp, Homo sapiens
ggaagcatccttgct

SEQ ID NO: 408852 - DNA, 15 bp, Homo sapiens
gggaagcatccttgc

SEQ ID NO: 408853 - DNA, 15 bp, Homo sapiens
agggaagcatccttg

SEQ ID NO: 408854 - DNA, 15 bp, Homo sapiens
aagggaagcatcctt

SEQ ID NO: 408855 - DNA, 15 bp, Homo sapiens
taagggaagcatcct

SEQ ID NO: 408856 - DNA, 15 bp, Homo sapiens
ttaagggaagcatcc

SEQ ID NO: 408857 - DNA, 15 bp, Homo sapiens
tttaagggaagcatc

SEQ ID NO: 408858 - DNA, 15 bp, Homo sapiens
atttaagggaagcat

SEQ ID NO: 408859 - DNA, 15 bp, Homo sapiens
aatttaagggaagca

SEQ ID NO: 408860 - DNA, 15 bp, Homo sapiens
gaatttaagggaagc

SEQ ID NO: 408861 - DNA, 15 bp, Homo sapiens
agaatttaagggaag

SEQ ID NO: 408862 - DNA, 15 bp, Homo sapiens
gagaatttaagggaa

SEQ ID NO: 408863 - DNA, 15 bp, Homo sapiens
agagaatttaaggga

SEQ ID NO: 408864 - DNA, 15 bp, Homo sapiens
aagagaatttaaggg

SEQ ID NO: 408865 - DNA, 15 bp, Homo sapiens
taagagaatttaagg

SEQ ID NO: 408866 - DNA, 15 bp, Homo sapiens
ttaagagaatttaag

SEQ ID NO: 408867 - DNA, 15 bp, Homo sapiens
tttaagagaatttaa

SEQ ID NO: 408868 - DNA, 15 bp, Homo sapiens
atttaagagaattta

SEQ ID NO: 408869 - DNA, 15 bp, Homo sapiens
aatttaagagaattt

SEQ ID NO: 408870 - DNA, 15 bp, Homo sapiens
gaatttaagagaatt

SEQ ID NO: 408871 - DNA, 15 bp, Homo sapiens
agaatttaagagaat

SEQ ID NO: 408872 - DNA, 15 bp, Homo sapiens
tagaatttaagagaa

SEQ ID NO: 408873 - DNA, 15 bp, Homo sapiens
gtagaatttaagaga

SEQ ID NO: 408874 - DNA, 15 bp, Homo sapiens
tgtagaatttaagag

SEQ ID NO: 408875 - DNA, 15 bp, Homo sapiens
gtgtagaatttaaga

SEQ ID NO: 408876 - DNA, 15 bp, Homo sapiens
tgtgtagaatttaag

SEQ ID NO: 408877 - DNA, 15 bp, Homo sapiens
ctgtgtagaatttaa

SEQ ID NO: 408878 - DNA, 15 bp, Homo sapiens
actgtgtagaattta

SEQ ID NO: 408879 - DNA, 15 bp, Homo sapiens
cactgtgtagaattt

SEQ ID NO: 408880 - DNA, 15 bp, Homo sapiens
tcactgtgtagaatt

SEQ ID NO: 408881 - DNA, 15 bp, Homo sapiens
gtcactgtgtagaat

SEQ ID NO: 408882 - DNA, 15 bp, Homo sapiens
tgtcactgtgtagaa

SEQ ID NO: 408883 - DNA, 15 bp, Homo sapiens
atgtcactgtgtaga

SEQ ID NO: 408884 - DNA, 15 bp, Homo sapiens
aatgtcactgtgtag

SEQ ID NO: 408885 - DNA, 15 bp, Homo sapiens
aaatgtcactgtgta

SEQ ID NO: 408886 - DNA, 15 bp, Homo sapiens
gaaatgtcactgtgt

SEQ ID NO: 408887 - DNA, 15 bp, Homo sapiens
tgaaatgtcactgtg

SEQ ID NO: 408888 - DNA, 15 bp, Homo sapiens
atgaaatgtcactgt

SEQ ID NO: 408889 - DNA, 15 bp, Homo sapiens
aatgaaatgtcactg

SEQ ID NO: 408890 - DNA, 15 bp, Homo sapiens
gaatgaaatgtcact

SEQ ID NO: 408891 - DNA, 15 bp, Homo sapiens
agaatgaaatgtcac

SEQ ID NO: 408892 - DNA, 15 bp, Homo sapiens
cagaatgaaatgtca

SEQ ID NO: 408893 - DNA, 15 bp, Homo sapiens
gcagaatgaaatgtc

SEQ ID NO: 408894 - DNA, 15 bp, Homo sapiens
tgcagaatgaaatgt

SEQ ID NO: 408895 - DNA, 15 bp, Homo sapiens
atgcagaatgaaatg

SEQ ID NO: 408896 - DNA, 15 bp, Homo sapiens
gatgcagaatgaaat

SEQ ID NO: 408897 - DNA, 15 bp, Homo sapiens
ggatgcagaatgaaa

SEQ ID NO: 408898 - DNA, 15 bp, Homo sapiens
tggatgcagaatgaa

SEQ ID NO: 408899 - DNA, 15 bp, Homo sapiens
ctggatgcagaatga

SEQ ID NO: 408900 - DNA, 15 bp, Homo sapiens
actggatgcagaatg

SEQ ID NO: 408901 - DNA, 15 bp, Homo sapiens
cactggatgcagaat

SEQ ID NO: 408902 - DNA, 15 bp, Homo sapiens
ccactggatgcagaa

SEQ ID NO: 408903 - DNA, 15 bp, Homo sapiens
tccactggatgcaga

SEQ ID NO: 408904 - DNA, 15 bp, Homo sapiens
atccactggatgcag

SEQ ID NO: 408905 - DNA, 15 bp, Homo sapiens
tatccactggatgca

SEQ ID NO: 408906 - DNA, 15 bp, Homo sapiens
atatccactggatgc

SEQ ID NO: 408907 - DNA, 15 bp, Homo sapiens
aatatccactggatg

SEQ ID NO: 408908 - DNA, 15 bp, Homo sapiens
aaatatccactggat

SEQ ID NO: 408909 - DNA, 15 bp, Homo sapiens
caaatatccactgga

SEQ ID NO: 408910 - DNA, 15 bp, Homo sapiens
acaaatatccactgg

SEQ ID NO: 408911 - DNA, 15 bp, Homo sapiens
aacaaatatccactg

SEQ ID NO: 408912 - DNA, 15 bp, Homo sapiens
caacaaatatccact

SEQ ID NO: 408913 - DNA, 15 bp, Homo sapiens
tcaacaaatatccac

SEQ ID NO: 408914 - DNA, 15 bp, Homo sapiens
gtcaacaaatatcca

SEQ ID NO: 408915 - DNA, 15 bp, Homo sapiens
tgtcaacaaatatcc

SEQ ID NO: 408916 - DNA, 15 bp, Homo sapiens
atgtcaacaaatatc

SEQ ID NO: 408917 - DNA, 15 bp, Homo sapiens
catgtcaacaaatat

SEQ ID NO: 408918 - DNA, 15 bp, Homo sapiens
ccatgtcaacaaata

SEQ ID NO: 408919 - DNA, 15 bp, Homo sapiens
accatgtcaacaaat

SEQ ID NO: 408920 - DNA, 15 bp, Homo sapiens
caccatgtcaacaaa

SEQ ID NO: 408921 - DNA, 15 bp, Homo sapiens
acaccatgtcaacaa

SEQ ID NO: 408922 - DNA, 15 bp, Homo sapiens
aacaccatgtcaaca

SEQ ID NO: 408923 - DNA, 15 bp, Homo sapiens
caacaccatgtcaac

SEQ ID NO: 408924 - DNA, 15 bp, Homo sapiens
ccaacaccatgtcaa

SEQ ID NO: 408925 - DNA, 15 bp, Homo sapiens
gccaacaccatgtca

SEQ ID NO: 408926 - DNA, 15 bp, Homo sapiens
agccaacaccatgtc

SEQ ID NO: 408927 - DNA, 15 bp, Homo sapiens
cagccaacaccatgt

SEQ ID NO: 408928 - DNA, 15 bp, Homo sapiens
tcagccaacaccatg

SEQ ID NO: 408929 - DNA, 15 bp, Homo sapiens
ctcagccaacaccat

SEQ ID NO: 408930 - DNA, 15 bp, Homo sapiens
gctcagccaacacca

SEQ ID NO: 408931 - DNA, 15 bp, Homo sapiens
agctcagccaacacc

SEQ ID NO: 408932 - DNA, 15 bp, Homo sapiens
cagctcagccaacac

SEQ ID NO: 408933 - DNA, 15 bp, Homo sapiens
ccagctcagccaaca

SEQ ID NO: 408934 - DNA, 15 bp, Homo sapiens
cccagctcagccaac

SEQ ID NO: 408935 - DNA, 15 bp, Homo sapiens
tcccagctcagccaa

SEQ ID NO: 408936 - DNA, 15 bp, Homo sapiens
atcccagctcagcca

SEQ ID NO: 408937 - DNA, 15 bp, Homo sapiens
tatcccagctcagcc

SEQ ID NO: 408938 - DNA, 15 bp, Homo sapiens
atatcccagctcagc

SEQ ID NO: 408939 - DNA, 15 bp, Homo sapiens
tatatcccagctcag

SEQ ID NO: 408940 - DNA, 15 bp, Homo sapiens
ctatatcccagctca

SEQ ID NO: 408941 - DNA, 15 bp, Homo sapiens
gctatatcccagctc

SEQ ID NO: 408942 - DNA, 15 bp, Homo sapiens
ggctatatcccagct

SEQ ID NO: 408943 - DNA, 15 bp, Homo sapiens
aggctatatcccagc

SEQ ID NO: 408944 - DNA, 15 bp, Homo sapiens
taggctatatcccag

SEQ ID NO: 408945 - DNA, 15 bp, Homo sapiens
cataggctatatccc

SEQ ID NO: 408946 - DNA, 15 bp, Homo sapiens
ccataggctatatcc

SEQ ID NO: 408947 - DNA, 15 bp, Homo sapiens
tccataggctatatc

SEQ ID NO: 408948 - DNA, 15 bp, Homo sapiens
ctccataggctatat

SEQ ID NO: 408949 - DNA, 15 bp, Homo sapiens
tctccataggctata

SEQ ID NO: 408950 - DNA, 15 bp, Homo sapiens
ttctccataggctat

SEQ ID NO: 408951 - DNA, 15 bp, Homo sapiens
tttctccataggcta

SEQ ID NO: 408952 - DNA, 15 bp, Homo sapiens
atttctccataggct

SEQ ID NO: 408953 - DNA, 15 bp, Homo sapiens
aatttctccataggc

SEQ ID NO: 408954 - DNA, 15 bp, Homo sapiens
aaatttctccatagg

SEQ ID NO: 408955 - DNA, 15 bp, Homo sapiens
gaaatttctccatag

SEQ ID NO: 408956 - DNA, 15 bp, Homo sapiens
tgaaatttctccata

SEQ ID NO: 408957 - DNA, 15 bp, Homo sapiens
atgaaatttctccat

SEQ ID NO: 408958 - DNA, 15 bp, Homo sapiens
catgaaatttctcca

SEQ ID NO: 408959 - DNA, 15 bp, Homo sapiens
tcatgaaatttctcc

SEQ ID NO: 408960 - DNA, 15 bp, Homo sapiens
ttcatgaaatttctc

SEQ ID NO: 408961 - DNA, 15 bp, Homo sapiens
cttcatgaaatttct

SEQ ID NO: 408962 - DNA, 15 bp, Homo sapiens
gcttcatgaaatttc

SEQ ID NO: 408963 - DNA, 15 bp, Homo sapiens
agcttcatgaaattt

SEQ ID NO: 408964 - DNA, 15 bp, Homo sapiens
cagcttcatgaaatt

SEQ ID NO: 408965 - DNA, 15 bp, Homo sapiens
ccagcttcatgaaat

SEQ ID NO: 408966 - DNA, 15 bp, Homo sapiens
gccagcttcatgaaa

SEQ ID NO: 408967 - DNA, 15 bp, Homo sapiens
tgccagcttcatgaa

SEQ ID NO: 408968 - DNA, 15 bp, Homo sapiens
ttgccagcttcatga

SEQ ID NO: 408969 - DNA, 15 bp, Homo sapiens
tttgccagcttcatg

SEQ ID NO: 408970 - DNA, 15 bp, Homo sapiens
ctttgccagcttcat

SEQ ID NO: 408971 - DNA, 15 bp, Homo sapiens
gctttgccagcttca

SEQ ID NO: 408972 - DNA, 15 bp, Homo sapiens
agctttgccagcttc

SEQ ID NO: 408973 - DNA, 15 bp, Homo sapiens
gagctttgccagctt

SEQ ID NO: 408974 - DNA, 15 bp, Homo sapiens
ggagctttgccagct

SEQ ID NO: 408975 - DNA, 15 bp, Homo sapiens
aggagctttgccagc

SEQ ID NO: 408976 - DNA, 15 bp, Homo sapiens
caggagctttgccag

SEQ ID NO: 408977 - DNA, 15 bp, Homo sapiens
acaggagctttgcca

SEQ ID NO: 408978 - DNA, 15 bp, Homo sapiens
aacaggagctttgcc

SEQ ID NO: 408979 - DNA, 15 bp, Homo sapiens
taacaggagctttgc

SEQ ID NO: 408980 - DNA, 15 bp, Homo sapiens
ataacaggagctttg

SEQ ID NO: 408981 - DNA, 15 bp, Homo sapiens
aataacaggagcttt

SEQ ID NO: 408982 - DNA, 15 bp, Homo sapiens
aaataacaggagctt

SEQ ID NO: 408983 - DNA, 15 bp, Homo sapiens
aaaataacaggagct

SEQ ID NO: 408984 - DNA, 15 bp, Homo sapiens
gaaaataacaggagc

SEQ ID NO: 408985 - DNA, 15 bp, Homo sapiens
agaaaataacaggag

SEQ ID NO: 408986 - DNA, 15 bp, Homo sapiens
tagaaaataacagga

SEQ ID NO: 408987 - DNA, 15 bp, Homo sapiens
atagaaaataacagg

SEQ ID NO: 408988 - DNA, 15 bp, Homo sapiens
aatagaaaataacag

SEQ ID NO: 408989 - DNA, 15 bp, Homo sapiens
aaatagaaaataaca

SEQ ID NO: 408990 - DNA, 15 bp, Homo sapiens
gaaatagaaaataac

SEQ ID NO: 408991 - DNA, 15 bp, Homo sapiens
tgaaatagaaaataa

SEQ ID NO: 408992 - DNA, 15 bp, Homo sapiens
atgaaatagaaaata

SEQ ID NO: 408993 - DNA, 15 bp, Homo sapiens
catgaaatagaaaat

SEQ ID NO: 408994 - DNA, 15 bp, Homo sapiens
gcatgaaatagaaaa

SEQ ID NO: 408995 - DNA, 15 bp, Homo sapiens
agcatgaaatagaaa

SEQ ID NO: 408996 - DNA, 15 bp, Homo sapiens
aagcatgaaatagaa

SEQ ID NO: 408997 - DNA, 15 bp, Homo sapiens
taagcatgaaataga

SEQ ID NO: 408998 - DNA, 15 bp, Homo sapiens
gtaagcatgaaatag

SEQ ID NO: 408999 - DNA, 15 bp, Homo sapiens
tgtaagcatgaaata

SEQ ID NO: 409000 - DNA, 15 bp, Homo sapiens
atgtaagcatgaaat

SEQ ID NO: 409001 - DNA, 15 bp, Homo sapiens
tatgtaagcatgaaa

SEQ ID NO: 409002 - DNA, 15 bp, Homo sapiens
atatgtaagcatgaa

SEQ ID NO: 409003 - DNA, 15 bp, Homo sapiens
aatatgtaagcatga

SEQ ID NO: 409004 - DNA, 15 bp, Homo sapiens
taatatgtaagcatg

SEQ ID NO: 409005 - DNA, 15 bp, Homo sapiens
ctaatatgtaagcat

SEQ ID NO: 409006 - DNA, 15 bp, Homo sapiens
actaatatgtaagca

SEQ ID NO: 409007 - DNA, 15 bp, Homo sapiens
cactaatatgtaagc

SEQ ID NO: 409008 - DNA, 15 bp, Homo sapiens
acactaatatgtaag

SEQ ID NO: 409009 - DNA, 15 bp, Homo sapiens
aacactaatatgtaa

SEQ ID NO: 409010 - DNA, 15 bp, Homo sapiens
aaacactaatatgta

SEQ ID NO: 409011 - DNA, 15 bp, Homo sapiens
aaaacactaatatgt

SEQ ID NO: 409012 - DNA, 15 bp, Homo sapiens
caaaacactaatatg

SEQ ID NO: 409013 - DNA, 15 bp, Homo sapiens
acaaaacactaatat

SEQ ID NO: 409014 - DNA, 15 bp, Homo sapiens
aacaaaacactaata

SEQ ID NO: 409015 - DNA, 15 bp, Homo sapiens
taacaaaacactaat

SEQ ID NO: 409016 - DNA, 15 bp, Homo sapiens
ctaacaaaacactaa

SEQ ID NO: 409017 - DNA, 15 bp, Homo sapiens
cctaacaaaacacta

SEQ ID NO: 409018 - DNA, 15 bp, Homo sapiens
acctaacaaaacact

SEQ ID NO: 409019 - DNA, 15 bp, Homo sapiens
aacctaacaaaacac

SEQ ID NO: 409020 - DNA, 15 bp, Homo sapiens
caacctaacaaaaca

SEQ ID NO: 409021 - DNA, 15 bp, Homo sapiens
acaacctaacaaaac

SEQ ID NO: 409022 - DNA, 15 bp, Homo sapiens
aacaacctaacaaaa

SEQ ID NO: 409023 - DNA, 15 bp, Homo sapiens
aaacaacctaacaaa

SEQ ID NO: 409024 - DNA, 15 bp, Homo sapiens
aaaacaacctaacaa

SEQ ID NO: 409025 - DNA, 15 bp, Homo sapiens
aaaaacaacctaaca

SEQ ID NO: 409026 - DNA, 15 bp, Homo sapiens
gaaaaacaacctaac

SEQ ID NO: 409027 - DNA, 15 bp, Homo sapiens
agaaaaacaacctaa

SEQ ID NO: 409028 - DNA, 15 bp, Homo sapiens
aagaaaaacaaccta

SEQ ID NO: 409029 - DNA, 15 bp, Homo sapiens
aaagaaaaacaacct

SEQ ID NO: 409030 - DNA, 15 bp, Homo sapiens
aaaagaaaaacaacc

SEQ ID NO: 409031 - DNA, 15 bp, Homo sapiens
aaaaagaaaaacaac

SEQ ID NO: 409032 - DNA, 15 bp, Homo sapiens
gaaaaagaaaaacaa

SEQ ID NO: 409033 - DNA, 15 bp, Homo sapiens
agaaaaagaaaaaca

SEQ ID NO: 409034 - DNA, 15 bp, Homo sapiens
aagaaaaagaaaaac

SEQ ID NO: 409035 - DNA, 15 bp, Homo sapiens
aaaaagaaaaagaaa

SEQ ID NO: 409036 - DNA, 15 bp, Homo sapiens
aaaaaagaaaaagaa

SEQ ID NO: 409037 - DNA, 15 bp, Homo sapiens
gaaaaaagaaaaaga

SEQ ID NO: 409038 - DNA, 15 bp, Homo sapiens
agaaaaaagaaaaag

SEQ ID NO: 409039 - DNA, 15 bp, Homo sapiens
taaaagaaaaaagaa

SEQ ID NO: 409040 - DNA, 15 bp, Homo sapiens
ctaaaagaaaaaaga

SEQ ID NO: 409041 - DNA, 15 bp, Homo sapiens
tctaaaagaaaaaag

SEQ ID NO: 409042 - DNA, 15 bp, Homo sapiens
atctaaaagaaaaaa

SEQ ID NO: 409043 - DNA, 15 bp, Homo sapiens
gatctaaaagaaaaa

SEQ ID NO: 409044 - DNA, 15 bp, Homo sapiens
agatctaaaagaaaa

SEQ ID NO: 409045 - DNA, 15 bp, Homo sapiens
tagatctaaaagaaa

SEQ ID NO: 409046 - DNA, 15 bp, Homo sapiens
gtagatctaaaagaa

SEQ ID NO: 409047 - DNA, 15 bp, Homo sapiens
tgtagatctaaaaga

SEQ ID NO: 409048 - DNA, 15 bp, Homo sapiens
gtgtagatctaaaag

SEQ ID NO: 409049 - DNA, 15 bp, Homo sapiens
cgtgtagatctaaaa

SEQ ID NO: 409050 - DNA, 15 bp, Homo sapiens
ccgtgtagatctaaa

SEQ ID NO: 409051 - DNA, 15 bp, Homo sapiens
tccgtgtagatctaa

SEQ ID NO: 409052 - DNA, 15 bp, Homo sapiens
ttccgtgtagatcta

SEQ ID NO: 409053 - DNA, 15 bp, Homo sapiens
tttccgtgtagatct

SEQ ID NO: 409054 - DNA, 15 bp, Homo sapiens
ctttccgtgtagatc

SEQ ID NO: 409055 - DNA, 15 bp, Homo sapiens
tctttccgtgtagat

SEQ ID NO: 409056 - DNA, 15 bp, Homo sapiens
atctttccgtgtaga

SEQ ID NO: 409057 - DNA, 15 bp, Homo sapiens
aatctttccgtgtag

SEQ ID NO: 409058 - DNA, 15 bp, Homo sapiens
aaatctttccgtgta

SEQ ID NO: 409059 - DNA, 15 bp, Homo sapiens
caaatctttccgtgt

SEQ ID NO: 409060 - DNA, 15 bp, Homo sapiens
ccaaatctttccgtg

SEQ ID NO: 409061 - DNA, 15 bp, Homo sapiens
gccaaatctttccgt

SEQ ID NO: 409062 - DNA, 15 bp, Homo sapiens
tgccaaatctttccg

SEQ ID NO: 409063 - DNA, 15 bp, Homo sapiens
ctgccaaatctttcc

SEQ ID NO: 409064 - DNA, 15 bp, Homo sapiens
cctgccaaatctttc

SEQ ID NO: 409065 - DNA, 15 bp, Homo sapiens
acctgccaaatcttt

SEQ ID NO: 409066 - DNA, 15 bp, Homo sapiens
gacctgccaaatctt

SEQ ID NO: 409067 - DNA, 15 bp, Homo sapiens
agacctgccaaatct

SEQ ID NO: 409068 - DNA, 15 bp, Homo sapiens
cagacctgccaaatc

SEQ ID NO: 409069 - DNA, 15 bp, Homo sapiens
tcagacctgccaaat

SEQ ID NO: 409070 - DNA, 15 bp, Homo sapiens
atcagacctgccaaa

SEQ ID NO: 409071 - DNA, 15 bp, Homo sapiens
tatcagacctgccaa

SEQ ID NO: 409072 - DNA, 15 bp, Homo sapiens
ttatcagacctgcca

SEQ ID NO: 409073 - DNA, 15 bp, Homo sapiens
attatcagacctgcc

SEQ ID NO: 409074 - DNA, 15 bp, Homo sapiens
aattatcagacctgc

SEQ ID NO: 409075 - DNA, 15 bp, Homo sapiens
aaattatcagacctg

SEQ ID NO: 409076 - DNA, 15 bp, Homo sapiens
taaattatcagacct

SEQ ID NO: 409077 - DNA, 15 bp, Homo sapiens
ctaaattatcagacc

SEQ ID NO: 409078 - DNA, 15 bp, Homo sapiens
cctaaattatcagac

SEQ ID NO: 409079 - DNA, 15 bp, Homo sapiens
gcctaaattatcaga

SEQ ID NO: 409080 - DNA, 15 bp, Homo sapiens
ggcctaaattatcag

SEQ ID NO: 409081 - DNA, 15 bp, Homo sapiens
aggcctaaattatca

SEQ ID NO: 409082 - DNA, 15 bp, Homo sapiens
gaggcctaaattatc

SEQ ID NO: 409083 - DNA, 15 bp, Homo sapiens
agaggcctaaattat

SEQ ID NO: 409084 - DNA, 15 bp, Homo sapiens
cagaggcctaaatta

SEQ ID NO: 409085 - DNA, 15 bp, Homo sapiens
ccagaggcctaaatt

SEQ ID NO: 409086 - DNA, 15 bp, Homo sapiens
tccagaggcctaaat

SEQ ID NO: 409087 - DNA, 15 bp, Homo sapiens
ttccagaggcctaaa

SEQ ID NO: 409088 - DNA, 15 bp, Homo sapiens
tttccagaggcctaa

SEQ ID NO: 409089 - DNA, 15 bp, Homo sapiens
gtttccagaggccta

SEQ ID NO: 409090 - DNA, 15 bp, Homo sapiens
ggtttccagaggcct

SEQ ID NO: 409091 - DNA, 15 bp, Homo sapiens
aggtttccagaggcc

SEQ ID NO: 409092 - DNA, 15 bp, Homo sapiens
gaggtttccagaggc

SEQ ID NO: 409093 - DNA, 15 bp, Homo sapiens
tgaggtttccagagg

SEQ ID NO: 409094 - DNA, 15 bp, Homo sapiens
ctgaggtttccagag

SEQ ID NO: 409095 - DNA, 15 bp, Homo sapiens
actgaggtttccaga

SEQ ID NO: 409096 - DNA, 15 bp, Homo sapiens
aactgaggtttccag

SEQ ID NO: 409097 - DNA, 15 bp, Homo sapiens
taactgaggtttcca

SEQ ID NO: 409098 - DNA, 15 bp, Homo sapiens
ataactgaggtttcc

SEQ ID NO: 409099 - DNA, 15 bp, Homo sapiens
cataactgaggtttc

SEQ ID NO: 409100 - DNA, 15 bp, Homo sapiens
gcataactgaggttt

SEQ ID NO: 409101 - DNA, 15 bp, Homo sapiens
agcataactgaggtt

SEQ ID NO: 409102 - DNA, 15 bp, Homo sapiens
tagcataactgaggt

SEQ ID NO: 409103 - DNA, 15 bp, Homo sapiens
atagcataactgagg

SEQ ID NO: 409104 - DNA, 15 bp, Homo sapiens
tatagcataactgag

SEQ ID NO: 409105 - DNA, 15 bp, Homo sapiens
ttatagcataactga

SEQ ID NO: 409106 - DNA, 15 bp, Homo sapiens
tttatagcataactg

SEQ ID NO: 409107 - DNA, 15 bp, Homo sapiens
ctttatagcataact

SEQ ID NO: 409108 - DNA, 15 bp, Homo sapiens
tctttatagcataac

SEQ ID NO: 409109 - DNA, 15 bp, Homo sapiens
ctctttatagcataa

SEQ ID NO: 409110 - DNA, 15 bp, Homo sapiens
actctttatagcata

SEQ ID NO: 409111 - DNA, 15 bp, Homo sapiens
tactctttatagcat

SEQ ID NO: 409112 - DNA, 15 bp, Homo sapiens
ttactctttatagca

SEQ ID NO: 409113 - DNA, 15 bp, Homo sapiens
tttactctttatagc

SEQ ID NO: 409114 - DNA, 15 bp, Homo sapiens
ctttactctttatag

SEQ ID NO: 409115 - DNA, 15 bp, Homo sapiens
cctttactctttata

SEQ ID NO: 409116 - DNA, 15 bp, Homo sapiens
ccctttactctttat

SEQ ID NO: 409117 - DNA, 15 bp, Homo sapiens
gccctttactcttta

SEQ ID NO: 409118 - DNA, 15 bp, Homo sapiens
tgccctttactcttt

SEQ ID NO: 409119 - DNA, 15 bp, Homo sapiens
ttgccctttactctt

SEQ ID NO: 409120 - DNA, 15 bp, Homo sapiens
gttgccctttactct

SEQ ID NO: 409121 - DNA, 15 bp, Homo sapiens
tgttgccctttactc

SEQ ID NO: 409122 - DNA, 15 bp, Homo sapiens
atgttgccctttact

SEQ ID NO: 409123 - DNA, 15 bp, Homo sapiens
gatgttgccctttac

SEQ ID NO: 409124 - DNA, 15 bp, Homo sapiens
tgatgttgcccttta

SEQ ID NO: 409125 - DNA, 15 bp, Homo sapiens
atgatgttgcccttt

SEQ ID NO: 409126 - DNA, 15 bp, Homo sapiens
tatgatgttgccctt

SEQ ID NO: 409127 - DNA, 15 bp, Homo sapiens
atatgatgttgccct

SEQ ID NO: 409128 - DNA, 15 bp, Homo sapiens
catatgatgttgccc

SEQ ID NO: 409129 - DNA, 15 bp, Homo sapiens
acatatgatgttgcc

SEQ ID NO: 409130 - DNA, 15 bp, Homo sapiens
aacatatgatgttgc

SEQ ID NO: 409131 - DNA, 15 bp, Homo sapiens
taacatatgatgttg

SEQ ID NO: 409132 - DNA, 15 bp, Homo sapiens
ataacatatgatgtt

SEQ ID NO: 409133 - DNA, 15 bp, Homo sapiens
aataacatatgatgt

SEQ ID NO: 409134 - DNA, 15 bp, Homo sapiens
caataacatatgatg

SEQ ID NO: 409135 - DNA, 15 bp, Homo sapiens
acaataacatatgat

SEQ ID NO: 409136 - DNA, 15 bp, Homo sapiens
tacaataacatatga

SEQ ID NO: 409137 - DNA, 15 bp, Homo sapiens
ctacaataacatatg

SEQ ID NO: 409138 - DNA, 15 bp, Homo sapiens
cctacaataacatat

SEQ ID NO: 409139 - DNA, 15 bp, Homo sapiens
ccctacaataacata

SEQ ID NO: 409140 - DNA, 15 bp, Homo sapiens
accctacaataacat

SEQ ID NO: 409141 - DNA, 15 bp, Homo sapiens
aaccctacaataaca

SEQ ID NO: 409142 - DNA, 15 bp, Homo sapiens
gaaccctacaataac

SEQ ID NO: 409143 - DNA, 15 bp, Homo sapiens
tgaaccctacaataa

SEQ ID NO: 409144 - DNA, 15 bp, Homo sapiens
gtgaaccctacaata

SEQ ID NO: 409145 - DNA, 15 bp, Homo sapiens
tgtgaaccctacaat

SEQ ID NO: 409146 - DNA, 15 bp, Homo sapiens
ctgtgaaccctacaa

SEQ ID NO: 409147 - DNA, 15 bp, Homo sapiens
actgtgaaccctaca

SEQ ID NO: 409148 - DNA, 15 bp, Homo sapiens
aactgtgaaccctac

SEQ ID NO: 409149 - DNA, 15 bp, Homo sapiens
aaactgtgaacccta

SEQ ID NO: 409150 - DNA, 15 bp, Homo sapiens
taaactgtgaaccct

SEQ ID NO: 409151 - DNA, 15 bp, Homo sapiens
ctaaactgtgaaccc

SEQ ID NO: 409152 - DNA, 15 bp, Homo sapiens
cctaaactgtgaacc

SEQ ID NO: 409153 - DNA, 15 bp, Homo sapiens
tcctaaactgtgaac

SEQ ID NO: 409154 - DNA, 15 bp, Homo sapiens
atcctaaactgtgaa

SEQ ID NO: 409155 - DNA, 15 bp, Homo sapiens
catcctaaactgtga

SEQ ID NO: 409156 - DNA, 15 bp, Homo sapiens
gcatcctaaactgtg

SEQ ID NO: 409157 - DNA, 15 bp, Homo sapiens
agcatcctaaactgt

SEQ ID NO: 409158 - DNA, 15 bp, Homo sapiens
aagcatcctaaactg

SEQ ID NO: 409159 - DNA, 15 bp, Homo sapiens
caagcatcctaaact

SEQ ID NO: 409160 - DNA, 15 bp, Homo sapiens
ccaagcatcctaaac

SEQ ID NO: 409161 - DNA, 15 bp, Homo sapiens
accaagcatcctaaa

SEQ ID NO: 409162 - DNA, 15 bp, Homo sapiens
gaccaagcatcctaa

SEQ ID NO: 409163 - DNA, 15 bp, Homo sapiens
agaccaagcatccta

SEQ ID NO: 409164 - DNA, 15 bp, Homo sapiens
aagaccaagcatcct

SEQ ID NO: 409165 - DNA, 15 bp, Homo sapiens
taagaccaagcatcc

SEQ ID NO: 409166 - DNA, 15 bp, Homo sapiens
ataagaccaagcatc

SEQ ID NO: 409167 - DNA, 15 bp, Homo sapiens
aataagaccaagcat

SEQ ID NO: 409168 - DNA, 15 bp, Homo sapiens
aaataagaccaagca

SEQ ID NO: 409169 - DNA, 15 bp, Homo sapiens
aaaataagaccaagc

SEQ ID NO: 409170 - DNA, 15 bp, Homo sapiens
caaaataagaccaag

SEQ ID NO: 409171 - DNA, 15 bp, Homo sapiens
ccaaaataagaccaa

SEQ ID NO: 409172 - DNA, 15 bp, Homo sapiens
accaaaataagacca

SEQ ID NO: 409173 - DNA, 15 bp, Homo sapiens
taccaaaataagacc

SEQ ID NO: 409174 - DNA, 15 bp, Homo sapiens
ttaccaaaataagac

SEQ ID NO: 409175 - DNA, 15 bp, Homo sapiens
tttaccaaaataaga

SEQ ID NO: 409176 - DNA, 15 bp, Homo sapiens
atttaccaaaataag

SEQ ID NO: 409177 - DNA, 15 bp, Homo sapiens
tatttaccaaaataa

SEQ ID NO: 409178 - DNA, 15 bp, Homo sapiens
gtatttaccaaaata

SEQ ID NO: 409179 - DNA, 15 bp, Homo sapiens
agtatttaccaaaat

SEQ ID NO: 409180 - DNA, 15 bp, Homo sapiens
tagtatttaccaaaa

SEQ ID NO: 409181 - DNA, 15 bp, Homo sapiens
atagtatttaccaaa

SEQ ID NO: 409182 - DNA, 15 bp, Homo sapiens
aatagtatttaccaa

SEQ ID NO: 409183 - DNA, 15 bp, Homo sapiens
aaatagtatttacca

SEQ ID NO: 409184 - DNA, 15 bp, Homo sapiens
gaaatagtatttacc

SEQ ID NO: 409185 - DNA, 15 bp, Homo sapiens
agaaatagtatttac

SEQ ID NO: 409186 - DNA, 15 bp, Homo sapiens
tagaaatagtattta

SEQ ID NO: 409187 - DNA, 15 bp, Homo sapiens
atagaaatagtattt

SEQ ID NO: 409188 - DNA, 15 bp, Homo sapiens
aatagaaatagtatt

SEQ ID NO: 409189 - DNA, 15 bp, Homo sapiens
taatagaaatagtat

SEQ ID NO: 409190 - DNA, 15 bp, Homo sapiens
ataatagaaatagta

SEQ ID NO: 409191 - DNA, 15 bp, Homo sapiens
tataatagaaatagt

SEQ ID NO: 409192 - DNA, 15 bp, Homo sapiens
ttataatagaaatag

SEQ ID NO: 409193 - DNA, 15 bp, Homo sapiens
tttataatagaaata

SEQ ID NO: 409194 - DNA, 15 bp, Homo sapiens
atttataatagaaat

SEQ ID NO: 409195 - DNA, 15 bp, Homo sapiens
catttataatagaaa

SEQ ID NO: 409196 - DNA, 15 bp, Homo sapiens
gcatttataatagaa

SEQ ID NO: 409197 - DNA, 15 bp, Homo sapiens
tgcatttataataga

SEQ ID NO: 409198 - DNA, 15 bp, Homo sapiens
gtgcatttataatag

SEQ ID NO: 409199 - DNA, 15 bp, Homo sapiens
tgtgcatttataata

SEQ ID NO: 409200 - DNA, 15 bp, Homo sapiens
atgtgcatttataat

SEQ ID NO: 409201 - DNA, 15 bp, Homo sapiens
aatgtgcatttataa

SEQ ID NO: 409202 - DNA, 15 bp, Homo sapiens
aaatgtgcatttata

SEQ ID NO: 409203 - DNA, 15 bp, Homo sapiens
gaaatgtgcatttat

SEQ ID NO: 409204 - DNA, 15 bp, Homo sapiens
tgaaatgtgcattta

SEQ ID NO: 409205 - DNA, 15 bp, Homo sapiens
ttgaaatgtgcattt

SEQ ID NO: 409206 - DNA, 15 bp, Homo sapiens
tttgaaatgtgcatt

SEQ ID NO: 409207 - DNA, 15 bp, Homo sapiens
ttttgaaatgtgcat

SEQ ID NO: 409208 - DNA, 15 bp, Homo sapiens
tttttgaaatgtgca

SEQ ID NO: 409209 - DNA, 15 bp, Homo sapiens
atttttgaaatgtgc

SEQ ID NO: 409210 - DNA, 15 bp, Homo sapiens
tatttttgaaatgtg

SEQ ID NO: 409211 - DNA, 15 bp, Homo sapiens
ttatttttgaaatgt

SEQ ID NO: 409212 - DNA, 15 bp, Homo sapiens
attatttttgaaatg

SEQ ID NO: 409213 - DNA, 15 bp, Homo sapiens
cattatttttgaaat

SEQ ID NO: 409214 - DNA, 15 bp, Homo sapiens
tcattatttttgaaa

SEQ ID NO: 409215 - DNA, 15 bp, Homo sapiens
ttcattatttttgaa

SEQ ID NO: 409216 - DNA, 15 bp, Homo sapiens
attcattatttttga

SEQ ID NO: 409217 - DNA, 15 bp, Homo sapiens
gattcattatttttg

SEQ ID NO: 409218 - DNA, 15 bp, Homo sapiens
tgattcattattttt

SEQ ID NO: 409219 - DNA, 15 bp, Homo sapiens
atgattcattatttt

SEQ ID NO: 409220 - DNA, 15 bp, Homo sapiens
tatgattcattattt

SEQ ID NO: 409221 - DNA, 15 bp, Homo sapiens
atatgattcattatt

SEQ ID NO: 409222 - DNA, 15 bp, Homo sapiens
tatatgattcattat

SEQ ID NO: 409223 - DNA, 15 bp, Homo sapiens
atatatgattcatta

SEQ ID NO: 409224 - DNA, 15 bp, Homo sapiens
aatatatgattcatt

SEQ ID NO: 409225 - DNA, 15 bp, Homo sapiens
aaatatatgattcat

SEQ ID NO: 409226 - DNA, 15 bp, Homo sapiens
aaaatatatgattca

SEQ ID NO: 409227 - DNA, 15 bp, Homo sapiens
aaaaatatatgattc

SEQ ID NO: 409228 - DNA, 15 bp, Homo sapiens
gaaaaatatatgatt

SEQ ID NO: 409229 - DNA, 15 bp, Homo sapiens
agaaaaatatatgat

SEQ ID NO: 409230 - DNA, 15 bp, Homo sapiens
aagaaaaatatatga

SEQ ID NO: 409231 - DNA, 15 bp, Homo sapiens
aaagaaaaatatatg

SEQ ID NO: 409232 - DNA, 15 bp, Homo sapiens
aaaagaaaaatatat

SEQ ID NO: 409233 - DNA, 15 bp, Homo sapiens
aaaaagaaaaatata

SEQ ID NO: 409234 - DNA, 15 bp, Homo sapiens
aaaaaagaaaaatat

SEQ ID NO: 409235 - DNA, 15 bp, Homo sapiens
aaaaaaagaaaaata

SEQ ID NO: 409236 - DNA, 15 bp, Homo sapiens
aaaaaaaagaaaaat

SEQ ID NO: 409237 - DNA, 15 bp, Homo sapiens
gaaaaaaaaagaaaa

SEQ ID NO: 409238 - DNA, 15 bp, Homo sapiens
agaaaaaaaaagaaa

SEQ ID NO: 409239 - DNA, 15 bp, Homo sapiens
aagaaaaaaaaagaa

SEQ ID NO: 409240 - DNA, 15 bp, Homo sapiens
aaagaaaaaaaaaga

SEQ ID NO: 409241 - DNA, 15 bp, Homo sapiens
aaaagaaaaaaaaag

SEQ ID NO: 409242 - DNA, 15 bp, Homo sapiens
gaaaaagaaaaaaaa

SEQ ID NO: 409243 - DNA, 15 bp, Homo sapiens
tgaaaaagaaaaaaa

SEQ ID NO: 409244 - DNA, 15 bp, Homo sapiens
gtgaaaaagaaaaaa

SEQ ID NO: 409245 - DNA, 15 bp, Homo sapiens
agtgaaaaagaaaaa

SEQ ID NO: 409246 - DNA, 15 bp, Homo sapiens
tagtgaaaaagaaaa

SEQ ID NO: 409247 - DNA, 15 bp, Homo sapiens
atagtgaaaaagaaa

SEQ ID NO: 409248 - DNA, 15 bp, Homo sapiens
aatagtgaaaaagaa

SEQ ID NO: 409249 - DNA, 15 bp, Homo sapiens
gaatagtgaaaaaga

SEQ ID NO: 409250 - DNA, 15 bp, Homo sapiens
agaatagtgaaaaag

SEQ ID NO: 409251 - DNA, 15 bp, Homo sapiens
aagaatagtgaaaaa

SEQ ID NO: 409252 - DNA, 15 bp, Homo sapiens
aaagaatagtgaaaa

SEQ ID NO: 409253 - DNA, 15 bp, Homo sapiens
gaaagaatagtgaaa

SEQ ID NO: 409254 - DNA, 15 bp, Homo sapiens
tgaaagaatagtgaa

SEQ ID NO: 409255 - DNA, 15 bp, Homo sapiens
atgaaagaatagtga

SEQ ID NO: 409256 - DNA, 15 bp, Homo sapiens
aatgaaagaatagtg

SEQ ID NO: 409257 - DNA, 15 bp, Homo sapiens
aaatgaaagaatagt

SEQ ID NO: 409258 - DNA, 15 bp, Homo sapiens
aaaatgaaagaatag

SEQ ID NO: 409259 - DNA, 15 bp, Homo sapiens
taaaatgaaagaata

SEQ ID NO: 409260 - DNA, 15 bp, Homo sapiens
ataaaatgaaagaat

SEQ ID NO: 409261 - DNA, 15 bp, Homo sapiens
tataaaatgaaagaa

SEQ ID NO: 409262 - DNA, 15 bp, Homo sapiens
ttataaaatgaaaga

SEQ ID NO: 409263 - DNA, 15 bp, Homo sapiens
cttataaaatgaaag

SEQ ID NO: 409264 - DNA, 15 bp, Homo sapiens
tcttataaaatgaaa

SEQ ID NO: 409265 - DNA, 15 bp, Homo sapiens
ttcttataaaatgaa

SEQ ID NO: 409266 - DNA, 15 bp, Homo sapiens
cttcttataaaatga

SEQ ID NO: 409267 - DNA, 15 bp, Homo sapiens
gcttcttataaaatg

SEQ ID NO: 409268 - DNA, 15 bp, Homo sapiens
tgcttcttataaaat

SEQ ID NO: 409269 - DNA, 15 bp, Homo sapiens
atgcttcttataaaa

SEQ ID NO: 409270 - DNA, 15 bp, Homo sapiens
aatgcttcttataaa

SEQ ID NO: 409271 - DNA, 15 bp, Homo sapiens
aaatgcttcttataa

SEQ ID NO: 409272 - DNA, 15 bp, Homo sapiens
gaaatgcttcttata

SEQ ID NO: 409273 - DNA, 15 bp, Homo sapiens
ggaaatgcttcttat

SEQ ID NO: 409274 - DNA, 15 bp, Homo sapiens
aggaaatgcttctta

SEQ ID NO: 409275 - DNA, 15 bp, Homo sapiens
aaggaaatgcttctt

SEQ ID NO: 409276 - DNA, 15 bp, Homo sapiens
aaaggaaatgcttct

SEQ ID NO: 409277 - DNA, 15 bp, Homo sapiens
aaaaggaaatgcttc

SEQ ID NO: 409278 - DNA, 15 bp, Homo sapiens
aaaaaggaaatgctt

SEQ ID NO: 409279 - DNA, 15 bp, Homo sapiens
taaaaaggaaatgct

SEQ ID NO: 409280 - DNA, 15 bp, Homo sapiens
ataaaaaggaaatgc

SEQ ID NO: 409281 - DNA, 15 bp, Homo sapiens
cataaaaaggaaatg

SEQ ID NO: 409282 - DNA, 15 bp, Homo sapiens
acataaaaaggaaat

SEQ ID NO: 409283 - DNA, 15 bp, Homo sapiens
gacataaaaaggaaa

SEQ ID NO: 409284 - DNA, 15 bp, Homo sapiens
agacataaaaaggaa

SEQ ID NO: 409285 - DNA, 15 bp, Homo sapiens
aagacataaaaagga

SEQ ID NO: 409286 - DNA, 15 bp, Homo sapiens
taagacataaaaagg

SEQ ID NO: 409287 - DNA, 15 bp, Homo sapiens
ctaagacataaaaag

SEQ ID NO: 409288 - DNA, 15 bp, Homo sapiens
cctaagacataaaaa

SEQ ID NO: 409289 - DNA, 15 bp, Homo sapiens
ccctaagacataaaa

SEQ ID NO: 409290 - DNA, 15 bp, Homo sapiens
accctaagacataaa

SEQ ID NO: 409291 - DNA, 15 bp, Homo sapiens
taccctaagacataa

SEQ ID NO: 409292 - DNA, 15 bp, Homo sapiens
ctaccctaagacata

SEQ ID NO: 409293 - DNA, 15 bp, Homo sapiens
cctaccctaagacat

SEQ ID NO: 409294 - DNA, 15 bp, Homo sapiens
acctaccctaagaca

SEQ ID NO: 409295 - DNA, 15 bp, Homo sapiens
tacctaccctaagac

SEQ ID NO: 409296 - DNA, 15 bp, Homo sapiens
ctacctaccctaaga

SEQ ID NO: 409297 - DNA, 15 bp, Homo sapiens
actacctaccctaag

SEQ ID NO: 409298 - DNA, 15 bp, Homo sapiens
cactacctaccctaa

SEQ ID NO: 409299 - DNA, 15 bp, Homo sapiens
ccactacctacccta

SEQ ID NO: 409300 - DNA, 15 bp, Homo sapiens
gccactacctaccct

SEQ ID NO: 409301 - DNA, 15 bp, Homo sapiens
agccactacctaccc

SEQ ID NO: 409302 - DNA, 15 bp, Homo sapiens
gagccactacctacc

SEQ ID NO: 409303 - DNA, 15 bp, Homo sapiens
ggagccactacctac

SEQ ID NO: 409304 - DNA, 15 bp, Homo sapiens
tggagccactaccta

SEQ ID NO: 409305 - DNA, 15 bp, Homo sapiens
ttggagccactacct

SEQ ID NO: 409306 - DNA, 15 bp, Homo sapiens
attggagccactacc

SEQ ID NO: 409307 - DNA, 15 bp, Homo sapiens
gattggagccactac

SEQ ID NO: 409308 - DNA, 15 bp, Homo sapiens
agattggagccacta

SEQ ID NO: 409309 - DNA, 15 bp, Homo sapiens
tagattggagccact

SEQ ID NO: 409310 - DNA, 15 bp, Homo sapiens
ctagattggagccac

SEQ ID NO: 409311 - DNA, 15 bp, Homo sapiens
gctagattggagcca

SEQ ID NO: 409312 - DNA, 15 bp, Homo sapiens
tgctagattggagcc

SEQ ID NO: 409313 - DNA, 15 bp, Homo sapiens
gtgctagattggagc

SEQ ID NO: 409314 - DNA, 15 bp, Homo sapiens
agtgctagattggag

SEQ ID NO: 409315 - DNA, 15 bp, Homo sapiens
tagtgctagattgga

SEQ ID NO: 409316 - DNA, 15 bp, Homo sapiens
ttagtgctagattgg

SEQ ID NO: 409317 - DNA, 15 bp, Homo sapiens
cttagtgctagattg

SEQ ID NO: 409318 - DNA, 15 bp, Homo sapiens
acttagtgctagatt

SEQ ID NO: 409319 - DNA, 15 bp, Homo sapiens
aacttagtgctagat

SEQ ID NO: 409320 - DNA, 15 bp, Homo sapiens
caacttagtgctaga

SEQ ID NO: 409321 - DNA, 15 bp, Homo sapiens
acaacttagtgctag

SEQ ID NO: 409322 - DNA, 15 bp, Homo sapiens
aacaacttagtgcta

SEQ ID NO: 409323 - DNA, 15 bp, Homo sapiens
aaacaacttagtgct

SEQ ID NO: 409324 - DNA, 15 bp, Homo sapiens
aaaacaacttagtgc

SEQ ID NO: 409325 - DNA, 15 bp, Homo sapiens
aaaaacaacttagtg

SEQ ID NO: 409326 - DNA, 15 bp, Homo sapiens
taaaaacaacttagt

SEQ ID NO: 409327 - DNA, 15 bp, Homo sapiens
ataaaaacaacttag

SEQ ID NO: 409328 - DNA, 15 bp, Homo sapiens
aataaaaacaactta

SEQ ID NO: 409329 - DNA, 15 bp, Homo sapiens
taataaaaacaactt

SEQ ID NO: 409330 - DNA, 15 bp, Homo sapiens
gtaataaaaacaact

SEQ ID NO: 409331 - DNA, 15 bp, Homo sapiens
agtaataaaaacaac

SEQ ID NO: 409332 - DNA, 15 bp, Homo sapiens
tagtaataaaaacaa

SEQ ID NO: 409333 - DNA, 15 bp, Homo sapiens
atagtaataaaaaca

SEQ ID NO: 409334 - DNA, 15 bp, Homo sapiens
aatagtaataaaaac

SEQ ID NO: 409335 - DNA, 15 bp, Homo sapiens
taatagtaataaaaa

SEQ ID NO: 409336 - DNA, 15 bp, Homo sapiens
ataatagtaataaaa

SEQ ID NO: 409337 - DNA, 15 bp, Homo sapiens
tataatagtaataaa

SEQ ID NO: 409338 - DNA, 15 bp, Homo sapiens
atataatagtaataa

SEQ ID NO: 409339 - DNA, 15 bp, Homo sapiens
aatataatagtaata

SEQ ID NO: 409340 - DNA, 15 bp, Homo sapiens
taatataatagtaat

SEQ ID NO: 409341 - DNA, 15 bp, Homo sapiens
ataatataatagtaa

SEQ ID NO: 409342 - DNA, 15 bp, Homo sapiens
aataatataatagta

SEQ ID NO: 409343 - DNA, 15 bp, Homo sapiens
aaataatataatagt

SEQ ID NO: 409344 - DNA, 15 bp, Homo sapiens
gaaataatataatag

SEQ ID NO: 409345 - DNA, 15 bp, Homo sapiens
tgaaataatataata

SEQ ID NO: 409346 - DNA, 15 bp, Homo sapiens
gtgaaataatataat

SEQ ID NO: 409347 - DNA, 15 bp, Homo sapiens
agtgaaataatataa

SEQ ID NO: 409348 - DNA, 15 bp, Homo sapiens
aagtgaaataatata

SEQ ID NO: 409349 - DNA, 15 bp, Homo sapiens
taagtgaaataatat

SEQ ID NO: 409350 - DNA, 15 bp, Homo sapiens
gtaagtgaaataata

SEQ ID NO: 409351 - DNA, 15 bp, Homo sapiens
ggtaagtgaaataat

SEQ ID NO: 409352 - DNA, 15 bp, Homo sapiens
cggtaagtgaaataa

SEQ ID NO: 409353 - DNA, 15 bp, Homo sapiens
tcggtaagtgaaata

SEQ ID NO: 409354 - DNA, 15 bp, Homo sapiens
ttcggtaagtgaaat

SEQ ID NO: 409355 - DNA, 15 bp, Homo sapiens
cttcggtaagtgaaa

SEQ ID NO: 409356 - DNA, 15 bp, Homo sapiens
acttcggtaagtgaa

SEQ ID NO: 409357 - DNA, 15 bp, Homo sapiens
tacttcggtaagtga

SEQ ID NO: 409358 - DNA, 15 bp, Homo sapiens
gtacttcggtaagtg

SEQ ID NO: 409359 - DNA, 15 bp, Homo sapiens
tgtacttcggtaagt

SEQ ID NO: 409360 - DNA, 15 bp, Homo sapiens
ctgtacttcggtaag

SEQ ID NO: 409361 - DNA, 15 bp, Homo sapiens
tctgtacttcggtaa

SEQ ID NO: 409362 - DNA, 15 bp, Homo sapiens
ctctgtacttcggta

SEQ ID NO: 409363 - DNA, 15 bp, Homo sapiens
actctgtacttcggt

SEQ ID NO: 409364 - DNA, 15 bp, Homo sapiens
tactctgtacttcgg

SEQ ID NO: 409365 - DNA, 15 bp, Homo sapiens
ttactctgtacttcg

SEQ ID NO: 409366 - DNA, 15 bp, Homo sapiens
attactctgtacttc

SEQ ID NO: 409367 - DNA, 15 bp, Homo sapiens
aattactctgtactt

SEQ ID NO: 409368 - DNA, 15 bp, Homo sapiens
aaattactctgtact

SEQ ID NO: 409369 - DNA, 15 bp, Homo sapiens
caaattactctgtac

SEQ ID NO: 409370 - DNA, 15 bp, Homo sapiens
acaaattactctgta

SEQ ID NO: 409371 - DNA, 15 bp, Homo sapiens
aacaaattactctgt

SEQ ID NO: 409372 - DNA, 15 bp, Homo sapiens
aaacaaattactctg

SEQ ID NO: 409373 - DNA, 15 bp, Homo sapiens
taaacaaattactct

SEQ ID NO: 409374 - DNA, 15 bp, Homo sapiens
gtaaacaaattactc

SEQ ID NO: 409375 - DNA, 15 bp, Homo sapiens
tgtaaacaaattact

SEQ ID NO: 409376 - DNA, 15 bp, Homo sapiens
ttgtaaacaaattac

SEQ ID NO: 409377 - DNA, 15 bp, Homo sapiens
tttgtaaacaaatta

SEQ ID NO: 409378 - DNA, 15 bp, Homo sapiens
atttgtaaacaaatt

SEQ ID NO: 409379 - DNA, 15 bp, Homo sapiens
aatttgtaaacaaat

SEQ ID NO: 409380 - DNA, 15 bp, Homo sapiens
taatttgtaaacaaa

SEQ ID NO: 409381 - DNA, 15 bp, Homo sapiens
ttaatttgtaaacaa

SEQ ID NO: 409382 - DNA, 15 bp, Homo sapiens
gttaatttgtaaaca

SEQ ID NO: 409383 - DNA, 15 bp, Homo sapiens
agttaatttgtaaac

SEQ ID NO: 409384 - DNA, 15 bp, Homo sapiens
tagttaatttgtaaa

SEQ ID NO: 409385 - DNA, 15 bp, Homo sapiens
ctagttaatttgtaa

SEQ ID NO: 409386 - DNA, 15 bp, Homo sapiens
gctagttaatttgta

SEQ ID NO: 409387 - DNA, 15 bp, Homo sapiens
tgctagttaatttgt

SEQ ID NO: 409388 - DNA, 15 bp, Homo sapiens
ttgctagttaatttg

SEQ ID NO: 409389 - DNA, 15 bp, Homo sapiens
attgctagttaattt

SEQ ID NO: 409390 - DNA, 15 bp, Homo sapiens
cattgctagttaatt

SEQ ID NO: 409391 - DNA, 15 bp, Homo sapiens
ccattgctagttaat

SEQ ID NO: 409392 - DNA, 15 bp, Homo sapiens
gccattgctagttaa

SEQ ID NO: 409393 - DNA, 15 bp, Homo sapiens
agccattgctagtta

SEQ ID NO: 409394 - DNA, 15 bp, Homo sapiens
tagccattgctagtt

SEQ ID NO: 409395 - DNA, 15 bp, Homo sapiens
ttagccattgctagt

SEQ ID NO: 409396 - DNA, 15 bp, Homo sapiens
cttagccattgctag

SEQ ID NO: 409397 - DNA, 15 bp, Homo sapiens
tcttagccattgcta

SEQ ID NO: 409398 - DNA, 15 bp, Homo sapiens
ttcttagccattgct

SEQ ID NO: 409399 - DNA, 15 bp, Homo sapiens
attcttagccattgc

SEQ ID NO: 409400 - DNA, 15 bp, Homo sapiens
cattcttagccattg

SEQ ID NO: 409401 - DNA, 15 bp, Homo sapiens
tcattcttagccatt

SEQ ID NO: 409402 - DNA, 15 bp, Homo sapiens
atcattcttagccat

SEQ ID NO: 409403 - DNA, 15 bp, Homo sapiens
aatcattcttagcca

SEQ ID NO: 409404 - DNA, 15 bp, Homo sapiens
aaatcattcttagcc

SEQ ID NO: 409405 - DNA, 15 bp, Homo sapiens
taaatcattcttagc

SEQ ID NO: 409406 - DNA, 15 bp, Homo sapiens
ttaaatcattcttag

SEQ ID NO: 409407 - DNA, 15 bp, Homo sapiens
tttaaatcattctta

SEQ ID NO: 409408 - DNA, 15 bp, Homo sapiens
gtttaaatcattctt

SEQ ID NO: 409409 - DNA, 15 bp, Homo sapiens
agtttaaatcattct

SEQ ID NO: 409410 - DNA, 15 bp, Homo sapiens
aagtttaaatcattc

SEQ ID NO: 409411 - DNA, 15 bp, Homo sapiens
aaagtttaaatcatt

SEQ ID NO: 409412 - DNA, 15 bp, Homo sapiens
gaaagtttaaatcat

SEQ ID NO: 409413 - DNA, 15 bp, Homo sapiens
agaaagtttaaatca

SEQ ID NO: 409414 - DNA, 15 bp, Homo sapiens
gagaaagtttaaatc

SEQ ID NO: 409415 - DNA, 15 bp, Homo sapiens
tgagaaagtttaaat

SEQ ID NO: 409416 - DNA, 15 bp, Homo sapiens
gtgagaaagtttaaa

SEQ ID NO: 409417 - DNA, 15 bp, Homo sapiens
tgtgagaaagtttaa

SEQ ID NO: 409418 - DNA, 15 bp, Homo sapiens
ttgtgagaaagttta

SEQ ID NO: 409419 - DNA, 15 bp, Homo sapiens
tttgtgagaaagttt

SEQ ID NO: 409420 - DNA, 15 bp, Homo sapiens
atttgtgagaaagtt

SEQ ID NO: 409421 - DNA, 15 bp, Homo sapiens
aatttgtgagaaagt

SEQ ID NO: 409422 - DNA, 15 bp, Homo sapiens
caatttgtgagaaag

SEQ ID NO: 409423 - DNA, 15 bp, Homo sapiens
acaatttgtgagaaa

SEQ ID NO: 409424 - DNA, 15 bp, Homo sapiens
aacaatttgtgagaa

SEQ ID NO: 409425 - DNA, 15 bp, Homo sapiens
aaacaatttgtgaga

SEQ ID NO: 409426 - DNA, 15 bp, Homo sapiens
gaaacaatttgtgag

SEQ ID NO: 409427 - DNA, 15 bp, Homo sapiens
tgaaacaatttgtga

SEQ ID NO: 409428 - DNA, 15 bp, Homo sapiens
atgaaacaatttgtg

SEQ ID NO: 409429 - DNA, 15 bp, Homo sapiens
gatgaaacaatttgt

SEQ ID NO: 409430 - DNA, 15 bp, Homo sapiens
ggatgaaacaatttg

SEQ ID NO: 409431 - DNA, 15 bp, Homo sapiens
aggatgaaacaattt

SEQ ID NO: 409432 - DNA, 15 bp, Homo sapiens
taggatgaaacaatt

SEQ ID NO: 409433 - DNA, 15 bp, Homo sapiens
gtaggatgaaacaat

SEQ ID NO: 409434 - DNA, 15 bp, Homo sapiens
cgtaggatgaaacaa

SEQ ID NO: 409435 - DNA, 15 bp, Homo sapiens
acgtaggatgaaaca

SEQ ID NO: 409436 - DNA, 15 bp, Homo sapiens
aacgtaggatgaaac

SEQ ID NO: 409437 - DNA, 15 bp, Homo sapiens
aaacgtaggatgaaa

SEQ ID NO: 409438 - DNA, 15 bp, Homo sapiens
aaaacgtaggatgaa

SEQ ID NO: 409439 - DNA, 15 bp, Homo sapiens
aaaaacgtaggatga

SEQ ID NO: 409440 - DNA, 15 bp, Homo sapiens
gaaaaacgtaggatg

SEQ ID NO: 409441 - DNA, 15 bp, Homo sapiens
agaaaaacgtaggat

SEQ ID NO: 409442 - DNA, 15 bp, Homo sapiens
tagaaaaacgtagga

SEQ ID NO: 409443 - DNA, 15 bp, Homo sapiens
gtagaaaaacgtagg

SEQ ID NO: 409444 - DNA, 15 bp, Homo sapiens
agtagaaaaacgtag

SEQ ID NO: 409445 - DNA, 15 bp, Homo sapiens
aagtagaaaaacgta

SEQ ID NO: 409446 - DNA, 15 bp, Homo sapiens
aaagtagaaaaacgt

SEQ ID NO: 409447 - DNA, 15 bp, Homo sapiens
taaagtagaaaaacg

SEQ ID NO: 409448 - DNA, 15 bp, Homo sapiens
gtaaagtagaaaaac

SEQ ID NO: 409449 - DNA, 15 bp, Homo sapiens
ggtaaagtagaaaaa

SEQ ID NO: 409450 - DNA, 15 bp, Homo sapiens
tggtaaagtagaaaa

SEQ ID NO: 409451 - DNA, 15 bp, Homo sapiens
gtggtaaagtagaaa

SEQ ID NO: 409452 - DNA, 15 bp, Homo sapiens
ggtggtaaagtagaa

SEQ ID NO: 409453 - DNA, 15 bp, Homo sapiens
tggtggtaaagtaga

SEQ ID NO: 409454 - DNA, 15 bp, Homo sapiens
gtggtggtaaagtag

SEQ ID NO: 409455 - DNA, 15 bp, Homo sapiens
ggtggtggtaaagta

SEQ ID NO: 409456 - DNA, 15 bp, Homo sapiens
aggtggtggtaaagt

SEQ ID NO: 409457 - DNA, 15 bp, Homo sapiens
taggtggtggtaaag

SEQ ID NO: 409458 - DNA, 15 bp, Homo sapiens
ataggtggtggtaaa

SEQ ID NO: 409459 - DNA, 15 bp, Homo sapiens
gataggtggtggtaa

SEQ ID NO: 409460 - DNA, 15 bp, Homo sapiens
agataggtggtggta

SEQ ID NO: 409461 - DNA, 15 bp, Homo sapiens
cagataggtggtggt

SEQ ID NO: 409462 - DNA, 15 bp, Homo sapiens
gcagataggtggtgg

SEQ ID NO: 409463 - DNA, 15 bp, Homo sapiens
tgcagataggtggtg

SEQ ID NO: 409464 - DNA, 15 bp, Homo sapiens
ctgcagataggtggt

SEQ ID NO: 409465 - DNA, 15 bp, Homo sapiens
actgcagataggtgg

SEQ ID NO: 409466 - DNA, 15 bp, Homo sapiens
tactgcagataggtg

SEQ ID NO: 409467 - DNA, 15 bp, Homo sapiens
atactgcagataggt

SEQ ID NO: 409468 - DNA, 15 bp, Homo sapiens
catactgcagatagg

SEQ ID NO: 409469 - DNA, 15 bp, Homo sapiens
acatactgcagatag

SEQ ID NO: 409470 - DNA, 15 bp, Homo sapiens
aacatactgcagata

SEQ ID NO: 409471 - DNA, 15 bp, Homo sapiens
taacatactgcagat

SEQ ID NO: 409472 - DNA, 15 bp, Homo sapiens
gtaacatactgcaga

SEQ ID NO: 409473 - DNA, 15 bp, Homo sapiens
tgtaacatactgcag

SEQ ID NO: 409474 - DNA, 15 bp, Homo sapiens
gtgtaacatactgca

SEQ ID NO: 409475 - DNA, 15 bp, Homo sapiens
tgtgtaacatactgc

SEQ ID NO: 409476 - DNA, 15 bp, Homo sapiens
atgtgtaacatactg

SEQ ID NO: 409477 - DNA, 15 bp, Homo sapiens
gatgtgtaacatact

SEQ ID NO: 409478 - DNA, 15 bp, Homo sapiens
agatgtgtaacatac

SEQ ID NO: 409479 - DNA, 15 bp, Homo sapiens
aagatgtgtaacata

SEQ ID NO: 409480 - DNA, 15 bp, Homo sapiens
gaagatgtgtaacat

SEQ ID NO: 409481 - DNA, 15 bp, Homo sapiens
tgaagatgtgtaaca

SEQ ID NO: 409482 - DNA, 15 bp, Homo sapiens
ttgaagatgtgtaac

SEQ ID NO: 409483 - DNA, 15 bp, Homo sapiens
attgaagatgtgtaa

SEQ ID NO: 409484 - DNA, 15 bp, Homo sapiens
aattgaagatgtgta

SEQ ID NO: 409485 - DNA, 15 bp, Homo sapiens
taattgaagatgtgt

SEQ ID NO: 409486 - DNA, 15 bp, Homo sapiens
ttaattgaagatgtg

SEQ ID NO: 409487 - DNA, 15 bp, Homo sapiens
attaattgaagatgt

SEQ ID NO: 409488 - DNA, 15 bp, Homo sapiens
cattaattgaagatg

SEQ ID NO: 409489 - DNA, 15 bp, Homo sapiens
gcattaattgaagat

SEQ ID NO: 409490 - DNA, 15 bp, Homo sapiens
tgcattaattgaaga

SEQ ID NO: 409491 - DNA, 15 bp, Homo sapiens
ttgcattaattgaag

SEQ ID NO: 409492 - DNA, 15 bp, Homo sapiens
tttgcattaattgaa

SEQ ID NO: 409493 - DNA, 15 bp, Homo sapiens
atttgcattaattga

SEQ ID NO: 409494 - DNA, 15 bp, Homo sapiens
aatttgcattaattg

SEQ ID NO: 409495 - DNA, 15 bp, Homo sapiens
gaatttgcattaatt

SEQ ID NO: 409496 - DNA, 15 bp, Homo sapiens
tgaatttgcattaat

SEQ ID NO: 409497 - DNA, 15 bp, Homo sapiens
ttgaatttgcattaa

SEQ ID NO: 409498 - DNA, 15 bp, Homo sapiens
tttgaatttgcatta

SEQ ID NO: 409499 - DNA, 15 bp, Homo sapiens
ctttgaatttgcatt

SEQ ID NO: 409500 - DNA, 15 bp, Homo sapiens
actttgaatttgcat

SEQ ID NO: 409501 - DNA, 15 bp, Homo sapiens
aactttgaatttgca

SEQ ID NO: 409502 - DNA, 15 bp, Homo sapiens
taactttgaatttgc

SEQ ID NO: 409503 - DNA, 15 bp, Homo sapiens
ataactttgaatttg

SEQ ID NO: 409504 - DNA, 15 bp, Homo sapiens
aataactttgaattt

SEQ ID NO: 409505 - DNA, 15 bp, Homo sapiens
aaataactttgaatt

SEQ ID NO: 409506 - DNA, 15 bp, Homo sapiens
aaaataactttgaat

SEQ ID NO: 409507 - DNA, 15 bp, Homo sapiens
aaaaataactttgaa

SEQ ID NO: 409508 - DNA, 15 bp, Homo sapiens
taaaaataactttga

SEQ ID NO: 409509 - DNA, 15 bp, Homo sapiens
ataaaaataactttg

SEQ ID NO: 409510 - DNA, 15 bp, Homo sapiens
tataaaaataacttt

SEQ ID NO: 409511 - DNA, 15 bp, Homo sapiens
ttataaaaataactt

SEQ ID NO: 409512 - DNA, 15 bp, Homo sapiens
attataaaaataact

SEQ ID NO: 409513 - DNA, 15 bp, Homo sapiens
aattataaaaataac

SEQ ID NO: 409514 - DNA, 15 bp, Homo sapiens
caattataaaaataa

SEQ ID NO: 409515 - DNA, 15 bp, Homo sapiens
tcaattataaaaata

SEQ ID NO: 409516 - DNA, 15 bp, Homo sapiens
ctcaattataaaaat

SEQ ID NO: 409517 - DNA, 15 bp, Homo sapiens
gctcaattataaaaa

SEQ ID NO: 409518 - DNA, 15 bp, Homo sapiens
cgctcaattataaaa

SEQ ID NO: 409519 - DNA, 15 bp, Homo sapiens
ccgctcaattataaa

SEQ ID NO: 409520 - DNA, 15 bp, Homo sapiens
accgctcaattataa

SEQ ID NO: 409521 - DNA, 15 bp, Homo sapiens
caccgctcaattata

SEQ ID NO: 409522 - DNA, 15 bp, Homo sapiens
gcaccgctcaattat

SEQ ID NO: 409523 - DNA, 15 bp, Homo sapiens
agcaccgctcaatta

SEQ ID NO: 409524 - DNA, 15 bp, Homo sapiens
gagcaccgctcaatt

SEQ ID NO: 409525 - DNA, 15 bp, Homo sapiens
ggagcaccgctcaat

SEQ ID NO: 409526 - DNA, 15 bp, Homo sapiens
aggagcaccgctcaa

SEQ ID NO: 409527 - DNA, 15 bp, Homo sapiens
caggagcaccgctca

SEQ ID NO: 409528 - DNA, 15 bp, Homo sapiens
tcaggagcaccgctc

SEQ ID NO: 409529 - DNA, 15 bp, Homo sapiens
ttcaggagcaccgct

SEQ ID NO: 409530 - DNA, 15 bp, Homo sapiens
tttcaggagcaccgc

SEQ ID NO: 409531 - DNA, 15 bp, Homo sapiens
ttttcaggagcaccg

SEQ ID NO: 409532 - DNA, 15 bp, Homo sapiens
attttcaggagcacc

SEQ ID NO: 409533 - DNA, 15 bp, Homo sapiens
tattttcaggagcac

SEQ ID NO: 409534 - DNA, 15 bp, Homo sapiens
ttattttcaggagca

SEQ ID NO: 409535 - DNA, 15 bp, Homo sapiens
attattttcaggagc

SEQ ID NO: 409536 - DNA, 15 bp, Homo sapiens
aattattttcaggag

SEQ ID NO: 409537 - DNA, 15 bp, Homo sapiens
caattattttcagga

SEQ ID NO: 409538 - DNA, 15 bp, Homo sapiens
ccaattattttcagg

SEQ ID NO: 409539 - DNA, 15 bp, Homo sapiens
gccaattattttcag

SEQ ID NO: 409540 - DNA, 15 bp, Homo sapiens
agccaattattttca

SEQ ID NO: 409541 - DNA, 15 bp, Homo sapiens
cagccaattattttc

SEQ ID NO: 409542 - DNA, 15 bp, Homo sapiens
acagccaattatttt

SEQ ID NO: 409543 - DNA, 15 bp, Homo sapiens
gacagccaattattt

SEQ ID NO: 409544 - DNA, 15 bp, Homo sapiens
ggacagccaattatt

SEQ ID NO: 409545 - DNA, 15 bp, Homo sapiens
aggacagccaattat

SEQ ID NO: 409546 - DNA, 15 bp, Homo sapiens
caggacagccaatta

SEQ ID NO: 409547 - DNA, 15 bp, Homo sapiens
ccaggacagccaatt

SEQ ID NO: 409548 - DNA, 15 bp, Homo sapiens
cccaggacagccaat

SEQ ID NO: 409549 - DNA, 15 bp, Homo sapiens
ccccaggacagccaa

SEQ ID NO: 409550 - DNA, 15 bp, Homo sapiens
tccccaggacagcca

SEQ ID NO: 409551 - DNA, 15 bp, Homo sapiens
ctccccaggacagcc

SEQ ID NO: 409552 - DNA, 15 bp, Homo sapiens
actccccaggacagc

SEQ ID NO: 409553 - DNA, 15 bp, Homo sapiens
aactccccaggacag

SEQ ID NO: 409554 - DNA, 15 bp, Homo sapiens
caactccccaggaca

SEQ ID NO: 409555 - DNA, 15 bp, Homo sapiens
ccaactccccaggac

SEQ ID NO: 409556 - DNA, 15 bp, Homo sapiens
tccaactccccagga

SEQ ID NO: 409557 - DNA, 15 bp, Homo sapiens
ttccaactccccagg

SEQ ID NO: 409558 - DNA, 15 bp, Homo sapiens
tttccaactccccag

SEQ ID NO: 409559 - DNA, 15 bp, Homo sapiens
atttccaactcccca

SEQ ID NO: 409560 - DNA, 15 bp, Homo sapiens
gatttccaactcccc

SEQ ID NO: 409561 - DNA, 15 bp, Homo sapiens
ggatttccaactccc

SEQ ID NO: 409562 - DNA, 15 bp, Homo sapiens
tggatttccaactcc

SEQ ID NO: 409563 - DNA, 15 bp, Homo sapiens
ctggatttccaactc

SEQ ID NO: 409564 - DNA, 15 bp, Homo sapiens
tctggatttccaact

SEQ ID NO: 409565 - DNA, 15 bp, Homo sapiens
ctctggatttccaac

SEQ ID NO: 409566 - DNA, 15 bp, Homo sapiens
actctggatttccaa

SEQ ID NO: 409567 - DNA, 15 bp, Homo sapiens
aactctggatttcca

SEQ ID NO: 409568 - DNA, 15 bp, Homo sapiens
caactctggatttcc

SEQ ID NO: 409569 - DNA, 15 bp, Homo sapiens
acaactctggatttc

SEQ ID NO: 409570 - DNA, 15 bp, Homo sapiens
aacaactctggattt

SEQ ID NO: 409571 - DNA, 15 bp, Homo sapiens
gaacaactctggatt

SEQ ID NO: 409572 - DNA, 15 bp, Homo sapiens
ggaacaactctggat

SEQ ID NO: 409573 - DNA, 15 bp, Homo sapiens
aggaacaactctgga

SEQ ID NO: 409574 - DNA, 15 bp, Homo sapiens
aaggaacaactctgg

SEQ ID NO: 409575 - DNA, 15 bp, Homo sapiens
taaggaacaactctg

SEQ ID NO: 409576 - DNA, 15 bp, Homo sapiens
gtaaggaacaactct

SEQ ID NO: 409577 - DNA, 15 bp, Homo sapiens
agtaaggaacaactc

SEQ ID NO: 409578 - DNA, 15 bp, Homo sapiens
gagtaaggaacaact

SEQ ID NO: 409579 - DNA, 15 bp, Homo sapiens
agagtaaggaacaac

SEQ ID NO: 409580 - DNA, 15 bp, Homo sapiens
tagagtaaggaacaa

SEQ ID NO: 409581 - DNA, 15 bp, Homo sapiens
atagagtaaggaaca

SEQ ID NO: 409582 - DNA, 15 bp, Homo sapiens
aatagagtaaggaac

SEQ ID NO: 409583 - DNA, 15 bp, Homo sapiens
taatagagtaaggaa

SEQ ID NO: 409584 - DNA, 15 bp, Homo sapiens
ctaatagagtaagga

SEQ ID NO: 409585 - DNA, 15 bp, Homo sapiens
tctaatagagtaagg

SEQ ID NO: 409586 - DNA, 15 bp, Homo sapiens
ttctaatagagtaag

SEQ ID NO: 409587 - DNA, 15 bp, Homo sapiens
tttctaatagagtaa

SEQ ID NO: 409588 - DNA, 15 bp, Homo sapiens
ttttctaatagagta

SEQ ID NO: 409589 - DNA, 15 bp, Homo sapiens
tttttctaatagagt

SEQ ID NO: 409590 - DNA, 15 bp, Homo sapiens
atttttctaatagag

SEQ ID NO: 409591 - DNA, 15 bp, Homo sapiens
catttttctaataga

SEQ ID NO: 409592 - DNA, 15 bp, Homo sapiens
tcatttttctaatag

SEQ ID NO: 409593 - DNA, 15 bp, Homo sapiens
ttcatttttctaata

SEQ ID NO: 409594 - DNA, 15 bp, Homo sapiens
cttcatttttctaat

SEQ ID NO: 409595 - DNA, 15 bp, Homo sapiens
acttcatttttctaa

SEQ ID NO: 409596 - DNA, 15 bp, Homo sapiens
gacttcatttttcta

SEQ ID NO: 409597 - DNA, 15 bp, Homo sapiens
agacttcatttttct

SEQ ID NO: 409598 - DNA, 15 bp, Homo sapiens
aagacttcatttttc

SEQ ID NO: 409599 - DNA, 15 bp, Homo sapiens
gaagacttcattttt

SEQ ID NO: 409600 - DNA, 15 bp, Homo sapiens
ggaagacttcatttt

SEQ ID NO: 409601 - DNA, 15 bp, Homo sapiens
aggaagacttcattt

SEQ ID NO: 409602 - DNA, 15 bp, Homo sapiens
aaggaagacttcatt

SEQ ID NO: 409603 - DNA, 15 bp, Homo sapiens
aaaggaagacttcat

SEQ ID NO: 409604 - DNA, 15 bp, Homo sapiens
aaaaggaagacttca

SEQ ID NO: 409605 - DNA, 15 bp, Homo sapiens
taaaaggaagacttc

SEQ ID NO: 409606 - DNA, 15 bp, Homo sapiens
ctaaaaggaagactt

SEQ ID NO: 409607 - DNA, 15 bp, Homo sapiens
actaaaaggaagact

SEQ ID NO: 409608 - DNA, 15 bp, Homo sapiens
cactaaaaggaagac

SEQ ID NO: 409609 - DNA, 15 bp, Homo sapiens
tcactaaaaggaaga

SEQ ID NO: 409610 - DNA, 15 bp, Homo sapiens
gtcactaaaaggaag

SEQ ID NO: 409611 - DNA, 15 bp, Homo sapiens
agtcactaaaaggaa

SEQ ID NO: 409612 - DNA, 15 bp, Homo sapiens
tagtcactaaaagga

SEQ ID NO: 409613 - DNA, 15 bp, Homo sapiens
ttagtcactaaaagg

SEQ ID NO: 409614 - DNA, 15 bp, Homo sapiens
tttagtcactaaaag

SEQ ID NO: 409615 - DNA, 15 bp, Homo sapiens
ttttagtcactaaaa

SEQ ID NO: 409616 - DNA, 15 bp, Homo sapiens
gttttagtcactaaa

SEQ ID NO: 409617 - DNA, 15 bp, Homo sapiens
tgttttagtcactaa

SEQ ID NO: 409618 - DNA, 15 bp, Homo sapiens
ctgttttagtcacta

SEQ ID NO: 409619 - DNA, 15 bp, Homo sapiens
tctgttttagtcact

SEQ ID NO: 409620 - DNA, 15 bp, Homo sapiens
ctctgttttagtcac

SEQ ID NO: 409621 - DNA, 15 bp, Homo sapiens
gctctgttttagtca

SEQ ID NO: 409622 - DNA, 15 bp, Homo sapiens
agctctgttttagtc

SEQ ID NO: 409623 - DNA, 15 bp, Homo sapiens
aagctctgttttagt

SEQ ID NO: 409624 - DNA, 15 bp, Homo sapiens
gaagctctgttttag

SEQ ID NO: 409625 - DNA, 15 bp, Homo sapiens
ggaagctctgtttta

SEQ ID NO: 409626 - DNA, 15 bp, Homo sapiens
aggaagctctgtttt

SEQ ID NO: 409627 - DNA, 15 bp, Homo sapiens
taggaagctctgttt

SEQ ID NO: 409628 - DNA, 15 bp, Homo sapiens
ttaggaagctctgtt

SEQ ID NO: 409629 - DNA, 15 bp, Homo sapiens
gttaggaagctctgt

SEQ ID NO: 409630 - DNA, 15 bp, Homo sapiens
ggttaggaagctctg

SEQ ID NO: 409631 - DNA, 15 bp, Homo sapiens
aggttaggaagctct

SEQ ID NO: 409632 - DNA, 15 bp, Homo sapiens
aaggttaggaagctc

SEQ ID NO: 409633 - DNA, 15 bp, Homo sapiens
gaaggttaggaagct

SEQ ID NO: 409634 - DNA, 15 bp, Homo sapiens
tgaaggttaggaagc

SEQ ID NO: 409635 - DNA, 15 bp, Homo sapiens
gtgaaggttaggaag

SEQ ID NO: 409636 - DNA, 15 bp, Homo sapiens
ggtgaaggttaggaa

SEQ ID NO: 409637 - DNA, 15 bp, Homo sapiens
tggtgaaggttagga

SEQ ID NO: 409638 - DNA, 15 bp, Homo sapiens
ttggtgaaggttagg

SEQ ID NO: 409639 - DNA, 15 bp, Homo sapiens
cttggtgaaggttag

SEQ ID NO: 409640 - DNA, 15 bp, Homo sapiens
ccttggtgaaggtta

SEQ ID NO: 409641 - DNA, 15 bp, Homo sapiens
accttggtgaaggtt

SEQ ID NO: 409642 - DNA, 15 bp, Homo sapiens
aaccttggtgaaggt

SEQ ID NO: 409643 - DNA, 15 bp, Homo sapiens
taaccttggtgaagg

SEQ ID NO: 409644 - DNA, 15 bp, Homo sapiens
ttaaccttggtgaag

SEQ ID NO: 409645 - DNA, 15 bp, Homo sapiens
gttaaccttggtgaa

SEQ ID NO: 409646 - DNA, 15 bp, Homo sapiens
agttaaccttggtga

SEQ ID NO: 409647 - DNA, 15 bp, Homo sapiens
cagttaaccttggtg

SEQ ID NO: 409648 - DNA, 15 bp, Homo sapiens
gcagttaaccttggt

SEQ ID NO: 409649 - DNA, 15 bp, Homo sapiens
tgcagttaaccttgg

SEQ ID NO: 409650 - DNA, 15 bp, Homo sapiens
atgcagttaaccttg

SEQ ID NO: 409651 - DNA, 15 bp, Homo sapiens
gatgcagttaacctt

SEQ ID NO: 409652 - DNA, 15 bp, Homo sapiens
ggatgcagttaacct

SEQ ID NO: 409653 - DNA, 15 bp, Homo sapiens
aggatgcagttaacc

SEQ ID NO: 409654 - DNA, 15 bp, Homo sapiens
aaggatgcagttaac

SEQ ID NO: 409655 - DNA, 15 bp, Homo sapiens
aaaggatgcagttaa

SEQ ID NO: 409656 - DNA, 15 bp, Homo sapiens
aaaaggatgcagtta

SEQ ID NO: 409657 - DNA, 15 bp, Homo sapiens
gaaaaggatgcagtt

SEQ ID NO: 409658 - DNA, 15 bp, Homo sapiens
agaaaaggatgcagt

SEQ ID NO: 409659 - DNA, 15 bp, Homo sapiens
cagaaaaggatgcag

SEQ ID NO: 409660 - DNA, 15 bp, Homo sapiens
acagaaaaggatgca

SEQ ID NO: 409661 - DNA, 15 bp, Homo sapiens
cacagaaaaggatgc

SEQ ID NO: 409662 - DNA, 15 bp, Homo sapiens
gcacagaaaaggatg

SEQ ID NO: 409663 - DNA, 15 bp, Homo sapiens
tgcacagaaaaggat

SEQ ID NO: 409664 - DNA, 15 bp, Homo sapiens
ctgcacagaaaagga

SEQ ID NO: 409665 - DNA, 15 bp, Homo sapiens
actgcacagaaaagg

SEQ ID NO: 409666 - DNA, 15 bp, Homo sapiens
cactgcacagaaaag

SEQ ID NO: 409667 - DNA, 15 bp, Homo sapiens
tcactgcacagaaaa

SEQ ID NO: 409668 - DNA, 15 bp, Homo sapiens
ctcactgcacagaaa

SEQ ID NO: 409669 - DNA, 15 bp, Homo sapiens
gctcactgcacagaa

SEQ ID NO: 409670 - DNA, 15 bp, Homo sapiens
tgctcactgcacaga

SEQ ID NO: 409671 - DNA, 15 bp, Homo sapiens
ctgctcactgcacag

SEQ ID NO: 409672 - DNA, 15 bp, Homo sapiens
gctgctcactgcaca

SEQ ID NO: 409673 - DNA, 15 bp, Homo sapiens
agctgctcactgcac

SEQ ID NO: 409674 - DNA, 15 bp, Homo sapiens
cagctgctcactgca

SEQ ID NO: 409675 - DNA, 15 bp, Homo sapiens
tcagctgctcactgc

SEQ ID NO: 409676 - DNA, 15 bp, Homo sapiens
gtcagctgctcactg

SEQ ID NO: 409677 - DNA, 15 bp, Homo sapiens
cgtcagctgctcact

SEQ ID NO: 409678 - DNA, 15 bp, Homo sapiens
acgtcagctgctcac

SEQ ID NO: 409679 - DNA, 15 bp, Homo sapiens
cacgtcagctgctca

SEQ ID NO: 409680 - DNA, 15 bp, Homo sapiens
ccacgtcagctgctc

SEQ ID NO: 409681 - DNA, 15 bp, Homo sapiens
accacgtcagctgct

SEQ ID NO: 409682 - DNA, 15 bp, Homo sapiens
caccacgtcagctgc

SEQ ID NO: 409683 - DNA, 15 bp, Homo sapiens
acaccacgtcagctg

SEQ ID NO: 409684 - DNA, 15 bp, Homo sapiens
cacaccacgtcagct

SEQ ID NO: 409685 - DNA, 15 bp, Homo sapiens
gcacaccacgtcagc

SEQ ID NO: 409686 - DNA, 15 bp, Homo sapiens
ggcacaccacgtcag

SEQ ID NO: 409687 - DNA, 15 bp, Homo sapiens
tggcacaccacgtca

SEQ ID NO: 409688 - DNA, 15 bp, Homo sapiens
ctggcacaccacgtc

SEQ ID NO: 409689 - DNA, 15 bp, Homo sapiens
gctggcacaccacgt

SEQ ID NO: 409690 - DNA, 15 bp, Homo sapiens
agctggcacaccacg

SEQ ID NO: 409691 - DNA, 15 bp, Homo sapiens
gagctggcacaccac

SEQ ID NO: 409692 - DNA, 15 bp, Homo sapiens
agagctggcacacca

SEQ ID NO: 409693 - DNA, 15 bp, Homo sapiens
gagagctggcacacc

SEQ ID NO: 409694 - DNA, 15 bp, Homo sapiens
tgagagctggcacac

SEQ ID NO: 409695 - DNA, 15 bp, Homo sapiens
atgagagctggcaca

SEQ ID NO: 409696 - DNA, 15 bp, Homo sapiens
aatgagagctggcac

SEQ ID NO: 409697 - DNA, 15 bp, Homo sapiens
caatgagagctggca

SEQ ID NO: 409698 - DNA, 15 bp, Homo sapiens
acaatgagagctggc

SEQ ID NO: 409699 - DNA, 15 bp, Homo sapiens
tacaatgagagctgg

SEQ ID NO: 409700 - DNA, 15 bp, Homo sapiens
atacaatgagagctg

SEQ ID NO: 409701 - DNA, 15 bp, Homo sapiens
tatacaatgagagct

SEQ ID NO: 409702 - DNA, 15 bp, Homo sapiens
ctatacaatgagagc

SEQ ID NO: 409703 - DNA, 15 bp, Homo sapiens
cctatacaatgagag

SEQ ID NO: 409704 - DNA, 15 bp, Homo sapiens
gcctatacaatgaga

SEQ ID NO: 409705 - DNA, 15 bp, Homo sapiens
agcctatacaatgag

SEQ ID NO: 409706 - DNA, 15 bp, Homo sapiens
aagcctatacaatga

SEQ ID NO: 409707 - DNA, 15 bp, Homo sapiens
aaagcctatacaatg

SEQ ID NO: 409708 - DNA, 15 bp, Homo sapiens
aaaagcctatacaat

SEQ ID NO: 409709 - DNA, 15 bp, Homo sapiens
taaaagcctatacaa

SEQ ID NO: 409710 - DNA, 15 bp, Homo sapiens
ataaaagcctataca

SEQ ID NO: 409711 - DNA, 15 bp, Homo sapiens
gataaaagcctatac

SEQ ID NO: 409712 - DNA, 15 bp, Homo sapiens
tgataaaagcctata

SEQ ID NO: 409713 - DNA, 15 bp, Homo sapiens
gtgataaaagcctat

SEQ ID NO: 409714 - DNA, 15 bp, Homo sapiens
tgtgataaaagccta

SEQ ID NO: 409715 - DNA, 15 bp, Homo sapiens
ctgtgataaaagcct

SEQ ID NO: 409716 - DNA, 15 bp, Homo sapiens
cctgtgataaaagcc

SEQ ID NO: 409717 - DNA, 15 bp, Homo sapiens
tcctgtgataaaagc

SEQ ID NO: 409718 - DNA, 15 bp, Homo sapiens
ttcctgtgataaaag

SEQ ID NO: 409719 - DNA, 15 bp, Homo sapiens
cttcctgtgataaaa

SEQ ID NO: 409720 - DNA, 15 bp, Homo sapiens
acttcctgtgataaa

SEQ ID NO: 409721 - DNA, 15 bp, Homo sapiens
tacttcctgtgataa

SEQ ID NO: 409722 - DNA, 15 bp, Homo sapiens
ctacttcctgtgata

SEQ ID NO: 409723 - DNA, 15 bp, Homo sapiens
tctacttcctgtgat

SEQ ID NO: 409724 - DNA, 15 bp, Homo sapiens
atctacttcctgtga

SEQ ID NO: 409725 - DNA, 15 bp, Homo sapiens
aatctacttcctgtg

SEQ ID NO: 409726 - DNA, 15 bp, Homo sapiens
gaatctacttcctgt

SEQ ID NO: 409727 - DNA, 15 bp, Homo sapiens
tgaatctacttcctg

SEQ ID NO: 409728 - DNA, 15 bp, Homo sapiens
ttgaatctacttcct

SEQ ID NO: 409729 - DNA, 15 bp, Homo sapiens
tttgaatctacttcc

SEQ ID NO: 409730 - DNA, 15 bp, Homo sapiens
atttgaatctacttc

SEQ ID NO: 409731 - DNA, 15 bp, Homo sapiens
catttgaatctactt

SEQ ID NO: 409732 - DNA, 15 bp, Homo sapiens
tcatttgaatctact

SEQ ID NO: 409733 - DNA, 15 bp, Homo sapiens
atcatttgaatctac

SEQ ID NO: 409734 - DNA, 15 bp, Homo sapiens
aatcatttgaatcta

SEQ ID NO: 409735 - DNA, 15 bp, Homo sapiens
caatcatttgaatct

SEQ ID NO: 409736 - DNA, 15 bp, Homo sapiens
acaatcatttgaatc

SEQ ID NO: 409737 - DNA, 15 bp, Homo sapiens
tacaatcatttgaat

SEQ ID NO: 409738 - DNA, 15 bp, Homo sapiens
ttacaatcatttgaa

SEQ ID NO: 409739 - DNA, 15 bp, Homo sapiens
attacaatcatttga

SEQ ID NO: 409740 - DNA, 15 bp, Homo sapiens
aattacaatcatttg

SEQ ID NO: 409741 - DNA, 15 bp, Homo sapiens
caattacaatcattt

SEQ ID NO: 409742 - DNA, 15 bp, Homo sapiens
gcaattacaatcatt

SEQ ID NO: 409743 - DNA, 15 bp, Homo sapiens
agcaattacaatcat

SEQ ID NO: 409744 - DNA, 15 bp, Homo sapiens
aagcaattacaatca

SEQ ID NO: 409745 - DNA, 15 bp, Homo sapiens
caagcaattacaatc

SEQ ID NO: 409746 - DNA, 15 bp, Homo sapiens
ccaagcaattacaat

SEQ ID NO: 409747 - DNA, 15 bp, Homo sapiens
cccaagcaattacaa

SEQ ID NO: 409748 - DNA, 15 bp, Homo sapiens
acccaagcaattaca

SEQ ID NO: 409749 - DNA, 15 bp, Homo sapiens
aacccaagcaattac

SEQ ID NO: 409750 - DNA, 15 bp, Homo sapiens
taacccaagcaatta

SEQ ID NO: 409751 - DNA, 15 bp, Homo sapiens
gtaacccaagcaatt

SEQ ID NO: 409752 - DNA, 15 bp, Homo sapiens
tgtaacccaagcaat

SEQ ID NO: 409753 - DNA, 15 bp, Homo sapiens
atgtaacccaagcaa

SEQ ID NO: 409754 - DNA, 15 bp, Homo sapiens
aatgtaacccaagca

SEQ ID NO: 409755 - DNA, 15 bp, Homo sapiens
taatgtaacccaagc

SEQ ID NO: 409756 - DNA, 15 bp, Homo sapiens
ttaatgtaacccaag

SEQ ID NO: 409757 - DNA, 15 bp, Homo sapiens
attaatgtaacccaa

SEQ ID NO: 409758 - DNA, 15 bp, Homo sapiens
tattaatgtaaccca

SEQ ID NO: 409759 - DNA, 15 bp, Homo sapiens
atattaatgtaaccc

SEQ ID NO: 409760 - DNA, 15 bp, Homo sapiens
aatattaatgtaacc

SEQ ID NO: 409761 - DNA, 15 bp, Homo sapiens
gaatattaatgtaac

SEQ ID NO: 409762 - DNA, 15 bp, Homo sapiens
tgaatattaatgtaa

SEQ ID NO: 409763 - DNA, 15 bp, Homo sapiens
atgaatattaatgta

SEQ ID NO: 409764 - DNA, 15 bp, Homo sapiens
catgaatattaatgt

SEQ ID NO: 409765 - DNA, 15 bp, Homo sapiens
ccatgaatattaatg

SEQ ID NO: 409766 - DNA, 15 bp, Homo sapiens
gccatgaatattaat

SEQ ID NO: 409767 - DNA, 15 bp, Homo sapiens
tgccatgaatattaa

SEQ ID NO: 409768 - DNA, 15 bp, Homo sapiens
gtgccatgaatatta

SEQ ID NO: 409769 - DNA, 15 bp, Homo sapiens
tgtgccatgaatatt

SEQ ID NO: 409770 - DNA, 15 bp, Homo sapiens
atgtgccatgaatat

SEQ ID NO: 409771 - DNA, 15 bp, Homo sapiens
catgtgccatgaata

SEQ ID NO: 409772 - DNA, 15 bp, Homo sapiens
gcatgtgccatgaat

SEQ ID NO: 409773 - DNA, 15 bp, Homo sapiens
ggcatgtgccatgaa

SEQ ID NO: 409774 - DNA, 15 bp, Homo sapiens
aggcatgtgccatga

SEQ ID NO: 409775 - DNA, 15 bp, Homo sapiens
gaggcatgtgccatg

SEQ ID NO: 409776 - DNA, 15 bp, Homo sapiens
agaggcatgtgccat

SEQ ID NO: 409777 - DNA, 15 bp, Homo sapiens
aagaggcatgtgcca

SEQ ID NO: 409778 - DNA, 15 bp, Homo sapiens
taagaggcatgtgcc

SEQ ID NO: 409779 - DNA, 15 bp, Homo sapiens
gtaagaggcatgtgc

SEQ ID NO: 409780 - DNA, 15 bp, Homo sapiens
ggtaagaggcatgtg

SEQ ID NO: 409781 - DNA, 15 bp, Homo sapiens
aggtaagaggcatgt

SEQ ID NO: 409782 - DNA, 15 bp, Homo sapiens
aaggtaagaggcatg

SEQ ID NO: 409783 - DNA, 15 bp, Homo sapiens
taaggtaagaggcat

SEQ ID NO: 409784 - DNA, 15 bp, Homo sapiens
gtaaggtaagaggca

SEQ ID NO: 409785 - DNA, 15 bp, Homo sapiens
tgtaaggtaagaggc

SEQ ID NO: 409786 - DNA, 15 bp, Homo sapiens
atgtaaggtaagagg

SEQ ID NO: 409787 - DNA, 15 bp, Homo sapiens
catgtaaggtaagag

SEQ ID NO: 409788 - DNA, 15 bp, Homo sapiens
ccatgtaaggtaaga

SEQ ID NO: 409789 - DNA, 15 bp, Homo sapiens
gccatgtaaggtaag

SEQ ID NO: 409790 - DNA, 15 bp, Homo sapiens
tgccatgtaaggtaa

SEQ ID NO: 409791 - DNA, 15 bp, Homo sapiens
gtgccatgtaaggta

SEQ ID NO: 409792 - DNA, 15 bp, Homo sapiens
agtgccatgtaaggt

SEQ ID NO: 409793 - DNA, 15 bp, Homo sapiens
gagtgccatgtaagg

SEQ ID NO: 409794 - DNA, 15 bp, Homo sapiens
tgagtgccatgtaag

SEQ ID NO: 409795 - DNA, 15 bp, Homo sapiens
atgagtgccatgtaa

SEQ ID NO: 409796 - DNA, 15 bp, Homo sapiens
aatgagtgccatgta

SEQ ID NO: 409797 - DNA, 15 bp, Homo sapiens
gaatgagtgccatgt

SEQ ID NO: 409798 - DNA, 15 bp, Homo sapiens
agaatgagtgccatg

SEQ ID NO: 409799 - DNA, 15 bp, Homo sapiens
gagaatgagtgccat

SEQ ID NO: 409800 - DNA, 15 bp, Homo sapiens
agagaatgagtgcca

SEQ ID NO: 409801 - DNA, 15 bp, Homo sapiens
cagagaatgagtgcc

SEQ ID NO: 409802 - DNA, 15 bp, Homo sapiens
acagagaatgagtgc

SEQ ID NO: 409803 - DNA, 15 bp, Homo sapiens
cacagagaatgagtg

SEQ ID NO: 409804 - DNA, 15 bp, Homo sapiens
acacagagaatgagt

SEQ ID NO: 409805 - DNA, 15 bp, Homo sapiens
tacacagagaatgag

SEQ ID NO: 409806 - DNA, 15 bp, Homo sapiens
atacacagagaatga

SEQ ID NO: 409807 - DNA, 15 bp, Homo sapiens
aatacacagagaatg

SEQ ID NO: 409808 - DNA, 15 bp, Homo sapiens
aaatacacagagaat

SEQ ID NO: 409809 - DNA, 15 bp, Homo sapiens
taaatacacagagaa

SEQ ID NO: 409810 - DNA, 15 bp, Homo sapiens
ttaaatacacagaga

SEQ ID NO: 409811 - DNA, 15 bp, Homo sapiens
attaaatacacagag

SEQ ID NO: 409812 - DNA, 15 bp, Homo sapiens
aattaaatacacaga

SEQ ID NO: 409813 - DNA, 15 bp, Homo sapiens
taattaaatacacag

SEQ ID NO: 409814 - DNA, 15 bp, Homo sapiens
ttaattaaatacaca

SEQ ID NO: 409815 - DNA, 15 bp, Homo sapiens
attaattaaatacac

SEQ ID NO: 409816 - DNA, 15 bp, Homo sapiens
tattaattaaataca

SEQ ID NO: 409817 - DNA, 15 bp, Homo sapiens
atattaattaaatac

SEQ ID NO: 409818 - DNA, 15 bp, Homo sapiens
catattaattaaata

SEQ ID NO: 409819 - DNA, 15 bp, Homo sapiens
gcatattaattaaat

SEQ ID NO: 409820 - DNA, 15 bp, Homo sapiens
ggcatattaattaaa

SEQ ID NO: 409821 - DNA, 15 bp, Homo sapiens
tggcatattaattaa

SEQ ID NO: 409822 - DNA, 15 bp, Homo sapiens
atggcatattaatta

SEQ ID NO: 409823 - DNA, 15 bp, Homo sapiens
aatggcatattaatt

SEQ ID NO: 409824 - DNA, 15 bp, Homo sapiens
aaatggcatattaat

SEQ ID NO: 409825 - DNA, 15 bp, Homo sapiens
aaaatggcatattaa

SEQ ID NO: 409826 - DNA, 15 bp, Homo sapiens
caaaatggcatatta

SEQ ID NO: 409827 - DNA, 15 bp, Homo sapiens
gcaaaatggcatatt

SEQ ID NO: 409828 - DNA, 15 bp, Homo sapiens
ggcaaaatggcatat

SEQ ID NO: 409829 - DNA, 15 bp, Homo sapiens
aggcaaaatggcata

SEQ ID NO: 409830 - DNA, 15 bp, Homo sapiens
aaggcaaaatggcat

SEQ ID NO: 409831 - DNA, 15 bp, Homo sapiens
aaaggcaaaatggca

SEQ ID NO: 409832 - DNA, 15 bp, Homo sapiens
gaaaggcaaaatggc

SEQ ID NO: 409833 - DNA, 15 bp, Homo sapiens
tgaaaggcaaaatgg

SEQ ID NO: 409834 - DNA, 15 bp, Homo sapiens
atgaaaggcaaaatg

SEQ ID NO: 409835 - DNA, 15 bp, Homo sapiens
aatgaaaggcaaaat

SEQ ID NO: 409836 - DNA, 15 bp, Homo sapiens
aaatgaaaggcaaaa

SEQ ID NO: 409837 - DNA, 15 bp, Homo sapiens
aaaatgaaaggcaaa

SEQ ID NO: 409838 - DNA, 15 bp, Homo sapiens
caaaatgaaaggcaa

SEQ ID NO: 409839 - DNA, 15 bp, Homo sapiens
ccaaaatgaaaggca

SEQ ID NO: 409840 - DNA, 15 bp, Homo sapiens
gccaaaatgaaaggc

SEQ ID NO: 409841 - DNA, 15 bp, Homo sapiens
tgccaaaatgaaagg

SEQ ID NO: 409842 - DNA, 15 bp, Homo sapiens
atgccaaaatgaaag

SEQ ID NO: 409843 - DNA, 15 bp, Homo sapiens
catgccaaaatgaaa

SEQ ID NO: 409844 - DNA, 15 bp, Homo sapiens
ccatgccaaaatgaa

SEQ ID NO: 409845 - DNA, 15 bp, Homo sapiens
cccatgccaaaatga

SEQ ID NO: 409846 - DNA, 15 bp, Homo sapiens
ccccatgccaaaatg

SEQ ID NO: 409847 - DNA, 15 bp, Homo sapiens
tccccatgccaaaat

SEQ ID NO: 409848 - DNA, 15 bp, Homo sapiens
ctccccatgccaaaa

SEQ ID NO: 409849 - DNA, 15 bp, Homo sapiens
gctccccatgccaaa

SEQ ID NO: 409850 - DNA, 15 bp, Homo sapiens
ggctccccatgccaa

SEQ ID NO: 409851 - DNA, 15 bp, Homo sapiens
tggctccccatgcca

SEQ ID NO: 409852 - DNA, 15 bp, Homo sapiens
atggctccccatgcc

SEQ ID NO: 409853 - DNA, 15 bp, Homo sapiens
catggctccccatgc

SEQ ID NO: 409854 - DNA, 15 bp, Homo sapiens
tcatggctccccatg

SEQ ID NO: 409855 - DNA, 15 bp, Homo sapiens
atcatggctccccat

SEQ ID NO: 409856 - DNA, 15 bp, Homo sapiens
aatcatggctcccca

SEQ ID NO: 409857 - DNA, 15 bp, Homo sapiens
aaatcatggctcccc

SEQ ID NO: 409858 - DNA, 15 bp, Homo sapiens
aaaatcatggctccc

SEQ ID NO: 409859 - DNA, 15 bp, Homo sapiens
taaaatcatggctcc

SEQ ID NO: 409860 - DNA, 15 bp, Homo sapiens
ctaaaatcatggctc

SEQ ID NO: 409861 - DNA, 15 bp, Homo sapiens
tctaaaatcatggct

SEQ ID NO: 409862 - DNA, 15 bp, Homo sapiens
ctctaaaatcatggc

SEQ ID NO: 409863 - DNA, 15 bp, Homo sapiens
cctctaaaatcatgg

SEQ ID NO: 409864 - DNA, 15 bp, Homo sapiens
ccctctaaaatcatg

SEQ ID NO: 409865 - DNA, 15 bp, Homo sapiens
accctctaaaatcat

SEQ ID NO: 409866 - DNA, 15 bp, Homo sapiens
caccctctaaaatca

SEQ ID NO: 409867 - DNA, 15 bp, Homo sapiens
acaccctctaaaatc

SEQ ID NO: 409868 - DNA, 15 bp, Homo sapiens
cacaccctctaaaat

SEQ ID NO: 409869 - DNA, 15 bp, Homo sapiens
tcacaccctctaaaa

SEQ ID NO: 409870 - DNA, 15 bp, Homo sapiens
ttcacaccctctaaa

SEQ ID NO: 409871 - DNA, 15 bp, Homo sapiens
tttcacaccctctaa

SEQ ID NO: 409872 - DNA, 15 bp, Homo sapiens
gtttcacaccctcta

SEQ ID NO: 409873 - DNA, 15 bp, Homo sapiens
tgtttcacaccctct

SEQ ID NO: 409874 - DNA, 15 bp, Homo sapiens
ctgtttcacaccctc

SEQ ID NO: 409875 - DNA, 15 bp, Homo sapiens
gctgtttcacaccct

SEQ ID NO: 409876 - DNA, 15 bp, Homo sapiens
cgctgtttcacaccc

SEQ ID NO: 409877 - DNA, 15 bp, Homo sapiens
tcgctgtttcacacc

SEQ ID NO: 409878 - DNA, 15 bp, Homo sapiens
ctcgctgtttcacac

SEQ ID NO: 409879 - DNA, 15 bp, Homo sapiens
gctcgctgtttcaca

SEQ ID NO: 409880 - DNA, 15 bp, Homo sapiens
tgctcgctgtttcac

SEQ ID NO: 409881 - DNA, 15 bp, Homo sapiens
ctgctcgctgtttca

SEQ ID NO: 409882 - DNA, 15 bp, Homo sapiens
gctgctcgctgtttc

SEQ ID NO: 409883 - DNA, 15 bp, Homo sapiens
agctgctcgctgttt

SEQ ID NO: 409884 - DNA, 15 bp, Homo sapiens
cagctgctcgctgtt

SEQ ID NO: 409885 - DNA, 15 bp, Homo sapiens
ccagctgctcgctgt

SEQ ID NO: 409886 - DNA, 15 bp, Homo sapiens
cccagctgctcgctg

SEQ ID NO: 409887 - DNA, 15 bp, Homo sapiens
ccccagctgctcgct

SEQ ID NO: 409888 - DNA, 15 bp, Homo sapiens
tccccagctgctcgc

SEQ ID NO: 409889 - DNA, 15 bp, Homo sapiens
ttccccagctgctcg

SEQ ID NO: 409890 - DNA, 15 bp, Homo sapiens
tttccccagctgctc

SEQ ID NO: 409891 - DNA, 15 bp, Homo sapiens
ctttccccagctgct

SEQ ID NO: 409892 - DNA, 15 bp, Homo sapiens
tctttccccagctgc

SEQ ID NO: 409893 - DNA, 15 bp, Homo sapiens
ttctttccccagctg

SEQ ID NO: 409894 - DNA, 15 bp, Homo sapiens
attctttccccagct

SEQ ID NO: 409895 - DNA, 15 bp, Homo sapiens
cattctttccccagc

SEQ ID NO: 409896 - DNA, 15 bp, Homo sapiens
tcattctttccccag

SEQ ID NO: 409897 - DNA, 15 bp, Homo sapiens
ttcattctttcccca

SEQ ID NO: 409898 - DNA, 15 bp, Homo sapiens
attcattctttcccc

SEQ ID NO: 409899 - DNA, 15 bp, Homo sapiens
tattcattctttccc

SEQ ID NO: 409900 - DNA, 15 bp, Homo sapiens
gtattcattctttcc

SEQ ID NO: 409901 - DNA, 15 bp, Homo sapiens
ggtattcattctttc

SEQ ID NO: 409902 - DNA, 15 bp, Homo sapiens
gggtattcattcttt

SEQ ID NO: 409903 - DNA, 15 bp, Homo sapiens
tgggtattcattctt

SEQ ID NO: 409904 - DNA, 15 bp, Homo sapiens
ctgggtattcattct

SEQ ID NO: 409905 - DNA, 15 bp, Homo sapiens
tctgggtattcattc

SEQ ID NO: 409906 - DNA, 15 bp, Homo sapiens
ttctgggtattcatt

SEQ ID NO: 409907 - DNA, 15 bp, Homo sapiens
gttctgggtattcat

SEQ ID NO: 409908 - DNA, 15 bp, Homo sapiens
ggttctgggtattca

SEQ ID NO: 409909 - DNA, 15 bp, Homo sapiens
gggttctgggtattc

SEQ ID NO: 409910 - DNA, 15 bp, Homo sapiens
tgggttctgggtatt

SEQ ID NO: 409911 - DNA, 15 bp, Homo sapiens
ctgggttctgggtat

SEQ ID NO: 409912 - DNA, 15 bp, Homo sapiens
actgggttctgggta

SEQ ID NO: 409913 - DNA, 15 bp, Homo sapiens
cactgggttctgggt

SEQ ID NO: 409914 - DNA, 15 bp, Homo sapiens
gcactgggttctggg

SEQ ID NO: 409915 - DNA, 15 bp, Homo sapiens
ggcactgggttctgg

SEQ ID NO: 409916 - DNA, 15 bp, Homo sapiens
tggcactgggttctg

SEQ ID NO: 409917 - DNA, 15 bp, Homo sapiens
ctggcactgggttct

SEQ ID NO: 409918 - DNA, 15 bp, Homo sapiens
cctggcactgggttc

SEQ ID NO: 409919 - DNA, 15 bp, Homo sapiens
tcctggcactgggtt

SEQ ID NO: 409920 - DNA, 15 bp, Homo sapiens
atcctggcactgggt

SEQ ID NO: 409921 - DNA, 15 bp, Homo sapiens
aatcctggcactggg

SEQ ID NO: 409922 - DNA, 15 bp, Homo sapiens
taatcctggcactgg

SEQ ID NO: 409923 - DNA, 15 bp, Homo sapiens
ttaatcctggcactg

SEQ ID NO: 409924 - DNA, 15 bp, Homo sapiens
gttaatcctggcact

SEQ ID NO: 409925 - DNA, 15 bp, Homo sapiens
tgttaatcctggcac

SEQ ID NO: 409926 - DNA, 15 bp, Homo sapiens
atgttaatcctggca

SEQ ID NO: 409927 - DNA, 15 bp, Homo sapiens
tatgttaatcctggc

SEQ ID NO: 409928 - DNA, 15 bp, Homo sapiens
gtatgttaatcctgg

SEQ ID NO: 409929 - DNA, 15 bp, Homo sapiens
agtatgttaatcctg

SEQ ID NO: 409930 - DNA, 15 bp, Homo sapiens
cagtatgttaatcct

SEQ ID NO: 409931 - DNA, 15 bp, Homo sapiens
tcagtatgttaatcc

SEQ ID NO: 409932 - DNA, 15 bp, Homo sapiens
atcagtatgttaatc

SEQ ID NO: 409933 - DNA, 15 bp, Homo sapiens
catcagtatgttaat

SEQ ID NO: 409934 - DNA, 15 bp, Homo sapiens
gcatcagtatgttaa

SEQ ID NO: 409935 - DNA, 15 bp, Homo sapiens
tgcatcagtatgtta

SEQ ID NO: 409936 - DNA, 15 bp, Homo sapiens
ctgcatcagtatgtt

SEQ ID NO: 409937 - DNA, 15 bp, Homo sapiens
tctgcatcagtatgt

SEQ ID NO: 409938 - DNA, 15 bp, Homo sapiens
atctgcatcagtatg

SEQ ID NO: 409939 - DNA, 15 bp, Homo sapiens
tatctgcatcagtat

SEQ ID NO: 409940 - DNA, 15 bp, Homo sapiens
atatctgcatcagta

SEQ ID NO: 409941 - DNA, 15 bp, Homo sapiens
aatatctgcatcagt

SEQ ID NO: 409942 - DNA, 15 bp, Homo sapiens
gaatatctgcatcag

SEQ ID NO: 409943 - DNA, 15 bp, Homo sapiens
agaatatctgcatca

SEQ ID NO: 409944 - DNA, 15 bp, Homo sapiens
cagaatatctgcatc

SEQ ID NO: 409945 - DNA, 15 bp, Homo sapiens
tcagaatatctgcat

SEQ ID NO: 409946 - DNA, 15 bp, Homo sapiens
ctcagaatatctgca

SEQ ID NO: 409947 - DNA, 15 bp, Homo sapiens
tctcagaatatctgc

SEQ ID NO: 409948 - DNA, 15 bp, Homo sapiens
ttctcagaatatctg

SEQ ID NO: 409949 - DNA, 15 bp, Homo sapiens
cttctcagaatatct

SEQ ID NO: 409950 - DNA, 15 bp, Homo sapiens
ccttctcagaatatc

SEQ ID NO: 409951 - DNA, 15 bp, Homo sapiens
cccttctcagaatat

SEQ ID NO: 409952 - DNA, 15 bp, Homo sapiens
tcccttctcagaata

SEQ ID NO: 409953 - DNA, 15 bp, Homo sapiens
atcccttctcagaat

SEQ ID NO: 409954 - DNA, 15 bp, Homo sapiens
gatcccttctcagaa

SEQ ID NO: 409955 - DNA, 15 bp, Homo sapiens
agatcccttctcaga

SEQ ID NO: 409956 - DNA, 15 bp, Homo sapiens
aagatcccttctcag

SEQ ID NO: 409957 - DNA, 15 bp, Homo sapiens
aaagatcccttctca

SEQ ID NO: 409958 - DNA, 15 bp, Homo sapiens
aaaagatcccttctc

SEQ ID NO: 409959 - DNA, 15 bp, Homo sapiens
caaaagatcccttct

SEQ ID NO: 409960 - DNA, 15 bp, Homo sapiens
tcaaaagatcccttc

SEQ ID NO: 409961 - DNA, 15 bp, Homo sapiens
ctcaaaagatccctt

SEQ ID NO: 409962 - DNA, 15 bp, Homo sapiens
cctcaaaagatccct

SEQ ID NO: 409963 - DNA, 15 bp, Homo sapiens
gcctcaaaagatccc

SEQ ID NO: 409964 - DNA, 15 bp, Homo sapiens
tgcctcaaaagatcc

SEQ ID NO: 409965 - DNA, 15 bp, Homo sapiens
ctgcctcaaaagatc

SEQ ID NO: 409966 - DNA, 15 bp, Homo sapiens
cctgcctcaaaagat

SEQ ID NO: 409967 - DNA, 15 bp, Homo sapiens
acctgcctcaaaaga

SEQ ID NO: 409968 - DNA, 15 bp, Homo sapiens
aacctgcctcaaaag

SEQ ID NO: 409969 - DNA, 15 bp, Homo sapiens
taacctgcctcaaaa

SEQ ID NO: 409970 - DNA, 15 bp, Homo sapiens
ttaacctgcctcaaa

SEQ ID NO: 409971 - DNA, 15 bp, Homo sapiens
tttaacctgcctcaa

SEQ ID NO: 409972 - DNA, 15 bp, Homo sapiens
ttttaacctgcctca

SEQ ID NO: 409973 - DNA, 15 bp, Homo sapiens
cttttaacctgcctc

SEQ ID NO: 409974 - DNA, 15 bp, Homo sapiens
ccttttaacctgcct

SEQ ID NO: 409975 - DNA, 15 bp, Homo sapiens
tccttttaacctgcc

SEQ ID NO: 409976 - DNA, 15 bp, Homo sapiens
ttccttttaacctgc

SEQ ID NO: 409977 - DNA, 15 bp, Homo sapiens
tttccttttaacctg

SEQ ID NO: 409978 - DNA, 15 bp, Homo sapiens
atttccttttaacct

SEQ ID NO: 409979 - DNA, 15 bp, Homo sapiens
catttccttttaacc

SEQ ID NO: 409980 - DNA, 15 bp, Homo sapiens
gcatttccttttaac

SEQ ID NO: 409981 - DNA, 15 bp, Homo sapiens
ggcatttccttttaa

SEQ ID NO: 409982 - DNA, 15 bp, Homo sapiens
tggcatttcctttta

SEQ ID NO: 409983 - DNA, 15 bp, Homo sapiens
ttggcatttcctttt

SEQ ID NO: 409984 - DNA, 15 bp, Homo sapiens
cttggcatttccttt

SEQ ID NO: 409985 - DNA, 15 bp, Homo sapiens
acttggcatttcctt

SEQ ID NO: 409986 - DNA, 15 bp, Homo sapiens
cacttggcatttcct

SEQ ID NO: 409987 - DNA, 15 bp, Homo sapiens
ccacttggcatttcc

SEQ ID NO: 409988 - DNA, 15 bp, Homo sapiens
tccacttggcatttc

SEQ ID NO: 409989 - DNA, 15 bp, Homo sapiens
ttccacttggcattt

SEQ ID NO: 409990 - DNA, 15 bp, Homo sapiens
gttccacttggcatt

SEQ ID NO: 409991 - DNA, 15 bp, Homo sapiens
ggttccacttggcat

SEQ ID NO: 409992 - DNA, 15 bp, Homo sapiens
tggttccacttggca

SEQ ID NO: 409993 - DNA, 15 bp, Homo sapiens
ttggttccacttggc

SEQ ID NO: 409994 - DNA, 15 bp, Homo sapiens
tttggttccacttgg

SEQ ID NO: 409995 - DNA, 15 bp, Homo sapiens
ctttggttccacttg

SEQ ID NO: 409996 - DNA, 15 bp, Homo sapiens
gctttggttccactt

SEQ ID NO: 409997 - DNA, 15 bp, Homo sapiens
ggctttggttccact

SEQ ID NO: 409998 - DNA, 15 bp, Homo sapiens
cggctttggttccac

SEQ ID NO: 409999 - DNA, 15 bp, Homo sapiens
tcggctttggttcca

SEQ ID NO: 410000 - DNA, 15 bp, Homo sapiens
gtcggctttggttcc

SEQ ID NO: 410001 - DNA, 15 bp, Homo sapiens
ggtcggctttggttc

SEQ ID NO: 410002 - DNA, 15 bp, Homo sapiens
aggtcggctttggtt

SEQ ID NO: 410003 - DNA, 15 bp, Homo sapiens
aaggtcggctttggt

SEQ ID NO: 410004 - DNA, 15 bp, Homo sapiens
caaggtcggctttgg

SEQ ID NO: 410005 - DNA, 15 bp, Homo sapiens
gcaaggtcggctttg

SEQ ID NO: 410006 - DNA, 15 bp, Homo sapiens
tgcaaggtcggcttt

SEQ ID NO: 410007 - DNA, 15 bp, Homo sapiens
gtgcaaggtcggctt

SEQ ID NO: 410008 - DNA, 15 bp, Homo sapiens
agtgcaaggtcggct

SEQ ID NO: 410009 - DNA, 15 bp, Homo sapiens
tagtgcaaggtcggc

SEQ ID NO: 410010 - DNA, 15 bp, Homo sapiens
ctagtgcaaggtcgg

SEQ ID NO: 410011 - DNA, 15 bp, Homo sapiens
gctagtgcaaggtcg

SEQ ID NO: 410012 - DNA, 15 bp, Homo sapiens
tgctagtgcaaggtc

SEQ ID NO: 410013 - DNA, 15 bp, Homo sapiens
gtgctagtgcaaggt

SEQ ID NO: 410014 - DNA, 15 bp, Homo sapiens
cgtgctagtgcaagg

SEQ ID NO: 410015 - DNA, 15 bp, Homo sapiens
acgtgctagtgcaag

SEQ ID NO: 410016 - DNA, 15 bp, Homo sapiens
cacgtgctagtgcaa

SEQ ID NO: 410017 - DNA, 15 bp, Homo sapiens
tcacgtgctagtgca

SEQ ID NO: 410018 - DNA, 15 bp, Homo sapiens
atcacgtgctagtgc

SEQ ID NO: 410019 - DNA, 15 bp, Homo sapiens
tatcacgtgctagtg

SEQ ID NO: 410020 - DNA, 15 bp, Homo sapiens
gtatcacgtgctagt

SEQ ID NO: 410021 - DNA, 15 bp, Homo sapiens
agtatcacgtgctag

SEQ ID NO: 410022 - DNA, 15 bp, Homo sapiens
tagtatcacgtgcta

SEQ ID NO: 410023 - DNA, 15 bp, Homo sapiens
ctagtatcacgtgct

SEQ ID NO: 410024 - DNA, 15 bp, Homo sapiens
actagtatcacgtgc

SEQ ID NO: 410025 - DNA, 15 bp, Homo sapiens
gactagtatcacgtg

SEQ ID NO: 410026 - DNA, 15 bp, Homo sapiens
tgactagtatcacgt

SEQ ID NO: 410027 - DNA, 15 bp, Homo sapiens
ttgactagtatcacg

SEQ ID NO: 410028 - DNA, 15 bp, Homo sapiens
cttgactagtatcac

SEQ ID NO: 410029 - DNA, 15 bp, Homo sapiens
ccttgactagtatca

SEQ ID NO: 410030 - DNA, 15 bp, Homo sapiens
tccttgactagtatc

SEQ ID NO: 410031 - DNA, 15 bp, Homo sapiens
ctccttgactagtat

SEQ ID NO: 410032 - DNA, 15 bp, Homo sapiens
cctccttgactagta

SEQ ID NO: 410033 - DNA, 15 bp, Homo sapiens
acctccttgactagt

SEQ ID NO: 410034 - DNA, 15 bp, Homo sapiens
cacctccttgactag

SEQ ID NO: 410035 - DNA, 15 bp, Homo sapiens
gcacctccttgacta

SEQ ID NO: 410036 - DNA, 15 bp, Homo sapiens
agcacctccttgact

SEQ ID NO: 410037 - DNA, 15 bp, Homo sapiens
aagcacctccttgac

SEQ ID NO: 410038 - DNA, 15 bp, Homo sapiens
caagcacctccttga

SEQ ID NO: 410039 - DNA, 15 bp, Homo sapiens
ccaagcacctccttg

SEQ ID NO: 410040 - DNA, 15 bp, Homo sapiens
gccaagcacctcctt

SEQ ID NO: 410041 - DNA, 15 bp, Homo sapiens
agccaagcacctcct

SEQ ID NO: 410042 - DNA, 15 bp, Homo sapiens
aagccaagcacctcc

SEQ ID NO: 410043 - DNA, 15 bp, Homo sapiens
gaagccaagcacctc

SEQ ID NO: 410044 - DNA, 15 bp, Homo sapiens
tgaagccaagcacct

SEQ ID NO: 410045 - DNA, 15 bp, Homo sapiens
gtgaagccaagcacc

SEQ ID NO: 410046 - DNA, 15 bp, Homo sapiens
agtgaagccaagcac

SEQ ID NO: 410047 - DNA, 15 bp, Homo sapiens
gagtgaagccaagca

SEQ ID NO: 410048 - DNA, 15 bp, Homo sapiens
agagtgaagccaagc

SEQ ID NO: 410049 - DNA, 15 bp, Homo sapiens
cagagtgaagccaag

SEQ ID NO: 410050 - DNA, 15 bp, Homo sapiens
gcagagtgaagccaa

SEQ ID NO: 410051 - DNA, 15 bp, Homo sapiens
agcagagtgaagcca

SEQ ID NO: 410052 - DNA, 15 bp, Homo sapiens
cagcagagtgaagcc

SEQ ID NO: 410053 - DNA, 15 bp, Homo sapiens
gcagcagagtgaagc

SEQ ID NO: 410054 - DNA, 15 bp, Homo sapiens
tgcagcagagtgaag

SEQ ID NO: 410055 - DNA, 15 bp, Homo sapiens
atgcagcagagtgaa

SEQ ID NO: 410056 - DNA, 15 bp, Homo sapiens
aatgcagcagagtga

SEQ ID NO: 410057 - DNA, 15 bp, Homo sapiens
aaatgcagcagagtg

SEQ ID NO: 410058 - DNA, 15 bp, Homo sapiens
aaaatgcagcagagt

SEQ ID NO: 410059 - DNA, 15 bp, Homo sapiens
caaaatgcagcagag

SEQ ID NO: 410060 - DNA, 15 bp, Homo sapiens
gcaaaatgcagcaga

SEQ ID NO: 410061 - DNA, 15 bp, Homo sapiens
agcaaaatgcagcag

SEQ ID NO: 410062 - DNA, 15 bp, Homo sapiens
gagcaaaatgcagca

SEQ ID NO: 410063 - DNA, 15 bp, Homo sapiens
agagcaaaatgcagc

SEQ ID NO: 410064 - DNA, 15 bp, Homo sapiens
aagagcaaaatgcag

SEQ ID NO: 410065 - DNA, 15 bp, Homo sapiens
caagagcaaaatgca

SEQ ID NO: 410066 - DNA, 15 bp, Homo sapiens
ccaagagcaaaatgc

SEQ ID NO: 410067 - DNA, 15 bp, Homo sapiens
tccaagagcaaaatg

SEQ ID NO: 410068 - DNA, 15 bp, Homo sapiens
atccaagagcaaaat

SEQ ID NO: 410069 - DNA, 15 bp, Homo sapiens
aatccaagagcaaaa

SEQ ID NO: 410070 - DNA, 15 bp, Homo sapiens
caatccaagagcaaa

SEQ ID NO: 410071 - DNA, 15 bp, Homo sapiens
gcaatccaagagcaa

SEQ ID NO: 410072 - DNA, 15 bp, Homo sapiens
ggcaatccaagagca

SEQ ID NO: 410073 - DNA, 15 bp, Homo sapiens
tggcaatccaagagc

SEQ ID NO: 410074 - DNA, 15 bp, Homo sapiens
ctggcaatccaagag

SEQ ID NO: 410075 - DNA, 15 bp, Homo sapiens
gctggcaatccaaga

SEQ ID NO: 410076 - DNA, 15 bp, Homo sapiens
agctggcaatccaag

SEQ ID NO: 410077 - DNA, 15 bp, Homo sapiens
cagctggcaatccaa

SEQ ID NO: 410078 - DNA, 15 bp, Homo sapiens
gcagctggcaatcca

SEQ ID NO: 410079 - DNA, 15 bp, Homo sapiens
agcagctggcaatcc

SEQ ID NO: 410080 - DNA, 15 bp, Homo sapiens
aagcagctggcaatc

SEQ ID NO: 410081 - DNA, 15 bp, Homo sapiens
gaagcagctggcaat

SEQ ID NO: 410082 - DNA, 15 bp, Homo sapiens
tgaagcagctggcaa

SEQ ID NO: 410083 - DNA, 15 bp, Homo sapiens
ttgaagcagctggca

SEQ ID NO: 410084 - DNA, 15 bp, Homo sapiens
cttgaagcagctggc

SEQ ID NO: 410085 - DNA, 15 bp, Homo sapiens
gcttgaagcagctgg

SEQ ID NO: 410086 - DNA, 15 bp, Homo sapiens
ggcttgaagcagctg

SEQ ID NO: 410087 - DNA, 15 bp, Homo sapiens
tggcttgaagcagct

SEQ ID NO: 410088 - DNA, 15 bp, Homo sapiens
ctggcttgaagcagc

SEQ ID NO: 410089 - DNA, 15 bp, Homo sapiens
gctggcttgaagcag

SEQ ID NO: 410090 - DNA, 15 bp, Homo sapiens
agctggcttgaagca

SEQ ID NO: 410091 - DNA, 15 bp, Homo sapiens
cagctggcttgaagc

SEQ ID NO: 410092 - DNA, 15 bp, Homo sapiens
gcagctggcttgaag

SEQ ID NO: 410093 - DNA, 15 bp, Homo sapiens
agcagctggcttgaa

SEQ ID NO: 410094 - DNA, 15 bp, Homo sapiens
aagcagctggcttga

SEQ ID NO: 410095 - DNA, 15 bp, Homo sapiens
gaagcagctggcttg

SEQ ID NO: 410096 - DNA, 15 bp, Homo sapiens
tgaagcagctggctt

SEQ ID NO: 410097 - DNA, 15 bp, Homo sapiens
ctgaagcagctggct

SEQ ID NO: 410098 - DNA, 15 bp, Homo sapiens
gctgaagcagctggc

SEQ ID NO: 410099 - DNA, 15 bp, Homo sapiens
tgctgaagcagctgg

SEQ ID NO: 410100 - DNA, 15 bp, Homo sapiens
gtgctgaagcagctg

SEQ ID NO: 410101 - DNA, 15 bp, Homo sapiens
tgtgctgaagcagct

SEQ ID NO: 410102 - DNA, 15 bp, Homo sapiens
ctgtgctgaagcagc

SEQ ID NO: 410103 - DNA, 15 bp, Homo sapiens
gctgtgctgaagcag

SEQ ID NO: 410104 - DNA, 15 bp, Homo sapiens
agctgtgctgaagca

SEQ ID NO: 410105 - DNA, 15 bp, Homo sapiens
tagctgtgctgaagc

SEQ ID NO: 410106 - DNA, 15 bp, Homo sapiens
ttagctgtgctgaag

SEQ ID NO: 410107 - DNA, 15 bp, Homo sapiens
tttagctgtgctgaa

SEQ ID NO: 410108 - DNA, 15 bp, Homo sapiens
ttttagctgtgctga

SEQ ID NO: 410109 - DNA, 15 bp, Homo sapiens
attttagctgtgctg

SEQ ID NO: 410110 - DNA, 15 bp, Homo sapiens
cattttagctgtgct

SEQ ID NO: 410111 - DNA, 15 bp, Homo sapiens
tcattttagctgtgc

SEQ ID NO: 410112 - DNA, 15 bp, Homo sapiens
ttcattttagctgtg

SEQ ID NO: 410113 - DNA, 15 bp, Homo sapiens
cttcattttagctgt

SEQ ID NO: 410114 - DNA, 15 bp, Homo sapiens
ccttcattttagctg

SEQ ID NO: 410115 - DNA, 15 bp, Homo sapiens
tccttcattttagct

SEQ ID NO: 410116 - DNA, 15 bp, Homo sapiens
ttccttcattttagc

SEQ ID NO: 410117 - DNA, 15 bp, Homo sapiens
tttccttcattttag

SEQ ID NO: 410118 - DNA, 15 bp, Homo sapiens
ctttccttcatttta

SEQ ID NO: 410119 - DNA, 15 bp, Homo sapiens
tctttccttcatttt

SEQ ID NO: 410120 - DNA, 15 bp, Homo sapiens
ttctttccttcattt

SEQ ID NO: 410121 - DNA, 15 bp, Homo sapiens
attctttccttcatt

SEQ ID NO: 410122 - DNA, 15 bp, Homo sapiens
tattctttccttcat

SEQ ID NO: 410123 - DNA, 15 bp, Homo sapiens
atattctttccttca

SEQ ID NO: 410124 - DNA, 15 bp, Homo sapiens
aatattctttccttc

SEQ ID NO: 410125 - DNA, 15 bp, Homo sapiens
taatattctttcctt

SEQ ID NO: 410126 - DNA, 15 bp, Homo sapiens
ataatattctttcct

SEQ ID NO: 410127 - DNA, 15 bp, Homo sapiens
gataatattctttcc

SEQ ID NO: 410128 - DNA, 15 bp, Homo sapiens
tgataatattctttc

SEQ ID NO: 410129 - DNA, 15 bp, Homo sapiens
gtgataatattcttt

SEQ ID NO: 410130 - DNA, 15 bp, Homo sapiens
agtgataatattctt

SEQ ID NO: 410131 - DNA, 15 bp, Homo sapiens
tagtgataatattct

SEQ ID NO: 410132 - DNA, 15 bp, Homo sapiens
atagtgataatattc

SEQ ID NO: 410133 - DNA, 15 bp, Homo sapiens
tatagtgataatatt

SEQ ID NO: 410134 - DNA, 15 bp, Homo sapiens
atatagtgataatat

SEQ ID NO: 410135 - DNA, 15 bp, Homo sapiens
tatatagtgataata

SEQ ID NO: 410136 - DNA, 15 bp, Homo sapiens
atatatagtgataat

SEQ ID NO: 410137 - DNA, 15 bp, Homo sapiens
aatatatagtgataa

SEQ ID NO: 410138 - DNA, 15 bp, Homo sapiens
aaatatatagtgata

SEQ ID NO: 410139 - DNA, 15 bp, Homo sapiens
aaaatatatagtgat

SEQ ID NO: 410140 - DNA, 15 bp, Homo sapiens
caaaatatatagtga

SEQ ID NO: 410141 - DNA, 15 bp, Homo sapiens
acaaaatatatagtg

SEQ ID NO: 410142 - DNA, 15 bp, Homo sapiens
tacaaaatatatagt

SEQ ID NO: 410143 - DNA, 15 bp, Homo sapiens
atacaaaatatatag

SEQ ID NO: 410144 - DNA, 15 bp, Homo sapiens
aatacaaaatatata

SEQ ID NO: 410145 - DNA, 15 bp, Homo sapiens
aaatacaaaatatat

SEQ ID NO: 410146 - DNA, 15 bp, Homo sapiens
caaatacaaaatata

SEQ ID NO: 410147 - DNA, 15 bp, Homo sapiens
tcaaatacaaaatat

SEQ ID NO: 410148 - DNA, 15 bp, Homo sapiens
ttcaaatacaaaata

SEQ ID NO: 410149 - DNA, 15 bp, Homo sapiens
tttcaaatacaaaat

SEQ ID NO: 410150 - DNA, 15 bp, Homo sapiens
ttttcaaatacaaaa

SEQ ID NO: 410151 - DNA, 15 bp, Homo sapiens
attttcaaatacaaa

SEQ ID NO: 410152 - DNA, 15 bp, Homo sapiens
gattttcaaatacaa

SEQ ID NO: 410153 - DNA, 15 bp, Homo sapiens
agattttcaaataca

SEQ ID NO: 410154 - DNA, 15 bp, Homo sapiens
cagattttcaaatac

SEQ ID NO: 410155 - DNA, 15 bp, Homo sapiens
gcagattttcaaata

SEQ ID NO: 410156 - DNA, 15 bp, Homo sapiens
agcagattttcaaat

SEQ ID NO: 410157 - DNA, 15 bp, Homo sapiens
cagcagattttcaaa

SEQ ID NO: 410158 - DNA, 15 bp, Homo sapiens
ccagcagattttcaa

SEQ ID NO: 410159 - DNA, 15 bp, Homo sapiens
accagcagattttca

SEQ ID NO: 410160 - DNA, 15 bp, Homo sapiens
taccagcagattttc

SEQ ID NO: 410161 - DNA, 15 bp, Homo sapiens
ttaccagcagatttt

SEQ ID NO: 410162 - DNA, 15 bp, Homo sapiens
attaccagcagattt

SEQ ID NO: 410163 - DNA, 15 bp, Homo sapiens
aattaccagcagatt

SEQ ID NO: 410164 - DNA, 15 bp, Homo sapiens
aaattaccagcagat

SEQ ID NO: 410165 - DNA, 15 bp, Homo sapiens
gaaattaccagcaga

SEQ ID NO: 410166 - DNA, 15 bp, Homo sapiens
tgaaattaccagcag

SEQ ID NO: 410167 - DNA, 15 bp, Homo sapiens
ttgaaattaccagca

SEQ ID NO: 410168 - DNA, 15 bp, Homo sapiens
tttgaaattaccagc

SEQ ID NO: 410169 - DNA, 15 bp, Homo sapiens
ttttgaaattaccag

SEQ ID NO: 410170 - DNA, 15 bp, Homo sapiens
cttttgaaattacca

SEQ ID NO: 410171 - DNA, 15 bp, Homo sapiens
gcttttgaaattacc

SEQ ID NO: 410172 - DNA, 15 bp, Homo sapiens
agcttttgaaattac

SEQ ID NO: 410173 - DNA, 15 bp, Homo sapiens
aagcttttgaaatta

SEQ ID NO: 410174 - DNA, 15 bp, Homo sapiens
taagcttttgaaatt

SEQ ID NO: 410175 - DNA, 15 bp, Homo sapiens
ctaagcttttgaaat

SEQ ID NO: 410176 - DNA, 15 bp, Homo sapiens
tctaagcttttgaaa

SEQ ID NO: 410177 - DNA, 15 bp, Homo sapiens
ttctaagcttttgaa

SEQ ID NO: 410178 - DNA, 15 bp, Homo sapiens
attctaagcttttga

SEQ ID NO: 410179 - DNA, 15 bp, Homo sapiens
cattctaagcttttg

SEQ ID NO: 410180 - DNA, 15 bp, Homo sapiens
acattctaagctttt

SEQ ID NO: 410181 - DNA, 15 bp, Homo sapiens
aacattctaagcttt

SEQ ID NO: 410182 - DNA, 15 bp, Homo sapiens
caacattctaagctt

SEQ ID NO: 410183 - DNA, 15 bp, Homo sapiens
tcaacattctaagct

SEQ ID NO: 410184 - DNA, 15 bp, Homo sapiens
gtcaacattctaagc

SEQ ID NO: 410185 - DNA, 15 bp, Homo sapiens
tgtcaacattctaag

SEQ ID NO: 410186 - DNA, 15 bp, Homo sapiens
ctgtcaacattctaa

SEQ ID NO: 410187 - DNA, 15 bp, Homo sapiens
actgtcaacattcta

SEQ ID NO: 410188 - DNA, 15 bp, Homo sapiens
tactgtcaacattct

SEQ ID NO: 410189 - DNA, 15 bp, Homo sapiens
ctactgtcaacattc

SEQ ID NO: 410190 - DNA, 15 bp, Homo sapiens
gctactgtcaacatt

SEQ ID NO: 410191 - DNA, 15 bp, Homo sapiens
ggctactgtcaacat

SEQ ID NO: 410192 - DNA, 15 bp, Homo sapiens
aggctactgtcaaca

SEQ ID NO: 410193 - DNA, 15 bp, Homo sapiens
caggctactgtcaac

SEQ ID NO: 410194 - DNA, 15 bp, Homo sapiens
acaggctactgtcaa

SEQ ID NO: 410195 - DNA, 15 bp, Homo sapiens
tacaggctactgtca

SEQ ID NO: 410196 - DNA, 15 bp, Homo sapiens
ctacaggctactgtc

SEQ ID NO: 410197 - DNA, 15 bp, Homo sapiens
tctacaggctactgt

SEQ ID NO: 410198 - DNA, 15 bp, Homo sapiens
atctacaggctactg

SEQ ID NO: 410199 - DNA, 15 bp, Homo sapiens
catctacaggctact

SEQ ID NO: 410200 - DNA, 15 bp, Homo sapiens
tcatctacaggctac

SEQ ID NO: 410201 - DNA, 15 bp, Homo sapiens
ttcatctacaggcta

SEQ ID NO: 410202 - DNA, 15 bp, Homo sapiens
tttcatctacaggct

SEQ ID NO: 410203 - DNA, 15 bp, Homo sapiens
ttttcatctacaggc

SEQ ID NO: 410204 - DNA, 15 bp, Homo sapiens
attttcatctacagg

SEQ ID NO: 410205 - DNA, 15 bp, Homo sapiens
aattttcatctacag

SEQ ID NO: 410206 - DNA, 15 bp, Homo sapiens
aaattttcatctaca

SEQ ID NO: 410207 - DNA, 15 bp, Homo sapiens
taaattttcatctac

SEQ ID NO: 410208 - DNA, 15 bp, Homo sapiens
ttaaattttcatcta

SEQ ID NO: 410209 - DNA, 15 bp, Homo sapiens
tttaaattttcatct

SEQ ID NO: 410210 - DNA, 15 bp, Homo sapiens
gttttaaattttcat

SEQ ID NO: 410211 - DNA, 15 bp, Homo sapiens
agttttaaattttca

SEQ ID NO: 410212 - DNA, 15 bp, Homo sapiens
aagttttaaattttc

SEQ ID NO: 410213 - DNA, 15 bp, Homo sapiens
taagttttaaatttt

SEQ ID NO: 410214 - DNA, 15 bp, Homo sapiens
ctaagttttaaattt

SEQ ID NO: 410215 - DNA, 15 bp, Homo sapiens
actaagttttaaatt

SEQ ID NO: 410216 - DNA, 15 bp, Homo sapiens
cactaagttttaaat

SEQ ID NO: 410217 - DNA, 15 bp, Homo sapiens
tcactaagttttaaa

SEQ ID NO: 410218 - DNA, 15 bp, Homo sapiens
atcactaagttttaa

SEQ ID NO: 410219 - DNA, 15 bp, Homo sapiens
gatcactaagtttta

SEQ ID NO: 410220 - DNA, 15 bp, Homo sapiens
tgatcactaagtttt

SEQ ID NO: 410221 - DNA, 15 bp, Homo sapiens
ttgatcactaagttt

SEQ ID NO: 410222 - DNA, 15 bp, Homo sapiens
tttgatcactaagtt

SEQ ID NO: 410223 - DNA, 15 bp, Homo sapiens
ctttgatcactaagt

SEQ ID NO: 410224 - DNA, 15 bp, Homo sapiens
actttgatcactaag

SEQ ID NO: 410225 - DNA, 15 bp, Homo sapiens
tactttgatcactaa

SEQ ID NO: 410226 - DNA, 15 bp, Homo sapiens
atactttgatcacta

SEQ ID NO: 410227 - DNA, 15 bp, Homo sapiens
gatactttgatcact

SEQ ID NO: 410228 - DNA, 15 bp, Homo sapiens
tgatactttgatcac

SEQ ID NO: 410229 - DNA, 15 bp, Homo sapiens
atgatactttgatca

SEQ ID NO: 410230 - DNA, 15 bp, Homo sapiens
tatgatactttgatc

SEQ ID NO: 410231 - DNA, 15 bp, Homo sapiens
atatgatactttgat

SEQ ID NO: 410232 - DNA, 15 bp, Homo sapiens
gatatgatactttga

SEQ ID NO: 410233 - DNA, 15 bp, Homo sapiens
ggatatgatactttg

SEQ ID NO: 410234 - DNA, 15 bp, Homo sapiens
aggatatgatacttt

SEQ ID NO: 410235 - DNA, 15 bp, Homo sapiens
aaggatatgatactt

SEQ ID NO: 410236 - DNA, 15 bp, Homo sapiens
gaaggatatgatact

SEQ ID NO: 410237 - DNA, 15 bp, Homo sapiens
ggaaggatatgatac

SEQ ID NO: 410238 - DNA, 15 bp, Homo sapiens
aggaaggatatgata

SEQ ID NO: 410239 - DNA, 15 bp, Homo sapiens
gaggaaggatatgat

SEQ ID NO: 410240 - DNA, 15 bp, Homo sapiens
ggaggaaggatatga

SEQ ID NO: 410241 - DNA, 15 bp, Homo sapiens
gggaggaaggatatg

SEQ ID NO: 410242 - DNA, 15 bp, Homo sapiens
agggaggaaggatat

SEQ ID NO: 410243 - DNA, 15 bp, Homo sapiens
aagggaggaaggata

SEQ ID NO: 410244 - DNA, 15 bp, Homo sapiens
aaagggaggaaggat

SEQ ID NO: 410245 - DNA, 15 bp, Homo sapiens
caaagggaggaagga

SEQ ID NO: 410246 - DNA, 15 bp, Homo sapiens
gcaaagggaggaagg

SEQ ID NO: 410247 - DNA, 15 bp, Homo sapiens
tgcaaagggaggaag

SEQ ID NO: 410248 - DNA, 15 bp, Homo sapiens
ctgcaaagggaggaa

SEQ ID NO: 410249 - DNA, 15 bp, Homo sapiens
tctgcaaagggagga

SEQ ID NO: 410250 - DNA, 15 bp, Homo sapiens
ttctgcaaagggagg

SEQ ID NO: 410251 - DNA, 15 bp, Homo sapiens
attctgcaaagggag

SEQ ID NO: 410252 - DNA, 15 bp, Homo sapiens
aattctgcaaaggga

SEQ ID NO: 410253 - DNA, 15 bp, Homo sapiens
taattctgcaaaggg

SEQ ID NO: 410254 - DNA, 15 bp, Homo sapiens
ataattctgcaaagg

SEQ ID NO: 410255 - DNA, 15 bp, Homo sapiens
aataattctgcaaag

SEQ ID NO: 410256 - DNA, 15 bp, Homo sapiens
aaataattctgcaaa

SEQ ID NO: 410257 - DNA, 15 bp, Homo sapiens
aaaataattctgcaa

SEQ ID NO: 410258 - DNA, 15 bp, Homo sapiens
aaaaataattctgca

SEQ ID NO: 410259 - DNA, 15 bp, Homo sapiens
taaaaataattctgc

SEQ ID NO: 410260 - DNA, 15 bp, Homo sapiens
ttaaaaataattctg

SEQ ID NO: 410261 - DNA, 15 bp, Homo sapiens
tttaaaaataattct

SEQ ID NO: 410262 - DNA, 15 bp, Homo sapiens
ttttaaaaataattc

SEQ ID NO: 410263 - DNA, 15 bp, Homo sapiens
cttttaaaaataatt

SEQ ID NO: 410264 - DNA, 15 bp, Homo sapiens
tcttttaaaaataat

SEQ ID NO: 410265 - DNA, 15 bp, Homo sapiens
atcttttaaaaataa

SEQ ID NO: 410266 - DNA, 15 bp, Homo sapiens
aatcttttaaaaata

SEQ ID NO: 410267 - DNA, 15 bp, Homo sapiens
caatcttttaaaaat

SEQ ID NO: 410268 - DNA, 15 bp, Homo sapiens
acaatcttttaaaaa

SEQ ID NO: 410269 - DNA, 15 bp, Homo sapiens
cacaatcttttaaaa

SEQ ID NO: 410270 - DNA, 15 bp, Homo sapiens
ccacaatcttttaaa

SEQ ID NO: 410271 - DNA, 15 bp, Homo sapiens
gccacaatcttttaa

SEQ ID NO: 410272 - DNA, 15 bp, Homo sapiens
agccacaatctttta

SEQ ID NO: 410273 - DNA, 15 bp, Homo sapiens
aagccacaatctttt

SEQ ID NO: 410274 - DNA, 15 bp, Homo sapiens
caagccacaatcttt

SEQ ID NO: 410275 - DNA, 15 bp, Homo sapiens
gcaagccacaatctt

SEQ ID NO: 410276 - DNA, 15 bp, Homo sapiens
ggcaagccacaatct

SEQ ID NO: 410277 - DNA, 15 bp, Homo sapiens
aggcaagccacaatc

SEQ ID NO: 410278 - DNA, 15 bp, Homo sapiens
caggcaagccacaat

SEQ ID NO: 410279 - DNA, 15 bp, Homo sapiens
acaggcaagccacaa

SEQ ID NO: 410280 - DNA, 15 bp, Homo sapiens
aacaggcaagccaca

SEQ ID NO: 410281 - DNA, 15 bp, Homo sapiens
aaacaggcaagccac

SEQ ID NO: 410282 - DNA, 15 bp, Homo sapiens
caaacaggcaagcca

SEQ ID NO: 410283 - DNA, 15 bp, Homo sapiens
ccaaacaggcaagcc

SEQ ID NO: 410284 - DNA, 15 bp, Homo sapiens
tccaaacaggcaagc

SEQ ID NO: 410285 - DNA, 15 bp, Homo sapiens
gtccaaacaggcaag

SEQ ID NO: 410286 - DNA, 15 bp, Homo sapiens
tgtccaaacaggcaa

SEQ ID NO: 410287 - DNA, 15 bp, Homo sapiens
ttgtccaaacaggca

SEQ ID NO: 410288 - DNA, 15 bp, Homo sapiens
attgtccaaacaggc

SEQ ID NO: 410289 - DNA, 15 bp, Homo sapiens
aattgtccaaacagg

SEQ ID NO: 410290 - DNA, 15 bp, Homo sapiens
aaattgtccaaacag

SEQ ID NO: 410291 - DNA, 15 bp, Homo sapiens
aaaattgtccaaaca

SEQ ID NO: 410292 - DNA, 15 bp, Homo sapiens
gaaaattgtccaaac

SEQ ID NO: 410293 - DNA, 15 bp, Homo sapiens
tgaaaattgtccaaa

SEQ ID NO: 410294 - DNA, 15 bp, Homo sapiens
ctgaaaattgtccaa

SEQ ID NO: 410295 - DNA, 15 bp, Homo sapiens
tctgaaaattgtcca

SEQ ID NO: 410296 - DNA, 15 bp, Homo sapiens
ttctgaaaattgtcc

SEQ ID NO: 410297 - DNA, 15 bp, Homo sapiens
gttctgaaaattgtc

SEQ ID NO: 410298 - DNA, 15 bp, Homo sapiens
tgttctgaaaattgt

SEQ ID NO: 410299 - DNA, 15 bp, Homo sapiens
gtgttctgaaaattg

SEQ ID NO: 410300 - DNA, 15 bp, Homo sapiens
tgtgttctgaaaatt

SEQ ID NO: 410301 - DNA, 15 bp, Homo sapiens
ctgtgttctgaaaat

SEQ ID NO: 410302 - DNA, 15 bp, Homo sapiens
cctgtgttctgaaaa

SEQ ID NO: 410303 - DNA, 15 bp, Homo sapiens
ccctgtgttctgaaa

SEQ ID NO: 410304 - DNA, 15 bp, Homo sapiens
cccctgtgttctgaa

SEQ ID NO: 410305 - DNA, 15 bp, Homo sapiens
ccccctgtgttctga

SEQ ID NO: 410306 - DNA, 15 bp, Homo sapiens
tccccctgtgttctg

SEQ ID NO: 410307 - DNA, 15 bp, Homo sapiens
ttccccctgtgttct

SEQ ID NO: 410308 - DNA, 15 bp, Homo sapiens
tttccccctgtgttc

SEQ ID NO: 410309 - DNA, 15 bp, Homo sapiens
atttccccctgtgtt

SEQ ID NO: 410310 - DNA, 15 bp, Homo sapiens
gatttccccctgtgt

SEQ ID NO: 410311 - DNA, 15 bp, Homo sapiens
tgatttccccctgtg

SEQ ID NO: 410312 - DNA, 15 bp, Homo sapiens
atgatttccccctgt

SEQ ID NO: 410313 - DNA, 15 bp, Homo sapiens
aatgatttccccctg

SEQ ID NO: 410314 - DNA, 15 bp, Homo sapiens
aaatgatttccccct

SEQ ID NO: 410315 - DNA, 15 bp, Homo sapiens
aaaatgatttccccc

SEQ ID NO: 410316 - DNA, 15 bp, Homo sapiens
aaaaatgatttcccc

SEQ ID NO: 410317 - DNA, 15 bp, Homo sapiens
gaaaaatgatttccc

SEQ ID NO: 410318 - DNA, 15 bp, Homo sapiens
tgaaaaatgatttcc

SEQ ID NO: 410319 - DNA, 15 bp, Homo sapiens
gtgaaaaatgatttc

SEQ ID NO: 410320 - DNA, 15 bp, Homo sapiens
agtgaaaaatgattt

SEQ ID NO: 410321 - DNA, 15 bp, Homo sapiens
aagtgaaaaatgatt

SEQ ID NO: 410322 - DNA, 15 bp, Homo sapiens
aaagtgaaaaatgat

SEQ ID NO: 410323 - DNA, 15 bp, Homo sapiens
aaaagtgaaaaatga

SEQ ID NO: 410324 - DNA, 15 bp, Homo sapiens
aaaaagtgaaaaatg

SEQ ID NO: 410325 - DNA, 15 bp, Homo sapiens
taaaaagtgaaaaat

SEQ ID NO: 410326 - DNA, 15 bp, Homo sapiens
ataaaaagtgaaaaa

SEQ ID NO: 410327 - DNA, 15 bp, Homo sapiens
aataaaaagtgaaaa

SEQ ID NO: 410328 - DNA, 15 bp, Homo sapiens
taataaaaagtgaaa

SEQ ID NO: 410329 - DNA, 15 bp, Homo sapiens
ataataaaaagtgaa

SEQ ID NO: 410330 - DNA, 15 bp, Homo sapiens
tataataaaaagtga

SEQ ID NO: 410331 - DNA, 15 bp, Homo sapiens
ttataataaaaagtg

SEQ ID NO: 410332 - DNA, 15 bp, Homo sapiens
attataataaaaagt

SEQ ID NO: 410333 - DNA, 15 bp, Homo sapiens
tattataataaaaag

SEQ ID NO: 410334 - DNA, 15 bp, Homo sapiens
atattataataaaaa

SEQ ID NO: 410335 - DNA, 15 bp, Homo sapiens
catattataataaaa

SEQ ID NO: 410336 - DNA, 15 bp, Homo sapiens
tcatattataataaa

SEQ ID NO: 410337 - DNA, 15 bp, Homo sapiens
atcatattataataa

SEQ ID NO: 410338 - DNA, 15 bp, Homo sapiens
aatcatattataata

SEQ ID NO: 410339 - DNA, 15 bp, Homo sapiens
taatcatattataat

SEQ ID NO: 410340 - DNA, 15 bp, Homo sapiens
ctaatcatattataa

SEQ ID NO: 410341 - DNA, 15 bp, Homo sapiens
tctaatcatattata

SEQ ID NO: 410342 - DNA, 15 bp, Homo sapiens
atctaatcatattat

SEQ ID NO: 410343 - DNA, 15 bp, Homo sapiens
catctaatcatatta

SEQ ID NO: 410344 - DNA, 15 bp, Homo sapiens
acatctaatcatatt

SEQ ID NO: 410345 - DNA, 15 bp, Homo sapiens
tacatctaatcatat

SEQ ID NO: 410346 - DNA, 15 bp, Homo sapiens
ttacatctaatcata

SEQ ID NO: 410347 - DNA, 15 bp, Homo sapiens
attacatctaatcat

SEQ ID NO: 410348 - DNA, 15 bp, Homo sapiens
aattacatctaatca

SEQ ID NO: 410349 - DNA, 15 bp, Homo sapiens
caattacatctaatc

SEQ ID NO: 410350 - DNA, 15 bp, Homo sapiens
tcaattacatctaat

SEQ ID NO: 410351 - DNA, 15 bp, Homo sapiens
ttcaattacatctaa

SEQ ID NO: 410352 - DNA, 15 bp, Homo sapiens
attcaattacatcta

SEQ ID NO: 410353 - DNA, 15 bp, Homo sapiens
aattcaattacatct

SEQ ID NO: 410354 - DNA, 15 bp, Homo sapiens
aaattcaattacatc

SEQ ID NO: 410355 - DNA, 15 bp, Homo sapiens
aaaattcaattacat

SEQ ID NO: 410356 - DNA, 15 bp, Homo sapiens
taaaattcaattaca

SEQ ID NO: 410357 - DNA, 15 bp, Homo sapiens
ctaaaattcaattac

SEQ ID NO: 410358 - DNA, 15 bp, Homo sapiens
actaaaattcaatta

SEQ ID NO: 410359 - DNA, 15 bp, Homo sapiens
tactaaaattcaatt

SEQ ID NO: 410360 - DNA, 15 bp, Homo sapiens
ttactaaaattcaat

SEQ ID NO: 410361 - DNA, 15 bp, Homo sapiens
cttactaaaattcaa

SEQ ID NO: 410362 - DNA, 15 bp, Homo sapiens
acttactaaaattca

SEQ ID NO: 410363 - DNA, 15 bp, Homo sapiens
tacttactaaaattc

SEQ ID NO: 410364 - DNA, 15 bp, Homo sapiens
gtacttactaaaatt

SEQ ID NO: 410365 - DNA, 15 bp, Homo sapiens
tgtacttactaaaat

SEQ ID NO: 410366 - DNA, 15 bp, Homo sapiens
atgtacttactaaaa

SEQ ID NO: 410367 - DNA, 15 bp, Homo sapiens
aatgtacttactaaa

SEQ ID NO: 410368 - DNA, 15 bp, Homo sapiens
caatgtacttactaa

SEQ ID NO: 410369 - DNA, 15 bp, Homo sapiens
gcaatgtacttacta

SEQ ID NO: 410370 - DNA, 15 bp, Homo sapiens
tgcaatgtacttact

SEQ ID NO: 410371 - DNA, 15 bp, Homo sapiens
ttgcaatgtacttac

SEQ ID NO: 410372 - DNA, 15 bp, Homo sapiens
gttgcaatgtactta

SEQ ID NO: 410373 - DNA, 15 bp, Homo sapiens
tgttgcaatgtactt

SEQ ID NO: 410374 - DNA, 15 bp, Homo sapiens
ttgttgcaatgtact

SEQ ID NO: 410375 - DNA, 15 bp, Homo sapiens
attgttgcaatgtac

SEQ ID NO: 410376 - DNA, 15 bp, Homo sapiens
cattgttgcaatgta

SEQ ID NO: 410377 - DNA, 15 bp, Homo sapiens
tcattgttgcaatgt

SEQ ID NO: 410378 - DNA, 15 bp, Homo sapiens
ttcattgttgcaatg

SEQ ID NO: 410379 - DNA, 15 bp, Homo sapiens
attcattgttgcaat

SEQ ID NO: 410380 - DNA, 15 bp, Homo sapiens
aattcattgttgcaa

SEQ ID NO: 410381 - DNA, 15 bp, Homo sapiens
aaattcattgttgca

SEQ ID NO: 410382 - DNA, 15 bp, Homo sapiens
gaaattcattgttgc

SEQ ID NO: 410383 - DNA, 15 bp, Homo sapiens
tgaaattcattgttg

SEQ ID NO: 410384 - DNA, 15 bp, Homo sapiens
ttgaaattcattgtt

SEQ ID NO: 410385 - DNA, 15 bp, Homo sapiens
attgaaattcattgt

SEQ ID NO: 410386 - DNA, 15 bp, Homo sapiens
cattgaaattcattg

SEQ ID NO: 410387 - DNA, 15 bp, Homo sapiens
ccattgaaattcatt

SEQ ID NO: 410388 - DNA, 15 bp, Homo sapiens
cccattgaaattcat

SEQ ID NO: 410389 - DNA, 15 bp, Homo sapiens
gcccattgaaattca

SEQ ID NO: 410390 - DNA, 15 bp, Homo sapiens
tgcccattgaaattc

SEQ ID NO: 410391 - DNA, 15 bp, Homo sapiens
atgcccattgaaatt

SEQ ID NO: 410392 - DNA, 15 bp, Homo sapiens
tatgcccattgaaat

SEQ ID NO: 410393 - DNA, 15 bp, Homo sapiens
gtatgcccattgaaa

SEQ ID NO: 410394 - DNA, 15 bp, Homo sapiens
tgtatgcccattgaa

SEQ ID NO: 410395 - DNA, 15 bp, Homo sapiens
ctgtatgcccattga

SEQ ID NO: 410396 - DNA, 15 bp, Homo sapiens
actgtatgcccattg

SEQ ID NO: 410397 - DNA, 15 bp, Homo sapiens
tactgtatgcccatt

SEQ ID NO: 410398 - DNA, 15 bp, Homo sapiens
atactgtatgcccat

SEQ ID NO: 410399 - DNA, 15 bp, Homo sapiens
tatactgtatgccca

SEQ ID NO: 410400 - DNA, 15 bp, Homo sapiens
ttatactgtatgccc

SEQ ID NO: 410401 - DNA, 15 bp, Homo sapiens
gttatactgtatgcc

SEQ ID NO: 410402 - DNA, 15 bp, Homo sapiens
agttatactgtatgc

SEQ ID NO: 410403 - DNA, 15 bp, Homo sapiens
aagttatactgtatg

SEQ ID NO: 410404 - DNA, 15 bp, Homo sapiens
taagttatactgtat

SEQ ID NO: 410405 - DNA, 15 bp, Homo sapiens
ttaagttatactgta

SEQ ID NO: 410406 - DNA, 15 bp, Homo sapiens
cttaagttatactgt

SEQ ID NO: 410407 - DNA, 15 bp, Homo sapiens
acttaagttatactg

SEQ ID NO: 410408 - DNA, 15 bp, Homo sapiens
aacttaagttatact

SEQ ID NO: 410409 - DNA, 15 bp, Homo sapiens
aaacttaagttatac

SEQ ID NO: 410410 - DNA, 15 bp, Homo sapiens
aaaacttaagttata

SEQ ID NO: 410411 - DNA, 15 bp, Homo sapiens
gaaaacttaagttat

SEQ ID NO: 410412 - DNA, 15 bp, Homo sapiens
agaaaacttaagtta

SEQ ID NO: 410413 - DNA, 15 bp, Homo sapiens
cagaaaacttaagtt

SEQ ID NO: 410414 - DNA, 15 bp, Homo sapiens
ccagaaaacttaagt

SEQ ID NO: 410415 - DNA, 15 bp, Homo sapiens
tccagaaaacttaag

SEQ ID NO: 410416 - DNA, 15 bp, Homo sapiens
atccagaaaacttaa

SEQ ID NO: 410417 - DNA, 15 bp, Homo sapiens
catccagaaaactta

SEQ ID NO: 410418 - DNA, 15 bp, Homo sapiens
acatccagaaaactt

SEQ ID NO: 410419 - DNA, 15 bp, Homo sapiens
tacatccagaaaact

SEQ ID NO: 410420 - DNA, 15 bp, Homo sapiens
ctacatccagaaaac

SEQ ID NO: 410421 - DNA, 15 bp, Homo sapiens
tctacatccagaaaa

SEQ ID NO: 410422 - DNA, 15 bp, Homo sapiens
atctacatccagaaa

SEQ ID NO: 410423 - DNA, 15 bp, Homo sapiens
aatctacatccagaa

SEQ ID NO: 410424 - DNA, 15 bp, Homo sapiens
aaatctacatccaga

SEQ ID NO: 410425 - DNA, 15 bp, Homo sapiens
aaaatctacatccag

SEQ ID NO: 410426 - DNA, 15 bp, Homo sapiens
caaaatctacatcca

SEQ ID NO: 410427 - DNA, 15 bp, Homo sapiens
gcaaaatctacatcc

SEQ ID NO: 410428 - DNA, 15 bp, Homo sapiens
tgcaaaatctacatc

SEQ ID NO: 410429 - DNA, 15 bp, Homo sapiens
ctgcaaaatctacat

SEQ ID NO: 410430 - DNA, 15 bp, Homo sapiens
tctgcaaaatctaca

SEQ ID NO: 410431 - DNA, 15 bp, Homo sapiens
ttctgcaaaatctac

SEQ ID NO: 410432 - DNA, 15 bp, Homo sapiens
tttctgcaaaatcta

SEQ ID NO: 410433 - DNA, 15 bp, Homo sapiens
ctttctgcaaaatct

SEQ ID NO: 410434 - DNA, 15 bp, Homo sapiens
tctttctgcaaaatc

SEQ ID NO: 410435 - DNA, 15 bp, Homo sapiens
ctctttctgcaaaat

SEQ ID NO: 410436 - DNA, 15 bp, Homo sapiens
cctctttctgcaaaa

SEQ ID NO: 410437 - DNA, 15 bp, Homo sapiens
tcctctttctgcaaa

SEQ ID NO: 410438 - DNA, 15 bp, Homo sapiens
ttcctctttctgcaa

SEQ ID NO: 410439 - DNA, 15 bp, Homo sapiens
cttcctctttctgca

SEQ ID NO: 410440 - DNA, 15 bp, Homo sapiens
actctgggttttaag

SEQ ID NO: 410441 - DNA, 15 bp, Homo sapiens
cactctgggttttaa

SEQ ID NO: 410442 - DNA, 15 bp, Homo sapiens
tcactctgggtttta

SEQ ID NO: 410443 - DNA, 15 bp, Homo sapiens
ctcactctgggtttt

SEQ ID NO: 410444 - DNA, 15 bp, Homo sapiens
cctcactctgggttt

SEQ ID NO: 410445 - DNA, 15 bp, Homo sapiens
gcctcactctgggtt

SEQ ID NO: 410446 - DNA, 15 bp, Homo sapiens
tgcctcactctgggt

SEQ ID NO: 410447 - DNA, 15 bp, Homo sapiens
atgcctcactctggg

SEQ ID NO: 410448 - DNA, 15 bp, Homo sapiens
tatgcctcactctgg

SEQ ID NO: 410449 - DNA, 15 bp, Homo sapiens
ctatgcctcactctg

SEQ ID NO: 410450 - DNA, 15 bp, Homo sapiens
tctatgcctcactct

SEQ ID NO: 410451 - DNA, 15 bp, Homo sapiens
ttctatgcctcactc

SEQ ID NO: 410452 - DNA, 15 bp, Homo sapiens
tttctatgcctcact

SEQ ID NO: 410453 - DNA, 15 bp, Homo sapiens
atttctatgcctcac

SEQ ID NO: 410454 - DNA, 15 bp, Homo sapiens
aatttctatgcctca

SEQ ID NO: 410455 - DNA, 15 bp, Homo sapiens
aaatttctatgcctc

SEQ ID NO: 410456 - DNA, 15 bp, Homo sapiens
taaatttctatgcct

SEQ ID NO: 410457 - DNA, 15 bp, Homo sapiens
ataaatttctatgcc

SEQ ID NO: 410458 - DNA, 15 bp, Homo sapiens
cataaatttctatgc

SEQ ID NO: 410459 - DNA, 15 bp, Homo sapiens
acataaatttctatg

SEQ ID NO: 410460 - DNA, 15 bp, Homo sapiens
gacataaatttctat

SEQ ID NO: 410461 - DNA, 15 bp, Homo sapiens
cgacataaatttcta

SEQ ID NO: 410462 - DNA, 15 bp, Homo sapiens
tcgacataaatttct

SEQ ID NO: 410463 - DNA, 15 bp, Homo sapiens
ctcgacataaatttc

SEQ ID NO: 410464 - DNA, 15 bp, Homo sapiens
gctcgacataaattt

SEQ ID NO: 410465 - DNA, 15 bp, Homo sapiens
agctcgacataaatt

SEQ ID NO: 410466 - DNA, 15 bp, Homo sapiens
cagctcgacataaat

SEQ ID NO: 410467 - DNA, 15 bp, Homo sapiens
ccagctcgacataaa

SEQ ID NO: 410468 - DNA, 15 bp, Homo sapiens
tccagctcgacataa

SEQ ID NO: 410469 - DNA, 15 bp, Homo sapiens
gtccagctcgacata

SEQ ID NO: 410470 - DNA, 15 bp, Homo sapiens
tgtccagctcgacat

SEQ ID NO: 410471 - DNA, 15 bp, Homo sapiens
ctgtccagctcgaca

SEQ ID NO: 410472 - DNA, 15 bp, Homo sapiens
tctgtccagctcgac

SEQ ID NO: 410473 - DNA, 15 bp, Homo sapiens
ctctgtccagctcga

SEQ ID NO: 410474 - DNA, 15 bp, Homo sapiens
gctctgtccagctcg

SEQ ID NO: 410475 - DNA, 15 bp, Homo sapiens
agctctgtccagctc

SEQ ID NO: 410476 - DNA, 15 bp, Homo sapiens
cagctctgtccagct

SEQ ID NO: 410477 - DNA, 15 bp, Homo sapiens
tcagctctgtccagc

SEQ ID NO: 410478 - DNA, 15 bp, Homo sapiens
ttcagctctgtccag

SEQ ID NO: 410479 - DNA, 15 bp, Homo sapiens
attcagctctgtcca

SEQ ID NO: 410480 - DNA, 15 bp, Homo sapiens
cattcagctctgtcc

SEQ ID NO: 410481 - DNA, 15 bp, Homo sapiens
acattcagctctgtc

SEQ ID NO: 410482 - DNA, 15 bp, Homo sapiens
gacattcagctctgt

SEQ ID NO: 410483 - DNA, 15 bp, Homo sapiens
tgacattcagctctg

SEQ ID NO: 410484 - DNA, 15 bp, Homo sapiens
ctgacattcagctct

SEQ ID NO: 410485 - DNA, 15 bp, Homo sapiens
gctgacattcagctc

SEQ ID NO: 410486 - DNA, 15 bp, Homo sapiens
ggctgacattcagct

SEQ ID NO: 410487 - DNA, 15 bp, Homo sapiens
tggctgacattcagc

SEQ ID NO: 410488 - DNA, 15 bp, Homo sapiens
gtggctgacattcag

SEQ ID NO: 410489 - DNA, 15 bp, Homo sapiens
tgtggctgacattca

SEQ ID NO: 410490 - DNA, 15 bp, Homo sapiens
atgtggctgacattc

SEQ ID NO: 410491 - DNA, 15 bp, Homo sapiens
catgtggctgacatt

SEQ ID NO: 410492 - DNA, 15 bp, Homo sapiens
ccatgtggctgacat

SEQ ID NO: 410493 - DNA, 15 bp, Homo sapiens
accatgtggctgaca

SEQ ID NO: 410494 - DNA, 15 bp, Homo sapiens
taccatgtggctgac

SEQ ID NO: 410495 - DNA, 15 bp, Homo sapiens
ctaccatgtggctga

SEQ ID NO: 410496 - DNA, 15 bp, Homo sapiens
gctaccatgtggctg

SEQ ID NO: 410497 - DNA, 15 bp, Homo sapiens
tgctaccatgtggct

SEQ ID NO: 410498 - DNA, 15 bp, Homo sapiens
ttgctaccatgtggc

SEQ ID NO: 410499 - DNA, 15 bp, Homo sapiens
cttgctaccatgtgg

SEQ ID NO: 410500 - DNA, 15 bp, Homo sapiens
tcttgctaccatgtg

SEQ ID NO: 410501 - DNA, 15 bp, Homo sapiens
atcttgctaccatgt

SEQ ID NO: 410502 - DNA, 15 bp, Homo sapiens
tatcttgctaccatg

SEQ ID NO: 410503 - DNA, 15 bp, Homo sapiens
ctatcttgctaccat

SEQ ID NO: 410504 - DNA, 15 bp, Homo sapiens
tctatcttgctacca

SEQ ID NO: 410505 - DNA, 15 bp, Homo sapiens
atctatcttgctacc

SEQ ID NO: 410506 - DNA, 15 bp, Homo sapiens
catctatcttgctac

SEQ ID NO: 410507 - DNA, 15 bp, Homo sapiens
gcatctatcttgcta

SEQ ID NO: 410508 - DNA, 15 bp, Homo sapiens
agcatctatcttgct

SEQ ID NO: 410509 - DNA, 15 bp, Homo sapiens
aagcatctatcttgc

SEQ ID NO: 410510 - DNA, 15 bp, Homo sapiens
aaagcatctatcttg

SEQ ID NO: 410511 - DNA, 15 bp, Homo sapiens
caaagcatctatctt

SEQ ID NO: 410512 - DNA, 15 bp, Homo sapiens
gcaaagcatctatct

SEQ ID NO: 410513 - DNA, 15 bp, Homo sapiens
tgcaaagcatctatc

SEQ ID NO: 410514 - DNA, 15 bp, Homo sapiens
atgcaaagcatctat

SEQ ID NO: 410515 - DNA, 15 bp, Homo sapiens
gatgcaaagcatcta

SEQ ID NO: 410516 - DNA, 15 bp, Homo sapiens
tgatgcaaagcatct

SEQ ID NO: 410517 - DNA, 15 bp, Homo sapiens
ctgatgcaaagcatc

SEQ ID NO: 410518 - DNA, 15 bp, Homo sapiens
cctgatgcaaagcat

SEQ ID NO: 410519 - DNA, 15 bp, Homo sapiens
ccctgatgcaaagca

SEQ ID NO: 410520 - DNA, 15 bp, Homo sapiens
accctgatgcaaagc

SEQ ID NO: 410521 - DNA, 15 bp, Homo sapiens
gaccctgatgcaaag

SEQ ID NO: 410522 - DNA, 15 bp, Homo sapiens
tgaccctgatgcaaa

SEQ ID NO: 410523 - DNA, 15 bp, Homo sapiens
atgaccctgatgcaa

SEQ ID NO: 410524 - DNA, 15 bp, Homo sapiens
aatgaccctgatgca

SEQ ID NO: 410525 - DNA, 15 bp, Homo sapiens
aaatgaccctgatgc

SEQ ID NO: 410526 - DNA, 15 bp, Homo sapiens
gaaatgaccctgatg

SEQ ID NO: 410527 - DNA, 15 bp, Homo sapiens
agaaatgaccctgat

SEQ ID NO: 410528 - DNA, 15 bp, Homo sapiens
tagaaatgaccctga

SEQ ID NO: 410529 - DNA, 15 bp, Homo sapiens
gtagaaatgaccctg

SEQ ID NO: 410530 - DNA, 15 bp, Homo sapiens
agtagaaatgaccct

SEQ ID NO: 410531 - DNA, 15 bp, Homo sapiens
tagtagaaatgaccc

SEQ ID NO: 410532 - DNA, 15 bp, Homo sapiens
atagtagaaatgacc

SEQ ID NO: 410533 - DNA, 15 bp, Homo sapiens
aatagtagaaatgac

SEQ ID NO: 410534 - DNA, 15 bp, Homo sapiens
taatagtagaaatga

SEQ ID NO: 410535 - DNA, 15 bp, Homo sapiens
ataatagtagaaatg

SEQ ID NO: 410536 - DNA, 15 bp, Homo sapiens
tataatagtagaaat

SEQ ID NO: 410537 - DNA, 15 bp, Homo sapiens
ttataatagtagaaa

SEQ ID NO: 410538 - DNA, 15 bp, Homo sapiens
tttataatagtagaa

SEQ ID NO: 410539 - DNA, 15 bp, Homo sapiens
ctttataatagtaga

SEQ ID NO: 410540 - DNA, 15 bp, Homo sapiens
gctttataatagtag

SEQ ID NO: 410541 - DNA, 15 bp, Homo sapiens
agctttataatagta

SEQ ID NO: 410542 - DNA, 15 bp, Homo sapiens
aagctttataatagt

SEQ ID NO: 410543 - DNA, 15 bp, Homo sapiens
caagctttataatag

SEQ ID NO: 410544 - DNA, 15 bp, Homo sapiens
tcaagctttataata

SEQ ID NO: 410545 - DNA, 15 bp, Homo sapiens
ttcaagctttataat

SEQ ID NO: 410546 - DNA, 15 bp, Homo sapiens
tttcaagctttataa

SEQ ID NO: 410547 - DNA, 15 bp, Homo sapiens
ttttcaagctttata

SEQ ID NO: 410548 - DNA, 15 bp, Homo sapiens
tttttcaagctttat

SEQ ID NO: 410549 - DNA, 15 bp, Homo sapiens
ctttttcaagcttta

SEQ ID NO: 410550 - DNA, 15 bp, Homo sapiens
cctttttcaagcttt

SEQ ID NO: 410551 - DNA, 15 bp, Homo sapiens
tcctttttcaagctt

SEQ ID NO: 410552 - DNA, 15 bp, Homo sapiens
atcctttttcaagct

SEQ ID NO: 410553 - DNA, 15 bp, Homo sapiens
tatcctttttcaagc

SEQ ID NO: 410554 - DNA, 15 bp, Homo sapiens
ctatcctttttcaag

SEQ ID NO: 410555 - DNA, 15 bp, Homo sapiens
tctatcctttttcaa

SEQ ID NO: 410556 - DNA, 15 bp, Homo sapiens
ttctatcctttttca

SEQ ID NO: 410557 - DNA, 15 bp, Homo sapiens
gttctatcctttttc

SEQ ID NO: 410558 - DNA, 15 bp, Homo sapiens
tgttctatccttttt

SEQ ID NO: 410559 - DNA, 15 bp, Homo sapiens
ttgttctatcctttt

SEQ ID NO: 410560 - DNA, 15 bp, Homo sapiens
cttgttctatccttt

SEQ ID NO: 410561 - DNA, 15 bp, Homo sapiens
tcttgttctatcctt

SEQ ID NO: 410562 - DNA, 15 bp, Homo sapiens
ttcttgttctatcct

SEQ ID NO: 410563 - DNA, 15 bp, Homo sapiens
cttcttgttctatcc

SEQ ID NO: 410564 - DNA, 15 bp, Homo sapiens
tcttcttgttctatc

SEQ ID NO: 410565 - DNA, 15 bp, Homo sapiens
ctcttcttgttctat

SEQ ID NO: 410566 - DNA, 15 bp, Homo sapiens
actcttcttgttcta

SEQ ID NO: 410567 - DNA, 15 bp, Homo sapiens
gactcttcttgttct

SEQ ID NO: 410568 - DNA, 15 bp, Homo sapiens
tgactcttcttgttc

SEQ ID NO: 410569 - DNA, 15 bp, Homo sapiens
atgactcttcttgtt

SEQ ID NO: 410570 - DNA, 15 bp, Homo sapiens
catgactcttcttgt

SEQ ID NO: 410571 - DNA, 15 bp, Homo sapiens
ccatgactcttcttg

SEQ ID NO: 410572 - DNA, 15 bp, Homo sapiens
accatgactcttctt

SEQ ID NO: 410573 - DNA, 15 bp, Homo sapiens
aaccatgactcttct

SEQ ID NO: 410574 - DNA, 15 bp, Homo sapiens
caaccatgactcttc

SEQ ID NO: 410575 - DNA, 15 bp, Homo sapiens
acaaccatgactctt

SEQ ID NO: 410576 - DNA, 15 bp, Homo sapiens
tacaaccatgactct

SEQ ID NO: 410577 - DNA, 15 bp, Homo sapiens
atacaaccatgactc

SEQ ID NO: 410578 - DNA, 15 bp, Homo sapiens
catacaaccatgact

SEQ ID NO: 410579 - DNA, 15 bp, Homo sapiens
ccatacaaccatgac

SEQ ID NO: 410580 - DNA, 15 bp, Homo sapiens
tccatacaaccatga

SEQ ID NO: 410581 - DNA, 15 bp, Homo sapiens
atccatacaaccatg

SEQ ID NO: 410582 - DNA, 15 bp, Homo sapiens
catccatacaaccat

SEQ ID NO: 410583 - DNA, 15 bp, Homo sapiens
acatccatacaacca

SEQ ID NO: 410584 - DNA, 15 bp, Homo sapiens
aacatccatacaacc

SEQ ID NO: 410585 - DNA, 15 bp, Homo sapiens
caacatccatacaac

SEQ ID NO: 410586 - DNA, 15 bp, Homo sapiens
acaacatccatacaa

SEQ ID NO: 410587 - DNA, 15 bp, Homo sapiens
aacaacatccataca

SEQ ID NO: 410588 - DNA, 15 bp, Homo sapiens
taacaacatccatac

SEQ ID NO: 410589 - DNA, 15 bp, Homo sapiens
ataacaacatccata

SEQ ID NO: 410590 - DNA, 15 bp, Homo sapiens
cataacaacatccat

SEQ ID NO: 410591 - DNA, 15 bp, Homo sapiens
ccataacaacatcca

SEQ ID NO: 410592 - DNA, 15 bp, Homo sapiens
cccataacaacatcc

SEQ ID NO: 410593 - DNA, 15 bp, Homo sapiens
acccataacaacatc

SEQ ID NO: 410594 - DNA, 15 bp, Homo sapiens
aacccataacaacat

SEQ ID NO: 410595 - DNA, 15 bp, Homo sapiens
aaacccataacaaca

SEQ ID NO: 410596 - DNA, 15 bp, Homo sapiens
caaacccataacaac

SEQ ID NO: 410597 - DNA, 15 bp, Homo sapiens
tcaaacccataacaa

SEQ ID NO: 410598 - DNA, 15 bp, Homo sapiens
ttcaaacccataaca

SEQ ID NO: 410599 - DNA, 15 bp, Homo sapiens
attcaaacccataac

SEQ ID NO: 410600 - DNA, 15 bp, Homo sapiens
aattcaaacccataa

SEQ ID NO: 410601 - DNA, 15 bp, Homo sapiens
taattcaaacccata

SEQ ID NO: 410602 - DNA, 15 bp, Homo sapiens
ctaattcaaacccat

SEQ ID NO: 410603 - DNA, 15 bp, Homo sapiens
gctaattcaaaccca

SEQ ID NO: 410604 - DNA, 15 bp, Homo sapiens
tgctaattcaaaccc

SEQ ID NO: 410605 - DNA, 15 bp, Homo sapiens
atgctaattcaaacc

SEQ ID NO: 410606 - DNA, 15 bp, Homo sapiens
tatgctaattcaaac

SEQ ID NO: 410607 - DNA, 15 bp, Homo sapiens
atatgctaattcaaa

SEQ ID NO: 410608 - DNA, 15 bp, Homo sapiens
catatgctaattcaa

SEQ ID NO: 410609 - DNA, 15 bp, Homo sapiens
acatatgctaattca

SEQ ID NO: 410610 - DNA, 15 bp, Homo sapiens
tacatatgctaattc

SEQ ID NO: 410611 - DNA, 15 bp, Homo sapiens
ctacatatgctaatt

SEQ ID NO: 410612 - DNA, 15 bp, Homo sapiens
cctacatatgctaat

SEQ ID NO: 410613 - DNA, 15 bp, Homo sapiens
tcctacatatgctaa

SEQ ID NO: 410614 - DNA, 15 bp, Homo sapiens
gtcctacatatgcta

SEQ ID NO: 410615 - DNA, 15 bp, Homo sapiens
tgtcctacatatgct

SEQ ID NO: 410616 - DNA, 15 bp, Homo sapiens
atgtcctacatatgc

SEQ ID NO: 410617 - DNA, 15 bp, Homo sapiens
aatgtcctacatatg

SEQ ID NO: 410618 - DNA, 15 bp, Homo sapiens
gaatgtcctacatat

SEQ ID NO: 410619 - DNA, 15 bp, Homo sapiens
ggaatgtcctacata

SEQ ID NO: 410620 - DNA, 15 bp, Homo sapiens
tggaatgtcctacat

SEQ ID NO: 410621 - DNA, 15 bp, Homo sapiens
ctggaatgtcctaca

SEQ ID NO: 410622 - DNA, 15 bp, Homo sapiens
actggaatgtcctac

SEQ ID NO: 410623 - DNA, 15 bp, Homo sapiens
tactggaatgtccta

SEQ ID NO: 410624 - DNA, 15 bp, Homo sapiens
gtactggaatgtcct

SEQ ID NO: 410625 - DNA, 15 bp, Homo sapiens
tgtactggaatgtcc

SEQ ID NO: 410626 - DNA, 15 bp, Homo sapiens
ttgtactggaatgtc

SEQ ID NO: 410627 - DNA, 15 bp, Homo sapiens
attgtactggaatgt

SEQ ID NO: 410628 - DNA, 15 bp, Homo sapiens
aattgtactggaatg

SEQ ID NO: 410629 - DNA, 15 bp, Homo sapiens
taattgtactggaat

SEQ ID NO: 410630 - DNA, 15 bp, Homo sapiens
ttaattgtactggaa

SEQ ID NO: 410631 - DNA, 15 bp, Homo sapiens
attaattgtactgga

SEQ ID NO: 410632 - DNA, 15 bp, Homo sapiens
tattaattgtactgg

SEQ ID NO: 410633 - DNA, 15 bp, Homo sapiens
ttattaattgtactg

SEQ ID NO: 410634 - DNA, 15 bp, Homo sapiens
gttattaattgtact

SEQ ID NO: 410635 - DNA, 15 bp, Homo sapiens
ggttattaattgtac

SEQ ID NO: 410636 - DNA, 15 bp, Homo sapiens
tggttattaattgta

SEQ ID NO: 410637 - DNA, 15 bp, Homo sapiens
gtggttattaattgt

SEQ ID NO: 410638 - DNA, 15 bp, Homo sapiens
agtggttattaattg

SEQ ID NO: 410639 - DNA, 15 bp, Homo sapiens
gagtggttattaatt

SEQ ID NO: 410640 - DNA, 15 bp, Homo sapiens
tgagtggttattaat

SEQ ID NO: 410641 - DNA, 15 bp, Homo sapiens
ctgagtggttattaa

SEQ ID NO: 410642 - DNA, 15 bp, Homo sapiens
actgagtggttatta

SEQ ID NO: 410643 - DNA, 15 bp, Homo sapiens
aactgagtggttatt

SEQ ID NO: 410644 - DNA, 15 bp, Homo sapiens
taactgagtggttat

SEQ ID NO: 410645 - DNA, 15 bp, Homo sapiens
ttaactgagtggtta

SEQ ID NO: 410646 - DNA, 15 bp, Homo sapiens
attaactgagtggtt

SEQ ID NO: 410647 - DNA, 15 bp, Homo sapiens
aattaactgagtggt

SEQ ID NO: 410648 - DNA, 15 bp, Homo sapiens
caattaactgagtgg

SEQ ID NO: 410649 - DNA, 15 bp, Homo sapiens
ccaattaactgagtg

SEQ ID NO: 410650 - DNA, 15 bp, Homo sapiens
accaattaactgagt

SEQ ID NO: 410651 - DNA, 15 bp, Homo sapiens
aaccaattaactgag

SEQ ID NO: 410652 - DNA, 15 bp, Homo sapiens
caaccaattaactga

SEQ ID NO: 410653 - DNA, 15 bp, Homo sapiens
ccaaccaattaactg

SEQ ID NO: 410654 - DNA, 15 bp, Homo sapiens
cccaaccaattaact

SEQ ID NO: 410655 - DNA, 15 bp, Homo sapiens
ccccaaccaattaac

SEQ ID NO: 410656 - DNA, 15 bp, Homo sapiens
accccaaccaattaa

SEQ ID NO: 410657 - DNA, 15 bp, Homo sapiens
caccccaaccaatta

SEQ ID NO: 410658 - DNA, 15 bp, Homo sapiens
tcaccccaaccaatt

SEQ ID NO: 410659 - DNA, 15 bp, Homo sapiens
ttcaccccaaccaat

SEQ ID NO: 410660 - DNA, 15 bp, Homo sapiens
attcaccccaaccaa

SEQ ID NO: 410661 - DNA, 15 bp, Homo sapiens
aattcaccccaacca

SEQ ID NO: 410662 - DNA, 15 bp, Homo sapiens
gaattcaccccaacc

SEQ ID NO: 410663 - DNA, 15 bp, Homo sapiens
agaattcaccccaac

SEQ ID NO: 410664 - DNA, 15 bp, Homo sapiens
gagaattcaccccaa

SEQ ID NO: 410665 - DNA, 15 bp, Homo sapiens
agagaattcacccca

SEQ ID NO: 410666 - DNA, 15 bp, Homo sapiens
aagagaattcacccc

SEQ ID NO: 410667 - DNA, 15 bp, Homo sapiens
aaagagaattcaccc

SEQ ID NO: 410668 - DNA, 15 bp, Homo sapiens
aaaagagaattcacc

SEQ ID NO: 410669 - DNA, 15 bp, Homo sapiens
taaaagagaattcac

SEQ ID NO: 410670 - DNA, 15 bp, Homo sapiens
ctaaaagagaattca

SEQ ID NO: 410671 - DNA, 15 bp, Homo sapiens
actaaaagagaattc

SEQ ID NO: 410672 - DNA, 15 bp, Homo sapiens
cactaaaagagaatt

SEQ ID NO: 410673 - DNA, 15 bp, Homo sapiens
acactaaaagagaat

SEQ ID NO: 410674 - DNA, 15 bp, Homo sapiens
aacactaaaagagaa

SEQ ID NO: 410675 - DNA, 15 bp, Homo sapiens
aaacactaaaagaga

SEQ ID NO: 410676 - DNA, 15 bp, Homo sapiens
gaaacactaaaagag

SEQ ID NO: 410677 - DNA, 15 bp, Homo sapiens
tgaaacactaaaaga

SEQ ID NO: 410678 - DNA, 15 bp, Homo sapiens
atgaaacactaaaag

SEQ ID NO: 410679 - DNA, 15 bp, Homo sapiens
aatgaaacactaaaa

SEQ ID NO: 410680 - DNA, 15 bp, Homo sapiens
aaatgaaacactaaa

SEQ ID NO: 410681 - DNA, 15 bp, Homo sapiens
taaatgaaacactaa

SEQ ID NO: 410682 - DNA, 15 bp, Homo sapiens
gtaaatgaaacacta

SEQ ID NO: 410683 - DNA, 15 bp, Homo sapiens
ggtaaatgaaacact

SEQ ID NO: 410684 - DNA, 15 bp, Homo sapiens
aggtaaatgaaacac

SEQ ID NO: 410685 - DNA, 15 bp, Homo sapiens
aaggtaaatgaaaca

SEQ ID NO: 410686 - DNA, 15 bp, Homo sapiens
taaggtaaatgaaac

SEQ ID NO: 410687 - DNA, 15 bp, Homo sapiens
ataaggtaaatgaaa

SEQ ID NO: 410688 - DNA, 15 bp, Homo sapiens
tataaggtaaatgaa

SEQ ID NO: 410689 - DNA, 15 bp, Homo sapiens
ttataaggtaaatga

SEQ ID NO: 410690 - DNA, 15 bp, Homo sapiens
attataaggtaaatg

SEQ ID NO: 410691 - DNA, 15 bp, Homo sapiens
aattataaggtaaat

SEQ ID NO: 410692 - DNA, 15 bp, Homo sapiens
taattataaggtaaa

SEQ ID NO: 410693 - DNA, 15 bp, Homo sapiens
ctaattataaggtaa

SEQ ID NO: 410694 - DNA, 15 bp, Homo sapiens
gctaattataaggta

SEQ ID NO: 410695 - DNA, 15 bp, Homo sapiens
agctaattataaggt

SEQ ID NO: 410696 - DNA, 15 bp, Homo sapiens
cagctaattataagg

SEQ ID NO: 410697 - DNA, 15 bp, Homo sapiens
acagctaattataag

SEQ ID NO: 410698 - DNA, 15 bp, Homo sapiens
tacagctaattataa

SEQ ID NO: 410699 - DNA, 15 bp, Homo sapiens
ttacagctaattata

SEQ ID NO: 410700 - DNA, 15 bp, Homo sapiens
gttacagctaattat

SEQ ID NO: 410701 - DNA, 15 bp, Homo sapiens
agttacagctaatta

SEQ ID NO: 410702 - DNA, 15 bp, Homo sapiens
gagttacagctaatt

SEQ ID NO: 410703 - DNA, 15 bp, Homo sapiens
tgagttacagctaat

SEQ ID NO: 410704 - DNA, 15 bp, Homo sapiens
ctgagttacagctaa

SEQ ID NO: 410705 - DNA, 15 bp, Homo sapiens
gctgagttacagcta

SEQ ID NO: 410706 - DNA, 15 bp, Homo sapiens
tgctgagttacagct

SEQ ID NO: 410707 - DNA, 15 bp, Homo sapiens
ttgctgagttacagc

SEQ ID NO: 410708 - DNA, 15 bp, Homo sapiens
attgctgagttacag

SEQ ID NO: 410709 - DNA, 15 bp, Homo sapiens
aattgctgagttaca

SEQ ID NO: 410710 - DNA, 15 bp, Homo sapiens
taattgctgagttac

SEQ ID NO: 410711 - DNA, 15 bp, Homo sapiens
ttaattgctgagtta

SEQ ID NO: 410712 - DNA, 15 bp, Homo sapiens
cttaattgctgagtt

SEQ ID NO: 410713 - DNA, 15 bp, Homo sapiens
acttaattgctgagt

SEQ ID NO: 410714 - DNA, 15 bp, Homo sapiens
gacttaattgctgag

SEQ ID NO: 410715 - DNA, 15 bp, Homo sapiens
tgacttaattgctga

SEQ ID NO: 410716 - DNA, 15 bp, Homo sapiens
atgacttaattgctg

SEQ ID NO: 410717 - DNA, 15 bp, Homo sapiens
catgacttaattgct

SEQ ID NO: 410718 - DNA, 15 bp, Homo sapiens
tcatgacttaattgc

SEQ ID NO: 410719 - DNA, 15 bp, Homo sapiens
gtcatgacttaattg

SEQ ID NO: 410720 - DNA, 15 bp, Homo sapiens
tgtcatgacttaatt

SEQ ID NO: 410721 - DNA, 15 bp, Homo sapiens
gtgtcatgacttaat

SEQ ID NO: 410722 - DNA, 15 bp, Homo sapiens
ggtgtcatgacttaa

SEQ ID NO: 410723 - DNA, 15 bp, Homo sapiens
tggtgtcatgactta

SEQ ID NO: 410724 - DNA, 15 bp, Homo sapiens
ctggtgtcatgactt

SEQ ID NO: 410725 - DNA, 15 bp, Homo sapiens
gctggtgtcatgact

SEQ ID NO: 410726 - DNA, 15 bp, Homo sapiens
ggctggtgtcatgac

SEQ ID NO: 410727 - DNA, 15 bp, Homo sapiens
gggctggtgtcatga

SEQ ID NO: 410728 - DNA, 15 bp, Homo sapiens
tgggctggtgtcatg

SEQ ID NO: 410729 - DNA, 15 bp, Homo sapiens
gtgggctggtgtcat

SEQ ID NO: 410730 - DNA, 15 bp, Homo sapiens
agtgggctggtgtca

SEQ ID NO: 410731 - DNA, 15 bp, Homo sapiens
cagtgggctggtgtc

SEQ ID NO: 410732 - DNA, 15 bp, Homo sapiens
acagtgggctggtgt

SEQ ID NO: 410733 - DNA, 15 bp, Homo sapiens
cacagtgggctggtg

SEQ ID NO: 410734 - DNA, 15 bp, Homo sapiens
tcacagtgggctggt

SEQ ID NO: 410735 - DNA, 15 bp, Homo sapiens
gtcacagtgggctgg

SEQ ID NO: 410736 - DNA, 15 bp, Homo sapiens
tgtcacagtgggctg

SEQ ID NO: 410737 - DNA, 15 bp, Homo sapiens
gtgtcacagtgggct

SEQ ID NO: 410738 - DNA, 15 bp, Homo sapiens
agtgtcacagtgggc

SEQ ID NO: 410739 - DNA, 15 bp, Homo sapiens
cagtgtcacagtggg

SEQ ID NO: 410740 - DNA, 15 bp, Homo sapiens
tcagtgtcacagtgg

SEQ ID NO: 410741 - DNA, 15 bp, Homo sapiens
ttcagtgtcacagtg

SEQ ID NO: 410742 - DNA, 15 bp, Homo sapiens
cttcagtgtcacagt

SEQ ID NO: 410743 - DNA, 15 bp, Homo sapiens
ccttcagtgtcacag

SEQ ID NO: 410744 - DNA, 15 bp, Homo sapiens
accttcagtgtcaca

SEQ ID NO: 410745 - DNA, 15 bp, Homo sapiens
aaccttcagtgtcac

SEQ ID NO: 410746 - DNA, 15 bp, Homo sapiens
caaccttcagtgtca

SEQ ID NO: 410747 - DNA, 15 bp, Homo sapiens
ccaaccttcagtgtc

SEQ ID NO: 410748 - DNA, 15 bp, Homo sapiens
tccaaccttcagtgt

SEQ ID NO: 410749 - DNA, 15 bp, Homo sapiens
ctccaaccttcagtg

SEQ ID NO: 410750 - DNA, 15 bp, Homo sapiens
cctccaaccttcagt

SEQ ID NO: 410751 - DNA, 15 bp, Homo sapiens
tcctccaaccttcag

SEQ ID NO: 410752 - DNA, 15 bp, Homo sapiens
atcctccaaccttca

SEQ ID NO: 410753 - DNA, 15 bp, Homo sapiens
tatcctccaaccttc

SEQ ID NO: 410754 - DNA, 15 bp, Homo sapiens
ctatcctccaacctt

SEQ ID NO: 410755 - DNA, 15 bp, Homo sapiens
actatcctccaacct

SEQ ID NO: 410756 - DNA, 15 bp, Homo sapiens
cactatcctccaacc

SEQ ID NO: 410757 - DNA, 15 bp, Homo sapiens
gcactatcctccaac

SEQ ID NO: 410758 - DNA, 15 bp, Homo sapiens
agcactatcctccaa

SEQ ID NO: 410759 - DNA, 15 bp, Homo sapiens
aagcactatcctcca

SEQ ID NO: 410760 - DNA, 15 bp, Homo sapiens
caagcactatcctcc

SEQ ID NO: 410761 - DNA, 15 bp, Homo sapiens
ccaagcactatcctc

SEQ ID NO: 410762 - DNA, 15 bp, Homo sapiens
cccaagcactatcct

SEQ ID NO: 410763 - DNA, 15 bp, Homo sapiens
acccaagcactatcc

SEQ ID NO: 410764 - DNA, 15 bp, Homo sapiens
cacccaagcactatc

SEQ ID NO: 410765 - DNA, 15 bp, Homo sapiens
gcacccaagcactat

SEQ ID NO: 410766 - DNA, 15 bp, Homo sapiens
tgcacccaagcacta

SEQ ID NO: 410767 - DNA, 15 bp, Homo sapiens
atgcacccaagcact

SEQ ID NO: 410768 - DNA, 15 bp, Homo sapiens
aatgcacccaagcac

SEQ ID NO: 410769 - DNA, 15 bp, Homo sapiens
gaatgcacccaagca

SEQ ID NO: 410770 - DNA, 15 bp, Homo sapiens
agaatgcacccaagc

SEQ ID NO: 410771 - DNA, 15 bp, Homo sapiens
cagaatgcacccaag

SEQ ID NO: 410772 - DNA, 15 bp, Homo sapiens
gcagaatgcacccaa

SEQ ID NO: 410773 - DNA, 15 bp, Homo sapiens
agcagaatgcaccca

SEQ ID NO: 410774 - DNA, 15 bp, Homo sapiens
gagcagaatgcaccc

SEQ ID NO: 410775 - DNA, 15 bp, Homo sapiens
tgagcagaatgcacc

SEQ ID NO: 410776 - DNA, 15 bp, Homo sapiens
atgagcagaatgcac

SEQ ID NO: 410777 - DNA, 15 bp, Homo sapiens
tatgagcagaatgca

SEQ ID NO: 410778 - DNA, 15 bp, Homo sapiens
atatgagcagaatgc

SEQ ID NO: 410779 - DNA, 15 bp, Homo sapiens
aatatgagcagaatg

SEQ ID NO: 410780 - DNA, 15 bp, Homo sapiens
taatatgagcagaat

SEQ ID NO: 410781 - DNA, 15 bp, Homo sapiens
ttaatatgagcagaa

SEQ ID NO: 410782 - DNA, 15 bp, Homo sapiens
cttaatatgagcaga

SEQ ID NO: 410783 - DNA, 15 bp, Homo sapiens
acttaatatgagcag

SEQ ID NO: 410784 - DNA, 15 bp, Homo sapiens
gacttaatatgagca

SEQ ID NO: 410785 - DNA, 15 bp, Homo sapiens
tgacttaatatgagc

SEQ ID NO: 410786 - DNA, 15 bp, Homo sapiens
ctgacttaatatgag

SEQ ID NO: 410787 - DNA, 15 bp, Homo sapiens
tctgacttaatatga

SEQ ID NO: 410788 - DNA, 15 bp, Homo sapiens
ctctgacttaatatg

SEQ ID NO: 410789 - DNA, 15 bp, Homo sapiens
actctgacttaatat

SEQ ID NO: 410790 - DNA, 15 bp, Homo sapiens
aactctgacttaata

SEQ ID NO: 410791 - DNA, 15 bp, Homo sapiens
caactctgacttaat

SEQ ID NO: 410792 - DNA, 15 bp, Homo sapiens
acaactctgacttaa

SEQ ID NO: 410793 - DNA, 15 bp, Homo sapiens
aacaactctgactta

SEQ ID NO: 410794 - DNA, 15 bp, Homo sapiens
caacaactctgactt

SEQ ID NO: 410795 - DNA, 15 bp, Homo sapiens
ccaacaactctgact

SEQ ID NO: 410796 - DNA, 15 bp, Homo sapiens
accaacaactctgac

SEQ ID NO: 410797 - DNA, 15 bp, Homo sapiens
aaccaacaactctga

SEQ ID NO: 410798 - DNA, 15 bp, Homo sapiens
aaaccaacaactctg

SEQ ID NO: 410799 - DNA, 15 bp, Homo sapiens
gaaaccaacaactct

SEQ ID NO: 410800 - DNA, 15 bp, Homo sapiens
ggaaaccaacaactc

SEQ ID NO: 410801 - DNA, 15 bp, Homo sapiens
aggaaaccaacaact

SEQ ID NO: 410802 - DNA, 15 bp, Homo sapiens
taggaaaccaacaac

SEQ ID NO: 410803 - DNA, 15 bp, Homo sapiens
ttaggaaaccaacaa

SEQ ID NO: 410804 - DNA, 15 bp, Homo sapiens
cttaggaaaccaaca

SEQ ID NO: 410805 - DNA, 15 bp, Homo sapiens
acttaggaaaccaac

SEQ ID NO: 410806 - DNA, 15 bp, Homo sapiens
cacttaggaaaccaa

SEQ ID NO: 410807 - DNA, 15 bp, Homo sapiens
gcacttaggaaacca

SEQ ID NO: 410808 - DNA, 15 bp, Homo sapiens
ggcacttaggaaacc

SEQ ID NO: 410809 - DNA, 15 bp, Homo sapiens
aggcacttaggaaac

SEQ ID NO: 410810 - DNA, 15 bp, Homo sapiens
gaggcacttaggaaa

SEQ ID NO: 410811 - DNA, 15 bp, Homo sapiens
agaggcacttaggaa

SEQ ID NO: 410812 - DNA, 15 bp, Homo sapiens
gagaggcacttagga

SEQ ID NO: 410813 - DNA, 15 bp, Homo sapiens
tgagaggcacttagg

SEQ ID NO: 410814 - DNA, 15 bp, Homo sapiens
atgagaggcacttag

SEQ ID NO: 410815 - DNA, 15 bp, Homo sapiens
aatgagaggcactta

SEQ ID NO: 410816 - DNA, 15 bp, Homo sapiens
gaatgagaggcactt

SEQ ID NO: 410817 - DNA, 15 bp, Homo sapiens
agaatgagaggcact

SEQ ID NO: 410818 - DNA, 15 bp, Homo sapiens
gagaatgagaggcac

SEQ ID NO: 410819 - DNA, 15 bp, Homo sapiens
agagaatgagaggca

SEQ ID NO: 410820 - DNA, 15 bp, Homo sapiens
aagagaatgagaggc

SEQ ID NO: 410821 - DNA, 15 bp, Homo sapiens
aaagagaatgagagg

SEQ ID NO: 410822 - DNA, 15 bp, Homo sapiens
aaaagagaatgagag

SEQ ID NO: 410823 - DNA, 15 bp, Homo sapiens
taaaagagaatgaga

SEQ ID NO: 410824 - DNA, 15 bp, Homo sapiens
ctaaaagagaatgag

SEQ ID NO: 410825 - DNA, 15 bp, Homo sapiens
cctaaaagagaatga

SEQ ID NO: 410826 - DNA, 15 bp, Homo sapiens
acctaaaagagaatg

SEQ ID NO: 410827 - DNA, 15 bp, Homo sapiens
aacctaaaagagaat

SEQ ID NO: 410828 - DNA, 15 bp, Homo sapiens
gaacctaaaagagaa

SEQ ID NO: 410829 - DNA, 15 bp, Homo sapiens
agaacctaaaagaga

SEQ ID NO: 410830 - DNA, 15 bp, Homo sapiens
aagaacctaaaagag

SEQ ID NO: 410831 - DNA, 15 bp, Homo sapiens
gaagaacctaaaaga

SEQ ID NO: 410832 - DNA, 15 bp, Homo sapiens
tgaagaacctaaaag

SEQ ID NO: 410833 - DNA, 15 bp, Homo sapiens
ttgaagaacctaaaa

SEQ ID NO: 410834 - DNA, 15 bp, Homo sapiens
attgaagaacctaaa

SEQ ID NO: 410835 - DNA, 15 bp, Homo sapiens
tattgaagaacctaa

SEQ ID NO: 410836 - DNA, 15 bp, Homo sapiens
ttattgaagaaccta

SEQ ID NO: 410837 - DNA, 15 bp, Homo sapiens
tttattgaagaacct

SEQ ID NO: 410838 - DNA, 15 bp, Homo sapiens
atttattgaagaacc

SEQ ID NO: 410839 - DNA, 15 bp, Homo sapiens
gatttattgaagaac

SEQ ID NO: 410840 - DNA, 15 bp, Homo sapiens
agatttattgaagaa

SEQ ID NO: 410841 - DNA, 15 bp, Homo sapiens
tagatttattgaaga

SEQ ID NO: 410842 - DNA, 15 bp, Homo sapiens
atagatttattgaag

SEQ ID NO: 410843 - DNA, 15 bp, Homo sapiens
catagatttattgaa

SEQ ID NO: 410844 - DNA, 15 bp, Homo sapiens
acatagatttattga

SEQ ID NO: 410845 - DNA, 15 bp, Homo sapiens
cacatagatttattg

SEQ ID NO: 410846 - DNA, 15 bp, Homo sapiens
acacatagatttatt

SEQ ID NO: 410847 - DNA, 15 bp, Homo sapiens
aacacatagatttat

SEQ ID NO: 410848 - DNA, 15 bp, Homo sapiens
taacacatagattta

SEQ ID NO: 410849 - DNA, 15 bp, Homo sapiens
ataacacatagattt

SEQ ID NO: 410850 - DNA, 15 bp, Homo sapiens
aataacacatagatt

SEQ ID NO: 410851 - DNA, 15 bp, Homo sapiens
gaataacacatagat

SEQ ID NO: 410852 - DNA, 15 bp, Homo sapiens
tgaataacacataga

SEQ ID NO: 410853 - DNA, 15 bp, Homo sapiens
atgaataacacatag

SEQ ID NO: 410854 - DNA, 15 bp, Homo sapiens
tatgaataacacata

SEQ ID NO: 410855 - DNA, 15 bp, Homo sapiens
atatgaataacacat

SEQ ID NO: 410856 - DNA, 15 bp, Homo sapiens
catatgaataacaca

SEQ ID NO: 410857 - DNA, 15 bp, Homo sapiens
acatatgaataacac

SEQ ID NO: 410858 - DNA, 15 bp, Homo sapiens
tacatatgaataaca

SEQ ID NO: 410859 - DNA, 15 bp, Homo sapiens
ctacatatgaataac

SEQ ID NO: 410860 - DNA, 15 bp, Homo sapiens
actacatatgaataa

SEQ ID NO: 410861 - DNA, 15 bp, Homo sapiens
gactacatatgaata

SEQ ID NO: 410862 - DNA, 15 bp, Homo sapiens
tgactacatatgaat

SEQ ID NO: 410863 - DNA, 15 bp, Homo sapiens
gtgactacatatgaa

SEQ ID NO: 410864 - DNA, 15 bp, Homo sapiens
tgtgactacatatga

SEQ ID NO: 410865 - DNA, 15 bp, Homo sapiens
ttgtgactacatatg

SEQ ID NO: 410866 - DNA, 15 bp, Homo sapiens
tttgtgactacatat

SEQ ID NO: 410867 - DNA, 15 bp, Homo sapiens
atttgtgactacata

SEQ ID NO: 410868 - DNA, 15 bp, Homo sapiens
catttgtgactacat

SEQ ID NO: 410869 - DNA, 15 bp, Homo sapiens
gcatttgtgactaca

SEQ ID NO: 410870 - DNA, 15 bp, Homo sapiens
tgcatttgtgactac

SEQ ID NO: 410871 - DNA, 15 bp, Homo sapiens
gtgcatttgtgacta

SEQ ID NO: 410872 - DNA, 15 bp, Homo sapiens
agtgcatttgtgact

SEQ ID NO: 410873 - DNA, 15 bp, Homo sapiens
cagtgcatttgtgac

SEQ ID NO: 410874 - DNA, 15 bp, Homo sapiens
tcagtgcatttgtga

SEQ ID NO: 410875 - DNA, 15 bp, Homo sapiens
ttcagtgcatttgtg

SEQ ID NO: 410876 - DNA, 15 bp, Homo sapiens
tttcagtgcatttgt

SEQ ID NO: 410877 - DNA, 15 bp, Homo sapiens
gtttcagtgcatttg

SEQ ID NO: 410878 - DNA, 15 bp, Homo sapiens
tgtttcagtgcattt

SEQ ID NO: 410879 - DNA, 15 bp, Homo sapiens
ttgtttcagtgcatt

SEQ ID NO: 410880 - DNA, 15 bp, Homo sapiens
tttgtttcagtgcat

SEQ ID NO: 410881 - DNA, 15 bp, Homo sapiens
atttgtttcagtgca

SEQ ID NO: 410882 - DNA, 15 bp, Homo sapiens
catttgtttcagtgc

SEQ ID NO: 410883 - DNA, 15 bp, Homo sapiens
gcatttgtttcagtg

SEQ ID NO: 410884 - DNA, 15 bp, Homo sapiens
ggcatttgtttcagt

SEQ ID NO: 410885 - DNA, 15 bp, Homo sapiens
cggcatttgtttcag

SEQ ID NO: 410886 - DNA, 15 bp, Homo sapiens
acggcatttgtttca

SEQ ID NO: 410887 - DNA, 15 bp, Homo sapiens
gacggcatttgtttc

SEQ ID NO: 410888 - DNA, 15 bp, Homo sapiens
agacggcatttgttt

SEQ ID NO: 410889 - DNA, 15 bp, Homo sapiens
cagacggcatttgtt

SEQ ID NO: 410890 - DNA, 15 bp, Homo sapiens
gcagacggcatttgt

SEQ ID NO: 410891 - DNA, 15 bp, Homo sapiens
ggcagacggcatttg

SEQ ID NO: 410892 - DNA, 15 bp, Homo sapiens
gggcagacggcattt

SEQ ID NO: 410893 - DNA, 15 bp, Homo sapiens
ggggcagacggcatt

SEQ ID NO: 410894 - DNA, 15 bp, Homo sapiens
tggggcagacggcat

SEQ ID NO: 410895 - DNA, 15 bp, Homo sapiens
ttggggcagacggca

SEQ ID NO: 410896 - DNA, 15 bp, Homo sapiens
cttggggcagacggc

SEQ ID NO: 410897 - DNA, 15 bp, Homo sapiens
tcttggggcagacgg

SEQ ID NO: 410898 - DNA, 15 bp, Homo sapiens
ttcttggggcagacg

SEQ ID NO: 410899 - DNA, 15 bp, Homo sapiens
attcttggggcagac

SEQ ID NO: 410900 - DNA, 15 bp, Homo sapiens
gattcttggggcaga

SEQ ID NO: 410901 - DNA, 15 bp, Homo sapiens
agattcttggggcag

SEQ ID NO: 410902 - DNA, 15 bp, Homo sapiens
cagattcttggggca

SEQ ID NO: 410903 - DNA, 15 bp, Homo sapiens
gcagattcttggggc

SEQ ID NO: 410904 - DNA, 15 bp, Homo sapiens
tgcagattcttgggg

SEQ ID NO: 410905 - DNA, 15 bp, Homo sapiens
ctgcagattcttggg

SEQ ID NO: 410906 - DNA, 15 bp, Homo sapiens
tctgcagattcttgg

SEQ ID NO: 410907 - DNA, 15 bp, Homo sapiens
atctgcagattcttg

SEQ ID NO: 410908 - DNA, 15 bp, Homo sapiens
aatctgcagattctt

SEQ ID NO: 410909 - DNA, 15 bp, Homo sapiens
gaatctgcagattct

SEQ ID NO: 410910 - DNA, 15 bp, Homo sapiens
ggaatctgcagattc

SEQ ID NO: 410911 - DNA, 15 bp, Homo sapiens
tggaatctgcagatt

SEQ ID NO: 410912 - DNA, 15 bp, Homo sapiens
gtggaatctgcagat

SEQ ID NO: 410913 - DNA, 15 bp, Homo sapiens
tgtggaatctgcaga

SEQ ID NO: 410914 - DNA, 15 bp, Homo sapiens
atgtggaatctgcag

SEQ ID NO: 410915 - DNA, 15 bp, Homo sapiens
gatgtggaatctgca

SEQ ID NO: 410916 - DNA, 15 bp, Homo sapiens
agatgtggaatctgc

SEQ ID NO: 410917 - DNA, 15 bp, Homo sapiens
cagatgtggaatctg

SEQ ID NO: 410918 - DNA, 15 bp, Homo sapiens
gcagatgtggaatct

SEQ ID NO: 410919 - DNA, 15 bp, Homo sapiens
tgcagatgtggaatc

SEQ ID NO: 410920 - DNA, 15 bp, Homo sapiens
ctgcagatgtggaat

SEQ ID NO: 410921 - DNA, 15 bp, Homo sapiens
tctgcagatgtggaa

SEQ ID NO: 410922 - DNA, 15 bp, Homo sapiens
atctgcagatgtgga

SEQ ID NO: 410923 - DNA, 15 bp, Homo sapiens
aatctgcagatgtgg

SEQ ID NO: 410924 - DNA, 15 bp, Homo sapiens
gaatctgcagatgtg

SEQ ID NO: 410925 - DNA, 15 bp, Homo sapiens
tgaatctgcagatgt

SEQ ID NO: 410926 - DNA, 15 bp, Homo sapiens
atgaatctgcagatg

SEQ ID NO: 410927 - DNA, 15 bp, Homo sapiens
aatgaatctgcagat

SEQ ID NO: 410928 - DNA, 15 bp, Homo sapiens
gaatgaatctgcaga

SEQ ID NO: 410929 - DNA, 15 bp, Homo sapiens
tgaatgaatctgcag

SEQ ID NO: 410930 - DNA, 15 bp, Homo sapiens
ctgaatgaatctgca

SEQ ID NO: 410931 - DNA, 15 bp, Homo sapiens
actgaatgaatctgc

SEQ ID NO: 410932 - DNA, 15 bp, Homo sapiens
gactgaatgaatctg

SEQ ID NO: 410933 - DNA, 15 bp, Homo sapiens
tgactgaatgaatct

SEQ ID NO: 410934 - DNA, 15 bp, Homo sapiens
ttgactgaatgaatc

SEQ ID NO: 410935 - DNA, 15 bp, Homo sapiens
attgactgaatgaat

SEQ ID NO: 410936 - DNA, 15 bp, Homo sapiens
cattgactgaatgaa

SEQ ID NO: 410937 - DNA, 15 bp, Homo sapiens
ccattgactgaatga

SEQ ID NO: 410938 - DNA, 15 bp, Homo sapiens
gccattgactgaatg

SEQ ID NO: 410939 - DNA, 15 bp, Homo sapiens
tgccattgactgaat

SEQ ID NO: 410940 - DNA, 15 bp, Homo sapiens
atgccattgactgaa

SEQ ID NO: 410941 - DNA, 15 bp, Homo sapiens
tatgccattgactga

SEQ ID NO: 410942 - DNA, 15 bp, Homo sapiens
atatgccattgactg

SEQ ID NO: 410943 - DNA, 15 bp, Homo sapiens
aatatgccattgact

SEQ ID NO: 410944 - DNA, 15 bp, Homo sapiens
caatatgccattgac

SEQ ID NO: 410945 - DNA, 15 bp, Homo sapiens
tcaatatgccattga

SEQ ID NO: 410946 - DNA, 15 bp, Homo sapiens
ttcaatatgccattg

SEQ ID NO: 410947 - DNA, 15 bp, Homo sapiens
tttcaatatgccatt

SEQ ID NO: 410948 - DNA, 15 bp, Homo sapiens
ttttcaatatgccat

SEQ ID NO: 410949 - DNA, 15 bp, Homo sapiens
attttcaatatgcca

SEQ ID NO: 410950 - DNA, 15 bp, Homo sapiens
tattttcaatatgcc

SEQ ID NO: 410951 - DNA, 15 bp, Homo sapiens
ttattttcaatatgc

SEQ ID NO: 410952 - DNA, 15 bp, Homo sapiens
attattttcaatatg

SEQ ID NO: 410953 - DNA, 15 bp, Homo sapiens
tattattttcaatat

SEQ ID NO: 410954 - DNA, 15 bp, Homo sapiens
atattattttcaata

SEQ ID NO: 410955 - DNA, 15 bp, Homo sapiens
aatattattttcaat

SEQ ID NO: 410956 - DNA, 15 bp, Homo sapiens
gaatattattttcaa

SEQ ID NO: 410957 - DNA, 15 bp, Homo sapiens
agaatattattttca

SEQ ID NO: 410958 - DNA, 15 bp, Homo sapiens
cagaatattattttc

SEQ ID NO: 410959 - DNA, 15 bp, Homo sapiens
tcagaatattatttt

SEQ ID NO: 410960 - DNA, 15 bp, Homo sapiens
ttcagaatattattt

SEQ ID NO: 410961 - DNA, 15 bp, Homo sapiens
tttcagaatattatt

SEQ ID NO: 410962 - DNA, 15 bp, Homo sapiens
ttttcagaatattat

SEQ ID NO: 410963 - DNA, 15 bp, Homo sapiens
tttttcagaatatta

SEQ ID NO: 410964 - DNA, 15 bp, Homo sapiens
ttttttcagaatatt

SEQ ID NO: 410965 - DNA, 15 bp, Homo sapiens
tttttttcagaatat

SEQ ID NO: 410966 - DNA, 15 bp, Homo sapiens
atttttttcagaata

SEQ ID NO: 410967 - DNA, 15 bp, Homo sapiens
catttttttcagaat

SEQ ID NO: 410968 - DNA, 15 bp, Homo sapiens
gcatttttttcagaa

SEQ ID NO: 410969 - DNA, 15 bp, Homo sapiens
tgcatttttttcaga

SEQ ID NO: 410970 - DNA, 15 bp, Homo sapiens
atgcatttttttcag

SEQ ID NO: 410971 - DNA, 15 bp, Homo sapiens
catgcatttttttca

SEQ ID NO: 410972 - DNA, 15 bp, Homo sapiens
ccatgcatttttttc

SEQ ID NO: 410973 - DNA, 15 bp, Homo sapiens
accatgcattttttt

SEQ ID NO: 410974 - DNA, 15 bp, Homo sapiens
aaccatgcatttttt

SEQ ID NO: 410975 - DNA, 15 bp, Homo sapiens
caaccatgcattttt

SEQ ID NO: 410976 - DNA, 15 bp, Homo sapiens
gcaaccatgcatttt

SEQ ID NO: 410977 - DNA, 15 bp, Homo sapiens
cgcaaccatgcattt

SEQ ID NO: 410978 - DNA, 15 bp, Homo sapiens
acgcaaccatgcatt

SEQ ID NO: 410979 - DNA, 15 bp, Homo sapiens
gacgcaaccatgcat

SEQ ID NO: 410980 - DNA, 15 bp, Homo sapiens
agacgcaaccatgca

SEQ ID NO: 410981 - DNA, 15 bp, Homo sapiens
cagacgcaaccatgc

SEQ ID NO: 410982 - DNA, 15 bp, Homo sapiens
acagacgcaaccatg

SEQ ID NO: 410983 - DNA, 15 bp, Homo sapiens
tacagacgcaaccat

SEQ ID NO: 410984 - DNA, 15 bp, Homo sapiens
gtacagacgcaacca

SEQ ID NO: 410985 - DNA, 15 bp, Homo sapiens
agtacagacgcaacc

SEQ ID NO: 410986 - DNA, 15 bp, Homo sapiens
tagtacagacgcaac

SEQ ID NO: 410987 - DNA, 15 bp, Homo sapiens
ttagtacagacgcaa

SEQ ID NO: 410988 - DNA, 15 bp, Homo sapiens
tttagtacagacgca

SEQ ID NO: 410989 - DNA, 15 bp, Homo sapiens
gtttagtacagacgc

SEQ ID NO: 410990 - DNA, 15 bp, Homo sapiens
tgtttagtacagacg

SEQ ID NO: 410991 - DNA, 15 bp, Homo sapiens
atgtttagtacagac

SEQ ID NO: 410992 - DNA, 15 bp, Homo sapiens
catgtttagtacaga

SEQ ID NO: 410993 - DNA, 15 bp, Homo sapiens
ccatgtttagtacag

SEQ ID NO: 410994 - DNA, 15 bp, Homo sapiens
tccatgtttagtaca

SEQ ID NO: 410995 - DNA, 15 bp, Homo sapiens
atccatgtttagtac

SEQ ID NO: 410996 - DNA, 15 bp, Homo sapiens
tatccatgtttagta

SEQ ID NO: 410997 - DNA, 15 bp, Homo sapiens
ctatccatgtttagt

SEQ ID NO: 410998 - DNA, 15 bp, Homo sapiens
gctatccatgtttag

SEQ ID NO: 410999 - DNA, 15 bp, Homo sapiens
tgctatccatgttta

SEQ ID NO: 411000 - DNA, 15 bp, Homo sapiens
atgctatccatgttt

SEQ ID NO: 411001 - DNA, 15 bp, Homo sapiens
aatgctatccatgtt

SEQ ID NO: 411002 - DNA, 15 bp, Homo sapiens
aaatgctatccatgt

SEQ ID NO: 411003 - DNA, 15 bp, Homo sapiens
caaatgctatccatg

SEQ ID NO: 411004 - DNA, 15 bp, Homo sapiens
acaaatgctatccat

SEQ ID NO: 411005 - DNA, 15 bp, Homo sapiens
aacaaatgctatcca

SEQ ID NO: 411006 - DNA, 15 bp, Homo sapiens
aaacaaatgctatcc

SEQ ID NO: 411007 - DNA, 15 bp, Homo sapiens
aaaacaaatgctatc

SEQ ID NO: 411008 - DNA, 15 bp, Homo sapiens
aaaaacaaatgctat

SEQ ID NO: 411009 - DNA, 15 bp, Homo sapiens
aaaaaacaaatgcta

SEQ ID NO: 411010 - DNA, 15 bp, Homo sapiens
taaaaaacaaatgct

SEQ ID NO: 411011 - DNA, 15 bp, Homo sapiens
gtaaaaaacaaatgc

SEQ ID NO: 411012 - DNA, 15 bp, Homo sapiens
agtaaaaaacaaatg

SEQ ID NO: 411013 - DNA, 15 bp, Homo sapiens
gagtaaaaaacaaat

SEQ ID NO: 411014 - DNA, 15 bp, Homo sapiens
tgagtaaaaaacaaa

SEQ ID NO: 411015 - DNA, 15 bp, Homo sapiens
atgagtaaaaaacaa

SEQ ID NO: 411016 - DNA, 15 bp, Homo sapiens
aatgagtaaaaaaca

SEQ ID NO: 411017 - DNA, 15 bp, Homo sapiens
taatgagtaaaaaac

SEQ ID NO: 411018 - DNA, 15 bp, Homo sapiens
gtaatgagtaaaaaa

SEQ ID NO: 411019 - DNA, 15 bp, Homo sapiens
agtaatgagtaaaaa

SEQ ID NO: 411020 - DNA, 15 bp, Homo sapiens
gagtaatgagtaaaa

SEQ ID NO: 411021 - DNA, 15 bp, Homo sapiens
ggagtaatgagtaaa

SEQ ID NO: 411022 - DNA, 15 bp, Homo sapiens
gggagtaatgagtaa

SEQ ID NO: 411023 - DNA, 15 bp, Homo sapiens
agggagtaatgagta

SEQ ID NO: 411024 - DNA, 15 bp, Homo sapiens
tagggagtaatgagt

SEQ ID NO: 411025 - DNA, 15 bp, Homo sapiens
ttagggagtaatgag

SEQ ID NO: 411026 - DNA, 15 bp, Homo sapiens
tttagggagtaatga

SEQ ID NO: 411027 - DNA, 15 bp, Homo sapiens
gtttagggagtaatg

SEQ ID NO: 411028 - DNA, 15 bp, Homo sapiens
tgtttagggagtaat

SEQ ID NO: 411029 - DNA, 15 bp, Homo sapiens
ttgtttagggagtaa

SEQ ID NO: 411030 - DNA, 15 bp, Homo sapiens
attgtttagggagta

SEQ ID NO: 411031 - DNA, 15 bp, Homo sapiens
tattgtttagggagt

SEQ ID NO: 411032 - DNA, 15 bp, Homo sapiens
ctattgtttagggag

SEQ ID NO: 411033 - DNA, 15 bp, Homo sapiens
tctattgtttaggga

SEQ ID NO: 411034 - DNA, 15 bp, Homo sapiens
ctctattgtttaggg

SEQ ID NO: 411035 - DNA, 15 bp, Homo sapiens
actctattgtttagg

SEQ ID NO: 411036 - DNA, 15 bp, Homo sapiens
tactctattgtttag

SEQ ID NO: 411037 - DNA, 15 bp, Homo sapiens
ttactctattgttta

SEQ ID NO: 411038 - DNA, 15 bp, Homo sapiens
tttactctattgttt

SEQ ID NO: 411039 - DNA, 15 bp, Homo sapiens
ttttactctattgtt

SEQ ID NO: 411040 - DNA, 15 bp, Homo sapiens
gttttactctattgt

SEQ ID NO: 411041 - DNA, 15 bp, Homo sapiens
tgttttactctattg

SEQ ID NO: 411042 - DNA, 15 bp, Homo sapiens
ttgttttactctatt

SEQ ID NO: 411043 - DNA, 15 bp, Homo sapiens
attgttttactctat

SEQ ID NO: 411044 - DNA, 15 bp, Homo sapiens
tattgttttactcta

SEQ ID NO: 411045 - DNA, 15 bp, Homo sapiens
ctattgttttactct

SEQ ID NO: 411046 - DNA, 15 bp, Homo sapiens
tctattgttttactc

SEQ ID NO: 411047 - DNA, 15 bp, Homo sapiens
ctctattgttttact

SEQ ID NO: 411048 - DNA, 15 bp, Homo sapiens
actctattgttttac

SEQ ID NO: 411049 - DNA, 15 bp, Homo sapiens
tactctattgtttta

SEQ ID NO: 411050 - DNA, 15 bp, Homo sapiens
ttactctattgtttt

SEQ ID NO: 411051 - DNA, 15 bp, Homo sapiens
atttactctattgtt

SEQ ID NO: 411052 - DNA, 15 bp, Homo sapiens
catttactctattgt

SEQ ID NO: 411053 - DNA, 15 bp, Homo sapiens
gcatttactctattg

SEQ ID NO: 411054 - DNA, 15 bp, Homo sapiens
agcatttactctatt

SEQ ID NO: 411055 - DNA, 15 bp, Homo sapiens
tagcatttactctat

SEQ ID NO: 411056 - DNA, 15 bp, Homo sapiens
atagcatttactcta

SEQ ID NO: 411057 - DNA, 15 bp, Homo sapiens
aatagcatttactct

SEQ ID NO: 411058 - DNA, 15 bp, Homo sapiens
aaatagcatttactc

SEQ ID NO: 411059 - DNA, 15 bp, Homo sapiens
taaatagcatttact

SEQ ID NO: 411060 - DNA, 15 bp, Homo sapiens
ataaatagcatttac

SEQ ID NO: 411061 - DNA, 15 bp, Homo sapiens
cataaatagcattta

SEQ ID NO: 411062 - DNA, 15 bp, Homo sapiens
acataaatagcattt

SEQ ID NO: 411063 - DNA, 15 bp, Homo sapiens
tacataaatagcatt

SEQ ID NO: 411064 - DNA, 15 bp, Homo sapiens
ctacataaatagcat

SEQ ID NO: 411065 - DNA, 15 bp, Homo sapiens
gctacataaatagca

SEQ ID NO: 411066 - DNA, 15 bp, Homo sapiens
tgctacataaatagc

SEQ ID NO: 411067 - DNA, 15 bp, Homo sapiens
atgctacataaatag

SEQ ID NO: 411068 - DNA, 15 bp, Homo sapiens
aatgctacataaata

SEQ ID NO: 411069 - DNA, 15 bp, Homo sapiens
aaatgctacataaat

SEQ ID NO: 411070 - DNA, 15 bp, Homo sapiens
taaatgctacataaa

SEQ ID NO: 411071 - DNA, 15 bp, Homo sapiens
ataaatgctacataa

SEQ ID NO: 411072 - DNA, 15 bp, Homo sapiens
tataaatgctacata

SEQ ID NO: 411073 - DNA, 15 bp, Homo sapiens
atataaatgctacat

SEQ ID NO: 411074 - DNA, 15 bp, Homo sapiens
aatataaatgctaca

SEQ ID NO: 411075 - DNA, 15 bp, Homo sapiens
caatataaatgctac

SEQ ID NO: 411076 - DNA, 15 bp, Homo sapiens
acaatataaatgcta

SEQ ID NO: 411077 - DNA, 15 bp, Homo sapiens
tacaatataaatgct

SEQ ID NO: 411078 - DNA, 15 bp, Homo sapiens
atacaatataaatgc

SEQ ID NO: 411079 - DNA, 15 bp, Homo sapiens
aatacaatataaatg

SEQ ID NO: 411080 - DNA, 15 bp, Homo sapiens
taatacaatataaat

SEQ ID NO: 411081 - DNA, 15 bp, Homo sapiens
ctaatacaatataaa

SEQ ID NO: 411082 - DNA, 15 bp, Homo sapiens
cctaatacaatataa

SEQ ID NO: 411083 - DNA, 15 bp, Homo sapiens
acctaatacaatata

SEQ ID NO: 411084 - DNA, 15 bp, Homo sapiens
tacctaatacaatat

SEQ ID NO: 411085 - DNA, 15 bp, Homo sapiens
atacctaatacaata

SEQ ID NO: 411086 - DNA, 15 bp, Homo sapiens
aatacctaatacaat

SEQ ID NO: 411087 - DNA, 15 bp, Homo sapiens
taatacctaatacaa

SEQ ID NO: 411088 - DNA, 15 bp, Homo sapiens
ataatacctaataca

SEQ ID NO: 411089 - DNA, 15 bp, Homo sapiens
cataatacctaatac

SEQ ID NO: 411090 - DNA, 15 bp, Homo sapiens
tcataatacctaata

SEQ ID NO: 411091 - DNA, 15 bp, Homo sapiens
ctcataatacctaat

SEQ ID NO: 411092 - DNA, 15 bp, Homo sapiens
actcataatacctaa

SEQ ID NO: 411093 - DNA, 15 bp, Homo sapiens
tactcataataccta

SEQ ID NO: 411094 - DNA, 15 bp, Homo sapiens
ttactcataatacct

SEQ ID NO: 411095 - DNA, 15 bp, Homo sapiens
attactcataatacc

SEQ ID NO: 411096 - DNA, 15 bp, Homo sapiens
gattactcataatac

SEQ ID NO: 411097 - DNA, 15 bp, Homo sapiens
agattactcataata

SEQ ID NO: 411098 - DNA, 15 bp, Homo sapiens
tagattactcataat

SEQ ID NO: 411099 - DNA, 15 bp, Homo sapiens
ctagattactcataa

SEQ ID NO: 411100 - DNA, 15 bp, Homo sapiens
tctagattactcata

SEQ ID NO: 411101 - DNA, 15 bp, Homo sapiens
atctagattactcat

SEQ ID NO: 411102 - DNA, 15 bp, Homo sapiens
tatctagattactca

SEQ ID NO: 411103 - DNA, 15 bp, Homo sapiens
atatctagattactc

SEQ ID NO: 411104 - DNA, 15 bp, Homo sapiens
catatctagattact

SEQ ID NO: 411105 - DNA, 15 bp, Homo sapiens
ccatatctagattac

SEQ ID NO: 411106 - DNA, 15 bp, Homo sapiens
accatatctagatta

SEQ ID NO: 411107 - DNA, 15 bp, Homo sapiens
aaccatatctagatt

SEQ ID NO: 411108 - DNA, 15 bp, Homo sapiens
aaaccatatctagat

SEQ ID NO: 411109 - DNA, 15 bp, Homo sapiens
taaaccatatctaga

SEQ ID NO: 411110 - DNA, 15 bp, Homo sapiens
ttaaaccatatctag

SEQ ID NO: 411111 - DNA, 15 bp, Homo sapiens
tttaaaccatatcta

SEQ ID NO: 411112 - DNA, 15 bp, Homo sapiens
ctttaaaccatatct

SEQ ID NO: 411113 - DNA, 15 bp, Homo sapiens
actttaaaccatatc

SEQ ID NO: 411114 - DNA, 15 bp, Homo sapiens
tactttaaaccatat

SEQ ID NO: 411115 - DNA, 15 bp, Homo sapiens
atactttaaaccata

SEQ ID NO: 411116 - DNA, 15 bp, Homo sapiens
tatactttaaaccat

SEQ ID NO: 411117 - DNA, 15 bp, Homo sapiens
gtatactttaaacca

SEQ ID NO: 411118 - DNA, 15 bp, Homo sapiens
tgtatactttaaacc

SEQ ID NO: 411119 - DNA, 15 bp, Homo sapiens
ctgtatactttaaac

SEQ ID NO: 411120 - DNA, 15 bp, Homo sapiens
cctgtatactttaaa

SEQ ID NO: 411121 - DNA, 15 bp, Homo sapiens
tcctgtatactttaa

SEQ ID NO: 411122 - DNA, 15 bp, Homo sapiens
ctcctgtatacttta

SEQ ID NO: 411123 - DNA, 15 bp, Homo sapiens
cctcctgtatacttt

SEQ ID NO: 411124 - DNA, 15 bp, Homo sapiens
tcctcctgtatactt

SEQ ID NO: 411125 - DNA, 15 bp, Homo sapiens
atcctcctgtatact

SEQ ID NO: 411126 - DNA, 15 bp, Homo sapiens
catcctcctgtatac

SEQ ID NO: 411127 - DNA, 15 bp, Homo sapiens
acatcctcctgtata

SEQ ID NO: 411128 - DNA, 15 bp, Homo sapiens
cacatcctcctgtat

SEQ ID NO: 411129 - DNA, 15 bp, Homo sapiens
gcacatcctcctgta

SEQ ID NO: 411130 - DNA, 15 bp, Homo sapiens
tgcacatcctcctgt

SEQ ID NO: 411131 - DNA, 15 bp, Homo sapiens
atgcacatcctcctg

SEQ ID NO: 411132 - DNA, 15 bp, Homo sapiens
tatgcacatcctcct

SEQ ID NO: 411133 - DNA, 15 bp, Homo sapiens
ttatgcacatcctcc

SEQ ID NO: 411134 - DNA, 15 bp, Homo sapiens
cttatgcacatcctc

SEQ ID NO: 411135 - DNA, 15 bp, Homo sapiens
acttatgcacatcct

SEQ ID NO: 411136 - DNA, 15 bp, Homo sapiens
aacttatgcacatcc

SEQ ID NO: 411137 - DNA, 15 bp, Homo sapiens
taacttatgcacatc

SEQ ID NO: 411138 - DNA, 15 bp, Homo sapiens
ataacttatgcacat

SEQ ID NO: 411139 - DNA, 15 bp, Homo sapiens
tataacttatgcaca

SEQ ID NO: 411140 - DNA, 15 bp, Homo sapiens
ttataacttatgcac

SEQ ID NO: 411141 - DNA, 15 bp, Homo sapiens
cttataacttatgca

SEQ ID NO: 411142 - DNA, 15 bp, Homo sapiens
gcttataacttatgc

SEQ ID NO: 411143 - DNA, 15 bp, Homo sapiens
tgcttataacttatg

SEQ ID NO: 411144 - DNA, 15 bp, Homo sapiens
ttgcttataacttat

SEQ ID NO: 411145 - DNA, 15 bp, Homo sapiens
tttgcttataactta

SEQ ID NO: 411146 - DNA, 15 bp, Homo sapiens
atttgcttataactt

SEQ ID NO: 411147 - DNA, 15 bp, Homo sapiens
tatttgcttataact

SEQ ID NO: 411148 - DNA, 15 bp, Homo sapiens
gtatttgcttataac

SEQ ID NO: 411149 - DNA, 15 bp, Homo sapiens
agtatttgcttataa

SEQ ID NO: 411150 - DNA, 15 bp, Homo sapiens
tagtatttgcttata

SEQ ID NO: 411151 - DNA, 15 bp, Homo sapiens
atagtatttgcttat

SEQ ID NO: 411152 - DNA, 15 bp, Homo sapiens
catagtatttgctta

SEQ ID NO: 411153 - DNA, 15 bp, Homo sapiens
tcatagtatttgctt

SEQ ID NO: 411154 - DNA, 15 bp, Homo sapiens
gtcatagtatttgct

SEQ ID NO: 411155 - DNA, 15 bp, Homo sapiens
tgtcatagtatttgc

SEQ ID NO: 411156 - DNA, 15 bp, Homo sapiens
atgtcatagtatttg

SEQ ID NO: 411157 - DNA, 15 bp, Homo sapiens
aatgtcatagtattt

SEQ ID NO: 411158 - DNA, 15 bp, Homo sapiens
aaatgtcatagtatt

SEQ ID NO: 411159 - DNA, 15 bp, Homo sapiens
aaaatgtcatagtat

SEQ ID NO: 411160 - DNA, 15 bp, Homo sapiens
taaaatgtcatagta

SEQ ID NO: 411161 - DNA, 15 bp, Homo sapiens
ataaaatgtcatagt

SEQ ID NO: 411162 - DNA, 15 bp, Homo sapiens
cataaaatgtcatag

SEQ ID NO: 411163 - DNA, 15 bp, Homo sapiens
acataaaatgtcata

SEQ ID NO: 411164 - DNA, 15 bp, Homo sapiens
tacataaaatgtcat

SEQ ID NO: 411165 - DNA, 15 bp, Homo sapiens
ttacataaaatgtca

SEQ ID NO: 411166 - DNA, 15 bp, Homo sapiens
gttacataaaatgtc

SEQ ID NO: 411167 - DNA, 15 bp, Homo sapiens
tgttacataaaatgt

SEQ ID NO: 411168 - DNA, 15 bp, Homo sapiens
ctgttacataaaatg

SEQ ID NO: 411169 - DNA, 15 bp, Homo sapiens
tctgttacataaaat

SEQ ID NO: 411170 - DNA, 15 bp, Homo sapiens
gtctgttacataaaa

SEQ ID NO: 411171 - DNA, 15 bp, Homo sapiens
agtctgttacataaa

SEQ ID NO: 411172 - DNA, 15 bp, Homo sapiens
aagtctgttacataa

SEQ ID NO: 411173 - DNA, 15 bp, Homo sapiens
caagtctgttacata

SEQ ID NO: 411174 - DNA, 15 bp, Homo sapiens
tcaagtctgttacat

SEQ ID NO: 411175 - DNA, 15 bp, Homo sapiens
ctcaagtctgttaca

SEQ ID NO: 411176 - DNA, 15 bp, Homo sapiens
gctcaagtctgttac

SEQ ID NO: 411177 - DNA, 15 bp, Homo sapiens
tgctcaagtctgtta

SEQ ID NO: 411178 - DNA, 15 bp, Homo sapiens
atgctcaagtctgtt

SEQ ID NO: 411179 - DNA, 15 bp, Homo sapiens
gatgctcaagtctgt

SEQ ID NO: 411180 - DNA, 15 bp, Homo sapiens
ggatgctcaagtctg

SEQ ID NO: 411181 - DNA, 15 bp, Homo sapiens
aggatgctcaagtct

SEQ ID NO: 411182 - DNA, 15 bp, Homo sapiens
gaggatgctcaagtc

SEQ ID NO: 411183 - DNA, 15 bp, Homo sapiens
agaggatgctcaagt

SEQ ID NO: 411184 - DNA, 15 bp, Homo sapiens
cagaggatgctcaag

SEQ ID NO: 411185 - DNA, 15 bp, Homo sapiens
gcagaggatgctcaa

SEQ ID NO: 411186 - DNA, 15 bp, Homo sapiens
agcagaggatgctca

SEQ ID NO: 411187 - DNA, 15 bp, Homo sapiens
aagcagaggatgctc

SEQ ID NO: 411188 - DNA, 15 bp, Homo sapiens
aaagcagaggatgct

SEQ ID NO: 411189 - DNA, 15 bp, Homo sapiens
aaaagcagaggatgc

SEQ ID NO: 411190 - DNA, 15 bp, Homo sapiens
caaaagcagaggatg

SEQ ID NO: 411191 - DNA, 15 bp, Homo sapiens
ccaaaagcagaggat

SEQ ID NO: 411192 - DNA, 15 bp, Homo sapiens
cccaaaagcagagga

SEQ ID NO: 411193 - DNA, 15 bp, Homo sapiens
ccccaaaagcagagg

SEQ ID NO: 411194 - DNA, 15 bp, Homo sapiens
accccaaaagcagag

SEQ ID NO: 411195 - DNA, 15 bp, Homo sapiens
gaccccaaaagcaga

SEQ ID NO: 411196 - DNA, 15 bp, Homo sapiens
ggaccccaaaagcag

SEQ ID NO: 411197 - DNA, 15 bp, Homo sapiens
tggaccccaaaagca

SEQ ID NO: 411198 - DNA, 15 bp, Homo sapiens
gtggaccccaaaagc

SEQ ID NO: 411199 - DNA, 15 bp, Homo sapiens
tgtggaccccaaaag

SEQ ID NO: 411200 - DNA, 15 bp, Homo sapiens
ctgtggaccccaaaa

SEQ ID NO: 411201 - DNA, 15 bp, Homo sapiens
cctgtggaccccaaa

SEQ ID NO: 411202 - DNA, 15 bp, Homo sapiens
ccctgtggaccccaa

SEQ ID NO: 411203 - DNA, 15 bp, Homo sapiens
accctgtggacccca

SEQ ID NO: 411204 - DNA, 15 bp, Homo sapiens
caccctgtggacccc

SEQ ID NO: 411205 - DNA, 15 bp, Homo sapiens
tcaccctgtggaccc

SEQ ID NO: 411206 - DNA, 15 bp, Homo sapiens
ctcaccctgtggacc

SEQ ID NO: 411207 - DNA, 15 bp, Homo sapiens
cctcaccctgtggac

SEQ ID NO: 411208 - DNA, 15 bp, Homo sapiens
ccctcaccctgtgga

SEQ ID NO: 411209 - DNA, 15 bp, Homo sapiens
cccctcaccctgtgg

SEQ ID NO: 411210 - DNA, 15 bp, Homo sapiens
tcccctcaccctgtg

SEQ ID NO: 411211 - DNA, 15 bp, Homo sapiens
atcccctcaccctgt

SEQ ID NO: 411212 - DNA, 15 bp, Homo sapiens
aatcccctcaccctg

SEQ ID NO: 411213 - DNA, 15 bp, Homo sapiens
gaatcccctcaccct

SEQ ID NO: 411214 - DNA, 15 bp, Homo sapiens
ggaatcccctcaccc

SEQ ID NO: 411215 - DNA, 15 bp, Homo sapiens
aggaatcccctcacc

SEQ ID NO: 411216 - DNA, 15 bp, Homo sapiens
taggaatcccctcac

SEQ ID NO: 411217 - DNA, 15 bp, Homo sapiens
ctaggaatcccctca

SEQ ID NO: 411218 - DNA, 15 bp, Homo sapiens
tctaggaatcccctc

SEQ ID NO: 411219 - DNA, 15 bp, Homo sapiens
ttctaggaatcccct

SEQ ID NO: 411220 - DNA, 15 bp, Homo sapiens
gttctaggaatcccc

SEQ ID NO: 411221 - DNA, 15 bp, Homo sapiens
ggttctaggaatccc

SEQ ID NO: 411222 - DNA, 15 bp, Homo sapiens
tggttctaggaatcc

SEQ ID NO: 411223 - DNA, 15 bp, Homo sapiens
ctggttctaggaatc

SEQ ID NO: 411224 - DNA, 15 bp, Homo sapiens
actggttctaggaat

SEQ ID NO: 411225 - DNA, 15 bp, Homo sapiens
gactggttctaggaa

SEQ ID NO: 411226 - DNA, 15 bp, Homo sapiens
ggactggttctagga

SEQ ID NO: 411227 - DNA, 15 bp, Homo sapiens
aggactggttctagg

SEQ ID NO: 411228 - DNA, 15 bp, Homo sapiens
gaggactggttctag

SEQ ID NO: 411229 - DNA, 15 bp, Homo sapiens
ggaggactggttcta

SEQ ID NO: 411230 - DNA, 15 bp, Homo sapiens
tggaggactggttct

SEQ ID NO: 411231 - DNA, 15 bp, Homo sapiens
atggaggactggttc

SEQ ID NO: 411232 - DNA, 15 bp, Homo sapiens
catggaggactggtt

SEQ ID NO: 411233 - DNA, 15 bp, Homo sapiens
ccatggaggactggt

SEQ ID NO: 411234 - DNA, 15 bp, Homo sapiens
cccatggaggactgg

SEQ ID NO: 411235 - DNA, 15 bp, Homo sapiens
acccatggaggactg

SEQ ID NO: 411236 - DNA, 15 bp, Homo sapiens
tacccatggaggact

SEQ ID NO: 411237 - DNA, 15 bp, Homo sapiens
atacccatggaggac

SEQ ID NO: 411238 - DNA, 15 bp, Homo sapiens
aatacccatggagga

SEQ ID NO: 411239 - DNA, 15 bp, Homo sapiens
caatacccatggagg

SEQ ID NO: 411240 - DNA, 15 bp, Homo sapiens
tcaatacccatggag

SEQ ID NO: 411241 - DNA, 15 bp, Homo sapiens
ctcaatacccatgga

SEQ ID NO: 411242 - DNA, 15 bp, Homo sapiens
cctcaatacccatgg

SEQ ID NO: 411243 - DNA, 15 bp, Homo sapiens
ccctcaatacccatg

SEQ ID NO: 411244 - DNA, 15 bp, Homo sapiens
tccctcaatacccat

SEQ ID NO: 411245 - DNA, 15 bp, Homo sapiens
gtccctcaataccca

SEQ ID NO: 411246 - DNA, 15 bp, Homo sapiens
tgtccctcaataccc

SEQ ID NO: 411247 - DNA, 15 bp, Homo sapiens
ttgtccctcaatacc

SEQ ID NO: 411248 - DNA, 15 bp, Homo sapiens
gttgtccctcaatac

SEQ ID NO: 411249 - DNA, 15 bp, Homo sapiens
agttgtccctcaata

SEQ ID NO: 411250 - DNA, 15 bp, Homo sapiens
tagttgtccctcaat

SEQ ID NO: 411251 - DNA, 15 bp, Homo sapiens
atagttgtccctcaa

SEQ ID NO: 411252 - DNA, 15 bp, Homo sapiens
tatagttgtccctca

SEQ ID NO: 411253 - DNA, 15 bp, Homo sapiens
ttatagttgtccctc

SEQ ID NO: 411254 - DNA, 15 bp, Homo sapiens
attatagttgtccct

SEQ ID NO: 411255 - DNA, 15 bp, Homo sapiens
aattatagttgtccc

SEQ ID NO: 411256 - DNA, 15 bp, Homo sapiens
aaattatagttgtcc

SEQ ID NO: 411257 - DNA, 15 bp, Homo sapiens
gaaattatagttgtc

SEQ ID NO: 411258 - DNA, 15 bp, Homo sapiens
tgaaattatagttgt

SEQ ID NO: 411259 - DNA, 15 bp, Homo sapiens
atgaaattatagttg

SEQ ID NO: 411260 - DNA, 15 bp, Homo sapiens
tatgaaattatagtt

SEQ ID NO: 411261 - DNA, 15 bp, Homo sapiens
gtatgaaattatagt

SEQ ID NO: 411262 - DNA, 15 bp, Homo sapiens
tgtatgaaattatag

SEQ ID NO: 411263 - DNA, 15 bp, Homo sapiens
ctgtatgaaattata

SEQ ID NO: 411264 - DNA, 15 bp, Homo sapiens
cctgtatgaaattat

SEQ ID NO: 411265 - DNA, 15 bp, Homo sapiens
tcctgtatgaaatta

SEQ ID NO: 411266 - DNA, 15 bp, Homo sapiens
atcctgtatgaaatt

SEQ ID NO: 411267 - DNA, 15 bp, Homo sapiens
aatcctgtatgaaat

SEQ ID NO: 411268 - DNA, 15 bp, Homo sapiens
aaatcctgtatgaaa

SEQ ID NO: 411269 - DNA, 15 bp, Homo sapiens
aaaatcctgtatgaa

SEQ ID NO: 411270 - DNA, 15 bp, Homo sapiens
caaaatcctgtatga

SEQ ID NO: 411271 - DNA, 15 bp, Homo sapiens
acaaaatcctgtatg

SEQ ID NO: 411272 - DNA, 15 bp, Homo sapiens
cacaaaatcctgtat

SEQ ID NO: 411273 - DNA, 15 bp, Homo sapiens
tcacaaaatcctgta

SEQ ID NO: 411274 - DNA, 15 bp, Homo sapiens
atcacaaaatcctgt

SEQ ID NO: 411275 - DNA, 15 bp, Homo sapiens
aatcacaaaatcctg

SEQ ID NO: 411276 - DNA, 15 bp, Homo sapiens
caatcacaaaatcct

SEQ ID NO: 411277 - DNA, 15 bp, Homo sapiens
acaatcacaaaatcc

SEQ ID NO: 411278 - DNA, 15 bp, Homo sapiens
tacaatcacaaaatc

SEQ ID NO: 411279 - DNA, 15 bp, Homo sapiens
ctacaatcacaaaat

SEQ ID NO: 411280 - DNA, 15 bp, Homo sapiens
gctacaatcacaaaa

SEQ ID NO: 411281 - DNA, 15 bp, Homo sapiens
tgctacaatcacaaa

SEQ ID NO: 411282 - DNA, 15 bp, Homo sapiens
ttgctacaatcacaa

SEQ ID NO: 411283 - DNA, 15 bp, Homo sapiens
tttgctacaatcaca

SEQ ID NO: 411284 - DNA, 15 bp, Homo sapiens
gtttgctacaatcac

SEQ ID NO: 411285 - DNA, 15 bp, Homo sapiens
agtttgctacaatca

SEQ ID NO: 411286 - DNA, 15 bp, Homo sapiens
cagtttgctacaatc

SEQ ID NO: 411287 - DNA, 15 bp, Homo sapiens
acagtttgctacaat

SEQ ID NO: 411288 - DNA, 15 bp, Homo sapiens
tacagtttgctacaa

SEQ ID NO: 411289 - DNA, 15 bp, Homo sapiens
ttacagtttgctaca

SEQ ID NO: 411290 - DNA, 15 bp, Homo sapiens
tttacagtttgctac

SEQ ID NO: 411291 - DNA, 15 bp, Homo sapiens
ttttacagtttgcta

SEQ ID NO: 411292 - DNA, 15 bp, Homo sapiens
tttttacagtttgct

SEQ ID NO: 411293 - DNA, 15 bp, Homo sapiens
atttttacagtttgc

SEQ ID NO: 411294 - DNA, 15 bp, Homo sapiens
aatttttacagtttg

SEQ ID NO: 411295 - DNA, 15 bp, Homo sapiens
caatttttacagttt

SEQ ID NO: 411296 - DNA, 15 bp, Homo sapiens
acaatttttacagtt

SEQ ID NO: 411297 - DNA, 15 bp, Homo sapiens
aacaatttttacagt

SEQ ID NO: 411298 - DNA, 15 bp, Homo sapiens
aaacaatttttacag

SEQ ID NO: 411299 - DNA, 15 bp, Homo sapiens
gaaacaatttttaca

SEQ ID NO: 411300 - DNA, 15 bp, Homo sapiens
tgaaacaatttttac

SEQ ID NO: 411301 - DNA, 15 bp, Homo sapiens
atgaaacaattttta

SEQ ID NO: 411302 - DNA, 15 bp, Homo sapiens
catgaaacaattttt

SEQ ID NO: 411303 - DNA, 15 bp, Homo sapiens
acatgaaacaatttt

SEQ ID NO: 411304 - DNA, 15 bp, Homo sapiens
aacatgaaacaattt

SEQ ID NO: 411305 - DNA, 15 bp, Homo sapiens
gaacatgaaacaatt

SEQ ID NO: 411306 - DNA, 15 bp, Homo sapiens
tgaacatgaaacaat

SEQ ID NO: 411307 - DNA, 15 bp, Homo sapiens
atgaacatgaaacaa

SEQ ID NO: 411308 - DNA, 15 bp, Homo sapiens
catgaacatgaaaca

SEQ ID NO: 411309 - DNA, 15 bp, Homo sapiens
acatgaacatgaaac

SEQ ID NO: 411310 - DNA, 15 bp, Homo sapiens
tacatgaacatgaaa

SEQ ID NO: 411311 - DNA, 15 bp, Homo sapiens
gtacatgaacatgaa

SEQ ID NO: 411312 - DNA, 15 bp, Homo sapiens
agtacatgaacatga

SEQ ID NO: 411313 - DNA, 15 bp, Homo sapiens
tagtacatgaacatg

SEQ ID NO: 411314 - DNA, 15 bp, Homo sapiens
atagtacatgaacat

SEQ ID NO: 411315 - DNA, 15 bp, Homo sapiens
gatagtacatgaaca

SEQ ID NO: 411316 - DNA, 15 bp, Homo sapiens
agatagtacatgaac

SEQ ID NO: 411317 - DNA, 15 bp, Homo sapiens
aagatagtacatgaa

SEQ ID NO: 411318 - DNA, 15 bp, Homo sapiens
aaagatagtacatga

SEQ ID NO: 411319 - DNA, 15 bp, Homo sapiens
gaaagatagtacatg

SEQ ID NO: 411320 - DNA, 15 bp, Homo sapiens
agaaagatagtacat

SEQ ID NO: 411321 - DNA, 15 bp, Homo sapiens
tagaaagatagtaca

SEQ ID NO: 411322 - DNA, 15 bp, Homo sapiens
ttagaaagatagtac

SEQ ID NO: 411323 - DNA, 15 bp, Homo sapiens
tttagaaagatagta

SEQ ID NO: 411324 - DNA, 15 bp, Homo sapiens
ttttagaaagatagt

SEQ ID NO: 411325 - DNA, 15 bp, Homo sapiens
gttttagaaagatag

SEQ ID NO: 411326 - DNA, 15 bp, Homo sapiens
agttttagaaagata

SEQ ID NO: 411327 - DNA, 15 bp, Homo sapiens
tagttttagaaagat

SEQ ID NO: 411328 - DNA, 15 bp, Homo sapiens
ctagttttagaaaga

SEQ ID NO: 411329 - DNA, 15 bp, Homo sapiens
tctagttttagaaag

SEQ ID NO: 411330 - DNA, 15 bp, Homo sapiens
ttctagttttagaaa

SEQ ID NO: 411331 - DNA, 15 bp, Homo sapiens
attctagttttagaa

SEQ ID NO: 411332 - DNA, 15 bp, Homo sapiens
aattctagttttaga

SEQ ID NO: 411333 - DNA, 15 bp, Homo sapiens
gaattctagttttag

SEQ ID NO: 411334 - DNA, 15 bp, Homo sapiens
tgaattctagtttta

SEQ ID NO: 411335 - DNA, 15 bp, Homo sapiens
ctgaattctagtttt

SEQ ID NO: 411336 - DNA, 15 bp, Homo sapiens
cctgaattctagttt

SEQ ID NO: 411337 - DNA, 15 bp, Homo sapiens
acctgaattctagtt

SEQ ID NO: 411338 - DNA, 15 bp, Homo sapiens
aacctgaattctagt

SEQ ID NO: 411339 - DNA, 15 bp, Homo sapiens
taacctgaattctag

SEQ ID NO: 411340 - DNA, 15 bp, Homo sapiens
gtaacctgaattcta

SEQ ID NO: 411341 - DNA, 15 bp, Homo sapiens
tgtaacctgaattct

SEQ ID NO: 411342 - DNA, 15 bp, Homo sapiens
atgtaacctgaattc

SEQ ID NO: 411343 - DNA, 15 bp, Homo sapiens
tatgtaacctgaatt

SEQ ID NO: 411344 - DNA, 15 bp, Homo sapiens
atatgtaacctgaat

SEQ ID NO: 411345 - DNA, 15 bp, Homo sapiens
tatatgtaacctgaa

SEQ ID NO: 411346 - DNA, 15 bp, Homo sapiens
gtatatgtaacctga

SEQ ID NO: 411347 - DNA, 15 bp, Homo sapiens
tgtatatgtaacctg

SEQ ID NO: 411348 - DNA, 15 bp, Homo sapiens
gtgtatatgtaacct

SEQ ID NO: 411349 - DNA, 15 bp, Homo sapiens
tgtgtatatgtaacc

SEQ ID NO: 411350 - DNA, 15 bp, Homo sapiens
atgtgtatatgtaac

SEQ ID NO: 411351 - DNA, 15 bp, Homo sapiens
tatgtgtatatgtaa

SEQ ID NO: 411352 - DNA, 15 bp, Homo sapiens
atatgtgtatatgta

SEQ ID NO: 411353 - DNA, 15 bp, Homo sapiens
tatatgtgtatatgt

SEQ ID NO: 411354 - DNA, 15 bp, Homo sapiens
ttatatgtgtatatg

SEQ ID NO: 411355 - DNA, 15 bp, Homo sapiens
tttatatgtgtatat

SEQ ID NO: 411356 - DNA, 15 bp, Homo sapiens
atttatatgtgtata

SEQ ID NO: 411357 - DNA, 15 bp, Homo sapiens
tatttatatgtgtat

SEQ ID NO: 411358 - DNA, 15 bp, Homo sapiens
gtatttatatgtgta

SEQ ID NO: 411359 - DNA, 15 bp, Homo sapiens
agtatttatatgtgt

SEQ ID NO: 411360 - DNA, 15 bp, Homo sapiens
aagtatttatatgtg

SEQ ID NO: 411361 - DNA, 15 bp, Homo sapiens
aaagtatttatatgt

SEQ ID NO: 411362 - DNA, 15 bp, Homo sapiens
aaaagtatttatatg

SEQ ID NO: 411363 - DNA, 15 bp, Homo sapiens
aaaaagtatttatat

SEQ ID NO: 411364 - DNA, 15 bp, Homo sapiens
gaaaaagtatttata

SEQ ID NO: 411365 - DNA, 15 bp, Homo sapiens
agaaaaagtatttat

SEQ ID NO: 411366 - DNA, 15 bp, Homo sapiens
gagaaaaagtattta

SEQ ID NO: 411367 - DNA, 15 bp, Homo sapiens
tgagaaaaagtattt

SEQ ID NO: 411368 - DNA, 15 bp, Homo sapiens
atgagaaaaagtatt

SEQ ID NO: 411369 - DNA, 15 bp, Homo sapiens
aatgagaaaaagtat

SEQ ID NO: 411370 - DNA, 15 bp, Homo sapiens
caatgagaaaaagta

SEQ ID NO: 411371 - DNA, 15 bp, Homo sapiens
ccaatgagaaaaagt

SEQ ID NO: 411372 - DNA, 15 bp, Homo sapiens
accaatgagaaaaag

SEQ ID NO: 411373 - DNA, 15 bp, Homo sapiens
aaccaatgagaaaaa

SEQ ID NO: 411374 - DNA, 15 bp, Homo sapiens
gaaccaatgagaaaa

SEQ ID NO: 411375 - DNA, 15 bp, Homo sapiens
agaaccaatgagaaa

SEQ ID NO: 411376 - DNA, 15 bp, Homo sapiens
aagaaccaatgagaa

SEQ ID NO: 411377 - DNA, 15 bp, Homo sapiens
aaagaaccaatgaga

SEQ ID NO: 411378 - DNA, 15 bp, Homo sapiens
aaaagaaccaatgag

SEQ ID NO: 411379 - DNA, 15 bp, Homo sapiens
taaaagaaccaatga

SEQ ID NO: 411380 - DNA, 15 bp, Homo sapiens
ctaaaagaaccaatg

SEQ ID NO: 411381 - DNA, 15 bp, Homo sapiens
tctaaaagaaccaat

SEQ ID NO: 411382 - DNA, 15 bp, Homo sapiens
ttctaaaagaaccaa

SEQ ID NO: 411383 - DNA, 15 bp, Homo sapiens
tttctaaaagaacca

SEQ ID NO: 411384 - DNA, 15 bp, Homo sapiens
ttttctaaaagaacc

SEQ ID NO: 411385 - DNA, 15 bp, Homo sapiens
tttttctaaaagaac

SEQ ID NO: 411386 - DNA, 15 bp, Homo sapiens
gtttttctaaaagaa

SEQ ID NO: 411387 - DNA, 15 bp, Homo sapiens
agtttttctaaaaga

SEQ ID NO: 411388 - DNA, 15 bp, Homo sapiens
aagtttttctaaaag

SEQ ID NO: 411389 - DNA, 15 bp, Homo sapiens
aaagtttttctaaaa

SEQ ID NO: 411390 - DNA, 15 bp, Homo sapiens
aaaagtttttctaaa

SEQ ID NO: 411391 - DNA, 15 bp, Homo sapiens
aaaaagtttttctaa

SEQ ID NO: 411392 - DNA, 15 bp, Homo sapiens
taaaaagtttttcta

SEQ ID NO: 411393 - DNA, 15 bp, Homo sapiens
ttaaaaagtttttct

SEQ ID NO: 411394 - DNA, 15 bp, Homo sapiens
cttaaaaagtttttc

SEQ ID NO: 411395 - DNA, 15 bp, Homo sapiens
tcttaaaaagttttt

SEQ ID NO: 411396 - DNA, 15 bp, Homo sapiens
gtcttaaaaagtttt

SEQ ID NO: 411397 - DNA, 15 bp, Homo sapiens
tgtcttaaaaagttt

SEQ ID NO: 411398 - DNA, 15 bp, Homo sapiens
ctgtcttaaaaagtt

SEQ ID NO: 411399 - DNA, 15 bp, Homo sapiens
cctgtcttaaaaagt

SEQ ID NO: 411400 - DNA, 15 bp, Homo sapiens
tcctgtcttaaaaag

SEQ ID NO: 411401 - DNA, 15 bp, Homo sapiens
ctcctgtcttaaaaa

SEQ ID NO: 411402 - DNA, 15 bp, Homo sapiens
cctcctgtcttaaaa

SEQ ID NO: 411403 - DNA, 15 bp, Homo sapiens
tcctcctgtcttaaa

SEQ ID NO: 411404 - DNA, 15 bp, Homo sapiens
atcctcctgtcttaa

SEQ ID NO: 411405 - DNA, 15 bp, Homo sapiens
aatcctcctgtctta

SEQ ID NO: 411406 - DNA, 15 bp, Homo sapiens
aaatcctcctgtctt

SEQ ID NO: 411407 - DNA, 15 bp, Homo sapiens
aaaatcctcctgtct

SEQ ID NO: 411408 - DNA, 15 bp, Homo sapiens
gaaaatcctcctgtc

SEQ ID NO: 411409 - DNA, 15 bp, Homo sapiens
agaaaatcctcctgt

SEQ ID NO: 411410 - DNA, 15 bp, Homo sapiens
aagaaaatcctcctg

SEQ ID NO: 411411 - DNA, 15 bp, Homo sapiens
gaagaaaatcctcct

SEQ ID NO: 411412 - DNA, 15 bp, Homo sapiens
agaagaaaatcctcc

SEQ ID NO: 411413 - DNA, 15 bp, Homo sapiens
aagaagaaaatcctc

SEQ ID NO: 411414 - DNA, 15 bp, Homo sapiens
caagaagaaaatcct

SEQ ID NO: 411415 - DNA, 15 bp, Homo sapiens
tcaagaagaaaatcc

SEQ ID NO: 411416 - DNA, 15 bp, Homo sapiens
atcaagaagaaaatc

SEQ ID NO: 411417 - DNA, 15 bp, Homo sapiens
catcaagaagaaaat

SEQ ID NO: 411418 - DNA, 15 bp, Homo sapiens
acatcaagaagaaaa

SEQ ID NO: 411419 - DNA, 15 bp, Homo sapiens
aacatcaagaagaaa

SEQ ID NO: 411420 - DNA, 15 bp, Homo sapiens
caacatcaagaagaa

SEQ ID NO: 411421 - DNA, 15 bp, Homo sapiens
acaacatcaagaaga

SEQ ID NO: 411422 - DNA, 15 bp, Homo sapiens
aacaacatcaagaag

SEQ ID NO: 411423 - DNA, 15 bp, Homo sapiens
caacaacatcaagaa

SEQ ID NO: 411424 - DNA, 15 bp, Homo sapiens
gcaacaacatcaaga

SEQ ID NO: 411425 - DNA, 15 bp, Homo sapiens
agcaacaacatcaag

SEQ ID NO: 411426 - DNA, 15 bp, Homo sapiens
cagcaacaacatcaa

SEQ ID NO: 411427 - DNA, 15 bp, Homo sapiens
gcagcaacaacatca

SEQ ID NO: 411428 - DNA, 15 bp, Homo sapiens
agcagcaacaacatc

SEQ ID NO: 411429 - DNA, 15 bp, Homo sapiens
tagcagcaacaacat

SEQ ID NO: 411430 - DNA, 15 bp, Homo sapiens
atagcagcaacaaca

SEQ ID NO: 411431 - DNA, 15 bp, Homo sapiens
aatagcagcaacaac

SEQ ID NO: 411432 - DNA, 15 bp, Homo sapiens
taatagcagcaacaa

SEQ ID NO: 411433 - DNA, 15 bp, Homo sapiens
ataatagcagcaaca

SEQ ID NO: 411434 - DNA, 15 bp, Homo sapiens
aataatagcagcaac

SEQ ID NO: 411435 - DNA, 15 bp, Homo sapiens
gaataatagcagcaa

SEQ ID NO: 411436 - DNA, 15 bp, Homo sapiens
agaataatagcagca

SEQ ID NO: 411437 - DNA, 15 bp, Homo sapiens
cagaataatagcagc

SEQ ID NO: 411438 - DNA, 15 bp, Homo sapiens
acagaataatagcag

SEQ ID NO: 411439 - DNA, 15 bp, Homo sapiens
gacagaataatagca

SEQ ID NO: 411440 - DNA, 15 bp, Homo sapiens
tgacagaataatagc

SEQ ID NO: 411441 - DNA, 15 bp, Homo sapiens
ttgacagaataatag

SEQ ID NO: 411442 - DNA, 15 bp, Homo sapiens
gttgacagaataata

SEQ ID NO: 411443 - DNA, 15 bp, Homo sapiens
agttgacagaataat

SEQ ID NO: 411444 - DNA, 15 bp, Homo sapiens
aagttgacagaataa

SEQ ID NO: 411445 - DNA, 15 bp, Homo sapiens
taagttgacagaata

SEQ ID NO: 411446 - DNA, 15 bp, Homo sapiens
ataagttgacagaat

SEQ ID NO: 411447 - DNA, 15 bp, Homo sapiens
aataagttgacagaa

SEQ ID NO: 411448 - DNA, 15 bp, Homo sapiens
gaataagttgacaga

SEQ ID NO: 411449 - DNA, 15 bp, Homo sapiens
agaataagttgacag

SEQ ID NO: 411450 - DNA, 15 bp, Homo sapiens
aagaataagttgaca

SEQ ID NO: 411451 - DNA, 15 bp, Homo sapiens
taagaataagttgac

SEQ ID NO: 411452 - DNA, 15 bp, Homo sapiens
ttaagaataagttga

SEQ ID NO: 411453 - DNA, 15 bp, Homo sapiens
tttaagaataagttg

SEQ ID NO: 411454 - DNA, 15 bp, Homo sapiens
atttaagaataagtt

SEQ ID NO: 411455 - DNA, 15 bp, Homo sapiens
tatttaagaataagt

SEQ ID NO: 411456 - DNA, 15 bp, Homo sapiens
ttatttaagaataag

SEQ ID NO: 411457 - DNA, 15 bp, Homo sapiens
gttatttaagaataa

SEQ ID NO: 411458 - DNA, 15 bp, Homo sapiens
agttatttaagaata

SEQ ID NO: 411459 - DNA, 15 bp, Homo sapiens
aagttatttaagaat

SEQ ID NO: 411460 - DNA, 15 bp, Homo sapiens
caagttatttaagaa

SEQ ID NO: 411461 - DNA, 15 bp, Homo sapiens
acaagttatttaaga

SEQ ID NO: 411462 - DNA, 15 bp, Homo sapiens
aacaagttatttaag

SEQ ID NO: 411463 - DNA, 15 bp, Homo sapiens
aaacaagttatttaa

SEQ ID NO: 411464 - DNA, 15 bp, Homo sapiens
aaaacaagttattta

SEQ ID NO: 411465 - DNA, 15 bp, Homo sapiens
taaaacaagttattt

SEQ ID NO: 411466 - DNA, 15 bp, Homo sapiens
ttaaaacaagttatt

SEQ ID NO: 411467 - DNA, 15 bp, Homo sapiens
gttaaaacaagttat

SEQ ID NO: 411468 - DNA, 15 bp, Homo sapiens
agttaaaacaagtta

SEQ ID NO: 411469 - DNA, 15 bp, Homo sapiens
cagttaaaacaagtt

SEQ ID NO: 411470 - DNA, 15 bp, Homo sapiens
tcagttaaaacaagt

SEQ ID NO: 411471 - DNA, 15 bp, Homo sapiens
ttcagttaaaacaag

SEQ ID NO: 411472 - DNA, 15 bp, Homo sapiens
tttcagttaaaacaa

SEQ ID NO: 411473 - DNA, 15 bp, Homo sapiens
atttcagttaaaaca

SEQ ID NO: 411474 - DNA, 15 bp, Homo sapiens
tatttcagttaaaac

SEQ ID NO: 411475 - DNA, 15 bp, Homo sapiens
ttatttcagttaaaa

SEQ ID NO: 411476 - DNA, 15 bp, Homo sapiens
tttatttcagttaaa

SEQ ID NO: 411477 - DNA, 15 bp, Homo sapiens
ttttatttcagttaa

SEQ ID NO: 411478 - DNA, 15 bp, Homo sapiens
gttttatttcagtta

SEQ ID NO: 411479 - DNA, 15 bp, Homo sapiens
agttttatttcagtt

SEQ ID NO: 411480 - DNA, 15 bp, Homo sapiens
cagttttatttcagt

SEQ ID NO: 411481 - DNA, 15 bp, Homo sapiens
tcagttttatttcag

SEQ ID NO: 411482 - DNA, 15 bp, Homo sapiens
ttcagttttatttca

SEQ ID NO: 411483 - DNA, 15 bp, Homo sapiens
tttcagttttatttc

SEQ ID NO: 411484 - DNA, 15 bp, Homo sapiens
atttcagttttattt

SEQ ID NO: 411485 - DNA, 15 bp, Homo sapiens
tatttcagttttatt

SEQ ID NO: 411486 - DNA, 15 bp, Homo sapiens
atatttcagttttat

SEQ ID NO: 411487 - DNA, 15 bp, Homo sapiens
aatatttcagtttta

SEQ ID NO: 411488 - DNA, 15 bp, Homo sapiens
aaatatttcagtttt

SEQ ID NO: 411489 - DNA, 15 bp, Homo sapiens
aaaatatttcagttt

SEQ ID NO: 411490 - DNA, 15 bp, Homo sapiens
aaaaatatttcagtt

SEQ ID NO: 411491 - DNA, 15 bp, Homo sapiens
aaaaaatatttcagt

SEQ ID NO: 411492 - DNA, 15 bp, Homo sapiens
caaaaaatatttcag

SEQ ID NO: 411493 - DNA, 15 bp, Homo sapiens
tcaaaaaatatttca

SEQ ID NO: 411494 - DNA, 15 bp, Homo sapiens
ttcaaaaaatatttc

SEQ ID NO: 411495 - DNA, 15 bp, Homo sapiens
tttcaaaaaatattt

SEQ ID NO: 411496 - DNA, 15 bp, Homo sapiens
ttttcaaaaaatatt

SEQ ID NO: 411497 - DNA, 15 bp, Homo sapiens
attttcaaaaaatat

SEQ ID NO: 411498 - DNA, 15 bp, Homo sapiens
aattttcaaaaaata

SEQ ID NO: 411499 - DNA, 15 bp, Homo sapiens
gaattttcaaaaaat

SEQ ID NO: 411500 - DNA, 15 bp, Homo sapiens
ggaattttcaaaaaa

SEQ ID NO: 411501 - DNA, 15 bp, Homo sapiens
gggaattttcaaaaa

SEQ ID NO: 411502 - DNA, 15 bp, Homo sapiens
ggggaattttcaaaa

SEQ ID NO: 411503 - DNA, 15 bp, Homo sapiens
aggggaattttcaaa

SEQ ID NO: 411504 - DNA, 15 bp, Homo sapiens
taggggaattttcaa

SEQ ID NO: 411505 - DNA, 15 bp, Homo sapiens
ttaggggaattttca

SEQ ID NO: 411506 - DNA, 15 bp, Homo sapiens
tttaggggaattttc

SEQ ID NO: 411507 - DNA, 15 bp, Homo sapiens
atttaggggaatttt

SEQ ID NO: 411508 - DNA, 15 bp, Homo sapiens
aatttaggggaattt

SEQ ID NO: 411509 - DNA, 15 bp, Homo sapiens
gaatttaggggaatt

SEQ ID NO: 411510 - DNA, 15 bp, Homo sapiens
ggaatttaggggaat

SEQ ID NO: 411511 - DNA, 15 bp, Homo sapiens
aggaatttaggggaa

SEQ ID NO: 411512 - DNA, 15 bp, Homo sapiens
caggaatttagggga

SEQ ID NO: 411513 - DNA, 15 bp, Homo sapiens
gcaggaatttagggg

SEQ ID NO: 411514 - DNA, 15 bp, Homo sapiens
agcaggaatttaggg

SEQ ID NO: 411515 - DNA, 15 bp, Homo sapiens
aagcaggaatttagg

SEQ ID NO: 411516 - DNA, 15 bp, Homo sapiens
aaagcaggaatttag

SEQ ID NO: 411517 - DNA, 15 bp, Homo sapiens
taaagcaggaattta

SEQ ID NO: 411518 - DNA, 15 bp, Homo sapiens
ctaaagcaggaattt

SEQ ID NO: 411519 - DNA, 15 bp, Homo sapiens
tctaaagcaggaatt

SEQ ID NO: 411520 - DNA, 15 bp, Homo sapiens
ttctaaagcaggaat

SEQ ID NO: 411521 - DNA, 15 bp, Homo sapiens
tttctaaagcaggaa

SEQ ID NO: 411522 - DNA, 15 bp, Homo sapiens
ttttctaaagcagga

SEQ ID NO: 411523 - DNA, 15 bp, Homo sapiens
attttctaaagcagg

SEQ ID NO: 411524 - DNA, 15 bp, Homo sapiens
tattttctaaagcag

SEQ ID NO: 411525 - DNA, 15 bp, Homo sapiens
ctattttctaaagca

SEQ ID NO: 411526 - DNA, 15 bp, Homo sapiens
gctattttctaaagc

SEQ ID NO: 411527 - DNA, 15 bp, Homo sapiens
ggctattttctaaag

SEQ ID NO: 411528 - DNA, 15 bp, Homo sapiens
aggctattttctaaa

SEQ ID NO: 411529 - DNA, 15 bp, Homo sapiens
caggctattttctaa

SEQ ID NO: 411530 - DNA, 15 bp, Homo sapiens
acaggctattttcta

SEQ ID NO: 411531 - DNA, 15 bp, Homo sapiens
tacaggctattttct

SEQ ID NO: 411532 - DNA, 15 bp, Homo sapiens
atacaggctattttc

SEQ ID NO: 411533 - DNA, 15 bp, Homo sapiens
aatacaggctatttt

SEQ ID NO: 411534 - DNA, 15 bp, Homo sapiens
caatacaggctattt

SEQ ID NO: 411535 - DNA, 15 bp, Homo sapiens
acaatacaggctatt

SEQ ID NO: 411536 - DNA, 15 bp, Homo sapiens
aacaatacaggctat

SEQ ID NO: 411537 - DNA, 15 bp, Homo sapiens
aaacaatacaggcta

SEQ ID NO: 411538 - DNA, 15 bp, Homo sapiens
caaacaatacaggct

SEQ ID NO: 411539 - DNA, 15 bp, Homo sapiens
acaaacaatacaggc

SEQ ID NO: 411540 - DNA, 15 bp, Homo sapiens
aacaaacaatacagg

SEQ ID NO: 411541 - DNA, 15 bp, Homo sapiens
aaacaaacaatacag

SEQ ID NO: 411542 - DNA, 15 bp, Homo sapiens
aaaacaaacaataca

SEQ ID NO: 411543 - DNA, 15 bp, Homo sapiens
aaaaacaaacaatac

SEQ ID NO: 411544 - DNA, 15 bp, Homo sapiens
taaaaacaaacaata

SEQ ID NO: 411545 - DNA, 15 bp, Homo sapiens
ttaaaaacaaacaat

SEQ ID NO: 411546 - DNA, 15 bp, Homo sapiens
tttaaaaacaaacaa

SEQ ID NO: 411547 - DNA, 15 bp, Homo sapiens
ctttaaaaacaaaca

SEQ ID NO: 411548 - DNA, 15 bp, Homo sapiens
gctttaaaaacaaac

SEQ ID NO: 411549 - DNA, 15 bp, Homo sapiens
agctttaaaaacaaa

SEQ ID NO: 411550 - DNA, 15 bp, Homo sapiens
tagctttaaaaacaa

SEQ ID NO: 411551 - DNA, 15 bp, Homo sapiens
atagctttaaaaaca

SEQ ID NO: 411552 - DNA, 15 bp, Homo sapiens
tatagctttaaaaac

SEQ ID NO: 411553 - DNA, 15 bp, Homo sapiens
atatagctttaaaaa

SEQ ID NO: 411554 - DNA, 15 bp, Homo sapiens
tatatagctttaaaa

SEQ ID NO: 411555 - DNA, 15 bp, Homo sapiens
atatatagctttaaa

SEQ ID NO: 411556 - DNA, 15 bp, Homo sapiens
catatatagctttaa

SEQ ID NO: 411557 - DNA, 15 bp, Homo sapiens
gcatatatagcttta

SEQ ID NO: 411558 - DNA, 15 bp, Homo sapiens
agcatatatagcttt

SEQ ID NO: 411559 - DNA, 15 bp, Homo sapiens
aagcatatatagctt

SEQ ID NO: 411560 - DNA, 15 bp, Homo sapiens
aaagcatatatagct

SEQ ID NO: 411561 - DNA, 15 bp, Homo sapiens
aaaagcatatatagc

SEQ ID NO: 411562 - DNA, 15 bp, Homo sapiens
taaaagcatatatag

SEQ ID NO: 411563 - DNA, 15 bp, Homo sapiens
ataaaagcatatata

SEQ ID NO: 411564 - DNA, 15 bp, Homo sapiens
aataaaagcatatat

SEQ ID NO: 411565 - DNA, 15 bp, Homo sapiens
aaataaaagcatata

SEQ ID NO: 411566 - DNA, 15 bp, Homo sapiens
caaataaaagcatat

SEQ ID NO: 411567 - DNA, 15 bp, Homo sapiens
acaaataaaagcata

SEQ ID NO: 411568 - DNA, 15 bp, Homo sapiens
aacaaataaaagcat

SEQ ID NO: 411569 - DNA, 15 bp, Homo sapiens
taacaaataaaagca

SEQ ID NO: 411570 - DNA, 15 bp, Homo sapiens
gtaacaaataaaagc

SEQ ID NO: 411571 - DNA, 15 bp, Homo sapiens
ggtaacaaataaaag

SEQ ID NO: 411572 - DNA, 15 bp, Homo sapiens
tggtaacaaataaaa

SEQ ID NO: 411573 - DNA, 15 bp, Homo sapiens
ttggtaacaaataaa

SEQ ID NO: 411574 - DNA, 15 bp, Homo sapiens
tttggtaacaaataa

SEQ ID NO: 411575 - DNA, 15 bp, Homo sapiens
ttttggtaacaaata

SEQ ID NO: 411576 - DNA, 15 bp, Homo sapiens
attttggtaacaaat

SEQ ID NO: 411577 - DNA, 15 bp, Homo sapiens
tattttggtaacaaa

SEQ ID NO: 411578 - DNA, 15 bp, Homo sapiens
ttattttggtaacaa

SEQ ID NO: 411579 - DNA, 15 bp, Homo sapiens
tttattttggtaaca

SEQ ID NO: 411580 - DNA, 15 bp, Homo sapiens
ttttattttggtaac

SEQ ID NO: 411581 - DNA, 15 bp, Homo sapiens
gttttattttggtaa

SEQ ID NO: 411582 - DNA, 15 bp, Homo sapiens
tgttttattttggta

SEQ ID NO: 411583 - DNA, 15 bp, Homo sapiens
ttgttttattttggt

SEQ ID NO: 411584 - DNA, 15 bp, Homo sapiens
cttgttttattttgg

SEQ ID NO: 411585 - DNA, 15 bp, Homo sapiens
acttgttttattttg

SEQ ID NO: 411586 - DNA, 15 bp, Homo sapiens
cacttgttttatttt

SEQ ID NO: 411587 - DNA, 15 bp, Homo sapiens
acacttgttttattt

SEQ ID NO: 411588 - DNA, 15 bp, Homo sapiens
cacacttgttttatt

SEQ ID NO: 411589 - DNA, 15 bp, Homo sapiens
acacacttgttttat

SEQ ID NO: 411590 - DNA, 15 bp, Homo sapiens
aacacacttgtttta

SEQ ID NO: 411591 - DNA, 15 bp, Homo sapiens
aaacacacttgtttt

SEQ ID NO: 411592 - DNA, 15 bp, Homo sapiens
taaacacacttgttt

SEQ ID NO: 411593 - DNA, 15 bp, Homo sapiens
ttaaacacacttgtt

SEQ ID NO: 411594 - DNA, 15 bp, Homo sapiens
tttaaacacacttgt

SEQ ID NO: 411595 - DNA, 15 bp, Homo sapiens
ttttaaacacacttg

SEQ ID NO: 411596 - DNA, 15 bp, Homo sapiens
tttttaaacacactt

SEQ ID NO: 411597 - DNA, 15 bp, Homo sapiens
atttttaaacacact

SEQ ID NO: 411598 - DNA, 15 bp, Homo sapiens
tatttttaaacacac

SEQ ID NO: 411599 - DNA, 15 bp, Homo sapiens
atatttttaaacaca

SEQ ID NO: 411600 - DNA, 15 bp, Homo sapiens
aatatttttaaacac

SEQ ID NO: 411601 - DNA, 15 bp, Homo sapiens
aaatatttttaaaca

SEQ ID NO: 411602 - DNA, 15 bp, Homo sapiens
taaatatttttaaac

SEQ ID NO: 411603 - DNA, 15 bp, Homo sapiens
ttaaatatttttaaa

SEQ ID NO: 411604 - DNA, 15 bp, Homo sapiens
cttaaatatttttaa

SEQ ID NO: 411605 - DNA, 15 bp, Homo sapiens
tcttaaatattttta

SEQ ID NO: 411606 - DNA, 15 bp, Homo sapiens
gtcttaaatattttt

SEQ ID NO: 411607 - DNA, 15 bp, Homo sapiens
agtcttaaatatttt

SEQ ID NO: 411608 - DNA, 15 bp, Homo sapiens
tagtcttaaatattt

SEQ ID NO: 411609 - DNA, 15 bp, Homo sapiens
ctagtcttaaatatt

SEQ ID NO: 411610 - DNA, 15 bp, Homo sapiens
tctagtcttaaatat

SEQ ID NO: 411611 - DNA, 15 bp, Homo sapiens
ctctagtcttaaata

SEQ ID NO: 411612 - DNA, 15 bp, Homo sapiens
tctctagtcttaaat

SEQ ID NO: 411613 - DNA, 15 bp, Homo sapiens
ttctctagtcttaaa

SEQ ID NO: 411614 - DNA, 15 bp, Homo sapiens
tttctctagtcttaa

SEQ ID NO: 411615 - DNA, 15 bp, Homo sapiens
ttttctctagtctta

SEQ ID NO: 411616 - DNA, 15 bp, Homo sapiens
attttctctagtctt

SEQ ID NO: 411617 - DNA, 15 bp, Homo sapiens
cattttctctagtct

SEQ ID NO: 411618 - DNA, 15 bp, Homo sapiens
ccattttctctagtc

SEQ ID NO: 411619 - DNA, 15 bp, Homo sapiens
tccattttctctagt

SEQ ID NO: 411620 - DNA, 15 bp, Homo sapiens
ttccattttctctag

SEQ ID NO: 411621 - DNA, 15 bp, Homo sapiens
tttccattttctcta

SEQ ID NO: 411622 - DNA, 15 bp, Homo sapiens
ttttccattttctct

SEQ ID NO: 411623 - DNA, 15 bp, Homo sapiens
tttttccattttctc

SEQ ID NO: 411624 - DNA, 15 bp, Homo sapiens
ctttttccattttct

SEQ ID NO: 411625 - DNA, 15 bp, Homo sapiens
actttttccattttc

SEQ ID NO: 411626 - DNA, 15 bp, Homo sapiens
cactttttccatttt

SEQ ID NO: 411627 - DNA, 15 bp, Homo sapiens
acactttttccattt

SEQ ID NO: 411628 - DNA, 15 bp, Homo sapiens
cacactttttccatt

SEQ ID NO: 411629 - DNA, 15 bp, Homo sapiens
acacactttttccat

SEQ ID NO: 411630 - DNA, 15 bp, Homo sapiens
tacacactttttcca

SEQ ID NO: 411631 - DNA, 15 bp, Homo sapiens
ttacacactttttcc

SEQ ID NO: 411632 - DNA, 15 bp, Homo sapiens
tttacacactttttc

SEQ ID NO: 411633 - DNA, 15 bp, Homo sapiens
ttttacacacttttt

SEQ ID NO: 411634 - DNA, 15 bp, Homo sapiens
attttacacactttt

SEQ ID NO: 411635 - DNA, 15 bp, Homo sapiens
tattttacacacttt

SEQ ID NO: 411636 - DNA, 15 bp, Homo sapiens
ttattttacacactt

SEQ ID NO: 411637 - DNA, 15 bp, Homo sapiens
tttattttacacact

SEQ ID NO: 411638 - DNA, 15 bp, Homo sapiens
ttttattttacacac

SEQ ID NO: 411639 - DNA, 15 bp, Homo sapiens
cttttattttacaca

SEQ ID NO: 411640 - DNA, 15 bp, Homo sapiens
acttttattttacac

SEQ ID NO: 411641 - DNA, 15 bp, Homo sapiens
aacttttattttaca

SEQ ID NO: 411642 - DNA, 15 bp, Homo sapiens
gaacttttattttac

SEQ ID NO: 411643 - DNA, 15 bp, Homo sapiens
ggaacttttatttta

SEQ ID NO: 411644 - DNA, 15 bp, Homo sapiens
tggaacttttatttt

SEQ ID NO: 411645 - DNA, 15 bp, Homo sapiens
atggaacttttattt

SEQ ID NO: 411646 - DNA, 15 bp, Homo sapiens
catggaacttttatt

SEQ ID NO: 411647 - DNA, 15 bp, Homo sapiens
acatggaacttttat

SEQ ID NO: 411648 - DNA, 15 bp, Homo sapiens
tacatggaactttta

SEQ ID NO: 411649 - DNA, 15 bp, Homo sapiens
ttacatggaactttt

SEQ ID NO: 411650 - DNA, 15 bp, Homo sapiens
attacatggaacttt

SEQ ID NO: 411651 - DNA, 15 bp, Homo sapiens
aattacatggaactt

SEQ ID NO: 411652 - DNA, 15 bp, Homo sapiens
gaattacatggaact

SEQ ID NO: 411653 - DNA, 15 bp, Homo sapiens
agaattacatggaac

SEQ ID NO: 411654 - DNA, 15 bp, Homo sapiens
tagaattacatggaa

SEQ ID NO: 411655 - DNA, 15 bp, Homo sapiens
atagaattacatgga

SEQ ID NO: 411656 - DNA, 15 bp, Homo sapiens
gatagaattacatgg

SEQ ID NO: 411657 - DNA, 15 bp, Homo sapiens
ggatagaattacatg

SEQ ID NO: 411658 - DNA, 15 bp, Homo sapiens
aggatagaattacat

SEQ ID NO: 411659 - DNA, 15 bp, Homo sapiens
gaggatagaattaca

SEQ ID NO: 411660 - DNA, 15 bp, Homo sapiens
ggaggatagaattac

SEQ ID NO: 411661 - DNA, 15 bp, Homo sapiens
tggaggatagaatta

SEQ ID NO: 411662 - DNA, 15 bp, Homo sapiens
ttggaggatagaatt

SEQ ID NO: 411663 - DNA, 15 bp, Homo sapiens
tttggaggatagaat

SEQ ID NO: 411664 - DNA, 15 bp, Homo sapiens
ctttggaggatagaa

SEQ ID NO: 411665 - DNA, 15 bp, Homo sapiens
tctttggaggataga

SEQ ID NO: 411666 - DNA, 15 bp, Homo sapiens
gtctttggaggatag

SEQ ID NO: 411667 - DNA, 15 bp, Homo sapiens
tgtctttggaggata

SEQ ID NO: 411668 - DNA, 15 bp, Homo sapiens
ttgtctttggaggat

SEQ ID NO: 411669 - DNA, 15 bp, Homo sapiens
gttgtctttggagga

SEQ ID NO: 411670 - DNA, 15 bp, Homo sapiens
agttgtctttggagg

SEQ ID NO: 411671 - DNA, 15 bp, Homo sapiens
tagttgtctttggag

SEQ ID NO: 411672 - DNA, 15 bp, Homo sapiens
gtagttgtctttgga

SEQ ID NO: 411673 - DNA, 15 bp, Homo sapiens
agtagttgtctttgg

SEQ ID NO: 411674 - DNA, 15 bp, Homo sapiens
aagtagttgtctttg

SEQ ID NO: 411675 - DNA, 15 bp, Homo sapiens
taagtagttgtcttt

SEQ ID NO: 411676 - DNA, 15 bp, Homo sapiens
ttaagtagttgtctt

SEQ ID NO: 411677 - DNA, 15 bp, Homo sapiens
attaagtagttgtct

SEQ ID NO: 411678 - DNA, 15 bp, Homo sapiens
cattaagtagttgtc

SEQ ID NO: 411679 - DNA, 15 bp, Homo sapiens
ccattaagtagttgt

SEQ ID NO: 411680 - DNA, 15 bp, Homo sapiens
tccattaagtagttg

SEQ ID NO: 411681 - DNA, 15 bp, Homo sapiens
atccattaagtagtt

SEQ ID NO: 411682 - DNA, 15 bp, Homo sapiens
aatccattaagtagt

SEQ ID NO: 411683 - DNA, 15 bp, Homo sapiens
gaatccattaagtag

SEQ ID NO: 411684 - DNA, 15 bp, Homo sapiens
agaatccattaagta

SEQ ID NO: 411685 - DNA, 15 bp, Homo sapiens
tagaatccattaagt

SEQ ID NO: 411686 - DNA, 15 bp, Homo sapiens
ctagaatccattaag

SEQ ID NO: 411687 - DNA, 15 bp, Homo sapiens
actagaatccattaa

SEQ ID NO: 411688 - DNA, 15 bp, Homo sapiens
aactagaatccatta

SEQ ID NO: 411689 - DNA, 15 bp, Homo sapiens
aaactagaatccatt

SEQ ID NO: 411690 - DNA, 15 bp, Homo sapiens
aaaactagaatccat

SEQ ID NO: 411691 - DNA, 15 bp, Homo sapiens
taaaactagaatcca

SEQ ID NO: 411692 - DNA, 15 bp, Homo sapiens
ataaaactagaatcc

SEQ ID NO: 411693 - DNA, 15 bp, Homo sapiens
cataaaactagaatc

SEQ ID NO: 411694 - DNA, 15 bp, Homo sapiens
acataaaactagaat

SEQ ID NO: 411695 - DNA, 15 bp, Homo sapiens
gacataaaactagaa

SEQ ID NO: 411696 - DNA, 15 bp, Homo sapiens
tgacataaaactaga

SEQ ID NO: 411697 - DNA, 15 bp, Homo sapiens
atgacataaaactag

SEQ ID NO: 411698 - DNA, 15 bp, Homo sapiens
catgacataaaacta

SEQ ID NO: 411699 - DNA, 15 bp, Homo sapiens
gcatgacataaaact

SEQ ID NO: 411700 - DNA, 15 bp, Homo sapiens
agcatgacataaaac

SEQ ID NO: 411701 - DNA, 15 bp, Homo sapiens
aagcatgacataaaa

SEQ ID NO: 411702 - DNA, 15 bp, Homo sapiens
taagcatgacataaa

SEQ ID NO: 411703 - DNA, 15 bp, Homo sapiens
ttaagcatgacataa

SEQ ID NO: 411704 - DNA, 15 bp, Homo sapiens
cttaagcatgacata

SEQ ID NO: 411705 - DNA, 15 bp, Homo sapiens
tcttaagcatgacat

SEQ ID NO: 411706 - DNA, 15 bp, Homo sapiens
ttcttaagcatgaca

SEQ ID NO: 411707 - DNA, 15 bp, Homo sapiens
tttcttaagcatgac

SEQ ID NO: 411708 - DNA, 15 bp, Homo sapiens
gtttcttaagcatga

SEQ ID NO: 411709 - DNA, 15 bp, Homo sapiens
ggtttcttaagcatg

SEQ ID NO: 411710 - DNA, 15 bp, Homo sapiens
aggtttcttaagcat

SEQ ID NO: 411711 - DNA, 15 bp, Homo sapiens
aaggtttcttaagca

SEQ ID NO: 411712 - DNA, 15 bp, Homo sapiens
aaaggtttcttaagc

SEQ ID NO: 411713 - DNA, 15 bp, Homo sapiens
aaaaggtttcttaag

SEQ ID NO: 411714 - DNA, 15 bp, Homo sapiens
gaaaaggtttcttaa

SEQ ID NO: 411715 - DNA, 15 bp, Homo sapiens
agaaaaggtttctta

SEQ ID NO: 411716 - DNA, 15 bp, Homo sapiens
aagaaaaggtttctt

SEQ ID NO: 411717 - DNA, 15 bp, Homo sapiens
gaagaaaaggtttct

SEQ ID NO: 411718 - DNA, 15 bp, Homo sapiens
ggaagaaaaggtttc

SEQ ID NO: 411719 - DNA, 15 bp, Homo sapiens
tggaagaaaaggttt

SEQ ID NO: 411720 - DNA, 15 bp, Homo sapiens
gtggaagaaaaggtt

SEQ ID NO: 411721 - DNA, 15 bp, Homo sapiens
agtggaagaaaaggt

SEQ ID NO: 411722 - DNA, 15 bp, Homo sapiens
cagtggaagaaaagg

SEQ ID NO: 411723 - DNA, 15 bp, Homo sapiens
tcagtggaagaaaag

SEQ ID NO: 411724 - DNA, 15 bp, Homo sapiens
atcagtggaagaaaa

SEQ ID NO: 411725 - DNA, 15 bp, Homo sapiens
aatcagtggaagaaa

SEQ ID NO: 411726 - DNA, 15 bp, Homo sapiens
taatcagtggaagaa

SEQ ID NO: 411727 - DNA, 15 bp, Homo sapiens
ttaatcagtggaaga

SEQ ID NO: 411728 - DNA, 15 bp, Homo sapiens
tttaatcagtggaag

SEQ ID NO: 411729 - DNA, 15 bp, Homo sapiens
ttttaatcagtggaa

SEQ ID NO: 411730 - DNA, 15 bp, Homo sapiens
attttaatcagtgga

SEQ ID NO: 411731 - DNA, 15 bp, Homo sapiens
tattttaatcagtgg

SEQ ID NO: 411732 - DNA, 15 bp, Homo sapiens
gtattttaatcagtg

SEQ ID NO: 411733 - DNA, 15 bp, Homo sapiens
tgtattttaatcagt

SEQ ID NO: 411734 - DNA, 15 bp, Homo sapiens
gtgtattttaatcag

SEQ ID NO: 411735 - DNA, 15 bp, Homo sapiens
ggtgtattttaatca

SEQ ID NO: 411736 - DNA, 15 bp, Homo sapiens
tggtgtattttaatc

SEQ ID NO: 411737 - DNA, 15 bp, Homo sapiens
gtggtgtattttaat

SEQ ID NO: 411738 - DNA, 15 bp, Homo sapiens
agtggtgtattttaa

SEQ ID NO: 411739 - DNA, 15 bp, Homo sapiens
tagtggtgtatttta

SEQ ID NO: 411740 - DNA, 15 bp, Homo sapiens
ctagtggtgtatttt

SEQ ID NO: 411741 - DNA, 15 bp, Homo sapiens
actagtggtgtattt

SEQ ID NO: 411742 - DNA, 15 bp, Homo sapiens
tactagtggtgtatt

SEQ ID NO: 411743 - DNA, 15 bp, Homo sapiens
gtactagtggtgtat

SEQ ID NO: 411744 - DNA, 15 bp, Homo sapiens
tgtactagtggtgta

SEQ ID NO: 411745 - DNA, 15 bp, Homo sapiens
atgtactagtggtgt

SEQ ID NO: 411746 - DNA, 15 bp, Homo sapiens
tatgtactagtggtg

SEQ ID NO: 411747 - DNA, 15 bp, Homo sapiens
ctatgtactagtggt

SEQ ID NO: 411748 - DNA, 15 bp, Homo sapiens
tctatgtactagtgg

SEQ ID NO: 411749 - DNA, 15 bp, Homo sapiens
ctctatgtactagtg

SEQ ID NO: 411750 - DNA, 15 bp, Homo sapiens
actctatgtactagt

SEQ ID NO: 411751 - DNA, 15 bp, Homo sapiens
tactctatgtactag

SEQ ID NO: 411752 - DNA, 15 bp, Homo sapiens
ctactctatgtacta

SEQ ID NO: 411753 - DNA, 15 bp, Homo sapiens
tctactctatgtact

SEQ ID NO: 411754 - DNA, 15 bp, Homo sapiens
ttctactctatgtac

SEQ ID NO: 411755 - DNA, 15 bp, Homo sapiens
tttctactctatgta

SEQ ID NO: 411756 - DNA, 15 bp, Homo sapiens
ttttctactctatgt

SEQ ID NO: 411757 - DNA, 15 bp, Homo sapiens
attttctactctatg

SEQ ID NO: 411758 - DNA, 15 bp, Homo sapiens
aattttctactctat

SEQ ID NO: 411759 - DNA, 15 bp, Homo sapiens
aaattttctactcta

SEQ ID NO: 411760 - DNA, 15 bp, Homo sapiens
gaaattttctactct

SEQ ID NO: 411761 - DNA, 15 bp, Homo sapiens
tgaaattttctactc

SEQ ID NO: 411762 - DNA, 15 bp, Homo sapiens
ttgaaattttctact

SEQ ID NO: 411763 - DNA, 15 bp, Homo sapiens
cttgaaattttctac

SEQ ID NO: 411764 - DNA, 15 bp, Homo sapiens
acttgaaattttcta

SEQ ID NO: 411765 - DNA, 15 bp, Homo sapiens
gacttgaaattttct

SEQ ID NO: 411766 - DNA, 15 bp, Homo sapiens
agacttgaaattttc

SEQ ID NO: 411767 - DNA, 15 bp, Homo sapiens
cagacttgaaatttt

SEQ ID NO: 411768 - DNA, 15 bp, Homo sapiens
acagacttgaaattt

SEQ ID NO: 411769 - DNA, 15 bp, Homo sapiens
tacagacttgaaatt

SEQ ID NO: 411770 - DNA, 15 bp, Homo sapiens
ctacagacttgaaat

SEQ ID NO: 411771 - DNA, 15 bp, Homo sapiens
actacagacttgaaa

SEQ ID NO: 411772 - DNA, 15 bp, Homo sapiens
cactacagacttgaa

SEQ ID NO: 411773 - DNA, 15 bp, Homo sapiens
tcactacagacttga

SEQ ID NO: 411774 - DNA, 15 bp, Homo sapiens
ttcactacagacttg

SEQ ID NO: 411775 - DNA, 15 bp, Homo sapiens
cttcactacagactt

SEQ ID NO: 411776 - DNA, 15 bp, Homo sapiens
tcttcactacagact

SEQ ID NO: 411777 - DNA, 15 bp, Homo sapiens
ttcttcactacagac

SEQ ID NO: 411778 - DNA, 15 bp, Homo sapiens
tttcttcactacaga

SEQ ID NO: 411779 - DNA, 15 bp, Homo sapiens
ttttcttcactacag

SEQ ID NO: 411780 - DNA, 15 bp, Homo sapiens
tttttcttcactaca

SEQ ID NO: 411781 - DNA, 15 bp, Homo sapiens
ttttttcttcactac

SEQ ID NO: 411782 - DNA, 15 bp, Homo sapiens
tttttttcttcacta

SEQ ID NO: 411783 - DNA, 15 bp, Homo sapiens
ttttttttcttcact

SEQ ID NO: 411784 - DNA, 15 bp, Homo sapiens
attttttttcttcac

SEQ ID NO: 411785 - DNA, 15 bp, Homo sapiens
gattttttttcttca

SEQ ID NO: 411786 - DNA, 15 bp, Homo sapiens
tgattttttttcttc

SEQ ID NO: 411787 - DNA, 15 bp, Homo sapiens
gtgattttttttctt

SEQ ID NO: 411788 - DNA, 15 bp, Homo sapiens
agtgattttttttct

SEQ ID NO: 411789 - DNA, 15 bp, Homo sapiens
aagtgattttttttc

SEQ ID NO: 411790 - DNA, 15 bp, Homo sapiens
taagtgatttttttt

SEQ ID NO: 411791 - DNA, 15 bp, Homo sapiens
gtaagtgattttttt

SEQ ID NO: 411792 - DNA, 15 bp, Homo sapiens
tgtaagtgatttttt

SEQ ID NO: 411793 - DNA, 15 bp, Homo sapiens
ctgtaagtgattttt

SEQ ID NO: 411794 - DNA, 15 bp, Homo sapiens
actgtaagtgatttt

SEQ ID NO: 411795 - DNA, 15 bp, Homo sapiens
aactgtaagtgattt

SEQ ID NO: 411796 - DNA, 15 bp, Homo sapiens
gaactgtaagtgatt

SEQ ID NO: 411797 - DNA, 15 bp, Homo sapiens
agaactgtaagtgat

SEQ ID NO: 411798 - DNA, 15 bp, Homo sapiens
tagaactgtaagtga

SEQ ID NO: 411799 - DNA, 15 bp, Homo sapiens
gtagaactgtaagtg

SEQ ID NO: 411800 - DNA, 15 bp, Homo sapiens
ggtagaactgtaagt

SEQ ID NO: 411801 - DNA, 15 bp, Homo sapiens
tggtagaactgtaag

SEQ ID NO: 411802 - DNA, 15 bp, Homo sapiens
atggtagaactgtaa

SEQ ID NO: 411803 - DNA, 15 bp, Homo sapiens
aatggtagaactgta

SEQ ID NO: 411804 - DNA, 15 bp, Homo sapiens
aaatggtagaactgt

SEQ ID NO: 411805 - DNA, 15 bp, Homo sapiens
caaatggtagaactg

SEQ ID NO: 411806 - DNA, 15 bp, Homo sapiens
ccaaatggtagaact

SEQ ID NO: 411807 - DNA, 15 bp, Homo sapiens
tccaaatggtagaac

SEQ ID NO: 411808 - DNA, 15 bp, Homo sapiens
ctccaaatggtagaa

SEQ ID NO: 411809 - DNA, 15 bp, Homo sapiens
actccaaatggtaga

SEQ ID NO: 411810 - DNA, 15 bp, Homo sapiens
aactccaaatggtag

SEQ ID NO: 411811 - DNA, 15 bp, Homo sapiens
caactccaaatggta

SEQ ID NO: 411812 - DNA, 15 bp, Homo sapiens
tcaactccaaatggt

SEQ ID NO: 411813 - DNA, 15 bp, Homo sapiens
ctcaactccaaatgg

SEQ ID NO: 411814 - DNA, 15 bp, Homo sapiens
gctcaactccaaatg

SEQ ID NO: 411815 - DNA, 15 bp, Homo sapiens
tgctcaactccaaat

SEQ ID NO: 411816 - DNA, 15 bp, Homo sapiens
gtgctcaactccaaa

SEQ ID NO: 411817 - DNA, 15 bp, Homo sapiens
agtgctcaactccaa

SEQ ID NO: 411818 - DNA, 15 bp, Homo sapiens
tagtgctcaactcca

SEQ ID NO: 411819 - DNA, 15 bp, Homo sapiens
atagtgctcaactcc

SEQ ID NO: 411820 - DNA, 15 bp, Homo sapiens
aatagtgctcaactc

SEQ ID NO: 411821 - DNA, 15 bp, Homo sapiens
caatagtgctcaact

SEQ ID NO: 411822 - DNA, 15 bp, Homo sapiens
ccaatagtgctcaac

SEQ ID NO: 411823 - DNA, 15 bp, Homo sapiens
tccaatagtgctcaa

SEQ ID NO: 411824 - DNA, 15 bp, Homo sapiens
ttccaatagtgctca

SEQ ID NO: 411825 - DNA, 15 bp, Homo sapiens
attccaatagtgctc

SEQ ID NO: 411826 - DNA, 15 bp, Homo sapiens
cattccaatagtgct

SEQ ID NO: 411827 - DNA, 15 bp, Homo sapiens
acattccaatagtgc

SEQ ID NO: 411828 - DNA, 15 bp, Homo sapiens
aacattccaatagtg

SEQ ID NO: 411829 - DNA, 15 bp, Homo sapiens
aaacattccaatagt

SEQ ID NO: 411830 - DNA, 15 bp, Homo sapiens
caaacattccaatag

SEQ ID NO: 411831 - DNA, 15 bp, Homo sapiens
acaaacattccaata

SEQ ID NO: 411832 - DNA, 15 bp, Homo sapiens
gacaaacattccaat

SEQ ID NO: 411833 - DNA, 15 bp, Homo sapiens
tgacaaacattccaa

SEQ ID NO: 411834 - DNA, 15 bp, Homo sapiens
atgacaaacattcca

SEQ ID NO: 411835 - DNA, 15 bp, Homo sapiens
aatgacaaacattcc

SEQ ID NO: 411836 - DNA, 15 bp, Homo sapiens
gaatgacaaacattc

SEQ ID NO: 411837 - DNA, 15 bp, Homo sapiens
ggaatgacaaacatt

SEQ ID NO: 411838 - DNA, 15 bp, Homo sapiens
aggaatgacaaacat

SEQ ID NO: 411839 - DNA, 15 bp, Homo sapiens
aaggaatgacaaaca

SEQ ID NO: 411840 - DNA, 15 bp, Homo sapiens
aaaggaatgacaaac

SEQ ID NO: 411841 - DNA, 15 bp, Homo sapiens
aaaaggaatgacaaa

SEQ ID NO: 411842 - DNA, 15 bp, Homo sapiens
aaaaaggaatgacaa

SEQ ID NO: 411843 - DNA, 15 bp, Homo sapiens
aaaaaaggaatgaca

SEQ ID NO: 411844 - DNA, 15 bp, Homo sapiens
aaaaaaaggaatgac

SEQ ID NO: 411845 - DNA, 15 bp, Homo sapiens
aaaaaaaaggaatga

SEQ ID NO: 411846 - DNA, 15 bp, Homo sapiens
aaaaaaaaaggaatg

SEQ ID NO: 411847 - DNA, 15 bp, Homo sapiens
aaaaaaaaaaggaat

SEQ ID NO: 411848 - DNA, 15 bp, Homo sapiens
gagactccgtctcaa

SEQ ID NO: 411849 - DNA, 15 bp, Homo sapiens
cgagactccgtctca

SEQ ID NO: 411850 - DNA, 15 bp, Homo sapiens
gcgagactccgtctc

SEQ ID NO: 411851 - DNA, 15 bp, Homo sapiens
agcgagactccgtct

SEQ ID NO: 411852 - DNA, 15 bp, Homo sapiens
gagcgagactccgtc

SEQ ID NO: 411853 - DNA, 15 bp, Homo sapiens
agagcgagactccgt

SEQ ID NO: 411854 - DNA, 15 bp, Homo sapiens
cagagcgagactccg

SEQ ID NO: 411855 - DNA, 15 bp, Homo sapiens
acagagcgagactcc

SEQ ID NO: 411856 - DNA, 15 bp, Homo sapiens
gacagagcgagactc

SEQ ID NO: 411857 - DNA, 15 bp, Homo sapiens
cgacagagcgagact

SEQ ID NO: 411858 - DNA, 15 bp, Homo sapiens
gcgacagagcgagac

SEQ ID NO: 411859 - DNA, 15 bp, Homo sapiens
ggcgacagagcgaga

SEQ ID NO: 411860 - DNA, 15 bp, Homo sapiens
gggcgacagagcgag

SEQ ID NO: 411861 - DNA, 15 bp, Homo sapiens
tgggcgacagagcga

SEQ ID NO: 411862 - DNA, 15 bp, Homo sapiens
ctgggcgacagagcg

SEQ ID NO: 411863 - DNA, 15 bp, Homo sapiens
cctgggcgacagagc

SEQ ID NO: 411864 - DNA, 15 bp, Homo sapiens
cagcctgggcgacag

SEQ ID NO: 411865 - DNA, 15 bp, Homo sapiens
ccgccactgcactcc

SEQ ID NO: 411866 - DNA, 15 bp, Homo sapiens
cccgccactgcactc

SEQ ID NO: 411867 - DNA, 15 bp, Homo sapiens
tcccgccactgcact

SEQ ID NO: 411868 - DNA, 15 bp, Homo sapiens
atcccgccactgcac

SEQ ID NO: 411869 - DNA, 15 bp, Homo sapiens
gatcccgccactgca

SEQ ID NO: 411870 - DNA, 15 bp, Homo sapiens
agatcccgccactgc

SEQ ID NO: 411871 - DNA, 15 bp, Homo sapiens
gagatcccgccactg

SEQ ID NO: 411872 - DNA, 15 bp, Homo sapiens
cgagatcccgccact

SEQ ID NO: 411873 - DNA, 15 bp, Homo sapiens
ccgagatcccgccac

SEQ ID NO: 411874 - DNA, 15 bp, Homo sapiens
gccgagatcccgcca

SEQ ID NO: 411875 - DNA, 15 bp, Homo sapiens
agccgagatcccgcc

SEQ ID NO: 411876 - DNA, 15 bp, Homo sapiens
gagccgagatcccgc

SEQ ID NO: 411877 - DNA, 15 bp, Homo sapiens
tgagccgagatcccg

SEQ ID NO: 411878 - DNA, 15 bp, Homo sapiens
gtgagccgagatccc

SEQ ID NO: 411879 - DNA, 15 bp, Homo sapiens
ggtgagccgagatcc

SEQ ID NO: 411880 - DNA, 15 bp, Homo sapiens
cggtgagccgagatc

SEQ ID NO: 411881 - DNA, 15 bp, Homo sapiens
gcggtgagccgagat

SEQ ID NO: 411882 - DNA, 15 bp, Homo sapiens
tgcggtgagccgaga

SEQ ID NO: 411883 - DNA, 15 bp, Homo sapiens
ttgcggtgagccgag

SEQ ID NO: 411884 - DNA, 15 bp, Homo sapiens
cttgcggtgagccga

SEQ ID NO: 411885 - DNA, 15 bp, Homo sapiens
gcttgcggtgagccg

SEQ ID NO: 411886 - DNA, 15 bp, Homo sapiens
agcttgcggtgagcc

SEQ ID NO: 411887 - DNA, 15 bp, Homo sapiens
gagcttgcggtgagc

SEQ ID NO: 411888 - DNA, 15 bp, Homo sapiens
ggagcttgcggtgag

SEQ ID NO: 411889 - DNA, 15 bp, Homo sapiens
cggagcttgcggtga

SEQ ID NO: 411890 - DNA, 15 bp, Homo sapiens
gcggagcttgcggtg

SEQ ID NO: 411891 - DNA, 15 bp, Homo sapiens
ggcggagcttgcggt

SEQ ID NO: 411892 - DNA, 15 bp, Homo sapiens
aggcggagcttgcgg

SEQ ID NO: 411893 - DNA, 15 bp, Homo sapiens
gaggcggagcttgcg

SEQ ID NO: 411894 - DNA, 15 bp, Homo sapiens
gggaggcggagcttg

SEQ ID NO: 411895 - DNA, 15 bp, Homo sapiens
cgggaggcggagctt

SEQ ID NO: 411896 - DNA, 15 bp, Homo sapiens
ccgggaggcggagct

SEQ ID NO: 411897 - DNA, 15 bp, Homo sapiens
cccgggaggcggagc

SEQ ID NO: 411898 - DNA, 15 bp, Homo sapiens
acccgggaggcggag

SEQ ID NO: 411899 - DNA, 15 bp, Homo sapiens
aacccgggaggcgga

SEQ ID NO: 411900 - DNA, 15 bp, Homo sapiens
gaacccgggaggcgg

SEQ ID NO: 411901 - DNA, 15 bp, Homo sapiens
tgaacccgggaggcg

SEQ ID NO: 411902 - DNA, 15 bp, Homo sapiens
agtggcgggcgcctg

SEQ ID NO: 411903 - DNA, 15 bp, Homo sapiens
tagtggcgggcgcct

SEQ ID NO: 411904 - DNA, 15 bp, Homo sapiens
gtagtggcgggcgcc

SEQ ID NO: 411905 - DNA, 15 bp, Homo sapiens
cgtagtggcgggcgc

SEQ ID NO: 411906 - DNA, 15 bp, Homo sapiens
gcgtagtggcgggcg

SEQ ID NO: 411907 - DNA, 15 bp, Homo sapiens
ggcgtagtggcgggc

SEQ ID NO: 411908 - DNA, 15 bp, Homo sapiens
gggcgtagtggcggg

SEQ ID NO: 411909 - DNA, 15 bp, Homo sapiens
cgggcgtagtggcgg

SEQ ID NO: 411910 - DNA, 15 bp, Homo sapiens
ccgggcgtagtggcg

SEQ ID NO: 411911 - DNA, 15 bp, Homo sapiens
gccgggcgtagtggc

SEQ ID NO: 411912 - DNA, 15 bp, Homo sapiens
agccgggcgtagtgg

SEQ ID NO: 411913 - DNA, 15 bp, Homo sapiens
tagccgggcgtagtg

SEQ ID NO: 411914 - DNA, 15 bp, Homo sapiens
ttagccgggcgtagt

SEQ ID NO: 411915 - DNA, 15 bp, Homo sapiens
attagccgggcgtag

SEQ ID NO: 411916 - DNA, 15 bp, Homo sapiens
aattagccgggcgta

SEQ ID NO: 411917 - DNA, 15 bp, Homo sapiens
aacggtgaaaccccg

SEQ ID NO: 411918 - DNA, 15 bp, Homo sapiens
aaacggtgaaacccc

SEQ ID NO: 411919 - DNA, 15 bp, Homo sapiens
aaaacggtgaaaccc

SEQ ID NO: 411920 - DNA, 15 bp, Homo sapiens
taaaacggtgaaacc

SEQ ID NO: 411921 - DNA, 15 bp, Homo sapiens
ctaaaacggtgaaac

SEQ ID NO: 411922 - DNA, 15 bp, Homo sapiens
gctaaaacggtgaaa

SEQ ID NO: 411923 - DNA, 15 bp, Homo sapiens
ggctaaaacggtgaa

SEQ ID NO: 411924 - DNA, 15 bp, Homo sapiens
tggctaaaacggtga

SEQ ID NO: 411925 - DNA, 15 bp, Homo sapiens
ctggctaaaacggtg

SEQ ID NO: 411926 - DNA, 15 bp, Homo sapiens
cctggctaaaacggt

SEQ ID NO: 411927 - DNA, 15 bp, Homo sapiens
tcctggctaaaacgg

SEQ ID NO: 411928 - DNA, 15 bp, Homo sapiens
atcctggctaaaacg

SEQ ID NO: 411929 - DNA, 15 bp, Homo sapiens
catcctggctaaaac

SEQ ID NO: 411930 - DNA, 15 bp, Homo sapiens
ccatcctggctaaaa

SEQ ID NO: 411931 - DNA, 15 bp, Homo sapiens
accatcctggctaaa

SEQ ID NO: 411932 - DNA, 15 bp, Homo sapiens
agcggatcacgaggt

SEQ ID NO: 411933 - DNA, 15 bp, Homo sapiens
aagcggatcacgagg

SEQ ID NO: 411934 - DNA, 15 bp, Homo sapiens
caagcggatcacgag

SEQ ID NO: 411935 - DNA, 15 bp, Homo sapiens
acaagcggatcacga

SEQ ID NO: 411936 - DNA, 15 bp, Homo sapiens
gacaagcggatcacg

SEQ ID NO: 411937 - DNA, 15 bp, Homo sapiens
tgacaagcggatcac

SEQ ID NO: 411938 - DNA, 15 bp, Homo sapiens
atgacaagcggatca

SEQ ID NO: 411939 - DNA, 15 bp, Homo sapiens
aatgacaagcggatc

SEQ ID NO: 411940 - DNA, 15 bp, Homo sapiens
gaatgacaagcggat

SEQ ID NO: 411941 - DNA, 15 bp, Homo sapiens
ggaatgacaagcgga

SEQ ID NO: 411942 - DNA, 15 bp, Homo sapiens
tggaatgacaagcgg

SEQ ID NO: 411943 - DNA, 15 bp, Homo sapiens
atggaatgacaagcg

SEQ ID NO: 411944 - DNA, 15 bp, Homo sapiens
aatggaatgacaagc

SEQ ID NO: 411945 - DNA, 15 bp, Homo sapiens
aaatggaatgacaag

SEQ ID NO: 411946 - DNA, 15 bp, Homo sapiens
aaaatggaatgacaa

SEQ ID NO: 411947 - DNA, 15 bp, Homo sapiens
aaaaatggaatgaca

SEQ ID NO: 411948 - DNA, 15 bp, Homo sapiens
gaaaaatggaatgac

SEQ ID NO: 411949 - DNA, 15 bp, Homo sapiens
tgaaaaatggaatga

SEQ ID NO: 411950 - DNA, 15 bp, Homo sapiens
ctgaaaaatggaatg

SEQ ID NO: 411951 - DNA, 15 bp, Homo sapiens
actgaaaaatggaat

SEQ ID NO: 411952 - DNA, 15 bp, Homo sapiens
cactgaaaaatggaa

SEQ ID NO: 411953 - DNA, 15 bp, Homo sapiens
tcactgaaaaatgga

SEQ ID NO: 411954 - DNA, 15 bp, Homo sapiens
atcactgaaaaatgg

SEQ ID NO: 411955 - DNA, 15 bp, Homo sapiens
tatcactgaaaaatg

SEQ ID NO: 411956 - DNA, 15 bp, Homo sapiens
gtatcactgaaaaat

SEQ ID NO: 411957 - DNA, 15 bp, Homo sapiens
tgtatcactgaaaaa

SEQ ID NO: 411958 - DNA, 15 bp, Homo sapiens
atgtatcactgaaaa

SEQ ID NO: 411959 - DNA, 15 bp, Homo sapiens
catgtatcactgaaa

SEQ ID NO: 411960 - DNA, 15 bp, Homo sapiens
acatgtatcactgaa

SEQ ID NO: 411961 - DNA, 15 bp, Homo sapiens
aacatgtatcactga

SEQ ID NO: 411962 - DNA, 15 bp, Homo sapiens
taacatgtatcactg

SEQ ID NO: 411963 - DNA, 15 bp, Homo sapiens
gtaacatgtatcact

SEQ ID NO: 411964 - DNA, 15 bp, Homo sapiens
tgtaacatgtatcac

SEQ ID NO: 411965 - DNA, 15 bp, Homo sapiens
ctgtaacatgtatca

SEQ ID NO: 411966 - DNA, 15 bp, Homo sapiens
tctgtaacatgtatc

SEQ ID NO: 411967 - DNA, 15 bp, Homo sapiens
ttctgtaacatgtat

SEQ ID NO: 411968 - DNA, 15 bp, Homo sapiens
tttctgtaacatgta

SEQ ID NO: 411969 - DNA, 15 bp, Homo sapiens
gtttctgtaacatgt

SEQ ID NO: 411970 - DNA, 15 bp, Homo sapiens
agtttctgtaacatg

SEQ ID NO: 411971 - DNA, 15 bp, Homo sapiens
cagtttctgtaacat

SEQ ID NO: 411972 - DNA, 15 bp, Homo sapiens
acagtttctgtaaca

SEQ ID NO: 411973 - DNA, 15 bp, Homo sapiens
gacagtttctgtaac

SEQ ID NO: 411974 - DNA, 15 bp, Homo sapiens
ggacagtttctgtaa

SEQ ID NO: 411975 - DNA, 15 bp, Homo sapiens
aggacagtttctgta

SEQ ID NO: 411976 - DNA, 15 bp, Homo sapiens
aaggacagtttctgt

SEQ ID NO: 411977 - DNA, 15 bp, Homo sapiens
taaggacagtttctg

SEQ ID NO: 411978 - DNA, 15 bp, Homo sapiens
ataaggacagtttct

SEQ ID NO: 411979 - DNA, 15 bp, Homo sapiens
cataaggacagtttc

SEQ ID NO: 411980 - DNA, 15 bp, Homo sapiens
acataaggacagttt

SEQ ID NO: 411981 - DNA, 15 bp, Homo sapiens
aacataaggacagtt

SEQ ID NO: 411982 - DNA, 15 bp, Homo sapiens
aaacataaggacagt

SEQ ID NO: 411983 - DNA, 15 bp, Homo sapiens
caaacataaggacag

SEQ ID NO: 411984 - DNA, 15 bp, Homo sapiens
acaaacataaggaca

SEQ ID NO: 411985 - DNA, 15 bp, Homo sapiens
cacaaacataaggac

SEQ ID NO: 411986 - DNA, 15 bp, Homo sapiens
acacaaacataagga

SEQ ID NO: 411987 - DNA, 15 bp, Homo sapiens
tacacaaacataagg

SEQ ID NO: 411988 - DNA, 15 bp, Homo sapiens
gtacacaaacataag

SEQ ID NO: 411989 - DNA, 15 bp, Homo sapiens
ggtacacaaacataa

SEQ ID NO: 411990 - DNA, 15 bp, Homo sapiens
aggtacacaaacata

SEQ ID NO: 411991 - DNA, 15 bp, Homo sapiens
taggtacacaaacat

SEQ ID NO: 411992 - DNA, 15 bp, Homo sapiens
ataggtacacaaaca

SEQ ID NO: 411993 - DNA, 15 bp, Homo sapiens
tataggtacacaaac

SEQ ID NO: 411994 - DNA, 15 bp, Homo sapiens
gtataggtacacaaa

SEQ ID NO: 411995 - DNA, 15 bp, Homo sapiens
tgtataggtacacaa

SEQ ID NO: 411996 - DNA, 15 bp, Homo sapiens
ctgtataggtacaca

SEQ ID NO: 411997 - DNA, 15 bp, Homo sapiens
tctgtataggtacac

SEQ ID NO: 411998 - DNA, 15 bp, Homo sapiens
atctgtataggtaca

SEQ ID NO: 411999 - DNA, 15 bp, Homo sapiens
tatctgtataggtac

SEQ ID NO: 412000 - DNA, 15 bp, Homo sapiens
ctatctgtataggta

SEQ ID NO: 412001 - DNA, 15 bp, Homo sapiens
gctatctgtataggt

SEQ ID NO: 412002 - DNA, 15 bp, Homo sapiens
agctatctgtatagg

SEQ ID NO: 412003 - DNA, 15 bp, Homo sapiens
tagctatctgtatag

SEQ ID NO: 412004 - DNA, 15 bp, Homo sapiens
ttagctatctgtata

SEQ ID NO: 412005 - DNA, 15 bp, Homo sapiens
gttagctatctgtat

SEQ ID NO: 412006 - DNA, 15 bp, Homo sapiens
cgttagctatctgta

SEQ ID NO: 412007 - DNA, 15 bp, Homo sapiens
acgttagctatctgt

SEQ ID NO: 412008 - DNA, 15 bp, Homo sapiens
tacgttagctatctg

SEQ ID NO: 412009 - DNA, 15 bp, Homo sapiens
atacgttagctatct

SEQ ID NO: 412010 - DNA, 15 bp, Homo sapiens
gatacgttagctatc

SEQ ID NO: 412011 - DNA, 15 bp, Homo sapiens
tgatacgttagctat

SEQ ID NO: 412012 - DNA, 15 bp, Homo sapiens
atgatacgttagcta

SEQ ID NO: 412013 - DNA, 15 bp, Homo sapiens
gatgatacgttagct

SEQ ID NO: 412014 - DNA, 15 bp, Homo sapiens
agatgatacgttagc

SEQ ID NO: 412015 - DNA, 15 bp, Homo sapiens
tagatgatacgttag

SEQ ID NO: 412016 - DNA, 15 bp, Homo sapiens
atagatgatacgtta

SEQ ID NO: 412017 - DNA, 15 bp, Homo sapiens
tatagatgatacgtt

SEQ ID NO: 412018 - DNA, 15 bp, Homo sapiens
gtatagatgatacgt

SEQ ID NO: 412019 - DNA, 15 bp, Homo sapiens
tgtatagatgatacg

SEQ ID NO: 412020 - DNA, 15 bp, Homo sapiens
gtgtatagatgatac

SEQ ID NO: 412021 - DNA, 15 bp, Homo sapiens
agtgtatagatgata

SEQ ID NO: 412022 - DNA, 15 bp, Homo sapiens
aagtgtatagatgat

SEQ ID NO: 412023 - DNA, 15 bp, Homo sapiens
aaagtgtatagatga

SEQ ID NO: 412024 - DNA, 15 bp, Homo sapiens
taaagtgtatagatg

SEQ ID NO: 412025 - DNA, 15 bp, Homo sapiens
ttaaagtgtatagat

SEQ ID NO: 412026 - DNA, 15 bp, Homo sapiens
tttaaagtgtataga

SEQ ID NO: 412027 - DNA, 15 bp, Homo sapiens
gtttaaagtgtatag

SEQ ID NO: 412028 - DNA, 15 bp, Homo sapiens
tgtttaaagtgtata

SEQ ID NO: 412029 - DNA, 15 bp, Homo sapiens
ttgtttaaagtgtat

SEQ ID NO: 412030 - DNA, 15 bp, Homo sapiens
tttgtttaaagtgta

SEQ ID NO: 412031 - DNA, 15 bp, Homo sapiens
ttttgtttaaagtgt

SEQ ID NO: 412032 - DNA, 15 bp, Homo sapiens
cttttgtttaaagtg

SEQ ID NO: 412033 - DNA, 15 bp, Homo sapiens
tcttttgtttaaagt

SEQ ID NO: 412034 - DNA, 15 bp, Homo sapiens
atcttttgtttaaag

SEQ ID NO: 412035 - DNA, 15 bp, Homo sapiens
catcttttgtttaaa

SEQ ID NO: 412036 - DNA, 15 bp, Homo sapiens
acatcttttgtttaa

SEQ ID NO: 412037 - DNA, 15 bp, Homo sapiens
gacatcttttgttta

SEQ ID NO: 412038 - DNA, 15 bp, Homo sapiens
tgacatcttttgttt

SEQ ID NO: 412039 - DNA, 15 bp, Homo sapiens
ttgacatcttttgtt

SEQ ID NO: 412040 - DNA, 15 bp, Homo sapiens
tttgacatcttttgt

SEQ ID NO: 412041 - DNA, 15 bp, Homo sapiens
gtttgacatcttttg

SEQ ID NO: 412042 - DNA, 15 bp, Homo sapiens
agtttgacatctttt

SEQ ID NO: 412043 - DNA, 15 bp, Homo sapiens
tagtttgacatcttt

SEQ ID NO: 412044 - DNA, 15 bp, Homo sapiens
gtagtttgacatctt

SEQ ID NO: 412045 - DNA, 15 bp, Homo sapiens
tgtagtttgacatct

SEQ ID NO: 412046 - DNA, 15 bp, Homo sapiens
gtgtagtttgacatc

SEQ ID NO: 412047 - DNA, 15 bp, Homo sapiens
tgtgtagtttgacat

SEQ ID NO: 412048 - DNA, 15 bp, Homo sapiens
gtgtgtagtttgaca

SEQ ID NO: 412049 - DNA, 15 bp, Homo sapiens
tgtgtgtagtttgac

SEQ ID NO: 412050 - DNA, 15 bp, Homo sapiens
gtgtgtgtagtttga

SEQ ID NO: 412051 - DNA, 15 bp, Homo sapiens
agtgtgtgtagtttg

SEQ ID NO: 412052 - DNA, 15 bp, Homo sapiens
aagtgtgtgtagttt

SEQ ID NO: 412053 - DNA, 15 bp, Homo sapiens
taagtgtgtgtagtt

SEQ ID NO: 412054 - DNA, 15 bp, Homo sapiens
ataagtgtgtgtagt

SEQ ID NO: 412055 - DNA, 15 bp, Homo sapiens
tataagtgtgtgtag

SEQ ID NO: 412056 - DNA, 15 bp, Homo sapiens
atataagtgtgtgta

SEQ ID NO: 412057 - DNA, 15 bp, Homo sapiens
tatataagtgtgtgt

SEQ ID NO: 412058 - DNA, 15 bp, Homo sapiens
ttatataagtgtgtg

SEQ ID NO: 412059 - DNA, 15 bp, Homo sapiens
attatataagtgtgt

SEQ ID NO: 412060 - DNA, 15 bp, Homo sapiens
aattatataagtgtg

SEQ ID NO: 412061 - DNA, 15 bp, Homo sapiens
aaattatataagtgt

SEQ ID NO: 412062 - DNA, 15 bp, Homo sapiens
caaattatataagtg

SEQ ID NO: 412063 - DNA, 15 bp, Homo sapiens
gcaaattatataagt

SEQ ID NO: 412064 - DNA, 15 bp, Homo sapiens
agcaaattatataag

SEQ ID NO: 412065 - DNA, 15 bp, Homo sapiens
aagcaaattatataa

SEQ ID NO: 412066 - DNA, 15 bp, Homo sapiens
aaagcaaattatata

SEQ ID NO: 412067 - DNA, 15 bp, Homo sapiens
gaaagcaaattatat

SEQ ID NO: 412068 - DNA, 15 bp, Homo sapiens
agaaagcaaattata

SEQ ID NO: 412069 - DNA, 15 bp, Homo sapiens
tagaaagcaaattat

SEQ ID NO: 412070 - DNA, 15 bp, Homo sapiens
ttagaaagcaaatta

SEQ ID NO: 412071 - DNA, 15 bp, Homo sapiens
tttagaaagcaaatt

SEQ ID NO: 412072 - DNA, 15 bp, Homo sapiens
gtttagaaagcaaat

SEQ ID NO: 412073 - DNA, 15 bp, Homo sapiens
agtttagaaagcaaa

SEQ ID NO: 412074 - DNA, 15 bp, Homo sapiens
tagtttagaaagcaa

SEQ ID NO: 412075 - DNA, 15 bp, Homo sapiens
ttagtttagaaagca

SEQ ID NO: 412076 - DNA, 15 bp, Homo sapiens
tttagtttagaaagc

SEQ ID NO: 412077 - DNA, 15 bp, Homo sapiens
ttttagtttagaaag

SEQ ID NO: 412078 - DNA, 15 bp, Homo sapiens
attttagtttagaaa

SEQ ID NO: 412079 - DNA, 15 bp, Homo sapiens
cattttagtttagaa

SEQ ID NO: 412080 - DNA, 15 bp, Homo sapiens
ccattttagtttaga

SEQ ID NO: 412081 - DNA, 15 bp, Homo sapiens
tccattttagtttag

SEQ ID NO: 412082 - DNA, 15 bp, Homo sapiens
ctccattttagttta

SEQ ID NO: 412083 - DNA, 15 bp, Homo sapiens
actccattttagttt

SEQ ID NO: 412084 - DNA, 15 bp, Homo sapiens
cactccattttagtt

SEQ ID NO: 412085 - DNA, 15 bp, Homo sapiens
tcactccattttagt

SEQ ID NO: 412086 - DNA, 15 bp, Homo sapiens
atcactccattttag

SEQ ID NO: 412087 - DNA, 15 bp, Homo sapiens
gatcactccatttta

SEQ ID NO: 412088 - DNA, 15 bp, Homo sapiens
tgatcactccatttt

SEQ ID NO: 412089 - DNA, 15 bp, Homo sapiens
atgatcactccattt

SEQ ID NO: 412090 - DNA, 15 bp, Homo sapiens
aatgatcactccatt

SEQ ID NO: 412091 - DNA, 15 bp, Homo sapiens
aaatgatcactccat

SEQ ID NO: 412092 - DNA, 15 bp, Homo sapiens
aaaatgatcactcca

SEQ ID NO: 412093 - DNA, 15 bp, Homo sapiens
gaaaatgatcactcc

SEQ ID NO: 412094 - DNA, 15 bp, Homo sapiens
ggaaaatgatcactc

SEQ ID NO: 412095 - DNA, 15 bp, Homo sapiens
aggaaaatgatcact

SEQ ID NO: 412096 - DNA, 15 bp, Homo sapiens
caggaaaatgatcac

SEQ ID NO: 412097 - DNA, 15 bp, Homo sapiens
acaggaaaatgatca

SEQ ID NO: 412098 - DNA, 15 bp, Homo sapiens
gacaggaaaatgatc

SEQ ID NO: 412099 - DNA, 15 bp, Homo sapiens
tgacaggaaaatgat

SEQ ID NO: 412100 - DNA, 15 bp, Homo sapiens
atgacaggaaaatga

SEQ ID NO: 412101 - DNA, 15 bp, Homo sapiens
aatgacaggaaaatg

SEQ ID NO: 412102 - DNA, 15 bp, Homo sapiens
aaatgacaggaaaat

SEQ ID NO: 412103 - DNA, 15 bp, Homo sapiens
taaatgacaggaaaa

SEQ ID NO: 412104 - DNA, 15 bp, Homo sapiens
ataaatgacaggaaa

SEQ ID NO: 412105 - DNA, 15 bp, Homo sapiens
tataaatgacaggaa

SEQ ID NO: 412106 - DNA, 15 bp, Homo sapiens
ttataaatgacagga

SEQ ID NO: 412107 - DNA, 15 bp, Homo sapiens
gttataaatgacagg

SEQ ID NO: 412108 - DNA, 15 bp, Homo sapiens
agttataaatgacag

SEQ ID NO: 412109 - DNA, 15 bp, Homo sapiens
aagttataaatgaca

SEQ ID NO: 412110 - DNA, 15 bp, Homo sapiens
caagttataaatgac

SEQ ID NO: 412111 - DNA, 15 bp, Homo sapiens
tcaagttataaatga

SEQ ID NO: 412112 - DNA, 15 bp, Homo sapiens
atcaagttataaatg

SEQ ID NO: 412113 - DNA, 15 bp, Homo sapiens
aatcaagttataaat

SEQ ID NO: 412114 - DNA, 15 bp, Homo sapiens
aaatcaagttataaa

SEQ ID NO: 412115 - DNA, 15 bp, Homo sapiens
aaaatcaagttataa

SEQ ID NO: 412116 - DNA, 15 bp, Homo sapiens
aaaaatcaagttata

SEQ ID NO: 412117 - DNA, 15 bp, Homo sapiens
taaaaatcaagttat

SEQ ID NO: 412118 - DNA, 15 bp, Homo sapiens
ttaaaaatcaagtta

SEQ ID NO: 412119 - DNA, 15 bp, Homo sapiens
attaaaaatcaagtt

SEQ ID NO: 412120 - DNA, 15 bp, Homo sapiens
cattaaaaatcaagt

SEQ ID NO: 412121 - DNA, 15 bp, Homo sapiens
ccattaaaaatcaag

SEQ ID NO: 412122 - DNA, 15 bp, Homo sapiens
gccattaaaaatcaa

SEQ ID NO: 412123 - DNA, 15 bp, Homo sapiens
agccattaaaaatca

SEQ ID NO: 412124 - DNA, 15 bp, Homo sapiens
cagccattaaaaatc

SEQ ID NO: 412125 - DNA, 15 bp, Homo sapiens
gcagccattaaaaat

SEQ ID NO: 412126 - DNA, 15 bp, Homo sapiens
tgcagccattaaaaa

SEQ ID NO: 412127 - DNA, 15 bp, Homo sapiens
atgcagccattaaaa

SEQ ID NO: 412128 - DNA, 15 bp, Homo sapiens
tatgcagccattaaa

SEQ ID NO: 412129 - DNA, 15 bp, Homo sapiens
gtatgcagccattaa

SEQ ID NO: 412130 - DNA, 15 bp, Homo sapiens
agtatgcagccatta

SEQ ID NO: 412131 - DNA, 15 bp, Homo sapiens
tagtatgcagccatt

SEQ ID NO: 412132 - DNA, 15 bp, Homo sapiens
atagtatgcagccat

SEQ ID NO: 412133 - DNA, 15 bp, Homo sapiens
aatagtatgcagcca

SEQ ID NO: 412134 - DNA, 15 bp, Homo sapiens
gaatagtatgcagcc

SEQ ID NO: 412135 - DNA, 15 bp, Homo sapiens
agaatagtatgcagc

SEQ ID NO: 412136 - DNA, 15 bp, Homo sapiens
tagaatagtatgcag

SEQ ID NO: 412137 - DNA, 15 bp, Homo sapiens
atagaatagtatgca

SEQ ID NO: 412138 - DNA, 15 bp, Homo sapiens
gatagaatagtatgc

SEQ ID NO: 412139 - DNA, 15 bp, Homo sapiens
tgatagaatagtatg

SEQ ID NO: 412140 - DNA, 15 bp, Homo sapiens
atgatagaatagtat

SEQ ID NO: 412141 - DNA, 15 bp, Homo sapiens
tatgatagaatagta

SEQ ID NO: 412142 - DNA, 15 bp, Homo sapiens
atatgatagaatagt

SEQ ID NO: 412143 - DNA, 15 bp, Homo sapiens
tatatgatagaatag

SEQ ID NO: 412144 - DNA, 15 bp, Homo sapiens
ctatatgatagaata

SEQ ID NO: 412145 - DNA, 15 bp, Homo sapiens
tctatatgatagaat

SEQ ID NO: 412146 - DNA, 15 bp, Homo sapiens
atctatatgatagaa

SEQ ID NO: 412147 - DNA, 15 bp, Homo sapiens
tatctatatgataga

SEQ ID NO: 412148 - DNA, 15 bp, Homo sapiens
atatctatatgatag

SEQ ID NO: 412149 - DNA, 15 bp, Homo sapiens
aatatctatatgata

SEQ ID NO: 412150 - DNA, 15 bp, Homo sapiens
aaatatctatatgat

SEQ ID NO: 412151 - DNA, 15 bp, Homo sapiens
taaatatctatatga

SEQ ID NO: 412152 - DNA, 15 bp, Homo sapiens
ttaaatatctatatg

SEQ ID NO: 412153 - DNA, 15 bp, Homo sapiens
attaaatatctatat

SEQ ID NO: 412154 - DNA, 15 bp, Homo sapiens
tattaaatatctata

SEQ ID NO: 412155 - DNA, 15 bp, Homo sapiens
atattaaatatctat

SEQ ID NO: 412156 - DNA, 15 bp, Homo sapiens
aatattaaatatcta

SEQ ID NO: 412157 - DNA, 15 bp, Homo sapiens
aaatattaaatatct

SEQ ID NO: 412158 - DNA, 15 bp, Homo sapiens
taaatattaaatatc

SEQ ID NO: 412159 - DNA, 15 bp, Homo sapiens
ttaaatattaaatat

SEQ ID NO: 412160 - DNA, 15 bp, Homo sapiens
gttaaatattaaata

SEQ ID NO: 412161 - DNA, 15 bp, Homo sapiens
ggttaaatattaaat

SEQ ID NO: 412162 - DNA, 15 bp, Homo sapiens
tggttaaatattaaa

SEQ ID NO: 412163 - DNA, 15 bp, Homo sapiens
atggttaaatattaa

SEQ ID NO: 412164 - DNA, 15 bp, Homo sapiens
aatggttaaatatta

SEQ ID NO: 412165 - DNA, 15 bp, Homo sapiens
aaatggttaaatatt

SEQ ID NO: 412166 - DNA, 15 bp, Homo sapiens
aaaatggttaaatat

SEQ ID NO: 412167 - DNA, 15 bp, Homo sapiens
aaaaatggttaaata

SEQ ID NO: 412168 - DNA, 15 bp, Homo sapiens
gaaaaatggttaaat

SEQ ID NO: 412169 - DNA, 15 bp, Homo sapiens
agaaaaatggttaaa

SEQ ID NO: 412170 - DNA, 15 bp, Homo sapiens
aagaaaaatggttaa

SEQ ID NO: 412171 - DNA, 15 bp, Homo sapiens
caagaaaaatggtta

SEQ ID NO: 412172 - DNA, 15 bp, Homo sapiens
acaagaaaaatggtt

SEQ ID NO: 412173 - DNA, 15 bp, Homo sapiens
aacaagaaaaatggt

SEQ ID NO: 412174 - DNA, 15 bp, Homo sapiens
caacaagaaaaatgg

SEQ ID NO: 412175 - DNA, 15 bp, Homo sapiens
acaacaagaaaaatg

SEQ ID NO: 412176 - DNA, 15 bp, Homo sapiens
tacaacaagaaaaat

SEQ ID NO: 412177 - DNA, 15 bp, Homo sapiens
atacaacaagaaaaa

SEQ ID NO: 412178 - DNA, 15 bp, Homo sapiens
tatacaacaagaaaa

SEQ ID NO: 412179 - DNA, 15 bp, Homo sapiens
atatacaacaagaaa

SEQ ID NO: 412180 - DNA, 15 bp, Homo sapiens
aatatacaacaagaa

SEQ ID NO: 412181 - DNA, 15 bp, Homo sapiens
aaatatacaacaaga

SEQ ID NO: 412182 - DNA, 15 bp, Homo sapiens
taaatatacaacaag

SEQ ID NO: 412183 - DNA, 15 bp, Homo sapiens
ctaaatatacaacaa

SEQ ID NO: 412184 - DNA, 15 bp, Homo sapiens
actaaatatacaaca

SEQ ID NO: 412185 - DNA, 15 bp, Homo sapiens
aactaaatatacaac

SEQ ID NO: 412186 - DNA, 15 bp, Homo sapiens
aaactaaatatacaa

SEQ ID NO: 412187 - DNA, 15 bp, Homo sapiens
aaaactaaatataca

SEQ ID NO: 412188 - DNA, 15 bp, Homo sapiens
aaaaactaaatatac

SEQ ID NO: 412189 - DNA, 15 bp, Homo sapiens
taaaaactaaatata

SEQ ID NO: 412190 - DNA, 15 bp, Homo sapiens
ctaaaaactaaatat

SEQ ID NO: 412191 - DNA, 15 bp, Homo sapiens
cctaaaaactaaata

SEQ ID NO: 412192 - DNA, 15 bp, Homo sapiens
acctaaaaactaaat

SEQ ID NO: 412193 - DNA, 15 bp, Homo sapiens
aacctaaaaactaaa

SEQ ID NO: 412194 - DNA, 15 bp, Homo sapiens
aaacctaaaaactaa

SEQ ID NO: 412195 - DNA, 15 bp, Homo sapiens
aaaacctaaaaacta

SEQ ID NO: 412196 - DNA, 15 bp, Homo sapiens
aaaaacctaaaaact

SEQ ID NO: 412197 - DNA, 15 bp, Homo sapiens
aaaaaacctaaaaac

SEQ ID NO: 412198 - DNA, 15 bp, Homo sapiens
aaaaaaacctaaaaa

SEQ ID NO: 412199 - DNA, 15 bp, Homo sapiens
caaaaaaacctaaaa

SEQ ID NO: 412200 - DNA, 15 bp, Homo sapiens
gcaaaaaaacctaaa

SEQ ID NO: 412201 - DNA, 15 bp, Homo sapiens
agcaaaaaaacctaa

SEQ ID NO: 412202 - DNA, 15 bp, Homo sapiens
aagcaaaaaaaccta

SEQ ID NO: 412203 - DNA, 15 bp, Homo sapiens
aaagcaaaaaaacct

SEQ ID NO: 412204 - DNA, 15 bp, Homo sapiens
aaaagcaaaaaaacc

SEQ ID NO: 412205 - DNA, 15 bp, Homo sapiens
caaaagcaaaaaaac

SEQ ID NO: 412206 - DNA, 15 bp, Homo sapiens
gcaaaagcaaaaaaa

SEQ ID NO: 412207 - DNA, 15 bp, Homo sapiens
tgcaaaagcaaaaaa

SEQ ID NO: 412208 - DNA, 15 bp, Homo sapiens
ttgcaaaagcaaaaa

SEQ ID NO: 412209 - DNA, 15 bp, Homo sapiens
tttgcaaaagcaaaa

SEQ ID NO: 412210 - DNA, 15 bp, Homo sapiens
atttgcaaaagcaaa

SEQ ID NO: 412211 - DNA, 15 bp, Homo sapiens
tatttgcaaaagcaa

SEQ ID NO: 412212 - DNA, 15 bp, Homo sapiens
ttatttgcaaaagca

SEQ ID NO: 412213 - DNA, 15 bp, Homo sapiens
attatttgcaaaagc

SEQ ID NO: 412214 - DNA, 15 bp, Homo sapiens
tattatttgcaaaag

SEQ ID NO: 412215 - DNA, 15 bp, Homo sapiens
atattatttgcaaaa

SEQ ID NO: 412216 - DNA, 15 bp, Homo sapiens
tatattatttgcaaa

SEQ ID NO: 412217 - DNA, 15 bp, Homo sapiens
atatattatttgcaa

SEQ ID NO: 412218 - DNA, 15 bp, Homo sapiens
aatatattatttgca

SEQ ID NO: 412219 - DNA, 15 bp, Homo sapiens
aaatatattatttgc

SEQ ID NO: 412220 - DNA, 15 bp, Homo sapiens
taaatatattatttg

SEQ ID NO: 412221 - DNA, 15 bp, Homo sapiens
ataaatatattattt

SEQ ID NO: 412222 - DNA, 15 bp, Homo sapiens
tataaatatattatt

SEQ ID NO: 412223 - DNA, 15 bp, Homo sapiens
ctataaatatattat

SEQ ID NO: 412224 - DNA, 15 bp, Homo sapiens
tctataaatatatta

SEQ ID NO: 412225 - DNA, 15 bp, Homo sapiens
atctataaatatatt

SEQ ID NO: 412226 - DNA, 15 bp, Homo sapiens
tatctataaatatat

SEQ ID NO: 412227 - DNA, 15 bp, Homo sapiens
atatctataaatata

SEQ ID NO: 412228 - DNA, 15 bp, Homo sapiens
tatatctataaatat

SEQ ID NO: 412229 - DNA, 15 bp, Homo sapiens
atatatctataaata

SEQ ID NO: 412230 - DNA, 15 bp, Homo sapiens
aatatatctataaat

SEQ ID NO: 412231 - DNA, 15 bp, Homo sapiens
aaatatatctataaa

SEQ ID NO: 412232 - DNA, 15 bp, Homo sapiens
aaaatatatctataa

SEQ ID NO: 412233 - DNA, 15 bp, Homo sapiens
aaaaatatatctata

SEQ ID NO: 412234 - DNA, 15 bp, Homo sapiens
caaaaatatatctat

SEQ ID NO: 412235 - DNA, 15 bp, Homo sapiens
gcaaaaatatatcta

SEQ ID NO: 412236 - DNA, 15 bp, Homo sapiens
agcaaaaatatatct

SEQ ID NO: 412237 - DNA, 15 bp, Homo sapiens
cagcaaaaatatatc

SEQ ID NO: 412238 - DNA, 15 bp, Homo sapiens
tcagcaaaaatatat

SEQ ID NO: 412239 - DNA, 15 bp, Homo sapiens
ttcagcaaaaatata

SEQ ID NO: 412240 - DNA, 15 bp, Homo sapiens
attcagcaaaaatat

SEQ ID NO: 412241 - DNA, 15 bp, Homo sapiens
tattcagcaaaaata

SEQ ID NO: 412242 - DNA, 15 bp, Homo sapiens
atattcagcaaaaat

SEQ ID NO: 412243 - DNA, 15 bp, Homo sapiens
gatattcagcaaaaa

SEQ ID NO: 412244 - DNA, 15 bp, Homo sapiens
ggatattcagcaaaa

SEQ ID NO: 412245 - DNA, 15 bp, Homo sapiens
aggatattcagcaaa

SEQ ID NO: 412246 - DNA, 15 bp, Homo sapiens
aaggatattcagcaa

SEQ ID NO: 412247 - DNA, 15 bp, Homo sapiens
caaggatattcagca

SEQ ID NO: 412248 - DNA, 15 bp, Homo sapiens
tcaaggatattcagc

SEQ ID NO: 412249 - DNA, 15 bp, Homo sapiens
ttcaaggatattcag

SEQ ID NO: 412250 - DNA, 15 bp, Homo sapiens
cttcaaggatattca

SEQ ID NO: 412251 - DNA, 15 bp, Homo sapiens
tcttcaaggatattc

SEQ ID NO: 412252 - DNA, 15 bp, Homo sapiens
atcttcaaggatatt

SEQ ID NO: 412253 - DNA, 15 bp, Homo sapiens
tatcttcaaggatat

SEQ ID NO: 412254 - DNA, 15 bp, Homo sapiens
ttatcttcaaggata

SEQ ID NO: 412255 - DNA, 15 bp, Homo sapiens
tttatcttcaaggat

SEQ ID NO: 412256 - DNA, 15 bp, Homo sapiens
atttatcttcaagga

SEQ ID NO: 412257 - DNA, 15 bp, Homo sapiens
tatttatcttcaagg

SEQ ID NO: 412258 - DNA, 15 bp, Homo sapiens
atatttatcttcaag

SEQ ID NO: 412259 - DNA, 15 bp, Homo sapiens
aatatttatcttcaa

SEQ ID NO: 412260 - DNA, 15 bp, Homo sapiens
aaatatttatcttca

SEQ ID NO: 412261 - DNA, 15 bp, Homo sapiens
aaaatatttatcttc

SEQ ID NO: 412262 - DNA, 15 bp, Homo sapiens
aaaaatatttatctt

SEQ ID NO: 412263 - DNA, 15 bp, Homo sapiens
taaaaatatttatct

SEQ ID NO: 412264 - DNA, 15 bp, Homo sapiens
gtaaaaatatttatc

SEQ ID NO: 412265 - DNA, 15 bp, Homo sapiens
tgtaaaaatatttat

SEQ ID NO: 412266 - DNA, 15 bp, Homo sapiens
atgtaaaaatattta

SEQ ID NO: 412267 - DNA, 15 bp, Homo sapiens
catgtaaaaatattt

SEQ ID NO: 412268 - DNA, 15 bp, Homo sapiens
gcatgtaaaaatatt

SEQ ID NO: 412269 - DNA, 15 bp, Homo sapiens
ggcatgtaaaaatat

SEQ ID NO: 412270 - DNA, 15 bp, Homo sapiens
aggcatgtaaaaata

SEQ ID NO: 412271 - DNA, 15 bp, Homo sapiens
taggcatgtaaaaat

SEQ ID NO: 412272 - DNA, 15 bp, Homo sapiens
ataggcatgtaaaaa

SEQ ID NO: 412273 - DNA, 15 bp, Homo sapiens
aataggcatgtaaaa

SEQ ID NO: 412274 - DNA, 15 bp, Homo sapiens
taataggcatgtaaa

SEQ ID NO: 412275 - DNA, 15 bp, Homo sapiens
ataataggcatgtaa

SEQ ID NO: 412276 - DNA, 15 bp, Homo sapiens
aataataggcatgta

SEQ ID NO: 412277 - DNA, 15 bp, Homo sapiens
taataataggcatgt

SEQ ID NO: 412278 - DNA, 15 bp, Homo sapiens
ataataataggcatg

SEQ ID NO: 412279 - DNA, 15 bp, Homo sapiens
gataataataggcat

SEQ ID NO: 412280 - DNA, 15 bp, Homo sapiens
agataataataggca

SEQ ID NO: 412281 - DNA, 15 bp, Homo sapiens
gagataataataggc

SEQ ID NO: 412282 - DNA, 15 bp, Homo sapiens
ggagataataatagg

SEQ ID NO: 412283 - DNA, 15 bp, Homo sapiens
aggagataataatag

SEQ ID NO: 412284 - DNA, 15 bp, Homo sapiens
aaggagataataata

SEQ ID NO: 412285 - DNA, 15 bp, Homo sapiens
taaggagataataat

SEQ ID NO: 412286 - DNA, 15 bp, Homo sapiens
ctaaggagataataa

SEQ ID NO: 412287 - DNA, 15 bp, Homo sapiens
cctaaggagataata

SEQ ID NO: 412288 - DNA, 15 bp, Homo sapiens
gcctaaggagataat

SEQ ID NO: 412289 - DNA, 15 bp, Homo sapiens
agcctaaggagataa

SEQ ID NO: 412290 - DNA, 15 bp, Homo sapiens
tagcctaaggagata

SEQ ID NO: 412291 - DNA, 15 bp, Homo sapiens
ttagcctaaggagat

SEQ ID NO: 412292 - DNA, 15 bp, Homo sapiens
tttagcctaaggaga

SEQ ID NO: 412293 - DNA, 15 bp, Homo sapiens
atttagcctaaggag

SEQ ID NO: 412294 - DNA, 15 bp, Homo sapiens
aatttagcctaagga

SEQ ID NO: 412295 - DNA, 15 bp, Homo sapiens
gaatttagcctaagg

SEQ ID NO: 412296 - DNA, 15 bp, Homo sapiens
ggaatttagcctaag

SEQ ID NO: 412297 - DNA, 15 bp, Homo sapiens
gggaatttagcctaa

SEQ ID NO: 412298 - DNA, 15 bp, Homo sapiens
tgggaatttagccta

SEQ ID NO: 412299 - DNA, 15 bp, Homo sapiens
gtgggaatttagcct

SEQ ID NO: 412300 - DNA, 15 bp, Homo sapiens
cgtgggaatttagcc

SEQ ID NO: 412301 - DNA, 15 bp, Homo sapiens
acgtgggaatttagc

SEQ ID NO: 412302 - DNA, 15 bp, Homo sapiens
cacgtgggaatttag

SEQ ID NO: 412303 - DNA, 15 bp, Homo sapiens
acacgtgggaattta

SEQ ID NO: 412304 - DNA, 15 bp, Homo sapiens
cacacgtgggaattt

SEQ ID NO: 412305 - DNA, 15 bp, Homo sapiens
acacacgtgggaatt

SEQ ID NO: 412306 - DNA, 15 bp, Homo sapiens
tacacacgtgggaat

SEQ ID NO: 412307 - DNA, 15 bp, Homo sapiens
ctacacacgtgggaa

SEQ ID NO: 412308 - DNA, 15 bp, Homo sapiens
actacacacgtggga

SEQ ID NO: 412309 - DNA, 15 bp, Homo sapiens
cactacacacgtggg

SEQ ID NO: 412310 - DNA, 15 bp, Homo sapiens
tcactacacacgtgg

SEQ ID NO: 412311 - DNA, 15 bp, Homo sapiens
atcactacacacgtg

SEQ ID NO: 412312 - DNA, 15 bp, Homo sapiens
aatcactacacacgt

SEQ ID NO: 412313 - DNA, 15 bp, Homo sapiens
aaatcactacacacg

SEQ ID NO: 412314 - DNA, 15 bp, Homo sapiens
aaaatcactacacac

SEQ ID NO: 412315 - DNA, 15 bp, Homo sapiens
aaaaatcactacaca

SEQ ID NO: 412316 - DNA, 15 bp, Homo sapiens
taaaaatcactacac

SEQ ID NO: 412317 - DNA, 15 bp, Homo sapiens
ttaaaaatcactaca

SEQ ID NO: 412318 - DNA, 15 bp, Homo sapiens
tttaaaaatcactac

SEQ ID NO: 412319 - DNA, 15 bp, Homo sapiens
ctttaaaaatcacta

SEQ ID NO: 412320 - DNA, 15 bp, Homo sapiens
tctttaaaaatcact

SEQ ID NO: 412321 - DNA, 15 bp, Homo sapiens
ttctttaaaaatcac

SEQ ID NO: 412322 - DNA, 15 bp, Homo sapiens
gttctttaaaaatca

SEQ ID NO: 412323 - DNA, 15 bp, Homo sapiens
tgttctttaaaaatc

SEQ ID NO: 412324 - DNA, 15 bp, Homo sapiens
ttgttctttaaaaat

SEQ ID NO: 412325 - DNA, 15 bp, Homo sapiens
gttgttctttaaaaa

SEQ ID NO: 412326 - DNA, 15 bp, Homo sapiens
tgttgttctttaaaa

SEQ ID NO: 412327 - DNA, 15 bp, Homo sapiens
ttgttgttctttaaa

SEQ ID NO: 412328 - DNA, 15 bp, Homo sapiens
tttgttgttctttaa

SEQ ID NO: 412329 - DNA, 15 bp, Homo sapiens
ttttgttgttcttta

SEQ ID NO: 412330 - DNA, 15 bp, Homo sapiens
tttttgttgttcttt

SEQ ID NO: 412331 - DNA, 15 bp, Homo sapiens
atttttgttgttctt

SEQ ID NO: 412332 - DNA, 15 bp, Homo sapiens
tatttttgttgttct

SEQ ID NO: 412333 - DNA, 15 bp, Homo sapiens
atatttttgttgttc

SEQ ID NO: 412334 - DNA, 15 bp, Homo sapiens
catatttttgttgtt

SEQ ID NO: 412335 - DNA, 15 bp, Homo sapiens
gcatatttttgttgt

SEQ ID NO: 412336 - DNA, 15 bp, Homo sapiens
agcatatttttgttg

SEQ ID NO: 412337 - DNA, 15 bp, Homo sapiens
gagcatatttttgtt

SEQ ID NO: 412338 - DNA, 15 bp, Homo sapiens
tgagcatatttttgt

SEQ ID NO: 412339 - DNA, 15 bp, Homo sapiens
ttgagcatatttttg

SEQ ID NO: 412340 - DNA, 15 bp, Homo sapiens
attgagcatattttt

SEQ ID NO: 412341 - DNA, 15 bp, Homo sapiens
aattgagcatatttt

SEQ ID NO: 412342 - DNA, 15 bp, Homo sapiens
gaattgagcatattt

SEQ ID NO: 412343 - DNA, 15 bp, Homo sapiens
tgaattgagcatatt

SEQ ID NO: 412344 - DNA, 15 bp, Homo sapiens
gtgaattgagcatat

SEQ ID NO: 412345 - DNA, 15 bp, Homo sapiens
tgtgaattgagcata

SEQ ID NO: 412346 - DNA, 15 bp, Homo sapiens
atgtgaattgagcat

SEQ ID NO: 412347 - DNA, 15 bp, Homo sapiens
catgtgaattgagca

SEQ ID NO: 412348 - DNA, 15 bp, Homo sapiens
acatgtgaattgagc

SEQ ID NO: 412349 - DNA, 15 bp, Homo sapiens
tacatgtgaattgag

SEQ ID NO: 412350 - DNA, 15 bp, Homo sapiens
atacatgtgaattga

SEQ ID NO: 412351 - DNA, 15 bp, Homo sapiens
catacatgtgaattg

SEQ ID NO: 412352 - DNA, 15 bp, Homo sapiens
tcatacatgtgaatt

SEQ ID NO: 412353 - DNA, 15 bp, Homo sapiens
ttcatacatgtgaat

SEQ ID NO: 412354 - DNA, 15 bp, Homo sapiens
gttcatacatgtgaa

SEQ ID NO: 412355 - DNA, 15 bp, Homo sapiens
agttcatacatgtga

SEQ ID NO: 412356 - DNA, 15 bp, Homo sapiens
aagttcatacatgtg

SEQ ID NO: 412357 - DNA, 15 bp, Homo sapiens
taagttcatacatgt

SEQ ID NO: 412358 - DNA, 15 bp, Homo sapiens
ataagttcatacatg

SEQ ID NO: 412359 - DNA, 15 bp, Homo sapiens
cataagttcatacat

SEQ ID NO: 412360 - DNA, 15 bp, Homo sapiens
ccataagttcataca

SEQ ID NO: 412361 - DNA, 15 bp, Homo sapiens
cccataagttcatac

SEQ ID NO: 412362 - DNA, 15 bp, Homo sapiens
tcccataagttcata

SEQ ID NO: 412363 - DNA, 15 bp, Homo sapiens
atcccataagttcat

SEQ ID NO: 412364 - DNA, 15 bp, Homo sapiens
aatcccataagttca

SEQ ID NO: 412365 - DNA, 15 bp, Homo sapiens
caatcccataagttc

SEQ ID NO: 412366 - DNA, 15 bp, Homo sapiens
tcaatcccataagtt

SEQ ID NO: 412367 - DNA, 15 bp, Homo sapiens
atcaatcccataagt

SEQ ID NO: 412368 - DNA, 15 bp, Homo sapiens
catcaatcccataag

SEQ ID NO: 412369 - DNA, 15 bp, Homo sapiens
tcatcaatcccataa

SEQ ID NO: 412370 - DNA, 15 bp, Homo sapiens
ctcatcaatcccata

SEQ ID NO: 412371 - DNA, 15 bp, Homo sapiens
actcatcaatcccat

SEQ ID NO: 412372 - DNA, 15 bp, Homo sapiens
cactcatcaatccca

SEQ ID NO: 412373 - DNA, 15 bp, Homo sapiens
ccactcatcaatccc

SEQ ID NO: 412374 - DNA, 15 bp, Homo sapiens
tccactcatcaatcc

SEQ ID NO: 412375 - DNA, 15 bp, Homo sapiens
atccactcatcaatc

SEQ ID NO: 412376 - DNA, 15 bp, Homo sapiens
catccactcatcaat

SEQ ID NO: 412377 - DNA, 15 bp, Homo sapiens
tcatccactcatcaa

SEQ ID NO: 412378 - DNA, 15 bp, Homo sapiens
ctcatccactcatca

SEQ ID NO: 412379 - DNA, 15 bp, Homo sapiens
tctcatccactcatc

SEQ ID NO: 412380 - DNA, 15 bp, Homo sapiens
ttctcatccactcat

SEQ ID NO: 412381 - DNA, 15 bp, Homo sapiens
tttctcatccactca

SEQ ID NO: 412382 - DNA, 15 bp, Homo sapiens
ctttctcatccactc

SEQ ID NO: 412383 - DNA, 15 bp, Homo sapiens
tctttctcatccact

SEQ ID NO: 412384 - DNA, 15 bp, Homo sapiens
ttctttctcatccac

SEQ ID NO: 412385 - DNA, 15 bp, Homo sapiens
gttctttctcatcca

SEQ ID NO: 412386 - DNA, 15 bp, Homo sapiens
ggttctttctcatcc

SEQ ID NO: 412387 - DNA, 15 bp, Homo sapiens
gggttctttctcatc

SEQ ID NO: 412388 - DNA, 15 bp, Homo sapiens
tgggttctttctcat

SEQ ID NO: 412389 - DNA, 15 bp, Homo sapiens
atgggttctttctca

SEQ ID NO: 412390 - DNA, 15 bp, Homo sapiens
gatgggttctttctc

SEQ ID NO: 412391 - DNA, 15 bp, Homo sapiens
tgatgggttctttct

SEQ ID NO: 412392 - DNA, 15 bp, Homo sapiens
ctgatgggttctttc

SEQ ID NO: 412393 - DNA, 15 bp, Homo sapiens
tctgatgggttcttt

SEQ ID NO: 412394 - DNA, 15 bp, Homo sapiens
atctgatgggttctt

SEQ ID NO: 412395 - DNA, 15 bp, Homo sapiens
aatctgatgggttct

SEQ ID NO: 412396 - DNA, 15 bp, Homo sapiens
aaatctgatgggttc

SEQ ID NO: 412397 - DNA, 15 bp, Homo sapiens
aaaatctgatgggtt

SEQ ID NO: 412398 - DNA, 15 bp, Homo sapiens
gaaaatctgatgggt

SEQ ID NO: 412399 - DNA, 15 bp, Homo sapiens
tgaaaatctgatggg

SEQ ID NO: 412400 - DNA, 15 bp, Homo sapiens
ctgaaaatctgatgg

SEQ ID NO: 412401 - DNA, 15 bp, Homo sapiens
tctgaaaatctgatg

SEQ ID NO: 412402 - DNA, 15 bp, Homo sapiens
ttctgaaaatctgat

SEQ ID NO: 412403 - DNA, 15 bp, Homo sapiens
attctgaaaatctga

SEQ ID NO: 412404 - DNA, 15 bp, Homo sapiens
cattctgaaaatctg

SEQ ID NO: 412405 - DNA, 15 bp, Homo sapiens
tcattctgaaaatct

SEQ ID NO: 412406 - DNA, 15 bp, Homo sapiens
gtcattctgaaaatc

SEQ ID NO: 412407 - DNA, 15 bp, Homo sapiens
agtcattctgaaaat

SEQ ID NO: 412408 - DNA, 15 bp, Homo sapiens
aagtcattctgaaaa

SEQ ID NO: 412409 - DNA, 15 bp, Homo sapiens
gaagtcattctgaaa

SEQ ID NO: 412410 - DNA, 15 bp, Homo sapiens
tgaagtcattctgaa

SEQ ID NO: 412411 - DNA, 15 bp, Homo sapiens
ctgaagtcattctga

SEQ ID NO: 412412 - DNA, 15 bp, Homo sapiens
gctgaagtcattctg

SEQ ID NO: 412413 - DNA, 15 bp, Homo sapiens
tgctgaagtcattct

SEQ ID NO: 412414 - DNA, 15 bp, Homo sapiens
ttgctgaagtcattc

SEQ ID NO: 412415 - DNA, 15 bp, Homo sapiens
cttgctgaagtcatt

SEQ ID NO: 412416 - DNA, 15 bp, Homo sapiens
acttgctgaagtcat

SEQ ID NO: 412417 - DNA, 15 bp, Homo sapiens
tacttgctgaagtca

SEQ ID NO: 412418 - DNA, 15 bp, Homo sapiens
ttacttgctgaagtc

SEQ ID NO: 412419 - DNA, 15 bp, Homo sapiens
tttacttgctgaagt

SEQ ID NO: 412420 - DNA, 15 bp, Homo sapiens
atttacttgctgaag

SEQ ID NO: 412421 - DNA, 15 bp, Homo sapiens
aatttacttgctgaa

SEQ ID NO: 412422 - DNA, 15 bp, Homo sapiens
aaatttacttgctga

SEQ ID NO: 412423 - DNA, 15 bp, Homo sapiens
caaatttacttgctg

SEQ ID NO: 412424 - DNA, 15 bp, Homo sapiens
tcaaatttacttgct

SEQ ID NO: 412425 - DNA, 15 bp, Homo sapiens
ttcaaatttacttgc

SEQ ID NO: 412426 - DNA, 15 bp, Homo sapiens
cttcaaatttacttg

SEQ ID NO: 412427 - DNA, 15 bp, Homo sapiens
tcttcaaatttactt

SEQ ID NO: 412428 - DNA, 15 bp, Homo sapiens
atcttcaaatttact

SEQ ID NO: 412429 - DNA, 15 bp, Homo sapiens
aatcttcaaatttac

SEQ ID NO: 412430 - DNA, 15 bp, Homo sapiens
gaatcttcaaattta

SEQ ID NO: 412431 - DNA, 15 bp, Homo sapiens
ggaatcttcaaattt

SEQ ID NO: 412432 - DNA, 15 bp, Homo sapiens
tggaatcttcaaatt

SEQ ID NO: 412433 - DNA, 15 bp, Homo sapiens
ttggaatcttcaaat

SEQ ID NO: 412434 - DNA, 15 bp, Homo sapiens
tttggaatcttcaaa

SEQ ID NO: 412435 - DNA, 15 bp, Homo sapiens
atttggaatcttcaa

SEQ ID NO: 412436 - DNA, 15 bp, Homo sapiens
aatttggaatcttca

SEQ ID NO: 412437 - DNA, 15 bp, Homo sapiens
aaatttggaatcttc

SEQ ID NO: 412438 - DNA, 15 bp, Homo sapiens
gaaatttggaatctt

SEQ ID NO: 412439 - DNA, 15 bp, Homo sapiens
tgaaatttggaatct

SEQ ID NO: 412440 - DNA, 15 bp, Homo sapiens
ctgaaatttggaatc

SEQ ID NO: 412441 - DNA, 15 bp, Homo sapiens
cctgaaatttggaat

SEQ ID NO: 412442 - DNA, 15 bp, Homo sapiens
gcctgaaatttggaa

SEQ ID NO: 412443 - DNA, 15 bp, Homo sapiens
agcctgaaatttgga

SEQ ID NO: 412444 - DNA, 15 bp, Homo sapiens
aagcctgaaatttgg

SEQ ID NO: 412445 - DNA, 15 bp, Homo sapiens
aaagcctgaaatttg

SEQ ID NO: 412446 - DNA, 15 bp, Homo sapiens
aaaagcctgaaattt

SEQ ID NO: 412447 - DNA, 15 bp, Homo sapiens
taaaagcctgaaatt

SEQ ID NO: 412448 - DNA, 15 bp, Homo sapiens
ttaaaagcctgaaat

SEQ ID NO: 412449 - DNA, 15 bp, Homo sapiens
attaaaagcctgaaa

SEQ ID NO: 412450 - DNA, 15 bp, Homo sapiens
aattaaaagcctgaa

SEQ ID NO: 412451 - DNA, 15 bp, Homo sapiens
aaattaaaagcctga

SEQ ID NO: 412452 - DNA, 15 bp, Homo sapiens
taaattaaaagcctg

SEQ ID NO: 412453 - DNA, 15 bp, Homo sapiens
ttaaattaaaagcct

SEQ ID NO: 412454 - DNA, 15 bp, Homo sapiens
tttaaattaaaagcc

SEQ ID NO: 412455 - DNA, 15 bp, Homo sapiens
atttaaattaaaagc

SEQ ID NO: 412456 - DNA, 15 bp, Homo sapiens
tatttaaattaaaag

SEQ ID NO: 412457 - DNA, 15 bp, Homo sapiens
ctatttaaattaaaa

SEQ ID NO: 412458 - DNA, 15 bp, Homo sapiens
tctatttaaattaaa

SEQ ID NO: 412459 - DNA, 15 bp, Homo sapiens
atctatttaaattaa

SEQ ID NO: 412460 - DNA, 15 bp, Homo sapiens
tatctatttaaatta

SEQ ID NO: 412461 - DNA, 15 bp, Homo sapiens
ttatctatttaaatt

SEQ ID NO: 412462 - DNA, 15 bp, Homo sapiens
attatctatttaaat

SEQ ID NO: 412463 - DNA, 15 bp, Homo sapiens
gattatctatttaaa

SEQ ID NO: 412464 - DNA, 15 bp, Homo sapiens
agattatctatttaa

SEQ ID NO: 412465 - DNA, 15 bp, Homo sapiens
tagattatctattta

SEQ ID NO: 412466 - DNA, 15 bp, Homo sapiens
ctagattatctattt

SEQ ID NO: 412467 - DNA, 15 bp, Homo sapiens
gctagattatctatt

SEQ ID NO: 412468 - DNA, 15 bp, Homo sapiens
agctagattatctat

SEQ ID NO: 412469 - DNA, 15 bp, Homo sapiens
aagctagattatcta

SEQ ID NO: 412470 - DNA, 15 bp, Homo sapiens
aaagctagattatct

SEQ ID NO: 412471 - DNA, 15 bp, Homo sapiens
taaagctagattatc

SEQ ID NO: 412472 - DNA, 15 bp, Homo sapiens
ttaaagctagattat

SEQ ID NO: 412473 - DNA, 15 bp, Homo sapiens
tttaaagctagatta

SEQ ID NO: 412474 - DNA, 15 bp, Homo sapiens
gtttaaagctagatt

SEQ ID NO: 412475 - DNA, 15 bp, Homo sapiens
tgtttaaagctagat

SEQ ID NO: 412476 - DNA, 15 bp, Homo sapiens
atgtttaaagctaga

SEQ ID NO: 412477 - DNA, 15 bp, Homo sapiens
aatgtttaaagctag

SEQ ID NO: 412478 - DNA, 15 bp, Homo sapiens
gaatgtttaaagcta

SEQ ID NO: 412479 - DNA, 15 bp, Homo sapiens
agaatgtttaaagct

SEQ ID NO: 412480 - DNA, 15 bp, Homo sapiens
cagaatgtttaaagc

SEQ ID NO: 412481 - DNA, 15 bp, Homo sapiens
gcagaatgtttaaag

SEQ ID NO: 412482 - DNA, 15 bp, Homo sapiens
tgcagaatgtttaaa

SEQ ID NO: 412483 - DNA, 15 bp, Homo sapiens
atgcagaatgtttaa

SEQ ID NO: 412484 - DNA, 15 bp, Homo sapiens
aatgcagaatgttta

SEQ ID NO: 412485 - DNA, 15 bp, Homo sapiens
aaatgcagaatgttt

SEQ ID NO: 412486 - DNA, 15 bp, Homo sapiens
taaatgcagaatgtt

SEQ ID NO: 412487 - DNA, 15 bp, Homo sapiens
ctaaatgcagaatgt

SEQ ID NO: 412488 - DNA, 15 bp, Homo sapiens
cctaaatgcagaatg

SEQ ID NO: 412489 - DNA, 15 bp, Homo sapiens
acctaaatgcagaat

SEQ ID NO: 412490 - DNA, 15 bp, Homo sapiens
tacctaaatgcagaa

SEQ ID NO: 412491 - DNA, 15 bp, Homo sapiens
gtacctaaatgcaga

SEQ ID NO: 412492 - DNA, 15 bp, Homo sapiens
agtacctaaatgcag

SEQ ID NO: 412493 - DNA, 15 bp, Homo sapiens
aagtacctaaatgca

SEQ ID NO: 412494 - DNA, 15 bp, Homo sapiens
taagtacctaaatgc

SEQ ID NO: 412495 - DNA, 15 bp, Homo sapiens
ttaagtacctaaatg

SEQ ID NO: 412496 - DNA, 15 bp, Homo sapiens
tttaagtacctaaat

SEQ ID NO: 412497 - DNA, 15 bp, Homo sapiens
atttaagtacctaaa

SEQ ID NO: 412498 - DNA, 15 bp, Homo sapiens
tatttaagtacctaa

SEQ ID NO: 412499 - DNA, 15 bp, Homo sapiens
atatttaagtaccta

SEQ ID NO: 412500 - DNA, 15 bp, Homo sapiens
aatatttaagtacct

SEQ ID NO: 412501 - DNA, 15 bp, Homo sapiens
aaatatttaagtacc

SEQ ID NO: 412502 - DNA, 15 bp, Homo sapiens
aaaatatttaagtac

SEQ ID NO: 412503 - DNA, 15 bp, Homo sapiens
caaaatatttaagta

SEQ ID NO: 412504 - DNA, 15 bp, Homo sapiens
ccaaaatatttaagt

SEQ ID NO: 412505 - DNA, 15 bp, Homo sapiens
accaaaatatttaag

SEQ ID NO: 412506 - DNA, 15 bp, Homo sapiens
aaccaaaatatttaa

SEQ ID NO: 412507 - DNA, 15 bp, Homo sapiens
caaccaaaatattta

SEQ ID NO: 412508 - DNA, 15 bp, Homo sapiens
tcaaccaaaatattt

SEQ ID NO: 412509 - DNA, 15 bp, Homo sapiens
ttcaaccaaaatatt

SEQ ID NO: 412510 - DNA, 15 bp, Homo sapiens
attcaaccaaaatat

SEQ ID NO: 412511 - DNA, 15 bp, Homo sapiens
tattcaaccaaaata

SEQ ID NO: 412512 - DNA, 15 bp, Homo sapiens
atattcaaccaaaat

SEQ ID NO: 412513 - DNA, 15 bp, Homo sapiens
tatattcaaccaaaa

SEQ ID NO: 412514 - DNA, 15 bp, Homo sapiens
atatattcaaccaaa

SEQ ID NO: 412515 - DNA, 15 bp, Homo sapiens
tatatattcaaccaa

SEQ ID NO: 412516 - DNA, 15 bp, Homo sapiens
atatatattcaacca

SEQ ID NO: 412517 - DNA, 15 bp, Homo sapiens
aatatatattcaacc

SEQ ID NO: 412518 - DNA, 15 bp, Homo sapiens
taatatatattcaac

SEQ ID NO: 412519 - DNA, 15 bp, Homo sapiens
ttaatatatattcaa

SEQ ID NO: 412520 - DNA, 15 bp, Homo sapiens
attaatatatattca

SEQ ID NO: 412521 - DNA, 15 bp, Homo sapiens
tattaatatatattc

SEQ ID NO: 412522 - DNA, 15 bp, Homo sapiens
ttattaatatatatt

SEQ ID NO: 412523 - DNA, 15 bp, Homo sapiens
attattaatatatat

SEQ ID NO: 412524 - DNA, 15 bp, Homo sapiens
gattattaatatata

SEQ ID NO: 412525 - DNA, 15 bp, Homo sapiens
tgattattaatatat

SEQ ID NO: 412526 - DNA, 15 bp, Homo sapiens
gtgattattaatata

SEQ ID NO: 412527 - DNA, 15 bp, Homo sapiens
ggtgattattaatat

SEQ ID NO: 412528 - DNA, 15 bp, Homo sapiens
tggtgattattaata

SEQ ID NO: 412529 - DNA, 15 bp, Homo sapiens
atggtgattattaat

SEQ ID NO: 412530 - DNA, 15 bp, Homo sapiens
tatggtgattattaa

SEQ ID NO: 412531 - DNA, 15 bp, Homo sapiens
atatggtgattatta

SEQ ID NO: 412532 - DNA, 15 bp, Homo sapiens
aatatggtgattatt

SEQ ID NO: 412533 - DNA, 15 bp, Homo sapiens
aaatatggtgattat

SEQ ID NO: 412534 - DNA, 15 bp, Homo sapiens
caaatatggtgatta

SEQ ID NO: 412535 - DNA, 15 bp, Homo sapiens
acaaatatggtgatt

SEQ ID NO: 412536 - DNA, 15 bp, Homo sapiens
cacaaatatggtgat

SEQ ID NO: 412537 - DNA, 15 bp, Homo sapiens
gcacaaatatggtga

SEQ ID NO: 412538 - DNA, 15 bp, Homo sapiens
tgcacaaatatggtg

SEQ ID NO: 412539 - DNA, 15 bp, Homo sapiens
ctgcacaaatatggt

SEQ ID NO: 412540 - DNA, 15 bp, Homo sapiens
tctgcacaaatatgg

SEQ ID NO: 412541 - DNA, 15 bp, Homo sapiens
ctctgcacaaatatg

SEQ ID NO: 412542 - DNA, 15 bp, Homo sapiens
cctctgcacaaatat

SEQ ID NO: 412543 - DNA, 15 bp, Homo sapiens
tcctctgcacaaata

SEQ ID NO: 412544 - DNA, 15 bp, Homo sapiens
ttcctctgcacaaat

SEQ ID NO: 412545 - DNA, 15 bp, Homo sapiens
cttcctctgcacaaa

SEQ ID NO: 412546 - DNA, 15 bp, Homo sapiens
gcttcctctgcacaa

SEQ ID NO: 412547 - DNA, 15 bp, Homo sapiens
ggcttcctctgcaca

SEQ ID NO: 412548 - DNA, 15 bp, Homo sapiens
aggcttcctctgcac

SEQ ID NO: 412549 - DNA, 15 bp, Homo sapiens
taggcttcctctgca

SEQ ID NO: 412550 - DNA, 15 bp, Homo sapiens
ataggcttcctctgc

SEQ ID NO: 412551 - DNA, 15 bp, Homo sapiens
aataggcttcctctg

SEQ ID NO: 412552 - DNA, 15 bp, Homo sapiens
caataggcttcctct

SEQ ID NO: 412553 - DNA, 15 bp, Homo sapiens
acaataggcttcctc

SEQ ID NO: 412554 - DNA, 15 bp, Homo sapiens
cacaataggcttcct

SEQ ID NO: 412555 - DNA, 15 bp, Homo sapiens
gcacaataggcttcc

SEQ ID NO: 412556 - DNA, 15 bp, Homo sapiens
tgcacaataggcttc

SEQ ID NO: 412557 - DNA, 15 bp, Homo sapiens
atgcacaataggctt

SEQ ID NO: 412558 - DNA, 15 bp, Homo sapiens
tatgcacaataggct

SEQ ID NO: 412559 - DNA, 15 bp, Homo sapiens
atatgcacaataggc

SEQ ID NO: 412560 - DNA, 15 bp, Homo sapiens
aatatgcacaatagg

SEQ ID NO: 412561 - DNA, 15 bp, Homo sapiens
aaatatgcacaatag

SEQ ID NO: 412562 - DNA, 15 bp, Homo sapiens
aaaatatgcacaata

SEQ ID NO: 412563 - DNA, 15 bp, Homo sapiens
taaaatatgcacaat

SEQ ID NO: 412564 - DNA, 15 bp, Homo sapiens
ttaaaatatgcacaa

SEQ ID NO: 412565 - DNA, 15 bp, Homo sapiens
attaaaatatgcaca

SEQ ID NO: 412566 - DNA, 15 bp, Homo sapiens
tattaaaatatgcac

SEQ ID NO: 412567 - DNA, 15 bp, Homo sapiens
gtattaaaatatgca

SEQ ID NO: 412568 - DNA, 15 bp, Homo sapiens
ggtattaaaatatgc

SEQ ID NO: 412569 - DNA, 15 bp, Homo sapiens
tggtattaaaatatg

SEQ ID NO: 412570 - DNA, 15 bp, Homo sapiens
ttggtattaaaatat

SEQ ID NO: 412571 - DNA, 15 bp, Homo sapiens
gttggtattaaaata

SEQ ID NO: 412572 - DNA, 15 bp, Homo sapiens
ggttggtattaaaat

SEQ ID NO: 412573 - DNA, 15 bp, Homo sapiens
aggttggtattaaaa

SEQ ID NO: 412574 - DNA, 15 bp, Homo sapiens
aaggttggtattaaa

SEQ ID NO: 412575 - DNA, 15 bp, Homo sapiens
taaggttggtattaa

SEQ ID NO: 412576 - DNA, 15 bp, Homo sapiens
ataaggttggtatta

SEQ ID NO: 412577 - DNA, 15 bp, Homo sapiens
aataaggttggtatt

SEQ ID NO: 412578 - DNA, 15 bp, Homo sapiens
aaataaggttggtat

SEQ ID NO: 412579 - DNA, 15 bp, Homo sapiens
taaataaggttggta

SEQ ID NO: 412580 - DNA, 15 bp, Homo sapiens
ataaataaggttggt

SEQ ID NO: 412581 - DNA, 15 bp, Homo sapiens
cataaataaggttgg

SEQ ID NO: 412582 - DNA, 15 bp, Homo sapiens
gcataaataaggttg

SEQ ID NO: 412583 - DNA, 15 bp, Homo sapiens
ggcataaataaggtt

SEQ ID NO: 412584 - DNA, 15 bp, Homo sapiens
tggcataaataaggt

SEQ ID NO: 412585 - DNA, 15 bp, Homo sapiens
atggcataaataagg

SEQ ID NO: 412586 - DNA, 15 bp, Homo sapiens
aatggcataaataag

SEQ ID NO: 412587 - DNA, 15 bp, Homo sapiens
caatggcataaataa

SEQ ID NO: 412588 - DNA, 15 bp, Homo sapiens
tcaatggcataaata

SEQ ID NO: 412589 - DNA, 15 bp, Homo sapiens
ctcaatggcataaat

SEQ ID NO: 412590 - DNA, 15 bp, Homo sapiens
actcaatggcataaa

SEQ ID NO: 412591 - DNA, 15 bp, Homo sapiens
aactcaatggcataa

SEQ ID NO: 412592 - DNA, 15 bp, Homo sapiens
aaactcaatggcata

SEQ ID NO: 412593 - DNA, 15 bp, Homo sapiens
aaaactcaatggcat

SEQ ID NO: 412594 - DNA, 15 bp, Homo sapiens
gaaaactcaatggca

SEQ ID NO: 412595 - DNA, 15 bp, Homo sapiens
agaaaactcaatggc

SEQ ID NO: 412596 - DNA, 15 bp, Homo sapiens
tagaaaactcaatgg

SEQ ID NO: 412597 - DNA, 15 bp, Homo sapiens
atagaaaactcaatg

SEQ ID NO: 412598 - DNA, 15 bp, Homo sapiens
gatagaaaactcaat

SEQ ID NO: 412599 - DNA, 15 bp, Homo sapiens
ggatagaaaactcaa

SEQ ID NO: 412600 - DNA, 15 bp, Homo sapiens
tggatagaaaactca

SEQ ID NO: 412601 - DNA, 15 bp, Homo sapiens
atggatagaaaactc

SEQ ID NO: 412602 - DNA, 15 bp, Homo sapiens
aatggatagaaaact

SEQ ID NO: 412603 - DNA, 15 bp, Homo sapiens
caatggatagaaaac

SEQ ID NO: 412604 - DNA, 15 bp, Homo sapiens
tcaatggatagaaaa

SEQ ID NO: 412605 - DNA, 15 bp, Homo sapiens
atcaatggatagaaa

SEQ ID NO: 412606 - DNA, 15 bp, Homo sapiens
aatcaatggatagaa

SEQ ID NO: 412607 - DNA, 15 bp, Homo sapiens
aaatcaatggataga

SEQ ID NO: 412608 - DNA, 15 bp, Homo sapiens
aaaatcaatggatag

SEQ ID NO: 412609 - DNA, 15 bp, Homo sapiens
aaaaatcaatggata

SEQ ID NO: 412610 - DNA, 15 bp, Homo sapiens
aaaaaatcaatggat

SEQ ID NO: 412611 - DNA, 15 bp, Homo sapiens
caaaaaatcaatgga

SEQ ID NO: 412612 - DNA, 15 bp, Homo sapiens
ccaaaaaatcaatgg

SEQ ID NO: 412613 - DNA, 15 bp, Homo sapiens
tccaaaaaatcaatg

SEQ ID NO: 412614 - DNA, 15 bp, Homo sapiens
ttccaaaaaatcaat

SEQ ID NO: 412615 - DNA, 15 bp, Homo sapiens
gttccaaaaaatcaa

SEQ ID NO: 412616 - DNA, 15 bp, Homo sapiens
agttccaaaaaatca

SEQ ID NO: 412617 - DNA, 15 bp, Homo sapiens
cagttccaaaaaatc

SEQ ID NO: 412618 - DNA, 15 bp, Homo sapiens
acagttccaaaaaat

SEQ ID NO: 412619 - DNA, 15 bp, Homo sapiens
cacagttccaaaaaa

SEQ ID NO: 412620 - DNA, 15 bp, Homo sapiens
acacagttccaaaaa

SEQ ID NO: 412621 - DNA, 15 bp, Homo sapiens
tacacagttccaaaa

SEQ ID NO: 412622 - DNA, 15 bp, Homo sapiens
atacacagttccaaa

SEQ ID NO: 412623 - DNA, 15 bp, Homo sapiens
tatacacagttccaa

SEQ ID NO: 412624 - DNA, 15 bp, Homo sapiens
atatacacagttcca

SEQ ID NO: 412625 - DNA, 15 bp, Homo sapiens
gatatacacagttcc

SEQ ID NO: 412626 - DNA, 15 bp, Homo sapiens
tgatatacacagttc

SEQ ID NO: 412627 - DNA, 15 bp, Homo sapiens
gtgatatacacagtt

SEQ ID NO: 412628 - DNA, 15 bp, Homo sapiens
tgtgatatacacagt

SEQ ID NO: 412629 - DNA, 15 bp, Homo sapiens
gtgtgatatacacag

SEQ ID NO: 412630 - DNA, 15 bp, Homo sapiens
ggtgtgatatacaca

SEQ ID NO: 412631 - DNA, 15 bp, Homo sapiens
tggtgtgatatacac

SEQ ID NO: 412632 - DNA, 15 bp, Homo sapiens
ttggtgtgatataca

SEQ ID NO: 412633 - DNA, 15 bp, Homo sapiens
tttggtgtgatatac

SEQ ID NO: 412634 - DNA, 15 bp, Homo sapiens
ttttggtgtgatata

SEQ ID NO: 412635 - DNA, 15 bp, Homo sapiens
attttggtgtgatat

SEQ ID NO: 412636 - DNA, 15 bp, Homo sapiens
gattttggtgtgata

SEQ ID NO: 412637 - DNA, 15 bp, Homo sapiens
ggattttggtgtgat

SEQ ID NO: 412638 - DNA, 15 bp, Homo sapiens
tggattttggtgtga

SEQ ID NO: 412639 - DNA, 15 bp, Homo sapiens
ttggattttggtgtg

SEQ ID NO: 412640 - DNA, 15 bp, Homo sapiens
tttggattttggtgt

SEQ ID NO: 412641 - DNA, 15 bp, Homo sapiens
atttggattttggtg

SEQ ID NO: 412642 - DNA, 15 bp, Homo sapiens
gatttggattttggt

SEQ ID NO: 412643 - DNA, 15 bp, Homo sapiens
ggatttggattttgg

SEQ ID NO: 412644 - DNA, 15 bp, Homo sapiens
tggatttggattttg

SEQ ID NO: 412645 - DNA, 15 bp, Homo sapiens
ttggatttggatttt

SEQ ID NO: 412646 - DNA, 15 bp, Homo sapiens
tttggatttggattt

SEQ ID NO: 412647 - DNA, 15 bp, Homo sapiens
ctttggatttggatt

SEQ ID NO: 412648 - DNA, 15 bp, Homo sapiens
actttggatttggat

SEQ ID NO: 412649 - DNA, 15 bp, Homo sapiens
cactttggatttgga

SEQ ID NO: 412650 - DNA, 15 bp, Homo sapiens
tcactttggatttgg

SEQ ID NO: 412651 - DNA, 15 bp, Homo sapiens
ttcactttggatttg

SEQ ID NO: 412652 - DNA, 15 bp, Homo sapiens
tttcactttggattt

SEQ ID NO: 412653 - DNA, 15 bp, Homo sapiens
ttttcactttggatt

SEQ ID NO: 412654 - DNA, 15 bp, Homo sapiens
tttttcactttggat

SEQ ID NO: 412655 - DNA, 15 bp, Homo sapiens
ctttttcactttgga

SEQ ID NO: 412656 - DNA, 15 bp, Homo sapiens
tctttttcactttgg

SEQ ID NO: 412657 - DNA, 15 bp, Homo sapiens
atctttttcactttg

SEQ ID NO: 412658 - DNA, 15 bp, Homo sapiens
tatctttttcacttt

SEQ ID NO: 412659 - DNA, 15 bp, Homo sapiens
ctatctttttcactt

SEQ ID NO: 412660 - DNA, 15 bp, Homo sapiens
actatctttttcact

SEQ ID NO: 412661 - DNA, 15 bp, Homo sapiens
gactatctttttcac

SEQ ID NO: 412662 - DNA, 15 bp, Homo sapiens
tgactatctttttca

SEQ ID NO: 412663 - DNA, 15 bp, Homo sapiens
ttgactatctttttc

SEQ ID NO: 412664 - DNA, 15 bp, Homo sapiens
tttgactatcttttt

SEQ ID NO: 412665 - DNA, 15 bp, Homo sapiens
gtttgactatctttt

SEQ ID NO: 412666 - DNA, 15 bp, Homo sapiens
tgtttgactatcttt

SEQ ID NO: 412667 - DNA, 15 bp, Homo sapiens
gtgtttgactatctt

SEQ ID NO: 412668 - DNA, 15 bp, Homo sapiens
tgtgtttgactatct

SEQ ID NO: 412669 - DNA, 15 bp, Homo sapiens
ctgtgtttgactatc

SEQ ID NO: 412670 - DNA, 15 bp, Homo sapiens
cctgtgtttgactat

SEQ ID NO: 412671 - DNA, 15 bp, Homo sapiens
acctgtgtttgacta

SEQ ID NO: 412672 - DNA, 15 bp, Homo sapiens
cacctgtgtttgact

SEQ ID NO: 412673 - DNA, 15 bp, Homo sapiens
acacctgtgtttgac

SEQ ID NO: 412674 - DNA, 15 bp, Homo sapiens
aacacctgtgtttga

SEQ ID NO: 412675 - DNA, 15 bp, Homo sapiens
caacacctgtgtttg

SEQ ID NO: 412676 - DNA, 15 bp, Homo sapiens
acaacacctgtgttt

SEQ ID NO: 412677 - DNA, 15 bp, Homo sapiens
cacaacacctgtgtt

SEQ ID NO: 412678 - DNA, 15 bp, Homo sapiens
ccacaacacctgtgt

SEQ ID NO: 412679 - DNA, 15 bp, Homo sapiens
cccacaacacctgtg

SEQ ID NO: 412680 - DNA, 15 bp, Homo sapiens
tcccacaacacctgt

SEQ ID NO: 412681 - DNA, 15 bp, Homo sapiens
atcccacaacacctg

SEQ ID NO: 412682 - DNA, 15 bp, Homo sapiens
tatcccacaacacct

SEQ ID NO: 412683 - DNA, 15 bp, Homo sapiens
gtatcccacaacacc

SEQ ID NO: 412684 - DNA, 15 bp, Homo sapiens
tgtatcccacaacac

SEQ ID NO: 412685 - DNA, 15 bp, Homo sapiens
gtgtatcccacaaca

SEQ ID NO: 412686 - DNA, 15 bp, Homo sapiens
tgtgtatcccacaac

SEQ ID NO: 412687 - DNA, 15 bp, Homo sapiens
ttgtgtatcccacaa

SEQ ID NO: 412688 - DNA, 15 bp, Homo sapiens
tttgtgtatcccaca

SEQ ID NO: 412689 - DNA, 15 bp, Homo sapiens
ttttgtgtatcccac

SEQ ID NO: 412690 - DNA, 15 bp, Homo sapiens
tttttgtgtatccca

SEQ ID NO: 412691 - DNA, 15 bp, Homo sapiens
gtttttgtgtatccc

SEQ ID NO: 412692 - DNA, 15 bp, Homo sapiens
tgtttttgtgtatcc

SEQ ID NO: 412693 - DNA, 15 bp, Homo sapiens
ttgtttttgtgtatc

SEQ ID NO: 412694 - DNA, 15 bp, Homo sapiens
cttgtttttgtgtat

SEQ ID NO: 412695 - DNA, 15 bp, Homo sapiens
gcttgtttttgtgta

SEQ ID NO: 412696 - DNA, 15 bp, Homo sapiens
tgcttgtttttgtgt

SEQ ID NO: 412697 - DNA, 15 bp, Homo sapiens
ttgcttgtttttgtg

SEQ ID NO: 412698 - DNA, 15 bp, Homo sapiens
tttgcttgtttttgt

SEQ ID NO: 412699 - DNA, 15 bp, Homo sapiens
ttttgcttgtttttg

SEQ ID NO: 412700 - DNA, 15 bp, Homo sapiens
gttttgcttgttttt

SEQ ID NO: 412701 - DNA, 15 bp, Homo sapiens
agttttgcttgtttt

SEQ ID NO: 412702 - DNA, 15 bp, Homo sapiens
tagttttgcttgttt

SEQ ID NO: 412703 - DNA, 15 bp, Homo sapiens
ctagttttgcttgtt

SEQ ID NO: 412704 - DNA, 15 bp, Homo sapiens
tctagttttgcttgt

SEQ ID NO: 412705 - DNA, 15 bp, Homo sapiens
atctagttttgcttg

SEQ ID NO: 412706 - DNA, 15 bp, Homo sapiens
aatctagttttgctt

SEQ ID NO: 412707 - DNA, 15 bp, Homo sapiens
aaatctagttttgct

SEQ ID NO: 412708 - DNA, 15 bp, Homo sapiens
aaaatctagttttgc

SEQ ID NO: 412709 - DNA, 15 bp, Homo sapiens
gaaaatctagttttg

SEQ ID NO: 412710 - DNA, 15 bp, Homo sapiens
agaaaatctagtttt

SEQ ID NO: 412711 - DNA, 15 bp, Homo sapiens
aagaaaatctagttt

SEQ ID NO: 412712 - DNA, 15 bp, Homo sapiens
caagaaaatctagtt

SEQ ID NO: 412713 - DNA, 15 bp, Homo sapiens
ccaagaaaatctagt

SEQ ID NO: 412714 - DNA, 15 bp, Homo sapiens
tccaagaaaatctag

SEQ ID NO: 412715 - DNA, 15 bp, Homo sapiens
ctccaagaaaatcta

SEQ ID NO: 412716 - DNA, 15 bp, Homo sapiens
tctccaagaaaatct

SEQ ID NO: 412717 - DNA, 15 bp, Homo sapiens
ttctccaagaaaatc

SEQ ID NO: 412718 - DNA, 15 bp, Homo sapiens
tttctccaagaaaat

SEQ ID NO: 412719 - DNA, 15 bp, Homo sapiens
ttttctccaagaaaa

SEQ ID NO: 412720 - DNA, 15 bp, Homo sapiens
tttttctccaagaaa

SEQ ID NO: 412721 - DNA, 15 bp, Homo sapiens
ctttttctccaagaa

SEQ ID NO: 412722 - DNA, 15 bp, Homo sapiens
cctttttctccaaga

SEQ ID NO: 412723 - DNA, 15 bp, Homo sapiens
ccctttttctccaag

SEQ ID NO: 412724 - DNA, 15 bp, Homo sapiens
accctttttctccaa

SEQ ID NO: 412725 - DNA, 15 bp, Homo sapiens
taccctttttctcca

SEQ ID NO: 412726 - DNA, 15 bp, Homo sapiens
ataccctttttctcc

SEQ ID NO: 412727 - DNA, 15 bp, Homo sapiens
cataccctttttctc

SEQ ID NO: 412728 - DNA, 15 bp, Homo sapiens
tcataccctttttct

SEQ ID NO: 412729 - DNA, 15 bp, Homo sapiens
atcataccctttttc

SEQ ID NO: 412730 - DNA, 15 bp, Homo sapiens
catcatacccttttt

SEQ ID NO: 412731 - DNA, 15 bp, Homo sapiens
tcatcataccctttt

SEQ ID NO: 412732 - DNA, 15 bp, Homo sapiens
gtcatcatacccttt

SEQ ID NO: 412733 - DNA, 15 bp, Homo sapiens
agtcatcataccctt

SEQ ID NO: 412734 - DNA, 15 bp, Homo sapiens
aagtcatcataccct

SEQ ID NO: 412735 - DNA, 15 bp, Homo sapiens
gaagtcatcataccc

SEQ ID NO: 412736 - DNA, 15 bp, Homo sapiens
ggaagtcatcatacc

SEQ ID NO: 412737 - DNA, 15 bp, Homo sapiens
gggaagtcatcatac

SEQ ID NO: 412738 - DNA, 15 bp, Homo sapiens
tgggaagtcatcata

SEQ ID NO: 412739 - DNA, 15 bp, Homo sapiens
ctgggaagtcatcat

SEQ ID NO: 412740 - DNA, 15 bp, Homo sapiens
cctgggaagtcatca

SEQ ID NO: 412741 - DNA, 15 bp, Homo sapiens
tcctgggaagtcatc

SEQ ID NO: 412742 - DNA, 15 bp, Homo sapiens
atcctgggaagtcat

SEQ ID NO: 412743 - DNA, 15 bp, Homo sapiens
catcctgggaagtca

SEQ ID NO: 412744 - DNA, 15 bp, Homo sapiens
gcatcctgggaagtc

SEQ ID NO: 412745 - DNA, 15 bp, Homo sapiens
agcatcctgggaagt

SEQ ID NO: 412746 - DNA, 15 bp, Homo sapiens
aagcatcctgggaag

SEQ ID NO: 412747 - DNA, 15 bp, Homo sapiens
aaagcatcctgggaa

SEQ ID NO: 412748 - DNA, 15 bp, Homo sapiens
taaagcatcctggga

SEQ ID NO: 412749 - DNA, 15 bp, Homo sapiens
ttaaagcatcctggg

SEQ ID NO: 412750 - DNA, 15 bp, Homo sapiens
tttaaagcatcctgg

SEQ ID NO: 412751 - DNA, 15 bp, Homo sapiens
atttaaagcatcctg

SEQ ID NO: 412752 - DNA, 15 bp, Homo sapiens
aatttaaagcatcct

SEQ ID NO: 412753 - DNA, 15 bp, Homo sapiens
aaatttaaagcatcc

SEQ ID NO: 412754 - DNA, 15 bp, Homo sapiens
gaaatttaaagcatc

SEQ ID NO: 412755 - DNA, 15 bp, Homo sapiens
agaaatttaaagcat

SEQ ID NO: 412756 - DNA, 15 bp, Homo sapiens
aagaaatttaaagca

SEQ ID NO: 412757 - DNA, 15 bp, Homo sapiens
aaagaaatttaaagc

SEQ ID NO: 412758 - DNA, 15 bp, Homo sapiens
gaaagaaatttaaag

SEQ ID NO: 412759 - DNA, 15 bp, Homo sapiens
agaaagaaatttaaa

SEQ ID NO: 412760 - DNA, 15 bp, Homo sapiens
aagaaagaaatttaa

SEQ ID NO: 412761 - DNA, 15 bp, Homo sapiens
caagaaagaaattta

SEQ ID NO: 412762 - DNA, 15 bp, Homo sapiens
acaagaaagaaattt

SEQ ID NO: 412763 - DNA, 15 bp, Homo sapiens
aacaagaaagaaatt

SEQ ID NO: 412764 - DNA, 15 bp, Homo sapiens
aaacaagaaagaaat

SEQ ID NO: 412765 - DNA, 15 bp, Homo sapiens
aaaacaagaaagaaa

SEQ ID NO: 412766 - DNA, 15 bp, Homo sapiens
aaaaacaagaaagaa

SEQ ID NO: 412767 - DNA, 15 bp, Homo sapiens
taaaaacaagaaaga

SEQ ID NO: 412768 - DNA, 15 bp, Homo sapiens
ctaaaaacaagaaag

SEQ ID NO: 412769 - DNA, 15 bp, Homo sapiens
gctaaaaacaagaaa

SEQ ID NO: 412770 - DNA, 15 bp, Homo sapiens
agctaaaaacaagaa

SEQ ID NO: 412771 - DNA, 15 bp, Homo sapiens
cagctaaaaacaaga

SEQ ID NO: 412772 - DNA, 15 bp, Homo sapiens
tcagctaaaaacaag

SEQ ID NO: 412773 - DNA, 15 bp, Homo sapiens
gtcagctaaaaacaa

SEQ ID NO: 412774 - DNA, 15 bp, Homo sapiens
ggtcagctaaaaaca

SEQ ID NO: 412775 - DNA, 15 bp, Homo sapiens
aggtcagctaaaaac

SEQ ID NO: 412776 - DNA, 15 bp, Homo sapiens
gaggtcagctaaaaa

SEQ ID NO: 412777 - DNA, 15 bp, Homo sapiens
tgaggtcagctaaaa

SEQ ID NO: 412778 - DNA, 15 bp, Homo sapiens
gtgaggtcagctaaa

SEQ ID NO: 412779 - DNA, 15 bp, Homo sapiens
agtgaggtcagctaa

SEQ ID NO: 412780 - DNA, 15 bp, Homo sapiens
gagtgaggtcagcta

SEQ ID NO: 412781 - DNA, 15 bp, Homo sapiens
agagtgaggtcagct

SEQ ID NO: 412782 - DNA, 15 bp, Homo sapiens
tagagtgaggtcagc

SEQ ID NO: 412783 - DNA, 15 bp, Homo sapiens
ctagagtgaggtcag

SEQ ID NO: 412784 - DNA, 15 bp, Homo sapiens
cctagagtgaggtca

SEQ ID NO: 412785 - DNA, 15 bp, Homo sapiens
tcctagagtgaggtc

SEQ ID NO: 412786 - DNA, 15 bp, Homo sapiens
ttcctagagtgaggt

SEQ ID NO: 412787 - DNA, 15 bp, Homo sapiens
cttcctagagtgagg

SEQ ID NO: 412788 - DNA, 15 bp, Homo sapiens
tcttcctagagtgag

SEQ ID NO: 412789 - DNA, 15 bp, Homo sapiens
ctcttcctagagtga

SEQ ID NO: 412790 - DNA, 15 bp, Homo sapiens
tctcttcctagagtg

SEQ ID NO: 412791 - DNA, 15 bp, Homo sapiens
ttctcttcctagagt

SEQ ID NO: 412792 - DNA, 15 bp, Homo sapiens
tttctcttcctagag

SEQ ID NO: 412793 - DNA, 15 bp, Homo sapiens
ttttctcttcctaga

SEQ ID NO: 412794 - DNA, 15 bp, Homo sapiens
attttctcttcctag

SEQ ID NO: 412795 - DNA, 15 bp, Homo sapiens
tattttctcttccta

SEQ ID NO: 412796 - DNA, 15 bp, Homo sapiens
ttattttctcttcct

SEQ ID NO: 412797 - DNA, 15 bp, Homo sapiens
tttattttctcttcc

SEQ ID NO: 412798 - DNA, 15 bp, Homo sapiens
atttattttctcttc

SEQ ID NO: 412799 - DNA, 15 bp, Homo sapiens
aatttattttctctt

SEQ ID NO: 412800 - DNA, 15 bp, Homo sapiens
taatttattttctct

SEQ ID NO: 412801 - DNA, 15 bp, Homo sapiens
ataatttattttctc

SEQ ID NO: 412802 - DNA, 15 bp, Homo sapiens
tataatttattttct

SEQ ID NO: 412803 - DNA, 15 bp, Homo sapiens
atataatttattttc

SEQ ID NO: 412804 - DNA, 15 bp, Homo sapiens
aatataatttatttt

SEQ ID NO: 412805 - DNA, 15 bp, Homo sapiens
taatataatttattt

SEQ ID NO: 412806 - DNA, 15 bp, Homo sapiens
ctaatataatttatt

SEQ ID NO: 412807 - DNA, 15 bp, Homo sapiens
actaatataatttat

SEQ ID NO: 412808 - DNA, 15 bp, Homo sapiens
aactaatataattta

SEQ ID NO: 412809 - DNA, 15 bp, Homo sapiens
taactaatataattt

SEQ ID NO: 412810 - DNA, 15 bp, Homo sapiens
ataactaatataatt

SEQ ID NO: 412811 - DNA, 15 bp, Homo sapiens
aataactaatataat

SEQ ID NO: 412812 - DNA, 15 bp, Homo sapiens
aaataactaatataa

SEQ ID NO: 412813 - DNA, 15 bp, Homo sapiens
aaaataactaatata

SEQ ID NO: 412814 - DNA, 15 bp, Homo sapiens
taaaataactaatat

SEQ ID NO: 412815 - DNA, 15 bp, Homo sapiens
ataaaataactaata

SEQ ID NO: 412816 - DNA, 15 bp, Homo sapiens
aataaaataactaat

SEQ ID NO: 412817 - DNA, 15 bp, Homo sapiens
aaataaaataactaa

SEQ ID NO: 412818 - DNA, 15 bp, Homo sapiens
gaaataaaataacta

SEQ ID NO: 412819 - DNA, 15 bp, Homo sapiens
ggaaataaaataact

SEQ ID NO: 412820 - DNA, 15 bp, Homo sapiens
tggaaataaaataac

SEQ ID NO: 412821 - DNA, 15 bp, Homo sapiens
ttggaaataaaataa

SEQ ID NO: 412822 - DNA, 15 bp, Homo sapiens
tttggaaataaaata

SEQ ID NO: 412823 - DNA, 15 bp, Homo sapiens
atttggaaataaaat

SEQ ID NO: 412824 - DNA, 15 bp, Homo sapiens
tatttggaaataaaa

SEQ ID NO: 412825 - DNA, 15 bp, Homo sapiens
ttatttggaaataaa

SEQ ID NO: 412826 - DNA, 15 bp, Homo sapiens
tttatttggaaataa

SEQ ID NO: 412827 - DNA, 15 bp, Homo sapiens
ttttatttggaaata

SEQ ID NO: 412828 - DNA, 15 bp, Homo sapiens
cttttatttggaaat

SEQ ID NO: 412829 - DNA, 15 bp, Homo sapiens
gcttttatttggaaa

SEQ ID NO: 412830 - DNA, 15 bp, Homo sapiens
tgcttttatttggaa

SEQ ID NO: 412831 - DNA, 15 bp, Homo sapiens
ttgcttttatttgga

SEQ ID NO: 412832 - DNA, 15 bp, Homo sapiens
tttgcttttatttgg

SEQ ID NO: 412833 - DNA, 15 bp, Homo sapiens
ttttgcttttatttg

SEQ ID NO: 412834 - DNA, 15 bp, Homo sapiens
tttttgcttttattt

SEQ ID NO: 412835 - DNA, 15 bp, Homo sapiens
atttttgcttttatt

SEQ ID NO: 412836 - DNA, 15 bp, Homo sapiens
aatttttgcttttat

SEQ ID NO: 412837 - DNA, 15 bp, Homo sapiens
taatttttgctttta

SEQ ID NO: 412838 - DNA, 15 bp, Homo sapiens
ataatttttgctttt

SEQ ID NO: 412839 - DNA, 15 bp, Homo sapiens
tataatttttgcttt

SEQ ID NO: 412840 - DNA, 15 bp, Homo sapiens
ttataatttttgctt

SEQ ID NO: 412841 - DNA, 15 bp, Homo sapiens
gttataatttttgct

SEQ ID NO: 412842 - DNA, 15 bp, Homo sapiens
agttataatttttgc

SEQ ID NO: 412843 - DNA, 15 bp, Homo sapiens
aagttataatttttg

SEQ ID NO: 412844 - DNA, 15 bp, Homo sapiens
caagttataattttt

SEQ ID NO: 412845 - DNA, 15 bp, Homo sapiens
tcaagttataatttt

SEQ ID NO: 412846 - DNA, 15 bp, Homo sapiens
ttcaagttataattt

SEQ ID NO: 412847 - DNA, 15 bp, Homo sapiens
tttcaagttataatt

SEQ ID NO: 412848 - DNA, 15 bp, Homo sapiens
ttttcaagttataat

SEQ ID NO: 412849 - DNA, 15 bp, Homo sapiens
attttcaagttataa

SEQ ID NO: 412850 - DNA, 15 bp, Homo sapiens
tattttcaagttata

SEQ ID NO: 412851 - DNA, 15 bp, Homo sapiens
atattttcaagttat

SEQ ID NO: 412852 - DNA, 15 bp, Homo sapiens
tatattttcaagtta

SEQ ID NO: 412853 - DNA, 15 bp, Homo sapiens
ttatattttcaagtt

SEQ ID NO: 412854 - DNA, 15 bp, Homo sapiens
tttatattttcaagt

SEQ ID NO: 412855 - DNA, 15 bp, Homo sapiens
ttttatattttcaag

SEQ ID NO: 412856 - DNA, 15 bp, Homo sapiens
cttttatattttcaa

SEQ ID NO: 412857 - DNA, 15 bp, Homo sapiens
ccttttatattttca

SEQ ID NO: 412858 - DNA, 15 bp, Homo sapiens
cccttttatattttc

SEQ ID NO: 412859 - DNA, 15 bp, Homo sapiens
acccttttatatttt

SEQ ID NO: 412860 - DNA, 15 bp, Homo sapiens
tacccttttatattt

SEQ ID NO: 412861 - DNA, 15 bp, Homo sapiens
atacccttttatatt

SEQ ID NO: 412862 - DNA, 15 bp, Homo sapiens
aatacccttttatat

SEQ ID NO: 412863 - DNA, 15 bp, Homo sapiens
taatacccttttata

SEQ ID NO: 412864 - DNA, 15 bp, Homo sapiens
gtaatacccttttat

SEQ ID NO: 412865 - DNA, 15 bp, Homo sapiens
ggtaataccctttta

SEQ ID NO: 412866 - DNA, 15 bp, Homo sapiens
aggtaataccctttt

SEQ ID NO: 412867 - DNA, 15 bp, Homo sapiens
gaggtaatacccttt

SEQ ID NO: 412868 - DNA, 15 bp, Homo sapiens
tgaggtaataccctt

SEQ ID NO: 412869 - DNA, 15 bp, Homo sapiens
ttgaggtaataccct

SEQ ID NO: 412870 - DNA, 15 bp, Homo sapiens
tttgaggtaataccc

SEQ ID NO: 412871 - DNA, 15 bp, Homo sapiens
atttgaggtaatacc

SEQ ID NO: 412872 - DNA, 15 bp, Homo sapiens
catttgaggtaatac

SEQ ID NO: 412873 - DNA, 15 bp, Homo sapiens
acatttgaggtaata

SEQ ID NO: 412874 - DNA, 15 bp, Homo sapiens
aacatttgaggtaat

SEQ ID NO: 412875 - DNA, 15 bp, Homo sapiens
caacatttgaggtaa

SEQ ID NO: 412876 - DNA, 15 bp, Homo sapiens
tcaacatttgaggta

SEQ ID NO: 412877 - DNA, 15 bp, Homo sapiens
atcaacatttgaggt

SEQ ID NO: 412878 - DNA, 15 bp, Homo sapiens
aatcaacatttgagg

SEQ ID NO: 412879 - DNA, 15 bp, Homo sapiens
taatcaacatttgag

SEQ ID NO: 412880 - DNA, 15 bp, Homo sapiens
ttaatcaacatttga

SEQ ID NO: 412881 - DNA, 15 bp, Homo sapiens
tttaatcaacatttg

SEQ ID NO: 412882 - DNA, 15 bp, Homo sapiens
ttttaatcaacattt

SEQ ID NO: 412883 - DNA, 15 bp, Homo sapiens
gttttaatcaacatt

SEQ ID NO: 412884 - DNA, 15 bp, Homo sapiens
tgttttaatcaacat

SEQ ID NO: 412885 - DNA, 15 bp, Homo sapiens
ttgttttaatcaaca

SEQ ID NO: 412886 - DNA, 15 bp, Homo sapiens
attgttttaatcaac

SEQ ID NO: 412887 - DNA, 15 bp, Homo sapiens
tattgttttaatcaa

SEQ ID NO: 412888 - DNA, 15 bp, Homo sapiens
ctattgttttaatca

SEQ ID NO: 412889 - DNA, 15 bp, Homo sapiens
actattgttttaatc

SEQ ID NO: 412890 - DNA, 15 bp, Homo sapiens
aactattgttttaat

SEQ ID NO: 412891 - DNA, 15 bp, Homo sapiens
taactattgttttaa

SEQ ID NO: 412892 - DNA, 15 bp, Homo sapiens
ataactattgtttta

SEQ ID NO: 412893 - DNA, 15 bp, Homo sapiens
tataactattgtttt

SEQ ID NO: 412894 - DNA, 15 bp, Homo sapiens
atataactattgttt

SEQ ID NO: 412895 - DNA, 15 bp, Homo sapiens
catataactattgtt

SEQ ID NO: 412896 - DNA, 15 bp, Homo sapiens
tcatataactattgt

SEQ ID NO: 412897 - DNA, 15 bp, Homo sapiens
gtcatataactattg

SEQ ID NO: 412898 - DNA, 15 bp, Homo sapiens
agtcatataactatt

SEQ ID NO: 412899 - DNA, 15 bp, Homo sapiens
tagtcatataactat

SEQ ID NO: 412900 - DNA, 15 bp, Homo sapiens
ctagtcatataacta

SEQ ID NO: 412901 - DNA, 15 bp, Homo sapiens
tctagtcatataact

SEQ ID NO: 412902 - DNA, 15 bp, Homo sapiens
ttctagtcatataac

SEQ ID NO: 412903 - DNA, 15 bp, Homo sapiens
attctagtcatataa

SEQ ID NO: 412904 - DNA, 15 bp, Homo sapiens
tattctagtcatata

SEQ ID NO: 412905 - DNA, 15 bp, Homo sapiens
ttattctagtcatat

SEQ ID NO: 412906 - DNA, 15 bp, Homo sapiens
tttattctagtcata

SEQ ID NO: 412907 - DNA, 15 bp, Homo sapiens
ttttattctagtcat

SEQ ID NO: 412908 - DNA, 15 bp, Homo sapiens
attttattctagtca

SEQ ID NO: 412909 - DNA, 15 bp, Homo sapiens
aattttattctagtc

SEQ ID NO: 412910 - DNA, 15 bp, Homo sapiens
aaattttattctagt

SEQ ID NO: 412911 - DNA, 15 bp, Homo sapiens
caaattttattctag

SEQ ID NO: 412912 - DNA, 15 bp, Homo sapiens
ccaaattttattcta

SEQ ID NO: 412913 - DNA, 15 bp, Homo sapiens
tccaaattttattct

SEQ ID NO: 412914 - DNA, 15 bp, Homo sapiens
gtccaaattttattc

SEQ ID NO: 412915 - DNA, 15 bp, Homo sapiens
agtccaaattttatt

SEQ ID NO: 412916 - DNA, 15 bp, Homo sapiens
aagtccaaattttat

SEQ ID NO: 412917 - DNA, 15 bp, Homo sapiens
aaagtccaaatttta

SEQ ID NO: 412918 - DNA, 15 bp, Homo sapiens
taaagtccaaatttt

SEQ ID NO: 412919 - DNA, 15 bp, Homo sapiens
ttaaagtccaaattt

SEQ ID NO: 412920 - DNA, 15 bp, Homo sapiens
gttaaagtccaaatt

SEQ ID NO: 412921 - DNA, 15 bp, Homo sapiens
tgttaaagtccaaat

SEQ ID NO: 412922 - DNA, 15 bp, Homo sapiens
atgttaaagtccaaa

SEQ ID NO: 412923 - DNA, 15 bp, Homo sapiens
catgttaaagtccaa

SEQ ID NO: 412924 - DNA, 15 bp, Homo sapiens
acatgttaaagtcca

SEQ ID NO: 412925 - DNA, 15 bp, Homo sapiens
tacatgttaaagtcc

SEQ ID NO: 412926 - DNA, 15 bp, Homo sapiens
ctacatgttaaagtc

SEQ ID NO: 412927 - DNA, 15 bp, Homo sapiens
tctacatgttaaagt

SEQ ID NO: 412928 - DNA, 15 bp, Homo sapiens
ttctacatgttaaag

SEQ ID NO: 412929 - DNA, 15 bp, Homo sapiens
tttctacatgttaaa

SEQ ID NO: 412930 - DNA, 15 bp, Homo sapiens
gtttctacatgttaa

SEQ ID NO: 412931 - DNA, 15 bp, Homo sapiens
agtttctacatgtta

SEQ ID NO: 412932 - DNA, 15 bp, Homo sapiens
cagtttctacatgtt

SEQ ID NO: 412933 - DNA, 15 bp, Homo sapiens
acagtttctacatgt

SEQ ID NO: 412934 - DNA, 15 bp, Homo sapiens
tacagtttctacatg

SEQ ID NO: 412935 - DNA, 15 bp, Homo sapiens
ttacagtttctacat

SEQ ID NO: 412936 - DNA, 15 bp, Homo sapiens
attacagtttctaca

SEQ ID NO: 412937 - DNA, 15 bp, Homo sapiens
tattacagtttctac

SEQ ID NO: 412938 - DNA, 15 bp, Homo sapiens
ctattacagtttcta

SEQ ID NO: 412939 - DNA, 15 bp, Homo sapiens
gctattacagtttct

SEQ ID NO: 412940 - DNA, 15 bp, Homo sapiens
agctattacagtttc

SEQ ID NO: 412941 - DNA, 15 bp, Homo sapiens
tagctattacagttt

SEQ ID NO: 412942 - DNA, 15 bp, Homo sapiens
gtagctattacagtt

SEQ ID NO: 412943 - DNA, 15 bp, Homo sapiens
agtagctattacagt

SEQ ID NO: 412944 - DNA, 15 bp, Homo sapiens
cagtagctattacag

SEQ ID NO: 412945 - DNA, 15 bp, Homo sapiens
acagtagctattaca

SEQ ID NO: 412946 - DNA, 15 bp, Homo sapiens
aacagtagctattac

SEQ ID NO: 412947 - DNA, 15 bp, Homo sapiens
aaacagtagctatta

SEQ ID NO: 412948 - DNA, 15 bp, Homo sapiens
taaacagtagctatt

SEQ ID NO: 412949 - DNA, 15 bp, Homo sapiens
ctaaacagtagctat

SEQ ID NO: 412950 - DNA, 15 bp, Homo sapiens
actaaacagtagcta

SEQ ID NO: 412951 - DNA, 15 bp, Homo sapiens
cactaaacagtagct

SEQ ID NO: 412952 - DNA, 15 bp, Homo sapiens
acactaaacagtagc

SEQ ID NO: 412953 - DNA, 15 bp, Homo sapiens
cacactaaacagtag

SEQ ID NO: 412954 - DNA, 15 bp, Homo sapiens
gcacactaaacagta

SEQ ID NO: 412955 - DNA, 15 bp, Homo sapiens
agcacactaaacagt

SEQ ID NO: 412956 - DNA, 15 bp, Homo sapiens
gagcacactaaacag

SEQ ID NO: 412957 - DNA, 15 bp, Homo sapiens
tgagcacactaaaca

SEQ ID NO: 412958 - DNA, 15 bp, Homo sapiens
atgagcacactaaac

SEQ ID NO: 412959 - DNA, 15 bp, Homo sapiens
tatgagcacactaaa

SEQ ID NO: 412960 - DNA, 15 bp, Homo sapiens
ctatgagcacactaa

SEQ ID NO: 412961 - DNA, 15 bp, Homo sapiens
actatgagcacacta

SEQ ID NO: 412962 - DNA, 15 bp, Homo sapiens
tactatgagcacact

SEQ ID NO: 412963 - DNA, 15 bp, Homo sapiens
ctactatgagcacac

SEQ ID NO: 412964 - DNA, 15 bp, Homo sapiens
cctactatgagcaca

SEQ ID NO: 412965 - DNA, 15 bp, Homo sapiens
acctactatgagcac

SEQ ID NO: 412966 - DNA, 15 bp, Homo sapiens
tacctactatgagca

SEQ ID NO: 412967 - DNA, 15 bp, Homo sapiens
gtacctactatgagc

SEQ ID NO: 412968 - DNA, 15 bp, Homo sapiens
ggtacctactatgag

SEQ ID NO: 412969 - DNA, 15 bp, Homo sapiens
aggtacctactatga

SEQ ID NO: 412970 - DNA, 15 bp, Homo sapiens
taggtacctactatg

SEQ ID NO: 412971 - DNA, 15 bp, Homo sapiens
ttaggtacctactat

SEQ ID NO: 412972 - DNA, 15 bp, Homo sapiens
gttaggtacctacta

SEQ ID NO: 412973 - DNA, 15 bp, Homo sapiens
tgttaggtacctact

SEQ ID NO: 412974 - DNA, 15 bp, Homo sapiens
atgttaggtacctac

SEQ ID NO: 412975 - DNA, 15 bp, Homo sapiens
catgttaggtaccta

SEQ ID NO: 412976 - DNA, 15 bp, Homo sapiens
ccatgttaggtacct

SEQ ID NO: 412977 - DNA, 15 bp, Homo sapiens
gccatgttaggtacc

SEQ ID NO: 412978 - DNA, 15 bp, Homo sapiens
ggccatgttaggtac

SEQ ID NO: 412979 - DNA, 15 bp, Homo sapiens
gggccatgttaggta

SEQ ID NO: 412980 - DNA, 15 bp, Homo sapiens
agggccatgttaggt

SEQ ID NO: 412981 - DNA, 15 bp, Homo sapiens
tagggccatgttagg

SEQ ID NO: 412982 - DNA, 15 bp, Homo sapiens
ttagggccatgttag

SEQ ID NO: 412983 - DNA, 15 bp, Homo sapiens
cttagggccatgtta

SEQ ID NO: 412984 - DNA, 15 bp, Homo sapiens
tcttagggccatgtt

SEQ ID NO: 412985 - DNA, 15 bp, Homo sapiens
ttcttagggccatgt

SEQ ID NO: 412986 - DNA, 15 bp, Homo sapiens
gttcttagggccatg

SEQ ID NO: 412987 - DNA, 15 bp, Homo sapiens
agttcttagggccat

SEQ ID NO: 412988 - DNA, 15 bp, Homo sapiens
aagttcttagggcca

SEQ ID NO: 412989 - DNA, 15 bp, Homo sapiens
gaagttcttagggcc

SEQ ID NO: 412990 - DNA, 15 bp, Homo sapiens
agaagttcttagggc

SEQ ID NO: 412991 - DNA, 15 bp, Homo sapiens
aagaagttcttaggg

SEQ ID NO: 412992 - DNA, 15 bp, Homo sapiens
gaagaagttcttagg

SEQ ID NO: 412993 - DNA, 15 bp, Homo sapiens
agaagaagttcttag

SEQ ID NO: 412994 - DNA, 15 bp, Homo sapiens
gagaagaagttctta

SEQ ID NO: 412995 - DNA, 15 bp, Homo sapiens
tgagaagaagttctt

SEQ ID NO: 412996 - DNA, 15 bp, Homo sapiens
atgagaagaagttct

SEQ ID NO: 412997 - DNA, 15 bp, Homo sapiens
aatgagaagaagttc

SEQ ID NO: 412998 - DNA, 15 bp, Homo sapiens
gaatgagaagaagtt

SEQ ID NO: 412999 - DNA, 15 bp, Homo sapiens
agaatgagaagaagt

SEQ ID NO: 413000 - DNA, 15 bp, Homo sapiens
aagaatgagaagaag

SEQ ID NO: 413001 - DNA, 15 bp, Homo sapiens
taagaatgagaagaa

SEQ ID NO: 413002 - DNA, 15 bp, Homo sapiens
ataagaatgagaaga

SEQ ID NO: 413003 - DNA, 15 bp, Homo sapiens
aataagaatgagaag

SEQ ID NO: 413004 - DNA, 15 bp, Homo sapiens
taataagaatgagaa

SEQ ID NO: 413005 - DNA, 15 bp, Homo sapiens
ttaataagaatgaga

SEQ ID NO: 413006 - DNA, 15 bp, Homo sapiens
attaataagaatgag

SEQ ID NO: 413007 - DNA, 15 bp, Homo sapiens
gattaataagaatga

SEQ ID NO: 413008 - DNA, 15 bp, Homo sapiens
agattaataagaatg

SEQ ID NO: 413009 - DNA, 15 bp, Homo sapiens
aagattaataagaat

SEQ ID NO: 413010 - DNA, 15 bp, Homo sapiens
aaagattaataagaa

SEQ ID NO: 413011 - DNA, 15 bp, Homo sapiens
taaagattaataaga

SEQ ID NO: 413012 - DNA, 15 bp, Homo sapiens
ataaagattaataag

SEQ ID NO: 413013 - DNA, 15 bp, Homo sapiens
aataaagattaataa

SEQ ID NO: 413014 - DNA, 15 bp, Homo sapiens
taataaagattaata

SEQ ID NO: 413015 - DNA, 15 bp, Homo sapiens
ttaataaagattaat

SEQ ID NO: 413016 - DNA, 15 bp, Homo sapiens
cttaataaagattaa

SEQ ID NO: 413017 - DNA, 15 bp, Homo sapiens
ccttaataaagatta

SEQ ID NO: 413018 - DNA, 15 bp, Homo sapiens
gccttaataaagatt

SEQ ID NO: 413019 - DNA, 15 bp, Homo sapiens
ggccttaataaagat

SEQ ID NO: 413020 - DNA, 15 bp, Homo sapiens
tggccttaataaaga

SEQ ID NO: 413021 - DNA, 15 bp, Homo sapiens
ctggccttaataaag

SEQ ID NO: 413022 - DNA, 15 bp, Homo sapiens
cctggccttaataaa

SEQ ID NO: 413023 - DNA, 15 bp, Homo sapiens
tcctggccttaataa

SEQ ID NO: 413024 - DNA, 15 bp, Homo sapiens
atcctggccttaata

SEQ ID NO: 413025 - DNA, 15 bp, Homo sapiens
tatcctggccttaat

SEQ ID NO: 413026 - DNA, 15 bp, Homo sapiens
ttatcctggccttaa

SEQ ID NO: 413027 - DNA, 15 bp, Homo sapiens
attatcctggcctta

SEQ ID NO: 413028 - DNA, 15 bp, Homo sapiens
tattatcctggcctt

SEQ ID NO: 413029 - DNA, 15 bp, Homo sapiens
ttattatcctggcct

SEQ ID NO: 413030 - DNA, 15 bp, Homo sapiens
attattatcctggcc

SEQ ID NO: 413031 - DNA, 15 bp, Homo sapiens
tattattatcctggc

SEQ ID NO: 413032 - DNA, 15 bp, Homo sapiens
atattattatcctgg

SEQ ID NO: 413033 - DNA, 15 bp, Homo sapiens
tatattattatcctg

SEQ ID NO: 413034 - DNA, 15 bp, Homo sapiens
atatattattatcct

SEQ ID NO: 413035 - DNA, 15 bp, Homo sapiens
catatattattatcc

SEQ ID NO: 413036 - DNA, 15 bp, Homo sapiens
gcatatattattatc

SEQ ID NO: 413037 - DNA, 15 bp, Homo sapiens
tgcatatattattat

SEQ ID NO: 413038 - DNA, 15 bp, Homo sapiens
atgcatatattatta

SEQ ID NO: 413039 - DNA, 15 bp, Homo sapiens
catgcatatattatt

SEQ ID NO: 413040 - DNA, 15 bp, Homo sapiens
ccatgcatatattat

SEQ ID NO: 413041 - DNA, 15 bp, Homo sapiens
gccatgcatatatta

SEQ ID NO: 413042 - DNA, 15 bp, Homo sapiens
tgccatgcatatatt

SEQ ID NO: 413043 - DNA, 15 bp, Homo sapiens
ctgccatgcatatat

SEQ ID NO: 413044 - DNA, 15 bp, Homo sapiens
cctgccatgcatata

SEQ ID NO: 413045 - DNA, 15 bp, Homo sapiens
acctgccatgcatat

SEQ ID NO: 413046 - DNA, 15 bp, Homo sapiens
gacctgccatgcata

SEQ ID NO: 413047 - DNA, 15 bp, Homo sapiens
agacctgccatgcat

SEQ ID NO: 413048 - DNA, 15 bp, Homo sapiens
cagacctgccatgca

SEQ ID NO: 413049 - DNA, 15 bp, Homo sapiens
tcagacctgccatgc

SEQ ID NO: 413050 - DNA, 15 bp, Homo sapiens
ttcagacctgccatg

SEQ ID NO: 413051 - DNA, 15 bp, Homo sapiens
attcagacctgccat

SEQ ID NO: 413052 - DNA, 15 bp, Homo sapiens
cattcagacctgcca

SEQ ID NO: 413053 - DNA, 15 bp, Homo sapiens
gcattcagacctgcc

SEQ ID NO: 413054 - DNA, 15 bp, Homo sapiens
agcattcagacctgc

SEQ ID NO: 413055 - DNA, 15 bp, Homo sapiens
aagcattcagacctg

SEQ ID NO: 413056 - DNA, 15 bp, Homo sapiens
gaagcattcagacct

SEQ ID NO: 413057 - DNA, 15 bp, Homo sapiens
tgaagcattcagacc

SEQ ID NO: 413058 - DNA, 15 bp, Homo sapiens
ttgaagcattcagac

SEQ ID NO: 413059 - DNA, 15 bp, Homo sapiens
attgaagcattcaga

SEQ ID NO: 413060 - DNA, 15 bp, Homo sapiens
aattgaagcattcag

SEQ ID NO: 413061 - DNA, 15 bp, Homo sapiens
aaattgaagcattca

SEQ ID NO: 413062 - DNA, 15 bp, Homo sapiens
aaaattgaagcattc

SEQ ID NO: 413063 - DNA, 15 bp, Homo sapiens
taaaattgaagcatt

SEQ ID NO: 413064 - DNA, 15 bp, Homo sapiens
ttaaaattgaagcat

SEQ ID NO: 413065 - DNA, 15 bp, Homo sapiens
tttaaaattgaagca

SEQ ID NO: 413066 - DNA, 15 bp, Homo sapiens
atttaaaattgaagc

SEQ ID NO: 413067 - DNA, 15 bp, Homo sapiens
catttaaaattgaag

SEQ ID NO: 413068 - DNA, 15 bp, Homo sapiens
gcatttaaaattgaa

SEQ ID NO: 413069 - DNA, 15 bp, Homo sapiens
agcatttaaaattga

SEQ ID NO: 413070 - DNA, 15 bp, Homo sapiens
aagcatttaaaattg

SEQ ID NO: 413071 - DNA, 15 bp, Homo sapiens
gaagcatttaaaatt

SEQ ID NO: 413072 - DNA, 15 bp, Homo sapiens
agaagcatttaaaat

SEQ ID NO: 413073 - DNA, 15 bp, Homo sapiens
gagaagcatttaaaa

SEQ ID NO: 413074 - DNA, 15 bp, Homo sapiens
tgagaagcatttaaa

SEQ ID NO: 413075 - DNA, 15 bp, Homo sapiens
ttgagaagcatttaa

SEQ ID NO: 413076 - DNA, 15 bp, Homo sapiens
tttgagaagcattta

SEQ ID NO: 413077 - DNA, 15 bp, Homo sapiens
atttgagaagcattt

SEQ ID NO: 413078 - DNA, 15 bp, Homo sapiens
aatttgagaagcatt

SEQ ID NO: 413079 - DNA, 15 bp, Homo sapiens
taatttgagaagcat

SEQ ID NO: 413080 - DNA, 15 bp, Homo sapiens
ataatttgagaagca

SEQ ID NO: 413081 - DNA, 15 bp, Homo sapiens
aataatttgagaagc

SEQ ID NO: 413082 - DNA, 15 bp, Homo sapiens
gaataatttgagaag

SEQ ID NO: 413083 - DNA, 15 bp, Homo sapiens
tgaataatttgagaa

SEQ ID NO: 413084 - DNA, 15 bp, Homo sapiens
atgaataatttgaga

SEQ ID NO: 413085 - DNA, 15 bp, Homo sapiens
gatgaataatttgag

SEQ ID NO: 413086 - DNA, 15 bp, Homo sapiens
agatgaataatttga

SEQ ID NO: 413087 - DNA, 15 bp, Homo sapiens
aagatgaataatttg

SEQ ID NO: 413088 - DNA, 15 bp, Homo sapiens
aaagatgaataattt

SEQ ID NO: 413089 - DNA, 15 bp, Homo sapiens
aaaagatgaataatt

SEQ ID NO: 413090 - DNA, 15 bp, Homo sapiens
aaaaagatgaataat

SEQ ID NO: 413091 - DNA, 15 bp, Homo sapiens
caaaaagatgaataa

SEQ ID NO: 413092 - DNA, 15 bp, Homo sapiens
tcaaaaagatgaata

SEQ ID NO: 413093 - DNA, 15 bp, Homo sapiens
atcaaaaagatgaat

SEQ ID NO: 413094 - DNA, 15 bp, Homo sapiens
catcaaaaagatgaa

SEQ ID NO: 413095 - DNA, 15 bp, Homo sapiens
acatcaaaaagatga

SEQ ID NO: 413096 - DNA, 15 bp, Homo sapiens
aacatcaaaaagatg

SEQ ID NO: 413097 - DNA, 15 bp, Homo sapiens
aaacatcaaaaagat

SEQ ID NO: 413098 - DNA, 15 bp, Homo sapiens
aaaacatcaaaaaga

SEQ ID NO: 413099 - DNA, 15 bp, Homo sapiens
taaaacatcaaaaag

SEQ ID NO: 413100 - DNA, 15 bp, Homo sapiens
ctaaaacatcaaaaa

SEQ ID NO: 413101 - DNA, 15 bp, Homo sapiens
tctaaaacatcaaaa

SEQ ID NO: 413102 - DNA, 15 bp, Homo sapiens
atctaaaacatcaaa

SEQ ID NO: 413103 - DNA, 15 bp, Homo sapiens
gatctaaaacatcaa

SEQ ID NO: 413104 - DNA, 15 bp, Homo sapiens
ggatctaaaacatca

SEQ ID NO: 413105 - DNA, 15 bp, Homo sapiens
tggatctaaaacatc

SEQ ID NO: 413106 - DNA, 15 bp, Homo sapiens
ctggatctaaaacat

SEQ ID NO: 413107 - DNA, 15 bp, Homo sapiens
cctggatctaaaaca

SEQ ID NO: 413108 - DNA, 15 bp, Homo sapiens
tcctggatctaaaac

SEQ ID NO: 413109 - DNA, 15 bp, Homo sapiens
ttcctggatctaaaa

SEQ ID NO: 413110 - DNA, 15 bp, Homo sapiens
tttcctggatctaaa

SEQ ID NO: 413111 - DNA, 15 bp, Homo sapiens
gtttcctggatctaa

SEQ ID NO: 413112 - DNA, 15 bp, Homo sapiens
ggtttcctggatcta

SEQ ID NO: 413113 - DNA, 15 bp, Homo sapiens
aggtttcctggatct

SEQ ID NO: 413114 - DNA, 15 bp, Homo sapiens
aaggtttcctggatc

SEQ ID NO: 413115 - DNA, 15 bp, Homo sapiens
aaaggtttcctggat

SEQ ID NO: 413116 - DNA, 15 bp, Homo sapiens
caaaggtttcctgga

SEQ ID NO: 413117 - DNA, 15 bp, Homo sapiens
ccaaaggtttcctgg

SEQ ID NO: 413118 - DNA, 15 bp, Homo sapiens
tccaaaggtttcctg

SEQ ID NO: 413119 - DNA, 15 bp, Homo sapiens
atccaaaggtttcct

SEQ ID NO: 413120 - DNA, 15 bp, Homo sapiens
catccaaaggtttcc

SEQ ID NO: 413121 - DNA, 15 bp, Homo sapiens
gcatccaaaggtttc

SEQ ID NO: 413122 - DNA, 15 bp, Homo sapiens
ggcatccaaaggttt

SEQ ID NO: 413123 - DNA, 15 bp, Homo sapiens
aggcatccaaaggtt

SEQ ID NO: 413124 - DNA, 15 bp, Homo sapiens
gaggcatccaaaggt

SEQ ID NO: 413125 - DNA, 15 bp, Homo sapiens
ggaggcatccaaagg

SEQ ID NO: 413126 - DNA, 15 bp, Homo sapiens
gggaggcatccaaag

SEQ ID NO: 413127 - DNA, 15 bp, Homo sapiens
ggggaggcatccaaa

SEQ ID NO: 413128 - DNA, 15 bp, Homo sapiens
tggggaggcatccaa

SEQ ID NO: 413129 - DNA, 15 bp, Homo sapiens
gtggggaggcatcca

SEQ ID NO: 413130 - DNA, 15 bp, Homo sapiens
tgtggggaggcatcc

SEQ ID NO: 413131 - DNA, 15 bp, Homo sapiens
ttgtggggaggcatc

SEQ ID NO: 413132 - DNA, 15 bp, Homo sapiens
attgtggggaggcat

SEQ ID NO: 413133 - DNA, 15 bp, Homo sapiens
aattgtggggaggca

SEQ ID NO: 413134 - DNA, 15 bp, Homo sapiens
aaattgtggggaggc

SEQ ID NO: 413135 - DNA, 15 bp, Homo sapiens
taaattgtggggagg

SEQ ID NO: 413136 - DNA, 15 bp, Homo sapiens
ataaattgtggggag

SEQ ID NO: 413137 - DNA, 15 bp, Homo sapiens
aataaattgtgggga

SEQ ID NO: 413138 - DNA, 15 bp, Homo sapiens
taataaattgtgggg

SEQ ID NO: 413139 - DNA, 15 bp, Homo sapiens
ttaataaattgtggg

SEQ ID NO: 413140 - DNA, 15 bp, Homo sapiens
tttaataaattgtgg

SEQ ID NO: 413141 - DNA, 15 bp, Homo sapiens
atttaataaattgtg

SEQ ID NO: 413142 - DNA, 15 bp, Homo sapiens
aatttaataaattgt

SEQ ID NO: 413143 - DNA, 15 bp, Homo sapiens
aaatttaataaattg

SEQ ID NO: 413144 - DNA, 15 bp, Homo sapiens
aaaatttaataaatt

SEQ ID NO: 413145 - DNA, 15 bp, Homo sapiens
aaaaatttaataaat

SEQ ID NO: 413146 - DNA, 15 bp, Homo sapiens
aaaaaatttaataaa

SEQ ID NO: 413147 - DNA, 15 bp, Homo sapiens
gaaaaaatttaataa

SEQ ID NO: 413148 - DNA, 15 bp, Homo sapiens
tgaaaaaatttaata

SEQ ID NO: 413149 - DNA, 15 bp, Homo sapiens
ttgaaaaaatttaat

SEQ ID NO: 413150 - DNA, 15 bp, Homo sapiens
attgaaaaaatttaa

SEQ ID NO: 413151 - DNA, 15 bp, Homo sapiens
cattgaaaaaattta

SEQ ID NO: 413152 - DNA, 15 bp, Homo sapiens
acattgaaaaaattt

SEQ ID NO: 413153 - DNA, 15 bp, Homo sapiens
cacattgaaaaaatt

SEQ ID NO: 413154 - DNA, 15 bp, Homo sapiens
acacattgaaaaaat

SEQ ID NO: 413155 - DNA, 15 bp, Homo sapiens
aacacattgaaaaaa

SEQ ID NO: 413156 - DNA, 15 bp, Homo sapiens
taacacattgaaaaa

SEQ ID NO: 413157 - DNA, 15 bp, Homo sapiens
ttaacacattgaaaa

SEQ ID NO: 413158 - DNA, 15 bp, Homo sapiens
attaacacattgaaa

SEQ ID NO: 413159 - DNA, 15 bp, Homo sapiens
gattaacacattgaa

SEQ ID NO: 413160 - DNA, 15 bp, Homo sapiens
tgattaacacattga

SEQ ID NO: 413161 - DNA, 15 bp, Homo sapiens
atgattaacacattg

SEQ ID NO: 413162 - DNA, 15 bp, Homo sapiens
aatgattaacacatt

SEQ ID NO: 413163 - DNA, 15 bp, Homo sapiens
aaatgattaacacat

SEQ ID NO: 413164 - DNA, 15 bp, Homo sapiens
gaaatgattaacaca

SEQ ID NO: 413165 - DNA, 15 bp, Homo sapiens
ggaaatgattaacac

SEQ ID NO: 413166 - DNA, 15 bp, Homo sapiens
aggaaatgattaaca

SEQ ID NO: 413167 - DNA, 15 bp, Homo sapiens
aaggaaatgattaac

SEQ ID NO: 413168 - DNA, 15 bp, Homo sapiens
aaaggaaatgattaa

SEQ ID NO: 413169 - DNA, 15 bp, Homo sapiens
taaaggaaatgatta

SEQ ID NO: 413170 - DNA, 15 bp, Homo sapiens
ataaaggaaatgatt

SEQ ID NO: 413171 - DNA, 15 bp, Homo sapiens
aataaaggaaatgat

SEQ ID NO: 413172 - DNA, 15 bp, Homo sapiens
taataaaggaaatga

SEQ ID NO: 413173 - DNA, 15 bp, Homo sapiens
ataataaaggaaatg

SEQ ID NO: 413174 - DNA, 15 bp, Homo sapiens
aataataaaggaaat

SEQ ID NO: 413175 - DNA, 15 bp, Homo sapiens
aaataataaaggaaa

SEQ ID NO: 413176 - DNA, 15 bp, Homo sapiens
aaaataataaaggaa

SEQ ID NO: 413177 - DNA, 15 bp, Homo sapiens
aaaaataataaagga

SEQ ID NO: 413178 - DNA, 15 bp, Homo sapiens
taaaaataataaagg

SEQ ID NO: 413179 - DNA, 15 bp, Homo sapiens
ataaaaataataaag

SEQ ID NO: 413180 - DNA, 15 bp, Homo sapiens
tataaaaataataaa

SEQ ID NO: 413181 - DNA, 15 bp, Homo sapiens
ctataaaaataataa

SEQ ID NO: 413182 - DNA, 15 bp, Homo sapiens
tctataaaaataata

SEQ ID NO: 413183 - DNA, 15 bp, Homo sapiens
ttctataaaaataat

SEQ ID NO: 413184 - DNA, 15 bp, Homo sapiens
tttctataaaaataa

SEQ ID NO: 413185 - DNA, 15 bp, Homo sapiens
atttctataaaaata

SEQ ID NO: 413186 - DNA, 15 bp, Homo sapiens
aatttctataaaaat

SEQ ID NO: 413187 - DNA, 15 bp, Homo sapiens
taatttctataaaaa

SEQ ID NO: 413188 - DNA, 15 bp, Homo sapiens
ataatttctataaaa

SEQ ID NO: 413189 - DNA, 15 bp, Homo sapiens
aataatttctataaa

SEQ ID NO: 413190 - DNA, 15 bp, Homo sapiens
aaataatttctataa

SEQ ID NO: 413191 - DNA, 15 bp, Homo sapiens
aaaataatttctata

SEQ ID NO: 413192 - DNA, 15 bp, Homo sapiens
taaaataatttctat

SEQ ID NO: 413193 - DNA, 15 bp, Homo sapiens
ttaaaataatttcta

SEQ ID NO: 413194 - DNA, 15 bp, Homo sapiens
cttaaaataatttct

SEQ ID NO: 413195 - DNA, 15 bp, Homo sapiens
acttaaaataatttc

SEQ ID NO: 413196 - DNA, 15 bp, Homo sapiens
cacttaaaataattt

SEQ ID NO: 413197 - DNA, 15 bp, Homo sapiens
acacttaaaataatt

SEQ ID NO: 413198 - DNA, 15 bp, Homo sapiens
cacacttaaaataat

SEQ ID NO: 413199 - DNA, 15 bp, Homo sapiens
tcacacttaaaataa

SEQ ID NO: 413200 - DNA, 15 bp, Homo sapiens
atcacacttaaaata

SEQ ID NO: 413201 - DNA, 15 bp, Homo sapiens
aatcacacttaaaat

SEQ ID NO: 413202 - DNA, 15 bp, Homo sapiens
aaatcacacttaaaa

SEQ ID NO: 413203 - DNA, 15 bp, Homo sapiens
caaatcacacttaaa

SEQ ID NO: 413204 - DNA, 15 bp, Homo sapiens
ccaaatcacacttaa

SEQ ID NO: 413205 - DNA, 15 bp, Homo sapiens
gccaaatcacactta

SEQ ID NO: 413206 - DNA, 15 bp, Homo sapiens
tgccaaatcacactt

SEQ ID NO: 413207 - DNA, 15 bp, Homo sapiens
gtgccaaatcacact

SEQ ID NO: 413208 - DNA, 15 bp, Homo sapiens
cgtgccaaatcacac

SEQ ID NO: 413209 - DNA, 15 bp, Homo sapiens
tcgtgccaaatcaca

SEQ ID NO: 413210 - DNA, 15 bp, Homo sapiens
gtcgtgccaaatcac

SEQ ID NO: 413211 - DNA, 15 bp, Homo sapiens
ggtcgtgccaaatca

SEQ ID NO: 413212 - DNA, 15 bp, Homo sapiens
aggtcgtgccaaatc

SEQ ID NO: 413213 - DNA, 15 bp, Homo sapiens
caggtcgtgccaaat

SEQ ID NO: 413214 - DNA, 15 bp, Homo sapiens
acaggtcgtgccaaa

SEQ ID NO: 413215 - DNA, 15 bp, Homo sapiens
tacaggtcgtgccaa

SEQ ID NO: 413216 - DNA, 15 bp, Homo sapiens
ctacaggtcgtgcca

SEQ ID NO: 413217 - DNA, 15 bp, Homo sapiens
gctacaggtcgtgcc

SEQ ID NO: 413218 - DNA, 15 bp, Homo sapiens
tgctacaggtcgtgc

SEQ ID NO: 413219 - DNA, 15 bp, Homo sapiens
ctgctacaggtcgtg

SEQ ID NO: 413220 - DNA, 15 bp, Homo sapiens
tctgctacaggtcgt

SEQ ID NO: 413221 - DNA, 15 bp, Homo sapiens
ttctgctacaggtcg

SEQ ID NO: 413222 - DNA, 15 bp, Homo sapiens
tttctgctacaggtc

SEQ ID NO: 413223 - DNA, 15 bp, Homo sapiens
atttctgctacaggt

SEQ ID NO: 413224 - DNA, 15 bp, Homo sapiens
aatttctgctacagg

SEQ ID NO: 413225 - DNA, 15 bp, Homo sapiens
aaatttctgctacag

SEQ ID NO: 413226 - DNA, 15 bp, Homo sapiens
aaaatttctgctaca

SEQ ID NO: 413227 - DNA, 15 bp, Homo sapiens
taaaatttctgctac

SEQ ID NO: 413228 - DNA, 15 bp, Homo sapiens
ttaaaatttctgcta

SEQ ID NO: 413229 - DNA, 15 bp, Homo sapiens
attaaaatttctgct

SEQ ID NO: 413230 - DNA, 15 bp, Homo sapiens
gattaaaatttctgc

SEQ ID NO: 413231 - DNA, 15 bp, Homo sapiens
tgattaaaatttctg

SEQ ID NO: 413232 - DNA, 15 bp, Homo sapiens
atgattaaaatttct

SEQ ID NO: 413233 - DNA, 15 bp, Homo sapiens
aatgattaaaatttc

SEQ ID NO: 413234 - DNA, 15 bp, Homo sapiens
aaatgattaaaattt

SEQ ID NO: 413235 - DNA, 15 bp, Homo sapiens
gaaatgattaaaatt

SEQ ID NO: 413236 - DNA, 15 bp, Homo sapiens
tgaaatgattaaaat

SEQ ID NO: 413237 - DNA, 15 bp, Homo sapiens
atgaaatgattaaaa

SEQ ID NO: 413238 - DNA, 15 bp, Homo sapiens
aatgaaatgattaaa

SEQ ID NO: 413239 - DNA, 15 bp, Homo sapiens
gaatgaaatgattaa

SEQ ID NO: 413240 - DNA, 15 bp, Homo sapiens
tgaatgaaatgatta

SEQ ID NO: 413241 - DNA, 15 bp, Homo sapiens
atgaatgaaatgatt

SEQ ID NO: 413242 - DNA, 15 bp, Homo sapiens
gatgaatgaaatgat

SEQ ID NO: 413243 - DNA, 15 bp, Homo sapiens
agatgaatgaaatga

SEQ ID NO: 413244 - DNA, 15 bp, Homo sapiens
aagatgaatgaaatg

SEQ ID NO: 413245 - DNA, 15 bp, Homo sapiens
aaagatgaatgaaat

SEQ ID NO: 413246 - DNA, 15 bp, Homo sapiens
aaaagatgaatgaaa

SEQ ID NO: 413247 - DNA, 15 bp, Homo sapiens
aaaaagatgaatgaa

SEQ ID NO: 413248 - DNA, 15 bp, Homo sapiens
taaaaagatgaatga

SEQ ID NO: 413249 - DNA, 15 bp, Homo sapiens
gtaaaaagatgaatg

SEQ ID NO: 413250 - DNA, 15 bp, Homo sapiens
agtaaaaagatgaat

SEQ ID NO: 413251 - DNA, 15 bp, Homo sapiens
tagtaaaaagatgaa

SEQ ID NO: 413252 - DNA, 15 bp, Homo sapiens
atagtaaaaagatga

SEQ ID NO: 413253 - DNA, 15 bp, Homo sapiens
gatagtaaaaagatg

SEQ ID NO: 413254 - DNA, 15 bp, Homo sapiens
tgatagtaaaaagat

SEQ ID NO: 413255 - DNA, 15 bp, Homo sapiens
atgatagtaaaaaga

SEQ ID NO: 413256 - DNA, 15 bp, Homo sapiens
tatgatagtaaaaag

SEQ ID NO: 413257 - DNA, 15 bp, Homo sapiens
ctatgatagtaaaaa

SEQ ID NO: 413258 - DNA, 15 bp, Homo sapiens
actatgatagtaaaa

SEQ ID NO: 413259 - DNA, 15 bp, Homo sapiens
aactatgatagtaaa

SEQ ID NO: 413260 - DNA, 15 bp, Homo sapiens
aaactatgatagtaa

SEQ ID NO: 413261 - DNA, 15 bp, Homo sapiens
taaactatgatagta

SEQ ID NO: 413262 - DNA, 15 bp, Homo sapiens
ataaactatgatagt

SEQ ID NO: 413263 - DNA, 15 bp, Homo sapiens
gataaactatgatag

SEQ ID NO: 413264 - DNA, 15 bp, Homo sapiens
agataaactatgata

SEQ ID NO: 413265 - DNA, 15 bp, Homo sapiens
cagataaactatgat

SEQ ID NO: 413266 - DNA, 15 bp, Homo sapiens
tcagataaactatga

SEQ ID NO: 413267 - DNA, 15 bp, Homo sapiens
ctcagataaactatg

SEQ ID NO: 413268 - DNA, 15 bp, Homo sapiens
tctcagataaactat

SEQ ID NO: 413269 - DNA, 15 bp, Homo sapiens
gtctcagataaacta

SEQ ID NO: 413270 - DNA, 15 bp, Homo sapiens
tgtctcagataaact

SEQ ID NO: 413271 - DNA, 15 bp, Homo sapiens
atgtctcagataaac

SEQ ID NO: 413272 - DNA, 15 bp, Homo sapiens
tatgtctcagataaa

SEQ ID NO: 413273 - DNA, 15 bp, Homo sapiens
ttatgtctcagataa

SEQ ID NO: 413274 - DNA, 15 bp, Homo sapiens
attatgtctcagata

SEQ ID NO: 413275 - DNA, 15 bp, Homo sapiens
cattatgtctcagat

SEQ ID NO: 413276 - DNA, 15 bp, Homo sapiens
tcattatgtctcaga

SEQ ID NO: 413277 - DNA, 15 bp, Homo sapiens
atcattatgtctcag

SEQ ID NO: 413278 - DNA, 15 bp, Homo sapiens
aatcattatgtctca

SEQ ID NO: 413279 - DNA, 15 bp, Homo sapiens
aaatcattatgtctc

SEQ ID NO: 413280 - DNA, 15 bp, Homo sapiens
aaaatcattatgtct

SEQ ID NO: 413281 - DNA, 15 bp, Homo sapiens
aaaaatcattatgtc

SEQ ID NO: 413282 - DNA, 15 bp, Homo sapiens
taaaaatcattatgt

SEQ ID NO: 413283 - DNA, 15 bp, Homo sapiens
ataaaaatcattatg

SEQ ID NO: 413284 - DNA, 15 bp, Homo sapiens
cataaaaatcattat

SEQ ID NO: 413285 - DNA, 15 bp, Homo sapiens
tcataaaaatcatta

SEQ ID NO: 413286 - DNA, 15 bp, Homo sapiens
gtcataaaaatcatt

SEQ ID NO: 413287 - DNA, 15 bp, Homo sapiens
agtcataaaaatcat

SEQ ID NO: 413288 - DNA, 15 bp, Homo sapiens
aagtcataaaaatca

SEQ ID NO: 413289 - DNA, 15 bp, Homo sapiens
gaagtcataaaaatc

SEQ ID NO: 413290 - DNA, 15 bp, Homo sapiens
tgaagtcataaaaat

SEQ ID NO: 413291 - DNA, 15 bp, Homo sapiens
ttgaagtcataaaaa

SEQ ID NO: 413292 - DNA, 15 bp, Homo sapiens
attgaagtcataaaa

SEQ ID NO: 413293 - DNA, 15 bp, Homo sapiens
cattgaagtcataaa

SEQ ID NO: 413294 - DNA, 15 bp, Homo sapiens
tcattgaagtcataa

SEQ ID NO: 413295 - DNA, 15 bp, Homo sapiens
gtcattgaagtcata

SEQ ID NO: 413296 - DNA, 15 bp, Homo sapiens
tgtcattgaagtcat

SEQ ID NO: 413297 - DNA, 15 bp, Homo sapiens
gtgtcattgaagtca

SEQ ID NO: 413298 - DNA, 15 bp, Homo sapiens
ggtgtcattgaagtc

SEQ ID NO: 413299 - DNA, 15 bp, Homo sapiens
aggtgtcattgaagt

SEQ ID NO: 413300 - DNA, 15 bp, Homo sapiens
caggtgtcattgaag

SEQ ID NO: 413301 - DNA, 15 bp, Homo sapiens
tcaggtgtcattgaa

SEQ ID NO: 413302 - DNA, 15 bp, Homo sapiens
ttcaggtgtcattga

SEQ ID NO: 413303 - DNA, 15 bp, Homo sapiens
tttcaggtgtcattg

SEQ ID NO: 413304 - DNA, 15 bp, Homo sapiens
atttcaggtgtcatt

SEQ ID NO: 413305 - DNA, 15 bp, Homo sapiens
catttcaggtgtcat

SEQ ID NO: 413306 - DNA, 15 bp, Homo sapiens
tcatttcaggtgtca

SEQ ID NO: 413307 - DNA, 15 bp, Homo sapiens
ttcatttcaggtgtc

SEQ ID NO: 413308 - DNA, 15 bp, Homo sapiens
tttcatttcaggtgt

SEQ ID NO: 413309 - DNA, 15 bp, Homo sapiens
gtttcatttcaggtg

SEQ ID NO: 413310 - DNA, 15 bp, Homo sapiens
ggtttcatttcaggt

SEQ ID NO: 413311 - DNA, 15 bp, Homo sapiens
tggtttcatttcagg

SEQ ID NO: 413312 - DNA, 15 bp, Homo sapiens
ctggtttcatttcag

SEQ ID NO: 413313 - DNA, 15 bp, Homo sapiens
actggtttcatttca

SEQ ID NO: 413314 - DNA, 15 bp, Homo sapiens
tactggtttcatttc

SEQ ID NO: 413315 - DNA, 15 bp, Homo sapiens
gtactggtttcattt

SEQ ID NO: 413316 - DNA, 15 bp, Homo sapiens
agtactggtttcatt

SEQ ID NO: 413317 - DNA, 15 bp, Homo sapiens
gagtactggtttcat

SEQ ID NO: 413318 - DNA, 15 bp, Homo sapiens
agagtactggtttca

SEQ ID NO: 413319 - DNA, 15 bp, Homo sapiens
tagagtactggtttc

SEQ ID NO: 413320 - DNA, 15 bp, Homo sapiens
ttagagtactggttt

SEQ ID NO: 413321 - DNA, 15 bp, Homo sapiens
tttagagtactggtt

SEQ ID NO: 413322 - DNA, 15 bp, Homo sapiens
ctttagagtactggt

SEQ ID NO: 413323 - DNA, 15 bp, Homo sapiens
actttagagtactgg

SEQ ID NO: 413324 - DNA, 15 bp, Homo sapiens
tactttagagtactg

SEQ ID NO: 413325 - DNA, 15 bp, Homo sapiens
ctactttagagtact

SEQ ID NO: 413326 - DNA, 15 bp, Homo sapiens
actactttagagtac

SEQ ID NO: 413327 - DNA, 15 bp, Homo sapiens
aactactttagagta

SEQ ID NO: 413328 - DNA, 15 bp, Homo sapiens
aaactactttagagt

SEQ ID NO: 413329 - DNA, 15 bp, Homo sapiens
aaaactactttagag

SEQ ID NO: 413330 - DNA, 15 bp, Homo sapiens
aaaaactactttaga

SEQ ID NO: 413331 - DNA, 15 bp, Homo sapiens
caaaaactactttag

SEQ ID NO: 413332 - DNA, 15 bp, Homo sapiens
acaaaaactacttta

SEQ ID NO: 413333 - DNA, 15 bp, Homo sapiens
aacaaaaactacttt

SEQ ID NO: 413334 - DNA, 15 bp, Homo sapiens
aaacaaaaactactt

SEQ ID NO: 413335 - DNA, 15 bp, Homo sapiens
taaacaaaaactact

SEQ ID NO: 413336 - DNA, 15 bp, Homo sapiens
ttaaacaaaaactac

SEQ ID NO: 413337 - DNA, 15 bp, Homo sapiens
gttaaacaaaaacta

SEQ ID NO: 413338 - DNA, 15 bp, Homo sapiens
tgttaaacaaaaact

SEQ ID NO: 413339 - DNA, 15 bp, Homo sapiens
atgttaaacaaaaac

SEQ ID NO: 413340 - DNA, 15 bp, Homo sapiens
catgttaaacaaaaa

SEQ ID NO: 413341 - DNA, 15 bp, Homo sapiens
tcatgttaaacaaaa

SEQ ID NO: 413342 - DNA, 15 bp, Homo sapiens
atcatgttaaacaaa

SEQ ID NO: 413343 - DNA, 15 bp, Homo sapiens
aatcatgttaaacaa

SEQ ID NO: 413344 - DNA, 15 bp, Homo sapiens
aaatcatgttaaaca

SEQ ID NO: 413345 - DNA, 15 bp, Homo sapiens
caaatcatgttaaac

SEQ ID NO: 413346 - DNA, 15 bp, Homo sapiens
tcaaatcatgttaaa

SEQ ID NO: 413347 - DNA, 15 bp, Homo sapiens
atcaaatcatgttaa

SEQ ID NO: 413348 - DNA, 15 bp, Homo sapiens
aatcaaatcatgtta

SEQ ID NO: 413349 - DNA, 15 bp, Homo sapiens
gaatcaaatcatgtt

SEQ ID NO: 413350 - DNA, 15 bp, Homo sapiens
agaatcaaatcatgt

SEQ ID NO: 413351 - DNA, 15 bp, Homo sapiens
aagaatcaaatcatg

SEQ ID NO: 413352 - DNA, 15 bp, Homo sapiens
aaagaatcaaatcat

SEQ ID NO: 413353 - DNA, 15 bp, Homo sapiens
aaaagaatcaaatca

SEQ ID NO: 413354 - DNA, 15 bp, Homo sapiens
taaaagaatcaaatc

SEQ ID NO: 413355 - DNA, 15 bp, Homo sapiens
ctaaaagaatcaaat

SEQ ID NO: 413356 - DNA, 15 bp, Homo sapiens
tctaaaagaatcaaa

SEQ ID NO: 413357 - DNA, 15 bp, Homo sapiens
ttctaaaagaatcaa

SEQ ID NO: 413358 - DNA, 15 bp, Homo sapiens
attctaaaagaatca

SEQ ID NO: 413359 - DNA, 15 bp, Homo sapiens
aattctaaaagaatc

SEQ ID NO: 413360 - DNA, 15 bp, Homo sapiens
aaattctaaaagaat

SEQ ID NO: 413361 - DNA, 15 bp, Homo sapiens
taaattctaaaagaa

SEQ ID NO: 413362 - DNA, 15 bp, Homo sapiens
ataaattctaaaaga

SEQ ID NO: 413363 - DNA, 15 bp, Homo sapiens
cataaattctaaaag

SEQ ID NO: 413364 - DNA, 15 bp, Homo sapiens
acataaattctaaaa

SEQ ID NO: 413365 - DNA, 15 bp, Homo sapiens
aacataaattctaaa

SEQ ID NO: 413366 - DNA, 15 bp, Homo sapiens
aaacataaattctaa

SEQ ID NO: 413367 - DNA, 15 bp, Homo sapiens
aaaacataaattcta

SEQ ID NO: 413368 - DNA, 15 bp, Homo sapiens
caaaacataaattct

SEQ ID NO: 413369 - DNA, 15 bp, Homo sapiens
gcaaaacataaattc

SEQ ID NO: 413370 - DNA, 15 bp, Homo sapiens
ggcaaaacataaatt

SEQ ID NO: 413371 - DNA, 15 bp, Homo sapiens
tggcaaaacataaat

SEQ ID NO: 413372 - DNA, 15 bp, Homo sapiens
ctggcaaaacataaa

SEQ ID NO: 413373 - DNA, 15 bp, Homo sapiens
tctggcaaaacataa

SEQ ID NO: 413374 - DNA, 15 bp, Homo sapiens
ctctggcaaaacata

SEQ ID NO: 413375 - DNA, 15 bp, Homo sapiens
actctggcaaaacat

SEQ ID NO: 413376 - DNA, 15 bp, Homo sapiens
cactctggcaaaaca

SEQ ID NO: 413377 - DNA, 15 bp, Homo sapiens
tcactctggcaaaac

SEQ ID NO: 413378 - DNA, 15 bp, Homo sapiens
ttcactctggcaaaa

SEQ ID NO: 413379 - DNA, 15 bp, Homo sapiens
attcactctggcaaa

SEQ ID NO: 413380 - DNA, 15 bp, Homo sapiens
cattcactctggcaa

SEQ ID NO: 413381 - DNA, 15 bp, Homo sapiens
tcattcactctggca

SEQ ID NO: 413382 - DNA, 15 bp, Homo sapiens
ctcattcactctggc

SEQ ID NO: 413383 - DNA, 15 bp, Homo sapiens
cctcattcactctgg

SEQ ID NO: 413384 - DNA, 15 bp, Homo sapiens
tcctcattcactctg

SEQ ID NO: 413385 - DNA, 15 bp, Homo sapiens
ttcctcattcactct

SEQ ID NO: 413386 - DNA, 15 bp, Homo sapiens
attcctcattcactc

SEQ ID NO: 413387 - DNA, 15 bp, Homo sapiens
aattcctcattcact

SEQ ID NO: 413388 - DNA, 15 bp, Homo sapiens
gaattcctcattcac

SEQ ID NO: 413389 - DNA, 15 bp, Homo sapiens
tgaattcctcattca

SEQ ID NO: 413390 - DNA, 15 bp, Homo sapiens
ctgaattcctcattc

SEQ ID NO: 413391 - DNA, 15 bp, Homo sapiens
tctgaattcctcatt

SEQ ID NO: 413392 - DNA, 15 bp, Homo sapiens
atctgaattcctcat

SEQ ID NO: 413393 - DNA, 15 bp, Homo sapiens
tatctgaattcctca

SEQ ID NO: 413394 - DNA, 15 bp, Homo sapiens
atatctgaattcctc

SEQ ID NO: 413395 - DNA, 15 bp, Homo sapiens
tatatctgaattcct

SEQ ID NO: 413396 - DNA, 15 bp, Homo sapiens
ttatatctgaattcc

SEQ ID NO: 413397 - DNA, 15 bp, Homo sapiens
attatatctgaattc

SEQ ID NO: 413398 - DNA, 15 bp, Homo sapiens
tattatatctgaatt

SEQ ID NO: 413399 - DNA, 15 bp, Homo sapiens
ctattatatctgaat

SEQ ID NO: 413400 - DNA, 15 bp, Homo sapiens
actattatatctgaa

SEQ ID NO: 413401 - DNA, 15 bp, Homo sapiens
cactattatatctga

SEQ ID NO: 413402 - DNA, 15 bp, Homo sapiens
tcactattatatctg

SEQ ID NO: 413403 - DNA, 15 bp, Homo sapiens
gtcactattatatct

SEQ ID NO: 413404 - DNA, 15 bp, Homo sapiens
agtcactattatatc

SEQ ID NO: 413405 - DNA, 15 bp, Homo sapiens
cagtcactattatat

SEQ ID NO: 413406 - DNA, 15 bp, Homo sapiens
acagtcactattata

SEQ ID NO: 413407 - DNA, 15 bp, Homo sapiens
tacagtcactattat

SEQ ID NO: 413408 - DNA, 15 bp, Homo sapiens
gtacagtcactatta

SEQ ID NO: 413409 - DNA, 15 bp, Homo sapiens
tgtacagtcactatt

SEQ ID NO: 413410 - DNA, 15 bp, Homo sapiens
ctgtacagtcactat

SEQ ID NO: 413411 - DNA, 15 bp, Homo sapiens
actgtacagtcacta

SEQ ID NO: 413412 - DNA, 15 bp, Homo sapiens
tactgtacagtcact

SEQ ID NO: 413413 - DNA, 15 bp, Homo sapiens
ttactgtacagtcac

SEQ ID NO: 413414 - DNA, 15 bp, Homo sapiens
attactgtacagtca

SEQ ID NO: 413415 - DNA, 15 bp, Homo sapiens
cattactgtacagtc

SEQ ID NO: 413416 - DNA, 15 bp, Homo sapiens
tcattactgtacagt

SEQ ID NO: 413417 - DNA, 15 bp, Homo sapiens
ctcattactgtacag

SEQ ID NO: 413418 - DNA, 15 bp, Homo sapiens
actcattactgtaca

SEQ ID NO: 413419 - DNA, 15 bp, Homo sapiens
aactcattactgtac

SEQ ID NO: 413420 - DNA, 15 bp, Homo sapiens
aaactcattactgta

SEQ ID NO: 413421 - DNA, 15 bp, Homo sapiens
gaaactcattactgt

SEQ ID NO: 413422 - DNA, 15 bp, Homo sapiens
tgaaactcattactg

SEQ ID NO: 413423 - DNA, 15 bp, Homo sapiens
atgaaactcattact

SEQ ID NO: 413424 - DNA, 15 bp, Homo sapiens
aatgaaactcattac

SEQ ID NO: 413425 - DNA, 15 bp, Homo sapiens
aaatgaaactcatta

SEQ ID NO: 413426 - DNA, 15 bp, Homo sapiens
gaaatgaaactcatt

SEQ ID NO: 413427 - DNA, 15 bp, Homo sapiens
agaaatgaaactcat

SEQ ID NO: 413428 - DNA, 15 bp, Homo sapiens
tagaaatgaaactca

SEQ ID NO: 413429 - DNA, 15 bp, Homo sapiens
ctagaaatgaaactc

SEQ ID NO: 413430 - DNA, 15 bp, Homo sapiens
gctagaaatgaaact

SEQ ID NO: 413431 - DNA, 15 bp, Homo sapiens
agctagaaatgaaac

SEQ ID NO: 413432 - DNA, 15 bp, Homo sapiens
tagctagaaatgaaa

SEQ ID NO: 413433 - DNA, 15 bp, Homo sapiens
ctagctagaaatgaa

SEQ ID NO: 413434 - DNA, 15 bp, Homo sapiens
gctagctagaaatga

SEQ ID NO: 413435 - DNA, 15 bp, Homo sapiens
agctagctagaaatg

SEQ ID NO: 413436 - DNA, 15 bp, Homo sapiens
tagctagctagaaat

SEQ ID NO: 413437 - DNA, 15 bp, Homo sapiens
atagctagctagaaa

SEQ ID NO: 413438 - DNA, 15 bp, Homo sapiens
aatagctagctagaa

SEQ ID NO: 413439 - DNA, 15 bp, Homo sapiens
aaatagctagctaga

SEQ ID NO: 413440 - DNA, 15 bp, Homo sapiens
aaaatagctagctag

SEQ ID NO: 413441 - DNA, 15 bp, Homo sapiens
aaaaatagctagcta

SEQ ID NO: 413442 - DNA, 15 bp, Homo sapiens
taaaaatagctagct

SEQ ID NO: 413443 - DNA, 15 bp, Homo sapiens
ataaaaatagctagc

SEQ ID NO: 413444 - DNA, 15 bp, Homo sapiens
gataaaaatagctag

SEQ ID NO: 413445 - DNA, 15 bp, Homo sapiens
ggataaaaatagcta

SEQ ID NO: 413446 - DNA, 15 bp, Homo sapiens
tggataaaaatagct

SEQ ID NO: 413447 - DNA, 15 bp, Homo sapiens
ttggataaaaatagc

SEQ ID NO: 413448 - DNA, 15 bp, Homo sapiens
cttggataaaaatag

SEQ ID NO: 413449 - DNA, 15 bp, Homo sapiens
ccttggataaaaata

SEQ ID NO: 413450 - DNA, 15 bp, Homo sapiens
tccttggataaaaat

SEQ ID NO: 413451 - DNA, 15 bp, Homo sapiens
ttccttggataaaaa

SEQ ID NO: 413452 - DNA, 15 bp, Homo sapiens
attccttggataaaa

SEQ ID NO: 413453 - DNA, 15 bp, Homo sapiens
aattccttggataaa

SEQ ID NO: 413454 - DNA, 15 bp, Homo sapiens
caattccttggataa

SEQ ID NO: 413455 - DNA, 15 bp, Homo sapiens
ccaattccttggata

SEQ ID NO: 413456 - DNA, 15 bp, Homo sapiens
accaattccttggat

SEQ ID NO: 413457 - DNA, 15 bp, Homo sapiens
taccaattccttgga

SEQ ID NO: 413458 - DNA, 15 bp, Homo sapiens
ataccaattccttgg

SEQ ID NO: 413459 - DNA, 15 bp, Homo sapiens
aataccaattccttg

SEQ ID NO: 413460 - DNA, 15 bp, Homo sapiens
gaataccaattcctt

SEQ ID NO: 413461 - DNA, 15 bp, Homo sapiens
agaataccaattcct

SEQ ID NO: 413462 - DNA, 15 bp, Homo sapiens
gagaataccaattcc

SEQ ID NO: 413463 - DNA, 15 bp, Homo sapiens
agagaataccaattc

SEQ ID NO: 413464 - DNA, 15 bp, Homo sapiens
tagagaataccaatt

SEQ ID NO: 413465 - DNA, 15 bp, Homo sapiens
ttagagaataccaat

SEQ ID NO: 413466 - DNA, 15 bp, Homo sapiens
tttagagaataccaa

SEQ ID NO: 413467 - DNA, 15 bp, Homo sapiens
ttttagagaatacca

SEQ ID NO: 413468 - DNA, 15 bp, Homo sapiens
attttagagaatacc

SEQ ID NO: 413469 - DNA, 15 bp, Homo sapiens
cattttagagaatac

SEQ ID NO: 413470 - DNA, 15 bp, Homo sapiens
tcattttagagaata

SEQ ID NO: 413471 - DNA, 15 bp, Homo sapiens
gtcattttagagaat

SEQ ID NO: 413472 - DNA, 15 bp, Homo sapiens
tgtcattttagagaa

SEQ ID NO: 413473 - DNA, 15 bp, Homo sapiens
ttgtcattttagaga

SEQ ID NO: 413474 - DNA, 15 bp, Homo sapiens
attgtcattttagag

SEQ ID NO: 413475 - DNA, 15 bp, Homo sapiens
aattgtcattttaga

SEQ ID NO: 413476 - DNA, 15 bp, Homo sapiens
caattgtcattttag

SEQ ID NO: 413477 - DNA, 15 bp, Homo sapiens
acaattgtcatttta

SEQ ID NO: 413478 - DNA, 15 bp, Homo sapiens
tacaattgtcatttt

SEQ ID NO: 413479 - DNA, 15 bp, Homo sapiens
ttacaattgtcattt

SEQ ID NO: 413480 - DNA, 15 bp, Homo sapiens
tttacaattgtcatt

SEQ ID NO: 413481 - DNA, 15 bp, Homo sapiens
ttttacaattgtcat

SEQ ID NO: 413482 - DNA, 15 bp, Homo sapiens
cttttacaattgtca

SEQ ID NO: 413483 - DNA, 15 bp, Homo sapiens
tcttttacaattgtc

SEQ ID NO: 413484 - DNA, 15 bp, Homo sapiens
atcttttacaattgt

SEQ ID NO: 413485 - DNA, 15 bp, Homo sapiens
catcttttacaattg

SEQ ID NO: 413486 - DNA, 15 bp, Homo sapiens
tcatcttttacaatt

SEQ ID NO: 413487 - DNA, 15 bp, Homo sapiens
gtcatcttttacaat

SEQ ID NO: 413488 - DNA, 15 bp, Homo sapiens
agtcatcttttacaa

SEQ ID NO: 413489 - DNA, 15 bp, Homo sapiens
tagtcatcttttaca

SEQ ID NO: 413490 - DNA, 15 bp, Homo sapiens
ttagtcatcttttac

SEQ ID NO: 413491 - DNA, 15 bp, Homo sapiens
tttagtcatctttta

SEQ ID NO: 413492 - DNA, 15 bp, Homo sapiens
ttttagtcatctttt

SEQ ID NO: 413493 - DNA, 15 bp, Homo sapiens
attttagtcatcttt

SEQ ID NO: 413494 - DNA, 15 bp, Homo sapiens
aattttagtcatctt

SEQ ID NO: 413495 - DNA, 15 bp, Homo sapiens
taattttagtcatct

SEQ ID NO: 413496 - DNA, 15 bp, Homo sapiens
ataattttagtcatc

SEQ ID NO: 413497 - DNA, 15 bp, Homo sapiens
aataattttagtcat

SEQ ID NO: 413498 - DNA, 15 bp, Homo sapiens
aaataattttagtca

SEQ ID NO: 413499 - DNA, 15 bp, Homo sapiens
aaaataattttagtc

SEQ ID NO: 413500 - DNA, 15 bp, Homo sapiens
aaaaataattttagt

SEQ ID NO: 413501 - DNA, 15 bp, Homo sapiens
caaaaataattttag

SEQ ID NO: 413502 - DNA, 15 bp, Homo sapiens
tcaaaaataatttta

SEQ ID NO: 413503 - DNA, 15 bp, Homo sapiens
ttcaaaaataatttt

SEQ ID NO: 413504 - DNA, 15 bp, Homo sapiens
tttcaaaaataattt

SEQ ID NO: 413505 - DNA, 15 bp, Homo sapiens
gtttcaaaaataatt

SEQ ID NO: 413506 - DNA, 15 bp, Homo sapiens
tgtttcaaaaataat

SEQ ID NO: 413507 - DNA, 15 bp, Homo sapiens
atgtttcaaaaataa

SEQ ID NO: 413508 - DNA, 15 bp, Homo sapiens
aatgtttcaaaaata

SEQ ID NO: 413509 - DNA, 15 bp, Homo sapiens
aaatgtttcaaaaat

SEQ ID NO: 413510 - DNA, 15 bp, Homo sapiens
aaaatgtttcaaaaa

SEQ ID NO: 413511 - DNA, 15 bp, Homo sapiens
aaaaatgtttcaaaa

SEQ ID NO: 413512 - DNA, 15 bp, Homo sapiens
taaaaatgtttcaaa

SEQ ID NO: 413513 - DNA, 15 bp, Homo sapiens
ctaaaaatgtttcaa

SEQ ID NO: 413514 - DNA, 15 bp, Homo sapiens
tctaaaaatgtttca

SEQ ID NO: 413515 - DNA, 15 bp, Homo sapiens
gtctaaaaatgtttc

SEQ ID NO: 413516 - DNA, 15 bp, Homo sapiens
agtctaaaaatgttt

SEQ ID NO: 413517 - DNA, 15 bp, Homo sapiens
aagtctaaaaatgtt

SEQ ID NO: 413518 - DNA, 15 bp, Homo sapiens
caagtctaaaaatgt

SEQ ID NO: 413519 - DNA, 15 bp, Homo sapiens
tcaagtctaaaaatg

SEQ ID NO: 413520 - DNA, 15 bp, Homo sapiens
atcaagtctaaaaat

SEQ ID NO: 413521 - DNA, 15 bp, Homo sapiens
tatcaagtctaaaaa

SEQ ID NO: 413522 - DNA, 15 bp, Homo sapiens
atatcaagtctaaaa

SEQ ID NO: 413523 - DNA, 15 bp, Homo sapiens
tatatcaagtctaaa

SEQ ID NO: 413524 - DNA, 15 bp, Homo sapiens
gtatatcaagtctaa

SEQ ID NO: 413525 - DNA, 15 bp, Homo sapiens
ggtatatcaagtcta

SEQ ID NO: 413526 - DNA, 15 bp, Homo sapiens
tggtatatcaagtct

SEQ ID NO: 413527 - DNA, 15 bp, Homo sapiens
ctggtatatcaagtc

SEQ ID NO: 413528 - DNA, 15 bp, Homo sapiens
cctggtatatcaagt

SEQ ID NO: 413529 - DNA, 15 bp, Homo sapiens
ccctggtatatcaag

SEQ ID NO: 413530 - DNA, 15 bp, Homo sapiens
accctggtatatcaa

SEQ ID NO: 413531 - DNA, 15 bp, Homo sapiens
aaccctggtatatca

SEQ ID NO: 413532 - DNA, 15 bp, Homo sapiens
gaaccctggtatatc

SEQ ID NO: 413533 - DNA, 15 bp, Homo sapiens
ggaaccctggtatat

SEQ ID NO: 413534 - DNA, 15 bp, Homo sapiens
tggaaccctggtata

SEQ ID NO: 413535 - DNA, 15 bp, Homo sapiens
gtggaaccctggtat

SEQ ID NO: 413536 - DNA, 15 bp, Homo sapiens
agtggaaccctggta

SEQ ID NO: 413537 - DNA, 15 bp, Homo sapiens
tagtggaaccctggt

SEQ ID NO: 413538 - DNA, 15 bp, Homo sapiens
ctagtggaaccctgg

SEQ ID NO: 413539 - DNA, 15 bp, Homo sapiens
tctagtggaaccctg

SEQ ID NO: 413540 - DNA, 15 bp, Homo sapiens
ctctagtggaaccct

SEQ ID NO: 413541 - DNA, 15 bp, Homo sapiens
tctctagtggaaccc

SEQ ID NO: 413542 - DNA, 15 bp, Homo sapiens
ttctctagtggaacc

SEQ ID NO: 413543 - DNA, 15 bp, Homo sapiens
tttctctagtggaac

SEQ ID NO: 413544 - DNA, 15 bp, Homo sapiens
gtttctctagtggaa

SEQ ID NO: 413545 - DNA, 15 bp, Homo sapiens
tgtttctctagtgga

SEQ ID NO: 413546 - DNA, 15 bp, Homo sapiens
ctgtttctctagtgg

SEQ ID NO: 413547 - DNA, 15 bp, Homo sapiens
tctgtttctctagtg

SEQ ID NO: 413548 - DNA, 15 bp, Homo sapiens
ttctgtttctctagt

SEQ ID NO: 413549 - DNA, 15 bp, Homo sapiens
attctgtttctctag

SEQ ID NO: 413550 - DNA, 15 bp, Homo sapiens
gattctgtttctcta

SEQ ID NO: 413551 - DNA, 15 bp, Homo sapiens
tgattctgtttctct

SEQ ID NO: 413552 - DNA, 15 bp, Homo sapiens
ctgattctgtttctc

SEQ ID NO: 413553 - DNA, 15 bp, Homo sapiens
actgattctgtttct

SEQ ID NO: 413554 - DNA, 15 bp, Homo sapiens
tactgattctgtttc

SEQ ID NO: 413555 - DNA, 15 bp, Homo sapiens
ctactgattctgttt

SEQ ID NO: 413556 - DNA, 15 bp, Homo sapiens
cctactgattctgtt

SEQ ID NO: 413557 - DNA, 15 bp, Homo sapiens
gcctactgattctgt

SEQ ID NO: 413558 - DNA, 15 bp, Homo sapiens
agcctactgattctg

SEQ ID NO: 413559 - DNA, 15 bp, Homo sapiens
tagcctactgattct

SEQ ID NO: 413560 - DNA, 15 bp, Homo sapiens
gtagcctactgattc

SEQ ID NO: 413561 - DNA, 15 bp, Homo sapiens
tgtagcctactgatt

SEQ ID NO: 413562 - DNA, 15 bp, Homo sapiens
gtgtagcctactgat

SEQ ID NO: 413563 - DNA, 15 bp, Homo sapiens
tgtgtagcctactga

SEQ ID NO: 413564 - DNA, 15 bp, Homo sapiens
gtgtgtagcctactg

SEQ ID NO: 413565 - DNA, 15 bp, Homo sapiens
tgtgtgtagcctact

SEQ ID NO: 413566 - DNA, 15 bp, Homo sapiens
gtgtgtgtagcctac

SEQ ID NO: 413567 - DNA, 15 bp, Homo sapiens
tgtgtgtgtagccta

SEQ ID NO: 413568 - DNA, 15 bp, Homo sapiens
atgtgtgtgtagcct

SEQ ID NO: 413569 - DNA, 15 bp, Homo sapiens
tatgtgtgtgtagcc

SEQ ID NO: 413570 - DNA, 15 bp, Homo sapiens
gtatgtgtgtgtagc

SEQ ID NO: 413571 - DNA, 15 bp, Homo sapiens
tgtatgtgtgtgtag

SEQ ID NO: 413572 - DNA, 15 bp, Homo sapiens
gtgtatgtgtgtgta

SEQ ID NO: 413573 - DNA, 15 bp, Homo sapiens
agtgtatgtgtgtgt

SEQ ID NO: 413574 - DNA, 15 bp, Homo sapiens
cagtgtatgtgtgtg

SEQ ID NO: 413575 - DNA, 15 bp, Homo sapiens
tcagtgtatgtgtgt

SEQ ID NO: 413576 - DNA, 15 bp, Homo sapiens
ctcagtgtatgtgtg

SEQ ID NO: 413577 - DNA, 15 bp, Homo sapiens
tctcagtgtatgtgt

SEQ ID NO: 413578 - DNA, 15 bp, Homo sapiens
gtctcagtgtatgtg

SEQ ID NO: 413579 - DNA, 15 bp, Homo sapiens
tgtctcagtgtatgt

SEQ ID NO: 413580 - DNA, 15 bp, Homo sapiens
ctgtctcagtgtatg

SEQ ID NO: 413581 - DNA, 15 bp, Homo sapiens
tctgtctcagtgtat

SEQ ID NO: 413582 - DNA, 15 bp, Homo sapiens
gtctgtctcagtgta

SEQ ID NO: 413583 - DNA, 15 bp, Homo sapiens
tgtctgtctcagtgt

SEQ ID NO: 413584 - DNA, 15 bp, Homo sapiens
ctgtctgtctcagtg

SEQ ID NO: 413585 - DNA, 15 bp, Homo sapiens
tctgtctgtctcagt

SEQ ID NO: 413586 - DNA, 15 bp, Homo sapiens
ctctgtctgtctcag

SEQ ID NO: 413587 - DNA, 15 bp, Homo sapiens
tctctgtctgtctca

SEQ ID NO: 413588 - DNA, 15 bp, Homo sapiens
ctctctgtctgtctc

SEQ ID NO: 413589 - DNA, 15 bp, Homo sapiens
tctctctgtctgtct

SEQ ID NO: 413590 - DNA, 15 bp, Homo sapiens
ttctctctgtctgtc

SEQ ID NO: 413591 - DNA, 15 bp, Homo sapiens
tttctctctgtctgt

SEQ ID NO: 413592 - DNA, 15 bp, Homo sapiens
atttctctctgtctg

SEQ ID NO: 413593 - DNA, 15 bp, Homo sapiens
tatttctctctgtct

SEQ ID NO: 413594 - DNA, 15 bp, Homo sapiens
ctatttctctctgtc

SEQ ID NO: 413595 - DNA, 15 bp, Homo sapiens
tctatttctctctgt

SEQ ID NO: 413596 - DNA, 15 bp, Homo sapiens
ctctatttctctctg

SEQ ID NO: 413597 - DNA, 15 bp, Homo sapiens
tctctatttctctct

SEQ ID NO: 413598 - DNA, 15 bp, Homo sapiens
atctctatttctctc

SEQ ID NO: 413599 - DNA, 15 bp, Homo sapiens
aatctctatttctct

SEQ ID NO: 413600 - DNA, 15 bp, Homo sapiens
caatctctatttctc

SEQ ID NO: 413601 - DNA, 15 bp, Homo sapiens
tcaatctctatttct

SEQ ID NO: 413602 - DNA, 15 bp, Homo sapiens
ctcaatctctatttc

SEQ ID NO: 413603 - DNA, 15 bp, Homo sapiens
tctcaatctctattt

SEQ ID NO: 413604 - DNA, 15 bp, Homo sapiens
ctctcaatctctatt

SEQ ID NO: 413605 - DNA, 15 bp, Homo sapiens
tctctcaatctctat

SEQ ID NO: 413606 - DNA, 15 bp, Homo sapiens
ctctctcaatctcta

SEQ ID NO: 413607 - DNA, 15 bp, Homo sapiens
tctctctcaatctct

SEQ ID NO: 413608 - DNA, 15 bp, Homo sapiens
ctctctctcaatctc

SEQ ID NO: 413609 - DNA, 15 bp, Homo sapiens
tctctctctcaatct

SEQ ID NO: 413610 - DNA, 15 bp, Homo sapiens
ctctctctctcaatc

SEQ ID NO: 413611 - DNA, 15 bp, Homo sapiens
tctctctctctcaat

SEQ ID NO: 413612 - DNA, 15 bp, Homo sapiens
ctctctctctctcaa

SEQ ID NO: 413613 - DNA, 15 bp, Homo sapiens
tctctctctctctca

SEQ ID NO: 413614 - DNA, 15 bp, Homo sapiens
ctctctctctctctc

SEQ ID NO: 413615 - DNA, 15 bp, Homo sapiens
tctctctctctctct

SEQ ID NO: 413616 - DNA, 15 bp, Homo sapiens
cctctctctctctct

SEQ ID NO: 413617 - DNA, 15 bp, Homo sapiens
gcctctctctctctc

SEQ ID NO: 413618 - DNA, 15 bp, Homo sapiens
tgcctctctctctct

SEQ ID NO: 413619 - DNA, 15 bp, Homo sapiens
ttgcctctctctctc

SEQ ID NO: 413620 - DNA, 15 bp, Homo sapiens
attgcctctctctct

SEQ ID NO: 413621 - DNA, 15 bp, Homo sapiens
cattgcctctctctc

SEQ ID NO: 413622 - DNA, 15 bp, Homo sapiens
tcattgcctctctct

SEQ ID NO: 413623 - DNA, 15 bp, Homo sapiens
ctcattgcctctctc

SEQ ID NO: 413624 - DNA, 15 bp, Homo sapiens
actcattgcctctct

SEQ ID NO: 413625 - DNA, 15 bp, Homo sapiens
aactcattgcctctc

SEQ ID NO: 413626 - DNA, 15 bp, Homo sapiens
caactcattgcctct

SEQ ID NO: 413627 - DNA, 15 bp, Homo sapiens
ccaactcattgcctc

SEQ ID NO: 413628 - DNA, 15 bp, Homo sapiens
cccaactcattgcct

SEQ ID NO: 413629 - DNA, 15 bp, Homo sapiens
acccaactcattgcc

SEQ ID NO: 413630 - DNA, 15 bp, Homo sapiens
aacccaactcattgc

SEQ ID NO: 413631 - DNA, 15 bp, Homo sapiens
gaacccaactcattg

SEQ ID NO: 413632 - DNA, 15 bp, Homo sapiens
ggaacccaactcatt

SEQ ID NO: 413633 - DNA, 15 bp, Homo sapiens
tggaacccaactcat

SEQ ID NO: 413634 - DNA, 15 bp, Homo sapiens
ctggaacccaactca

SEQ ID NO: 413635 - DNA, 15 bp, Homo sapiens
cctggaacccaactc

SEQ ID NO: 413636 - DNA, 15 bp, Homo sapiens
tcctggaacccaact

SEQ ID NO: 413637 - DNA, 15 bp, Homo sapiens
atcctggaacccaac

SEQ ID NO: 413638 - DNA, 15 bp, Homo sapiens
aatcctggaacccaa

SEQ ID NO: 413639 - DNA, 15 bp, Homo sapiens
aaatcctggaaccca

SEQ ID NO: 413640 - DNA, 15 bp, Homo sapiens
aaaatcctggaaccc

SEQ ID NO: 413641 - DNA, 15 bp, Homo sapiens
caaaatcctggaacc

SEQ ID NO: 413642 - DNA, 15 bp, Homo sapiens
ccaaaatcctggaac

SEQ ID NO: 413643 - DNA, 15 bp, Homo sapiens
cccaaaatcctggaa

SEQ ID NO: 413644 - DNA, 15 bp, Homo sapiens
ccccaaaatcctgga

SEQ ID NO: 413645 - DNA, 15 bp, Homo sapiens
cccccaaaatcctgg

SEQ ID NO: 413646 - DNA, 15 bp, Homo sapiens
gcccccaaaatcctg

SEQ ID NO: 413647 - DNA, 15 bp, Homo sapiens
agcccccaaaatcct

SEQ ID NO: 413648 - DNA, 15 bp, Homo sapiens
cagcccccaaaatcc

SEQ ID NO: 413649 - DNA, 15 bp, Homo sapiens
ccagcccccaaaatc

SEQ ID NO: 413650 - DNA, 15 bp, Homo sapiens
gccagcccccaaaat

SEQ ID NO: 413651 - DNA, 15 bp, Homo sapiens
agccagcccccaaaa

SEQ ID NO: 413652 - DNA, 15 bp, Homo sapiens
tagccagcccccaaa

SEQ ID NO: 413653 - DNA, 15 bp, Homo sapiens
ctagccagcccccaa

SEQ ID NO: 413654 - DNA, 15 bp, Homo sapiens
cctagccagccccca

SEQ ID NO: 413655 - DNA, 15 bp, Homo sapiens
gcctagccagccccc

SEQ ID NO: 413656 - DNA, 15 bp, Homo sapiens
tgcctagccagcccc

SEQ ID NO: 413657 - DNA, 15 bp, Homo sapiens
ttgcctagccagccc

SEQ ID NO: 413658 - DNA, 15 bp, Homo sapiens
cttgcctagccagcc

SEQ ID NO: 413659 - DNA, 15 bp, Homo sapiens
acttgcctagccagc

SEQ ID NO: 413660 - DNA, 15 bp, Homo sapiens
gacttgcctagccag

SEQ ID NO: 413661 - DNA, 15 bp, Homo sapiens
agacttgcctagcca

SEQ ID NO: 413662 - DNA, 15 bp, Homo sapiens
cagacttgcctagcc

SEQ ID NO: 413663 - DNA, 15 bp, Homo sapiens
tcagacttgcctagc

SEQ ID NO: 413664 - DNA, 15 bp, Homo sapiens
ttcagacttgcctag

SEQ ID NO: 413665 - DNA, 15 bp, Homo sapiens
tttcagacttgccta

SEQ ID NO: 413666 - DNA, 15 bp, Homo sapiens
atttcagacttgcct

SEQ ID NO: 413667 - DNA, 15 bp, Homo sapiens
catttcagacttgcc

SEQ ID NO: 413668 - DNA, 15 bp, Homo sapiens
ccatttcagacttgc

SEQ ID NO: 413669 - DNA, 15 bp, Homo sapiens
cccatttcagacttg

SEQ ID NO: 413670 - DNA, 15 bp, Homo sapiens
acccatttcagactt

SEQ ID NO: 413671 - DNA, 15 bp, Homo sapiens
tacccatttcagact

SEQ ID NO: 413672 - DNA, 15 bp, Homo sapiens
ctacccatttcagac

SEQ ID NO: 413673 - DNA, 15 bp, Homo sapiens
cctacccatttcaga

SEQ ID NO: 413674 - DNA, 15 bp, Homo sapiens
ccctacccatttcag

SEQ ID NO: 413675 - DNA, 15 bp, Homo sapiens
accctacccatttca

SEQ ID NO: 413676 - DNA, 15 bp, Homo sapiens
caccctacccatttc

SEQ ID NO: 413677 - DNA, 15 bp, Homo sapiens
ccaccctacccattt

SEQ ID NO: 413678 - DNA, 15 bp, Homo sapiens
cccaccctacccatt

SEQ ID NO: 413679 - DNA, 15 bp, Homo sapiens
gcccaccctacccat

SEQ ID NO: 413680 - DNA, 15 bp, Homo sapiens
ggcccaccctaccca

SEQ ID NO: 413681 - DNA, 15 bp, Homo sapiens
tggcccaccctaccc

SEQ ID NO: 413682 - DNA, 15 bp, Homo sapiens
atggcccaccctacc

SEQ ID NO: 413683 - DNA, 15 bp, Homo sapiens
aatggcccaccctac

SEQ ID NO: 413684 - DNA, 15 bp, Homo sapiens
taatggcccacccta

SEQ ID NO: 413685 - DNA, 15 bp, Homo sapiens
ttaatggcccaccct

SEQ ID NO: 413686 - DNA, 15 bp, Homo sapiens
attaatggcccaccc

SEQ ID NO: 413687 - DNA, 15 bp, Homo sapiens
gattaatggcccacc

SEQ ID NO: 413688 - DNA, 15 bp, Homo sapiens
tgattaatggcccac

SEQ ID NO: 413689 - DNA, 15 bp, Homo sapiens
ctgattaatggccca

SEQ ID NO: 413690 - DNA, 15 bp, Homo sapiens
cctgattaatggccc

SEQ ID NO: 413691 - DNA, 15 bp, Homo sapiens
tcctgattaatggcc

SEQ ID NO: 413692 - DNA, 15 bp, Homo sapiens
ttcctgattaatggc

SEQ ID NO: 413693 - DNA, 15 bp, Homo sapiens
cttcctgattaatgg

SEQ ID NO: 413694 - DNA, 15 bp, Homo sapiens
ccttcctgattaatg

SEQ ID NO: 413695 - DNA, 15 bp, Homo sapiens
cccttcctgattaat

SEQ ID NO: 413696 - DNA, 15 bp, Homo sapiens
gcccttcctgattaa

SEQ ID NO: 413697 - DNA, 15 bp, Homo sapiens
tgcccttcctgatta

SEQ ID NO: 413698 - DNA, 15 bp, Homo sapiens
ctgcccttcctgatt

SEQ ID NO: 413699 - DNA, 15 bp, Homo sapiens
cctgcccttcctgat

SEQ ID NO: 413700 - DNA, 15 bp, Homo sapiens
gcctgcccttcctga

SEQ ID NO: 413701 - DNA, 15 bp, Homo sapiens
agcctgcccttcctg

SEQ ID NO: 413702 - DNA, 15 bp, Homo sapiens
cagcctgcccttcct

SEQ ID NO: 413703 - DNA, 15 bp, Homo sapiens
ccagcctgcccttcc

SEQ ID NO: 413704 - DNA, 15 bp, Homo sapiens
tccagcctgcccttc

SEQ ID NO: 413705 - DNA, 15 bp, Homo sapiens
ttccagcctgccctt

SEQ ID NO: 413706 - DNA, 15 bp, Homo sapiens
gttccagcctgccct

SEQ ID NO: 413707 - DNA, 15 bp, Homo sapiens
agttccagcctgccc

SEQ ID NO: 413708 - DNA, 15 bp, Homo sapiens
gagttccagcctgcc

SEQ ID NO: 413709 - DNA, 15 bp, Homo sapiens
agagttccagcctgc

SEQ ID NO: 413710 - DNA, 15 bp, Homo sapiens
aagagttccagcctg

SEQ ID NO: 413711 - DNA, 15 bp, Homo sapiens
caagagttccagcct

SEQ ID NO: 413712 - DNA, 15 bp, Homo sapiens
acaagagttccagcc

SEQ ID NO: 413713 - DNA, 15 bp, Homo sapiens
cacaagagttccagc

SEQ ID NO: 413714 - DNA, 15 bp, Homo sapiens
acacaagagttccag

SEQ ID NO: 413715 - DNA, 15 bp, Homo sapiens
gacacaagagttcca

SEQ ID NO: 413716 - DNA, 15 bp, Homo sapiens
agacacaagagttcc

SEQ ID NO: 413717 - DNA, 15 bp, Homo sapiens
tagacacaagagttc

SEQ ID NO: 413718 - DNA, 15 bp, Homo sapiens
ttagacacaagagtt

SEQ ID NO: 413719 - DNA, 15 bp, Homo sapiens
cttagacacaagagt

SEQ ID NO: 413720 - DNA, 15 bp, Homo sapiens
gcttagacacaagag

SEQ ID NO: 413721 - DNA, 15 bp, Homo sapiens
agcttagacacaaga

SEQ ID NO: 413722 - DNA, 15 bp, Homo sapiens
cagcttagacacaag

SEQ ID NO: 413723 - DNA, 15 bp, Homo sapiens
tcagcttagacacaa

SEQ ID NO: 413724 - DNA, 15 bp, Homo sapiens
ttcagcttagacaca

SEQ ID NO: 413725 - DNA, 15 bp, Homo sapiens
cttcagcttagacac

SEQ ID NO: 413726 - DNA, 15 bp, Homo sapiens
gcttcagcttagaca

SEQ ID NO: 413727 - DNA, 15 bp, Homo sapiens
cgcttcagcttagac

SEQ ID NO: 413728 - DNA, 15 bp, Homo sapiens
ccgcttcagcttaga

SEQ ID NO: 413729 - DNA, 15 bp, Homo sapiens
gccgcttcagcttag

SEQ ID NO: 413730 - DNA, 15 bp, Homo sapiens
agccgcttcagctta

SEQ ID NO: 413731 - DNA, 15 bp, Homo sapiens
cagccgcttcagctt

SEQ ID NO: 413732 - DNA, 15 bp, Homo sapiens
acagccgcttcagct

SEQ ID NO: 413733 - DNA, 15 bp, Homo sapiens
gacagccgcttcagc

SEQ ID NO: 413734 - DNA, 15 bp, Homo sapiens
agacagccgcttcag

SEQ ID NO: 413735 - DNA, 15 bp, Homo sapiens
cagacagccgcttca

SEQ ID NO: 413736 - DNA, 15 bp, Homo sapiens
gcagacagccgcttc

SEQ ID NO: 413737 - DNA, 15 bp, Homo sapiens
tgcagacagccgctt

SEQ ID NO: 413738 - DNA, 15 bp, Homo sapiens
ctgcagacagccgct

SEQ ID NO: 413739 - DNA, 15 bp, Homo sapiens
cctgcagacagccgc

SEQ ID NO: 413740 - DNA, 15 bp, Homo sapiens
acctgcagacagccg

SEQ ID NO: 413741 - DNA, 15 bp, Homo sapiens
gacctgcagacagcc

SEQ ID NO: 413742 - DNA, 15 bp, Homo sapiens
tgacctgcagacagc

SEQ ID NO: 413743 - DNA, 15 bp, Homo sapiens
ctgacctgcagacag

SEQ ID NO: 413744 - DNA, 15 bp, Homo sapiens
tctgacctgcagaca

SEQ ID NO: 413745 - DNA, 15 bp, Homo sapiens
atctgacctgcagac

SEQ ID NO: 413746 - DNA, 15 bp, Homo sapiens
aatctgacctgcaga

SEQ ID NO: 413747 - DNA, 15 bp, Homo sapiens
aaatctgacctgcag

SEQ ID NO: 413748 - DNA, 15 bp, Homo sapiens
gaaatctgacctgca

SEQ ID NO: 413749 - DNA, 15 bp, Homo sapiens
agaaatctgacctgc

SEQ ID NO: 413750 - DNA, 15 bp, Homo sapiens
aagaaatctgacctg

SEQ ID NO: 413751 - DNA, 15 bp, Homo sapiens
aaagaaatctgacct

SEQ ID NO: 413752 - DNA, 15 bp, Homo sapiens
taaagaaatctgacc

SEQ ID NO: 413753 - DNA, 15 bp, Homo sapiens
ataaagaaatctgac

SEQ ID NO: 413754 - DNA, 15 bp, Homo sapiens
gataaagaaatctga

SEQ ID NO: 413755 - DNA, 15 bp, Homo sapiens
tgataaagaaatctg

SEQ ID NO: 413756 - DNA, 15 bp, Homo sapiens
ctgataaagaaatct

SEQ ID NO: 413757 - DNA, 15 bp, Homo sapiens
tctgataaagaaatc

SEQ ID NO: 413758 - DNA, 15 bp, Homo sapiens
ctctgataaagaaat

SEQ ID NO: 413759 - DNA, 15 bp, Homo sapiens
tctctgataaagaaa

SEQ ID NO: 413760 - DNA, 15 bp, Homo sapiens
ttctctgataaagaa

SEQ ID NO: 413761 - DNA, 15 bp, Homo sapiens
cttctctgataaaga

SEQ ID NO: 413762 - DNA, 15 bp, Homo sapiens
gcttctctgataaag

SEQ ID NO: 413763 - DNA, 15 bp, Homo sapiens
ggcttctctgataaa

SEQ ID NO: 413764 - DNA, 15 bp, Homo sapiens
aggcttctctgataa

SEQ ID NO: 413765 - DNA, 15 bp, Homo sapiens
gaggcttctctgata

SEQ ID NO: 413766 - DNA, 15 bp, Homo sapiens
tgaggcttctctgat

SEQ ID NO: 413767 - DNA, 15 bp, Homo sapiens
ctgaggcttctctga

SEQ ID NO: 413768 - DNA, 15 bp, Homo sapiens
gctgaggcttctctg

SEQ ID NO: 413769 - DNA, 15 bp, Homo sapiens
agctgaggcttctct

SEQ ID NO: 413770 - DNA, 15 bp, Homo sapiens
gagctgaggcttctc

SEQ ID NO: 413771 - DNA, 15 bp, Homo sapiens
agagctgaggcttct

SEQ ID NO: 413772 - DNA, 15 bp, Homo sapiens
cagagctgaggcttc

SEQ ID NO: 413773 - DNA, 15 bp, Homo sapiens
gcagagctgaggctt

SEQ ID NO: 413774 - DNA, 15 bp, Homo sapiens
agcagagctgaggct

SEQ ID NO: 413775 - DNA, 15 bp, Homo sapiens
cagcagagctgaggc

SEQ ID NO: 413776 - DNA, 15 bp, Homo sapiens
acagcagagctgagg

SEQ ID NO: 413777 - DNA, 15 bp, Homo sapiens
aacagcagagctgag

SEQ ID NO: 413778 - DNA, 15 bp, Homo sapiens
taacagcagagctga

SEQ ID NO: 413779 - DNA, 15 bp, Homo sapiens
ttaacagcagagctg

SEQ ID NO: 413780 - DNA, 15 bp, Homo sapiens
cttaacagcagagct

SEQ ID NO: 413781 - DNA, 15 bp, Homo sapiens
ccttaacagcagagc

SEQ ID NO: 413782 - DNA, 15 bp, Homo sapiens
gccttaacagcagag

SEQ ID NO: 413783 - DNA, 15 bp, Homo sapiens
ggccttaacagcaga

SEQ ID NO: 413784 - DNA, 15 bp, Homo sapiens
aggccttaacagcag

SEQ ID NO: 413785 - DNA, 15 bp, Homo sapiens
aaggccttaacagca

SEQ ID NO: 413786 - DNA, 15 bp, Homo sapiens
aaaggccttaacagc

SEQ ID NO: 413787 - DNA, 15 bp, Homo sapiens
caaaggccttaacag

SEQ ID NO: 413788 - DNA, 15 bp, Homo sapiens
tcaaaggccttaaca

SEQ ID NO: 413789 - DNA, 15 bp, Homo sapiens
ttcaaaggccttaac

SEQ ID NO: 413790 - DNA, 15 bp, Homo sapiens
attcaaaggccttaa

SEQ ID NO: 413791 - DNA, 15 bp, Homo sapiens
cattcaaaggcctta

SEQ ID NO: 413792 - DNA, 15 bp, Homo sapiens
ccattcaaaggcctt

SEQ ID NO: 413793 - DNA, 15 bp, Homo sapiens
tccattcaaaggcct

SEQ ID NO: 413794 - DNA, 15 bp, Homo sapiens
atccattcaaaggcc

SEQ ID NO: 413795 - DNA, 15 bp, Homo sapiens
aatccattcaaaggc

SEQ ID NO: 413796 - DNA, 15 bp, Homo sapiens
caatccattcaaagg

SEQ ID NO: 413797 - DNA, 15 bp, Homo sapiens
tcaatccattcaaag

SEQ ID NO: 413798 - DNA, 15 bp, Homo sapiens
ttcaatccattcaaa

SEQ ID NO: 413799 - DNA, 15 bp, Homo sapiens
gttcaatccattcaa

SEQ ID NO: 413800 - DNA, 15 bp, Homo sapiens
ggttcaatccattca

SEQ ID NO: 413801 - DNA, 15 bp, Homo sapiens
tggttcaatccattc

SEQ ID NO: 413802 - DNA, 15 bp, Homo sapiens
ctggttcaatccatt

SEQ ID NO: 413803 - DNA, 15 bp, Homo sapiens
cctggttcaatccat

SEQ ID NO: 413804 - DNA, 15 bp, Homo sapiens
gcctggttcaatcca

SEQ ID NO: 413805 - DNA, 15 bp, Homo sapiens
ggcctggttcaatcc

SEQ ID NO: 413806 - DNA, 15 bp, Homo sapiens
gggcctggttcaatc

SEQ ID NO: 413807 - DNA, 15 bp, Homo sapiens
tgggcctggttcaat

SEQ ID NO: 413808 - DNA, 15 bp, Homo sapiens
gtgggcctggttcaa

SEQ ID NO: 413809 - DNA, 15 bp, Homo sapiens
ggtgggcctggttca

SEQ ID NO: 413810 - DNA, 15 bp, Homo sapiens
gggtgggcctggttc

SEQ ID NO: 413811 - DNA, 15 bp, Homo sapiens
tgggtgggcctggtt

SEQ ID NO: 413812 - DNA, 15 bp, Homo sapiens
ctgggtgggcctggt

SEQ ID NO: 413813 - DNA, 15 bp, Homo sapiens
tctgggtgggcctgg

SEQ ID NO: 413814 - DNA, 15 bp, Homo sapiens
atctgggtgggcctg

SEQ ID NO: 413815 - DNA, 15 bp, Homo sapiens
aatctgggtgggcct

SEQ ID NO: 413816 - DNA, 15 bp, Homo sapiens
taatctgggtgggcc

SEQ ID NO: 413817 - DNA, 15 bp, Homo sapiens
ataatctgggtgggc

SEQ ID NO: 413818 - DNA, 15 bp, Homo sapiens
gataatctgggtggg

SEQ ID NO: 413819 - DNA, 15 bp, Homo sapiens
agataatctgggtgg

SEQ ID NO: 413820 - DNA, 15 bp, Homo sapiens
tagataatctgggtg

SEQ ID NO: 413821 - DNA, 15 bp, Homo sapiens
ctagataatctgggt

SEQ ID NO: 413822 - DNA, 15 bp, Homo sapiens
cctagataatctggg

SEQ ID NO: 413823 - DNA, 15 bp, Homo sapiens
tcctagataatctgg

SEQ ID NO: 413824 - DNA, 15 bp, Homo sapiens
atcctagataatctg

SEQ ID NO: 413825 - DNA, 15 bp, Homo sapiens
tatcctagataatct

SEQ ID NO: 413826 - DNA, 15 bp, Homo sapiens
ttatcctagataatc

SEQ ID NO: 413827 - DNA, 15 bp, Homo sapiens
attatcctagataat

SEQ ID NO: 413828 - DNA, 15 bp, Homo sapiens
gattatcctagataa

SEQ ID NO: 413829 - DNA, 15 bp, Homo sapiens
agattatcctagata

SEQ ID NO: 413830 - DNA, 15 bp, Homo sapiens
aagattatcctagat

SEQ ID NO: 413831 - DNA, 15 bp, Homo sapiens
aaagattatcctaga

SEQ ID NO: 413832 - DNA, 15 bp, Homo sapiens
taaagattatcctag

SEQ ID NO: 413833 - DNA, 15 bp, Homo sapiens
gtaaagattatccta

SEQ ID NO: 413834 - DNA, 15 bp, Homo sapiens
agtaaagattatcct

SEQ ID NO: 413835 - DNA, 15 bp, Homo sapiens
aagtaaagattatcc

SEQ ID NO: 413836 - DNA, 15 bp, Homo sapiens
taagtaaagattatc

SEQ ID NO: 413837 - DNA, 15 bp, Homo sapiens
ttaagtaaagattat

SEQ ID NO: 413838 - DNA, 15 bp, Homo sapiens
tttaagtaaagatta

SEQ ID NO: 413839 - DNA, 15 bp, Homo sapiens
ctttaagtaaagatt

SEQ ID NO: 413840 - DNA, 15 bp, Homo sapiens
actttaagtaaagat

SEQ ID NO: 413841 - DNA, 15 bp, Homo sapiens
gactttaagtaaaga

SEQ ID NO: 413842 - DNA, 15 bp, Homo sapiens
tgactttaagtaaag

SEQ ID NO: 413843 - DNA, 15 bp, Homo sapiens
ttgactttaagtaaa

SEQ ID NO: 413844 - DNA, 15 bp, Homo sapiens
attgactttaagtaa

SEQ ID NO: 413845 - DNA, 15 bp, Homo sapiens
cattgactttaagta

SEQ ID NO: 413846 - DNA, 15 bp, Homo sapiens
ccattgactttaagt

SEQ ID NO: 413847 - DNA, 15 bp, Homo sapiens
tccattgactttaag

SEQ ID NO: 413848 - DNA, 15 bp, Homo sapiens
atccattgactttaa

SEQ ID NO: 413849 - DNA, 15 bp, Homo sapiens
aatccattgacttta

SEQ ID NO: 413850 - DNA, 15 bp, Homo sapiens
caatccattgacttt

SEQ ID NO: 413851 - DNA, 15 bp, Homo sapiens
acaatccattgactt

SEQ ID NO: 413852 - DNA, 15 bp, Homo sapiens
cacaatccattgact

SEQ ID NO: 413853 - DNA, 15 bp, Homo sapiens
acacaatccattgac

SEQ ID NO: 413854 - DNA, 15 bp, Homo sapiens
tacacaatccattga

SEQ ID NO: 413855 - DNA, 15 bp, Homo sapiens
atacacaatccattg

SEQ ID NO: 413856 - DNA, 15 bp, Homo sapiens
aatacacaatccatt

SEQ ID NO: 413857 - DNA, 15 bp, Homo sapiens
aaatacacaatccat

SEQ ID NO: 413858 - DNA, 15 bp, Homo sapiens
aaaatacacaatcca

SEQ ID NO: 413859 - DNA, 15 bp, Homo sapiens
taaaatacacaatcc

SEQ ID NO: 413860 - DNA, 15 bp, Homo sapiens
ttaaaatacacaatc

SEQ ID NO: 413861 - DNA, 15 bp, Homo sapiens
attaaaatacacaat

SEQ ID NO: 413862 - DNA, 15 bp, Homo sapiens
gattaaaatacacaa

SEQ ID NO: 413863 - DNA, 15 bp, Homo sapiens
tgattaaaatacaca

SEQ ID NO: 413864 - DNA, 15 bp, Homo sapiens
gtgattaaaatacac

SEQ ID NO: 413865 - DNA, 15 bp, Homo sapiens
tgtgattaaaataca

SEQ ID NO: 413866 - DNA, 15 bp, Homo sapiens
atgtgattaaaatac

SEQ ID NO: 413867 - DNA, 15 bp, Homo sapiens
gatgtgattaaaata

SEQ ID NO: 413868 - DNA, 15 bp, Homo sapiens
agatgtgattaaaat

SEQ ID NO: 413869 - DNA, 15 bp, Homo sapiens
tagatgtgattaaaa

SEQ ID NO: 413870 - DNA, 15 bp, Homo sapiens
gtagatgtgattaaa

SEQ ID NO: 413871 - DNA, 15 bp, Homo sapiens
tgtagatgtgattaa

SEQ ID NO: 413872 - DNA, 15 bp, Homo sapiens
ttgtagatgtgatta

SEQ ID NO: 413873 - DNA, 15 bp, Homo sapiens
tttgtagatgtgatt

SEQ ID NO: 413874 - DNA, 15 bp, Homo sapiens
ttttgtagatgtgat

SEQ ID NO: 413875 - DNA, 15 bp, Homo sapiens
attttgtagatgtga

SEQ ID NO: 413876 - DNA, 15 bp, Homo sapiens
tattttgtagatgtg

SEQ ID NO: 413877 - DNA, 15 bp, Homo sapiens
gtattttgtagatgt

SEQ ID NO: 413878 - DNA, 15 bp, Homo sapiens
ggtattttgtagatg

SEQ ID NO: 413879 - DNA, 15 bp, Homo sapiens
aggtattttgtagat

SEQ ID NO: 413880 - DNA, 15 bp, Homo sapiens
aaggtattttgtaga

SEQ ID NO: 413881 - DNA, 15 bp, Homo sapiens
gaaggtattttgtag

SEQ ID NO: 413882 - DNA, 15 bp, Homo sapiens
tgaaggtattttgta

SEQ ID NO: 413883 - DNA, 15 bp, Homo sapiens
gtgaaggtattttgt

SEQ ID NO: 413884 - DNA, 15 bp, Homo sapiens
tgtgaaggtattttg

SEQ ID NO: 413885 - DNA, 15 bp, Homo sapiens
ctgtgaaggtatttt

SEQ ID NO: 413886 - DNA, 15 bp, Homo sapiens
gctgtgaaggtattt

SEQ ID NO: 413887 - DNA, 15 bp, Homo sapiens
tgctgtgaaggtatt

SEQ ID NO: 413888 - DNA, 15 bp, Homo sapiens
ttgctgtgaaggtat

SEQ ID NO: 413889 - DNA, 15 bp, Homo sapiens
attgctgtgaaggta

SEQ ID NO: 413890 - DNA, 15 bp, Homo sapiens
tattgctgtgaaggt

SEQ ID NO: 413891 - DNA, 15 bp, Homo sapiens
gtattgctgtgaagg

SEQ ID NO: 413892 - DNA, 15 bp, Homo sapiens
agtattgctgtgaag

SEQ ID NO: 413893 - DNA, 15 bp, Homo sapiens
aagtattgctgtgaa

SEQ ID NO: 413894 - DNA, 15 bp, Homo sapiens
taagtattgctgtga

SEQ ID NO: 413895 - DNA, 15 bp, Homo sapiens
ctaagtattgctgtg

SEQ ID NO: 413896 - DNA, 15 bp, Homo sapiens
actaagtattgctgt

SEQ ID NO: 413897 - DNA, 15 bp, Homo sapiens
cactaagtattgctg

SEQ ID NO: 413898 - DNA, 15 bp, Homo sapiens
acactaagtattgct

SEQ ID NO: 413899 - DNA, 15 bp, Homo sapiens
aacactaagtattgc

SEQ ID NO: 413900 - DNA, 15 bp, Homo sapiens
aaacactaagtattg

SEQ ID NO: 413901 - DNA, 15 bp, Homo sapiens
caaacactaagtatt

SEQ ID NO: 413902 - DNA, 15 bp, Homo sapiens
ccaaacactaagtat

SEQ ID NO: 413903 - DNA, 15 bp, Homo sapiens
accaaacactaagta

SEQ ID NO: 413904 - DNA, 15 bp, Homo sapiens
aaccaaacactaagt

SEQ ID NO: 413905 - DNA, 15 bp, Homo sapiens
aaaccaaacactaag

SEQ ID NO: 413906 - DNA, 15 bp, Homo sapiens
taaaccaaacactaa

SEQ ID NO: 413907 - DNA, 15 bp, Homo sapiens
ttaaaccaaacacta

SEQ ID NO: 413908 - DNA, 15 bp, Homo sapiens
attaaaccaaacact

SEQ ID NO: 413909 - DNA, 15 bp, Homo sapiens
tattaaaccaaacac

SEQ ID NO: 413910 - DNA, 15 bp, Homo sapiens
ctattaaaccaaaca

SEQ ID NO: 413911 - DNA, 15 bp, Homo sapiens
gctattaaaccaaac

SEQ ID NO: 413912 - DNA, 15 bp, Homo sapiens
agctattaaaccaaa

SEQ ID NO: 413913 - DNA, 15 bp, Homo sapiens
tagctattaaaccaa

SEQ ID NO: 413914 - DNA, 15 bp, Homo sapiens
ctagctattaaacca

SEQ ID NO: 413915 - DNA, 15 bp, Homo sapiens
cctagctattaaacc

SEQ ID NO: 413916 - DNA, 15 bp, Homo sapiens
ccctagctattaaac

SEQ ID NO: 413917 - DNA, 15 bp, Homo sapiens
cccctagctattaaa

SEQ ID NO: 413918 - DNA, 15 bp, Homo sapiens
gcccctagctattaa

SEQ ID NO: 413919 - DNA, 15 bp, Homo sapiens
tgcccctagctatta

SEQ ID NO: 413920 - DNA, 15 bp, Homo sapiens
ctgcccctagctatt

SEQ ID NO: 413921 - DNA, 15 bp, Homo sapiens
actgcccctagctat

SEQ ID NO: 413922 - DNA, 15 bp, Homo sapiens
tactgcccctagcta

SEQ ID NO: 413923 - DNA, 15 bp, Homo sapiens
ctactgcccctagct

SEQ ID NO: 413924 - DNA, 15 bp, Homo sapiens
actactgcccctagc

SEQ ID NO: 413925 - DNA, 15 bp, Homo sapiens
gactactgcccctag

SEQ ID NO: 413926 - DNA, 15 bp, Homo sapiens
agactactgccccta

SEQ ID NO: 413927 - DNA, 15 bp, Homo sapiens
tagactactgcccct

SEQ ID NO: 413928 - DNA, 15 bp, Homo sapiens
gtagactactgcccc

SEQ ID NO: 413929 - DNA, 15 bp, Homo sapiens
ggtagactactgccc

SEQ ID NO: 413930 - DNA, 15 bp, Homo sapiens
gggtagactactgcc

SEQ ID NO: 413931 - DNA, 15 bp, Homo sapiens
tgggtagactactgc

SEQ ID NO: 413932 - DNA, 15 bp, Homo sapiens
ttgggtagactactg

SEQ ID NO: 413933 - DNA, 15 bp, Homo sapiens
cttgggtagactact

SEQ ID NO: 413934 - DNA, 15 bp, Homo sapiens
acttgggtagactac

SEQ ID NO: 413935 - DNA, 15 bp, Homo sapiens
aacttgggtagacta

SEQ ID NO: 413936 - DNA, 15 bp, Homo sapiens
caacttgggtagact

SEQ ID NO: 413937 - DNA, 15 bp, Homo sapiens
tcaacttgggtagac

SEQ ID NO: 413938 - DNA, 15 bp, Homo sapiens
gtcaacttgggtaga

SEQ ID NO: 413939 - DNA, 15 bp, Homo sapiens
tgtcaacttgggtag

SEQ ID NO: 413940 - DNA, 15 bp, Homo sapiens
gtgtcaacttgggta

SEQ ID NO: 413941 - DNA, 15 bp, Homo sapiens
tgtgtcaacttgggt

SEQ ID NO: 413942 - DNA, 15 bp, Homo sapiens
gtgtgtcaacttggg

SEQ ID NO: 413943 - DNA, 15 bp, Homo sapiens
tgtgtgtcaacttgg

SEQ ID NO: 413944 - DNA, 15 bp, Homo sapiens
ttgtgtgtcaacttg

SEQ ID NO: 413945 - DNA, 15 bp, Homo sapiens
tttgtgtgtcaactt

SEQ ID NO: 413946 - DNA, 15 bp, Homo sapiens
ttttgtgtgtcaact

SEQ ID NO: 413947 - DNA, 15 bp, Homo sapiens
attttgtgtgtcaac

SEQ ID NO: 413948 - DNA, 15 bp, Homo sapiens
gattttgtgtgtcaa

SEQ ID NO: 413949 - DNA, 15 bp, Homo sapiens
agattttgtgtgtca

SEQ ID NO: 413950 - DNA, 15 bp, Homo sapiens
gagattttgtgtgtc

SEQ ID NO: 413951 - DNA, 15 bp, Homo sapiens
tgagattttgtgtgt

SEQ ID NO: 413952 - DNA, 15 bp, Homo sapiens
gtgagattttgtgtg

SEQ ID NO: 413953 - DNA, 15 bp, Homo sapiens
ggtgagattttgtgt

SEQ ID NO: 413954 - DNA, 15 bp, Homo sapiens
tggtgagattttgtg

SEQ ID NO: 413955 - DNA, 15 bp, Homo sapiens
atggtgagattttgt

SEQ ID NO: 413956 - DNA, 15 bp, Homo sapiens
gatggtgagattttg

SEQ ID NO: 413957 - DNA, 15 bp, Homo sapiens
tgatggtgagatttt

SEQ ID NO: 413958 - DNA, 15 bp, Homo sapiens
gtgatggtgagattt

SEQ ID NO: 413959 - DNA, 15 bp, Homo sapiens
tgtgatggtgagatt

SEQ ID NO: 413960 - DNA, 15 bp, Homo sapiens
gtgtgatggtgagat

SEQ ID NO: 413961 - DNA, 15 bp, Homo sapiens
agtgtgatggtgaga

SEQ ID NO: 413962 - DNA, 15 bp, Homo sapiens
aagtgtgatggtgag

SEQ ID NO: 413963 - DNA, 15 bp, Homo sapiens
caagtgtgatggtga

SEQ ID NO: 413964 - DNA, 15 bp, Homo sapiens
tcaagtgtgatggtg

SEQ ID NO: 413965 - DNA, 15 bp, Homo sapiens
atcaagtgtgatggt

SEQ ID NO: 413966 - DNA, 15 bp, Homo sapiens
tatcaagtgtgatgg

SEQ ID NO: 413967 - DNA, 15 bp, Homo sapiens
atatcaagtgtgatg

SEQ ID NO: 413968 - DNA, 15 bp, Homo sapiens
gatatcaagtgtgat

SEQ ID NO: 413969 - DNA, 15 bp, Homo sapiens
agatatcaagtgtga

SEQ ID NO: 413970 - DNA, 15 bp, Homo sapiens
cagatatcaagtgtg

SEQ ID NO: 413971 - DNA, 15 bp, Homo sapiens
tcagatatcaagtgt

SEQ ID NO: 413972 - DNA, 15 bp, Homo sapiens
ttcagatatcaagtg

SEQ ID NO: 413973 - DNA, 15 bp, Homo sapiens
gttcagatatcaagt

SEQ ID NO: 413974 - DNA, 15 bp, Homo sapiens
ggttcagatatcaag

SEQ ID NO: 413975 - DNA, 15 bp, Homo sapiens
tggttcagatatcaa

SEQ ID NO: 413976 - DNA, 15 bp, Homo sapiens
ctggttcagatatca

SEQ ID NO: 413977 - DNA, 15 bp, Homo sapiens
actggttcagatatc

SEQ ID NO: 413978 - DNA, 15 bp, Homo sapiens
aactggttcagatat

SEQ ID NO: 413979 - DNA, 15 bp, Homo sapiens
gaactggttcagata

SEQ ID NO: 413980 - DNA, 15 bp, Homo sapiens
tgaactggttcagat

SEQ ID NO: 413981 - DNA, 15 bp, Homo sapiens
ttgaactggttcaga

SEQ ID NO: 413982 - DNA, 15 bp, Homo sapiens
attgaactggttcag

SEQ ID NO: 413983 - DNA, 15 bp, Homo sapiens
cattgaactggttca

SEQ ID NO: 413984 - DNA, 15 bp, Homo sapiens
gcattgaactggttc

SEQ ID NO: 413985 - DNA, 15 bp, Homo sapiens
agcattgaactggtt

SEQ ID NO: 413986 - DNA, 15 bp, Homo sapiens
gagcattgaactggt

SEQ ID NO: 413987 - DNA, 15 bp, Homo sapiens
tgagcattgaactgg

SEQ ID NO: 413988 - DNA, 15 bp, Homo sapiens
atgagcattgaactg

SEQ ID NO: 413989 - DNA, 15 bp, Homo sapiens
tatgagcattgaact

SEQ ID NO: 413990 - DNA, 15 bp, Homo sapiens
atatgagcattgaac

SEQ ID NO: 413991 - DNA, 15 bp, Homo sapiens
tatatgagcattgaa

SEQ ID NO: 413992 - DNA, 15 bp, Homo sapiens
ctatatgagcattga

SEQ ID NO: 413993 - DNA, 15 bp, Homo sapiens
tctatatgagcattg

SEQ ID NO: 413994 - DNA, 15 bp, Homo sapiens
ttctatatgagcatt

SEQ ID NO: 413995 - DNA, 15 bp, Homo sapiens
tttctatatgagcat

SEQ ID NO: 413996 - DNA, 15 bp, Homo sapiens
gtttctatatgagca

SEQ ID NO: 413997 - DNA, 15 bp, Homo sapiens
tgtttctatatgagc

SEQ ID NO: 413998 - DNA, 15 bp, Homo sapiens
gtgtttctatatgag

SEQ ID NO: 413999 - DNA, 15 bp, Homo sapiens
ggtgtttctatatga

SEQ ID NO: 414000 - DNA, 15 bp, Homo sapiens
gggtgtttctatatg

SEQ ID NO: 414001 - DNA, 15 bp, Homo sapiens
tgggtgtttctatat

SEQ ID NO: 414002 - DNA, 15 bp, Homo sapiens
gtgggtgtttctata

SEQ ID NO: 414003 - DNA, 15 bp, Homo sapiens
agtgggtgtttctat

SEQ ID NO: 414004 - DNA, 15 bp, Homo sapiens
aagtgggtgtttcta

SEQ ID NO: 414005 - DNA, 15 bp, Homo sapiens
gaagtgggtgtttct

SEQ ID NO: 414006 - DNA, 15 bp, Homo sapiens
tgaagtgggtgtttc

SEQ ID NO: 414007 - DNA, 15 bp, Homo sapiens
atgaagtgggtgttt

SEQ ID NO: 414008 - DNA, 15 bp, Homo sapiens
aatgaagtgggtgtt

SEQ ID NO: 414009 - DNA, 15 bp, Homo sapiens
taatgaagtgggtgt

SEQ ID NO: 414010 - DNA, 15 bp, Homo sapiens
ttaatgaagtgggtg

SEQ ID NO: 414011 - DNA, 15 bp, Homo sapiens
attaatgaagtgggt

SEQ ID NO: 414012 - DNA, 15 bp, Homo sapiens
tattaatgaagtggg

SEQ ID NO: 414013 - DNA, 15 bp, Homo sapiens
ctattaatgaagtgg

SEQ ID NO: 414014 - DNA, 15 bp, Homo sapiens
cctattaatgaagtg

SEQ ID NO: 414015 - DNA, 15 bp, Homo sapiens
acctattaatgaagt

SEQ ID NO: 414016 - DNA, 15 bp, Homo sapiens
tacctattaatgaag

SEQ ID NO: 414017 - DNA, 15 bp, Homo sapiens
ctacctattaatgaa

SEQ ID NO: 414018 - DNA, 15 bp, Homo sapiens
actacctattaatga

SEQ ID NO: 414019 - DNA, 15 bp, Homo sapiens
aactacctattaatg

SEQ ID NO: 414020 - DNA, 15 bp, Homo sapiens
taactacctattaat

SEQ ID NO: 414021 - DNA, 15 bp, Homo sapiens
ataactacctattaa

SEQ ID NO: 414022 - DNA, 15 bp, Homo sapiens
tataactacctatta

SEQ ID NO: 414023 - DNA, 15 bp, Homo sapiens
ttataactacctatt

SEQ ID NO: 414024 - DNA, 15 bp, Homo sapiens
attataactacctat

SEQ ID NO: 414025 - DNA, 15 bp, Homo sapiens
aattataactaccta

SEQ ID NO: 414026 - DNA, 15 bp, Homo sapiens
aaattataactacct

SEQ ID NO: 414027 - DNA, 15 bp, Homo sapiens
taaattataactacc

SEQ ID NO: 414028 - DNA, 15 bp, Homo sapiens
ataaattataactac

SEQ ID NO: 414029 - DNA, 15 bp, Homo sapiens
gataaattataacta

SEQ ID NO: 414030 - DNA, 15 bp, Homo sapiens
ggataaattataact

SEQ ID NO: 414031 - DNA, 15 bp, Homo sapiens
tggataaattataac

SEQ ID NO: 414032 - DNA, 15 bp, Homo sapiens
atggataaattataa

SEQ ID NO: 414033 - DNA, 15 bp, Homo sapiens
catggataaattata

SEQ ID NO: 414034 - DNA, 15 bp, Homo sapiens
tcatggataaattat

SEQ ID NO: 414035 - DNA, 15 bp, Homo sapiens
atcatggataaatta

SEQ ID NO: 414036 - DNA, 15 bp, Homo sapiens
tatcatggataaatt

SEQ ID NO: 414037 - DNA, 15 bp, Homo sapiens
ttatcatggataaat

SEQ ID NO: 414038 - DNA, 15 bp, Homo sapiens
tttatcatggataaa

SEQ ID NO: 414039 - DNA, 15 bp, Homo sapiens
ttttatcatggataa

SEQ ID NO: 414040 - DNA, 15 bp, Homo sapiens
tttttatcatggata

SEQ ID NO: 414041 - DNA, 15 bp, Homo sapiens
gtttttatcatggat

SEQ ID NO: 414042 - DNA, 15 bp, Homo sapiens
ggtttttatcatgga

SEQ ID NO: 414043 - DNA, 15 bp, Homo sapiens
tggtttttatcatgg

SEQ ID NO: 414044 - DNA, 15 bp, Homo sapiens
ctggtttttatcatg

SEQ ID NO: 414045 - DNA, 15 bp, Homo sapiens
tctggtttttatcat

SEQ ID NO: 414046 - DNA, 15 bp, Homo sapiens
ttctggtttttatca

SEQ ID NO: 414047 - DNA, 15 bp, Homo sapiens
tttctggtttttatc

SEQ ID NO: 414048 - DNA, 15 bp, Homo sapiens
atttctggtttttat

SEQ ID NO: 414049 - DNA, 15 bp, Homo sapiens
tatttctggttttta

SEQ ID NO: 414050 - DNA, 15 bp, Homo sapiens
gtatttctggttttt

SEQ ID NO: 414051 - DNA, 15 bp, Homo sapiens
ggtatttctggtttt

SEQ ID NO: 414052 - DNA, 15 bp, Homo sapiens
gggtatttctggttt

SEQ ID NO: 414053 - DNA, 15 bp, Homo sapiens
tgggtatttctggtt

SEQ ID NO: 414054 - DNA, 15 bp, Homo sapiens
ttgggtatttctggt

SEQ ID NO: 414055 - DNA, 15 bp, Homo sapiens
attgggtatttctgg

SEQ ID NO: 414056 - DNA, 15 bp, Homo sapiens
aattgggtatttctg

SEQ ID NO: 414057 - DNA, 15 bp, Homo sapiens
aaattgggtatttct

SEQ ID NO: 414058 - DNA, 15 bp, Homo sapiens
caaattgggtatttc

SEQ ID NO: 414059 - DNA, 15 bp, Homo sapiens
tcaaattgggtattt

SEQ ID NO: 414060 - DNA, 15 bp, Homo sapiens
gtcaaattgggtatt

SEQ ID NO: 414061 - DNA, 15 bp, Homo sapiens
agtcaaattgggtat

SEQ ID NO: 414062 - DNA, 15 bp, Homo sapiens
tagtcaaattgggta

SEQ ID NO: 414063 - DNA, 15 bp, Homo sapiens
gtagtcaaattgggt

SEQ ID NO: 414064 - DNA, 15 bp, Homo sapiens
agtagtcaaattggg

SEQ ID NO: 414065 - DNA, 15 bp, Homo sapiens
aagtagtcaaattgg

SEQ ID NO: 414066 - DNA, 15 bp, Homo sapiens
taagtagtcaaattg

SEQ ID NO: 414067 - DNA, 15 bp, Homo sapiens
ttaagtagtcaaatt

SEQ ID NO: 414068 - DNA, 15 bp, Homo sapiens
attaagtagtcaaat

SEQ ID NO: 414069 - DNA, 15 bp, Homo sapiens
cattaagtagtcaaa

SEQ ID NO: 414070 - DNA, 15 bp, Homo sapiens
gcattaagtagtcaa

SEQ ID NO: 414071 - DNA, 15 bp, Homo sapiens
agcattaagtagtca

SEQ ID NO: 414072 - DNA, 15 bp, Homo sapiens
cagcattaagtagtc

SEQ ID NO: 414073 - DNA, 15 bp, Homo sapiens
ccagcattaagtagt

SEQ ID NO: 414074 - DNA, 15 bp, Homo sapiens
accagcattaagtag

SEQ ID NO: 414075 - DNA, 15 bp, Homo sapiens
taccagcattaagta

SEQ ID NO: 414076 - DNA, 15 bp, Homo sapiens
gtaccagcattaagt

SEQ ID NO: 414077 - DNA, 15 bp, Homo sapiens
agtaccagcattaag

SEQ ID NO: 414078 - DNA, 15 bp, Homo sapiens
tagtaccagcattaa

SEQ ID NO: 414079 - DNA, 15 bp, Homo sapiens
ctagtaccagcatta

SEQ ID NO: 414080 - DNA, 15 bp, Homo sapiens
actagtaccagcatt

SEQ ID NO: 414081 - DNA, 15 bp, Homo sapiens
aactagtaccagcat

SEQ ID NO: 414082 - DNA, 15 bp, Homo sapiens
aaactagtaccagca

SEQ ID NO: 414083 - DNA, 15 bp, Homo sapiens
caaactagtaccagc

SEQ ID NO: 414084 - DNA, 15 bp, Homo sapiens
ccaaactagtaccag

SEQ ID NO: 414085 - DNA, 15 bp, Homo sapiens
cccaaactagtacca

SEQ ID NO: 414086 - DNA, 15 bp, Homo sapiens
gcccaaactagtacc

SEQ ID NO: 414087 - DNA, 15 bp, Homo sapiens
agcccaaactagtac

SEQ ID NO: 414088 - DNA, 15 bp, Homo sapiens
tagcccaaactagta

SEQ ID NO: 414089 - DNA, 15 bp, Homo sapiens
atagcccaaactagt

SEQ ID NO: 414090 - DNA, 15 bp, Homo sapiens
tatagcccaaactag

SEQ ID NO: 414091 - DNA, 15 bp, Homo sapiens
gtatagcccaaacta

SEQ ID NO: 414092 - DNA, 15 bp, Homo sapiens
tgtatagcccaaact

SEQ ID NO: 414093 - DNA, 15 bp, Homo sapiens
gtgtatagcccaaac

SEQ ID NO: 414094 - DNA, 15 bp, Homo sapiens
tgtgtatagcccaaa

SEQ ID NO: 414095 - DNA, 15 bp, Homo sapiens
ctgtgtatagcccaa

SEQ ID NO: 414096 - DNA, 15 bp, Homo sapiens
actgtgtatagccca

SEQ ID NO: 414097 - DNA, 15 bp, Homo sapiens
aactgtgtatagccc

SEQ ID NO: 414098 - DNA, 15 bp, Homo sapiens
aaactgtgtatagcc

SEQ ID NO: 414099 - DNA, 15 bp, Homo sapiens
caaactgtgtatagc

SEQ ID NO: 414100 - DNA, 15 bp, Homo sapiens
gcaaactgtgtatag

SEQ ID NO: 414101 - DNA, 15 bp, Homo sapiens
tgcaaactgtgtata

SEQ ID NO: 414102 - DNA, 15 bp, Homo sapiens
atgcaaactgtgtat

SEQ ID NO: 414103 - DNA, 15 bp, Homo sapiens
catgcaaactgtgta

SEQ ID NO: 414104 - DNA, 15 bp, Homo sapiens
acatgcaaactgtgt

SEQ ID NO: 414105 - DNA, 15 bp, Homo sapiens
aacatgcaaactgtg

SEQ ID NO: 414106 - DNA, 15 bp, Homo sapiens
taacatgcaaactgt

SEQ ID NO: 414107 - DNA, 15 bp, Homo sapiens
gtaacatgcaaactg

SEQ ID NO: 414108 - DNA, 15 bp, Homo sapiens
tgtaacatgcaaact

SEQ ID NO: 414109 - DNA, 15 bp, Homo sapiens
ttgtaacatgcaaac

SEQ ID NO: 414110 - DNA, 15 bp, Homo sapiens
tttgtaacatgcaaa

SEQ ID NO: 414111 - DNA, 15 bp, Homo sapiens
ttttgtaacatgcaa

SEQ ID NO: 414112 - DNA, 15 bp, Homo sapiens
tttttgtaacatgca

SEQ ID NO: 414113 - DNA, 15 bp, Homo sapiens
ctttttgtaacatgc

SEQ ID NO: 414114 - DNA, 15 bp, Homo sapiens
actttttgtaacatg

SEQ ID NO: 414115 - DNA, 15 bp, Homo sapiens
tactttttgtaacat

SEQ ID NO: 414116 - DNA, 15 bp, Homo sapiens
ttactttttgtaaca

SEQ ID NO: 414117 - DNA, 15 bp, Homo sapiens
tttactttttgtaac

SEQ ID NO: 414118 - DNA, 15 bp, Homo sapiens
atttactttttgtaa

SEQ ID NO: 414119 - DNA, 15 bp, Homo sapiens
gatttactttttgta

SEQ ID NO: 414120 - DNA, 15 bp, Homo sapiens
agatttactttttgt

SEQ ID NO: 414121 - DNA, 15 bp, Homo sapiens
tagatttactttttg

SEQ ID NO: 414122 - DNA, 15 bp, Homo sapiens
gtagatttacttttt

SEQ ID NO: 414123 - DNA, 15 bp, Homo sapiens
ggtagatttactttt

SEQ ID NO: 414124 - DNA, 15 bp, Homo sapiens
gggtagatttacttt

SEQ ID NO: 414125 - DNA, 15 bp, Homo sapiens
agggtagatttactt

SEQ ID NO: 414126 - DNA, 15 bp, Homo sapiens
aagggtagatttact

SEQ ID NO: 414127 - DNA, 15 bp, Homo sapiens
caagggtagatttac

SEQ ID NO: 414128 - DNA, 15 bp, Homo sapiens
tcaagggtagattta

SEQ ID NO: 414129 - DNA, 15 bp, Homo sapiens
ttcaagggtagattt

SEQ ID NO: 414130 - DNA, 15 bp, Homo sapiens
tttcaagggtagatt

SEQ ID NO: 414131 - DNA, 15 bp, Homo sapiens
atttcaagggtagat

SEQ ID NO: 414132 - DNA, 15 bp, Homo sapiens
tatttcaagggtaga

SEQ ID NO: 414133 - DNA, 15 bp, Homo sapiens
ttatttcaagggtag

SEQ ID NO: 414134 - DNA, 15 bp, Homo sapiens
attatttcaagggta

SEQ ID NO: 414135 - DNA, 15 bp, Homo sapiens
tattatttcaagggt

SEQ ID NO: 414136 - DNA, 15 bp, Homo sapiens
ttattatttcaaggg

SEQ ID NO: 414137 - DNA, 15 bp, Homo sapiens
attattatttcaagg

SEQ ID NO: 414138 - DNA, 15 bp, Homo sapiens
tattattatttcaag

SEQ ID NO: 414139 - DNA, 15 bp, Homo sapiens
atattattatttcaa

SEQ ID NO: 414140 - DNA, 15 bp, Homo sapiens
aatattattatttca

SEQ ID NO: 414141 - DNA, 15 bp, Homo sapiens
aaatattattatttc

SEQ ID NO: 414142 - DNA, 15 bp, Homo sapiens
taaatattattattt

SEQ ID NO: 414143 - DNA, 15 bp, Homo sapiens
gtaaatattattatt

SEQ ID NO: 414144 - DNA, 15 bp, Homo sapiens
ggtaaatattattat

SEQ ID NO: 414145 - DNA, 15 bp, Homo sapiens
tggtaaatattatta

SEQ ID NO: 414146 - DNA, 15 bp, Homo sapiens
ctggtaaatattatt

SEQ ID NO: 414147 - DNA, 15 bp, Homo sapiens
tctggtaaatattat

SEQ ID NO: 414148 - DNA, 15 bp, Homo sapiens
ctctggtaaatatta

SEQ ID NO: 414149 - DNA, 15 bp, Homo sapiens
actctggtaaatatt

SEQ ID NO: 414150 - DNA, 15 bp, Homo sapiens
aactctggtaaatat

SEQ ID NO: 414151 - DNA, 15 bp, Homo sapiens
caactctggtaaata

SEQ ID NO: 414152 - DNA, 15 bp, Homo sapiens
tcaactctggtaaat

SEQ ID NO: 414153 - DNA, 15 bp, Homo sapiens
ctcaactctggtaaa

SEQ ID NO: 414154 - DNA, 15 bp, Homo sapiens
tctcaactctggtaa

SEQ ID NO: 414155 - DNA, 15 bp, Homo sapiens
ttctcaactctggta

SEQ ID NO: 414156 - DNA, 15 bp, Homo sapiens
attctcaactctggt

SEQ ID NO: 414157 - DNA, 15 bp, Homo sapiens
tattctcaactctgg

SEQ ID NO: 414158 - DNA, 15 bp, Homo sapiens
atattctcaactctg

SEQ ID NO: 414159 - DNA, 15 bp, Homo sapiens
aatattctcaactct

SEQ ID NO: 414160 - DNA, 15 bp, Homo sapiens
caatattctcaactc

SEQ ID NO: 414161 - DNA, 15 bp, Homo sapiens
tcaatattctcaact

SEQ ID NO: 414162 - DNA, 15 bp, Homo sapiens
ttcaatattctcaac

SEQ ID NO: 414163 - DNA, 15 bp, Homo sapiens
tttcaatattctcaa

SEQ ID NO: 414164 - DNA, 15 bp, Homo sapiens
ttttcaatattctca

SEQ ID NO: 414165 - DNA, 15 bp, Homo sapiens
cttttcaatattctc

SEQ ID NO: 414166 - DNA, 15 bp, Homo sapiens
tcttttcaatattct

SEQ ID NO: 414167 - DNA, 15 bp, Homo sapiens
ttcttttcaatattc

SEQ ID NO: 414168 - DNA, 15 bp, Homo sapiens
cttcttttcaatatt

SEQ ID NO: 414169 - DNA, 15 bp, Homo sapiens
ccttcttttcaatat

SEQ ID NO: 414170 - DNA, 15 bp, Homo sapiens
accttcttttcaata

SEQ ID NO: 414171 - DNA, 15 bp, Homo sapiens
taccttcttttcaat

SEQ ID NO: 414172 - DNA, 15 bp, Homo sapiens
ataccttcttttcaa

SEQ ID NO: 414173 - DNA, 15 bp, Homo sapiens
cataccttcttttca

SEQ ID NO: 414174 - DNA, 15 bp, Homo sapiens
gcataccttcttttc

SEQ ID NO: 414175 - DNA, 15 bp, Homo sapiens
agcataccttctttt

SEQ ID NO: 414176 - DNA, 15 bp, Homo sapiens
tagcataccttcttt

SEQ ID NO: 414177 - DNA, 15 bp, Homo sapiens
ctagcataccttctt

SEQ ID NO: 414178 - DNA, 15 bp, Homo sapiens
cctagcataccttct

SEQ ID NO: 414179 - DNA, 15 bp, Homo sapiens
gcctagcataccttc

SEQ ID NO: 414180 - DNA, 15 bp, Homo sapiens
agcctagcatacctt

SEQ ID NO: 414181 - DNA, 15 bp, Homo sapiens
tagcctagcatacct

SEQ ID NO: 414182 - DNA, 15 bp, Homo sapiens
atagcctagcatacc

SEQ ID NO: 414183 - DNA, 15 bp, Homo sapiens
tatagcctagcatac

SEQ ID NO: 414184 - DNA, 15 bp, Homo sapiens
atatagcctagcata

SEQ ID NO: 414185 - DNA, 15 bp, Homo sapiens
aatatagcctagcat

SEQ ID NO: 414186 - DNA, 15 bp, Homo sapiens
aaatatagcctagca

SEQ ID NO: 414187 - DNA, 15 bp, Homo sapiens
taaatatagcctagc

SEQ ID NO: 414188 - DNA, 15 bp, Homo sapiens
ctaaatatagcctag

SEQ ID NO: 414189 - DNA, 15 bp, Homo sapiens
cctaaatatagccta

SEQ ID NO: 414190 - DNA, 15 bp, Homo sapiens
tcctaaatatagcct

SEQ ID NO: 414191 - DNA, 15 bp, Homo sapiens
atcctaaatatagcc

SEQ ID NO: 414192 - DNA, 15 bp, Homo sapiens
aatcctaaatatagc

SEQ ID NO: 414193 - DNA, 15 bp, Homo sapiens
aaatcctaaatatag

SEQ ID NO: 414194 - DNA, 15 bp, Homo sapiens
aaaatcctaaatata

SEQ ID NO: 414195 - DNA, 15 bp, Homo sapiens
aaaaatcctaaatat

SEQ ID NO: 414196 - DNA, 15 bp, Homo sapiens
taaaaatcctaaata

SEQ ID NO: 414197 - DNA, 15 bp, Homo sapiens
ataaaaatcctaaat

SEQ ID NO: 414198 - DNA, 15 bp, Homo sapiens
tataaaaatcctaaa

SEQ ID NO: 414199 - DNA, 15 bp, Homo sapiens
ttataaaaatcctaa

SEQ ID NO: 414200 - DNA, 15 bp, Homo sapiens
tttataaaaatccta

SEQ ID NO: 414201 - DNA, 15 bp, Homo sapiens
ctttataaaaatcct

SEQ ID NO: 414202 - DNA, 15 bp, Homo sapiens
actttataaaaatcc

SEQ ID NO: 414203 - DNA, 15 bp, Homo sapiens
aactttataaaaatc

SEQ ID NO: 414204 - DNA, 15 bp, Homo sapiens
aaactttataaaaat

SEQ ID NO: 414205 - DNA, 15 bp, Homo sapiens
gaaactttataaaaa

SEQ ID NO: 414206 - DNA, 15 bp, Homo sapiens
cgaaactttataaaa

SEQ ID NO: 414207 - DNA, 15 bp, Homo sapiens
tcgaaactttataaa

SEQ ID NO: 414208 - DNA, 15 bp, Homo sapiens
ctcgaaactttataa

SEQ ID NO: 414209 - DNA, 15 bp, Homo sapiens
cctcgaaactttata

SEQ ID NO: 414210 - DNA, 15 bp, Homo sapiens
tcctcgaaactttat

SEQ ID NO: 414211 - DNA, 15 bp, Homo sapiens
ttcctcgaaacttta

SEQ ID NO: 414212 - DNA, 15 bp, Homo sapiens
attcctcgaaacttt

SEQ ID NO: 414213 - DNA, 15 bp, Homo sapiens
cattcctcgaaactt

SEQ ID NO: 414214 - DNA, 15 bp, Homo sapiens
ccattcctcgaaact

SEQ ID NO: 414215 - DNA, 15 bp, Homo sapiens
gccattcctcgaaac

SEQ ID NO: 414216 - DNA, 15 bp, Homo sapiens
tgccattcctcgaaa

SEQ ID NO: 414217 - DNA, 15 bp, Homo sapiens
ctgccattcctcgaa

SEQ ID NO: 414218 - DNA, 15 bp, Homo sapiens
gctgccattcctcga

SEQ ID NO: 414219 - DNA, 15 bp, Homo sapiens
tgctgccattcctcg

SEQ ID NO: 414220 - DNA, 15 bp, Homo sapiens
atgctgccattcctc

SEQ ID NO: 414221 - DNA, 15 bp, Homo sapiens
gatgctgccattcct

SEQ ID NO: 414222 - DNA, 15 bp, Homo sapiens
tgatgctgccattcc

SEQ ID NO: 414223 - DNA, 15 bp, Homo sapiens
atgatgctgccattc

SEQ ID NO: 414224 - DNA, 15 bp, Homo sapiens
aatgatgctgccatt

SEQ ID NO: 414225 - DNA, 15 bp, Homo sapiens
caatgatgctgccat

SEQ ID NO: 414226 - DNA, 15 bp, Homo sapiens
ccaatgatgctgcca

SEQ ID NO: 414227 - DNA, 15 bp, Homo sapiens
cccaatgatgctgcc

SEQ ID NO: 414228 - DNA, 15 bp, Homo sapiens
tcccaatgatgctgc

SEQ ID NO: 414229 - DNA, 15 bp, Homo sapiens
atcccaatgatgctg

SEQ ID NO: 414230 - DNA, 15 bp, Homo sapiens
tatcccaatgatgct

SEQ ID NO: 414231 - DNA, 15 bp, Homo sapiens
gtatcccaatgatgc

SEQ ID NO: 414232 - DNA, 15 bp, Homo sapiens
agtatcccaatgatg

SEQ ID NO: 414233 - DNA, 15 bp, Homo sapiens
cagtatcccaatgat

SEQ ID NO: 414234 - DNA, 15 bp, Homo sapiens
tcagtatcccaatga

SEQ ID NO: 414235 - DNA, 15 bp, Homo sapiens
atcagtatcccaatg

SEQ ID NO: 414236 - DNA, 15 bp, Homo sapiens
gatcagtatcccaat

SEQ ID NO: 414237 - DNA, 15 bp, Homo sapiens
cgatcagtatcccaa

SEQ ID NO: 414238 - DNA, 15 bp, Homo sapiens
tcgatcagtatccca

SEQ ID NO: 414239 - DNA, 15 bp, Homo sapiens
gtcgatcagtatccc

SEQ ID NO: 414240 - DNA, 15 bp, Homo sapiens
agtcgatcagtatcc

SEQ ID NO: 414241 - DNA, 15 bp, Homo sapiens
aagtcgatcagtatc

SEQ ID NO: 414242 - DNA, 15 bp, Homo sapiens
gaagtcgatcagtat

SEQ ID NO: 414243 - DNA, 15 bp, Homo sapiens
ggaagtcgatcagta

SEQ ID NO: 414244 - DNA, 15 bp, Homo sapiens
gggaagtcgatcagt

SEQ ID NO: 414245 - DNA, 15 bp, Homo sapiens
tgggaagtcgatcag

SEQ ID NO: 414246 - DNA, 15 bp, Homo sapiens
ttgggaagtcgatca

SEQ ID NO: 414247 - DNA, 15 bp, Homo sapiens
tttgggaagtcgatc

SEQ ID NO: 414248 - DNA, 15 bp, Homo sapiens
atttgggaagtcgat

SEQ ID NO: 414249 - DNA, 15 bp, Homo sapiens
catttgggaagtcga

SEQ ID NO: 414250 - DNA, 15 bp, Homo sapiens
tcatttgggaagtcg

SEQ ID NO: 414251 - DNA, 15 bp, Homo sapiens
atcatttgggaagtc

SEQ ID NO: 414252 - DNA, 15 bp, Homo sapiens
catcatttgggaagt

SEQ ID NO: 414253 - DNA, 15 bp, Homo sapiens
acatcatttgggaag

SEQ ID NO: 414254 - DNA, 15 bp, Homo sapiens
tacatcatttgggaa

SEQ ID NO: 414255 - DNA, 15 bp, Homo sapiens
ttacatcatttggga

SEQ ID NO: 414256 - DNA, 15 bp, Homo sapiens
gttacatcatttggg

SEQ ID NO: 414257 - DNA, 15 bp, Homo sapiens
agttacatcatttgg

SEQ ID NO: 414258 - DNA, 15 bp, Homo sapiens
cagttacatcatttg

SEQ ID NO: 414259 - DNA, 15 bp, Homo sapiens
ccagttacatcattt

SEQ ID NO: 414260 - DNA, 15 bp, Homo sapiens
tccagttacatcatt

SEQ ID NO: 414261 - DNA, 15 bp, Homo sapiens
gtccagttacatcat

SEQ ID NO: 414262 - DNA, 15 bp, Homo sapiens
tgtccagttacatca

SEQ ID NO: 414263 - DNA, 15 bp, Homo sapiens
ttgtccagttacatc

SEQ ID NO: 414264 - DNA, 15 bp, Homo sapiens
tttgtccagttacat

SEQ ID NO: 414265 - DNA, 15 bp, Homo sapiens
gtttgtccagttaca

SEQ ID NO: 414266 - DNA, 15 bp, Homo sapiens
cgtttgtccagttac

SEQ ID NO: 414267 - DNA, 15 bp, Homo sapiens
ccgtttgtccagtta

SEQ ID NO: 414268 - DNA, 15 bp, Homo sapiens
accgtttgtccagtt

SEQ ID NO: 414269 - DNA, 15 bp, Homo sapiens
gaccgtttgtccagt

SEQ ID NO: 414270 - DNA, 15 bp, Homo sapiens
tgaccgtttgtccag

SEQ ID NO: 414271 - DNA, 15 bp, Homo sapiens
atgaccgtttgtcca

SEQ ID NO: 414272 - DNA, 15 bp, Homo sapiens
aatgaccgtttgtcc

SEQ ID NO: 414273 - DNA, 15 bp, Homo sapiens
aaatgaccgtttgtc

SEQ ID NO: 414274 - DNA, 15 bp, Homo sapiens
taaatgaccgtttgt

SEQ ID NO: 414275 - DNA, 15 bp, Homo sapiens
ttaaatgaccgtttg

SEQ ID NO: 414276 - DNA, 15 bp, Homo sapiens
tttaaatgaccgttt

SEQ ID NO: 414277 - DNA, 15 bp, Homo sapiens
gtttaaatgaccgtt

SEQ ID NO: 414278 - DNA, 15 bp, Homo sapiens
ggtttaaatgaccgt

SEQ ID NO: 414279 - DNA, 15 bp, Homo sapiens
aggtttaaatgaccg

SEQ ID NO: 414280 - DNA, 15 bp, Homo sapiens
caggtttaaatgacc

SEQ ID NO: 414281 - DNA, 15 bp, Homo sapiens
acaggtttaaatgac

SEQ ID NO: 414282 - DNA, 15 bp, Homo sapiens
cacaggtttaaatga

SEQ ID NO: 414283 - DNA, 15 bp, Homo sapiens
gcacaggtttaaatg

SEQ ID NO: 414284 - DNA, 15 bp, Homo sapiens
agcacaggtttaaat

SEQ ID NO: 414285 - DNA, 15 bp, Homo sapiens
aagcacaggtttaaa

SEQ ID NO: 414286 - DNA, 15 bp, Homo sapiens
gaagcacaggtttaa

SEQ ID NO: 414287 - DNA, 15 bp, Homo sapiens
agaagcacaggttta

SEQ ID NO: 414288 - DNA, 15 bp, Homo sapiens
aagaagcacaggttt

SEQ ID NO: 414289 - DNA, 15 bp, Homo sapiens
taagaagcacaggtt

SEQ ID NO: 414290 - DNA, 15 bp, Homo sapiens
ttaagaagcacaggt

SEQ ID NO: 414291 - DNA, 15 bp, Homo sapiens
cttaagaagcacagg

SEQ ID NO: 414292 - DNA, 15 bp, Homo sapiens
gcttaagaagcacag

SEQ ID NO: 414293 - DNA, 15 bp, Homo sapiens
cgcttaagaagcaca

SEQ ID NO: 414294 - DNA, 15 bp, Homo sapiens
ccgcttaagaagcac

SEQ ID NO: 414295 - DNA, 15 bp, Homo sapiens
cccgcttaagaagca

SEQ ID NO: 414296 - DNA, 15 bp, Homo sapiens
ccccgcttaagaagc

SEQ ID NO: 414297 - DNA, 15 bp, Homo sapiens
gccccgcttaagaag

SEQ ID NO: 414298 - DNA, 15 bp, Homo sapiens
agccccgcttaagaa

SEQ ID NO: 414299 - DNA, 15 bp, Homo sapiens
gagccccgcttaaga

SEQ ID NO: 414300 - DNA, 15 bp, Homo sapiens
tgagccccgcttaag

SEQ ID NO: 414301 - DNA, 15 bp, Homo sapiens
atgagccccgcttaa

SEQ ID NO: 414302 - DNA, 15 bp, Homo sapiens
tatgagccccgctta

SEQ ID NO: 414303 - DNA, 15 bp, Homo sapiens
ttatgagccccgctt

SEQ ID NO: 414304 - DNA, 15 bp, Homo sapiens
gttatgagccccgct

SEQ ID NO: 414305 - DNA, 15 bp, Homo sapiens
agttatgagccccgc

SEQ ID NO: 414306 - DNA, 15 bp, Homo sapiens
gagttatgagccccg

SEQ ID NO: 414307 - DNA, 15 bp, Homo sapiens
ggagttatgagcccc

SEQ ID NO: 414308 - DNA, 15 bp, Homo sapiens
gggagttatgagccc

SEQ ID NO: 414309 - DNA, 15 bp, Homo sapiens
ggggagttatgagcc

SEQ ID NO: 414310 - DNA, 15 bp, Homo sapiens
aggggagttatgagc

SEQ ID NO: 414311 - DNA, 15 bp, Homo sapiens
caggggagttatgag

SEQ ID NO: 414312 - DNA, 15 bp, Homo sapiens
tcaggggagttatga

SEQ ID NO: 414313 - DNA, 15 bp, Homo sapiens
ttcaggggagttatg

SEQ ID NO: 414314 - DNA, 15 bp, Homo sapiens
tttcaggggagttat

SEQ ID NO: 414315 - DNA, 15 bp, Homo sapiens
atttcaggggagtta

SEQ ID NO: 414316 - DNA, 15 bp, Homo sapiens
tatttcaggggagtt

SEQ ID NO: 414317 - DNA, 15 bp, Homo sapiens
atatttcaggggagt

SEQ ID NO: 414318 - DNA, 15 bp, Homo sapiens
tatatttcaggggag

SEQ ID NO: 414319 - DNA, 15 bp, Homo sapiens
atatatttcagggga

SEQ ID NO: 414320 - DNA, 15 bp, Homo sapiens
aatatatttcagggg

SEQ ID NO: 414321 - DNA, 15 bp, Homo sapiens
gaatatatttcaggg

SEQ ID NO: 414322 - DNA, 15 bp, Homo sapiens
agaatatatttcagg

SEQ ID NO: 414323 - DNA, 15 bp, Homo sapiens
aagaatatatttcag

SEQ ID NO: 414324 - DNA, 15 bp, Homo sapiens
taagaatatatttca

SEQ ID NO: 414325 - DNA, 15 bp, Homo sapiens
ataagaatatatttc

SEQ ID NO: 414326 - DNA, 15 bp, Homo sapiens
aataagaatatattt

SEQ ID NO: 414327 - DNA, 15 bp, Homo sapiens
aaataagaatatatt

SEQ ID NO: 414328 - DNA, 15 bp, Homo sapiens
aaaataagaatatat

SEQ ID NO: 414329 - DNA, 15 bp, Homo sapiens
gaaaataagaatata

SEQ ID NO: 414330 - DNA, 15 bp, Homo sapiens
agaaaataagaatat

SEQ ID NO: 414331 - DNA, 15 bp, Homo sapiens
aagaaaataagaata

SEQ ID NO: 414332 - DNA, 15 bp, Homo sapiens
gaagaaaataagaat

SEQ ID NO: 414333 - DNA, 15 bp, Homo sapiens
agaagaaaataagaa

SEQ ID NO: 414334 - DNA, 15 bp, Homo sapiens
cagaagaaaataaga

SEQ ID NO: 414335 - DNA, 15 bp, Homo sapiens
gcagaagaaaataag

SEQ ID NO: 414336 - DNA, 15 bp, Homo sapiens
ggcagaagaaaataa

SEQ ID NO: 414337 - DNA, 15 bp, Homo sapiens
tggcagaagaaaata

SEQ ID NO: 414338 - DNA, 15 bp, Homo sapiens
atggcagaagaaaat

SEQ ID NO: 414339 - DNA, 15 bp, Homo sapiens
aatggcagaagaaaa

SEQ ID NO: 414340 - DNA, 15 bp, Homo sapiens
taatggcagaagaaa

SEQ ID NO: 414341 - DNA, 15 bp, Homo sapiens
ctaatggcagaagaa

SEQ ID NO: 414342 - DNA, 15 bp, Homo sapiens
tctaatggcagaaga

SEQ ID NO: 414343 - DNA, 15 bp, Homo sapiens
ttctaatggcagaag

SEQ ID NO: 414344 - DNA, 15 bp, Homo sapiens
cttctaatggcagaa

SEQ ID NO: 414345 - DNA, 15 bp, Homo sapiens
ccttctaatggcaga

SEQ ID NO: 414346 - DNA, 15 bp, Homo sapiens
tccttctaatggcag

SEQ ID NO: 414347 - DNA, 15 bp, Homo sapiens
gtccttctaatggca

SEQ ID NO: 414348 - DNA, 15 bp, Homo sapiens
agtccttctaatggc

SEQ ID NO: 414349 - DNA, 15 bp, Homo sapiens
aagtccttctaatgg

SEQ ID NO: 414350 - DNA, 15 bp, Homo sapiens
aaagtccttctaatg

SEQ ID NO: 414351 - DNA, 15 bp, Homo sapiens
taaagtccttctaat

SEQ ID NO: 414352 - DNA, 15 bp, Homo sapiens
ctaaagtccttctaa

SEQ ID NO: 414353 - DNA, 15 bp, Homo sapiens
actaaagtccttcta

SEQ ID NO: 414354 - DNA, 15 bp, Homo sapiens
tactaaagtccttct

SEQ ID NO: 414355 - DNA, 15 bp, Homo sapiens
ctactaaagtccttc

SEQ ID NO: 414356 - DNA, 15 bp, Homo sapiens
tctactaaagtcctt

SEQ ID NO: 414357 - DNA, 15 bp, Homo sapiens
ttctactaaagtcct

SEQ ID NO: 414358 - DNA, 15 bp, Homo sapiens
tttctactaaagtcc

SEQ ID NO: 414359 - DNA, 15 bp, Homo sapiens
ttttctactaaagtc

SEQ ID NO: 414360 - DNA, 15 bp, Homo sapiens
attttctactaaagt

SEQ ID NO: 414361 - DNA, 15 bp, Homo sapiens
tattttctactaaag

SEQ ID NO: 414362 - DNA, 15 bp, Homo sapiens
gtattttctactaaa

SEQ ID NO: 414363 - DNA, 15 bp, Homo sapiens
ggtattttctactaa

SEQ ID NO: 414364 - DNA, 15 bp, Homo sapiens
tggtattttctacta

SEQ ID NO: 414365 - DNA, 15 bp, Homo sapiens
ctggtattttctact

SEQ ID NO: 414366 - DNA, 15 bp, Homo sapiens
tctggtattttctac

SEQ ID NO: 414367 - DNA, 15 bp, Homo sapiens
ctctggtattttcta

SEQ ID NO: 414368 - DNA, 15 bp, Homo sapiens
tctctggtattttct

SEQ ID NO: 414369 - DNA, 15 bp, Homo sapiens
ttctctggtattttc

SEQ ID NO: 414370 - DNA, 15 bp, Homo sapiens
cttctctggtatttt

SEQ ID NO: 414371 - DNA, 15 bp, Homo sapiens
gcttctctggtattt

SEQ ID NO: 414372 - DNA, 15 bp, Homo sapiens
tgcttctctggtatt

SEQ ID NO: 414373 - DNA, 15 bp, Homo sapiens
atgcttctctggtat

SEQ ID NO: 414374 - DNA, 15 bp, Homo sapiens
aatgcttctctggta

SEQ ID NO: 414375 - DNA, 15 bp, Homo sapiens
caatgcttctctggt

SEQ ID NO: 414376 - DNA, 15 bp, Homo sapiens
gcaatgcttctctgg

SEQ ID NO: 414377 - DNA, 15 bp, Homo sapiens
agcaatgcttctctg

SEQ ID NO: 414378 - DNA, 15 bp, Homo sapiens
aagcaatgcttctct

SEQ ID NO: 414379 - DNA, 15 bp, Homo sapiens
aaagcaatgcttctc

SEQ ID NO: 414380 - DNA, 15 bp, Homo sapiens
aaaagcaatgcttct

SEQ ID NO: 414381 - DNA, 15 bp, Homo sapiens
taaaagcaatgcttc

SEQ ID NO: 414382 - DNA, 15 bp, Homo sapiens
ataaaagcaatgctt

SEQ ID NO: 414383 - DNA, 15 bp, Homo sapiens
aataaaagcaatgct

SEQ ID NO: 414384 - DNA, 15 bp, Homo sapiens
aaataaaagcaatgc

SEQ ID NO: 414385 - DNA, 15 bp, Homo sapiens
taaataaaagcaatg

SEQ ID NO: 414386 - DNA, 15 bp, Homo sapiens
ttaaataaaagcaat

SEQ ID NO: 414387 - DNA, 15 bp, Homo sapiens
cttaaataaaagcaa

SEQ ID NO: 414388 - DNA, 15 bp, Homo sapiens
ccttaaataaaagca

SEQ ID NO: 414389 - DNA, 15 bp, Homo sapiens
accttaaataaaagc

SEQ ID NO: 414390 - DNA, 15 bp, Homo sapiens
taccttaaataaaag

SEQ ID NO: 414391 - DNA, 15 bp, Homo sapiens
ttaccttaaataaaa

SEQ ID NO: 414392 - DNA, 15 bp, Homo sapiens
tttaccttaaataaa

SEQ ID NO: 414393 - DNA, 15 bp, Homo sapiens
gtttaccttaaataa

SEQ ID NO: 414394 - DNA, 15 bp, Homo sapiens
ggtttaccttaaata

SEQ ID NO: 414395 - DNA, 15 bp, Homo sapiens
tggtttaccttaaat

SEQ ID NO: 414396 - DNA, 15 bp, Homo sapiens
ctggtttaccttaaa

SEQ ID NO: 414397 - DNA, 15 bp, Homo sapiens
cctggtttaccttaa

SEQ ID NO: 414398 - DNA, 15 bp, Homo sapiens
ccctggtttacctta

SEQ ID NO: 414399 - DNA, 15 bp, Homo sapiens
cccctggtttacctt

SEQ ID NO: 414400 - DNA, 15 bp, Homo sapiens
acccctggtttacct

SEQ ID NO: 414401 - DNA, 15 bp, Homo sapiens
gacccctggtttacc

SEQ ID NO: 414402 - DNA, 15 bp, Homo sapiens
tgacccctggtttac

SEQ ID NO: 414403 - DNA, 15 bp, Homo sapiens
ctgacccctggttta

SEQ ID NO: 414404 - DNA, 15 bp, Homo sapiens
gctgacccctggttt

SEQ ID NO: 414405 - DNA, 15 bp, Homo sapiens
tgctgacccctggtt

SEQ ID NO: 414406 - DNA, 15 bp, Homo sapiens
ttgctgacccctggt

SEQ ID NO: 414407 - DNA, 15 bp, Homo sapiens
tttgctgacccctgg

SEQ ID NO: 414408 - DNA, 15 bp, Homo sapiens
gtttgctgacccctg

SEQ ID NO: 414409 - DNA, 15 bp, Homo sapiens
ggtttgctgacccct

SEQ ID NO: 414410 - DNA, 15 bp, Homo sapiens
gggtttgctgacccc

SEQ ID NO: 414411 - DNA, 15 bp, Homo sapiens
agggtttgctgaccc

SEQ ID NO: 414412 - DNA, 15 bp, Homo sapiens
aagggtttgctgacc

SEQ ID NO: 414413 - DNA, 15 bp, Homo sapiens
aaagggtttgctgac

SEQ ID NO: 414414 - DNA, 15 bp, Homo sapiens
aaaagggtttgctga

SEQ ID NO: 414415 - DNA, 15 bp, Homo sapiens
gaaaagggtttgctg

SEQ ID NO: 414416 - DNA, 15 bp, Homo sapiens
agaaaagggtttgct

SEQ ID NO: 414417 - DNA, 15 bp, Homo sapiens
cagaaaagggtttgc

SEQ ID NO: 414418 - DNA, 15 bp, Homo sapiens
acagaaaagggtttg

SEQ ID NO: 414419 - DNA, 15 bp, Homo sapiens
tacagaaaagggttt

SEQ ID NO: 414420 - DNA, 15 bp, Homo sapiens
ttacagaaaagggtt

SEQ ID NO: 414421 - DNA, 15 bp, Homo sapiens
tttacagaaaagggt

SEQ ID NO: 414422 - DNA, 15 bp, Homo sapiens
ctttacagaaaaggg

SEQ ID NO: 414423 - DNA, 15 bp, Homo sapiens
tctttacagaaaagg

SEQ ID NO: 414424 - DNA, 15 bp, Homo sapiens
ctctttacagaaaag

SEQ ID NO: 414425 - DNA, 15 bp, Homo sapiens
gctctttacagaaaa

SEQ ID NO: 414426 - DNA, 15 bp, Homo sapiens
ggctctttacagaaa

SEQ ID NO: 414427 - DNA, 15 bp, Homo sapiens
tggctctttacagaa

SEQ ID NO: 414428 - DNA, 15 bp, Homo sapiens
ctggctctttacaga

SEQ ID NO: 414429 - DNA, 15 bp, Homo sapiens
tctggctctttacag

SEQ ID NO: 414430 - DNA, 15 bp, Homo sapiens
gtctggctctttaca

SEQ ID NO: 414431 - DNA, 15 bp, Homo sapiens
tgtctggctctttac

SEQ ID NO: 414432 - DNA, 15 bp, Homo sapiens
ctgtctggctcttta

SEQ ID NO: 414433 - DNA, 15 bp, Homo sapiens
actgtctggctcttt

SEQ ID NO: 414434 - DNA, 15 bp, Homo sapiens
tactgtctggctctt

SEQ ID NO: 414435 - DNA, 15 bp, Homo sapiens
ttactgtctggctct

SEQ ID NO: 414436 - DNA, 15 bp, Homo sapiens
tttactgtctggctc

SEQ ID NO: 414437 - DNA, 15 bp, Homo sapiens
atttactgtctggct

SEQ ID NO: 414438 - DNA, 15 bp, Homo sapiens
tatttactgtctggc

SEQ ID NO: 414439 - DNA, 15 bp, Homo sapiens
atatttactgtctgg

SEQ ID NO: 414440 - DNA, 15 bp, Homo sapiens
aatatttactgtctg

SEQ ID NO: 414441 - DNA, 15 bp, Homo sapiens
aaatatttactgtct

SEQ ID NO: 414442 - DNA, 15 bp, Homo sapiens
aaaatatttactgtc

SEQ ID NO: 414443 - DNA, 15 bp, Homo sapiens
gaaaatatttactgt

SEQ ID NO: 414444 - DNA, 15 bp, Homo sapiens
tgaaaatatttactg

SEQ ID NO: 414445 - DNA, 15 bp, Homo sapiens
ctgaaaatatttact

SEQ ID NO: 414446 - DNA, 15 bp, Homo sapiens
gctgaaaatatttac

SEQ ID NO: 414447 - DNA, 15 bp, Homo sapiens
agctgaaaatattta

SEQ ID NO: 414448 - DNA, 15 bp, Homo sapiens
aagctgaaaatattt

SEQ ID NO: 414449 - DNA, 15 bp, Homo sapiens
aaagctgaaaatatt

SEQ ID NO: 414450 - DNA, 15 bp, Homo sapiens
caaagctgaaaatat

SEQ ID NO: 414451 - DNA, 15 bp, Homo sapiens
gcaaagctgaaaata

SEQ ID NO: 414452 - DNA, 15 bp, Homo sapiens
tgcaaagctgaaaat

SEQ ID NO: 414453 - DNA, 15 bp, Homo sapiens
ctgcaaagctgaaaa

SEQ ID NO: 414454 - DNA, 15 bp, Homo sapiens
cctgcaaagctgaaa

SEQ ID NO: 414455 - DNA, 15 bp, Homo sapiens
gcctgcaaagctgaa

SEQ ID NO: 414456 - DNA, 15 bp, Homo sapiens
agcctgcaaagctga

SEQ ID NO: 414457 - DNA, 15 bp, Homo sapiens
cagcctgcaaagctg

SEQ ID NO: 414458 - DNA, 15 bp, Homo sapiens
acagcctgcaaagct

SEQ ID NO: 414459 - DNA, 15 bp, Homo sapiens
tacagcctgcaaagc

SEQ ID NO: 414460 - DNA, 15 bp, Homo sapiens
gtacagcctgcaaag

SEQ ID NO: 414461 - DNA, 15 bp, Homo sapiens
tgtacagcctgcaaa

SEQ ID NO: 414462 - DNA, 15 bp, Homo sapiens
ctgtacagcctgcaa

SEQ ID NO: 414463 - DNA, 15 bp, Homo sapiens
actgtacagcctgca

SEQ ID NO: 414464 - DNA, 15 bp, Homo sapiens
aactgtacagcctgc

SEQ ID NO: 414465 - DNA, 15 bp, Homo sapiens
aaactgtacagcctg

SEQ ID NO: 414466 - DNA, 15 bp, Homo sapiens
caaactgtacagcct

SEQ ID NO: 414467 - DNA, 15 bp, Homo sapiens
acaaactgtacagcc

SEQ ID NO: 414468 - DNA, 15 bp, Homo sapiens
aacaaactgtacagc

SEQ ID NO: 414469 - DNA, 15 bp, Homo sapiens
taacaaactgtacag

SEQ ID NO: 414470 - DNA, 15 bp, Homo sapiens
gtaacaaactgtaca

SEQ ID NO: 414471 - DNA, 15 bp, Homo sapiens
tgtaacaaactgtac

SEQ ID NO: 414472 - DNA, 15 bp, Homo sapiens
gtgtaacaaactgta

SEQ ID NO: 414473 - DNA, 15 bp, Homo sapiens
agtgtaacaaactgt

SEQ ID NO: 414474 - DNA, 15 bp, Homo sapiens
tagtgtaacaaactg

SEQ ID NO: 414475 - DNA, 15 bp, Homo sapiens
atagtgtaacaaact

SEQ ID NO: 414476 - DNA, 15 bp, Homo sapiens
aatagtgtaacaaac

SEQ ID NO: 414477 - DNA, 15 bp, Homo sapiens
aaatagtgtaacaaa

SEQ ID NO: 414478 - DNA, 15 bp, Homo sapiens
taaatagtgtaacaa

SEQ ID NO: 414479 - DNA, 15 bp, Homo sapiens
ttaaatagtgtaaca

SEQ ID NO: 414480 - DNA, 15 bp, Homo sapiens
gttaaatagtgtaac

SEQ ID NO: 414481 - DNA, 15 bp, Homo sapiens
agttaaatagtgtaa

SEQ ID NO: 414482 - DNA, 15 bp, Homo sapiens
gagttaaatagtgta

SEQ ID NO: 414483 - DNA, 15 bp, Homo sapiens
tgagttaaatagtgt

SEQ ID NO: 414484 - DNA, 15 bp, Homo sapiens
ctgagttaaatagtg

SEQ ID NO: 414485 - DNA, 15 bp, Homo sapiens
gctgagttaaatagt

SEQ ID NO: 414486 - DNA, 15 bp, Homo sapiens
agctgagttaaatag

SEQ ID NO: 414487 - DNA, 15 bp, Homo sapiens
cagctgagttaaata

SEQ ID NO: 414488 - DNA, 15 bp, Homo sapiens
acagctgagttaaat

SEQ ID NO: 414489 - DNA, 15 bp, Homo sapiens
aacagctgagttaaa

SEQ ID NO: 414490 - DNA, 15 bp, Homo sapiens
caacagctgagttaa

SEQ ID NO: 414491 - DNA, 15 bp, Homo sapiens
acaacagctgagtta

SEQ ID NO: 414492 - DNA, 15 bp, Homo sapiens
tacaacagctgagtt

SEQ ID NO: 414493 - DNA, 15 bp, Homo sapiens
ctacaacagctgagt

SEQ ID NO: 414494 - DNA, 15 bp, Homo sapiens
gctacaacagctgag

SEQ ID NO: 414495 - DNA, 15 bp, Homo sapiens
tgctacaacagctga

SEQ ID NO: 414496 - DNA, 15 bp, Homo sapiens
atgctacaacagctg

SEQ ID NO: 414497 - DNA, 15 bp, Homo sapiens
catgctacaacagct

SEQ ID NO: 414498 - DNA, 15 bp, Homo sapiens
tcatgctacaacagc

SEQ ID NO: 414499 - DNA, 15 bp, Homo sapiens
ttcatgctacaacag

SEQ ID NO: 414500 - DNA, 15 bp, Homo sapiens
tttcatgctacaaca

SEQ ID NO: 414501 - DNA, 15 bp, Homo sapiens
ctttcatgctacaac

SEQ ID NO: 414502 - DNA, 15 bp, Homo sapiens
gctttcatgctacaa

SEQ ID NO: 414503 - DNA, 15 bp, Homo sapiens
tgctttcatgctaca

SEQ ID NO: 414504 - DNA, 15 bp, Homo sapiens
ctgctttcatgctac

SEQ ID NO: 414505 - DNA, 15 bp, Homo sapiens
actgctttcatgcta

SEQ ID NO: 414506 - DNA, 15 bp, Homo sapiens
gactgctttcatgct

SEQ ID NO: 414507 - DNA, 15 bp, Homo sapiens
tgactgctttcatgc

SEQ ID NO: 414508 - DNA, 15 bp, Homo sapiens
atgactgctttcatg

SEQ ID NO: 414509 - DNA, 15 bp, Homo sapiens
tatgactgctttcat

SEQ ID NO: 414510 - DNA, 15 bp, Homo sapiens
ctatgactgctttca

SEQ ID NO: 414511 - DNA, 15 bp, Homo sapiens
tctatgactgctttc

SEQ ID NO: 414512 - DNA, 15 bp, Homo sapiens
gtctatgactgcttt

SEQ ID NO: 414513 - DNA, 15 bp, Homo sapiens
tgtctatgactgctt

SEQ ID NO: 414514 - DNA, 15 bp, Homo sapiens
atgtctatgactgct

SEQ ID NO: 414515 - DNA, 15 bp, Homo sapiens
aatgtctatgactgc

SEQ ID NO: 414516 - DNA, 15 bp, Homo sapiens
taatgtctatgactg

SEQ ID NO: 414517 - DNA, 15 bp, Homo sapiens
gtaatgtctatgact

SEQ ID NO: 414518 - DNA, 15 bp, Homo sapiens
tgtaatgtctatgac

SEQ ID NO: 414519 - DNA, 15 bp, Homo sapiens
atgtaatgtctatga

SEQ ID NO: 414520 - DNA, 15 bp, Homo sapiens
tatgtaatgtctatg

SEQ ID NO: 414521 - DNA, 15 bp, Homo sapiens
ttatgtaatgtctat

SEQ ID NO: 414522 - DNA, 15 bp, Homo sapiens
tttatgtaatgtcta

SEQ ID NO: 414523 - DNA, 15 bp, Homo sapiens
gtttatgtaatgtct

SEQ ID NO: 414524 - DNA, 15 bp, Homo sapiens
agtttatgtaatgtc

SEQ ID NO: 414525 - DNA, 15 bp, Homo sapiens
tagtttatgtaatgt

SEQ ID NO: 414526 - DNA, 15 bp, Homo sapiens
ttagtttatgtaatg

SEQ ID NO: 414527 - DNA, 15 bp, Homo sapiens
gttagtttatgtaat

SEQ ID NO: 414528 - DNA, 15 bp, Homo sapiens
tgttagtttatgtaa

SEQ ID NO: 414529 - DNA, 15 bp, Homo sapiens
ttgttagtttatgta

SEQ ID NO: 414530 - DNA, 15 bp, Homo sapiens
cttgttagtttatgt

SEQ ID NO: 414531 - DNA, 15 bp, Homo sapiens
gcttgttagtttatg

SEQ ID NO: 414532 - DNA, 15 bp, Homo sapiens
tgcttgttagtttat

SEQ ID NO: 414533 - DNA, 15 bp, Homo sapiens
gtgcttgttagttta

SEQ ID NO: 414534 - DNA, 15 bp, Homo sapiens
cgtgcttgttagttt

SEQ ID NO: 414535 - DNA, 15 bp, Homo sapiens
ccgtgcttgttagtt

SEQ ID NO: 414536 - DNA, 15 bp, Homo sapiens
gccgtgcttgttagt

SEQ ID NO: 414537 - DNA, 15 bp, Homo sapiens
agccgtgcttgttag

SEQ ID NO: 414538 - DNA, 15 bp, Homo sapiens
cagccgtgcttgtta

SEQ ID NO: 414539 - DNA, 15 bp, Homo sapiens
acagccgtgcttgtt

SEQ ID NO: 414540 - DNA, 15 bp, Homo sapiens
cacagccgtgcttgt

SEQ ID NO: 414541 - DNA, 15 bp, Homo sapiens
acacagccgtgcttg

SEQ ID NO: 414542 - DNA, 15 bp, Homo sapiens
aacacagccgtgctt

SEQ ID NO: 414543 - DNA, 15 bp, Homo sapiens
aaacacagccgtgct

SEQ ID NO: 414544 - DNA, 15 bp, Homo sapiens
taaacacagccgtgc

SEQ ID NO: 414545 - DNA, 15 bp, Homo sapiens
ataaacacagccgtg

SEQ ID NO: 414546 - DNA, 15 bp, Homo sapiens
tataaacacagccgt

SEQ ID NO: 414547 - DNA, 15 bp, Homo sapiens
ttataaacacagccg

SEQ ID NO: 414548 - DNA, 15 bp, Homo sapiens
tttataaacacagcc

SEQ ID NO: 414549 - DNA, 15 bp, Homo sapiens
ttttataaacacagc

SEQ ID NO: 414550 - DNA, 15 bp, Homo sapiens
attttataaacacag

SEQ ID NO: 414551 - DNA, 15 bp, Homo sapiens
cattttataaacaca

SEQ ID NO: 414552 - DNA, 15 bp, Homo sapiens
acattttataaacac

SEQ ID NO: 414553 - DNA, 15 bp, Homo sapiens
tacattttataaaca

SEQ ID NO: 414554 - DNA, 15 bp, Homo sapiens
atacattttataaac

SEQ ID NO: 414555 - DNA, 15 bp, Homo sapiens
aatacattttataaa

SEQ ID NO: 414556 - DNA, 15 bp, Homo sapiens
aaatacattttataa

SEQ ID NO: 414557 - DNA, 15 bp, Homo sapiens
taaatacattttata

SEQ ID NO: 414558 - DNA, 15 bp, Homo sapiens
gtaaatacattttat

SEQ ID NO: 414559 - DNA, 15 bp, Homo sapiens
agtaaatacatttta

SEQ ID NO: 414560 - DNA, 15 bp, Homo sapiens
tagtaaatacatttt

SEQ ID NO: 414561 - DNA, 15 bp, Homo sapiens
ttagtaaatacattt

SEQ ID NO: 414562 - DNA, 15 bp, Homo sapiens
gttagtaaatacatt

SEQ ID NO: 414563 - DNA, 15 bp, Homo sapiens
tgttagtaaatacat

SEQ ID NO: 414564 - DNA, 15 bp, Homo sapiens
gtgttagtaaataca

SEQ ID NO: 414565 - DNA, 15 bp, Homo sapiens
tgtgttagtaaatac

SEQ ID NO: 414566 - DNA, 15 bp, Homo sapiens
ctgtgttagtaaata

SEQ ID NO: 414567 - DNA, 15 bp, Homo sapiens
cctgtgttagtaaat

SEQ ID NO: 414568 - DNA, 15 bp, Homo sapiens
gcctgtgttagtaaa

SEQ ID NO: 414569 - DNA, 15 bp, Homo sapiens
tgcctgtgttagtaa

SEQ ID NO: 414570 - DNA, 15 bp, Homo sapiens
ctgcctgtgttagta

SEQ ID NO: 414571 - DNA, 15 bp, Homo sapiens
actgcctgtgttagt

SEQ ID NO: 414572 - DNA, 15 bp, Homo sapiens
cactgcctgtgttag

SEQ ID NO: 414573 - DNA, 15 bp, Homo sapiens
ccactgcctgtgtta

SEQ ID NO: 414574 - DNA, 15 bp, Homo sapiens
cccactgcctgtgtt

SEQ ID NO: 414575 - DNA, 15 bp, Homo sapiens
gcccactgcctgtgt

SEQ ID NO: 414576 - DNA, 15 bp, Homo sapiens
agcccactgcctgtg

SEQ ID NO: 414577 - DNA, 15 bp, Homo sapiens
cagcccactgcctgt

SEQ ID NO: 414578 - DNA, 15 bp, Homo sapiens
ccagcccactgcctg

SEQ ID NO: 414579 - DNA, 15 bp, Homo sapiens
tccagcccactgcct

SEQ ID NO: 414580 - DNA, 15 bp, Homo sapiens
atccagcccactgcc

SEQ ID NO: 414581 - DNA, 15 bp, Homo sapiens
aatccagcccactgc

SEQ ID NO: 414582 - DNA, 15 bp, Homo sapiens
aaatccagcccactg

SEQ ID NO: 414583 - DNA, 15 bp, Homo sapiens
aaaatccagcccact

SEQ ID NO: 414584 - DNA, 15 bp, Homo sapiens
caaaatccagcccac

SEQ ID NO: 414585 - DNA, 15 bp, Homo sapiens
gcaaaatccagccca

SEQ ID NO: 414586 - DNA, 15 bp, Homo sapiens
ggcaaaatccagccc

SEQ ID NO: 414587 - DNA, 15 bp, Homo sapiens
aggcaaaatccagcc

SEQ ID NO: 414588 - DNA, 15 bp, Homo sapiens
caggcaaaatccagc

SEQ ID NO: 414589 - DNA, 15 bp, Homo sapiens
gcaggcaaaatccag

SEQ ID NO: 414590 - DNA, 15 bp, Homo sapiens
tgcaggcaaaatcca

SEQ ID NO: 414591 - DNA, 15 bp, Homo sapiens
ctgcaggcaaaatcc

SEQ ID NO: 414592 - DNA, 15 bp, Homo sapiens
tctgcaggcaaaatc

SEQ ID NO: 414593 - DNA, 15 bp, Homo sapiens
gtctgcaggcaaaat

SEQ ID NO: 414594 - DNA, 15 bp, Homo sapiens
agtctgcaggcaaaa

SEQ ID NO: 414595 - DNA, 15 bp, Homo sapiens
cagtctgcaggcaaa

SEQ ID NO: 414596 - DNA, 15 bp, Homo sapiens
gcagtctgcaggcaa

SEQ ID NO: 414597 - DNA, 15 bp, Homo sapiens
tgcagtctgcaggca

SEQ ID NO: 414598 - DNA, 15 bp, Homo sapiens
atgcagtctgcaggc

SEQ ID NO: 414599 - DNA, 15 bp, Homo sapiens
aatgcagtctgcagg

SEQ ID NO: 414600 - DNA, 15 bp, Homo sapiens
aaatgcagtctgcag

SEQ ID NO: 414601 - DNA, 15 bp, Homo sapiens
aaaatgcagtctgca

SEQ ID NO: 414602 - DNA, 15 bp, Homo sapiens
gaaaatgcagtctgc

SEQ ID NO: 414603 - DNA, 15 bp, Homo sapiens
ggaaaatgcagtctg

SEQ ID NO: 414604 - DNA, 15 bp, Homo sapiens
aggaaaatgcagtct

SEQ ID NO: 414605 - DNA, 15 bp, Homo sapiens
taggaaaatgcagtc

SEQ ID NO: 414606 - DNA, 15 bp, Homo sapiens
ataggaaaatgcagt

SEQ ID NO: 414607 - DNA, 15 bp, Homo sapiens
gataggaaaatgcag

SEQ ID NO: 414608 - DNA, 15 bp, Homo sapiens
ggataggaaaatgca

SEQ ID NO: 414609 - DNA, 15 bp, Homo sapiens
gggataggaaaatgc

SEQ ID NO: 414610 - DNA, 15 bp, Homo sapiens
agggataggaaaatg

SEQ ID NO: 414611 - DNA, 15 bp, Homo sapiens
cagggataggaaaat

SEQ ID NO: 414612 - DNA, 15 bp, Homo sapiens
tcagggataggaaaa

SEQ ID NO: 414613 - DNA, 15 bp, Homo sapiens
atcagggataggaaa

SEQ ID NO: 414614 - DNA, 15 bp, Homo sapiens
catcagggataggaa

SEQ ID NO: 414615 - DNA, 15 bp, Homo sapiens
acatcagggatagga

SEQ ID NO: 414616 - DNA, 15 bp, Homo sapiens
tacatcagggatagg

SEQ ID NO: 414617 - DNA, 15 bp, Homo sapiens
ctacatcagggatag

SEQ ID NO: 414618 - DNA, 15 bp, Homo sapiens
tctacatcagggata

SEQ ID NO: 414619 - DNA, 15 bp, Homo sapiens
gtctacatcagggat

SEQ ID NO: 414620 - DNA, 15 bp, Homo sapiens
tgtctacatcaggga

SEQ ID NO: 414621 - DNA, 15 bp, Homo sapiens
ctgtctacatcaggg

SEQ ID NO: 414622 - DNA, 15 bp, Homo sapiens
cctgtctacatcagg

SEQ ID NO: 414623 - DNA, 15 bp, Homo sapiens
acctgtctacatcag

SEQ ID NO: 414624 - DNA, 15 bp, Homo sapiens
gacctgtctacatca

SEQ ID NO: 414625 - DNA, 15 bp, Homo sapiens
agacctgtctacatc

SEQ ID NO: 414626 - DNA, 15 bp, Homo sapiens
cagacctgtctacat

SEQ ID NO: 414627 - DNA, 15 bp, Homo sapiens
ccagacctgtctaca

SEQ ID NO: 414628 - DNA, 15 bp, Homo sapiens
accagacctgtctac

SEQ ID NO: 414629 - DNA, 15 bp, Homo sapiens
caccagacctgtcta

SEQ ID NO: 414630 - DNA, 15 bp, Homo sapiens
acaccagacctgtct

SEQ ID NO: 414631 - DNA, 15 bp, Homo sapiens
cacaccagacctgtc

SEQ ID NO: 414632 - DNA, 15 bp, Homo sapiens
acacaccagacctgt

SEQ ID NO: 414633 - DNA, 15 bp, Homo sapiens
aacacaccagacctg

SEQ ID NO: 414634 - DNA, 15 bp, Homo sapiens
caacacaccagacct

SEQ ID NO: 414635 - DNA, 15 bp, Homo sapiens
ccaacacaccagacc

SEQ ID NO: 414636 - DNA, 15 bp, Homo sapiens
accaacacaccagac

SEQ ID NO: 414637 - DNA, 15 bp, Homo sapiens
aaccaacacaccaga

SEQ ID NO: 414638 - DNA, 15 bp, Homo sapiens
taaccaacacaccag

SEQ ID NO: 414639 - DNA, 15 bp, Homo sapiens
ttaaccaacacacca

SEQ ID NO: 414640 - DNA, 15 bp, Homo sapiens
tttaaccaacacacc

SEQ ID NO: 414641 - DNA, 15 bp, Homo sapiens
atttaaccaacacac

SEQ ID NO: 414642 - DNA, 15 bp, Homo sapiens
tatttaaccaacaca

SEQ ID NO: 414643 - DNA, 15 bp, Homo sapiens
ctatttaaccaacac

SEQ ID NO: 414644 - DNA, 15 bp, Homo sapiens
actatttaaccaaca

SEQ ID NO: 414645 - DNA, 15 bp, Homo sapiens
gactatttaaccaac

SEQ ID NO: 414646 - DNA, 15 bp, Homo sapiens
cgactatttaaccaa

SEQ ID NO: 414647 - DNA, 15 bp, Homo sapiens
gcgactatttaacca

SEQ ID NO: 414648 - DNA, 15 bp, Homo sapiens
agcgactatttaacc

SEQ ID NO: 414649 - DNA, 15 bp, Homo sapiens
gagcgactatttaac

SEQ ID NO: 414650 - DNA, 15 bp, Homo sapiens
agagcgactatttaa

SEQ ID NO: 414651 - DNA, 15 bp, Homo sapiens
cagagcgactattta

SEQ ID NO: 414652 - DNA, 15 bp, Homo sapiens
acagagcgactattt

SEQ ID NO: 414653 - DNA, 15 bp, Homo sapiens
aacagagcgactatt

SEQ ID NO: 414654 - DNA, 15 bp, Homo sapiens
aaacagagcgactat

SEQ ID NO: 414655 - DNA, 15 bp, Homo sapiens
caaacagagcgacta

SEQ ID NO: 414656 - DNA, 15 bp, Homo sapiens
acaaacagagcgact

SEQ ID NO: 414657 - DNA, 15 bp, Homo sapiens
tacaaacagagcgac

SEQ ID NO: 414658 - DNA, 15 bp, Homo sapiens
ttacaaacagagcga

SEQ ID NO: 414659 - DNA, 15 bp, Homo sapiens
attacaaacagagcg

SEQ ID NO: 414660 - DNA, 15 bp, Homo sapiens
tattacaaacagagc

SEQ ID NO: 414661 - DNA, 15 bp, Homo sapiens
gtattacaaacagag

SEQ ID NO: 414662 - DNA, 15 bp, Homo sapiens
ggtattacaaacaga

SEQ ID NO: 414663 - DNA, 15 bp, Homo sapiens
tggtattacaaacag

SEQ ID NO: 414664 - DNA, 15 bp, Homo sapiens
atggtattacaaaca

SEQ ID NO: 414665 - DNA, 15 bp, Homo sapiens
tatggtattacaaac

SEQ ID NO: 414666 - DNA, 15 bp, Homo sapiens
gtatggtattacaaa

SEQ ID NO: 414667 - DNA, 15 bp, Homo sapiens
tgtatggtattacaa

SEQ ID NO: 414668 - DNA, 15 bp, Homo sapiens
atgtatggtattaca

SEQ ID NO: 414669 - DNA, 15 bp, Homo sapiens
tatgtatggtattac

SEQ ID NO: 414670 - DNA, 15 bp, Homo sapiens
atatgtatggtatta

SEQ ID NO: 414671 - DNA, 15 bp, Homo sapiens
gatatgtatggtatt

SEQ ID NO: 414672 - DNA, 15 bp, Homo sapiens
agatatgtatggtat

SEQ ID NO: 414673 - DNA, 15 bp, Homo sapiens
tagatatgtatggta

SEQ ID NO: 414674 - DNA, 15 bp, Homo sapiens
ctagatatgtatggt

SEQ ID NO: 414675 - DNA, 15 bp, Homo sapiens
actagatatgtatgg

SEQ ID NO: 414676 - DNA, 15 bp, Homo sapiens
cactagatatgtatg

SEQ ID NO: 414677 - DNA, 15 bp, Homo sapiens
tcactagatatgtat

SEQ ID NO: 414678 - DNA, 15 bp, Homo sapiens
gtcactagatatgta

SEQ ID NO: 414679 - DNA, 15 bp, Homo sapiens
tgtcactagatatgt

SEQ ID NO: 414680 - DNA, 15 bp, Homo sapiens
ctgtcactagatatg

SEQ ID NO: 414681 - DNA, 15 bp, Homo sapiens
cctgtcactagatat

SEQ ID NO: 414682 - DNA, 15 bp, Homo sapiens
tcctgtcactagata

SEQ ID NO: 414683 - DNA, 15 bp, Homo sapiens
atcctgtcactagat

SEQ ID NO: 414684 - DNA, 15 bp, Homo sapiens
catcctgtcactaga

SEQ ID NO: 414685 - DNA, 15 bp, Homo sapiens
acatcctgtcactag

SEQ ID NO: 414686 - DNA, 15 bp, Homo sapiens
tacatcctgtcacta

SEQ ID NO: 414687 - DNA, 15 bp, Homo sapiens
atacatcctgtcact

SEQ ID NO: 414688 - DNA, 15 bp, Homo sapiens
aatacatcctgtcac

SEQ ID NO: 414689 - DNA, 15 bp, Homo sapiens
aaatacatcctgtca

SEQ ID NO: 414690 - DNA, 15 bp, Homo sapiens
gaaatacatcctgtc

SEQ ID NO: 414691 - DNA, 15 bp, Homo sapiens
tgaaatacatcctgt

SEQ ID NO: 414692 - DNA, 15 bp, Homo sapiens
ctgaaatacatcctg

SEQ ID NO: 414693 - DNA, 15 bp, Homo sapiens
gctgaaatacatcct

SEQ ID NO: 414694 - DNA, 15 bp, Homo sapiens
tgctgaaatacatcc

SEQ ID NO: 414695 - DNA, 15 bp, Homo sapiens
gtgctgaaatacatc

SEQ ID NO: 414696 - DNA, 15 bp, Homo sapiens
tgtgctgaaatacat

SEQ ID NO: 414697 - DNA, 15 bp, Homo sapiens
ctgtgctgaaataca

SEQ ID NO: 414698 - DNA, 15 bp, Homo sapiens
actgtgctgaaatac

SEQ ID NO: 414699 - DNA, 15 bp, Homo sapiens
aactgtgctgaaata

SEQ ID NO: 414700 - DNA, 15 bp, Homo sapiens
aaactgtgctgaaat

SEQ ID NO: 414701 - DNA, 15 bp, Homo sapiens
taaactgtgctgaaa

SEQ ID NO: 414702 - DNA, 15 bp, Homo sapiens
ctaaactgtgctgaa

SEQ ID NO: 414703 - DNA, 15 bp, Homo sapiens
cctaaactgtgctga

SEQ ID NO: 414704 - DNA, 15 bp, Homo sapiens
tcctaaactgtgctg

SEQ ID NO: 414705 - DNA, 15 bp, Homo sapiens
ttcctaaactgtgct

SEQ ID NO: 414706 - DNA, 15 bp, Homo sapiens
attcctaaactgtgc

SEQ ID NO: 414707 - DNA, 15 bp, Homo sapiens
aattcctaaactgtg

SEQ ID NO: 414708 - DNA, 15 bp, Homo sapiens
caattcctaaactgt

SEQ ID NO: 414709 - DNA, 15 bp, Homo sapiens
ccaattcctaaactg

SEQ ID NO: 414710 - DNA, 15 bp, Homo sapiens
accaattcctaaact

SEQ ID NO: 414711 - DNA, 15 bp, Homo sapiens
gaccaattcctaaac

SEQ ID NO: 414712 - DNA, 15 bp, Homo sapiens
tgaccaattcctaaa

SEQ ID NO: 414713 - DNA, 15 bp, Homo sapiens
ttgaccaattcctaa

SEQ ID NO: 414714 - DNA, 15 bp, Homo sapiens
gttgaccaattccta

SEQ ID NO: 414715 - DNA, 15 bp, Homo sapiens
agttgaccaattcct

SEQ ID NO: 414716 - DNA, 15 bp, Homo sapiens
tagttgaccaattcc

SEQ ID NO: 414717 - DNA, 15 bp, Homo sapiens
atagttgaccaattc

SEQ ID NO: 414718 - DNA, 15 bp, Homo sapiens
aatagttgaccaatt

SEQ ID NO: 414719 - DNA, 15 bp, Homo sapiens
caatagttgaccaat

SEQ ID NO: 414720 - DNA, 15 bp, Homo sapiens
tcaatagttgaccaa

SEQ ID NO: 414721 - DNA, 15 bp, Homo sapiens
ttcaatagttgacca

SEQ ID NO: 414722 - DNA, 15 bp, Homo sapiens
gttcaatagttgacc

SEQ ID NO: 414723 - DNA, 15 bp, Homo sapiens
tgttcaatagttgac

SEQ ID NO: 414724 - DNA, 15 bp, Homo sapiens
gtgttcaatagttga

SEQ ID NO: 414725 - DNA, 15 bp, Homo sapiens
ggtgttcaatagttg

SEQ ID NO: 414726 - DNA, 15 bp, Homo sapiens
aggtgttcaatagtt

SEQ ID NO: 414727 - DNA, 15 bp, Homo sapiens
aaggtgttcaatagt

SEQ ID NO: 414728 - DNA, 15 bp, Homo sapiens
gaaggtgttcaatag

SEQ ID NO: 414729 - DNA, 15 bp, Homo sapiens
ggaaggtgttcaata

SEQ ID NO: 414730 - DNA, 15 bp, Homo sapiens
tggaaggtgttcaat

SEQ ID NO: 414731 - DNA, 15 bp, Homo sapiens
atggaaggtgttcaa

SEQ ID NO: 414732 - DNA, 15 bp, Homo sapiens
aatggaaggtgttca

SEQ ID NO: 414733 - DNA, 15 bp, Homo sapiens
aaatggaaggtgttc

SEQ ID NO: 414734 - DNA, 15 bp, Homo sapiens
aaaatggaaggtgtt

SEQ ID NO: 414735 - DNA, 15 bp, Homo sapiens
aaaaatggaaggtgt

SEQ ID NO: 414736 - DNA, 15 bp, Homo sapiens
gaaaaatggaaggtg

SEQ ID NO: 414737 - DNA, 15 bp, Homo sapiens
agaaaaatggaaggt

SEQ ID NO: 414738 - DNA, 15 bp, Homo sapiens
cagaaaaatggaagg

SEQ ID NO: 414739 - DNA, 15 bp, Homo sapiens
gcagaaaaatggaag

SEQ ID NO: 414740 - DNA, 15 bp, Homo sapiens
agcagaaaaatggaa

SEQ ID NO: 414741 - DNA, 15 bp, Homo sapiens
tagcagaaaaatgga

SEQ ID NO: 414742 - DNA, 15 bp, Homo sapiens
atagcagaaaaatgg

SEQ ID NO: 414743 - DNA, 15 bp, Homo sapiens
aatagcagaaaaatg

SEQ ID NO: 414744 - DNA, 15 bp, Homo sapiens
aaatagcagaaaaat

SEQ ID NO: 414745 - DNA, 15 bp, Homo sapiens
aaaatagcagaaaaa

SEQ ID NO: 414746 - DNA, 15 bp, Homo sapiens
taaaatagcagaaaa

SEQ ID NO: 414747 - DNA, 15 bp, Homo sapiens
ataaaatagcagaaa

SEQ ID NO: 414748 - DNA, 15 bp, Homo sapiens
aataaaatagcagaa

SEQ ID NO: 414749 - DNA, 15 bp, Homo sapiens
aaataaaatagcaga

SEQ ID NO: 414750 - DNA, 15 bp, Homo sapiens
aaaataaaatagcag

SEQ ID NO: 414751 - DNA, 15 bp, Homo sapiens
taaaataaaatagca

SEQ ID NO: 414752 - DNA, 15 bp, Homo sapiens
ataaaataaaatagc

SEQ ID NO: 414753 - DNA, 15 bp, Homo sapiens
aataaaataaaatag

SEQ ID NO: 414754 - DNA, 15 bp, Homo sapiens
aaataaaataaaata

SEQ ID NO: 414755 - DNA, 15 bp, Homo sapiens
aaaataaaataaaat

SEQ ID NO: 414756 - DNA, 15 bp, Homo sapiens
taaaataaaataaaa

SEQ ID NO: 414757 - DNA, 15 bp, Homo sapiens
ataaaataaaataaa

SEQ ID NO: 414758 - DNA, 15 bp, Homo sapiens
tataaaataaaataa

SEQ ID NO: 414759 - DNA, 15 bp, Homo sapiens
atataaaataaaata

SEQ ID NO: 414760 - DNA, 15 bp, Homo sapiens
aatataaaataaaat

SEQ ID NO: 414761 - DNA, 15 bp, Homo sapiens
aaatataaaataaaa

SEQ ID NO: 414762 - DNA, 15 bp, Homo sapiens
aaaatataaaataaa

SEQ ID NO: 414763 - DNA, 15 bp, Homo sapiens
aaaaatataaaataa

SEQ ID NO: 414764 - DNA, 15 bp, Homo sapiens
taaaaatataaaata

SEQ ID NO: 414765 - DNA, 15 bp, Homo sapiens
ataaaaatataaaat

SEQ ID NO: 414766 - DNA, 15 bp, Homo sapiens
aataaaaatataaaa

SEQ ID NO: 414767 - DNA, 15 bp, Homo sapiens
aaataaaaatataaa

SEQ ID NO: 414768 - DNA, 15 bp, Homo sapiens
aaaataaaaatataa

SEQ ID NO: 414769 - DNA, 15 bp, Homo sapiens
taaaataaaaatata

SEQ ID NO: 414770 - DNA, 15 bp, Homo sapiens
ataaaataaaaatat

SEQ ID NO: 414771 - DNA, 15 bp, Homo sapiens
aataaaataaaaata

SEQ ID NO: 414772 - DNA, 15 bp, Homo sapiens
aaataaaataaaaat

SEQ ID NO: 414773 - DNA, 15 bp, Homo sapiens
acataaaataaaata

SEQ ID NO: 414774 - DNA, 15 bp, Homo sapiens
aacataaaataaaat

SEQ ID NO: 414775 - DNA, 15 bp, Homo sapiens
caacataaaataaaa

SEQ ID NO: 414776 - DNA, 15 bp, Homo sapiens
tcaacataaaataaa

SEQ ID NO: 414777 - DNA, 15 bp, Homo sapiens
ctcaacataaaataa

SEQ ID NO: 414778 - DNA, 15 bp, Homo sapiens
tctcaacataaaata

SEQ ID NO: 414779 - DNA, 15 bp, Homo sapiens
gtctcaacataaaat

SEQ ID NO: 414780 - DNA, 15 bp, Homo sapiens
cgtctcaacataaaa

SEQ ID NO: 414781 - DNA, 15 bp, Homo sapiens
ccgtctcaacataaa

SEQ ID NO: 414782 - DNA, 15 bp, Homo sapiens
tccgtctcaacataa

SEQ ID NO: 414783 - DNA, 15 bp, Homo sapiens
ctccgtctcaacata

SEQ ID NO: 414784 - DNA, 15 bp, Homo sapiens
actccgtctcaacat

SEQ ID NO: 414785 - DNA, 15 bp, Homo sapiens
aactccgtctcaaca

SEQ ID NO: 414786 - DNA, 15 bp, Homo sapiens
aaactccgtctcaac

SEQ ID NO: 414787 - DNA, 15 bp, Homo sapiens
aaaactccgtctcaa

SEQ ID NO: 414788 - DNA, 15 bp, Homo sapiens
caaaactccgtctca

SEQ ID NO: 414789 - DNA, 15 bp, Homo sapiens
gcaaaactccgtctc

SEQ ID NO: 414790 - DNA, 15 bp, Homo sapiens
agcaaaactccgtct

SEQ ID NO: 414791 - DNA, 15 bp, Homo sapiens
gagcaaaactccgtc

SEQ ID NO: 414792 - DNA, 15 bp, Homo sapiens
agagcaaaactccgt

SEQ ID NO: 414793 - DNA, 15 bp, Homo sapiens
aagagcaaaactccg

SEQ ID NO: 414794 - DNA, 15 bp, Homo sapiens
caagagcaaaactcc

SEQ ID NO: 414795 - DNA, 15 bp, Homo sapiens
acaagagcaaaactc

SEQ ID NO: 414796 - DNA, 15 bp, Homo sapiens
aacaagagcaaaact

SEQ ID NO: 414797 - DNA, 15 bp, Homo sapiens
caacaagagcaaaac

SEQ ID NO: 414798 - DNA, 15 bp, Homo sapiens
agcaacaagagcaaa

SEQ ID NO: 414799 - DNA, 15 bp, Homo sapiens
gagcaacaagagcaa

SEQ ID NO: 414800 - DNA, 15 bp, Homo sapiens
tgagcaacaagagca

SEQ ID NO: 414801 - DNA, 15 bp, Homo sapiens
ctgagcaacaagagc

SEQ ID NO: 414802 - DNA, 15 bp, Homo sapiens
cctgagcaacaagag

SEQ ID NO: 414803 - DNA, 15 bp, Homo sapiens
gcctgagcaacaaga

SEQ ID NO: 414804 - DNA, 15 bp, Homo sapiens
agcctgagcaacaag

SEQ ID NO: 414805 - DNA, 15 bp, Homo sapiens
cagcctgagcaacaa

SEQ ID NO: 414806 - DNA, 15 bp, Homo sapiens
ccagcctgagcaaca

SEQ ID NO: 414807 - DNA, 15 bp, Homo sapiens
tccagcctgagcaac

SEQ ID NO: 414808 - DNA, 15 bp, Homo sapiens
ctccagcctgagcaa

SEQ ID NO: 414809 - DNA, 15 bp, Homo sapiens
actccagcctgagca

SEQ ID NO: 414810 - DNA, 15 bp, Homo sapiens
cactccagcctgagc

SEQ ID NO: 414811 - DNA, 15 bp, Homo sapiens
gcactccagcctgag

SEQ ID NO: 414812 - DNA, 15 bp, Homo sapiens
tgcactccagcctga

SEQ ID NO: 414813 - DNA, 15 bp, Homo sapiens
gccattgcactccag

SEQ ID NO: 414814 - DNA, 15 bp, Homo sapiens
tgccattgcactcca

SEQ ID NO: 414815 - DNA, 15 bp, Homo sapiens
gtgccattgcactcc

SEQ ID NO: 414816 - DNA, 15 bp, Homo sapiens
cgtgccattgcactc

SEQ ID NO: 414817 - DNA, 15 bp, Homo sapiens
tcgtgccattgcact

SEQ ID NO: 414818 - DNA, 15 bp, Homo sapiens
atcgtgccattgcac

SEQ ID NO: 414819 - DNA, 15 bp, Homo sapiens
gatcgtgccattgca

SEQ ID NO: 414820 - DNA, 15 bp, Homo sapiens
agatcgtgccattgc

SEQ ID NO: 414821 - DNA, 15 bp, Homo sapiens
aagatcgtgccattg

SEQ ID NO: 414822 - DNA, 15 bp, Homo sapiens
caagatcgtgccatt

SEQ ID NO: 414823 - DNA, 15 bp, Homo sapiens
ccaagatcgtgccat

SEQ ID NO: 414824 - DNA, 15 bp, Homo sapiens
gtgagccaagatcgt

SEQ ID NO: 414825 - DNA, 15 bp, Homo sapiens
agtgagccaagatcg

SEQ ID NO: 414826 - DNA, 15 bp, Homo sapiens
actgcagtgagccaa

SEQ ID NO: 414827 - DNA, 15 bp, Homo sapiens
gactgcagtgagcca

SEQ ID NO: 414828 - DNA, 15 bp, Homo sapiens
agactgcagtgagcc

SEQ ID NO: 414829 - DNA, 15 bp, Homo sapiens
gagactgcagtgagc

SEQ ID NO: 414830 - DNA, 15 bp, Homo sapiens
agagactgcagtgag

SEQ ID NO: 414831 - DNA, 15 bp, Homo sapiens
tagagactgcagtga

SEQ ID NO: 414832 - DNA, 15 bp, Homo sapiens
gtagagactgcagtg

SEQ ID NO: 414833 - DNA, 15 bp, Homo sapiens
ggtagagactgcagt

SEQ ID NO: 414834 - DNA, 15 bp, Homo sapiens
aggtagagactgcag

SEQ ID NO: 414835 - DNA, 15 bp, Homo sapiens
gaggtagagactgca

SEQ ID NO: 414836 - DNA, 15 bp, Homo sapiens
ggaggtagagactgc

SEQ ID NO: 414837 - DNA, 15 bp, Homo sapiens
gggaggtagagactg

SEQ ID NO: 414838 - DNA, 15 bp, Homo sapiens
tgggaggtagagact

SEQ ID NO: 414839 - DNA, 15 bp, Homo sapiens
ctgggaggtagagac

SEQ ID NO: 414840 - DNA, 15 bp, Homo sapiens
actgggaggtagaga

SEQ ID NO: 414841 - DNA, 15 bp, Homo sapiens
aactgggaggtagag

SEQ ID NO: 414842 - DNA, 15 bp, Homo sapiens
aaactgggaggtaga

SEQ ID NO: 414843 - DNA, 15 bp, Homo sapiens
gaaactgggaggtag

SEQ ID NO: 414844 - DNA, 15 bp, Homo sapiens
tgaaactgggaggta

SEQ ID NO: 414845 - DNA, 15 bp, Homo sapiens
ttgaaactgggaggt

SEQ ID NO: 414846 - DNA, 15 bp, Homo sapiens
cttgaaactgggagg

SEQ ID NO: 414847 - DNA, 15 bp, Homo sapiens
gcttgaaactgggag

SEQ ID NO: 414848 - DNA, 15 bp, Homo sapiens
cgcttgaaactggga

SEQ ID NO: 414849 - DNA, 15 bp, Homo sapiens
tcgcttgaaactggg

SEQ ID NO: 414850 - DNA, 15 bp, Homo sapiens
atcgcttgaaactgg

SEQ ID NO: 414851 - DNA, 15 bp, Homo sapiens
aatcgcttgaaactg

SEQ ID NO: 414852 - DNA, 15 bp, Homo sapiens
gaatcgcttgaaact

SEQ ID NO: 414853 - DNA, 15 bp, Homo sapiens
agaatcgcttgaaac

SEQ ID NO: 414854 - DNA, 15 bp, Homo sapiens
gagaatcgcttgaaa

SEQ ID NO: 414855 - DNA, 15 bp, Homo sapiens
agagaatcgcttgaa

SEQ ID NO: 414856 - DNA, 15 bp, Homo sapiens
aagagaatcgcttga

SEQ ID NO: 414857 - DNA, 15 bp, Homo sapiens
caagagaatcgcttg

SEQ ID NO: 414858 - DNA, 15 bp, Homo sapiens
gcaagagaatcgctt

SEQ ID NO: 414859 - DNA, 15 bp, Homo sapiens
agcaagagaatcgct

SEQ ID NO: 414860 - DNA, 15 bp, Homo sapiens
aagcaagagaatcgc

SEQ ID NO: 414861 - DNA, 15 bp, Homo sapiens
gaagcaagagaatcg

SEQ ID NO: 414862 - DNA, 15 bp, Homo sapiens
tgaagcaagagaatc

SEQ ID NO: 414863 - DNA, 15 bp, Homo sapiens
ctgaagcaagagaat

SEQ ID NO: 414864 - DNA, 15 bp, Homo sapiens
gctgaagcaagagaa

SEQ ID NO: 414865 - DNA, 15 bp, Homo sapiens
agctgaagcaagaga

SEQ ID NO: 414866 - DNA, 15 bp, Homo sapiens
aagctgaagcaagag

SEQ ID NO: 414867 - DNA, 15 bp, Homo sapiens
gaagctgaagcaaga

SEQ ID NO: 414868 - DNA, 15 bp, Homo sapiens
ggaagctgaagcaag

SEQ ID NO: 414869 - DNA, 15 bp, Homo sapiens
tggaagctgaagcaa

SEQ ID NO: 414870 - DNA, 15 bp, Homo sapiens
ctggaagctgaagca

SEQ ID NO: 414871 - DNA, 15 bp, Homo sapiens
tctggaagctgaagc

SEQ ID NO: 414872 - DNA, 15 bp, Homo sapiens
ctctggaagctgaag

SEQ ID NO: 414873 - DNA, 15 bp, Homo sapiens
actctggaagctgaa

SEQ ID NO: 414874 - DNA, 15 bp, Homo sapiens
tactctggaagctga

SEQ ID NO: 414875 - DNA, 15 bp, Homo sapiens
ctactctggaagctg

SEQ ID NO: 414876 - DNA, 15 bp, Homo sapiens
gctactctggaagct

SEQ ID NO: 414877 - DNA, 15 bp, Homo sapiens
agctactctggaagc

SEQ ID NO: 414878 - DNA, 15 bp, Homo sapiens
tagctactctggaag

SEQ ID NO: 414879 - DNA, 15 bp, Homo sapiens
ctagctactctggaa

SEQ ID NO: 414880 - DNA, 15 bp, Homo sapiens
cctagctactctgga

SEQ ID NO: 414881 - DNA, 15 bp, Homo sapiens
tcctagctactctgg

SEQ ID NO: 414882 - DNA, 15 bp, Homo sapiens
atcctagctactctg

SEQ ID NO: 414883 - DNA, 15 bp, Homo sapiens
aatcctagctactct

SEQ ID NO: 414884 - DNA, 15 bp, Homo sapiens
tgtaatcctagctac

SEQ ID NO: 414885 - DNA, 15 bp, Homo sapiens
gcctgtaatcctagc

SEQ ID NO: 414886 - DNA, 15 bp, Homo sapiens
tgcctgtaatcctag

SEQ ID NO: 414887 - DNA, 15 bp, Homo sapiens
gtgcctgtaatccta

SEQ ID NO: 414888 - DNA, 15 bp, Homo sapiens
ggtgcctgtaatcct

SEQ ID NO: 414889 - DNA, 15 bp, Homo sapiens
tggttgtgggtgcct

SEQ ID NO: 414890 - DNA, 15 bp, Homo sapiens
gtggttgtgggtgcc

SEQ ID NO: 414891 - DNA, 15 bp, Homo sapiens
tgtggttgtgggtgc

SEQ ID NO: 414892 - DNA, 15 bp, Homo sapiens
gtgtggttgtgggtg

SEQ ID NO: 414893 - DNA, 15 bp, Homo sapiens
ggtgtggttgtgggt

SEQ ID NO: 414894 - DNA, 15 bp, Homo sapiens
aggtgtggttgtggg

SEQ ID NO: 414895 - DNA, 15 bp, Homo sapiens
caggtgtggttgtgg

SEQ ID NO: 414896 - DNA, 15 bp, Homo sapiens
ccaggtgtggttgtg

SEQ ID NO: 414897 - DNA, 15 bp, Homo sapiens
gccaggtgtggttgt

SEQ ID NO: 414898 - DNA, 15 bp, Homo sapiens
agccaggtgtggttg

SEQ ID NO: 414899 - DNA, 15 bp, Homo sapiens
tagccaggtgtggtt

SEQ ID NO: 414900 - DNA, 15 bp, Homo sapiens
caaattagccaggtg

SEQ ID NO: 414901 - DNA, 15 bp, Homo sapiens
acaaattagccaggt

SEQ ID NO: 414902 - DNA, 15 bp, Homo sapiens
tacaaattagccagg

SEQ ID NO: 414903 - DNA, 15 bp, Homo sapiens
ttacaaattagccag

SEQ ID NO: 414904 - DNA, 15 bp, Homo sapiens
attacaaattagcca

SEQ ID NO: 414905 - DNA, 15 bp, Homo sapiens
tattacaaattagcc

SEQ ID NO: 414906 - DNA, 15 bp, Homo sapiens
atattacaaattagc

SEQ ID NO: 414907 - DNA, 15 bp, Homo sapiens
tatattacaaattag

SEQ ID NO: 414908 - DNA, 15 bp, Homo sapiens
gtatattacaaatta

SEQ ID NO: 414909 - DNA, 15 bp, Homo sapiens
tgtatattacaaatt

SEQ ID NO: 414910 - DNA, 15 bp, Homo sapiens
atgtatattacaaat

SEQ ID NO: 414911 - DNA, 15 bp, Homo sapiens
tatgtatattacaaa

SEQ ID NO: 414912 - DNA, 15 bp, Homo sapiens
gtatgtatattacaa

SEQ ID NO: 414913 - DNA, 15 bp, Homo sapiens
tgtatgtatattaca

SEQ ID NO: 414914 - DNA, 15 bp, Homo sapiens
atgtatgtatattac

SEQ ID NO: 414915 - DNA, 15 bp, Homo sapiens
tatgtatgtatatta

SEQ ID NO: 414916 - DNA, 15 bp, Homo sapiens
atatgtatgtatatt

SEQ ID NO: 414917 - DNA, 15 bp, Homo sapiens
tatatgtatgtatat

SEQ ID NO: 414918 - DNA, 15 bp, Homo sapiens
atatatgtatgtata

SEQ ID NO: 414919 - DNA, 15 bp, Homo sapiens
tatatatgtatgtat

SEQ ID NO: 414920 - DNA, 15 bp, Homo sapiens
atatatatgtatgta

SEQ ID NO: 414921 - DNA, 15 bp, Homo sapiens
tatatatatgtatgt

SEQ ID NO: 414922 - DNA, 15 bp, Homo sapiens
atatatatatgtatg

SEQ ID NO: 414923 - DNA, 15 bp, Homo sapiens
aatatatatatgtat

SEQ ID NO: 414924 - DNA, 15 bp, Homo sapiens
aaatatatatatgta

SEQ ID NO: 414925 - DNA, 15 bp, Homo sapiens
caaaaatatatatat

SEQ ID NO: 414926 - DNA, 15 bp, Homo sapiens
acaaaaatatatata

SEQ ID NO: 414927 - DNA, 15 bp, Homo sapiens
aacaaaaatatatat

SEQ ID NO: 414928 - DNA, 15 bp, Homo sapiens
aaacaaaaatatata

SEQ ID NO: 414929 - DNA, 15 bp, Homo sapiens
caaacaaaaatatat

SEQ ID NO: 414930 - DNA, 15 bp, Homo sapiens
acaaacaaaaatata

SEQ ID NO: 414931 - DNA, 15 bp, Homo sapiens
aacaaacaaaaatat

SEQ ID NO: 414932 - DNA, 15 bp, Homo sapiens
aaacaaacaaaaata

SEQ ID NO: 414933 - DNA, 15 bp, Homo sapiens
caaacaaacaaaaat

SEQ ID NO: 414934 - DNA, 15 bp, Homo sapiens
aaaaaacaaacaaac

SEQ ID NO: 414935 - DNA, 15 bp, Homo sapiens
caaaaaacaaacaaa

SEQ ID NO: 414936 - DNA, 15 bp, Homo sapiens
tcaaaaaacaaacaa

SEQ ID NO: 414937 - DNA, 15 bp, Homo sapiens
ctcaaaaaacaaaca

SEQ ID NO: 414938 - DNA, 15 bp, Homo sapiens
tctcaaaaaacaaac

SEQ ID NO: 414939 - DNA, 15 bp, Homo sapiens
catctcaaaaaacaa

SEQ ID NO: 414940 - DNA, 15 bp, Homo sapiens
ccatctcaaaaaaca

SEQ ID NO: 414941 - DNA, 15 bp, Homo sapiens
tccatctcaaaaaac

SEQ ID NO: 414942 - DNA, 15 bp, Homo sapiens
caaaactccatctca

SEQ ID NO: 414943 - DNA, 15 bp, Homo sapiens
gcaaaactccatctc

SEQ ID NO: 414944 - DNA, 15 bp, Homo sapiens
agcaaaactccatct

SEQ ID NO: 414945 - DNA, 15 bp, Homo sapiens
gagcaaaactccatc

SEQ ID NO: 414946 - DNA, 15 bp, Homo sapiens
agagcaaaactccat

SEQ ID NO: 414947 - DNA, 15 bp, Homo sapiens
aagagcaaaactcca

SEQ ID NO: 414948 - DNA, 15 bp, Homo sapiens
tcaagagcaaaactc

SEQ ID NO: 414949 - DNA, 15 bp, Homo sapiens
gtcaagagcaaaact

SEQ ID NO: 414950 - DNA, 15 bp, Homo sapiens
cgtcaagagcaaaac

SEQ ID NO: 414951 - DNA, 15 bp, Homo sapiens
acgtcaagagcaaaa

SEQ ID NO: 414952 - DNA, 15 bp, Homo sapiens
gacgtcaagagcaaa

SEQ ID NO: 414953 - DNA, 15 bp, Homo sapiens
tgacgtcaagagcaa

SEQ ID NO: 414954 - DNA, 15 bp, Homo sapiens
atgacgtcaagagca

SEQ ID NO: 414955 - DNA, 15 bp, Homo sapiens
gatgacgtcaagagc

SEQ ID NO: 414956 - DNA, 15 bp, Homo sapiens
ggatgacgtcaagag

SEQ ID NO: 414957 - DNA, 15 bp, Homo sapiens
tggatgacgtcaaga

SEQ ID NO: 414958 - DNA, 15 bp, Homo sapiens
ctggatgacgtcaag

SEQ ID NO: 414959 - DNA, 15 bp, Homo sapiens
cctggatgacgtcaa

SEQ ID NO: 414960 - DNA, 15 bp, Homo sapiens
gcctggatgacgtca

SEQ ID NO: 414961 - DNA, 15 bp, Homo sapiens
agcctggatgacgtc

SEQ ID NO: 414962 - DNA, 15 bp, Homo sapiens
cagcctggatgacgt

SEQ ID NO: 414963 - DNA, 15 bp, Homo sapiens
ccagcctggatgacg

SEQ ID NO: 414964 - DNA, 15 bp, Homo sapiens
tccagcctggatgac

SEQ ID NO: 414965 - DNA, 15 bp, Homo sapiens
ctccagcctggatga

SEQ ID NO: 414966 - DNA, 15 bp, Homo sapiens
actccagcctggatg

SEQ ID NO: 414967 - DNA, 15 bp, Homo sapiens
cactccagcctggat

SEQ ID NO: 414968 - DNA, 15 bp, Homo sapiens
gcactccagcctgga

SEQ ID NO: 414969 - DNA, 15 bp, Homo sapiens
agagaggcggaggtt

SEQ ID NO: 414970 - DNA, 15 bp, Homo sapiens
cagagaggcggaggt

SEQ ID NO: 414971 - DNA, 15 bp, Homo sapiens
ccagagaggcggagg

SEQ ID NO: 414972 - DNA, 15 bp, Homo sapiens
accagagaggcggag

SEQ ID NO: 414973 - DNA, 15 bp, Homo sapiens
caccagagaggcgga

SEQ ID NO: 414974 - DNA, 15 bp, Homo sapiens
tcaccagagaggcgg

SEQ ID NO: 414975 - DNA, 15 bp, Homo sapiens
atcaccagagaggcg

SEQ ID NO: 414976 - DNA, 15 bp, Homo sapiens
aatcaccagagaggc

SEQ ID NO: 414977 - DNA, 15 bp, Homo sapiens
gaatcaccagagagg

SEQ ID NO: 414978 - DNA, 15 bp, Homo sapiens
agaatcaccagagag

SEQ ID NO: 414979 - DNA, 15 bp, Homo sapiens
gagaatcaccagaga

SEQ ID NO: 414980 - DNA, 15 bp, Homo sapiens
ggagaatcaccagag

SEQ ID NO: 414981 - DNA, 15 bp, Homo sapiens
aggagaatcaccaga

SEQ ID NO: 414982 - DNA, 15 bp, Homo sapiens
caggagaatcaccag

SEQ ID NO: 414983 - DNA, 15 bp, Homo sapiens
gcaggagaatcacca

SEQ ID NO: 414984 - DNA, 15 bp, Homo sapiens
ttgaggcaggagaat

SEQ ID NO: 414985 - DNA, 15 bp, Homo sapiens
gttgaggcaggagaa

SEQ ID NO: 414986 - DNA, 15 bp, Homo sapiens
ggttgaggcaggaga

SEQ ID NO: 414987 - DNA, 15 bp, Homo sapiens
aggttgaggcaggag

SEQ ID NO: 414988 - DNA, 15 bp, Homo sapiens
gaggttgaggcagga

SEQ ID NO: 414989 - DNA, 15 bp, Homo sapiens
ggaggttgaggcagg

SEQ ID NO: 414990 - DNA, 15 bp, Homo sapiens
gggaggttgaggcag

SEQ ID NO: 414991 - DNA, 15 bp, Homo sapiens
cgggaggttgaggca

SEQ ID NO: 414992 - DNA, 15 bp, Homo sapiens
tcgggaggttgaggc

SEQ ID NO: 414993 - DNA, 15 bp, Homo sapiens
ctcgggaggttgagg

SEQ ID NO: 414994 - DNA, 15 bp, Homo sapiens
actcgggaggttgag

SEQ ID NO: 414995 - DNA, 15 bp, Homo sapiens
tactcgggaggttga

SEQ ID NO: 414996 - DNA, 15 bp, Homo sapiens
ctactcgggaggttg

SEQ ID NO: 414997 - DNA, 15 bp, Homo sapiens
actactcgggaggtt

SEQ ID NO: 414998 - DNA, 15 bp, Homo sapiens
aactactcgggaggt

SEQ ID NO: 414999 - DNA, 15 bp, Homo sapiens
caactactcgggagg

SEQ ID NO: 415000 - DNA, 15 bp, Homo sapiens
ccaactactcgggag

SEQ ID NO: 415001 - DNA, 15 bp, Homo sapiens
cccaactactcggga

SEQ ID NO: 415002 - DNA, 15 bp, Homo sapiens
tcccaactactcggg

SEQ ID NO: 415003 - DNA, 15 bp, Homo sapiens
atcccaactactcgg

SEQ ID NO: 415004 - DNA, 15 bp, Homo sapiens
aatcccaactactcg

SEQ ID NO: 415005 - DNA, 15 bp, Homo sapiens
tcctgtaatcccaac

SEQ ID NO: 415006 - DNA, 15 bp, Homo sapiens
ctcctgtaatcccaa

SEQ ID NO: 415007 - DNA, 15 bp, Homo sapiens
gctcctgtaatccca

SEQ ID NO: 415008 - DNA, 15 bp, Homo sapiens
ggctcctgtaatccc

SEQ ID NO: 415009 - DNA, 15 bp, Homo sapiens
aggctcctgtaatcc

SEQ ID NO: 415010 - DNA, 15 bp, Homo sapiens
caggctcctgtaatc

SEQ ID NO: 415011 - DNA, 15 bp, Homo sapiens
gcaggctcctgtaat

SEQ ID NO: 415012 - DNA, 15 bp, Homo sapiens
ggcaggctcctgtaa

SEQ ID NO: 415013 - DNA, 15 bp, Homo sapiens
tggcaggctcctgta

SEQ ID NO: 415014 - DNA, 15 bp, Homo sapiens
gtggcaggctcctgt

SEQ ID NO: 415015 - DNA, 15 bp, Homo sapiens
ggtggcaggctcctg

SEQ ID NO: 415016 - DNA, 15 bp, Homo sapiens
tggtggcaggctcct

SEQ ID NO: 415017 - DNA, 15 bp, Homo sapiens
atggtggcaggctcc

SEQ ID NO: 415018 - DNA, 15 bp, Homo sapiens
catggtggcaggctc

SEQ ID NO: 415019 - DNA, 15 bp, Homo sapiens
gcatggtggcaggct

SEQ ID NO: 415020 - DNA, 15 bp, Homo sapiens
ggcatggtggcaggc

SEQ ID NO: 415021 - DNA, 15 bp, Homo sapiens
gggcatggtggcagg

SEQ ID NO: 415022 - DNA, 15 bp, Homo sapiens
tgggcatggtggcag

SEQ ID NO: 415023 - DNA, 15 bp, Homo sapiens
cctactaaaaataca

SEQ ID NO: 415024 - DNA, 15 bp, Homo sapiens
ccctactaaaaatac

SEQ ID NO: 415025 - DNA, 15 bp, Homo sapiens
tccctactaaaaata

SEQ ID NO: 415026 - DNA, 15 bp, Homo sapiens
atccctactaaaaat

SEQ ID NO: 415027 - DNA, 15 bp, Homo sapiens
catccctactaaaaa

SEQ ID NO: 415028 - DNA, 15 bp, Homo sapiens
ccatccctactaaaa

SEQ ID NO: 415029 - DNA, 15 bp, Homo sapiens
cccatccctactaaa

SEQ ID NO: 415030 - DNA, 15 bp, Homo sapiens
ccccatccctactaa

SEQ ID NO: 415031 - DNA, 15 bp, Homo sapiens
accccatccctacta

SEQ ID NO: 415032 - DNA, 15 bp, Homo sapiens
aaccccatccctact

SEQ ID NO: 415033 - DNA, 15 bp, Homo sapiens
aaaccccatccctac

SEQ ID NO: 415034 - DNA, 15 bp, Homo sapiens
gaaaccccatcccta

SEQ ID NO: 415035 - DNA, 15 bp, Homo sapiens
tgaaaccccatccct

SEQ ID NO: 415036 - DNA, 15 bp, Homo sapiens
gtgaaaccccatccc

SEQ ID NO: 415037 - DNA, 15 bp, Homo sapiens
ggtgaaaccccatcc

SEQ ID NO: 415038 - DNA, 15 bp, Homo sapiens
ttttgagaccagcct

SEQ ID NO: 415039 - DNA, 15 bp, Homo sapiens
gttttgagaccagcc

SEQ ID NO: 415040 - DNA, 15 bp, Homo sapiens
agttttgagaccagc

SEQ ID NO: 415041 - DNA, 15 bp, Homo sapiens
gagttttgagaccag

SEQ ID NO: 415042 - DNA, 15 bp, Homo sapiens
ggagttttgagacca

SEQ ID NO: 415043 - DNA, 15 bp, Homo sapiens
aggagttttgagacc

SEQ ID NO: 415044 - DNA, 15 bp, Homo sapiens
caggagttttgagac

SEQ ID NO: 415045 - DNA, 15 bp, Homo sapiens
tcaggagttttgaga

SEQ ID NO: 415046 - DNA, 15 bp, Homo sapiens
gtcaggagttttgag

SEQ ID NO: 415047 - DNA, 15 bp, Homo sapiens
tgtcaggagttttga

SEQ ID NO: 415048 - DNA, 15 bp, Homo sapiens
atgtcaggagttttg

SEQ ID NO: 415049 - DNA, 15 bp, Homo sapiens
gatgtcaggagtttt

SEQ ID NO: 415050 - DNA, 15 bp, Homo sapiens
agatgtcaggagttt

SEQ ID NO: 415051 - DNA, 15 bp, Homo sapiens
cagatgtcaggagtt

SEQ ID NO: 415052 - DNA, 15 bp, Homo sapiens
ccagatgtcaggagt

SEQ ID NO: 415053 - DNA, 15 bp, Homo sapiens
accagatgtcaggag

SEQ ID NO: 415054 - DNA, 15 bp, Homo sapiens
taccagatgtcagga

SEQ ID NO: 415055 - DNA, 15 bp, Homo sapiens
ttaccagatgtcagg

SEQ ID NO: 415056 - DNA, 15 bp, Homo sapiens
attaccagatgtcag

SEQ ID NO: 415057 - DNA, 15 bp, Homo sapiens
gattaccagatgtca

SEQ ID NO: 415058 - DNA, 15 bp, Homo sapiens
agattaccagatgtc

SEQ ID NO: 415059 - DNA, 15 bp, Homo sapiens
cagattaccagatgt

SEQ ID NO: 415060 - DNA, 15 bp, Homo sapiens
gcagattaccagatg

SEQ ID NO: 415061 - DNA, 15 bp, Homo sapiens
ggcagattaccagat

SEQ ID NO: 415062 - DNA, 15 bp, Homo sapiens
gggcagattaccaga

SEQ ID NO: 415063 - DNA, 15 bp, Homo sapiens
tgggcagattaccag

SEQ ID NO: 415064 - DNA, 15 bp, Homo sapiens
gtgggcagattacca

SEQ ID NO: 415065 - DNA, 15 bp, Homo sapiens
ggtgggcagattacc

SEQ ID NO: 415066 - DNA, 15 bp, Homo sapiens
aggtgggcagattac

SEQ ID NO: 415067 - DNA, 15 bp, Homo sapiens
gaggtgggcagatta

SEQ ID NO: 415068 - DNA, 15 bp, Homo sapiens
tgaggtgggcagatt

SEQ ID NO: 415069 - DNA, 15 bp, Homo sapiens
aggaggctgaggtgg

SEQ ID NO: 415070 - DNA, 15 bp, Homo sapiens
taggaggctgaggtg

SEQ ID NO: 415071 - DNA, 15 bp, Homo sapiens
ttaggaggctgaggt

SEQ ID NO: 415072 - DNA, 15 bp, Homo sapiens
gtttaggaggctgag

SEQ ID NO: 415073 - DNA, 15 bp, Homo sapiens
agtttaggaggctga

SEQ ID NO: 415074 - DNA, 15 bp, Homo sapiens
cagtttaggaggctg

SEQ ID NO: 415075 - DNA, 15 bp, Homo sapiens
gcagtttaggaggct

SEQ ID NO: 415076 - DNA, 15 bp, Homo sapiens
agcagtttaggaggc

SEQ ID NO: 415077 - DNA, 15 bp, Homo sapiens
cagcagtttaggagg

SEQ ID NO: 415078 - DNA, 15 bp, Homo sapiens
ccagcagtttaggag

SEQ ID NO: 415079 - DNA, 15 bp, Homo sapiens
cccagcagtttagga

SEQ ID NO: 415080 - DNA, 15 bp, Homo sapiens
tcccagcagtttagg

SEQ ID NO: 415081 - DNA, 15 bp, Homo sapiens
atcccagcagtttag

SEQ ID NO: 415082 - DNA, 15 bp, Homo sapiens
aatcccagcagttta

SEQ ID NO: 415083 - DNA, 15 bp, Homo sapiens
taatcccagcagttt

SEQ ID NO: 415084 - DNA, 15 bp, Homo sapiens
gtaatcccagcagtt

SEQ ID NO: 415085 - DNA, 15 bp, Homo sapiens
tgtaatcccagcagt

SEQ ID NO: 415086 - DNA, 15 bp, Homo sapiens
ctgtaatcccagcag

SEQ ID NO: 415087 - DNA, 15 bp, Homo sapiens
gctgtaatcccagca

SEQ ID NO: 415088 - DNA, 15 bp, Homo sapiens
ggctgtaatcccagc

SEQ ID NO: 415089 - DNA, 15 bp, Homo sapiens
tggctgtaatcccag

SEQ ID NO: 415090 - DNA, 15 bp, Homo sapiens
atggctgtaatccca

SEQ ID NO: 415091 - DNA, 15 bp, Homo sapiens
catggctgtaatccc

SEQ ID NO: 415092 - DNA, 15 bp, Homo sapiens
tcatggctgtaatcc

SEQ ID NO: 415093 - DNA, 15 bp, Homo sapiens
ctcatggctgtaatc

SEQ ID NO: 415094 - DNA, 15 bp, Homo sapiens
gctcatggctgtaat

SEQ ID NO: 415095 - DNA, 15 bp, Homo sapiens
ggctcatggctgtaa

SEQ ID NO: 415096 - DNA, 15 bp, Homo sapiens
tggctcatggctgta

SEQ ID NO: 415097 - DNA, 15 bp, Homo sapiens
gtggctcatggctgt

SEQ ID NO: 415098 - DNA, 15 bp, Homo sapiens
ggtggctcatggctg

SEQ ID NO: 415099 - DNA, 15 bp, Homo sapiens
cggtggctcatggct

SEQ ID NO: 415100 - DNA, 15 bp, Homo sapiens
acggtggctcatggc

SEQ ID NO: 415101 - DNA, 15 bp, Homo sapiens
cacggtggctcatgg

SEQ ID NO: 415102 - DNA, 15 bp, Homo sapiens
gccaggcacggtggc

SEQ ID NO: 415103 - DNA, 15 bp, Homo sapiens
ggccaggcacggtgg

SEQ ID NO: 415104 - DNA, 15 bp, Homo sapiens
tggccaggcacggtg

SEQ ID NO: 415105 - DNA, 15 bp, Homo sapiens
gtggccaggcacggt

SEQ ID NO: 415106 - DNA, 15 bp, Homo sapiens
tgtggccaggcacgg

SEQ ID NO: 415107 - DNA, 15 bp, Homo sapiens
atgtggccaggcacg

SEQ ID NO: 415108 - DNA, 15 bp, Homo sapiens
aatgtggccaggcac

SEQ ID NO: 415109 - DNA, 15 bp, Homo sapiens
aaatgtggccaggca

SEQ ID NO: 415110 - DNA, 15 bp, Homo sapiens
gaaatgtggccaggc

SEQ ID NO: 415111 - DNA, 15 bp, Homo sapiens
agaaatgtggccagg

SEQ ID NO: 415112 - DNA, 15 bp, Homo sapiens
gagaaatgtggccag

SEQ ID NO: 415113 - DNA, 15 bp, Homo sapiens
agagaaatgtggcca

SEQ ID NO: 415114 - DNA, 15 bp, Homo sapiens
cagagaaatgtggcc

SEQ ID NO: 415115 - DNA, 15 bp, Homo sapiens
gcagagaaatgtggc

SEQ ID NO: 415116 - DNA, 15 bp, Homo sapiens
agcagagaaatgtgg

SEQ ID NO: 415117 - DNA, 15 bp, Homo sapiens
tagcagagaaatgtg

SEQ ID NO: 415118 - DNA, 15 bp, Homo sapiens
atagcagagaaatgt

SEQ ID NO: 415119 - DNA, 15 bp, Homo sapiens
aatagcagagaaatg

SEQ ID NO: 415120 - DNA, 15 bp, Homo sapiens
aaatagcagagaaat

SEQ ID NO: 415121 - DNA, 15 bp, Homo sapiens
aaaatagcagagaaa

SEQ ID NO: 415122 - DNA, 15 bp, Homo sapiens
taaaatagcagagaa

SEQ ID NO: 415123 - DNA, 15 bp, Homo sapiens
ttaaaatagcagaga

SEQ ID NO: 415124 - DNA, 15 bp, Homo sapiens
attaaaatagcagag

SEQ ID NO: 415125 - DNA, 15 bp, Homo sapiens
tattaaaatagcaga

SEQ ID NO: 415126 - DNA, 15 bp, Homo sapiens
ttattaaaatagcag

SEQ ID NO: 415127 - DNA, 15 bp, Homo sapiens
cttattaaaatagca

SEQ ID NO: 415128 - DNA, 15 bp, Homo sapiens
tcttattaaaatagc

SEQ ID NO: 415129 - DNA, 15 bp, Homo sapiens
ttcttattaaaatag

SEQ ID NO: 415130 - DNA, 15 bp, Homo sapiens
gttcttattaaaata

SEQ ID NO: 415131 - DNA, 15 bp, Homo sapiens
tgttcttattaaaat

SEQ ID NO: 415132 - DNA, 15 bp, Homo sapiens
atgttcttattaaaa

SEQ ID NO: 415133 - DNA, 15 bp, Homo sapiens
tatgttcttattaaa

SEQ ID NO: 415134 - DNA, 15 bp, Homo sapiens
ctatgttcttattaa

SEQ ID NO: 415135 - DNA, 15 bp, Homo sapiens
tctatgttcttatta

SEQ ID NO: 415136 - DNA, 15 bp, Homo sapiens
ttctatgttcttatt

SEQ ID NO: 415137 - DNA, 15 bp, Homo sapiens
attctatgttcttat

SEQ ID NO: 415138 - DNA, 15 bp, Homo sapiens
tattctatgttctta

SEQ ID NO: 415139 - DNA, 15 bp, Homo sapiens
ctattctatgttctt

SEQ ID NO: 415140 - DNA, 15 bp, Homo sapiens
tctattctatgttct

SEQ ID NO: 415141 - DNA, 15 bp, Homo sapiens
ttctattctatgttc

SEQ ID NO: 415142 - DNA, 15 bp, Homo sapiens
attctattctatgtt

SEQ ID NO: 415143 - DNA, 15 bp, Homo sapiens
tattctattctatgt

SEQ ID NO: 415144 - DNA, 15 bp, Homo sapiens
ttattctattctatg

SEQ ID NO: 415145 - DNA, 15 bp, Homo sapiens
cttattctattctat

SEQ ID NO: 415146 - DNA, 15 bp, Homo sapiens
acttattctattcta

SEQ ID NO: 415147 - DNA, 15 bp, Homo sapiens
tacttattctattct

SEQ ID NO: 415148 - DNA, 15 bp, Homo sapiens
atacttattctattc

SEQ ID NO: 415149 - DNA, 15 bp, Homo sapiens
tatacttattctatt

SEQ ID NO: 415150 - DNA, 15 bp, Homo sapiens
ctatacttattctat

SEQ ID NO: 415151 - DNA, 15 bp, Homo sapiens
cctatacttattcta

SEQ ID NO: 415152 - DNA, 15 bp, Homo sapiens
tcctatacttattct

SEQ ID NO: 415153 - DNA, 15 bp, Homo sapiens
ttcctatacttattc

SEQ ID NO: 415154 - DNA, 15 bp, Homo sapiens
attcctatacttatt

SEQ ID NO: 415155 - DNA, 15 bp, Homo sapiens
cattcctatacttat

SEQ ID NO: 415156 - DNA, 15 bp, Homo sapiens
ccattcctatactta

SEQ ID NO: 415157 - DNA, 15 bp, Homo sapiens
cccattcctatactt

SEQ ID NO: 415158 - DNA, 15 bp, Homo sapiens
ccccattcctatact

SEQ ID NO: 415159 - DNA, 15 bp, Homo sapiens
accccattcctatac

SEQ ID NO: 415160 - DNA, 15 bp, Homo sapiens
taccccattcctata

SEQ ID NO: 415161 - DNA, 15 bp, Homo sapiens
ctaccccattcctat

SEQ ID NO: 415162 - DNA, 15 bp, Homo sapiens
actaccccattccta

SEQ ID NO: 415163 - DNA, 15 bp, Homo sapiens
cactaccccattcct

SEQ ID NO: 415164 - DNA, 15 bp, Homo sapiens
acactaccccattcc

SEQ ID NO: 415165 - DNA, 15 bp, Homo sapiens
aacactaccccattc

SEQ ID NO: 415166 - DNA, 15 bp, Homo sapiens
gaacactaccccatt

SEQ ID NO: 415167 - DNA, 15 bp, Homo sapiens
tgaacactaccccat

SEQ ID NO: 415168 - DNA, 15 bp, Homo sapiens
ttgaacactacccca

SEQ ID NO: 415169 - DNA, 15 bp, Homo sapiens
attgaacactacccc

SEQ ID NO: 415170 - DNA, 15 bp, Homo sapiens
gattgaacactaccc

SEQ ID NO: 415171 - DNA, 15 bp, Homo sapiens
agattgaacactacc

SEQ ID NO: 415172 - DNA, 15 bp, Homo sapiens
tagattgaacactac

SEQ ID NO: 415173 - DNA, 15 bp, Homo sapiens
atagattgaacacta

SEQ ID NO: 415174 - DNA, 15 bp, Homo sapiens
aatagattgaacact

SEQ ID NO: 415175 - DNA, 15 bp, Homo sapiens
taatagattgaacac

SEQ ID NO: 415176 - DNA, 15 bp, Homo sapiens
ctaatagattgaaca

SEQ ID NO: 415177 - DNA, 15 bp, Homo sapiens
cctaatagattgaac

SEQ ID NO: 415178 - DNA, 15 bp, Homo sapiens
ccctaatagattgaa

SEQ ID NO: 415179 - DNA, 15 bp, Homo sapiens
cccctaatagattga

SEQ ID NO: 415180 - DNA, 15 bp, Homo sapiens
tcccctaatagattg

SEQ ID NO: 415181 - DNA, 15 bp, Homo sapiens
atcccctaatagatt

SEQ ID NO: 415182 - DNA, 15 bp, Homo sapiens
aatcccctaatagat

SEQ ID NO: 415183 - DNA, 15 bp, Homo sapiens
taatcccctaataga

SEQ ID NO: 415184 - DNA, 15 bp, Homo sapiens
ttaatcccctaatag

SEQ ID NO: 415185 - DNA, 15 bp, Homo sapiens
tttaatcccctaata

SEQ ID NO: 415186 - DNA, 15 bp, Homo sapiens
ctttaatcccctaat

SEQ ID NO: 415187 - DNA, 15 bp, Homo sapiens
gctttaatcccctaa

SEQ ID NO: 415188 - DNA, 15 bp, Homo sapiens
agctttaatccccta

SEQ ID NO: 415189 - DNA, 15 bp, Homo sapiens
tagctttaatcccct

SEQ ID NO: 415190 - DNA, 15 bp, Homo sapiens
atagctttaatcccc

SEQ ID NO: 415191 - DNA, 15 bp, Homo sapiens
aatagctttaatccc

SEQ ID NO: 415192 - DNA, 15 bp, Homo sapiens
taatagctttaatcc

SEQ ID NO: 415193 - DNA, 15 bp, Homo sapiens
ataatagctttaatc

SEQ ID NO: 415194 - DNA, 15 bp, Homo sapiens
tataatagctttaat

SEQ ID NO: 415195 - DNA, 15 bp, Homo sapiens
atataatagctttaa

SEQ ID NO: 415196 - DNA, 15 bp, Homo sapiens
tatataatagcttta

SEQ ID NO: 415197 - DNA, 15 bp, Homo sapiens
atatataatagcttt

SEQ ID NO: 415198 - DNA, 15 bp, Homo sapiens
tatatataatagctt

SEQ ID NO: 415199 - DNA, 15 bp, Homo sapiens
ttatatataatagct

SEQ ID NO: 415200 - DNA, 15 bp, Homo sapiens
tttatatataatagc

SEQ ID NO: 415201 - DNA, 15 bp, Homo sapiens
ttttatatataatag

SEQ ID NO: 415202 - DNA, 15 bp, Homo sapiens
attttatatataata

SEQ ID NO: 415203 - DNA, 15 bp, Homo sapiens
aattttatatataat

SEQ ID NO: 415204 - DNA, 15 bp, Homo sapiens
taattttatatataa

SEQ ID NO: 415205 - DNA, 15 bp, Homo sapiens
ataattttatatata

SEQ ID NO: 415206 - DNA, 15 bp, Homo sapiens
aataattttatatat

SEQ ID NO: 415207 - DNA, 15 bp, Homo sapiens
taataattttatata

SEQ ID NO: 415208 - DNA, 15 bp, Homo sapiens
ctaataattttatat

SEQ ID NO: 415209 - DNA, 15 bp, Homo sapiens
gctaataattttata

SEQ ID NO: 415210 - DNA, 15 bp, Homo sapiens
tgctaataattttat

SEQ ID NO: 415211 - DNA, 15 bp, Homo sapiens
gtgctaataatttta

SEQ ID NO: 415212 - DNA, 15 bp, Homo sapiens
tgtgctaataatttt

SEQ ID NO: 415213 - DNA, 15 bp, Homo sapiens
gtgtgctaataattt

SEQ ID NO: 415214 - DNA, 15 bp, Homo sapiens
tgtgtgctaataatt

SEQ ID NO: 415215 - DNA, 15 bp, Homo sapiens
ttgtgtgctaataat

SEQ ID NO: 415216 - DNA, 15 bp, Homo sapiens
attgtgtgctaataa

SEQ ID NO: 415217 - DNA, 15 bp, Homo sapiens
tattgtgtgctaata

SEQ ID NO: 415218 - DNA, 15 bp, Homo sapiens
atattgtgtgctaat

SEQ ID NO: 415219 - DNA, 15 bp, Homo sapiens
tatattgtgtgctaa

SEQ ID NO: 415220 - DNA, 15 bp, Homo sapiens
ctatattgtgtgcta

SEQ ID NO: 415221 - DNA, 15 bp, Homo sapiens
tctatattgtgtgct

SEQ ID NO: 415222 - DNA, 15 bp, Homo sapiens
ctctatattgtgtgc

SEQ ID NO: 415223 - DNA, 15 bp, Homo sapiens
actctatattgtgtg

SEQ ID NO: 415224 - DNA, 15 bp, Homo sapiens
aactctatattgtgt

SEQ ID NO: 415225 - DNA, 15 bp, Homo sapiens
taactctatattgtg

SEQ ID NO: 415226 - DNA, 15 bp, Homo sapiens
ataactctatattgt

SEQ ID NO: 415227 - DNA, 15 bp, Homo sapiens
cataactctatattg

SEQ ID NO: 415228 - DNA, 15 bp, Homo sapiens
tcataactctatatt

SEQ ID NO: 415229 - DNA, 15 bp, Homo sapiens
atcataactctatat

SEQ ID NO: 415230 - DNA, 15 bp, Homo sapiens
tatcataactctata

SEQ ID NO: 415231 - DNA, 15 bp, Homo sapiens
atatcataactctat

SEQ ID NO: 415232 - DNA, 15 bp, Homo sapiens
tatatcataactcta

SEQ ID NO: 415233 - DNA, 15 bp, Homo sapiens
atatatcataactct

SEQ ID NO: 415234 - DNA, 15 bp, Homo sapiens
tatatatcataactc

SEQ ID NO: 415235 - DNA, 15 bp, Homo sapiens
atatatatcataact

SEQ ID NO: 415236 - DNA, 15 bp, Homo sapiens
aatatatatcataac

SEQ ID NO: 415237 - DNA, 15 bp, Homo sapiens
aaatatatatcataa

SEQ ID NO: 415238 - DNA, 15 bp, Homo sapiens
aaaatatatatcata

SEQ ID NO: 415239 - DNA, 15 bp, Homo sapiens
taaaatatatatcat

SEQ ID NO: 415240 - DNA, 15 bp, Homo sapiens
ataaaatatatatca

SEQ ID NO: 415241 - DNA, 15 bp, Homo sapiens
tataaaatatatatc

SEQ ID NO: 415242 - DNA, 15 bp, Homo sapiens
atataaaatatatat

SEQ ID NO: 415243 - DNA, 15 bp, Homo sapiens
catataaaatatata

SEQ ID NO: 415244 - DNA, 15 bp, Homo sapiens
tcatataaaatatat

SEQ ID NO: 415245 - DNA, 15 bp, Homo sapiens
atcatataaaatata

SEQ ID NO: 415246 - DNA, 15 bp, Homo sapiens
aatcatataaaatat

SEQ ID NO: 415247 - DNA, 15 bp, Homo sapiens
taatcatataaaata

SEQ ID NO: 415248 - DNA, 15 bp, Homo sapiens
ataatcatataaaat

SEQ ID NO: 415249 - DNA, 15 bp, Homo sapiens
tataatcatataaaa

SEQ ID NO: 415250 - DNA, 15 bp, Homo sapiens
atataatcatataaa

SEQ ID NO: 415251 - DNA, 15 bp, Homo sapiens
tatataatcatataa

SEQ ID NO: 415252 - DNA, 15 bp, Homo sapiens
ctatataatcatata

SEQ ID NO: 415253 - DNA, 15 bp, Homo sapiens
gctatataatcatat

SEQ ID NO: 415254 - DNA, 15 bp, Homo sapiens
tgctatataatcata

SEQ ID NO: 415255 - DNA, 15 bp, Homo sapiens
atgctatataatcat

SEQ ID NO: 415256 - DNA, 15 bp, Homo sapiens
catgctatataatca

SEQ ID NO: 415257 - DNA, 15 bp, Homo sapiens
tcatgctatataatc

SEQ ID NO: 415258 - DNA, 15 bp, Homo sapiens
gtcatgctatataat

SEQ ID NO: 415259 - DNA, 15 bp, Homo sapiens
agtcatgctatataa

SEQ ID NO: 415260 - DNA, 15 bp, Homo sapiens
aagtcatgctatata

SEQ ID NO: 415261 - DNA, 15 bp, Homo sapiens
taagtcatgctatat

SEQ ID NO: 415262 - DNA, 15 bp, Homo sapiens
ataagtcatgctata

SEQ ID NO: 415263 - DNA, 15 bp, Homo sapiens
aataagtcatgctat

SEQ ID NO: 415264 - DNA, 15 bp, Homo sapiens
taataagtcatgcta

SEQ ID NO: 415265 - DNA, 15 bp, Homo sapiens
ttaataagtcatgct

SEQ ID NO: 415266 - DNA, 15 bp, Homo sapiens
tttaataagtcatgc

SEQ ID NO: 415267 - DNA, 15 bp, Homo sapiens
atttaataagtcatg

SEQ ID NO: 415268 - DNA, 15 bp, Homo sapiens
tatttaataagtcat

SEQ ID NO: 415269 - DNA, 15 bp, Homo sapiens
atatttaataagtca

SEQ ID NO: 415270 - DNA, 15 bp, Homo sapiens
tatatttaataagtc

SEQ ID NO: 415271 - DNA, 15 bp, Homo sapiens
atatatttaataagt

SEQ ID NO: 415272 - DNA, 15 bp, Homo sapiens
catatatttaataag

SEQ ID NO: 415273 - DNA, 15 bp, Homo sapiens
acatatatttaataa

SEQ ID NO: 415274 - DNA, 15 bp, Homo sapiens
tacatatatttaata

SEQ ID NO: 415275 - DNA, 15 bp, Homo sapiens
ttacatatatttaat

SEQ ID NO: 415276 - DNA, 15 bp, Homo sapiens
attacatatatttaa

SEQ ID NO: 415277 - DNA, 15 bp, Homo sapiens
cattacatatattta

SEQ ID NO: 415278 - DNA, 15 bp, Homo sapiens
tcattacatatattt

SEQ ID NO: 415279 - DNA, 15 bp, Homo sapiens
ttcattacatatatt

SEQ ID NO: 415280 - DNA, 15 bp, Homo sapiens
cttcattacatatat

SEQ ID NO: 415281 - DNA, 15 bp, Homo sapiens
gcttcattacatata

SEQ ID NO: 415282 - DNA, 15 bp, Homo sapiens
tgcttcattacatat

SEQ ID NO: 415283 - DNA, 15 bp, Homo sapiens
atgcttcattacata

SEQ ID NO: 415284 - DNA, 15 bp, Homo sapiens
tatgcttcattacat

SEQ ID NO: 415285 - DNA, 15 bp, Homo sapiens
atatgcttcattaca

SEQ ID NO: 415286 - DNA, 15 bp, Homo sapiens
aatatgcttcattac

SEQ ID NO: 415287 - DNA, 15 bp, Homo sapiens
gaatatgcttcatta

SEQ ID NO: 415288 - DNA, 15 bp, Homo sapiens
agaatatgcttcatt

SEQ ID NO: 415289 - DNA, 15 bp, Homo sapiens
gagaatatgcttcat

SEQ ID NO: 415290 - DNA, 15 bp, Homo sapiens
agagaatatgcttca

SEQ ID NO: 415291 - DNA, 15 bp, Homo sapiens
aagagaatatgcttc

SEQ ID NO: 415292 - DNA, 15 bp, Homo sapiens
taagagaatatgctt

SEQ ID NO: 415293 - DNA, 15 bp, Homo sapiens
ttaagagaatatgct

SEQ ID NO: 415294 - DNA, 15 bp, Homo sapiens
attaagagaatatgc

SEQ ID NO: 415295 - DNA, 15 bp, Homo sapiens
aattaagagaatatg

SEQ ID NO: 415296 - DNA, 15 bp, Homo sapiens
gaattaagagaatat

SEQ ID NO: 415297 - DNA, 15 bp, Homo sapiens
agaattaagagaata

SEQ ID NO: 415298 - DNA, 15 bp, Homo sapiens
gagaattaagagaat

SEQ ID NO: 415299 - DNA, 15 bp, Homo sapiens
tgagaattaagagaa

SEQ ID NO: 415300 - DNA, 15 bp, Homo sapiens
ttgagaattaagaga

SEQ ID NO: 415301 - DNA, 15 bp, Homo sapiens
cttgagaattaagag

SEQ ID NO: 415302 - DNA, 15 bp, Homo sapiens
tcttgagaattaaga

SEQ ID NO: 415303 - DNA, 15 bp, Homo sapiens
ttcttgagaattaag

SEQ ID NO: 415304 - DNA, 15 bp, Homo sapiens
tttcttgagaattaa

SEQ ID NO: 415305 - DNA, 15 bp, Homo sapiens
ctttcttgagaatta

SEQ ID NO: 415306 - DNA, 15 bp, Homo sapiens
tctttcttgagaatt

SEQ ID NO: 415307 - DNA, 15 bp, Homo sapiens
ttctttcttgagaat

SEQ ID NO: 415308 - DNA, 15 bp, Homo sapiens
tttctttcttgagaa

SEQ ID NO: 415309 - DNA, 15 bp, Homo sapiens
ttttctttcttgaga

SEQ ID NO: 415310 - DNA, 15 bp, Homo sapiens
tttttctttcttgag

SEQ ID NO: 415311 - DNA, 15 bp, Homo sapiens
ttttttctttcttga

SEQ ID NO: 415312 - DNA, 15 bp, Homo sapiens
tttttttctttcttg

SEQ ID NO: 415313 - DNA, 15 bp, Homo sapiens
ctttttttctttctt

SEQ ID NO: 415314 - DNA, 15 bp, Homo sapiens
actttttttctttct

SEQ ID NO: 415315 - DNA, 15 bp, Homo sapiens
tactttttttctttc

SEQ ID NO: 415316 - DNA, 15 bp, Homo sapiens
ttactttttttcttt

SEQ ID NO: 415317 - DNA, 15 bp, Homo sapiens
cttactttttttctt

SEQ ID NO: 415318 - DNA, 15 bp, Homo sapiens
gcttactttttttct

SEQ ID NO: 415319 - DNA, 15 bp, Homo sapiens
tgcttactttttttc

SEQ ID NO: 415320 - DNA, 15 bp, Homo sapiens
atgcttacttttttt

SEQ ID NO: 415321 - DNA, 15 bp, Homo sapiens
aatgcttactttttt

SEQ ID NO: 415322 - DNA, 15 bp, Homo sapiens
gaatgcttacttttt

SEQ ID NO: 415323 - DNA, 15 bp, Homo sapiens
tgaatgcttactttt

SEQ ID NO: 415324 - DNA, 15 bp, Homo sapiens
atgaatgcttacttt

SEQ ID NO: 415325 - DNA, 15 bp, Homo sapiens
catgaatgcttactt

SEQ ID NO: 415326 - DNA, 15 bp, Homo sapiens
acatgaatgcttact

SEQ ID NO: 415327 - DNA, 15 bp, Homo sapiens
aacatgaatgcttac

SEQ ID NO: 415328 - DNA, 15 bp, Homo sapiens
aaacatgaatgctta

SEQ ID NO: 415329 - DNA, 15 bp, Homo sapiens
caaacatgaatgctt

SEQ ID NO: 415330 - DNA, 15 bp, Homo sapiens
acaaacatgaatgct

SEQ ID NO: 415331 - DNA, 15 bp, Homo sapiens
aacaaacatgaatgc

SEQ ID NO: 415332 - DNA, 15 bp, Homo sapiens
aaacaaacatgaatg

SEQ ID NO: 415333 - DNA, 15 bp, Homo sapiens
aaaacaaacatgaat

SEQ ID NO: 415334 - DNA, 15 bp, Homo sapiens
caaaacaaacatgaa

SEQ ID NO: 415335 - DNA, 15 bp, Homo sapiens
acaaaacaaacatga

SEQ ID NO: 415336 - DNA, 15 bp, Homo sapiens
cacaaaacaaacatg

SEQ ID NO: 415337 - DNA, 15 bp, Homo sapiens
ccacaaaacaaacat

SEQ ID NO: 415338 - DNA, 15 bp, Homo sapiens
gccacaaaacaaaca

SEQ ID NO: 415339 - DNA, 15 bp, Homo sapiens
agccacaaaacaaac

SEQ ID NO: 415340 - DNA, 15 bp, Homo sapiens
gagccacaaaacaaa

SEQ ID NO: 415341 - DNA, 15 bp, Homo sapiens
tgagccacaaaacaa

SEQ ID NO: 415342 - DNA, 15 bp, Homo sapiens
ctgagccacaaaaca

SEQ ID NO: 415343 - DNA, 15 bp, Homo sapiens
gctgagccacaaaac

SEQ ID NO: 415344 - DNA, 15 bp, Homo sapiens
tgctgagccacaaaa

SEQ ID NO: 415345 - DNA, 15 bp, Homo sapiens
gtgctgagccacaaa

SEQ ID NO: 415346 - DNA, 15 bp, Homo sapiens
tgtgctgagccacaa

SEQ ID NO: 415347 - DNA, 15 bp, Homo sapiens
ctgtgctgagccaca

SEQ ID NO: 415348 - DNA, 15 bp, Homo sapiens
tctgtgctgagccac

SEQ ID NO: 415349 - DNA, 15 bp, Homo sapiens
ttctgtgctgagcca

SEQ ID NO: 415350 - DNA, 15 bp, Homo sapiens
cttctgtgctgagcc

SEQ ID NO: 415351 - DNA, 15 bp, Homo sapiens
gcttctgtgctgagc

SEQ ID NO: 415352 - DNA, 15 bp, Homo sapiens
agcttctgtgctgag

SEQ ID NO: 415353 - DNA, 15 bp, Homo sapiens
tagcttctgtgctga

SEQ ID NO: 415354 - DNA, 15 bp, Homo sapiens
ctagcttctgtgctg

SEQ ID NO: 415355 - DNA, 15 bp, Homo sapiens
cctagcttctgtgct

SEQ ID NO: 415356 - DNA, 15 bp, Homo sapiens
gcctagcttctgtgc

SEQ ID NO: 415357 - DNA, 15 bp, Homo sapiens
ggcctagcttctgtg

SEQ ID NO: 415358 - DNA, 15 bp, Homo sapiens
tggcctagcttctgt

SEQ ID NO: 415359 - DNA, 15 bp, Homo sapiens
ctggcctagcttctg

SEQ ID NO: 415360 - DNA, 15 bp, Homo sapiens
cctggcctagcttct

SEQ ID NO: 415361 - DNA, 15 bp, Homo sapiens
acctggcctagcttc

SEQ ID NO: 415362 - DNA, 15 bp, Homo sapiens
cacctggcctagctt

SEQ ID NO: 415363 - DNA, 15 bp, Homo sapiens
gcacctggcctagct

SEQ ID NO: 415364 - DNA, 15 bp, Homo sapiens
tgcacctggcctagc

SEQ ID NO: 415365 - DNA, 15 bp, Homo sapiens
ctgcacctggcctag

SEQ ID NO: 415366 - DNA, 15 bp, Homo sapiens
tctgcacctggccta

SEQ ID NO: 415367 - DNA, 15 bp, Homo sapiens
ctctgcacctggcct

SEQ ID NO: 415368 - DNA, 15 bp, Homo sapiens
tctctgcacctggcc

SEQ ID NO: 415369 - DNA, 15 bp, Homo sapiens
atctctgcacctggc

SEQ ID NO: 415370 - DNA, 15 bp, Homo sapiens
aatctctgcacctgg

SEQ ID NO: 415371 - DNA, 15 bp, Homo sapiens
aaatctctgcacctg

SEQ ID NO: 415372 - DNA, 15 bp, Homo sapiens
gaaatctctgcacct

SEQ ID NO: 415373 - DNA, 15 bp, Homo sapiens
ggaaatctctgcacc

SEQ ID NO: 415374 - DNA, 15 bp, Homo sapiens
aggaaatctctgcac

SEQ ID NO: 415375 - DNA, 15 bp, Homo sapiens
aaggaaatctctgca

SEQ ID NO: 415376 - DNA, 15 bp, Homo sapiens
caaggaaatctctgc

SEQ ID NO: 415377 - DNA, 15 bp, Homo sapiens
acaaggaaatctctg

SEQ ID NO: 415378 - DNA, 15 bp, Homo sapiens
cacaaggaaatctct

SEQ ID NO: 415379 - DNA, 15 bp, Homo sapiens
tcacaaggaaatctc

SEQ ID NO: 415380 - DNA, 15 bp, Homo sapiens
ctcacaaggaaatct

SEQ ID NO: 415381 - DNA, 15 bp, Homo sapiens
gctcacaaggaaatc

SEQ ID NO: 415382 - DNA, 15 bp, Homo sapiens
tgctcacaaggaaat

SEQ ID NO: 415383 - DNA, 15 bp, Homo sapiens
atgctcacaaggaaa

SEQ ID NO: 415384 - DNA, 15 bp, Homo sapiens
tatgctcacaaggaa

SEQ ID NO: 415385 - DNA, 15 bp, Homo sapiens
atatgctcacaagga

SEQ ID NO: 415386 - DNA, 15 bp, Homo sapiens
catatgctcacaagg

SEQ ID NO: 415387 - DNA, 15 bp, Homo sapiens
ccatatgctcacaag

SEQ ID NO: 415388 - DNA, 15 bp, Homo sapiens
tccatatgctcacaa

SEQ ID NO: 415389 - DNA, 15 bp, Homo sapiens
ctccatatgctcaca

SEQ ID NO: 415390 - DNA, 15 bp, Homo sapiens
cctccatatgctcac

SEQ ID NO: 415391 - DNA, 15 bp, Homo sapiens
gcctccatatgctca

SEQ ID NO: 415392 - DNA, 15 bp, Homo sapiens
tgcctccatatgctc

SEQ ID NO: 415393 - DNA, 15 bp, Homo sapiens
ctgcctccatatgct

SEQ ID NO: 415394 - DNA, 15 bp, Homo sapiens
gctgcctccatatgc

SEQ ID NO: 415395 - DNA, 15 bp, Homo sapiens
tgctgcctccatatg

SEQ ID NO: 415396 - DNA, 15 bp, Homo sapiens
gtgctgcctccatat

SEQ ID NO: 415397 - DNA, 15 bp, Homo sapiens
agtgctgcctccata

SEQ ID NO: 415398 - DNA, 15 bp, Homo sapiens
tagtgctgcctccat

SEQ ID NO: 415399 - DNA, 15 bp, Homo sapiens
ttagtgctgcctcca

SEQ ID NO: 415400 - DNA, 15 bp, Homo sapiens
cttagtgctgcctcc

SEQ ID NO: 415401 - DNA, 15 bp, Homo sapiens
ccttagtgctgcctc

SEQ ID NO: 415402 - DNA, 15 bp, Homo sapiens
gccttagtgctgcct

SEQ ID NO: 415403 - DNA, 15 bp, Homo sapiens
tgccttagtgctgcc

SEQ ID NO: 415404 - DNA, 15 bp, Homo sapiens
ttgccttagtgctgc

SEQ ID NO: 415405 - DNA, 15 bp, Homo sapiens
cttgccttagtgctg

SEQ ID NO: 415406 - DNA, 15 bp, Homo sapiens
gcttgccttagtgct

SEQ ID NO: 415407 - DNA, 15 bp, Homo sapiens
agcttgccttagtgc

SEQ ID NO: 415408 - DNA, 15 bp, Homo sapiens
cagcttgccttagtg

SEQ ID NO: 415409 - DNA, 15 bp, Homo sapiens
ccagcttgccttagt

SEQ ID NO: 415410 - DNA, 15 bp, Homo sapiens
accagcttgccttag

SEQ ID NO: 415411 - DNA, 15 bp, Homo sapiens
caccagcttgcctta

SEQ ID NO: 415412 - DNA, 15 bp, Homo sapiens
ccaccagcttgcctt

SEQ ID NO: 415413 - DNA, 15 bp, Homo sapiens
gccaccagcttgcct

SEQ ID NO: 415414 - DNA, 15 bp, Homo sapiens
agccaccagcttgcc

SEQ ID NO: 415415 - DNA, 15 bp, Homo sapiens
cagccaccagcttgc

SEQ ID NO: 415416 - DNA, 15 bp, Homo sapiens
gcagccaccagcttg

SEQ ID NO: 415417 - DNA, 15 bp, Homo sapiens
ggcagccaccagctt

SEQ ID NO: 415418 - DNA, 15 bp, Homo sapiens
tggcagccaccagct

SEQ ID NO: 415419 - DNA, 15 bp, Homo sapiens
ttggcagccaccagc

SEQ ID NO: 415420 - DNA, 15 bp, Homo sapiens
gttggcagccaccag

SEQ ID NO: 415421 - DNA, 15 bp, Homo sapiens
agttggcagccacca

SEQ ID NO: 415422 - DNA, 15 bp, Homo sapiens
aagttggcagccacc

SEQ ID NO: 415423 - DNA, 15 bp, Homo sapiens
gaagttggcagccac

SEQ ID NO: 415424 - DNA, 15 bp, Homo sapiens
ggaagttggcagcca

SEQ ID NO: 415425 - DNA, 15 bp, Homo sapiens
aggaagttggcagcc

SEQ ID NO: 415426 - DNA, 15 bp, Homo sapiens
caggaagttggcagc

SEQ ID NO: 415427 - DNA, 15 bp, Homo sapiens
ccaggaagttggcag

SEQ ID NO: 415428 - DNA, 15 bp, Homo sapiens
gccaggaagttggca

SEQ ID NO: 415429 - DNA, 15 bp, Homo sapiens
agccaggaagttggc

SEQ ID NO: 415430 - DNA, 15 bp, Homo sapiens
aagccaggaagttgg

SEQ ID NO: 415431 - DNA, 15 bp, Homo sapiens
aaagccaggaagttg

SEQ ID NO: 415432 - DNA, 15 bp, Homo sapiens
caaagccaggaagtt

SEQ ID NO: 415433 - DNA, 15 bp, Homo sapiens
ccaaagccaggaagt

SEQ ID NO: 415434 - DNA, 15 bp, Homo sapiens
accaaagccaggaag

SEQ ID NO: 415435 - DNA, 15 bp, Homo sapiens
aaccaaagccaggaa

SEQ ID NO: 415436 - DNA, 15 bp, Homo sapiens
gaaccaaagccagga

SEQ ID NO: 415437 - DNA, 15 bp, Homo sapiens
ggaaccaaagccagg

SEQ ID NO: 415438 - DNA, 15 bp, Homo sapiens
cggaaccaaagccag

SEQ ID NO: 415439 - DNA, 15 bp, Homo sapiens
gcggaaccaaagcca

SEQ ID NO: 415440 - DNA, 15 bp, Homo sapiens
ggcggaaccaaagcc

SEQ ID NO: 415441 - DNA, 15 bp, Homo sapiens
aggcggaaccaaagc

SEQ ID NO: 415442 - DNA, 15 bp, Homo sapiens
gaggcggaaccaaag

SEQ ID NO: 415443 - DNA, 15 bp, Homo sapiens
ggaggcggaaccaaa

SEQ ID NO: 415444 - DNA, 15 bp, Homo sapiens
gggaggcggaaccaa

SEQ ID NO: 415445 - DNA, 15 bp, Homo sapiens
tgggaggcggaacca

SEQ ID NO: 415446 - DNA, 15 bp, Homo sapiens
atgggaggcggaacc

SEQ ID NO: 415447 - DNA, 15 bp, Homo sapiens
gatgggaggcggaac

SEQ ID NO: 415448 - DNA, 15 bp, Homo sapiens
agatgggaggcggaa

SEQ ID NO: 415449 - DNA, 15 bp, Homo sapiens
gagatgggaggcgga

SEQ ID NO: 415450 - DNA, 15 bp, Homo sapiens
ggagatgggaggcgg

SEQ ID NO: 415451 - DNA, 15 bp, Homo sapiens
aggagatgggaggcg

SEQ ID NO: 415452 - DNA, 15 bp, Homo sapiens
gaggagatgggaggc

SEQ ID NO: 415453 - DNA, 15 bp, Homo sapiens
ggaggagatgggagg

SEQ ID NO: 415454 - DNA, 15 bp, Homo sapiens
aggaggagatgggag

SEQ ID NO: 415455 - DNA, 15 bp, Homo sapiens
aaggaggagatggga

SEQ ID NO: 415456 - DNA, 15 bp, Homo sapiens
taaggaggagatggg

SEQ ID NO: 415457 - DNA, 15 bp, Homo sapiens
ataaggaggagatgg

SEQ ID NO: 415458 - DNA, 15 bp, Homo sapiens
aataaggaggagatg

SEQ ID NO: 415459 - DNA, 15 bp, Homo sapiens
taataaggaggagat

SEQ ID NO: 415460 - DNA, 15 bp, Homo sapiens
ttaataaggaggaga

SEQ ID NO: 415461 - DNA, 15 bp, Homo sapiens
gttaataaggaggag

SEQ ID NO: 415462 - DNA, 15 bp, Homo sapiens
tgttaataaggagga

SEQ ID NO: 415463 - DNA, 15 bp, Homo sapiens
ttgttaataaggagg

SEQ ID NO: 415464 - DNA, 15 bp, Homo sapiens
tttgttaataaggag

SEQ ID NO: 415465 - DNA, 15 bp, Homo sapiens
gtttgttaataagga

SEQ ID NO: 415466 - DNA, 15 bp, Homo sapiens
cgtttgttaataagg

SEQ ID NO: 415467 - DNA, 15 bp, Homo sapiens
tcgtttgttaataag

SEQ ID NO: 415468 - DNA, 15 bp, Homo sapiens
gtcgtttgttaataa

SEQ ID NO: 415469 - DNA, 15 bp, Homo sapiens
tgtcgtttgttaata

SEQ ID NO: 415470 - DNA, 15 bp, Homo sapiens
ttgtcgtttgttaat

SEQ ID NO: 415471 - DNA, 15 bp, Homo sapiens
attgtcgtttgttaa

SEQ ID NO: 415472 - DNA, 15 bp, Homo sapiens
tattgtcgtttgtta

SEQ ID NO: 415473 - DNA, 15 bp, Homo sapiens
ttattgtcgtttgtt

SEQ ID NO: 415474 - DNA, 15 bp, Homo sapiens
attattgtcgtttgt

SEQ ID NO: 415475 - DNA, 15 bp, Homo sapiens
gattattgtcgtttg

SEQ ID NO: 415476 - DNA, 15 bp, Homo sapiens
tgattattgtcgttt

SEQ ID NO: 415477 - DNA, 15 bp, Homo sapiens
ttgattattgtcgtt

SEQ ID NO: 415478 - DNA, 15 bp, Homo sapiens
tttgattattgtcgt

SEQ ID NO: 415479 - DNA, 15 bp, Homo sapiens
ctttgattattgtcg

SEQ ID NO: 415480 - DNA, 15 bp, Homo sapiens
tctttgattattgtc

SEQ ID NO: 415481 - DNA, 15 bp, Homo sapiens
ttctttgattattgt

SEQ ID NO: 415482 - DNA, 15 bp, Homo sapiens
tttctttgattattg

SEQ ID NO: 415483 - DNA, 15 bp, Homo sapiens
ttttctttgattatt

SEQ ID NO: 415484 - DNA, 15 bp, Homo sapiens
tttttctttgattat

SEQ ID NO: 415485 - DNA, 15 bp, Homo sapiens
ctttttctttgatta

SEQ ID NO: 415486 - DNA, 15 bp, Homo sapiens
cctttttctttgatt

SEQ ID NO: 415487 - DNA, 15 bp, Homo sapiens
tcctttttctttgat

SEQ ID NO: 415488 - DNA, 15 bp, Homo sapiens
ttcctttttctttga

SEQ ID NO: 415489 - DNA, 15 bp, Homo sapiens
cttcctttttctttg

SEQ ID NO: 415490 - DNA, 15 bp, Homo sapiens
gcttcctttttcttt

SEQ ID NO: 415491 - DNA, 15 bp, Homo sapiens
agcttcctttttctt

SEQ ID NO: 415492 - DNA, 15 bp, Homo sapiens
cagcttcctttttct

SEQ ID NO: 415493 - DNA, 15 bp, Homo sapiens
tcagcttcctttttc

SEQ ID NO: 415494 - DNA, 15 bp, Homo sapiens
ttcagcttccttttt

SEQ ID NO: 415495 - DNA, 15 bp, Homo sapiens
tttcagcttcctttt

SEQ ID NO: 415496 - DNA, 15 bp, Homo sapiens
gtttcagcttccttt

SEQ ID NO: 415497 - DNA, 15 bp, Homo sapiens
tgtttcagcttcctt

SEQ ID NO: 415498 - DNA, 15 bp, Homo sapiens
atgtttcagcttcct

SEQ ID NO: 415499 - DNA, 15 bp, Homo sapiens
aatgtttcagcttcc

SEQ ID NO: 415500 - DNA, 15 bp, Homo sapiens
taatgtttcagcttc

SEQ ID NO: 415501 - DNA, 15 bp, Homo sapiens
ataatgtttcagctt

SEQ ID NO: 415502 - DNA, 15 bp, Homo sapiens
aataatgtttcagct

SEQ ID NO: 415503 - DNA, 15 bp, Homo sapiens
aaataatgtttcagc

SEQ ID NO: 415504 - DNA, 15 bp, Homo sapiens
caaataatgtttcag

SEQ ID NO: 415505 - DNA, 15 bp, Homo sapiens
tcaaataatgtttca

SEQ ID NO: 415506 - DNA, 15 bp, Homo sapiens
ctcaaataatgtttc

SEQ ID NO: 415507 - DNA, 15 bp, Homo sapiens
gctcaaataatgttt

SEQ ID NO: 415508 - DNA, 15 bp, Homo sapiens
tgctcaaataatgtt

SEQ ID NO: 415509 - DNA, 15 bp, Homo sapiens
atgctcaaataatgt

SEQ ID NO: 415510 - DNA, 15 bp, Homo sapiens
catgctcaaataatg

SEQ ID NO: 415511 - DNA, 15 bp, Homo sapiens
acatgctcaaataat

SEQ ID NO: 415512 - DNA, 15 bp, Homo sapiens
tacatgctcaaataa

SEQ ID NO: 415513 - DNA, 15 bp, Homo sapiens
atacatgctcaaata

SEQ ID NO: 415514 - DNA, 15 bp, Homo sapiens
catacatgctcaaat

SEQ ID NO: 415515 - DNA, 15 bp, Homo sapiens
acatacatgctcaaa

SEQ ID NO: 415516 - DNA, 15 bp, Homo sapiens
tacatacatgctcaa

SEQ ID NO: 415517 - DNA, 15 bp, Homo sapiens
ctacatacatgctca

SEQ ID NO: 415518 - DNA, 15 bp, Homo sapiens
tctacatacatgctc

SEQ ID NO: 415519 - DNA, 15 bp, Homo sapiens
ctctacatacatgct

SEQ ID NO: 415520 - DNA, 15 bp, Homo sapiens
cctctacatacatgc

SEQ ID NO: 415521 - DNA, 15 bp, Homo sapiens
tcctctacatacatg

SEQ ID NO: 415522 - DNA, 15 bp, Homo sapiens
gtcctctacatacat

SEQ ID NO: 415523 - DNA, 15 bp, Homo sapiens
tgtcctctacataca

SEQ ID NO: 415524 - DNA, 15 bp, Homo sapiens
atgtcctctacatac

SEQ ID NO: 415525 - DNA, 15 bp, Homo sapiens
tatgtcctctacata

SEQ ID NO: 415526 - DNA, 15 bp, Homo sapiens
ctatgtcctctacat

SEQ ID NO: 415527 - DNA, 15 bp, Homo sapiens
cctatgtcctctaca

SEQ ID NO: 415528 - DNA, 15 bp, Homo sapiens
gcctatgtcctctac

SEQ ID NO: 415529 - DNA, 15 bp, Homo sapiens
tgcctatgtcctcta

SEQ ID NO: 415530 - DNA, 15 bp, Homo sapiens
atgcctatgtcctct

SEQ ID NO: 415531 - DNA, 15 bp, Homo sapiens
aatgcctatgtcctc

SEQ ID NO: 415532 - DNA, 15 bp, Homo sapiens
aaatgcctatgtcct

SEQ ID NO: 415533 - DNA, 15 bp, Homo sapiens
caaatgcctatgtcc

SEQ ID NO: 415534 - DNA, 15 bp, Homo sapiens
ccaaatgcctatgtc

SEQ ID NO: 415535 - DNA, 15 bp, Homo sapiens
accaaatgcctatgt

SEQ ID NO: 415536 - DNA, 15 bp, Homo sapiens
taccaaatgcctatg

SEQ ID NO: 415537 - DNA, 15 bp, Homo sapiens
ctaccaaatgcctat

SEQ ID NO: 415538 - DNA, 15 bp, Homo sapiens
tctaccaaatgccta

SEQ ID NO: 415539 - DNA, 15 bp, Homo sapiens
ttctaccaaatgcct

SEQ ID NO: 415540 - DNA, 15 bp, Homo sapiens
attctaccaaatgcc

SEQ ID NO: 415541 - DNA, 15 bp, Homo sapiens
tattctaccaaatgc

SEQ ID NO: 415542 - DNA, 15 bp, Homo sapiens
atattctaccaaatg

SEQ ID NO: 415543 - DNA, 15 bp, Homo sapiens
gatattctaccaaat

SEQ ID NO: 415544 - DNA, 15 bp, Homo sapiens
tgatattctaccaaa

SEQ ID NO: 415545 - DNA, 15 bp, Homo sapiens
atgatattctaccaa

SEQ ID NO: 415546 - DNA, 15 bp, Homo sapiens
tatgatattctacca

SEQ ID NO: 415547 - DNA, 15 bp, Homo sapiens
ctatgatattctacc

SEQ ID NO: 415548 - DNA, 15 bp, Homo sapiens
tctatgatattctac

SEQ ID NO: 415549 - DNA, 15 bp, Homo sapiens
gtctatgatattcta

SEQ ID NO: 415550 - DNA, 15 bp, Homo sapiens
tgtctatgatattct

SEQ ID NO: 415551 - DNA, 15 bp, Homo sapiens
atgtctatgatattc

SEQ ID NO: 415552 - DNA, 15 bp, Homo sapiens
gatgtctatgatatt

SEQ ID NO: 415553 - DNA, 15 bp, Homo sapiens
ggatgtctatgatat

SEQ ID NO: 415554 - DNA, 15 bp, Homo sapiens
tggatgtctatgata

SEQ ID NO: 415555 - DNA, 15 bp, Homo sapiens
ttggatgtctatgat

SEQ ID NO: 415556 - DNA, 15 bp, Homo sapiens
tttggatgtctatga

SEQ ID NO: 415557 - DNA, 15 bp, Homo sapiens
atttggatgtctatg

SEQ ID NO: 415558 - DNA, 15 bp, Homo sapiens
tatttggatgtctat

SEQ ID NO: 415559 - DNA, 15 bp, Homo sapiens
gtatttggatgtcta

SEQ ID NO: 415560 - DNA, 15 bp, Homo sapiens
agtatttggatgtct

SEQ ID NO: 415561 - DNA, 15 bp, Homo sapiens
aagtatttggatgtc

SEQ ID NO: 415562 - DNA, 15 bp, Homo sapiens
caagtatttggatgt

SEQ ID NO: 415563 - DNA, 15 bp, Homo sapiens
tcaagtatttggatg

SEQ ID NO: 415564 - DNA, 15 bp, Homo sapiens
ctcaagtatttggat

SEQ ID NO: 415565 - DNA, 15 bp, Homo sapiens
actcaagtatttgga

SEQ ID NO: 415566 - DNA, 15 bp, Homo sapiens
gactcaagtatttgg

SEQ ID NO: 415567 - DNA, 15 bp, Homo sapiens
agactcaagtatttg

SEQ ID NO: 415568 - DNA, 15 bp, Homo sapiens
cagactcaagtattt

SEQ ID NO: 415569 - DNA, 15 bp, Homo sapiens
tcagactcaagtatt

SEQ ID NO: 415570 - DNA, 15 bp, Homo sapiens
ctcagactcaagtat

SEQ ID NO: 415571 - DNA, 15 bp, Homo sapiens
tctcagactcaagta

SEQ ID NO: 415572 - DNA, 15 bp, Homo sapiens
atctcagactcaagt

SEQ ID NO: 415573 - DNA, 15 bp, Homo sapiens
aatctcagactcaag

SEQ ID NO: 415574 - DNA, 15 bp, Homo sapiens
gaatctcagactcaa

SEQ ID NO: 415575 - DNA, 15 bp, Homo sapiens
agaatctcagactca

SEQ ID NO: 415576 - DNA, 15 bp, Homo sapiens
tagaatctcagactc

SEQ ID NO: 415577 - DNA, 15 bp, Homo sapiens
ttagaatctcagact

SEQ ID NO: 415578 - DNA, 15 bp, Homo sapiens
tttagaatctcagac

SEQ ID NO: 415579 - DNA, 15 bp, Homo sapiens
atttagaatctcaga

SEQ ID NO: 415580 - DNA, 15 bp, Homo sapiens
aatttagaatctcag

SEQ ID NO: 415581 - DNA, 15 bp, Homo sapiens
gaatttagaatctca

SEQ ID NO: 415582 - DNA, 15 bp, Homo sapiens
tgaatttagaatctc

SEQ ID NO: 415583 - DNA, 15 bp, Homo sapiens
ctgaatttagaatct

SEQ ID NO: 415584 - DNA, 15 bp, Homo sapiens
actgaatttagaatc

SEQ ID NO: 415585 - DNA, 15 bp, Homo sapiens
tactgaatttagaat

SEQ ID NO: 415586 - DNA, 15 bp, Homo sapiens
ctactgaatttagaa

SEQ ID NO: 415587 - DNA, 15 bp, Homo sapiens
gctactgaatttaga

SEQ ID NO: 415588 - DNA, 15 bp, Homo sapiens
tgctactgaatttag

SEQ ID NO: 415589 - DNA, 15 bp, Homo sapiens
ttgctactgaattta

SEQ ID NO: 415590 - DNA, 15 bp, Homo sapiens
tttgctactgaattt

SEQ ID NO: 415591 - DNA, 15 bp, Homo sapiens
ttttgctactgaatt

SEQ ID NO: 415592 - DNA, 15 bp, Homo sapiens
tttttgctactgaat

SEQ ID NO: 415593 - DNA, 15 bp, Homo sapiens
atttttgctactgaa

SEQ ID NO: 415594 - DNA, 15 bp, Homo sapiens
catttttgctactga

SEQ ID NO: 415595 - DNA, 15 bp, Homo sapiens
gcatttttgctactg

SEQ ID NO: 415596 - DNA, 15 bp, Homo sapiens
agcatttttgctact

SEQ ID NO: 415597 - DNA, 15 bp, Homo sapiens
tagcatttttgctac

SEQ ID NO: 415598 - DNA, 15 bp, Homo sapiens
gtagcatttttgcta

SEQ ID NO: 415599 - DNA, 15 bp, Homo sapiens
agtagcatttttgct

SEQ ID NO: 415600 - DNA, 15 bp, Homo sapiens
aagtagcatttttgc

SEQ ID NO: 415601 - DNA, 15 bp, Homo sapiens
aaagtagcatttttg

SEQ ID NO: 415602 - DNA, 15 bp, Homo sapiens
aaaagtagcattttt

SEQ ID NO: 415603 - DNA, 15 bp, Homo sapiens
aaaaagtagcatttt

SEQ ID NO: 415604 - DNA, 15 bp, Homo sapiens
taaaaagtagcattt

SEQ ID NO: 415605 - DNA, 15 bp, Homo sapiens
gtaaaaagtagcatt

SEQ ID NO: 415606 - DNA, 15 bp, Homo sapiens
agtaaaaagtagcat

SEQ ID NO: 415607 - DNA, 15 bp, Homo sapiens
gagtaaaaagtagca

SEQ ID NO: 415608 - DNA, 15 bp, Homo sapiens
agagtaaaaagtagc

SEQ ID NO: 415609 - DNA, 15 bp, Homo sapiens
tagagtaaaaagtag

SEQ ID NO: 415610 - DNA, 15 bp, Homo sapiens
ttagagtaaaaagta

SEQ ID NO: 415611 - DNA, 15 bp, Homo sapiens
gttagagtaaaaagt

SEQ ID NO: 415612 - DNA, 15 bp, Homo sapiens
tgttagagtaaaaag

SEQ ID NO: 415613 - DNA, 15 bp, Homo sapiens
gtgttagagtaaaaa

SEQ ID NO: 415614 - DNA, 15 bp, Homo sapiens
agtgttagagtaaaa

SEQ ID NO: 415615 - DNA, 15 bp, Homo sapiens
tagtgttagagtaaa

SEQ ID NO: 415616 - DNA, 15 bp, Homo sapiens
atagtgttagagtaa

SEQ ID NO: 415617 - DNA, 15 bp, Homo sapiens
catagtgttagagta

SEQ ID NO: 415618 - DNA, 15 bp, Homo sapiens
acatagtgttagagt

SEQ ID NO: 415619 - DNA, 15 bp, Homo sapiens
tacatagtgttagag

SEQ ID NO: 415620 - DNA, 15 bp, Homo sapiens
ctacatagtgttaga

SEQ ID NO: 415621 - DNA, 15 bp, Homo sapiens
actacatagtgttag

SEQ ID NO: 415622 - DNA, 15 bp, Homo sapiens
gactacatagtgtta

SEQ ID NO: 415623 - DNA, 15 bp, Homo sapiens
tgactacatagtgtt

SEQ ID NO: 415624 - DNA, 15 bp, Homo sapiens
ttgactacatagtgt

SEQ ID NO: 415625 - DNA, 15 bp, Homo sapiens
attgactacatagtg

SEQ ID NO: 415626 - DNA, 15 bp, Homo sapiens
gattgactacatagt

SEQ ID NO: 415627 - DNA, 15 bp, Homo sapiens
tgattgactacatag

SEQ ID NO: 415628 - DNA, 15 bp, Homo sapiens
atgattgactacata

SEQ ID NO: 415629 - DNA, 15 bp, Homo sapiens
tatgattgactacat

SEQ ID NO: 415630 - DNA, 15 bp, Homo sapiens
ctatgattgactaca

SEQ ID NO: 415631 - DNA, 15 bp, Homo sapiens
actatgattgactac

SEQ ID NO: 415632 - DNA, 15 bp, Homo sapiens
aactatgattgacta

SEQ ID NO: 415633 - DNA, 15 bp, Homo sapiens
gaactatgattgact

SEQ ID NO: 415634 - DNA, 15 bp, Homo sapiens
tgaactatgattgac

SEQ ID NO: 415635 - DNA, 15 bp, Homo sapiens
ctgaactatgattga

SEQ ID NO: 415636 - DNA, 15 bp, Homo sapiens
cctgaactatgattg

SEQ ID NO: 415637 - DNA, 15 bp, Homo sapiens
gcctgaactatgatt

SEQ ID NO: 415638 - DNA, 15 bp, Homo sapiens
tgcctgaactatgat

SEQ ID NO: 415639 - DNA, 15 bp, Homo sapiens
gtgcctgaactatga

SEQ ID NO: 415640 - DNA, 15 bp, Homo sapiens
tgtgcctgaactatg

SEQ ID NO: 415641 - DNA, 15 bp, Homo sapiens
ctgtgcctgaactat

SEQ ID NO: 415642 - DNA, 15 bp, Homo sapiens
cctgtgcctgaacta

SEQ ID NO: 415643 - DNA, 15 bp, Homo sapiens
gcctgtgcctgaact

SEQ ID NO: 415644 - DNA, 15 bp, Homo sapiens
agcctgtgcctgaac

SEQ ID NO: 415645 - DNA, 15 bp, Homo sapiens
tagcctgtgcctgaa

SEQ ID NO: 415646 - DNA, 15 bp, Homo sapiens
ttagcctgtgcctga

SEQ ID NO: 415647 - DNA, 15 bp, Homo sapiens
cttagcctgtgcctg

SEQ ID NO: 415648 - DNA, 15 bp, Homo sapiens
tcttagcctgtgcct

SEQ ID NO: 415649 - DNA, 15 bp, Homo sapiens
ttcttagcctgtgcc

SEQ ID NO: 415650 - DNA, 15 bp, Homo sapiens
tttcttagcctgtgc

SEQ ID NO: 415651 - DNA, 15 bp, Homo sapiens
gtttcttagcctgtg

SEQ ID NO: 415652 - DNA, 15 bp, Homo sapiens
ggtttcttagcctgt

SEQ ID NO: 415653 - DNA, 15 bp, Homo sapiens
tggtttcttagcctg

SEQ ID NO: 415654 - DNA, 15 bp, Homo sapiens
ctggtttcttagcct

SEQ ID NO: 415655 - DNA, 15 bp, Homo sapiens
gctggtttcttagcc

SEQ ID NO: 415656 - DNA, 15 bp, Homo sapiens
tgctggtttcttagc

SEQ ID NO: 415657 - DNA, 15 bp, Homo sapiens
ctgctggtttcttag

SEQ ID NO: 415658 - DNA, 15 bp, Homo sapiens
tctgctggtttctta

SEQ ID NO: 415659 - DNA, 15 bp, Homo sapiens
atctgctggtttctt

SEQ ID NO: 415660 - DNA, 15 bp, Homo sapiens
aatctgctggtttct

SEQ ID NO: 415661 - DNA, 15 bp, Homo sapiens
aaatctgctggtttc

SEQ ID NO: 415662 - DNA, 15 bp, Homo sapiens
aaaatctgctggttt

SEQ ID NO: 415663 - DNA, 15 bp, Homo sapiens
gaaaatctgctggtt

SEQ ID NO: 415664 - DNA, 15 bp, Homo sapiens
ggaaaatctgctggt

SEQ ID NO: 415665 - DNA, 15 bp, Homo sapiens
tggaaaatctgctgg

SEQ ID NO: 415666 - DNA, 15 bp, Homo sapiens
ttggaaaatctgctg

SEQ ID NO: 415667 - DNA, 15 bp, Homo sapiens
attggaaaatctgct

SEQ ID NO: 415668 - DNA, 15 bp, Homo sapiens
aattggaaaatctgc

SEQ ID NO: 415669 - DNA, 15 bp, Homo sapiens
gaattggaaaatctg

SEQ ID NO: 415670 - DNA, 15 bp, Homo sapiens
ggaattggaaaatct

SEQ ID NO: 415671 - DNA, 15 bp, Homo sapiens
aggaattggaaaatc

SEQ ID NO: 415672 - DNA, 15 bp, Homo sapiens
taggaattggaaaat

SEQ ID NO: 415673 - DNA, 15 bp, Homo sapiens
ctaggaattggaaaa

SEQ ID NO: 415674 - DNA, 15 bp, Homo sapiens
tctaggaattggaaa

SEQ ID NO: 415675 - DNA, 15 bp, Homo sapiens
ttctaggaattggaa

SEQ ID NO: 415676 - DNA, 15 bp, Homo sapiens
tttctaggaattgga

SEQ ID NO: 415677 - DNA, 15 bp, Homo sapiens
ttttctaggaattgg

SEQ ID NO: 415678 - DNA, 15 bp, Homo sapiens
tttttctaggaattg

SEQ ID NO: 415679 - DNA, 15 bp, Homo sapiens
atttttctaggaatt

SEQ ID NO: 415680 - DNA, 15 bp, Homo sapiens
catttttctaggaat

SEQ ID NO: 415681 - DNA, 15 bp, Homo sapiens
tcatttttctaggaa

SEQ ID NO: 415682 - DNA, 15 bp, Homo sapiens
gtcatttttctagga

SEQ ID NO: 415683 - DNA, 15 bp, Homo sapiens
ggtcatttttctagg

SEQ ID NO: 415684 - DNA, 15 bp, Homo sapiens
aggtcatttttctag

SEQ ID NO: 415685 - DNA, 15 bp, Homo sapiens
taggtcatttttcta

SEQ ID NO: 415686 - DNA, 15 bp, Homo sapiens
ctaggtcatttttct

SEQ ID NO: 415687 - DNA, 15 bp, Homo sapiens
cctaggtcatttttc

SEQ ID NO: 415688 - DNA, 15 bp, Homo sapiens
ccctaggtcattttt

SEQ ID NO: 415689 - DNA, 15 bp, Homo sapiens
tccctaggtcatttt

SEQ ID NO: 415690 - DNA, 15 bp, Homo sapiens
ttccctaggtcattt

SEQ ID NO: 415691 - DNA, 15 bp, Homo sapiens
attccctaggtcatt

SEQ ID NO: 415692 - DNA, 15 bp, Homo sapiens
tattccctaggtcat

SEQ ID NO: 415693 - DNA, 15 bp, Homo sapiens
ctattccctaggtca

SEQ ID NO: 415694 - DNA, 15 bp, Homo sapiens
gctattccctaggtc

SEQ ID NO: 415695 - DNA, 15 bp, Homo sapiens
tgctattccctaggt

SEQ ID NO: 415696 - DNA, 15 bp, Homo sapiens
gtgctattccctagg

SEQ ID NO: 415697 - DNA, 15 bp, Homo sapiens
agtgctattccctag

SEQ ID NO: 415698 - DNA, 15 bp, Homo sapiens
aagtgctattcccta

SEQ ID NO: 415699 - DNA, 15 bp, Homo sapiens
taagtgctattccct

SEQ ID NO: 415700 - DNA, 15 bp, Homo sapiens
gtaagtgctattccc

SEQ ID NO: 415701 - DNA, 15 bp, Homo sapiens
ggtaagtgctattcc

SEQ ID NO: 415702 - DNA, 15 bp, Homo sapiens
tggtaagtgctattc

SEQ ID NO: 415703 - DNA, 15 bp, Homo sapiens
atggtaagtgctatt

SEQ ID NO: 415704 - DNA, 15 bp, Homo sapiens
gatggtaagtgctat

SEQ ID NO: 415705 - DNA, 15 bp, Homo sapiens
agatggtaagtgcta

SEQ ID NO: 415706 - DNA, 15 bp, Homo sapiens
aagatggtaagtgct

SEQ ID NO: 415707 - DNA, 15 bp, Homo sapiens
aaagatggtaagtgc

SEQ ID NO: 415708 - DNA, 15 bp, Homo sapiens
taaagatggtaagtg

SEQ ID NO: 415709 - DNA, 15 bp, Homo sapiens
ctaaagatggtaagt

SEQ ID NO: 415710 - DNA, 15 bp, Homo sapiens
cctaaagatggtaag

SEQ ID NO: 415711 - DNA, 15 bp, Homo sapiens
acctaaagatggtaa

SEQ ID NO: 415712 - DNA, 15 bp, Homo sapiens
tacctaaagatggta

SEQ ID NO: 415713 - DNA, 15 bp, Homo sapiens
atacctaaagatggt

SEQ ID NO: 415714 - DNA, 15 bp, Homo sapiens
aatacctaaagatgg

SEQ ID NO: 415715 - DNA, 15 bp, Homo sapiens
taatacctaaagatg

SEQ ID NO: 415716 - DNA, 15 bp, Homo sapiens
ctaatacctaaagat

SEQ ID NO: 415717 - DNA, 15 bp, Homo sapiens
actaatacctaaaga

SEQ ID NO: 415718 - DNA, 15 bp, Homo sapiens
aactaatacctaaag

SEQ ID NO: 415719 - DNA, 15 bp, Homo sapiens
aaactaatacctaaa

SEQ ID NO: 415720 - DNA, 15 bp, Homo sapiens
gaaactaatacctaa

SEQ ID NO: 415721 - DNA, 15 bp, Homo sapiens
agaaactaataccta

SEQ ID NO: 415722 - DNA, 15 bp, Homo sapiens
aagaaactaatacct

SEQ ID NO: 415723 - DNA, 15 bp, Homo sapiens
gaagaaactaatacc

SEQ ID NO: 415724 - DNA, 15 bp, Homo sapiens
tgaagaaactaatac

SEQ ID NO: 415725 - DNA, 15 bp, Homo sapiens
atgaagaaactaata

SEQ ID NO: 415726 - DNA, 15 bp, Homo sapiens
gatgaagaaactaat

SEQ ID NO: 415727 - DNA, 15 bp, Homo sapiens
agatgaagaaactaa

SEQ ID NO: 415728 - DNA, 15 bp, Homo sapiens
cagatgaagaaacta

SEQ ID NO: 415729 - DNA, 15 bp, Homo sapiens
acagatgaagaaact

SEQ ID NO: 415730 - DNA, 15 bp, Homo sapiens
aacagatgaagaaac

SEQ ID NO: 415731 - DNA, 15 bp, Homo sapiens
aaacagatgaagaaa

SEQ ID NO: 415732 - DNA, 15 bp, Homo sapiens
aaaacagatgaagaa

SEQ ID NO: 415733 - DNA, 15 bp, Homo sapiens
taaaacagatgaaga

SEQ ID NO: 415734 - DNA, 15 bp, Homo sapiens
ctaaaacagatgaag

SEQ ID NO: 415735 - DNA, 15 bp, Homo sapiens
actaaaacagatgaa

SEQ ID NO: 415736 - DNA, 15 bp, Homo sapiens
gactaaaacagatga

SEQ ID NO: 415737 - DNA, 15 bp, Homo sapiens
tgactaaaacagatg

SEQ ID NO: 415738 - DNA, 15 bp, Homo sapiens
atgactaaaacagat

SEQ ID NO: 415739 - DNA, 15 bp, Homo sapiens
catgactaaaacaga

SEQ ID NO: 415740 - DNA, 15 bp, Homo sapiens
gcatgactaaaacag

SEQ ID NO: 415741 - DNA, 15 bp, Homo sapiens
ggcatgactaaaaca

SEQ ID NO: 415742 - DNA, 15 bp, Homo sapiens
aggcatgactaaaac

SEQ ID NO: 415743 - DNA, 15 bp, Homo sapiens
aaggcatgactaaaa

SEQ ID NO: 415744 - DNA, 15 bp, Homo sapiens
caaggcatgactaaa

SEQ ID NO: 415745 - DNA, 15 bp, Homo sapiens
acaaggcatgactaa

SEQ ID NO: 415746 - DNA, 15 bp, Homo sapiens
cacaaggcatgacta

SEQ ID NO: 415747 - DNA, 15 bp, Homo sapiens
acacaaggcatgact

SEQ ID NO: 415748 - DNA, 15 bp, Homo sapiens
aacacaaggcatgac

SEQ ID NO: 415749 - DNA, 15 bp, Homo sapiens
taacacaaggcatga

SEQ ID NO: 415750 - DNA, 15 bp, Homo sapiens
ctaacacaaggcatg

SEQ ID NO: 415751 - DNA, 15 bp, Homo sapiens
actaacacaaggcat

SEQ ID NO: 415752 - DNA, 15 bp, Homo sapiens
cactaacacaaggca

SEQ ID NO: 415753 - DNA, 15 bp, Homo sapiens
tcactaacacaaggc

SEQ ID NO: 415754 - DNA, 15 bp, Homo sapiens
atcactaacacaagg

SEQ ID NO: 415755 - DNA, 15 bp, Homo sapiens
gatcactaacacaag

SEQ ID NO: 415756 - DNA, 15 bp, Homo sapiens
agatcactaacacaa

SEQ ID NO: 415757 - DNA, 15 bp, Homo sapiens
aagatcactaacaca

SEQ ID NO: 415758 - DNA, 15 bp, Homo sapiens
aaagatcactaacac

SEQ ID NO: 415759 - DNA, 15 bp, Homo sapiens
taaagatcactaaca

SEQ ID NO: 415760 - DNA, 15 bp, Homo sapiens
ttaaagatcactaac

SEQ ID NO: 415761 - DNA, 15 bp, Homo sapiens
cttaaagatcactaa

SEQ ID NO: 415762 - DNA, 15 bp, Homo sapiens
gcttaaagatcacta

SEQ ID NO: 415763 - DNA, 15 bp, Homo sapiens
agcttaaagatcact

SEQ ID NO: 415764 - DNA, 15 bp, Homo sapiens
cagcttaaagatcac

SEQ ID NO: 415765 - DNA, 15 bp, Homo sapiens
ccagcttaaagatca

SEQ ID NO: 415766 - DNA, 15 bp, Homo sapiens
tccagcttaaagatc

SEQ ID NO: 415767 - DNA, 15 bp, Homo sapiens
ctccagcttaaagat

SEQ ID NO: 415768 - DNA, 15 bp, Homo sapiens
gctccagcttaaaga

SEQ ID NO: 415769 - DNA, 15 bp, Homo sapiens
tgctccagcttaaag

SEQ ID NO: 415770 - DNA, 15 bp, Homo sapiens
ctgctccagcttaaa

SEQ ID NO: 415771 - DNA, 15 bp, Homo sapiens
tctgctccagcttaa

SEQ ID NO: 415772 - DNA, 15 bp, Homo sapiens
atctgctccagctta

SEQ ID NO: 415773 - DNA, 15 bp, Homo sapiens
gatctgctccagctt

SEQ ID NO: 415774 - DNA, 15 bp, Homo sapiens
tgatctgctccagct

SEQ ID NO: 415775 - DNA, 15 bp, Homo sapiens
ttgatctgctccagc

SEQ ID NO: 415776 - DNA, 15 bp, Homo sapiens
attgatctgctccag

SEQ ID NO: 415777 - DNA, 15 bp, Homo sapiens
aattgatctgctcca

SEQ ID NO: 415778 - DNA, 15 bp, Homo sapiens
gaattgatctgctcc

SEQ ID NO: 415779 - DNA, 15 bp, Homo sapiens
ggaattgatctgctc

SEQ ID NO: 415780 - DNA, 15 bp, Homo sapiens
gggaattgatctgct

SEQ ID NO: 415781 - DNA, 15 bp, Homo sapiens
tgggaattgatctgc

SEQ ID NO: 415782 - DNA, 15 bp, Homo sapiens
atgggaattgatctg

SEQ ID NO: 415783 - DNA, 15 bp, Homo sapiens
catgggaattgatct

SEQ ID NO: 415784 - DNA, 15 bp, Homo sapiens
acatgggaattgatc

SEQ ID NO: 415785 - DNA, 15 bp, Homo sapiens
cacatgggaattgat

SEQ ID NO: 415786 - DNA, 15 bp, Homo sapiens
acacatgggaattga

SEQ ID NO: 415787 - DNA, 15 bp, Homo sapiens
aacacatgggaattg

SEQ ID NO: 415788 - DNA, 15 bp, Homo sapiens
taacacatgggaatt

SEQ ID NO: 415789 - DNA, 15 bp, Homo sapiens
ctaacacatgggaat

SEQ ID NO: 415790 - DNA, 15 bp, Homo sapiens
tctaacacatgggaa

SEQ ID NO: 415791 - DNA, 15 bp, Homo sapiens
ttctaacacatggga

SEQ ID NO: 415792 - DNA, 15 bp, Homo sapiens
tttctaacacatggg

SEQ ID NO: 415793 - DNA, 15 bp, Homo sapiens
ctttctaacacatgg

SEQ ID NO: 415794 - DNA, 15 bp, Homo sapiens
tctttctaacacatg

SEQ ID NO: 415795 - DNA, 15 bp, Homo sapiens
atctttctaacacat

SEQ ID NO: 415796 - DNA, 15 bp, Homo sapiens
catctttctaacaca

SEQ ID NO: 415797 - DNA, 15 bp, Homo sapiens
tcatctttctaacac

SEQ ID NO: 415798 - DNA, 15 bp, Homo sapiens
gtcatctttctaaca

SEQ ID NO: 415799 - DNA, 15 bp, Homo sapiens
agtcatctttctaac

SEQ ID NO: 415800 - DNA, 15 bp, Homo sapiens
gagtcatctttctaa

SEQ ID NO: 415801 - DNA, 15 bp, Homo sapiens
tgagtcatctttcta

SEQ ID NO: 415802 - DNA, 15 bp, Homo sapiens
ctgagtcatctttct

SEQ ID NO: 415803 - DNA, 15 bp, Homo sapiens
cctgagtcatctttc

SEQ ID NO: 415804 - DNA, 15 bp, Homo sapiens
acctgagtcatcttt

SEQ ID NO: 415805 - DNA, 15 bp, Homo sapiens
cacctgagtcatctt

SEQ ID NO: 415806 - DNA, 15 bp, Homo sapiens
ccacctgagtcatct

SEQ ID NO: 415807 - DNA, 15 bp, Homo sapiens
gccacctgagtcatc

SEQ ID NO: 415808 - DNA, 15 bp, Homo sapiens
tgccacctgagtcat

SEQ ID NO: 415809 - DNA, 15 bp, Homo sapiens
ctgccacctgagtca

SEQ ID NO: 415810 - DNA, 15 bp, Homo sapiens
actgccacctgagtc

SEQ ID NO: 415811 - DNA, 15 bp, Homo sapiens
cactgccacctgagt

SEQ ID NO: 415812 - DNA, 15 bp, Homo sapiens
acactgccacctgag

SEQ ID NO: 415813 - DNA, 15 bp, Homo sapiens
tacactgccacctga

SEQ ID NO: 415814 - DNA, 15 bp, Homo sapiens
ctacactgccacctg

SEQ ID NO: 415815 - DNA, 15 bp, Homo sapiens
tctacactgccacct

SEQ ID NO: 415816 - DNA, 15 bp, Homo sapiens
ctctacactgccacc

SEQ ID NO: 415817 - DNA, 15 bp, Homo sapiens
actctacactgccac

SEQ ID NO: 415818 - DNA, 15 bp, Homo sapiens
aactctacactgcca

SEQ ID NO: 415819 - DNA, 15 bp, Homo sapiens
aaactctacactgcc

SEQ ID NO: 415820 - DNA, 15 bp, Homo sapiens
caaactctacactgc

SEQ ID NO: 415821 - DNA, 15 bp, Homo sapiens
ccaaactctacactg

SEQ ID NO: 415822 - DNA, 15 bp, Homo sapiens
cccaaactctacact

SEQ ID NO: 415823 - DNA, 15 bp, Homo sapiens
acccaaactctacac

SEQ ID NO: 415824 - DNA, 15 bp, Homo sapiens
aacccaaactctaca

SEQ ID NO: 415825 - DNA, 15 bp, Homo sapiens
taacccaaactctac

SEQ ID NO: 415826 - DNA, 15 bp, Homo sapiens
ctaacccaaactcta

SEQ ID NO: 415827 - DNA, 15 bp, Homo sapiens
tctaacccaaactct

SEQ ID NO: 415828 - DNA, 15 bp, Homo sapiens
atctaacccaaactc

SEQ ID NO: 415829 - DNA, 15 bp, Homo sapiens
aatctaacccaaact

SEQ ID NO: 415830 - DNA, 15 bp, Homo sapiens
caatctaacccaaac

SEQ ID NO: 415831 - DNA, 15 bp, Homo sapiens
ccaatctaacccaaa

SEQ ID NO: 415832 - DNA, 15 bp, Homo sapiens
cccaatctaacccaa

SEQ ID NO: 415833 - DNA, 15 bp, Homo sapiens
acccaatctaaccca

SEQ ID NO: 415834 - DNA, 15 bp, Homo sapiens
cacccaatctaaccc

SEQ ID NO: 415835 - DNA, 15 bp, Homo sapiens
gcacccaatctaacc

SEQ ID NO: 415836 - DNA, 15 bp, Homo sapiens
agcacccaatctaac

SEQ ID NO: 415837 - DNA, 15 bp, Homo sapiens
cagcacccaatctaa

SEQ ID NO: 415838 - DNA, 15 bp, Homo sapiens
tcagcacccaatcta

SEQ ID NO: 415839 - DNA, 15 bp, Homo sapiens
ctcagcacccaatct

SEQ ID NO: 415840 - DNA, 15 bp, Homo sapiens
tctcagcacccaatc

SEQ ID NO: 415841 - DNA, 15 bp, Homo sapiens
ctctcagcacccaat

SEQ ID NO: 415842 - DNA, 15 bp, Homo sapiens
tctctcagcacccaa

SEQ ID NO: 415843 - DNA, 15 bp, Homo sapiens
atctctcagcaccca

SEQ ID NO: 415844 - DNA, 15 bp, Homo sapiens
catctctcagcaccc

SEQ ID NO: 415845 - DNA, 15 bp, Homo sapiens
ccatctctcagcacc

SEQ ID NO: 415846 - DNA, 15 bp, Homo sapiens
gccatctctcagcac

SEQ ID NO: 415847 - DNA, 15 bp, Homo sapiens
tgccatctctcagca

SEQ ID NO: 415848 - DNA, 15 bp, Homo sapiens
atgccatctctcagc

SEQ ID NO: 415849 - DNA, 15 bp, Homo sapiens
gatgccatctctcag

SEQ ID NO: 415850 - DNA, 15 bp, Homo sapiens
agatgccatctctca

SEQ ID NO: 415851 - DNA, 15 bp, Homo sapiens
tagatgccatctctc

SEQ ID NO: 415852 - DNA, 15 bp, Homo sapiens
ctagatgccatctct

SEQ ID NO: 415853 - DNA, 15 bp, Homo sapiens
cctagatgccatctc

SEQ ID NO: 415854 - DNA, 15 bp, Homo sapiens
tcctagatgccatct

SEQ ID NO: 415855 - DNA, 15 bp, Homo sapiens
ctcctagatgccatc

SEQ ID NO: 415856 - DNA, 15 bp, Homo sapiens
tctcctagatgccat

SEQ ID NO: 415857 - DNA, 15 bp, Homo sapiens
gtctcctagatgcca

SEQ ID NO: 415858 - DNA, 15 bp, Homo sapiens
tgtctcctagatgcc

SEQ ID NO: 415859 - DNA, 15 bp, Homo sapiens
ctgtctcctagatgc

SEQ ID NO: 415860 - DNA, 15 bp, Homo sapiens
cctgtctcctagatg

SEQ ID NO: 415861 - DNA, 15 bp, Homo sapiens
acctgtctcctagat

SEQ ID NO: 415862 - DNA, 15 bp, Homo sapiens
aacctgtctcctaga

SEQ ID NO: 415863 - DNA, 15 bp, Homo sapiens
caacctgtctcctag

SEQ ID NO: 415864 - DNA, 15 bp, Homo sapiens
ccaacctgtctccta

SEQ ID NO: 415865 - DNA, 15 bp, Homo sapiens
cccaacctgtctcct

SEQ ID NO: 415866 - DNA, 15 bp, Homo sapiens
ccccaacctgtctcc

SEQ ID NO: 415867 - DNA, 15 bp, Homo sapiens
cccccaacctgtctc

SEQ ID NO: 415868 - DNA, 15 bp, Homo sapiens
ccccccaacctgtct

SEQ ID NO: 415869 - DNA, 15 bp, Homo sapiens
tccccccaacctgtc

SEQ ID NO: 415870 - DNA, 15 bp, Homo sapiens
atccccccaacctgt

SEQ ID NO: 415871 - DNA, 15 bp, Homo sapiens
tatccccccaacctg

SEQ ID NO: 415872 - DNA, 15 bp, Homo sapiens
atatccccccaacct

SEQ ID NO: 415873 - DNA, 15 bp, Homo sapiens
catatccccccaacc

SEQ ID NO: 415874 - DNA, 15 bp, Homo sapiens
tcatatccccccaac

SEQ ID NO: 415875 - DNA, 15 bp, Homo sapiens
atcatatccccccaa

SEQ ID NO: 415876 - DNA, 15 bp, Homo sapiens
gatcatatcccccca

SEQ ID NO: 415877 - DNA, 15 bp, Homo sapiens
tgatcatatcccccc

SEQ ID NO: 415878 - DNA, 15 bp, Homo sapiens
atgatcatatccccc

SEQ ID NO: 415879 - DNA, 15 bp, Homo sapiens
gatgatcatatcccc

SEQ ID NO: 415880 - DNA, 15 bp, Homo sapiens
ggatgatcatatccc

SEQ ID NO: 415881 - DNA, 15 bp, Homo sapiens
tggatgatcatatcc

SEQ ID NO: 415882 - DNA, 15 bp, Homo sapiens
ctggatgatcatatc

SEQ ID NO: 415883 - DNA, 15 bp, Homo sapiens
cctggatgatcatat

SEQ ID NO: 415884 - DNA, 15 bp, Homo sapiens
acctggatgatcata

SEQ ID NO: 415885 - DNA, 15 bp, Homo sapiens
tacctggatgatcat

SEQ ID NO: 415886 - DNA, 15 bp, Homo sapiens
ttacctggatgatca

SEQ ID NO: 415887 - DNA, 15 bp, Homo sapiens
cttacctggatgatc

SEQ ID NO: 415888 - DNA, 15 bp, Homo sapiens
tcttacctggatgat

SEQ ID NO: 415889 - DNA, 15 bp, Homo sapiens
ttcttacctggatga

SEQ ID NO: 415890 - DNA, 15 bp, Homo sapiens
tttcttacctggatg

SEQ ID NO: 415891 - DNA, 15 bp, Homo sapiens
ttttcttacctggat

SEQ ID NO: 415892 - DNA, 15 bp, Homo sapiens
tttttcttacctgga

SEQ ID NO: 415893 - DNA, 15 bp, Homo sapiens
ctttttcttacctgg

SEQ ID NO: 415894 - DNA, 15 bp, Homo sapiens
cctttttcttacctg

SEQ ID NO: 415895 - DNA, 15 bp, Homo sapiens
tcctttttcttacct

SEQ ID NO: 415896 - DNA, 15 bp, Homo sapiens
ttcctttttcttacc

SEQ ID NO: 415897 - DNA, 15 bp, Homo sapiens
cttcctttttcttac

SEQ ID NO: 415898 - DNA, 15 bp, Homo sapiens
tcttcctttttctta

SEQ ID NO: 415899 - DNA, 15 bp, Homo sapiens
atcttcctttttctt

SEQ ID NO: 415900 - DNA, 15 bp, Homo sapiens
aatcttcctttttct

SEQ ID NO: 415901 - DNA, 15 bp, Homo sapiens
caatcttcctttttc

SEQ ID NO: 415902 - DNA, 15 bp, Homo sapiens
ccaatcttccttttt

SEQ ID NO: 415903 - DNA, 15 bp, Homo sapiens
tccaatcttcctttt

SEQ ID NO: 415904 - DNA, 15 bp, Homo sapiens
gtccaatcttccttt

SEQ ID NO: 415905 - DNA, 15 bp, Homo sapiens
ggtccaatcttcctt

SEQ ID NO: 415906 - DNA, 15 bp, Homo sapiens
tggtccaatcttcct

SEQ ID NO: 415907 - DNA, 15 bp, Homo sapiens
gtggtccaatcttcc

SEQ ID NO: 415908 - DNA, 15 bp, Homo sapiens
agtggtccaatcttc

SEQ ID NO: 415909 - DNA, 15 bp, Homo sapiens
cagtggtccaatctt

SEQ ID NO: 415910 - DNA, 15 bp, Homo sapiens
tcagtggtccaatct

SEQ ID NO: 415911 - DNA, 15 bp, Homo sapiens
ctcagtggtccaatc

SEQ ID NO: 415912 - DNA, 15 bp, Homo sapiens
cctcagtggtccaat

SEQ ID NO: 415913 - DNA, 15 bp, Homo sapiens
ccctcagtggtccaa

SEQ ID NO: 415914 - DNA, 15 bp, Homo sapiens
gccctcagtggtcca

SEQ ID NO: 415915 - DNA, 15 bp, Homo sapiens
tgccctcagtggtcc

SEQ ID NO: 415916 - DNA, 15 bp, Homo sapiens
ttgccctcagtggtc

SEQ ID NO: 415917 - DNA, 15 bp, Homo sapiens
gttgccctcagtggt

SEQ ID NO: 415918 - DNA, 15 bp, Homo sapiens
tgttgccctcagtgg

SEQ ID NO: 415919 - DNA, 15 bp, Homo sapiens
gtgttgccctcagtg

SEQ ID NO: 415920 - DNA, 15 bp, Homo sapiens
tgtgttgccctcagt

SEQ ID NO: 415921 - DNA, 15 bp, Homo sapiens
ctgtgttgccctcag

SEQ ID NO: 415922 - DNA, 15 bp, Homo sapiens
tctgtgttgccctca

SEQ ID NO: 415923 - DNA, 15 bp, Homo sapiens
atctgtgttgccctc

SEQ ID NO: 415924 - DNA, 15 bp, Homo sapiens
catctgtgttgccct

SEQ ID NO: 415925 - DNA, 15 bp, Homo sapiens
ccatctgtgttgccc

SEQ ID NO: 415926 - DNA, 15 bp, Homo sapiens
tccatctgtgttgcc

SEQ ID NO: 415927 - DNA, 15 bp, Homo sapiens
ttccatctgtgttgc

SEQ ID NO: 415928 - DNA, 15 bp, Homo sapiens
tttccatctgtgttg

SEQ ID NO: 415929 - DNA, 15 bp, Homo sapiens
ctttccatctgtgtt

SEQ ID NO: 415930 - DNA, 15 bp, Homo sapiens
tctttccatctgtgt

SEQ ID NO: 415931 - DNA, 15 bp, Homo sapiens
ttctttccatctgtg

SEQ ID NO: 415932 - DNA, 15 bp, Homo sapiens
tttctttccatctgt

SEQ ID NO: 415933 - DNA, 15 bp, Homo sapiens
atttctttccatctg

SEQ ID NO: 415934 - DNA, 15 bp, Homo sapiens
gatttctttccatct

SEQ ID NO: 415935 - DNA, 15 bp, Homo sapiens
ggatttctttccatc

SEQ ID NO: 415936 - DNA, 15 bp, Homo sapiens
tggatttctttccat

SEQ ID NO: 415937 - DNA, 15 bp, Homo sapiens
ttggatttctttcca

SEQ ID NO: 415938 - DNA, 15 bp, Homo sapiens
gttggatttctttcc

SEQ ID NO: 415939 - DNA, 15 bp, Homo sapiens
agttggatttctttc

SEQ ID NO: 415940 - DNA, 15 bp, Homo sapiens
cagttggatttcttt

SEQ ID NO: 415941 - DNA, 15 bp, Homo sapiens
ccagttggatttctt

SEQ ID NO: 415942 - DNA, 15 bp, Homo sapiens
tccagttggatttct

SEQ ID NO: 415943 - DNA, 15 bp, Homo sapiens
ttccagttggatttc

SEQ ID NO: 415944 - DNA, 15 bp, Homo sapiens
tttccagttggattt

SEQ ID NO: 415945 - DNA, 15 bp, Homo sapiens
atttccagttggatt

SEQ ID NO: 415946 - DNA, 15 bp, Homo sapiens
tatttccagttggat

SEQ ID NO: 415947 - DNA, 15 bp, Homo sapiens
gtatttccagttgga

SEQ ID NO: 415948 - DNA, 15 bp, Homo sapiens
ggtatttccagttgg

SEQ ID NO: 415949 - DNA, 15 bp, Homo sapiens
aggtatttccagttg

SEQ ID NO: 415950 - DNA, 15 bp, Homo sapiens
caggtatttccagtt

SEQ ID NO: 415951 - DNA, 15 bp, Homo sapiens
acaggtatttccagt

SEQ ID NO: 415952 - DNA, 15 bp, Homo sapiens
cacaggtatttccag

SEQ ID NO: 415953 - DNA, 15 bp, Homo sapiens
tcacaggtatttcca

SEQ ID NO: 415954 - DNA, 15 bp, Homo sapiens
ttcacaggtatttcc

SEQ ID NO: 415955 - DNA, 15 bp, Homo sapiens
gttcacaggtatttc

SEQ ID NO: 415956 - DNA, 15 bp, Homo sapiens
tgttcacaggtattt

SEQ ID NO: 415957 - DNA, 15 bp, Homo sapiens
gtgttcacaggtatt

SEQ ID NO: 415958 - DNA, 15 bp, Homo sapiens
tgtgttcacaggtat

SEQ ID NO: 415959 - DNA, 15 bp, Homo sapiens
atgtgttcacaggta

SEQ ID NO: 415960 - DNA, 15 bp, Homo sapiens
catgtgttcacaggt

SEQ ID NO: 415961 - DNA, 15 bp, Homo sapiens
gcatgtgttcacagg

SEQ ID NO: 415962 - DNA, 15 bp, Homo sapiens
agcatgtgttcacag

SEQ ID NO: 415963 - DNA, 15 bp, Homo sapiens
aagcatgtgttcaca

SEQ ID NO: 415964 - DNA, 15 bp, Homo sapiens
caagcatgtgttcac

SEQ ID NO: 415965 - DNA, 15 bp, Homo sapiens
ccaagcatgtgttca

SEQ ID NO: 415966 - DNA, 15 bp, Homo sapiens
cccaagcatgtgttc

SEQ ID NO: 415967 - DNA, 15 bp, Homo sapiens
acccaagcatgtgtt

SEQ ID NO: 415968 - DNA, 15 bp, Homo sapiens
tacccaagcatgtgt

SEQ ID NO: 415969 - DNA, 15 bp, Homo sapiens
gtacccaagcatgtg

SEQ ID NO: 415970 - DNA, 15 bp, Homo sapiens
tgtacccaagcatgt

SEQ ID NO: 415971 - DNA, 15 bp, Homo sapiens
ttgtacccaagcatg

SEQ ID NO: 415972 - DNA, 15 bp, Homo sapiens
cttgtacccaagcat

SEQ ID NO: 415973 - DNA, 15 bp, Homo sapiens
gcttgtacccaagca

SEQ ID NO: 415974 - DNA, 15 bp, Homo sapiens
agcttgtacccaagc

SEQ ID NO: 415975 - DNA, 15 bp, Homo sapiens
aagcttgtacccaag

SEQ ID NO: 415976 - DNA, 15 bp, Homo sapiens
aaagcttgtacccaa

SEQ ID NO: 415977 - DNA, 15 bp, Homo sapiens
taaagcttgtaccca

SEQ ID NO: 415978 - DNA, 15 bp, Homo sapiens
ataaagcttgtaccc

SEQ ID NO: 415979 - DNA, 15 bp, Homo sapiens
cataaagcttgtacc

SEQ ID NO: 415980 - DNA, 15 bp, Homo sapiens
acataaagcttgtac

SEQ ID NO: 415981 - DNA, 15 bp, Homo sapiens
cacataaagcttgta

SEQ ID NO: 415982 - DNA, 15 bp, Homo sapiens
tcacataaagcttgt

SEQ ID NO: 415983 - DNA, 15 bp, Homo sapiens
ttcacataaagcttg

SEQ ID NO: 415984 - DNA, 15 bp, Homo sapiens
gttcacataaagctt

SEQ ID NO: 415985 - DNA, 15 bp, Homo sapiens
ggttcacataaagct

SEQ ID NO: 415986 - DNA, 15 bp, Homo sapiens
gggttcacataaagc

SEQ ID NO: 415987 - DNA, 15 bp, Homo sapiens
tgggttcacataaag

SEQ ID NO: 415988 - DNA, 15 bp, Homo sapiens
ctgggttcacataaa

SEQ ID NO: 415989 - DNA, 15 bp, Homo sapiens
cctgggttcacataa

SEQ ID NO: 415990 - DNA, 15 bp, Homo sapiens
ccctgggttcacata

SEQ ID NO: 415991 - DNA, 15 bp, Homo sapiens
accctgggttcacat

SEQ ID NO: 415992 - DNA, 15 bp, Homo sapiens
caccctgggttcaca

SEQ ID NO: 415993 - DNA, 15 bp, Homo sapiens
tcaccctgggttcac

SEQ ID NO: 415994 - DNA, 15 bp, Homo sapiens
ctcaccctgggttca

SEQ ID NO: 415995 - DNA, 15 bp, Homo sapiens
actcaccctgggttc

SEQ ID NO: 415996 - DNA, 15 bp, Homo sapiens
tactcaccctgggtt

SEQ ID NO: 415997 - DNA, 15 bp, Homo sapiens
ttactcaccctgggt

SEQ ID NO: 415998 - DNA, 15 bp, Homo sapiens
attactcaccctggg

SEQ ID NO: 415999 - DNA, 15 bp, Homo sapiens
cattactcaccctgg

SEQ ID NO: 416000 - DNA, 15 bp, Homo sapiens
gcattactcaccctg

SEQ ID NO: 416001 - DNA, 15 bp, Homo sapiens
agcattactcaccct

SEQ ID NO: 416002 - DNA, 15 bp, Homo sapiens
cagcattactcaccc

SEQ ID NO: 416003 - DNA, 15 bp, Homo sapiens
acagcattactcacc

SEQ ID NO: 416004 - DNA, 15 bp, Homo sapiens
cacagcattactcac

SEQ ID NO: 416005 - DNA, 15 bp, Homo sapiens
ccacagcattactca

SEQ ID NO: 416006 - DNA, 15 bp, Homo sapiens
cccacagcattactc

SEQ ID NO: 416007 - DNA, 15 bp, Homo sapiens
tcccacagcattact

SEQ ID NO: 416008 - DNA, 15 bp, Homo sapiens
atcccacagcattac

SEQ ID NO: 416009 - DNA, 15 bp, Homo sapiens
gatcccacagcatta

SEQ ID NO: 416010 - DNA, 15 bp, Homo sapiens
ggatcccacagcatt

SEQ ID NO: 416011 - DNA, 15 bp, Homo sapiens
aggatcccacagcat

SEQ ID NO: 416012 - DNA, 15 bp, Homo sapiens
aaggatcccacagca

SEQ ID NO: 416013 - DNA, 15 bp, Homo sapiens
gaaggatcccacagc

SEQ ID NO: 416014 - DNA, 15 bp, Homo sapiens
ggaaggatcccacag

SEQ ID NO: 416015 - DNA, 15 bp, Homo sapiens
tggaaggatcccaca

SEQ ID NO: 416016 - DNA, 15 bp, Homo sapiens
ctggaaggatcccac

SEQ ID NO: 416017 - DNA, 15 bp, Homo sapiens
actggaaggatccca

SEQ ID NO: 416018 - DNA, 15 bp, Homo sapiens
cactggaaggatccc

SEQ ID NO: 416019 - DNA, 15 bp, Homo sapiens
acactggaaggatcc

SEQ ID NO: 416020 - DNA, 15 bp, Homo sapiens
tacactggaaggatc

SEQ ID NO: 416021 - DNA, 15 bp, Homo sapiens
ttacactggaaggat

SEQ ID NO: 416022 - DNA, 15 bp, Homo sapiens
cttacactggaagga

SEQ ID NO: 416023 - DNA, 15 bp, Homo sapiens
tcttacactggaagg

SEQ ID NO: 416024 - DNA, 15 bp, Homo sapiens
ttcttacactggaag

SEQ ID NO: 416025 - DNA, 15 bp, Homo sapiens
cttcttacactggaa

SEQ ID NO: 416026 - DNA, 15 bp, Homo sapiens
gcttcttacactgga

SEQ ID NO: 416027 - DNA, 15 bp, Homo sapiens
ggcttcttacactgg

SEQ ID NO: 416028 - DNA, 15 bp, Homo sapiens
gggcttcttacactg

SEQ ID NO: 416029 - DNA, 15 bp, Homo sapiens
agggcttcttacact

SEQ ID NO: 416030 - DNA, 15 bp, Homo sapiens
aagggcttcttacac

SEQ ID NO: 416031 - DNA, 15 bp, Homo sapiens
taagggcttcttaca

SEQ ID NO: 416032 - DNA, 15 bp, Homo sapiens
ctaagggcttcttac

SEQ ID NO: 416033 - DNA, 15 bp, Homo sapiens
tctaagggcttctta

SEQ ID NO: 416034 - DNA, 15 bp, Homo sapiens
ttctaagggcttctt

SEQ ID NO: 416035 - DNA, 15 bp, Homo sapiens
gttctaagggcttct

SEQ ID NO: 416036 - DNA, 15 bp, Homo sapiens
tgttctaagggcttc

SEQ ID NO: 416037 - DNA, 15 bp, Homo sapiens
ttgttctaagggctt

SEQ ID NO: 416038 - DNA, 15 bp, Homo sapiens
attgttctaagggct

SEQ ID NO: 416039 - DNA, 15 bp, Homo sapiens
cattgttctaagggc

SEQ ID NO: 416040 - DNA, 15 bp, Homo sapiens
ccattgttctaaggg

SEQ ID NO: 416041 - DNA, 15 bp, Homo sapiens
accattgttctaagg

SEQ ID NO: 416042 - DNA, 15 bp, Homo sapiens
aaccattgttctaag

SEQ ID NO: 416043 - DNA, 15 bp, Homo sapiens
taaccattgttctaa

SEQ ID NO: 416044 - DNA, 15 bp, Homo sapiens
ctaaccattgttcta

SEQ ID NO: 416045 - DNA, 15 bp, Homo sapiens
cctaaccattgttct

SEQ ID NO: 416046 - DNA, 15 bp, Homo sapiens
tcctaaccattgttc

SEQ ID NO: 416047 - DNA, 15 bp, Homo sapiens
ttcctaaccattgtt

SEQ ID NO: 416048 - DNA, 15 bp, Homo sapiens
gttcctaaccattgt

SEQ ID NO: 416049 - DNA, 15 bp, Homo sapiens
agttcctaaccattg

SEQ ID NO: 416050 - DNA, 15 bp, Homo sapiens
gagttcctaaccatt

SEQ ID NO: 416051 - DNA, 15 bp, Homo sapiens
tgagttcctaaccat

SEQ ID NO: 416052 - DNA, 15 bp, Homo sapiens
ctgagttcctaacca

SEQ ID NO: 416053 - DNA, 15 bp, Homo sapiens
cctgagttcctaacc

SEQ ID NO: 416054 - DNA, 15 bp, Homo sapiens
gcctgagttcctaac

SEQ ID NO: 416055 - DNA, 15 bp, Homo sapiens
agcctgagttcctaa

SEQ ID NO: 416056 - DNA, 15 bp, Homo sapiens
aagcctgagttccta

SEQ ID NO: 416057 - DNA, 15 bp, Homo sapiens
gaagcctgagttcct

SEQ ID NO: 416058 - DNA, 15 bp, Homo sapiens
tgaagcctgagttcc

SEQ ID NO: 416059 - DNA, 15 bp, Homo sapiens
ctgaagcctgagttc

SEQ ID NO: 416060 - DNA, 15 bp, Homo sapiens
gctgaagcctgagtt

SEQ ID NO: 416061 - DNA, 15 bp, Homo sapiens
tgctgaagcctgagt

SEQ ID NO: 416062 - DNA, 15 bp, Homo sapiens
gtgctgaagcctgag

SEQ ID NO: 416063 - DNA, 15 bp, Homo sapiens
ggtgctgaagcctga

SEQ ID NO: 416064 - DNA, 15 bp, Homo sapiens
tggtgctgaagcctg

SEQ ID NO: 416065 - DNA, 15 bp, Homo sapiens
ctggtgctgaagcct

SEQ ID NO: 416066 - DNA, 15 bp, Homo sapiens
actggtgctgaagcc

SEQ ID NO: 416067 - DNA, 15 bp, Homo sapiens
aactggtgctgaagc

SEQ ID NO: 416068 - DNA, 15 bp, Homo sapiens
caactggtgctgaag

SEQ ID NO: 416069 - DNA, 15 bp, Homo sapiens
acaactggtgctgaa

SEQ ID NO: 416070 - DNA, 15 bp, Homo sapiens
tacaactggtgctga

SEQ ID NO: 416071 - DNA, 15 bp, Homo sapiens
gtacaactggtgctg

SEQ ID NO: 416072 - DNA, 15 bp, Homo sapiens
ggtacaactggtgct

SEQ ID NO: 416073 - DNA, 15 bp, Homo sapiens
aggtacaactggtgc

SEQ ID NO: 416074 - DNA, 15 bp, Homo sapiens
caggtacaactggtg

SEQ ID NO: 416075 - DNA, 15 bp, Homo sapiens
tcaggtacaactggt

SEQ ID NO: 416076 - DNA, 15 bp, Homo sapiens
ttcaggtacaactgg

SEQ ID NO: 416077 - DNA, 15 bp, Homo sapiens
attcaggtacaactg

SEQ ID NO: 416078 - DNA, 15 bp, Homo sapiens
aattcaggtacaact

SEQ ID NO: 416079 - DNA, 15 bp, Homo sapiens
gaattcaggtacaac

SEQ ID NO: 416080 - DNA, 15 bp, Homo sapiens
tgaattcaggtacaa

SEQ ID NO: 416081 - DNA, 15 bp, Homo sapiens
atgaattcaggtaca

SEQ ID NO: 416082 - DNA, 15 bp, Homo sapiens
tatgaattcaggtac

SEQ ID NO: 416083 - DNA, 15 bp, Homo sapiens
atatgaattcaggta

SEQ ID NO: 416084 - DNA, 15 bp, Homo sapiens
gatatgaattcaggt

SEQ ID NO: 416085 - DNA, 15 bp, Homo sapiens
ggatatgaattcagg

SEQ ID NO: 416086 - DNA, 15 bp, Homo sapiens
aggatatgaattcag

SEQ ID NO: 416087 - DNA, 15 bp, Homo sapiens
caggatatgaattca

SEQ ID NO: 416088 - DNA, 15 bp, Homo sapiens
ccaggatatgaattc

SEQ ID NO: 416089 - DNA, 15 bp, Homo sapiens
cccaggatatgaatt

SEQ ID NO: 416090 - DNA, 15 bp, Homo sapiens
acccaggatatgaat

SEQ ID NO: 416091 - DNA, 15 bp, Homo sapiens
gacccaggatatgaa

SEQ ID NO: 416092 - DNA, 15 bp, Homo sapiens
agacccaggatatga

SEQ ID NO: 416093 - DNA, 15 bp, Homo sapiens
cagacccaggatatg

SEQ ID NO: 416094 - DNA, 15 bp, Homo sapiens
gcagacccaggatat

SEQ ID NO: 416095 - DNA, 15 bp, Homo sapiens
ggcagacccaggata

SEQ ID NO: 416096 - DNA, 15 bp, Homo sapiens
tggcagacccaggat

SEQ ID NO: 416097 - DNA, 15 bp, Homo sapiens
gtggcagacccagga

SEQ ID NO: 416098 - DNA, 15 bp, Homo sapiens
agtggcagacccagg

SEQ ID NO: 416099 - DNA, 15 bp, Homo sapiens
cagtggcagacccag

SEQ ID NO: 416100 - DNA, 15 bp, Homo sapiens
acagtggcagaccca

SEQ ID NO: 416101 - DNA, 15 bp, Homo sapiens
gacagtggcagaccc

SEQ ID NO: 416102 - DNA, 15 bp, Homo sapiens
agacagtggcagacc

SEQ ID NO: 416103 - DNA, 15 bp, Homo sapiens
tagacagtggcagac

SEQ ID NO: 416104 - DNA, 15 bp, Homo sapiens
atagacagtggcaga

SEQ ID NO: 416105 - DNA, 15 bp, Homo sapiens
gatagacagtggcag

SEQ ID NO: 416106 - DNA, 15 bp, Homo sapiens
agatagacagtggca

SEQ ID NO: 416107 - DNA, 15 bp, Homo sapiens
cagatagacagtggc

SEQ ID NO: 416108 - DNA, 15 bp, Homo sapiens
gcagatagacagtgg

SEQ ID NO: 416109 - DNA, 15 bp, Homo sapiens
cgcagatagacagtg

SEQ ID NO: 416110 - DNA, 15 bp, Homo sapiens
acgcagatagacagt

SEQ ID NO: 416111 - DNA, 15 bp, Homo sapiens
cacgcagatagacag

SEQ ID NO: 416112 - DNA, 15 bp, Homo sapiens
tcacgcagatagaca

SEQ ID NO: 416113 - DNA, 15 bp, Homo sapiens
gtcacgcagatagac

SEQ ID NO: 416114 - DNA, 15 bp, Homo sapiens
agtcacgcagataga

SEQ ID NO: 416115 - DNA, 15 bp, Homo sapiens
aagtcacgcagatag

SEQ ID NO: 416116 - DNA, 15 bp, Homo sapiens
aaagtcacgcagata

SEQ ID NO: 416117 - DNA, 15 bp, Homo sapiens
caaagtcacgcagat

SEQ ID NO: 416118 - DNA, 15 bp, Homo sapiens
ccaaagtcacgcaga

SEQ ID NO: 416119 - DNA, 15 bp, Homo sapiens
tccaaagtcacgcag

SEQ ID NO: 416120 - DNA, 15 bp, Homo sapiens
gtccaaagtcacgca

SEQ ID NO: 416121 - DNA, 15 bp, Homo sapiens
tgtccaaagtcacgc

SEQ ID NO: 416122 - DNA, 15 bp, Homo sapiens
ttgtccaaagtcacg

SEQ ID NO: 416123 - DNA, 15 bp, Homo sapiens
cttgtccaaagtcac

SEQ ID NO: 416124 - DNA, 15 bp, Homo sapiens
acttgtccaaagtca

SEQ ID NO: 416125 - DNA, 15 bp, Homo sapiens
cacttgtccaaagtc

SEQ ID NO: 416126 - DNA, 15 bp, Homo sapiens
tcacttgtccaaagt

SEQ ID NO: 416127 - DNA, 15 bp, Homo sapiens
gtcacttgtccaaag

SEQ ID NO: 416128 - DNA, 15 bp, Homo sapiens
agtcacttgtccaaa

SEQ ID NO: 416129 - DNA, 15 bp, Homo sapiens
aagtcacttgtccaa

SEQ ID NO: 416130 - DNA, 15 bp, Homo sapiens
taagtcacttgtcca

SEQ ID NO: 416131 - DNA, 15 bp, Homo sapiens
ttaagtcacttgtcc

SEQ ID NO: 416132 - DNA, 15 bp, Homo sapiens
cttaagtcacttgtc

SEQ ID NO: 416133 - DNA, 15 bp, Homo sapiens
acttaagtcacttgt

SEQ ID NO: 416134 - DNA, 15 bp, Homo sapiens
cacttaagtcacttg

SEQ ID NO: 416135 - DNA, 15 bp, Homo sapiens
tcacttaagtcactt

SEQ ID NO: 416136 - DNA, 15 bp, Homo sapiens
atcacttaagtcact

SEQ ID NO: 416137 - DNA, 15 bp, Homo sapiens
aatcacttaagtcac

SEQ ID NO: 416138 - DNA, 15 bp, Homo sapiens
aaatcacttaagtca

SEQ ID NO: 416139 - DNA, 15 bp, Homo sapiens
taaatcacttaagtc

SEQ ID NO: 416140 - DNA, 15 bp, Homo sapiens
ttaaatcacttaagt

SEQ ID NO: 416141 - DNA, 15 bp, Homo sapiens
attaaatcacttaag

SEQ ID NO: 416142 - DNA, 15 bp, Homo sapiens
gattaaatcacttaa

SEQ ID NO: 416143 - DNA, 15 bp, Homo sapiens
agattaaatcactta

SEQ ID NO: 416144 - DNA, 15 bp, Homo sapiens
aagattaaatcactt

SEQ ID NO: 416145 - DNA, 15 bp, Homo sapiens
gaagattaaatcact

SEQ ID NO: 416146 - DNA, 15 bp, Homo sapiens
tgaagattaaatcac

SEQ ID NO: 416147 - DNA, 15 bp, Homo sapiens
gtgaagattaaatca

SEQ ID NO: 416148 - DNA, 15 bp, Homo sapiens
agtgaagattaaatc

SEQ ID NO: 416149 - DNA, 15 bp, Homo sapiens
aagtgaagattaaat

SEQ ID NO: 416150 - DNA, 15 bp, Homo sapiens
aaagtgaagattaaa

SEQ ID NO: 416151 - DNA, 15 bp, Homo sapiens
gaaagtgaagattaa

SEQ ID NO: 416152 - DNA, 15 bp, Homo sapiens
agaaagtgaagatta

SEQ ID NO: 416153 - DNA, 15 bp, Homo sapiens
aagaaagtgaagatt

SEQ ID NO: 416154 - DNA, 15 bp, Homo sapiens
taagaaagtgaagat

SEQ ID NO: 416155 - DNA, 15 bp, Homo sapiens
ataagaaagtgaaga

SEQ ID NO: 416156 - DNA, 15 bp, Homo sapiens
gataagaaagtgaag

SEQ ID NO: 416157 - DNA, 15 bp, Homo sapiens
agataagaaagtgaa

SEQ ID NO: 416158 - DNA, 15 bp, Homo sapiens
gagataagaaagtga

SEQ ID NO: 416159 - DNA, 15 bp, Homo sapiens
agagataagaaagtg

SEQ ID NO: 416160 - DNA, 15 bp, Homo sapiens
tagagataagaaagt

SEQ ID NO: 416161 - DNA, 15 bp, Homo sapiens
ctagagataagaaag

SEQ ID NO: 416162 - DNA, 15 bp, Homo sapiens
tctagagataagaaa

SEQ ID NO: 416163 - DNA, 15 bp, Homo sapiens
atctagagataagaa

SEQ ID NO: 416164 - DNA, 15 bp, Homo sapiens
tatctagagataaga

SEQ ID NO: 416165 - DNA, 15 bp, Homo sapiens
gtatctagagataag

SEQ ID NO: 416166 - DNA, 15 bp, Homo sapiens
tgtatctagagataa

SEQ ID NO: 416167 - DNA, 15 bp, Homo sapiens
ctgtatctagagata

SEQ ID NO: 416168 - DNA, 15 bp, Homo sapiens
tctgtatctagagat

SEQ ID NO: 416169 - DNA, 15 bp, Homo sapiens
gtctgtatctagaga

SEQ ID NO: 416170 - DNA, 15 bp, Homo sapiens
tgtctgtatctagag

SEQ ID NO: 416171 - DNA, 15 bp, Homo sapiens
ctgtctgtatctaga

SEQ ID NO: 416172 - DNA, 15 bp, Homo sapiens
cctgtctgtatctag

SEQ ID NO: 416173 - DNA, 15 bp, Homo sapiens
tcctgtctgtatcta

SEQ ID NO: 416174 - DNA, 15 bp, Homo sapiens
atcctgtctgtatct

SEQ ID NO: 416175 - DNA, 15 bp, Homo sapiens
tatcctgtctgtatc

SEQ ID NO: 416176 - DNA, 15 bp, Homo sapiens
ttatcctgtctgtat

SEQ ID NO: 416177 - DNA, 15 bp, Homo sapiens
attatcctgtctgta

SEQ ID NO: 416178 - DNA, 15 bp, Homo sapiens
tattatcctgtctgt

SEQ ID NO: 416179 - DNA, 15 bp, Homo sapiens
ttattatcctgtctg

SEQ ID NO: 416180 - DNA, 15 bp, Homo sapiens
gttattatcctgtct

SEQ ID NO: 416181 - DNA, 15 bp, Homo sapiens
tgttattatcctgtc

SEQ ID NO: 416182 - DNA, 15 bp, Homo sapiens
gtgttattatcctgt

SEQ ID NO: 416183 - DNA, 15 bp, Homo sapiens
tgtgttattatcctg

SEQ ID NO: 416184 - DNA, 15 bp, Homo sapiens
ttgtgttattatcct

SEQ ID NO: 416185 - DNA, 15 bp, Homo sapiens
tttgtgttattatcc

SEQ ID NO: 416186 - DNA, 15 bp, Homo sapiens
ctttgtgttattatc

SEQ ID NO: 416187 - DNA, 15 bp, Homo sapiens
actttgtgttattat

SEQ ID NO: 416188 - DNA, 15 bp, Homo sapiens
aactttgtgttatta

SEQ ID NO: 416189 - DNA, 15 bp, Homo sapiens
caactttgtgttatt

SEQ ID NO: 416190 - DNA, 15 bp, Homo sapiens
acaactttgtgttat

SEQ ID NO: 416191 - DNA, 15 bp, Homo sapiens
cacaactttgtgtta

SEQ ID NO: 416192 - DNA, 15 bp, Homo sapiens
tcacaactttgtgtt

SEQ ID NO: 416193 - DNA, 15 bp, Homo sapiens
ttcacaactttgtgt

SEQ ID NO: 416194 - DNA, 15 bp, Homo sapiens
tttcacaactttgtg

SEQ ID NO: 416195 - DNA, 15 bp, Homo sapiens
ttttcacaactttgt

SEQ ID NO: 416196 - DNA, 15 bp, Homo sapiens
attttcacaactttg

SEQ ID NO: 416197 - DNA, 15 bp, Homo sapiens
aattttcacaacttt

SEQ ID NO: 416198 - DNA, 15 bp, Homo sapiens
aaattttcacaactt

SEQ ID NO: 416199 - DNA, 15 bp, Homo sapiens
taaattttcacaact

SEQ ID NO: 416200 - DNA, 15 bp, Homo sapiens
gtaaattttcacaac

SEQ ID NO: 416201 - DNA, 15 bp, Homo sapiens
agtaaattttcacaa

SEQ ID NO: 416202 - DNA, 15 bp, Homo sapiens
tagtaaattttcaca

SEQ ID NO: 416203 - DNA, 15 bp, Homo sapiens
ttagtaaattttcac

SEQ ID NO: 416204 - DNA, 15 bp, Homo sapiens
cttagtaaattttca

SEQ ID NO: 416205 - DNA, 15 bp, Homo sapiens
tcttagtaaattttc

SEQ ID NO: 416206 - DNA, 15 bp, Homo sapiens
gtcttagtaaatttt

SEQ ID NO: 416207 - DNA, 15 bp, Homo sapiens
tgtcttagtaaattt

SEQ ID NO: 416208 - DNA, 15 bp, Homo sapiens
gtgtcttagtaaatt

SEQ ID NO: 416209 - DNA, 15 bp, Homo sapiens
ggtgtcttagtaaat

SEQ ID NO: 416210 - DNA, 15 bp, Homo sapiens
tggtgtcttagtaaa

SEQ ID NO: 416211 - DNA, 15 bp, Homo sapiens
atggtgtcttagtaa

SEQ ID NO: 416212 - DNA, 15 bp, Homo sapiens
catggtgtcttagta

SEQ ID NO: 416213 - DNA, 15 bp, Homo sapiens
acatggtgtcttagt

SEQ ID NO: 416214 - DNA, 15 bp, Homo sapiens
tacatggtgtcttag

SEQ ID NO: 416215 - DNA, 15 bp, Homo sapiens
ttacatggtgtctta

SEQ ID NO: 416216 - DNA, 15 bp, Homo sapiens
tttacatggtgtctt

SEQ ID NO: 416217 - DNA, 15 bp, Homo sapiens
ctttacatggtgtct

SEQ ID NO: 416218 - DNA, 15 bp, Homo sapiens
gctttacatggtgtc

SEQ ID NO: 416219 - DNA, 15 bp, Homo sapiens
tgctttacatggtgt

SEQ ID NO: 416220 - DNA, 15 bp, Homo sapiens
atgctttacatggtg

SEQ ID NO: 416221 - DNA, 15 bp, Homo sapiens
aatgctttacatggt

SEQ ID NO: 416222 - DNA, 15 bp, Homo sapiens
aaatgctttacatgg

SEQ ID NO: 416223 - DNA, 15 bp, Homo sapiens
taaatgctttacatg

SEQ ID NO: 416224 - DNA, 15 bp, Homo sapiens
ctaaatgctttacat

SEQ ID NO: 416225 - DNA, 15 bp, Homo sapiens
gctaaatgctttaca

SEQ ID NO: 416226 - DNA, 15 bp, Homo sapiens
ggctaaatgctttac

SEQ ID NO: 416227 - DNA, 15 bp, Homo sapiens
gggctaaatgcttta

SEQ ID NO: 416228 - DNA, 15 bp, Homo sapiens
tgggctaaatgcttt

SEQ ID NO: 416229 - DNA, 15 bp, Homo sapiens
atgggctaaatgctt

SEQ ID NO: 416230 - DNA, 15 bp, Homo sapiens
aatgggctaaatgct

SEQ ID NO: 416231 - DNA, 15 bp, Homo sapiens
caatgggctaaatgc

SEQ ID NO: 416232 - DNA, 15 bp, Homo sapiens
gcaatgggctaaatg

SEQ ID NO: 416233 - DNA, 15 bp, Homo sapiens
agcaatgggctaaat

SEQ ID NO: 416234 - DNA, 15 bp, Homo sapiens
cagcaatgggctaaa

SEQ ID NO: 416235 - DNA, 15 bp, Homo sapiens
ccagcaatgggctaa

SEQ ID NO: 416236 - DNA, 15 bp, Homo sapiens
accagcaatgggcta

SEQ ID NO: 416237 - DNA, 15 bp, Homo sapiens
aaccagcaatgggct

SEQ ID NO: 416238 - DNA, 15 bp, Homo sapiens
caaccagcaatgggc

SEQ ID NO: 416239 - DNA, 15 bp, Homo sapiens
acaaccagcaatggg

SEQ ID NO: 416240 - DNA, 15 bp, Homo sapiens
aacaaccagcaatgg

SEQ ID NO: 416241 - DNA, 15 bp, Homo sapiens
aaacaaccagcaatg

SEQ ID NO: 416242 - DNA, 15 bp, Homo sapiens
aaaacaaccagcaat

SEQ ID NO: 416243 - DNA, 15 bp, Homo sapiens
taaaacaaccagcaa

SEQ ID NO: 416244 - DNA, 15 bp, Homo sapiens
ataaaacaaccagca

SEQ ID NO: 416245 - DNA, 15 bp, Homo sapiens
cataaaacaaccagc

SEQ ID NO: 416246 - DNA, 15 bp, Homo sapiens
tcataaaacaaccag

SEQ ID NO: 416247 - DNA, 15 bp, Homo sapiens
ttcataaaacaacca

SEQ ID NO: 416248 - DNA, 15 bp, Homo sapiens
cttcataaaacaacc

SEQ ID NO: 416249 - DNA, 15 bp, Homo sapiens
tcttcataaaacaac

SEQ ID NO: 416250 - DNA, 15 bp, Homo sapiens
atcttcataaaacaa

SEQ ID NO: 416251 - DNA, 15 bp, Homo sapiens
aatcttcataaaaca

SEQ ID NO: 416252 - DNA, 15 bp, Homo sapiens
gaatcttcataaaac

SEQ ID NO: 416253 - DNA, 15 bp, Homo sapiens
agaatcttcataaaa

SEQ ID NO: 416254 - DNA, 15 bp, Homo sapiens
tagaatcttcataaa

SEQ ID NO: 416255 - DNA, 15 bp, Homo sapiens
atagaatcttcataa

SEQ ID NO: 416256 - DNA, 15 bp, Homo sapiens
catagaatcttcata

SEQ ID NO: 416257 - DNA, 15 bp, Homo sapiens
tcatagaatcttcat

SEQ ID NO: 416258 - DNA, 15 bp, Homo sapiens
ctcatagaatcttca

SEQ ID NO: 416259 - DNA, 15 bp, Homo sapiens
actcatagaatcttc

SEQ ID NO: 416260 - DNA, 15 bp, Homo sapiens
cactcatagaatctt

SEQ ID NO: 416261 - DNA, 15 bp, Homo sapiens
acactcatagaatct

SEQ ID NO: 416262 - DNA, 15 bp, Homo sapiens
aacactcatagaatc

SEQ ID NO: 416263 - DNA, 15 bp, Homo sapiens
aaacactcatagaat

SEQ ID NO: 416264 - DNA, 15 bp, Homo sapiens
caaacactcatagaa

SEQ ID NO: 416265 - DNA, 15 bp, Homo sapiens
gcaaacactcataga

SEQ ID NO: 416266 - DNA, 15 bp, Homo sapiens
agcaaacactcatag

SEQ ID NO: 416267 - DNA, 15 bp, Homo sapiens
cagcaaacactcata

SEQ ID NO: 416268 - DNA, 15 bp, Homo sapiens
gcagcaaacactcat

SEQ ID NO: 416269 - DNA, 15 bp, Homo sapiens
ggcagcaaacactca

SEQ ID NO: 416270 - DNA, 15 bp, Homo sapiens
tggcagcaaacactc

SEQ ID NO: 416271 - DNA, 15 bp, Homo sapiens
atggcagcaaacact

SEQ ID NO: 416272 - DNA, 15 bp, Homo sapiens
aatggcagcaaacac

SEQ ID NO: 416273 - DNA, 15 bp, Homo sapiens
taatggcagcaaaca

SEQ ID NO: 416274 - DNA, 15 bp, Homo sapiens
ataatggcagcaaac

SEQ ID NO: 416275 - DNA, 15 bp, Homo sapiens
aataatggcagcaaa

SEQ ID NO: 416276 - DNA, 15 bp, Homo sapiens
taataatggcagcaa

SEQ ID NO: 416277 - DNA, 15 bp, Homo sapiens
ataataatggcagca

SEQ ID NO: 416278 - DNA, 15 bp, Homo sapiens
aataataatggcagc

SEQ ID NO: 416279 - DNA, 15 bp, Homo sapiens
taataataatggcag

SEQ ID NO: 416280 - DNA, 15 bp, Homo sapiens
ataataataatggca

SEQ ID NO: 416281 - DNA, 15 bp, Homo sapiens
aataataataatggc

SEQ ID NO: 416282 - DNA, 15 bp, Homo sapiens
gaataataataatgg

SEQ ID NO: 416283 - DNA, 15 bp, Homo sapiens
tgaataataataatg

SEQ ID NO: 416284 - DNA, 15 bp, Homo sapiens
atgaataataataat

SEQ ID NO: 416285 - DNA, 15 bp, Homo sapiens
aatgaataataataa

SEQ ID NO: 416286 - DNA, 15 bp, Homo sapiens
taatgaataataata

SEQ ID NO: 416287 - DNA, 15 bp, Homo sapiens
ataatgaataataat

SEQ ID NO: 416288 - DNA, 15 bp, Homo sapiens
aataatgaataataa

SEQ ID NO: 416289 - DNA, 15 bp, Homo sapiens
taataatgaataata

SEQ ID NO: 416290 - DNA, 15 bp, Homo sapiens
ataataatgaataat

SEQ ID NO: 416291 - DNA, 15 bp, Homo sapiens
aataataatgaataa

SEQ ID NO: 416292 - DNA, 15 bp, Homo sapiens
taataataatgaata

SEQ ID NO: 416293 - DNA, 15 bp, Homo sapiens
ataataataatgaat

SEQ ID NO: 416294 - DNA, 15 bp, Homo sapiens
aataataataatgaa

SEQ ID NO: 416295 - DNA, 15 bp, Homo sapiens
aaataataataatga

SEQ ID NO: 416296 - DNA, 15 bp, Homo sapiens
caaataataataatg

SEQ ID NO: 416297 - DNA, 15 bp, Homo sapiens
acaaataataataat

SEQ ID NO: 416298 - DNA, 15 bp, Homo sapiens
cacaaataataataa

SEQ ID NO: 416299 - DNA, 15 bp, Homo sapiens
ccacaaataataata

SEQ ID NO: 416300 - DNA, 15 bp, Homo sapiens
cccacaaataataat

SEQ ID NO: 416301 - DNA, 15 bp, Homo sapiens
tcccacaaataataa

SEQ ID NO: 416302 - DNA, 15 bp, Homo sapiens
ctcccacaaataata

SEQ ID NO: 416303 - DNA, 15 bp, Homo sapiens
cctcccacaaataat

SEQ ID NO: 416304 - DNA, 15 bp, Homo sapiens
tcctcccacaaataa

SEQ ID NO: 416305 - DNA, 15 bp, Homo sapiens
ttcctcccacaaata

SEQ ID NO: 416306 - DNA, 15 bp, Homo sapiens
cttcctcccacaaat

SEQ ID NO: 416307 - DNA, 15 bp, Homo sapiens
acttcctcccacaaa

SEQ ID NO: 416308 - DNA, 15 bp, Homo sapiens
tacttcctcccacaa

SEQ ID NO: 416309 - DNA, 15 bp, Homo sapiens
ttacttcctcccaca

SEQ ID NO: 416310 - DNA, 15 bp, Homo sapiens
tttacttcctcccac

SEQ ID NO: 416311 - DNA, 15 bp, Homo sapiens
ctttacttcctccca

SEQ ID NO: 416312 - DNA, 15 bp, Homo sapiens
actttacttcctccc

SEQ ID NO: 416313 - DNA, 15 bp, Homo sapiens
aactttacttcctcc

SEQ ID NO: 416314 - DNA, 15 bp, Homo sapiens
gaactttacttcctc

SEQ ID NO: 416315 - DNA, 15 bp, Homo sapiens
tgaactttacttcct

SEQ ID NO: 416316 - DNA, 15 bp, Homo sapiens
ttgaactttacttcc

SEQ ID NO: 416317 - DNA, 15 bp, Homo sapiens
cttgaactttacttc

SEQ ID NO: 416318 - DNA, 15 bp, Homo sapiens
acttgaactttactt

SEQ ID NO: 416319 - DNA, 15 bp, Homo sapiens
tacttgaactttact

SEQ ID NO: 416320 - DNA, 15 bp, Homo sapiens
gtacttgaactttac

SEQ ID NO: 416321 - DNA, 15 bp, Homo sapiens
ggtacttgaacttta

SEQ ID NO: 416322 - DNA, 15 bp, Homo sapiens
tggtacttgaacttt

SEQ ID NO: 416323 - DNA, 15 bp, Homo sapiens
ttggtacttgaactt

SEQ ID NO: 416324 - DNA, 15 bp, Homo sapiens
attggtacttgaact

SEQ ID NO: 416325 - DNA, 15 bp, Homo sapiens
tattggtacttgaac

SEQ ID NO: 416326 - DNA, 15 bp, Homo sapiens
ttattggtacttgaa

SEQ ID NO: 416327 - DNA, 15 bp, Homo sapiens
attattggtacttga

SEQ ID NO: 416328 - DNA, 15 bp, Homo sapiens
tattattggtacttg

SEQ ID NO: 416329 - DNA, 15 bp, Homo sapiens
ttattattggtactt

SEQ ID NO: 416330 - DNA, 15 bp, Homo sapiens
attattattggtact

SEQ ID NO: 416331 - DNA, 15 bp, Homo sapiens
aattattattggtac

SEQ ID NO: 416332 - DNA, 15 bp, Homo sapiens
aaattattattggta

SEQ ID NO: 416333 - DNA, 15 bp, Homo sapiens
aaaattattattggt

SEQ ID NO: 416334 - DNA, 15 bp, Homo sapiens
gaaaattattattgg

SEQ ID NO: 416335 - DNA, 15 bp, Homo sapiens
tgaaaattattattg

SEQ ID NO: 416336 - DNA, 15 bp, Homo sapiens
ttgaaaattattatt

SEQ ID NO: 416337 - DNA, 15 bp, Homo sapiens
gttgaaaattattat

SEQ ID NO: 416338 - DNA, 15 bp, Homo sapiens
ggttgaaaattatta

SEQ ID NO: 416339 - DNA, 15 bp, Homo sapiens
tggttgaaaattatt

SEQ ID NO: 416340 - DNA, 15 bp, Homo sapiens
atggttgaaaattat

SEQ ID NO: 416341 - DNA, 15 bp, Homo sapiens
aatggttgaaaatta

SEQ ID NO: 416342 - DNA, 15 bp, Homo sapiens
taatggttgaaaatt

SEQ ID NO: 416343 - DNA, 15 bp, Homo sapiens
gtaatggttgaaaat

SEQ ID NO: 416344 - DNA, 15 bp, Homo sapiens
tgtaatggttgaaaa

SEQ ID NO: 416345 - DNA, 15 bp, Homo sapiens
ttgtaatggttgaaa

SEQ ID NO: 416346 - DNA, 15 bp, Homo sapiens
tttgtaatggttgaa

SEQ ID NO: 416347 - DNA, 15 bp, Homo sapiens
atttgtaatggttga

SEQ ID NO: 416348 - DNA, 15 bp, Homo sapiens
aatttgtaatggttg

SEQ ID NO: 416349 - DNA, 15 bp, Homo sapiens
caatttgtaatggtt

SEQ ID NO: 416350 - DNA, 15 bp, Homo sapiens
acaatttgtaatggt

SEQ ID NO: 416351 - DNA, 15 bp, Homo sapiens
cacaatttgtaatgg

SEQ ID NO: 416352 - DNA, 15 bp, Homo sapiens
tcacaatttgtaatg

SEQ ID NO: 416353 - DNA, 15 bp, Homo sapiens
atcacaatttgtaat

SEQ ID NO: 416354 - DNA, 15 bp, Homo sapiens
aatcacaatttgtaa

SEQ ID NO: 416355 - DNA, 15 bp, Homo sapiens
taatcacaatttgta

SEQ ID NO: 416356 - DNA, 15 bp, Homo sapiens
ataatcacaatttgt

SEQ ID NO: 416357 - DNA, 15 bp, Homo sapiens
tataatcacaatttg

SEQ ID NO: 416358 - DNA, 15 bp, Homo sapiens
atataatcacaattt

SEQ ID NO: 416359 - DNA, 15 bp, Homo sapiens
tatataatcacaatt

SEQ ID NO: 416360 - DNA, 15 bp, Homo sapiens
ttatataatcacaat

SEQ ID NO: 416361 - DNA, 15 bp, Homo sapiens
tttatataatcacaa

SEQ ID NO: 416362 - DNA, 15 bp, Homo sapiens
ttttatataatcaca

SEQ ID NO: 416363 - DNA, 15 bp, Homo sapiens
cttttatataatcac

SEQ ID NO: 416364 - DNA, 15 bp, Homo sapiens
acttttatataatca

SEQ ID NO: 416365 - DNA, 15 bp, Homo sapiens
aacttttatataatc

SEQ ID NO: 416366 - DNA, 15 bp, Homo sapiens
aaacttttatataat

SEQ ID NO: 416367 - DNA, 15 bp, Homo sapiens
aaaacttttatataa

SEQ ID NO: 416368 - DNA, 15 bp, Homo sapiens
taaaacttttatata

SEQ ID NO: 416369 - DNA, 15 bp, Homo sapiens
ttaaaacttttatat

SEQ ID NO: 416370 - DNA, 15 bp, Homo sapiens
tttaaaacttttata

SEQ ID NO: 416371 - DNA, 15 bp, Homo sapiens
ttttaaaacttttat

SEQ ID NO: 416372 - DNA, 15 bp, Homo sapiens
tttttaaaactttta

SEQ ID NO: 416373 - DNA, 15 bp, Homo sapiens
atttttaaaactttt

SEQ ID NO: 416374 - DNA, 15 bp, Homo sapiens
aatttttaaaacttt

SEQ ID NO: 416375 - DNA, 15 bp, Homo sapiens
aaatttttaaaactt

SEQ ID NO: 416376 - DNA, 15 bp, Homo sapiens
gaaatttttaaaact

SEQ ID NO: 416377 - DNA, 15 bp, Homo sapiens
agaaatttttaaaac

SEQ ID NO: 416378 - DNA, 15 bp, Homo sapiens
gagaaatttttaaaa

SEQ ID NO: 416379 - DNA, 15 bp, Homo sapiens
tgagaaatttttaaa

SEQ ID NO: 416380 - DNA, 15 bp, Homo sapiens
ctgagaaatttttaa

SEQ ID NO: 416381 - DNA, 15 bp, Homo sapiens
cctgagaaattttta

SEQ ID NO: 416382 - DNA, 15 bp, Homo sapiens
tcctgagaaattttt

SEQ ID NO: 416383 - DNA, 15 bp, Homo sapiens
ttcctgagaaatttt

SEQ ID NO: 416384 - DNA, 15 bp, Homo sapiens
gttcctgagaaattt

SEQ ID NO: 416385 - DNA, 15 bp, Homo sapiens
ggttcctgagaaatt

SEQ ID NO: 416386 - DNA, 15 bp, Homo sapiens
tggttcctgagaaat

SEQ ID NO: 416387 - DNA, 15 bp, Homo sapiens
ctggttcctgagaaa

SEQ ID NO: 416388 - DNA, 15 bp, Homo sapiens
cctggttcctgagaa

SEQ ID NO: 416389 - DNA, 15 bp, Homo sapiens
ccctggttcctgaga

SEQ ID NO: 416390 - DNA, 15 bp, Homo sapiens
tccctggttcctgag

SEQ ID NO: 416391 - DNA, 15 bp, Homo sapiens
ctccctggttcctga

SEQ ID NO: 416392 - DNA, 15 bp, Homo sapiens
gctccctggttcctg

SEQ ID NO: 416393 - DNA, 15 bp, Homo sapiens
tgctccctggttcct

SEQ ID NO: 416394 - DNA, 15 bp, Homo sapiens
atgctccctggttcc

SEQ ID NO: 416395 - DNA, 15 bp, Homo sapiens
aatgctccctggttc

SEQ ID NO: 416396 - DNA, 15 bp, Homo sapiens
gaatgctccctggtt

SEQ ID NO: 416397 - DNA, 15 bp, Homo sapiens
agaatgctccctggt

SEQ ID NO: 416398 - DNA, 15 bp, Homo sapiens
tagaatgctccctgg

SEQ ID NO: 416399 - DNA, 15 bp, Homo sapiens
atagaatgctccctg

SEQ ID NO: 416400 - DNA, 15 bp, Homo sapiens
aatagaatgctccct

SEQ ID NO: 416401 - DNA, 15 bp, Homo sapiens
aaatagaatgctccc

SEQ ID NO: 416402 - DNA, 15 bp, Homo sapiens
aaaatagaatgctcc

SEQ ID NO: 416403 - DNA, 15 bp, Homo sapiens
aaaaatagaatgctc

SEQ ID NO: 416404 - DNA, 15 bp, Homo sapiens
gaaaaatagaatgct

SEQ ID NO: 416405 - DNA, 15 bp, Homo sapiens
tgaaaaatagaatgc

SEQ ID NO: 416406 - DNA, 15 bp, Homo sapiens
atgaaaaatagaatg

SEQ ID NO: 416407 - DNA, 15 bp, Homo sapiens
aatgaaaaatagaat

SEQ ID NO: 416408 - DNA, 15 bp, Homo sapiens
gaatgaaaaatagaa

SEQ ID NO: 416409 - DNA, 15 bp, Homo sapiens
agaatgaaaaataga

SEQ ID NO: 416410 - DNA, 15 bp, Homo sapiens
tagaatgaaaaatag

SEQ ID NO: 416411 - DNA, 15 bp, Homo sapiens
ttagaatgaaaaata

SEQ ID NO: 416412 - DNA, 15 bp, Homo sapiens
attagaatgaaaaat

SEQ ID NO: 416413 - DNA, 15 bp, Homo sapiens
aattagaatgaaaaa

SEQ ID NO: 416414 - DNA, 15 bp, Homo sapiens
aaattagaatgaaaa

SEQ ID NO: 416415 - DNA, 15 bp, Homo sapiens
caaattagaatgaaa

SEQ ID NO: 416416 - DNA, 15 bp, Homo sapiens
tcaaattagaatgaa

SEQ ID NO: 416417 - DNA, 15 bp, Homo sapiens
ctcaaattagaatga

SEQ ID NO: 416418 - DNA, 15 bp, Homo sapiens
tctcaaattagaatg

SEQ ID NO: 416419 - DNA, 15 bp, Homo sapiens
ttctcaaattagaat

SEQ ID NO: 416420 - DNA, 15 bp, Homo sapiens
attctcaaattagaa

SEQ ID NO: 416421 - DNA, 15 bp, Homo sapiens
tattctcaaattaga

SEQ ID NO: 416422 - DNA, 15 bp, Homo sapiens
ttattctcaaattag

SEQ ID NO: 416423 - DNA, 15 bp, Homo sapiens
tttattctcaaatta

SEQ ID NO: 416424 - DNA, 15 bp, Homo sapiens
ttttattctcaaatt

SEQ ID NO: 416425 - DNA, 15 bp, Homo sapiens
attttattctcaaat

SEQ ID NO: 416426 - DNA, 15 bp, Homo sapiens
aattttattctcaaa

SEQ ID NO: 416427 - DNA, 15 bp, Homo sapiens
taattttattctcaa

SEQ ID NO: 416428 - DNA, 15 bp, Homo sapiens
ataattttattctca

SEQ ID NO: 416429 - DNA, 15 bp, Homo sapiens
tataattttattctc

SEQ ID NO: 416430 - DNA, 15 bp, Homo sapiens
atataattttattct

SEQ ID NO: 416431 - DNA, 15 bp, Homo sapiens
aatataattttattc

SEQ ID NO: 416432 - DNA, 15 bp, Homo sapiens
aaatataattttatt

SEQ ID NO: 416433 - DNA, 15 bp, Homo sapiens
aaaatataattttat

SEQ ID NO: 416434 - DNA, 15 bp, Homo sapiens
taaaatataatttta

SEQ ID NO: 416435 - DNA, 15 bp, Homo sapiens
ataaaatataatttt

SEQ ID NO: 416436 - DNA, 15 bp, Homo sapiens
cataaaatataattt

SEQ ID NO: 416437 - DNA, 15 bp, Homo sapiens
acataaaatataatt

SEQ ID NO: 416438 - DNA, 15 bp, Homo sapiens
aacataaaatataat

SEQ ID NO: 416439 - DNA, 15 bp, Homo sapiens
aaacataaaatataa

SEQ ID NO: 416440 - DNA, 15 bp, Homo sapiens
aaaacataaaatata

SEQ ID NO: 416441 - DNA, 15 bp, Homo sapiens
aaaaacataaaatat

SEQ ID NO: 416442 - DNA, 15 bp, Homo sapiens
taaaaacataaaata

SEQ ID NO: 416443 - DNA, 15 bp, Homo sapiens
gtaaaaacataaaat

SEQ ID NO: 416444 - DNA, 15 bp, Homo sapiens
agtaaaaacataaaa

SEQ ID NO: 416445 - DNA, 15 bp, Homo sapiens
aagtaaaaacataaa

SEQ ID NO: 416446 - DNA, 15 bp, Homo sapiens
aaagtaaaaacataa

SEQ ID NO: 416447 - DNA, 15 bp, Homo sapiens
aaaagtaaaaacata

SEQ ID NO: 416448 - DNA, 15 bp, Homo sapiens
gaaaagtaaaaacat

SEQ ID NO: 416449 - DNA, 15 bp, Homo sapiens
agaaaagtaaaaaca

SEQ ID NO: 416450 - DNA, 15 bp, Homo sapiens
gagaaaagtaaaaac

SEQ ID NO: 416451 - DNA, 15 bp, Homo sapiens
tgagaaaagtaaaaa

SEQ ID NO: 416452 - DNA, 15 bp, Homo sapiens
ttgagaaaagtaaaa

SEQ ID NO: 416453 - DNA, 15 bp, Homo sapiens
tttgagaaaagtaaa

SEQ ID NO: 416454 - DNA, 15 bp, Homo sapiens
ttttgagaaaagtaa

SEQ ID NO: 416455 - DNA, 15 bp, Homo sapiens
cttttgagaaaagta

SEQ ID NO: 416456 - DNA, 15 bp, Homo sapiens
gcttttgagaaaagt

SEQ ID NO: 416457 - DNA, 15 bp, Homo sapiens
cgcttttgagaaaag

SEQ ID NO: 416458 - DNA, 15 bp, Homo sapiens
ccgcttttgagaaaa

SEQ ID NO: 416459 - DNA, 15 bp, Homo sapiens
accgcttttgagaaa

SEQ ID NO: 416460 - DNA, 15 bp, Homo sapiens
taccgcttttgagaa

SEQ ID NO: 416461 - DNA, 15 bp, Homo sapiens
ctaccgcttttgaga

SEQ ID NO: 416462 - DNA, 15 bp, Homo sapiens
cctaccgcttttgag

SEQ ID NO: 416463 - DNA, 15 bp, Homo sapiens
tcctaccgcttttga

SEQ ID NO: 416464 - DNA, 15 bp, Homo sapiens
ctcctaccgcttttg

SEQ ID NO: 416465 - DNA, 15 bp, Homo sapiens
gctcctaccgctttt

SEQ ID NO: 416466 - DNA, 15 bp, Homo sapiens
tgctcctaccgcttt

SEQ ID NO: 416467 - DNA, 15 bp, Homo sapiens
ttgctcctaccgctt

SEQ ID NO: 416468 - DNA, 15 bp, Homo sapiens
tttgctcctaccgct

SEQ ID NO: 416469 - DNA, 15 bp, Homo sapiens
atttgctcctaccgc

SEQ ID NO: 416470 - DNA, 15 bp, Homo sapiens
gatttgctcctaccg

SEQ ID NO: 416471 - DNA, 15 bp, Homo sapiens
tgatttgctcctacc

SEQ ID NO: 416472 - DNA, 15 bp, Homo sapiens
ctgatttgctcctac

SEQ ID NO: 416473 - DNA, 15 bp, Homo sapiens
actgatttgctccta

SEQ ID NO: 416474 - DNA, 15 bp, Homo sapiens
aactgatttgctcct

SEQ ID NO: 416475 - DNA, 15 bp, Homo sapiens
aaactgatttgctcc

SEQ ID NO: 416476 - DNA, 15 bp, Homo sapiens
aaaactgatttgctc

SEQ ID NO: 416477 - DNA, 15 bp, Homo sapiens
taaaactgatttgct

SEQ ID NO: 416478 - DNA, 15 bp, Homo sapiens
ctaaaactgatttgc

SEQ ID NO: 416479 - DNA, 15 bp, Homo sapiens
cctaaaactgatttg

SEQ ID NO: 416480 - DNA, 15 bp, Homo sapiens
acctaaaactgattt

SEQ ID NO: 416481 - DNA, 15 bp, Homo sapiens
aacctaaaactgatt

SEQ ID NO: 416482 - DNA, 15 bp, Homo sapiens
caacctaaaactgat

SEQ ID NO: 416483 - DNA, 15 bp, Homo sapiens
acaacctaaaactga

SEQ ID NO: 416484 - DNA, 15 bp, Homo sapiens
gacaacctaaaactg

SEQ ID NO: 416485 - DNA, 15 bp, Homo sapiens
tgacaacctaaaact

SEQ ID NO: 416486 - DNA, 15 bp, Homo sapiens
atgacaacctaaaac

SEQ ID NO: 416487 - DNA, 15 bp, Homo sapiens
aatgacaacctaaaa

SEQ ID NO: 416488 - DNA, 15 bp, Homo sapiens
aaatgacaacctaaa

SEQ ID NO: 416489 - DNA, 15 bp, Homo sapiens
aaaatgacaacctaa

SEQ ID NO: 416490 - DNA, 15 bp, Homo sapiens
aaaaatgacaaccta

SEQ ID NO: 416491 - DNA, 15 bp, Homo sapiens
aaaaaatgacaacct

SEQ ID NO: 416492 - DNA, 15 bp, Homo sapiens
gaaaaaatgacaacc

SEQ ID NO: 416493 - DNA, 15 bp, Homo sapiens
agaaaaaatgacaac

SEQ ID NO: 416494 - DNA, 15 bp, Homo sapiens
cagaaaaaatgacaa

SEQ ID NO: 416495 - DNA, 15 bp, Homo sapiens
acagaaaaaatgaca

SEQ ID NO: 416496 - DNA, 15 bp, Homo sapiens
aacagaaaaaatgac

SEQ ID NO: 416497 - DNA, 15 bp, Homo sapiens
aaacagaaaaaatga

SEQ ID NO: 416498 - DNA, 15 bp, Homo sapiens
gaaacagaaaaaatg

SEQ ID NO: 416499 - DNA, 15 bp, Homo sapiens
ggaaacagaaaaaat

SEQ ID NO: 416500 - DNA, 15 bp, Homo sapiens
tggaaacagaaaaaa

SEQ ID NO: 416501 - DNA, 15 bp, Homo sapiens
ctggaaacagaaaaa

SEQ ID NO: 416502 - DNA, 15 bp, Homo sapiens
cctggaaacagaaaa

SEQ ID NO: 416503 - DNA, 15 bp, Homo sapiens
acctggaaacagaaa

SEQ ID NO: 416504 - DNA, 15 bp, Homo sapiens
aacctggaaacagaa

SEQ ID NO: 416505 - DNA, 15 bp, Homo sapiens
aaacctggaaacaga

SEQ ID NO: 416506 - DNA, 15 bp, Homo sapiens
aaaacctggaaacag

SEQ ID NO: 416507 - DNA, 15 bp, Homo sapiens
aaaaacctggaaaca

SEQ ID NO: 416508 - DNA, 15 bp, Homo sapiens
taaaaacctggaaac

SEQ ID NO: 416509 - DNA, 15 bp, Homo sapiens
ctaaaaacctggaaa

SEQ ID NO: 416510 - DNA, 15 bp, Homo sapiens
tctaaaaacctggaa

SEQ ID NO: 416511 - DNA, 15 bp, Homo sapiens
ttctaaaaacctgga

SEQ ID NO: 416512 - DNA, 15 bp, Homo sapiens
gttctaaaaacctgg

SEQ ID NO: 416513 - DNA, 15 bp, Homo sapiens
tgttctaaaaacctg

SEQ ID NO: 416514 - DNA, 15 bp, Homo sapiens
ctgttctaaaaacct

SEQ ID NO: 416515 - DNA, 15 bp, Homo sapiens
actgttctaaaaacc

SEQ ID NO: 416516 - DNA, 15 bp, Homo sapiens
tactgttctaaaaac

SEQ ID NO: 416517 - DNA, 15 bp, Homo sapiens
ctactgttctaaaaa

SEQ ID NO: 416518 - DNA, 15 bp, Homo sapiens
tctactgttctaaaa

SEQ ID NO: 416519 - DNA, 15 bp, Homo sapiens
atctactgttctaaa

SEQ ID NO: 416520 - DNA, 15 bp, Homo sapiens
tatctactgttctaa

SEQ ID NO: 416521 - DNA, 15 bp, Homo sapiens
gtatctactgttcta

SEQ ID NO: 416522 - DNA, 15 bp, Homo sapiens
ggtatctactgttct

SEQ ID NO: 416523 - DNA, 15 bp, Homo sapiens
aggtatctactgttc

SEQ ID NO: 416524 - DNA, 15 bp, Homo sapiens
caggtatctactgtt

SEQ ID NO: 416525 - DNA, 15 bp, Homo sapiens
acaggtatctactgt

SEQ ID NO: 416526 - DNA, 15 bp, Homo sapiens
aacaggtatctactg

SEQ ID NO: 416527 - DNA, 15 bp, Homo sapiens
gaacaggtatctact

SEQ ID NO: 416528 - DNA, 15 bp, Homo sapiens
agaacaggtatctac

SEQ ID NO: 416529 - DNA, 15 bp, Homo sapiens
gagaacaggtatcta

SEQ ID NO: 416530 - DNA, 15 bp, Homo sapiens
agagaacaggtatct

SEQ ID NO: 416531 - DNA, 15 bp, Homo sapiens
cagagaacaggtatc

SEQ ID NO: 416532 - DNA, 15 bp, Homo sapiens
acagagaacaggtat

SEQ ID NO: 416533 - DNA, 15 bp, Homo sapiens
tacagagaacaggta

SEQ ID NO: 416534 - DNA, 15 bp, Homo sapiens
ttacagagaacaggt

SEQ ID NO: 416535 - DNA, 15 bp, Homo sapiens
attacagagaacagg

SEQ ID NO: 416536 - DNA, 15 bp, Homo sapiens
aattacagagaacag

SEQ ID NO: 416537 - DNA, 15 bp, Homo sapiens
aaattacagagaaca

SEQ ID NO: 416538 - DNA, 15 bp, Homo sapiens
caaattacagagaac

SEQ ID NO: 416539 - DNA, 15 bp, Homo sapiens
ccaaattacagagaa

SEQ ID NO: 416540 - DNA, 15 bp, Homo sapiens
accaaattacagaga

SEQ ID NO: 416541 - DNA, 15 bp, Homo sapiens
taccaaattacagag

SEQ ID NO: 416542 - DNA, 15 bp, Homo sapiens
ataccaaattacaga

SEQ ID NO: 416543 - DNA, 15 bp, Homo sapiens
cataccaaattacag

SEQ ID NO: 416544 - DNA, 15 bp, Homo sapiens
acataccaaattaca

SEQ ID NO: 416545 - DNA, 15 bp, Homo sapiens
gacataccaaattac

SEQ ID NO: 416546 - DNA, 15 bp, Homo sapiens
agacataccaaatta

SEQ ID NO: 416547 - DNA, 15 bp, Homo sapiens
tagacataccaaatt

SEQ ID NO: 416548 - DNA, 15 bp, Homo sapiens
atagacataccaaat

SEQ ID NO: 416549 - DNA, 15 bp, Homo sapiens
gatagacataccaaa

SEQ ID NO: 416550 - DNA, 15 bp, Homo sapiens
agatagacataccaa

SEQ ID NO: 416551 - DNA, 15 bp, Homo sapiens
cagatagacatacca

SEQ ID NO: 416552 - DNA, 15 bp, Homo sapiens
acagatagacatacc

SEQ ID NO: 416553 - DNA, 15 bp, Homo sapiens
cacagatagacatac

SEQ ID NO: 416554 - DNA, 15 bp, Homo sapiens
acacagatagacata

SEQ ID NO: 416555 - DNA, 15 bp, Homo sapiens
tacacagatagacat

SEQ ID NO: 416556 - DNA, 15 bp, Homo sapiens
ttacacagatagaca

SEQ ID NO: 416557 - DNA, 15 bp, Homo sapiens
attacacagatagac

SEQ ID NO: 416558 - DNA, 15 bp, Homo sapiens
cattacacagataga

SEQ ID NO: 416559 - DNA, 15 bp, Homo sapiens
gcattacacagatag

SEQ ID NO: 416560 - DNA, 15 bp, Homo sapiens
agcattacacagata

SEQ ID NO: 416561 - DNA, 15 bp, Homo sapiens
aagcattacacagat

SEQ ID NO: 416562 - DNA, 15 bp, Homo sapiens
taagcattacacaga

SEQ ID NO: 416563 - DNA, 15 bp, Homo sapiens
ttaagcattacacag

SEQ ID NO: 416564 - DNA, 15 bp, Homo sapiens
cttaagcattacaca

SEQ ID NO: 416565 - DNA, 15 bp, Homo sapiens
acttaagcattacac

SEQ ID NO: 416566 - DNA, 15 bp, Homo sapiens
gacttaagcattaca

SEQ ID NO: 416567 - DNA, 15 bp, Homo sapiens
tgacttaagcattac

SEQ ID NO: 416568 - DNA, 15 bp, Homo sapiens
ctgacttaagcatta

SEQ ID NO: 416569 - DNA, 15 bp, Homo sapiens
actgacttaagcatt

SEQ ID NO: 416570 - DNA, 15 bp, Homo sapiens
gactgacttaagcat

SEQ ID NO: 416571 - DNA, 15 bp, Homo sapiens
ggactgacttaagca

SEQ ID NO: 416572 - DNA, 15 bp, Homo sapiens
aggactgacttaagc

SEQ ID NO: 416573 - DNA, 15 bp, Homo sapiens
caggactgacttaag

SEQ ID NO: 416574 - DNA, 15 bp, Homo sapiens
ccaggactgacttaa

SEQ ID NO: 416575 - DNA, 15 bp, Homo sapiens
gccaggactgactta

SEQ ID NO: 416576 - DNA, 15 bp, Homo sapiens
cgccaggactgactt

SEQ ID NO: 416577 - DNA, 15 bp, Homo sapiens
gcgccaggactgact

SEQ ID NO: 416578 - DNA, 15 bp, Homo sapiens
agcgccaggactgac

SEQ ID NO: 416579 - DNA, 15 bp, Homo sapiens
aagcgccaggactga

SEQ ID NO: 416580 - DNA, 15 bp, Homo sapiens
caagcgccaggactg

SEQ ID NO: 416581 - DNA, 15 bp, Homo sapiens
acaagcgccaggact

SEQ ID NO: 416582 - DNA, 15 bp, Homo sapiens
aacaagcgccaggac

SEQ ID NO: 416583 - DNA, 15 bp, Homo sapiens
gaacaagcgccagga

SEQ ID NO: 416584 - DNA, 15 bp, Homo sapiens
ggaacaagcgccagg

SEQ ID NO: 416585 - DNA, 15 bp, Homo sapiens
aggaacaagcgccag

SEQ ID NO: 416586 - DNA, 15 bp, Homo sapiens
taggaacaagcgcca

SEQ ID NO: 416587 - DNA, 15 bp, Homo sapiens
ttaggaacaagcgcc

SEQ ID NO: 416588 - DNA, 15 bp, Homo sapiens
cttaggaacaagcgc

SEQ ID NO: 416589 - DNA, 15 bp, Homo sapiens
tcttaggaacaagcg

SEQ ID NO: 416590 - DNA, 15 bp, Homo sapiens
ttcttaggaacaagc

SEQ ID NO: 416591 - DNA, 15 bp, Homo sapiens
tttcttaggaacaag

SEQ ID NO: 416592 - DNA, 15 bp, Homo sapiens
ttttcttaggaacaa

SEQ ID NO: 416593 - DNA, 15 bp, Homo sapiens
cttttcttaggaaca

SEQ ID NO: 416594 - DNA, 15 bp, Homo sapiens
ccttttcttaggaac

SEQ ID NO: 416595 - DNA, 15 bp, Homo sapiens
tccttttcttaggaa

SEQ ID NO: 416596 - DNA, 15 bp, Homo sapiens
ttccttttcttagga

SEQ ID NO: 416597 - DNA, 15 bp, Homo sapiens
tttccttttcttagg

SEQ ID NO: 416598 - DNA, 15 bp, Homo sapiens
ttttccttttcttag

SEQ ID NO: 416599 - DNA, 15 bp, Homo sapiens
attttccttttctta

SEQ ID NO: 416600 - DNA, 15 bp, Homo sapiens
tattttccttttctt

SEQ ID NO: 416601 - DNA, 15 bp, Homo sapiens
ttattttccttttct

SEQ ID NO: 416602 - DNA, 15 bp, Homo sapiens
cttattttccttttc

SEQ ID NO: 416603 - DNA, 15 bp, Homo sapiens
tcttattttcctttt

SEQ ID NO: 416604 - DNA, 15 bp, Homo sapiens
ctcttattttccttt

SEQ ID NO: 416605 - DNA, 15 bp, Homo sapiens
cctcttattttcctt

SEQ ID NO: 416606 - DNA, 15 bp, Homo sapiens
gcctcttattttcct

SEQ ID NO: 416607 - DNA, 15 bp, Homo sapiens
tgcctcttattttcc

SEQ ID NO: 416608 - DNA, 15 bp, Homo sapiens
ttgcctcttattttc

SEQ ID NO: 416609 - DNA, 15 bp, Homo sapiens
tttgcctcttatttt

SEQ ID NO: 416610 - DNA, 15 bp, Homo sapiens
atttgcctcttattt

SEQ ID NO: 416611 - DNA, 15 bp, Homo sapiens
tatttgcctcttatt

SEQ ID NO: 416612 - DNA, 15 bp, Homo sapiens
gtatttgcctcttat

SEQ ID NO: 416613 - DNA, 15 bp, Homo sapiens
tgtatttgcctctta

SEQ ID NO: 416614 - DNA, 15 bp, Homo sapiens
atgtatttgcctctt

SEQ ID NO: 416615 - DNA, 15 bp, Homo sapiens
tatgtatttgcctct

SEQ ID NO: 416616 - DNA, 15 bp, Homo sapiens
atatgtatttgcctc

SEQ ID NO: 416617 - DNA, 15 bp, Homo sapiens
aatatgtatttgcct

SEQ ID NO: 416618 - DNA, 15 bp, Homo sapiens
caatatgtatttgcc

SEQ ID NO: 416619 - DNA, 15 bp, Homo sapiens
tcaatatgtatttgc

SEQ ID NO: 416620 - DNA, 15 bp, Homo sapiens
atcaatatgtatttg

SEQ ID NO: 416621 - DNA, 15 bp, Homo sapiens
aatcaatatgtattt

SEQ ID NO: 416622 - DNA, 15 bp, Homo sapiens
gaatcaatatgtatt

SEQ ID NO: 416623 - DNA, 15 bp, Homo sapiens
agaatcaatatgtat

SEQ ID NO: 416624 - DNA, 15 bp, Homo sapiens
cagaatcaatatgta

SEQ ID NO: 416625 - DNA, 15 bp, Homo sapiens
acagaatcaatatgt

SEQ ID NO: 416626 - DNA, 15 bp, Homo sapiens
tacagaatcaatatg

SEQ ID NO: 416627 - DNA, 15 bp, Homo sapiens
gtacagaatcaatat

SEQ ID NO: 416628 - DNA, 15 bp, Homo sapiens
tgtacagaatcaata

SEQ ID NO: 416629 - DNA, 15 bp, Homo sapiens
ttgtacagaatcaat

SEQ ID NO: 416630 - DNA, 15 bp, Homo sapiens
cttgtacagaatcaa

SEQ ID NO: 416631 - DNA, 15 bp, Homo sapiens
tcttgtacagaatca

SEQ ID NO: 416632 - DNA, 15 bp, Homo sapiens
ttcttgtacagaatc

SEQ ID NO: 416633 - DNA, 15 bp, Homo sapiens
tttcttgtacagaat

SEQ ID NO: 416634 - DNA, 15 bp, Homo sapiens
ttttcttgtacagaa

SEQ ID NO: 416635 - DNA, 15 bp, Homo sapiens
tttttcttgtacaga

SEQ ID NO: 416636 - DNA, 15 bp, Homo sapiens
ctttttcttgtacag

SEQ ID NO: 416637 - DNA, 15 bp, Homo sapiens
tctttttcttgtaca

SEQ ID NO: 416638 - DNA, 15 bp, Homo sapiens
ttctttttcttgtac

SEQ ID NO: 416639 - DNA, 15 bp, Homo sapiens
attctttttcttgta

SEQ ID NO: 416640 - DNA, 15 bp, Homo sapiens
tattctttttcttgt

SEQ ID NO: 416641 - DNA, 15 bp, Homo sapiens
ttattctttttcttg

SEQ ID NO: 416642 - DNA, 15 bp, Homo sapiens
tttattctttttctt

SEQ ID NO: 416643 - DNA, 15 bp, Homo sapiens
ctttattctttttct

SEQ ID NO: 416644 - DNA, 15 bp, Homo sapiens
cctttattctttttc

SEQ ID NO: 416645 - DNA, 15 bp, Homo sapiens
tcctttattcttttt

SEQ ID NO: 416646 - DNA, 15 bp, Homo sapiens
ttcctttattctttt

SEQ ID NO: 416647 - DNA, 15 bp, Homo sapiens
cttcctttattcttt

SEQ ID NO: 416648 - DNA, 15 bp, Homo sapiens
ccttcctttattctt

SEQ ID NO: 416649 - DNA, 15 bp, Homo sapiens
cccttcctttattct

SEQ ID NO: 416650 - DNA, 15 bp, Homo sapiens
tcccttcctttattc

SEQ ID NO: 416651 - DNA, 15 bp, Homo sapiens
ctcccttcctttatt

SEQ ID NO: 416652 - DNA, 15 bp, Homo sapiens
tctcccttcctttat

SEQ ID NO: 416653 - DNA, 15 bp, Homo sapiens
ttctcccttccttta

SEQ ID NO: 416654 - DNA, 15 bp, Homo sapiens
tttctcccttccttt

SEQ ID NO: 416655 - DNA, 15 bp, Homo sapiens
ttttctcccttcctt

SEQ ID NO: 416656 - DNA, 15 bp, Homo sapiens
tttttctcccttcct

SEQ ID NO: 416657 - DNA, 15 bp, Homo sapiens
gtttttctcccttcc

SEQ ID NO: 416658 - DNA, 15 bp, Homo sapiens
tgtttttctcccttc

SEQ ID NO: 416659 - DNA, 15 bp, Homo sapiens
gtgtttttctccctt

SEQ ID NO: 416660 - DNA, 15 bp, Homo sapiens
ggtgtttttctccct

SEQ ID NO: 416661 - DNA, 15 bp, Homo sapiens
tggtgtttttctccc

SEQ ID NO: 416662 - DNA, 15 bp, Homo sapiens
ttggtgtttttctcc

SEQ ID NO: 416663 - DNA, 15 bp, Homo sapiens
tttggtgtttttctc

SEQ ID NO: 416664 - DNA, 15 bp, Homo sapiens
gtttggtgtttttct

SEQ ID NO: 416665 - DNA, 15 bp, Homo sapiens
cgtttggtgtttttc

SEQ ID NO: 416666 - DNA, 15 bp, Homo sapiens
acgtttggtgttttt

SEQ ID NO: 416667 - DNA, 15 bp, Homo sapiens
gacgtttggtgtttt

SEQ ID NO: 416668 - DNA, 15 bp, Homo sapiens
tgacgtttggtgttt

SEQ ID NO: 416669 - DNA, 15 bp, Homo sapiens
gtgacgtttggtgtt

SEQ ID NO: 416670 - DNA, 15 bp, Homo sapiens
agtgacgtttggtgt

SEQ ID NO: 416671 - DNA, 15 bp, Homo sapiens
tagtgacgtttggtg

SEQ ID NO: 416672 - DNA, 15 bp, Homo sapiens
ctagtgacgtttggt

SEQ ID NO: 416673 - DNA, 15 bp, Homo sapiens
actagtgacgtttgg

SEQ ID NO: 416674 - DNA, 15 bp, Homo sapiens
cactagtgacgtttg

SEQ ID NO: 416675 - DNA, 15 bp, Homo sapiens
gcactagtgacgttt

SEQ ID NO: 416676 - DNA, 15 bp, Homo sapiens
agcactagtgacgtt

SEQ ID NO: 416677 - DNA, 15 bp, Homo sapiens
gagcactagtgacgt

SEQ ID NO: 416678 - DNA, 15 bp, Homo sapiens
agagcactagtgacg

SEQ ID NO: 416679 - DNA, 15 bp, Homo sapiens
cagagcactagtgac

SEQ ID NO: 416680 - DNA, 15 bp, Homo sapiens
acagagcactagtga

SEQ ID NO: 416681 - DNA, 15 bp, Homo sapiens
cacagagcactagtg

SEQ ID NO: 416682 - DNA, 15 bp, Homo sapiens
tcacagagcactagt

SEQ ID NO: 416683 - DNA, 15 bp, Homo sapiens
gtcacagagcactag

SEQ ID NO: 416684 - DNA, 15 bp, Homo sapiens
tgtcacagagcacta

SEQ ID NO: 416685 - DNA, 15 bp, Homo sapiens
ctgtcacagagcact

SEQ ID NO: 416686 - DNA, 15 bp, Homo sapiens
tctgtcacagagcac

SEQ ID NO: 416687 - DNA, 15 bp, Homo sapiens
ttctgtcacagagca

SEQ ID NO: 416688 - DNA, 15 bp, Homo sapiens
cttctgtcacagagc

SEQ ID NO: 416689 - DNA, 15 bp, Homo sapiens
tcttctgtcacagag

SEQ ID NO: 416690 - DNA, 15 bp, Homo sapiens
ctcttctgtcacaga

SEQ ID NO: 416691 - DNA, 15 bp, Homo sapiens
tctcttctgtcacag

SEQ ID NO: 416692 - DNA, 15 bp, Homo sapiens
ttctcttctgtcaca

SEQ ID NO: 416693 - DNA, 15 bp, Homo sapiens
tttctcttctgtcac

SEQ ID NO: 416694 - DNA, 15 bp, Homo sapiens
ttttctcttctgtca

SEQ ID NO: 416695 - DNA, 15 bp, Homo sapiens
tttttctcttctgtc

SEQ ID NO: 416696 - DNA, 15 bp, Homo sapiens
ctttttctcttctgt

SEQ ID NO: 416697 - DNA, 15 bp, Homo sapiens
cctttttctcttctg

SEQ ID NO: 416698 - DNA, 15 bp, Homo sapiens
acctttttctcttct

SEQ ID NO: 416699 - DNA, 15 bp, Homo sapiens
aacctttttctcttc

SEQ ID NO: 416700 - DNA, 15 bp, Homo sapiens
caacctttttctctt

SEQ ID NO: 416701 - DNA, 15 bp, Homo sapiens
acaacctttttctct

SEQ ID NO: 416702 - DNA, 15 bp, Homo sapiens
cacaacctttttctc

SEQ ID NO: 416703 - DNA, 15 bp, Homo sapiens
acacaacctttttct

SEQ ID NO: 416704 - DNA, 15 bp, Homo sapiens
aacacaacctttttc

SEQ ID NO: 416705 - DNA, 15 bp, Homo sapiens
aaacacaaccttttt

SEQ ID NO: 416706 - DNA, 15 bp, Homo sapiens
gaaacacaacctttt

SEQ ID NO: 416707 - DNA, 15 bp, Homo sapiens
tgaaacacaaccttt

SEQ ID NO: 416708 - DNA, 15 bp, Homo sapiens
atgaaacacaacctt

SEQ ID NO: 416709 - DNA, 15 bp, Homo sapiens
tatgaaacacaacct

SEQ ID NO: 416710 - DNA, 15 bp, Homo sapiens
ttatgaaacacaacc

SEQ ID NO: 416711 - DNA, 15 bp, Homo sapiens
attatgaaacacaac

SEQ ID NO: 416712 - DNA, 15 bp, Homo sapiens
tattatgaaacacaa

SEQ ID NO: 416713 - DNA, 15 bp, Homo sapiens
gtattatgaaacaca

SEQ ID NO: 416714 - DNA, 15 bp, Homo sapiens
tgtattatgaaacac

SEQ ID NO: 416715 - DNA, 15 bp, Homo sapiens
gtgtattatgaaaca

SEQ ID NO: 416716 - DNA, 15 bp, Homo sapiens
agtgtattatgaaac

SEQ ID NO: 416717 - DNA, 15 bp, Homo sapiens
cagtgtattatgaaa

SEQ ID NO: 416718 - DNA, 15 bp, Homo sapiens
tcagtgtattatgaa

SEQ ID NO: 416719 - DNA, 15 bp, Homo sapiens
ctcagtgtattatga

SEQ ID NO: 416720 - DNA, 15 bp, Homo sapiens
cctcagtgtattatg

SEQ ID NO: 416721 - DNA, 15 bp, Homo sapiens
acctcagtgtattat

SEQ ID NO: 416722 - DNA, 15 bp, Homo sapiens
tacctcagtgtatta

SEQ ID NO: 416723 - DNA, 15 bp, Homo sapiens
ctacctcagtgtatt

SEQ ID NO: 416724 - DNA, 15 bp, Homo sapiens
tctacctcagtgtat

SEQ ID NO: 416725 - DNA, 15 bp, Homo sapiens
gtctacctcagtgta

SEQ ID NO: 416726 - DNA, 15 bp, Homo sapiens
agtctacctcagtgt

SEQ ID NO: 416727 - DNA, 15 bp, Homo sapiens
aagtctacctcagtg

SEQ ID NO: 416728 - DNA, 15 bp, Homo sapiens
aaagtctacctcagt

SEQ ID NO: 416729 - DNA, 15 bp, Homo sapiens
taaagtctacctcag

SEQ ID NO: 416730 - DNA, 15 bp, Homo sapiens
ataaagtctacctca

SEQ ID NO: 416731 - DNA, 15 bp, Homo sapiens
tataaagtctacctc

SEQ ID NO: 416732 - DNA, 15 bp, Homo sapiens
atataaagtctacct

SEQ ID NO: 416733 - DNA, 15 bp, Homo sapiens
aatataaagtctacc

SEQ ID NO: 416734 - DNA, 15 bp, Homo sapiens
taatataaagtctac

SEQ ID NO: 416735 - DNA, 15 bp, Homo sapiens
ttaatataaagtcta

SEQ ID NO: 416736 - DNA, 15 bp, Homo sapiens
tttaatataaagtct

SEQ ID NO: 416737 - DNA, 15 bp, Homo sapiens
ttttaatataaagtc

SEQ ID NO: 416738 - DNA, 15 bp, Homo sapiens
tttttaatataaagt

SEQ ID NO: 416739 - DNA, 15 bp, Homo sapiens
gtttttaatataaag

SEQ ID NO: 416740 - DNA, 15 bp, Homo sapiens
atgtttttaatataa

SEQ ID NO: 416741 - DNA, 15 bp, Homo sapiens
tatgtttttaatata

SEQ ID NO: 416742 - DNA, 15 bp, Homo sapiens
gtatgtttttaatat

SEQ ID NO: 416743 - DNA, 15 bp, Homo sapiens
agtatgtttttaata

SEQ ID NO: 416744 - DNA, 15 bp, Homo sapiens
gagtatgtttttaat

SEQ ID NO: 416745 - DNA, 15 bp, Homo sapiens
agagtatgtttttaa

SEQ ID NO: 416746 - DNA, 15 bp, Homo sapiens
gagagtatgttttta

SEQ ID NO: 416747 - DNA, 15 bp, Homo sapiens
ggagagtatgttttt

SEQ ID NO: 416748 - DNA, 15 bp, Homo sapiens
gggagagtatgtttt

SEQ ID NO: 416749 - DNA, 15 bp, Homo sapiens
ggggagagtatgttt

SEQ ID NO: 416750 - DNA, 15 bp, Homo sapiens
tggggagagtatgtt

SEQ ID NO: 416751 - DNA, 15 bp, Homo sapiens
ttggggagagtatgt

SEQ ID NO: 416752 - DNA, 15 bp, Homo sapiens
attggggagagtatg

SEQ ID NO: 416753 - DNA, 15 bp, Homo sapiens
tattggggagagtat

SEQ ID NO: 416754 - DNA, 15 bp, Homo sapiens
gtattggggagagta

SEQ ID NO: 416755 - DNA, 15 bp, Homo sapiens
agtattggggagagt

SEQ ID NO: 416756 - DNA, 15 bp, Homo sapiens
gagtattggggagag

SEQ ID NO: 416757 - DNA, 15 bp, Homo sapiens
agagtattggggaga

SEQ ID NO: 416758 - DNA, 15 bp, Homo sapiens
cagagtattggggag

SEQ ID NO: 416759 - DNA, 15 bp, Homo sapiens
gcagagtattgggga

SEQ ID NO: 416760 - DNA, 15 bp, Homo sapiens
tgcagagtattgggg

SEQ ID NO: 416761 - DNA, 15 bp, Homo sapiens
ttgcagagtattggg

SEQ ID NO: 416762 - DNA, 15 bp, Homo sapiens
cttgcagagtattgg

SEQ ID NO: 416763 - DNA, 15 bp, Homo sapiens
acttgcagagtattg

SEQ ID NO: 416764 - DNA, 15 bp, Homo sapiens
aacttgcagagtatt

SEQ ID NO: 416765 - DNA, 15 bp, Homo sapiens
caacttgcagagtat

SEQ ID NO: 416766 - DNA, 15 bp, Homo sapiens
ccaacttgcagagta

SEQ ID NO: 416767 - DNA, 15 bp, Homo sapiens
tccaacttgcagagt

SEQ ID NO: 416768 - DNA, 15 bp, Homo sapiens
atccaacttgcagag

SEQ ID NO: 416769 - DNA, 15 bp, Homo sapiens
aatccaacttgcaga

SEQ ID NO: 416770 - DNA, 15 bp, Homo sapiens
aaatccaacttgcag

SEQ ID NO: 416771 - DNA, 15 bp, Homo sapiens
aaaatccaacttgca

SEQ ID NO: 416772 - DNA, 15 bp, Homo sapiens
aaaaatccaacttgc

SEQ ID NO: 416773 - DNA, 15 bp, Homo sapiens
aaaaaatccaacttg

SEQ ID NO: 416774 - DNA, 15 bp, Homo sapiens
aaaaaaatccaactt

SEQ ID NO: 416775 - DNA, 15 bp, Homo sapiens
caaaaaaatccaact

SEQ ID NO: 416776 - DNA, 15 bp, Homo sapiens
tcaaaaaaatccaac

SEQ ID NO: 416777 - DNA, 15 bp, Homo sapiens
ttcaaaaaaatccaa

SEQ ID NO: 416778 - DNA, 15 bp, Homo sapiens
attcaaaaaaatcca

SEQ ID NO: 416779 - DNA, 15 bp, Homo sapiens
tattcaaaaaaatcc

SEQ ID NO: 416780 - DNA, 15 bp, Homo sapiens
atattcaaaaaaatc

SEQ ID NO: 416781 - DNA, 15 bp, Homo sapiens
aatattcaaaaaaat

SEQ ID NO: 416782 - DNA, 15 bp, Homo sapiens
aaatattcaaaaaaa

SEQ ID NO: 416783 - DNA, 15 bp, Homo sapiens
gaaatattcaaaaaa

SEQ ID NO: 416784 - DNA, 15 bp, Homo sapiens
agaaatattcaaaaa

SEQ ID NO: 416785 - DNA, 15 bp, Homo sapiens
aagaaatattcaaaa

SEQ ID NO: 416786 - DNA, 15 bp, Homo sapiens
aaagaaatattcaaa

SEQ ID NO: 416787 - DNA, 15 bp, Homo sapiens
aaaagaaatattcaa

SEQ ID NO: 416788 - DNA, 15 bp, Homo sapiens
gaaaagaaatattca

SEQ ID NO: 416789 - DNA, 15 bp, Homo sapiens
tgaaaagaaatattc

SEQ ID NO: 416790 - DNA, 15 bp, Homo sapiens
atgaaaagaaatatt

SEQ ID NO: 416791 - DNA, 15 bp, Homo sapiens
gatgaaaagaaatat

SEQ ID NO: 416792 - DNA, 15 bp, Homo sapiens
tgatgaaaagaaata

SEQ ID NO: 416793 - DNA, 15 bp, Homo sapiens
ctgatgaaaagaaat

SEQ ID NO: 416794 - DNA, 15 bp, Homo sapiens
gctgatgaaaagaaa

SEQ ID NO: 416795 - DNA, 15 bp, Homo sapiens
agctgatgaaaagaa

SEQ ID NO: 416796 - DNA, 15 bp, Homo sapiens
tagctgatgaaaaga

SEQ ID NO: 416797 - DNA, 15 bp, Homo sapiens
ctagctgatgaaaag

SEQ ID NO: 416798 - DNA, 15 bp, Homo sapiens
cctagctgatgaaaa

SEQ ID NO: 416799 - DNA, 15 bp, Homo sapiens
acctagctgatgaaa

SEQ ID NO: 416800 - DNA, 15 bp, Homo sapiens
aacctagctgatgaa

SEQ ID NO: 416801 - DNA, 15 bp, Homo sapiens
gaacctagctgatga

SEQ ID NO: 416802 - DNA, 15 bp, Homo sapiens
agaacctagctgatg

SEQ ID NO: 416803 - DNA, 15 bp, Homo sapiens
aagaacctagctgat

SEQ ID NO: 416804 - DNA, 15 bp, Homo sapiens
taagaacctagctga

SEQ ID NO: 416805 - DNA, 15 bp, Homo sapiens
ataagaacctagctg

SEQ ID NO: 416806 - DNA, 15 bp, Homo sapiens
aataagaacctagct

SEQ ID NO: 416807 - DNA, 15 bp, Homo sapiens
aaataagaacctagc

SEQ ID NO: 416808 - DNA, 15 bp, Homo sapiens
aaaataagaacctag

SEQ ID NO: 416809 - DNA, 15 bp, Homo sapiens
taaaataagaaccta

SEQ ID NO: 416810 - DNA, 15 bp, Homo sapiens
ataaaataagaacct

SEQ ID NO: 416811 - DNA, 15 bp, Homo sapiens
aataaaataagaacc

SEQ ID NO: 416812 - DNA, 15 bp, Homo sapiens
aaataaaataagaac

SEQ ID NO: 416813 - DNA, 15 bp, Homo sapiens
aaaataaaataagaa

SEQ ID NO: 416814 - DNA, 15 bp, Homo sapiens
taaaataaaataaga

SEQ ID NO: 416815 - DNA, 15 bp, Homo sapiens
ataaaataaaataag

SEQ ID NO: 416816 - DNA, 15 bp, Homo sapiens
aataaaataaaataa

SEQ ID NO: 416817 - DNA, 15 bp, Homo sapiens
gaaaataaaataaaa

SEQ ID NO: 416818 - DNA, 15 bp, Homo sapiens
agaaaataaaataaa

SEQ ID NO: 416819 - DNA, 15 bp, Homo sapiens
gagaaaataaaataa

SEQ ID NO: 416820 - DNA, 15 bp, Homo sapiens
agagaaaataaaata

SEQ ID NO: 416821 - DNA, 15 bp, Homo sapiens
cagagaaaataaaat

SEQ ID NO: 416822 - DNA, 15 bp, Homo sapiens
gcagagaaaataaaa

SEQ ID NO: 416823 - DNA, 15 bp, Homo sapiens
tgcagagaaaataaa

SEQ ID NO: 416824 - DNA, 15 bp, Homo sapiens
ctgcagagaaaataa

SEQ ID NO: 416825 - DNA, 15 bp, Homo sapiens
gctgcagagaaaata

SEQ ID NO: 416826 - DNA, 15 bp, Homo sapiens
agctgcagagaaaat

SEQ ID NO: 416827 - DNA, 15 bp, Homo sapiens
cagctgcagagaaaa

SEQ ID NO: 416828 - DNA, 15 bp, Homo sapiens
acagctgcagagaaa

SEQ ID NO: 416829 - DNA, 15 bp, Homo sapiens
aacagctgcagagaa

SEQ ID NO: 416830 - DNA, 15 bp, Homo sapiens
caacagctgcagaga

SEQ ID NO: 416831 - DNA, 15 bp, Homo sapiens
ccaacagctgcagag

SEQ ID NO: 416832 - DNA, 15 bp, Homo sapiens
accaacagctgcaga

SEQ ID NO: 416833 - DNA, 15 bp, Homo sapiens
gaccaacagctgcag

SEQ ID NO: 416834 - DNA, 15 bp, Homo sapiens
agaccaacagctgca

SEQ ID NO: 416835 - DNA, 15 bp, Homo sapiens
cagaccaacagctgc

SEQ ID NO: 416836 - DNA, 15 bp, Homo sapiens
acagaccaacagctg

SEQ ID NO: 416837 - DNA, 15 bp, Homo sapiens
gacagaccaacagct

SEQ ID NO: 416838 - DNA, 15 bp, Homo sapiens
agacagaccaacagc

SEQ ID NO: 416839 - DNA, 15 bp, Homo sapiens
gagacagaccaacag

SEQ ID NO: 416840 - DNA, 15 bp, Homo sapiens
tgagacagaccaaca

SEQ ID NO: 416841 - DNA, 15 bp, Homo sapiens
atgagacagaccaac

SEQ ID NO: 416842 - DNA, 15 bp, Homo sapiens
catgagacagaccaa

SEQ ID NO: 416843 - DNA, 15 bp, Homo sapiens
acatgagacagacca

SEQ ID NO: 416844 - DNA, 15 bp, Homo sapiens
aacatgagacagacc

SEQ ID NO: 416845 - DNA, 15 bp, Homo sapiens
taacatgagacagac

SEQ ID NO: 416846 - DNA, 15 bp, Homo sapiens
gtaacatgagacaga

SEQ ID NO: 416847 - DNA, 15 bp, Homo sapiens
tgtaacatgagacag

SEQ ID NO: 416848 - DNA, 15 bp, Homo sapiens
atgtaacatgagaca

SEQ ID NO: 416849 - DNA, 15 bp, Homo sapiens
aatgtaacatgagac

SEQ ID NO: 416850 - DNA, 15 bp, Homo sapiens
gaatgtaacatgaga

SEQ ID NO: 416851 - DNA, 15 bp, Homo sapiens
ggaatgtaacatgag

SEQ ID NO: 416852 - DNA, 15 bp, Homo sapiens
gggaatgtaacatga

SEQ ID NO: 416853 - DNA, 15 bp, Homo sapiens
tgggaatgtaacatg

SEQ ID NO: 416854 - DNA, 15 bp, Homo sapiens
atgggaatgtaacat

SEQ ID NO: 416855 - DNA, 15 bp, Homo sapiens
gatgggaatgtaaca

SEQ ID NO: 416856 - DNA, 15 bp, Homo sapiens
tgatgggaatgtaac

SEQ ID NO: 416857 - DNA, 15 bp, Homo sapiens
atgatgggaatgtaa

SEQ ID NO: 416858 - DNA, 15 bp, Homo sapiens
aatgatgggaatgta

SEQ ID NO: 416859 - DNA, 15 bp, Homo sapiens
aaatgatgggaatgt

SEQ ID NO: 416860 - DNA, 15 bp, Homo sapiens
taaatgatgggaatg

SEQ ID NO: 416861 - DNA, 15 bp, Homo sapiens
ataaatgatgggaat

SEQ ID NO: 416862 - DNA, 15 bp, Homo sapiens
cataaatgatgggaa

SEQ ID NO: 416863 - DNA, 15 bp, Homo sapiens
acataaatgatggga

SEQ ID NO: 416864 - DNA, 15 bp, Homo sapiens
tacataaatgatggg

SEQ ID NO: 416865 - DNA, 15 bp, Homo sapiens
atacataaatgatgg

SEQ ID NO: 416866 - DNA, 15 bp, Homo sapiens
gatacataaatgatg

SEQ ID NO: 416867 - DNA, 15 bp, Homo sapiens
agatacataaatgat

SEQ ID NO: 416868 - DNA, 15 bp, Homo sapiens
cagatacataaatga

SEQ ID NO: 416869 - DNA, 15 bp, Homo sapiens
ccagatacataaatg

SEQ ID NO: 416870 - DNA, 15 bp, Homo sapiens
accagatacataaat

SEQ ID NO: 416871 - DNA, 15 bp, Homo sapiens
aaccagatacataaa

SEQ ID NO: 416872 - DNA, 15 bp, Homo sapiens
aaaccagatacataa

SEQ ID NO: 416873 - DNA, 15 bp, Homo sapiens
aaaaccagatacata

SEQ ID NO: 416874 - DNA, 15 bp, Homo sapiens
caaaaccagatacat

SEQ ID NO: 416875 - DNA, 15 bp, Homo sapiens
gcaaaaccagataca

SEQ ID NO: 416876 - DNA, 15 bp, Homo sapiens
ggcaaaaccagatac

SEQ ID NO: 416877 - DNA, 15 bp, Homo sapiens
aggcaaaaccagata

SEQ ID NO: 416878 - DNA, 15 bp, Homo sapiens
caggcaaaaccagat

SEQ ID NO: 416879 - DNA, 15 bp, Homo sapiens
acaggcaaaaccaga

SEQ ID NO: 416880 - DNA, 15 bp, Homo sapiens
cacaggcaaaaccag

SEQ ID NO: 416881 - DNA, 15 bp, Homo sapiens
tcacaggcaaaacca

SEQ ID NO: 416882 - DNA, 15 bp, Homo sapiens
atcacaggcaaaacc

SEQ ID NO: 416883 - DNA, 15 bp, Homo sapiens
catcacaggcaaaac

SEQ ID NO: 416884 - DNA, 15 bp, Homo sapiens
tcatcacaggcaaaa

SEQ ID NO: 416885 - DNA, 15 bp, Homo sapiens
ttcatcacaggcaaa

SEQ ID NO: 416886 - DNA, 15 bp, Homo sapiens
cttcatcacaggcaa

SEQ ID NO: 416887 - DNA, 15 bp, Homo sapiens
gcttcatcacaggca

SEQ ID NO: 416888 - DNA, 15 bp, Homo sapiens
agcttcatcacaggc

SEQ ID NO: 416889 - DNA, 15 bp, Homo sapiens
cagcttcatcacagg

SEQ ID NO: 416890 - DNA, 15 bp, Homo sapiens
tcagcttcatcacag

SEQ ID NO: 416891 - DNA, 15 bp, Homo sapiens
ctcagcttcatcaca

SEQ ID NO: 416892 - DNA, 15 bp, Homo sapiens
tctcagcttcatcac

SEQ ID NO: 416893 - DNA, 15 bp, Homo sapiens
ttctcagcttcatca

SEQ ID NO: 416894 - DNA, 15 bp, Homo sapiens
tttctcagcttcatc

SEQ ID NO: 416895 - DNA, 15 bp, Homo sapiens
atttctcagcttcat

SEQ ID NO: 416896 - DNA, 15 bp, Homo sapiens
catttctcagcttca

SEQ ID NO: 416897 - DNA, 15 bp, Homo sapiens
acatttctcagcttc

SEQ ID NO: 416898 - DNA, 15 bp, Homo sapiens
gacatttctcagctt

SEQ ID NO: 416899 - DNA, 15 bp, Homo sapiens
agacatttctcagct

SEQ ID NO: 416900 - DNA, 15 bp, Homo sapiens
gagacatttctcagc

SEQ ID NO: 416901 - DNA, 15 bp, Homo sapiens
tgagacatttctcag

SEQ ID NO: 416902 - DNA, 15 bp, Homo sapiens
atgagacatttctca

SEQ ID NO: 416903 - DNA, 15 bp, Homo sapiens
aatgagacatttctc

SEQ ID NO: 416904 - DNA, 15 bp, Homo sapiens
aaatgagacatttct

SEQ ID NO: 416905 - DNA, 15 bp, Homo sapiens
aaaatgagacatttc

SEQ ID NO: 416906 - DNA, 15 bp, Homo sapiens
taaaatgagacattt

SEQ ID NO: 416907 - DNA, 15 bp, Homo sapiens
ttaaaatgagacatt

SEQ ID NO: 416908 - DNA, 15 bp, Homo sapiens
attaaaatgagacat

SEQ ID NO: 416909 - DNA, 15 bp, Homo sapiens
cattaaaatgagaca

SEQ ID NO: 416910 - DNA, 15 bp, Homo sapiens
ccattaaaatgagac

SEQ ID NO: 416911 - DNA, 15 bp, Homo sapiens
accattaaaatgaga

SEQ ID NO: 416912 - DNA, 15 bp, Homo sapiens
aaccattaaaatgag

SEQ ID NO: 416913 - DNA, 15 bp, Homo sapiens
aaaccattaaaatga

SEQ ID NO: 416914 - DNA, 15 bp, Homo sapiens
gaaaccattaaaatg

SEQ ID NO: 416915 - DNA, 15 bp, Homo sapiens
agaaaccattaaaat

SEQ ID NO: 416916 - DNA, 15 bp, Homo sapiens
cagaaaccattaaaa

SEQ ID NO: 416917 - DNA, 15 bp, Homo sapiens
acagaaaccattaaa

SEQ ID NO: 416918 - DNA, 15 bp, Homo sapiens
cacagaaaccattaa

SEQ ID NO: 416919 - DNA, 15 bp, Homo sapiens
acacagaaaccatta

SEQ ID NO: 416920 - DNA, 15 bp, Homo sapiens
aacacagaaaccatt

SEQ ID NO: 416921 - DNA, 15 bp, Homo sapiens
aaacacagaaaccat

SEQ ID NO: 416922 - DNA, 15 bp, Homo sapiens
aaaacacagaaacca

SEQ ID NO: 416923 - DNA, 15 bp, Homo sapiens
caaaacacagaaacc

SEQ ID NO: 416924 - DNA, 15 bp, Homo sapiens
acaaaacacagaaac

SEQ ID NO: 416925 - DNA, 15 bp, Homo sapiens
cacaaaacacagaaa

SEQ ID NO: 416926 - DNA, 15 bp, Homo sapiens
acacaaaacacagaa

SEQ ID NO: 416927 - DNA, 15 bp, Homo sapiens
gacacaaaacacaga

SEQ ID NO: 416928 - DNA, 15 bp, Homo sapiens
agacacaaaacacag

SEQ ID NO: 416929 - DNA, 15 bp, Homo sapiens
acagacacaaaacac

SEQ ID NO: 416930 - DNA, 15 bp, Homo sapiens
gacagacacaaaaca

SEQ ID NO: 416931 - DNA, 15 bp, Homo sapiens
agacagacacaaaac

SEQ ID NO: 416932 - DNA, 15 bp, Homo sapiens
cagacagacacaaaa

SEQ ID NO: 416933 - DNA, 15 bp, Homo sapiens
acagacagacacaaa

SEQ ID NO: 416934 - DNA, 15 bp, Homo sapiens
aacagacagacacaa

SEQ ID NO: 416935 - DNA, 15 bp, Homo sapiens
aaacagacagacaca

SEQ ID NO: 416936 - DNA, 15 bp, Homo sapiens
aaaacagacagacac

SEQ ID NO: 416937 - DNA, 15 bp, Homo sapiens
gaaaacagacagaca

SEQ ID NO: 416938 - DNA, 15 bp, Homo sapiens
ggaaaacagacagac

SEQ ID NO: 416939 - DNA, 15 bp, Homo sapiens
tggaaaacagacaga

SEQ ID NO: 416940 - DNA, 15 bp, Homo sapiens
ctggaaaacagacag

SEQ ID NO: 416941 - DNA, 15 bp, Homo sapiens
actggaaaacagaca

SEQ ID NO: 416942 - DNA, 15 bp, Homo sapiens
aactggaaaacagac

SEQ ID NO: 416943 - DNA, 15 bp, Homo sapiens
aaactggaaaacaga

SEQ ID NO: 416944 - DNA, 15 bp, Homo sapiens
aaaactggaaaacag

SEQ ID NO: 416945 - DNA, 15 bp, Homo sapiens
caaaactggaaaaca

SEQ ID NO: 416946 - DNA, 15 bp, Homo sapiens
ccaaaactggaaaac

SEQ ID NO: 416947 - DNA, 15 bp, Homo sapiens
cccaaaactggaaaa

SEQ ID NO: 416948 - DNA, 15 bp, Homo sapiens
ccccaaaactggaaa

SEQ ID NO: 416949 - DNA, 15 bp, Homo sapiens
tccccaaaactggaa

SEQ ID NO: 416950 - DNA, 15 bp, Homo sapiens
ctccccaaaactgga

SEQ ID NO: 416951 - DNA, 15 bp, Homo sapiens
tctccccaaaactgg

SEQ ID NO: 416952 - DNA, 15 bp, Homo sapiens
gtctccccaaaactg

SEQ ID NO: 416953 - DNA, 15 bp, Homo sapiens
tgtctccccaaaact

SEQ ID NO: 416954 - DNA, 15 bp, Homo sapiens
atgtctccccaaaac

SEQ ID NO: 416955 - DNA, 15 bp, Homo sapiens
aatgtctccccaaaa

SEQ ID NO: 416956 - DNA, 15 bp, Homo sapiens
aaatgtctccccaaa

SEQ ID NO: 416957 - DNA, 15 bp, Homo sapiens
taaatgtctccccaa

SEQ ID NO: 416958 - DNA, 15 bp, Homo sapiens
ttaaatgtctcccca

SEQ ID NO: 416959 - DNA, 15 bp, Homo sapiens
tttaaatgtctcccc

SEQ ID NO: 416960 - DNA, 15 bp, Homo sapiens
gtttaaatgtctccc

SEQ ID NO: 416961 - DNA, 15 bp, Homo sapiens
ggtttaaatgtctcc

SEQ ID NO: 416962 - DNA, 15 bp, Homo sapiens
tggtttaaatgtctc

SEQ ID NO: 416963 - DNA, 15 bp, Homo sapiens
ctggtttaaatgtct

SEQ ID NO: 416964 - DNA, 15 bp, Homo sapiens
actggtttaaatgtc

SEQ ID NO: 416965 - DNA, 15 bp, Homo sapiens
tactggtttaaatgt

SEQ ID NO: 416966 - DNA, 15 bp, Homo sapiens
ctactggtttaaatg

SEQ ID NO: 416967 - DNA, 15 bp, Homo sapiens
actactggtttaaat

SEQ ID NO: 416968 - DNA, 15 bp, Homo sapiens
gactactggtttaaa

SEQ ID NO: 416969 - DNA, 15 bp, Homo sapiens
tgactactggtttaa

SEQ ID NO: 416970 - DNA, 15 bp, Homo sapiens
atgactactggttta

SEQ ID NO: 416971 - DNA, 15 bp, Homo sapiens
catgactactggttt

SEQ ID NO: 416972 - DNA, 15 bp, Homo sapiens
acatgactactggtt

SEQ ID NO: 416973 - DNA, 15 bp, Homo sapiens
gacatgactactggt

SEQ ID NO: 416974 - DNA, 15 bp, Homo sapiens
tgacatgactactgg

SEQ ID NO: 416975 - DNA, 15 bp, Homo sapiens
atgacatgactactg

SEQ ID NO: 416976 - DNA, 15 bp, Homo sapiens
gatgacatgactact

SEQ ID NO: 416977 - DNA, 15 bp, Homo sapiens
agatgacatgactac

SEQ ID NO: 416978 - DNA, 15 bp, Homo sapiens
gagatgacatgacta

SEQ ID NO: 416979 - DNA, 15 bp, Homo sapiens
tgagatgacatgact

SEQ ID NO: 416980 - DNA, 15 bp, Homo sapiens
atgagatgacatgac

SEQ ID NO: 416981 - DNA, 15 bp, Homo sapiens
catgagatgacatga

SEQ ID NO: 416982 - DNA, 15 bp, Homo sapiens
acatgagatgacatg

SEQ ID NO: 416983 - DNA, 15 bp, Homo sapiens
tacatgagatgacat

SEQ ID NO: 416984 - DNA, 15 bp, Homo sapiens
ttacatgagatgaca

SEQ ID NO: 416985 - DNA, 15 bp, Homo sapiens
attacatgagatgac

SEQ ID NO: 416986 - DNA, 15 bp, Homo sapiens
cattacatgagatga

SEQ ID NO: 416987 - DNA, 15 bp, Homo sapiens
tcattacatgagatg

SEQ ID NO: 416988 - DNA, 15 bp, Homo sapiens
gtcattacatgagat

SEQ ID NO: 416989 - DNA, 15 bp, Homo sapiens
tgtcattacatgaga

SEQ ID NO: 416990 - DNA, 15 bp, Homo sapiens
atgtcattacatgag

SEQ ID NO: 416991 - DNA, 15 bp, Homo sapiens
catgtcattacatga

SEQ ID NO: 416992 - DNA, 15 bp, Homo sapiens
gcatgtcattacatg

SEQ ID NO: 416993 - DNA, 15 bp, Homo sapiens
ggcatgtcattacat

SEQ ID NO: 416994 - DNA, 15 bp, Homo sapiens
aggcatgtcattaca

SEQ ID NO: 416995 - DNA, 15 bp, Homo sapiens
gaggcatgtcattac

SEQ ID NO: 416996 - DNA, 15 bp, Homo sapiens
agaggcatgtcatta

SEQ ID NO: 416997 - DNA, 15 bp, Homo sapiens
gagaggcatgtcatt

SEQ ID NO: 416998 - DNA, 15 bp, Homo sapiens
agagaggcatgtcat

SEQ ID NO: 416999 - DNA, 15 bp, Homo sapiens
cagagaggcatgtca

SEQ ID NO: 417000 - DNA, 15 bp, Homo sapiens
gcagagaggcatgtc

SEQ ID NO: 417001 - DNA, 15 bp, Homo sapiens
agcagagaggcatgt

SEQ ID NO: 417002 - DNA, 15 bp, Homo sapiens
aagcagagaggcatg

SEQ ID NO: 417003 - DNA, 15 bp, Homo sapiens
taagcagagaggcat

SEQ ID NO: 417004 - DNA, 15 bp, Homo sapiens
ataagcagagaggca

SEQ ID NO: 417005 - DNA, 15 bp, Homo sapiens
aataagcagagaggc

SEQ ID NO: 417006 - DNA, 15 bp, Homo sapiens
gaataagcagagagg

SEQ ID NO: 417007 - DNA, 15 bp, Homo sapiens
agaataagcagagag

SEQ ID NO: 417008 - DNA, 15 bp, Homo sapiens
gagaataagcagaga

SEQ ID NO: 417009 - DNA, 15 bp, Homo sapiens
ggagaataagcagag

SEQ ID NO: 417010 - DNA, 15 bp, Homo sapiens
gggagaataagcaga

SEQ ID NO: 417011 - DNA, 15 bp, Homo sapiens
agggagaataagcag

SEQ ID NO: 417012 - DNA, 15 bp, Homo sapiens
aagggagaataagca

SEQ ID NO: 417013 - DNA, 15 bp, Homo sapiens
gaagggagaataagc

SEQ ID NO: 417014 - DNA, 15 bp, Homo sapiens
agaagggagaataag

SEQ ID NO: 417015 - DNA, 15 bp, Homo sapiens
cagaagggagaataa

SEQ ID NO: 417016 - DNA, 15 bp, Homo sapiens
acagaagggagaata

SEQ ID NO: 417017 - DNA, 15 bp, Homo sapiens
aacagaagggagaat

SEQ ID NO: 417018 - DNA, 15 bp, Homo sapiens
taacagaagggagaa

SEQ ID NO: 417019 - DNA, 15 bp, Homo sapiens
gtaacagaagggaga

SEQ ID NO: 417020 - DNA, 15 bp, Homo sapiens
ggtaacagaagggag

SEQ ID NO: 417021 - DNA, 15 bp, Homo sapiens
tggtaacagaaggga

SEQ ID NO: 417022 - DNA, 15 bp, Homo sapiens
ttggtaacagaaggg

SEQ ID NO: 417023 - DNA, 15 bp, Homo sapiens
tttggtaacagaagg

SEQ ID NO: 417024 - DNA, 15 bp, Homo sapiens
gtttggtaacagaag

SEQ ID NO: 417025 - DNA, 15 bp, Homo sapiens
tgtttggtaacagaa

SEQ ID NO: 417026 - DNA, 15 bp, Homo sapiens
ttgtttggtaacaga

SEQ ID NO: 417027 - DNA, 15 bp, Homo sapiens
attgtttggtaacag

SEQ ID NO: 417028 - DNA, 15 bp, Homo sapiens
tattgtttggtaaca

SEQ ID NO: 417029 - DNA, 15 bp, Homo sapiens
atattgtttggtaac

SEQ ID NO: 417030 - DNA, 15 bp, Homo sapiens
aatattgtttggtaa

SEQ ID NO: 417031 - DNA, 15 bp, Homo sapiens
aaatattgtttggta

SEQ ID NO: 417032 - DNA, 15 bp, Homo sapiens
taaatattgtttggt

SEQ ID NO: 417033 - DNA, 15 bp, Homo sapiens
ataaatattgtttgg

SEQ ID NO: 417034 - DNA, 15 bp, Homo sapiens
cataaatattgtttg

SEQ ID NO: 417035 - DNA, 15 bp, Homo sapiens
ccataaatattgttt

SEQ ID NO: 417036 - DNA, 15 bp, Homo sapiens
gccataaatattgtt

SEQ ID NO: 417037 - DNA, 15 bp, Homo sapiens
agccataaatattgt

SEQ ID NO: 417038 - DNA, 15 bp, Homo sapiens
tagccataaatattg

SEQ ID NO: 417039 - DNA, 15 bp, Homo sapiens
ctagccataaatatt

SEQ ID NO: 417040 - DNA, 15 bp, Homo sapiens
gctagccataaatat

SEQ ID NO: 417041 - DNA, 15 bp, Homo sapiens
cgctagccataaata

SEQ ID NO: 417042 - DNA, 15 bp, Homo sapiens
acgctagccataaat

SEQ ID NO: 417043 - DNA, 15 bp, Homo sapiens
gacgctagccataaa

SEQ ID NO: 417044 - DNA, 15 bp, Homo sapiens
agacgctagccataa

SEQ ID NO: 417045 - DNA, 15 bp, Homo sapiens
cagacgctagccata

SEQ ID NO: 417046 - DNA, 15 bp, Homo sapiens
acagacgctagccat

SEQ ID NO: 417047 - DNA, 15 bp, Homo sapiens
tacagacgctagcca

SEQ ID NO: 417048 - DNA, 15 bp, Homo sapiens
atacagacgctagcc

SEQ ID NO: 417049 - DNA, 15 bp, Homo sapiens
catacagacgctagc

SEQ ID NO: 417050 - DNA, 15 bp, Homo sapiens
gcatacagacgctag

SEQ ID NO: 417051 - DNA, 15 bp, Homo sapiens
tgcatacagacgcta

SEQ ID NO: 417052 - DNA, 15 bp, Homo sapiens
atgcatacagacgct

SEQ ID NO: 417053 - DNA, 15 bp, Homo sapiens
catgcatacagacgc

SEQ ID NO: 417054 - DNA, 15 bp, Homo sapiens
acatgcatacagacg

SEQ ID NO: 417055 - DNA, 15 bp, Homo sapiens
cacatgcatacagac

SEQ ID NO: 417056 - DNA, 15 bp, Homo sapiens
acacatgcatacaga

SEQ ID NO: 417057 - DNA, 15 bp, Homo sapiens
cacacatgcatacag

SEQ ID NO: 417058 - DNA, 15 bp, Homo sapiens
gcacacatgcataca

SEQ ID NO: 417059 - DNA, 15 bp, Homo sapiens
cgcacacatgcatac

SEQ ID NO: 417060 - DNA, 15 bp, Homo sapiens
tcgcacacatgcata

SEQ ID NO: 417061 - DNA, 15 bp, Homo sapiens
atcgcacacatgcat

SEQ ID NO: 417062 - DNA, 15 bp, Homo sapiens
catcgcacacatgca

SEQ ID NO: 417063 - DNA, 15 bp, Homo sapiens
tcatcgcacacatgc

SEQ ID NO: 417064 - DNA, 15 bp, Homo sapiens
gtcatcgcacacatg

SEQ ID NO: 417065 - DNA, 15 bp, Homo sapiens
agtcatcgcacacat

SEQ ID NO: 417066 - DNA, 15 bp, Homo sapiens
tagtcatcgcacaca

SEQ ID NO: 417067 - DNA, 15 bp, Homo sapiens
atagtcatcgcacac

SEQ ID NO: 417068 - DNA, 15 bp, Homo sapiens
aatagtcatcgcaca

SEQ ID NO: 417069 - DNA, 15 bp, Homo sapiens
aaatagtcatcgcac

SEQ ID NO: 417070 - DNA, 15 bp, Homo sapiens
caaatagtcatcgca

SEQ ID NO: 417071 - DNA, 15 bp, Homo sapiens
gcaaatagtcatcgc

SEQ ID NO: 417072 - DNA, 15 bp, Homo sapiens
agcaaatagtcatcg

SEQ ID NO: 417073 - DNA, 15 bp, Homo sapiens
tagcaaatagtcatc

SEQ ID NO: 417074 - DNA, 15 bp, Homo sapiens
atagcaaatagtcat

SEQ ID NO: 417075 - DNA, 15 bp, Homo sapiens
tatagcaaatagtca

SEQ ID NO: 417076 - DNA, 15 bp, Homo sapiens
gtatagcaaatagtc

SEQ ID NO: 417077 - DNA, 15 bp, Homo sapiens
tgtatagcaaatagt

SEQ ID NO: 417078 - DNA, 15 bp, Homo sapiens
ctgtatagcaaatag

SEQ ID NO: 417079 - DNA, 15 bp, Homo sapiens
actgtatagcaaata

SEQ ID NO: 417080 - DNA, 15 bp, Homo sapiens
aactgtatagcaaat

SEQ ID NO: 417081 - DNA, 15 bp, Homo sapiens
caactgtatagcaaa

SEQ ID NO: 417082 - DNA, 15 bp, Homo sapiens
gcaactgtatagcaa

SEQ ID NO: 417083 - DNA, 15 bp, Homo sapiens
ggcaactgtatagca

SEQ ID NO: 417084 - DNA, 15 bp, Homo sapiens
aggcaactgtatagc

SEQ ID NO: 417085 - DNA, 15 bp, Homo sapiens
taggcaactgtatag

SEQ ID NO: 417086 - DNA, 15 bp, Homo sapiens
ctaggcaactgtata

SEQ ID NO: 417087 - DNA, 15 bp, Homo sapiens
tctaggcaactgtat

SEQ ID NO: 417088 - DNA, 15 bp, Homo sapiens
ctctaggcaactgta

SEQ ID NO: 417089 - DNA, 15 bp, Homo sapiens
gctctaggcaactgt

SEQ ID NO: 417090 - DNA, 15 bp, Homo sapiens
tgctctaggcaactg

SEQ ID NO: 417091 - DNA, 15 bp, Homo sapiens
gtgctctaggcaact

SEQ ID NO: 417092 - DNA, 15 bp, Homo sapiens
agtgctctaggcaac

SEQ ID NO: 417093 - DNA, 15 bp, Homo sapiens
cagtgctctaggcaa

SEQ ID NO: 417094 - DNA, 15 bp, Homo sapiens
acagtgctctaggca

SEQ ID NO: 417095 - DNA, 15 bp, Homo sapiens
cacagtgctctaggc

SEQ ID NO: 417096 - DNA, 15 bp, Homo sapiens
tcacagtgctctagg

SEQ ID NO: 417097 - DNA, 15 bp, Homo sapiens
ttcacagtgctctag

SEQ ID NO: 417098 - DNA, 15 bp, Homo sapiens
tttcacagtgctcta

SEQ ID NO: 417099 - DNA, 15 bp, Homo sapiens
gtttcacagtgctct

SEQ ID NO: 417100 - DNA, 15 bp, Homo sapiens
agtttcacagtgctc

SEQ ID NO: 417101 - DNA, 15 bp, Homo sapiens
gagtttcacagtgct

SEQ ID NO: 417102 - DNA, 15 bp, Homo sapiens
ggagtttcacagtgc

SEQ ID NO: 417103 - DNA, 15 bp, Homo sapiens
tggagtttcacagtg

SEQ ID NO: 417104 - DNA, 15 bp, Homo sapiens
gtggagtttcacagt

SEQ ID NO: 417105 - DNA, 15 bp, Homo sapiens
tgtggagtttcacag

SEQ ID NO: 417106 - DNA, 15 bp, Homo sapiens
atgtggagtttcaca

SEQ ID NO: 417107 - DNA, 15 bp, Homo sapiens
catgtggagtttcac

SEQ ID NO: 417108 - DNA, 15 bp, Homo sapiens
acatgtggagtttca

SEQ ID NO: 417109 - DNA, 15 bp, Homo sapiens
aacatgtggagtttc

SEQ ID NO: 417110 - DNA, 15 bp, Homo sapiens
gaacatgtggagttt

SEQ ID NO: 417111 - DNA, 15 bp, Homo sapiens
tgaacatgtggagtt

SEQ ID NO: 417112 - DNA, 15 bp, Homo sapiens
ttgaacatgtggagt

SEQ ID NO: 417113 - DNA, 15 bp, Homo sapiens
attgaacatgtggag

SEQ ID NO: 417114 - DNA, 15 bp, Homo sapiens
cattgaacatgtgga

SEQ ID NO: 417115 - DNA, 15 bp, Homo sapiens
ccattgaacatgtgg

SEQ ID NO: 417116 - DNA, 15 bp, Homo sapiens
tccattgaacatgtg

SEQ ID NO: 417117 - DNA, 15 bp, Homo sapiens
ctccattgaacatgt

SEQ ID NO: 417118 - DNA, 15 bp, Homo sapiens
actccattgaacatg

SEQ ID NO: 417119 - DNA, 15 bp, Homo sapiens
cactccattgaacat

SEQ ID NO: 417120 - DNA, 15 bp, Homo sapiens
tcactccattgaaca

SEQ ID NO: 417121 - DNA, 15 bp, Homo sapiens
atcactccattgaac

SEQ ID NO: 417122 - DNA, 15 bp, Homo sapiens
aatcactccattgaa

SEQ ID NO: 417123 - DNA, 15 bp, Homo sapiens
aaatcactccattga

SEQ ID NO: 417124 - DNA, 15 bp, Homo sapiens
gaaatcactccattg

SEQ ID NO: 417125 - DNA, 15 bp, Homo sapiens
agaaatcactccatt

SEQ ID NO: 417126 - DNA, 15 bp, Homo sapiens
aagaaatcactccat

SEQ ID NO: 417127 - DNA, 15 bp, Homo sapiens
aaagaaatcactcca

SEQ ID NO: 417128 - DNA, 15 bp, Homo sapiens
aaaagaaatcactcc

SEQ ID NO: 417129 - DNA, 15 bp, Homo sapiens
aaaaagaaatcactc

SEQ ID NO: 417130 - DNA, 15 bp, Homo sapiens
caaaaagaaatcact

SEQ ID NO: 417131 - DNA, 15 bp, Homo sapiens
acaaaaagaaatcac

SEQ ID NO: 417132 - DNA, 15 bp, Homo sapiens
aacaaaaagaaatca

SEQ ID NO: 417133 - DNA, 15 bp, Homo sapiens
aaacaaaaagaaatc

SEQ ID NO: 417134 - DNA, 15 bp, Homo sapiens
aaaacaaaaagaaat

SEQ ID NO: 417135 - DNA, 15 bp, Homo sapiens
aaaaacaaaaagaaa

SEQ ID NO: 417136 - DNA, 15 bp, Homo sapiens
gaaaaacaaaaagaa

SEQ ID NO: 417137 - DNA, 15 bp, Homo sapiens
agaaaaacaaaaaga

SEQ ID NO: 417138 - DNA, 15 bp, Homo sapiens
cagaaaaacaaaaag

SEQ ID NO: 417139 - DNA, 15 bp, Homo sapiens
gcagaaaaacaaaaa

SEQ ID NO: 417140 - DNA, 15 bp, Homo sapiens
tgcagaaaaacaaaa

SEQ ID NO: 417141 - DNA, 15 bp, Homo sapiens
atgcagaaaaacaaa

SEQ ID NO: 417142 - DNA, 15 bp, Homo sapiens
catgcagaaaaacaa

SEQ ID NO: 417143 - DNA, 15 bp, Homo sapiens
gcatgcagaaaaaca

SEQ ID NO: 417144 - DNA, 15 bp, Homo sapiens
agcatgcagaaaaac

SEQ ID NO: 417145 - DNA, 15 bp, Homo sapiens
tagcatgcagaaaaa

SEQ ID NO: 417146 - DNA, 15 bp, Homo sapiens
atagcatgcagaaaa

SEQ ID NO: 417147 - DNA, 15 bp, Homo sapiens
gatagcatgcagaaa

SEQ ID NO: 417148 - DNA, 15 bp, Homo sapiens
tgatagcatgcagaa

SEQ ID NO: 417149 - DNA, 15 bp, Homo sapiens
ttgatagcatgcaga

SEQ ID NO: 417150 - DNA, 15 bp, Homo sapiens
cttgatagcatgcag

SEQ ID NO: 417151 - DNA, 15 bp, Homo sapiens
acttgatagcatgca

SEQ ID NO: 417152 - DNA, 15 bp, Homo sapiens
tacttgatagcatgc

SEQ ID NO: 417153 - DNA, 15 bp, Homo sapiens
gtacttgatagcatg

SEQ ID NO: 417154 - DNA, 15 bp, Homo sapiens
agtacttgatagcat

SEQ ID NO: 417155 - DNA, 15 bp, Homo sapiens
gagtacttgatagca

SEQ ID NO: 417156 - DNA, 15 bp, Homo sapiens
agagtacttgatagc

SEQ ID NO: 417157 - DNA, 15 bp, Homo sapiens
gagagtacttgatag

SEQ ID NO: 417158 - DNA, 15 bp, Homo sapiens
tgagagtacttgata

SEQ ID NO: 417159 - DNA, 15 bp, Homo sapiens
ttgagagtacttgat

SEQ ID NO: 417160 - DNA, 15 bp, Homo sapiens
tttgagagtacttga

SEQ ID NO: 417161 - DNA, 15 bp, Homo sapiens
ctttgagagtacttg

SEQ ID NO: 417162 - DNA, 15 bp, Homo sapiens
actttgagagtactt

SEQ ID NO: 417163 - DNA, 15 bp, Homo sapiens
cactttgagagtact

SEQ ID NO: 417164 - DNA, 15 bp, Homo sapiens
acactttgagagtac

SEQ ID NO: 417165 - DNA, 15 bp, Homo sapiens
aacactttgagagta

SEQ ID NO: 417166 - DNA, 15 bp, Homo sapiens
gaacactttgagagt

SEQ ID NO: 417167 - DNA, 15 bp, Homo sapiens
ggaacactttgagag

SEQ ID NO: 417168 - DNA, 15 bp, Homo sapiens
aggaacactttgaga

SEQ ID NO: 417169 - DNA, 15 bp, Homo sapiens
aaggaacactttgag

SEQ ID NO: 417170 - DNA, 15 bp, Homo sapiens
gaaggaacactttga

SEQ ID NO: 417171 - DNA, 15 bp, Homo sapiens
cgaaggaacactttg

SEQ ID NO: 417172 - DNA, 15 bp, Homo sapiens
ccgaaggaacacttt

SEQ ID NO: 417173 - DNA, 15 bp, Homo sapiens
gccgaaggaacactt

SEQ ID NO: 417174 - DNA, 15 bp, Homo sapiens
agccgaaggaacact

SEQ ID NO: 417175 - DNA, 15 bp, Homo sapiens
aagccgaaggaacac

SEQ ID NO: 417176 - DNA, 15 bp, Homo sapiens
aaagccgaaggaaca

SEQ ID NO: 417177 - DNA, 15 bp, Homo sapiens
aaaagccgaaggaac

SEQ ID NO: 417178 - DNA, 15 bp, Homo sapiens
aaaaagccgaaggaa

SEQ ID NO: 417179 - DNA, 15 bp, Homo sapiens
caaaaagccgaagga

SEQ ID NO: 417180 - DNA, 15 bp, Homo sapiens
gcaaaaagccgaagg

SEQ ID NO: 417181 - DNA, 15 bp, Homo sapiens
tgcaaaaagccgaag

SEQ ID NO: 417182 - DNA, 15 bp, Homo sapiens
atgcaaaaagccgaa

SEQ ID NO: 417183 - DNA, 15 bp, Homo sapiens
catgcaaaaagccga

SEQ ID NO: 417184 - DNA, 15 bp, Homo sapiens
tcatgcaaaaagccg

SEQ ID NO: 417185 - DNA, 15 bp, Homo sapiens
ttcatgcaaaaagcc

SEQ ID NO: 417186 - DNA, 15 bp, Homo sapiens
tttcatgcaaaaagc

SEQ ID NO: 417187 - DNA, 15 bp, Homo sapiens
ctttcatgcaaaaag

SEQ ID NO: 417188 - DNA, 15 bp, Homo sapiens
tctttcatgcaaaaa

SEQ ID NO: 417189 - DNA, 15 bp, Homo sapiens
atctttcatgcaaaa

SEQ ID NO: 417190 - DNA, 15 bp, Homo sapiens
tatctttcatgcaaa

SEQ ID NO: 417191 - DNA, 15 bp, Homo sapiens
ctatctttcatgcaa

SEQ ID NO: 417192 - DNA, 15 bp, Homo sapiens
gctatctttcatgca

SEQ ID NO: 417193 - DNA, 15 bp, Homo sapiens
agctatctttcatgc

SEQ ID NO: 417194 - DNA, 15 bp, Homo sapiens
tagctatctttcatg

SEQ ID NO: 417195 - DNA, 15 bp, Homo sapiens
ctagctatctttcat

SEQ ID NO: 417196 - DNA, 15 bp, Homo sapiens
tctagctatctttca

SEQ ID NO: 417197 - DNA, 15 bp, Homo sapiens
ctctagctatctttc

SEQ ID NO: 417198 - DNA, 15 bp, Homo sapiens
cctctagctatcttt

SEQ ID NO: 417199 - DNA, 15 bp, Homo sapiens
tcctctagctatctt

SEQ ID NO: 417200 - DNA, 15 bp, Homo sapiens
atcctctagctatct

SEQ ID NO: 417201 - DNA, 15 bp, Homo sapiens
tatcctctagctatc

SEQ ID NO: 417202 - DNA, 15 bp, Homo sapiens
ctatcctctagctat

SEQ ID NO: 417203 - DNA, 15 bp, Homo sapiens
tctatcctctagcta

SEQ ID NO: 417204 - DNA, 15 bp, Homo sapiens
ttctatcctctagct

SEQ ID NO: 417205 - DNA, 15 bp, Homo sapiens
tttctatcctctagc

SEQ ID NO: 417206 - DNA, 15 bp, Homo sapiens
ctttctatcctctag

SEQ ID NO: 417207 - DNA, 15 bp, Homo sapiens
cctttctatcctcta

SEQ ID NO: 417208 - DNA, 15 bp, Homo sapiens
ccctttctatcctct

SEQ ID NO: 417209 - DNA, 15 bp, Homo sapiens
tccctttctatcctc

SEQ ID NO: 417210 - DNA, 15 bp, Homo sapiens
gtccctttctatcct

SEQ ID NO: 417211 - DNA, 15 bp, Homo sapiens
tgtccctttctatcc

SEQ ID NO: 417212 - DNA, 15 bp, Homo sapiens
atgtccctttctatc

SEQ ID NO: 417213 - DNA, 15 bp, Homo sapiens
aatgtccctttctat

SEQ ID NO: 417214 - DNA, 15 bp, Homo sapiens
gaatgtccctttcta

SEQ ID NO: 417215 - DNA, 15 bp, Homo sapiens
ggaatgtccctttct

SEQ ID NO: 417216 - DNA, 15 bp, Homo sapiens
tggaatgtccctttc

SEQ ID NO: 417217 - DNA, 15 bp, Homo sapiens
ctggaatgtcccttt

SEQ ID NO: 417218 - DNA, 15 bp, Homo sapiens
actggaatgtccctt

SEQ ID NO: 417219 - DNA, 15 bp, Homo sapiens
tactggaatgtccct

SEQ ID NO: 417220 - DNA, 15 bp, Homo sapiens
ttactggaatgtccc

SEQ ID NO: 417221 - DNA, 15 bp, Homo sapiens
tttactggaatgtcc

SEQ ID NO: 417222 - DNA, 15 bp, Homo sapiens
atttactggaatgtc

SEQ ID NO: 417223 - DNA, 15 bp, Homo sapiens
aatttactggaatgt

SEQ ID NO: 417224 - DNA, 15 bp, Homo sapiens
gaatttactggaatg

SEQ ID NO: 417225 - DNA, 15 bp, Homo sapiens
agaatttactggaat

SEQ ID NO: 417226 - DNA, 15 bp, Homo sapiens
tagaatttactggaa

SEQ ID NO: 417227 - DNA, 15 bp, Homo sapiens
gtagaatttactgga

SEQ ID NO: 417228 - DNA, 15 bp, Homo sapiens
agtagaatttactgg

SEQ ID NO: 417229 - DNA, 15 bp, Homo sapiens
aagtagaatttactg

SEQ ID NO: 417230 - DNA, 15 bp, Homo sapiens
aaagtagaatttact

SEQ ID NO: 417231 - DNA, 15 bp, Homo sapiens
caaagtagaatttac

SEQ ID NO: 417232 - DNA, 15 bp, Homo sapiens
acaaagtagaattta

SEQ ID NO: 417233 - DNA, 15 bp, Homo sapiens
tacaaagtagaattt

SEQ ID NO: 417234 - DNA, 15 bp, Homo sapiens
ctacaaagtagaatt

SEQ ID NO: 417235 - DNA, 15 bp, Homo sapiens
gctacaaagtagaat

SEQ ID NO: 417236 - DNA, 15 bp, Homo sapiens
tgctacaaagtagaa

SEQ ID NO: 417237 - DNA, 15 bp, Homo sapiens
ttgctacaaagtaga

SEQ ID NO: 417238 - DNA, 15 bp, Homo sapiens
tttgctacaaagtag

SEQ ID NO: 417239 - DNA, 15 bp, Homo sapiens
atttgctacaaagta

SEQ ID NO: 417240 - DNA, 15 bp, Homo sapiens
aatttgctacaaagt

SEQ ID NO: 417241 - DNA, 15 bp, Homo sapiens
caatttgctacaaag

SEQ ID NO: 417242 - DNA, 15 bp, Homo sapiens
tcaatttgctacaaa

SEQ ID NO: 417243 - DNA, 15 bp, Homo sapiens
ttcaatttgctacaa

SEQ ID NO: 417244 - DNA, 15 bp, Homo sapiens
attcaatttgctaca

SEQ ID NO: 417245 - DNA, 15 bp, Homo sapiens
tattcaatttgctac

SEQ ID NO: 417246 - DNA, 15 bp, Homo sapiens
atattcaatttgcta

SEQ ID NO: 417247 - DNA, 15 bp, Homo sapiens
tatattcaatttgct

SEQ ID NO: 417248 - DNA, 15 bp, Homo sapiens
ctatattcaatttgc

SEQ ID NO: 417249 - DNA, 15 bp, Homo sapiens
tctatattcaatttg

SEQ ID NO: 417250 - DNA, 15 bp, Homo sapiens
ctctatattcaattt

SEQ ID NO: 417251 - DNA, 15 bp, Homo sapiens
cctctatattcaatt

SEQ ID NO: 417252 - DNA, 15 bp, Homo sapiens
acctctatattcaat

SEQ ID NO: 417253 - DNA, 15 bp, Homo sapiens
aacctctatattcaa

SEQ ID NO: 417254 - DNA, 15 bp, Homo sapiens
aaacctctatattca

SEQ ID NO: 417255 - DNA, 15 bp, Homo sapiens
aaaacctctatattc

SEQ ID NO: 417256 - DNA, 15 bp, Homo sapiens
aaaaacctctatatt

SEQ ID NO: 417257 - DNA, 15 bp, Homo sapiens
gaaaaacctctatat

SEQ ID NO: 417258 - DNA, 15 bp, Homo sapiens
agaaaaacctctata

SEQ ID NO: 417259 - DNA, 15 bp, Homo sapiens
aagaaaaacctctat

SEQ ID NO: 417260 - DNA, 15 bp, Homo sapiens
gaagaaaaacctcta

SEQ ID NO: 417261 - DNA, 15 bp, Homo sapiens
ggaagaaaaacctct

SEQ ID NO: 417262 - DNA, 15 bp, Homo sapiens
tggaagaaaaacctc

SEQ ID NO: 417263 - DNA, 15 bp, Homo sapiens
ctggaagaaaaacct

SEQ ID NO: 417264 - DNA, 15 bp, Homo sapiens
actggaagaaaaacc

SEQ ID NO: 417265 - DNA, 15 bp, Homo sapiens
tactggaagaaaaac

SEQ ID NO: 417266 - DNA, 15 bp, Homo sapiens
ttactggaagaaaaa

SEQ ID NO: 417267 - DNA, 15 bp, Homo sapiens
attactggaagaaaa

SEQ ID NO: 417268 - DNA, 15 bp, Homo sapiens
cattactggaagaaa

SEQ ID NO: 417269 - DNA, 15 bp, Homo sapiens
acattactggaagaa

SEQ ID NO: 417270 - DNA, 15 bp, Homo sapiens
aacattactggaaga

SEQ ID NO: 417271 - DNA, 15 bp, Homo sapiens
aaacattactggaag

SEQ ID NO: 417272 - DNA, 15 bp, Homo sapiens
aaaacattactggaa

SEQ ID NO: 417273 - DNA, 15 bp, Homo sapiens
gaaaacattactgga

SEQ ID NO: 417274 - DNA, 15 bp, Homo sapiens
ggaaaacattactgg

SEQ ID NO: 417275 - DNA, 15 bp, Homo sapiens
aggaaaacattactg

SEQ ID NO: 417276 - DNA, 15 bp, Homo sapiens
gaggaaaacattact

SEQ ID NO: 417277 - DNA, 15 bp, Homo sapiens
ggaggaaaacattac

SEQ ID NO: 417278 - DNA, 15 bp, Homo sapiens
gggaggaaaacatta

SEQ ID NO: 417279 - DNA, 15 bp, Homo sapiens
cgggaggaaaacatt

SEQ ID NO: 417280 - DNA, 15 bp, Homo sapiens
tcgggaggaaaacat

SEQ ID NO: 417281 - DNA, 15 bp, Homo sapiens
atcgggaggaaaaca

SEQ ID NO: 417282 - DNA, 15 bp, Homo sapiens
aatcgggaggaaaac

SEQ ID NO: 417283 - DNA, 15 bp, Homo sapiens
aaatcgggaggaaaa

SEQ ID NO: 417284 - DNA, 15 bp, Homo sapiens
aaaatcgggaggaaa

SEQ ID NO: 417285 - DNA, 15 bp, Homo sapiens
aaaaatcgggaggaa

SEQ ID NO: 417286 - DNA, 15 bp, Homo sapiens
taaaaatcgggagga

SEQ ID NO: 417287 - DNA, 15 bp, Homo sapiens
ataaaaatcgggagg

SEQ ID NO: 417288 - DNA, 15 bp, Homo sapiens
cataaaaatcgggag

SEQ ID NO: 417289 - DNA, 15 bp, Homo sapiens
acataaaaatcggga

SEQ ID NO: 417290 - DNA, 15 bp, Homo sapiens
tacataaaaatcggg

SEQ ID NO: 417291 - DNA, 15 bp, Homo sapiens
ctacataaaaatcgg

SEQ ID NO: 417292 - DNA, 15 bp, Homo sapiens
tctacataaaaatcg

SEQ ID NO: 417293 - DNA, 15 bp, Homo sapiens
ttctacataaaaatc

SEQ ID NO: 417294 - DNA, 15 bp, Homo sapiens
tttctacataaaaat

SEQ ID NO: 417295 - DNA, 15 bp, Homo sapiens
ctttctacataaaaa

SEQ ID NO: 417296 - DNA, 15 bp, Homo sapiens
actttctacataaaa

SEQ ID NO: 417297 - DNA, 15 bp, Homo sapiens
cactttctacataaa

SEQ ID NO: 417298 - DNA, 15 bp, Homo sapiens
acactttctacataa

SEQ ID NO: 417299 - DNA, 15 bp, Homo sapiens
aacactttctacata

SEQ ID NO: 417300 - DNA, 15 bp, Homo sapiens
aaacactttctacat

SEQ ID NO: 417301 - DNA, 15 bp, Homo sapiens
aaaacactttctaca

SEQ ID NO: 417302 - DNA, 15 bp, Homo sapiens
caaaacactttctac

SEQ ID NO: 417303 - DNA, 15 bp, Homo sapiens
acaaaacactttcta

SEQ ID NO: 417304 - DNA, 15 bp, Homo sapiens
aacaaaacactttct

SEQ ID NO: 417305 - DNA, 15 bp, Homo sapiens
taacaaaacactttc

SEQ ID NO: 417306 - DNA, 15 bp, Homo sapiens
ttaacaaaacacttt

SEQ ID NO: 417307 - DNA, 15 bp, Homo sapiens
tttaacaaaacactt

SEQ ID NO: 417308 - DNA, 15 bp, Homo sapiens
ttttaacaaaacact

SEQ ID NO: 417309 - DNA, 15 bp, Homo sapiens
attttaacaaaacac

SEQ ID NO: 417310 - DNA, 15 bp, Homo sapiens
aattttaacaaaaca

SEQ ID NO: 417311 - DNA, 15 bp, Homo sapiens
gaattttaacaaaac

SEQ ID NO: 417312 - DNA, 15 bp, Homo sapiens
agaattttaacaaaa

SEQ ID NO: 417313 - DNA, 15 bp, Homo sapiens
cagaattttaacaaa

SEQ ID NO: 417314 - DNA, 15 bp, Homo sapiens
ccagaattttaacaa

SEQ ID NO: 417315 - DNA, 15 bp, Homo sapiens
tccagaattttaaca

SEQ ID NO: 417316 - DNA, 15 bp, Homo sapiens
ttccagaattttaac

SEQ ID NO: 417317 - DNA, 15 bp, Homo sapiens
tttccagaattttaa

SEQ ID NO: 417318 - DNA, 15 bp, Homo sapiens
atttccagaatttta

SEQ ID NO: 417319 - DNA, 15 bp, Homo sapiens
catttccagaatttt

SEQ ID NO: 417320 - DNA, 15 bp, Homo sapiens
tcatttccagaattt

SEQ ID NO: 417321 - DNA, 15 bp, Homo sapiens
ttcatttccagaatt

SEQ ID NO: 417322 - DNA, 15 bp, Homo sapiens
tttcatttccagaat

SEQ ID NO: 417323 - DNA, 15 bp, Homo sapiens
gtttcatttccagaa

SEQ ID NO: 417324 - DNA, 15 bp, Homo sapiens
agtttcatttccaga

SEQ ID NO: 417325 - DNA, 15 bp, Homo sapiens
gagtttcatttccag

SEQ ID NO: 417326 - DNA, 15 bp, Homo sapiens
tgagtttcatttcca

SEQ ID NO: 417327 - DNA, 15 bp, Homo sapiens
ctgagtttcatttcc

SEQ ID NO: 417328 - DNA, 15 bp, Homo sapiens
tctgagtttcatttc

SEQ ID NO: 417329 - DNA, 15 bp, Homo sapiens
ttctgagtttcattt

SEQ ID NO: 417330 - DNA, 15 bp, Homo sapiens
tttctgagtttcatt

SEQ ID NO: 417331 - DNA, 15 bp, Homo sapiens
ctttctgagtttcat

SEQ ID NO: 417332 - DNA, 15 bp, Homo sapiens
cctttctgagtttca

SEQ ID NO: 417333 - DNA, 15 bp, Homo sapiens
tcctttctgagtttc

SEQ ID NO: 417334 - DNA, 15 bp, Homo sapiens
ttcctttctgagttt

SEQ ID NO: 417335 - DNA, 15 bp, Homo sapiens
tttcctttctgagtt

SEQ ID NO: 417336 - DNA, 15 bp, Homo sapiens
atttcctttctgagt

SEQ ID NO: 417337 - DNA, 15 bp, Homo sapiens
aatttcctttctgag

SEQ ID NO: 417338 - DNA, 15 bp, Homo sapiens
taatttcctttctga

SEQ ID NO: 417339 - DNA, 15 bp, Homo sapiens
ttaatttcctttctg

SEQ ID NO: 417340 - DNA, 15 bp, Homo sapiens
tttaatttcctttct

SEQ ID NO: 417341 - DNA, 15 bp, Homo sapiens
ttttaatttcctttc

SEQ ID NO: 417342 - DNA, 15 bp, Homo sapiens
cttttaatttccttt

SEQ ID NO: 417343 - DNA, 15 bp, Homo sapiens
tcttttaatttcctt

SEQ ID NO: 417344 - DNA, 15 bp, Homo sapiens
ttcttttaatttcct

SEQ ID NO: 417345 - DNA, 15 bp, Homo sapiens
tttcttttaatttcc

SEQ ID NO: 417346 - DNA, 15 bp, Homo sapiens
ttttcttttaatttc

SEQ ID NO: 417347 - DNA, 15 bp, Homo sapiens
cttttcttttaattt

SEQ ID NO: 417348 - DNA, 15 bp, Homo sapiens
ccttttcttttaatt

SEQ ID NO: 417349 - DNA, 15 bp, Homo sapiens
cccttttcttttaat

SEQ ID NO: 417350 - DNA, 15 bp, Homo sapiens
tcccttttcttttaa

SEQ ID NO: 417351 - DNA, 15 bp, Homo sapiens
ttcccttttctttta

SEQ ID NO: 417352 - DNA, 15 bp, Homo sapiens
cttcccttttctttt

SEQ ID NO: 417353 - DNA, 15 bp, Homo sapiens
tcttcccttttcttt

SEQ ID NO: 417354 - DNA, 15 bp, Homo sapiens
ttcttcccttttctt

SEQ ID NO: 417355 - DNA, 15 bp, Homo sapiens
attcttcccttttct

SEQ ID NO: 417356 - DNA, 15 bp, Homo sapiens
aattcttcccttttc

SEQ ID NO: 417357 - DNA, 15 bp, Homo sapiens
caattcttccctttt

SEQ ID NO: 417358 - DNA, 15 bp, Homo sapiens
gcaattcttcccttt

SEQ ID NO: 417359 - DNA, 15 bp, Homo sapiens
tgcaattcttccctt

SEQ ID NO: 417360 - DNA, 15 bp, Homo sapiens
atgcaattcttccct

SEQ ID NO: 417361 - DNA, 15 bp, Homo sapiens
gatgcaattcttccc

SEQ ID NO: 417362 - DNA, 15 bp, Homo sapiens
tgatgcaattcttcc

SEQ ID NO: 417363 - DNA, 15 bp, Homo sapiens
ttgatgcaattcttc

SEQ ID NO: 417364 - DNA, 15 bp, Homo sapiens
attgatgcaattctt

SEQ ID NO: 417365 - DNA, 15 bp, Homo sapiens
aattgatgcaattct

SEQ ID NO: 417366 - DNA, 15 bp, Homo sapiens
taattgatgcaattc

SEQ ID NO: 417367 - DNA, 15 bp, Homo sapiens
ataattgatgcaatt

SEQ ID NO: 417368 - DNA, 15 bp, Homo sapiens
cataattgatgcaat

SEQ ID NO: 417369 - DNA, 15 bp, Homo sapiens
tcataattgatgcaa

SEQ ID NO: 417370 - DNA, 15 bp, Homo sapiens
gtcataattgatgca

SEQ ID NO: 417371 - DNA, 15 bp, Homo sapiens
tgtcataattgatgc

SEQ ID NO: 417372 - DNA, 15 bp, Homo sapiens
ctgtcataattgatg

SEQ ID NO: 417373 - DNA, 15 bp, Homo sapiens
tctgtcataattgat

SEQ ID NO: 417374 - DNA, 15 bp, Homo sapiens
atctgtcataattga

SEQ ID NO: 417375 - DNA, 15 bp, Homo sapiens
tatctgtcataattg

SEQ ID NO: 417376 - DNA, 15 bp, Homo sapiens
ttatctgtcataatt

SEQ ID NO: 417377 - DNA, 15 bp, Homo sapiens
cttatctgtcataat

SEQ ID NO: 417378 - DNA, 15 bp, Homo sapiens
tcttatctgtcataa

SEQ ID NO: 417379 - DNA, 15 bp, Homo sapiens
ctcttatctgtcata

SEQ ID NO: 417380 - DNA, 15 bp, Homo sapiens
tctcttatctgtcat

SEQ ID NO: 417381 - DNA, 15 bp, Homo sapiens
atctcttatctgtca

SEQ ID NO: 417382 - DNA, 15 bp, Homo sapiens
aatctcttatctgtc

SEQ ID NO: 417383 - DNA, 15 bp, Homo sapiens
taatctcttatctgt

SEQ ID NO: 417384 - DNA, 15 bp, Homo sapiens
ttaatctcttatctg

SEQ ID NO: 417385 - DNA, 15 bp, Homo sapiens
gttaatctcttatct

SEQ ID NO: 417386 - DNA, 15 bp, Homo sapiens
cgttaatctcttatc

SEQ ID NO: 417387 - DNA, 15 bp, Homo sapiens
acgttaatctcttat

SEQ ID NO: 417388 - DNA, 15 bp, Homo sapiens
tacgttaatctctta

SEQ ID NO: 417389 - DNA, 15 bp, Homo sapiens
gtacgttaatctctt

SEQ ID NO: 417390 - DNA, 15 bp, Homo sapiens
agtacgttaatctct

SEQ ID NO: 417391 - DNA, 15 bp, Homo sapiens
aagtacgttaatctc

SEQ ID NO: 417392 - DNA, 15 bp, Homo sapiens
taagtacgttaatct

SEQ ID NO: 417393 - DNA, 15 bp, Homo sapiens
gtaagtacgttaatc

SEQ ID NO: 417394 - DNA, 15 bp, Homo sapiens
agtaagtacgttaat

SEQ ID NO: 417395 - DNA, 15 bp, Homo sapiens
tagtaagtacgttaa

SEQ ID NO: 417396 - DNA, 15 bp, Homo sapiens
ttagtaagtacgtta

SEQ ID NO: 417397 - DNA, 15 bp, Homo sapiens
cttagtaagtacgtt

SEQ ID NO: 417398 - DNA, 15 bp, Homo sapiens
tcttagtaagtacgt

SEQ ID NO: 417399 - DNA, 15 bp, Homo sapiens
ctcttagtaagtacg

SEQ ID NO: 417400 - DNA, 15 bp, Homo sapiens
gctcttagtaagtac

SEQ ID NO: 417401 - DNA, 15 bp, Homo sapiens
agctcttagtaagta

SEQ ID NO: 417402 - DNA, 15 bp, Homo sapiens
aagctcttagtaagt

SEQ ID NO: 417403 - DNA, 15 bp, Homo sapiens
aaagctcttagtaag

SEQ ID NO: 417404 - DNA, 15 bp, Homo sapiens
aaaagctcttagtaa

SEQ ID NO: 417405 - DNA, 15 bp, Homo sapiens
taaaagctcttagta

SEQ ID NO: 417406 - DNA, 15 bp, Homo sapiens
ataaaagctcttagt

SEQ ID NO: 417407 - DNA, 15 bp, Homo sapiens
tataaaagctcttag

SEQ ID NO: 417408 - DNA, 15 bp, Homo sapiens
ttataaaagctctta

SEQ ID NO: 417409 - DNA, 15 bp, Homo sapiens
tttataaaagctctt

SEQ ID NO: 417410 - DNA, 15 bp, Homo sapiens
atttataaaagctct

SEQ ID NO: 417411 - DNA, 15 bp, Homo sapiens
aatttataaaagctc

SEQ ID NO: 417412 - DNA, 15 bp, Homo sapiens
taatttataaaagct

SEQ ID NO: 417413 - DNA, 15 bp, Homo sapiens
ctaatttataaaagc

SEQ ID NO: 417414 - DNA, 15 bp, Homo sapiens
actaatttataaaag

SEQ ID NO: 417415 - DNA, 15 bp, Homo sapiens
cactaatttataaaa

SEQ ID NO: 417416 - DNA, 15 bp, Homo sapiens
gcactaatttataaa

SEQ ID NO: 417417 - DNA, 15 bp, Homo sapiens
ggcactaatttataa

SEQ ID NO: 417418 - DNA, 15 bp, Homo sapiens
tggcactaatttata

SEQ ID NO: 417419 - DNA, 15 bp, Homo sapiens
atggcactaatttat

SEQ ID NO: 417420 - DNA, 15 bp, Homo sapiens
aatggcactaattta

SEQ ID NO: 417421 - DNA, 15 bp, Homo sapiens
gaatggcactaattt

SEQ ID NO: 417422 - DNA, 15 bp, Homo sapiens
ggaatggcactaatt

SEQ ID NO: 417423 - DNA, 15 bp, Homo sapiens
tggaatggcactaat

SEQ ID NO: 417424 - DNA, 15 bp, Homo sapiens
ttggaatggcactaa

SEQ ID NO: 417425 - DNA, 15 bp, Homo sapiens
attggaatggcacta

SEQ ID NO: 417426 - DNA, 15 bp, Homo sapiens
tattggaatggcact

SEQ ID NO: 417427 - DNA, 15 bp, Homo sapiens
ctattggaatggcac

SEQ ID NO: 417428 - DNA, 15 bp, Homo sapiens
tctattggaatggca

SEQ ID NO: 417429 - DNA, 15 bp, Homo sapiens
ttctattggaatggc

SEQ ID NO: 417430 - DNA, 15 bp, Homo sapiens
tttctattggaatgg

SEQ ID NO: 417431 - DNA, 15 bp, Homo sapiens
ttttctattggaatg

SEQ ID NO: 417432 - DNA, 15 bp, Homo sapiens
tttttctattggaat

SEQ ID NO: 417433 - DNA, 15 bp, Homo sapiens
ttttttctattggaa

SEQ ID NO: 417434 - DNA, 15 bp, Homo sapiens
tttttttctattgga

SEQ ID NO: 417435 - DNA, 15 bp, Homo sapiens
ctttttttctattgg

SEQ ID NO: 417436 - DNA, 15 bp, Homo sapiens
cctttttttctattg

SEQ ID NO: 417437 - DNA, 15 bp, Homo sapiens
gcctttttttctatt

SEQ ID NO: 417438 - DNA, 15 bp, Homo sapiens
tgcctttttttctat

SEQ ID NO: 417439 - DNA, 15 bp, Homo sapiens
ttgcctttttttcta

SEQ ID NO: 417440 - DNA, 15 bp, Homo sapiens
gttgcctttttttct

SEQ ID NO: 417441 - DNA, 15 bp, Homo sapiens
tgttgcctttttttc

SEQ ID NO: 417442 - DNA, 15 bp, Homo sapiens
gtgttgccttttttt

SEQ ID NO: 417443 - DNA, 15 bp, Homo sapiens
cgtgttgcctttttt

SEQ ID NO: 417444 - DNA, 15 bp, Homo sapiens
tcgtgttgccttttt

SEQ ID NO: 417445 - DNA, 15 bp, Homo sapiens
ttcgtgttgcctttt

SEQ ID NO: 417446 - DNA, 15 bp, Homo sapiens
gttcgtgttgccttt

SEQ ID NO: 417447 - DNA, 15 bp, Homo sapiens
agttcgtgttgcctt

SEQ ID NO: 417448 - DNA, 15 bp, Homo sapiens
tagttcgtgttgcct

SEQ ID NO: 417449 - DNA, 15 bp, Homo sapiens
ctagttcgtgttgcc

SEQ ID NO: 417450 - DNA, 15 bp, Homo sapiens
actagttcgtgttgc

SEQ ID NO: 417451 - DNA, 15 bp, Homo sapiens
tactagttcgtgttg

SEQ ID NO: 417452 - DNA, 15 bp, Homo sapiens
ttactagttcgtgtt

SEQ ID NO: 417453 - DNA, 15 bp, Homo sapiens
attactagttcgtgt

SEQ ID NO: 417454 - DNA, 15 bp, Homo sapiens
aattactagttcgtg

SEQ ID NO: 417455 - DNA, 15 bp, Homo sapiens
taattactagttcgt

SEQ ID NO: 417456 - DNA, 15 bp, Homo sapiens
ttaattactagttcg

SEQ ID NO: 417457 - DNA, 15 bp, Homo sapiens
tttaattactagttc

SEQ ID NO: 417458 - DNA, 15 bp, Homo sapiens
atttaattactagtt

SEQ ID NO: 417459 - DNA, 15 bp, Homo sapiens
aatttaattactagt

SEQ ID NO: 417460 - DNA, 15 bp, Homo sapiens
taatttaattactag

SEQ ID NO: 417461 - DNA, 15 bp, Homo sapiens
tttaatttaattact

SEQ ID NO: 417462 - DNA, 15 bp, Homo sapiens
atttaatttaattac

SEQ ID NO: 417463 - DNA, 15 bp, Homo sapiens
aatttaatttaatta

SEQ ID NO: 417464 - DNA, 15 bp, Homo sapiens
aaatttaatttaatt

SEQ ID NO: 417465 - DNA, 15 bp, Homo sapiens
taaatttaatttaat

SEQ ID NO: 417466 - DNA, 15 bp, Homo sapiens
ttaaatttaatttaa

SEQ ID NO: 417467 - DNA, 15 bp, Homo sapiens
tttaaatttaattta

SEQ ID NO: 417468 - DNA, 15 bp, Homo sapiens
ttttaaatttaattt

SEQ ID NO: 417469 - DNA, 15 bp, Homo sapiens
tttttaaatttaatt

SEQ ID NO: 417470 - DNA, 15 bp, Homo sapiens
ttttttaaatttaat

SEQ ID NO: 417471 - DNA, 15 bp, Homo sapiens
attttttaaatttaa

SEQ ID NO: 417472 - DNA, 15 bp, Homo sapiens
aattttttaaattta

SEQ ID NO: 417473 - DNA, 15 bp, Homo sapiens
taattttttaaattt

SEQ ID NO: 417474 - DNA, 15 bp, Homo sapiens
ttaattttttaaatt

SEQ ID NO: 417475 - DNA, 15 bp, Homo sapiens
attaattttttaaat

SEQ ID NO: 417476 - DNA, 15 bp, Homo sapiens
aattaattttttaaa

SEQ ID NO: 417477 - DNA, 15 bp, Homo sapiens
taattaattttttaa

SEQ ID NO: 417478 - DNA, 15 bp, Homo sapiens
ttaattaatttttta

SEQ ID NO: 417479 - DNA, 15 bp, Homo sapiens
tttaattaatttttt

SEQ ID NO: 417480 - DNA, 15 bp, Homo sapiens
ctttaattaattttt

SEQ ID NO: 417481 - DNA, 15 bp, Homo sapiens
gctttaattaatttt

SEQ ID NO: 417482 - DNA, 15 bp, Homo sapiens
tgctttaattaattt

SEQ ID NO: 417483 - DNA, 15 bp, Homo sapiens
atgctttaattaatt

SEQ ID NO: 417484 - DNA, 15 bp, Homo sapiens
aatgctttaattaat

SEQ ID NO: 417485 - DNA, 15 bp, Homo sapiens
taatgctttaattaa

SEQ ID NO: 417486 - DNA, 15 bp, Homo sapiens
ttaatgctttaatta

SEQ ID NO: 417487 - DNA, 15 bp, Homo sapiens
tttaatgctttaatt

SEQ ID NO: 417488 - DNA, 15 bp, Homo sapiens
ttttaatgctttaat

SEQ ID NO: 417489 - DNA, 15 bp, Homo sapiens
tttttaatgctttaa

SEQ ID NO: 417490 - DNA, 15 bp, Homo sapiens
gtttttaatgcttta

SEQ ID NO: 417491 - DNA, 15 bp, Homo sapiens
agtttttaatgcttt

SEQ ID NO: 417492 - DNA, 15 bp, Homo sapiens
tagtttttaatgctt

SEQ ID NO: 417493 - DNA, 15 bp, Homo sapiens
ctagtttttaatgct

SEQ ID NO: 417494 - DNA, 15 bp, Homo sapiens
tctagtttttaatgc

SEQ ID NO: 417495 - DNA, 15 bp, Homo sapiens
ctctagtttttaatg

SEQ ID NO: 417496 - DNA, 15 bp, Homo sapiens
tctctagtttttaat

SEQ ID NO: 417497 - DNA, 15 bp, Homo sapiens
ttctctagtttttaa

SEQ ID NO: 417498 - DNA, 15 bp, Homo sapiens
tttctctagttttta

SEQ ID NO: 417499 - DNA, 15 bp, Homo sapiens
ttttctctagttttt

SEQ ID NO: 417500 - DNA, 15 bp, Homo sapiens
attttctctagtttt

SEQ ID NO: 417501 - DNA, 15 bp, Homo sapiens
tattttctctagttt

SEQ ID NO: 417502 - DNA, 15 bp, Homo sapiens
ctattttctctagtt

SEQ ID NO: 417503 - DNA, 15 bp, Homo sapiens
tctattttctctagt

SEQ ID NO: 417504 - DNA, 15 bp, Homo sapiens
gtctattttctctag

SEQ ID NO: 417505 - DNA, 15 bp, Homo sapiens
tgtctattttctcta

SEQ ID NO: 417506 - DNA, 15 bp, Homo sapiens
atgtctattttctct

SEQ ID NO: 417507 - DNA, 15 bp, Homo sapiens
tatgtctattttctc

SEQ ID NO: 417508 - DNA, 15 bp, Homo sapiens
ctatgtctattttct

SEQ ID NO: 417509 - DNA, 15 bp, Homo sapiens
tctatgtctattttc

SEQ ID NO: 417510 - DNA, 15 bp, Homo sapiens
ttctatgtctatttt

SEQ ID NO: 417511 - DNA, 15 bp, Homo sapiens
attctatgtctattt

SEQ ID NO: 417512 - DNA, 15 bp, Homo sapiens
aattctatgtctatt

SEQ ID NO: 417513 - DNA, 15 bp, Homo sapiens
aaattctatgtctat

SEQ ID NO: 417514 - DNA, 15 bp, Homo sapiens
aaaattctatgtcta

SEQ ID NO: 417515 - DNA, 15 bp, Homo sapiens
taaaattctatgtct

SEQ ID NO: 417516 - DNA, 15 bp, Homo sapiens
ttaaaattctatgtc

SEQ ID NO: 417517 - DNA, 15 bp, Homo sapiens
cttaaaattctatgt

SEQ ID NO: 417518 - DNA, 15 bp, Homo sapiens
gcttaaaattctatg

SEQ ID NO: 417519 - DNA, 15 bp, Homo sapiens
ggcttaaaattctat

SEQ ID NO: 417520 - DNA, 15 bp, Homo sapiens
aggcttaaaattcta

SEQ ID NO: 417521 - DNA, 15 bp, Homo sapiens
taggcttaaaattct

SEQ ID NO: 417522 - DNA, 15 bp, Homo sapiens
ctaggcttaaaattc

SEQ ID NO: 417523 - DNA, 15 bp, Homo sapiens
gctaggcttaaaatt

SEQ ID NO: 417524 - DNA, 15 bp, Homo sapiens
agctaggcttaaaat

SEQ ID NO: 417525 - DNA, 15 bp, Homo sapiens
tagctaggcttaaaa

SEQ ID NO: 417526 - DNA, 15 bp, Homo sapiens
ctagctaggcttaaa

SEQ ID NO: 417527 - DNA, 15 bp, Homo sapiens
actagctaggcttaa

SEQ ID NO: 417528 - DNA, 15 bp, Homo sapiens
tactagctaggctta

SEQ ID NO: 417529 - DNA, 15 bp, Homo sapiens
ttactagctaggctt

SEQ ID NO: 417530 - DNA, 15 bp, Homo sapiens
attactagctaggct

SEQ ID NO: 417531 - DNA, 15 bp, Homo sapiens
gattactagctaggc

SEQ ID NO: 417532 - DNA, 15 bp, Homo sapiens
tgattactagctagg

SEQ ID NO: 417533 - DNA, 15 bp, Homo sapiens
ttgattactagctag

SEQ ID NO: 417534 - DNA, 15 bp, Homo sapiens
tttgattactagcta

SEQ ID NO: 417535 - DNA, 15 bp, Homo sapiens
atttgattactagct

SEQ ID NO: 417536 - DNA, 15 bp, Homo sapiens
tatttgattactagc

SEQ ID NO: 417537 - DNA, 15 bp, Homo sapiens
ttatttgattactag

SEQ ID NO: 417538 - DNA, 15 bp, Homo sapiens
gttatttgattacta

SEQ ID NO: 417539 - DNA, 15 bp, Homo sapiens
ggttatttgattact

SEQ ID NO: 417540 - DNA, 15 bp, Homo sapiens
tggttatttgattac

SEQ ID NO: 417541 - DNA, 15 bp, Homo sapiens
ttggttatttgatta

SEQ ID NO: 417542 - DNA, 15 bp, Homo sapiens
tttggttatttgatt

SEQ ID NO: 417543 - DNA, 15 bp, Homo sapiens
gtttggttatttgat

SEQ ID NO: 417544 - DNA, 15 bp, Homo sapiens
agtttggttatttga

SEQ ID NO: 417545 - DNA, 15 bp, Homo sapiens
aagtttggttatttg

SEQ ID NO: 417546 - DNA, 15 bp, Homo sapiens
gaagtttggttattt

SEQ ID NO: 417547 - DNA, 15 bp, Homo sapiens
ggaagtttggttatt

SEQ ID NO: 417548 - DNA, 15 bp, Homo sapiens
gggaagtttggttat

SEQ ID NO: 417549 - DNA, 15 bp, Homo sapiens
agggaagtttggtta

SEQ ID NO: 417550 - DNA, 15 bp, Homo sapiens
gagggaagtttggtt

SEQ ID NO: 417551 - DNA, 15 bp, Homo sapiens
ggagggaagtttggt

SEQ ID NO: 417552 - DNA, 15 bp, Homo sapiens
aggagggaagtttgg

SEQ ID NO: 417553 - DNA, 15 bp, Homo sapiens
gaggagggaagtttg

SEQ ID NO: 417554 - DNA, 15 bp, Homo sapiens
agaggagggaagttt

SEQ ID NO: 417555 - DNA, 15 bp, Homo sapiens
gagaggagggaagtt

SEQ ID NO: 417556 - DNA, 15 bp, Homo sapiens
ggagaggagggaagt

SEQ ID NO: 417557 - DNA, 15 bp, Homo sapiens
gggagaggagggaag

SEQ ID NO: 417558 - DNA, 15 bp, Homo sapiens
ggggagaggagggaa

SEQ ID NO: 417559 - DNA, 15 bp, Homo sapiens
aggggagaggaggga

SEQ ID NO: 417560 - DNA, 15 bp, Homo sapiens
gaggggagaggaggg

SEQ ID NO: 417561 - DNA, 15 bp, Homo sapiens
ggaggggagaggagg

SEQ ID NO: 417562 - DNA, 15 bp, Homo sapiens
gggaggggagaggag

SEQ ID NO: 417563 - DNA, 15 bp, Homo sapiens
ggggaggggagagga

SEQ ID NO: 417564 - DNA, 15 bp, Homo sapiens
aggggaggggagagg

SEQ ID NO: 417565 - DNA, 15 bp, Homo sapiens
gaggggaggggagag

SEQ ID NO: 417566 - DNA, 15 bp, Homo sapiens
agaggggaggggaga

SEQ ID NO: 417567 - DNA, 15 bp, Homo sapiens
gagaggggaggggag

SEQ ID NO: 417568 - DNA, 15 bp, Homo sapiens
agagaggggagggga

SEQ ID NO: 417569 - DNA, 15 bp, Homo sapiens
aagagaggggagggg

SEQ ID NO: 417570 - DNA, 15 bp, Homo sapiens
gaagagaggggaggg

SEQ ID NO: 417571 - DNA, 15 bp, Homo sapiens
ggaagagaggggagg

SEQ ID NO: 417572 - DNA, 15 bp, Homo sapiens
gggaagagaggggag

SEQ ID NO: 417573 - DNA, 15 bp, Homo sapiens
agggaagagagggga

SEQ ID NO: 417574 - DNA, 15 bp, Homo sapiens
aagggaagagagggg

SEQ ID NO: 417575 - DNA, 15 bp, Homo sapiens
gaagggaagagaggg

SEQ ID NO: 417576 - DNA, 15 bp, Homo sapiens
agaagggaagagagg

SEQ ID NO: 417577 - DNA, 15 bp, Homo sapiens
aagaagggaagagag

SEQ ID NO: 417578 - DNA, 15 bp, Homo sapiens
gaagaagggaagaga

SEQ ID NO: 417579 - DNA, 15 bp, Homo sapiens
agaagaagggaagag

SEQ ID NO: 417580 - DNA, 15 bp, Homo sapiens
gagaagaagggaaga

SEQ ID NO: 417581 - DNA, 15 bp, Homo sapiens
ggagaagaagggaag

SEQ ID NO: 417582 - DNA, 15 bp, Homo sapiens
gggagaagaagggaa

SEQ ID NO: 417583 - DNA, 15 bp, Homo sapiens
agggagaagaaggga

SEQ ID NO: 417584 - DNA, 15 bp, Homo sapiens
gagggagaagaaggg

SEQ ID NO: 417585 - DNA, 15 bp, Homo sapiens
ggagggagaagaagg

SEQ ID NO: 417586 - DNA, 15 bp, Homo sapiens
gggagggagaagaag

SEQ ID NO: 417587 - DNA, 15 bp, Homo sapiens
ggggagggagaagaa

SEQ ID NO: 417588 - DNA, 15 bp, Homo sapiens
gggggagggagaaga

SEQ ID NO: 417589 - DNA, 15 bp, Homo sapiens
agggggagggagaag

SEQ ID NO: 417590 - DNA, 15 bp, Homo sapiens
aagggggagggagaa

SEQ ID NO: 417591 - DNA, 15 bp, Homo sapiens
caagggggagggaga

SEQ ID NO: 417592 - DNA, 15 bp, Homo sapiens
acaagggggagggag

SEQ ID NO: 417593 - DNA, 15 bp, Homo sapiens
aacaagggggaggga

SEQ ID NO: 417594 - DNA, 15 bp, Homo sapiens
aaacaagggggaggg

SEQ ID NO: 417595 - DNA, 15 bp, Homo sapiens
aaaacaagggggagg

SEQ ID NO: 417596 - DNA, 15 bp, Homo sapiens
gaaaacaagggggag

SEQ ID NO: 417597 - DNA, 15 bp, Homo sapiens
agaaaacaaggggga

SEQ ID NO: 417598 - DNA, 15 bp, Homo sapiens
aagaaaacaaggggg

SEQ ID NO: 417599 - DNA, 15 bp, Homo sapiens
aaagaaaacaagggg

SEQ ID NO: 417600 - DNA, 15 bp, Homo sapiens
aaaagaaaacaaggg

SEQ ID NO: 417601 - DNA, 15 bp, Homo sapiens
gaaaagaaaacaagg

SEQ ID NO: 417602 - DNA, 15 bp, Homo sapiens
ggaaaagaaaacaag

SEQ ID NO: 417603 - DNA, 15 bp, Homo sapiens
aggaaaagaaaacaa

SEQ ID NO: 417604 - DNA, 15 bp, Homo sapiens
aaggaaaagaaaaca

SEQ ID NO: 417605 - DNA, 15 bp, Homo sapiens
aaaggaaaagaaaac

SEQ ID NO: 417606 - DNA, 15 bp, Homo sapiens
gaaaggaaaagaaaa

SEQ ID NO: 417607 - DNA, 15 bp, Homo sapiens
agaaaggaaaagaaa

SEQ ID NO: 417608 - DNA, 15 bp, Homo sapiens
aagaaaggaaaagaa

SEQ ID NO: 417609 - DNA, 15 bp, Homo sapiens
aaagaaaggaaaaga

SEQ ID NO: 417610 - DNA, 15 bp, Homo sapiens
aaaagaaaggaaaag

SEQ ID NO: 417611 - DNA, 15 bp, Homo sapiens
aaaaagaaaggaaaa

SEQ ID NO: 417612 - DNA, 15 bp, Homo sapiens
aaaaaagaaaggaaa

SEQ ID NO: 417613 - DNA, 15 bp, Homo sapiens
gaaaaaagaaaggaa

SEQ ID NO: 417614 - DNA, 15 bp, Homo sapiens
agaaaaaagaaagga

SEQ ID NO: 417615 - DNA, 15 bp, Homo sapiens
aagaaaaaagaaagg

SEQ ID NO: 417616 - DNA, 15 bp, Homo sapiens
aaagaaaaaagaaag

SEQ ID NO: 417617 - DNA, 15 bp, Homo sapiens
gaaaagaaaaaagaa

SEQ ID NO: 417618 - DNA, 15 bp, Homo sapiens
agaaaagaaaaaaga

SEQ ID NO: 417619 - DNA, 15 bp, Homo sapiens
aagaaaagaaaaaag

SEQ ID NO: 417620 - DNA, 15 bp, Homo sapiens
aaagaaaagaaaaaa

SEQ ID NO: 417621 - DNA, 15 bp, Homo sapiens
gaaagaaaagaaaaa

SEQ ID NO: 417622 - DNA, 15 bp, Homo sapiens
agaaagaaaagaaaa

SEQ ID NO: 417623 - DNA, 15 bp, Homo sapiens
aagaaagaaaagaaa

SEQ ID NO: 417624 - DNA, 15 bp, Homo sapiens
caagaaagaaaagaa

SEQ ID NO: 417625 - DNA, 15 bp, Homo sapiens
tcaagaaagaaaaga

SEQ ID NO: 417626 - DNA, 15 bp, Homo sapiens
ctcaagaaagaaaag

SEQ ID NO: 417627 - DNA, 15 bp, Homo sapiens
gctcaagaaagaaaa

SEQ ID NO: 417628 - DNA, 15 bp, Homo sapiens
tgctcaagaaagaaa

SEQ ID NO: 417629 - DNA, 15 bp, Homo sapiens
ctgctcaagaaagaa

SEQ ID NO: 417630 - DNA, 15 bp, Homo sapiens
cctgctcaagaaaga

SEQ ID NO: 417631 - DNA, 15 bp, Homo sapiens
ccctgctcaagaaag

SEQ ID NO: 417632 - DNA, 15 bp, Homo sapiens
cccctgctcaagaaa

SEQ ID NO: 417633 - DNA, 15 bp, Homo sapiens
gcccctgctcaagaa

SEQ ID NO: 417634 - DNA, 15 bp, Homo sapiens
tgcccctgctcaaga

SEQ ID NO: 417635 - DNA, 15 bp, Homo sapiens
ctgcccctgctcaag

SEQ ID NO: 417636 - DNA, 15 bp, Homo sapiens
cctgcccctgctcaa

SEQ ID NO: 417637 - DNA, 15 bp, Homo sapiens
ccctgcccctgctca

SEQ ID NO: 417638 - DNA, 15 bp, Homo sapiens
tccctgcccctgctc

SEQ ID NO: 417639 - DNA, 15 bp, Homo sapiens
ctccctgcccctgct

SEQ ID NO: 417640 - DNA, 15 bp, Homo sapiens
cctccctgcccctgc

SEQ ID NO: 417641 - DNA, 15 bp, Homo sapiens
tcctccctgcccctg

SEQ ID NO: 417642 - DNA, 15 bp, Homo sapiens
ttcctccctgcccct

SEQ ID NO: 417643 - DNA, 15 bp, Homo sapiens
attcctccctgcccc

SEQ ID NO: 417644 - DNA, 15 bp, Homo sapiens
cattcctccctgccc

SEQ ID NO: 417645 - DNA, 15 bp, Homo sapiens
ccattcctccctgcc

SEQ ID NO: 417646 - DNA, 15 bp, Homo sapiens
accattcctccctgc

SEQ ID NO: 417647 - DNA, 15 bp, Homo sapiens
aaccattcctccctg

SEQ ID NO: 417648 - DNA, 15 bp, Homo sapiens
aaaccattcctccct

SEQ ID NO: 417649 - DNA, 15 bp, Homo sapiens
gaaaccattcctccc

SEQ ID NO: 417650 - DNA, 15 bp, Homo sapiens
agaaaccattcctcc

SEQ ID NO: 417651 - DNA, 15 bp, Homo sapiens
aagaaaccattcctc

SEQ ID NO: 417652 - DNA, 15 bp, Homo sapiens
aaagaaaccattcct

SEQ ID NO: 417653 - DNA, 15 bp, Homo sapiens
gaaagaaaccattcc

SEQ ID NO: 417654 - DNA, 15 bp, Homo sapiens
agaaagaaaccattc

SEQ ID NO: 417655 - DNA, 15 bp, Homo sapiens
aagaaagaaaccatt

SEQ ID NO: 417656 - DNA, 15 bp, Homo sapiens
aaagaaagaaaccat

SEQ ID NO: 417657 - DNA, 15 bp, Homo sapiens
aaaagaaagaaacca

SEQ ID NO: 417658 - DNA, 15 bp, Homo sapiens
aaaaagaaagaaacc

SEQ ID NO: 417659 - DNA, 15 bp, Homo sapiens
aaaaaagaaagaaac

SEQ ID NO: 417660 - DNA, 15 bp, Homo sapiens
caaaaaaaagaaaga

SEQ ID NO: 417661 - DNA, 15 bp, Homo sapiens
acaaaaaaaagaaag

SEQ ID NO: 417662 - DNA, 15 bp, Homo sapiens
aacaaaaaaaagaaa

SEQ ID NO: 417663 - DNA, 15 bp, Homo sapiens
aaacaaaaaaaagaa

SEQ ID NO: 417664 - DNA, 15 bp, Homo sapiens
aaaacaaaaaaaaga

SEQ ID NO: 417665 - DNA, 15 bp, Homo sapiens
taaaacaaaaaaaag

SEQ ID NO: 417666 - DNA, 15 bp, Homo sapiens
ataaaacaaaaaaaa

SEQ ID NO: 417667 - DNA, 15 bp, Homo sapiens
aataaaacaaaaaaa

SEQ ID NO: 417668 - DNA, 15 bp, Homo sapiens
aaataaaacaaaaaa

SEQ ID NO: 417669 - DNA, 15 bp, Homo sapiens
aaaataaaacaaaaa

SEQ ID NO: 417670 - DNA, 15 bp, Homo sapiens
gaaaataaaacaaaa

SEQ ID NO: 417671 - DNA, 15 bp, Homo sapiens
agaaaataaaacaaa

SEQ ID NO: 417672 - DNA, 15 bp, Homo sapiens
cagaaaataaaacaa

SEQ ID NO: 417673 - DNA, 15 bp, Homo sapiens
acagaaaataaaaca

SEQ ID NO: 417674 - DNA, 15 bp, Homo sapiens
tacagaaaataaaac

SEQ ID NO: 417675 - DNA, 15 bp, Homo sapiens
atacagaaaataaaa

SEQ ID NO: 417676 - DNA, 15 bp, Homo sapiens
aatacagaaaataaa

SEQ ID NO: 417677 - DNA, 15 bp, Homo sapiens
aaatacagaaaataa

SEQ ID NO: 417678 - DNA, 15 bp, Homo sapiens
aaaatacagaaaata

SEQ ID NO: 417679 - DNA, 15 bp, Homo sapiens
taaaatacagaaaat

SEQ ID NO: 417680 - DNA, 15 bp, Homo sapiens
ttaaaatacagaaaa

SEQ ID NO: 417681 - DNA, 15 bp, Homo sapiens
tttaaaatacagaaa

SEQ ID NO: 417682 - DNA, 15 bp, Homo sapiens
ttttaaaatacagaa

SEQ ID NO: 417683 - DNA, 15 bp, Homo sapiens
tttttaaaatacaga

SEQ ID NO: 417684 - DNA, 15 bp, Homo sapiens
ttttttaaaatacag

SEQ ID NO: 417685 - DNA, 15 bp, Homo sapiens
attttttaaaataca

SEQ ID NO: 417686 - DNA, 15 bp, Homo sapiens
cattttttaaaatac

SEQ ID NO: 417687 - DNA, 15 bp, Homo sapiens
acattttttaaaata

SEQ ID NO: 417688 - DNA, 15 bp, Homo sapiens
aaacattttttaaaa

SEQ ID NO: 417689 - DNA, 15 bp, Homo sapiens
aaaacattttttaaa

SEQ ID NO: 417690 - DNA, 15 bp, Homo sapiens
caaaacattttttaa

SEQ ID NO: 417691 - DNA, 15 bp, Homo sapiens
ccaaaacatttttta

SEQ ID NO: 417692 - DNA, 15 bp, Homo sapiens
cccaaaacatttttt

SEQ ID NO: 417693 - DNA, 15 bp, Homo sapiens
tcccaaaacattttt

SEQ ID NO: 417694 - DNA, 15 bp, Homo sapiens
ttcccaaaacatttt

SEQ ID NO: 417695 - DNA, 15 bp, Homo sapiens
tttcccaaaacattt

SEQ ID NO: 417696 - DNA, 15 bp, Homo sapiens
ttttcccaaaacatt

SEQ ID NO: 417697 - DNA, 15 bp, Homo sapiens
gttttcccaaaacat

SEQ ID NO: 417698 - DNA, 15 bp, Homo sapiens
tgttttcccaaaaca

SEQ ID NO: 417699 - DNA, 15 bp, Homo sapiens
ttgttttcccaaaac

SEQ ID NO: 417700 - DNA, 15 bp, Homo sapiens
gttgttttcccaaaa

SEQ ID NO: 417701 - DNA, 15 bp, Homo sapiens
agttgttttcccaaa

SEQ ID NO: 417702 - DNA, 15 bp, Homo sapiens
aagttgttttcccaa

SEQ ID NO: 417703 - DNA, 15 bp, Homo sapiens
aaagttgttttccca

SEQ ID NO: 417704 - DNA, 15 bp, Homo sapiens
caaagttgttttccc

SEQ ID NO: 417705 - DNA, 15 bp, Homo sapiens
tcaaagttgttttcc

SEQ ID NO: 417706 - DNA, 15 bp, Homo sapiens
ttcaaagttgttttc

SEQ ID NO: 417707 - DNA, 15 bp, Homo sapiens
tttcaaagttgtttt

SEQ ID NO: 417708 - DNA, 15 bp, Homo sapiens
ttttcaaagttgttt

SEQ ID NO: 417709 - DNA, 15 bp, Homo sapiens
cttttcaaagttgtt

SEQ ID NO: 417710 - DNA, 15 bp, Homo sapiens
gcttttcaaagttgt

SEQ ID NO: 417711 - DNA, 15 bp, Homo sapiens
tgcttttcaaagttg

SEQ ID NO: 417712 - DNA, 15 bp, Homo sapiens
ttgcttttcaaagtt

SEQ ID NO: 417713 - DNA, 15 bp, Homo sapiens
tttgcttttcaaagt

SEQ ID NO: 417714 - DNA, 15 bp, Homo sapiens
ttttgcttttcaaag

SEQ ID NO: 417715 - DNA, 15 bp, Homo sapiens
cttttgcttttcaaa

SEQ ID NO: 417716 - DNA, 15 bp, Homo sapiens
gcttttgcttttcaa

SEQ ID NO: 417717 - DNA, 15 bp, Homo sapiens
tgcttttgcttttca

SEQ ID NO: 417718 - DNA, 15 bp, Homo sapiens
ttgcttttgcttttc

SEQ ID NO: 417719 - DNA, 15 bp, Homo sapiens
attgcttttgctttt

SEQ ID NO: 417720 - DNA, 15 bp, Homo sapiens
gattgcttttgcttt

SEQ ID NO: 417721 - DNA, 15 bp, Homo sapiens
agattgcttttgctt

SEQ ID NO: 417722 - DNA, 15 bp, Homo sapiens
gagattgcttttgct

SEQ ID NO: 417723 - DNA, 15 bp, Homo sapiens
ggagattgcttttgc

SEQ ID NO: 417724 - DNA, 15 bp, Homo sapiens
tggagattgcttttg

SEQ ID NO: 417725 - DNA, 15 bp, Homo sapiens
atggagattgctttt

SEQ ID NO: 417726 - DNA, 15 bp, Homo sapiens
gatggagattgcttt

SEQ ID NO: 417727 - DNA, 15 bp, Homo sapiens
ggatggagattgctt

SEQ ID NO: 417728 - DNA, 15 bp, Homo sapiens
tggatggagattgct

SEQ ID NO: 417729 - DNA, 15 bp, Homo sapiens
atggatggagattgc

SEQ ID NO: 417730 - DNA, 15 bp, Homo sapiens
aatggatggagattg

SEQ ID NO: 417731 - DNA, 15 bp, Homo sapiens
aaatggatggagatt

SEQ ID NO: 417732 - DNA, 15 bp, Homo sapiens
aaaatggatggagat

SEQ ID NO: 417733 - DNA, 15 bp, Homo sapiens
caaaatggatggaga

SEQ ID NO: 417734 - DNA, 15 bp, Homo sapiens
ccaaaatggatggag

SEQ ID NO: 417735 - DNA, 15 bp, Homo sapiens
cccaaaatggatgga

SEQ ID NO: 417736 - DNA, 15 bp, Homo sapiens
ccccaaaatggatgg

SEQ ID NO: 417737 - DNA, 15 bp, Homo sapiens
tccccaaaatggatg

SEQ ID NO: 417738 - DNA, 15 bp, Homo sapiens
atccccaaaatggat

SEQ ID NO: 417739 - DNA, 15 bp, Homo sapiens
tatccccaaaatgga

SEQ ID NO: 417740 - DNA, 15 bp, Homo sapiens
gtatccccaaaatgg

SEQ ID NO: 417741 - DNA, 15 bp, Homo sapiens
tgtatccccaaaatg

SEQ ID NO: 417742 - DNA, 15 bp, Homo sapiens
gtgtatccccaaaat

SEQ ID NO: 417743 - DNA, 15 bp, Homo sapiens
tgtgtatccccaaaa

SEQ ID NO: 417744 - DNA, 15 bp, Homo sapiens
atgtgtatccccaaa

SEQ ID NO: 417745 - DNA, 15 bp, Homo sapiens
aatgtgtatccccaa

SEQ ID NO: 417746 - DNA, 15 bp, Homo sapiens
aaatgtgtatcccca

SEQ ID NO: 417747 - DNA, 15 bp, Homo sapiens
caaatgtgtatcccc

SEQ ID NO: 417748 - DNA, 15 bp, Homo sapiens
acaaatgtgtatccc

SEQ ID NO: 417749 - DNA, 15 bp, Homo sapiens
aacaaatgtgtatcc

SEQ ID NO: 417750 - DNA, 15 bp, Homo sapiens
aaacaaatgtgtatc

SEQ ID NO: 417751 - DNA, 15 bp, Homo sapiens
caaacaaatgtgtat

SEQ ID NO: 417752 - DNA, 15 bp, Homo sapiens
acaaacaaatgtgta

SEQ ID NO: 417753 - DNA, 15 bp, Homo sapiens
aacaaacaaatgtgt

SEQ ID NO: 417754 - DNA, 15 bp, Homo sapiens
aaacaaacaaatgtg

SEQ ID NO: 417755 - DNA, 15 bp, Homo sapiens
gaaacaaacaaatgt

SEQ ID NO: 417756 - DNA, 15 bp, Homo sapiens
agaaacaaacaaatg

SEQ ID NO: 417757 - DNA, 15 bp, Homo sapiens
tagaaacaaacaaat

SEQ ID NO: 417758 - DNA, 15 bp, Homo sapiens
atagaaacaaacaaa

SEQ ID NO: 417759 - DNA, 15 bp, Homo sapiens
tatagaaacaaacaa

SEQ ID NO: 417760 - DNA, 15 bp, Homo sapiens
ctatagaaacaaaca

SEQ ID NO: 417761 - DNA, 15 bp, Homo sapiens
actatagaaacaaac

SEQ ID NO: 417762 - DNA, 15 bp, Homo sapiens
tactatagaaacaaa

SEQ ID NO: 417763 - DNA, 15 bp, Homo sapiens
ttactatagaaacaa

SEQ ID NO: 417764 - DNA, 15 bp, Homo sapiens
gttactatagaaaca

SEQ ID NO: 417765 - DNA, 15 bp, Homo sapiens
tgttactatagaaac

SEQ ID NO: 417766 - DNA, 15 bp, Homo sapiens
atgttactatagaaa

SEQ ID NO: 417767 - DNA, 15 bp, Homo sapiens
catgttactatagaa

SEQ ID NO: 417768 - DNA, 15 bp, Homo sapiens
tcatgttactataga

SEQ ID NO: 417769 - DNA, 15 bp, Homo sapiens
atcatgttactatag

SEQ ID NO: 417770 - DNA, 15 bp, Homo sapiens
catcatgttactata

SEQ ID NO: 417771 - DNA, 15 bp, Homo sapiens
ccatcatgttactat

SEQ ID NO: 417772 - DNA, 15 bp, Homo sapiens
accatcatgttacta

SEQ ID NO: 417773 - DNA, 15 bp, Homo sapiens
aaccatcatgttact

SEQ ID NO: 417774 - DNA, 15 bp, Homo sapiens
caaccatcatgttac

SEQ ID NO: 417775 - DNA, 15 bp, Homo sapiens
ccaaccatcatgtta

SEQ ID NO: 417776 - DNA, 15 bp, Homo sapiens
gccaaccatcatgtt

SEQ ID NO: 417777 - DNA, 15 bp, Homo sapiens
ggccaaccatcatgt

SEQ ID NO: 417778 - DNA, 15 bp, Homo sapiens
aggccaaccatcatg

SEQ ID NO: 417779 - DNA, 15 bp, Homo sapiens
aaggccaaccatcat

SEQ ID NO: 417780 - DNA, 15 bp, Homo sapiens
gaaggccaaccatca

SEQ ID NO: 417781 - DNA, 15 bp, Homo sapiens
ggaaggccaaccatc

SEQ ID NO: 417782 - DNA, 15 bp, Homo sapiens
tggaaggccaaccat

SEQ ID NO: 417783 - DNA, 15 bp, Homo sapiens
ctggaaggccaacca

SEQ ID NO: 417784 - DNA, 15 bp, Homo sapiens
actggaaggccaacc

SEQ ID NO: 417785 - DNA, 15 bp, Homo sapiens
cactggaaggccaac

SEQ ID NO: 417786 - DNA, 15 bp, Homo sapiens
ccactggaaggccaa

SEQ ID NO: 417787 - DNA, 15 bp, Homo sapiens
accactggaaggcca

SEQ ID NO: 417788 - DNA, 15 bp, Homo sapiens
taccactggaaggcc

SEQ ID NO: 417789 - DNA, 15 bp, Homo sapiens
ttaccactggaaggc

SEQ ID NO: 417790 - DNA, 15 bp, Homo sapiens
attaccactggaagg

SEQ ID NO: 417791 - DNA, 15 bp, Homo sapiens
tattaccactggaag

SEQ ID NO: 417792 - DNA, 15 bp, Homo sapiens
gtattaccactggaa

SEQ ID NO: 417793 - DNA, 15 bp, Homo sapiens
agtattaccactgga

SEQ ID NO: 417794 - DNA, 15 bp, Homo sapiens
gagtattaccactgg

SEQ ID NO: 417795 - DNA, 15 bp, Homo sapiens
tgagtattaccactg

SEQ ID NO: 417796 - DNA, 15 bp, Homo sapiens
atgagtattaccact

SEQ ID NO: 417797 - DNA, 15 bp, Homo sapiens
aatgagtattaccac

SEQ ID NO: 417798 - DNA, 15 bp, Homo sapiens
aaatgagtattacca

SEQ ID NO: 417799 - DNA, 15 bp, Homo sapiens
caaatgagtattacc

SEQ ID NO: 417800 - DNA, 15 bp, Homo sapiens
acaaatgagtattac

SEQ ID NO: 417801 - DNA, 15 bp, Homo sapiens
tacaaatgagtatta

SEQ ID NO: 417802 - DNA, 15 bp, Homo sapiens
ttacaaatgagtatt

SEQ ID NO: 417803 - DNA, 15 bp, Homo sapiens
attacaaatgagtat

SEQ ID NO: 417804 - DNA, 15 bp, Homo sapiens
tattacaaatgagta

SEQ ID NO: 417805 - DNA, 15 bp, Homo sapiens
gtattacaaatgagt

SEQ ID NO: 417806 - DNA, 15 bp, Homo sapiens
tgtattacaaatgag

SEQ ID NO: 417807 - DNA, 15 bp, Homo sapiens
ttgtattacaaatga

SEQ ID NO: 417808 - DNA, 15 bp, Homo sapiens
gttgtattacaaatg

SEQ ID NO: 417809 - DNA, 15 bp, Homo sapiens
agttgtattacaaat

SEQ ID NO: 417810 - DNA, 15 bp, Homo sapiens
cagttgtattacaaa

SEQ ID NO: 417811 - DNA, 15 bp, Homo sapiens
ccagttgtattacaa

SEQ ID NO: 417812 - DNA, 15 bp, Homo sapiens
cccagttgtattaca

SEQ ID NO: 417813 - DNA, 15 bp, Homo sapiens
gcccagttgtattac

SEQ ID NO: 417814 - DNA, 15 bp, Homo sapiens
ggcccagttgtatta

SEQ ID NO: 417815 - DNA, 15 bp, Homo sapiens
tggcccagttgtatt

SEQ ID NO: 417816 - DNA, 15 bp, Homo sapiens
ctggcccagttgtat

SEQ ID NO: 417817 - DNA, 15 bp, Homo sapiens
tctggcccagttgta

SEQ ID NO: 417818 - DNA, 15 bp, Homo sapiens
ctctggcccagttgt

SEQ ID NO: 417819 - DNA, 15 bp, Homo sapiens
cctctggcccagttg

SEQ ID NO: 417820 - DNA, 15 bp, Homo sapiens
acctctggcccagtt

SEQ ID NO: 417821 - DNA, 15 bp, Homo sapiens
tacctctggcccagt

SEQ ID NO: 417822 - DNA, 15 bp, Homo sapiens
gtacctctggcccag

SEQ ID NO: 417823 - DNA, 15 bp, Homo sapiens
ggtacctctggccca

SEQ ID NO: 417824 - DNA, 15 bp, Homo sapiens
aggtacctctggccc

SEQ ID NO: 417825 - DNA, 15 bp, Homo sapiens
aaggtacctctggcc

SEQ ID NO: 417826 - DNA, 15 bp, Homo sapiens
gaaggtacctctggc

SEQ ID NO: 417827 - DNA, 15 bp, Homo sapiens
agaaggtacctctgg

SEQ ID NO: 417828 - DNA, 15 bp, Homo sapiens
cagaaggtacctctg

SEQ ID NO: 417829 - DNA, 15 bp, Homo sapiens
tcagaaggtacctct

SEQ ID NO: 417830 - DNA, 15 bp, Homo sapiens
ctcagaaggtacctc

SEQ ID NO: 417831 - DNA, 15 bp, Homo sapiens
actcagaaggtacct

SEQ ID NO: 417832 - DNA, 15 bp, Homo sapiens
aactcagaaggtacc

SEQ ID NO: 417833 - DNA, 15 bp, Homo sapiens
gaactcagaaggtac

SEQ ID NO: 417834 - DNA, 15 bp, Homo sapiens
tgaactcagaaggta

SEQ ID NO: 417835 - DNA, 15 bp, Homo sapiens
atgaactcagaaggt

SEQ ID NO: 417836 - DNA, 15 bp, Homo sapiens
catgaactcagaagg

SEQ ID NO: 417837 - DNA, 15 bp, Homo sapiens
ccatgaactcagaag

SEQ ID NO: 417838 - DNA, 15 bp, Homo sapiens
gccatgaactcagaa

SEQ ID NO: 417839 - DNA, 15 bp, Homo sapiens
tgccatgaactcaga

SEQ ID NO: 417840 - DNA, 15 bp, Homo sapiens
gtgccatgaactcag

SEQ ID NO: 417841 - DNA, 15 bp, Homo sapiens
tgtgccatgaactca

SEQ ID NO: 417842 - DNA, 15 bp, Homo sapiens
ctgtgccatgaactc

SEQ ID NO: 417843 - DNA, 15 bp, Homo sapiens
cctgtgccatgaact

SEQ ID NO: 417844 - DNA, 15 bp, Homo sapiens
tcctgtgccatgaac

SEQ ID NO: 417845 - DNA, 15 bp, Homo sapiens
atcctgtgccatgaa

SEQ ID NO: 417846 - DNA, 15 bp, Homo sapiens
aatcctgtgccatga

SEQ ID NO: 417847 - DNA, 15 bp, Homo sapiens
aaatcctgtgccatg

SEQ ID NO: 417848 - DNA, 15 bp, Homo sapiens
gaaatcctgtgccat

SEQ ID NO: 417849 - DNA, 15 bp, Homo sapiens
agaaatcctgtgcca

SEQ ID NO: 417850 - DNA, 15 bp, Homo sapiens
aagaaatcctgtgcc

SEQ ID NO: 417851 - DNA, 15 bp, Homo sapiens
taagaaatcctgtgc

SEQ ID NO: 417852 - DNA, 15 bp, Homo sapiens
ctaagaaatcctgtg

SEQ ID NO: 417853 - DNA, 15 bp, Homo sapiens
tctaagaaatcctgt

SEQ ID NO: 417854 - DNA, 15 bp, Homo sapiens
ctctaagaaatcctg

SEQ ID NO: 417855 - DNA, 15 bp, Homo sapiens
actctaagaaatcct

SEQ ID NO: 417856 - DNA, 15 bp, Homo sapiens
cactctaagaaatcc

SEQ ID NO: 417857 - DNA, 15 bp, Homo sapiens
tcactctaagaaatc

SEQ ID NO: 417858 - DNA, 15 bp, Homo sapiens
ctcactctaagaaat

SEQ ID NO: 417859 - DNA, 15 bp, Homo sapiens
cctcactctaagaaa

SEQ ID NO: 417860 - DNA, 15 bp, Homo sapiens
acctcactctaagaa

SEQ ID NO: 417861 - DNA, 15 bp, Homo sapiens
aacctcactctaaga

SEQ ID NO: 417862 - DNA, 15 bp, Homo sapiens
caacctcactctaag

SEQ ID NO: 417863 - DNA, 15 bp, Homo sapiens
tcaacctcactctaa

SEQ ID NO: 417864 - DNA, 15 bp, Homo sapiens
gtcaacctcactcta

SEQ ID NO: 417865 - DNA, 15 bp, Homo sapiens
agtcaacctcactct

SEQ ID NO: 417866 - DNA, 15 bp, Homo sapiens
cagtcaacctcactc

SEQ ID NO: 417867 - DNA, 15 bp, Homo sapiens
tcagtcaacctcact

SEQ ID NO: 417868 - DNA, 15 bp, Homo sapiens
gtcagtcaacctcac

SEQ ID NO: 417869 - DNA, 15 bp, Homo sapiens
agtcagtcaacctca

SEQ ID NO: 417870 - DNA, 15 bp, Homo sapiens
gagtcagtcaacctc

SEQ ID NO: 417871 - DNA, 15 bp, Homo sapiens
tgagtcagtcaacct

SEQ ID NO: 417872 - DNA, 15 bp, Homo sapiens
atgagtcagtcaacc

SEQ ID NO: 417873 - DNA, 15 bp, Homo sapiens
aatgagtcagtcaac

SEQ ID NO: 417874 - DNA, 15 bp, Homo sapiens
gaatgagtcagtcaa

SEQ ID NO: 417875 - DNA, 15 bp, Homo sapiens
tgaatgagtcagtca

SEQ ID NO: 417876 - DNA, 15 bp, Homo sapiens
ttgaatgagtcagtc

SEQ ID NO: 417877 - DNA, 15 bp, Homo sapiens
tttgaatgagtcagt

SEQ ID NO: 417878 - DNA, 15 bp, Homo sapiens
gtttgaatgagtcag

SEQ ID NO: 417879 - DNA, 15 bp, Homo sapiens
ggtttgaatgagtca

SEQ ID NO: 417880 - DNA, 15 bp, Homo sapiens
aggtttgaatgagtc

SEQ ID NO: 417881 - DNA, 15 bp, Homo sapiens
taggtttgaatgagt

SEQ ID NO: 417882 - DNA, 15 bp, Homo sapiens
ctaggtttgaatgag

SEQ ID NO: 417883 - DNA, 15 bp, Homo sapiens
cctaggtttgaatga

SEQ ID NO: 417884 - DNA, 15 bp, Homo sapiens
tcctaggtttgaatg

SEQ ID NO: 417885 - DNA, 15 bp, Homo sapiens
gtcctaggtttgaat

SEQ ID NO: 417886 - DNA, 15 bp, Homo sapiens
agtcctaggtttgaa

SEQ ID NO: 417887 - DNA, 15 bp, Homo sapiens
cagtcctaggtttga

SEQ ID NO: 417888 - DNA, 15 bp, Homo sapiens
acagtcctaggtttg

SEQ ID NO: 417889 - DNA, 15 bp, Homo sapiens
tacagtcctaggttt

SEQ ID NO: 417890 - DNA, 15 bp, Homo sapiens
ctacagtcctaggtt

SEQ ID NO: 417891 - DNA, 15 bp, Homo sapiens
gctacagtcctaggt

SEQ ID NO: 417892 - DNA, 15 bp, Homo sapiens
agctacagtcctagg

SEQ ID NO: 417893 - DNA, 15 bp, Homo sapiens
aagctacagtcctag

SEQ ID NO: 417894 - DNA, 15 bp, Homo sapiens
gaagctacagtccta

SEQ ID NO: 417895 - DNA, 15 bp, Homo sapiens
tgaagctacagtcct

SEQ ID NO: 417896 - DNA, 15 bp, Homo sapiens
atgaagctacagtcc

SEQ ID NO: 417897 - DNA, 15 bp, Homo sapiens
aatgaagctacagtc

SEQ ID NO: 417898 - DNA, 15 bp, Homo sapiens
taatgaagctacagt

SEQ ID NO: 417899 - DNA, 15 bp, Homo sapiens
ttaatgaagctacag

SEQ ID NO: 417900 - DNA, 15 bp, Homo sapiens
gttaatgaagctaca

SEQ ID NO: 417901 - DNA, 15 bp, Homo sapiens
ggttaatgaagctac

SEQ ID NO: 417902 - DNA, 15 bp, Homo sapiens
aggttaatgaagcta

SEQ ID NO: 417903 - DNA, 15 bp, Homo sapiens
aaggttaatgaagct

SEQ ID NO: 417904 - DNA, 15 bp, Homo sapiens
caaggttaatgaagc

SEQ ID NO: 417905 - DNA, 15 bp, Homo sapiens
tcaaggttaatgaag

SEQ ID NO: 417906 - DNA, 15 bp, Homo sapiens
ctcaaggttaatgaa

SEQ ID NO: 417907 - DNA, 15 bp, Homo sapiens
actcaaggttaatga

SEQ ID NO: 417908 - DNA, 15 bp, Homo sapiens
aactcaaggttaatg

SEQ ID NO: 417909 - DNA, 15 bp, Homo sapiens
aaactcaaggttaat

SEQ ID NO: 417910 - DNA, 15 bp, Homo sapiens
aaaactcaaggttaa

SEQ ID NO: 417911 - DNA, 15 bp, Homo sapiens
taaaactcaaggtta

SEQ ID NO: 417912 - DNA, 15 bp, Homo sapiens
ttaaaactcaaggtt

SEQ ID NO: 417913 - DNA, 15 bp, Homo sapiens
gttaaaactcaaggt

SEQ ID NO: 417914 - DNA, 15 bp, Homo sapiens
ggttaaaactcaagg

SEQ ID NO: 417915 - DNA, 15 bp, Homo sapiens
tggttaaaactcaag

SEQ ID NO: 417916 - DNA, 15 bp, Homo sapiens
ttggttaaaactcaa

SEQ ID NO: 417917 - DNA, 15 bp, Homo sapiens
attggttaaaactca

SEQ ID NO: 417918 - DNA, 15 bp, Homo sapiens
aattggttaaaactc

SEQ ID NO: 417919 - DNA, 15 bp, Homo sapiens
taattggttaaaact

SEQ ID NO: 417920 - DNA, 15 bp, Homo sapiens
gtaattggttaaaac

SEQ ID NO: 417921 - DNA, 15 bp, Homo sapiens
agtaattggttaaaa

SEQ ID NO: 417922 - DNA, 15 bp, Homo sapiens
cagtaattggttaaa

SEQ ID NO: 417923 - DNA, 15 bp, Homo sapiens
tcagtaattggttaa

SEQ ID NO: 417924 - DNA, 15 bp, Homo sapiens
atcagtaattggtta

SEQ ID NO: 417925 - DNA, 15 bp, Homo sapiens
gatcagtaattggtt

SEQ ID NO: 417926 - DNA, 15 bp, Homo sapiens
ggatcagtaattggt

SEQ ID NO: 417927 - DNA, 15 bp, Homo sapiens
tggatcagtaattgg

SEQ ID NO: 417928 - DNA, 15 bp, Homo sapiens
gtggatcagtaattg

SEQ ID NO: 417929 - DNA, 15 bp, Homo sapiens
ggtggatcagtaatt

SEQ ID NO: 417930 - DNA, 15 bp, Homo sapiens
aggtggatcagtaat

SEQ ID NO: 417931 - DNA, 15 bp, Homo sapiens
gaggtggatcagtaa

SEQ ID NO: 417932 - DNA, 15 bp, Homo sapiens
tgaggtggatcagta

SEQ ID NO: 417933 - DNA, 15 bp, Homo sapiens
ttgaggtggatcagt

SEQ ID NO: 417934 - DNA, 15 bp, Homo sapiens
cttgaggtggatcag

SEQ ID NO: 417935 - DNA, 15 bp, Homo sapiens
tcttgaggtggatca

SEQ ID NO: 417936 - DNA, 15 bp, Homo sapiens
ttcttgaggtggatc

SEQ ID NO: 417937 - DNA, 15 bp, Homo sapiens
tttcttgaggtggat

SEQ ID NO: 417938 - DNA, 15 bp, Homo sapiens
gtttcttgaggtgga

SEQ ID NO: 417939 - DNA, 15 bp, Homo sapiens
tgtttcttgaggtgg

SEQ ID NO: 417940 - DNA, 15 bp, Homo sapiens
atgtttcttgaggtg

SEQ ID NO: 417941 - DNA, 15 bp, Homo sapiens
aatgtttcttgaggt

SEQ ID NO: 417942 - DNA, 15 bp, Homo sapiens
caatgtttcttgagg

SEQ ID NO: 417943 - DNA, 15 bp, Homo sapiens
acaatgtttcttgag

SEQ ID NO: 417944 - DNA, 15 bp, Homo sapiens
gacaatgtttcttga

SEQ ID NO: 417945 - DNA, 15 bp, Homo sapiens
agacaatgtttcttg

SEQ ID NO: 417946 - DNA, 15 bp, Homo sapiens
cagacaatgtttctt

SEQ ID NO: 417947 - DNA, 15 bp, Homo sapiens
gcagacaatgtttct

SEQ ID NO: 417948 - DNA, 15 bp, Homo sapiens
tgcagacaatgtttc

SEQ ID NO: 417949 - DNA, 15 bp, Homo sapiens
atgcagacaatgttt

SEQ ID NO: 417950 - DNA, 15 bp, Homo sapiens
aatgcagacaatgtt

SEQ ID NO: 417951 - DNA, 15 bp, Homo sapiens
gaatgcagacaatgt

SEQ ID NO: 417952 - DNA, 15 bp, Homo sapiens
agaatgcagacaatg

SEQ ID NO: 417953 - DNA, 15 bp, Homo sapiens
tagaatgcagacaat

SEQ ID NO: 417954 - DNA, 15 bp, Homo sapiens
ttagaatgcagacaa

SEQ ID NO: 417955 - DNA, 15 bp, Homo sapiens
cttagaatgcagaca

SEQ ID NO: 417956 - DNA, 15 bp, Homo sapiens
ccttagaatgcagac

SEQ ID NO: 417957 - DNA, 15 bp, Homo sapiens
tccttagaatgcaga

SEQ ID NO: 417958 - DNA, 15 bp, Homo sapiens
atccttagaatgcag

SEQ ID NO: 417959 - DNA, 15 bp, Homo sapiens
gatccttagaatgca

SEQ ID NO: 417960 - DNA, 15 bp, Homo sapiens
agatccttagaatgc

SEQ ID NO: 417961 - DNA, 15 bp, Homo sapiens
tagatccttagaatg

SEQ ID NO: 417962 - DNA, 15 bp, Homo sapiens
ctagatccttagaat

SEQ ID NO: 417963 - DNA, 15 bp, Homo sapiens
cctagatccttagaa

SEQ ID NO: 417964 - DNA, 15 bp, Homo sapiens
gcctagatccttaga

SEQ ID NO: 417965 - DNA, 15 bp, Homo sapiens
cgcctagatccttag

SEQ ID NO: 417966 - DNA, 15 bp, Homo sapiens
acgcctagatcctta

SEQ ID NO: 417967 - DNA, 15 bp, Homo sapiens
aacgcctagatcctt

SEQ ID NO: 417968 - DNA, 15 bp, Homo sapiens
taacgcctagatcct

SEQ ID NO: 417969 - DNA, 15 bp, Homo sapiens
ctaacgcctagatcc

SEQ ID NO: 417970 - DNA, 15 bp, Homo sapiens
tctaacgcctagatc

SEQ ID NO: 417971 - DNA, 15 bp, Homo sapiens
gtctaacgcctagat

SEQ ID NO: 417972 - DNA, 15 bp, Homo sapiens
tgtctaacgcctaga

SEQ ID NO: 417973 - DNA, 15 bp, Homo sapiens
ttgtctaacgcctag

SEQ ID NO: 417974 - DNA, 15 bp, Homo sapiens
attgtctaacgccta

SEQ ID NO: 417975 - DNA, 15 bp, Homo sapiens
aattgtctaacgcct

SEQ ID NO: 417976 - DNA, 15 bp, Homo sapiens
caattgtctaacgcc

SEQ ID NO: 417977 - DNA, 15 bp, Homo sapiens
gcaattgtctaacgc

SEQ ID NO: 417978 - DNA, 15 bp, Homo sapiens
agcaattgtctaacg

SEQ ID NO: 417979 - DNA, 15 bp, Homo sapiens
tagcaattgtctaac

SEQ ID NO: 417980 - DNA, 15 bp, Homo sapiens
ttagcaattgtctaa

SEQ ID NO: 417981 - DNA, 15 bp, Homo sapiens
attagcaattgtcta

SEQ ID NO: 417982 - DNA, 15 bp, Homo sapiens
aattagcaattgtct

SEQ ID NO: 417983 - DNA, 15 bp, Homo sapiens
taattagcaattgtc

SEQ ID NO: 417984 - DNA, 15 bp, Homo sapiens
ttaattagcaattgt

SEQ ID NO: 417985 - DNA, 15 bp, Homo sapiens
tttaattagcaattg

SEQ ID NO: 417986 - DNA, 15 bp, Homo sapiens
ttttaattagcaatt

SEQ ID NO: 417987 - DNA, 15 bp, Homo sapiens
tttttaattagcaat

SEQ ID NO: 417988 - DNA, 15 bp, Homo sapiens
gtttttaattagcaa

SEQ ID NO: 417989 - DNA, 15 bp, Homo sapiens
tgtttttaattagca

SEQ ID NO: 417990 - DNA, 15 bp, Homo sapiens
atgtttttaattagc

SEQ ID NO: 417991 - DNA, 15 bp, Homo sapiens
catgtttttaattag

SEQ ID NO: 417992 - DNA, 15 bp, Homo sapiens
tcatgtttttaatta

SEQ ID NO: 417993 - DNA, 15 bp, Homo sapiens
ttcatgtttttaatt

SEQ ID NO: 417994 - DNA, 15 bp, Homo sapiens
tttcatgtttttaat

SEQ ID NO: 417995 - DNA, 15 bp, Homo sapiens
atttcatgtttttaa

SEQ ID NO: 417996 - DNA, 15 bp, Homo sapiens
aatttcatgttttta

SEQ ID NO: 417997 - DNA, 15 bp, Homo sapiens
aaatttcatgttttt

SEQ ID NO: 417998 - DNA, 15 bp, Homo sapiens
gaaatttcatgtttt

SEQ ID NO: 417999 - DNA, 15 bp, Homo sapiens
agaaatttcatgttt

SEQ ID NO: 418000 - DNA, 15 bp, Homo sapiens
aagaaatttcatgtt

SEQ ID NO: 418001 - DNA, 15 bp, Homo sapiens
aaagaaatttcatgt

SEQ ID NO: 418002 - DNA, 15 bp, Homo sapiens
gaaagaaatttcatg

SEQ ID NO: 418003 - DNA, 15 bp, Homo sapiens
agaaagaaatttcat

SEQ ID NO: 418004 - DNA, 15 bp, Homo sapiens
aagaaagaaatttca

SEQ ID NO: 418005 - DNA, 15 bp, Homo sapiens
aaagaaagaaatttc

SEQ ID NO: 418006 - DNA, 15 bp, Homo sapiens
aaaagaaagaaattt

SEQ ID NO: 418007 - DNA, 15 bp, Homo sapiens
aaaaagaaagaaatt

SEQ ID NO: 418008 - DNA, 15 bp, Homo sapiens
gaaaaagaaagaaat

SEQ ID NO: 418009 - DNA, 15 bp, Homo sapiens
ggaaaaagaaagaaa

SEQ ID NO: 418010 - DNA, 15 bp, Homo sapiens
aggaaaaagaaagaa

SEQ ID NO: 418011 - DNA, 15 bp, Homo sapiens
aaggaaaaagaaaga

SEQ ID NO: 418012 - DNA, 15 bp, Homo sapiens
gaaggaaaaagaaag

SEQ ID NO: 418013 - DNA, 15 bp, Homo sapiens
agaaggaaaaagaaa

SEQ ID NO: 418014 - DNA, 15 bp, Homo sapiens
cagaaggaaaaagaa

SEQ ID NO: 418015 - DNA, 15 bp, Homo sapiens
gcagaaggaaaaaga

SEQ ID NO: 418016 - DNA, 15 bp, Homo sapiens
tgcagaaggaaaaag

SEQ ID NO: 418017 - DNA, 15 bp, Homo sapiens
atgcagaaggaaaaa

SEQ ID NO: 418018 - DNA, 15 bp, Homo sapiens
aatgcagaaggaaaa

SEQ ID NO: 418019 - DNA, 15 bp, Homo sapiens
taatgcagaaggaaa

SEQ ID NO: 418020 - DNA, 15 bp, Homo sapiens
gtaatgcagaaggaa

SEQ ID NO: 418021 - DNA, 15 bp, Homo sapiens
tgtaatgcagaagga

SEQ ID NO: 418022 - DNA, 15 bp, Homo sapiens
ctgtaatgcagaagg

SEQ ID NO: 418023 - DNA, 15 bp, Homo sapiens
tctgtaatgcagaag

SEQ ID NO: 418024 - DNA, 15 bp, Homo sapiens
atctgtaatgcagaa

SEQ ID NO: 418025 - DNA, 15 bp, Homo sapiens
catctgtaatgcaga

SEQ ID NO: 418026 - DNA, 15 bp, Homo sapiens
tcatctgtaatgcag

SEQ ID NO: 418027 - DNA, 15 bp, Homo sapiens
ttcatctgtaatgca

SEQ ID NO: 418028 - DNA, 15 bp, Homo sapiens
attcatctgtaatgc

SEQ ID NO: 418029 - DNA, 15 bp, Homo sapiens
tattcatctgtaatg

SEQ ID NO: 418030 - DNA, 15 bp, Homo sapiens
ctattcatctgtaat

SEQ ID NO: 418031 - DNA, 15 bp, Homo sapiens
tctattcatctgtaa

SEQ ID NO: 418032 - DNA, 15 bp, Homo sapiens
atctattcatctgta

SEQ ID NO: 418033 - DNA, 15 bp, Homo sapiens
aatctattcatctgt

SEQ ID NO: 418034 - DNA, 15 bp, Homo sapiens
taatctattcatctg

SEQ ID NO: 418035 - DNA, 15 bp, Homo sapiens
ataatctattcatct

SEQ ID NO: 418036 - DNA, 15 bp, Homo sapiens
aataatctattcatc

SEQ ID NO: 418037 - DNA, 15 bp, Homo sapiens
gaataatctattcat

SEQ ID NO: 418038 - DNA, 15 bp, Homo sapiens
tgaataatctattca

SEQ ID NO: 418039 - DNA, 15 bp, Homo sapiens
gtgaataatctattc

SEQ ID NO: 418040 - DNA, 15 bp, Homo sapiens
ggtgaataatctatt

SEQ ID NO: 418041 - DNA, 15 bp, Homo sapiens
tggtgaataatctat

SEQ ID NO: 418042 - DNA, 15 bp, Homo sapiens
atggtgaataatcta

SEQ ID NO: 418043 - DNA, 15 bp, Homo sapiens
catggtgaataatct

SEQ ID NO: 418044 - DNA, 15 bp, Homo sapiens
tcatggtgaataatc

SEQ ID NO: 418045 - DNA, 15 bp, Homo sapiens
ctcatggtgaataat

SEQ ID NO: 418046 - DNA, 15 bp, Homo sapiens
cctcatggtgaataa

SEQ ID NO: 418047 - DNA, 15 bp, Homo sapiens
ccctcatggtgaata

SEQ ID NO: 418048 - DNA, 15 bp, Homo sapiens
tccctcatggtgaat

SEQ ID NO: 418049 - DNA, 15 bp, Homo sapiens
atccctcatggtgaa

SEQ ID NO: 418050 - DNA, 15 bp, Homo sapiens
catccctcatggtga

SEQ ID NO: 418051 - DNA, 15 bp, Homo sapiens
tcatccctcatggtg

SEQ ID NO: 418052 - DNA, 15 bp, Homo sapiens
gtcatccctcatggt

SEQ ID NO: 418053 - DNA, 15 bp, Homo sapiens
ggtcatccctcatgg

SEQ ID NO: 418054 - DNA, 15 bp, Homo sapiens
tggtcatccctcatg

SEQ ID NO: 418055 - DNA, 15 bp, Homo sapiens
atggtcatccctcat

SEQ ID NO: 418056 - DNA, 15 bp, Homo sapiens
aatggtcatccctca

SEQ ID NO: 418057 - DNA, 15 bp, Homo sapiens
aaatggtcatccctc

SEQ ID NO: 418058 - DNA, 15 bp, Homo sapiens
aaaatggtcatccct

SEQ ID NO: 418059 - DNA, 15 bp, Homo sapiens
caaaatggtcatccc

SEQ ID NO: 418060 - DNA, 15 bp, Homo sapiens
ccaaaatggtcatcc

SEQ ID NO: 418061 - DNA, 15 bp, Homo sapiens
tccaaaatggtcatc

SEQ ID NO: 418062 - DNA, 15 bp, Homo sapiens
gtccaaaatggtcat

SEQ ID NO: 418063 - DNA, 15 bp, Homo sapiens
tgtccaaaatggtca

SEQ ID NO: 418064 - DNA, 15 bp, Homo sapiens
gtgtccaaaatggtc

SEQ ID NO: 418065 - DNA, 15 bp, Homo sapiens
agtgtccaaaatggt

SEQ ID NO: 418066 - DNA, 15 bp, Homo sapiens
tagtgtccaaaatgg

SEQ ID NO: 418067 - DNA, 15 bp, Homo sapiens
atagtgtccaaaatg

SEQ ID NO: 418068 - DNA, 15 bp, Homo sapiens
aatagtgtccaaaat

SEQ ID NO: 418069 - DNA, 15 bp, Homo sapiens
aaatagtgtccaaaa

SEQ ID NO: 418070 - DNA, 15 bp, Homo sapiens
caaatagtgtccaaa

SEQ ID NO: 418071 - DNA, 15 bp, Homo sapiens
tcaaatagtgtccaa

SEQ ID NO: 418072 - DNA, 15 bp, Homo sapiens
ctcaaatagtgtcca

SEQ ID NO: 418073 - DNA, 15 bp, Homo sapiens
tctcaaatagtgtcc

SEQ ID NO: 418074 - DNA, 15 bp, Homo sapiens
atctcaaatagtgtc

SEQ ID NO: 418075 - DNA, 15 bp, Homo sapiens
tatctcaaatagtgt

SEQ ID NO: 418076 - DNA, 15 bp, Homo sapiens
ttatctcaaatagtg

SEQ ID NO: 418077 - DNA, 15 bp, Homo sapiens
attatctcaaatagt

SEQ ID NO: 418078 - DNA, 15 bp, Homo sapiens
tattatctcaaatag

SEQ ID NO: 418079 - DNA, 15 bp, Homo sapiens
ttattatctcaaata

SEQ ID NO: 418080 - DNA, 15 bp, Homo sapiens
cttattatctcaaat

SEQ ID NO: 418081 - DNA, 15 bp, Homo sapiens
tcttattatctcaaa

SEQ ID NO: 418082 - DNA, 15 bp, Homo sapiens
ttcttattatctcaa

SEQ ID NO: 418083 - DNA, 15 bp, Homo sapiens
attcttattatctca

SEQ ID NO: 418084 - DNA, 15 bp, Homo sapiens
tattcttattatctc

SEQ ID NO: 418085 - DNA, 15 bp, Homo sapiens
ctattcttattatct

SEQ ID NO: 418086 - DNA, 15 bp, Homo sapiens
tctattcttattatc

SEQ ID NO: 418087 - DNA, 15 bp, Homo sapiens
atctattcttattat

SEQ ID NO: 418088 - DNA, 15 bp, Homo sapiens
catctattcttatta

SEQ ID NO: 418089 - DNA, 15 bp, Homo sapiens
acatctattcttatt

SEQ ID NO: 418090 - DNA, 15 bp, Homo sapiens
aacatctattcttat

SEQ ID NO: 418091 - DNA, 15 bp, Homo sapiens
aaacatctattctta

SEQ ID NO: 418092 - DNA, 15 bp, Homo sapiens
taaacatctattctt

SEQ ID NO: 418093 - DNA, 15 bp, Homo sapiens
ttaaacatctattct

SEQ ID NO: 418094 - DNA, 15 bp, Homo sapiens
cttaaacatctattc

SEQ ID NO: 418095 - DNA, 15 bp, Homo sapiens
tcttaaacatctatt

SEQ ID NO: 418096 - DNA, 15 bp, Homo sapiens
ctcttaaacatctat

SEQ ID NO: 418097 - DNA, 15 bp, Homo sapiens
cctcttaaacatcta

SEQ ID NO: 418098 - DNA, 15 bp, Homo sapiens
ccctcttaaacatct

SEQ ID NO: 418099 - DNA, 15 bp, Homo sapiens
cccctcttaaacatc

SEQ ID NO: 418100 - DNA, 15 bp, Homo sapiens
tcccctcttaaacat

SEQ ID NO: 418101 - DNA, 15 bp, Homo sapiens
ttcccctcttaaaca

SEQ ID NO: 418102 - DNA, 15 bp, Homo sapiens
tttcccctcttaaac

SEQ ID NO: 418103 - DNA, 15 bp, Homo sapiens
ttttcccctcttaaa

SEQ ID NO: 418104 - DNA, 15 bp, Homo sapiens
attttcccctcttaa

SEQ ID NO: 418105 - DNA, 15 bp, Homo sapiens
cattttcccctctta

SEQ ID NO: 418106 - DNA, 15 bp, Homo sapiens
gcattttcccctctt

SEQ ID NO: 418107 - DNA, 15 bp, Homo sapiens
ggcattttcccctct

SEQ ID NO: 418108 - DNA, 15 bp, Homo sapiens
tggcattttcccctc

SEQ ID NO: 418109 - DNA, 15 bp, Homo sapiens
atggcattttcccct

SEQ ID NO: 418110 - DNA, 15 bp, Homo sapiens
aatggcattttcccc

SEQ ID NO: 418111 - DNA, 15 bp, Homo sapiens
aaatggcattttccc

SEQ ID NO: 418112 - DNA, 15 bp, Homo sapiens
taaatggcattttcc

SEQ ID NO: 418113 - DNA, 15 bp, Homo sapiens
gtaaatggcattttc

SEQ ID NO: 418114 - DNA, 15 bp, Homo sapiens
tgtaaatggcatttt

SEQ ID NO: 418115 - DNA, 15 bp, Homo sapiens
atgtaaatggcattt

SEQ ID NO: 418116 - DNA, 15 bp, Homo sapiens
catgtaaatggcatt

SEQ ID NO: 418117 - DNA, 15 bp, Homo sapiens
ccatgtaaatggcat

SEQ ID NO: 418118 - DNA, 15 bp, Homo sapiens
cccatgtaaatggca

SEQ ID NO: 418119 - DNA, 15 bp, Homo sapiens
gcccatgtaaatggc

SEQ ID NO: 418120 - DNA, 15 bp, Homo sapiens
agcccatgtaaatgg

SEQ ID NO: 418121 - DNA, 15 bp, Homo sapiens
tagcccatgtaaatg

SEQ ID NO: 418122 - DNA, 15 bp, Homo sapiens
ctagcccatgtaaat

SEQ ID NO: 418123 - DNA, 15 bp, Homo sapiens
cctagcccatgtaaa

SEQ ID NO: 418124 - DNA, 15 bp, Homo sapiens
tcctagcccatgtaa

SEQ ID NO: 418125 - DNA, 15 bp, Homo sapiens
ctcctagcccatgta

SEQ ID NO: 418126 - DNA, 15 bp, Homo sapiens
gctcctagcccatgt

SEQ ID NO: 418127 - DNA, 15 bp, Homo sapiens
tgctcctagcccatg

SEQ ID NO: 418128 - DNA, 15 bp, Homo sapiens
atgctcctagcccat

SEQ ID NO: 418129 - DNA, 15 bp, Homo sapiens
aatgctcctagccca

SEQ ID NO: 418130 - DNA, 15 bp, Homo sapiens
aaatgctcctagccc

SEQ ID NO: 418131 - DNA, 15 bp, Homo sapiens
ggtggaaactggagc

SEQ ID NO: 418132 - DNA, 15 bp, Homo sapiens
cggtggaaactggag

SEQ ID NO: 418133 - DNA, 15 bp, Homo sapiens
tcggtggaaactgga

SEQ ID NO: 418134 - DNA, 15 bp, Homo sapiens
gtcggtggaaactgg

SEQ ID NO: 418135 - DNA, 15 bp, Homo sapiens
agtcggtggaaactg

SEQ ID NO: 418136 - DNA, 15 bp, Homo sapiens
cagtcggtggaaact

SEQ ID NO: 418137 - DNA, 15 bp, Homo sapiens
acagtcggtggaaac

SEQ ID NO: 418138 - DNA, 15 bp, Homo sapiens
aacagtcggtggaaa

SEQ ID NO: 418139 - DNA, 15 bp, Homo sapiens
taacagtcggtggaa

SEQ ID NO: 418140 - DNA, 15 bp, Homo sapiens
gtaacagtcggtgga

SEQ ID NO: 418141 - DNA, 15 bp, Homo sapiens
ggtaacagtcggtgg

SEQ ID NO: 418142 - DNA, 15 bp, Homo sapiens
gggtaacagtcggtg

SEQ ID NO: 418143 - DNA, 15 bp, Homo sapiens
cgggtaacagtcggt

SEQ ID NO: 418144 - DNA, 15 bp, Homo sapiens
acgggtaacagtcgg

SEQ ID NO: 418145 - DNA, 15 bp, Homo sapiens
tacgggtaacagtcg

SEQ ID NO: 418146 - DNA, 15 bp, Homo sapiens
ctacgggtaacagtc

SEQ ID NO: 418147 - DNA, 15 bp, Homo sapiens
tctacgggtaacagt

SEQ ID NO: 418148 - DNA, 15 bp, Homo sapiens
gtctacgggtaacag

SEQ ID NO: 418149 - DNA, 15 bp, Homo sapiens
tgtctacgggtaaca

SEQ ID NO: 418150 - DNA, 15 bp, Homo sapiens
atgtctacgggtaac

SEQ ID NO: 418151 - DNA, 15 bp, Homo sapiens
aatgtctacgggtaa

SEQ ID NO: 418152 - DNA, 15 bp, Homo sapiens
taatgtctacgggta

SEQ ID NO: 418153 - DNA, 15 bp, Homo sapiens
gtaatgtctacgggt

SEQ ID NO: 418154 - DNA, 15 bp, Homo sapiens
cgtaatgtctacggg

SEQ ID NO: 418155 - DNA, 15 bp, Homo sapiens
acgtaatgtctacgg

SEQ ID NO: 418156 - DNA, 15 bp, Homo sapiens
tacgtaatgtctacg

SEQ ID NO: 418157 - DNA, 15 bp, Homo sapiens
ttacgtaatgtctac

SEQ ID NO: 418158 - DNA, 15 bp, Homo sapiens
tttacgtaatgtcta

SEQ ID NO: 418159 - DNA, 15 bp, Homo sapiens
ctttacgtaatgtct

SEQ ID NO: 418160 - DNA, 15 bp, Homo sapiens
gctttacgtaatgtc

SEQ ID NO: 418161 - DNA, 15 bp, Homo sapiens
ggctttacgtaatgt

SEQ ID NO: 418162 - DNA, 15 bp, Homo sapiens
tggctttacgtaatg

SEQ ID NO: 418163 - DNA, 15 bp, Homo sapiens
ctggctttacgtaat

SEQ ID NO: 418164 - DNA, 15 bp, Homo sapiens
tctggctttacgtaa

SEQ ID NO: 418165 - DNA, 15 bp, Homo sapiens
atctggctttacgta

SEQ ID NO: 418166 - DNA, 15 bp, Homo sapiens
catctggctttacgt

SEQ ID NO: 418167 - DNA, 15 bp, Homo sapiens
gcatctggctttacg

SEQ ID NO: 418168 - DNA, 15 bp, Homo sapiens
tgcatctggctttac

SEQ ID NO: 418169 - DNA, 15 bp, Homo sapiens
atgcatctggcttta

SEQ ID NO: 418170 - DNA, 15 bp, Homo sapiens
aatgcatctggcttt

SEQ ID NO: 418171 - DNA, 15 bp, Homo sapiens
aaatgcatctggctt

SEQ ID NO: 418172 - DNA, 15 bp, Homo sapiens
caaatgcatctggct

SEQ ID NO: 418173 - DNA, 15 bp, Homo sapiens
acaaatgcatctggc

SEQ ID NO: 418174 - DNA, 15 bp, Homo sapiens
cacaaatgcatctgg

SEQ ID NO: 418175 - DNA, 15 bp, Homo sapiens
tcacaaatgcatctg

SEQ ID NO: 418176 - DNA, 15 bp, Homo sapiens
atcacaaatgcatct

SEQ ID NO: 418177 - DNA, 15 bp, Homo sapiens
aatcacaaatgcatc

SEQ ID NO: 418178 - DNA, 15 bp, Homo sapiens
aaatcacaaatgcat

SEQ ID NO: 418179 - DNA, 15 bp, Homo sapiens
taaatcacaaatgca

SEQ ID NO: 418180 - DNA, 15 bp, Homo sapiens
ttaaatcacaaatgc

SEQ ID NO: 418181 - DNA, 15 bp, Homo sapiens
gttaaatcacaaatg

SEQ ID NO: 418182 - DNA, 15 bp, Homo sapiens
ggttaaatcacaaat

SEQ ID NO: 418183 - DNA, 15 bp, Homo sapiens
cggttaaatcacaaa

SEQ ID NO: 418184 - DNA, 15 bp, Homo sapiens
ccggttaaatcacaa

SEQ ID NO: 418185 - DNA, 15 bp, Homo sapiens
tccggttaaatcaca

SEQ ID NO: 418186 - DNA, 15 bp, Homo sapiens
ctccggttaaatcac

SEQ ID NO: 418187 - DNA, 15 bp, Homo sapiens
actccggttaaatca

SEQ ID NO: 418188 - DNA, 15 bp, Homo sapiens
aactccggttaaatc

SEQ ID NO: 418189 - DNA, 15 bp, Homo sapiens
gaactccggttaaat

SEQ ID NO: 418190 - DNA, 15 bp, Homo sapiens
tgaactccggttaaa

SEQ ID NO: 418191 - DNA, 15 bp, Homo sapiens
gtgaactccggttaa

SEQ ID NO: 418192 - DNA, 15 bp, Homo sapiens
tgtgaactccggtta

SEQ ID NO: 418193 - DNA, 15 bp, Homo sapiens
ctgtgaactccggtt

SEQ ID NO: 418194 - DNA, 15 bp, Homo sapiens
gctgtgaactccggt

SEQ ID NO: 418195 - DNA, 15 bp, Homo sapiens
ggctgtgaactccgg

SEQ ID NO: 418196 - DNA, 15 bp, Homo sapiens
gggctgtgaactccg

SEQ ID NO: 418197 - DNA, 15 bp, Homo sapiens
tgggctgtgaactcc

SEQ ID NO: 418198 - DNA, 15 bp, Homo sapiens
ctgggctgtgaactc

SEQ ID NO: 418199 - DNA, 15 bp, Homo sapiens
cctgggctgtgaact

SEQ ID NO: 418200 - DNA, 15 bp, Homo sapiens
tcctgggctgtgaac

SEQ ID NO: 418201 - DNA, 15 bp, Homo sapiens
gtcctgggctgtgaa

SEQ ID NO: 418202 - DNA, 15 bp, Homo sapiens
ggtcctgggctgtga

SEQ ID NO: 418203 - DNA, 15 bp, Homo sapiens
aggtcctgggctgtg

SEQ ID NO: 418204 - DNA, 15 bp, Homo sapiens
caggtcctgggctgt

SEQ ID NO: 418205 - DNA, 15 bp, Homo sapiens
tcaggtcctgggctg

SEQ ID NO: 418206 - DNA, 15 bp, Homo sapiens
ctcaggtcctgggct

SEQ ID NO: 418207 - DNA, 15 bp, Homo sapiens
cctcaggtcctgggc

SEQ ID NO: 418208 - DNA, 15 bp, Homo sapiens
tcctcaggtcctggg

SEQ ID NO: 418209 - DNA, 15 bp, Homo sapiens
ctcctcaggtcctgg

SEQ ID NO: 418210 - DNA, 15 bp, Homo sapiens
tctcctcaggtcctg

SEQ ID NO: 418211 - DNA, 15 bp, Homo sapiens
atctcctcaggtcct

SEQ ID NO: 418212 - DNA, 15 bp, Homo sapiens
tatctcctcaggtcc

SEQ ID NO: 418213 - DNA, 15 bp, Homo sapiens
ttatctcctcaggtc

SEQ ID NO: 418214 - DNA, 15 bp, Homo sapiens
attatctcctcaggt

SEQ ID NO: 418215 - DNA, 15 bp, Homo sapiens
aattatctcctcagg

SEQ ID NO: 418216 - DNA, 15 bp, Homo sapiens
aaattatctcctcag

SEQ ID NO: 418217 - DNA, 15 bp, Homo sapiens
aaaattatctcctca

SEQ ID NO: 418218 - DNA, 15 bp, Homo sapiens
taaaattatctcctc

SEQ ID NO: 418219 - DNA, 15 bp, Homo sapiens
ctaaaattatctcct

SEQ ID NO: 418220 - DNA, 15 bp, Homo sapiens
cctaaaattatctcc

SEQ ID NO: 418221 - DNA, 15 bp, Homo sapiens
acctaaaattatctc

SEQ ID NO: 418222 - DNA, 15 bp, Homo sapiens
tacctaaaattatct

SEQ ID NO: 418223 - DNA, 15 bp, Homo sapiens
gtacctaaaattatc

SEQ ID NO: 418224 - DNA, 15 bp, Homo sapiens
agtacctaaaattat

SEQ ID NO: 418225 - DNA, 15 bp, Homo sapiens
aagtacctaaaatta

SEQ ID NO: 418226 - DNA, 15 bp, Homo sapiens
aaagtacctaaaatt

SEQ ID NO: 418227 - DNA, 15 bp, Homo sapiens
gaaagtacctaaaat

SEQ ID NO: 418228 - DNA, 15 bp, Homo sapiens
agaaagtacctaaaa

SEQ ID NO: 418229 - DNA, 15 bp, Homo sapiens
cagaaagtacctaaa

SEQ ID NO: 418230 - DNA, 15 bp, Homo sapiens
ccagaaagtacctaa

SEQ ID NO: 418231 - DNA, 15 bp, Homo sapiens
tccagaaagtaccta

SEQ ID NO: 418232 - DNA, 15 bp, Homo sapiens
ttccagaaagtacct

SEQ ID NO: 418233 - DNA, 15 bp, Homo sapiens
tttccagaaagtacc

SEQ ID NO: 418234 - DNA, 15 bp, Homo sapiens
ttttccagaaagtac

SEQ ID NO: 418235 - DNA, 15 bp, Homo sapiens
tttttccagaaagta

SEQ ID NO: 418236 - DNA, 15 bp, Homo sapiens
atttttccagaaagt

SEQ ID NO: 418237 - DNA, 15 bp, Homo sapiens
tatttttccagaaag

SEQ ID NO: 418238 - DNA, 15 bp, Homo sapiens
ttatttttccagaaa

SEQ ID NO: 418239 - DNA, 15 bp, Homo sapiens
gttatttttccagaa

SEQ ID NO: 418240 - DNA, 15 bp, Homo sapiens
agttatttttccaga

SEQ ID NO: 418241 - DNA, 15 bp, Homo sapiens
cagttatttttccag

SEQ ID NO: 418242 - DNA, 15 bp, Homo sapiens
ccagttatttttcca

SEQ ID NO: 418243 - DNA, 15 bp, Homo sapiens
accagttatttttcc

SEQ ID NO: 418244 - DNA, 15 bp, Homo sapiens
gaccagttatttttc

SEQ ID NO: 418245 - DNA, 15 bp, Homo sapiens
ggaccagttattttt

SEQ ID NO: 418246 - DNA, 15 bp, Homo sapiens
aggaccagttatttt

SEQ ID NO: 418247 - DNA, 15 bp, Homo sapiens
aaggaccagttattt

SEQ ID NO: 418248 - DNA, 15 bp, Homo sapiens
taaggaccagttatt

SEQ ID NO: 418249 - DNA, 15 bp, Homo sapiens
ctaaggaccagttat

SEQ ID NO: 418250 - DNA, 15 bp, Homo sapiens
cctaaggaccagtta

SEQ ID NO: 418251 - DNA, 15 bp, Homo sapiens
acctaaggaccagtt

SEQ ID NO: 418252 - DNA, 15 bp, Homo sapiens
tacctaaggaccagt

SEQ ID NO: 418253 - DNA, 15 bp, Homo sapiens
gtacctaaggaccag

SEQ ID NO: 418254 - DNA, 15 bp, Homo sapiens
tgtacctaaggacca

SEQ ID NO: 418255 - DNA, 15 bp, Homo sapiens
ttgtacctaaggacc

SEQ ID NO: 418256 - DNA, 15 bp, Homo sapiens
tttgtacctaaggac

SEQ ID NO: 418257 - DNA, 15 bp, Homo sapiens
atttgtacctaagga

SEQ ID NO: 418258 - DNA, 15 bp, Homo sapiens
catttgtacctaagg

SEQ ID NO: 418259 - DNA, 15 bp, Homo sapiens
gcatttgtacctaag

SEQ ID NO: 418260 - DNA, 15 bp, Homo sapiens
tgcatttgtacctaa

SEQ ID NO: 418261 - DNA, 15 bp, Homo sapiens
ttgcatttgtaccta

SEQ ID NO: 418262 - DNA, 15 bp, Homo sapiens
tttgcatttgtacct

SEQ ID NO: 418263 - DNA, 15 bp, Homo sapiens
ctttgcatttgtacc

SEQ ID NO: 418264 - DNA, 15 bp, Homo sapiens
gctttgcatttgtac

SEQ ID NO: 418265 - DNA, 15 bp, Homo sapiens
ggctttgcatttgta

SEQ ID NO: 418266 - DNA, 15 bp, Homo sapiens
tggctttgcatttgt

SEQ ID NO: 418267 - DNA, 15 bp, Homo sapiens
ttggctttgcatttg

SEQ ID NO: 418268 - DNA, 15 bp, Homo sapiens
tttggctttgcattt

SEQ ID NO: 418269 - DNA, 15 bp, Homo sapiens
gtttggctttgcatt

SEQ ID NO: 418270 - DNA, 15 bp, Homo sapiens
cgtttggctttgcat

SEQ ID NO: 418271 - DNA, 15 bp, Homo sapiens
acgtttggctttgca

SEQ ID NO: 418272 - DNA, 15 bp, Homo sapiens
tacgtttggctttgc

SEQ ID NO: 418273 - DNA, 15 bp, Homo sapiens
ctacgtttggctttg

SEQ ID NO: 418274 - DNA, 15 bp, Homo sapiens
actacgtttggcttt

SEQ ID NO: 418275 - DNA, 15 bp, Homo sapiens
aactacgtttggctt

SEQ ID NO: 418276 - DNA, 15 bp, Homo sapiens
taactacgtttggct

SEQ ID NO: 418277 - DNA, 15 bp, Homo sapiens
ataactacgtttggc

SEQ ID NO: 418278 - DNA, 15 bp, Homo sapiens
aataactacgtttgg

SEQ ID NO: 418279 - DNA, 15 bp, Homo sapiens
caataactacgtttg

SEQ ID NO: 418280 - DNA, 15 bp, Homo sapiens
ccaataactacgttt

SEQ ID NO: 418281 - DNA, 15 bp, Homo sapiens
tccaataactacgtt

SEQ ID NO: 418282 - DNA, 15 bp, Homo sapiens
ttccaataactacgt

SEQ ID NO: 418283 - DNA, 15 bp, Homo sapiens
attccaataactacg

SEQ ID NO: 418284 - DNA, 15 bp, Homo sapiens
aattccaataactac

SEQ ID NO: 418285 - DNA, 15 bp, Homo sapiens
caattccaataacta

SEQ ID NO: 418286 - DNA, 15 bp, Homo sapiens
tcaattccaataact

SEQ ID NO: 418287 - DNA, 15 bp, Homo sapiens
ttcaattccaataac

SEQ ID NO: 418288 - DNA, 15 bp, Homo sapiens
tttcaattccaataa

SEQ ID NO: 418289 - DNA, 15 bp, Homo sapiens
ttttcaattccaata

SEQ ID NO: 418290 - DNA, 15 bp, Homo sapiens
attttcaattccaat

SEQ ID NO: 418291 - DNA, 15 bp, Homo sapiens
tattttcaattccaa

SEQ ID NO: 418292 - DNA, 15 bp, Homo sapiens
ttattttcaattcca

SEQ ID NO: 418293 - DNA, 15 bp, Homo sapiens
attattttcaattcc

SEQ ID NO: 418294 - DNA, 15 bp, Homo sapiens
tattattttcaattc

SEQ ID NO: 418295 - DNA, 15 bp, Homo sapiens
ttattattttcaatt

SEQ ID NO: 418296 - DNA, 15 bp, Homo sapiens
tttattattttcaat

SEQ ID NO: 418297 - DNA, 15 bp, Homo sapiens
ctttattattttcaa

SEQ ID NO: 418298 - DNA, 15 bp, Homo sapiens
gctttattattttca

SEQ ID NO: 418299 - DNA, 15 bp, Homo sapiens
ggctttattattttc

SEQ ID NO: 418300 - DNA, 15 bp, Homo sapiens
tggctttattatttt

SEQ ID NO: 418301 - DNA, 15 bp, Homo sapiens
ttggctttattattt

SEQ ID NO: 418302 - DNA, 15 bp, Homo sapiens
cttggctttattatt

SEQ ID NO: 418303 - DNA, 15 bp, Homo sapiens
ccttggctttattat

SEQ ID NO: 418304 - DNA, 15 bp, Homo sapiens
cccttggctttatta

SEQ ID NO: 418305 - DNA, 15 bp, Homo sapiens
gcccttggctttatt

SEQ ID NO: 418306 - DNA, 15 bp, Homo sapiens
agcccttggctttat

SEQ ID NO: 418307 - DNA, 15 bp, Homo sapiens
aagcccttggcttta

SEQ ID NO: 418308 - DNA, 15 bp, Homo sapiens
taagcccttggcttt

SEQ ID NO: 418309 - DNA, 15 bp, Homo sapiens
ataagcccttggctt

SEQ ID NO: 418310 - DNA, 15 bp, Homo sapiens
aataagcccttggct

SEQ ID NO: 418311 - DNA, 15 bp, Homo sapiens
aaataagcccttggc

SEQ ID NO: 418312 - DNA, 15 bp, Homo sapiens
aaaataagcccttgg

SEQ ID NO: 418313 - DNA, 15 bp, Homo sapiens
caaaataagcccttg

SEQ ID NO: 418314 - DNA, 15 bp, Homo sapiens
ccaaaataagccctt

SEQ ID NO: 418315 - DNA, 15 bp, Homo sapiens
tccaaaataagccct

SEQ ID NO: 418316 - DNA, 15 bp, Homo sapiens
gtccaaaataagccc

SEQ ID NO: 418317 - DNA, 15 bp, Homo sapiens
tgtccaaaataagcc

SEQ ID NO: 418318 - DNA, 15 bp, Homo sapiens
ttgtccaaaataagc

SEQ ID NO: 418319 - DNA, 15 bp, Homo sapiens
gttgtccaaaataag

SEQ ID NO: 418320 - DNA, 15 bp, Homo sapiens
ggttgtccaaaataa

SEQ ID NO: 418321 - DNA, 15 bp, Homo sapiens
tggttgtccaaaata

SEQ ID NO: 418322 - DNA, 15 bp, Homo sapiens
atggttgtccaaaat

SEQ ID NO: 418323 - DNA, 15 bp, Homo sapiens
catggttgtccaaaa

SEQ ID NO: 418324 - DNA, 15 bp, Homo sapiens
gcatggttgtccaaa

SEQ ID NO: 418325 - DNA, 15 bp, Homo sapiens
tgcatggttgtccaa

SEQ ID NO: 418326 - DNA, 15 bp, Homo sapiens
ctgcatggttgtcca

SEQ ID NO: 418327 - DNA, 15 bp, Homo sapiens
gctgcatggttgtcc

SEQ ID NO: 418328 - DNA, 15 bp, Homo sapiens
agctgcatggttgtc

SEQ ID NO: 418329 - DNA, 15 bp, Homo sapiens
cagctgcatggttgt

SEQ ID NO: 418330 - DNA, 15 bp, Homo sapiens
ccagctgcatggttg

SEQ ID NO: 418331 - DNA, 15 bp, Homo sapiens
tccagctgcatggtt

SEQ ID NO: 418332 - DNA, 15 bp, Homo sapiens
ctccagctgcatggt

SEQ ID NO: 418333 - DNA, 15 bp, Homo sapiens
gctccagctgcatgg

SEQ ID NO: 418334 - DNA, 15 bp, Homo sapiens
tgctccagctgcatg

SEQ ID NO: 418335 - DNA, 15 bp, Homo sapiens
ctgctccagctgcat

SEQ ID NO: 418336 - DNA, 15 bp, Homo sapiens
gctgctccagctgca

SEQ ID NO: 418337 - DNA, 15 bp, Homo sapiens
agctgctccagctgc

SEQ ID NO: 418338 - DNA, 15 bp, Homo sapiens
cagctgctccagctg

SEQ ID NO: 418339 - DNA, 15 bp, Homo sapiens
tcagctgctccagct

SEQ ID NO: 418340 - DNA, 15 bp, Homo sapiens
ttcagctgctccagc

SEQ ID NO: 418341 - DNA, 15 bp, Homo sapiens
attcagctgctccag

SEQ ID NO: 418342 - DNA, 15 bp, Homo sapiens
tattcagctgctcca

SEQ ID NO: 418343 - DNA, 15 bp, Homo sapiens
gtattcagctgctcc

SEQ ID NO: 418344 - DNA, 15 bp, Homo sapiens
agtattcagctgctc

SEQ ID NO: 418345 - DNA, 15 bp, Homo sapiens
tagtattcagctgct

SEQ ID NO: 418346 - DNA, 15 bp, Homo sapiens
ttagtattcagctgc

SEQ ID NO: 418347 - DNA, 15 bp, Homo sapiens
tttagtattcagctg

SEQ ID NO: 418348 - DNA, 15 bp, Homo sapiens
ttttagtattcagct

SEQ ID NO: 418349 - DNA, 15 bp, Homo sapiens
attttagtattcagc

SEQ ID NO: 418350 - DNA, 15 bp, Homo sapiens
tattttagtattcag

SEQ ID NO: 418351 - DNA, 15 bp, Homo sapiens
ctattttagtattca

SEQ ID NO: 418352 - DNA, 15 bp, Homo sapiens
actattttagtattc

SEQ ID NO: 418353 - DNA, 15 bp, Homo sapiens
cactattttagtatt

SEQ ID NO: 418354 - DNA, 15 bp, Homo sapiens
ccactattttagtat

SEQ ID NO: 418355 - DNA, 15 bp, Homo sapiens
gccactattttagta

SEQ ID NO: 418356 - DNA, 15 bp, Homo sapiens
ggccactattttagt

SEQ ID NO: 418357 - DNA, 15 bp, Homo sapiens
aggccactattttag

SEQ ID NO: 418358 - DNA, 15 bp, Homo sapiens
caggccactatttta

SEQ ID NO: 418359 - DNA, 15 bp, Homo sapiens
acaggccactatttt

SEQ ID NO: 418360 - DNA, 15 bp, Homo sapiens
cacaggccactattt

SEQ ID NO: 418361 - DNA, 15 bp, Homo sapiens
acacaggccactatt

SEQ ID NO: 418362 - DNA, 15 bp, Homo sapiens
cacacaggccactat

SEQ ID NO: 418363 - DNA, 15 bp, Homo sapiens
ccacacaggccacta

SEQ ID NO: 418364 - DNA, 15 bp, Homo sapiens
accacacaggccact

SEQ ID NO: 418365 - DNA, 15 bp, Homo sapiens
caccacacaggccac

SEQ ID NO: 418366 - DNA, 15 bp, Homo sapiens
ccaccacacaggcca

SEQ ID NO: 418367 - DNA, 15 bp, Homo sapiens
accaccacacaggcc

SEQ ID NO: 418368 - DNA, 15 bp, Homo sapiens
aaccaccacacaggc

SEQ ID NO: 418369 - DNA, 15 bp, Homo sapiens
aaaccaccacacagg

SEQ ID NO: 418370 - DNA, 15 bp, Homo sapiens
gaaaccaccacacag

SEQ ID NO: 418371 - DNA, 15 bp, Homo sapiens
ggaaaccaccacaca

SEQ ID NO: 418372 - DNA, 15 bp, Homo sapiens
gggaaaccaccacac

SEQ ID NO: 418373 - DNA, 15 bp, Homo sapiens
ggggaaaccaccaca

SEQ ID NO: 418374 - DNA, 15 bp, Homo sapiens
aggggaaaccaccac

SEQ ID NO: 418375 - DNA, 15 bp, Homo sapiens
caggggaaaccacca

SEQ ID NO: 418376 - DNA, 15 bp, Homo sapiens
acaggggaaaccacc

SEQ ID NO: 418377 - DNA, 15 bp, Homo sapiens
cacaggggaaaccac

SEQ ID NO: 418378 - DNA, 15 bp, Homo sapiens
ccacaggggaaacca

SEQ ID NO: 418379 - DNA, 15 bp, Homo sapiens
gccacaggggaaacc

SEQ ID NO: 418380 - DNA, 15 bp, Homo sapiens
agccacaggggaaac

SEQ ID NO: 418381 - DNA, 15 bp, Homo sapiens
aagccacaggggaaa

SEQ ID NO: 418382 - DNA, 15 bp, Homo sapiens
gaagccacaggggaa

SEQ ID NO: 418383 - DNA, 15 bp, Homo sapiens
agaagccacagggga

SEQ ID NO: 418384 - DNA, 15 bp, Homo sapiens
aagaagccacagggg

SEQ ID NO: 418385 - DNA, 15 bp, Homo sapiens
taagaagccacaggg

SEQ ID NO: 418386 - DNA, 15 bp, Homo sapiens
ataagaagccacagg

SEQ ID NO: 418387 - DNA, 15 bp, Homo sapiens
gataagaagccacag

SEQ ID NO: 418388 - DNA, 15 bp, Homo sapiens
agataagaagccaca

SEQ ID NO: 418389 - DNA, 15 bp, Homo sapiens
gagataagaagccac

SEQ ID NO: 418390 - DNA, 15 bp, Homo sapiens
ggagataagaagcca

SEQ ID NO: 418391 - DNA, 15 bp, Homo sapiens
cggagataagaagcc

SEQ ID NO: 418392 - DNA, 15 bp, Homo sapiens
acggagataagaagc

SEQ ID NO: 418393 - DNA, 15 bp, Homo sapiens
cacggagataagaag

SEQ ID NO: 418394 - DNA, 15 bp, Homo sapiens
ccacggagataagaa

SEQ ID NO: 418395 - DNA, 15 bp, Homo sapiens
cccacggagataaga

SEQ ID NO: 418396 - DNA, 15 bp, Homo sapiens
acccacggagataag

SEQ ID NO: 418397 - DNA, 15 bp, Homo sapiens
aacccacggagataa

SEQ ID NO: 418398 - DNA, 15 bp, Homo sapiens
taacccacggagata

SEQ ID NO: 418399 - DNA, 15 bp, Homo sapiens
gtaacccacggagat

SEQ ID NO: 418400 - DNA, 15 bp, Homo sapiens
tgtaacccacggaga

SEQ ID NO: 418401 - DNA, 15 bp, Homo sapiens
gtgtaacccacggag

SEQ ID NO: 418402 - DNA, 15 bp, Homo sapiens
tgtgtaacccacgga

SEQ ID NO: 418403 - DNA, 15 bp, Homo sapiens
gtgtgtaacccacgg

SEQ ID NO: 418404 - DNA, 15 bp, Homo sapiens
ggtgtgtaacccacg

SEQ ID NO: 418405 - DNA, 15 bp, Homo sapiens
gggtgtgtaacccac

SEQ ID NO: 418406 - DNA, 15 bp, Homo sapiens
agggtgtgtaaccca

SEQ ID NO: 418407 - DNA, 15 bp, Homo sapiens
gagggtgtgtaaccc

SEQ ID NO: 418408 - DNA, 15 bp, Homo sapiens
tgagggtgtgtaacc

SEQ ID NO: 418409 - DNA, 15 bp, Homo sapiens
gtgagggtgtgtaac

SEQ ID NO: 418410 - DNA, 15 bp, Homo sapiens
ggtgagggtgtgtaa

SEQ ID NO: 418411 - DNA, 15 bp, Homo sapiens
gggtgagggtgtgta

SEQ ID NO: 418412 - DNA, 15 bp, Homo sapiens
tgggtgagggtgtgt

SEQ ID NO: 418413 - DNA, 15 bp, Homo sapiens
ctgggtgagggtgtg

SEQ ID NO: 418414 - DNA, 15 bp, Homo sapiens
cctgggtgagggtgt

SEQ ID NO: 418415 - DNA, 15 bp, Homo sapiens
ccctgggtgagggtg

SEQ ID NO: 418416 - DNA, 15 bp, Homo sapiens
cccctgggtgagggt

SEQ ID NO: 418417 - DNA, 15 bp, Homo sapiens
tcccctgggtgaggg

SEQ ID NO: 418418 - DNA, 15 bp, Homo sapiens
ttcccctgggtgagg

SEQ ID NO: 418419 - DNA, 15 bp, Homo sapiens
cttcccctgggtgag

SEQ ID NO: 418420 - DNA, 15 bp, Homo sapiens
tcttcccctgggtga

SEQ ID NO: 418421 - DNA, 15 bp, Homo sapiens
gtcttcccctgggtg

SEQ ID NO: 418422 - DNA, 15 bp, Homo sapiens
tgtcttcccctgggt

SEQ ID NO: 418423 - DNA, 15 bp, Homo sapiens
ctgtcttcccctggg

SEQ ID NO: 418424 - DNA, 15 bp, Homo sapiens
gctgtcttcccctgg

SEQ ID NO: 418425 - DNA, 15 bp, Homo sapiens
ggctgtcttcccctg

SEQ ID NO: 418426 - DNA, 15 bp, Homo sapiens
aggctgtcttcccct

SEQ ID NO: 418427 - DNA, 15 bp, Homo sapiens
aaggctgtcttcccc

SEQ ID NO: 418428 - DNA, 15 bp, Homo sapiens
gaaggctgtcttccc

SEQ ID NO: 418429 - DNA, 15 bp, Homo sapiens
agaaggctgtcttcc

SEQ ID NO: 418430 - DNA, 15 bp, Homo sapiens
aagaaggctgtcttc

SEQ ID NO: 418431 - DNA, 15 bp, Homo sapiens
taagaaggctgtctt

SEQ ID NO: 418432 - DNA, 15 bp, Homo sapiens
ttaagaaggctgtct

SEQ ID NO: 418433 - DNA, 15 bp, Homo sapiens
attaagaaggctgtc

SEQ ID NO: 418434 - DNA, 15 bp, Homo sapiens
cattaagaaggctgt

SEQ ID NO: 418435 - DNA, 15 bp, Homo sapiens
gcattaagaaggctg

SEQ ID NO: 418436 - DNA, 15 bp, Homo sapiens
tgcattaagaaggct

SEQ ID NO: 418437 - DNA, 15 bp, Homo sapiens
ctgcattaagaaggc

SEQ ID NO: 418438 - DNA, 15 bp, Homo sapiens
gctgcattaagaagg

SEQ ID NO: 418439 - DNA, 15 bp, Homo sapiens
agctgcattaagaag

SEQ ID NO: 418440 - DNA, 15 bp, Homo sapiens
aagctgcattaagaa

SEQ ID NO: 418441 - DNA, 15 bp, Homo sapiens
caagctgcattaaga

SEQ ID NO: 418442 - DNA, 15 bp, Homo sapiens
gcaagctgcattaag

SEQ ID NO: 418443 - DNA, 15 bp, Homo sapiens
tgcaagctgcattaa

SEQ ID NO: 418444 - DNA, 15 bp, Homo sapiens
ctgcaagctgcatta

SEQ ID NO: 418445 - DNA, 15 bp, Homo sapiens
gctgcaagctgcatt

SEQ ID NO: 418446 - DNA, 15 bp, Homo sapiens
tgctgcaagctgcat

SEQ ID NO: 418447 - DNA, 15 bp, Homo sapiens
ctgctgcaagctgca

SEQ ID NO: 418448 - DNA, 15 bp, Homo sapiens
cctgctgcaagctgc

SEQ ID NO: 418449 - DNA, 15 bp, Homo sapiens
gcctgctgcaagctg

SEQ ID NO: 418450 - DNA, 15 bp, Homo sapiens
ggcctgctgcaagct

SEQ ID NO: 418451 - DNA, 15 bp, Homo sapiens
aggcctgctgcaagc

SEQ ID NO: 418452 - DNA, 15 bp, Homo sapiens
aaggcctgctgcaag

SEQ ID NO: 418453 - DNA, 15 bp, Homo sapiens
gaaggcctgctgcaa

SEQ ID NO: 418454 - DNA, 15 bp, Homo sapiens
agaaggcctgctgca

SEQ ID NO: 418455 - DNA, 15 bp, Homo sapiens
aagaaggcctgctgc

SEQ ID NO: 418456 - DNA, 15 bp, Homo sapiens
aaagaaggcctgctg

SEQ ID NO: 418457 - DNA, 15 bp, Homo sapiens
aaaagaaggcctgct

SEQ ID NO: 418458 - DNA, 15 bp, Homo sapiens
caaaagaaggcctgc

SEQ ID NO: 418459 - DNA, 15 bp, Homo sapiens
gcaaaagaaggcctg

SEQ ID NO: 418460 - DNA, 15 bp, Homo sapiens
cgcaaaagaaggcct

SEQ ID NO: 418461 - DNA, 15 bp, Homo sapiens
ccgcaaaagaaggcc

SEQ ID NO: 418462 - DNA, 15 bp, Homo sapiens
cccgcaaaagaaggc

SEQ ID NO: 418463 - DNA, 15 bp, Homo sapiens
ccccgcaaaagaagg

SEQ ID NO: 418464 - DNA, 15 bp, Homo sapiens
gccccgcaaaagaag

SEQ ID NO: 418465 - DNA, 15 bp, Homo sapiens
tgccccgcaaaagaa

SEQ ID NO: 418466 - DNA, 15 bp, Homo sapiens
ctgccccgcaaaaga

SEQ ID NO: 418467 - DNA, 15 bp, Homo sapiens
tctgccccgcaaaag

SEQ ID NO: 418468 - DNA, 15 bp, Homo sapiens
atctgccccgcaaaa

SEQ ID NO: 418469 - DNA, 15 bp, Homo sapiens
aatctgccccgcaaa

SEQ ID NO: 418470 - DNA, 15 bp, Homo sapiens
aaatctgccccgcaa

SEQ ID NO: 418471 - DNA, 15 bp, Homo sapiens
aaaatctgccccgca

SEQ ID NO: 418472 - DNA, 15 bp, Homo sapiens
gaaaatctgccccgc

SEQ ID NO: 418473 - DNA, 15 bp, Homo sapiens
ggaaaatctgccccg

SEQ ID NO: 418474 - DNA, 15 bp, Homo sapiens
aggaaaatctgcccc

SEQ ID NO: 418475 - DNA, 15 bp, Homo sapiens
gaggaaaatctgccc

SEQ ID NO: 418476 - DNA, 15 bp, Homo sapiens
tgaggaaaatctgcc

SEQ ID NO: 418477 - DNA, 15 bp, Homo sapiens
ctgaggaaaatctgc

SEQ ID NO: 418478 - DNA, 15 bp, Homo sapiens
tctgaggaaaatctg

SEQ ID NO: 418479 - DNA, 15 bp, Homo sapiens
ttctgaggaaaatct

SEQ ID NO: 418480 - DNA, 15 bp, Homo sapiens
cttctgaggaaaatc

SEQ ID NO: 418481 - DNA, 15 bp, Homo sapiens
tcttctgaggaaaat

SEQ ID NO: 418482 - DNA, 15 bp, Homo sapiens
ctcttctgaggaaaa

SEQ ID NO: 418483 - DNA, 15 bp, Homo sapiens
tctcttctgaggaaa

SEQ ID NO: 418484 - DNA, 15 bp, Homo sapiens
ttctcttctgaggaa

SEQ ID NO: 418485 - DNA, 15 bp, Homo sapiens
cttctcttctgagga

SEQ ID NO: 418486 - DNA, 15 bp, Homo sapiens
acttctcttctgagg

SEQ ID NO: 418487 - DNA, 15 bp, Homo sapiens
tacttctcttctgag

SEQ ID NO: 418488 - DNA, 15 bp, Homo sapiens
gtacttctcttctga

SEQ ID NO: 418489 - DNA, 15 bp, Homo sapiens
tgtacttctcttctg

SEQ ID NO: 418490 - DNA, 15 bp, Homo sapiens
atgtacttctcttct

SEQ ID NO: 418491 - DNA, 15 bp, Homo sapiens
aatgtacttctcttc

SEQ ID NO: 418492 - DNA, 15 bp, Homo sapiens
taatgtacttctctt

SEQ ID NO: 418493 - DNA, 15 bp, Homo sapiens
ctaatgtacttctct

SEQ ID NO: 418494 - DNA, 15 bp, Homo sapiens
actaatgtacttctc

SEQ ID NO: 418495 - DNA, 15 bp, Homo sapiens
gactaatgtacttct

SEQ ID NO: 418496 - DNA, 15 bp, Homo sapiens
tgactaatgtacttc

SEQ ID NO: 418497 - DNA, 15 bp, Homo sapiens
atgactaatgtactt

SEQ ID NO: 418498 - DNA, 15 bp, Homo sapiens
aatgactaatgtact

SEQ ID NO: 418499 - DNA, 15 bp, Homo sapiens
caatgactaatgtac

SEQ ID NO: 418500 - DNA, 15 bp, Homo sapiens
tcaatgactaatgta

SEQ ID NO: 418501 - DNA, 15 bp, Homo sapiens
ttcaatgactaatgt

SEQ ID NO: 418502 - DNA, 15 bp, Homo sapiens
gttcaatgactaatg

SEQ ID NO: 418503 - DNA, 15 bp, Homo sapiens
agttcaatgactaat

SEQ ID NO: 418504 - DNA, 15 bp, Homo sapiens
cagttcaatgactaa

SEQ ID NO: 418505 - DNA, 15 bp, Homo sapiens
acagttcaatgacta

SEQ ID NO: 418506 - DNA, 15 bp, Homo sapiens
aacagttcaatgact

SEQ ID NO: 418507 - DNA, 15 bp, Homo sapiens
taacagttcaatgac

SEQ ID NO: 418508 - DNA, 15 bp, Homo sapiens
ctaacagttcaatga

SEQ ID NO: 418509 - DNA, 15 bp, Homo sapiens
tctaacagttcaatg

SEQ ID NO: 418510 - DNA, 15 bp, Homo sapiens
ctctaacagttcaat

SEQ ID NO: 418511 - DNA, 15 bp, Homo sapiens
tctctaacagttcaa

SEQ ID NO: 418512 - DNA, 15 bp, Homo sapiens
ttctctaacagttca

SEQ ID NO: 418513 - DNA, 15 bp, Homo sapiens
attctctaacagttc

SEQ ID NO: 418514 - DNA, 15 bp, Homo sapiens
tattctctaacagtt

SEQ ID NO: 418515 - DNA, 15 bp, Homo sapiens
atattctctaacagt

SEQ ID NO: 418516 - DNA, 15 bp, Homo sapiens
tatattctctaacag

SEQ ID NO: 418517 - DNA, 15 bp, Homo sapiens
ttatattctctaaca

SEQ ID NO: 418518 - DNA, 15 bp, Homo sapiens
attatattctctaac

SEQ ID NO: 418519 - DNA, 15 bp, Homo sapiens
cattatattctctaa

SEQ ID NO: 418520 - DNA, 15 bp, Homo sapiens
tcattatattctcta

SEQ ID NO: 418521 - DNA, 15 bp, Homo sapiens
ttcattatattctct

SEQ ID NO: 418522 - DNA, 15 bp, Homo sapiens
tttcattatattctc

SEQ ID NO: 418523 - DNA, 15 bp, Homo sapiens
ttttcattatattct

SEQ ID NO: 418524 - DNA, 15 bp, Homo sapiens
cttttcattatattc

SEQ ID NO: 418525 - DNA, 15 bp, Homo sapiens
tcttttcattatatt

SEQ ID NO: 418526 - DNA, 15 bp, Homo sapiens
ttcttttcattatat

SEQ ID NO: 418527 - DNA, 15 bp, Homo sapiens
tttcttttcattata

SEQ ID NO: 418528 - DNA, 15 bp, Homo sapiens
ttttcttttcattat

SEQ ID NO: 418529 - DNA, 15 bp, Homo sapiens
tttttcttttcatta

SEQ ID NO: 418530 - DNA, 15 bp, Homo sapiens
gtttttcttttcatt

SEQ ID NO: 418531 - DNA, 15 bp, Homo sapiens
ggtttttcttttcat

SEQ ID NO: 418532 - DNA, 15 bp, Homo sapiens
aggtttttcttttca

SEQ ID NO: 418533 - DNA, 15 bp, Homo sapiens
taggtttttcttttc

SEQ ID NO: 418534 - DNA, 15 bp, Homo sapiens
ttaggtttttctttt

SEQ ID NO: 418535 - DNA, 15 bp, Homo sapiens
gttaggtttttcttt

SEQ ID NO: 418536 - DNA, 15 bp, Homo sapiens
agttaggtttttctt

SEQ ID NO: 418537 - DNA, 15 bp, Homo sapiens
aagttaggtttttct

SEQ ID NO: 418538 - DNA, 15 bp, Homo sapiens
aaagttaggtttttc

SEQ ID NO: 418539 - DNA, 15 bp, Homo sapiens
caaagttaggttttt

SEQ ID NO: 418540 - DNA, 15 bp, Homo sapiens
ccaaagttaggtttt

SEQ ID NO: 418541 - DNA, 15 bp, Homo sapiens
tccaaagttaggttt

SEQ ID NO: 418542 - DNA, 15 bp, Homo sapiens
atccaaagttaggtt

SEQ ID NO: 418543 - DNA, 15 bp, Homo sapiens
gatccaaagttaggt

SEQ ID NO: 418544 - DNA, 15 bp, Homo sapiens
tgatccaaagttagg

SEQ ID NO: 418545 - DNA, 15 bp, Homo sapiens
ctgatccaaagttag

SEQ ID NO: 418546 - DNA, 15 bp, Homo sapiens
tctgatccaaagtta

SEQ ID NO: 418547 - DNA, 15 bp, Homo sapiens
atctgatccaaagtt

SEQ ID NO: 418548 - DNA, 15 bp, Homo sapiens
aatctgatccaaagt

SEQ ID NO: 418549 - DNA, 15 bp, Homo sapiens
aaatctgatccaaag

SEQ ID NO: 418550 - DNA, 15 bp, Homo sapiens
caaatctgatccaaa

SEQ ID NO: 418551 - DNA, 15 bp, Homo sapiens
tcaaatctgatccaa

SEQ ID NO: 418552 - DNA, 15 bp, Homo sapiens
ttcaaatctgatcca

SEQ ID NO: 418553 - DNA, 15 bp, Homo sapiens
attcaaatctgatcc

SEQ ID NO: 418554 - DNA, 15 bp, Homo sapiens
aattcaaatctgatc

SEQ ID NO: 418555 - DNA, 15 bp, Homo sapiens
aaattcaaatctgat

SEQ ID NO: 418556 - DNA, 15 bp, Homo sapiens
aaaattcaaatctga

SEQ ID NO: 418557 - DNA, 15 bp, Homo sapiens
taaaattcaaatctg

SEQ ID NO: 418558 - DNA, 15 bp, Homo sapiens
gtaaaattcaaatct

SEQ ID NO: 418559 - DNA, 15 bp, Homo sapiens
agtaaaattcaaatc

SEQ ID NO: 418560 - DNA, 15 bp, Homo sapiens
tagtaaaattcaaat

SEQ ID NO: 418561 - DNA, 15 bp, Homo sapiens
gtagtaaaattcaaa

SEQ ID NO: 418562 - DNA, 15 bp, Homo sapiens
ggtagtaaaattcaa

SEQ ID NO: 418563 - DNA, 15 bp, Homo sapiens
gggtagtaaaattca

SEQ ID NO: 418564 - DNA, 15 bp, Homo sapiens
ggggtagtaaaattc

SEQ ID NO: 418565 - DNA, 15 bp, Homo sapiens
tggggtagtaaaatt

SEQ ID NO: 418566 - DNA, 15 bp, Homo sapiens
atggggtagtaaaat

SEQ ID NO: 418567 - DNA, 15 bp, Homo sapiens
catggggtagtaaaa

SEQ ID NO: 418568 - DNA, 15 bp, Homo sapiens
ccatggggtagtaaa

SEQ ID NO: 418569 - DNA, 15 bp, Homo sapiens
gccatggggtagtaa

SEQ ID NO: 418570 - DNA, 15 bp, Homo sapiens
ggccatggggtagta

SEQ ID NO: 418571 - DNA, 15 bp, Homo sapiens
aggccatggggtagt

SEQ ID NO: 418572 - DNA, 15 bp, Homo sapiens
caggccatggggtag

SEQ ID NO: 418573 - DNA, 15 bp, Homo sapiens
acaggccatggggta

SEQ ID NO: 418574 - DNA, 15 bp, Homo sapiens
tacaggccatggggt

SEQ ID NO: 418575 - DNA, 15 bp, Homo sapiens
ctacaggccatgggg

SEQ ID NO: 418576 - DNA, 15 bp, Homo sapiens
gctacaggccatggg

SEQ ID NO: 418577 - DNA, 15 bp, Homo sapiens
agctacaggccatgg

SEQ ID NO: 418578 - DNA, 15 bp, Homo sapiens
cagctacaggccatg

SEQ ID NO: 418579 - DNA, 15 bp, Homo sapiens
gcagctacaggccat

SEQ ID NO: 418580 - DNA, 15 bp, Homo sapiens
agcagctacaggcca

SEQ ID NO: 418581 - DNA, 15 bp, Homo sapiens
aagcagctacaggcc

SEQ ID NO: 418582 - DNA, 15 bp, Homo sapiens
gaagcagctacaggc

SEQ ID NO: 418583 - DNA, 15 bp, Homo sapiens
agaagcagctacagg

SEQ ID NO: 418584 - DNA, 15 bp, Homo sapiens
gagaagcagctacag

SEQ ID NO: 418585 - DNA, 15 bp, Homo sapiens
agagaagcagctaca

SEQ ID NO: 418586 - DNA, 15 bp, Homo sapiens
cagagaagcagctac

SEQ ID NO: 418587 - DNA, 15 bp, Homo sapiens
tcagagaagcagcta

SEQ ID NO: 418588 - DNA, 15 bp, Homo sapiens
gtcagagaagcagct

SEQ ID NO: 418589 - DNA, 15 bp, Homo sapiens
agtcagagaagcagc

SEQ ID NO: 418590 - DNA, 15 bp, Homo sapiens
gagtcagagaagcag

SEQ ID NO: 418591 - DNA, 15 bp, Homo sapiens
tgagtcagagaagca

SEQ ID NO: 418592 - DNA, 15 bp, Homo sapiens
ttgagtcagagaagc

SEQ ID NO: 418593 - DNA, 15 bp, Homo sapiens
attgagtcagagaag

SEQ ID NO: 418594 - DNA, 15 bp, Homo sapiens
tattgagtcagagaa

SEQ ID NO: 418595 - DNA, 15 bp, Homo sapiens
atattgagtcagaga

SEQ ID NO: 418596 - DNA, 15 bp, Homo sapiens
tatattgagtcagag

SEQ ID NO: 418597 - DNA, 15 bp, Homo sapiens
atatattgagtcaga

SEQ ID NO: 418598 - DNA, 15 bp, Homo sapiens
aatatattgagtcag

SEQ ID NO: 418599 - DNA, 15 bp, Homo sapiens
taatatattgagtca

SEQ ID NO: 418600 - DNA, 15 bp, Homo sapiens
ataatatattgagtc

SEQ ID NO: 418601 - DNA, 15 bp, Homo sapiens
gataatatattgagt

SEQ ID NO: 418602 - DNA, 15 bp, Homo sapiens
agataatatattgag

SEQ ID NO: 418603 - DNA, 15 bp, Homo sapiens
aagataatatattga

SEQ ID NO: 418604 - DNA, 15 bp, Homo sapiens
gaagataatatattg

SEQ ID NO: 418605 - DNA, 15 bp, Homo sapiens
ggaagataatatatt

SEQ ID NO: 418606 - DNA, 15 bp, Homo sapiens
aggaagataatatat

SEQ ID NO: 418607 - DNA, 15 bp, Homo sapiens
aaggaagataatata

SEQ ID NO: 418608 - DNA, 15 bp, Homo sapiens
aaaggaagataatat

SEQ ID NO: 418609 - DNA, 15 bp, Homo sapiens
taaaggaagataata

SEQ ID NO: 418610 - DNA, 15 bp, Homo sapiens
ttaaaggaagataat

SEQ ID NO: 418611 - DNA, 15 bp, Homo sapiens
cttaaaggaagataa

SEQ ID NO: 418612 - DNA, 15 bp, Homo sapiens
ccttaaaggaagata

SEQ ID NO: 418613 - DNA, 15 bp, Homo sapiens
gccttaaaggaagat

SEQ ID NO: 418614 - DNA, 15 bp, Homo sapiens
tgccttaaaggaaga

SEQ ID NO: 418615 - DNA, 15 bp, Homo sapiens
ttgccttaaaggaag

SEQ ID NO: 418616 - DNA, 15 bp, Homo sapiens
tttgccttaaaggaa

SEQ ID NO: 418617 - DNA, 15 bp, Homo sapiens
gtttgccttaaagga

SEQ ID NO: 418618 - DNA, 15 bp, Homo sapiens
agtttgccttaaagg

SEQ ID NO: 418619 - DNA, 15 bp, Homo sapiens
tagtttgccttaaag

SEQ ID NO: 418620 - DNA, 15 bp, Homo sapiens
atagtttgccttaaa

SEQ ID NO: 418621 - DNA, 15 bp, Homo sapiens
aatagtttgccttaa

SEQ ID NO: 418622 - DNA, 15 bp, Homo sapiens
aaatagtttgcctta

SEQ ID NO: 418623 - DNA, 15 bp, Homo sapiens
taaatagtttgcctt

SEQ ID NO: 418624 - DNA, 15 bp, Homo sapiens
ctaaatagtttgcct

SEQ ID NO: 418625 - DNA, 15 bp, Homo sapiens
actaaatagtttgcc

SEQ ID NO: 418626 - DNA, 15 bp, Homo sapiens
aactaaatagtttgc

SEQ ID NO: 418627 - DNA, 15 bp, Homo sapiens
aaactaaatagtttg

SEQ ID NO: 418628 - DNA, 15 bp, Homo sapiens
aaaactaaatagttt

SEQ ID NO: 418629 - DNA, 15 bp, Homo sapiens
gaaaactaaatagtt

SEQ ID NO: 418630 - DNA, 15 bp, Homo sapiens
tgaaaactaaatagt

SEQ ID NO: 418631 - DNA, 15 bp, Homo sapiens
ctgaaaactaaatag

SEQ ID NO: 418632 - DNA, 15 bp, Homo sapiens
actgaaaactaaata

SEQ ID NO: 418633 - DNA, 15 bp, Homo sapiens
aactgaaaactaaat

SEQ ID NO: 418634 - DNA, 15 bp, Homo sapiens
taactgaaaactaaa

SEQ ID NO: 418635 - DNA, 15 bp, Homo sapiens
ctaactgaaaactaa

SEQ ID NO: 418636 - DNA, 15 bp, Homo sapiens
actaactgaaaacta

SEQ ID NO: 418637 - DNA, 15 bp, Homo sapiens
tactaactgaaaact

SEQ ID NO: 418638 - DNA, 15 bp, Homo sapiens
ctactaactgaaaac

SEQ ID NO: 418639 - DNA, 15 bp, Homo sapiens
tctactaactgaaaa

SEQ ID NO: 418640 - DNA, 15 bp, Homo sapiens
ctctactaactgaaa

SEQ ID NO: 418641 - DNA, 15 bp, Homo sapiens
cctctactaactgaa

SEQ ID NO: 418642 - DNA, 15 bp, Homo sapiens
ccctctactaactga

SEQ ID NO: 418643 - DNA, 15 bp, Homo sapiens
accctctactaactg

SEQ ID NO: 418644 - DNA, 15 bp, Homo sapiens
aaccctctactaact

SEQ ID NO: 418645 - DNA, 15 bp, Homo sapiens
aaaccctctactaac

SEQ ID NO: 418646 - DNA, 15 bp, Homo sapiens
gaaaccctctactaa

SEQ ID NO: 418647 - DNA, 15 bp, Homo sapiens
tgaaaccctctacta

SEQ ID NO: 418648 - DNA, 15 bp, Homo sapiens
ttgaaaccctctact

SEQ ID NO: 418649 - DNA, 15 bp, Homo sapiens
tttgaaaccctctac

SEQ ID NO: 418650 - DNA, 15 bp, Homo sapiens
ttttgaaaccctcta

SEQ ID NO: 418651 - DNA, 15 bp, Homo sapiens
gttttgaaaccctct

SEQ ID NO: 418652 - DNA, 15 bp, Homo sapiens
tgttttgaaaccctc

SEQ ID NO: 418653 - DNA, 15 bp, Homo sapiens
ttgttttgaaaccct

SEQ ID NO: 418654 - DNA, 15 bp, Homo sapiens
tttgttttgaaaccc

SEQ ID NO: 418655 - DNA, 15 bp, Homo sapiens
ctttgttttgaaacc

SEQ ID NO: 418656 - DNA, 15 bp, Homo sapiens
gctttgttttgaaac

SEQ ID NO: 418657 - DNA, 15 bp, Homo sapiens
tgctttgttttgaaa

SEQ ID NO: 418658 - DNA, 15 bp, Homo sapiens
ttgctttgttttgaa

SEQ ID NO: 418659 - DNA, 15 bp, Homo sapiens
cttgctttgttttga

SEQ ID NO: 418660 - DNA, 15 bp, Homo sapiens
acttgctttgttttg

SEQ ID NO: 418661 - DNA, 15 bp, Homo sapiens
tacttgctttgtttt

SEQ ID NO: 418662 - DNA, 15 bp, Homo sapiens
ctacttgctttgttt

SEQ ID NO: 418663 - DNA, 15 bp, Homo sapiens
tctacttgctttgtt

SEQ ID NO: 418664 - DNA, 15 bp, Homo sapiens
atctacttgctttgt

SEQ ID NO: 418665 - DNA, 15 bp, Homo sapiens
aatctacttgctttg

SEQ ID NO: 418666 - DNA, 15 bp, Homo sapiens
taatctacttgcttt

SEQ ID NO: 418667 - DNA, 15 bp, Homo sapiens
ttaatctacttgctt

SEQ ID NO: 418668 - DNA, 15 bp, Homo sapiens
attaatctacttgct

SEQ ID NO: 418669 - DNA, 15 bp, Homo sapiens
tattaatctacttgc

SEQ ID NO: 418670 - DNA, 15 bp, Homo sapiens
ttattaatctacttg

SEQ ID NO: 418671 - DNA, 15 bp, Homo sapiens
tttattaatctactt

SEQ ID NO: 418672 - DNA, 15 bp, Homo sapiens
ttttattaatctact

SEQ ID NO: 418673 - DNA, 15 bp, Homo sapiens
tttttattaatctac

SEQ ID NO: 418674 - DNA, 15 bp, Homo sapiens
ctttttattaatcta

SEQ ID NO: 418675 - DNA, 15 bp, Homo sapiens
actttttattaatct

SEQ ID NO: 418676 - DNA, 15 bp, Homo sapiens
cactttttattaatc

SEQ ID NO: 418677 - DNA, 15 bp, Homo sapiens
acactttttattaat

SEQ ID NO: 418678 - DNA, 15 bp, Homo sapiens
tacactttttattaa

SEQ ID NO: 418679 - DNA, 15 bp, Homo sapiens
ttacactttttatta

SEQ ID NO: 418680 - DNA, 15 bp, Homo sapiens
tttacactttttatt

SEQ ID NO: 418681 - DNA, 15 bp, Homo sapiens
ttttacactttttat

SEQ ID NO: 418682 - DNA, 15 bp, Homo sapiens
tttttacacttttta

SEQ ID NO: 418683 - DNA, 15 bp, Homo sapiens
atttttacacttttt

SEQ ID NO: 418684 - DNA, 15 bp, Homo sapiens
gatttttacactttt

SEQ ID NO: 418685 - DNA, 15 bp, Homo sapiens
tgatttttacacttt

SEQ ID NO: 418686 - DNA, 15 bp, Homo sapiens
ctgatttttacactt

SEQ ID NO: 418687 - DNA, 15 bp, Homo sapiens
tctgatttttacact

SEQ ID NO: 418688 - DNA, 15 bp, Homo sapiens
ttctgatttttacac

SEQ ID NO: 418689 - DNA, 15 bp, Homo sapiens
attctgatttttaca

SEQ ID NO: 418690 - DNA, 15 bp, Homo sapiens
tattctgatttttac

SEQ ID NO: 418691 - DNA, 15 bp, Homo sapiens
ttattctgattttta

SEQ ID NO: 418692 - DNA, 15 bp, Homo sapiens
tttattctgattttt

SEQ ID NO: 418693 - DNA, 15 bp, Homo sapiens
atttattctgatttt

SEQ ID NO: 418694 - DNA, 15 bp, Homo sapiens
tatttattctgattt

SEQ ID NO: 418695 - DNA, 15 bp, Homo sapiens
ctatttattctgatt

SEQ ID NO: 418696 - DNA, 15 bp, Homo sapiens
tctatttattctgat

SEQ ID NO: 418697 - DNA, 15 bp, Homo sapiens
ttctatttattctga

SEQ ID NO: 418698 - DNA, 15 bp, Homo sapiens
attctatttattctg

SEQ ID NO: 418699 - DNA, 15 bp, Homo sapiens
tattctatttattct

SEQ ID NO: 418700 - DNA, 15 bp, Homo sapiens
ctattctatttattc

SEQ ID NO: 418701 - DNA, 15 bp, Homo sapiens
tctattctatttatt

SEQ ID NO: 418702 - DNA, 15 bp, Homo sapiens
ttctattctatttat

SEQ ID NO: 418703 - DNA, 15 bp, Homo sapiens
tttctattctattta

SEQ ID NO: 418704 - DNA, 15 bp, Homo sapiens
ttttctattctattt

SEQ ID NO: 418705 - DNA, 15 bp, Homo sapiens
attttctattctatt

SEQ ID NO: 418706 - DNA, 15 bp, Homo sapiens
tattttctattctat

SEQ ID NO: 418707 - DNA, 15 bp, Homo sapiens
ctattttctattcta

SEQ ID NO: 418708 - DNA, 15 bp, Homo sapiens
tctattttctattct

SEQ ID NO: 418709 - DNA, 15 bp, Homo sapiens
atctattttctattc

SEQ ID NO: 418710 - DNA, 15 bp, Homo sapiens
aatctattttctatt

SEQ ID NO: 418711 - DNA, 15 bp, Homo sapiens
aaatctattttctat

SEQ ID NO: 418712 - DNA, 15 bp, Homo sapiens
taaatctattttcta

SEQ ID NO: 418713 - DNA, 15 bp, Homo sapiens
ataaatctattttct

SEQ ID NO: 418714 - DNA, 15 bp, Homo sapiens
aataaatctattttc

SEQ ID NO: 418715 - DNA, 15 bp, Homo sapiens
aaataaatctatttt

SEQ ID NO: 418716 - DNA, 15 bp, Homo sapiens
aaaataaatctattt

SEQ ID NO: 418717 - DNA, 15 bp, Homo sapiens
aaaaataaatctatt

SEQ ID NO: 418718 - DNA, 15 bp, Homo sapiens
taaaaataaatctat

SEQ ID NO: 418719 - DNA, 15 bp, Homo sapiens
ataaaaataaatcta

SEQ ID NO: 418720 - DNA, 15 bp, Homo sapiens
aataaaaataaatct

SEQ ID NO: 418721 - DNA, 15 bp, Homo sapiens
aaataaaaataaatc

SEQ ID NO: 418722 - DNA, 15 bp, Homo sapiens
aaaataaaaataaat

SEQ ID NO: 418723 - DNA, 15 bp, Homo sapiens
caaaataaaaataaa

SEQ ID NO: 418724 - DNA, 15 bp, Homo sapiens
acaaaataaaaataa

SEQ ID NO: 418725 - DNA, 15 bp, Homo sapiens
gacaaaataaaaata

SEQ ID NO: 418726 - DNA, 15 bp, Homo sapiens
tgacaaaataaaaat

SEQ ID NO: 418727 - DNA, 15 bp, Homo sapiens
atgacaaaataaaaa

SEQ ID NO: 418728 - DNA, 15 bp, Homo sapiens
catgacaaaataaaa

SEQ ID NO: 418729 - DNA, 15 bp, Homo sapiens
acatgacaaaataaa

SEQ ID NO: 418730 - DNA, 15 bp, Homo sapiens
tacatgacaaaataa

SEQ ID NO: 418731 - DNA, 15 bp, Homo sapiens
ttacatgacaaaata

SEQ ID NO: 418732 - DNA, 15 bp, Homo sapiens
attacatgacaaaat

SEQ ID NO: 418733 - DNA, 15 bp, Homo sapiens
gattacatgacaaaa

SEQ ID NO: 418734 - DNA, 15 bp, Homo sapiens
agattacatgacaaa

SEQ ID NO: 418735 - DNA, 15 bp, Homo sapiens
gagattacatgacaa

SEQ ID NO: 418736 - DNA, 15 bp, Homo sapiens
cgagattacatgaca

SEQ ID NO: 418737 - DNA, 15 bp, Homo sapiens
ccgagattacatgac

SEQ ID NO: 418738 - DNA, 15 bp, Homo sapiens
gccgagattacatga

SEQ ID NO: 418739 - DNA, 15 bp, Homo sapiens
agccgagattacatg

SEQ ID NO: 418740 - DNA, 15 bp, Homo sapiens
cagccgagattacat

SEQ ID NO: 418741 - DNA, 15 bp, Homo sapiens
tcagccgagattaca

SEQ ID NO: 418742 - DNA, 15 bp, Homo sapiens
atcagccgagattac

SEQ ID NO: 418743 - DNA, 15 bp, Homo sapiens
tatcagccgagatta

SEQ ID NO: 418744 - DNA, 15 bp, Homo sapiens
ttatcagccgagatt

SEQ ID NO: 418745 - DNA, 15 bp, Homo sapiens
tttatcagccgagat

SEQ ID NO: 418746 - DNA, 15 bp, Homo sapiens
ttttatcagccgaga

SEQ ID NO: 418747 - DNA, 15 bp, Homo sapiens
gttttatcagccgag

SEQ ID NO: 418748 - DNA, 15 bp, Homo sapiens
tgttttatcagccga

SEQ ID NO: 418749 - DNA, 15 bp, Homo sapiens
ctgttttatcagccg

SEQ ID NO: 418750 - DNA, 15 bp, Homo sapiens
cctgttttatcagcc

SEQ ID NO: 418751 - DNA, 15 bp, Homo sapiens
tcctgttttatcagc

SEQ ID NO: 418752 - DNA, 15 bp, Homo sapiens
ttcctgttttatcag

SEQ ID NO: 418753 - DNA, 15 bp, Homo sapiens
attcctgttttatca

SEQ ID NO: 418754 - DNA, 15 bp, Homo sapiens
tattcctgttttatc

SEQ ID NO: 418755 - DNA, 15 bp, Homo sapiens
atattcctgttttat

SEQ ID NO: 418756 - DNA, 15 bp, Homo sapiens
tatattcctgtttta

SEQ ID NO: 418757 - DNA, 15 bp, Homo sapiens
gtatattcctgtttt

SEQ ID NO: 418758 - DNA, 15 bp, Homo sapiens
tgtatattcctgttt

SEQ ID NO: 418759 - DNA, 15 bp, Homo sapiens
atgtatattcctgtt

SEQ ID NO: 418760 - DNA, 15 bp, Homo sapiens
tatgtatattcctgt

SEQ ID NO: 418761 - DNA, 15 bp, Homo sapiens
atatgtatattcctg

SEQ ID NO: 418762 - DNA, 15 bp, Homo sapiens
catatgtatattcct

SEQ ID NO: 418763 - DNA, 15 bp, Homo sapiens
acatatgtatattcc

SEQ ID NO: 418764 - DNA, 15 bp, Homo sapiens
cacatatgtatattc

SEQ ID NO: 418765 - DNA, 15 bp, Homo sapiens
acacatatgtatatt

SEQ ID NO: 418766 - DNA, 15 bp, Homo sapiens
cacacatatgtatat

SEQ ID NO: 418767 - DNA, 15 bp, Homo sapiens
acacacatatgtata

SEQ ID NO: 418768 - DNA, 15 bp, Homo sapiens
tacacacatatgtat

SEQ ID NO: 418769 - DNA, 15 bp, Homo sapiens
ctacacacatatgta

SEQ ID NO: 418770 - DNA, 15 bp, Homo sapiens
actacacacatatgt

SEQ ID NO: 418771 - DNA, 15 bp, Homo sapiens
cactacacacatatg

SEQ ID NO: 418772 - DNA, 15 bp, Homo sapiens
ccactacacacatat

SEQ ID NO: 418773 - DNA, 15 bp, Homo sapiens
accactacacacata

SEQ ID NO: 418774 - DNA, 15 bp, Homo sapiens
gaccactacacacat

SEQ ID NO: 418775 - DNA, 15 bp, Homo sapiens
tgaccactacacaca

SEQ ID NO: 418776 - DNA, 15 bp, Homo sapiens
ctgaccactacacac

SEQ ID NO: 418777 - DNA, 15 bp, Homo sapiens
actgaccactacaca

SEQ ID NO: 418778 - DNA, 15 bp, Homo sapiens
aactgaccactacac

SEQ ID NO: 418779 - DNA, 15 bp, Homo sapiens
aaactgaccactaca

SEQ ID NO: 418780 - DNA, 15 bp, Homo sapiens
gaaactgaccactac

SEQ ID NO: 418781 - DNA, 15 bp, Homo sapiens
tgaaactgaccacta

SEQ ID NO: 418782 - DNA, 15 bp, Homo sapiens
ttgaaactgaccact

SEQ ID NO: 418783 - DNA, 15 bp, Homo sapiens
tttgaaactgaccac

SEQ ID NO: 418784 - DNA, 15 bp, Homo sapiens
ttttgaaactgacca

SEQ ID NO: 418785 - DNA, 15 bp, Homo sapiens
attttgaaactgacc

SEQ ID NO: 418786 - DNA, 15 bp, Homo sapiens
gattttgaaactgac

SEQ ID NO: 418787 - DNA, 15 bp, Homo sapiens
tgattttgaaactga

SEQ ID NO: 418788 - DNA, 15 bp, Homo sapiens
atgattttgaaactg

SEQ ID NO: 418789 - DNA, 15 bp, Homo sapiens
catgattttgaaact

SEQ ID NO: 418790 - DNA, 15 bp, Homo sapiens
gcatgattttgaaac

SEQ ID NO: 418791 - DNA, 15 bp, Homo sapiens
ggcatgattttgaaa

SEQ ID NO: 418792 - DNA, 15 bp, Homo sapiens
tggcatgattttgaa

SEQ ID NO: 418793 - DNA, 15 bp, Homo sapiens
ctggcatgattttga

SEQ ID NO: 418794 - DNA, 15 bp, Homo sapiens
actggcatgattttg

SEQ ID NO: 418795 - DNA, 15 bp, Homo sapiens
aactggcatgatttt

SEQ ID NO: 418796 - DNA, 15 bp, Homo sapiens
taactggcatgattt

SEQ ID NO: 418797 - DNA, 15 bp, Homo sapiens
ttaactggcatgatt

SEQ ID NO: 418798 - DNA, 15 bp, Homo sapiens
tttaactggcatgat

SEQ ID NO: 418799 - DNA, 15 bp, Homo sapiens
ctttaactggcatga

SEQ ID NO: 418800 - DNA, 15 bp, Homo sapiens
actttaactggcatg

SEQ ID NO: 418801 - DNA, 15 bp, Homo sapiens
aactttaactggcat

SEQ ID NO: 418802 - DNA, 15 bp, Homo sapiens
gaactttaactggca

SEQ ID NO: 418803 - DNA, 15 bp, Homo sapiens
agaactttaactggc

SEQ ID NO: 418804 - DNA, 15 bp, Homo sapiens
gagaactttaactgg

SEQ ID NO: 418805 - DNA, 15 bp, Homo sapiens
agagaactttaactg

SEQ ID NO: 418806 - DNA, 15 bp, Homo sapiens
cagagaactttaact

SEQ ID NO: 418807 - DNA, 15 bp, Homo sapiens
acagagaactttaac

SEQ ID NO: 418808 - DNA, 15 bp, Homo sapiens
cacagagaactttaa

SEQ ID NO: 418809 - DNA, 15 bp, Homo sapiens
acacagagaacttta

SEQ ID NO: 418810 - DNA, 15 bp, Homo sapiens
aacacagagaacttt

SEQ ID NO: 418811 - DNA, 15 bp, Homo sapiens
aaacacagagaactt

SEQ ID NO: 418812 - DNA, 15 bp, Homo sapiens
aaaacacagagaact

SEQ ID NO: 418813 - DNA, 15 bp, Homo sapiens
taaaacacagagaac

SEQ ID NO: 418814 - DNA, 15 bp, Homo sapiens
ttaaaacacagagaa

SEQ ID NO: 418815 - DNA, 15 bp, Homo sapiens
attaaaacacagaga

SEQ ID NO: 418816 - DNA, 15 bp, Homo sapiens
aattaaaacacagag

SEQ ID NO: 418817 - DNA, 15 bp, Homo sapiens
aaattaaaacacaga

SEQ ID NO: 418818 - DNA, 15 bp, Homo sapiens
aaaattaaaacacag

SEQ ID NO: 418819 - DNA, 15 bp, Homo sapiens
aaaaattaaaacaca

SEQ ID NO: 418820 - DNA, 15 bp, Homo sapiens
gaaaaattaaaacac

SEQ ID NO: 418821 - DNA, 15 bp, Homo sapiens
agaaaaattaaaaca

SEQ ID NO: 418822 - DNA, 15 bp, Homo sapiens
aagaaaaattaaaac

SEQ ID NO: 418823 - DNA, 15 bp, Homo sapiens
taagaaaaattaaaa

SEQ ID NO: 418824 - DNA, 15 bp, Homo sapiens
ttaagaaaaattaaa

SEQ ID NO: 418825 - DNA, 15 bp, Homo sapiens
tttaagaaaaattaa

SEQ ID NO: 418826 - DNA, 15 bp, Homo sapiens
ctttaagaaaaatta

SEQ ID NO: 418827 - DNA, 15 bp, Homo sapiens
cctttaagaaaaatt

SEQ ID NO: 418828 - DNA, 15 bp, Homo sapiens
gcctttaagaaaaat

SEQ ID NO: 418829 - DNA, 15 bp, Homo sapiens
tgcctttaagaaaaa

SEQ ID NO: 418830 - DNA, 15 bp, Homo sapiens
atgcctttaagaaaa

SEQ ID NO: 418831 - DNA, 15 bp, Homo sapiens
tatgcctttaagaaa

SEQ ID NO: 418832 - DNA, 15 bp, Homo sapiens
atatgcctttaagaa

SEQ ID NO: 418833 - DNA, 15 bp, Homo sapiens
tatatgcctttaaga

SEQ ID NO: 418834 - DNA, 15 bp, Homo sapiens
atatatgcctttaag

SEQ ID NO: 418835 - DNA, 15 bp, Homo sapiens
tatatatgcctttaa

SEQ ID NO: 418836 - DNA, 15 bp, Homo sapiens
ttatatatgccttta

SEQ ID NO: 418837 - DNA, 15 bp, Homo sapiens
tttatatatgccttt

SEQ ID NO: 418838 - DNA, 15 bp, Homo sapiens
ttttatatatgcctt

SEQ ID NO: 418839 - DNA, 15 bp, Homo sapiens
tttttatatatgcct

SEQ ID NO: 418840 - DNA, 15 bp, Homo sapiens
ttttttatatatgcc

SEQ ID NO: 418841 - DNA, 15 bp, Homo sapiens
cttttttatatatgc

SEQ ID NO: 418842 - DNA, 15 bp, Homo sapiens
tcttttttatatatg

SEQ ID NO: 418843 - DNA, 15 bp, Homo sapiens
ttcttttttatatat

SEQ ID NO: 418844 - DNA, 15 bp, Homo sapiens
attcttttttatata

SEQ ID NO: 418845 - DNA, 15 bp, Homo sapiens
gattcttttttatat

SEQ ID NO: 418846 - DNA, 15 bp, Homo sapiens
agattcttttttata

SEQ ID NO: 418847 - DNA, 15 bp, Homo sapiens
gagattcttttttat

SEQ ID NO: 418848 - DNA, 15 bp, Homo sapiens
tgagattctttttta

SEQ ID NO: 418849 - DNA, 15 bp, Homo sapiens
ctgagattctttttt

SEQ ID NO: 418850 - DNA, 15 bp, Homo sapiens
tctgagattcttttt

SEQ ID NO: 418851 - DNA, 15 bp, Homo sapiens
ctctgagattctttt

SEQ ID NO: 418852 - DNA, 15 bp, Homo sapiens
tctctgagattcttt

SEQ ID NO: 418853 - DNA, 15 bp, Homo sapiens
ttctctgagattctt

SEQ ID NO: 418854 - DNA, 15 bp, Homo sapiens
tttctctgagattct

SEQ ID NO: 418855 - DNA, 15 bp, Homo sapiens
ctttctctgagattc

SEQ ID NO: 418856 - DNA, 15 bp, Homo sapiens
cctttctctgagatt

SEQ ID NO: 418857 - DNA, 15 bp, Homo sapiens
tcctttctctgagat

SEQ ID NO: 418858 - DNA, 15 bp, Homo sapiens
ctcctttctctgaga

SEQ ID NO: 418859 - DNA, 15 bp, Homo sapiens
tctcctttctctgag

SEQ ID NO: 418860 - DNA, 15 bp, Homo sapiens
gtctcctttctctga

SEQ ID NO: 418861 - DNA, 15 bp, Homo sapiens
tgtctcctttctctg

SEQ ID NO: 418862 - DNA, 15 bp, Homo sapiens
gtgtctcctttctct

SEQ ID NO: 418863 - DNA, 15 bp, Homo sapiens
tgtgtctcctttctc

SEQ ID NO: 418864 - DNA, 15 bp, Homo sapiens
atgtgtctcctttct

SEQ ID NO: 418865 - DNA, 15 bp, Homo sapiens
aatgtgtctcctttc

SEQ ID NO: 418866 - DNA, 15 bp, Homo sapiens
gaatgtgtctccttt

SEQ ID NO: 418867 - DNA, 15 bp, Homo sapiens
tgaatgtgtctcctt

SEQ ID NO: 418868 - DNA, 15 bp, Homo sapiens
atgaatgtgtctcct

SEQ ID NO: 418869 - DNA, 15 bp, Homo sapiens
agttgatgttggatg

SEQ ID NO: 418870 - DNA, 15 bp, Homo sapiens
cagttgatgttggat

SEQ ID NO: 418871 - DNA, 15 bp, Homo sapiens
tcagttgatgttgga

SEQ ID NO: 418872 - DNA, 15 bp, Homo sapiens
ttcagttgatgttgg

SEQ ID NO: 418873 - DNA, 15 bp, Homo sapiens
attcagttgatgttg

SEQ ID NO: 418874 - DNA, 15 bp, Homo sapiens
cattcagttgatgtt

SEQ ID NO: 418875 - DNA, 15 bp, Homo sapiens
gcattcagttgatgt

SEQ ID NO: 418876 - DNA, 15 bp, Homo sapiens
agcattcagttgatg

SEQ ID NO: 418877 - DNA, 15 bp, Homo sapiens
aagcattcagttgat

SEQ ID NO: 418878 - DNA, 15 bp, Homo sapiens
taagcattcagttga

SEQ ID NO: 418879 - DNA, 15 bp, Homo sapiens
gtaagcattcagttg

SEQ ID NO: 418880 - DNA, 15 bp, Homo sapiens
tgtaagcattcagtt

SEQ ID NO: 418881 - DNA, 15 bp, Homo sapiens
ctgtaagcattcagt

SEQ ID NO: 418882 - DNA, 15 bp, Homo sapiens
actgtaagcattcag

SEQ ID NO: 418883 - DNA, 15 bp, Homo sapiens
cactgtaagcattca

SEQ ID NO: 418884 - DNA, 15 bp, Homo sapiens
tcactgtaagcattc

SEQ ID NO: 418885 - DNA, 15 bp, Homo sapiens
atcactgtaagcatt

SEQ ID NO: 418886 - DNA, 15 bp, Homo sapiens
gatcactgtaagcat

SEQ ID NO: 418887 - DNA, 15 bp, Homo sapiens
agatcactgtaagca

SEQ ID NO: 418888 - DNA, 15 bp, Homo sapiens
aagatcactgtaagc

SEQ ID NO: 418889 - DNA, 15 bp, Homo sapiens
taagatcactgtaag

SEQ ID NO: 418890 - DNA, 15 bp, Homo sapiens
ataagatcactgtaa

SEQ ID NO: 418891 - DNA, 15 bp, Homo sapiens
aataagatcactgta

SEQ ID NO: 418892 - DNA, 15 bp, Homo sapiens
aaataagatcactgt

SEQ ID NO: 418893 - DNA, 15 bp, Homo sapiens
aaaataagatcactg

SEQ ID NO: 418894 - DNA, 15 bp, Homo sapiens
taaaataagatcact

SEQ ID NO: 418895 - DNA, 15 bp, Homo sapiens
gtaaaataagatcac

SEQ ID NO: 418896 - DNA, 15 bp, Homo sapiens
tgtaaaataagatca

SEQ ID NO: 418897 - DNA, 15 bp, Homo sapiens
gtgtaaaataagatc

SEQ ID NO: 418898 - DNA, 15 bp, Homo sapiens
tgtgtaaaataagat

SEQ ID NO: 418899 - DNA, 15 bp, Homo sapiens
atgtgtaaaataaga

SEQ ID NO: 418900 - DNA, 15 bp, Homo sapiens
aatgtgtaaaataag

SEQ ID NO: 418901 - DNA, 15 bp, Homo sapiens
taatgtgtaaaataa

SEQ ID NO: 418902 - DNA, 15 bp, Homo sapiens
ctaatgtgtaaaata

SEQ ID NO: 418903 - DNA, 15 bp, Homo sapiens
tctaatgtgtaaaat

SEQ ID NO: 418904 - DNA, 15 bp, Homo sapiens
ttctaatgtgtaaaa

SEQ ID NO: 418905 - DNA, 15 bp, Homo sapiens
tttctaatgtgtaaa

SEQ ID NO: 418906 - DNA, 15 bp, Homo sapiens
ttttctaatgtgtaa

SEQ ID NO: 418907 - DNA, 15 bp, Homo sapiens
gttttctaatgtgta

SEQ ID NO: 418908 - DNA, 15 bp, Homo sapiens
agttttctaatgtgt

SEQ ID NO: 418909 - DNA, 15 bp, Homo sapiens
tagttttctaatgtg

SEQ ID NO: 418910 - DNA, 15 bp, Homo sapiens
ttagttttctaatgt

SEQ ID NO: 418911 - DNA, 15 bp, Homo sapiens
cttagttttctaatg

SEQ ID NO: 418912 - DNA, 15 bp, Homo sapiens
gcttagttttctaat

SEQ ID NO: 418913 - DNA, 15 bp, Homo sapiens
ggcttagttttctaa

SEQ ID NO: 418914 - DNA, 15 bp, Homo sapiens
gggcttagttttcta

SEQ ID NO: 418915 - DNA, 15 bp, Homo sapiens
ggggcttagttttct

SEQ ID NO: 418916 - DNA, 15 bp, Homo sapiens
tggggcttagttttc

SEQ ID NO: 418917 - DNA, 15 bp, Homo sapiens
ttggggcttagtttt

SEQ ID NO: 418918 - DNA, 15 bp, Homo sapiens
cttggggcttagttt

SEQ ID NO: 418919 - DNA, 15 bp, Homo sapiens
ccttggggcttagtt

SEQ ID NO: 418920 - DNA, 15 bp, Homo sapiens
tccttggggcttagt

SEQ ID NO: 418921 - DNA, 15 bp, Homo sapiens
ttccttggggcttag

SEQ ID NO: 418922 - DNA, 15 bp, Homo sapiens
attccttggggctta

SEQ ID NO: 418923 - DNA, 15 bp, Homo sapiens
gattccttggggctt

SEQ ID NO: 418924 - DNA, 15 bp, Homo sapiens
tgattccttggggct

SEQ ID NO: 418925 - DNA, 15 bp, Homo sapiens
ttgattccttggggc

SEQ ID NO: 418926 - DNA, 15 bp, Homo sapiens
cttgattccttgggg

SEQ ID NO: 418927 - DNA, 15 bp, Homo sapiens
tcttgattccttggg

SEQ ID NO: 418928 - DNA, 15 bp, Homo sapiens
ttcttgattccttgg

SEQ ID NO: 418929 - DNA, 15 bp, Homo sapiens
tttcttgattccttg

SEQ ID NO: 418930 - DNA, 15 bp, Homo sapiens
ttttcttgattcctt

SEQ ID NO: 418931 - DNA, 15 bp, Homo sapiens
cttttcttgattcct

SEQ ID NO: 418932 - DNA, 15 bp, Homo sapiens
gcttttcttgattcc

SEQ ID NO: 418933 - DNA, 15 bp, Homo sapiens
tgcttttcttgattc

SEQ ID NO: 418934 - DNA, 15 bp, Homo sapiens
ttgcttttcttgatt

SEQ ID NO: 418935 - DNA, 15 bp, Homo sapiens
gttgcttttcttgat

SEQ ID NO: 418936 - DNA, 15 bp, Homo sapiens
ggttgcttttcttga

SEQ ID NO: 418937 - DNA, 15 bp, Homo sapiens
tggttgcttttcttg

SEQ ID NO: 418938 - DNA, 15 bp, Homo sapiens
ttggttgcttttctt

SEQ ID NO: 418939 - DNA, 15 bp, Homo sapiens
cttggttgcttttct

SEQ ID NO: 418940 - DNA, 15 bp, Homo sapiens
ccttggttgcttttc

SEQ ID NO: 418941 - DNA, 15 bp, Homo sapiens
accttggttgctttt

SEQ ID NO: 418942 - DNA, 15 bp, Homo sapiens
gaccttggttgcttt

SEQ ID NO: 418943 - DNA, 15 bp, Homo sapiens
tgaccttggttgctt

SEQ ID NO: 418944 - DNA, 15 bp, Homo sapiens
gtgaccttggttgct

SEQ ID NO: 418945 - DNA, 15 bp, Homo sapiens
tgtgaccttggttgc

SEQ ID NO: 418946 - DNA, 15 bp, Homo sapiens
atgtgaccttggttg

SEQ ID NO: 418947 - DNA, 15 bp, Homo sapiens
tatgtgaccttggtt

SEQ ID NO: 418948 - DNA, 15 bp, Homo sapiens
ctatgtgaccttggt

SEQ ID NO: 418949 - DNA, 15 bp, Homo sapiens
gctatgtgaccttgg

SEQ ID NO: 418950 - DNA, 15 bp, Homo sapiens
ggctatgtgaccttg

SEQ ID NO: 418951 - DNA, 15 bp, Homo sapiens
gggctatgtgacctt

SEQ ID NO: 418952 - DNA, 15 bp, Homo sapiens
tgggctatgtgacct

SEQ ID NO: 418953 - DNA, 15 bp, Homo sapiens
ctgggctatgtgacc

SEQ ID NO: 418954 - DNA, 15 bp, Homo sapiens
gctgggctatgtgac

SEQ ID NO: 418955 - DNA, 15 bp, Homo sapiens
agctgggctatgtga

SEQ ID NO: 418956 - DNA, 15 bp, Homo sapiens
tagctgggctatgtg

SEQ ID NO: 418957 - DNA, 15 bp, Homo sapiens
atagctgggctatgt

SEQ ID NO: 418958 - DNA, 15 bp, Homo sapiens
gatagctgggctatg

SEQ ID NO: 418959 - DNA, 15 bp, Homo sapiens
agatagctgggctat

SEQ ID NO: 418960 - DNA, 15 bp, Homo sapiens
tagatagctgggcta

SEQ ID NO: 418961 - DNA, 15 bp, Homo sapiens
ctagatagctgggct

SEQ ID NO: 418962 - DNA, 15 bp, Homo sapiens
actagatagctgggc

SEQ ID NO: 418963 - DNA, 15 bp, Homo sapiens
aactagatagctggg

SEQ ID NO: 418964 - DNA, 15 bp, Homo sapiens
aaactagatagctgg

SEQ ID NO: 418965 - DNA, 15 bp, Homo sapiens
taaactagatagctg

SEQ ID NO: 418966 - DNA, 15 bp, Homo sapiens
ttaaactagatagct

SEQ ID NO: 418967 - DNA, 15 bp, Homo sapiens
tttaaactagatagc

SEQ ID NO: 418968 - DNA, 15 bp, Homo sapiens
ctttaaactagatag

SEQ ID NO: 418969 - DNA, 15 bp, Homo sapiens
cctttaaactagata

SEQ ID NO: 418970 - DNA, 15 bp, Homo sapiens
ccctttaaactagat

SEQ ID NO: 418971 - DNA, 15 bp, Homo sapiens
cccctttaaactaga

SEQ ID NO: 418972 - DNA, 15 bp, Homo sapiens
acccctttaaactag

SEQ ID NO: 418973 - DNA, 15 bp, Homo sapiens
aacccctttaaacta

SEQ ID NO: 418974 - DNA, 15 bp, Homo sapiens
aaacccctttaaact

SEQ ID NO: 418975 - DNA, 15 bp, Homo sapiens
aaaacccctttaaac

SEQ ID NO: 418976 - DNA, 15 bp, Homo sapiens
caaaacccctttaaa

SEQ ID NO: 418977 - DNA, 15 bp, Homo sapiens
gcaaaacccctttaa

SEQ ID NO: 418978 - DNA, 15 bp, Homo sapiens
ggcaaaaccccttta

SEQ ID NO: 418979 - DNA, 15 bp, Homo sapiens
aggcaaaaccccttt

SEQ ID NO: 418980 - DNA, 15 bp, Homo sapiens
aaggcaaaacccctt

SEQ ID NO: 418981 - DNA, 15 bp, Homo sapiens
aaaggcaaaacccct

SEQ ID NO: 418982 - DNA, 15 bp, Homo sapiens
taaaggcaaaacccc

SEQ ID NO: 418983 - DNA, 15 bp, Homo sapiens
ttaaaggcaaaaccc

SEQ ID NO: 418984 - DNA, 15 bp, Homo sapiens
tttaaaggcaaaacc

SEQ ID NO: 418985 - DNA, 15 bp, Homo sapiens
gtttaaaggcaaaac

SEQ ID NO: 418986 - DNA, 15 bp, Homo sapiens
agtttaaaggcaaaa

SEQ ID NO: 418987 - DNA, 15 bp, Homo sapiens
tagtttaaaggcaaa

SEQ ID NO: 418988 - DNA, 15 bp, Homo sapiens
ttagtttaaaggcaa

SEQ ID NO: 418989 - DNA, 15 bp, Homo sapiens
tttagtttaaaggca

SEQ ID NO: 418990 - DNA, 15 bp, Homo sapiens
atttagtttaaaggc

SEQ ID NO: 418991 - DNA, 15 bp, Homo sapiens
catttagtttaaagg

SEQ ID NO: 418992 - DNA, 15 bp, Homo sapiens
ccatttagtttaaag

SEQ ID NO: 418993 - DNA, 15 bp, Homo sapiens
accatttagtttaaa

SEQ ID NO: 418994 - DNA, 15 bp, Homo sapiens
taccatttagtttaa

SEQ ID NO: 418995 - DNA, 15 bp, Homo sapiens
ttaccatttagttta

SEQ ID NO: 418996 - DNA, 15 bp, Homo sapiens
cttaccatttagttt

SEQ ID NO: 418997 - DNA, 15 bp, Homo sapiens
ccttaccatttagtt

SEQ ID NO: 418998 - DNA, 15 bp, Homo sapiens
accttaccatttagt

SEQ ID NO: 418999 - DNA, 15 bp, Homo sapiens
aaccttaccatttag

SEQ ID NO: 419000 - DNA, 15 bp, Homo sapiens
gaaccttaccattta

SEQ ID NO: 419001 - DNA, 15 bp, Homo sapiens
ggaaccttaccattt

SEQ ID NO: 419002 - DNA, 15 bp, Homo sapiens
aggaaccttaccatt

SEQ ID NO: 419003 - DNA, 15 bp, Homo sapiens
caggaaccttaccat

SEQ ID NO: 419004 - DNA, 15 bp, Homo sapiens
acaggaaccttacca

SEQ ID NO: 419005 - DNA, 15 bp, Homo sapiens
aacaggaaccttacc

SEQ ID NO: 419006 - DNA, 15 bp, Homo sapiens
caacaggaaccttac

SEQ ID NO: 419007 - DNA, 15 bp, Homo sapiens
tcaacaggaacctta

SEQ ID NO: 419008 - DNA, 15 bp, Homo sapiens
gtcaacaggaacctt

SEQ ID NO: 419009 - DNA, 15 bp, Homo sapiens
agtcaacaggaacct

SEQ ID NO: 419010 - DNA, 15 bp, Homo sapiens
aagtcaacaggaacc

SEQ ID NO: 419011 - DNA, 15 bp, Homo sapiens
gaagtcaacaggaac

SEQ ID NO: 419012 - DNA, 15 bp, Homo sapiens
ggaagtcaacaggaa

SEQ ID NO: 419013 - DNA, 15 bp, Homo sapiens
aggaagtcaacagga

SEQ ID NO: 419014 - DNA, 15 bp, Homo sapiens
taggaagtcaacagg

SEQ ID NO: 419015 - DNA, 15 bp, Homo sapiens
ttaggaagtcaacag

SEQ ID NO: 419016 - DNA, 15 bp, Homo sapiens
tttaggaagtcaaca

SEQ ID NO: 419017 - DNA, 15 bp, Homo sapiens
atttaggaagtcaac

SEQ ID NO: 419018 - DNA, 15 bp, Homo sapiens
gatttaggaagtcaa

SEQ ID NO: 419019 - DNA, 15 bp, Homo sapiens
ggatttaggaagtca

SEQ ID NO: 419020 - DNA, 15 bp, Homo sapiens
gggatttaggaagtc

SEQ ID NO: 419021 - DNA, 15 bp, Homo sapiens
tgggatttaggaagt

SEQ ID NO: 419022 - DNA, 15 bp, Homo sapiens
ttgggatttaggaag

SEQ ID NO: 419023 - DNA, 15 bp, Homo sapiens
tttgggatttaggaa

SEQ ID NO: 419024 - DNA, 15 bp, Homo sapiens
gtttgggatttagga

SEQ ID NO: 419025 - DNA, 15 bp, Homo sapiens
ggtttgggatttagg

SEQ ID NO: 419026 - DNA, 15 bp, Homo sapiens
tggtttgggatttag

SEQ ID NO: 419027 - DNA, 15 bp, Homo sapiens
ctggtttgggattta

SEQ ID NO: 419028 - DNA, 15 bp, Homo sapiens
gctggtttgggattt

SEQ ID NO: 419029 - DNA, 15 bp, Homo sapiens
agctggtttgggatt

SEQ ID NO: 419030 - DNA, 15 bp, Homo sapiens
aagctggtttgggat

SEQ ID NO: 419031 - DNA, 15 bp, Homo sapiens
caagctggtttggga

SEQ ID NO: 419032 - DNA, 15 bp, Homo sapiens
tcaagctggtttggg

SEQ ID NO: 419033 - DNA, 15 bp, Homo sapiens
atcaagctggtttgg

SEQ ID NO: 419034 - DNA, 15 bp, Homo sapiens
tatcaagctggtttg

SEQ ID NO: 419035 - DNA, 15 bp, Homo sapiens
gtatcaagctggttt

SEQ ID NO: 419036 - DNA, 15 bp, Homo sapiens
agtatcaagctggtt

SEQ ID NO: 419037 - DNA, 15 bp, Homo sapiens
aagtatcaagctggt

SEQ ID NO: 419038 - DNA, 15 bp, Homo sapiens
aaagtatcaagctgg

SEQ ID NO: 419039 - DNA, 15 bp, Homo sapiens
aaaagtatcaagctg

SEQ ID NO: 419040 - DNA, 15 bp, Homo sapiens
aaaaagtatcaagct

SEQ ID NO: 419041 - DNA, 15 bp, Homo sapiens
taaaaagtatcaagc

SEQ ID NO: 419042 - DNA, 15 bp, Homo sapiens
ctaaaaagtatcaag

SEQ ID NO: 419043 - DNA, 15 bp, Homo sapiens
actaaaaagtatcaa

SEQ ID NO: 419044 - DNA, 15 bp, Homo sapiens
aactaaaaagtatca

SEQ ID NO: 419045 - DNA, 15 bp, Homo sapiens
gaactaaaaagtatc

SEQ ID NO: 419046 - DNA, 15 bp, Homo sapiens
agaactaaaaagtat

SEQ ID NO: 419047 - DNA, 15 bp, Homo sapiens
gagaactaaaaagta

SEQ ID NO: 419048 - DNA, 15 bp, Homo sapiens
cgagaactaaaaagt

SEQ ID NO: 419049 - DNA, 15 bp, Homo sapiens
acgagaactaaaaag

SEQ ID NO: 419050 - DNA, 15 bp, Homo sapiens
gacgagaactaaaaa

SEQ ID NO: 419051 - DNA, 15 bp, Homo sapiens
agacgagaactaaaa

SEQ ID NO: 419052 - DNA, 15 bp, Homo sapiens
aagacgagaactaaa

SEQ ID NO: 419053 - DNA, 15 bp, Homo sapiens
taagacgagaactaa

SEQ ID NO: 419054 - DNA, 15 bp, Homo sapiens
gtaagacgagaacta

SEQ ID NO: 419055 - DNA, 15 bp, Homo sapiens
agtaagacgagaact

SEQ ID NO: 419056 - DNA, 15 bp, Homo sapiens
aagtaagacgagaac

SEQ ID NO: 419057 - DNA, 15 bp, Homo sapiens
caagtaagacgagaa

SEQ ID NO: 419058 - DNA, 15 bp, Homo sapiens
tcaagtaagacgaga

SEQ ID NO: 419059 - DNA, 15 bp, Homo sapiens
gtcaagtaagacgag

SEQ ID NO: 419060 - DNA, 15 bp, Homo sapiens
ggtcaagtaagacga

SEQ ID NO: 419061 - DNA, 15 bp, Homo sapiens
gggtcaagtaagacg

SEQ ID NO: 419062 - DNA, 15 bp, Homo sapiens
agggtcaagtaagac

SEQ ID NO: 419063 - DNA, 15 bp, Homo sapiens
gagggtcaagtaaga

SEQ ID NO: 419064 - DNA, 15 bp, Homo sapiens
agagggtcaagtaag

SEQ ID NO: 419065 - DNA, 15 bp, Homo sapiens
gagagggtcaagtaa

SEQ ID NO: 419066 - DNA, 15 bp, Homo sapiens
tgagagggtcaagta

SEQ ID NO: 419067 - DNA, 15 bp, Homo sapiens
ctgagagggtcaagt

SEQ ID NO: 419068 - DNA, 15 bp, Homo sapiens
cctgagagggtcaag

SEQ ID NO: 419069 - DNA, 15 bp, Homo sapiens
ccctgagagggtcaa

SEQ ID NO: 419070 - DNA, 15 bp, Homo sapiens
cccctgagagggtca

SEQ ID NO: 419071 - DNA, 15 bp, Homo sapiens
gcccctgagagggtc

SEQ ID NO: 419072 - DNA, 15 bp, Homo sapiens
tgcccctgagagggt

SEQ ID NO: 419073 - DNA, 15 bp, Homo sapiens
ctgcccctgagaggg

SEQ ID NO: 419074 - DNA, 15 bp, Homo sapiens
tctgcccctgagagg

SEQ ID NO: 419075 - DNA, 15 bp, Homo sapiens
ctctgcccctgagag

SEQ ID NO: 419076 - DNA, 15 bp, Homo sapiens
gctctgcccctgaga

SEQ ID NO: 419077 - DNA, 15 bp, Homo sapiens
tgctctgcccctgag

SEQ ID NO: 419078 - DNA, 15 bp, Homo sapiens
atgctctgcccctga

SEQ ID NO: 419079 - DNA, 15 bp, Homo sapiens
gatgctctgcccctg

SEQ ID NO: 419080 - DNA, 15 bp, Homo sapiens
tgatgctctgcccct

SEQ ID NO: 419081 - DNA, 15 bp, Homo sapiens
ttgatgctctgcccc

SEQ ID NO: 419082 - DNA, 15 bp, Homo sapiens
gttgatgctctgccc

SEQ ID NO: 419083 - DNA, 15 bp, Homo sapiens
tgttgatgctctgcc

SEQ ID NO: 419084 - DNA, 15 bp, Homo sapiens
ctgttgatgctctgc

SEQ ID NO: 419085 - DNA, 15 bp, Homo sapiens
cctgttgatgctctg

SEQ ID NO: 419086 - DNA, 15 bp, Homo sapiens
tcctgttgatgctct

SEQ ID NO: 419087 - DNA, 15 bp, Homo sapiens
ttcctgttgatgctc

SEQ ID NO: 419088 - DNA, 15 bp, Homo sapiens
tttcctgttgatgct

SEQ ID NO: 419089 - DNA, 15 bp, Homo sapiens
ttttcctgttgatgc

SEQ ID NO: 419090 - DNA, 15 bp, Homo sapiens
tttttcctgttgatg

SEQ ID NO: 419091 - DNA, 15 bp, Homo sapiens
ttttttcctgttgat

SEQ ID NO: 419092 - DNA, 15 bp, Homo sapiens
cttttttcctgttga

SEQ ID NO: 419093 - DNA, 15 bp, Homo sapiens
gcttttttcctgttg

SEQ ID NO: 419094 - DNA, 15 bp, Homo sapiens
cgcttttttcctgtt

SEQ ID NO: 419095 - DNA, 15 bp, Homo sapiens
gcgcttttttcctgt

SEQ ID NO: 419096 - DNA, 15 bp, Homo sapiens
tgcgcttttttcctg

SEQ ID NO: 419097 - DNA, 15 bp, Homo sapiens
ctgcgcttttttcct

SEQ ID NO: 419098 - DNA, 15 bp, Homo sapiens
cctgcgcttttttcc

SEQ ID NO: 419099 - DNA, 15 bp, Homo sapiens
tcctgcgcttttttc

SEQ ID NO: 419100 - DNA, 15 bp, Homo sapiens
ctcctgcgctttttt

SEQ ID NO: 419101 - DNA, 15 bp, Homo sapiens
tctcctgcgcttttt

SEQ ID NO: 419102 - DNA, 15 bp, Homo sapiens
ctctcctgcgctttt

SEQ ID NO: 419103 - DNA, 15 bp, Homo sapiens
cctctcctgcgcttt

SEQ ID NO: 419104 - DNA, 15 bp, Homo sapiens
acctctcctgcgctt

SEQ ID NO: 419105 - DNA, 15 bp, Homo sapiens
aacctctcctgcgct

SEQ ID NO: 419106 - DNA, 15 bp, Homo sapiens
taacctctcctgcgc

SEQ ID NO: 419107 - DNA, 15 bp, Homo sapiens
ttaacctctcctgcg

SEQ ID NO: 419108 - DNA, 15 bp, Homo sapiens
cttaacctctcctgc

SEQ ID NO: 419109 - DNA, 15 bp, Homo sapiens
acttaacctctcctg

SEQ ID NO: 419110 - DNA, 15 bp, Homo sapiens
aacttaacctctcct

SEQ ID NO: 419111 - DNA, 15 bp, Homo sapiens
aaacttaacctctcc

SEQ ID NO: 419112 - DNA, 15 bp, Homo sapiens
aaaacttaacctctc

SEQ ID NO: 419113 - DNA, 15 bp, Homo sapiens
aaaaacttaacctct

SEQ ID NO: 419114 - DNA, 15 bp, Homo sapiens
taaaaacttaacctc

SEQ ID NO: 419115 - DNA, 15 bp, Homo sapiens
ttaaaaacttaacct

SEQ ID NO: 419116 - DNA, 15 bp, Homo sapiens
cttaaaaacttaacc

SEQ ID NO: 419117 - DNA, 15 bp, Homo sapiens
tcttaaaaacttaac

SEQ ID NO: 419118 - DNA, 15 bp, Homo sapiens
gtcttaaaaacttaa

SEQ ID NO: 419119 - DNA, 15 bp, Homo sapiens
agtcttaaaaactta

SEQ ID NO: 419120 - DNA, 15 bp, Homo sapiens
tagtcttaaaaactt

SEQ ID NO: 419121 - DNA, 15 bp, Homo sapiens
atagtcttaaaaact

SEQ ID NO: 419122 - DNA, 15 bp, Homo sapiens
catagtcttaaaaac

SEQ ID NO: 419123 - DNA, 15 bp, Homo sapiens
tcatagtcttaaaaa

SEQ ID NO: 419124 - DNA, 15 bp, Homo sapiens
ttcatagtcttaaaa

SEQ ID NO: 419125 - DNA, 15 bp, Homo sapiens
tttcatagtcttaaa

SEQ ID NO: 419126 - DNA, 15 bp, Homo sapiens
atttcatagtcttaa

SEQ ID NO: 419127 - DNA, 15 bp, Homo sapiens
catttcatagtctta

SEQ ID NO: 419128 - DNA, 15 bp, Homo sapiens
gcatttcatagtctt

SEQ ID NO: 419129 - DNA, 15 bp, Homo sapiens
tgcatttcatagtct

SEQ ID NO: 419130 - DNA, 15 bp, Homo sapiens
atgcatttcatagtc

SEQ ID NO: 419131 - DNA, 15 bp, Homo sapiens
tatgcatttcatagt

SEQ ID NO: 419132 - DNA, 15 bp, Homo sapiens
atatgcatttcatag

SEQ ID NO: 419133 - DNA, 15 bp, Homo sapiens
aatatgcatttcata

SEQ ID NO: 419134 - DNA, 15 bp, Homo sapiens
aaatatgcatttcat

SEQ ID NO: 419135 - DNA, 15 bp, Homo sapiens
taaatatgcatttca

SEQ ID NO: 419136 - DNA, 15 bp, Homo sapiens
ataaatatgcatttc

SEQ ID NO: 419137 - DNA, 15 bp, Homo sapiens
tataaatatgcattt

SEQ ID NO: 419138 - DNA, 15 bp, Homo sapiens
atataaatatgcatt

SEQ ID NO: 419139 - DNA, 15 bp, Homo sapiens
aatataaatatgcat

SEQ ID NO: 419140 - DNA, 15 bp, Homo sapiens
aaatataaatatgca

SEQ ID NO: 419141 - DNA, 15 bp, Homo sapiens
aaaatataaatatgc

SEQ ID NO: 419142 - DNA, 15 bp, Homo sapiens
taaaatataaatatg

SEQ ID NO: 419143 - DNA, 15 bp, Homo sapiens
ttaaaatataaatat

SEQ ID NO: 419144 - DNA, 15 bp, Homo sapiens
attaaaatataaata

SEQ ID NO: 419145 - DNA, 15 bp, Homo sapiens
aattaaaatataaat

SEQ ID NO: 419146 - DNA, 15 bp, Homo sapiens
aaattaaaatataaa

SEQ ID NO: 419147 - DNA, 15 bp, Homo sapiens
aaaattaaaatataa

SEQ ID NO: 419148 - DNA, 15 bp, Homo sapiens
aaaaattaaaatata

SEQ ID NO: 419149 - DNA, 15 bp, Homo sapiens
aaaaaattaaaatat

SEQ ID NO: 419150 - DNA, 15 bp, Homo sapiens
caaaaaattaaaata

SEQ ID NO: 419151 - DNA, 15 bp, Homo sapiens
ccaaaaaattaaaat

SEQ ID NO: 419152 - DNA, 15 bp, Homo sapiens
accaaaaaattaaaa

SEQ ID NO: 419153 - DNA, 15 bp, Homo sapiens
aaccaaaaaattaaa

SEQ ID NO: 419154 - DNA, 15 bp, Homo sapiens
caaccaaaaaattaa

SEQ ID NO: 419155 - DNA, 15 bp, Homo sapiens
acaaccaaaaaatta

SEQ ID NO: 419156 - DNA, 15 bp, Homo sapiens
gacaaccaaaaaatt

SEQ ID NO: 419157 - DNA, 15 bp, Homo sapiens
tgacaaccaaaaaat

SEQ ID NO: 419158 - DNA, 15 bp, Homo sapiens
ctgacaaccaaaaaa

SEQ ID NO: 419159 - DNA, 15 bp, Homo sapiens
tctgacaaccaaaaa

SEQ ID NO: 419160 - DNA, 15 bp, Homo sapiens
gtctgacaaccaaaa

SEQ ID NO: 419161 - DNA, 15 bp, Homo sapiens
ggtctgacaaccaaa

SEQ ID NO: 419162 - DNA, 15 bp, Homo sapiens
tggtctgacaaccaa

SEQ ID NO: 419163 - DNA, 15 bp, Homo sapiens
ttggtctgacaacca

SEQ ID NO: 419164 - DNA, 15 bp, Homo sapiens
tttggtctgacaacc

SEQ ID NO: 419165 - DNA, 15 bp, Homo sapiens
ttttggtctgacaac

SEQ ID NO: 419166 - DNA, 15 bp, Homo sapiens
tttttggtctgacaa

SEQ ID NO: 419167 - DNA, 15 bp, Homo sapiens
gtttttggtctgaca

SEQ ID NO: 419168 - DNA, 15 bp, Homo sapiens
agtttttggtctgac

SEQ ID NO: 419169 - DNA, 15 bp, Homo sapiens
cagtttttggtctga

SEQ ID NO: 419170 - DNA, 15 bp, Homo sapiens
acagtttttggtctg

SEQ ID NO: 419171 - DNA, 15 bp, Homo sapiens
aacagtttttggtct

SEQ ID NO: 419172 - DNA, 15 bp, Homo sapiens
aaacagtttttggtc

SEQ ID NO: 419173 - DNA, 15 bp, Homo sapiens
aaaacagtttttggt

SEQ ID NO: 419174 - DNA, 15 bp, Homo sapiens
caaaacagtttttgg

SEQ ID NO: 419175 - DNA, 15 bp, Homo sapiens
acaaaacagtttttg

SEQ ID NO: 419176 - DNA, 15 bp, Homo sapiens
aacaaaacagttttt

SEQ ID NO: 419177 - DNA, 15 bp, Homo sapiens
gaacaaaacagtttt

SEQ ID NO: 419178 - DNA, 15 bp, Homo sapiens
ggaacaaaacagttt

SEQ ID NO: 419179 - DNA, 15 bp, Homo sapiens
tggaacaaaacagtt

SEQ ID NO: 419180 - DNA, 15 bp, Homo sapiens
gtggaacaaaacagt

SEQ ID NO: 419181 - DNA, 15 bp, Homo sapiens
agtggaacaaaacag

SEQ ID NO: 419182 - DNA, 15 bp, Homo sapiens
cagtggaacaaaaca

SEQ ID NO: 419183 - DNA, 15 bp, Homo sapiens
acagtggaacaaaac

SEQ ID NO: 419184 - DNA, 15 bp, Homo sapiens
cacagtggaacaaaa

SEQ ID NO: 419185 - DNA, 15 bp, Homo sapiens
tcacagtggaacaaa

SEQ ID NO: 419186 - DNA, 15 bp, Homo sapiens
gtcacagtggaacaa

SEQ ID NO: 419187 - DNA, 15 bp, Homo sapiens
tgtcacagtggaaca

SEQ ID NO: 419188 - DNA, 15 bp, Homo sapiens
ctgtcacagtggaac

SEQ ID NO: 419189 - DNA, 15 bp, Homo sapiens
cctgtcacagtggaa

SEQ ID NO: 419190 - DNA, 15 bp, Homo sapiens
gcctgtcacagtgga

SEQ ID NO: 419191 - DNA, 15 bp, Homo sapiens
ggcctgtcacagtgg

SEQ ID NO: 419192 - DNA, 15 bp, Homo sapiens
gggcctgtcacagtg

SEQ ID NO: 419193 - DNA, 15 bp, Homo sapiens
tgggcctgtcacagt

SEQ ID NO: 419194 - DNA, 15 bp, Homo sapiens
gtgggcctgtcacag

SEQ ID NO: 419195 - DNA, 15 bp, Homo sapiens
agtgggcctgtcaca

SEQ ID NO: 419196 - DNA, 15 bp, Homo sapiens
cagtgggcctgtcac

SEQ ID NO: 419197 - DNA, 15 bp, Homo sapiens
tcagtgggcctgtca

SEQ ID NO: 419198 - DNA, 15 bp, Homo sapiens
ctcagtgggcctgtc

SEQ ID NO: 419199 - DNA, 15 bp, Homo sapiens
gctcagtgggcctgt

SEQ ID NO: 419200 - DNA, 15 bp, Homo sapiens
agctcagtgggcctg

SEQ ID NO: 419201 - DNA, 15 bp, Homo sapiens
tagctcagtgggcct

SEQ ID NO: 419202 - DNA, 15 bp, Homo sapiens
gtagctcagtgggcc

SEQ ID NO: 419203 - DNA, 15 bp, Homo sapiens
agtagctcagtgggc

SEQ ID NO: 419204 - DNA, 15 bp, Homo sapiens
tagtagctcagtggg

SEQ ID NO: 419205 - DNA, 15 bp, Homo sapiens
ctagtagctcagtgg

SEQ ID NO: 419206 - DNA, 15 bp, Homo sapiens
gctagtagctcagtg

SEQ ID NO: 419207 - DNA, 15 bp, Homo sapiens
tgctagtagctcagt

SEQ ID NO: 419208 - DNA, 15 bp, Homo sapiens
atgctagtagctcag

SEQ ID NO: 419209 - DNA, 15 bp, Homo sapiens
catgctagtagctca

SEQ ID NO: 419210 - DNA, 15 bp, Homo sapiens
acatgctagtagctc

SEQ ID NO: 419211 - DNA, 15 bp, Homo sapiens
gacatgctagtagct

SEQ ID NO: 419212 - DNA, 15 bp, Homo sapiens
ggacatgctagtagc

SEQ ID NO: 419213 - DNA, 15 bp, Homo sapiens
tggacatgctagtag

SEQ ID NO: 419214 - DNA, 15 bp, Homo sapiens
ttggacatgctagta

SEQ ID NO: 419215 - DNA, 15 bp, Homo sapiens
cttggacatgctagt

SEQ ID NO: 419216 - DNA, 15 bp, Homo sapiens
tcttggacatgctag

SEQ ID NO: 419217 - DNA, 15 bp, Homo sapiens
ttcttggacatgcta

SEQ ID NO: 419218 - DNA, 15 bp, Homo sapiens
cttcttggacatgct

SEQ ID NO: 419219 - DNA, 15 bp, Homo sapiens
acttcttggacatgc

SEQ ID NO: 419220 - DNA, 15 bp, Homo sapiens
cacttcttggacatg

SEQ ID NO: 419221 - DNA, 15 bp, Homo sapiens
gcacttcttggacat

SEQ ID NO: 419222 - DNA, 15 bp, Homo sapiens
agcacttcttggaca

SEQ ID NO: 419223 - DNA, 15 bp, Homo sapiens
aagcacttcttggac

SEQ ID NO: 419224 - DNA, 15 bp, Homo sapiens
aaagcacttcttgga

SEQ ID NO: 419225 - DNA, 15 bp, Homo sapiens
aaaagcacttcttgg

SEQ ID NO: 419226 - DNA, 15 bp, Homo sapiens
taaaagcacttcttg

SEQ ID NO: 419227 - DNA, 15 bp, Homo sapiens
ttaaaagcacttctt

SEQ ID NO: 419228 - DNA, 15 bp, Homo sapiens
tttaaaagcacttct

SEQ ID NO: 419229 - DNA, 15 bp, Homo sapiens
ttttaaaagcacttc

SEQ ID NO: 419230 - DNA, 15 bp, Homo sapiens
attttaaaagcactt

SEQ ID NO: 419231 - DNA, 15 bp, Homo sapiens
gattttaaaagcact

SEQ ID NO: 419232 - DNA, 15 bp, Homo sapiens
agattttaaaagcac

SEQ ID NO: 419233 - DNA, 15 bp, Homo sapiens
tagattttaaaagca

SEQ ID NO: 419234 - DNA, 15 bp, Homo sapiens
ttagattttaaaagc

SEQ ID NO: 419235 - DNA, 15 bp, Homo sapiens
tttagattttaaaag

SEQ ID NO: 419236 - DNA, 15 bp, Homo sapiens
atttagattttaaaa

SEQ ID NO: 419237 - DNA, 15 bp, Homo sapiens
aatttagattttaaa

SEQ ID NO: 419238 - DNA, 15 bp, Homo sapiens
aaatttagattttaa

SEQ ID NO: 419239 - DNA, 15 bp, Homo sapiens
caaatttagatttta

SEQ ID NO: 419240 - DNA, 15 bp, Homo sapiens
acaaatttagatttt

SEQ ID NO: 419241 - DNA, 15 bp, Homo sapiens
aacaaatttagattt

SEQ ID NO: 419242 - DNA, 15 bp, Homo sapiens
aaacaaatttagatt

SEQ ID NO: 419243 - DNA, 15 bp, Homo sapiens
taaacaaatttagat

SEQ ID NO: 419244 - DNA, 15 bp, Homo sapiens
ataaacaaatttaga

SEQ ID NO: 419245 - DNA, 15 bp, Homo sapiens
cataaacaaatttag

SEQ ID NO: 419246 - DNA, 15 bp, Homo sapiens
tcataaacaaattta

SEQ ID NO: 419247 - DNA, 15 bp, Homo sapiens
ctcataaacaaattt

SEQ ID NO: 419248 - DNA, 15 bp, Homo sapiens
tctcataaacaaatt

SEQ ID NO: 419249 - DNA, 15 bp, Homo sapiens
ctctcataaacaaat

SEQ ID NO: 419250 - DNA, 15 bp, Homo sapiens
gctctcataaacaaa

SEQ ID NO: 419251 - DNA, 15 bp, Homo sapiens
agctctcataaacaa

SEQ ID NO: 419252 - DNA, 15 bp, Homo sapiens
aagctctcataaaca

SEQ ID NO: 419253 - DNA, 15 bp, Homo sapiens
aaagctctcataaac

SEQ ID NO: 419254 - DNA, 15 bp, Homo sapiens
caaagctctcataaa

SEQ ID NO: 419255 - DNA, 15 bp, Homo sapiens
gcaaagctctcataa

SEQ ID NO: 419256 - DNA, 15 bp, Homo sapiens
agcaaagctctcata

SEQ ID NO: 419257 - DNA, 15 bp, Homo sapiens
cagcaaagctctcat

SEQ ID NO: 419258 - DNA, 15 bp, Homo sapiens
acagcaaagctctca

SEQ ID NO: 419259 - DNA, 15 bp, Homo sapiens
aacagcaaagctctc

SEQ ID NO: 419260 - DNA, 15 bp, Homo sapiens
aaacagcaaagctct

SEQ ID NO: 419261 - DNA, 15 bp, Homo sapiens
taaacagcaaagctc

SEQ ID NO: 419262 - DNA, 15 bp, Homo sapiens
gtaaacagcaaagct

SEQ ID NO: 419263 - DNA, 15 bp, Homo sapiens
tgtaaacagcaaagc

SEQ ID NO: 419264 - DNA, 15 bp, Homo sapiens
atgtaaacagcaaag

SEQ ID NO: 419265 - DNA, 15 bp, Homo sapiens
aatgtaaacagcaaa

SEQ ID NO: 419266 - DNA, 15 bp, Homo sapiens
caatgtaaacagcaa

SEQ ID NO: 419267 - DNA, 15 bp, Homo sapiens
acaatgtaaacagca

SEQ ID NO: 419268 - DNA, 15 bp, Homo sapiens
tacaatgtaaacagc

SEQ ID NO: 419269 - DNA, 15 bp, Homo sapiens
ctacaatgtaaacag

SEQ ID NO: 419270 - DNA, 15 bp, Homo sapiens
cctacaatgtaaaca

SEQ ID NO: 419271 - DNA, 15 bp, Homo sapiens
acctacaatgtaaac

SEQ ID NO: 419272 - DNA, 15 bp, Homo sapiens
tacctacaatgtaaa

SEQ ID NO: 419273 - DNA, 15 bp, Homo sapiens
atacctacaatgtaa

SEQ ID NO: 419274 - DNA, 15 bp, Homo sapiens
catacctacaatgta

SEQ ID NO: 419275 - DNA, 15 bp, Homo sapiens
gcatacctacaatgt

SEQ ID NO: 419276 - DNA, 15 bp, Homo sapiens
tgcatacctacaatg

SEQ ID NO: 419277 - DNA, 15 bp, Homo sapiens
gtgcatacctacaat

SEQ ID NO: 419278 - DNA, 15 bp, Homo sapiens
ggtgcatacctacaa

SEQ ID NO: 419279 - DNA, 15 bp, Homo sapiens
tggtgcatacctaca

SEQ ID NO: 419280 - DNA, 15 bp, Homo sapiens
ctggtgcatacctac

SEQ ID NO: 419281 - DNA, 15 bp, Homo sapiens
cctggtgcataccta

SEQ ID NO: 419282 - DNA, 15 bp, Homo sapiens
ccctggtgcatacct

SEQ ID NO: 419283 - DNA, 15 bp, Homo sapiens
tccctggtgcatacc

SEQ ID NO: 419284 - DNA, 15 bp, Homo sapiens
ttccctggtgcatac

SEQ ID NO: 419285 - DNA, 15 bp, Homo sapiens
tttccctggtgcata

SEQ ID NO: 419286 - DNA, 15 bp, Homo sapiens
ttttccctggtgcat

SEQ ID NO: 419287 - DNA, 15 bp, Homo sapiens
cttttccctggtgca

SEQ ID NO: 419288 - DNA, 15 bp, Homo sapiens
tcttttccctggtgc

SEQ ID NO: 419289 - DNA, 15 bp, Homo sapiens
ttcttttccctggtg

SEQ ID NO: 419290 - DNA, 15 bp, Homo sapiens
attcttttccctggt

SEQ ID NO: 419291 - DNA, 15 bp, Homo sapiens
aattcttttccctgg

SEQ ID NO: 419292 - DNA, 15 bp, Homo sapiens
gaattcttttccctg

SEQ ID NO: 419293 - DNA, 15 bp, Homo sapiens
tgaattcttttccct

SEQ ID NO: 419294 - DNA, 15 bp, Homo sapiens
ttgaattcttttccc

SEQ ID NO: 419295 - DNA, 15 bp, Homo sapiens
tttgaattcttttcc

SEQ ID NO: 419296 - DNA, 15 bp, Homo sapiens
ctttgaattcttttc

SEQ ID NO: 419297 - DNA, 15 bp, Homo sapiens
actttgaattctttt

SEQ ID NO: 419298 - DNA, 15 bp, Homo sapiens
cactttgaattcttt

SEQ ID NO: 419299 - DNA, 15 bp, Homo sapiens
tcactttgaattctt

SEQ ID NO: 419300 - DNA, 15 bp, Homo sapiens
gtcactttgaattct

SEQ ID NO: 419301 - DNA, 15 bp, Homo sapiens
tgtcactttgaattc

SEQ ID NO: 419302 - DNA, 15 bp, Homo sapiens
gtgtcactttgaatt

SEQ ID NO: 419303 - DNA, 15 bp, Homo sapiens
ggtgtcactttgaat

SEQ ID NO: 419304 - DNA, 15 bp, Homo sapiens
tggtgtcactttgaa

SEQ ID NO: 419305 - DNA, 15 bp, Homo sapiens
ttggtgtcactttga

SEQ ID NO: 419306 - DNA, 15 bp, Homo sapiens
tttggtgtcactttg

SEQ ID NO: 419307 - DNA, 15 bp, Homo sapiens
atttggtgtcacttt

SEQ ID NO: 419308 - DNA, 15 bp, Homo sapiens
tatttggtgtcactt

SEQ ID NO: 419309 - DNA, 15 bp, Homo sapiens
atatttggtgtcact

SEQ ID NO: 419310 - DNA, 15 bp, Homo sapiens
catatttggtgtcac

SEQ ID NO: 419311 - DNA, 15 bp, Homo sapiens
acatatttggtgtca

SEQ ID NO: 419312 - DNA, 15 bp, Homo sapiens
cacatatttggtgtc

SEQ ID NO: 419313 - DNA, 15 bp, Homo sapiens
gcacatatttggtgt

SEQ ID NO: 419314 - DNA, 15 bp, Homo sapiens
cgcacatatttggtg

SEQ ID NO: 419315 - DNA, 15 bp, Homo sapiens
gcgcacatatttggt

SEQ ID NO: 419316 - DNA, 15 bp, Homo sapiens
tgcgcacatatttgg

SEQ ID NO: 419317 - DNA, 15 bp, Homo sapiens
atgcgcacatatttg

SEQ ID NO: 419318 - DNA, 15 bp, Homo sapiens
aatgcgcacatattt

SEQ ID NO: 419319 - DNA, 15 bp, Homo sapiens
taatgcgcacatatt

SEQ ID NO: 419320 - DNA, 15 bp, Homo sapiens
ttaatgcgcacatat

SEQ ID NO: 419321 - DNA, 15 bp, Homo sapiens
tttaatgcgcacata

SEQ ID NO: 419322 - DNA, 15 bp, Homo sapiens
atttaatgcgcacat

SEQ ID NO: 419323 - DNA, 15 bp, Homo sapiens
tatttaatgcgcaca

SEQ ID NO: 419324 - DNA, 15 bp, Homo sapiens
ttatttaatgcgcac

SEQ ID NO: 419325 - DNA, 15 bp, Homo sapiens
gttatttaatgcgca

SEQ ID NO: 419326 - DNA, 15 bp, Homo sapiens
tgttatttaatgcgc

SEQ ID NO: 419327 - DNA, 15 bp, Homo sapiens
gtgttatttaatgcg

SEQ ID NO: 419328 - DNA, 15 bp, Homo sapiens
ggtgttatttaatgc

SEQ ID NO: 419329 - DNA, 15 bp, Homo sapiens
tggtgttatttaatg

SEQ ID NO: 419330 - DNA, 15 bp, Homo sapiens
atggtgttatttaat

SEQ ID NO: 419331 - DNA, 15 bp, Homo sapiens
gatggtgttatttaa

SEQ ID NO: 419332 - DNA, 15 bp, Homo sapiens
agatggtgttattta

SEQ ID NO: 419333 - DNA, 15 bp, Homo sapiens
cagatggtgttattt

SEQ ID NO: 419334 - DNA, 15 bp, Homo sapiens
gcagatggtgttatt

SEQ ID NO: 419335 - DNA, 15 bp, Homo sapiens
ggcagatggtgttat

SEQ ID NO: 419336 - DNA, 15 bp, Homo sapiens
gggcagatggtgtta

SEQ ID NO: 419337 - DNA, 15 bp, Homo sapiens
tgggcagatggtgtt

SEQ ID NO: 419338 - DNA, 15 bp, Homo sapiens
atgggcagatggtgt

SEQ ID NO: 419339 - DNA, 15 bp, Homo sapiens
aatgggcagatggtg

SEQ ID NO: 419340 - DNA, 15 bp, Homo sapiens
aaatgggcagatggt

SEQ ID NO: 419341 - DNA, 15 bp, Homo sapiens
caaatgggcagatgg

SEQ ID NO: 419342 - DNA, 15 bp, Homo sapiens
ccaaatgggcagatg

SEQ ID NO: 419343 - DNA, 15 bp, Homo sapiens
tccaaatgggcagat

SEQ ID NO: 419344 - DNA, 15 bp, Homo sapiens
atccaaatgggcaga

SEQ ID NO: 419345 - DNA, 15 bp, Homo sapiens
gatccaaatgggcag

SEQ ID NO: 419346 - DNA, 15 bp, Homo sapiens
agatccaaatgggca

SEQ ID NO: 419347 - DNA, 15 bp, Homo sapiens
cagatccaaatgggc

SEQ ID NO: 419348 - DNA, 15 bp, Homo sapiens
acagatccaaatggg

SEQ ID NO: 419349 - DNA, 15 bp, Homo sapiens
cacagatccaaatgg

SEQ ID NO: 419350 - DNA, 15 bp, Homo sapiens
gcacagatccaaatg

SEQ ID NO: 419351 - DNA, 15 bp, Homo sapiens
tgcacagatccaaat

SEQ ID NO: 419352 - DNA, 15 bp, Homo sapiens
ctgcacagatccaaa

SEQ ID NO: 419353 - DNA, 15 bp, Homo sapiens
gctgcacagatccaa

SEQ ID NO: 419354 - DNA, 15 bp, Homo sapiens
agctgcacagatcca

SEQ ID NO: 419355 - DNA, 15 bp, Homo sapiens
gagctgcacagatcc

SEQ ID NO: 419356 - DNA, 15 bp, Homo sapiens
agagctgcacagatc

SEQ ID NO: 419357 - DNA, 15 bp, Homo sapiens
aagagctgcacagat

SEQ ID NO: 419358 - DNA, 15 bp, Homo sapiens
aaagagctgcacaga

SEQ ID NO: 419359 - DNA, 15 bp, Homo sapiens
aaaagagctgcacag

SEQ ID NO: 419360 - DNA, 15 bp, Homo sapiens
taaaagagctgcaca

SEQ ID NO: 419361 - DNA, 15 bp, Homo sapiens
ttaaaagagctgcac

SEQ ID NO: 419362 - DNA, 15 bp, Homo sapiens
tttaaaagagctgca

SEQ ID NO: 419363 - DNA, 15 bp, Homo sapiens
ttttaaaagagctgc

SEQ ID NO: 419364 - DNA, 15 bp, Homo sapiens
attttaaaagagctg

SEQ ID NO: 419365 - DNA, 15 bp, Homo sapiens
tattttaaaagagct

SEQ ID NO: 419366 - DNA, 15 bp, Homo sapiens
gtattttaaaagagc

SEQ ID NO: 419367 - DNA, 15 bp, Homo sapiens
agtattttaaaagag

SEQ ID NO: 419368 - DNA, 15 bp, Homo sapiens
cagtattttaaaaga

SEQ ID NO: 419369 - DNA, 15 bp, Homo sapiens
acagtattttaaaag

SEQ ID NO: 419370 - DNA, 15 bp, Homo sapiens
cacagtattttaaaa

SEQ ID NO: 419371 - DNA, 15 bp, Homo sapiens
tcacagtattttaaa

SEQ ID NO: 419372 - DNA, 15 bp, Homo sapiens
ctcacagtattttaa

SEQ ID NO: 419373 - DNA, 15 bp, Homo sapiens
cctcacagtatttta

SEQ ID NO: 419374 - DNA, 15 bp, Homo sapiens
acctcacagtatttt

SEQ ID NO: 419375 - DNA, 15 bp, Homo sapiens
cacctcacagtattt

SEQ ID NO: 419376 - DNA, 15 bp, Homo sapiens
gcacctcacagtatt

SEQ ID NO: 419377 - DNA, 15 bp, Homo sapiens
agcacctcacagtat

SEQ ID NO: 419378 - DNA, 15 bp, Homo sapiens
gagcacctcacagta

SEQ ID NO: 419379 - DNA, 15 bp, Homo sapiens
cgagcacctcacagt

SEQ ID NO: 419380 - DNA, 15 bp, Homo sapiens
gcgagcacctcacag

SEQ ID NO: 419381 - DNA, 15 bp, Homo sapiens
ggcgagcacctcaca

SEQ ID NO: 419382 - DNA, 15 bp, Homo sapiens
gggcgagcacctcac

SEQ ID NO: 419383 - DNA, 15 bp, Homo sapiens
tgggcgagcacctca

SEQ ID NO: 419384 - DNA, 15 bp, Homo sapiens
ttgggcgagcacctc

SEQ ID NO: 419385 - DNA, 15 bp, Homo sapiens
tttgggcgagcacct

SEQ ID NO: 419386 - DNA, 15 bp, Homo sapiens
ctttgggcgagcacc

SEQ ID NO: 419387 - DNA, 15 bp, Homo sapiens
gctttgggcgagcac

SEQ ID NO: 419388 - DNA, 15 bp, Homo sapiens
ggctttgggcgagca

SEQ ID NO: 419389 - DNA, 15 bp, Homo sapiens
aggctttgggcgagc

SEQ ID NO: 419390 - DNA, 15 bp, Homo sapiens
caggctttgggcgag

SEQ ID NO: 419391 - DNA, 15 bp, Homo sapiens
tcaggctttgggcga

SEQ ID NO: 419392 - DNA, 15 bp, Homo sapiens
gtcaggctttgggcg

SEQ ID NO: 419393 - DNA, 15 bp, Homo sapiens
tgtcaggctttgggc

SEQ ID NO: 419394 - DNA, 15 bp, Homo sapiens
atgtcaggctttggg

SEQ ID NO: 419395 - DNA, 15 bp, Homo sapiens
tatgtcaggctttgg

SEQ ID NO: 419396 - DNA, 15 bp, Homo sapiens
atatgtcaggctttg

SEQ ID NO: 419397 - DNA, 15 bp, Homo sapiens
aatatgtcaggcttt

SEQ ID NO: 419398 - DNA, 15 bp, Homo sapiens
aaatatgtcaggctt

SEQ ID NO: 419399 - DNA, 15 bp, Homo sapiens
gaaatatgtcaggct

SEQ ID NO: 419400 - DNA, 15 bp, Homo sapiens
tgaaatatgtcaggc

SEQ ID NO: 419401 - DNA, 15 bp, Homo sapiens
ctgaaatatgtcagg

SEQ ID NO: 419402 - DNA, 15 bp, Homo sapiens
cctgaaatatgtcag

SEQ ID NO: 419403 - DNA, 15 bp, Homo sapiens
tcctgaaatatgtca

SEQ ID NO: 419404 - DNA, 15 bp, Homo sapiens
atcctgaaatatgtc

SEQ ID NO: 419405 - DNA, 15 bp, Homo sapiens
tatcctgaaatatgt

SEQ ID NO: 419406 - DNA, 15 bp, Homo sapiens
ttatcctgaaatatg

SEQ ID NO: 419407 - DNA, 15 bp, Homo sapiens
cttatcctgaaatat

SEQ ID NO: 419408 - DNA, 15 bp, Homo sapiens
ccttatcctgaaata

SEQ ID NO: 419409 - DNA, 15 bp, Homo sapiens
cccttatcctgaaat

SEQ ID NO: 419410 - DNA, 15 bp, Homo sapiens
tcccttatcctgaaa

SEQ ID NO: 419411 - DNA, 15 bp, Homo sapiens
ttcccttatcctgaa

SEQ ID NO: 419412 - DNA, 15 bp, Homo sapiens
tttcccttatcctga

SEQ ID NO: 419413 - DNA, 15 bp, Homo sapiens
ctttcccttatcctg

SEQ ID NO: 419414 - DNA, 15 bp, Homo sapiens
tctttcccttatcct

SEQ ID NO: 419415 - DNA, 15 bp, Homo sapiens
atctttcccttatcc

SEQ ID NO: 419416 - DNA, 15 bp, Homo sapiens
aatctttcccttatc

SEQ ID NO: 419417 - DNA, 15 bp, Homo sapiens
aaatctttcccttat

SEQ ID NO: 419418 - DNA, 15 bp, Homo sapiens
aaaatctttccctta

SEQ ID NO: 419419 - DNA, 15 bp, Homo sapiens
aaaaatctttccctt

SEQ ID NO: 419420 - DNA, 15 bp, Homo sapiens
taaaaatctttccct

SEQ ID NO: 419421 - DNA, 15 bp, Homo sapiens
ataaaaatctttccc

SEQ ID NO: 419422 - DNA, 15 bp, Homo sapiens
cataaaaatctttcc

SEQ ID NO: 419423 - DNA, 15 bp, Homo sapiens
acataaaaatctttc

SEQ ID NO: 419424 - DNA, 15 bp, Homo sapiens
aacataaaaatcttt

SEQ ID NO: 419425 - DNA, 15 bp, Homo sapiens
taacataaaaatctt

SEQ ID NO: 419426 - DNA, 15 bp, Homo sapiens
ttaacataaaaatct

SEQ ID NO: 419427 - DNA, 15 bp, Homo sapiens
cttaacataaaaatc

SEQ ID NO: 419428 - DNA, 15 bp, Homo sapiens
tcttaacataaaaat

SEQ ID NO: 419429 - DNA, 15 bp, Homo sapiens
gtcttaacataaaaa

SEQ ID NO: 419430 - DNA, 15 bp, Homo sapiens
ggtcttaacataaaa

SEQ ID NO: 419431 - DNA, 15 bp, Homo sapiens
gggtcttaacataaa

SEQ ID NO: 419432 - DNA, 15 bp, Homo sapiens
agggtcttaacataa

SEQ ID NO: 419433 - DNA, 15 bp, Homo sapiens
tagggtcttaacata

SEQ ID NO: 419434 - DNA, 15 bp, Homo sapiens
gtagggtcttaacat

SEQ ID NO: 419435 - DNA, 15 bp, Homo sapiens
tgtagggtcttaaca

SEQ ID NO: 419436 - DNA, 15 bp, Homo sapiens
atgtagggtcttaac

SEQ ID NO: 419437 - DNA, 15 bp, Homo sapiens
catgtagggtcttaa

SEQ ID NO: 419438 - DNA, 15 bp, Homo sapiens
tcatgtagggtctta

SEQ ID NO: 419439 - DNA, 15 bp, Homo sapiens
ttcatgtagggtctt

SEQ ID NO: 419440 - DNA, 15 bp, Homo sapiens
cttcatgtagggtct

SEQ ID NO: 419441 - DNA, 15 bp, Homo sapiens
tcttcatgtagggtc

SEQ ID NO: 419442 - DNA, 15 bp, Homo sapiens
gtcttcatgtagggt

SEQ ID NO: 419443 - DNA, 15 bp, Homo sapiens
tgtcttcatgtaggg

SEQ ID NO: 419444 - DNA, 15 bp, Homo sapiens
gtgtcttcatgtagg

SEQ ID NO: 419445 - DNA, 15 bp, Homo sapiens
agtgtcttcatgtag

SEQ ID NO: 419446 - DNA, 15 bp, Homo sapiens
cagtgtcttcatgta

SEQ ID NO: 419447 - DNA, 15 bp, Homo sapiens
acagtgtcttcatgt

SEQ ID NO: 419448 - DNA, 15 bp, Homo sapiens
aacagtgtcttcatg

SEQ ID NO: 419449 - DNA, 15 bp, Homo sapiens
aaacagtgtcttcat

SEQ ID NO: 419450 - DNA, 15 bp, Homo sapiens
caaacagtgtcttca

SEQ ID NO: 419451 - DNA, 15 bp, Homo sapiens
tcaaacagtgtcttc

SEQ ID NO: 419452 - DNA, 15 bp, Homo sapiens
ttcaaacagtgtctt

SEQ ID NO: 419453 - DNA, 15 bp, Homo sapiens
cttcaaacagtgtct

SEQ ID NO: 419454 - DNA, 15 bp, Homo sapiens
acttcaaacagtgtc

SEQ ID NO: 419455 - DNA, 15 bp, Homo sapiens
aacttcaaacagtgt

SEQ ID NO: 419456 - DNA, 15 bp, Homo sapiens
aaacttcaaacagtg

SEQ ID NO: 419457 - DNA, 15 bp, Homo sapiens
gaaacttcaaacagt

SEQ ID NO: 419458 - DNA, 15 bp, Homo sapiens
tgaaacttcaaacag

SEQ ID NO: 419459 - DNA, 15 bp, Homo sapiens
ctgaaacttcaaaca

SEQ ID NO: 419460 - DNA, 15 bp, Homo sapiens
tctgaaacttcaaac

SEQ ID NO: 419461 - DNA, 15 bp, Homo sapiens
ttctgaaacttcaaa

SEQ ID NO: 419462 - DNA, 15 bp, Homo sapiens
cttctgaaacttcaa

SEQ ID NO: 419463 - DNA, 15 bp, Homo sapiens
ccttctgaaacttca

SEQ ID NO: 419464 - DNA, 15 bp, Homo sapiens
gccttctgaaacttc

SEQ ID NO: 419465 - DNA, 15 bp, Homo sapiens
agccttctgaaactt

SEQ ID NO: 419466 - DNA, 15 bp, Homo sapiens
aagccttctgaaact

SEQ ID NO: 419467 - DNA, 15 bp, Homo sapiens
aaagccttctgaaac

SEQ ID NO: 419468 - DNA, 15 bp, Homo sapiens
caaagccttctgaaa

SEQ ID NO: 419469 - DNA, 15 bp, Homo sapiens
tcaaagccttctgaa

SEQ ID NO: 419470 - DNA, 15 bp, Homo sapiens
ctcaaagccttctga

SEQ ID NO: 419471 - DNA, 15 bp, Homo sapiens
actcaaagccttctg

SEQ ID NO: 419472 - DNA, 15 bp, Homo sapiens
aactcaaagccttct

SEQ ID NO: 419473 - DNA, 15 bp, Homo sapiens
gaactcaaagccttc

SEQ ID NO: 419474 - DNA, 15 bp, Homo sapiens
agaactcaaagcctt

SEQ ID NO: 419475 - DNA, 15 bp, Homo sapiens
aagaactcaaagcct

SEQ ID NO: 419476 - DNA, 15 bp, Homo sapiens
gaagaactcaaagcc

SEQ ID NO: 419477 - DNA, 15 bp, Homo sapiens
ggaagaactcaaagc

SEQ ID NO: 419478 - DNA, 15 bp, Homo sapiens
gggaagaactcaaag

SEQ ID NO: 419479 - DNA, 15 bp, Homo sapiens
agggaagaactcaaa

SEQ ID NO: 419480 - DNA, 15 bp, Homo sapiens
aagggaagaactcaa

SEQ ID NO: 419481 - DNA, 15 bp, Homo sapiens
gaagggaagaactca

SEQ ID NO: 419482 - DNA, 15 bp, Homo sapiens
agaagggaagaactc

SEQ ID NO: 419483 - DNA, 15 bp, Homo sapiens
aagaagggaagaact

SEQ ID NO: 419484 - DNA, 15 bp, Homo sapiens
aaagaagggaagaac

SEQ ID NO: 419485 - DNA, 15 bp, Homo sapiens
gaaagaagggaagaa

SEQ ID NO: 419486 - DNA, 15 bp, Homo sapiens
agaaagaagggaaga

SEQ ID NO: 419487 - DNA, 15 bp, Homo sapiens
aagaaagaagggaag

SEQ ID NO: 419488 - DNA, 15 bp, Homo sapiens
aaagaaagaagggaa

SEQ ID NO: 419489 - DNA, 15 bp, Homo sapiens
gaaagaaagaaggga

SEQ ID NO: 419490 - DNA, 15 bp, Homo sapiens
ggaaagaaagaaggg

SEQ ID NO: 419491 - DNA, 15 bp, Homo sapiens
aggaaagaaagaagg

SEQ ID NO: 419492 - DNA, 15 bp, Homo sapiens
taggaaagaaagaag

SEQ ID NO: 419493 - DNA, 15 bp, Homo sapiens
ctaggaaagaaagaa

SEQ ID NO: 419494 - DNA, 15 bp, Homo sapiens
actaggaaagaaaga

SEQ ID NO: 419495 - DNA, 15 bp, Homo sapiens
aactaggaaagaaag

SEQ ID NO: 419496 - DNA, 15 bp, Homo sapiens
caactaggaaagaaa

SEQ ID NO: 419497 - DNA, 15 bp, Homo sapiens
acaactaggaaagaa

SEQ ID NO: 419498 - DNA, 15 bp, Homo sapiens
aacaactaggaaaga

SEQ ID NO: 419499 - DNA, 15 bp, Homo sapiens
gaacaactaggaaag

SEQ ID NO: 419500 - DNA, 15 bp, Homo sapiens
tgaacaactaggaaa

SEQ ID NO: 419501 - DNA, 15 bp, Homo sapiens
atgaacaactaggaa

SEQ ID NO: 419502 - DNA, 15 bp, Homo sapiens
aatgaacaactagga

SEQ ID NO: 419503 - DNA, 15 bp, Homo sapiens
gaatgaacaactagg

SEQ ID NO: 419504 - DNA, 15 bp, Homo sapiens
tgaatgaacaactag

SEQ ID NO: 419505 - DNA, 15 bp, Homo sapiens
ttgaatgaacaacta

SEQ ID NO: 419506 - DNA, 15 bp, Homo sapiens
attgaatgaacaact

SEQ ID NO: 419507 - DNA, 15 bp, Homo sapiens
tattgaatgaacaac

SEQ ID NO: 419508 - DNA, 15 bp, Homo sapiens
atattgaatgaacaa

SEQ ID NO: 419509 - DNA, 15 bp, Homo sapiens
aatattgaatgaaca

SEQ ID NO: 419510 - DNA, 15 bp, Homo sapiens
aaatattgaatgaac

SEQ ID NO: 419511 - DNA, 15 bp, Homo sapiens
taaatattgaatgaa

SEQ ID NO: 419512 - DNA, 15 bp, Homo sapiens
ataaatattgaatga

SEQ ID NO: 419513 - DNA, 15 bp, Homo sapiens
aataaatattgaatg

SEQ ID NO: 419514 - DNA, 15 bp, Homo sapiens
taataaatattgaat

SEQ ID NO: 419515 - DNA, 15 bp, Homo sapiens
ctaataaatattgaa

SEQ ID NO: 419516 - DNA, 15 bp, Homo sapiens
tctaataaatattga

SEQ ID NO: 419517 - DNA, 15 bp, Homo sapiens
ttctaataaatattg

SEQ ID NO: 419518 - DNA, 15 bp, Homo sapiens
cttctaataaatatt

SEQ ID NO: 419519 - DNA, 15 bp, Homo sapiens
ccttctaataaatat

SEQ ID NO: 419520 - DNA, 15 bp, Homo sapiens
tccttctaataaata

SEQ ID NO: 419521 - DNA, 15 bp, Homo sapiens
gtccttctaataaat

SEQ ID NO: 419522 - DNA, 15 bp, Homo sapiens
cgtccttctaataaa

SEQ ID NO: 419523 - DNA, 15 bp, Homo sapiens
ccgtccttctaataa

SEQ ID NO: 419524 - DNA, 15 bp, Homo sapiens
cccgtccttctaata

SEQ ID NO: 419525 - DNA, 15 bp, Homo sapiens
ccccgtccttctaat

SEQ ID NO: 419526 - DNA, 15 bp, Homo sapiens
accccgtccttctaa

SEQ ID NO: 419527 - DNA, 15 bp, Homo sapiens
gaccccgtccttcta

SEQ ID NO: 419528 - DNA, 15 bp, Homo sapiens
ggaccccgtccttct

SEQ ID NO: 419529 - DNA, 15 bp, Homo sapiens
aggaccccgtccttc

SEQ ID NO: 419530 - DNA, 15 bp, Homo sapiens
aaggaccccgtcctt

SEQ ID NO: 419531 - DNA, 15 bp, Homo sapiens
aaaggaccccgtcct

SEQ ID NO: 419532 - DNA, 15 bp, Homo sapiens
aaaaggaccccgtcc

SEQ ID NO: 419533 - DNA, 15 bp, Homo sapiens
aaaaaggaccccgtc

SEQ ID NO: 419534 - DNA, 15 bp, Homo sapiens
aaaaaaggaccccgt

SEQ ID NO: 419535 - DNA, 15 bp, Homo sapiens
taaaaaaggaccccg

SEQ ID NO: 419536 - DNA, 15 bp, Homo sapiens
ataaaaaaggacccc

SEQ ID NO: 419537 - DNA, 15 bp, Homo sapiens
aataaaaaaggaccc

SEQ ID NO: 419538 - DNA, 15 bp, Homo sapiens
gaataaaaaaggacc

SEQ ID NO: 419539 - DNA, 15 bp, Homo sapiens
agaataaaaaaggac

SEQ ID NO: 419540 - DNA, 15 bp, Homo sapiens
tagaataaaaaagga

SEQ ID NO: 419541 - DNA, 15 bp, Homo sapiens
ctagaataaaaaagg

SEQ ID NO: 419542 - DNA, 15 bp, Homo sapiens
actagaataaaaaag

SEQ ID NO: 419543 - DNA, 15 bp, Homo sapiens
cactagaataaaaaa

SEQ ID NO: 419544 - DNA, 15 bp, Homo sapiens
gcactagaataaaaa

SEQ ID NO: 419545 - DNA, 15 bp, Homo sapiens
ggcactagaataaaa

SEQ ID NO: 419546 - DNA, 15 bp, Homo sapiens
gggcactagaataaa

SEQ ID NO: 419547 - DNA, 15 bp, Homo sapiens
ggggcactagaataa

SEQ ID NO: 419548 - DNA, 15 bp, Homo sapiens
gggggcactagaata

SEQ ID NO: 419549 - DNA, 15 bp, Homo sapiens
agggggcactagaat

SEQ ID NO: 419550 - DNA, 15 bp, Homo sapiens
cagggggcactagaa

SEQ ID NO: 419551 - DNA, 15 bp, Homo sapiens
acagggggcactaga

SEQ ID NO: 419552 - DNA, 15 bp, Homo sapiens
tacagggggcactag

SEQ ID NO: 419553 - DNA, 15 bp, Homo sapiens
gtacagggggcacta

SEQ ID NO: 419554 - DNA, 15 bp, Homo sapiens
tgtacagggggcact

SEQ ID NO: 419555 - DNA, 15 bp, Homo sapiens
gtgtacagggggcac

SEQ ID NO: 419556 - DNA, 15 bp, Homo sapiens
tgtgtacagggggca

SEQ ID NO: 419557 - DNA, 15 bp, Homo sapiens
ctgtgtacagggggc

SEQ ID NO: 419558 - DNA, 15 bp, Homo sapiens
gctgtgtacaggggg

SEQ ID NO: 419559 - DNA, 15 bp, Homo sapiens
tgctgtgtacagggg

SEQ ID NO: 419560 - DNA, 15 bp, Homo sapiens
ctgctgtgtacaggg

SEQ ID NO: 419561 - DNA, 15 bp, Homo sapiens
tctgctgtgtacagg

SEQ ID NO: 419562 - DNA, 15 bp, Homo sapiens
ctctgctgtgtacag

SEQ ID NO: 419563 - DNA, 15 bp, Homo sapiens
cctctgctgtgtaca

SEQ ID NO: 419564 - DNA, 15 bp, Homo sapiens
acctctgctgtgtac

SEQ ID NO: 419565 - DNA, 15 bp, Homo sapiens
gacctctgctgtgta

SEQ ID NO: 419566 - DNA, 15 bp, Homo sapiens
ggacctctgctgtgt

SEQ ID NO: 419567 - DNA, 15 bp, Homo sapiens
tggacctctgctgtg

SEQ ID NO: 419568 - DNA, 15 bp, Homo sapiens
atggacctctgctgt

SEQ ID NO: 419569 - DNA, 15 bp, Homo sapiens
gatggacctctgctg

SEQ ID NO: 419570 - DNA, 15 bp, Homo sapiens
agatggacctctgct

SEQ ID NO: 419571 - DNA, 15 bp, Homo sapiens
aagatggacctctgc

SEQ ID NO: 419572 - DNA, 15 bp, Homo sapiens
aaagatggacctctg

SEQ ID NO: 419573 - DNA, 15 bp, Homo sapiens
taaagatggacctct

SEQ ID NO: 419574 - DNA, 15 bp, Homo sapiens
ataaagatggacctc

SEQ ID NO: 419575 - DNA, 15 bp, Homo sapiens
tataaagatggacct

SEQ ID NO: 419576 - DNA, 15 bp, Homo sapiens
gtataaagatggacc

SEQ ID NO: 419577 - DNA, 15 bp, Homo sapiens
agtataaagatggac

SEQ ID NO: 419578 - DNA, 15 bp, Homo sapiens
aagtataaagatgga

SEQ ID NO: 419579 - DNA, 15 bp, Homo sapiens
taagtataaagatgg

SEQ ID NO: 419580 - DNA, 15 bp, Homo sapiens
ataagtataaagatg

SEQ ID NO: 419581 - DNA, 15 bp, Homo sapiens
cataagtataaagat

SEQ ID NO: 419582 - DNA, 15 bp, Homo sapiens
acataagtataaaga

SEQ ID NO: 419583 - DNA, 15 bp, Homo sapiens
aacataagtataaag

SEQ ID NO: 419584 - DNA, 15 bp, Homo sapiens
gaacataagtataaa

SEQ ID NO: 419585 - DNA, 15 bp, Homo sapiens
agaacataagtataa

SEQ ID NO: 419586 - DNA, 15 bp, Homo sapiens
gagaacataagtata

SEQ ID NO: 419587 - DNA, 15 bp, Homo sapiens
agagaacataagtat

SEQ ID NO: 419588 - DNA, 15 bp, Homo sapiens
cagagaacataagta

SEQ ID NO: 419589 - DNA, 15 bp, Homo sapiens
acagagaacataagt

SEQ ID NO: 419590 - DNA, 15 bp, Homo sapiens
tacagagaacataag

SEQ ID NO: 419591 - DNA, 15 bp, Homo sapiens
gtacagagaacataa

SEQ ID NO: 419592 - DNA, 15 bp, Homo sapiens
tgtacagagaacata

SEQ ID NO: 419593 - DNA, 15 bp, Homo sapiens
gtgtacagagaacat

SEQ ID NO: 419594 - DNA, 15 bp, Homo sapiens
tgtgtacagagaaca

SEQ ID NO: 419595 - DNA, 15 bp, Homo sapiens
ctgtgtacagagaac

SEQ ID NO: 419596 - DNA, 15 bp, Homo sapiens
gctgtgtacagagaa

SEQ ID NO: 419597 - DNA, 15 bp, Homo sapiens
tgctgtgtacagaga

SEQ ID NO: 419598 - DNA, 15 bp, Homo sapiens
ctgctgtgtacagag

SEQ ID NO: 419599 - DNA, 15 bp, Homo sapiens
cctgctgtgtacaga

SEQ ID NO: 419600 - DNA, 15 bp, Homo sapiens
ccctgctgtgtacag

SEQ ID NO: 419601 - DNA, 15 bp, Homo sapiens
cccctgctgtgtaca

SEQ ID NO: 419602 - DNA, 15 bp, Homo sapiens
gcccctgctgtgtac

SEQ ID NO: 419603 - DNA, 15 bp, Homo sapiens
agcccctgctgtgta

SEQ ID NO: 419604 - DNA, 15 bp, Homo sapiens
cagcccctgctgtgt

SEQ ID NO: 419605 - DNA, 15 bp, Homo sapiens
acagcccctgctgtg

SEQ ID NO: 419606 - DNA, 15 bp, Homo sapiens
tacagcccctgctgt

SEQ ID NO: 419607 - DNA, 15 bp, Homo sapiens
gtacagcccctgctg

SEQ ID NO: 419608 - DNA, 15 bp, Homo sapiens
agtacagcccctgct

SEQ ID NO: 419609 - DNA, 15 bp, Homo sapiens
tagtacagcccctgc

SEQ ID NO: 419610 - DNA, 15 bp, Homo sapiens
atagtacagcccctg

SEQ ID NO: 419611 - DNA, 15 bp, Homo sapiens
aatagtacagcccct

SEQ ID NO: 419612 - DNA, 15 bp, Homo sapiens
caatagtacagcccc

SEQ ID NO: 419613 - DNA, 15 bp, Homo sapiens
gcaatagtacagccc

SEQ ID NO: 419614 - DNA, 15 bp, Homo sapiens
tgcaatagtacagcc

SEQ ID NO: 419615 - DNA, 15 bp, Homo sapiens
ctgcaatagtacagc

SEQ ID NO: 419616 - DNA, 15 bp, Homo sapiens
actgcaatagtacag

SEQ ID NO: 419617 - DNA, 15 bp, Homo sapiens
cactgcaatagtaca

SEQ ID NO: 419618 - DNA, 15 bp, Homo sapiens
tcactgcaatagtac

SEQ ID NO: 419619 - DNA, 15 bp, Homo sapiens
atcactgcaatagta

SEQ ID NO: 419620 - DNA, 15 bp, Homo sapiens
tatcactgcaatagt

SEQ ID NO: 419621 - DNA, 15 bp, Homo sapiens
atatcactgcaatag

SEQ ID NO: 419622 - DNA, 15 bp, Homo sapiens
catatcactgcaata

SEQ ID NO: 419623 - DNA, 15 bp, Homo sapiens
tcatatcactgcaat

SEQ ID NO: 419624 - DNA, 15 bp, Homo sapiens
gtcatatcactgcaa

SEQ ID NO: 419625 - DNA, 15 bp, Homo sapiens
tgtcatatcactgca

SEQ ID NO: 419626 - DNA, 15 bp, Homo sapiens
ctgtcatatcactgc

SEQ ID NO: 419627 - DNA, 15 bp, Homo sapiens
tctgtcatatcactg

SEQ ID NO: 419628 - DNA, 15 bp, Homo sapiens
gtctgtcatatcact

SEQ ID NO: 419629 - DNA, 15 bp, Homo sapiens
ggtctgtcatatcac

SEQ ID NO: 419630 - DNA, 15 bp, Homo sapiens
aggtctgtcatatca

SEQ ID NO: 419631 - DNA, 15 bp, Homo sapiens
caggtctgtcatatc

SEQ ID NO: 419632 - DNA, 15 bp, Homo sapiens
tcaggtctgtcatat

SEQ ID NO: 419633 - DNA, 15 bp, Homo sapiens
ctcaggtctgtcata

SEQ ID NO: 419634 - DNA, 15 bp, Homo sapiens
tctcaggtctgtcat

SEQ ID NO: 419635 - DNA, 15 bp, Homo sapiens
ttctcaggtctgtca

SEQ ID NO: 419636 - DNA, 15 bp, Homo sapiens
cttctcaggtctgtc

SEQ ID NO: 419637 - DNA, 15 bp, Homo sapiens
ccttctcaggtctgt

SEQ ID NO: 419638 - DNA, 15 bp, Homo sapiens
gccttctcaggtctg

SEQ ID NO: 419639 - DNA, 15 bp, Homo sapiens
ggccttctcaggtct

SEQ ID NO: 419640 - DNA, 15 bp, Homo sapiens
gggccttctcaggtc

SEQ ID NO: 419641 - DNA, 15 bp, Homo sapiens
agggccttctcaggt

SEQ ID NO: 419642 - DNA, 15 bp, Homo sapiens
gagggccttctcagg

SEQ ID NO: 419643 - DNA, 15 bp, Homo sapiens
ggagggccttctcag

SEQ ID NO: 419644 - DNA, 15 bp, Homo sapiens
aggagggccttctca

SEQ ID NO: 419645 - DNA, 15 bp, Homo sapiens
aaggagggccttctc

SEQ ID NO: 419646 - DNA, 15 bp, Homo sapiens
aaaggagggccttct

SEQ ID NO: 419647 - DNA, 15 bp, Homo sapiens
aaaaggagggccttc

SEQ ID NO: 419648 - DNA, 15 bp, Homo sapiens
gaaaaggagggcctt

SEQ ID NO: 419649 - DNA, 15 bp, Homo sapiens
ggaaaaggagggcct

SEQ ID NO: 419650 - DNA, 15 bp, Homo sapiens
aggaaaaggagggcc

SEQ ID NO: 419651 - DNA, 15 bp, Homo sapiens
gaggaaaaggagggc

SEQ ID NO: 419652 - DNA, 15 bp, Homo sapiens
ggaggaaaaggaggg

SEQ ID NO: 419653 - DNA, 15 bp, Homo sapiens
gggaggaaaaggagg

SEQ ID NO: 419654 - DNA, 15 bp, Homo sapiens
ggggaggaaaaggag

SEQ ID NO: 419655 - DNA, 15 bp, Homo sapiens
tggggaggaaaagga

SEQ ID NO: 419656 - DNA, 15 bp, Homo sapiens
ttggggaggaaaagg

SEQ ID NO: 419657 - DNA, 15 bp, Homo sapiens
cttggggaggaaaag

SEQ ID NO: 419658 - DNA, 15 bp, Homo sapiens
gcttggggaggaaaa

SEQ ID NO: 419659 - DNA, 15 bp, Homo sapiens
tgcttggggaggaaa

SEQ ID NO: 419660 - DNA, 15 bp, Homo sapiens
ctgcttggggaggaa

SEQ ID NO: 419661 - DNA, 15 bp, Homo sapiens
gctgcttggggagga

SEQ ID NO: 419662 - DNA, 15 bp, Homo sapiens
agctgcttggggagg

SEQ ID NO: 419663 - DNA, 15 bp, Homo sapiens
cagctgcttggggag

SEQ ID NO: 419664 - DNA, 15 bp, Homo sapiens
gcagctgcttgggga

SEQ ID NO: 419665 - DNA, 15 bp, Homo sapiens
tgcagctgcttgggg

SEQ ID NO: 419666 - DNA, 15 bp, Homo sapiens
atgcagctgcttggg

SEQ ID NO: 419667 - DNA, 15 bp, Homo sapiens
catgcagctgcttgg

SEQ ID NO: 419668 - DNA, 15 bp, Homo sapiens
tcatgcagctgcttg

SEQ ID NO: 419669 - DNA, 15 bp, Homo sapiens
ttcatgcagctgctt

SEQ ID NO: 419670 - DNA, 15 bp, Homo sapiens
attcatgcagctgct

SEQ ID NO: 419671 - DNA, 15 bp, Homo sapiens
tattcatgcagctgc

SEQ ID NO: 419672 - DNA, 15 bp, Homo sapiens
ttattcatgcagctg

SEQ ID NO: 419673 - DNA, 15 bp, Homo sapiens
gttattcatgcagct

SEQ ID NO: 419674 - DNA, 15 bp, Homo sapiens
ggttattcatgcagc

SEQ ID NO: 419675 - DNA, 15 bp, Homo sapiens
gggttattcatgcag

SEQ ID NO: 419676 - DNA, 15 bp, Homo sapiens
tgggttattcatgca

SEQ ID NO: 419677 - DNA, 15 bp, Homo sapiens
ctgggttattcatgc

SEQ ID NO: 419678 - DNA, 15 bp, Homo sapiens
actgggttattcatg

SEQ ID NO: 419679 - DNA, 15 bp, Homo sapiens
gactgggttattcat

SEQ ID NO: 419680 - DNA, 15 bp, Homo sapiens
agactgggttattca

SEQ ID NO: 419681 - DNA, 15 bp, Homo sapiens
aagactgggttattc

SEQ ID NO: 419682 - DNA, 15 bp, Homo sapiens
aaagactgggttatt

SEQ ID NO: 419683 - DNA, 15 bp, Homo sapiens
taaagactgggttat

SEQ ID NO: 419684 - DNA, 15 bp, Homo sapiens
gtaaagactgggtta

SEQ ID NO: 419685 - DNA, 15 bp, Homo sapiens
agtaaagactgggtt

SEQ ID NO: 419686 - DNA, 15 bp, Homo sapiens
cagtaaagactgggt

SEQ ID NO: 419687 - DNA, 15 bp, Homo sapiens
tcagtaaagactggg

SEQ ID NO: 419688 - DNA, 15 bp, Homo sapiens
ctcagtaaagactgg

SEQ ID NO: 419689 - DNA, 15 bp, Homo sapiens
cctcagtaaagactg

SEQ ID NO: 419690 - DNA, 15 bp, Homo sapiens
acctcagtaaagact

SEQ ID NO: 419691 - DNA, 15 bp, Homo sapiens
gacctcagtaaagac

SEQ ID NO: 419692 - DNA, 15 bp, Homo sapiens
agacctcagtaaaga

SEQ ID NO: 419693 - DNA, 15 bp, Homo sapiens
tagacctcagtaaag

SEQ ID NO: 419694 - DNA, 15 bp, Homo sapiens
atagacctcagtaaa

SEQ ID NO: 419695 - DNA, 15 bp, Homo sapiens
aatagacctcagtaa

SEQ ID NO: 419696 - DNA, 15 bp, Homo sapiens
taatagacctcagta

SEQ ID NO: 419697 - DNA, 15 bp, Homo sapiens
ataatagacctcagt

SEQ ID NO: 419698 - DNA, 15 bp, Homo sapiens
aataatagacctcag

SEQ ID NO: 419699 - DNA, 15 bp, Homo sapiens
taataatagacctca

SEQ ID NO: 419700 - DNA, 15 bp, Homo sapiens
gtaataatagacctc

SEQ ID NO: 419701 - DNA, 15 bp, Homo sapiens
agtaataatagacct

SEQ ID NO: 419702 - DNA, 15 bp, Homo sapiens
cagtaataatagacc

SEQ ID NO: 419703 - DNA, 15 bp, Homo sapiens
gcagtaataatagac

SEQ ID NO: 419704 - DNA, 15 bp, Homo sapiens
tgcagtaataataga

SEQ ID NO: 419705 - DNA, 15 bp, Homo sapiens
atgcagtaataatag

SEQ ID NO: 419706 - DNA, 15 bp, Homo sapiens
aatgcagtaataata

SEQ ID NO: 419707 - DNA, 15 bp, Homo sapiens
taatgcagtaataat

SEQ ID NO: 419708 - DNA, 15 bp, Homo sapiens
ctaatgcagtaataa

SEQ ID NO: 419709 - DNA, 15 bp, Homo sapiens
tctaatgcagtaata

SEQ ID NO: 419710 - DNA, 15 bp, Homo sapiens
ttctaatgcagtaat

SEQ ID NO: 419711 - DNA, 15 bp, Homo sapiens
tttctaatgcagtaa

SEQ ID NO: 419712 - DNA, 15 bp, Homo sapiens
atttctaatgcagta

SEQ ID NO: 419713 - DNA, 15 bp, Homo sapiens
tatttctaatgcagt

SEQ ID NO: 419714 - DNA, 15 bp, Homo sapiens
gtatttctaatgcag

SEQ ID NO: 419715 - DNA, 15 bp, Homo sapiens
agtatttctaatgca

SEQ ID NO: 419716 - DNA, 15 bp, Homo sapiens
cagtatttctaatgc

SEQ ID NO: 419717 - DNA, 15 bp, Homo sapiens
ccagtatttctaatg

SEQ ID NO: 419718 - DNA, 15 bp, Homo sapiens
cccagtatttctaat

SEQ ID NO: 419719 - DNA, 15 bp, Homo sapiens
acccagtatttctaa

SEQ ID NO: 419720 - DNA, 15 bp, Homo sapiens
tacccagtatttcta

SEQ ID NO: 419721 - DNA, 15 bp, Homo sapiens
ctacccagtatttct

SEQ ID NO: 419722 - DNA, 15 bp, Homo sapiens
tctacccagtatttc

SEQ ID NO: 419723 - DNA, 15 bp, Homo sapiens
ttctacccagtattt

SEQ ID NO: 419724 - DNA, 15 bp, Homo sapiens
cttctacccagtatt

SEQ ID NO: 419725 - DNA, 15 bp, Homo sapiens
ccttctacccagtat

SEQ ID NO: 419726 - DNA, 15 bp, Homo sapiens
accttctacccagta

SEQ ID NO: 419727 - DNA, 15 bp, Homo sapiens
gaccttctacccagt

SEQ ID NO: 419728 - DNA, 15 bp, Homo sapiens
agaccttctacccag

SEQ ID NO: 419729 - DNA, 15 bp, Homo sapiens
tagaccttctaccca

SEQ ID NO: 419730 - DNA, 15 bp, Homo sapiens
atagaccttctaccc

SEQ ID NO: 419731 - DNA, 15 bp, Homo sapiens
gatagaccttctacc

SEQ ID NO: 419732 - DNA, 15 bp, Homo sapiens
tgatagaccttctac

SEQ ID NO: 419733 - DNA, 15 bp, Homo sapiens
gtgatagaccttcta

SEQ ID NO: 419734 - DNA, 15 bp, Homo sapiens
ggtgatagaccttct

SEQ ID NO: 419735 - DNA, 15 bp, Homo sapiens
aggtgatagaccttc

SEQ ID NO: 419736 - DNA, 15 bp, Homo sapiens
taggtgatagacctt

SEQ ID NO: 419737 - DNA, 15 bp, Homo sapiens
ataggtgatagacct

SEQ ID NO: 419738 - DNA, 15 bp, Homo sapiens
aataggtgatagacc

SEQ ID NO: 419739 - DNA, 15 bp, Homo sapiens
taataggtgatagac

SEQ ID NO: 419740 - DNA, 15 bp, Homo sapiens
gtaataggtgataga

SEQ ID NO: 419741 - DNA, 15 bp, Homo sapiens
tgtaataggtgatag

SEQ ID NO: 419742 - DNA, 15 bp, Homo sapiens
ttgtaataggtgata

SEQ ID NO: 419743 - DNA, 15 bp, Homo sapiens
tttgtaataggtgat

SEQ ID NO: 419744 - DNA, 15 bp, Homo sapiens
ctttgtaataggtga

SEQ ID NO: 419745 - DNA, 15 bp, Homo sapiens
gctttgtaataggtg

SEQ ID NO: 419746 - DNA, 15 bp, Homo sapiens
tgctttgtaataggt

SEQ ID NO: 419747 - DNA, 15 bp, Homo sapiens
ttgctttgtaatagg

SEQ ID NO: 419748 - DNA, 15 bp, Homo sapiens
tttgctttgtaatag

SEQ ID NO: 419749 - DNA, 15 bp, Homo sapiens
atttgctttgtaata

SEQ ID NO: 419750 - DNA, 15 bp, Homo sapiens
catttgctttgtaat

SEQ ID NO: 419751 - DNA, 15 bp, Homo sapiens
acatttgctttgtaa

SEQ ID NO: 419752 - DNA, 15 bp, Homo sapiens
gacatttgctttgta

SEQ ID NO: 419753 - DNA, 15 bp, Homo sapiens
ggacatttgctttgt

SEQ ID NO: 419754 - DNA, 15 bp, Homo sapiens
tggacatttgctttg

SEQ ID NO: 419755 - DNA, 15 bp, Homo sapiens
ctggacatttgcttt

SEQ ID NO: 419756 - DNA, 15 bp, Homo sapiens
actggacatttgctt

SEQ ID NO: 419757 - DNA, 15 bp, Homo sapiens
aactggacatttgct

SEQ ID NO: 419758 - DNA, 15 bp, Homo sapiens
taactggacatttgc

SEQ ID NO: 419759 - DNA, 15 bp, Homo sapiens
ttaactggacatttg

SEQ ID NO: 419760 - DNA, 15 bp, Homo sapiens
attaactggacattt

SEQ ID NO: 419761 - DNA, 15 bp, Homo sapiens
tattaactggacatt

SEQ ID NO: 419762 - DNA, 15 bp, Homo sapiens
atattaactggacat

SEQ ID NO: 419763 - DNA, 15 bp, Homo sapiens
catattaactggaca

SEQ ID NO: 419764 - DNA, 15 bp, Homo sapiens
tcatattaactggac

SEQ ID NO: 419765 - DNA, 15 bp, Homo sapiens
ctcatattaactgga

SEQ ID NO: 419766 - DNA, 15 bp, Homo sapiens
actcatattaactgg

SEQ ID NO: 419767 - DNA, 15 bp, Homo sapiens
gactcatattaactg

SEQ ID NO: 419768 - DNA, 15 bp, Homo sapiens
tgactcatattaact

SEQ ID NO: 419769 - DNA, 15 bp, Homo sapiens
atgactcatattaac

SEQ ID NO: 419770 - DNA, 15 bp, Homo sapiens
aatgactcatattaa

SEQ ID NO: 419771 - DNA, 15 bp, Homo sapiens
aaatgactcatatta

SEQ ID NO: 419772 - DNA, 15 bp, Homo sapiens
aaaatgactcatatt

SEQ ID NO: 419773 - DNA, 15 bp, Homo sapiens
aaaaatgactcatat

SEQ ID NO: 419774 - DNA, 15 bp, Homo sapiens
aaaaaatgactcata

SEQ ID NO: 419775 - DNA, 15 bp, Homo sapiens
taaaaaatgactcat

SEQ ID NO: 419776 - DNA, 15 bp, Homo sapiens
gtaaaaaatgactca

SEQ ID NO: 419777 - DNA, 15 bp, Homo sapiens
ggtaaaaaatgactc

SEQ ID NO: 419778 - DNA, 15 bp, Homo sapiens
aggtaaaaaatgact

SEQ ID NO: 419779 - DNA, 15 bp, Homo sapiens
aaggtaaaaaatgac

SEQ ID NO: 419780 - DNA, 15 bp, Homo sapiens
taaggtaaaaaatga

SEQ ID NO: 419781 - DNA, 15 bp, Homo sapiens
ctaaggtaaaaaatg

SEQ ID NO: 419782 - DNA, 15 bp, Homo sapiens
cctaaggtaaaaaat

SEQ ID NO: 419783 - DNA, 15 bp, Homo sapiens
tcctaaggtaaaaaa

SEQ ID NO: 419784 - DNA, 15 bp, Homo sapiens
atcctaaggtaaaaa

SEQ ID NO: 419785 - DNA, 15 bp, Homo sapiens
catcctaaggtaaaa

SEQ ID NO: 419786 - DNA, 15 bp, Homo sapiens
tcatcctaaggtaaa

SEQ ID NO: 419787 - DNA, 15 bp, Homo sapiens
ttcatcctaaggtaa

SEQ ID NO: 419788 - DNA, 15 bp, Homo sapiens
attcatcctaaggta

SEQ ID NO: 419789 - DNA, 15 bp, Homo sapiens
tattcatcctaaggt

SEQ ID NO: 419790 - DNA, 15 bp, Homo sapiens
ttattcatcctaagg

SEQ ID NO: 419791 - DNA, 15 bp, Homo sapiens
attattcatcctaag

SEQ ID NO: 419792 - DNA, 15 bp, Homo sapiens
gattattcatcctaa

SEQ ID NO: 419793 - DNA, 15 bp, Homo sapiens
agattattcatccta

SEQ ID NO: 419794 - DNA, 15 bp, Homo sapiens
cagattattcatcct

SEQ ID NO: 419795 - DNA, 15 bp, Homo sapiens
ccagattattcatcc

SEQ ID NO: 419796 - DNA, 15 bp, Homo sapiens
accagattattcatc

SEQ ID NO: 419797 - DNA, 15 bp, Homo sapiens
gaccagattattcat

SEQ ID NO: 419798 - DNA, 15 bp, Homo sapiens
ggaccagattattca

SEQ ID NO: 419799 - DNA, 15 bp, Homo sapiens
gggaccagattattc

SEQ ID NO: 419800 - DNA, 15 bp, Homo sapiens
tgggaccagattatt

SEQ ID NO: 419801 - DNA, 15 bp, Homo sapiens
atgggaccagattat

SEQ ID NO: 419802 - DNA, 15 bp, Homo sapiens
aatgggaccagatta

SEQ ID NO: 419803 - DNA, 15 bp, Homo sapiens
aaatgggaccagatt

SEQ ID NO: 419804 - DNA, 15 bp, Homo sapiens
caaatgggaccagat

SEQ ID NO: 419805 - DNA, 15 bp, Homo sapiens
tcaaatgggaccaga

SEQ ID NO: 419806 - DNA, 15 bp, Homo sapiens
atcaaatgggaccag

SEQ ID NO: 419807 - DNA, 15 bp, Homo sapiens
tatcaaatgggacca

SEQ ID NO: 419808 - DNA, 15 bp, Homo sapiens
ctatcaaatgggacc

SEQ ID NO: 419809 - DNA, 15 bp, Homo sapiens
tctatcaaatgggac

SEQ ID NO: 419810 - DNA, 15 bp, Homo sapiens
gtctatcaaatggga

SEQ ID NO: 419811 - DNA, 15 bp, Homo sapiens
agtctatcaaatggg

SEQ ID NO: 419812 - DNA, 15 bp, Homo sapiens
tagtctatcaaatgg

SEQ ID NO: 419813 - DNA, 15 bp, Homo sapiens
gtagtctatcaaatg

SEQ ID NO: 419814 - DNA, 15 bp, Homo sapiens
agtagtctatcaaat

SEQ ID NO: 419815 - DNA, 15 bp, Homo sapiens
tagtagtctatcaaa

SEQ ID NO: 419816 - DNA, 15 bp, Homo sapiens
gtagtagtctatcaa

SEQ ID NO: 419817 - DNA, 15 bp, Homo sapiens
agtagtagtctatca

SEQ ID NO: 419818 - DNA, 15 bp, Homo sapiens
aagtagtagtctatc

SEQ ID NO: 419819 - DNA, 15 bp, Homo sapiens
gaagtagtagtctat

SEQ ID NO: 419820 - DNA, 15 bp, Homo sapiens
agaagtagtagtcta

SEQ ID NO: 419821 - DNA, 15 bp, Homo sapiens
cagaagtagtagtct

SEQ ID NO: 419822 - DNA, 15 bp, Homo sapiens
tcagaagtagtagtc

SEQ ID NO: 419823 - DNA, 15 bp, Homo sapiens
ttcagaagtagtagt

SEQ ID NO: 419824 - DNA, 15 bp, Homo sapiens
attcagaagtagtag

SEQ ID NO: 419825 - DNA, 15 bp, Homo sapiens
aattcagaagtagta

SEQ ID NO: 419826 - DNA, 15 bp, Homo sapiens
caattcagaagtagt

SEQ ID NO: 419827 - DNA, 15 bp, Homo sapiens
ccaattcagaagtag

SEQ ID NO: 419828 - DNA, 15 bp, Homo sapiens
accaattcagaagta

SEQ ID NO: 419829 - DNA, 15 bp, Homo sapiens
aaccaattcagaagt

SEQ ID NO: 419830 - DNA, 15 bp, Homo sapiens
aaaccaattcagaag

SEQ ID NO: 419831 - DNA, 15 bp, Homo sapiens
aaaaccaattcagaa

SEQ ID NO: 419832 - DNA, 15 bp, Homo sapiens
aaaaaccaattcaga

SEQ ID NO: 419833 - DNA, 15 bp, Homo sapiens
taaaaaccaattcag

SEQ ID NO: 419834 - DNA, 15 bp, Homo sapiens
ataaaaaccaattca

SEQ ID NO: 419835 - DNA, 15 bp, Homo sapiens
tataaaaaccaattc

SEQ ID NO: 419836 - DNA, 15 bp, Homo sapiens
ttataaaaaccaatt

SEQ ID NO: 419837 - DNA, 15 bp, Homo sapiens
gttataaaaaccaat

SEQ ID NO: 419838 - DNA, 15 bp, Homo sapiens
agttataaaaaccaa

SEQ ID NO: 419839 - DNA, 15 bp, Homo sapiens
tagttataaaaacca

SEQ ID NO: 419840 - DNA, 15 bp, Homo sapiens
ctagttataaaaacc

SEQ ID NO: 419841 - DNA, 15 bp, Homo sapiens
cctagttataaaaac

SEQ ID NO: 419842 - DNA, 15 bp, Homo sapiens
tcctagttataaaaa

SEQ ID NO: 419843 - DNA, 15 bp, Homo sapiens
ttcctagttataaaa

SEQ ID NO: 419844 - DNA, 15 bp, Homo sapiens
tttcctagttataaa

SEQ ID NO: 419845 - DNA, 15 bp, Homo sapiens
ctttcctagttataa

SEQ ID NO: 419846 - DNA, 15 bp, Homo sapiens
gctttcctagttata

SEQ ID NO: 419847 - DNA, 15 bp, Homo sapiens
tgctttcctagttat

SEQ ID NO: 419848 - DNA, 15 bp, Homo sapiens
gtgctttcctagtta

SEQ ID NO: 419849 - DNA, 15 bp, Homo sapiens
tgtgctttcctagtt

SEQ ID NO: 419850 - DNA, 15 bp, Homo sapiens
ctgtgctttcctagt

SEQ ID NO: 419851 - DNA, 15 bp, Homo sapiens
tctgtgctttcctag

SEQ ID NO: 419852 - DNA, 15 bp, Homo sapiens
ctctgtgctttccta

SEQ ID NO: 419853 - DNA, 15 bp, Homo sapiens
cctctgtgctttcct

SEQ ID NO: 419854 - DNA, 15 bp, Homo sapiens
ccctctgtgctttcc

SEQ ID NO: 419855 - DNA, 15 bp, Homo sapiens
tccctctgtgctttc

SEQ ID NO: 419856 - DNA, 15 bp, Homo sapiens
gtccctctgtgcttt

SEQ ID NO: 419857 - DNA, 15 bp, Homo sapiens
tgtccctctgtgctt

SEQ ID NO: 419858 - DNA, 15 bp, Homo sapiens
ctgtccctctgtgct

SEQ ID NO: 419859 - DNA, 15 bp, Homo sapiens
actgtccctctgtgc

SEQ ID NO: 419860 - DNA, 15 bp, Homo sapiens
cactgtccctctgtg

SEQ ID NO: 419861 - DNA, 15 bp, Homo sapiens
acactgtccctctgt

SEQ ID NO: 419862 - DNA, 15 bp, Homo sapiens
gacactgtccctctg

SEQ ID NO: 419863 - DNA, 15 bp, Homo sapiens
tgacactgtccctct

SEQ ID NO: 419864 - DNA, 15 bp, Homo sapiens
ctgacactgtccctc

SEQ ID NO: 419865 - DNA, 15 bp, Homo sapiens
tctgacactgtccct

SEQ ID NO: 419866 - DNA, 15 bp, Homo sapiens
ctctgacactgtccc

SEQ ID NO: 419867 - DNA, 15 bp, Homo sapiens
cctctgacactgtcc

SEQ ID NO: 419868 - DNA, 15 bp, Homo sapiens
ccctctgacactgtc

SEQ ID NO: 419869 - DNA, 15 bp, Homo sapiens
gccctctgacactgt

SEQ ID NO: 419870 - DNA, 15 bp, Homo sapiens
tgccctctgacactg

SEQ ID NO: 419871 - DNA, 15 bp, Homo sapiens
gtgccctctgacact

SEQ ID NO: 419872 - DNA, 15 bp, Homo sapiens
agtgccctctgacac

SEQ ID NO: 419873 - DNA, 15 bp, Homo sapiens
aagtgccctctgaca

SEQ ID NO: 419874 - DNA, 15 bp, Homo sapiens
caagtgccctctgac

SEQ ID NO: 419875 - DNA, 15 bp, Homo sapiens
ccaagtgccctctga

SEQ ID NO: 419876 - DNA, 15 bp, Homo sapiens
tccaagtgccctctg

SEQ ID NO: 419877 - DNA, 15 bp, Homo sapiens
ttccaagtgccctct

SEQ ID NO: 419878 - DNA, 15 bp, Homo sapiens
cttccaagtgccctc

SEQ ID NO: 419879 - DNA, 15 bp, Homo sapiens
acttccaagtgccct

SEQ ID NO: 419880 - DNA, 15 bp, Homo sapiens
tacttccaagtgccc

SEQ ID NO: 419881 - DNA, 15 bp, Homo sapiens
ttacttccaagtgcc

SEQ ID NO: 419882 - DNA, 15 bp, Homo sapiens
tttacttccaagtgc

SEQ ID NO: 419883 - DNA, 15 bp, Homo sapiens
ctttacttccaagtg

SEQ ID NO: 419884 - DNA, 15 bp, Homo sapiens
tctttacttccaagt

SEQ ID NO: 419885 - DNA, 15 bp, Homo sapiens
atctttacttccaag

SEQ ID NO: 419886 - DNA, 15 bp, Homo sapiens
aatctttacttccaa

SEQ ID NO: 419887 - DNA, 15 bp, Homo sapiens
aaatctttacttcca

SEQ ID NO: 419888 - DNA, 15 bp, Homo sapiens
caaatctttacttcc

SEQ ID NO: 419889 - DNA, 15 bp, Homo sapiens
tcaaatctttacttc

SEQ ID NO: 419890 - DNA, 15 bp, Homo sapiens
ttcaaatctttactt

SEQ ID NO: 419891 - DNA, 15 bp, Homo sapiens
tttcaaatctttact

SEQ ID NO: 419892 - DNA, 15 bp, Homo sapiens
ttttcaaatctttac

SEQ ID NO: 419893 - DNA, 15 bp, Homo sapiens
tttttcaaatcttta

SEQ ID NO: 419894 - DNA, 15 bp, Homo sapiens
ttttttcaaatcttt

SEQ ID NO: 419895 - DNA, 15 bp, Homo sapiens
cttttttcaaatctt

SEQ ID NO: 419896 - DNA, 15 bp, Homo sapiens
ccttttttcaaatct

SEQ ID NO: 419897 - DNA, 15 bp, Homo sapiens
tccttttttcaaatc

SEQ ID NO: 419898 - DNA, 15 bp, Homo sapiens
ttccttttttcaaat

SEQ ID NO: 419899 - DNA, 15 bp, Homo sapiens
attccttttttcaaa

SEQ ID NO: 419900 - DNA, 15 bp, Homo sapiens
cattccttttttcaa

SEQ ID NO: 419901 - DNA, 15 bp, Homo sapiens
tcattccttttttca

SEQ ID NO: 419902 - DNA, 15 bp, Homo sapiens
atcattccttttttc

SEQ ID NO: 419903 - DNA, 15 bp, Homo sapiens
tatcattcctttttt

SEQ ID NO: 419904 - DNA, 15 bp, Homo sapiens
ctatcattccttttt

SEQ ID NO: 419905 - DNA, 15 bp, Homo sapiens
cctatcattcctttt

SEQ ID NO: 419906 - DNA, 15 bp, Homo sapiens
gcctatcattccttt

SEQ ID NO: 419907 - DNA, 15 bp, Homo sapiens
agcctatcattcctt

SEQ ID NO: 419908 - DNA, 15 bp, Homo sapiens
tagcctatcattcct

SEQ ID NO: 419909 - DNA, 15 bp, Homo sapiens
gtagcctatcattcc

SEQ ID NO: 419910 - DNA, 15 bp, Homo sapiens
tgtagcctatcattc

SEQ ID NO: 419911 - DNA, 15 bp, Homo sapiens
atgtagcctatcatt

SEQ ID NO: 419912 - DNA, 15 bp, Homo sapiens
gatgtagcctatcat

SEQ ID NO: 419913 - DNA, 15 bp, Homo sapiens
agatgtagcctatca

SEQ ID NO: 419914 - DNA, 15 bp, Homo sapiens
cagatgtagcctatc

SEQ ID NO: 419915 - DNA, 15 bp, Homo sapiens
acagatgtagcctat

SEQ ID NO: 419916 - DNA, 15 bp, Homo sapiens
gacagatgtagccta

SEQ ID NO: 419917 - DNA, 15 bp, Homo sapiens
agacagatgtagcct

SEQ ID NO: 419918 - DNA, 15 bp, Homo sapiens
cagacagatgtagcc

SEQ ID NO: 419919 - DNA, 15 bp, Homo sapiens
acagacagatgtagc

SEQ ID NO: 419920 - DNA, 15 bp, Homo sapiens
aacagacagatgtag

SEQ ID NO: 419921 - DNA, 15 bp, Homo sapiens
aaacagacagatgta

SEQ ID NO: 419922 - DNA, 15 bp, Homo sapiens
taaacagacagatgt

SEQ ID NO: 419923 - DNA, 15 bp, Homo sapiens
ataaacagacagatg

SEQ ID NO: 419924 - DNA, 15 bp, Homo sapiens
tataaacagacagat

SEQ ID NO: 419925 - DNA, 15 bp, Homo sapiens
gtataaacagacaga

SEQ ID NO: 419926 - DNA, 15 bp, Homo sapiens
cgtataaacagacag

SEQ ID NO: 419927 - DNA, 15 bp, Homo sapiens
tcgtataaacagaca

SEQ ID NO: 419928 - DNA, 15 bp, Homo sapiens
ttcgtataaacagac

SEQ ID NO: 419929 - DNA, 15 bp, Homo sapiens
cttcgtataaacaga

SEQ ID NO: 419930 - DNA, 15 bp, Homo sapiens
gcttcgtataaacag

SEQ ID NO: 419931 - DNA, 15 bp, Homo sapiens
tgcttcgtataaaca

SEQ ID NO: 419932 - DNA, 15 bp, Homo sapiens
ttgcttcgtataaac

SEQ ID NO: 419933 - DNA, 15 bp, Homo sapiens
cttgcttcgtataaa

SEQ ID NO: 419934 - DNA, 15 bp, Homo sapiens
ccttgcttcgtataa

SEQ ID NO: 419935 - DNA, 15 bp, Homo sapiens
cccttgcttcgtata

SEQ ID NO: 419936 - DNA, 15 bp, Homo sapiens
tcccttgcttcgtat

SEQ ID NO: 419937 - DNA, 15 bp, Homo sapiens
ctcccttgcttcgta

SEQ ID NO: 419938 - DNA, 15 bp, Homo sapiens
gctcccttgcttcgt

SEQ ID NO: 419939 - DNA, 15 bp, Homo sapiens
agctcccttgcttcg

SEQ ID NO: 419940 - DNA, 15 bp, Homo sapiens
tagctcccttgcttc

SEQ ID NO: 419941 - DNA, 15 bp, Homo sapiens
atagctcccttgctt

SEQ ID NO: 419942 - DNA, 15 bp, Homo sapiens
tatagctcccttgct

SEQ ID NO: 419943 - DNA, 15 bp, Homo sapiens
ttatagctcccttgc

SEQ ID NO: 419944 - DNA, 15 bp, Homo sapiens
tttatagctcccttg

SEQ ID NO: 419945 - DNA, 15 bp, Homo sapiens
ctttatagctccctt

SEQ ID NO: 419946 - DNA, 15 bp, Homo sapiens
actttatagctccct

SEQ ID NO: 419947 - DNA, 15 bp, Homo sapiens
gactttatagctccc

SEQ ID NO: 419948 - DNA, 15 bp, Homo sapiens
agactttatagctcc

SEQ ID NO: 419949 - DNA, 15 bp, Homo sapiens
aagactttatagctc

SEQ ID NO: 419950 - DNA, 15 bp, Homo sapiens
caagactttatagct

SEQ ID NO: 419951 - DNA, 15 bp, Homo sapiens
tcaagactttatagc

SEQ ID NO: 419952 - DNA, 15 bp, Homo sapiens
atcaagactttatag

SEQ ID NO: 419953 - DNA, 15 bp, Homo sapiens
tatcaagactttata

SEQ ID NO: 419954 - DNA, 15 bp, Homo sapiens
ctatcaagactttat

SEQ ID NO: 419955 - DNA, 15 bp, Homo sapiens
tctatcaagacttta

SEQ ID NO: 419956 - DNA, 15 bp, Homo sapiens
ctctatcaagacttt

SEQ ID NO: 419957 - DNA, 15 bp, Homo sapiens
cctctatcaagactt

SEQ ID NO: 419958 - DNA, 15 bp, Homo sapiens
ccctctatcaagact

SEQ ID NO: 419959 - DNA, 15 bp, Homo sapiens
gccctctatcaagac

SEQ ID NO: 419960 - DNA, 15 bp, Homo sapiens
ggccctctatcaaga

SEQ ID NO: 419961 - DNA, 15 bp, Homo sapiens
aggccctctatcaag

SEQ ID NO: 419962 - DNA, 15 bp, Homo sapiens
aaggccctctatcaa

SEQ ID NO: 419963 - DNA, 15 bp, Homo sapiens
caaggccctctatca

SEQ ID NO: 419964 - DNA, 15 bp, Homo sapiens
ccaaggccctctatc

SEQ ID NO: 419965 - DNA, 15 bp, Homo sapiens
accaaggccctctat

SEQ ID NO: 419966 - DNA, 15 bp, Homo sapiens
taccaaggccctcta

SEQ ID NO: 419967 - DNA, 15 bp, Homo sapiens
ttaccaaggccctct

SEQ ID NO: 419968 - DNA, 15 bp, Homo sapiens
cttaccaaggccctc

SEQ ID NO: 419969 - DNA, 15 bp, Homo sapiens
tcttaccaaggccct

SEQ ID NO: 419970 - DNA, 15 bp, Homo sapiens
atcttaccaaggccc

SEQ ID NO: 419971 - DNA, 15 bp, Homo sapiens
tatcttaccaaggcc

SEQ ID NO: 419972 - DNA, 15 bp, Homo sapiens
ctatcttaccaaggc

SEQ ID NO: 419973 - DNA, 15 bp, Homo sapiens
actatcttaccaagg

SEQ ID NO: 419974 - DNA, 15 bp, Homo sapiens
cactatcttaccaag

SEQ ID NO: 419975 - DNA, 15 bp, Homo sapiens
tcactatcttaccaa

SEQ ID NO: 419976 - DNA, 15 bp, Homo sapiens
gtcactatcttacca

SEQ ID NO: 419977 - DNA, 15 bp, Homo sapiens
tgtcactatcttacc

SEQ ID NO: 419978 - DNA, 15 bp, Homo sapiens
ctgtcactatcttac

SEQ ID NO: 419979 - DNA, 15 bp, Homo sapiens
tctgtcactatctta

SEQ ID NO: 419980 - DNA, 15 bp, Homo sapiens
ctctgtcactatctt

SEQ ID NO: 419981 - DNA, 15 bp, Homo sapiens
tctctgtcactatct

SEQ ID NO: 419982 - DNA, 15 bp, Homo sapiens
ctctctgtcactatc

SEQ ID NO: 419983 - DNA, 15 bp, Homo sapiens
actctctgtcactat

SEQ ID NO: 419984 - DNA, 15 bp, Homo sapiens
tactctctgtcacta

SEQ ID NO: 419985 - DNA, 15 bp, Homo sapiens
ctactctctgtcact

SEQ ID NO: 419986 - DNA, 15 bp, Homo sapiens
cctactctctgtcac

SEQ ID NO: 419987 - DNA, 15 bp, Homo sapiens
ccctactctctgtca

SEQ ID NO: 419988 - DNA, 15 bp, Homo sapiens
cccctactctctgtc

SEQ ID NO: 419989 - DNA, 15 bp, Homo sapiens
gcccctactctctgt

SEQ ID NO: 419990 - DNA, 15 bp, Homo sapiens
agcccctactctctg

SEQ ID NO: 419991 - DNA, 15 bp, Homo sapiens
aagcccctactctct

SEQ ID NO: 419992 - DNA, 15 bp, Homo sapiens
aaagcccctactctc

SEQ ID NO: 419993 - DNA, 15 bp, Homo sapiens
taaagcccctactct

SEQ ID NO: 419994 - DNA, 15 bp, Homo sapiens
ctaaagcccctactc

SEQ ID NO: 419995 - DNA, 15 bp, Homo sapiens
cctaaagcccctact

SEQ ID NO: 419996 - DNA, 15 bp, Homo sapiens
gcctaaagcccctac

SEQ ID NO: 419997 - DNA, 15 bp, Homo sapiens
agcctaaagccccta

SEQ ID NO: 419998 - DNA, 15 bp, Homo sapiens
tagcctaaagcccct

SEQ ID NO: 419999 - DNA, 15 bp, Homo sapiens
ttagcctaaagcccc

SEQ ID NO: 420000 - DNA, 15 bp, Homo sapiens
cttagcctaaagccc

SEQ ID NO: 420001 - DNA, 15 bp, Homo sapiens
acttagcctaaagcc

SEQ ID NO: 420002 - DNA, 15 bp, Homo sapiens
cacttagcctaaagc

SEQ ID NO: 420003 - DNA, 15 bp, Homo sapiens
tcacttagcctaaag

SEQ ID NO: 420004 - DNA, 15 bp, Homo sapiens
gtcacttagcctaaa

SEQ ID NO: 420005 - DNA, 15 bp, Homo sapiens
agtcacttagcctaa

SEQ ID NO: 420006 - DNA, 15 bp, Homo sapiens
tagtcacttagccta

SEQ ID NO: 420007 - DNA, 15 bp, Homo sapiens
atagtcacttagcct

SEQ ID NO: 420008 - DNA, 15 bp, Homo sapiens
aatagtcacttagcc

SEQ ID NO: 420009 - DNA, 15 bp, Homo sapiens
aaatagtcacttagc

SEQ ID NO: 420010 - DNA, 15 bp, Homo sapiens
taaatagtcacttag

SEQ ID NO: 420011 - DNA, 15 bp, Homo sapiens
ttaaatagtcactta

SEQ ID NO: 420012 - DNA, 15 bp, Homo sapiens
attaaatagtcactt

SEQ ID NO: 420013 - DNA, 15 bp, Homo sapiens
aattaaatagtcact

SEQ ID NO: 420014 - DNA, 15 bp, Homo sapiens
taattaaatagtcac

SEQ ID NO: 420015 - DNA, 15 bp, Homo sapiens
ctaattaaatagtca

SEQ ID NO: 420016 - DNA, 15 bp, Homo sapiens
gctaattaaatagtc

SEQ ID NO: 420017 - DNA, 15 bp, Homo sapiens
agctaattaaatagt

SEQ ID NO: 420018 - DNA, 15 bp, Homo sapiens
gagctaattaaatag

SEQ ID NO: 420019 - DNA, 15 bp, Homo sapiens
agagctaattaaata

SEQ ID NO: 420020 - DNA, 15 bp, Homo sapiens
cagagctaattaaat

SEQ ID NO: 420021 - DNA, 15 bp, Homo sapiens
acagagctaattaaa

SEQ ID NO: 420022 - DNA, 15 bp, Homo sapiens
cacagagctaattaa

SEQ ID NO: 420023 - DNA, 15 bp, Homo sapiens
tcacagagctaatta

SEQ ID NO: 420024 - DNA, 15 bp, Homo sapiens
gtcacagagctaatt

SEQ ID NO: 420025 - DNA, 15 bp, Homo sapiens
agtcacagagctaat

SEQ ID NO: 420026 - DNA, 15 bp, Homo sapiens
aagtcacagagctaa

SEQ ID NO: 420027 - DNA, 15 bp, Homo sapiens
aaagtcacagagcta

SEQ ID NO: 420028 - DNA, 15 bp, Homo sapiens
caaagtcacagagct

SEQ ID NO: 420029 - DNA, 15 bp, Homo sapiens
ccaaagtcacagagc

SEQ ID NO: 420030 - DNA, 15 bp, Homo sapiens
accaaagtcacagag

SEQ ID NO: 420031 - DNA, 15 bp, Homo sapiens
gaccaaagtcacaga

SEQ ID NO: 420032 - DNA, 15 bp, Homo sapiens
tgaccaaagtcacag

SEQ ID NO: 420033 - DNA, 15 bp, Homo sapiens
ctgaccaaagtcaca

SEQ ID NO: 420034 - DNA, 15 bp, Homo sapiens
cctgaccaaagtcac

SEQ ID NO: 420035 - DNA, 15 bp, Homo sapiens
acctgaccaaagtca

SEQ ID NO: 420036 - DNA, 15 bp, Homo sapiens
gacctgaccaaagtc

SEQ ID NO: 420037 - DNA, 15 bp, Homo sapiens
tgacctgaccaaagt

SEQ ID NO: 420038 - DNA, 15 bp, Homo sapiens
atgacctgaccaaag

SEQ ID NO: 420039 - DNA, 15 bp, Homo sapiens
aatgacctgaccaaa

SEQ ID NO: 420040 - DNA, 15 bp, Homo sapiens
caatgacctgaccaa

SEQ ID NO: 420041 - DNA, 15 bp, Homo sapiens
acaatgacctgacca

SEQ ID NO: 420042 - DNA, 15 bp, Homo sapiens
tacaatgacctgacc

SEQ ID NO: 420043 - DNA, 15 bp, Homo sapiens
ttacaatgacctgac

SEQ ID NO: 420044 - DNA, 15 bp, Homo sapiens
gttacaatgacctga

SEQ ID NO: 420045 - DNA, 15 bp, Homo sapiens
agttacaatgacctg

SEQ ID NO: 420046 - DNA, 15 bp, Homo sapiens
aagttacaatgacct

SEQ ID NO: 420047 - DNA, 15 bp, Homo sapiens
caagttacaatgacc

SEQ ID NO: 420048 - DNA, 15 bp, Homo sapiens
tcaagttacaatgac

SEQ ID NO: 420049 - DNA, 15 bp, Homo sapiens
atcaagttacaatga

SEQ ID NO: 420050 - DNA, 15 bp, Homo sapiens
catcaagttacaatg

SEQ ID NO: 420051 - DNA, 15 bp, Homo sapiens
ccatcaagttacaat

SEQ ID NO: 420052 - DNA, 15 bp, Homo sapiens
cccatcaagttacaa

SEQ ID NO: 420053 - DNA, 15 bp, Homo sapiens
acccatcaagttaca

SEQ ID NO: 420054 - DNA, 15 bp, Homo sapiens
tacccatcaagttac

SEQ ID NO: 420055 - DNA, 15 bp, Homo sapiens
ctacccatcaagtta

SEQ ID NO: 420056 - DNA, 15 bp, Homo sapiens
actacccatcaagtt

SEQ ID NO: 420057 - DNA, 15 bp, Homo sapiens
aactacccatcaagt

SEQ ID NO: 420058 - DNA, 15 bp, Homo sapiens
gaactacccatcaag

SEQ ID NO: 420059 - DNA, 15 bp, Homo sapiens
agaactacccatcaa

SEQ ID NO: 420060 - DNA, 15 bp, Homo sapiens
gagaactacccatca

SEQ ID NO: 420061 - DNA, 15 bp, Homo sapiens
tgagaactacccatc

SEQ ID NO: 420062 - DNA, 15 bp, Homo sapiens
atgagaactacccat

SEQ ID NO: 420063 - DNA, 15 bp, Homo sapiens
aatgagaactaccca

SEQ ID NO: 420064 - DNA, 15 bp, Homo sapiens
gaatgagaactaccc

SEQ ID NO: 420065 - DNA, 15 bp, Homo sapiens
agaatgagaactacc

SEQ ID NO: 420066 - DNA, 15 bp, Homo sapiens
cagaatgagaactac

SEQ ID NO: 420067 - DNA, 15 bp, Homo sapiens
gcagaatgagaacta

SEQ ID NO: 420068 - DNA, 15 bp, Homo sapiens
tgcagaatgagaact

SEQ ID NO: 420069 - DNA, 15 bp, Homo sapiens
atgcagaatgagaac

SEQ ID NO: 420070 - DNA, 15 bp, Homo sapiens
gatgcagaatgagaa

SEQ ID NO: 420071 - DNA, 15 bp, Homo sapiens
agatgcagaatgaga

SEQ ID NO: 420072 - DNA, 15 bp, Homo sapiens
cagatgcagaatgag

SEQ ID NO: 420073 - DNA, 15 bp, Homo sapiens
acagatgcagaatga

SEQ ID NO: 420074 - DNA, 15 bp, Homo sapiens
tacagatgcagaatg

SEQ ID NO: 420075 - DNA, 15 bp, Homo sapiens
ttacagatgcagaat

SEQ ID NO: 420076 - DNA, 15 bp, Homo sapiens
cttacagatgcagaa

SEQ ID NO: 420077 - DNA, 15 bp, Homo sapiens
acttacagatgcaga

SEQ ID NO: 420078 - DNA, 15 bp, Homo sapiens
cacttacagatgcag

SEQ ID NO: 420079 - DNA, 15 bp, Homo sapiens
ccacttacagatgca

SEQ ID NO: 420080 - DNA, 15 bp, Homo sapiens
tccacttacagatgc

SEQ ID NO: 420081 - DNA, 15 bp, Homo sapiens
gtccacttacagatg

SEQ ID NO: 420082 - DNA, 15 bp, Homo sapiens
agtccacttacagat

SEQ ID NO: 420083 - DNA, 15 bp, Homo sapiens
gagtccacttacaga

SEQ ID NO: 420084 - DNA, 15 bp, Homo sapiens
agagtccacttacag

SEQ ID NO: 420085 - DNA, 15 bp, Homo sapiens
tagagtccacttaca

SEQ ID NO: 420086 - DNA, 15 bp, Homo sapiens
gtagagtccacttac

SEQ ID NO: 420087 - DNA, 15 bp, Homo sapiens
tgtagagtccactta

SEQ ID NO: 420088 - DNA, 15 bp, Homo sapiens
atgtagagtccactt

SEQ ID NO: 420089 - DNA, 15 bp, Homo sapiens
tatgtagagtccact

SEQ ID NO: 420090 - DNA, 15 bp, Homo sapiens
ctatgtagagtccac

SEQ ID NO: 420091 - DNA, 15 bp, Homo sapiens
actatgtagagtcca

SEQ ID NO: 420092 - DNA, 15 bp, Homo sapiens
gactatgtagagtcc

SEQ ID NO: 420093 - DNA, 15 bp, Homo sapiens
ggactatgtagagtc

SEQ ID NO: 420094 - DNA, 15 bp, Homo sapiens
aggactatgtagagt

SEQ ID NO: 420095 - DNA, 15 bp, Homo sapiens
aaggactatgtagag

SEQ ID NO: 420096 - DNA, 15 bp, Homo sapiens
aaaggactatgtaga

SEQ ID NO: 420097 - DNA, 15 bp, Homo sapiens
taaaggactatgtag

SEQ ID NO: 420098 - DNA, 15 bp, Homo sapiens
ttaaaggactatgta

SEQ ID NO: 420099 - DNA, 15 bp, Homo sapiens
cttaaaggactatgt

SEQ ID NO: 420100 - DNA, 15 bp, Homo sapiens
ccttaaaggactatg

SEQ ID NO: 420101 - DNA, 15 bp, Homo sapiens
accttaaaggactat

SEQ ID NO: 420102 - DNA, 15 bp, Homo sapiens
gaccttaaaggacta

SEQ ID NO: 420103 - DNA, 15 bp, Homo sapiens
ggaccttaaaggact

SEQ ID NO: 420104 - DNA, 15 bp, Homo sapiens
aggaccttaaaggac

SEQ ID NO: 420105 - DNA, 15 bp, Homo sapiens
aaggaccttaaagga

SEQ ID NO: 420106 - DNA, 15 bp, Homo sapiens
aaaggaccttaaagg

SEQ ID NO: 420107 - DNA, 15 bp, Homo sapiens
aaaaggaccttaaag

SEQ ID NO: 420108 - DNA, 15 bp, Homo sapiens
aaaaaggaccttaaa

SEQ ID NO: 420109 - DNA, 15 bp, Homo sapiens
taaaaaggaccttaa

SEQ ID NO: 420110 - DNA, 15 bp, Homo sapiens
ctaaaaaggacctta

SEQ ID NO: 420111 - DNA, 15 bp, Homo sapiens
gctaaaaaggacctt

SEQ ID NO: 420112 - DNA, 15 bp, Homo sapiens
cgctaaaaaggacct

SEQ ID NO: 420113 - DNA, 15 bp, Homo sapiens
gcgctaaaaaggacc

SEQ ID NO: 420114 - DNA, 15 bp, Homo sapiens
agcgctaaaaaggac

SEQ ID NO: 420115 - DNA, 15 bp, Homo sapiens
cagcgctaaaaagga

SEQ ID NO: 420116 - DNA, 15 bp, Homo sapiens
tcagcgctaaaaagg

SEQ ID NO: 420117 - DNA, 15 bp, Homo sapiens
gtcagcgctaaaaag

SEQ ID NO: 420118 - DNA, 15 bp, Homo sapiens
tgtcagcgctaaaaa

SEQ ID NO: 420119 - DNA, 15 bp, Homo sapiens
gtgtcagcgctaaaa

SEQ ID NO: 420120 - DNA, 15 bp, Homo sapiens
agtgtcagcgctaaa

SEQ ID NO: 420121 - DNA, 15 bp, Homo sapiens
aagtgtcagcgctaa

SEQ ID NO: 420122 - DNA, 15 bp, Homo sapiens
aaagtgtcagcgcta

SEQ ID NO: 420123 - DNA, 15 bp, Homo sapiens
taaagtgtcagcgct

SEQ ID NO: 420124 - DNA, 15 bp, Homo sapiens
ataaagtgtcagcgc

SEQ ID NO: 420125 - DNA, 15 bp, Homo sapiens
cataaagtgtcagcg

SEQ ID NO: 420126 - DNA, 15 bp, Homo sapiens
tcataaagtgtcagc

SEQ ID NO: 420127 - DNA, 15 bp, Homo sapiens
atcataaagtgtcag

SEQ ID NO: 420128 - DNA, 15 bp, Homo sapiens
aatcataaagtgtca

SEQ ID NO: 420129 - DNA, 15 bp, Homo sapiens
gaatcataaagtgtc

SEQ ID NO: 420130 - DNA, 15 bp, Homo sapiens
agaatcataaagtgt

SEQ ID NO: 420131 - DNA, 15 bp, Homo sapiens
cagaatcataaagtg

SEQ ID NO: 420132 - DNA, 15 bp, Homo sapiens
gcagaatcataaagt

SEQ ID NO: 420133 - DNA, 15 bp, Homo sapiens
agcagaatcataaag

SEQ ID NO: 420134 - DNA, 15 bp, Homo sapiens
cagcagaatcataaa

SEQ ID NO: 420135 - DNA, 15 bp, Homo sapiens
ccagcagaatcataa

SEQ ID NO: 420136 - DNA, 15 bp, Homo sapiens
tccagcagaatcata

SEQ ID NO: 420137 - DNA, 15 bp, Homo sapiens
ttccagcagaatcat

SEQ ID NO: 420138 - DNA, 15 bp, Homo sapiens
cttccagcagaatca

SEQ ID NO: 420139 - DNA, 15 bp, Homo sapiens
tcttccagcagaatc

SEQ ID NO: 420140 - DNA, 15 bp, Homo sapiens
ttcttccagcagaat

SEQ ID NO: 420141 - DNA, 15 bp, Homo sapiens
gttcttccagcagaa

SEQ ID NO: 420142 - DNA, 15 bp, Homo sapiens
agttcttccagcaga

SEQ ID NO: 420143 - DNA, 15 bp, Homo sapiens
cagttcttccagcag

SEQ ID NO: 420144 - DNA, 15 bp, Homo sapiens
tcagttcttccagca

SEQ ID NO: 420145 - DNA, 15 bp, Homo sapiens
ctcagttcttccagc

SEQ ID NO: 420146 - DNA, 15 bp, Homo sapiens
tctcagttcttccag

SEQ ID NO: 420147 - DNA, 15 bp, Homo sapiens
ttctcagttcttcca

SEQ ID NO: 420148 - DNA, 15 bp, Homo sapiens
tttctcagttcttcc

SEQ ID NO: 420149 - DNA, 15 bp, Homo sapiens
atttctcagttcttc

SEQ ID NO: 420150 - DNA, 15 bp, Homo sapiens
gatttctcagttctt

SEQ ID NO: 420151 - DNA, 15 bp, Homo sapiens
agatttctcagttct

SEQ ID NO: 420152 - DNA, 15 bp, Homo sapiens
cagatttctcagttc

SEQ ID NO: 420153 - DNA, 15 bp, Homo sapiens
tcagatttctcagtt

SEQ ID NO: 420154 - DNA, 15 bp, Homo sapiens
ttcagatttctcagt

SEQ ID NO: 420155 - DNA, 15 bp, Homo sapiens
cttcagatttctcag

SEQ ID NO: 420156 - DNA, 15 bp, Homo sapiens
tcttcagatttctca

SEQ ID NO: 420157 - DNA, 15 bp, Homo sapiens
ttcttcagatttctc

SEQ ID NO: 420158 - DNA, 15 bp, Homo sapiens
tttcttcagatttct

SEQ ID NO: 420159 - DNA, 15 bp, Homo sapiens
gtttcttcagatttc

SEQ ID NO: 420160 - DNA, 15 bp, Homo sapiens
ggtttcttcagattt

SEQ ID NO: 420161 - DNA, 15 bp, Homo sapiens
gggtttcttcagatt

SEQ ID NO: 420162 - DNA, 15 bp, Homo sapiens
tgggtttcttcagat

SEQ ID NO: 420163 - DNA, 15 bp, Homo sapiens
ctgggtttcttcaga

SEQ ID NO: 420164 - DNA, 15 bp, Homo sapiens
cctgggtttcttcag

SEQ ID NO: 420165 - DNA, 15 bp, Homo sapiens
ccctgggtttcttca

SEQ ID NO: 420166 - DNA, 15 bp, Homo sapiens
accctgggtttcttc

SEQ ID NO: 420167 - DNA, 15 bp, Homo sapiens
aaccctgggtttctt

SEQ ID NO: 420168 - DNA, 15 bp, Homo sapiens
aaaccctgggtttct

SEQ ID NO: 420169 - DNA, 15 bp, Homo sapiens
caaaccctgggtttc

SEQ ID NO: 420170 - DNA, 15 bp, Homo sapiens
acaaaccctgggttt

SEQ ID NO: 420171 - DNA, 15 bp, Homo sapiens
cacaaaccctgggtt

SEQ ID NO: 420172 - DNA, 15 bp, Homo sapiens
acacaaaccctgggt

SEQ ID NO: 420173 - DNA, 15 bp, Homo sapiens
cacacaaaccctggg

SEQ ID NO: 420174 - DNA, 15 bp, Homo sapiens
acacacaaaccctgg

SEQ ID NO: 420175 - DNA, 15 bp, Homo sapiens
cacacacaaaccctg

SEQ ID NO: 420176 - DNA, 15 bp, Homo sapiens
acacacacaaaccct

SEQ ID NO: 420177 - DNA, 15 bp, Homo sapiens
cacacacacaaaccc

SEQ ID NO: 420178 - DNA, 15 bp, Homo sapiens
acacacacacaaacc

SEQ ID NO: 420179 - DNA, 15 bp, Homo sapiens
cacacacacacaaac

SEQ ID NO: 420180 - DNA, 15 bp, Homo sapiens
tcacacacacacaaa

SEQ ID NO: 420181 - DNA, 15 bp, Homo sapiens
atcacacacacacaa

SEQ ID NO: 420182 - DNA, 15 bp, Homo sapiens
catcacacacacaca

SEQ ID NO: 420183 - DNA, 15 bp, Homo sapiens
ccatcacacacacac

SEQ ID NO: 420184 - DNA, 15 bp, Homo sapiens
cccatcacacacaca

SEQ ID NO: 420185 - DNA, 15 bp, Homo sapiens
acccatcacacacac

SEQ ID NO: 420186 - DNA, 15 bp, Homo sapiens
tacccatcacacaca

SEQ ID NO: 420187 - DNA, 15 bp, Homo sapiens
gtacccatcacacac

SEQ ID NO: 420188 - DNA, 15 bp, Homo sapiens
tgtacccatcacaca

SEQ ID NO: 420189 - DNA, 15 bp, Homo sapiens
ctgtacccatcacac

SEQ ID NO: 420190 - DNA, 15 bp, Homo sapiens
cctgtacccatcaca

SEQ ID NO: 420191 - DNA, 15 bp, Homo sapiens
gcctgtacccatcac

SEQ ID NO: 420192 - DNA, 15 bp, Homo sapiens
tgcctgtacccatca

SEQ ID NO: 420193 - DNA, 15 bp, Homo sapiens
atgcctgtacccatc

SEQ ID NO: 420194 - DNA, 15 bp, Homo sapiens
catgcctgtacccat

SEQ ID NO: 420195 - DNA, 15 bp, Homo sapiens
gcatgcctgtaccca

SEQ ID NO: 420196 - DNA, 15 bp, Homo sapiens
ggcatgcctgtaccc

SEQ ID NO: 420197 - DNA, 15 bp, Homo sapiens
tggcatgcctgtacc

SEQ ID NO: 420198 - DNA, 15 bp, Homo sapiens
ctggcatgcctgtac

SEQ ID NO: 420199 - DNA, 15 bp, Homo sapiens
cctggcatgcctgta

SEQ ID NO: 420200 - DNA, 15 bp, Homo sapiens
tcctggcatgcctgt

SEQ ID NO: 420201 - DNA, 15 bp, Homo sapiens
ctcctggcatgcctg

SEQ ID NO: 420202 - DNA, 15 bp, Homo sapiens
gctcctggcatgcct

SEQ ID NO: 420203 - DNA, 15 bp, Homo sapiens
ggctcctggcatgcc

SEQ ID NO: 420204 - DNA, 15 bp, Homo sapiens
aggctcctggcatgc

SEQ ID NO: 420205 - DNA, 15 bp, Homo sapiens
caggctcctggcatg

SEQ ID NO: 420206 - DNA, 15 bp, Homo sapiens
acaggctcctggcat

SEQ ID NO: 420207 - DNA, 15 bp, Homo sapiens
cacaggctcctggca

SEQ ID NO: 420208 - DNA, 15 bp, Homo sapiens
tcacaggctcctggc

SEQ ID NO: 420209 - DNA, 15 bp, Homo sapiens
ctcacaggctcctgg

SEQ ID NO: 420210 - DNA, 15 bp, Homo sapiens
tctcacaggctcctg

SEQ ID NO: 420211 - DNA, 15 bp, Homo sapiens
ctctcacaggctcct

SEQ ID NO: 420212 - DNA, 15 bp, Homo sapiens
cctctcacaggctcc

SEQ ID NO: 420213 - DNA, 15 bp, Homo sapiens
acctctcacaggctc

SEQ ID NO: 420214 - DNA, 15 bp, Homo sapiens
tacctctcacaggct

SEQ ID NO: 420215 - DNA, 15 bp, Homo sapiens
atacctctcacaggc

SEQ ID NO: 420216 - DNA, 15 bp, Homo sapiens
aatacctctcacagg

SEQ ID NO: 420217 - DNA, 15 bp, Homo sapiens
taatacctctcacag

SEQ ID NO: 420218 - DNA, 15 bp, Homo sapiens
ataatacctctcaca

SEQ ID NO: 420219 - DNA, 15 bp, Homo sapiens
cataatacctctcac

SEQ ID NO: 420220 - DNA, 15 bp, Homo sapiens
ccataatacctctca

SEQ ID NO: 420221 - DNA, 15 bp, Homo sapiens
tccataatacctctc

SEQ ID NO: 420222 - DNA, 15 bp, Homo sapiens
atccataatacctct

SEQ ID NO: 420223 - DNA, 15 bp, Homo sapiens
gatccataatacctc

SEQ ID NO: 420224 - DNA, 15 bp, Homo sapiens
agatccataatacct

SEQ ID NO: 420225 - DNA, 15 bp, Homo sapiens
cagatccataatacc

SEQ ID NO: 420226 - DNA, 15 bp, Homo sapiens
acagatccataatac

SEQ ID NO: 420227 - DNA, 15 bp, Homo sapiens
cacagatccataata

SEQ ID NO: 420228 - DNA, 15 bp, Homo sapiens
tcacagatccataat

SEQ ID NO: 420229 - DNA, 15 bp, Homo sapiens
gtcacagatccataa

SEQ ID NO: 420230 - DNA, 15 bp, Homo sapiens
tgtcacagatccata

SEQ ID NO: 420231 - DNA, 15 bp, Homo sapiens
atgtcacagatccat

SEQ ID NO: 420232 - DNA, 15 bp, Homo sapiens
tatgtcacagatcca

SEQ ID NO: 420233 - DNA, 15 bp, Homo sapiens
ctatgtcacagatcc

SEQ ID NO: 420234 - DNA, 15 bp, Homo sapiens
tctatgtcacagatc

SEQ ID NO: 420235 - DNA, 15 bp, Homo sapiens
gtctatgtcacagat

SEQ ID NO: 420236 - DNA, 15 bp, Homo sapiens
agtctatgtcacaga

SEQ ID NO: 420237 - DNA, 15 bp, Homo sapiens
aagtctatgtcacag

SEQ ID NO: 420238 - DNA, 15 bp, Homo sapiens
caagtctatgtcaca

SEQ ID NO: 420239 - DNA, 15 bp, Homo sapiens
acaagtctatgtcac

SEQ ID NO: 420240 - DNA, 15 bp, Homo sapiens
tacaagtctatgtca

SEQ ID NO: 420241 - DNA, 15 bp, Homo sapiens
ctacaagtctatgtc

SEQ ID NO: 420242 - DNA, 15 bp, Homo sapiens
actacaagtctatgt

SEQ ID NO: 420243 - DNA, 15 bp, Homo sapiens
cactacaagtctatg

SEQ ID NO: 420244 - DNA, 15 bp, Homo sapiens
ccactacaagtctat

SEQ ID NO: 420245 - DNA, 15 bp, Homo sapiens
gccactacaagtcta

SEQ ID NO: 420246 - DNA, 15 bp, Homo sapiens
tgccactacaagtct

SEQ ID NO: 420247 - DNA, 15 bp, Homo sapiens
ctgccactacaagtc

SEQ ID NO: 420248 - DNA, 15 bp, Homo sapiens
cctgccactacaagt

SEQ ID NO: 420249 - DNA, 15 bp, Homo sapiens
ccctgccactacaag

SEQ ID NO: 420250 - DNA, 15 bp, Homo sapiens
cccctgccactacaa

SEQ ID NO: 420251 - DNA, 15 bp, Homo sapiens
gcccctgccactaca

SEQ ID NO: 420252 - DNA, 15 bp, Homo sapiens
agcccctgccactac

SEQ ID NO: 420253 - DNA, 15 bp, Homo sapiens
tagcccctgccacta

SEQ ID NO: 420254 - DNA, 15 bp, Homo sapiens
ttagcccctgccact

SEQ ID NO: 420255 - DNA, 15 bp, Homo sapiens
cttagcccctgccac

SEQ ID NO: 420256 - DNA, 15 bp, Homo sapiens
acttagcccctgcca

SEQ ID NO: 420257 - DNA, 15 bp, Homo sapiens
gacttagcccctgcc

SEQ ID NO: 420258 - DNA, 15 bp, Homo sapiens
agacttagcccctgc

SEQ ID NO: 420259 - DNA, 15 bp, Homo sapiens
cagacttagcccctg

SEQ ID NO: 420260 - DNA, 15 bp, Homo sapiens
acagacttagcccct

SEQ ID NO: 420261 - DNA, 15 bp, Homo sapiens
tacagacttagcccc

SEQ ID NO: 420262 - DNA, 15 bp, Homo sapiens
ttacagacttagccc

SEQ ID NO: 420263 - DNA, 15 bp, Homo sapiens
attacagacttagcc

SEQ ID NO: 420264 - DNA, 15 bp, Homo sapiens
gattacagacttagc

SEQ ID NO: 420265 - DNA, 15 bp, Homo sapiens
ggattacagacttag

SEQ ID NO: 420266 - DNA, 15 bp, Homo sapiens
aggattacagactta

SEQ ID NO: 420267 - DNA, 15 bp, Homo sapiens
caggattacagactt

SEQ ID NO: 420268 - DNA, 15 bp, Homo sapiens
ccaggattacagact

SEQ ID NO: 420269 - DNA, 15 bp, Homo sapiens
tccaggattacagac

SEQ ID NO: 420270 - DNA, 15 bp, Homo sapiens
ctccaggattacaga

SEQ ID NO: 420271 - DNA, 15 bp, Homo sapiens
gctccaggattacag

SEQ ID NO: 420272 - DNA, 15 bp, Homo sapiens
tgctccaggattaca

SEQ ID NO: 420273 - DNA, 15 bp, Homo sapiens
gtgctccaggattac

SEQ ID NO: 420274 - DNA, 15 bp, Homo sapiens
ggtgctccaggatta

SEQ ID NO: 420275 - DNA, 15 bp, Homo sapiens
cggtgctccaggatt

SEQ ID NO: 420276 - DNA, 15 bp, Homo sapiens
gcggtgctccaggat

SEQ ID NO: 420277 - DNA, 15 bp, Homo sapiens
agcggtgctccagga

SEQ ID NO: 420278 - DNA, 15 bp, Homo sapiens
aagcggtgctccagg

SEQ ID NO: 420279 - DNA, 15 bp, Homo sapiens
caagcggtgctccag

SEQ ID NO: 420280 - DNA, 15 bp, Homo sapiens
acaagcggtgctcca

SEQ ID NO: 420281 - DNA, 15 bp, Homo sapiens
cacaagcggtgctcc

SEQ ID NO: 420282 - DNA, 15 bp, Homo sapiens
tcacaagcggtgctc

SEQ ID NO: 420283 - DNA, 15 bp, Homo sapiens
atcacaagcggtgct

SEQ ID NO: 420284 - DNA, 15 bp, Homo sapiens
aatcacaagcggtgc

SEQ ID NO: 420285 - DNA, 15 bp, Homo sapiens
caatcacaagcggtg

SEQ ID NO: 420286 - DNA, 15 bp, Homo sapiens
ccaatcacaagcggt

SEQ ID NO: 420287 - DNA, 15 bp, Homo sapiens
accaatcacaagcgg

SEQ ID NO: 420288 - DNA, 15 bp, Homo sapiens
caccaatcacaagcg

SEQ ID NO: 420289 - DNA, 15 bp, Homo sapiens
acaccaatcacaagc

SEQ ID NO: 420290 - DNA, 15 bp, Homo sapiens
cacaccaatcacaag

SEQ ID NO: 420291 - DNA, 15 bp, Homo sapiens
ccacaccaatcacaa

SEQ ID NO: 420292 - DNA, 15 bp, Homo sapiens
tccacaccaatcaca

SEQ ID NO: 420293 - DNA, 15 bp, Homo sapiens
ttccacaccaatcac

SEQ ID NO: 420294 - DNA, 15 bp, Homo sapiens
gttccacaccaatca

SEQ ID NO: 420295 - DNA, 15 bp, Homo sapiens
tgttccacaccaatc

SEQ ID NO: 420296 - DNA, 15 bp, Homo sapiens
atgttccacaccaat

SEQ ID NO: 420297 - DNA, 15 bp, Homo sapiens
catgttccacaccaa

SEQ ID NO: 420298 - DNA, 15 bp, Homo sapiens
acatgttccacacca

SEQ ID NO: 420299 - DNA, 15 bp, Homo sapiens
tacatgttccacacc

SEQ ID NO: 420300 - DNA, 15 bp, Homo sapiens
ctacatgttccacac

SEQ ID NO: 420301 - DNA, 15 bp, Homo sapiens
actacatgttccaca

SEQ ID NO: 420302 - DNA, 15 bp, Homo sapiens
cactacatgttccac

SEQ ID NO: 420303 - DNA, 15 bp, Homo sapiens
gcactacatgttcca

SEQ ID NO: 420304 - DNA, 15 bp, Homo sapiens
agcactacatgttcc

SEQ ID NO: 420305 - DNA, 15 bp, Homo sapiens
cagcactacatgttc

SEQ ID NO: 420306 - DNA, 15 bp, Homo sapiens
acagcactacatgtt

SEQ ID NO: 420307 - DNA, 15 bp, Homo sapiens
cacagcactacatgt

SEQ ID NO: 420308 - DNA, 15 bp, Homo sapiens
acacagcactacatg

SEQ ID NO: 420309 - DNA, 15 bp, Homo sapiens
cacacagcactacat

SEQ ID NO: 420310 - DNA, 15 bp, Homo sapiens
tcacacagcactaca

SEQ ID NO: 420311 - DNA, 15 bp, Homo sapiens
atcacacagcactac

SEQ ID NO: 420312 - DNA, 15 bp, Homo sapiens
catcacacagcacta

SEQ ID NO: 420313 - DNA, 15 bp, Homo sapiens
ccatcacacagcact

SEQ ID NO: 420314 - DNA, 15 bp, Homo sapiens
tccatcacacagcac

SEQ ID NO: 420315 - DNA, 15 bp, Homo sapiens
ttccatcacacagca

SEQ ID NO: 420316 - DNA, 15 bp, Homo sapiens
attccatcacacagc

SEQ ID NO: 420317 - DNA, 15 bp, Homo sapiens
gattccatcacacag

SEQ ID NO: 420318 - DNA, 15 bp, Homo sapiens
tgattccatcacaca

SEQ ID NO: 420319 - DNA, 15 bp, Homo sapiens
ttgattccatcacac

SEQ ID NO: 420320 - DNA, 15 bp, Homo sapiens
attgattccatcaca

SEQ ID NO: 420321 - DNA, 15 bp, Homo sapiens
cattgattccatcac

SEQ ID NO: 420322 - DNA, 15 bp, Homo sapiens
tcattgattccatca

SEQ ID NO: 420323 - DNA, 15 bp, Homo sapiens
ttcattgattccatc

SEQ ID NO: 420324 - DNA, 15 bp, Homo sapiens
gttcattgattccat

SEQ ID NO: 420325 - DNA, 15 bp, Homo sapiens
agttcattgattcca

SEQ ID NO: 420326 - DNA, 15 bp, Homo sapiens
tagttcattgattcc

SEQ ID NO: 420327 - DNA, 15 bp, Homo sapiens
ttagttcattgattc

SEQ ID NO: 420328 - DNA, 15 bp, Homo sapiens
cttagttcattgatt

SEQ ID NO: 420329 - DNA, 15 bp, Homo sapiens
ccttagttcattgat

SEQ ID NO: 420330 - DNA, 15 bp, Homo sapiens
tccttagttcattga

SEQ ID NO: 420331 - DNA, 15 bp, Homo sapiens
gtccttagttcattg

SEQ ID NO: 420332 - DNA, 15 bp, Homo sapiens
agtccttagttcatt

SEQ ID NO: 420333 - DNA, 15 bp, Homo sapiens
cagtccttagttcat

SEQ ID NO: 420334 - DNA, 15 bp, Homo sapiens
ccagtccttagttca

SEQ ID NO: 420335 - DNA, 15 bp, Homo sapiens
gccagtccttagttc

SEQ ID NO: 420336 - DNA, 15 bp, Homo sapiens
tgccagtccttagtt

SEQ ID NO: 420337 - DNA, 15 bp, Homo sapiens
ctgccagtccttagt

SEQ ID NO: 420338 - DNA, 15 bp, Homo sapiens
cctgccagtccttag

SEQ ID NO: 420339 - DNA, 15 bp, Homo sapiens
acctgccagtcctta

SEQ ID NO: 420340 - DNA, 15 bp, Homo sapiens
cacctgccagtcctt

SEQ ID NO: 420341 - DNA, 15 bp, Homo sapiens
gcacctgccagtcct

SEQ ID NO: 420342 - DNA, 15 bp, Homo sapiens
agcacctgccagtcc

SEQ ID NO: 420343 - DNA, 15 bp, Homo sapiens
gagcacctgccagtc

SEQ ID NO: 420344 - DNA, 15 bp, Homo sapiens
ggagcacctgccagt

SEQ ID NO: 420345 - DNA, 15 bp, Homo sapiens
tggagcacctgccag

SEQ ID NO: 420346 - DNA, 15 bp, Homo sapiens
ctggagcacctgcca

SEQ ID NO: 420347 - DNA, 15 bp, Homo sapiens
gctggagcacctgcc

SEQ ID NO: 420348 - DNA, 15 bp, Homo sapiens
tgctggagcacctgc

SEQ ID NO: 420349 - DNA, 15 bp, Homo sapiens
ctgctggagcacctg

SEQ ID NO: 420350 - DNA, 15 bp, Homo sapiens
gctgctggagcacct

SEQ ID NO: 420351 - DNA, 15 bp, Homo sapiens
tgctgctggagcacc

SEQ ID NO: 420352 - DNA, 15 bp, Homo sapiens
gtgctgctggagcac

SEQ ID NO: 420353 - DNA, 15 bp, Homo sapiens
tgtgctgctggagca

SEQ ID NO: 420354 - DNA, 15 bp, Homo sapiens
ttgtgctgctggagc

SEQ ID NO: 420355 - DNA, 15 bp, Homo sapiens
attgtgctgctggag

SEQ ID NO: 420356 - DNA, 15 bp, Homo sapiens
tattgtgctgctgga

SEQ ID NO: 420357 - DNA, 15 bp, Homo sapiens
atattgtgctgctgg

SEQ ID NO: 420358 - DNA, 15 bp, Homo sapiens
tatattgtgctgctg

SEQ ID NO: 420359 - DNA, 15 bp, Homo sapiens
ctatattgtgctgct

SEQ ID NO: 420360 - DNA, 15 bp, Homo sapiens
tctatattgtgctgc

SEQ ID NO: 420361 - DNA, 15 bp, Homo sapiens
ttctatattgtgctg

SEQ ID NO: 420362 - DNA, 15 bp, Homo sapiens
tttctatattgtgct

SEQ ID NO: 420363 - DNA, 15 bp, Homo sapiens
ctttctatattgtgc

SEQ ID NO: 420364 - DNA, 15 bp, Homo sapiens
gctttctatattgtg

SEQ ID NO: 420365 - DNA, 15 bp, Homo sapiens
tgctttctatattgt

SEQ ID NO: 420366 - DNA, 15 bp, Homo sapiens
ctgctttctatattg

SEQ ID NO: 420367 - DNA, 15 bp, Homo sapiens
tctgctttctatatt

SEQ ID NO: 420368 - DNA, 15 bp, Homo sapiens
ttctgctttctatat

SEQ ID NO: 420369 - DNA, 15 bp, Homo sapiens
tttctgctttctata

SEQ ID NO: 420370 - DNA, 15 bp, Homo sapiens
ttttctgctttctat

SEQ ID NO: 420371 - DNA, 15 bp, Homo sapiens
tttttctgctttcta

SEQ ID NO: 420372 - DNA, 15 bp, Homo sapiens
atttttctgctttct

SEQ ID NO: 420373 - DNA, 15 bp, Homo sapiens
catttttctgctttc

SEQ ID NO: 420374 - DNA, 15 bp, Homo sapiens
tcatttttctgcttt

SEQ ID NO: 420375 - DNA, 15 bp, Homo sapiens
gtcatttttctgctt

SEQ ID NO: 420376 - DNA, 15 bp, Homo sapiens
agtcatttttctgct

SEQ ID NO: 420377 - DNA, 15 bp, Homo sapiens
aagtcatttttctgc

SEQ ID NO: 420378 - DNA, 15 bp, Homo sapiens
caagtcatttttctg

SEQ ID NO: 420379 - DNA, 15 bp, Homo sapiens
ccaagtcatttttct

SEQ ID NO: 420380 - DNA, 15 bp, Homo sapiens
cccaagtcatttttc

SEQ ID NO: 420381 - DNA, 15 bp, Homo sapiens
ccccaagtcattttt

SEQ ID NO: 420382 - DNA, 15 bp, Homo sapiens
gccccaagtcatttt

SEQ ID NO: 420383 - DNA, 15 bp, Homo sapiens
tgccccaagtcattt

SEQ ID NO: 420384 - DNA, 15 bp, Homo sapiens
gtgccccaagtcatt

SEQ ID NO: 420385 - DNA, 15 bp, Homo sapiens
tgtgccccaagtcat

SEQ ID NO: 420386 - DNA, 15 bp, Homo sapiens
ctgtgccccaagtca

SEQ ID NO: 420387 - DNA, 15 bp, Homo sapiens
tctgtgccccaagtc

SEQ ID NO: 420388 - DNA, 15 bp, Homo sapiens
ttctgtgccccaagt

SEQ ID NO: 420389 - DNA, 15 bp, Homo sapiens
attctgtgccccaag

SEQ ID NO: 420390 - DNA, 15 bp, Homo sapiens
aattctgtgccccaa

SEQ ID NO: 420391 - DNA, 15 bp, Homo sapiens
aaattctgtgcccca

SEQ ID NO: 420392 - DNA, 15 bp, Homo sapiens
aaaattctgtgcccc

SEQ ID NO: 420393 - DNA, 15 bp, Homo sapiens
gaaaattctgtgccc

SEQ ID NO: 420394 - DNA, 15 bp, Homo sapiens
agaaaattctgtgcc

SEQ ID NO: 420395 - DNA, 15 bp, Homo sapiens
cagaaaattctgtgc

SEQ ID NO: 420396 - DNA, 15 bp, Homo sapiens
ccagaaaattctgtg

SEQ ID NO: 420397 - DNA, 15 bp, Homo sapiens
cccagaaaattctgt

SEQ ID NO: 420398 - DNA, 15 bp, Homo sapiens
acccagaaaattctg

SEQ ID NO: 420399 - DNA, 15 bp, Homo sapiens
gacccagaaaattct

SEQ ID NO: 420400 - DNA, 15 bp, Homo sapiens
ggacccagaaaattc

SEQ ID NO: 420401 - DNA, 15 bp, Homo sapiens
aggacccagaaaatt

SEQ ID NO: 420402 - DNA, 15 bp, Homo sapiens
aaggacccagaaaat

SEQ ID NO: 420403 - DNA, 15 bp, Homo sapiens
aaaggacccagaaaa

SEQ ID NO: 420404 - DNA, 15 bp, Homo sapiens
caaaggacccagaaa

SEQ ID NO: 420405 - DNA, 15 bp, Homo sapiens
ccaaaggacccagaa

SEQ ID NO: 420406 - DNA, 15 bp, Homo sapiens
tccaaaggacccaga

SEQ ID NO: 420407 - DNA, 15 bp, Homo sapiens
ctccaaaggacccag

SEQ ID NO: 420408 - DNA, 15 bp, Homo sapiens
actccaaaggaccca

SEQ ID NO: 420409 - DNA, 15 bp, Homo sapiens
gactccaaaggaccc

SEQ ID NO: 420410 - DNA, 15 bp, Homo sapiens
agactccaaaggacc

SEQ ID NO: 420411 - DNA, 15 bp, Homo sapiens
aagactccaaaggac

SEQ ID NO: 420412 - DNA, 15 bp, Homo sapiens
gaagactccaaagga

SEQ ID NO: 420413 - DNA, 15 bp, Homo sapiens
agaagactccaaagg

SEQ ID NO: 420414 - DNA, 15 bp, Homo sapiens
gagaagactccaaag

SEQ ID NO: 420415 - DNA, 15 bp, Homo sapiens
agagaagactccaaa

SEQ ID NO: 420416 - DNA, 15 bp, Homo sapiens
aagagaagactccaa

SEQ ID NO: 420417 - DNA, 15 bp, Homo sapiens
gaagagaagactcca

SEQ ID NO: 420418 - DNA, 15 bp, Homo sapiens
agaagagaagactcc

SEQ ID NO: 420419 - DNA, 15 bp, Homo sapiens
tagaagagaagactc

SEQ ID NO: 420420 - DNA, 15 bp, Homo sapiens
ttagaagagaagact

SEQ ID NO: 420421 - DNA, 15 bp, Homo sapiens
attagaagagaagac

SEQ ID NO: 420422 - DNA, 15 bp, Homo sapiens
tattagaagagaaga

SEQ ID NO: 420423 - DNA, 15 bp, Homo sapiens
ttattagaagagaag

SEQ ID NO: 420424 - DNA, 15 bp, Homo sapiens
tttattagaagagaa

SEQ ID NO: 420425 - DNA, 15 bp, Homo sapiens
atttattagaagaga

SEQ ID NO: 420426 - DNA, 15 bp, Homo sapiens
catttattagaagag

SEQ ID NO: 420427 - DNA, 15 bp, Homo sapiens
gcatttattagaaga

SEQ ID NO: 420428 - DNA, 15 bp, Homo sapiens
tgcatttattagaag

SEQ ID NO: 420429 - DNA, 15 bp, Homo sapiens
ttgcatttattagaa

SEQ ID NO: 420430 - DNA, 15 bp, Homo sapiens
tttgcatttattaga

SEQ ID NO: 420431 - DNA, 15 bp, Homo sapiens
ctttgcatttattag

SEQ ID NO: 420432 - DNA, 15 bp, Homo sapiens
gctttgcatttatta

SEQ ID NO: 420433 - DNA, 15 bp, Homo sapiens
ggctttgcatttatt

SEQ ID NO: 420434 - DNA, 15 bp, Homo sapiens
tggctttgcatttat

SEQ ID NO: 420435 - DNA, 15 bp, Homo sapiens
atggctttgcattta

SEQ ID NO: 420436 - DNA, 15 bp, Homo sapiens
catggctttgcattt

SEQ ID NO: 420437 - DNA, 15 bp, Homo sapiens
tcatggctttgcatt

SEQ ID NO: 420438 - DNA, 15 bp, Homo sapiens
ttcatggctttgcat

SEQ ID NO: 420439 - DNA, 15 bp, Homo sapiens
attcatggctttgca

SEQ ID NO: 420440 - DNA, 15 bp, Homo sapiens
gattcatggctttgc

SEQ ID NO: 420441 - DNA, 15 bp, Homo sapiens
agattcatggctttg

SEQ ID NO: 420442 - DNA, 15 bp, Homo sapiens
tagattcatggcttt

SEQ ID NO: 420443 - DNA, 15 bp, Homo sapiens
atagattcatggctt

SEQ ID NO: 420444 - DNA, 15 bp, Homo sapiens
aatagattcatggct

SEQ ID NO: 420445 - DNA, 15 bp, Homo sapiens
caatagattcatggc

SEQ ID NO: 420446 - DNA, 15 bp, Homo sapiens
tcaatagattcatgg

SEQ ID NO: 420447 - DNA, 15 bp, Homo sapiens
ctcaatagattcatg

SEQ ID NO: 420448 - DNA, 15 bp, Homo sapiens
cctcaatagattcat

SEQ ID NO: 420449 - DNA, 15 bp, Homo sapiens
ccctcaatagattca

SEQ ID NO: 420450 - DNA, 15 bp, Homo sapiens
gccctcaatagattc

SEQ ID NO: 420451 - DNA, 15 bp, Homo sapiens
ggccctcaatagatt

SEQ ID NO: 420452 - DNA, 15 bp, Homo sapiens
aggccctcaatagat

SEQ ID NO: 420453 - DNA, 15 bp, Homo sapiens
aaggccctcaataga

SEQ ID NO: 420454 - DNA, 15 bp, Homo sapiens
caaggccctcaatag

SEQ ID NO: 420455 - DNA, 15 bp, Homo sapiens
acaaggccctcaata

SEQ ID NO: 420456 - DNA, 15 bp, Homo sapiens
aacaaggccctcaat

SEQ ID NO: 420457 - DNA, 15 bp, Homo sapiens
caacaaggccctcaa

SEQ ID NO: 420458 - DNA, 15 bp, Homo sapiens
tcaacaaggccctca

SEQ ID NO: 420459 - DNA, 15 bp, Homo sapiens
ctcaacaaggccctc

SEQ ID NO: 420460 - DNA, 15 bp, Homo sapiens
actcaacaaggccct

SEQ ID NO: 420461 - DNA, 15 bp, Homo sapiens
cactcaacaaggccc

SEQ ID NO: 420462 - DNA, 15 bp, Homo sapiens
ccactcaacaaggcc

SEQ ID NO: 420463 - DNA, 15 bp, Homo sapiens
accactcaacaaggc

SEQ ID NO: 420464 - DNA, 15 bp, Homo sapiens
gaccactcaacaagg

SEQ ID NO: 420465 - DNA, 15 bp, Homo sapiens
tgaccactcaacaag

SEQ ID NO: 420466 - DNA, 15 bp, Homo sapiens
ctgaccactcaacaa

SEQ ID NO: 420467 - DNA, 15 bp, Homo sapiens
cctgaccactcaaca

SEQ ID NO: 420468 - DNA, 15 bp, Homo sapiens
tcctgaccactcaac

SEQ ID NO: 420469 - DNA, 15 bp, Homo sapiens
atcctgaccactcaa

SEQ ID NO: 420470 - DNA, 15 bp, Homo sapiens
aatcctgaccactca

SEQ ID NO: 420471 - DNA, 15 bp, Homo sapiens
caatcctgaccactc

SEQ ID NO: 420472 - DNA, 15 bp, Homo sapiens
acaatcctgaccact

SEQ ID NO: 420473 - DNA, 15 bp, Homo sapiens
tacaatcctgaccac

SEQ ID NO: 420474 - DNA, 15 bp, Homo sapiens
gtacaatcctgacca

SEQ ID NO: 420475 - DNA, 15 bp, Homo sapiens
tgtacaatcctgacc

SEQ ID NO: 420476 - DNA, 15 bp, Homo sapiens
ctgtacaatcctgac

SEQ ID NO: 420477 - DNA, 15 bp, Homo sapiens
actgtacaatcctga

SEQ ID NO: 420478 - DNA, 15 bp, Homo sapiens
cactgtacaatcctg

SEQ ID NO: 420479 - DNA, 15 bp, Homo sapiens
tcactgtacaatcct

SEQ ID NO: 420480 - DNA, 15 bp, Homo sapiens
ctcactgtacaatcc

SEQ ID NO: 420481 - DNA, 15 bp, Homo sapiens
gctcactgtacaatc

SEQ ID NO: 420482 - DNA, 15 bp, Homo sapiens
tgctcactgtacaat

SEQ ID NO: 420483 - DNA, 15 bp, Homo sapiens
ctgctcactgtacaa

SEQ ID NO: 420484 - DNA, 15 bp, Homo sapiens
actgctcactgtaca

SEQ ID NO: 420485 - DNA, 15 bp, Homo sapiens
tactgctcactgtac

SEQ ID NO: 420486 - DNA, 15 bp, Homo sapiens
gtactgctcactgta

SEQ ID NO: 420487 - DNA, 15 bp, Homo sapiens
ggtactgctcactgt

SEQ ID NO: 420488 - DNA, 15 bp, Homo sapiens
gggtactgctcactg

SEQ ID NO: 420489 - DNA, 15 bp, Homo sapiens
agggtactgctcact

SEQ ID NO: 420490 - DNA, 15 bp, Homo sapiens
aagggtactgctcac

SEQ ID NO: 420491 - DNA, 15 bp, Homo sapiens
gaagggtactgctca

SEQ ID NO: 420492 - DNA, 15 bp, Homo sapiens
tgaagggtactgctc

SEQ ID NO: 420493 - DNA, 15 bp, Homo sapiens
atgaagggtactgct

SEQ ID NO: 420494 - DNA, 15 bp, Homo sapiens
gatgaagggtactgc

SEQ ID NO: 420495 - DNA, 15 bp, Homo sapiens
tgatgaagggtactg

SEQ ID NO: 420496 - DNA, 15 bp, Homo sapiens
atgatgaagggtact

SEQ ID NO: 420497 - DNA, 15 bp, Homo sapiens
catgatgaagggtac

SEQ ID NO: 420498 - DNA, 15 bp, Homo sapiens
tcatgatgaagggta

SEQ ID NO: 420499 - DNA, 15 bp, Homo sapiens
atcatgatgaagggt

SEQ ID NO: 420500 - DNA, 15 bp, Homo sapiens
catcatgatgaaggg

SEQ ID NO: 420501 - DNA, 15 bp, Homo sapiens
tcatcatgatgaagg

SEQ ID NO: 420502 - DNA, 15 bp, Homo sapiens
atcatcatgatgaag

SEQ ID NO: 420503 - DNA, 15 bp, Homo sapiens
aatcatcatgatgaa

SEQ ID NO: 420504 - DNA, 15 bp, Homo sapiens
aaatcatcatgatga

SEQ ID NO: 420505 - DNA, 15 bp, Homo sapiens
taaatcatcatgatg

SEQ ID NO: 420506 - DNA, 15 bp, Homo sapiens
gtaaatcatcatgat

SEQ ID NO: 420507 - DNA, 15 bp, Homo sapiens
tgtaaatcatcatga

SEQ ID NO: 420508 - DNA, 15 bp, Homo sapiens
ctgtaaatcatcatg

SEQ ID NO: 420509 - DNA, 15 bp, Homo sapiens
actgtaaatcatcat

SEQ ID NO: 420510 - DNA, 15 bp, Homo sapiens
tactgtaaatcatca

SEQ ID NO: 420511 - DNA, 15 bp, Homo sapiens
gtactgtaaatcatc

SEQ ID NO: 420512 - DNA, 15 bp, Homo sapiens
agtactgtaaatcat

SEQ ID NO: 420513 - DNA, 15 bp, Homo sapiens
aagtactgtaaatca

SEQ ID NO: 420514 - DNA, 15 bp, Homo sapiens
aaagtactgtaaatc

SEQ ID NO: 420515 - DNA, 15 bp, Homo sapiens
gaaagtactgtaaat

SEQ ID NO: 420516 - DNA, 15 bp, Homo sapiens
agaaagtactgtaaa

SEQ ID NO: 420517 - DNA, 15 bp, Homo sapiens
tagaaagtactgtaa

SEQ ID NO: 420518 - DNA, 15 bp, Homo sapiens
gtagaaagtactgta

SEQ ID NO: 420519 - DNA, 15 bp, Homo sapiens
ggtagaaagtactgt

SEQ ID NO: 420520 - DNA, 15 bp, Homo sapiens
tggtagaaagtactg

SEQ ID NO: 420521 - DNA, 15 bp, Homo sapiens
ttggtagaaagtact

SEQ ID NO: 420522 - DNA, 15 bp, Homo sapiens
gttggtagaaagtac

SEQ ID NO: 420523 - DNA, 15 bp, Homo sapiens
agttggtagaaagta

SEQ ID NO: 420524 - DNA, 15 bp, Homo sapiens
cagttggtagaaagt

SEQ ID NO: 420525 - DNA, 15 bp, Homo sapiens
acagttggtagaaag

SEQ ID NO: 420526 - DNA, 15 bp, Homo sapiens
gacagttggtagaaa

SEQ ID NO: 420527 - DNA, 15 bp, Homo sapiens
agacagttggtagaa

SEQ ID NO: 420528 - DNA, 15 bp, Homo sapiens
tagacagttggtaga

SEQ ID NO: 420529 - DNA, 15 bp, Homo sapiens
ctagacagttggtag

SEQ ID NO: 420530 - DNA, 15 bp, Homo sapiens
actagacagttggta

SEQ ID NO: 420531 - DNA, 15 bp, Homo sapiens
tactagacagttggt

SEQ ID NO: 420532 - DNA, 15 bp, Homo sapiens
ttactagacagttgg

SEQ ID NO: 420533 - DNA, 15 bp, Homo sapiens
gttactagacagttg

SEQ ID NO: 420534 - DNA, 15 bp, Homo sapiens
tgttactagacagtt

SEQ ID NO: 420535 - DNA, 15 bp, Homo sapiens
ctgttactagacagt

SEQ ID NO: 420536 - DNA, 15 bp, Homo sapiens
cctgttactagacag

SEQ ID NO: 420537 - DNA, 15 bp, Homo sapiens
gcctgttactagaca

SEQ ID NO: 420538 - DNA, 15 bp, Homo sapiens
tgcctgttactagac

SEQ ID NO: 420539 - DNA, 15 bp, Homo sapiens
ttgcctgttactaga

SEQ ID NO: 420540 - DNA, 15 bp, Homo sapiens
tttgcctgttactag

SEQ ID NO: 420541 - DNA, 15 bp, Homo sapiens
ttttgcctgttacta

SEQ ID NO: 420542 - DNA, 15 bp, Homo sapiens
attttgcctgttact

SEQ ID NO: 420543 - DNA, 15 bp, Homo sapiens
cattttgcctgttac

SEQ ID NO: 420544 - DNA, 15 bp, Homo sapiens
gcattttgcctgtta

SEQ ID NO: 420545 - DNA, 15 bp, Homo sapiens
agcattttgcctgtt

SEQ ID NO: 420546 - DNA, 15 bp, Homo sapiens
cagcattttgcctgt

SEQ ID NO: 420547 - DNA, 15 bp, Homo sapiens
acagcattttgcctg

SEQ ID NO: 420548 - DNA, 15 bp, Homo sapiens
tacagcattttgcct

SEQ ID NO: 420549 - DNA, 15 bp, Homo sapiens
ctacagcattttgcc

SEQ ID NO: 420550 - DNA, 15 bp, Homo sapiens
actacagcattttgc

SEQ ID NO: 420551 - DNA, 15 bp, Homo sapiens
tactacagcattttg

SEQ ID NO: 420552 - DNA, 15 bp, Homo sapiens
ttactacagcatttt

SEQ ID NO: 420553 - DNA, 15 bp, Homo sapiens
gttactacagcattt

SEQ ID NO: 420554 - DNA, 15 bp, Homo sapiens
ggttactacagcatt

SEQ ID NO: 420555 - DNA, 15 bp, Homo sapiens
aggttactacagcat

SEQ ID NO: 420556 - DNA, 15 bp, Homo sapiens
caggttactacagca

SEQ ID NO: 420557 - DNA, 15 bp, Homo sapiens
tcaggttactacagc

SEQ ID NO: 420558 - DNA, 15 bp, Homo sapiens
ttcaggttactacag

SEQ ID NO: 420559 - DNA, 15 bp, Homo sapiens
attcaggttactaca

SEQ ID NO: 420560 - DNA, 15 bp, Homo sapiens
aattcaggttactac

SEQ ID NO: 420561 - DNA, 15 bp, Homo sapiens
taattcaggttacta

SEQ ID NO: 420562 - DNA, 15 bp, Homo sapiens
ataattcaggttact

SEQ ID NO: 420563 - DNA, 15 bp, Homo sapiens
tataattcaggttac

SEQ ID NO: 420564 - DNA, 15 bp, Homo sapiens
ctataattcaggtta

SEQ ID NO: 420565 - DNA, 15 bp, Homo sapiens
tctataattcaggtt

SEQ ID NO: 420566 - DNA, 15 bp, Homo sapiens
gtctataattcaggt

SEQ ID NO: 420567 - DNA, 15 bp, Homo sapiens
agtctataattcagg

SEQ ID NO: 420568 - DNA, 15 bp, Homo sapiens
cagtctataattcag

SEQ ID NO: 420569 - DNA, 15 bp, Homo sapiens
ccagtctataattca

SEQ ID NO: 420570 - DNA, 15 bp, Homo sapiens
gccagtctataattc

SEQ ID NO: 420571 - DNA, 15 bp, Homo sapiens
tgccagtctataatt

SEQ ID NO: 420572 - DNA, 15 bp, Homo sapiens
atgccagtctataat

SEQ ID NO: 420573 - DNA, 15 bp, Homo sapiens
tatgccagtctataa

SEQ ID NO: 420574 - DNA, 15 bp, Homo sapiens
ttatgccagtctata

SEQ ID NO: 420575 - DNA, 15 bp, Homo sapiens
tttatgccagtctat

SEQ ID NO: 420576 - DNA, 15 bp, Homo sapiens
ctttatgccagtcta

SEQ ID NO: 420577 - DNA, 15 bp, Homo sapiens
actttatgccagtct

SEQ ID NO: 420578 - DNA, 15 bp, Homo sapiens
cactttatgccagtc

SEQ ID NO: 420579 - DNA, 15 bp, Homo sapiens
ccactttatgccagt

SEQ ID NO: 420580 - DNA, 15 bp, Homo sapiens
cccactttatgccag

SEQ ID NO: 420581 - DNA, 15 bp, Homo sapiens
ccccactttatgcca

SEQ ID NO: 420582 - DNA, 15 bp, Homo sapiens
accccactttatgcc

SEQ ID NO: 420583 - DNA, 15 bp, Homo sapiens
caccccactttatgc

SEQ ID NO: 420584 - DNA, 15 bp, Homo sapiens
gcaccccactttatg

SEQ ID NO: 420585 - DNA, 15 bp, Homo sapiens
ggcaccccactttat

SEQ ID NO: 420586 - DNA, 15 bp, Homo sapiens
aggcaccccacttta

SEQ ID NO: 420587 - DNA, 15 bp, Homo sapiens
gaggcaccccacttt

SEQ ID NO: 420588 - DNA, 15 bp, Homo sapiens
tgaggcaccccactt

SEQ ID NO: 420589 - DNA, 15 bp, Homo sapiens
atgaggcaccccact

SEQ ID NO: 420590 - DNA, 15 bp, Homo sapiens
catgaggcaccccac

SEQ ID NO: 420591 - DNA, 15 bp, Homo sapiens
ccatgaggcacccca

SEQ ID NO: 420592 - DNA, 15 bp, Homo sapiens
gccatgaggcacccc

SEQ ID NO: 420593 - DNA, 15 bp, Homo sapiens
tgccatgaggcaccc

SEQ ID NO: 420594 - DNA, 15 bp, Homo sapiens
ctgccatgaggcacc

SEQ ID NO: 420595 - DNA, 15 bp, Homo sapiens
gctgccatgaggcac

SEQ ID NO: 420596 - DNA, 15 bp, Homo sapiens
tgctgccatgaggca

SEQ ID NO: 420597 - DNA, 15 bp, Homo sapiens
atgctgccatgaggc

SEQ ID NO: 420598 - DNA, 15 bp, Homo sapiens
catgctgccatgagg

SEQ ID NO: 420599 - DNA, 15 bp, Homo sapiens
acatgctgccatgag

SEQ ID NO: 420600 - DNA, 15 bp, Homo sapiens
cacatgctgccatga

SEQ ID NO: 420601 - DNA, 15 bp, Homo sapiens
tcacatgctgccatg

SEQ ID NO: 420602 - DNA, 15 bp, Homo sapiens
ctcacatgctgccat

SEQ ID NO: 420603 - DNA, 15 bp, Homo sapiens
cctcacatgctgcca

SEQ ID NO: 420604 - DNA, 15 bp, Homo sapiens
acctcacatgctgcc

SEQ ID NO: 420605 - DNA, 15 bp, Homo sapiens
cacctcacatgctgc

SEQ ID NO: 420606 - DNA, 15 bp, Homo sapiens
acacctcacatgctg

SEQ ID NO: 420607 - DNA, 15 bp, Homo sapiens
cacacctcacatgct

SEQ ID NO: 420608 - DNA, 15 bp, Homo sapiens
gcacacctcacatgc

SEQ ID NO: 420609 - DNA, 15 bp, Homo sapiens
agcacacctcacatg

SEQ ID NO: 420610 - DNA, 15 bp, Homo sapiens
cagcacacctcacat

SEQ ID NO: 420611 - DNA, 15 bp, Homo sapiens
gcagcacacctcaca

SEQ ID NO: 420612 - DNA, 15 bp, Homo sapiens
ggcagcacacctcac

SEQ ID NO: 420613 - DNA, 15 bp, Homo sapiens
gggcagcacacctca

SEQ ID NO: 420614 - DNA, 15 bp, Homo sapiens
tgggcagcacacctc

SEQ ID NO: 420615 - DNA, 15 bp, Homo sapiens
atgggcagcacacct

SEQ ID NO: 420616 - DNA, 15 bp, Homo sapiens
catgggcagcacacc

SEQ ID NO: 420617 - DNA, 15 bp, Homo sapiens
ccatgggcagcacac

SEQ ID NO: 420618 - DNA, 15 bp, Homo sapiens
cccatgggcagcaca

SEQ ID NO: 420619 - DNA, 15 bp, Homo sapiens
tcccatgggcagcac

SEQ ID NO: 420620 - DNA, 15 bp, Homo sapiens
ctcccatgggcagca

SEQ ID NO: 420621 - DNA, 15 bp, Homo sapiens
cctcccatgggcagc

SEQ ID NO: 420622 - DNA, 15 bp, Homo sapiens
ccctcccatgggcag

SEQ ID NO: 420623 - DNA, 15 bp, Homo sapiens
tccctcccatgggca

SEQ ID NO: 420624 - DNA, 15 bp, Homo sapiens
atccctcccatgggc

SEQ ID NO: 420625 - DNA, 15 bp, Homo sapiens
catccctcccatggg

SEQ ID NO: 420626 - DNA, 15 bp, Homo sapiens
acatccctcccatgg

SEQ ID NO: 420627 - DNA, 15 bp, Homo sapiens
cacatccctcccatg

SEQ ID NO: 420628 - DNA, 15 bp, Homo sapiens
gcacatccctcccat

SEQ ID NO: 420629 - DNA, 15 bp, Homo sapiens
tgcacatccctccca

SEQ ID NO: 420630 - DNA, 15 bp, Homo sapiens
atgcacatccctccc

SEQ ID NO: 420631 - DNA, 15 bp, Homo sapiens
gatgcacatccctcc

SEQ ID NO: 420632 - DNA, 15 bp, Homo sapiens
tgatgcacatccctc

SEQ ID NO: 420633 - DNA, 15 bp, Homo sapiens
atgatgcacatccct

SEQ ID NO: 420634 - DNA, 15 bp, Homo sapiens
aatgatgcacatccc

SEQ ID NO: 420635 - DNA, 15 bp, Homo sapiens
taatgatgcacatcc

SEQ ID NO: 420636 - DNA, 15 bp, Homo sapiens
ttaatgatgcacatc

SEQ ID NO: 420637 - DNA, 15 bp, Homo sapiens
gttaatgatgcacat

SEQ ID NO: 420638 - DNA, 15 bp, Homo sapiens
tgttaatgatgcaca

SEQ ID NO: 420639 - DNA, 15 bp, Homo sapiens
atgttaatgatgcac

SEQ ID NO: 420640 - DNA, 15 bp, Homo sapiens
tatgttaatgatgca

SEQ ID NO: 420641 - DNA, 15 bp, Homo sapiens
ctatgttaatgatgc

SEQ ID NO: 420642 - DNA, 15 bp, Homo sapiens
actatgttaatgatg

SEQ ID NO: 420643 - DNA, 15 bp, Homo sapiens
tactatgttaatgat

SEQ ID NO: 420644 - DNA, 15 bp, Homo sapiens
ttactatgttaatga

SEQ ID NO: 420645 - DNA, 15 bp, Homo sapiens
tttactatgttaatg

SEQ ID NO: 420646 - DNA, 15 bp, Homo sapiens
atttactatgttaat

SEQ ID NO: 420647 - DNA, 15 bp, Homo sapiens
catttactatgttaa

SEQ ID NO: 420648 - DNA, 15 bp, Homo sapiens
ccatttactatgtta

SEQ ID NO: 420649 - DNA, 15 bp, Homo sapiens
gccatttactatgtt

SEQ ID NO: 420650 - DNA, 15 bp, Homo sapiens
tgccatttactatgt

SEQ ID NO: 420651 - DNA, 15 bp, Homo sapiens
ctgccatttactatg

SEQ ID NO: 420652 - DNA, 15 bp, Homo sapiens
gctgccatttactat

SEQ ID NO: 420653 - DNA, 15 bp, Homo sapiens
agctgccatttacta

SEQ ID NO: 420654 - DNA, 15 bp, Homo sapiens
aagctgccatttact

SEQ ID NO: 420655 - DNA, 15 bp, Homo sapiens
aaagctgccatttac

SEQ ID NO: 420656 - DNA, 15 bp, Homo sapiens
caaagctgccattta

SEQ ID NO: 420657 - DNA, 15 bp, Homo sapiens
gcaaagctgccattt

SEQ ID NO: 420658 - DNA, 15 bp, Homo sapiens
agcaaagctgccatt

SEQ ID NO: 420659 - DNA, 15 bp, Homo sapiens
tagcaaagctgccat

SEQ ID NO: 420660 - DNA, 15 bp, Homo sapiens
atagcaaagctgcca

SEQ ID NO: 420661 - DNA, 15 bp, Homo sapiens
aatagcaaagctgcc

SEQ ID NO: 420662 - DNA, 15 bp, Homo sapiens
taatagcaaagctgc

SEQ ID NO: 420663 - DNA, 15 bp, Homo sapiens
gtaatagcaaagctg

SEQ ID NO: 420664 - DNA, 15 bp, Homo sapiens
agtaatagcaaagct

SEQ ID NO: 420665 - DNA, 15 bp, Homo sapiens
aagtaatagcaaagc

SEQ ID NO: 420666 - DNA, 15 bp, Homo sapiens
aaagtaatagcaaag

SEQ ID NO: 420667 - DNA, 15 bp, Homo sapiens
aaaagtaatagcaaa

SEQ ID NO: 420668 - DNA, 15 bp, Homo sapiens
caaaagtaatagcaa

SEQ ID NO: 420669 - DNA, 15 bp, Homo sapiens
tcaaaagtaatagca

SEQ ID NO: 420670 - DNA, 15 bp, Homo sapiens
ttcaaaagtaatagc

SEQ ID NO: 420671 - DNA, 15 bp, Homo sapiens
tttcaaaagtaatag

SEQ ID NO: 420672 - DNA, 15 bp, Homo sapiens
ttttcaaaagtaata

SEQ ID NO: 420673 - DNA, 15 bp, Homo sapiens
gttttcaaaagtaat

SEQ ID NO: 420674 - DNA, 15 bp, Homo sapiens
ggttttcaaaagtaa

SEQ ID NO: 420675 - DNA, 15 bp, Homo sapiens
tggttttcaaaagta

SEQ ID NO: 420676 - DNA, 15 bp, Homo sapiens
ttggttttcaaaagt

SEQ ID NO: 420677 - DNA, 15 bp, Homo sapiens
gttggttttcaaaag

SEQ ID NO: 420678 - DNA, 15 bp, Homo sapiens
agttggttttcaaaa

SEQ ID NO: 420679 - DNA, 15 bp, Homo sapiens
cagttggttttcaaa

SEQ ID NO: 420680 - DNA, 15 bp, Homo sapiens
gcagttggttttcaa

SEQ ID NO: 420681 - DNA, 15 bp, Homo sapiens
tgcagttggttttca

SEQ ID NO: 420682 - DNA, 15 bp, Homo sapiens
ctgcagttggttttc

SEQ ID NO: 420683 - DNA, 15 bp, Homo sapiens
gctgcagttggtttt

SEQ ID NO: 420684 - DNA, 15 bp, Homo sapiens
tgctgcagttggttt

SEQ ID NO: 420685 - DNA, 15 bp, Homo sapiens
ctgctgcagttggtt

SEQ ID NO: 420686 - DNA, 15 bp, Homo sapiens
cctgctgcagttggt

SEQ ID NO: 420687 - DNA, 15 bp, Homo sapiens
gcctgctgcagttgg

SEQ ID NO: 420688 - DNA, 15 bp, Homo sapiens
tgcctgctgcagttg

SEQ ID NO: 420689 - DNA, 15 bp, Homo sapiens
gtgcctgctgcagtt

SEQ ID NO: 420690 - DNA, 15 bp, Homo sapiens
ggtgcctgctgcagt

SEQ ID NO: 420691 - DNA, 15 bp, Homo sapiens
cggtgcctgctgcag

SEQ ID NO: 420692 - DNA, 15 bp, Homo sapiens
tcggtgcctgctgca

SEQ ID NO: 420693 - DNA, 15 bp, Homo sapiens
gtcggtgcctgctgc

SEQ ID NO: 420694 - DNA, 15 bp, Homo sapiens
agtcggtgcctgctg

SEQ ID NO: 420695 - DNA, 15 bp, Homo sapiens
aagtcggtgcctgct

SEQ ID NO: 420696 - DNA, 15 bp, Homo sapiens
taagtcggtgcctgc

SEQ ID NO: 420697 - DNA, 15 bp, Homo sapiens
ctaagtcggtgcctg

SEQ ID NO: 420698 - DNA, 15 bp, Homo sapiens
cctaagtcggtgcct

SEQ ID NO: 420699 - DNA, 15 bp, Homo sapiens
acctaagtcggtgcc

SEQ ID NO: 420700 - DNA, 15 bp, Homo sapiens
cacctaagtcggtgc

SEQ ID NO: 420701 - DNA, 15 bp, Homo sapiens
acacctaagtcggtg

SEQ ID NO: 420702 - DNA, 15 bp, Homo sapiens
aacacctaagtcggt

SEQ ID NO: 420703 - DNA, 15 bp, Homo sapiens
aaacacctaagtcgg

SEQ ID NO: 420704 - DNA, 15 bp, Homo sapiens
aaaacacctaagtcg

SEQ ID NO: 420705 - DNA, 15 bp, Homo sapiens
taaaacacctaagtc

SEQ ID NO: 420706 - DNA, 15 bp, Homo sapiens
gtaaaacacctaagt

SEQ ID NO: 420707 - DNA, 15 bp, Homo sapiens
tgtaaaacacctaag

SEQ ID NO: 420708 - DNA, 15 bp, Homo sapiens
atgtaaaacacctaa

SEQ ID NO: 420709 - DNA, 15 bp, Homo sapiens
catgtaaaacaccta

SEQ ID NO: 420710 - DNA, 15 bp, Homo sapiens
ccatgtaaaacacct

SEQ ID NO: 420711 - DNA, 15 bp, Homo sapiens
cccatgtaaaacacc

SEQ ID NO: 420712 - DNA, 15 bp, Homo sapiens
ccccatgtaaaacac

SEQ ID NO: 420713 - DNA, 15 bp, Homo sapiens
accccatgtaaaaca

SEQ ID NO: 420714 - DNA, 15 bp, Homo sapiens
aaccccatgtaaaac

SEQ ID NO: 420715 - DNA, 15 bp, Homo sapiens
taaccccatgtaaaa

SEQ ID NO: 420716 - DNA, 15 bp, Homo sapiens
ctaaccccatgtaaa

SEQ ID NO: 420717 - DNA, 15 bp, Homo sapiens
actaaccccatgtaa

SEQ ID NO: 420718 - DNA, 15 bp, Homo sapiens
tactaaccccatgta

SEQ ID NO: 420719 - DNA, 15 bp, Homo sapiens
atactaaccccatgt

SEQ ID NO: 420720 - DNA, 15 bp, Homo sapiens
catactaaccccatg

SEQ ID NO: 420721 - DNA, 15 bp, Homo sapiens
tcatactaaccccat

SEQ ID NO: 420722 - DNA, 15 bp, Homo sapiens
ttcatactaacccca

SEQ ID NO: 420723 - DNA, 15 bp, Homo sapiens
tttcatactaacccc

SEQ ID NO: 420724 - DNA, 15 bp, Homo sapiens
ttttcatactaaccc

SEQ ID NO: 420725 - DNA, 15 bp, Homo sapiens
attttcatactaacc

SEQ ID NO: 420726 - DNA, 15 bp, Homo sapiens
aattttcatactaac

SEQ ID NO: 420727 - DNA, 15 bp, Homo sapiens
gaattttcatactaa

SEQ ID NO: 420728 - DNA, 15 bp, Homo sapiens
tgaattttcatacta

SEQ ID NO: 420729 - DNA, 15 bp, Homo sapiens
ctgaattttcatact

SEQ ID NO: 420730 - DNA, 15 bp, Homo sapiens
cctgaattttcatac

SEQ ID NO: 420731 - DNA, 15 bp, Homo sapiens
tcctgaattttcata

SEQ ID NO: 420732 - DNA, 15 bp, Homo sapiens
gtcctgaattttcat

SEQ ID NO: 420733 - DNA, 15 bp, Homo sapiens
ggtcctgaattttca

SEQ ID NO: 420734 - DNA, 15 bp, Homo sapiens
gggtcctgaattttc

SEQ ID NO: 420735 - DNA, 15 bp, Homo sapiens
agggtcctgaatttt

SEQ ID NO: 420736 - DNA, 15 bp, Homo sapiens
aagggtcctgaattt

SEQ ID NO: 420737 - DNA, 15 bp, Homo sapiens
caagggtcctgaatt

SEQ ID NO: 420738 - DNA, 15 bp, Homo sapiens
tcaagggtcctgaat

SEQ ID NO: 420739 - DNA, 15 bp, Homo sapiens
ctcaagggtcctgaa

SEQ ID NO: 420740 - DNA, 15 bp, Homo sapiens
tctcaagggtcctga

SEQ ID NO: 420741 - DNA, 15 bp, Homo sapiens
atctcaagggtcctg

SEQ ID NO: 420742 - DNA, 15 bp, Homo sapiens
tatctcaagggtcct

SEQ ID NO: 420743 - DNA, 15 bp, Homo sapiens
ttatctcaagggtcc

SEQ ID NO: 420744 - DNA, 15 bp, Homo sapiens
tttatctcaagggtc

SEQ ID NO: 420745 - DNA, 15 bp, Homo sapiens
atttatctcaagggt

SEQ ID NO: 420746 - DNA, 15 bp, Homo sapiens
tatttatctcaaggg

SEQ ID NO: 420747 - DNA, 15 bp, Homo sapiens
ttatttatctcaagg

SEQ ID NO: 420748 - DNA, 15 bp, Homo sapiens
gttatttatctcaag

SEQ ID NO: 420749 - DNA, 15 bp, Homo sapiens
tgttatttatctcaa

SEQ ID NO: 420750 - DNA, 15 bp, Homo sapiens
ttgttatttatctca

SEQ ID NO: 420751 - DNA, 15 bp, Homo sapiens
tttgttatttatctc

SEQ ID NO: 420752 - DNA, 15 bp, Homo sapiens
atttgttatttatct

SEQ ID NO: 420753 - DNA, 15 bp, Homo sapiens
tatttgttatttatc

SEQ ID NO: 420754 - DNA, 15 bp, Homo sapiens
atatttgttatttat

SEQ ID NO: 420755 - DNA, 15 bp, Homo sapiens
catatttgttattta

SEQ ID NO: 420756 - DNA, 15 bp, Homo sapiens
tcatatttgttattt

SEQ ID NO: 420757 - DNA, 15 bp, Homo sapiens
atcatatttgttatt

SEQ ID NO: 420758 - DNA, 15 bp, Homo sapiens
aatcatatttgttat

SEQ ID NO: 420759 - DNA, 15 bp, Homo sapiens
aaatcatatttgtta

SEQ ID NO: 420760 - DNA, 15 bp, Homo sapiens
gaaatcatatttgtt

SEQ ID NO: 420761 - DNA, 15 bp, Homo sapiens
ggaaatcatatttgt

SEQ ID NO: 420762 - DNA, 15 bp, Homo sapiens
tggaaatcatatttg

SEQ ID NO: 420763 - DNA, 15 bp, Homo sapiens
gtggaaatcatattt

SEQ ID NO: 420764 - DNA, 15 bp, Homo sapiens
agtggaaatcatatt

SEQ ID NO: 420765 - DNA, 15 bp, Homo sapiens
aagtggaaatcatat

SEQ ID NO: 420766 - DNA, 15 bp, Homo sapiens
taagtggaaatcata

SEQ ID NO: 420767 - DNA, 15 bp, Homo sapiens
gtaagtggaaatcat

SEQ ID NO: 420768 - DNA, 15 bp, Homo sapiens
tgtaagtggaaatca

SEQ ID NO: 420769 - DNA, 15 bp, Homo sapiens
ctgtaagtggaaatc

SEQ ID NO: 420770 - DNA, 15 bp, Homo sapiens
actgtaagtggaaat

SEQ ID NO: 420771 - DNA, 15 bp, Homo sapiens
aactgtaagtggaaa

SEQ ID NO: 420772 - DNA, 15 bp, Homo sapiens
caactgtaagtggaa

SEQ ID NO: 420773 - DNA, 15 bp, Homo sapiens
tcaactgtaagtgga

SEQ ID NO: 420774 - DNA, 15 bp, Homo sapiens
ttcaactgtaagtgg

SEQ ID NO: 420775 - DNA, 15 bp, Homo sapiens
cttcaactgtaagtg

SEQ ID NO: 420776 - DNA, 15 bp, Homo sapiens
tcttcaactgtaagt

SEQ ID NO: 420777 - DNA, 15 bp, Homo sapiens
ttcttcaactgtaag

SEQ ID NO: 420778 - DNA, 15 bp, Homo sapiens
tttcttcaactgtaa

SEQ ID NO: 420779 - DNA, 15 bp, Homo sapiens
gtttcttcaactgta

SEQ ID NO: 420780 - DNA, 15 bp, Homo sapiens
ggtttcttcaactgt

SEQ ID NO: 420781 - DNA, 15 bp, Homo sapiens
cggtttcttcaactg

SEQ ID NO: 420782 - DNA, 15 bp, Homo sapiens
tcggtttcttcaact

SEQ ID NO: 420783 - DNA, 15 bp, Homo sapiens
gtcggtttcttcaac

SEQ ID NO: 420784 - DNA, 15 bp, Homo sapiens
cgtcggtttcttcaa

SEQ ID NO: 420785 - DNA, 15 bp, Homo sapiens
acgtcggtttcttca

SEQ ID NO: 420786 - DNA, 15 bp, Homo sapiens
aacgtcggtttcttc

SEQ ID NO: 420787 - DNA, 15 bp, Homo sapiens
gaacgtcggtttctt

SEQ ID NO: 420788 - DNA, 15 bp, Homo sapiens
tgaacgtcggtttct

SEQ ID NO: 420789 - DNA, 15 bp, Homo sapiens
ctgaacgtcggtttc

SEQ ID NO: 420790 - DNA, 15 bp, Homo sapiens
tctgaacgtcggttt

SEQ ID NO: 420791 - DNA, 15 bp, Homo sapiens
atctgaacgtcggtt

SEQ ID NO: 420792 - DNA, 15 bp, Homo sapiens
tatctgaacgtcggt

SEQ ID NO: 420793 - DNA, 15 bp, Homo sapiens
ttatctgaacgtcgg

SEQ ID NO: 420794 - DNA, 15 bp, Homo sapiens
attatctgaacgtcg

SEQ ID NO: 420795 - DNA, 15 bp, Homo sapiens
tattatctgaacgtc

SEQ ID NO: 420796 - DNA, 15 bp, Homo sapiens
ttattatctgaacgt

SEQ ID NO: 420797 - DNA, 15 bp, Homo sapiens
gttattatctgaacg

SEQ ID NO: 420798 - DNA, 15 bp, Homo sapiens
agttattatctgaac

SEQ ID NO: 420799 - DNA, 15 bp, Homo sapiens
gagttattatctgaa

SEQ ID NO: 420800 - DNA, 15 bp, Homo sapiens
tgagttattatctga

SEQ ID NO: 420801 - DNA, 15 bp, Homo sapiens
gtgagttattatctg

SEQ ID NO: 420802 - DNA, 15 bp, Homo sapiens
ggtgagttattatct

SEQ ID NO: 420803 - DNA, 15 bp, Homo sapiens
aggtgagttattatc

SEQ ID NO: 420804 - DNA, 15 bp, Homo sapiens
caggtgagttattat

SEQ ID NO: 420805 - DNA, 15 bp, Homo sapiens
ccaggtgagttatta

SEQ ID NO: 420806 - DNA, 15 bp, Homo sapiens
cccaggtgagttatt

SEQ ID NO: 420807 - DNA, 15 bp, Homo sapiens
ccccaggtgagttat

SEQ ID NO: 420808 - DNA, 15 bp, Homo sapiens
accccaggtgagtta

SEQ ID NO: 420809 - DNA, 15 bp, Homo sapiens
aaccccaggtgagtt

SEQ ID NO: 420810 - DNA, 15 bp, Homo sapiens
taaccccaggtgagt

SEQ ID NO: 420811 - DNA, 15 bp, Homo sapiens
ataaccccaggtgag

SEQ ID NO: 420812 - DNA, 15 bp, Homo sapiens
tataaccccaggtga

SEQ ID NO: 420813 - DNA, 15 bp, Homo sapiens
ctataaccccaggtg

SEQ ID NO: 420814 - DNA, 15 bp, Homo sapiens
tctataaccccaggt

SEQ ID NO: 420815 - DNA, 15 bp, Homo sapiens
gtctataaccccagg

SEQ ID NO: 420816 - DNA, 15 bp, Homo sapiens
agtctataaccccag

SEQ ID NO: 420817 - DNA, 15 bp, Homo sapiens
gagtctataacccca

SEQ ID NO: 420818 - DNA, 15 bp, Homo sapiens
ggagtctataacccc

SEQ ID NO: 420819 - DNA, 15 bp, Homo sapiens
gggagtctataaccc

SEQ ID NO: 420820 - DNA, 15 bp, Homo sapiens
agggagtctataacc

SEQ ID NO: 420821 - DNA, 15 bp, Homo sapiens
aagggagtctataac

SEQ ID NO: 420822 - DNA, 15 bp, Homo sapiens
gaagggagtctataa

SEQ ID NO: 420823 - DNA, 15 bp, Homo sapiens
agaagggagtctata

SEQ ID NO: 420824 - DNA, 15 bp, Homo sapiens
tagaagggagtctat

SEQ ID NO: 420825 - DNA, 15 bp, Homo sapiens
ctagaagggagtcta

SEQ ID NO: 420826 - DNA, 15 bp, Homo sapiens
tctagaagggagtct

SEQ ID NO: 420827 - DNA, 15 bp, Homo sapiens
atctagaagggagtc

SEQ ID NO: 420828 - DNA, 15 bp, Homo sapiens
gatctagaagggagt

SEQ ID NO: 420829 - DNA, 15 bp, Homo sapiens
ggatctagaagggag

SEQ ID NO: 420830 - DNA, 15 bp, Homo sapiens
tggatctagaaggga

SEQ ID NO: 420831 - DNA, 15 bp, Homo sapiens
atggatctagaaggg

SEQ ID NO: 420832 - DNA, 15 bp, Homo sapiens
catggatctagaagg

SEQ ID NO: 420833 - DNA, 15 bp, Homo sapiens
ccatggatctagaag

SEQ ID NO: 420834 - DNA, 15 bp, Homo sapiens
accatggatctagaa

SEQ ID NO: 420835 - DNA, 15 bp, Homo sapiens
caccatggatctaga

SEQ ID NO: 420836 - DNA, 15 bp, Homo sapiens
acaccatggatctag

SEQ ID NO: 420837 - DNA, 15 bp, Homo sapiens
cacaccatggatcta

SEQ ID NO: 420838 - DNA, 15 bp, Homo sapiens
acacaccatggatct

SEQ ID NO: 420839 - DNA, 15 bp, Homo sapiens
tacacaccatggatc

SEQ ID NO: 420840 - DNA, 15 bp, Homo sapiens
ttacacaccatggat

SEQ ID NO: 420841 - DNA, 15 bp, Homo sapiens
tttacacaccatgga

SEQ ID NO: 420842 - DNA, 15 bp, Homo sapiens
atttacacaccatgg

SEQ ID NO: 420843 - DNA, 15 bp, Homo sapiens
aatttacacaccatg

SEQ ID NO: 420844 - DNA, 15 bp, Homo sapiens
aaatttacacaccat

SEQ ID NO: 420845 - DNA, 15 bp, Homo sapiens
taaatttacacacca

SEQ ID NO: 420846 - DNA, 15 bp, Homo sapiens
ataaatttacacacc

SEQ ID NO: 420847 - DNA, 15 bp, Homo sapiens
gataaatttacacac

SEQ ID NO: 420848 - DNA, 15 bp, Homo sapiens
tgataaatttacaca

SEQ ID NO: 420849 - DNA, 15 bp, Homo sapiens
atgataaatttacac

SEQ ID NO: 420850 - DNA, 15 bp, Homo sapiens
aatgataaatttaca

SEQ ID NO: 420851 - DNA, 15 bp, Homo sapiens
gaatgataaatttac

SEQ ID NO: 420852 - DNA, 15 bp, Homo sapiens
ggaatgataaattta

SEQ ID NO: 420853 - DNA, 15 bp, Homo sapiens
aggaatgataaattt

SEQ ID NO: 420854 - DNA, 15 bp, Homo sapiens
caggaatgataaatt

SEQ ID NO: 420855 - DNA, 15 bp, Homo sapiens
tcaggaatgataaat

SEQ ID NO: 420856 - DNA, 15 bp, Homo sapiens
ctcaggaatgataaa

SEQ ID NO: 420857 - DNA, 15 bp, Homo sapiens
gctcaggaatgataa

SEQ ID NO: 420858 - DNA, 15 bp, Homo sapiens
agctcaggaatgata

SEQ ID NO: 420859 - DNA, 15 bp, Homo sapiens
aagctcaggaatgat

SEQ ID NO: 420860 - DNA, 15 bp, Homo sapiens
aaagctcaggaatga

SEQ ID NO: 420861 - DNA, 15 bp, Homo sapiens
gaaagctcaggaatg

SEQ ID NO: 420862 - DNA, 15 bp, Homo sapiens
agaaagctcaggaat

SEQ ID NO: 420863 - DNA, 15 bp, Homo sapiens
aagaaagctcaggaa

SEQ ID NO: 420864 - DNA, 15 bp, Homo sapiens
gaagaaagctcagga

SEQ ID NO: 420865 - DNA, 15 bp, Homo sapiens
agaagaaagctcagg

SEQ ID NO: 420866 - DNA, 15 bp, Homo sapiens
aagaagaaagctcag

SEQ ID NO: 420867 - DNA, 15 bp, Homo sapiens
aaagaagaaagctca

SEQ ID NO: 420868 - DNA, 15 bp, Homo sapiens
aaaagaagaaagctc

SEQ ID NO: 420869 - DNA, 15 bp, Homo sapiens
taaaagaagaaagct

SEQ ID NO: 420870 - DNA, 15 bp, Homo sapiens
ataaaagaagaaagc

SEQ ID NO: 420871 - DNA, 15 bp, Homo sapiens
cataaaagaagaaag

SEQ ID NO: 420872 - DNA, 15 bp, Homo sapiens
gcataaaagaagaaa

SEQ ID NO: 420873 - DNA, 15 bp, Homo sapiens
tgcataaaagaagaa

SEQ ID NO: 420874 - DNA, 15 bp, Homo sapiens
ttgcataaaagaaga

SEQ ID NO: 420875 - DNA, 15 bp, Homo sapiens
tttgcataaaagaag

SEQ ID NO: 420876 - DNA, 15 bp, Homo sapiens
ttttgcataaaagaa

SEQ ID NO: 420877 - DNA, 15 bp, Homo sapiens
attttgcataaaaga

SEQ ID NO: 420878 - DNA, 15 bp, Homo sapiens
gattttgcataaaag

SEQ ID NO: 420879 - DNA, 15 bp, Homo sapiens
ggattttgcataaaa

SEQ ID NO: 420880 - DNA, 15 bp, Homo sapiens
gggattttgcataaa

SEQ ID NO: 420881 - DNA, 15 bp, Homo sapiens
tgggattttgcataa

SEQ ID NO: 420882 - DNA, 15 bp, Homo sapiens
atgggattttgcata

SEQ ID NO: 420883 - DNA, 15 bp, Homo sapiens
aatgggattttgcat

SEQ ID NO: 420884 - DNA, 15 bp, Homo sapiens
gaatgggattttgca

SEQ ID NO: 420885 - DNA, 15 bp, Homo sapiens
ggaatgggattttgc

SEQ ID NO: 420886 - DNA, 15 bp, Homo sapiens
aggaatgggattttg

SEQ ID NO: 420887 - DNA, 15 bp, Homo sapiens
taggaatgggatttt

SEQ ID NO: 420888 - DNA, 15 bp, Homo sapiens
ctaggaatgggattt

SEQ ID NO: 420889 - DNA, 15 bp, Homo sapiens
actaggaatgggatt

SEQ ID NO: 420890 - DNA, 15 bp, Homo sapiens
gactaggaatgggat

SEQ ID NO: 420891 - DNA, 15 bp, Homo sapiens
tgactaggaatggga

SEQ ID NO: 420892 - DNA, 15 bp, Homo sapiens
atgactaggaatggg

SEQ ID NO: 420893 - DNA, 15 bp, Homo sapiens
aatgactaggaatgg

SEQ ID NO: 420894 - DNA, 15 bp, Homo sapiens
gaatgactaggaatg

SEQ ID NO: 420895 - DNA, 15 bp, Homo sapiens
ggaatgactaggaat

SEQ ID NO: 420896 - DNA, 15 bp, Homo sapiens
tggaatgactaggaa

SEQ ID NO: 420897 - DNA, 15 bp, Homo sapiens
ttggaatgactagga

SEQ ID NO: 420898 - DNA, 15 bp, Homo sapiens
tttggaatgactagg

SEQ ID NO: 420899 - DNA, 15 bp, Homo sapiens
atttggaatgactag

SEQ ID NO: 420900 - DNA, 15 bp, Homo sapiens
catttggaatgacta

SEQ ID NO: 420901 - DNA, 15 bp, Homo sapiens
acatttggaatgact

SEQ ID NO: 420902 - DNA, 15 bp, Homo sapiens
aacatttggaatgac

SEQ ID NO: 420903 - DNA, 15 bp, Homo sapiens
taacatttggaatga

SEQ ID NO: 420904 - DNA, 15 bp, Homo sapiens
gtaacatttggaatg

SEQ ID NO: 420905 - DNA, 15 bp, Homo sapiens
tgtaacatttggaat

SEQ ID NO: 420906 - DNA, 15 bp, Homo sapiens
ctgtaacatttggaa

SEQ ID NO: 420907 - DNA, 15 bp, Homo sapiens
tctgtaacatttgga

SEQ ID NO: 420908 - DNA, 15 bp, Homo sapiens
atctgtaacatttgg

SEQ ID NO: 420909 - DNA, 15 bp, Homo sapiens
aatctgtaacatttg

SEQ ID NO: 420910 - DNA, 15 bp, Homo sapiens
taatctgtaacattt

SEQ ID NO: 420911 - DNA, 15 bp, Homo sapiens
ctaatctgtaacatt

SEQ ID NO: 420912 - DNA, 15 bp, Homo sapiens
actaatctgtaacat

SEQ ID NO: 420913 - DNA, 15 bp, Homo sapiens
gactaatctgtaaca

SEQ ID NO: 420914 - DNA, 15 bp, Homo sapiens
agactaatctgtaac

SEQ ID NO: 420915 - DNA, 15 bp, Homo sapiens
aagactaatctgtaa

SEQ ID NO: 420916 - DNA, 15 bp, Homo sapiens
caagactaatctgta

SEQ ID NO: 420917 - DNA, 15 bp, Homo sapiens
acaagactaatctgt

SEQ ID NO: 420918 - DNA, 15 bp, Homo sapiens
gacaagactaatctg

SEQ ID NO: 420919 - DNA, 15 bp, Homo sapiens
ggacaagactaatct

SEQ ID NO: 420920 - DNA, 15 bp, Homo sapiens
aggacaagactaatc

SEQ ID NO: 420921 - DNA, 15 bp, Homo sapiens
aaggacaagactaat

SEQ ID NO: 420922 - DNA, 15 bp, Homo sapiens
aaaggacaagactaa

SEQ ID NO: 420923 - DNA, 15 bp, Homo sapiens
gaaaggacaagacta

SEQ ID NO: 420924 - DNA, 15 bp, Homo sapiens
agaaaggacaagact

SEQ ID NO: 420925 - DNA, 15 bp, Homo sapiens
aagaaaggacaagac

SEQ ID NO: 420926 - DNA, 15 bp, Homo sapiens
taagaaaggacaaga

SEQ ID NO: 420927 - DNA, 15 bp, Homo sapiens
ttaagaaaggacaag

SEQ ID NO: 420928 - DNA, 15 bp, Homo sapiens
gttaagaaaggacaa

SEQ ID NO: 420929 - DNA, 15 bp, Homo sapiens
agttaagaaaggaca

SEQ ID NO: 420930 - DNA, 15 bp, Homo sapiens
aagttaagaaaggac

SEQ ID NO: 420931 - DNA, 15 bp, Homo sapiens
caagttaagaaagga

SEQ ID NO: 420932 - DNA, 15 bp, Homo sapiens
tcaagttaagaaagg

SEQ ID NO: 420933 - DNA, 15 bp, Homo sapiens
atcaagttaagaaag

SEQ ID NO: 420934 - DNA, 15 bp, Homo sapiens
tatcaagttaagaaa

SEQ ID NO: 420935 - DNA, 15 bp, Homo sapiens
ctatcaagttaagaa

SEQ ID NO: 420936 - DNA, 15 bp, Homo sapiens
actatcaagttaaga

SEQ ID NO: 420937 - DNA, 15 bp, Homo sapiens
tactatcaagttaag

SEQ ID NO: 420938 - DNA, 15 bp, Homo sapiens
atactatcaagttaa

SEQ ID NO: 420939 - DNA, 15 bp, Homo sapiens
tatactatcaagtta

SEQ ID NO: 420940 - DNA, 15 bp, Homo sapiens
atatactatcaagtt

SEQ ID NO: 420941 - DNA, 15 bp, Homo sapiens
aatatactatcaagt

SEQ ID NO: 420942 - DNA, 15 bp, Homo sapiens
gaatatactatcaag

SEQ ID NO: 420943 - DNA, 15 bp, Homo sapiens
ggaatatactatcaa

SEQ ID NO: 420944 - DNA, 15 bp, Homo sapiens
gggaatatactatca

SEQ ID NO: 420945 - DNA, 15 bp, Homo sapiens
ggggaatatactatc

SEQ ID NO: 420946 - DNA, 15 bp, Homo sapiens
gggggaatatactat

SEQ ID NO: 420947 - DNA, 15 bp, Homo sapiens
cgggggaatatacta

SEQ ID NO: 420948 - DNA, 15 bp, Homo sapiens
acgggggaatatact

SEQ ID NO: 420949 - DNA, 15 bp, Homo sapiens
gacgggggaatatac

SEQ ID NO: 420950 - DNA, 15 bp, Homo sapiens
agacgggggaatata

SEQ ID NO: 420951 - DNA, 15 bp, Homo sapiens
gagacgggggaatat

SEQ ID NO: 420952 - DNA, 15 bp, Homo sapiens
agagacgggggaata

SEQ ID NO: 420953 - DNA, 15 bp, Homo sapiens
cagagacgggggaat

SEQ ID NO: 420954 - DNA, 15 bp, Homo sapiens
atttggaatatacat

SEQ ID NO: 420955 - DNA, 15 bp, Homo sapiens
aatttggaatataca

SEQ ID NO: 420956 - DNA, 15 bp, Homo sapiens
gaatttggaatatac

SEQ ID NO: 420957 - DNA, 15 bp, Homo sapiens
agaatttggaatata

SEQ ID NO: 420958 - DNA, 15 bp, Homo sapiens
tagaatttggaatat

SEQ ID NO: 420959 - DNA, 15 bp, Homo sapiens
ttagaatttggaata

SEQ ID NO: 420960 - DNA, 15 bp, Homo sapiens
tttagaatttggaat

SEQ ID NO: 420961 - DNA, 15 bp, Homo sapiens
atttagaatttggaa

SEQ ID NO: 420962 - DNA, 15 bp, Homo sapiens
tatttagaatttgga

SEQ ID NO: 420963 - DNA, 15 bp, Homo sapiens
ttatttagaatttgg

SEQ ID NO: 420964 - DNA, 15 bp, Homo sapiens
attatttagaatttg

SEQ ID NO: 420965 - DNA, 15 bp, Homo sapiens
aattatttagaattt

SEQ ID NO: 420966 - DNA, 15 bp, Homo sapiens
aaattatttagaatt

SEQ ID NO: 420967 - DNA, 15 bp, Homo sapiens
aaaattatttagaat

SEQ ID NO: 420968 - DNA, 15 bp, Homo sapiens
taaaattatttagaa

SEQ ID NO: 420969 - DNA, 15 bp, Homo sapiens
ttaaaattatttaga

SEQ ID NO: 420970 - DNA, 15 bp, Homo sapiens
attaaaattatttag

SEQ ID NO: 420971 - DNA, 15 bp, Homo sapiens
tattaaaattattta

SEQ ID NO: 420972 - DNA, 15 bp, Homo sapiens
ttattaaaattattt

SEQ ID NO: 420973 - DNA, 15 bp, Homo sapiens
attattaaaattatt

SEQ ID NO: 420974 - DNA, 15 bp, Homo sapiens
aattattaaaattat

SEQ ID NO: 420975 - DNA, 15 bp, Homo sapiens
gaattattaaaatta

SEQ ID NO: 420976 - DNA, 15 bp, Homo sapiens
agaattattaaaatt

SEQ ID NO: 420977 - DNA, 15 bp, Homo sapiens
tagaattattaaaat

SEQ ID NO: 420978 - DNA, 15 bp, Homo sapiens
atagaattattaaaa

SEQ ID NO: 420979 - DNA, 15 bp, Homo sapiens
tatagaattattaaa

SEQ ID NO: 420980 - DNA, 15 bp, Homo sapiens
atatagaattattaa

SEQ ID NO: 420981 - DNA, 15 bp, Homo sapiens
tatatagaattatta

SEQ ID NO: 420982 - DNA, 15 bp, Homo sapiens
ttatatagaattatt

SEQ ID NO: 420983 - DNA, 15 bp, Homo sapiens
tttatatagaattat

SEQ ID NO: 420984 - DNA, 15 bp, Homo sapiens
atttatatagaatta

SEQ ID NO: 420985 - DNA, 15 bp, Homo sapiens
catttatatagaatt

SEQ ID NO: 420986 - DNA, 15 bp, Homo sapiens
acatttatatagaat

SEQ ID NO: 420987 - DNA, 15 bp, Homo sapiens
tacatttatatagaa

SEQ ID NO: 420988 - DNA, 15 bp, Homo sapiens
atacatttatataga

SEQ ID NO: 420989 - DNA, 15 bp, Homo sapiens
tatacatttatatag

SEQ ID NO: 420990 - DNA, 15 bp, Homo sapiens
atatacatttatata

SEQ ID NO: 420991 - DNA, 15 bp, Homo sapiens
tatatacatttatat

SEQ ID NO: 420992 - DNA, 15 bp, Homo sapiens
atatatacatttata

SEQ ID NO: 420993 - DNA, 15 bp, Homo sapiens
aatatatacatttat

SEQ ID NO: 420994 - DNA, 15 bp, Homo sapiens
gaatatatacattta

SEQ ID NO: 420995 - DNA, 15 bp, Homo sapiens
agaatatatacattt

SEQ ID NO: 420996 - DNA, 15 bp, Homo sapiens
tagaatatatacatt

SEQ ID NO: 420997 - DNA, 15 bp, Homo sapiens
ttagaatatatacat

SEQ ID NO: 420998 - DNA, 15 bp, Homo sapiens
tttagaatatataca

SEQ ID NO: 420999 - DNA, 15 bp, Homo sapiens
atttagaatatatac

SEQ ID NO: 421000 - DNA, 15 bp, Homo sapiens
aatttagaatatata

SEQ ID NO: 421001 - DNA, 15 bp, Homo sapiens
gaatttagaatatat

SEQ ID NO: 421002 - DNA, 15 bp, Homo sapiens
agaatttagaatata

SEQ ID NO: 421003 - DNA, 15 bp, Homo sapiens
cagaatttagaatat

SEQ ID NO: 421004 - DNA, 15 bp, Homo sapiens
tcagaatttagaata

SEQ ID NO: 421005 - DNA, 15 bp, Homo sapiens
ttcagaatttagaat

SEQ ID NO: 421006 - DNA, 15 bp, Homo sapiens
attcagaatttagaa

SEQ ID NO: 421007 - DNA, 15 bp, Homo sapiens
aattcagaatttaga

SEQ ID NO: 421008 - DNA, 15 bp, Homo sapiens
taattcagaatttag

SEQ ID NO: 421009 - DNA, 15 bp, Homo sapiens
ttaattcagaattta

SEQ ID NO: 421010 - DNA, 15 bp, Homo sapiens
tttaattcagaattt

SEQ ID NO: 421011 - DNA, 15 bp, Homo sapiens
atttaattcagaatt

SEQ ID NO: 421012 - DNA, 15 bp, Homo sapiens
aatttaattcagaat

SEQ ID NO: 421013 - DNA, 15 bp, Homo sapiens
aaatttaattcagaa

SEQ ID NO: 421014 - DNA, 15 bp, Homo sapiens
aaaatttaattcaga

SEQ ID NO: 421015 - DNA, 15 bp, Homo sapiens
taaaatttaattcag

SEQ ID NO: 421016 - DNA, 15 bp, Homo sapiens
ataaaatttaattca

SEQ ID NO: 421017 - DNA, 15 bp, Homo sapiens
aataaaatttaattc

SEQ ID NO: 421018 - DNA, 15 bp, Homo sapiens
taataaaatttaatt

SEQ ID NO: 421019 - DNA, 15 bp, Homo sapiens
gtaataaaatttaat

SEQ ID NO: 421020 - DNA, 15 bp, Homo sapiens
tgtaataaaatttaa

SEQ ID NO: 421021 - DNA, 15 bp, Homo sapiens
atgtaataaaattta

SEQ ID NO: 421022 - DNA, 15 bp, Homo sapiens
catgtaataaaattt

SEQ ID NO: 421023 - DNA, 15 bp, Homo sapiens
ccatgtaataaaatt

SEQ ID NO: 421024 - DNA, 15 bp, Homo sapiens
gccatgtaataaaat

SEQ ID NO: 421025 - DNA, 15 bp, Homo sapiens
ggccatgtaataaaa

SEQ ID NO: 421026 - DNA, 15 bp, Homo sapiens
tggccatgtaataaa

SEQ ID NO: 421027 - DNA, 15 bp, Homo sapiens
ctggccatgtaataa

SEQ ID NO: 421028 - DNA, 15 bp, Homo sapiens
tctggccatgtaata

SEQ ID NO: 421029 - DNA, 15 bp, Homo sapiens
ttctggccatgtaat

SEQ ID NO: 421030 - DNA, 15 bp, Homo sapiens
cttctggccatgtaa

SEQ ID NO: 421031 - DNA, 15 bp, Homo sapiens
gcttctggccatgta

SEQ ID NO: 421032 - DNA, 15 bp, Homo sapiens
tgcttctggccatgt

SEQ ID NO: 421033 - DNA, 15 bp, Homo sapiens
ttgcttctggccatg

SEQ ID NO: 421034 - DNA, 15 bp, Homo sapiens
attgcttctggccat

SEQ ID NO: 421035 - DNA, 15 bp, Homo sapiens
aattgcttctggcca

SEQ ID NO: 421036 - DNA, 15 bp, Homo sapiens
aaattgcttctggcc

SEQ ID NO: 421037 - DNA, 15 bp, Homo sapiens
taaattgcttctggc

SEQ ID NO: 421038 - DNA, 15 bp, Homo sapiens
ttaaattgcttctgg

SEQ ID NO: 421039 - DNA, 15 bp, Homo sapiens
cttaaattgcttctg

SEQ ID NO: 421040 - DNA, 15 bp, Homo sapiens
acttaaattgcttct

SEQ ID NO: 421041 - DNA, 15 bp, Homo sapiens
cacttaaattgcttc

SEQ ID NO: 421042 - DNA, 15 bp, Homo sapiens
gcacttaaattgctt

SEQ ID NO: 421043 - DNA, 15 bp, Homo sapiens
agcacttaaattgct

SEQ ID NO: 421044 - DNA, 15 bp, Homo sapiens
cagcacttaaattgc

SEQ ID NO: 421045 - DNA, 15 bp, Homo sapiens
tcagcacttaaattg

SEQ ID NO: 421046 - DNA, 15 bp, Homo sapiens
atcagcacttaaatt

SEQ ID NO: 421047 - DNA, 15 bp, Homo sapiens
aatcagcacttaaat

SEQ ID NO: 421048 - DNA, 15 bp, Homo sapiens
taatcagcacttaaa

SEQ ID NO: 421049 - DNA, 15 bp, Homo sapiens
ttaatcagcacttaa

SEQ ID NO: 421050 - DNA, 15 bp, Homo sapiens
tttaatcagcactta

SEQ ID NO: 421051 - DNA, 15 bp, Homo sapiens
atttaatcagcactt

SEQ ID NO: 421052 - DNA, 15 bp, Homo sapiens
aatttaatcagcact

SEQ ID NO: 421053 - DNA, 15 bp, Homo sapiens
gaatttaatcagcac

SEQ ID NO: 421054 - DNA, 15 bp, Homo sapiens
tgaatttaatcagca

SEQ ID NO: 421055 - DNA, 15 bp, Homo sapiens
ctgaatttaatcagc

SEQ ID NO: 421056 - DNA, 15 bp, Homo sapiens
tctgaatttaatcag

SEQ ID NO: 421057 - DNA, 15 bp, Homo sapiens
atctgaatttaatca

SEQ ID NO: 421058 - DNA, 15 bp, Homo sapiens
gatctgaatttaatc

SEQ ID NO: 421059 - DNA, 15 bp, Homo sapiens
tgatctgaatttaat

SEQ ID NO: 421060 - DNA, 15 bp, Homo sapiens
atgatctgaatttaa

SEQ ID NO: 421061 - DNA, 15 bp, Homo sapiens
tatgatctgaattta

SEQ ID NO: 421062 - DNA, 15 bp, Homo sapiens
ttatgatctgaattt

SEQ ID NO: 421063 - DNA, 15 bp, Homo sapiens
tttatgatctgaatt

SEQ ID NO: 421064 - DNA, 15 bp, Homo sapiens
ctttatgatctgaat

SEQ ID NO: 421065 - DNA, 15 bp, Homo sapiens
tctttatgatctgaa

SEQ ID NO: 421066 - DNA, 15 bp, Homo sapiens
ttctttatgatctga

SEQ ID NO: 421067 - DNA, 15 bp, Homo sapiens
tttctttatgatctg

SEQ ID NO: 421068 - DNA, 15 bp, Homo sapiens
ttttctttatgatct

SEQ ID NO: 421069 - DNA, 15 bp, Homo sapiens
tttttctttatgatc

SEQ ID NO: 421070 - DNA, 15 bp, Homo sapiens
gtttttctttatgat

SEQ ID NO: 421071 - DNA, 15 bp, Homo sapiens
tgtttttctttatga

SEQ ID NO: 421072 - DNA, 15 bp, Homo sapiens
ttgtttttctttatg

SEQ ID NO: 421073 - DNA, 15 bp, Homo sapiens
attgtttttctttat

SEQ ID NO: 421074 - DNA, 15 bp, Homo sapiens
cattgtttttcttta

SEQ ID NO: 421075 - DNA, 15 bp, Homo sapiens
ccattgtttttcttt

SEQ ID NO: 421076 - DNA, 15 bp, Homo sapiens
gccattgtttttctt

SEQ ID NO: 421077 - DNA, 15 bp, Homo sapiens
cgccattgtttttct

SEQ ID NO: 421078 - DNA, 15 bp, Homo sapiens
tcgccattgtttttc

SEQ ID NO: 421079 - DNA, 15 bp, Homo sapiens
atcgccattgttttt

SEQ ID NO: 421080 - DNA, 15 bp, Homo sapiens
catcgccattgtttt

SEQ ID NO: 421081 - DNA, 15 bp, Homo sapiens
acatcgccattgttt

SEQ ID NO: 421082 - DNA, 15 bp, Homo sapiens
tacatcgccattgtt

SEQ ID NO: 421083 - DNA, 15 bp, Homo sapiens
ctacatcgccattgt

SEQ ID NO: 421084 - DNA, 15 bp, Homo sapiens
tctacatcgccattg

SEQ ID NO: 421085 - DNA, 15 bp, Homo sapiens
ttctacatcgccatt

SEQ ID NO: 421086 - DNA, 15 bp, Homo sapiens
tttctacatcgccat

SEQ ID NO: 421087 - DNA, 15 bp, Homo sapiens
atttctacatcgcca

SEQ ID NO: 421088 - DNA, 15 bp, Homo sapiens
aatttctacatcgcc

SEQ ID NO: 421089 - DNA, 15 bp, Homo sapiens
aaatttctacatcgc

SEQ ID NO: 421090 - DNA, 15 bp, Homo sapiens
taaatttctacatcg

SEQ ID NO: 421091 - DNA, 15 bp, Homo sapiens
ctaaatttctacatc

SEQ ID NO: 421092 - DNA, 15 bp, Homo sapiens
cctaaatttctacat

SEQ ID NO: 421093 - DNA, 15 bp, Homo sapiens
acctaaatttctaca

SEQ ID NO: 421094 - DNA, 15 bp, Homo sapiens
tacctaaatttctac

SEQ ID NO: 421095 - DNA, 15 bp, Homo sapiens
ctacctaaatttcta

SEQ ID NO: 421096 - DNA, 15 bp, Homo sapiens
tctacctaaatttct

SEQ ID NO: 421097 - DNA, 15 bp, Homo sapiens
ctctacctaaatttc

SEQ ID NO: 421098 - DNA, 15 bp, Homo sapiens
actctacctaaattt

SEQ ID NO: 421099 - DNA, 15 bp, Homo sapiens
tactctacctaaatt

SEQ ID NO: 421100 - DNA, 15 bp, Homo sapiens
ttactctacctaaat

SEQ ID NO: 421101 - DNA, 15 bp, Homo sapiens
tttactctacctaaa

SEQ ID NO: 421102 - DNA, 15 bp, Homo sapiens
ttttactctacctaa

SEQ ID NO: 421103 - DNA, 15 bp, Homo sapiens
tttttactctaccta

SEQ ID NO: 421104 - DNA, 15 bp, Homo sapiens
ttttttactctacct

SEQ ID NO: 421105 - DNA, 15 bp, Homo sapiens
tttttttactctacc

SEQ ID NO: 421106 - DNA, 15 bp, Homo sapiens
ttttttttactctac

SEQ ID NO: 421107 - DNA, 15 bp, Homo sapiens
attttttttactcta

SEQ ID NO: 421108 - DNA, 15 bp, Homo sapiens
tattttttttactct

SEQ ID NO: 421109 - DNA, 15 bp, Homo sapiens
atattttttttactc

SEQ ID NO: 421110 - DNA, 15 bp, Homo sapiens
tatattttttttact

SEQ ID NO: 421111 - DNA, 15 bp, Homo sapiens
atatattttttttac

SEQ ID NO: 421112 - DNA, 15 bp, Homo sapiens
aatatatttttttta

SEQ ID NO: 421113 - DNA, 15 bp, Homo sapiens
gaatatatttttttt

SEQ ID NO: 421114 - DNA, 15 bp, Homo sapiens
tgaatatattttttt

SEQ ID NO: 421115 - DNA, 15 bp, Homo sapiens
ttgaatatatttttt

SEQ ID NO: 421116 - DNA, 15 bp, Homo sapiens
cttgaatatattttt

SEQ ID NO: 421117 - DNA, 15 bp, Homo sapiens
tcttgaatatatttt

SEQ ID NO: 421118 - DNA, 15 bp, Homo sapiens
gtcttgaatatattt

SEQ ID NO: 421119 - DNA, 15 bp, Homo sapiens
ggtcttgaatatatt

SEQ ID NO: 421120 - DNA, 15 bp, Homo sapiens
aggtcttgaatatat

SEQ ID NO: 421121 - DNA, 15 bp, Homo sapiens
aaggtcttgaatata

SEQ ID NO: 421122 - DNA, 15 bp, Homo sapiens
gaaggtcttgaatat

SEQ ID NO: 421123 - DNA, 15 bp, Homo sapiens
cgaaggtcttgaata

SEQ ID NO: 421124 - DNA, 15 bp, Homo sapiens
acgaaggtcttgaat

SEQ ID NO: 421125 - DNA, 15 bp, Homo sapiens
gacgaaggtcttgaa

SEQ ID NO: 421126 - DNA, 15 bp, Homo sapiens
cgacgaaggtcttga

SEQ ID NO: 421127 - DNA, 15 bp, Homo sapiens
ccgacgaaggtcttg

SEQ ID NO: 421128 - DNA, 15 bp, Homo sapiens
accgacgaaggtctt

SEQ ID NO: 421129 - DNA, 15 bp, Homo sapiens
gaccgacgaaggtct

SEQ ID NO: 421130 - DNA, 15 bp, Homo sapiens
ggaccgacgaaggtc

SEQ ID NO: 421131 - DNA, 15 bp, Homo sapiens
gggaccgacgaaggt

SEQ ID NO: 421132 - DNA, 15 bp, Homo sapiens
tgggaccgacgaagg

SEQ ID NO: 421133 - DNA, 15 bp, Homo sapiens
ttgggaccgacgaag

SEQ ID NO: 421134 - DNA, 15 bp, Homo sapiens
tttgggaccgacgaa

SEQ ID NO: 421135 - DNA, 15 bp, Homo sapiens
atttgggaccgacga

SEQ ID NO: 421136 - DNA, 15 bp, Homo sapiens
aatttgggaccgacg

SEQ ID NO: 421137 - DNA, 15 bp, Homo sapiens
aaatttgggaccgac

SEQ ID NO: 421138 - DNA, 15 bp, Homo sapiens
aaaatttgggaccga

SEQ ID NO: 421139 - DNA, 15 bp, Homo sapiens
gaaaatttgggaccg

SEQ ID NO: 421140 - DNA, 15 bp, Homo sapiens
tgaaaatttgggacc

SEQ ID NO: 421141 - DNA, 15 bp, Homo sapiens
atgaaaatttgggac

SEQ ID NO: 421142 - DNA, 15 bp, Homo sapiens
tatgaaaatttggga

SEQ ID NO: 421143 - DNA, 15 bp, Homo sapiens
ctatgaaaatttggg

SEQ ID NO: 421144 - DNA, 15 bp, Homo sapiens
gctatgaaaatttgg

SEQ ID NO: 421145 - DNA, 15 bp, Homo sapiens
tgctatgaaaatttg

SEQ ID NO: 421146 - DNA, 15 bp, Homo sapiens
gtgctatgaaaattt

SEQ ID NO: 421147 - DNA, 15 bp, Homo sapiens
agtgctatgaaaatt

SEQ ID NO: 421148 - DNA, 15 bp, Homo sapiens
tagtgctatgaaaat

SEQ ID NO: 421149 - DNA, 15 bp, Homo sapiens
ctagtgctatgaaaa

SEQ ID NO: 421150 - DNA, 15 bp, Homo sapiens
tctagtgctatgaaa

SEQ ID NO: 421151 - DNA, 15 bp, Homo sapiens
ttctagtgctatgaa

SEQ ID NO: 421152 - DNA, 15 bp, Homo sapiens
gttctagtgctatga

SEQ ID NO: 421153 - DNA, 15 bp, Homo sapiens
tgttctagtgctatg

SEQ ID NO: 421154 - DNA, 15 bp, Homo sapiens
ttgttctagtgctat

SEQ ID NO: 421155 - DNA, 15 bp, Homo sapiens
tttgttctagtgcta

SEQ ID NO: 421156 - DNA, 15 bp, Homo sapiens
atttgttctagtgct

SEQ ID NO: 421157 - DNA, 15 bp, Homo sapiens
tatttgttctagtgc

SEQ ID NO: 421158 - DNA, 15 bp, Homo sapiens
ttatttgttctagtg

SEQ ID NO: 421159 - DNA, 15 bp, Homo sapiens
attatttgttctagt

SEQ ID NO: 421160 - DNA, 15 bp, Homo sapiens
aattatttgttctag

SEQ ID NO: 421161 - DNA, 15 bp, Homo sapiens
aaattatttgttcta

SEQ ID NO: 421162 - DNA, 15 bp, Homo sapiens
aaaattatttgttct

SEQ ID NO: 421163 - DNA, 15 bp, Homo sapiens
taaaattatttgttc

SEQ ID NO: 421164 - DNA, 15 bp, Homo sapiens
ataaaattatttgtt

SEQ ID NO: 421165 - DNA, 15 bp, Homo sapiens
gataaaattatttgt

SEQ ID NO: 421166 - DNA, 15 bp, Homo sapiens
cgataaaattatttg

SEQ ID NO: 421167 - DNA, 15 bp, Homo sapiens
tcgataaaattattt

SEQ ID NO: 421168 - DNA, 15 bp, Homo sapiens
atcgataaaattatt

SEQ ID NO: 421169 - DNA, 15 bp, Homo sapiens
tatcgataaaattat

SEQ ID NO: 421170 - DNA, 15 bp, Homo sapiens
ttatcgataaaatta

SEQ ID NO: 421171 - DNA, 15 bp, Homo sapiens
cttatcgataaaatt

SEQ ID NO: 421172 - DNA, 15 bp, Homo sapiens
tcttatcgataaaat

SEQ ID NO: 421173 - DNA, 15 bp, Homo sapiens
ttcttatcgataaaa

SEQ ID NO: 421174 - DNA, 15 bp, Homo sapiens
cttcttatcgataaa

SEQ ID NO: 421175 - DNA, 15 bp, Homo sapiens
gcttcttatcgataa

SEQ ID NO: 421176 - DNA, 15 bp, Homo sapiens
ggcttcttatcgata

SEQ ID NO: 421177 - DNA, 15 bp, Homo sapiens
tggcttcttatcgat

SEQ ID NO: 421178 - DNA, 15 bp, Homo sapiens
atggcttcttatcga

SEQ ID NO: 421179 - DNA, 15 bp, Homo sapiens
aatggcttcttatcg

SEQ ID NO: 421180 - DNA, 15 bp, Homo sapiens
aaatggcttcttatc

SEQ ID NO: 421181 - DNA, 15 bp, Homo sapiens
caaatggcttcttat

SEQ ID NO: 421182 - DNA, 15 bp, Homo sapiens
ccaaatggcttctta

SEQ ID NO: 421183 - DNA, 15 bp, Homo sapiens
accaaatggcttctt

SEQ ID NO: 421184 - DNA, 15 bp, Homo sapiens
aaccaaatggcttct

SEQ ID NO: 421185 - DNA, 15 bp, Homo sapiens
gaaccaaatggcttc

SEQ ID NO: 421186 - DNA, 15 bp, Homo sapiens
ggaaccaaatggctt

SEQ ID NO: 421187 - DNA, 15 bp, Homo sapiens
tggaaccaaatggct

SEQ ID NO: 421188 - DNA, 15 bp, Homo sapiens
ttggaaccaaatggc

SEQ ID NO: 421189 - DNA, 15 bp, Homo sapiens
attggaaccaaatgg

SEQ ID NO: 421190 - DNA, 15 bp, Homo sapiens
tattggaaccaaatg

SEQ ID NO: 421191 - DNA, 15 bp, Homo sapiens
ttattggaaccaaat

SEQ ID NO: 421192 - DNA, 15 bp, Homo sapiens
attattggaaccaaa

SEQ ID NO: 421193 - DNA, 15 bp, Homo sapiens
tattattggaaccaa

SEQ ID NO: 421194 - DNA, 15 bp, Homo sapiens
ttattattggaacca

SEQ ID NO: 421195 - DNA, 15 bp, Homo sapiens
attattattggaacc

SEQ ID NO: 421196 - DNA, 15 bp, Homo sapiens
tattattattggaac

SEQ ID NO: 421197 - DNA, 15 bp, Homo sapiens
ttattattattggaa

SEQ ID NO: 421198 - DNA, 15 bp, Homo sapiens
gttattattattgga

SEQ ID NO: 421199 - DNA, 15 bp, Homo sapiens
agttattattattgg

SEQ ID NO: 421200 - DNA, 15 bp, Homo sapiens
tagttattattattg

SEQ ID NO: 421201 - DNA, 15 bp, Homo sapiens
ttagttattattatt

SEQ ID NO: 421202 - DNA, 15 bp, Homo sapiens
gttagttattattat

SEQ ID NO: 421203 - DNA, 15 bp, Homo sapiens
tgttagttattatta

SEQ ID NO: 421204 - DNA, 15 bp, Homo sapiens
gtgttagttattatt

SEQ ID NO: 421205 - DNA, 15 bp, Homo sapiens
agtgttagttattat

SEQ ID NO: 421206 - DNA, 15 bp, Homo sapiens
gagtgttagttatta

SEQ ID NO: 421207 - DNA, 15 bp, Homo sapiens
agagtgttagttatt

SEQ ID NO: 421208 - DNA, 15 bp, Homo sapiens
aagagtgttagttat

SEQ ID NO: 421209 - DNA, 15 bp, Homo sapiens
taagagtgttagtta

SEQ ID NO: 421210 - DNA, 15 bp, Homo sapiens
ctaagagtgttagtt

SEQ ID NO: 421211 - DNA, 15 bp, Homo sapiens
actaagagtgttagt

SEQ ID NO: 421212 - DNA, 15 bp, Homo sapiens
cactaagagtgttag

SEQ ID NO: 421213 - DNA, 15 bp, Homo sapiens
acactaagagtgtta

SEQ ID NO: 421214 - DNA, 15 bp, Homo sapiens
gacactaagagtgtt

SEQ ID NO: 421215 - DNA, 15 bp, Homo sapiens
agacactaagagtgt

SEQ ID NO: 421216 - DNA, 15 bp, Homo sapiens
cagacactaagagtg

SEQ ID NO: 421217 - DNA, 15 bp, Homo sapiens
gcagacactaagagt

SEQ ID NO: 421218 - DNA, 15 bp, Homo sapiens
agcagacactaagag

SEQ ID NO: 421219 - DNA, 15 bp, Homo sapiens
tagcagacactaaga

SEQ ID NO: 421220 - DNA, 15 bp, Homo sapiens
atagcagacactaag

SEQ ID NO: 421221 - DNA, 15 bp, Homo sapiens
gatagcagacactaa

SEQ ID NO: 421222 - DNA, 15 bp, Homo sapiens
tgatagcagacacta

SEQ ID NO: 421223 - DNA, 15 bp, Homo sapiens
ctgatagcagacact

SEQ ID NO: 421224 - DNA, 15 bp, Homo sapiens
gctgatagcagacac

SEQ ID NO: 421225 - DNA, 15 bp, Homo sapiens
agctgatagcagaca

SEQ ID NO: 421226 - DNA, 15 bp, Homo sapiens
aagctgatagcagac

SEQ ID NO: 421227 - DNA, 15 bp, Homo sapiens
aaagctgatagcaga

SEQ ID NO: 421228 - DNA, 15 bp, Homo sapiens
taaagctgatagcag

SEQ ID NO: 421229 - DNA, 15 bp, Homo sapiens
ataaagctgatagca

SEQ ID NO: 421230 - DNA, 15 bp, Homo sapiens
tataaagctgatagc

SEQ ID NO: 421231 - DNA, 15 bp, Homo sapiens
atataaagctgatag

SEQ ID NO: 421232 - DNA, 15 bp, Homo sapiens
catataaagctgata

SEQ ID NO: 421233 - DNA, 15 bp, Homo sapiens
tcatataaagctgat

SEQ ID NO: 421234 - DNA, 15 bp, Homo sapiens
atcatataaagctga

SEQ ID NO: 421235 - DNA, 15 bp, Homo sapiens
tatcatataaagctg

SEQ ID NO: 421236 - DNA, 15 bp, Homo sapiens
atatcatataaagct

SEQ ID NO: 421237 - DNA, 15 bp, Homo sapiens
aatatcatataaagc

SEQ ID NO: 421238 - DNA, 15 bp, Homo sapiens
caatatcatataaag

SEQ ID NO: 421239 - DNA, 15 bp, Homo sapiens
acaatatcatataaa

SEQ ID NO: 421240 - DNA, 15 bp, Homo sapiens
gacaatatcatataa

SEQ ID NO: 421241 - DNA, 15 bp, Homo sapiens
agacaatatcatata

SEQ ID NO: 421242 - DNA, 15 bp, Homo sapiens
gagacaatatcatat

SEQ ID NO: 421243 - DNA, 15 bp, Homo sapiens
agagacaatatcata

SEQ ID NO: 421244 - DNA, 15 bp, Homo sapiens
aagagacaatatcat

SEQ ID NO: 421245 - DNA, 15 bp, Homo sapiens
caagagacaatatca

SEQ ID NO: 421246 - DNA, 15 bp, Homo sapiens
acaagagacaatatc

SEQ ID NO: 421247 - DNA, 15 bp, Homo sapiens
tacaagagacaatat

SEQ ID NO: 421248 - DNA, 15 bp, Homo sapiens
ttacaagagacaata

SEQ ID NO: 421249 - DNA, 15 bp, Homo sapiens
attacaagagacaat

SEQ ID NO: 421250 - DNA, 15 bp, Homo sapiens
gattacaagagacaa

SEQ ID NO: 421251 - DNA, 15 bp, Homo sapiens
ggattacaagagaca

SEQ ID NO: 421252 - DNA, 15 bp, Homo sapiens
aggattacaagagac

SEQ ID NO: 421253 - DNA, 15 bp, Homo sapiens
gaggattacaagaga

SEQ ID NO: 421254 - DNA, 15 bp, Homo sapiens
tgaggattacaagag

SEQ ID NO: 421255 - DNA, 15 bp, Homo sapiens
gtgaggattacaaga

SEQ ID NO: 421256 - DNA, 15 bp, Homo sapiens
tgtgaggattacaag

SEQ ID NO: 421257 - DNA, 15 bp, Homo sapiens
ttgtgaggattacaa

SEQ ID NO: 421258 - DNA, 15 bp, Homo sapiens
attgtgaggattaca

SEQ ID NO: 421259 - DNA, 15 bp, Homo sapiens
tattgtgaggattac

SEQ ID NO: 421260 - DNA, 15 bp, Homo sapiens
ctattgtgaggatta

SEQ ID NO: 421261 - DNA, 15 bp, Homo sapiens
gctattgtgaggatt

SEQ ID NO: 421262 - DNA, 15 bp, Homo sapiens
ggctattgtgaggat

SEQ ID NO: 421263 - DNA, 15 bp, Homo sapiens
gggctattgtgagga

SEQ ID NO: 421264 - DNA, 15 bp, Homo sapiens
ggggctattgtgagg

SEQ ID NO: 421265 - DNA, 15 bp, Homo sapiens
tggggctattgtgag

SEQ ID NO: 421266 - DNA, 15 bp, Homo sapiens
ctggggctattgtga

SEQ ID NO: 421267 - DNA, 15 bp, Homo sapiens
cctggggctattgtg

SEQ ID NO: 421268 - DNA, 15 bp, Homo sapiens
tcctggggctattgt

SEQ ID NO: 421269 - DNA, 15 bp, Homo sapiens
ttcctggggctattg

SEQ ID NO: 421270 - DNA, 15 bp, Homo sapiens
cttcctggggctatt

SEQ ID NO: 421271 - DNA, 15 bp, Homo sapiens
gcttcctggggctat

SEQ ID NO: 421272 - DNA, 15 bp, Homo sapiens
tgcttcctggggcta

SEQ ID NO: 421273 - DNA, 15 bp, Homo sapiens
ctgcttcctggggct

SEQ ID NO: 421274 - DNA, 15 bp, Homo sapiens
tctgcttcctggggc

SEQ ID NO: 421275 - DNA, 15 bp, Homo sapiens
atctgcttcctgggg

SEQ ID NO: 421276 - DNA, 15 bp, Homo sapiens
tatctgcttcctggg

SEQ ID NO: 421277 - DNA, 15 bp, Homo sapiens
atatctgcttcctgg

SEQ ID NO: 421278 - DNA, 15 bp, Homo sapiens
aatatctgcttcctg

SEQ ID NO: 421279 - DNA, 15 bp, Homo sapiens
taatatctgcttcct

SEQ ID NO: 421280 - DNA, 15 bp, Homo sapiens
ataatatctgcttcc

SEQ ID NO: 421281 - DNA, 15 bp, Homo sapiens
aataatatctgcttc

SEQ ID NO: 421282 - DNA, 15 bp, Homo sapiens
taataatatctgctt

SEQ ID NO: 421283 - DNA, 15 bp, Homo sapiens
ataataatatctgct

SEQ ID NO: 421284 - DNA, 15 bp, Homo sapiens
aataataatatctgc

SEQ ID NO: 421285 - DNA, 15 bp, Homo sapiens
taataataatatctg

SEQ ID NO: 421286 - DNA, 15 bp, Homo sapiens
ataataataatatct

SEQ ID NO: 421287 - DNA, 15 bp, Homo sapiens
gataataataatatc

SEQ ID NO: 421288 - DNA, 15 bp, Homo sapiens
agataataataatat

SEQ ID NO: 421289 - DNA, 15 bp, Homo sapiens
gagataataataata

SEQ ID NO: 421290 - DNA, 15 bp, Homo sapiens
agagataataataat

SEQ ID NO: 421291 - DNA, 15 bp, Homo sapiens
gagagataataataa

SEQ ID NO: 421292 - DNA, 15 bp, Homo sapiens
agagagataataata

SEQ ID NO: 421293 - DNA, 15 bp, Homo sapiens
aagagagataataat

SEQ ID NO: 421294 - DNA, 15 bp, Homo sapiens
aaagagagataataa

SEQ ID NO: 421295 - DNA, 15 bp, Homo sapiens
aaaagagagataata

SEQ ID NO: 421296 - DNA, 15 bp, Homo sapiens
taaaagagagataat

SEQ ID NO: 421297 - DNA, 15 bp, Homo sapiens
ataaaagagagataa

SEQ ID NO: 421298 - DNA, 15 bp, Homo sapiens
tataaaagagagata

SEQ ID NO: 421299 - DNA, 15 bp, Homo sapiens
ctataaaagagagat

SEQ ID NO: 421300 - DNA, 15 bp, Homo sapiens
actataaaagagaga

SEQ ID NO: 421301 - DNA, 15 bp, Homo sapiens
aactataaaagagag

SEQ ID NO: 421302 - DNA, 15 bp, Homo sapiens
taactataaaagaga

SEQ ID NO: 421303 - DNA, 15 bp, Homo sapiens
ttaactataaaagag

SEQ ID NO: 421304 - DNA, 15 bp, Homo sapiens
cttaactataaaaga

SEQ ID NO: 421305 - DNA, 15 bp, Homo sapiens
ccttaactataaaag

SEQ ID NO: 421306 - DNA, 15 bp, Homo sapiens
cccttaactataaaa

SEQ ID NO: 421307 - DNA, 15 bp, Homo sapiens
tcccttaactataaa

SEQ ID NO: 421308 - DNA, 15 bp, Homo sapiens
ctcccttaactataa

SEQ ID NO: 421309 - DNA, 15 bp, Homo sapiens
gctcccttaactata

SEQ ID NO: 421310 - DNA, 15 bp, Homo sapiens
agctcccttaactat

SEQ ID NO: 421311 - DNA, 15 bp, Homo sapiens
cagctcccttaacta

SEQ ID NO: 421312 - DNA, 15 bp, Homo sapiens
tcagctcccttaact

SEQ ID NO: 421313 - DNA, 15 bp, Homo sapiens
ctcagctcccttaac

SEQ ID NO: 421314 - DNA, 15 bp, Homo sapiens
cctcagctcccttaa

SEQ ID NO: 421315 - DNA, 15 bp, Homo sapiens
acctcagctccctta

SEQ ID NO: 421316 - DNA, 15 bp, Homo sapiens
tacctcagctccctt

SEQ ID NO: 421317 - DNA, 15 bp, Homo sapiens
atacctcagctccct

SEQ ID NO: 421318 - DNA, 15 bp, Homo sapiens
tatacctcagctccc

SEQ ID NO: 421319 - DNA, 15 bp, Homo sapiens
ctatacctcagctcc

SEQ ID NO: 421320 - DNA, 15 bp, Homo sapiens
gctatacctcagctc

SEQ ID NO: 421321 - DNA, 15 bp, Homo sapiens
tgctatacctcagct

SEQ ID NO: 421322 - DNA, 15 bp, Homo sapiens
ttgctatacctcagc

SEQ ID NO: 421323 - DNA, 15 bp, Homo sapiens
cttgctatacctcag

SEQ ID NO: 421324 - DNA, 15 bp, Homo sapiens
ccttgctatacctca

SEQ ID NO: 421325 - DNA, 15 bp, Homo sapiens
accttgctatacctc

SEQ ID NO: 421326 - DNA, 15 bp, Homo sapiens
caccttgctatacct

SEQ ID NO: 421327 - DNA, 15 bp, Homo sapiens
tcaccttgctatacc

SEQ ID NO: 421328 - DNA, 15 bp, Homo sapiens
ttcaccttgctatac

SEQ ID NO: 421329 - DNA, 15 bp, Homo sapiens
cttcaccttgctata

SEQ ID NO: 421330 - DNA, 15 bp, Homo sapiens
acttcaccttgctat

SEQ ID NO: 421331 - DNA, 15 bp, Homo sapiens
tacttcaccttgcta

SEQ ID NO: 421332 - DNA, 15 bp, Homo sapiens
ttacttcaccttgct

SEQ ID NO: 421333 - DNA, 15 bp, Homo sapiens
attacttcaccttgc

SEQ ID NO: 421334 - DNA, 15 bp, Homo sapiens
gattacttcaccttg

SEQ ID NO: 421335 - DNA, 15 bp, Homo sapiens
agattacttcacctt

SEQ ID NO: 421336 - DNA, 15 bp, Homo sapiens
cagattacttcacct

SEQ ID NO: 421337 - DNA, 15 bp, Homo sapiens
acagattacttcacc

SEQ ID NO: 421338 - DNA, 15 bp, Homo sapiens
gacagattacttcac

SEQ ID NO: 421339 - DNA, 15 bp, Homo sapiens
ggacagattacttca

SEQ ID NO: 421340 - DNA, 15 bp, Homo sapiens
tggacagattacttc

SEQ ID NO: 421341 - DNA, 15 bp, Homo sapiens
ctggacagattactt

SEQ ID NO: 421342 - DNA, 15 bp, Homo sapiens
cctggacagattact

SEQ ID NO: 421343 - DNA, 15 bp, Homo sapiens
ccctggacagattac

SEQ ID NO: 421344 - DNA, 15 bp, Homo sapiens
accctggacagatta

SEQ ID NO: 421345 - DNA, 15 bp, Homo sapiens
gaccctggacagatt

SEQ ID NO: 421346 - DNA, 15 bp, Homo sapiens
tgaccctggacagat

SEQ ID NO: 421347 - DNA, 15 bp, Homo sapiens
gtgaccctggacaga

SEQ ID NO: 421348 - DNA, 15 bp, Homo sapiens
tgtgaccctggacag

SEQ ID NO: 421349 - DNA, 15 bp, Homo sapiens
atgtgaccctggaca

SEQ ID NO: 421350 - DNA, 15 bp, Homo sapiens
catgtgaccctggac

SEQ ID NO: 421351 - DNA, 15 bp, Homo sapiens
ccatgtgaccctgga

SEQ ID NO: 421352 - DNA, 15 bp, Homo sapiens
gccatgtgaccctgg

SEQ ID NO: 421353 - DNA, 15 bp, Homo sapiens
cgccatgtgaccctg

SEQ ID NO: 421354 - DNA, 15 bp, Homo sapiens
ccgccatgtgaccct

SEQ ID NO: 421355 - DNA, 15 bp, Homo sapiens
tccgccatgtgaccc

SEQ ID NO: 421356 - DNA, 15 bp, Homo sapiens
atccgccatgtgacc

SEQ ID NO: 421357 - DNA, 15 bp, Homo sapiens
tatccgccatgtgac

SEQ ID NO: 421358 - DNA, 15 bp, Homo sapiens
ttatccgccatgtga

SEQ ID NO: 421359 - DNA, 15 bp, Homo sapiens
gttatccgccatgtg

SEQ ID NO: 421360 - DNA, 15 bp, Homo sapiens
ggttatccgccatgt

SEQ ID NO: 421361 - DNA, 15 bp, Homo sapiens
aggttatccgccatg

SEQ ID NO: 421362 - DNA, 15 bp, Homo sapiens
caggttatccgccat

SEQ ID NO: 421363 - DNA, 15 bp, Homo sapiens
ccaggttatccgcca

SEQ ID NO: 421364 - DNA, 15 bp, Homo sapiens
cccaggttatccgcc

SEQ ID NO: 421365 - DNA, 15 bp, Homo sapiens
acccaggttatccgc

SEQ ID NO: 421366 - DNA, 15 bp, Homo sapiens
tacccaggttatccg

SEQ ID NO: 421367 - DNA, 15 bp, Homo sapiens
ctacccaggttatcc

SEQ ID NO: 421368 - DNA, 15 bp, Homo sapiens
actacccaggttatc

SEQ ID NO: 421369 - DNA, 15 bp, Homo sapiens
gactacccaggttat

SEQ ID NO: 421370 - DNA, 15 bp, Homo sapiens
agactacccaggtta

SEQ ID NO: 421371 - DNA, 15 bp, Homo sapiens
aagactacccaggtt

SEQ ID NO: 421372 - DNA, 15 bp, Homo sapiens
taagactacccaggt

SEQ ID NO: 421373 - DNA, 15 bp, Homo sapiens
gtaagactacccagg

SEQ ID NO: 421374 - DNA, 15 bp, Homo sapiens
agtaagactacccag

SEQ ID NO: 421375 - DNA, 15 bp, Homo sapiens
aagtaagactaccca

SEQ ID NO: 421376 - DNA, 15 bp, Homo sapiens
gaagtaagactaccc

SEQ ID NO: 421377 - DNA, 15 bp, Homo sapiens
tgaagtaagactacc

SEQ ID NO: 421378 - DNA, 15 bp, Homo sapiens
gtgaagtaagactac

SEQ ID NO: 421379 - DNA, 15 bp, Homo sapiens
tgtgaagtaagacta

SEQ ID NO: 421380 - DNA, 15 bp, Homo sapiens
ttgtgaagtaagact

SEQ ID NO: 421381 - DNA, 15 bp, Homo sapiens
attgtgaagtaagac

SEQ ID NO: 421382 - DNA, 15 bp, Homo sapiens
gattgtgaagtaaga

SEQ ID NO: 421383 - DNA, 15 bp, Homo sapiens
ggattgtgaagtaag

SEQ ID NO: 421384 - DNA, 15 bp, Homo sapiens
tggattgtgaagtaa

SEQ ID NO: 421385 - DNA, 15 bp, Homo sapiens
ttggattgtgaagta

SEQ ID NO: 421386 - DNA, 15 bp, Homo sapiens
cttggattgtgaagt

SEQ ID NO: 421387 - DNA, 15 bp, Homo sapiens
acttggattgtgaag

SEQ ID NO: 421388 - DNA, 15 bp, Homo sapiens
aacttggattgtgaa

SEQ ID NO: 421389 - DNA, 15 bp, Homo sapiens
gaacttggattgtga

SEQ ID NO: 421390 - DNA, 15 bp, Homo sapiens
agaacttggattgtg

SEQ ID NO: 421391 - DNA, 15 bp, Homo sapiens
aagaacttggattgt

SEQ ID NO: 421392 - DNA, 15 bp, Homo sapiens
taagaacttggattg

SEQ ID NO: 421393 - DNA, 15 bp, Homo sapiens
ttaagaacttggatt

SEQ ID NO: 421394 - DNA, 15 bp, Homo sapiens
cttaagaacttggat

SEQ ID NO: 421395 - DNA, 15 bp, Homo sapiens
gcttaagaacttgga

SEQ ID NO: 421396 - DNA, 15 bp, Homo sapiens
tgcttaagaacttgg

SEQ ID NO: 421397 - DNA, 15 bp, Homo sapiens
gtgcttaagaacttg

SEQ ID NO: 421398 - DNA, 15 bp, Homo sapiens
agtgcttaagaactt

SEQ ID NO: 421399 - DNA, 15 bp, Homo sapiens
aagtgcttaagaact

SEQ ID NO: 421400 - DNA, 15 bp, Homo sapiens
aaagtgcttaagaac

SEQ ID NO: 421401 - DNA, 15 bp, Homo sapiens
taaagtgcttaagaa

SEQ ID NO: 421402 - DNA, 15 bp, Homo sapiens
ttaaagtgcttaaga

SEQ ID NO: 421403 - DNA, 15 bp, Homo sapiens
tttaaagtgcttaag

SEQ ID NO: 421404 - DNA, 15 bp, Homo sapiens
ttttaaagtgcttaa

SEQ ID NO: 421405 - DNA, 15 bp, Homo sapiens
tttttaaagtgctta

SEQ ID NO: 421406 - DNA, 15 bp, Homo sapiens
ttttttaaagtgctt

SEQ ID NO: 421407 - DNA, 15 bp, Homo sapiens
attttttaaagtgct

SEQ ID NO: 421408 - DNA, 15 bp, Homo sapiens
aattttttaaagtgc

SEQ ID NO: 421409 - DNA, 15 bp, Homo sapiens
caattttttaaagtg

SEQ ID NO: 421410 - DNA, 15 bp, Homo sapiens
tcaattttttaaagt

SEQ ID NO: 421411 - DNA, 15 bp, Homo sapiens
ttcaattttttaaag

SEQ ID NO: 421412 - DNA, 15 bp, Homo sapiens
attcaattttttaaa

SEQ ID NO: 421413 - DNA, 15 bp, Homo sapiens
aattcaattttttaa

SEQ ID NO: 421414 - DNA, 15 bp, Homo sapiens
caattcaatttttta

SEQ ID NO: 421415 - DNA, 15 bp, Homo sapiens
tcaattcaatttttt

SEQ ID NO: 421416 - DNA, 15 bp, Homo sapiens
gtcaattcaattttt

SEQ ID NO: 421417 - DNA, 15 bp, Homo sapiens
ggtcaattcaatttt

SEQ ID NO: 421418 - DNA, 15 bp, Homo sapiens
aggtcaattcaattt

SEQ ID NO: 421419 - DNA, 15 bp, Homo sapiens
aaggtcaattcaatt

SEQ ID NO: 421420 - DNA, 15 bp, Homo sapiens
caaggtcaattcaat

SEQ ID NO: 421421 - DNA, 15 bp, Homo sapiens
acaaggtcaattcaa

SEQ ID NO: 421422 - DNA, 15 bp, Homo sapiens
gacaaggtcaattca

SEQ ID NO: 421423 - DNA, 15 bp, Homo sapiens
ggacaaggtcaattc

SEQ ID NO: 421424 - DNA, 15 bp, Homo sapiens
tggacaaggtcaatt

SEQ ID NO: 421425 - DNA, 15 bp, Homo sapiens
ctggacaaggtcaat

SEQ ID NO: 421426 - DNA, 15 bp, Homo sapiens
tctggacaaggtcaa

SEQ ID NO: 421427 - DNA, 15 bp, Homo sapiens
ttctggacaaggtca

SEQ ID NO: 421428 - DNA, 15 bp, Homo sapiens
gttctggacaaggtc

SEQ ID NO: 421429 - DNA, 15 bp, Homo sapiens
ggttctggacaaggt

SEQ ID NO: 421430 - DNA, 15 bp, Homo sapiens
aggttctggacaagg

SEQ ID NO: 421431 - DNA, 15 bp, Homo sapiens
gaggttctggacaag

SEQ ID NO: 421432 - DNA, 15 bp, Homo sapiens
agaggttctggacaa

SEQ ID NO: 421433 - DNA, 15 bp, Homo sapiens
tagaggttctggaca

SEQ ID NO: 421434 - DNA, 15 bp, Homo sapiens
atagaggttctggac

SEQ ID NO: 421435 - DNA, 15 bp, Homo sapiens
catagaggttctgga

SEQ ID NO: 421436 - DNA, 15 bp, Homo sapiens
tcatagaggttctgg

SEQ ID NO: 421437 - DNA, 15 bp, Homo sapiens
ctcatagaggttctg

SEQ ID NO: 421438 - DNA, 15 bp, Homo sapiens
cctcatagaggttct

SEQ ID NO: 421439 - DNA, 15 bp, Homo sapiens
acctcatagaggttc

SEQ ID NO: 421440 - DNA, 15 bp, Homo sapiens
cacctcatagaggtt

SEQ ID NO: 421441 - DNA, 15 bp, Homo sapiens
acacctcatagaggt

SEQ ID NO: 421442 - DNA, 15 bp, Homo sapiens
tacacctcatagagg

SEQ ID NO: 421443 - DNA, 15 bp, Homo sapiens
atacacctcatagag

SEQ ID NO: 421444 - DNA, 15 bp, Homo sapiens
tatacacctcataga

SEQ ID NO: 421445 - DNA, 15 bp, Homo sapiens
ttatacacctcatag

SEQ ID NO: 421446 - DNA, 15 bp, Homo sapiens
tttatacacctcata

SEQ ID NO: 421447 - DNA, 15 bp, Homo sapiens
gtttatacacctcat

SEQ ID NO: 421448 - DNA, 15 bp, Homo sapiens
ggtttatacacctca

SEQ ID NO: 421449 - DNA, 15 bp, Homo sapiens
tggtttatacacctc

SEQ ID NO: 421450 - DNA, 15 bp, Homo sapiens
ttggtttatacacct

SEQ ID NO: 421451 - DNA, 15 bp, Homo sapiens
cttggtttatacacc

SEQ ID NO: 421452 - DNA, 15 bp, Homo sapiens
tcttggtttatacac

SEQ ID NO: 421453 - DNA, 15 bp, Homo sapiens
atcttggtttataca

SEQ ID NO: 421454 - DNA, 15 bp, Homo sapiens
aatcttggtttatac

SEQ ID NO: 421455 - DNA, 15 bp, Homo sapiens
taatcttggtttata

SEQ ID NO: 421456 - DNA, 15 bp, Homo sapiens
ttaatcttggtttat

SEQ ID NO: 421457 - DNA, 15 bp, Homo sapiens
gttaatcttggttta

SEQ ID NO: 421458 - DNA, 15 bp, Homo sapiens
tgttaatcttggttt

SEQ ID NO: 421459 - DNA, 15 bp, Homo sapiens
atgttaatcttggtt

SEQ ID NO: 421460 - DNA, 15 bp, Homo sapiens
tatgttaatcttggt

SEQ ID NO: 421461 - DNA, 15 bp, Homo sapiens
ttatgttaatcttgg

SEQ ID NO: 421462 - DNA, 15 bp, Homo sapiens
attatgttaatcttg

SEQ ID NO: 421463 - DNA, 15 bp, Homo sapiens
aattatgttaatctt

SEQ ID NO: 421464 - DNA, 15 bp, Homo sapiens
taattatgttaatct

SEQ ID NO: 421465 - DNA, 15 bp, Homo sapiens
ataattatgttaatc

SEQ ID NO: 421466 - DNA, 15 bp, Homo sapiens
aataattatgttaat

SEQ ID NO: 421467 - DNA, 15 bp, Homo sapiens
cttaataattatgtt

SEQ ID NO: 421468 - DNA, 15 bp, Homo sapiens
gcttaataattatgt

SEQ ID NO: 421469 - DNA, 15 bp, Homo sapiens
tgcttaataattatg

SEQ ID NO: 421470 - DNA, 15 bp, Homo sapiens
ttgcttaataattat

SEQ ID NO: 421471 - DNA, 15 bp, Homo sapiens
attgcttaataatta

SEQ ID NO: 421472 - DNA, 15 bp, Homo sapiens
aattgcttaataatt

SEQ ID NO: 421473 - DNA, 15 bp, Homo sapiens
taattgcttaataat

SEQ ID NO: 421474 - DNA, 15 bp, Homo sapiens
ttaattgcttaataa

SEQ ID NO: 421475 - DNA, 15 bp, Homo sapiens
tttaattgcttaata

SEQ ID NO: 421476 - DNA, 15 bp, Homo sapiens
ttttaattgcttaat

SEQ ID NO: 421477 - DNA, 15 bp, Homo sapiens
attttaattgcttaa

SEQ ID NO: 421478 - DNA, 15 bp, Homo sapiens
tattttaattgctta

SEQ ID NO: 421479 - DNA, 15 bp, Homo sapiens
ttattttaattgctt

SEQ ID NO: 421480 - DNA, 15 bp, Homo sapiens
attattttaattgct

SEQ ID NO: 421481 - DNA, 15 bp, Homo sapiens
tattattttaattgc

SEQ ID NO: 421482 - DNA, 15 bp, Homo sapiens
ttattattttaattg

SEQ ID NO: 421483 - DNA, 15 bp, Homo sapiens
attattattttaatt

SEQ ID NO: 421484 - DNA, 15 bp, Homo sapiens
aattattattttaat

SEQ ID NO: 421485 - DNA, 15 bp, Homo sapiens
aaattattattttaa

SEQ ID NO: 421486 - DNA, 15 bp, Homo sapiens
aaaattattatttta

SEQ ID NO: 421487 - DNA, 15 bp, Homo sapiens
taaaattattatttt

SEQ ID NO: 421488 - DNA, 15 bp, Homo sapiens
ctaaaattattattt

SEQ ID NO: 421489 - DNA, 15 bp, Homo sapiens
actaaaattattatt

SEQ ID NO: 421490 - DNA, 15 bp, Homo sapiens
tactaaaattattat

SEQ ID NO: 421491 - DNA, 15 bp, Homo sapiens
ttactaaaattatta

SEQ ID NO: 421492 - DNA, 15 bp, Homo sapiens
tttactaaaattatt

SEQ ID NO: 421493 - DNA, 15 bp, Homo sapiens
ttttactaaaattat

SEQ ID NO: 421494 - DNA, 15 bp, Homo sapiens
attttactaaaatta

SEQ ID NO: 421495 - DNA, 15 bp, Homo sapiens
aattttactaaaatt

SEQ ID NO: 421496 - DNA, 15 bp, Homo sapiens
gaattttactaaaat

SEQ ID NO: 421497 - DNA, 15 bp, Homo sapiens
agaattttactaaaa

SEQ ID NO: 421498 - DNA, 15 bp, Homo sapiens
cagaattttactaaa

SEQ ID NO: 421499 - DNA, 15 bp, Homo sapiens
acagaattttactaa

SEQ ID NO: 421500 - DNA, 15 bp, Homo sapiens
tacagaattttacta

SEQ ID NO: 421501 - DNA, 15 bp, Homo sapiens
gtacagaattttact

SEQ ID NO: 421502 - DNA, 15 bp, Homo sapiens
agtacagaattttac

SEQ ID NO: 421503 - DNA, 15 bp, Homo sapiens
cagtacagaatttta

SEQ ID NO: 421504 - DNA, 15 bp, Homo sapiens
gcagtacagaatttt

SEQ ID NO: 421505 - DNA, 15 bp, Homo sapiens
tgcagtacagaattt

SEQ ID NO: 421506 - DNA, 15 bp, Homo sapiens
ctgcagtacagaatt

SEQ ID NO: 421507 - DNA, 15 bp, Homo sapiens
actgcagtacagaat

SEQ ID NO: 421508 - DNA, 15 bp, Homo sapiens
cactgcagtacagaa

SEQ ID NO: 421509 - DNA, 15 bp, Homo sapiens
ccactgcagtacaga

SEQ ID NO: 421510 - DNA, 15 bp, Homo sapiens
tccactgcagtacag

SEQ ID NO: 421511 - DNA, 15 bp, Homo sapiens
atccactgcagtaca

SEQ ID NO: 421512 - DNA, 15 bp, Homo sapiens
catccactgcagtac

SEQ ID NO: 421513 - DNA, 15 bp, Homo sapiens
tcatccactgcagta

SEQ ID NO: 421514 - DNA, 15 bp, Homo sapiens
gtcatccactgcagt

SEQ ID NO: 421515 - DNA, 15 bp, Homo sapiens
tgtcatccactgcag

SEQ ID NO: 421516 - DNA, 15 bp, Homo sapiens
atgtcatccactgca

SEQ ID NO: 421517 - DNA, 15 bp, Homo sapiens
aatgtcatccactgc

SEQ ID NO: 421518 - DNA, 15 bp, Homo sapiens
taatgtcatccactg

SEQ ID NO: 421519 - DNA, 15 bp, Homo sapiens
ataatgtcatccact

SEQ ID NO: 421520 - DNA, 15 bp, Homo sapiens
aataatgtcatccac

SEQ ID NO: 421521 - DNA, 15 bp, Homo sapiens
aaataatgtcatcca

SEQ ID NO: 421522 - DNA, 15 bp, Homo sapiens
gaaataatgtcatcc

SEQ ID NO: 421523 - DNA, 15 bp, Homo sapiens
agaaataatgtcatc

SEQ ID NO: 421524 - DNA, 15 bp, Homo sapiens
cagaaataatgtcat

SEQ ID NO: 421525 - DNA, 15 bp, Homo sapiens
tcagaaataatgtca

SEQ ID NO: 421526 - DNA, 15 bp, Homo sapiens
ttcagaaataatgtc

SEQ ID NO: 421527 - DNA, 15 bp, Homo sapiens
cttcagaaataatgt

SEQ ID NO: 421528 - DNA, 15 bp, Homo sapiens
acttcagaaataatg

SEQ ID NO: 421529 - DNA, 15 bp, Homo sapiens
cacttcagaaataat

SEQ ID NO: 421530 - DNA, 15 bp, Homo sapiens
tcacttcagaaataa

SEQ ID NO: 421531 - DNA, 15 bp, Homo sapiens
gtcacttcagaaata

SEQ ID NO: 421532 - DNA, 15 bp, Homo sapiens
tgtcacttcagaaat

SEQ ID NO: 421533 - DNA, 15 bp, Homo sapiens
atgtcacttcagaaa

SEQ ID NO: 421534 - DNA, 15 bp, Homo sapiens
aatgtcacttcagaa

SEQ ID NO: 421535 - DNA, 15 bp, Homo sapiens
taatgtcacttcaga

SEQ ID NO: 421536 - DNA, 15 bp, Homo sapiens
ttaatgtcacttcag

SEQ ID NO: 421537 - DNA, 15 bp, Homo sapiens
gttaatgtcacttca

SEQ ID NO: 421538 - DNA, 15 bp, Homo sapiens
ggttaatgtcacttc

SEQ ID NO: 421539 - DNA, 15 bp, Homo sapiens
aggttaatgtcactt

SEQ ID NO: 421540 - DNA, 15 bp, Homo sapiens
taggttaatgtcact

SEQ ID NO: 421541 - DNA, 15 bp, Homo sapiens
ttaggttaatgtcac

SEQ ID NO: 421542 - DNA, 15 bp, Homo sapiens
gttaggttaatgtca

SEQ ID NO: 421543 - DNA, 15 bp, Homo sapiens
agttaggttaatgtc

SEQ ID NO: 421544 - DNA, 15 bp, Homo sapiens
aagttaggttaatgt

SEQ ID NO: 421545 - DNA, 15 bp, Homo sapiens
taagttaggttaatg

SEQ ID NO: 421546 - DNA, 15 bp, Homo sapiens
gtaagttaggttaat

SEQ ID NO: 421547 - DNA, 15 bp, Homo sapiens
agtaagttaggttaa

SEQ ID NO: 421548 - DNA, 15 bp, Homo sapiens
cagtaagttaggtta

SEQ ID NO: 421549 - DNA, 15 bp, Homo sapiens
acagtaagttaggtt

SEQ ID NO: 421550 - DNA, 15 bp, Homo sapiens
tacagtaagttaggt

SEQ ID NO: 421551 - DNA, 15 bp, Homo sapiens
ctacagtaagttagg

SEQ ID NO: 421552 - DNA, 15 bp, Homo sapiens
cctacagtaagttag

SEQ ID NO: 421553 - DNA, 15 bp, Homo sapiens
tcctacagtaagtta

SEQ ID NO: 421554 - DNA, 15 bp, Homo sapiens
ttcctacagtaagtt

SEQ ID NO: 421555 - DNA, 15 bp, Homo sapiens
gttcctacagtaagt

SEQ ID NO: 421556 - DNA, 15 bp, Homo sapiens
tgttcctacagtaag

SEQ ID NO: 421557 - DNA, 15 bp, Homo sapiens
ctgttcctacagtaa

SEQ ID NO: 421558 - DNA, 15 bp, Homo sapiens
actgttcctacagta

SEQ ID NO: 421559 - DNA, 15 bp, Homo sapiens
aactgttcctacagt

SEQ ID NO: 421560 - DNA, 15 bp, Homo sapiens
gaactgttcctacag

SEQ ID NO: 421561 - DNA, 15 bp, Homo sapiens
tgaactgttcctaca

SEQ ID NO: 421562 - DNA, 15 bp, Homo sapiens
ctgaactgttcctac

SEQ ID NO: 421563 - DNA, 15 bp, Homo sapiens
actgaactgttccta

SEQ ID NO: 421564 - DNA, 15 bp, Homo sapiens
cactgaactgttcct

SEQ ID NO: 421565 - DNA, 15 bp, Homo sapiens
ccactgaactgttcc

SEQ ID NO: 421566 - DNA, 15 bp, Homo sapiens
gccactgaactgttc

SEQ ID NO: 421567 - DNA, 15 bp, Homo sapiens
tgccactgaactgtt

SEQ ID NO: 421568 - DNA, 15 bp, Homo sapiens
ctgccactgaactgt

SEQ ID NO: 421569 - DNA, 15 bp, Homo sapiens
cctgccactgaactg

SEQ ID NO: 421570 - DNA, 15 bp, Homo sapiens
tcctgccactgaact

SEQ ID NO: 421571 - DNA, 15 bp, Homo sapiens
atcctgccactgaac

SEQ ID NO: 421572 - DNA, 15 bp, Homo sapiens
aatcctgccactgaa

SEQ ID NO: 421573 - DNA, 15 bp, Homo sapiens
caatcctgccactga

SEQ ID NO: 421574 - DNA, 15 bp, Homo sapiens
gcaatcctgccactg

SEQ ID NO: 421575 - DNA, 15 bp, Homo sapiens
ggcaatcctgccact

SEQ ID NO: 421576 - DNA, 15 bp, Homo sapiens
tggcaatcctgccac

SEQ ID NO: 421577 - DNA, 15 bp, Homo sapiens
ctggcaatcctgcca

SEQ ID NO: 421578 - DNA, 15 bp, Homo sapiens
actggcaatcctgcc

SEQ ID NO: 421579 - DNA, 15 bp, Homo sapiens
cactggcaatcctgc

SEQ ID NO: 421580 - DNA, 15 bp, Homo sapiens
ccactggcaatcctg

SEQ ID NO: 421581 - DNA, 15 bp, Homo sapiens
accactggcaatcct

SEQ ID NO: 421582 - DNA, 15 bp, Homo sapiens
aaccactggcaatcc

SEQ ID NO: 421583 - DNA, 15 bp, Homo sapiens
caaccactggcaatc

SEQ ID NO: 421584 - DNA, 15 bp, Homo sapiens
tcaaccactggcaat

SEQ ID NO: 421585 - DNA, 15 bp, Homo sapiens
gtcaaccactggcaa

SEQ ID NO: 421586 - DNA, 15 bp, Homo sapiens
tgtcaaccactggca

SEQ ID NO: 421587 - DNA, 15 bp, Homo sapiens
ctgtcaaccactggc

SEQ ID NO: 421588 - DNA, 15 bp, Homo sapiens
gctgtcaaccactgg

SEQ ID NO: 421589 - DNA, 15 bp, Homo sapiens
agctgtcaaccactg

SEQ ID NO: 421590 - DNA, 15 bp, Homo sapiens
gagctgtcaaccact

SEQ ID NO: 421591 - DNA, 15 bp, Homo sapiens
cgagctgtcaaccac

SEQ ID NO: 421592 - DNA, 15 bp, Homo sapiens
ccgagctgtcaacca

SEQ ID NO: 421593 - DNA, 15 bp, Homo sapiens
cccgagctgtcaacc

SEQ ID NO: 421594 - DNA, 15 bp, Homo sapiens
gcccgagctgtcaac

SEQ ID NO: 421595 - DNA, 15 bp, Homo sapiens
agcccgagctgtcaa

SEQ ID NO: 421596 - DNA, 15 bp, Homo sapiens
gagcccgagctgtca

SEQ ID NO: 421597 - DNA, 15 bp, Homo sapiens
agagcccgagctgtc

SEQ ID NO: 421598 - DNA, 15 bp, Homo sapiens
cagagcccgagctgt

SEQ ID NO: 421599 - DNA, 15 bp, Homo sapiens
ccagagcccgagctg

SEQ ID NO: 421600 - DNA, 15 bp, Homo sapiens
cccagagcccgagct

SEQ ID NO: 421601 - DNA, 15 bp, Homo sapiens
ccccagagcccgagc

SEQ ID NO: 421602 - DNA, 15 bp, Homo sapiens
accccagagcccgag

SEQ ID NO: 421603 - DNA, 15 bp, Homo sapiens
gaccccagagcccga

SEQ ID NO: 421604 - DNA, 15 bp, Homo sapiens
tgaccccagagcccg

SEQ ID NO: 421605 - DNA, 15 bp, Homo sapiens
ctgaccccagagccc

SEQ ID NO: 421606 - DNA, 15 bp, Homo sapiens
tctgaccccagagcc

SEQ ID NO: 421607 - DNA, 15 bp, Homo sapiens
gtctgaccccagagc

SEQ ID NO: 421608 - DNA, 15 bp, Homo sapiens
tgtctgaccccagag

SEQ ID NO: 421609 - DNA, 15 bp, Homo sapiens
ctgtctgaccccaga

SEQ ID NO: 421610 - DNA, 15 bp, Homo sapiens
tctgtctgaccccag

SEQ ID NO: 421611 - DNA, 15 bp, Homo sapiens
atctgtctgacccca

SEQ ID NO: 421612 - DNA, 15 bp, Homo sapiens
catctgtctgacccc

SEQ ID NO: 421613 - DNA, 15 bp, Homo sapiens
acatctgtctgaccc

SEQ ID NO: 421614 - DNA, 15 bp, Homo sapiens
ttaaaattaggccac

SEQ ID NO: 421615 - DNA, 15 bp, Homo sapiens
tttaaaattaggcca

SEQ ID NO: 421616 - DNA, 15 bp, Homo sapiens
ctttaaaattaggcc

SEQ ID NO: 421617 - DNA, 15 bp, Homo sapiens
gctttaaaattaggc

SEQ ID NO: 421618 - DNA, 15 bp, Homo sapiens
tgctttaaaattagg

SEQ ID NO: 421619 - DNA, 15 bp, Homo sapiens
gtgctttaaaattag

SEQ ID NO: 421620 - DNA, 15 bp, Homo sapiens
tgtgctttaaaatta

SEQ ID NO: 421621 - DNA, 15 bp, Homo sapiens
ttgtgctttaaaatt

SEQ ID NO: 421622 - DNA, 15 bp, Homo sapiens
gttgtgctttaaaat

SEQ ID NO: 421623 - DNA, 15 bp, Homo sapiens
agttgtgctttaaaa

SEQ ID NO: 421624 - DNA, 15 bp, Homo sapiens
aagttgtgctttaaa

SEQ ID NO: 421625 - DNA, 15 bp, Homo sapiens
aaagttgtgctttaa

SEQ ID NO: 421626 - DNA, 15 bp, Homo sapiens
caaagttgtgcttta

SEQ ID NO: 421627 - DNA, 15 bp, Homo sapiens
tcaaagttgtgcttt

SEQ ID NO: 421628 - DNA, 15 bp, Homo sapiens
gtcaaagttgtgctt

SEQ ID NO: 421629 - DNA, 15 bp, Homo sapiens
tgtcaaagttgtgct

SEQ ID NO: 421630 - DNA, 15 bp, Homo sapiens
atgtcaaagttgtgc

SEQ ID NO: 421631 - DNA, 15 bp, Homo sapiens
catgtcaaagttgtg

SEQ ID NO: 421632 - DNA, 15 bp, Homo sapiens
acatgtcaaagttgt

SEQ ID NO: 421633 - DNA, 15 bp, Homo sapiens
cacatgtcaaagttg

SEQ ID NO: 421634 - DNA, 15 bp, Homo sapiens
gcacatgtcaaagtt

SEQ ID NO: 421635 - DNA, 15 bp, Homo sapiens
agcacatgtcaaagt

SEQ ID NO: 421636 - DNA, 15 bp, Homo sapiens
gagcacatgtcaaag

SEQ ID NO: 421637 - DNA, 15 bp, Homo sapiens
tgagcacatgtcaaa

SEQ ID NO: 421638 - DNA, 15 bp, Homo sapiens
atgagcacatgtcaa

SEQ ID NO: 421639 - DNA, 15 bp, Homo sapiens
catgagcacatgtca

SEQ ID NO: 421640 - DNA, 15 bp, Homo sapiens
acatgagcacatgtc

SEQ ID NO: 421641 - DNA, 15 bp, Homo sapiens
cacatgagcacatgt

SEQ ID NO: 421642 - DNA, 15 bp, Homo sapiens
acacatgagcacatg

SEQ ID NO: 421643 - DNA, 15 bp, Homo sapiens
cacacatgagcacat

SEQ ID NO: 421644 - DNA, 15 bp, Homo sapiens
tcacacatgagcaca

SEQ ID NO: 421645 - DNA, 15 bp, Homo sapiens
gtcacacatgagcac

SEQ ID NO: 421646 - DNA, 15 bp, Homo sapiens
ggtcacacatgagca

SEQ ID NO: 421647 - DNA, 15 bp, Homo sapiens
aggtcacacatgagc

SEQ ID NO: 421648 - DNA, 15 bp, Homo sapiens
gaggtcacacatgag

SEQ ID NO: 421649 - DNA, 15 bp, Homo sapiens
agaggtcacacatga

SEQ ID NO: 421650 - DNA, 15 bp, Homo sapiens
tagaggtcacacatg

SEQ ID NO: 421651 - DNA, 15 bp, Homo sapiens
ctagaggtcacacat

SEQ ID NO: 421652 - DNA, 15 bp, Homo sapiens
cctagaggtcacaca

SEQ ID NO: 421653 - DNA, 15 bp, Homo sapiens
acctagaggtcacac

SEQ ID NO: 421654 - DNA, 15 bp, Homo sapiens
aacctagaggtcaca

SEQ ID NO: 421655 - DNA, 15 bp, Homo sapiens
caacctagaggtcac

SEQ ID NO: 421656 - DNA, 15 bp, Homo sapiens
gcaacctagaggtca

SEQ ID NO: 421657 - DNA, 15 bp, Homo sapiens
agcaacctagaggtc

SEQ ID NO: 421658 - DNA, 15 bp, Homo sapiens
aagcaacctagaggt

SEQ ID NO: 421659 - DNA, 15 bp, Homo sapiens
caagcaacctagagg

SEQ ID NO: 421660 - DNA, 15 bp, Homo sapiens
acaagcaacctagag

SEQ ID NO: 421661 - DNA, 15 bp, Homo sapiens
aacaagcaacctaga

SEQ ID NO: 421662 - DNA, 15 bp, Homo sapiens
aaacaagcaacctag

SEQ ID NO: 421663 - DNA, 15 bp, Homo sapiens
gaaacaagcaaccta

SEQ ID NO: 421664 - DNA, 15 bp, Homo sapiens
agaaacaagcaacct

SEQ ID NO: 421665 - DNA, 15 bp, Homo sapiens
aagaaacaagcaacc

SEQ ID NO: 421666 - DNA, 15 bp, Homo sapiens
taagaaacaagcaac

SEQ ID NO: 421667 - DNA, 15 bp, Homo sapiens
ttaagaaacaagcaa

SEQ ID NO: 421668 - DNA, 15 bp, Homo sapiens
tttaagaaacaagca

SEQ ID NO: 421669 - DNA, 15 bp, Homo sapiens
ttttaagaaacaagc

SEQ ID NO: 421670 - DNA, 15 bp, Homo sapiens
attttaagaaacaag

SEQ ID NO: 421671 - DNA, 15 bp, Homo sapiens
tattttaagaaacaa

SEQ ID NO: 421672 - DNA, 15 bp, Homo sapiens
ttattttaagaaaca

SEQ ID NO: 421673 - DNA, 15 bp, Homo sapiens
tttattttaagaaac

SEQ ID NO: 421674 - DNA, 15 bp, Homo sapiens
ttttattttaagaaa

SEQ ID NO: 421675 - DNA, 15 bp, Homo sapiens
tttttattttaagaa

SEQ ID NO: 421676 - DNA, 15 bp, Homo sapiens
atttttattttaaga

SEQ ID NO: 421677 - DNA, 15 bp, Homo sapiens
tatttttattttaag

SEQ ID NO: 421678 - DNA, 15 bp, Homo sapiens
atatttttattttaa

SEQ ID NO: 421679 - DNA, 15 bp, Homo sapiens
tatatttttatttta

SEQ ID NO: 421680 - DNA, 15 bp, Homo sapiens
gtatatttttatttt

SEQ ID NO: 421681 - DNA, 15 bp, Homo sapiens
ggtatatttttattt

SEQ ID NO: 421682 - DNA, 15 bp, Homo sapiens
aggtatatttttatt

SEQ ID NO: 421683 - DNA, 15 bp, Homo sapiens
caggtatatttttat

SEQ ID NO: 421684 - DNA, 15 bp, Homo sapiens
acaggtatattttta

SEQ ID NO: 421685 - DNA, 15 bp, Homo sapiens
gacaggtatattttt

SEQ ID NO: 421686 - DNA, 15 bp, Homo sapiens
agacaggtatatttt

SEQ ID NO: 421687 - DNA, 15 bp, Homo sapiens
aagacaggtatattt

SEQ ID NO: 421688 - DNA, 15 bp, Homo sapiens
caagacaggtatatt

SEQ ID NO: 421689 - DNA, 15 bp, Homo sapiens
gcaagacaggtatat

SEQ ID NO: 421690 - DNA, 15 bp, Homo sapiens
tgcaagacaggtata

SEQ ID NO: 421691 - DNA, 15 bp, Homo sapiens
gtgcaagacaggtat

SEQ ID NO: 421692 - DNA, 15 bp, Homo sapiens
ggtgcaagacaggta

SEQ ID NO: 421693 - DNA, 15 bp, Homo sapiens
aggtgcaagacaggt

SEQ ID NO: 421694 - DNA, 15 bp, Homo sapiens
aaggtgcaagacagg

SEQ ID NO: 421695 - DNA, 15 bp, Homo sapiens
gaaggtgcaagacag

SEQ ID NO: 421696 - DNA, 15 bp, Homo sapiens
tgaaggtgcaagaca

SEQ ID NO: 421697 - DNA, 15 bp, Homo sapiens
ttgaaggtgcaagac

SEQ ID NO: 421698 - DNA, 15 bp, Homo sapiens
attgaaggtgcaaga

SEQ ID NO: 421699 - DNA, 15 bp, Homo sapiens
aattgaaggtgcaag

SEQ ID NO: 421700 - DNA, 15 bp, Homo sapiens
aaattgaaggtgcaa

SEQ ID NO: 421701 - DNA, 15 bp, Homo sapiens
taaattgaaggtgca

SEQ ID NO: 421702 - DNA, 15 bp, Homo sapiens
ttaaattgaaggtgc

SEQ ID NO: 421703 - DNA, 15 bp, Homo sapiens
tttaaattgaaggtg

SEQ ID NO: 421704 - DNA, 15 bp, Homo sapiens
ctttaaattgaaggt

SEQ ID NO: 421705 - DNA, 15 bp, Homo sapiens
cctttaaattgaagg

SEQ ID NO: 421706 - DNA, 15 bp, Homo sapiens
ccctttaaattgaag

SEQ ID NO: 421707 - DNA, 15 bp, Homo sapiens
gccctttaaattgaa

SEQ ID NO: 421708 - DNA, 15 bp, Homo sapiens
tgccctttaaattga

SEQ ID NO: 421709 - DNA, 15 bp, Homo sapiens
atgccctttaaattg

SEQ ID NO: 421710 - DNA, 15 bp, Homo sapiens
tatgccctttaaatt

SEQ ID NO: 421711 - DNA, 15 bp, Homo sapiens
ttatgccctttaaat

SEQ ID NO: 421712 - DNA, 15 bp, Homo sapiens
gttatgccctttaaa

SEQ ID NO: 421713 - DNA, 15 bp, Homo sapiens
agttatgccctttaa

SEQ ID NO: 421714 - DNA, 15 bp, Homo sapiens
tagttatgcccttta

SEQ ID NO: 421715 - DNA, 15 bp, Homo sapiens
ttagttatgcccttt

SEQ ID NO: 421716 - DNA, 15 bp, Homo sapiens
attagttatgccctt

SEQ ID NO: 421717 - DNA, 15 bp, Homo sapiens
cattagttatgccct

SEQ ID NO: 421718 - DNA, 15 bp, Homo sapiens
tcattagttatgccc

SEQ ID NO: 421719 - DNA, 15 bp, Homo sapiens
ttcattagttatgcc

SEQ ID NO: 421720 - DNA, 15 bp, Homo sapiens
cttcattagttatgc

SEQ ID NO: 421721 - DNA, 15 bp, Homo sapiens
tcttcattagttatg

SEQ ID NO: 421722 - DNA, 15 bp, Homo sapiens
gtcttcattagttat

SEQ ID NO: 421723 - DNA, 15 bp, Homo sapiens
tgtcttcattagtta

SEQ ID NO: 421724 - DNA, 15 bp, Homo sapiens
atgtcttcattagtt

SEQ ID NO: 421725 - DNA, 15 bp, Homo sapiens
aatgtcttcattagt

SEQ ID NO: 421726 - DNA, 15 bp, Homo sapiens
aaatgtcttcattag

SEQ ID NO: 421727 - DNA, 15 bp, Homo sapiens
gaaatgtcttcatta

SEQ ID NO: 421728 - DNA, 15 bp, Homo sapiens
agaaatgtcttcatt

SEQ ID NO: 421729 - DNA, 15 bp, Homo sapiens
aagaaatgtcttcat

SEQ ID NO: 421730 - DNA, 15 bp, Homo sapiens
taagaaatgtcttca

SEQ ID NO: 421731 - DNA, 15 bp, Homo sapiens
ctaagaaatgtcttc

SEQ ID NO: 421732 - DNA, 15 bp, Homo sapiens
tctaagaaatgtctt

SEQ ID NO: 421733 - DNA, 15 bp, Homo sapiens
atctaagaaatgtct

SEQ ID NO: 421734 - DNA, 15 bp, Homo sapiens
tatctaagaaatgtc

SEQ ID NO: 421735 - DNA, 15 bp, Homo sapiens
gtatctaagaaatgt

SEQ ID NO: 421736 - DNA, 15 bp, Homo sapiens
agtatctaagaaatg

SEQ ID NO: 421737 - DNA, 15 bp, Homo sapiens
aagtatctaagaaat

SEQ ID NO: 421738 - DNA, 15 bp, Homo sapiens
gaagtatctaagaaa

SEQ ID NO: 421739 - DNA, 15 bp, Homo sapiens
agaagtatctaagaa

SEQ ID NO: 421740 - DNA, 15 bp, Homo sapiens
aagaagtatctaaga

SEQ ID NO: 421741 - DNA, 15 bp, Homo sapiens
gaagaagtatctaag

SEQ ID NO: 421742 - DNA, 15 bp, Homo sapiens
tgaagaagtatctaa

SEQ ID NO: 421743 - DNA, 15 bp, Homo sapiens
atgaagaagtatcta

SEQ ID NO: 421744 - DNA, 15 bp, Homo sapiens
aatgaagaagtatct

SEQ ID NO: 421745 - DNA, 15 bp, Homo sapiens
taatgaagaagtatc

SEQ ID NO: 421746 - DNA, 15 bp, Homo sapiens
gtaatgaagaagtat

SEQ ID NO: 421747 - DNA, 15 bp, Homo sapiens
tgtaatgaagaagta

SEQ ID NO: 421748 - DNA, 15 bp, Homo sapiens
atgtaatgaagaagt

SEQ ID NO: 421749 - DNA, 15 bp, Homo sapiens
catgtaatgaagaag

SEQ ID NO: 421750 - DNA, 15 bp, Homo sapiens
acatgtaatgaagaa

SEQ ID NO: 421751 - DNA, 15 bp, Homo sapiens
aacatgtaatgaaga

SEQ ID NO: 421752 - DNA, 15 bp, Homo sapiens
aaacatgtaatgaag

SEQ ID NO: 421753 - DNA, 15 bp, Homo sapiens
aaaacatgtaatgaa

SEQ ID NO: 421754 - DNA, 15 bp, Homo sapiens
taaaacatgtaatga

SEQ ID NO: 421755 - DNA, 15 bp, Homo sapiens
ataaaacatgtaatg

SEQ ID NO: 421756 - DNA, 15 bp, Homo sapiens
aataaaacatgtaat

SEQ ID NO: 421757 - DNA, 15 bp, Homo sapiens
gaataaaacatgtaa

SEQ ID NO: 421758 - DNA, 15 bp, Homo sapiens
agaataaaacatgta

SEQ ID NO: 421759 - DNA, 15 bp, Homo sapiens
gagaataaaacatgt

SEQ ID NO: 421760 - DNA, 15 bp, Homo sapiens
tgagaataaaacatg

SEQ ID NO: 421761 - DNA, 15 bp, Homo sapiens
gtgagaataaaacat

SEQ ID NO: 421762 - DNA, 15 bp, Homo sapiens
agtgagaataaaaca

SEQ ID NO: 421763 - DNA, 15 bp, Homo sapiens
aagtgagaataaaac

SEQ ID NO: 421764 - DNA, 15 bp, Homo sapiens
taagtgagaataaaa

SEQ ID NO: 421765 - DNA, 15 bp, Homo sapiens
ctaagtgagaataaa

SEQ ID NO: 421766 - DNA, 15 bp, Homo sapiens
tctaagtgagaataa

SEQ ID NO: 421767 - DNA, 15 bp, Homo sapiens
ttctaagtgagaata

SEQ ID NO: 421768 - DNA, 15 bp, Homo sapiens
gttctaagtgagaat

SEQ ID NO: 421769 - DNA, 15 bp, Homo sapiens
tgttctaagtgagaa

SEQ ID NO: 421770 - DNA, 15 bp, Homo sapiens
ctgttctaagtgaga

SEQ ID NO: 421771 - DNA, 15 bp, Homo sapiens
actgttctaagtgag

SEQ ID NO: 421772 - DNA, 15 bp, Homo sapiens
aactgttctaagtga

SEQ ID NO: 421773 - DNA, 15 bp, Homo sapiens
aaactgttctaagtg

SEQ ID NO: 421774 - DNA, 15 bp, Homo sapiens
taaactgttctaagt

SEQ ID NO: 421775 - DNA, 15 bp, Homo sapiens
gtaaactgttctaag

SEQ ID NO: 421776 - DNA, 15 bp, Homo sapiens
tgtaaactgttctaa

SEQ ID NO: 421777 - DNA, 15 bp, Homo sapiens
atgtaaactgttcta

SEQ ID NO: 421778 - DNA, 15 bp, Homo sapiens
gatgtaaactgttct

SEQ ID NO: 421779 - DNA, 15 bp, Homo sapiens
agatgtaaactgttc

SEQ ID NO: 421780 - DNA, 15 bp, Homo sapiens
cagatgtaaactgtt

SEQ ID NO: 421781 - DNA, 15 bp, Homo sapiens
acagatgtaaactgt

SEQ ID NO: 421782 - DNA, 15 bp, Homo sapiens
aacagatgtaaactg

SEQ ID NO: 421783 - DNA, 15 bp, Homo sapiens
taacagatgtaaact

SEQ ID NO: 421784 - DNA, 15 bp, Homo sapiens
gtaacagatgtaaac

SEQ ID NO: 421785 - DNA, 15 bp, Homo sapiens
tgtaacagatgtaaa

SEQ ID NO: 421786 - DNA, 15 bp, Homo sapiens
ttgtaacagatgtaa

SEQ ID NO: 421787 - DNA, 15 bp, Homo sapiens
attgtaacagatgta

SEQ ID NO: 421788 - DNA, 15 bp, Homo sapiens
aattgtaacagatgt

SEQ ID NO: 421789 - DNA, 15 bp, Homo sapiens
taattgtaacagatg

SEQ ID NO: 421790 - DNA, 15 bp, Homo sapiens
gtaattgtaacagat

SEQ ID NO: 421791 - DNA, 15 bp, Homo sapiens
agtaattgtaacaga

SEQ ID NO: 421792 - DNA, 15 bp, Homo sapiens
aagtaattgtaacag

SEQ ID NO: 421793 - DNA, 15 bp, Homo sapiens
taagtaattgtaaca

SEQ ID NO: 421794 - DNA, 15 bp, Homo sapiens
ctaagtaattgtaac

SEQ ID NO: 421795 - DNA, 15 bp, Homo sapiens
tctaagtaattgtaa

SEQ ID NO: 421796 - DNA, 15 bp, Homo sapiens
atctaagtaattgta

SEQ ID NO: 421797 - DNA, 15 bp, Homo sapiens
gatctaagtaattgt

SEQ ID NO: 421798 - DNA, 15 bp, Homo sapiens
ggatctaagtaattg

SEQ ID NO: 421799 - DNA, 15 bp, Homo sapiens
aggatctaagtaatt

SEQ ID NO: 421800 - DNA, 15 bp, Homo sapiens
aaggatctaagtaat

SEQ ID NO: 421801 - DNA, 15 bp, Homo sapiens
aaaggatctaagtaa

SEQ ID NO: 421802 - DNA, 15 bp, Homo sapiens
aaaaggatctaagta

SEQ ID NO: 421803 - DNA, 15 bp, Homo sapiens
aaaaaggatctaagt

SEQ ID NO: 421804 - DNA, 15 bp, Homo sapiens
aaaaaaggatctaag

SEQ ID NO: 421805 - DNA, 15 bp, Homo sapiens
gaaaaaaggatctaa

SEQ ID NO: 421806 - DNA, 15 bp, Homo sapiens
agaaaaaaggatcta

SEQ ID NO: 421807 - DNA, 15 bp, Homo sapiens
tagaaaaaaggatct

SEQ ID NO: 421808 - DNA, 15 bp, Homo sapiens
ttagaaaaaaggatc

SEQ ID NO: 421809 - DNA, 15 bp, Homo sapiens
cttagaaaaaaggat

SEQ ID NO: 421810 - DNA, 15 bp, Homo sapiens
acttagaaaaaagga

SEQ ID NO: 421811 - DNA, 15 bp, Homo sapiens
aacttagaaaaaagg

SEQ ID NO: 421812 - DNA, 15 bp, Homo sapiens
aaacttagaaaaaag

SEQ ID NO: 421813 - DNA, 15 bp, Homo sapiens
aaaacttagaaaaaa

SEQ ID NO: 421814 - DNA, 15 bp, Homo sapiens
taaaacttagaaaaa

SEQ ID NO: 421815 - DNA, 15 bp, Homo sapiens
ctaaaacttagaaaa

SEQ ID NO: 421816 - DNA, 15 bp, Homo sapiens
cctaaaacttagaaa

SEQ ID NO: 421817 - DNA, 15 bp, Homo sapiens
ccctaaaacttagaa

SEQ ID NO: 421818 - DNA, 15 bp, Homo sapiens
tccctaaaacttaga

SEQ ID NO: 421819 - DNA, 15 bp, Homo sapiens
atccctaaaacttag

SEQ ID NO: 421820 - DNA, 15 bp, Homo sapiens
tatccctaaaactta

SEQ ID NO: 421821 - DNA, 15 bp, Homo sapiens
ctatccctaaaactt

SEQ ID NO: 421822 - DNA, 15 bp, Homo sapiens
actatccctaaaact

SEQ ID NO: 421823 - DNA, 15 bp, Homo sapiens
aactatccctaaaac

SEQ ID NO: 421824 - DNA, 15 bp, Homo sapiens
taactatccctaaaa

SEQ ID NO: 421825 - DNA, 15 bp, Homo sapiens
ttaactatccctaaa

SEQ ID NO: 421826 - DNA, 15 bp, Homo sapiens
tttaactatccctaa

SEQ ID NO: 421827 - DNA, 15 bp, Homo sapiens
gtttaactatcccta

SEQ ID NO: 421828 - DNA, 15 bp, Homo sapiens
agtttaactatccct

SEQ ID NO: 421829 - DNA, 15 bp, Homo sapiens
cagtttaactatccc

SEQ ID NO: 421830 - DNA, 15 bp, Homo sapiens
tcagtttaactatcc

SEQ ID NO: 421831 - DNA, 15 bp, Homo sapiens
ttcagtttaactatc

SEQ ID NO: 421832 - DNA, 15 bp, Homo sapiens
attcagtttaactat

SEQ ID NO: 421833 - DNA, 15 bp, Homo sapiens
cattcagtttaacta

SEQ ID NO: 421834 - DNA, 15 bp, Homo sapiens
gcattcagtttaact

SEQ ID NO: 421835 - DNA, 15 bp, Homo sapiens
tgcattcagtttaac

SEQ ID NO: 421836 - DNA, 15 bp, Homo sapiens
ctgcattcagtttaa

SEQ ID NO: 421837 - DNA, 15 bp, Homo sapiens
gctgcattcagttta

SEQ ID NO: 421838 - DNA, 15 bp, Homo sapiens
tgctgcattcagttt

SEQ ID NO: 421839 - DNA, 15 bp, Homo sapiens
gtgctgcattcagtt

SEQ ID NO: 421840 - DNA, 15 bp, Homo sapiens
tgtgctgcattcagt

SEQ ID NO: 421841 - DNA, 15 bp, Homo sapiens
gtgtgctgcattcag

SEQ ID NO: 421842 - DNA, 15 bp, Homo sapiens
tgtgtgctgcattca

SEQ ID NO: 421843 - DNA, 15 bp, Homo sapiens
atgtgtgctgcattc

SEQ ID NO: 421844 - DNA, 15 bp, Homo sapiens
tatgtgtgctgcatt

SEQ ID NO: 421845 - DNA, 15 bp, Homo sapiens
atatgtgtgctgcat

SEQ ID NO: 421846 - DNA, 15 bp, Homo sapiens
tatatgtgtgctgca

SEQ ID NO: 421847 - DNA, 15 bp, Homo sapiens
atatatgtgtgctgc

SEQ ID NO: 421848 - DNA, 15 bp, Homo sapiens
catatatgtgtgctg

SEQ ID NO: 421849 - DNA, 15 bp, Homo sapiens
tcatatatgtgtgct

SEQ ID NO: 421850 - DNA, 15 bp, Homo sapiens
gtcatatatgtgtgc

SEQ ID NO: 421851 - DNA, 15 bp, Homo sapiens
tgtcatatatgtgtg

SEQ ID NO: 421852 - DNA, 15 bp, Homo sapiens
gtgtcatatatgtgt

SEQ ID NO: 421853 - DNA, 15 bp, Homo sapiens
ggtgtcatatatgtg

SEQ ID NO: 421854 - DNA, 15 bp, Homo sapiens
tggtgtcatatatgt

SEQ ID NO: 421855 - DNA, 15 bp, Homo sapiens
ttggtgtcatatatg

SEQ ID NO: 421856 - DNA, 15 bp, Homo sapiens
attggtgtcatatat

SEQ ID NO: 421857 - DNA, 15 bp, Homo sapiens
cattggtgtcatata

SEQ ID NO: 421858 - DNA, 15 bp, Homo sapiens
acattggtgtcatat

SEQ ID NO: 421859 - DNA, 15 bp, Homo sapiens
aacattggtgtcata

SEQ ID NO: 421860 - DNA, 15 bp, Homo sapiens
taacattggtgtcat

SEQ ID NO: 421861 - DNA, 15 bp, Homo sapiens
ttaacattggtgtca

SEQ ID NO: 421862 - DNA, 15 bp, Homo sapiens
gttaacattggtgtc

SEQ ID NO: 421863 - DNA, 15 bp, Homo sapiens
tgttaacattggtgt

SEQ ID NO: 421864 - DNA, 15 bp, Homo sapiens
gtgttaacattggtg

SEQ ID NO: 421865 - DNA, 15 bp, Homo sapiens
tgtgttaacattggt

SEQ ID NO: 421866 - DNA, 15 bp, Homo sapiens
ctgtgttaacattgg

SEQ ID NO: 421867 - DNA, 15 bp, Homo sapiens
tctgtgttaacattg

SEQ ID NO: 421868 - DNA, 15 bp, Homo sapiens
atctgtgttaacatt

SEQ ID NO: 421869 - DNA, 15 bp, Homo sapiens
aatctgtgttaacat

SEQ ID NO: 421870 - DNA, 15 bp, Homo sapiens
aaatctgtgttaaca

SEQ ID NO: 421871 - DNA, 15 bp, Homo sapiens
gaaatctgtgttaac

SEQ ID NO: 421872 - DNA, 15 bp, Homo sapiens
agaaatctgtgttaa

SEQ ID NO: 421873 - DNA, 15 bp, Homo sapiens
aagaaatctgtgtta

SEQ ID NO: 421874 - DNA, 15 bp, Homo sapiens
aaagaaatctgtgtt

SEQ ID NO: 421875 - DNA, 15 bp, Homo sapiens
aaaagaaatctgtgt

SEQ ID NO: 421876 - DNA, 15 bp, Homo sapiens
aaaaagaaatctgtg

SEQ ID NO: 421877 - DNA, 15 bp, Homo sapiens
taaaaagaaatctgt

SEQ ID NO: 421878 - DNA, 15 bp, Homo sapiens
ttaaaaagaaatctg

SEQ ID NO: 421879 - DNA, 15 bp, Homo sapiens
cttaaaaagaaatct

SEQ ID NO: 421880 - DNA, 15 bp, Homo sapiens
gcttaaaaagaaatc

SEQ ID NO: 421881 - DNA, 15 bp, Homo sapiens
agcttaaaaagaaat

SEQ ID NO: 421882 - DNA, 15 bp, Homo sapiens
gagcttaaaaagaaa

SEQ ID NO: 421883 - DNA, 15 bp, Homo sapiens
tgagcttaaaaagaa

SEQ ID NO: 421884 - DNA, 15 bp, Homo sapiens
ctgagcttaaaaaga

SEQ ID NO: 421885 - DNA, 15 bp, Homo sapiens
actgagcttaaaaag

SEQ ID NO: 421886 - DNA, 15 bp, Homo sapiens
aactgagcttaaaaa

SEQ ID NO: 421887 - DNA, 15 bp, Homo sapiens
gaactgagcttaaaa

SEQ ID NO: 421888 - DNA, 15 bp, Homo sapiens
agaactgagcttaaa

SEQ ID NO: 421889 - DNA, 15 bp, Homo sapiens
gagaactgagcttaa

SEQ ID NO: 421890 - DNA, 15 bp, Homo sapiens
agagaactgagctta

SEQ ID NO: 421891 - DNA, 15 bp, Homo sapiens
tagagaactgagctt

SEQ ID NO: 421892 - DNA, 15 bp, Homo sapiens
ttagagaactgagct

SEQ ID NO: 421893 - DNA, 15 bp, Homo sapiens
attagagaactgagc

SEQ ID NO: 421894 - DNA, 15 bp, Homo sapiens
cattagagaactgag

SEQ ID NO: 421895 - DNA, 15 bp, Homo sapiens
ccattagagaactga

SEQ ID NO: 421896 - DNA, 15 bp, Homo sapiens
tccattagagaactg

SEQ ID NO: 421897 - DNA, 15 bp, Homo sapiens
ttccattagagaact

SEQ ID NO: 421898 - DNA, 15 bp, Homo sapiens
cttccattagagaac

SEQ ID NO: 421899 - DNA, 15 bp, Homo sapiens
acttccattagagaa

SEQ ID NO: 421900 - DNA, 15 bp, Homo sapiens
gacttccattagaga

SEQ ID NO: 421901 - DNA, 15 bp, Homo sapiens
tgacttccattagag

SEQ ID NO: 421902 - DNA, 15 bp, Homo sapiens
atgacttccattaga

SEQ ID NO: 421903 - DNA, 15 bp, Homo sapiens
tatgacttccattag

SEQ ID NO: 421904 - DNA, 15 bp, Homo sapiens
ttatgacttccatta

SEQ ID NO: 421905 - DNA, 15 bp, Homo sapiens
tttatgacttccatt

SEQ ID NO: 421906 - DNA, 15 bp, Homo sapiens
ttttatgacttccat

SEQ ID NO: 421907 - DNA, 15 bp, Homo sapiens
cttttatgacttcca

SEQ ID NO: 421908 - DNA, 15 bp, Homo sapiens
gcttttatgacttcc

SEQ ID NO: 421909 - DNA, 15 bp, Homo sapiens
tgcttttatgacttc

SEQ ID NO: 421910 - DNA, 15 bp, Homo sapiens
ttgcttttatgactt

SEQ ID NO: 421911 - DNA, 15 bp, Homo sapiens
attgcttttatgact

SEQ ID NO: 421912 - DNA, 15 bp, Homo sapiens
tattgcttttatgac

SEQ ID NO: 421913 - DNA, 15 bp, Homo sapiens
atattgcttttatga

SEQ ID NO: 421914 - DNA, 15 bp, Homo sapiens
aatattgcttttatg

SEQ ID NO: 421915 - DNA, 15 bp, Homo sapiens
aaatattgcttttat

SEQ ID NO: 421916 - DNA, 15 bp, Homo sapiens
gaaatattgctttta

SEQ ID NO: 421917 - DNA, 15 bp, Homo sapiens
tgaaatattgctttt

SEQ ID NO: 421918 - DNA, 15 bp, Homo sapiens
gtgaaatattgcttt

SEQ ID NO: 421919 - DNA, 15 bp, Homo sapiens
tgtgaaatattgctt

SEQ ID NO: 421920 - DNA, 15 bp, Homo sapiens
ttgtgaaatattgct

SEQ ID NO: 421921 - DNA, 15 bp, Homo sapiens
attgtgaaatattgc

SEQ ID NO: 421922 - DNA, 15 bp, Homo sapiens
cattgtgaaatattg

SEQ ID NO: 421923 - DNA, 15 bp, Homo sapiens
acattgtgaaatatt

SEQ ID NO: 421924 - DNA, 15 bp, Homo sapiens
aacattgtgaaatat

SEQ ID NO: 421925 - DNA, 15 bp, Homo sapiens
aaacattgtgaaata

SEQ ID NO: 421926 - DNA, 15 bp, Homo sapiens
caaacattgtgaaat

SEQ ID NO: 421927 - DNA, 15 bp, Homo sapiens
gcaaacattgtgaaa

SEQ ID NO: 421928 - DNA, 15 bp, Homo sapiens
agcaaacattgtgaa

SEQ ID NO: 421929 - DNA, 15 bp, Homo sapiens
cagcaaacattgtga

SEQ ID NO: 421930 - DNA, 15 bp, Homo sapiens
gcagcaaacattgtg

SEQ ID NO: 421931 - DNA, 15 bp, Homo sapiens
tgcagcaaacattgt

SEQ ID NO: 421932 - DNA, 15 bp, Homo sapiens
gtgcagcaaacattg

SEQ ID NO: 421933 - DNA, 15 bp, Homo sapiens
ggtgcagcaaacatt

SEQ ID NO: 421934 - DNA, 15 bp, Homo sapiens
gggtgcagcaaacat

SEQ ID NO: 421935 - DNA, 15 bp, Homo sapiens
ggggtgcagcaaaca

SEQ ID NO: 421936 - DNA, 15 bp, Homo sapiens
gggggtgcagcaaac

SEQ ID NO: 421937 - DNA, 15 bp, Homo sapiens
agggggtgcagcaaa

SEQ ID NO: 421938 - DNA, 15 bp, Homo sapiens
cagggggtgcagcaa

SEQ ID NO: 421939 - DNA, 15 bp, Homo sapiens
gcagggggtgcagca

SEQ ID NO: 421940 - DNA, 15 bp, Homo sapiens
agcagggggtgcagc

SEQ ID NO: 421941 - DNA, 15 bp, Homo sapiens
cagcagggggtgcag

SEQ ID NO: 421942 - DNA, 15 bp, Homo sapiens
ccagcagggggtgca

SEQ ID NO: 421943 - DNA, 15 bp, Homo sapiens
gccagcagggggtgc

SEQ ID NO: 421944 - DNA, 15 bp, Homo sapiens
agccagcagggggtg

SEQ ID NO: 421945 - DNA, 15 bp, Homo sapiens
cagccagcagggggt

SEQ ID NO: 421946 - DNA, 15 bp, Homo sapiens
acagccagcaggggg

SEQ ID NO: 421947 - DNA, 15 bp, Homo sapiens
tacagccagcagggg

SEQ ID NO: 421948 - DNA, 15 bp, Homo sapiens
atacagccagcaggg

SEQ ID NO: 421949 - DNA, 15 bp, Homo sapiens
aatacagccagcagg

SEQ ID NO: 421950 - DNA, 15 bp, Homo sapiens
caatacagccagcag

SEQ ID NO: 421951 - DNA, 15 bp, Homo sapiens
acaatacagccagca

SEQ ID NO: 421952 - DNA, 15 bp, Homo sapiens
cacaatacagccagc

SEQ ID NO: 421953 - DNA, 15 bp, Homo sapiens
tcacaatacagccag

SEQ ID NO: 421954 - DNA, 15 bp, Homo sapiens
gtcacaatacagcca

SEQ ID NO: 421955 - DNA, 15 bp, Homo sapiens
tgtcacaatacagcc

SEQ ID NO: 421956 - DNA, 15 bp, Homo sapiens
gtgtcacaatacagc

SEQ ID NO: 421957 - DNA, 15 bp, Homo sapiens
agtgtcacaatacag

SEQ ID NO: 421958 - DNA, 15 bp, Homo sapiens
aagtgtcacaataca

SEQ ID NO: 421959 - DNA, 15 bp, Homo sapiens
gaagtgtcacaatac

SEQ ID NO: 421960 - DNA, 15 bp, Homo sapiens
agaagtgtcacaata

SEQ ID NO: 421961 - DNA, 15 bp, Homo sapiens
aagaagtgtcacaat

SEQ ID NO: 421962 - DNA, 15 bp, Homo sapiens
taagaagtgtcacaa

SEQ ID NO: 421963 - DNA, 15 bp, Homo sapiens
ttaagaagtgtcaca

SEQ ID NO: 421964 - DNA, 15 bp, Homo sapiens
tttaagaagtgtcac

SEQ ID NO: 421965 - DNA, 15 bp, Homo sapiens
atttaagaagtgtca

SEQ ID NO: 421966 - DNA, 15 bp, Homo sapiens
tatttaagaagtgtc

SEQ ID NO: 421967 - DNA, 15 bp, Homo sapiens
ttatttaagaagtgt

SEQ ID NO: 421968 - DNA, 15 bp, Homo sapiens
tttatttaagaagtg

SEQ ID NO: 421969 - DNA, 15 bp, Homo sapiens
ctttatttaagaagt

SEQ ID NO: 421970 - DNA, 15 bp, Homo sapiens
tctttatttaagaag

SEQ ID NO: 421971 - DNA, 15 bp, Homo sapiens
ctctttatttaagaa

SEQ ID NO: 421972 - DNA, 15 bp, Homo sapiens
gctctttatttaaga

SEQ ID NO: 421973 - DNA, 15 bp, Homo sapiens
tgctctttatttaag

SEQ ID NO: 421974 - DNA, 15 bp, Homo sapiens
atgctctttatttaa

SEQ ID NO: 421975 - DNA, 15 bp, Homo sapiens
gatgctctttattta

SEQ ID NO: 421976 - DNA, 15 bp, Homo sapiens
agatgctctttattt

SEQ ID NO: 421977 - DNA, 15 bp, Homo sapiens
aagatgctctttatt

SEQ ID NO: 421978 - DNA, 15 bp, Homo sapiens
aaagatgctctttat

SEQ ID NO: 421979 - DNA, 15 bp, Homo sapiens
taaagatgctcttta

SEQ ID NO: 421980 - DNA, 15 bp, Homo sapiens
ctaaagatgctcttt

SEQ ID NO: 421981 - DNA, 15 bp, Homo sapiens
tctaaagatgctctt

SEQ ID NO: 421982 - DNA, 15 bp, Homo sapiens
atctaaagatgctct

SEQ ID NO: 421983 - DNA, 15 bp, Homo sapiens
tatctaaagatgctc

SEQ ID NO: 421984 - DNA, 15 bp, Homo sapiens
gtatctaaagatgct

SEQ ID NO: 421985 - DNA, 15 bp, Homo sapiens
agtatctaaagatgc

SEQ ID NO: 421986 - DNA, 15 bp, Homo sapiens
cagtatctaaagatg

SEQ ID NO: 421987 - DNA, 15 bp, Homo sapiens
gcagtatctaaagat

SEQ ID NO: 421988 - DNA, 15 bp, Homo sapiens
agcagtatctaaaga

SEQ ID NO: 421989 - DNA, 15 bp, Homo sapiens
gagcagtatctaaag

SEQ ID NO: 421990 - DNA, 15 bp, Homo sapiens
tgagcagtatctaaa

SEQ ID NO: 421991 - DNA, 15 bp, Homo sapiens
ctgagcagtatctaa

SEQ ID NO: 421992 - DNA, 15 bp, Homo sapiens
actgagcagtatcta

SEQ ID NO: 421993 - DNA, 15 bp, Homo sapiens
cactgagcagtatct

SEQ ID NO: 421994 - DNA, 15 bp, Homo sapiens
tcactgagcagtatc

SEQ ID NO: 421995 - DNA, 15 bp, Homo sapiens
ttcactgagcagtat

SEQ ID NO: 421996 - DNA, 15 bp, Homo sapiens
attcactgagcagta

SEQ ID NO: 421997 - DNA, 15 bp, Homo sapiens
tattcactgagcagt

SEQ ID NO: 421998 - DNA, 15 bp, Homo sapiens
gtattcactgagcag

SEQ ID NO: 421999 - DNA, 15 bp, Homo sapiens
agtattcactgagca

SEQ ID NO: 422000 - DNA, 15 bp, Homo sapiens
aagtattcactgagc

SEQ ID NO: 422001 - DNA, 15 bp, Homo sapiens
aaagtattcactgag

SEQ ID NO: 422002 - DNA, 15 bp, Homo sapiens
taaagtattcactga

SEQ ID NO: 422003 - DNA, 15 bp, Homo sapiens
ctaaagtattcactg

SEQ ID NO: 422004 - DNA, 15 bp, Homo sapiens
cctaaagtattcact

SEQ ID NO: 422005 - DNA, 15 bp, Homo sapiens
acctaaagtattcac

SEQ ID NO: 422006 - DNA, 15 bp, Homo sapiens
tacctaaagtattca

SEQ ID NO: 422007 - DNA, 15 bp, Homo sapiens
atacctaaagtattc

SEQ ID NO: 422008 - DNA, 15 bp, Homo sapiens
tatacctaaagtatt

SEQ ID NO: 422009 - DNA, 15 bp, Homo sapiens
atatacctaaagtat

SEQ ID NO: 422010 - DNA, 15 bp, Homo sapiens
tatatacctaaagta

SEQ ID NO: 422011 - DNA, 15 bp, Homo sapiens
gtatatacctaaagt

SEQ ID NO: 422012 - DNA, 15 bp, Homo sapiens
tgtatatacctaaag

SEQ ID NO: 422013 - DNA, 15 bp, Homo sapiens
atgtatatacctaaa

SEQ ID NO: 422014 - DNA, 15 bp, Homo sapiens
catgtatatacctaa

SEQ ID NO: 422015 - DNA, 15 bp, Homo sapiens
tcatgtatataccta

SEQ ID NO: 422016 - DNA, 15 bp, Homo sapiens
atcatgtatatacct

SEQ ID NO: 422017 - DNA, 15 bp, Homo sapiens
aatcatgtatatacc

SEQ ID NO: 422018 - DNA, 15 bp, Homo sapiens
aaatcatgtatatac

SEQ ID NO: 422019 - DNA, 15 bp, Homo sapiens
taaatcatgtatata

SEQ ID NO: 422020 - DNA, 15 bp, Homo sapiens
ataaatcatgtatat

SEQ ID NO: 422021 - DNA, 15 bp, Homo sapiens
gataaatcatgtata

SEQ ID NO: 422022 - DNA, 15 bp, Homo sapiens
agataaatcatgtat

SEQ ID NO: 422023 - DNA, 15 bp, Homo sapiens
aagataaatcatgta

SEQ ID NO: 422024 - DNA, 15 bp, Homo sapiens
aaagataaatcatgt

SEQ ID NO: 422025 - DNA, 15 bp, Homo sapiens
caaagataaatcatg

SEQ ID NO: 422026 - DNA, 15 bp, Homo sapiens
ccaaagataaatcat

SEQ ID NO: 422027 - DNA, 15 bp, Homo sapiens
tccaaagataaatca

SEQ ID NO: 422028 - DNA, 15 bp, Homo sapiens
ctccaaagataaatc

SEQ ID NO: 422029 - DNA, 15 bp, Homo sapiens
actccaaagataaat

SEQ ID NO: 422030 - DNA, 15 bp, Homo sapiens
aactccaaagataaa

SEQ ID NO: 422031 - DNA, 15 bp, Homo sapiens
taactccaaagataa

SEQ ID NO: 422032 - DNA, 15 bp, Homo sapiens
ataactccaaagata

SEQ ID NO: 422033 - DNA, 15 bp, Homo sapiens
aataactccaaagat

SEQ ID NO: 422034 - DNA, 15 bp, Homo sapiens
aaataactccaaaga

SEQ ID NO: 422035 - DNA, 15 bp, Homo sapiens
aaaataactccaaag

SEQ ID NO: 422036 - DNA, 15 bp, Homo sapiens
aaaaataactccaaa

SEQ ID NO: 422037 - DNA, 15 bp, Homo sapiens
aaaaaataactccaa

SEQ ID NO: 422038 - DNA, 15 bp, Homo sapiens
caaaaaataactcca

SEQ ID NO: 422039 - DNA, 15 bp, Homo sapiens
acaaaaaataactcc

SEQ ID NO: 422040 - DNA, 15 bp, Homo sapiens
aacaaaaaataactc

SEQ ID NO: 422041 - DNA, 15 bp, Homo sapiens
aaacaaaaaataact

SEQ ID NO: 422042 - DNA, 15 bp, Homo sapiens
taaacaaaaaataac

SEQ ID NO: 422043 - DNA, 15 bp, Homo sapiens
ctaaacaaaaaataa

SEQ ID NO: 422044 - DNA, 15 bp, Homo sapiens
tctaaacaaaaaata

SEQ ID NO: 422045 - DNA, 15 bp, Homo sapiens
ttctaaacaaaaaat

SEQ ID NO: 422046 - DNA, 15 bp, Homo sapiens
tttctaaacaaaaaa

SEQ ID NO: 422047 - DNA, 15 bp, Homo sapiens
atttctaaacaaaaa

SEQ ID NO: 422048 - DNA, 15 bp, Homo sapiens
tatttctaaacaaaa

SEQ ID NO: 422049 - DNA, 15 bp, Homo sapiens
ttatttctaaacaaa

SEQ ID NO: 422050 - DNA, 15 bp, Homo sapiens
attatttctaaacaa

SEQ ID NO: 422051 - DNA, 15 bp, Homo sapiens
aattatttctaaaca

SEQ ID NO: 422052 - DNA, 15 bp, Homo sapiens
aaattatttctaaac

SEQ ID NO: 422053 - DNA, 15 bp, Homo sapiens
gaaattatttctaaa

SEQ ID NO: 422054 - DNA, 15 bp, Homo sapiens
tgaaattatttctaa

SEQ ID NO: 422055 - DNA, 15 bp, Homo sapiens
ttgaaattatttcta

SEQ ID NO: 422056 - DNA, 15 bp, Homo sapiens
attgaaattatttct

SEQ ID NO: 422057 - DNA, 15 bp, Homo sapiens
aattgaaattatttc

SEQ ID NO: 422058 - DNA, 15 bp, Homo sapiens
caattgaaattattt

SEQ ID NO: 422059 - DNA, 15 bp, Homo sapiens
gcaattgaaattatt

SEQ ID NO: 422060 - DNA, 15 bp, Homo sapiens
tgcaattgaaattat

SEQ ID NO: 422061 - DNA, 15 bp, Homo sapiens
atgcaattgaaatta

SEQ ID NO: 422062 - DNA, 15 bp, Homo sapiens
gatgcaattgaaatt

SEQ ID NO: 422063 - DNA, 15 bp, Homo sapiens
agatgcaattgaaat

SEQ ID NO: 422064 - DNA, 15 bp, Homo sapiens
cagatgcaattgaaa

SEQ ID NO: 422065 - DNA, 15 bp, Homo sapiens
tcagatgcaattgaa

SEQ ID NO: 422066 - DNA, 15 bp, Homo sapiens
atcagatgcaattga

SEQ ID NO: 422067 - DNA, 15 bp, Homo sapiens
tatcagatgcaattg

SEQ ID NO: 422068 - DNA, 15 bp, Homo sapiens
atatcagatgcaatt

SEQ ID NO: 422069 - DNA, 15 bp, Homo sapiens
tatatcagatgcaat

SEQ ID NO: 422070 - DNA, 15 bp, Homo sapiens
atatatcagatgcaa

SEQ ID NO: 422071 - DNA, 15 bp, Homo sapiens
tatatatcagatgca

SEQ ID NO: 422072 - DNA, 15 bp, Homo sapiens
ttatatatcagatgc

SEQ ID NO: 422073 - DNA, 15 bp, Homo sapiens
attatatatcagatg

SEQ ID NO: 422074 - DNA, 15 bp, Homo sapiens
tattatatatcagat

SEQ ID NO: 422075 - DNA, 15 bp, Homo sapiens
ctattatatatcaga

SEQ ID NO: 422076 - DNA, 15 bp, Homo sapiens
tctattatatatcag

SEQ ID NO: 422077 - DNA, 15 bp, Homo sapiens
ctctattatatatca

SEQ ID NO: 422078 - DNA, 15 bp, Homo sapiens
actctattatatatc

SEQ ID NO: 422079 - DNA, 15 bp, Homo sapiens
gactctattatatat

SEQ ID NO: 422080 - DNA, 15 bp, Homo sapiens
cgactctattatata

SEQ ID NO: 422081 - DNA, 15 bp, Homo sapiens
tcgactctattatat

SEQ ID NO: 422082 - DNA, 15 bp, Homo sapiens
ttcgactctattata

SEQ ID NO: 422083 - DNA, 15 bp, Homo sapiens
tttcgactctattat

SEQ ID NO: 422084 - DNA, 15 bp, Homo sapiens
atttcgactctatta

SEQ ID NO: 422085 - DNA, 15 bp, Homo sapiens
aatttcgactctatt

SEQ ID NO: 422086 - DNA, 15 bp, Homo sapiens
aaatttcgactctat

SEQ ID NO: 422087 - DNA, 15 bp, Homo sapiens
aaaatttcgactcta

SEQ ID NO: 422088 - DNA, 15 bp, Homo sapiens
taaaatttcgactct

SEQ ID NO: 422089 - DNA, 15 bp, Homo sapiens
ttaaaatttcgactc

SEQ ID NO: 422090 - DNA, 15 bp, Homo sapiens
attaaaatttcgact

SEQ ID NO: 422091 - DNA, 15 bp, Homo sapiens
aattaaaatttcgac

SEQ ID NO: 422092 - DNA, 15 bp, Homo sapiens
caattaaaatttcga

SEQ ID NO: 422093 - DNA, 15 bp, Homo sapiens
tcaattaaaatttcg

SEQ ID NO: 422094 - DNA, 15 bp, Homo sapiens
ttcaattaaaatttc

SEQ ID NO: 422095 - DNA, 15 bp, Homo sapiens
tttcaattaaaattt

SEQ ID NO: 422096 - DNA, 15 bp, Homo sapiens
ttttcaattaaaatt

SEQ ID NO: 422097 - DNA, 15 bp, Homo sapiens
gttttcaattaaaat

SEQ ID NO: 422098 - DNA, 15 bp, Homo sapiens
tgttttcaattaaaa

SEQ ID NO: 422099 - DNA, 15 bp, Homo sapiens
ctgttttcaattaaa

SEQ ID NO: 422100 - DNA, 15 bp, Homo sapiens
actgttttcaattaa

SEQ ID NO: 422101 - DNA, 15 bp, Homo sapiens
aactgttttcaatta

SEQ ID NO: 422102 - DNA, 15 bp, Homo sapiens
aaactgttttcaatt

SEQ ID NO: 422103 - DNA, 15 bp, Homo sapiens
aaaactgttttcaat

SEQ ID NO: 422104 - DNA, 15 bp, Homo sapiens
gaaaactgttttcaa

SEQ ID NO: 422105 - DNA, 15 bp, Homo sapiens
agaaaactgttttca

SEQ ID NO: 422106 - DNA, 15 bp, Homo sapiens
aagaaaactgttttc

SEQ ID NO: 422107 - DNA, 15 bp, Homo sapiens
aaagaaaactgtttt

SEQ ID NO: 422108 - DNA, 15 bp, Homo sapiens
caaagaaaactgttt

SEQ ID NO: 422109 - DNA, 15 bp, Homo sapiens
acaaagaaaactgtt

SEQ ID NO: 422110 - DNA, 15 bp, Homo sapiens
cacaaagaaaactgt

SEQ ID NO: 422111 - DNA, 15 bp, Homo sapiens
tcacaaagaaaactg

SEQ ID NO: 422112 - DNA, 15 bp, Homo sapiens
atcacaaagaaaact

SEQ ID NO: 422113 - DNA, 15 bp, Homo sapiens
aatcacaaagaaaac

SEQ ID NO: 422114 - DNA, 15 bp, Homo sapiens
aaatcacaaagaaaa

SEQ ID NO: 422115 - DNA, 15 bp, Homo sapiens
caaatcacaaagaaa

SEQ ID NO: 422116 - DNA, 15 bp, Homo sapiens
acaaatcacaaagaa

SEQ ID NO: 422117 - DNA, 15 bp, Homo sapiens
gacaaatcacaaaga

SEQ ID NO: 422118 - DNA, 15 bp, Homo sapiens
tgacaaatcacaaag

SEQ ID NO: 422119 - DNA, 15 bp, Homo sapiens
ttgacaaatcacaaa

SEQ ID NO: 422120 - DNA, 15 bp, Homo sapiens
attgacaaatcacaa

SEQ ID NO: 422121 - DNA, 15 bp, Homo sapiens
aattgacaaatcaca

SEQ ID NO: 422122 - DNA, 15 bp, Homo sapiens
caattgacaaatcac

SEQ ID NO: 422123 - DNA, 15 bp, Homo sapiens
tcaattgacaaatca

SEQ ID NO: 422124 - DNA, 15 bp, Homo sapiens
atcaattgacaaatc

SEQ ID NO: 422125 - DNA, 15 bp, Homo sapiens
catcaattgacaaat

SEQ ID NO: 422126 - DNA, 15 bp, Homo sapiens
acatcaattgacaaa

SEQ ID NO: 422127 - DNA, 15 bp, Homo sapiens
aacatcaattgacaa

SEQ ID NO: 422128 - DNA, 15 bp, Homo sapiens
aaacatcaattgaca

SEQ ID NO: 422129 - DNA, 15 bp, Homo sapiens
taaacatcaattgac

SEQ ID NO: 422130 - DNA, 15 bp, Homo sapiens
ttaaacatcaattga

SEQ ID NO: 422131 - DNA, 15 bp, Homo sapiens
tttaaacatcaattg

SEQ ID NO: 422132 - DNA, 15 bp, Homo sapiens
gtttaaacatcaatt

SEQ ID NO: 422133 - DNA, 15 bp, Homo sapiens
tgtttaaacatcaat

SEQ ID NO: 422134 - DNA, 15 bp, Homo sapiens
ctgtttaaacatcaa

SEQ ID NO: 422135 - DNA, 15 bp, Homo sapiens
actgtttaaacatca

SEQ ID NO: 422136 - DNA, 15 bp, Homo sapiens
cactgtttaaacatc

SEQ ID NO: 422137 - DNA, 15 bp, Homo sapiens
acactgtttaaacat

SEQ ID NO: 422138 - DNA, 15 bp, Homo sapiens
aacactgtttaaaca

SEQ ID NO: 422139 - DNA, 15 bp, Homo sapiens
aaacactgtttaaac

SEQ ID NO: 422140 - DNA, 15 bp, Homo sapiens
taaacactgtttaaa

SEQ ID NO: 422141 - DNA, 15 bp, Homo sapiens
ataaacactgtttaa

SEQ ID NO: 422142 - DNA, 15 bp, Homo sapiens
gataaacactgttta

SEQ ID NO: 422143 - DNA, 15 bp, Homo sapiens
ggataaacactgttt

SEQ ID NO: 422144 - DNA, 15 bp, Homo sapiens
aggataaacactgtt

SEQ ID NO: 422145 - DNA, 15 bp, Homo sapiens
aaggataaacactgt

SEQ ID NO: 422146 - DNA, 15 bp, Homo sapiens
gaaggataaacactg

SEQ ID NO: 422147 - DNA, 15 bp, Homo sapiens
ggaaggataaacact

SEQ ID NO: 422148 - DNA, 15 bp, Homo sapiens
tggaaggataaacac

SEQ ID NO: 422149 - DNA, 15 bp, Homo sapiens
ctggaaggataaaca

SEQ ID NO: 422150 - DNA, 15 bp, Homo sapiens
cctggaaggataaac

SEQ ID NO: 422151 - DNA, 15 bp, Homo sapiens
acctggaaggataaa

SEQ ID NO: 422152 - DNA, 15 bp, Homo sapiens
tacctggaaggataa

SEQ ID NO: 422153 - DNA, 15 bp, Homo sapiens
ctacctggaaggata

SEQ ID NO: 422154 - DNA, 15 bp, Homo sapiens
actacctggaaggat

SEQ ID NO: 422155 - DNA, 15 bp, Homo sapiens
tactacctggaagga

SEQ ID NO: 422156 - DNA, 15 bp, Homo sapiens
atactacctggaagg

SEQ ID NO: 422157 - DNA, 15 bp, Homo sapiens
catactacctggaag

SEQ ID NO: 422158 - DNA, 15 bp, Homo sapiens
tcatactacctggaa

SEQ ID NO: 422159 - DNA, 15 bp, Homo sapiens
atcatactacctgga

SEQ ID NO: 422160 - DNA, 15 bp, Homo sapiens
catcatactacctgg

SEQ ID NO: 422161 - DNA, 15 bp, Homo sapiens
tcatcatactacctg

SEQ ID NO: 422162 - DNA, 15 bp, Homo sapiens
atcatcatactacct

SEQ ID NO: 422163 - DNA, 15 bp, Homo sapiens
catcatcatactacc

SEQ ID NO: 422164 - DNA, 15 bp, Homo sapiens
acatcatcatactac

SEQ ID NO: 422165 - DNA, 15 bp, Homo sapiens
tacatcatcatacta

SEQ ID NO: 422166 - DNA, 15 bp, Homo sapiens
atacatcatcatact

SEQ ID NO: 422167 - DNA, 15 bp, Homo sapiens
aatacatcatcatac

SEQ ID NO: 422168 - DNA, 15 bp, Homo sapiens
aaatacatcatcata

SEQ ID NO: 422169 - DNA, 15 bp, Homo sapiens
caaatacatcatcat

SEQ ID NO: 422170 - DNA, 15 bp, Homo sapiens
acaaatacatcatca

SEQ ID NO: 422171 - DNA, 15 bp, Homo sapiens
aacaaatacatcatc

SEQ ID NO: 422172 - DNA, 15 bp, Homo sapiens
caacaaatacatcat

SEQ ID NO: 422173 - DNA, 15 bp, Homo sapiens
ccaacaaatacatca

SEQ ID NO: 422174 - DNA, 15 bp, Homo sapiens
tccaacaaatacatc

SEQ ID NO: 422175 - DNA, 15 bp, Homo sapiens
ctccaacaaatacat

SEQ ID NO: 422176 - DNA, 15 bp, Homo sapiens
tctccaacaaataca

SEQ ID NO: 422177 - DNA, 15 bp, Homo sapiens
gtctccaacaaatac

SEQ ID NO: 422178 - DNA, 15 bp, Homo sapiens
tgtctccaacaaata

SEQ ID NO: 422179 - DNA, 15 bp, Homo sapiens
ttgtctccaacaaat

SEQ ID NO: 422180 - DNA, 15 bp, Homo sapiens
tttgtctccaacaaa

SEQ ID NO: 422181 - DNA, 15 bp, Homo sapiens
ttttgtctccaacaa

SEQ ID NO: 422182 - DNA, 15 bp, Homo sapiens
attttgtctccaaca

SEQ ID NO: 422183 - DNA, 15 bp, Homo sapiens
tattttgtctccaac

SEQ ID NO: 422184 - DNA, 15 bp, Homo sapiens
atattttgtctccaa

SEQ ID NO: 422185 - DNA, 15 bp, Homo sapiens
aatattttgtctcca

SEQ ID NO: 422186 - DNA, 15 bp, Homo sapiens
aaatattttgtctcc

SEQ ID NO: 422187 - DNA, 15 bp, Homo sapiens
caaatattttgtctc

SEQ ID NO: 422188 - DNA, 15 bp, Homo sapiens
gcaaatattttgtct

SEQ ID NO: 422189 - DNA, 15 bp, Homo sapiens
ggcaaatattttgtc

SEQ ID NO: 422190 - DNA, 15 bp, Homo sapiens
gggcaaatattttgt

SEQ ID NO: 422191 - DNA, 15 bp, Homo sapiens
agggcaaatattttg

SEQ ID NO: 422192 - DNA, 15 bp, Homo sapiens
tagggcaaatatttt

SEQ ID NO: 422193 - DNA, 15 bp, Homo sapiens
ctagggcaaatattt

SEQ ID NO: 422194 - DNA, 15 bp, Homo sapiens
gctagggcaaatatt

SEQ ID NO: 422195 - DNA, 15 bp, Homo sapiens
ggctagggcaaatat

SEQ ID NO: 422196 - DNA, 15 bp, Homo sapiens
aggctagggcaaata

SEQ ID NO: 422197 - DNA, 15 bp, Homo sapiens
aaggctagggcaaat

SEQ ID NO: 422198 - DNA, 15 bp, Homo sapiens
aaaggctagggcaaa

SEQ ID NO: 422199 - DNA, 15 bp, Homo sapiens
aaaaggctagggcaa

SEQ ID NO: 422200 - DNA, 15 bp, Homo sapiens
aaaaaggctagggca

SEQ ID NO: 422201 - DNA, 15 bp, Homo sapiens
taaaaaggctagggc

SEQ ID NO: 422202 - DNA, 15 bp, Homo sapiens
gtaaaaaggctaggg

SEQ ID NO: 422203 - DNA, 15 bp, Homo sapiens
agtaaaaaggctagg

SEQ ID NO: 422204 - DNA, 15 bp, Homo sapiens
tagtaaaaaggctag

SEQ ID NO: 422205 - DNA, 15 bp, Homo sapiens
ttagtaaaaaggcta

SEQ ID NO: 422206 - DNA, 15 bp, Homo sapiens
attagtaaaaaggct

SEQ ID NO: 422207 - DNA, 15 bp, Homo sapiens
tattagtaaaaaggc

SEQ ID NO: 422208 - DNA, 15 bp, Homo sapiens
atattagtaaaaagg

SEQ ID NO: 422209 - DNA, 15 bp, Homo sapiens
aatattagtaaaaag

SEQ ID NO: 422210 - DNA, 15 bp, Homo sapiens
aaatattagtaaaaa

SEQ ID NO: 422211 - DNA, 15 bp, Homo sapiens
gaaatattagtaaaa

SEQ ID NO: 422212 - DNA, 15 bp, Homo sapiens
tgaaatattagtaaa

SEQ ID NO: 422213 - DNA, 15 bp, Homo sapiens
ctgaaatattagtaa

SEQ ID NO: 422214 - DNA, 15 bp, Homo sapiens
tctgaaatattagta

SEQ ID NO: 422215 - DNA, 15 bp, Homo sapiens
atctgaaatattagt

SEQ ID NO: 422216 - DNA, 15 bp, Homo sapiens
catctgaaatattag

SEQ ID NO: 422217 - DNA, 15 bp, Homo sapiens
tcatctgaaatatta

SEQ ID NO: 422218 - DNA, 15 bp, Homo sapiens
ctcatctgaaatatt

SEQ ID NO: 422219 - DNA, 15 bp, Homo sapiens
tctcatctgaaatat

SEQ ID NO: 422220 - DNA, 15 bp, Homo sapiens
atctcatctgaaata

SEQ ID NO: 422221 - DNA, 15 bp, Homo sapiens
aatctcatctgaaat

SEQ ID NO: 422222 - DNA, 15 bp, Homo sapiens
gaatctcatctgaaa

SEQ ID NO: 422223 - DNA, 15 bp, Homo sapiens
agaatctcatctgaa

SEQ ID NO: 422224 - DNA, 15 bp, Homo sapiens
cagaatctcatctga

SEQ ID NO: 422225 - DNA, 15 bp, Homo sapiens
acagaatctcatctg

SEQ ID NO: 422226 - DNA, 15 bp, Homo sapiens
cacagaatctcatct

SEQ ID NO: 422227 - DNA, 15 bp, Homo sapiens
ccacagaatctcatc

SEQ ID NO: 422228 - DNA, 15 bp, Homo sapiens
tccacagaatctcat

SEQ ID NO: 422229 - DNA, 15 bp, Homo sapiens
ctccacagaatctca

SEQ ID NO: 422230 - DNA, 15 bp, Homo sapiens
cctccacagaatctc

SEQ ID NO: 422231 - DNA, 15 bp, Homo sapiens
tcctccacagaatct

SEQ ID NO: 422232 - DNA, 15 bp, Homo sapiens
ctcctccacagaatc

SEQ ID NO: 422233 - DNA, 15 bp, Homo sapiens
tctcctccacagaat

SEQ ID NO: 422234 - DNA, 15 bp, Homo sapiens
ttctcctccacagaa

SEQ ID NO: 422235 - DNA, 15 bp, Homo sapiens
cttctcctccacaga

SEQ ID NO: 422236 - DNA, 15 bp, Homo sapiens
gcttctcctccacag

SEQ ID NO: 422237 - DNA, 15 bp, Homo sapiens
tgcttctcctccaca

SEQ ID NO: 422238 - DNA, 15 bp, Homo sapiens
atgcttctcctccac

SEQ ID NO: 422239 - DNA, 15 bp, Homo sapiens
gatgcttctcctcca

SEQ ID NO: 422240 - DNA, 15 bp, Homo sapiens
agatgcttctcctcc

SEQ ID NO: 422241 - DNA, 15 bp, Homo sapiens
gagatgcttctcctc

SEQ ID NO: 422242 - DNA, 15 bp, Homo sapiens
ggagatgcttctcct

SEQ ID NO: 422243 - DNA, 15 bp, Homo sapiens
gggagatgcttctcc

SEQ ID NO: 422244 - DNA, 15 bp, Homo sapiens
ggggagatgcttctc

SEQ ID NO: 422245 - DNA, 15 bp, Homo sapiens
tggggagatgcttct

SEQ ID NO: 422246 - DNA, 15 bp, Homo sapiens
ttggggagatgcttc

SEQ ID NO: 422247 - DNA, 15 bp, Homo sapiens
tttggggagatgctt

SEQ ID NO: 422248 - DNA, 15 bp, Homo sapiens
atttggggagatgct

SEQ ID NO: 422249 - DNA, 15 bp, Homo sapiens
catttggggagatgc

SEQ ID NO: 422250 - DNA, 15 bp, Homo sapiens
acatttggggagatg

SEQ ID NO: 422251 - DNA, 15 bp, Homo sapiens
gacatttggggagat

SEQ ID NO: 422252 - DNA, 15 bp, Homo sapiens
ggacatttggggaga

SEQ ID NO: 422253 - DNA, 15 bp, Homo sapiens
aggacatttggggag

SEQ ID NO: 422254 - DNA, 15 bp, Homo sapiens
aaggacatttgggga

SEQ ID NO: 422255 - DNA, 15 bp, Homo sapiens
caaggacatttgggg

SEQ ID NO: 422256 - DNA, 15 bp, Homo sapiens
acaaggacatttggg

SEQ ID NO: 422257 - DNA, 15 bp, Homo sapiens
aacaaggacatttgg

SEQ ID NO: 422258 - DNA, 15 bp, Homo sapiens
aaacaaggacatttg

SEQ ID NO: 422259 - DNA, 15 bp, Homo sapiens
aaaacaaggacattt

SEQ ID NO: 422260 - DNA, 15 bp, Homo sapiens
taaaacaaggacatt

SEQ ID NO: 422261 - DNA, 15 bp, Homo sapiens
ataaaacaaggacat

SEQ ID NO: 422262 - DNA, 15 bp, Homo sapiens
tataaaacaaggaca

SEQ ID NO: 422263 - DNA, 15 bp, Homo sapiens
ctataaaacaaggac

SEQ ID NO: 422264 - DNA, 15 bp, Homo sapiens
actataaaacaagga

SEQ ID NO: 422265 - DNA, 15 bp, Homo sapiens
tactataaaacaagg

SEQ ID NO: 422266 - DNA, 15 bp, Homo sapiens
ttactataaaacaag

SEQ ID NO: 422267 - DNA, 15 bp, Homo sapiens
tttactataaaacaa

SEQ ID NO: 422268 - DNA, 15 bp, Homo sapiens
atttactataaaaca

SEQ ID NO: 422269 - DNA, 15 bp, Homo sapiens
tatttactataaaac

SEQ ID NO: 422270 - DNA, 15 bp, Homo sapiens
ttatttactataaaa

SEQ ID NO: 422271 - DNA, 15 bp, Homo sapiens
attatttactataaa

SEQ ID NO: 422272 - DNA, 15 bp, Homo sapiens
aattatttactataa

SEQ ID NO: 422273 - DNA, 15 bp, Homo sapiens
gaattatttactata

SEQ ID NO: 422274 - DNA, 15 bp, Homo sapiens
agaattatttactat

SEQ ID NO: 422275 - DNA, 15 bp, Homo sapiens
tagaattatttacta

SEQ ID NO: 422276 - DNA, 15 bp, Homo sapiens
gtagaattatttact

SEQ ID NO: 422277 - DNA, 15 bp, Homo sapiens
ggtagaattatttac

SEQ ID NO: 422278 - DNA, 15 bp, Homo sapiens
tggtagaattattta

SEQ ID NO: 422279 - DNA, 15 bp, Homo sapiens
gtggtagaattattt

SEQ ID NO: 422280 - DNA, 15 bp, Homo sapiens
cgtggtagaattatt

SEQ ID NO: 422281 - DNA, 15 bp, Homo sapiens
tcgtggtagaattat

SEQ ID NO: 422282 - DNA, 15 bp, Homo sapiens
ctcgtggtagaatta

SEQ ID NO: 422283 - DNA, 15 bp, Homo sapiens
cctcgtggtagaatt

SEQ ID NO: 422284 - DNA, 15 bp, Homo sapiens
tcctcgtggtagaat

SEQ ID NO: 422285 - DNA, 15 bp, Homo sapiens
atcctcgtggtagaa

SEQ ID NO: 422286 - DNA, 15 bp, Homo sapiens
gatcctcgtggtaga

SEQ ID NO: 422287 - DNA, 15 bp, Homo sapiens
ggatcctcgtggtag

SEQ ID NO: 422288 - DNA, 15 bp, Homo sapiens
aggatcctcgtggta

SEQ ID NO: 422289 - DNA, 15 bp, Homo sapiens
aaggatcctcgtggt

SEQ ID NO: 422290 - DNA, 15 bp, Homo sapiens
taaggatcctcgtgg

SEQ ID NO: 422291 - DNA, 15 bp, Homo sapiens
ataaggatcctcgtg

SEQ ID NO: 422292 - DNA, 15 bp, Homo sapiens
gataaggatcctcgt

SEQ ID NO: 422293 - DNA, 15 bp, Homo sapiens
ggataaggatcctcg

SEQ ID NO: 422294 - DNA, 15 bp, Homo sapiens
tggataaggatcctc

SEQ ID NO: 422295 - DNA, 15 bp, Homo sapiens
atggataaggatcct

SEQ ID NO: 422296 - DNA, 15 bp, Homo sapiens
tatggataaggatcc

SEQ ID NO: 422297 - DNA, 15 bp, Homo sapiens
ttatggataaggatc

SEQ ID NO: 422298 - DNA, 15 bp, Homo sapiens
tttatggataaggat

SEQ ID NO: 422299 - DNA, 15 bp, Homo sapiens
atttatggataagga

SEQ ID NO: 422300 - DNA, 15 bp, Homo sapiens
gatttatggataagg

SEQ ID NO: 422301 - DNA, 15 bp, Homo sapiens
agatttatggataag

SEQ ID NO: 422302 - DNA, 15 bp, Homo sapiens
tagatttatggataa

SEQ ID NO: 422303 - DNA, 15 bp, Homo sapiens
atagatttatggata

SEQ ID NO: 422304 - DNA, 15 bp, Homo sapiens
tatagatttatggat

SEQ ID NO: 422305 - DNA, 15 bp, Homo sapiens
atatagatttatgga

SEQ ID NO: 422306 - DNA, 15 bp, Homo sapiens
aatatagatttatgg

SEQ ID NO: 422307 - DNA, 15 bp, Homo sapiens
gaatatagatttatg

SEQ ID NO: 422308 - DNA, 15 bp, Homo sapiens
tgaatatagatttat

SEQ ID NO: 422309 - DNA, 15 bp, Homo sapiens
atgaatatagattta

SEQ ID NO: 422310 - DNA, 15 bp, Homo sapiens
catgaatatagattt

SEQ ID NO: 422311 - DNA, 15 bp, Homo sapiens
acatgaatatagatt

SEQ ID NO: 422312 - DNA, 15 bp, Homo sapiens
aacatgaatatagat

SEQ ID NO: 422313 - DNA, 15 bp, Homo sapiens
aaacatgaatataga

SEQ ID NO: 422314 - DNA, 15 bp, Homo sapiens
taaacatgaatatag

SEQ ID NO: 422315 - DNA, 15 bp, Homo sapiens
ataaacatgaatata

SEQ ID NO: 422316 - DNA, 15 bp, Homo sapiens
aataaacatgaatat

SEQ ID NO: 422317 - DNA, 15 bp, Homo sapiens
aaataaacatgaata

SEQ ID NO: 422318 - DNA, 15 bp, Homo sapiens
aaaataaacatgaat

SEQ ID NO: 422319 - DNA, 15 bp, Homo sapiens
caaaataaacatgaa

SEQ ID NO: 422320 - DNA, 15 bp, Homo sapiens
acaaaataaacatga

SEQ ID NO: 422321 - DNA, 15 bp, Homo sapiens
cacaaaataaacatg

SEQ ID NO: 422322 - DNA, 15 bp, Homo sapiens
gcacaaaataaacat

SEQ ID NO: 422323 - DNA, 15 bp, Homo sapiens
agcacaaaataaaca

SEQ ID NO: 422324 - DNA, 15 bp, Homo sapiens
tagcacaaaataaac

SEQ ID NO: 422325 - DNA, 15 bp, Homo sapiens
ctagcacaaaataaa

SEQ ID NO: 422326 - DNA, 15 bp, Homo sapiens
tctagcacaaaataa

SEQ ID NO: 422327 - DNA, 15 bp, Homo sapiens
atctagcacaaaata

SEQ ID NO: 422328 - DNA, 15 bp, Homo sapiens
tatctagcacaaaat

SEQ ID NO: 422329 - DNA, 15 bp, Homo sapiens
gtatctagcacaaaa

SEQ ID NO: 422330 - DNA, 15 bp, Homo sapiens
tgtatctagcacaaa

SEQ ID NO: 422331 - DNA, 15 bp, Homo sapiens
ctgtatctagcacaa

SEQ ID NO: 422332 - DNA, 15 bp, Homo sapiens
tctgtatctagcaca

SEQ ID NO: 422333 - DNA, 15 bp, Homo sapiens
atctgtatctagcac

SEQ ID NO: 422334 - DNA, 15 bp, Homo sapiens
gatctgtatctagca

SEQ ID NO: 422335 - DNA, 15 bp, Homo sapiens
agatctgtatctagc

SEQ ID NO: 422336 - DNA, 15 bp, Homo sapiens
aagatctgtatctag

SEQ ID NO: 422337 - DNA, 15 bp, Homo sapiens
caagatctgtatcta

SEQ ID NO: 422338 - DNA, 15 bp, Homo sapiens
gcaagatctgtatct

SEQ ID NO: 422339 - DNA, 15 bp, Homo sapiens
tgcaagatctgtatc

SEQ ID NO: 422340 - DNA, 15 bp, Homo sapiens
ttgcaagatctgtat

SEQ ID NO: 422341 - DNA, 15 bp, Homo sapiens
attgcaagatctgta

SEQ ID NO: 422342 - DNA, 15 bp, Homo sapiens
tattgcaagatctgt

SEQ ID NO: 422343 - DNA, 15 bp, Homo sapiens
atattgcaagatctg

SEQ ID NO: 422344 - DNA, 15 bp, Homo sapiens
aatattgcaagatct

SEQ ID NO: 422345 - DNA, 15 bp, Homo sapiens
gaatattgcaagatc

SEQ ID NO: 422346 - DNA, 15 bp, Homo sapiens
tgaatattgcaagat

SEQ ID NO: 422347 - DNA, 15 bp, Homo sapiens
atgaatattgcaaga

SEQ ID NO: 422348 - DNA, 15 bp, Homo sapiens
catgaatattgcaag

SEQ ID NO: 422349 - DNA, 15 bp, Homo sapiens
tcatgaatattgcaa

SEQ ID NO: 422350 - DNA, 15 bp, Homo sapiens
ttcatgaatattgca

SEQ ID NO: 422351 - DNA, 15 bp, Homo sapiens
cttcatgaatattgc

SEQ ID NO: 422352 - DNA, 15 bp, Homo sapiens
gcttcatgaatattg

SEQ ID NO: 422353 - DNA, 15 bp, Homo sapiens
agcttcatgaatatt

SEQ ID NO: 422354 - DNA, 15 bp, Homo sapiens
aagcttcatgaatat

SEQ ID NO: 422355 - DNA, 15 bp, Homo sapiens
aaagcttcatgaata

SEQ ID NO: 422356 - DNA, 15 bp, Homo sapiens
taaagcttcatgaat

SEQ ID NO: 422357 - DNA, 15 bp, Homo sapiens
ttaaagcttcatgaa

SEQ ID NO: 422358 - DNA, 15 bp, Homo sapiens
cttaaagcttcatga

SEQ ID NO: 422359 - DNA, 15 bp, Homo sapiens
tcttaaagcttcatg

SEQ ID NO: 422360 - DNA, 15 bp, Homo sapiens
ttcttaaagcttcat

SEQ ID NO: 422361 - DNA, 15 bp, Homo sapiens
cttcttaaagcttca

SEQ ID NO: 422362 - DNA, 15 bp, Homo sapiens
tcttcttaaagcttc

SEQ ID NO: 422363 - DNA, 15 bp, Homo sapiens
ctcttcttaaagctt

SEQ ID NO: 422364 - DNA, 15 bp, Homo sapiens
gctcttcttaaagct

SEQ ID NO: 422365 - DNA, 15 bp, Homo sapiens
tgctcttcttaaagc

SEQ ID NO: 422366 - DNA, 15 bp, Homo sapiens
gtgctcttcttaaag

SEQ ID NO: 422367 - DNA, 15 bp, Homo sapiens
agtgctcttcttaaa

SEQ ID NO: 422368 - DNA, 15 bp, Homo sapiens
aagtgctcttcttaa

SEQ ID NO: 422369 - DNA, 15 bp, Homo sapiens
aaagtgctcttctta

SEQ ID NO: 422370 - DNA, 15 bp, Homo sapiens
caaagtgctcttctt

SEQ ID NO: 422371 - DNA, 15 bp, Homo sapiens
tcaaagtgctcttct

SEQ ID NO: 422372 - DNA, 15 bp, Homo sapiens
ttcaaagtgctcttc

SEQ ID NO: 422373 - DNA, 15 bp, Homo sapiens
attcaaagtgctctt

SEQ ID NO: 422374 - DNA, 15 bp, Homo sapiens
gattcaaagtgctct

SEQ ID NO: 422375 - DNA, 15 bp, Homo sapiens
agattcaaagtgctc

SEQ ID NO: 422376 - DNA, 15 bp, Homo sapiens
aagattcaaagtgct

SEQ ID NO: 422377 - DNA, 15 bp, Homo sapiens
taagattcaaagtgc

SEQ ID NO: 422378 - DNA, 15 bp, Homo sapiens
ttaagattcaaagtg

SEQ ID NO: 422379 - DNA, 15 bp, Homo sapiens
tttaagattcaaagt

SEQ ID NO: 422380 - DNA, 15 bp, Homo sapiens
ttttaagattcaaag

SEQ ID NO: 422381 - DNA, 15 bp, Homo sapiens
cttttaagattcaaa

SEQ ID NO: 422382 - DNA, 15 bp, Homo sapiens
tcttttaagattcaa

SEQ ID NO: 422383 - DNA, 15 bp, Homo sapiens
ctcttttaagattca

SEQ ID NO: 422384 - DNA, 15 bp, Homo sapiens
tctcttttaagattc

SEQ ID NO: 422385 - DNA, 15 bp, Homo sapiens
atctcttttaagatt

SEQ ID NO: 422386 - DNA, 15 bp, Homo sapiens
aatctcttttaagat

SEQ ID NO: 422387 - DNA, 15 bp, Homo sapiens
gaatctcttttaaga

SEQ ID NO: 422388 - DNA, 15 bp, Homo sapiens
agaatctcttttaag

SEQ ID NO: 422389 - DNA, 15 bp, Homo sapiens
gagaatctcttttaa

SEQ ID NO: 422390 - DNA, 15 bp, Homo sapiens
agagaatctctttta

SEQ ID NO: 422391 - DNA, 15 bp, Homo sapiens
cagagaatctctttt

SEQ ID NO: 422392 - DNA, 15 bp, Homo sapiens
tcagagaatctcttt

SEQ ID NO: 422393 - DNA, 15 bp, Homo sapiens
ctcagagaatctctt

SEQ ID NO: 422394 - DNA, 15 bp, Homo sapiens
gctcagagaatctct

SEQ ID NO: 422395 - DNA, 15 bp, Homo sapiens
tgctcagagaatctc

SEQ ID NO: 422396 - DNA, 15 bp, Homo sapiens
ctgctcagagaatct

SEQ ID NO: 422397 - DNA, 15 bp, Homo sapiens
cctgctcagagaatc

SEQ ID NO: 422398 - DNA, 15 bp, Homo sapiens
ccctgctcagagaat

SEQ ID NO: 422399 - DNA, 15 bp, Homo sapiens
cccctgctcagagaa

SEQ ID NO: 422400 - DNA, 15 bp, Homo sapiens
acccctgctcagaga

SEQ ID NO: 422401 - DNA, 15 bp, Homo sapiens
aacccctgctcagag

SEQ ID NO: 422402 - DNA, 15 bp, Homo sapiens
caacccctgctcaga

SEQ ID NO: 422403 - DNA, 15 bp, Homo sapiens
ccaacccctgctcag

SEQ ID NO: 422404 - DNA, 15 bp, Homo sapiens
gccaacccctgctca

SEQ ID NO: 422405 - DNA, 15 bp, Homo sapiens
tgccaacccctgctc

SEQ ID NO: 422406 - DNA, 15 bp, Homo sapiens
ctgccaacccctgct

SEQ ID NO: 422407 - DNA, 15 bp, Homo sapiens
actgccaacccctgc

SEQ ID NO: 422408 - DNA, 15 bp, Homo sapiens
cactgccaacccctg

SEQ ID NO: 422409 - DNA, 15 bp, Homo sapiens
ccactgccaacccct

SEQ ID NO: 422410 - DNA, 15 bp, Homo sapiens
accactgccaacccc

SEQ ID NO: 422411 - DNA, 15 bp, Homo sapiens
caccactgccaaccc

SEQ ID NO: 422412 - DNA, 15 bp, Homo sapiens
tcaccactgccaacc

SEQ ID NO: 422413 - DNA, 15 bp, Homo sapiens
ctcaccactgccaac

SEQ ID NO: 422414 - DNA, 15 bp, Homo sapiens
cctcaccactgccaa

SEQ ID NO: 422415 - DNA, 15 bp, Homo sapiens
acctcaccactgcca

SEQ ID NO: 422416 - DNA, 15 bp, Homo sapiens
gacctcaccactgcc

SEQ ID NO: 422417 - DNA, 15 bp, Homo sapiens
ggacctcaccactgc

SEQ ID NO: 422418 - DNA, 15 bp, Homo sapiens
tggacctcaccactg

SEQ ID NO: 422419 - DNA, 15 bp, Homo sapiens
ctggacctcaccact

SEQ ID NO: 422420 - DNA, 15 bp, Homo sapiens
cctggacctcaccac

SEQ ID NO: 422421 - DNA, 15 bp, Homo sapiens
acctggacctcacca

SEQ ID NO: 422422 - DNA, 15 bp, Homo sapiens
tacctggacctcacc

SEQ ID NO: 422423 - DNA, 15 bp, Homo sapiens
ctacctggacctcac

SEQ ID NO: 422424 - DNA, 15 bp, Homo sapiens
actacctggacctca

SEQ ID NO: 422425 - DNA, 15 bp, Homo sapiens
aactacctggacctc

SEQ ID NO: 422426 - DNA, 15 bp, Homo sapiens
taactacctggacct

SEQ ID NO: 422427 - DNA, 15 bp, Homo sapiens
ataactacctggacc

SEQ ID NO: 422428 - DNA, 15 bp, Homo sapiens
tataactacctggac

SEQ ID NO: 422429 - DNA, 15 bp, Homo sapiens
ttataactacctgga

SEQ ID NO: 422430 - DNA, 15 bp, Homo sapiens
attataactacctgg

SEQ ID NO: 422431 - DNA, 15 bp, Homo sapiens
tattataactacctg

SEQ ID NO: 422432 - DNA, 15 bp, Homo sapiens
ctattataactacct

SEQ ID NO: 422433 - DNA, 15 bp, Homo sapiens
gctattataactacc

SEQ ID NO: 422434 - DNA, 15 bp, Homo sapiens
ggctattataactac

SEQ ID NO: 422435 - DNA, 15 bp, Homo sapiens
tggctattataacta

SEQ ID NO: 422436 - DNA, 15 bp, Homo sapiens
atggctattataact

SEQ ID NO: 422437 - DNA, 15 bp, Homo sapiens
tatggctattataac

SEQ ID NO: 422438 - DNA, 15 bp, Homo sapiens
ttatggctattataa

SEQ ID NO: 422439 - DNA, 15 bp, Homo sapiens
cttatggctattata

SEQ ID NO: 422440 - DNA, 15 bp, Homo sapiens
tcttatggctattat

SEQ ID NO: 422441 - DNA, 15 bp, Homo sapiens
ctcttatggctatta

SEQ ID NO: 422442 - DNA, 15 bp, Homo sapiens
gctcttatggctatt

SEQ ID NO: 422443 - DNA, 15 bp, Homo sapiens
tgctcttatggctat

SEQ ID NO: 422444 - DNA, 15 bp, Homo sapiens
ctgctcttatggcta

SEQ ID NO: 422445 - DNA, 15 bp, Homo sapiens
cctgctcttatggct

SEQ ID NO: 422446 - DNA, 15 bp, Homo sapiens
ccctgctcttatggc

SEQ ID NO: 422447 - DNA, 15 bp, Homo sapiens
tccctgctcttatgg

SEQ ID NO: 422448 - DNA, 15 bp, Homo sapiens
atccctgctcttatg

SEQ ID NO: 422449 - DNA, 15 bp, Homo sapiens
aatccctgctcttat

SEQ ID NO: 422450 - DNA, 15 bp, Homo sapiens
taatccctgctctta

SEQ ID NO: 422451 - DNA, 15 bp, Homo sapiens
ataatccctgctctt

SEQ ID NO: 422452 - DNA, 15 bp, Homo sapiens
cataatccctgctct

SEQ ID NO: 422453 - DNA, 15 bp, Homo sapiens
ccataatccctgctc

SEQ ID NO: 422454 - DNA, 15 bp, Homo sapiens
accataatccctgct

SEQ ID NO: 422455 - DNA, 15 bp, Homo sapiens
aaccataatccctgc

SEQ ID NO: 422456 - DNA, 15 bp, Homo sapiens
taaccataatccctg

SEQ ID NO: 422457 - DNA, 15 bp, Homo sapiens
ataaccataatccct

SEQ ID NO: 422458 - DNA, 15 bp, Homo sapiens
aataaccataatccc

SEQ ID NO: 422459 - DNA, 15 bp, Homo sapiens
caataaccataatcc

SEQ ID NO: 422460 - DNA, 15 bp, Homo sapiens
tcaataaccataatc

SEQ ID NO: 422461 - DNA, 15 bp, Homo sapiens
ctcaataaccataat

SEQ ID NO: 422462 - DNA, 15 bp, Homo sapiens
gctcaataaccataa

SEQ ID NO: 422463 - DNA, 15 bp, Homo sapiens
agctcaataaccata

SEQ ID NO: 422464 - DNA, 15 bp, Homo sapiens
gagctcaataaccat

SEQ ID NO: 422465 - DNA, 15 bp, Homo sapiens
tgagctcaataacca

SEQ ID NO: 422466 - DNA, 15 bp, Homo sapiens
gtgagctcaataacc

SEQ ID NO: 422467 - DNA, 15 bp, Homo sapiens
ggtgagctcaataac

SEQ ID NO: 422468 - DNA, 15 bp, Homo sapiens
tggtgagctcaataa

SEQ ID NO: 422469 - DNA, 15 bp, Homo sapiens
ctggtgagctcaata

SEQ ID NO: 422470 - DNA, 15 bp, Homo sapiens
actggtgagctcaat

SEQ ID NO: 422471 - DNA, 15 bp, Homo sapiens
cactggtgagctcaa

SEQ ID NO: 422472 - DNA, 15 bp, Homo sapiens
acactggtgagctca

SEQ ID NO: 422473 - DNA, 15 bp, Homo sapiens
cacactggtgagctc

SEQ ID NO: 422474 - DNA, 15 bp, Homo sapiens
acacactggtgagct

SEQ ID NO: 422475 - DNA, 15 bp, Homo sapiens
aacacactggtgagc

SEQ ID NO: 422476 - DNA, 15 bp, Homo sapiens
aaacacactggtgag

SEQ ID NO: 422477 - DNA, 15 bp, Homo sapiens
gaaacacactggtga

SEQ ID NO: 422478 - DNA, 15 bp, Homo sapiens
tgaaacacactggtg

SEQ ID NO: 422479 - DNA, 15 bp, Homo sapiens
ttgaaacacactggt

SEQ ID NO: 422480 - DNA, 15 bp, Homo sapiens
cttgaaacacactgg

SEQ ID NO: 422481 - DNA, 15 bp, Homo sapiens
gcttgaaacacactg

SEQ ID NO: 422482 - DNA, 15 bp, Homo sapiens
ggcttgaaacacact

SEQ ID NO: 422483 - DNA, 15 bp, Homo sapiens
tggcttgaaacacac

SEQ ID NO: 422484 - DNA, 15 bp, Homo sapiens
atggcttgaaacaca

SEQ ID NO: 422485 - DNA, 15 bp, Homo sapiens
catggcttgaaacac

SEQ ID NO: 422486 - DNA, 15 bp, Homo sapiens
tcatggcttgaaaca

SEQ ID NO: 422487 - DNA, 15 bp, Homo sapiens
atcatggcttgaaac

SEQ ID NO: 422488 - DNA, 15 bp, Homo sapiens
gatcatggcttgaaa

SEQ ID NO: 422489 - DNA, 15 bp, Homo sapiens
agatcatggcttgaa

SEQ ID NO: 422490 - DNA, 15 bp, Homo sapiens
cagatcatggcttga

SEQ ID NO: 422491 - DNA, 15 bp, Homo sapiens
ccagatcatggcttg

SEQ ID NO: 422492 - DNA, 15 bp, Homo sapiens
tccagatcatggctt

SEQ ID NO: 422493 - DNA, 15 bp, Homo sapiens
ctccagatcatggct

SEQ ID NO: 422494 - DNA, 15 bp, Homo sapiens
actccagatcatggc

SEQ ID NO: 422495 - DNA, 15 bp, Homo sapiens
gactccagatcatgg

SEQ ID NO: 422496 - DNA, 15 bp, Homo sapiens
tgactccagatcatg

SEQ ID NO: 422497 - DNA, 15 bp, Homo sapiens
ttgactccagatcat

SEQ ID NO: 422498 - DNA, 15 bp, Homo sapiens
cttgactccagatca

SEQ ID NO: 422499 - DNA, 15 bp, Homo sapiens
ccttgactccagatc

SEQ ID NO: 422500 - DNA, 15 bp, Homo sapiens
accttgactccagat

SEQ ID NO: 422501 - DNA, 15 bp, Homo sapiens
caccttgactccaga

SEQ ID NO: 422502 - DNA, 15 bp, Homo sapiens
acaccttgactccag

SEQ ID NO: 422503 - DNA, 15 bp, Homo sapiens
aacaccttgactcca

SEQ ID NO: 422504 - DNA, 15 bp, Homo sapiens
taacaccttgactcc

SEQ ID NO: 422505 - DNA, 15 bp, Homo sapiens
ctaacaccttgactc

SEQ ID NO: 422506 - DNA, 15 bp, Homo sapiens
actaacaccttgact

SEQ ID NO: 422507 - DNA, 15 bp, Homo sapiens
cactaacaccttgac

SEQ ID NO: 422508 - DNA, 15 bp, Homo sapiens
tcactaacaccttga

SEQ ID NO: 422509 - DNA, 15 bp, Homo sapiens
atcactaacaccttg

SEQ ID NO: 422510 - DNA, 15 bp, Homo sapiens
aatcactaacacctt

SEQ ID NO: 422511 - DNA, 15 bp, Homo sapiens
gaatcactaacacct

SEQ ID NO: 422512 - DNA, 15 bp, Homo sapiens
ggaatcactaacacc

SEQ ID NO: 422513 - DNA, 15 bp, Homo sapiens
aggaatcactaacac

SEQ ID NO: 422514 - DNA, 15 bp, Homo sapiens
gaggaatcactaaca

SEQ ID NO: 422515 - DNA, 15 bp, Homo sapiens
agaggaatcactaac

SEQ ID NO: 422516 - DNA, 15 bp, Homo sapiens
tagaggaatcactaa

SEQ ID NO: 422517 - DNA, 15 bp, Homo sapiens
ttagaggaatcacta

SEQ ID NO: 422518 - DNA, 15 bp, Homo sapiens
cttagaggaatcact

SEQ ID NO: 422519 - DNA, 15 bp, Homo sapiens
ccttagaggaatcac

SEQ ID NO: 422520 - DNA, 15 bp, Homo sapiens
cccttagaggaatca

SEQ ID NO: 422521 - DNA, 15 bp, Homo sapiens
ccccttagaggaatc

SEQ ID NO: 422522 - DNA, 15 bp, Homo sapiens
tccccttagaggaat

SEQ ID NO: 422523 - DNA, 15 bp, Homo sapiens
ctccccttagaggaa

SEQ ID NO: 422524 - DNA, 15 bp, Homo sapiens
tctccccttagagga

SEQ ID NO: 422525 - DNA, 15 bp, Homo sapiens
ttctccccttagagg

SEQ ID NO: 422526 - DNA, 15 bp, Homo sapiens
tttctccccttagag

SEQ ID NO: 422527 - DNA, 15 bp, Homo sapiens
ttttctccccttaga

SEQ ID NO: 422528 - DNA, 15 bp, Homo sapiens
tttttctccccttag

SEQ ID NO: 422529 - DNA, 15 bp, Homo sapiens
ttttttctcccctta

SEQ ID NO: 422530 - DNA, 15 bp, Homo sapiens
attttttctcccctt

SEQ ID NO: 422531 - DNA, 15 bp, Homo sapiens
tattttttctcccct

SEQ ID NO: 422532 - DNA, 15 bp, Homo sapiens
ttattttttctcccc

SEQ ID NO: 422533 - DNA, 15 bp, Homo sapiens
attattttttctccc

SEQ ID NO: 422534 - DNA, 15 bp, Homo sapiens
aattattttttctcc

SEQ ID NO: 422535 - DNA, 15 bp, Homo sapiens
taattattttttctc

SEQ ID NO: 422536 - DNA, 15 bp, Homo sapiens
gtaattattttttct

SEQ ID NO: 422537 - DNA, 15 bp, Homo sapiens
tgtaattattttttc

SEQ ID NO: 422538 - DNA, 15 bp, Homo sapiens
ctgtaattatttttt

SEQ ID NO: 422539 - DNA, 15 bp, Homo sapiens
cctgtaattattttt

SEQ ID NO: 422540 - DNA, 15 bp, Homo sapiens
tcctgtaattatttt

SEQ ID NO: 422541 - DNA, 15 bp, Homo sapiens
ttcctgtaattattt

SEQ ID NO: 422542 - DNA, 15 bp, Homo sapiens
cttcctgtaattatt

SEQ ID NO: 422543 - DNA, 15 bp, Homo sapiens
gcttcctgtaattat

SEQ ID NO: 422544 - DNA, 15 bp, Homo sapiens
tgcttcctgtaatta

SEQ ID NO: 422545 - DNA, 15 bp, Homo sapiens
atgcttcctgtaatt

SEQ ID NO: 422546 - DNA, 15 bp, Homo sapiens
tatgcttcctgtaat

SEQ ID NO: 422547 - DNA, 15 bp, Homo sapiens
ttatgcttcctgtaa

SEQ ID NO: 422548 - DNA, 15 bp, Homo sapiens
attatgcttcctgta

SEQ ID NO: 422549 - DNA, 15 bp, Homo sapiens
aattatgcttcctgt

SEQ ID NO: 422550 - DNA, 15 bp, Homo sapiens
aaattatgcttcctg

SEQ ID NO: 422551 - DNA, 15 bp, Homo sapiens
aaaattatgcttcct

SEQ ID NO: 422552 - DNA, 15 bp, Homo sapiens
caaaattatgcttcc

SEQ ID NO: 422553 - DNA, 15 bp, Homo sapiens
acaaaattatgcttc

SEQ ID NO: 422554 - DNA, 15 bp, Homo sapiens
tacaaaattatgctt

SEQ ID NO: 422555 - DNA, 15 bp, Homo sapiens
ctacaaaattatgct

SEQ ID NO: 422556 - DNA, 15 bp, Homo sapiens
actacaaaattatgc

SEQ ID NO: 422557 - DNA, 15 bp, Homo sapiens
aactacaaaattatg

SEQ ID NO: 422558 - DNA, 15 bp, Homo sapiens
taactacaaaattat

SEQ ID NO: 422559 - DNA, 15 bp, Homo sapiens
ttaactacaaaatta

SEQ ID NO: 422560 - DNA, 15 bp, Homo sapiens
attaactacaaaatt

SEQ ID NO: 422561 - DNA, 15 bp, Homo sapiens
cattaactacaaaat

SEQ ID NO: 422562 - DNA, 15 bp, Homo sapiens
gcattaactacaaaa

SEQ ID NO: 422563 - DNA, 15 bp, Homo sapiens
ggcattaactacaaa

SEQ ID NO: 422564 - DNA, 15 bp, Homo sapiens
tggcattaactacaa

SEQ ID NO: 422565 - DNA, 15 bp, Homo sapiens
atggcattaactaca

SEQ ID NO: 422566 - DNA, 15 bp, Homo sapiens
tatggcattaactac

SEQ ID NO: 422567 - DNA, 15 bp, Homo sapiens
atatggcattaacta

SEQ ID NO: 422568 - DNA, 15 bp, Homo sapiens
catatggcattaact

SEQ ID NO: 422569 - DNA, 15 bp, Homo sapiens
tcatatggcattaac

SEQ ID NO: 422570 - DNA, 15 bp, Homo sapiens
ttcatatggcattaa

SEQ ID NO: 422571 - DNA, 15 bp, Homo sapiens
cttcatatggcatta

SEQ ID NO: 422572 - DNA, 15 bp, Homo sapiens
acttcatatggcatt

SEQ ID NO: 422573 - DNA, 15 bp, Homo sapiens
cacttcatatggcat

SEQ ID NO: 422574 - DNA, 15 bp, Homo sapiens
tcacttcatatggca

SEQ ID NO: 422575 - DNA, 15 bp, Homo sapiens
gtcacttcatatggc

SEQ ID NO: 422576 - DNA, 15 bp, Homo sapiens
tgtcacttcatatgg

SEQ ID NO: 422577 - DNA, 15 bp, Homo sapiens
ctgtcacttcatatg

SEQ ID NO: 422578 - DNA, 15 bp, Homo sapiens
gctgtcacttcatat

SEQ ID NO: 422579 - DNA, 15 bp, Homo sapiens
ggctgtcacttcata

SEQ ID NO: 422580 - DNA, 15 bp, Homo sapiens
tggctgtcacttcat

SEQ ID NO: 422581 - DNA, 15 bp, Homo sapiens
atggctgtcacttca

SEQ ID NO: 422582 - DNA, 15 bp, Homo sapiens
gatggctgtcacttc

SEQ ID NO: 422583 - DNA, 15 bp, Homo sapiens
tgatggctgtcactt

SEQ ID NO: 422584 - DNA, 15 bp, Homo sapiens
ttgatggctgtcact

SEQ ID NO: 422585 - DNA, 15 bp, Homo sapiens
tttgatggctgtcac

SEQ ID NO: 422586 - DNA, 15 bp, Homo sapiens
atttgatggctgtca

SEQ ID NO: 422587 - DNA, 15 bp, Homo sapiens
gatttgatggctgtc

SEQ ID NO: 422588 - DNA, 15 bp, Homo sapiens
agatttgatggctgt

SEQ ID NO: 422589 - DNA, 15 bp, Homo sapiens
gagatttgatggctg

SEQ ID NO: 422590 - DNA, 15 bp, Homo sapiens
tgagatttgatggct

SEQ ID NO: 422591 - DNA, 15 bp, Homo sapiens
ctgagatttgatggc

SEQ ID NO: 422592 - DNA, 15 bp, Homo sapiens
actgagatttgatgg

SEQ ID NO: 422593 - DNA, 15 bp, Homo sapiens
aactgagatttgatg

SEQ ID NO: 422594 - DNA, 15 bp, Homo sapiens
aaactgagatttgat

SEQ ID NO: 422595 - DNA, 15 bp, Homo sapiens
gaaactgagatttga

SEQ ID NO: 422596 - DNA, 15 bp, Homo sapiens
tgaaactgagatttg

SEQ ID NO: 422597 - DNA, 15 bp, Homo sapiens
gtgaaactgagattt

SEQ ID NO: 422598 - DNA, 15 bp, Homo sapiens
tgtgaaactgagatt

SEQ ID NO: 422599 - DNA, 15 bp, Homo sapiens
ttgtgaaactgagat

SEQ ID NO: 422600 - DNA, 15 bp, Homo sapiens
cttgtgaaactgaga

SEQ ID NO: 422601 - DNA, 15 bp, Homo sapiens
tcttgtgaaactgag

SEQ ID NO: 422602 - DNA, 15 bp, Homo sapiens
ttcttgtgaaactga

SEQ ID NO: 422603 - DNA, 15 bp, Homo sapiens
gttcttgtgaaactg

SEQ ID NO: 422604 - DNA, 15 bp, Homo sapiens
tgttcttgtgaaact

SEQ ID NO: 422605 - DNA, 15 bp, Homo sapiens
ttgttcttgtgaaac

SEQ ID NO: 422606 - DNA, 15 bp, Homo sapiens
tttgttcttgtgaaa

SEQ ID NO: 422607 - DNA, 15 bp, Homo sapiens
ttttgttcttgtgaa

SEQ ID NO: 422608 - DNA, 15 bp, Homo sapiens
attttgttcttgtga

SEQ ID NO: 422609 - DNA, 15 bp, Homo sapiens
aattttgttcttgtg

SEQ ID NO: 422610 - DNA, 15 bp, Homo sapiens
gaattttgttcttgt

SEQ ID NO: 422611 - DNA, 15 bp, Homo sapiens
tgaattttgttcttg

SEQ ID NO: 422612 - DNA, 15 bp, Homo sapiens
ctgaattttgttctt

SEQ ID NO: 422613 - DNA, 15 bp, Homo sapiens
tctgaattttgttct

SEQ ID NO: 422614 - DNA, 15 bp, Homo sapiens
ctctgaattttgttc

SEQ ID NO: 422615 - DNA, 15 bp, Homo sapiens
tctctgaattttgtt

SEQ ID NO: 422616 - DNA, 15 bp, Homo sapiens
atctctgaattttgt

SEQ ID NO: 422617 - DNA, 15 bp, Homo sapiens
catctctgaattttg

SEQ ID NO: 422618 - DNA, 15 bp, Homo sapiens
gcatctctgaatttt

SEQ ID NO: 422619 - DNA, 15 bp, Homo sapiens
agcatctctgaattt

SEQ ID NO: 422620 - DNA, 15 bp, Homo sapiens
tagcatctctgaatt

SEQ ID NO: 422621 - DNA, 15 bp, Homo sapiens
ttagcatctctgaat

SEQ ID NO: 422622 - DNA, 15 bp, Homo sapiens
tttagcatctctgaa

SEQ ID NO: 422623 - DNA, 15 bp, Homo sapiens
atttagcatctctga

SEQ ID NO: 422624 - DNA, 15 bp, Homo sapiens
aatttagcatctctg

SEQ ID NO: 422625 - DNA, 15 bp, Homo sapiens
taatttagcatctct

SEQ ID NO: 422626 - DNA, 15 bp, Homo sapiens
ttaatttagcatctc

SEQ ID NO: 422627 - DNA, 15 bp, Homo sapiens
cttaatttagcatct

SEQ ID NO: 422628 - DNA, 15 bp, Homo sapiens
acttaatttagcatc

SEQ ID NO: 422629 - DNA, 15 bp, Homo sapiens
cacttaatttagcat

SEQ ID NO: 422630 - DNA, 15 bp, Homo sapiens
ccacttaatttagca

SEQ ID NO: 422631 - DNA, 15 bp, Homo sapiens
tccacttaatttagc

SEQ ID NO: 422632 - DNA, 15 bp, Homo sapiens
gtccacttaatttag

SEQ ID NO: 422633 - DNA, 15 bp, Homo sapiens
tgtccacttaattta

SEQ ID NO: 422634 - DNA, 15 bp, Homo sapiens
ttgtccacttaattt

SEQ ID NO: 422635 - DNA, 15 bp, Homo sapiens
tttgtccacttaatt

SEQ ID NO: 422636 - DNA, 15 bp, Homo sapiens
ctttgtccacttaat

SEQ ID NO: 422637 - DNA, 15 bp, Homo sapiens
tctttgtccacttaa

SEQ ID NO: 422638 - DNA, 15 bp, Homo sapiens
atctttgtccactta

SEQ ID NO: 422639 - DNA, 15 bp, Homo sapiens
gatctttgtccactt

SEQ ID NO: 422640 - DNA, 15 bp, Homo sapiens
tgatctttgtccact

SEQ ID NO: 422641 - DNA, 15 bp, Homo sapiens
atgatctttgtccac

SEQ ID NO: 422642 - DNA, 15 bp, Homo sapiens
aatgatctttgtcca

SEQ ID NO: 422643 - DNA, 15 bp, Homo sapiens
aaatgatctttgtcc

SEQ ID NO: 422644 - DNA, 15 bp, Homo sapiens
aaaatgatctttgtc

SEQ ID NO: 422645 - DNA, 15 bp, Homo sapiens
gaaaatgatctttgt

SEQ ID NO: 422646 - DNA, 15 bp, Homo sapiens
agaaaatgatctttg

SEQ ID NO: 422647 - DNA, 15 bp, Homo sapiens
tagaaaatgatcttt

SEQ ID NO: 422648 - DNA, 15 bp, Homo sapiens
ttagaaaatgatctt

SEQ ID NO: 422649 - DNA, 15 bp, Homo sapiens
tttagaaaatgatct

SEQ ID NO: 422650 - DNA, 15 bp, Homo sapiens
atttagaaaatgatc

SEQ ID NO: 422651 - DNA, 15 bp, Homo sapiens
catttagaaaatgat

SEQ ID NO: 422652 - DNA, 15 bp, Homo sapiens
ccatttagaaaatga

SEQ ID NO: 422653 - DNA, 15 bp, Homo sapiens
gccatttagaaaatg

SEQ ID NO: 422654 - DNA, 15 bp, Homo sapiens
tgccatttagaaaat

SEQ ID NO: 422655 - DNA, 15 bp, Homo sapiens
ttgccatttagaaaa

SEQ ID NO: 422656 - DNA, 15 bp, Homo sapiens
cttgccatttagaaa

SEQ ID NO: 422657 - DNA, 15 bp, Homo sapiens
acttgccatttagaa

SEQ ID NO: 422658 - DNA, 15 bp, Homo sapiens
aacttgccatttaga

SEQ ID NO: 422659 - DNA, 15 bp, Homo sapiens
taacttgccatttag

SEQ ID NO: 422660 - DNA, 15 bp, Homo sapiens
ttaacttgccattta

SEQ ID NO: 422661 - DNA, 15 bp, Homo sapiens
cttaacttgccattt

SEQ ID NO: 422662 - DNA, 15 bp, Homo sapiens
gcttaacttgccatt

SEQ ID NO: 422663 - DNA, 15 bp, Homo sapiens
agcttaacttgccat

SEQ ID NO: 422664 - DNA, 15 bp, Homo sapiens
tagcttaacttgcca

SEQ ID NO: 422665 - DNA, 15 bp, Homo sapiens
ttagcttaacttgcc

SEQ ID NO: 422666 - DNA, 15 bp, Homo sapiens
cttagcttaacttgc

SEQ ID NO: 422667 - DNA, 15 bp, Homo sapiens
acttagcttaacttg

SEQ ID NO: 422668 - DNA, 15 bp, Homo sapiens
cacttagcttaactt

SEQ ID NO: 422669 - DNA, 15 bp, Homo sapiens
tcacttagcttaact

SEQ ID NO: 422670 - DNA, 15 bp, Homo sapiens
gtcacttagcttaac

SEQ ID NO: 422671 - DNA, 15 bp, Homo sapiens
tgtcacttagcttaa

SEQ ID NO: 422672 - DNA, 15 bp, Homo sapiens
ttgtcacttagctta

SEQ ID NO: 422673 - DNA, 15 bp, Homo sapiens
tttgtcacttagctt

SEQ ID NO: 422674 - DNA, 15 bp, Homo sapiens
ttttgtcacttagct

SEQ ID NO: 422675 - DNA, 15 bp, Homo sapiens
tttttgtcacttagc

SEQ ID NO: 422676 - DNA, 15 bp, Homo sapiens
ttttttgtcacttag

SEQ ID NO: 422677 - DNA, 15 bp, Homo sapiens
attttttgtcactta

SEQ ID NO: 422678 - DNA, 15 bp, Homo sapiens
aattttttgtcactt

SEQ ID NO: 422679 - DNA, 15 bp, Homo sapiens
aaattttttgtcact

SEQ ID NO: 422680 - DNA, 15 bp, Homo sapiens
taaattttttgtcac

SEQ ID NO: 422681 - DNA, 15 bp, Homo sapiens
ctaaattttttgtca

SEQ ID NO: 422682 - DNA, 15 bp, Homo sapiens
cctaaattttttgtc

SEQ ID NO: 422683 - DNA, 15 bp, Homo sapiens
ccctaaattttttgt

SEQ ID NO: 422684 - DNA, 15 bp, Homo sapiens
gccctaaattttttg

SEQ ID NO: 422685 - DNA, 15 bp, Homo sapiens
ggccctaaatttttt

SEQ ID NO: 422686 - DNA, 15 bp, Homo sapiens
tggccctaaattttt

SEQ ID NO: 422687 - DNA, 15 bp, Homo sapiens
atggccctaaatttt

SEQ ID NO: 422688 - DNA, 15 bp, Homo sapiens
aatggccctaaattt

SEQ ID NO: 422689 - DNA, 15 bp, Homo sapiens
taatggccctaaatt

SEQ ID NO: 422690 - DNA, 15 bp, Homo sapiens
ataatggccctaaat

SEQ ID NO: 422691 - DNA, 15 bp, Homo sapiens
aataatggccctaaa

SEQ ID NO: 422692 - DNA, 15 bp, Homo sapiens
aaataatggccctaa

SEQ ID NO: 422693 - DNA, 15 bp, Homo sapiens
taaataatggcccta

SEQ ID NO: 422694 - DNA, 15 bp, Homo sapiens
ataaataatggccct

SEQ ID NO: 422695 - DNA, 15 bp, Homo sapiens
tataaataatggccc

SEQ ID NO: 422696 - DNA, 15 bp, Homo sapiens
ttataaataatggcc

SEQ ID NO: 422697 - DNA, 15 bp, Homo sapiens
tttataaataatggc

SEQ ID NO: 422698 - DNA, 15 bp, Homo sapiens
atttataaataatgg

SEQ ID NO: 422699 - DNA, 15 bp, Homo sapiens
tatttataaataatg

SEQ ID NO: 422700 - DNA, 15 bp, Homo sapiens
atatttataaataat

SEQ ID NO: 422701 - DNA, 15 bp, Homo sapiens
aatatttataaataa

SEQ ID NO: 422702 - DNA, 15 bp, Homo sapiens
caatatttataaata

SEQ ID NO: 422703 - DNA, 15 bp, Homo sapiens
cacaatatttataaa

SEQ ID NO: 422704 - DNA, 15 bp, Homo sapiens
acacaatatttataa

SEQ ID NO: 422705 - DNA, 15 bp, Homo sapiens
tacacaatatttata

SEQ ID NO: 422706 - DNA, 15 bp, Homo sapiens
ttacacaatatttat

SEQ ID NO: 422707 - DNA, 15 bp, Homo sapiens
tttacacaatattta

SEQ ID NO: 422708 - DNA, 15 bp, Homo sapiens
atttacacaatattt

SEQ ID NO: 422709 - DNA, 15 bp, Homo sapiens
aatttacacaatatt

SEQ ID NO: 422710 - DNA, 15 bp, Homo sapiens
aaatttacacaatat

SEQ ID NO: 422711 - DNA, 15 bp, Homo sapiens
aaaatttacacaata

SEQ ID NO: 422712 - DNA, 15 bp, Homo sapiens
taaaatttacacaat

SEQ ID NO: 422713 - DNA, 15 bp, Homo sapiens
ttaaaatttacacaa

SEQ ID NO: 422714 - DNA, 15 bp, Homo sapiens
cttaaaatttacaca

SEQ ID NO: 422715 - DNA, 15 bp, Homo sapiens
acttaaaatttacac

SEQ ID NO: 422716 - DNA, 15 bp, Homo sapiens
cacttaaaatttaca

SEQ ID NO: 422717 - DNA, 15 bp, Homo sapiens
ccacttaaaatttac

SEQ ID NO: 422718 - DNA, 15 bp, Homo sapiens
cccacttaaaattta

SEQ ID NO: 422719 - DNA, 15 bp, Homo sapiens
tcccacttaaaattt

SEQ ID NO: 422720 - DNA, 15 bp, Homo sapiens
atcccacttaaaatt

SEQ ID NO: 422721 - DNA, 15 bp, Homo sapiens
gatcccacttaaaat

SEQ ID NO: 422722 - DNA, 15 bp, Homo sapiens
ggatcccacttaaaa

SEQ ID NO: 422723 - DNA, 15 bp, Homo sapiens
aggatcccacttaaa

SEQ ID NO: 422724 - DNA, 15 bp, Homo sapiens
caggatcccacttaa

SEQ ID NO: 422725 - DNA, 15 bp, Homo sapiens
gcaggatcccactta

SEQ ID NO: 422726 - DNA, 15 bp, Homo sapiens
ggcaggatcccactt

SEQ ID NO: 422727 - DNA, 15 bp, Homo sapiens
gggcaggatcccact

SEQ ID NO: 422728 - DNA, 15 bp, Homo sapiens
agggcaggatcccac

SEQ ID NO: 422729 - DNA, 15 bp, Homo sapiens
tagggcaggatccca

SEQ ID NO: 422730 - DNA, 15 bp, Homo sapiens
ttagggcaggatccc

SEQ ID NO: 422731 - DNA, 15 bp, Homo sapiens
attagggcaggatcc

SEQ ID NO: 422732 - DNA, 15 bp, Homo sapiens
aattagggcaggatc

SEQ ID NO: 422733 - DNA, 15 bp, Homo sapiens
aaattagggcaggat

SEQ ID NO: 422734 - DNA, 15 bp, Homo sapiens
taaattagggcagga

SEQ ID NO: 422735 - DNA, 15 bp, Homo sapiens
ctaaattagggcagg

SEQ ID NO: 422736 - DNA, 15 bp, Homo sapiens
tctaaattagggcag

SEQ ID NO: 422737 - DNA, 15 bp, Homo sapiens
ttctaaattagggca

SEQ ID NO: 422738 - DNA, 15 bp, Homo sapiens
tttctaaattagggc

SEQ ID NO: 422739 - DNA, 15 bp, Homo sapiens
atttctaaattaggg

SEQ ID NO: 422740 - DNA, 15 bp, Homo sapiens
tatttctaaattagg

SEQ ID NO: 422741 - DNA, 15 bp, Homo sapiens
ttatttctaaattag

SEQ ID NO: 422742 - DNA, 15 bp, Homo sapiens
cttatttctaaatta

SEQ ID NO: 422743 - DNA, 15 bp, Homo sapiens
acttatttctaaatt

SEQ ID NO: 422744 - DNA, 15 bp, Homo sapiens
tacttatttctaaat

SEQ ID NO: 422745 - DNA, 15 bp, Homo sapiens
gtacttatttctaaa

SEQ ID NO: 422746 - DNA, 15 bp, Homo sapiens
tgtacttatttctaa

SEQ ID NO: 422747 - DNA, 15 bp, Homo sapiens
atgtacttatttcta

SEQ ID NO: 422748 - DNA, 15 bp, Homo sapiens
gatgtacttatttct

SEQ ID NO: 422749 - DNA, 15 bp, Homo sapiens
agatgtacttatttc

SEQ ID NO: 422750 - DNA, 15 bp, Homo sapiens
aagatgtacttattt

SEQ ID NO: 422751 - DNA, 15 bp, Homo sapiens
gaagatgtacttatt

SEQ ID NO: 422752 - DNA, 15 bp, Homo sapiens
agaagatgtacttat

SEQ ID NO: 422753 - DNA, 15 bp, Homo sapiens
aagaagatgtactta

SEQ ID NO: 422754 - DNA, 15 bp, Homo sapiens
aaagaagatgtactt

SEQ ID NO: 422755 - DNA, 15 bp, Homo sapiens
taaagaagatgtact

SEQ ID NO: 422756 - DNA, 15 bp, Homo sapiens
ttaaagaagatgtac

SEQ ID NO: 422757 - DNA, 15 bp, Homo sapiens
tttaaagaagatgta

SEQ ID NO: 422758 - DNA, 15 bp, Homo sapiens
atttaaagaagatgt

SEQ ID NO: 422759 - DNA, 15 bp, Homo sapiens
catttaaagaagatg

SEQ ID NO: 422760 - DNA, 15 bp, Homo sapiens
tcatttaaagaagat

SEQ ID NO: 422761 - DNA, 15 bp, Homo sapiens
ttcatttaaagaaga

SEQ ID NO: 422762 - DNA, 15 bp, Homo sapiens
tttcatttaaagaag

SEQ ID NO: 422763 - DNA, 15 bp, Homo sapiens
ttttcatttaaagaa

SEQ ID NO: 422764 - DNA, 15 bp, Homo sapiens
gttttcatttaaaga

SEQ ID NO: 422765 - DNA, 15 bp, Homo sapiens
tgttttcatttaaag

SEQ ID NO: 422766 - DNA, 15 bp, Homo sapiens
gtgttttcatttaaa

SEQ ID NO: 422767 - DNA, 15 bp, Homo sapiens
cgtgttttcatttaa

SEQ ID NO: 422768 - DNA, 15 bp, Homo sapiens
acgtgttttcattta

SEQ ID NO: 422769 - DNA, 15 bp, Homo sapiens
tacgtgttttcattt

SEQ ID NO: 422770 - DNA, 15 bp, Homo sapiens
atacgtgttttcatt

SEQ ID NO: 422771 - DNA, 15 bp, Homo sapiens
aatacgtgttttcat

SEQ ID NO: 422772 - DNA, 15 bp, Homo sapiens
gaatacgtgttttca

SEQ ID NO: 422773 - DNA, 15 bp, Homo sapiens
ggaatacgtgttttc

SEQ ID NO: 422774 - DNA, 15 bp, Homo sapiens
aggaatacgtgtttt

SEQ ID NO: 422775 - DNA, 15 bp, Homo sapiens
caggaatacgtgttt

SEQ ID NO: 422776 - DNA, 15 bp, Homo sapiens
acaggaatacgtgtt

SEQ ID NO: 422777 - DNA, 15 bp, Homo sapiens
aacaggaatacgtgt

SEQ ID NO: 422778 - DNA, 15 bp, Homo sapiens
taacaggaatacgtg

SEQ ID NO: 422779 - DNA, 15 bp, Homo sapiens
ataacaggaatacgt

SEQ ID NO: 422780 - DNA, 15 bp, Homo sapiens
cataacaggaatacg

SEQ ID NO: 422781 - DNA, 15 bp, Homo sapiens
acataacaggaatac

SEQ ID NO: 422782 - DNA, 15 bp, Homo sapiens
cacataacaggaata

SEQ ID NO: 422783 - DNA, 15 bp, Homo sapiens
acacataacaggaat

SEQ ID NO: 422784 - DNA, 15 bp, Homo sapiens
tacacataacaggaa

SEQ ID NO: 422785 - DNA, 15 bp, Homo sapiens
atacacataacagga

SEQ ID NO: 422786 - DNA, 15 bp, Homo sapiens
tatacacataacagg

SEQ ID NO: 422787 - DNA, 15 bp, Homo sapiens
atatacacataacag

SEQ ID NO: 422788 - DNA, 15 bp, Homo sapiens
gatatacacataaca

SEQ ID NO: 422789 - DNA, 15 bp, Homo sapiens
ggatatacacataac

SEQ ID NO: 422790 - DNA, 15 bp, Homo sapiens
aggatatacacataa

SEQ ID NO: 422791 - DNA, 15 bp, Homo sapiens
aaggatatacacata

SEQ ID NO: 422792 - DNA, 15 bp, Homo sapiens
aaaggatatacacat

SEQ ID NO: 422793 - DNA, 15 bp, Homo sapiens
taaaggatatacaca

SEQ ID NO: 422794 - DNA, 15 bp, Homo sapiens
gtaaaggatatacac

SEQ ID NO: 422795 - DNA, 15 bp, Homo sapiens
agtaaaggatataca

SEQ ID NO: 422796 - DNA, 15 bp, Homo sapiens
tagtaaaggatatac

SEQ ID NO: 422797 - DNA, 15 bp, Homo sapiens
atagtaaaggatata

SEQ ID NO: 422798 - DNA, 15 bp, Homo sapiens
aatagtaaaggatat

SEQ ID NO: 422799 - DNA, 15 bp, Homo sapiens
aaatagtaaaggata

SEQ ID NO: 422800 - DNA, 15 bp, Homo sapiens
aaaatagtaaaggat

SEQ ID NO: 422801 - DNA, 15 bp, Homo sapiens
taaaatagtaaagga

SEQ ID NO: 422802 - DNA, 15 bp, Homo sapiens
ttaaaatagtaaagg

SEQ ID NO: 422803 - DNA, 15 bp, Homo sapiens
gttaaaatagtaaag

SEQ ID NO: 422804 - DNA, 15 bp, Homo sapiens
tgttaaaatagtaaa

SEQ ID NO: 422805 - DNA, 15 bp, Homo sapiens
ttgttaaaatagtaa

SEQ ID NO: 422806 - DNA, 15 bp, Homo sapiens
tttgttaaaatagta

SEQ ID NO: 422807 - DNA, 15 bp, Homo sapiens
atttgttaaaatagt

SEQ ID NO: 422808 - DNA, 15 bp, Homo sapiens
tatttgttaaaatag

SEQ ID NO: 422809 - DNA, 15 bp, Homo sapiens
atatttgttaaaata

SEQ ID NO: 422810 - DNA, 15 bp, Homo sapiens
aatatttgttaaaat

SEQ ID NO: 422811 - DNA, 15 bp, Homo sapiens
aaatatttgttaaaa

SEQ ID NO: 422812 - DNA, 15 bp, Homo sapiens
caaatatttgttaaa

SEQ ID NO: 422813 - DNA, 15 bp, Homo sapiens
acaaatatttgttaa

SEQ ID NO: 422814 - DNA, 15 bp, Homo sapiens
aacaaatatttgtta

SEQ ID NO: 422815 - DNA, 15 bp, Homo sapiens
caacaaatatttgtt

SEQ ID NO: 422816 - DNA, 15 bp, Homo sapiens
tcaacaaatatttgt

SEQ ID NO: 422817 - DNA, 15 bp, Homo sapiens
ctcaacaaatatttg

SEQ ID NO: 422818 - DNA, 15 bp, Homo sapiens
tctcaacaaatattt

SEQ ID NO: 422819 - DNA, 15 bp, Homo sapiens
atctcaacaaatatt

SEQ ID NO: 422820 - DNA, 15 bp, Homo sapiens
aatctcaacaaatat

SEQ ID NO: 422821 - DNA, 15 bp, Homo sapiens
taatctcaacaaata

SEQ ID NO: 422822 - DNA, 15 bp, Homo sapiens
gtaatctcaacaaat

SEQ ID NO: 422823 - DNA, 15 bp, Homo sapiens
tgtaatctcaacaaa

SEQ ID NO: 422824 - DNA, 15 bp, Homo sapiens
gtgtaatctcaacaa

SEQ ID NO: 422825 - DNA, 15 bp, Homo sapiens
tgtgtaatctcaaca

SEQ ID NO: 422826 - DNA, 15 bp, Homo sapiens
gtgtgtaatctcaac

SEQ ID NO: 422827 - DNA, 15 bp, Homo sapiens
tgtgtgtaatctcaa

SEQ ID NO: 422828 - DNA, 15 bp, Homo sapiens
atgtgtgtaatctca

SEQ ID NO: 422829 - DNA, 15 bp, Homo sapiens
catgtgtgtaatctc

SEQ ID NO: 422830 - DNA, 15 bp, Homo sapiens
acatgtgtgtaatct

SEQ ID NO: 422831 - DNA, 15 bp, Homo sapiens
aacatgtgtgtaatc

SEQ ID NO: 422832 - DNA, 15 bp, Homo sapiens
gaacatgtgtgtaat

SEQ ID NO: 422833 - DNA, 15 bp, Homo sapiens
ggaacatgtgtgtaa

SEQ ID NO: 422834 - DNA, 15 bp, Homo sapiens
gggaacatgtgtgta

SEQ ID NO: 422835 - DNA, 15 bp, Homo sapiens
tgggaacatgtgtgt

SEQ ID NO: 422836 - DNA, 15 bp, Homo sapiens
ctgggaacatgtgtg

SEQ ID NO: 422837 - DNA, 15 bp, Homo sapiens
tctgggaacatgtgt

SEQ ID NO: 422838 - DNA, 15 bp, Homo sapiens
ctctgggaacatgtg

SEQ ID NO: 422839 - DNA, 15 bp, Homo sapiens
actctgggaacatgt

SEQ ID NO: 422840 - DNA, 15 bp, Homo sapiens
cactctgggaacatg

SEQ ID NO: 422841 - DNA, 15 bp, Homo sapiens
gcactctgggaacat

SEQ ID NO: 422842 - DNA, 15 bp, Homo sapiens
agcactctgggaaca

SEQ ID NO: 422843 - DNA, 15 bp, Homo sapiens
aagcactctgggaac

SEQ ID NO: 422844 - DNA, 15 bp, Homo sapiens
aaagcactctgggaa

SEQ ID NO: 422845 - DNA, 15 bp, Homo sapiens
caaagcactctggga

SEQ ID NO: 422846 - DNA, 15 bp, Homo sapiens
acaaagcactctggg

SEQ ID NO: 422847 - DNA, 15 bp, Homo sapiens
cacaaagcactctgg

SEQ ID NO: 422848 - DNA, 15 bp, Homo sapiens
acacaaagcactctg

SEQ ID NO: 422849 - DNA, 15 bp, Homo sapiens
aacacaaagcactct

SEQ ID NO: 422850 - DNA, 15 bp, Homo sapiens
gaacacaaagcactc

SEQ ID NO: 422851 - DNA, 15 bp, Homo sapiens
agaacacaaagcact

SEQ ID NO: 422852 - DNA, 15 bp, Homo sapiens
gagaacacaaagcac

SEQ ID NO: 422853 - DNA, 15 bp, Homo sapiens
ggagaacacaaagca

SEQ ID NO: 422854 - DNA, 15 bp, Homo sapiens
tggagaacacaaagc

SEQ ID NO: 422855 - DNA, 15 bp, Homo sapiens
atggagaacacaaag

SEQ ID NO: 422856 - DNA, 15 bp, Homo sapiens
aatggagaacacaaa

SEQ ID NO: 422857 - DNA, 15 bp, Homo sapiens
taatggagaacacaa

SEQ ID NO: 422858 - DNA, 15 bp, Homo sapiens
ataatggagaacaca

SEQ ID NO: 422859 - DNA, 15 bp, Homo sapiens
gataatggagaacac

SEQ ID NO: 422860 - DNA, 15 bp, Homo sapiens
tgataatggagaaca

SEQ ID NO: 422861 - DNA, 15 bp, Homo sapiens
gtgataatggagaac

SEQ ID NO: 422862 - DNA, 15 bp, Homo sapiens
tgtgataatggagaa

SEQ ID NO: 422863 - DNA, 15 bp, Homo sapiens
gtgtgataatggaga

SEQ ID NO: 422864 - DNA, 15 bp, Homo sapiens
agtgtgataatggag

SEQ ID NO: 422865 - DNA, 15 bp, Homo sapiens
cagtgtgataatgga

SEQ ID NO: 422866 - DNA, 15 bp, Homo sapiens
acagtgtgataatgg

SEQ ID NO: 422867 - DNA, 15 bp, Homo sapiens
cacagtgtgataatg

SEQ ID NO: 422868 - DNA, 15 bp, Homo sapiens
acacagtgtgataat

SEQ ID NO: 422869 - DNA, 15 bp, Homo sapiens
aacacagtgtgataa

SEQ ID NO: 422870 - DNA, 15 bp, Homo sapiens
caacacagtgtgata

SEQ ID NO: 422871 - DNA, 15 bp, Homo sapiens
tcaacacagtgtgat

SEQ ID NO: 422872 - DNA, 15 bp, Homo sapiens
ttcaacacagtgtga

SEQ ID NO: 422873 - DNA, 15 bp, Homo sapiens
tttcaacacagtgtg

SEQ ID NO: 422874 - DNA, 15 bp, Homo sapiens
atttcaacacagtgt

SEQ ID NO: 422875 - DNA, 15 bp, Homo sapiens
aatttcaacacagtg

SEQ ID NO: 422876 - DNA, 15 bp, Homo sapiens
caatttcaacacagt

SEQ ID NO: 422877 - DNA, 15 bp, Homo sapiens
tcaatttcaacacag

SEQ ID NO: 422878 - DNA, 15 bp, Homo sapiens
atcaatttcaacaca

SEQ ID NO: 422879 - DNA, 15 bp, Homo sapiens
catcaatttcaacac

SEQ ID NO: 422880 - DNA, 15 bp, Homo sapiens
ccatcaatttcaaca

SEQ ID NO: 422881 - DNA, 15 bp, Homo sapiens
accatcaatttcaac

SEQ ID NO: 422882 - DNA, 15 bp, Homo sapiens
aaccatcaatttcaa

SEQ ID NO: 422883 - DNA, 15 bp, Homo sapiens
aaaccatcaatttca

SEQ ID NO: 422884 - DNA, 15 bp, Homo sapiens
taaaccatcaatttc

SEQ ID NO: 422885 - DNA, 15 bp, Homo sapiens
gtaaaccatcaattt

SEQ ID NO: 422886 - DNA, 15 bp, Homo sapiens
agtaaaccatcaatt

SEQ ID NO: 422887 - DNA, 15 bp, Homo sapiens
aagtaaaccatcaat

SEQ ID NO: 422888 - DNA, 15 bp, Homo sapiens
taagtaaaccatcaa

SEQ ID NO: 422889 - DNA, 15 bp, Homo sapiens
ataagtaaaccatca

SEQ ID NO: 422890 - DNA, 15 bp, Homo sapiens
aataagtaaaccatc

SEQ ID NO: 422891 - DNA, 15 bp, Homo sapiens
aaataagtaaaccat

SEQ ID NO: 422892 - DNA, 15 bp, Homo sapiens
gaaataagtaaacca

SEQ ID NO: 422893 - DNA, 15 bp, Homo sapiens
ggaaataagtaaacc

SEQ ID NO: 422894 - DNA, 15 bp, Homo sapiens
aggaaataagtaaac

SEQ ID NO: 422895 - DNA, 15 bp, Homo sapiens
gaggaaataagtaaa

SEQ ID NO: 422896 - DNA, 15 bp, Homo sapiens
ggaggaaataagtaa

SEQ ID NO: 422897 - DNA, 15 bp, Homo sapiens
tggaggaaataagta

SEQ ID NO: 422898 - DNA, 15 bp, Homo sapiens
ctggaggaaataagt

SEQ ID NO: 422899 - DNA, 15 bp, Homo sapiens
actggaggaaataag

SEQ ID NO: 422900 - DNA, 15 bp, Homo sapiens
cactggaggaaataa

SEQ ID NO: 422901 - DNA, 15 bp, Homo sapiens
ccactggaggaaata

SEQ ID NO: 422902 - DNA, 15 bp, Homo sapiens
cccactggaggaaat

SEQ ID NO: 422903 - DNA, 15 bp, Homo sapiens
acccactggaggaaa

SEQ ID NO: 422904 - DNA, 15 bp, Homo sapiens
cacccactggaggaa

SEQ ID NO: 422905 - DNA, 15 bp, Homo sapiens
gcacccactggagga

SEQ ID NO: 422906 - DNA, 15 bp, Homo sapiens
agcacccactggagg

SEQ ID NO: 422907 - DNA, 15 bp, Homo sapiens
gagcacccactggag

SEQ ID NO: 422908 - DNA, 15 bp, Homo sapiens
tgagcacccactgga

SEQ ID NO: 422909 - DNA, 15 bp, Homo sapiens
ttgagcacccactgg

SEQ ID NO: 422910 - DNA, 15 bp, Homo sapiens
tttgagcacccactg

SEQ ID NO: 422911 - DNA, 15 bp, Homo sapiens
atttgagcacccact

SEQ ID NO: 422912 - DNA, 15 bp, Homo sapiens
aatttgagcacccac

SEQ ID NO: 422913 - DNA, 15 bp, Homo sapiens
taatttgagcaccca

SEQ ID NO: 422914 - DNA, 15 bp, Homo sapiens
ttaatttgagcaccc

SEQ ID NO: 422915 - DNA, 15 bp, Homo sapiens
attaatttgagcacc

SEQ ID NO: 422916 - DNA, 15 bp, Homo sapiens
cattaatttgagcac

SEQ ID NO: 422917 - DNA, 15 bp, Homo sapiens
gcattaatttgagca

SEQ ID NO: 422918 - DNA, 15 bp, Homo sapiens
agcattaatttgagc

SEQ ID NO: 422919 - DNA, 15 bp, Homo sapiens
gagcattaatttgag

SEQ ID NO: 422920 - DNA, 15 bp, Homo sapiens
tgagcattaatttga

SEQ ID NO: 422921 - DNA, 15 bp, Homo sapiens
ctgagcattaatttg

SEQ ID NO: 422922 - DNA, 15 bp, Homo sapiens
actgagcattaattt

SEQ ID NO: 422923 - DNA, 15 bp, Homo sapiens
cactgagcattaatt

SEQ ID NO: 422924 - DNA, 15 bp, Homo sapiens
ccactgagcattaat

SEQ ID NO: 422925 - DNA, 15 bp, Homo sapiens
tccactgagcattaa

SEQ ID NO: 422926 - DNA, 15 bp, Homo sapiens
atccactgagcatta

SEQ ID NO: 422927 - DNA, 15 bp, Homo sapiens
catccactgagcatt

SEQ ID NO: 422928 - DNA, 15 bp, Homo sapiens
ccatccactgagcat

SEQ ID NO: 422929 - DNA, 15 bp, Homo sapiens
tccatccactgagca

SEQ ID NO: 422930 - DNA, 15 bp, Homo sapiens
atccatccactgagc

SEQ ID NO: 422931 - DNA, 15 bp, Homo sapiens
catccatccactgag

SEQ ID NO: 422932 - DNA, 15 bp, Homo sapiens
ccatccatccactga

SEQ ID NO: 422933 - DNA, 15 bp, Homo sapiens
tccatccatccactg

SEQ ID NO: 422934 - DNA, 15 bp, Homo sapiens
atccatccatccact

SEQ ID NO: 422935 - DNA, 15 bp, Homo sapiens
catccatccatccac

SEQ ID NO: 422936 - DNA, 15 bp, Homo sapiens
acatccatccatcca

SEQ ID NO: 422937 - DNA, 15 bp, Homo sapiens
aacatccatccatcc

SEQ ID NO: 422938 - DNA, 15 bp, Homo sapiens
caacatccatccatc

SEQ ID NO: 422939 - DNA, 15 bp, Homo sapiens
tcaacatccatccat

SEQ ID NO: 422940 - DNA, 15 bp, Homo sapiens
ttcaacatccatcca

SEQ ID NO: 422941 - DNA, 15 bp, Homo sapiens
attcaacatccatcc

SEQ ID NO: 422942 - DNA, 15 bp, Homo sapiens
cattcaacatccatc

SEQ ID NO: 422943 - DNA, 15 bp, Homo sapiens
acattcaacatccat

SEQ ID NO: 422944 - DNA, 15 bp, Homo sapiens
tacattcaacatcca

SEQ ID NO: 422945 - DNA, 15 bp, Homo sapiens
gtacattcaacatcc

SEQ ID NO: 422946 - DNA, 15 bp, Homo sapiens
tgtacattcaacatc

SEQ ID NO: 422947 - DNA, 15 bp, Homo sapiens
ctgtacattcaacat

SEQ ID NO: 422948 - DNA, 15 bp, Homo sapiens
cctgtacattcaaca

SEQ ID NO: 422949 - DNA, 15 bp, Homo sapiens
tcctgtacattcaac

SEQ ID NO: 422950 - DNA, 15 bp, Homo sapiens
gtcctgtacattcaa

SEQ ID NO: 422951 - DNA, 15 bp, Homo sapiens
agtcctgtacattca

SEQ ID NO: 422952 - DNA, 15 bp, Homo sapiens
cagtcctgtacattc

SEQ ID NO: 422953 - DNA, 15 bp, Homo sapiens
tcagtcctgtacatt

SEQ ID NO: 422954 - DNA, 15 bp, Homo sapiens
ctcagtcctgtacat

SEQ ID NO: 422955 - DNA, 15 bp, Homo sapiens
cctcagtcctgtaca

SEQ ID NO: 422956 - DNA, 15 bp, Homo sapiens
ccctcagtcctgtac

SEQ ID NO: 422957 - DNA, 15 bp, Homo sapiens
accctcagtcctgta

SEQ ID NO: 422958 - DNA, 15 bp, Homo sapiens
taccctcagtcctgt

SEQ ID NO: 422959 - DNA, 15 bp, Homo sapiens
ctaccctcagtcctg

SEQ ID NO: 422960 - DNA, 15 bp, Homo sapiens
cctaccctcagtcct

SEQ ID NO: 422961 - DNA, 15 bp, Homo sapiens
tcctaccctcagtcc

SEQ ID NO: 422962 - DNA, 15 bp, Homo sapiens
atcctaccctcagtc

SEQ ID NO: 422963 - DNA, 15 bp, Homo sapiens
gatcctaccctcagt

SEQ ID NO: 422964 - DNA, 15 bp, Homo sapiens
ggatcctaccctcag

SEQ ID NO: 422965 - DNA, 15 bp, Homo sapiens
aggatcctaccctca

SEQ ID NO: 422966 - DNA, 15 bp, Homo sapiens
taggatcctaccctc

SEQ ID NO: 422967 - DNA, 15 bp, Homo sapiens
ttaggatcctaccct

SEQ ID NO: 422968 - DNA, 15 bp, Homo sapiens
attaggatcctaccc

SEQ ID NO: 422969 - DNA, 15 bp, Homo sapiens
cattaggatcctacc

SEQ ID NO: 422970 - DNA, 15 bp, Homo sapiens
tcattaggatcctac

SEQ ID NO: 422971 - DNA, 15 bp, Homo sapiens
ttcattaggatccta

SEQ ID NO: 422972 - DNA, 15 bp, Homo sapiens
attcattaggatcct

SEQ ID NO: 422973 - DNA, 15 bp, Homo sapiens
gattcattaggatcc

SEQ ID NO: 422974 - DNA, 15 bp, Homo sapiens
tgattcattaggatc

SEQ ID NO: 422975 - DNA, 15 bp, Homo sapiens
gtgattcattaggat

SEQ ID NO: 422976 - DNA, 15 bp, Homo sapiens
ggtgattcattagga

SEQ ID NO: 422977 - DNA, 15 bp, Homo sapiens
tggtgattcattagg

SEQ ID NO: 422978 - DNA, 15 bp, Homo sapiens
gtggtgattcattag

SEQ ID NO: 422979 - DNA, 15 bp, Homo sapiens
cgtggtgattcatta

SEQ ID NO: 422980 - DNA, 15 bp, Homo sapiens
acgtggtgattcatt

SEQ ID NO: 422981 - DNA, 15 bp, Homo sapiens
cacgtggtgattcat

SEQ ID NO: 422982 - DNA, 15 bp, Homo sapiens
ccacgtggtgattca

SEQ ID NO: 422983 - DNA, 15 bp, Homo sapiens
gccacgtggtgattc

SEQ ID NO: 422984 - DNA, 15 bp, Homo sapiens
ggccacgtggtgatt

SEQ ID NO: 422985 - DNA, 15 bp, Homo sapiens
aggccacgtggtgat

SEQ ID NO: 422986 - DNA, 15 bp, Homo sapiens
aaggccacgtggtga

SEQ ID NO: 422987 - DNA, 15 bp, Homo sapiens
gaaggccacgtggtg

SEQ ID NO: 422988 - DNA, 15 bp, Homo sapiens
tgaaggccacgtggt

SEQ ID NO: 422989 - DNA, 15 bp, Homo sapiens
ttgaaggccacgtgg

SEQ ID NO: 422990 - DNA, 15 bp, Homo sapiens
attgaaggccacgtg

SEQ ID NO: 422991 - DNA, 15 bp, Homo sapiens
cattgaaggccacgt

SEQ ID NO: 422992 - DNA, 15 bp, Homo sapiens
acattgaaggccacg

SEQ ID NO: 422993 - DNA, 15 bp, Homo sapiens
gacattgaaggccac

SEQ ID NO: 422994 - DNA, 15 bp, Homo sapiens
ggacattgaaggcca

SEQ ID NO: 422995 - DNA, 15 bp, Homo sapiens
aggacattgaaggcc

SEQ ID NO: 422996 - DNA, 15 bp, Homo sapiens
aaggacattgaaggc

SEQ ID NO: 422997 - DNA, 15 bp, Homo sapiens
aaaggacattgaagg

SEQ ID NO: 422998 - DNA, 15 bp, Homo sapiens
caaaggacattgaag

SEQ ID NO: 422999 - DNA, 15 bp, Homo sapiens
ccaaaggacattgaa

SEQ ID NO: 423000 - DNA, 15 bp, Homo sapiens
tccaaaggacattga

SEQ ID NO: 423001 - DNA, 15 bp, Homo sapiens
atccaaaggacattg

SEQ ID NO: 423002 - DNA, 15 bp, Homo sapiens
aatccaaaggacatt

SEQ ID NO: 423003 - DNA, 15 bp, Homo sapiens
aaatccaaaggacat

SEQ ID NO: 423004 - DNA, 15 bp, Homo sapiens
gaaatccaaaggaca

SEQ ID NO: 423005 - DNA, 15 bp, Homo sapiens
agaaatccaaaggac

SEQ ID NO: 423006 - DNA, 15 bp, Homo sapiens
cagaaatccaaagga

SEQ ID NO: 423007 - DNA, 15 bp, Homo sapiens
gcagaaatccaaagg

SEQ ID NO: 423008 - DNA, 15 bp, Homo sapiens
tgcagaaatccaaag

SEQ ID NO: 423009 - DNA, 15 bp, Homo sapiens
ttgcagaaatccaaa

SEQ ID NO: 423010 - DNA, 15 bp, Homo sapiens
attgcagaaatccaa

SEQ ID NO: 423011 - DNA, 15 bp, Homo sapiens
tattgcagaaatcca

SEQ ID NO: 423012 - DNA, 15 bp, Homo sapiens
ttattgcagaaatcc

SEQ ID NO: 423013 - DNA, 15 bp, Homo sapiens
attattgcagaaatc

SEQ ID NO: 423014 - DNA, 15 bp, Homo sapiens
aattattgcagaaat

SEQ ID NO: 423015 - DNA, 15 bp, Homo sapiens
caattattgcagaaa

SEQ ID NO: 423016 - DNA, 15 bp, Homo sapiens
gcaattattgcagaa

SEQ ID NO: 423017 - DNA, 15 bp, Homo sapiens
agcaattattgcaga

SEQ ID NO: 423018 - DNA, 15 bp, Homo sapiens
gagcaattattgcag

SEQ ID NO: 423019 - DNA, 15 bp, Homo sapiens
tgagcaattattgca

SEQ ID NO: 423020 - DNA, 15 bp, Homo sapiens
gtgagcaattattgc

SEQ ID NO: 423021 - DNA, 15 bp, Homo sapiens
agtgagcaattattg

SEQ ID NO: 423022 - DNA, 15 bp, Homo sapiens
aagtgagcaattatt

SEQ ID NO: 423023 - DNA, 15 bp, Homo sapiens
aaagtgagcaattat

SEQ ID NO: 423024 - DNA, 15 bp, Homo sapiens
aaaagtgagcaatta

SEQ ID NO: 423025 - DNA, 15 bp, Homo sapiens
aaaaagtgagcaatt

SEQ ID NO: 423026 - DNA, 15 bp, Homo sapiens
aaaaaagtgagcaat

SEQ ID NO: 423027 - DNA, 15 bp, Homo sapiens
caaaaaagtgagcaa

SEQ ID NO: 423028 - DNA, 15 bp, Homo sapiens
acaaaaaagtgagca

SEQ ID NO: 423029 - DNA, 15 bp, Homo sapiens
tacaaaaaagtgagc

SEQ ID NO: 423030 - DNA, 15 bp, Homo sapiens
gtacaaaaaagtgag

SEQ ID NO: 423031 - DNA, 15 bp, Homo sapiens
tgtacaaaaaagtga

SEQ ID NO: 423032 - DNA, 15 bp, Homo sapiens
atgtacaaaaaagtg

SEQ ID NO: 423033 - DNA, 15 bp, Homo sapiens
tatgtacaaaaaagt

SEQ ID NO: 423034 - DNA, 15 bp, Homo sapiens
atatgtacaaaaaag

SEQ ID NO: 423035 - DNA, 15 bp, Homo sapiens
catatgtacaaaaaa

SEQ ID NO: 423036 - DNA, 15 bp, Homo sapiens
acatatgtacaaaaa

SEQ ID NO: 423037 - DNA, 15 bp, Homo sapiens
aacatatgtacaaaa

SEQ ID NO: 423038 - DNA, 15 bp, Homo sapiens
caacatatgtacaaa

SEQ ID NO: 423039 - DNA, 15 bp, Homo sapiens
acaacatatgtacaa

SEQ ID NO: 423040 - DNA, 15 bp, Homo sapiens
aacaacatatgtaca

SEQ ID NO: 423041 - DNA, 15 bp, Homo sapiens
caacaacatatgtac

SEQ ID NO: 423042 - DNA, 15 bp, Homo sapiens
ccaacaacatatgta

SEQ ID NO: 423043 - DNA, 15 bp, Homo sapiens
tccaacaacatatgt

SEQ ID NO: 423044 - DNA, 15 bp, Homo sapiens
atccaacaacatatg

SEQ ID NO: 423045 - DNA, 15 bp, Homo sapiens
catccaacaacatat

SEQ ID NO: 423046 - DNA, 15 bp, Homo sapiens
acatccaacaacata

SEQ ID NO: 423047 - DNA, 15 bp, Homo sapiens
cacatccaacaacat

SEQ ID NO: 423048 - DNA, 15 bp, Homo sapiens
ccacatccaacaaca

SEQ ID NO: 423049 - DNA, 15 bp, Homo sapiens
accacatccaacaac

SEQ ID NO: 423050 - DNA, 15 bp, Homo sapiens
aaccacatccaacaa

SEQ ID NO: 423051 - DNA, 15 bp, Homo sapiens
aaaccacatccaaca

SEQ ID NO: 423052 - DNA, 15 bp, Homo sapiens
aaaaccacatccaac

SEQ ID NO: 423053 - DNA, 15 bp, Homo sapiens
aaaaaccacatccaa

SEQ ID NO: 423054 - DNA, 15 bp, Homo sapiens
caaaaaccacatcca

SEQ ID NO: 423055 - DNA, 15 bp, Homo sapiens
gcaaaaaccacatcc

SEQ ID NO: 423056 - DNA, 15 bp, Homo sapiens
agcaaaaaccacatc

SEQ ID NO: 423057 - DNA, 15 bp, Homo sapiens
cagcaaaaaccacat

SEQ ID NO: 423058 - DNA, 15 bp, Homo sapiens
ccagcaaaaaccaca

SEQ ID NO: 423059 - DNA, 15 bp, Homo sapiens
accagcaaaaaccac

SEQ ID NO: 423060 - DNA, 15 bp, Homo sapiens
aaccagcaaaaacca

SEQ ID NO: 423061 - DNA, 15 bp, Homo sapiens
caaccagcaaaaacc

SEQ ID NO: 423062 - DNA, 15 bp, Homo sapiens
gcaaccagcaaaaac

SEQ ID NO: 423063 - DNA, 15 bp, Homo sapiens
tgcaaccagcaaaaa

SEQ ID NO: 423064 - DNA, 15 bp, Homo sapiens
gtgcaaccagcaaaa

SEQ ID NO: 423065 - DNA, 15 bp, Homo sapiens
tgtgcaaccagcaaa

SEQ ID NO: 423066 - DNA, 15 bp, Homo sapiens
gtgtgcaaccagcaa

SEQ ID NO: 423067 - DNA, 15 bp, Homo sapiens
cgtgtgcaaccagca

SEQ ID NO: 423068 - DNA, 15 bp, Homo sapiens
gcgtgtgcaaccagc

SEQ ID NO: 423069 - DNA, 15 bp, Homo sapiens
tgcgtgtgcaaccag

SEQ ID NO: 423070 - DNA, 15 bp, Homo sapiens
gtgcgtgtgcaacca

SEQ ID NO: 423071 - DNA, 15 bp, Homo sapiens
tgtgcgtgtgcaacc

SEQ ID NO: 423072 - DNA, 15 bp, Homo sapiens
atgtgcgtgtgcaac

SEQ ID NO: 423073 - DNA, 15 bp, Homo sapiens
tatgtgcgtgtgcaa

SEQ ID NO: 423074 - DNA, 15 bp, Homo sapiens
ctatgtgcgtgtgca

SEQ ID NO: 423075 - DNA, 15 bp, Homo sapiens
tctatgtgcgtgtgc

SEQ ID NO: 423076 - DNA, 15 bp, Homo sapiens
atctatgtgcgtgtg

SEQ ID NO: 423077 - DNA, 15 bp, Homo sapiens
catctatgtgcgtgt

SEQ ID NO: 423078 - DNA, 15 bp, Homo sapiens
acatctatgtgcgtg

SEQ ID NO: 423079 - DNA, 15 bp, Homo sapiens
aacatctatgtgcgt

SEQ ID NO: 423080 - DNA, 15 bp, Homo sapiens
aaacatctatgtgcg

SEQ ID NO: 423081 - DNA, 15 bp, Homo sapiens
aaaacatctatgtgc

SEQ ID NO: 423082 - DNA, 15 bp, Homo sapiens
caaaacatctatgtg

SEQ ID NO: 423083 - DNA, 15 bp, Homo sapiens
tcaaaacatctatgt

SEQ ID NO: 423084 - DNA, 15 bp, Homo sapiens
ttcaaaacatctatg

SEQ ID NO: 423085 - DNA, 15 bp, Homo sapiens
attcaaaacatctat

SEQ ID NO: 423086 - DNA, 15 bp, Homo sapiens
tattcaaaacatcta

SEQ ID NO: 423087 - DNA, 15 bp, Homo sapiens
gtattcaaaacatct

SEQ ID NO: 423088 - DNA, 15 bp, Homo sapiens
agtattcaaaacatc

SEQ ID NO: 423089 - DNA, 15 bp, Homo sapiens
tagtattcaaaacat

SEQ ID NO: 423090 - DNA, 15 bp, Homo sapiens
atagtattcaaaaca

SEQ ID NO: 423091 - DNA, 15 bp, Homo sapiens
aatagtattcaaaac

SEQ ID NO: 423092 - DNA, 15 bp, Homo sapiens
taatagtattcaaaa

SEQ ID NO: 423093 - DNA, 15 bp, Homo sapiens
ttaatagtattcaaa

SEQ ID NO: 423094 - DNA, 15 bp, Homo sapiens
gttaatagtattcaa

SEQ ID NO: 423095 - DNA, 15 bp, Homo sapiens
agttaatagtattca

SEQ ID NO: 423096 - DNA, 15 bp, Homo sapiens
cagttaatagtattc

SEQ ID NO: 423097 - DNA, 15 bp, Homo sapiens
tcagttaatagtatt

SEQ ID NO: 423098 - DNA, 15 bp, Homo sapiens
atcagttaatagtat

SEQ ID NO: 423099 - DNA, 15 bp, Homo sapiens
aatcagttaatagta

SEQ ID NO: 423100 - DNA, 15 bp, Homo sapiens
aaatcagttaatagt

SEQ ID NO: 423101 - DNA, 15 bp, Homo sapiens
aaaatcagttaatag

SEQ ID NO: 423102 - DNA, 15 bp, Homo sapiens
aaaaatcagttaata

SEQ ID NO: 423103 - DNA, 15 bp, Homo sapiens
aaaaaatcagttaat

SEQ ID NO: 423104 - DNA, 15 bp, Homo sapiens
aaaaaaatcagttaa

SEQ ID NO: 423105 - DNA, 15 bp, Homo sapiens
taaaaaaatcagtta

SEQ ID NO: 423106 - DNA, 15 bp, Homo sapiens
ataaaaaaatcagtt

SEQ ID NO: 423107 - DNA, 15 bp, Homo sapiens
tataaaaaaatcagt

SEQ ID NO: 423108 - DNA, 15 bp, Homo sapiens
ttataaaaaaatcag

SEQ ID NO: 423109 - DNA, 15 bp, Homo sapiens
attataaaaaaatca

SEQ ID NO: 423110 - DNA, 15 bp, Homo sapiens
tattataaaaaaatc

SEQ ID NO: 423111 - DNA, 15 bp, Homo sapiens
ttattataaaaaaat

SEQ ID NO: 423112 - DNA, 15 bp, Homo sapiens
tttattataaaaaaa

SEQ ID NO: 423113 - DNA, 15 bp, Homo sapiens
ttttattataaaaaa

SEQ ID NO: 423114 - DNA, 15 bp, Homo sapiens
attttattataaaaa

SEQ ID NO: 423115 - DNA, 15 bp, Homo sapiens
gattttattataaaa

SEQ ID NO: 423116 - DNA, 15 bp, Homo sapiens
agattttattataaa

SEQ ID NO: 423117 - DNA, 15 bp, Homo sapiens
aagattttattataa

SEQ ID NO: 423118 - DNA, 15 bp, Homo sapiens
taagattttattata

SEQ ID NO: 423119 - DNA, 15 bp, Homo sapiens
ataagattttattat

SEQ ID NO: 423120 - DNA, 15 bp, Homo sapiens
aataagattttatta

SEQ ID NO: 423121 - DNA, 15 bp, Homo sapiens
gaataagattttatt

SEQ ID NO: 423122 - DNA, 15 bp, Homo sapiens
tgaataagattttat

SEQ ID NO: 423123 - DNA, 15 bp, Homo sapiens
atgaataagatttta

SEQ ID NO: 423124 - DNA, 15 bp, Homo sapiens
gatgaataagatttt

SEQ ID NO: 423125 - DNA, 15 bp, Homo sapiens
ggatgaataagattt

SEQ ID NO: 423126 - DNA, 15 bp, Homo sapiens
tggatgaataagatt

SEQ ID NO: 423127 - DNA, 15 bp, Homo sapiens
ttggatgaataagat

SEQ ID NO: 423128 - DNA, 15 bp, Homo sapiens
tttggatgaataaga

SEQ ID NO: 423129 - DNA, 15 bp, Homo sapiens
ttttggatgaataag

SEQ ID NO: 423130 - DNA, 15 bp, Homo sapiens
attttggatgaataa

SEQ ID NO: 423131 - DNA, 15 bp, Homo sapiens
gattttggatgaata

SEQ ID NO: 423132 - DNA, 15 bp, Homo sapiens
agattttggatgaat

SEQ ID NO: 423133 - DNA, 15 bp, Homo sapiens
tagattttggatgaa

SEQ ID NO: 423134 - DNA, 15 bp, Homo sapiens
ctagattttggatga

SEQ ID NO: 423135 - DNA, 15 bp, Homo sapiens
actagattttggatg

SEQ ID NO: 423136 - DNA, 15 bp, Homo sapiens
tactagattttggat

SEQ ID NO: 423137 - DNA, 15 bp, Homo sapiens
atactagattttgga

SEQ ID NO: 423138 - DNA, 15 bp, Homo sapiens
aatactagattttgg

SEQ ID NO: 423139 - DNA, 15 bp, Homo sapiens
gaatactagattttg

SEQ ID NO: 423140 - DNA, 15 bp, Homo sapiens
agaatactagatttt

SEQ ID NO: 423141 - DNA, 15 bp, Homo sapiens
cagaatactagattt

SEQ ID NO: 423142 - DNA, 15 bp, Homo sapiens
tcagaatactagatt

SEQ ID NO: 423143 - DNA, 15 bp, Homo sapiens
ttcagaatactagat

SEQ ID NO: 423144 - DNA, 15 bp, Homo sapiens
attcagaatactaga

SEQ ID NO: 423145 - DNA, 15 bp, Homo sapiens
gattcagaatactag

SEQ ID NO: 423146 - DNA, 15 bp, Homo sapiens
tgattcagaatacta

SEQ ID NO: 423147 - DNA, 15 bp, Homo sapiens
ctgattcagaatact

SEQ ID NO: 423148 - DNA, 15 bp, Homo sapiens
actgattcagaatac

SEQ ID NO: 423149 - DNA, 15 bp, Homo sapiens
tactgattcagaata

SEQ ID NO: 423150 - DNA, 15 bp, Homo sapiens
ctactgattcagaat

SEQ ID NO: 423151 - DNA, 15 bp, Homo sapiens
tctactgattcagaa

SEQ ID NO: 423152 - DNA, 15 bp, Homo sapiens
ttctactgattcaga

SEQ ID NO: 423153 - DNA, 15 bp, Homo sapiens
tttctactgattcag

SEQ ID NO: 423154 - DNA, 15 bp, Homo sapiens
ctttctactgattca

SEQ ID NO: 423155 - DNA, 15 bp, Homo sapiens
actttctactgattc

SEQ ID NO: 423156 - DNA, 15 bp, Homo sapiens
gactttctactgatt

SEQ ID NO: 423157 - DNA, 15 bp, Homo sapiens
agactttctactgat

SEQ ID NO: 423158 - DNA, 15 bp, Homo sapiens
aagactttctactga

SEQ ID NO: 423159 - DNA, 15 bp, Homo sapiens
taagactttctactg

SEQ ID NO: 423160 - DNA, 15 bp, Homo sapiens
ttaagactttctact

SEQ ID NO: 423161 - DNA, 15 bp, Homo sapiens
attaagactttctac

SEQ ID NO: 423162 - DNA, 15 bp, Homo sapiens
gattaagactttcta

SEQ ID NO: 423163 - DNA, 15 bp, Homo sapiens
tgattaagactttct

SEQ ID NO: 423164 - DNA, 15 bp, Homo sapiens
atgattaagactttc

SEQ ID NO: 423165 - DNA, 15 bp, Homo sapiens
tatgattaagacttt

SEQ ID NO: 423166 - DNA, 15 bp, Homo sapiens
ctatgattaagactt

SEQ ID NO: 423167 - DNA, 15 bp, Homo sapiens
tctatgattaagact

SEQ ID NO: 423168 - DNA, 15 bp, Homo sapiens
gtctatgattaagac

SEQ ID NO: 423169 - DNA, 15 bp, Homo sapiens
agtctatgattaaga

SEQ ID NO: 423170 - DNA, 15 bp, Homo sapiens
cagtctatgattaag

SEQ ID NO: 423171 - DNA, 15 bp, Homo sapiens
acagtctatgattaa

SEQ ID NO: 423172 - DNA, 15 bp, Homo sapiens
aacagtctatgatta

SEQ ID NO: 423173 - DNA, 15 bp, Homo sapiens
aaacagtctatgatt

SEQ ID NO: 423174 - DNA, 15 bp, Homo sapiens
aaaacagtctatgat

SEQ ID NO: 423175 - DNA, 15 bp, Homo sapiens
taaaacagtctatga

SEQ ID NO: 423176 - DNA, 15 bp, Homo sapiens
ttaaaacagtctatg

SEQ ID NO: 423177 - DNA, 15 bp, Homo sapiens
tttaaaacagtctat

SEQ ID NO: 423178 - DNA, 15 bp, Homo sapiens
ttttaaaacagtcta

SEQ ID NO: 423179 - DNA, 15 bp, Homo sapiens
cttttaaaacagtct

SEQ ID NO: 423180 - DNA, 15 bp, Homo sapiens
tcttttaaaacagtc

SEQ ID NO: 423181 - DNA, 15 bp, Homo sapiens
ttcttttaaaacagt

SEQ ID NO: 423182 - DNA, 15 bp, Homo sapiens
attcttttaaaacag

SEQ ID NO: 423183 - DNA, 15 bp, Homo sapiens
aattcttttaaaaca

SEQ ID NO: 423184 - DNA, 15 bp, Homo sapiens
caattcttttaaaac

SEQ ID NO: 423185 - DNA, 15 bp, Homo sapiens
acaattcttttaaaa

SEQ ID NO: 423186 - DNA, 15 bp, Homo sapiens
tacaattcttttaaa

SEQ ID NO: 423187 - DNA, 15 bp, Homo sapiens
ctacaattcttttaa

SEQ ID NO: 423188 - DNA, 15 bp, Homo sapiens
actacaattctttta

SEQ ID NO: 423189 - DNA, 15 bp, Homo sapiens
aactacaattctttt

SEQ ID NO: 423190 - DNA, 15 bp, Homo sapiens
aaactacaattcttt

SEQ ID NO: 423191 - DNA, 15 bp, Homo sapiens
taaactacaattctt

SEQ ID NO: 423192 - DNA, 15 bp, Homo sapiens
ataaactacaattct

SEQ ID NO: 423193 - DNA, 15 bp, Homo sapiens
aataaactacaattc

SEQ ID NO: 423194 - DNA, 15 bp, Homo sapiens
taataaactacaatt

SEQ ID NO: 423195 - DNA, 15 bp, Homo sapiens
ctaataaactacaat

SEQ ID NO: 423196 - DNA, 15 bp, Homo sapiens
actaataaactacaa

SEQ ID NO: 423197 - DNA, 15 bp, Homo sapiens
gactaataaactaca

SEQ ID NO: 423198 - DNA, 15 bp, Homo sapiens
tgactaataaactac

SEQ ID NO: 423199 - DNA, 15 bp, Homo sapiens
atgactaataaacta

SEQ ID NO: 423200 - DNA, 15 bp, Homo sapiens
tatgactaataaact

SEQ ID NO: 423201 - DNA, 15 bp, Homo sapiens
atatgactaataaac

SEQ ID NO: 423202 - DNA, 15 bp, Homo sapiens
catatgactaataaa

SEQ ID NO: 423203 - DNA, 15 bp, Homo sapiens
gcatatgactaataa

SEQ ID NO: 423204 - DNA, 15 bp, Homo sapiens
agcatatgactaata

SEQ ID NO: 423205 - DNA, 15 bp, Homo sapiens
aagcatatgactaat

SEQ ID NO: 423206 - DNA, 15 bp, Homo sapiens
taagcatatgactaa

SEQ ID NO: 423207 - DNA, 15 bp, Homo sapiens
gtaagcatatgacta

SEQ ID NO: 423208 - DNA, 15 bp, Homo sapiens
ggtaagcatatgact

SEQ ID NO: 423209 - DNA, 15 bp, Homo sapiens
tggtaagcatatgac

SEQ ID NO: 423210 - DNA, 15 bp, Homo sapiens
atggtaagcatatga

SEQ ID NO: 423211 - DNA, 15 bp, Homo sapiens
aatggtaagcatatg

SEQ ID NO: 423212 - DNA, 15 bp, Homo sapiens
taatggtaagcatat

SEQ ID NO: 423213 - DNA, 15 bp, Homo sapiens
ataatggtaagcata

SEQ ID NO: 423214 - DNA, 15 bp, Homo sapiens
tataatggtaagcat

SEQ ID NO: 423215 - DNA, 15 bp, Homo sapiens
ttataatggtaagca

SEQ ID NO: 423216 - DNA, 15 bp, Homo sapiens
gttataatggtaagc

SEQ ID NO: 423217 - DNA, 15 bp, Homo sapiens
tgttataatggtaag

SEQ ID NO: 423218 - DNA, 15 bp, Homo sapiens
gtgttataatggtaa

SEQ ID NO: 423219 - DNA, 15 bp, Homo sapiens
tgtgttataatggta

SEQ ID NO: 423220 - DNA, 15 bp, Homo sapiens
ctgtgttataatggt

SEQ ID NO: 423221 - DNA, 15 bp, Homo sapiens
actgtgttataatgg

SEQ ID NO: 423222 - DNA, 15 bp, Homo sapiens
gactgtgttataatg

SEQ ID NO: 423223 - DNA, 15 bp, Homo sapiens
agactgtgttataat

SEQ ID NO: 423224 - DNA, 15 bp, Homo sapiens
aagactgtgttataa

SEQ ID NO: 423225 - DNA, 15 bp, Homo sapiens
taagactgtgttata

SEQ ID NO: 423226 - DNA, 15 bp, Homo sapiens
ttaagactgtgttat

SEQ ID NO: 423227 - DNA, 15 bp, Homo sapiens
tttaagactgtgtta

SEQ ID NO: 423228 - DNA, 15 bp, Homo sapiens
ctttaagactgtgtt

SEQ ID NO: 423229 - DNA, 15 bp, Homo sapiens
actttaagactgtgt

SEQ ID NO: 423230 - DNA, 15 bp, Homo sapiens
aactttaagactgtg

SEQ ID NO: 423231 - DNA, 15 bp, Homo sapiens
taactttaagactgt

SEQ ID NO: 423232 - DNA, 15 bp, Homo sapiens
ttaactttaagactg

SEQ ID NO: 423233 - DNA, 15 bp, Homo sapiens
attaactttaagact

SEQ ID NO: 423234 - DNA, 15 bp, Homo sapiens
cattaactttaagac

SEQ ID NO: 423235 - DNA, 15 bp, Homo sapiens
gcattaactttaaga

SEQ ID NO: 423236 - DNA, 15 bp, Homo sapiens
agcattaactttaag

SEQ ID NO: 423237 - DNA, 15 bp, Homo sapiens
aagcattaactttaa

SEQ ID NO: 423238 - DNA, 15 bp, Homo sapiens
caagcattaacttta

SEQ ID NO: 423239 - DNA, 15 bp, Homo sapiens
ccaagcattaacttt

SEQ ID NO: 423240 - DNA, 15 bp, Homo sapiens
gccaagcattaactt

SEQ ID NO: 423241 - DNA, 15 bp, Homo sapiens
agccaagcattaact

SEQ ID NO: 423242 - DNA, 15 bp, Homo sapiens
aagccaagcattaac

SEQ ID NO: 423243 - DNA, 15 bp, Homo sapiens
aaagccaagcattaa

SEQ ID NO: 423244 - DNA, 15 bp, Homo sapiens
aaaagccaagcatta

SEQ ID NO: 423245 - DNA, 15 bp, Homo sapiens
gaaaagccaagcatt

SEQ ID NO: 423246 - DNA, 15 bp, Homo sapiens
agaaaagccaagcat

SEQ ID NO: 423247 - DNA, 15 bp, Homo sapiens
tagaaaagccaagca

SEQ ID NO: 423248 - DNA, 15 bp, Homo sapiens
ttagaaaagccaagc

SEQ ID NO: 423249 - DNA, 15 bp, Homo sapiens
cttagaaaagccaag

SEQ ID NO: 423250 - DNA, 15 bp, Homo sapiens
acttagaaaagccaa

SEQ ID NO: 423251 - DNA, 15 bp, Homo sapiens
aacttagaaaagcca

SEQ ID NO: 423252 - DNA, 15 bp, Homo sapiens
taacttagaaaagcc

SEQ ID NO: 423253 - DNA, 15 bp, Homo sapiens
ttaacttagaaaagc

SEQ ID NO: 423254 - DNA, 15 bp, Homo sapiens
tttaacttagaaaag

SEQ ID NO: 423255 - DNA, 15 bp, Homo sapiens
ctttaacttagaaaa

SEQ ID NO: 423256 - DNA, 15 bp, Homo sapiens
actttaacttagaaa

SEQ ID NO: 423257 - DNA, 15 bp, Homo sapiens
gactttaacttagaa

SEQ ID NO: 423258 - DNA, 15 bp, Homo sapiens
ggactttaacttaga

SEQ ID NO: 423259 - DNA, 15 bp, Homo sapiens
aggactttaacttag

SEQ ID NO: 423260 - DNA, 15 bp, Homo sapiens
aaggactttaactta

SEQ ID NO: 423261 - DNA, 15 bp, Homo sapiens
aaaggactttaactt

SEQ ID NO: 423262 - DNA, 15 bp, Homo sapiens
aaaaggactttaact

SEQ ID NO: 423263 - DNA, 15 bp, Homo sapiens
caaaaggactttaac

SEQ ID NO: 423264 - DNA, 15 bp, Homo sapiens
acaaaaggactttaa

SEQ ID NO: 423265 - DNA, 15 bp, Homo sapiens
aacaaaaggacttta

SEQ ID NO: 423266 - DNA, 15 bp, Homo sapiens
gaacaaaaggacttt

SEQ ID NO: 423267 - DNA, 15 bp, Homo sapiens
agaacaaaaggactt

SEQ ID NO: 423268 - DNA, 15 bp, Homo sapiens
tagaacaaaaggact

SEQ ID NO: 423269 - DNA, 15 bp, Homo sapiens
ttagaacaaaaggac

SEQ ID NO: 423270 - DNA, 15 bp, Homo sapiens
tttagaacaaaagga

SEQ ID NO: 423271 - DNA, 15 bp, Homo sapiens
atttagaacaaaagg

SEQ ID NO: 423272 - DNA, 15 bp, Homo sapiens
aatttagaacaaaag

SEQ ID NO: 423273 - DNA, 15 bp, Homo sapiens
aaatttagaacaaaa

SEQ ID NO: 423274 - DNA, 15 bp, Homo sapiens
gaaatttagaacaaa

SEQ ID NO: 423275 - DNA, 15 bp, Homo sapiens
agaaatttagaacaa

SEQ ID NO: 423276 - DNA, 15 bp, Homo sapiens
cagaaatttagaaca

SEQ ID NO: 423277 - DNA, 15 bp, Homo sapiens
acagaaatttagaac

SEQ ID NO: 423278 - DNA, 15 bp, Homo sapiens
cacagaaatttagaa

SEQ ID NO: 423279 - DNA, 15 bp, Homo sapiens
ccacagaaatttaga

SEQ ID NO: 423280 - DNA, 15 bp, Homo sapiens
accacagaaatttag

SEQ ID NO: 423281 - DNA, 15 bp, Homo sapiens
gaccacagaaattta

SEQ ID NO: 423282 - DNA, 15 bp, Homo sapiens
ggaccacagaaattt

SEQ ID NO: 423283 - DNA, 15 bp, Homo sapiens
aggaccacagaaatt

SEQ ID NO: 423284 - DNA, 15 bp, Homo sapiens
caggaccacagaaat

SEQ ID NO: 423285 - DNA, 15 bp, Homo sapiens
ccaggaccacagaaa

SEQ ID NO: 423286 - DNA, 15 bp, Homo sapiens
accaggaccacagaa

SEQ ID NO: 423287 - DNA, 15 bp, Homo sapiens
taccaggaccacaga

SEQ ID NO: 423288 - DNA, 15 bp, Homo sapiens
ataccaggaccacag

SEQ ID NO: 423289 - DNA, 15 bp, Homo sapiens
tataccaggaccaca

SEQ ID NO: 423290 - DNA, 15 bp, Homo sapiens
ttataccaggaccac

SEQ ID NO: 423291 - DNA, 15 bp, Homo sapiens
attataccaggacca

SEQ ID NO: 423292 - DNA, 15 bp, Homo sapiens
tattataccaggacc

SEQ ID NO: 423293 - DNA, 15 bp, Homo sapiens
ttattataccaggac

SEQ ID NO: 423294 - DNA, 15 bp, Homo sapiens
tttattataccagga

SEQ ID NO: 423295 - DNA, 15 bp, Homo sapiens
ctttattataccagg

SEQ ID NO: 423296 - DNA, 15 bp, Homo sapiens
tctttattataccag

SEQ ID NO: 423297 - DNA, 15 bp, Homo sapiens
ctctttattatacca

SEQ ID NO: 423298 - DNA, 15 bp, Homo sapiens
cctctttattatacc

SEQ ID NO: 423299 - DNA, 15 bp, Homo sapiens
acctctttattatac

SEQ ID NO: 423300 - DNA, 15 bp, Homo sapiens
tacctctttattata

SEQ ID NO: 423301 - DNA, 15 bp, Homo sapiens
atacctctttattat

SEQ ID NO: 423302 - DNA, 15 bp, Homo sapiens
catacctctttatta

SEQ ID NO: 423303 - DNA, 15 bp, Homo sapiens
tcatacctctttatt

SEQ ID NO: 423304 - DNA, 15 bp, Homo sapiens
gtcatacctctttat

SEQ ID NO: 423305 - DNA, 15 bp, Homo sapiens
ggtcatacctcttta

SEQ ID NO: 423306 - DNA, 15 bp, Homo sapiens
aggtcatacctcttt

SEQ ID NO: 423307 - DNA, 15 bp, Homo sapiens
taggtcatacctctt

SEQ ID NO: 423308 - DNA, 15 bp, Homo sapiens
ataggtcatacctct

SEQ ID NO: 423309 - DNA, 15 bp, Homo sapiens
aataggtcatacctc

SEQ ID NO: 423310 - DNA, 15 bp, Homo sapiens
taataggtcatacct

SEQ ID NO: 423311 - DNA, 15 bp, Homo sapiens
ctaataggtcatacc

SEQ ID NO: 423312 - DNA, 15 bp, Homo sapiens
cctaataggtcatac

SEQ ID NO: 423313 - DNA, 15 bp, Homo sapiens
tcctaataggtcata

SEQ ID NO: 423314 - DNA, 15 bp, Homo sapiens
atcctaataggtcat

SEQ ID NO: 423315 - DNA, 15 bp, Homo sapiens
catcctaataggtca

SEQ ID NO: 423316 - DNA, 15 bp, Homo sapiens
acatcctaataggtc

SEQ ID NO: 423317 - DNA, 15 bp, Homo sapiens
cacatcctaataggt

SEQ ID NO: 423318 - DNA, 15 bp, Homo sapiens
gcacatcctaatagg

SEQ ID NO: 423319 - DNA, 15 bp, Homo sapiens
agcacatcctaatag

SEQ ID NO: 423320 - DNA, 15 bp, Homo sapiens
tagcacatcctaata

SEQ ID NO: 423321 - DNA, 15 bp, Homo sapiens
ttagcacatcctaat

SEQ ID NO: 423322 - DNA, 15 bp, Homo sapiens
gttagcacatcctaa

SEQ ID NO: 423323 - DNA, 15 bp, Homo sapiens
tgttagcacatccta

SEQ ID NO: 423324 - DNA, 15 bp, Homo sapiens
atgttagcacatcct

SEQ ID NO: 423325 - DNA, 15 bp, Homo sapiens
catgttagcacatcc

SEQ ID NO: 423326 - DNA, 15 bp, Homo sapiens
tcatgttagcacatc

SEQ ID NO: 423327 - DNA, 15 bp, Homo sapiens
atcatgttagcacat

SEQ ID NO: 423328 - DNA, 15 bp, Homo sapiens
catcatgttagcaca

SEQ ID NO: 423329 - DNA, 15 bp, Homo sapiens
tcatcatgttagcac

SEQ ID NO: 423330 - DNA, 15 bp, Homo sapiens
atcatcatgttagca

SEQ ID NO: 423331 - DNA, 15 bp, Homo sapiens
tatcatcatgttagc

SEQ ID NO: 423332 - DNA, 15 bp, Homo sapiens
atatcatcatgttag

SEQ ID NO: 423333 - DNA, 15 bp, Homo sapiens
aatatcatcatgtta

SEQ ID NO: 423334 - DNA, 15 bp, Homo sapiens
taatatcatcatgtt

SEQ ID NO: 423335 - DNA, 15 bp, Homo sapiens
ctaatatcatcatgt

SEQ ID NO: 423336 - DNA, 15 bp, Homo sapiens
actaatatcatcatg

SEQ ID NO: 423337 - DNA, 15 bp, Homo sapiens
tactaatatcatcat

SEQ ID NO: 423338 - DNA, 15 bp, Homo sapiens
atactaatatcatca

SEQ ID NO: 423339 - DNA, 15 bp, Homo sapiens
catactaatatcatc

SEQ ID NO: 423340 - DNA, 15 bp, Homo sapiens
tcatactaatatcat

SEQ ID NO: 423341 - DNA, 15 bp, Homo sapiens
atcatactaatatca

SEQ ID NO: 423342 - DNA, 15 bp, Homo sapiens
catcatactaatatc

SEQ ID NO: 423343 - DNA, 15 bp, Homo sapiens
tcatcatactaatat

SEQ ID NO: 423344 - DNA, 15 bp, Homo sapiens
atcatcatactaata

SEQ ID NO: 423345 - DNA, 15 bp, Homo sapiens
aatcatcatactaat

SEQ ID NO: 423346 - DNA, 15 bp, Homo sapiens
taatcatcatactaa

SEQ ID NO: 423347 - DNA, 15 bp, Homo sapiens
ctaatcatcatacta

SEQ ID NO: 423348 - DNA, 15 bp, Homo sapiens
actaatcatcatact

SEQ ID NO: 423349 - DNA, 15 bp, Homo sapiens
tactaatcatcatac

SEQ ID NO: 423350 - DNA, 15 bp, Homo sapiens
atactaatcatcata

SEQ ID NO: 423351 - DNA, 15 bp, Homo sapiens
tatactaatcatcat

SEQ ID NO: 423352 - DNA, 15 bp, Homo sapiens
atatactaatcatca

SEQ ID NO: 423353 - DNA, 15 bp, Homo sapiens
catatactaatcatc

SEQ ID NO: 423354 - DNA, 15 bp, Homo sapiens
acatatactaatcat

SEQ ID NO: 423355 - DNA, 15 bp, Homo sapiens
tacatatactaatca

SEQ ID NO: 423356 - DNA, 15 bp, Homo sapiens
atacatatactaatc

SEQ ID NO: 423357 - DNA, 15 bp, Homo sapiens
gatacatatactaat

SEQ ID NO: 423358 - DNA, 15 bp, Homo sapiens
agatacatatactaa

SEQ ID NO: 423359 - DNA, 15 bp, Homo sapiens
cagatacatatacta

SEQ ID NO: 423360 - DNA, 15 bp, Homo sapiens
acagatacatatact

SEQ ID NO: 423361 - DNA, 15 bp, Homo sapiens
cacagatacatatac

SEQ ID NO: 423362 - DNA, 15 bp, Homo sapiens
gcacagatacatata

SEQ ID NO: 423363 - DNA, 15 bp, Homo sapiens
tgcacagatacatat

SEQ ID NO: 423364 - DNA, 15 bp, Homo sapiens
ttgcacagatacata

SEQ ID NO: 423365 - DNA, 15 bp, Homo sapiens
cttgcacagatacat

SEQ ID NO: 423366 - DNA, 15 bp, Homo sapiens
acttgcacagataca

SEQ ID NO: 423367 - DNA, 15 bp, Homo sapiens
tacttgcacagatac

SEQ ID NO: 423368 - DNA, 15 bp, Homo sapiens
ttacttgcacagata

SEQ ID NO: 423369 - DNA, 15 bp, Homo sapiens
tttacttgcacagat

SEQ ID NO: 423370 - DNA, 15 bp, Homo sapiens
atttacttgcacaga

SEQ ID NO: 423371 - DNA, 15 bp, Homo sapiens
catttacttgcacag

SEQ ID NO: 423372 - DNA, 15 bp, Homo sapiens
tcatttacttgcaca

SEQ ID NO: 423373 - DNA, 15 bp, Homo sapiens
atcatttacttgcac

SEQ ID NO: 423374 - DNA, 15 bp, Homo sapiens
tatcatttacttgca

SEQ ID NO: 423375 - DNA, 15 bp, Homo sapiens
atatcatttacttgc

SEQ ID NO: 423376 - DNA, 15 bp, Homo sapiens
aatatcatttacttg

SEQ ID NO: 423377 - DNA, 15 bp, Homo sapiens
taatatcatttactt

SEQ ID NO: 423378 - DNA, 15 bp, Homo sapiens
ttaatatcatttact

SEQ ID NO: 423379 - DNA, 15 bp, Homo sapiens
tttaatatcatttac

SEQ ID NO: 423380 - DNA, 15 bp, Homo sapiens
ttttaatatcattta

SEQ ID NO: 423381 - DNA, 15 bp, Homo sapiens
attttaatatcattt

SEQ ID NO: 423382 - DNA, 15 bp, Homo sapiens
cattttaatatcatt

SEQ ID NO: 423383 - DNA, 15 bp, Homo sapiens
gcattttaatatcat

SEQ ID NO: 423384 - DNA, 15 bp, Homo sapiens
agcattttaatatca

SEQ ID NO: 423385 - DNA, 15 bp, Homo sapiens
aagcattttaatatc

SEQ ID NO: 423386 - DNA, 15 bp, Homo sapiens
aaagcattttaatat

SEQ ID NO: 423387 - DNA, 15 bp, Homo sapiens
caaagcattttaata

SEQ ID NO: 423388 - DNA, 15 bp, Homo sapiens
tcaaagcattttaat

SEQ ID NO: 423389 - DNA, 15 bp, Homo sapiens
ctcaaagcattttaa

SEQ ID NO: 423390 - DNA, 15 bp, Homo sapiens
tctcaaagcatttta

SEQ ID NO: 423391 - DNA, 15 bp, Homo sapiens
gtctcaaagcatttt

SEQ ID NO: 423392 - DNA, 15 bp, Homo sapiens
tgtctcaaagcattt

SEQ ID NO: 423393 - DNA, 15 bp, Homo sapiens
ttgtctcaaagcatt

SEQ ID NO: 423394 - DNA, 15 bp, Homo sapiens
attgtctcaaagcat

SEQ ID NO: 423395 - DNA, 15 bp, Homo sapiens
aattgtctcaaagca

SEQ ID NO: 423396 - DNA, 15 bp, Homo sapiens
aaattgtctcaaagc

SEQ ID NO: 423397 - DNA, 15 bp, Homo sapiens
gaaattgtctcaaag

SEQ ID NO: 423398 - DNA, 15 bp, Homo sapiens
agaaattgtctcaaa

SEQ ID NO: 423399 - DNA, 15 bp, Homo sapiens
aagaaattgtctcaa

SEQ ID NO: 423400 - DNA, 15 bp, Homo sapiens
aaagaaattgtctca

SEQ ID NO: 423401 - DNA, 15 bp, Homo sapiens
aaaagaaattgtctc

SEQ ID NO: 423402 - DNA, 15 bp, Homo sapiens
taaaagaaattgtct

SEQ ID NO: 423403 - DNA, 15 bp, Homo sapiens
ttaaaagaaattgtc

SEQ ID NO: 423404 - DNA, 15 bp, Homo sapiens
attaaaagaaattgt

SEQ ID NO: 423405 - DNA, 15 bp, Homo sapiens
aattaaaagaaattg

SEQ ID NO: 423406 - DNA, 15 bp, Homo sapiens
caattaaaagaaatt

SEQ ID NO: 423407 - DNA, 15 bp, Homo sapiens
gcaattaaaagaaat

SEQ ID NO: 423408 - DNA, 15 bp, Homo sapiens
tgcaattaaaagaaa

SEQ ID NO: 423409 - DNA, 15 bp, Homo sapiens
atgcaattaaaagaa

SEQ ID NO: 423410 - DNA, 15 bp, Homo sapiens
aatgcaattaaaaga

SEQ ID NO: 423411 - DNA, 15 bp, Homo sapiens
aaatgcaattaaaag

SEQ ID NO: 423412 - DNA, 15 bp, Homo sapiens
gaaatgcaattaaaa

SEQ ID NO: 423413 - DNA, 15 bp, Homo sapiens
agaaatgcaattaaa

SEQ ID NO: 423414 - DNA, 15 bp, Homo sapiens
aagaaatgcaattaa

SEQ ID NO: 423415 - DNA, 15 bp, Homo sapiens
gaagaaatgcaatta

SEQ ID NO: 423416 - DNA, 15 bp, Homo sapiens
ggaagaaatgcaatt

SEQ ID NO: 423417 - DNA, 15 bp, Homo sapiens
aggaagaaatgcaat

SEQ ID NO: 423418 - DNA, 15 bp, Homo sapiens
taggaagaaatgcaa

SEQ ID NO: 423419 - DNA, 15 bp, Homo sapiens
gtaggaagaaatgca

SEQ ID NO: 423420 - DNA, 15 bp, Homo sapiens
tgtaggaagaaatgc

SEQ ID NO: 423421 - DNA, 15 bp, Homo sapiens
ttgtaggaagaaatg

SEQ ID NO: 423422 - DNA, 15 bp, Homo sapiens
attgtaggaagaaat

SEQ ID NO: 423423 - DNA, 15 bp, Homo sapiens
tattgtaggaagaaa

SEQ ID NO: 423424 - DNA, 15 bp, Homo sapiens
atattgtaggaagaa

SEQ ID NO: 423425 - DNA, 15 bp, Homo sapiens
catattgtaggaaga

SEQ ID NO: 423426 - DNA, 15 bp, Homo sapiens
ccatattgtaggaag

SEQ ID NO: 423427 - DNA, 15 bp, Homo sapiens
accatattgtaggaa

SEQ ID NO: 423428 - DNA, 15 bp, Homo sapiens
taccatattgtagga

SEQ ID NO: 423429 - DNA, 15 bp, Homo sapiens
ttaccatattgtagg

SEQ ID NO: 423430 - DNA, 15 bp, Homo sapiens
attaccatattgtag

SEQ ID NO: 423431 - DNA, 15 bp, Homo sapiens
gattaccatattgta

SEQ ID NO: 423432 - DNA, 15 bp, Homo sapiens
agattaccatattgt

SEQ ID NO: 423433 - DNA, 15 bp, Homo sapiens
aagattaccatattg

SEQ ID NO: 423434 - DNA, 15 bp, Homo sapiens
taagattaccatatt

SEQ ID NO: 423435 - DNA, 15 bp, Homo sapiens
ataagattaccatat

SEQ ID NO: 423436 - DNA, 15 bp, Homo sapiens
aataagattaccata

SEQ ID NO: 423437 - DNA, 15 bp, Homo sapiens
taataagattaccat

SEQ ID NO: 423438 - DNA, 15 bp, Homo sapiens
ttaataagattacca

SEQ ID NO: 423439 - DNA, 15 bp, Homo sapiens
attaataagattacc

SEQ ID NO: 423440 - DNA, 15 bp, Homo sapiens
aattaataagattac

SEQ ID NO: 423441 - DNA, 15 bp, Homo sapiens
aaattaataagatta

SEQ ID NO: 423442 - DNA, 15 bp, Homo sapiens
aaaattaataagatt

SEQ ID NO: 423443 - DNA, 15 bp, Homo sapiens
gaaaattaataagat

SEQ ID NO: 423444 - DNA, 15 bp, Homo sapiens
agaaaattaataaga

SEQ ID NO: 423445 - DNA, 15 bp, Homo sapiens
aagaaaattaataag

SEQ ID NO: 423446 - DNA, 15 bp, Homo sapiens
taagaaaattaataa

SEQ ID NO: 423447 - DNA, 15 bp, Homo sapiens
ataagaaaattaata

SEQ ID NO: 423448 - DNA, 15 bp, Homo sapiens
aataagaaaattaat

SEQ ID NO: 423449 - DNA, 15 bp, Homo sapiens
gaataagaaaattaa

SEQ ID NO: 423450 - DNA, 15 bp, Homo sapiens
ggaataagaaaatta

SEQ ID NO: 423451 - DNA, 15 bp, Homo sapiens
aggaataagaaaatt

SEQ ID NO: 423452 - DNA, 15 bp, Homo sapiens
aaggaataagaaaat

SEQ ID NO: 423453 - DNA, 15 bp, Homo sapiens
aaaggaataagaaaa

SEQ ID NO: 423454 - DNA, 15 bp, Homo sapiens
gaaaggaataagaaa

SEQ ID NO: 423455 - DNA, 15 bp, Homo sapiens
ggaaaggaataagaa

SEQ ID NO: 423456 - DNA, 15 bp, Homo sapiens
aggaaaggaataaga

SEQ ID NO: 423457 - DNA, 15 bp, Homo sapiens
caggaaaggaataag

SEQ ID NO: 423458 - DNA, 15 bp, Homo sapiens
acaggaaaggaataa

SEQ ID NO: 423459 - DNA, 15 bp, Homo sapiens
tacaggaaaggaata

SEQ ID NO: 423460 - DNA, 15 bp, Homo sapiens
ttacaggaaaggaat

SEQ ID NO: 423461 - DNA, 15 bp, Homo sapiens
cttacaggaaaggaa

SEQ ID NO: 423462 - DNA, 15 bp, Homo sapiens
ccttacaggaaagga

SEQ ID NO: 423463 - DNA, 15 bp, Homo sapiens
gccttacaggaaagg

SEQ ID NO: 423464 - DNA, 15 bp, Homo sapiens
tgccttacaggaaag

SEQ ID NO: 423465 - DNA, 15 bp, Homo sapiens
ttgccttacaggaaa

SEQ ID NO: 423466 - DNA, 15 bp, Homo sapiens
tttgccttacaggaa

SEQ ID NO: 423467 - DNA, 15 bp, Homo sapiens
ttttgccttacagga

SEQ ID NO: 423468 - DNA, 15 bp, Homo sapiens
cttttgccttacagg

SEQ ID NO: 423469 - DNA, 15 bp, Homo sapiens
gcttttgccttacag

SEQ ID NO: 423470 - DNA, 15 bp, Homo sapiens
tgcttttgccttaca

SEQ ID NO: 423471 - DNA, 15 bp, Homo sapiens
ttgcttttgccttac

SEQ ID NO: 423472 - DNA, 15 bp, Homo sapiens
tttgcttttgcctta

SEQ ID NO: 423473 - DNA, 15 bp, Homo sapiens
gtttgcttttgcctt

SEQ ID NO: 423474 - DNA, 15 bp, Homo sapiens
agtttgcttttgcct

SEQ ID NO: 423475 - DNA, 15 bp, Homo sapiens
cagtttgcttttgcc

SEQ ID NO: 423476 - DNA, 15 bp, Homo sapiens
ccagtttgcttttgc

SEQ ID NO: 423477 - DNA, 15 bp, Homo sapiens
accagtttgcttttg

SEQ ID NO: 423478 - DNA, 15 bp, Homo sapiens
taccagtttgctttt

SEQ ID NO: 423479 - DNA, 15 bp, Homo sapiens
ttaccagtttgcttt

SEQ ID NO: 423480 - DNA, 15 bp, Homo sapiens
tttaccagtttgctt

SEQ ID NO: 423481 - DNA, 15 bp, Homo sapiens
atttaccagtttgct

SEQ ID NO: 423482 - DNA, 15 bp, Homo sapiens
aatttaccagtttgc

SEQ ID NO: 423483 - DNA, 15 bp, Homo sapiens
taatttaccagtttg

SEQ ID NO: 423484 - DNA, 15 bp, Homo sapiens
ataatttaccagttt

SEQ ID NO: 423485 - DNA, 15 bp, Homo sapiens
gataatttaccagtt

SEQ ID NO: 423486 - DNA, 15 bp, Homo sapiens
tgataatttaccagt

SEQ ID NO: 423487 - DNA, 15 bp, Homo sapiens
atgataatttaccag

SEQ ID NO: 423488 - DNA, 15 bp, Homo sapiens
tatgataatttacca

SEQ ID NO: 423489 - DNA, 15 bp, Homo sapiens
ttatgataatttacc

SEQ ID NO: 423490 - DNA, 15 bp, Homo sapiens
tttatgataatttac

SEQ ID NO: 423491 - DNA, 15 bp, Homo sapiens
ttttatgataattta

SEQ ID NO: 423492 - DNA, 15 bp, Homo sapiens
attttatgataattt

SEQ ID NO: 423493 - DNA, 15 bp, Homo sapiens
gattttatgataatt

SEQ ID NO: 423494 - DNA, 15 bp, Homo sapiens
tgattttatgataat

SEQ ID NO: 423495 - DNA, 15 bp, Homo sapiens
gtgattttatgataa

SEQ ID NO: 423496 - DNA, 15 bp, Homo sapiens
agtgattttatgata

SEQ ID NO: 423497 - DNA, 15 bp, Homo sapiens
cagtgattttatgat

SEQ ID NO: 423498 - DNA, 15 bp, Homo sapiens
acagtgattttatga

SEQ ID NO: 423499 - DNA, 15 bp, Homo sapiens
aacagtgattttatg

SEQ ID NO: 423500 - DNA, 15 bp, Homo sapiens
taacagtgattttat

SEQ ID NO: 423501 - DNA, 15 bp, Homo sapiens
ctaacagtgatttta

SEQ ID NO: 423502 - DNA, 15 bp, Homo sapiens
gctaacagtgatttt

SEQ ID NO: 423503 - DNA, 15 bp, Homo sapiens
tgctaacagtgattt

SEQ ID NO: 423504 - DNA, 15 bp, Homo sapiens
atgctaacagtgatt

SEQ ID NO: 423505 - DNA, 15 bp, Homo sapiens
catgctaacagtgat

SEQ ID NO: 423506 - DNA, 15 bp, Homo sapiens
tcatgctaacagtga

SEQ ID NO: 423507 - DNA, 15 bp, Homo sapiens
ttcatgctaacagtg

SEQ ID NO: 423508 - DNA, 15 bp, Homo sapiens
gttcatgctaacagt

SEQ ID NO: 423509 - DNA, 15 bp, Homo sapiens
ggttcatgctaacag

SEQ ID NO: 423510 - DNA, 15 bp, Homo sapiens
gggttcatgctaaca

SEQ ID NO: 423511 - DNA, 15 bp, Homo sapiens
tgggttcatgctaac

SEQ ID NO: 423512 - DNA, 15 bp, Homo sapiens
ttgggttcatgctaa

SEQ ID NO: 423513 - DNA, 15 bp, Homo sapiens
tttgggttcatgcta

SEQ ID NO: 423514 - DNA, 15 bp, Homo sapiens
atttgggttcatgct

SEQ ID NO: 423515 - DNA, 15 bp, Homo sapiens
aatttgggttcatgc

SEQ ID NO: 423516 - DNA, 15 bp, Homo sapiens
taatttgggttcatg

SEQ ID NO: 423517 - DNA, 15 bp, Homo sapiens
ttaatttgggttcat

SEQ ID NO: 423518 - DNA, 15 bp, Homo sapiens
cttaatttgggttca

SEQ ID NO: 423519 - DNA, 15 bp, Homo sapiens
tcttaatttgggttc

SEQ ID NO: 423520 - DNA, 15 bp, Homo sapiens
gtcttaatttgggtt

SEQ ID NO: 423521 - DNA, 15 bp, Homo sapiens
agtcttaatttgggt

SEQ ID NO: 423522 - DNA, 15 bp, Homo sapiens
tagtcttaatttggg

SEQ ID NO: 423523 - DNA, 15 bp, Homo sapiens
atagtcttaatttgg

SEQ ID NO: 423524 - DNA, 15 bp, Homo sapiens
tatagtcttaatttg

SEQ ID NO: 423525 - DNA, 15 bp, Homo sapiens
ttatagtcttaattt

SEQ ID NO: 423526 - DNA, 15 bp, Homo sapiens
cttatagtcttaatt

SEQ ID NO: 423527 - DNA, 15 bp, Homo sapiens
ccttatagtcttaat

SEQ ID NO: 423528 - DNA, 15 bp, Homo sapiens
gccttatagtcttaa

SEQ ID NO: 423529 - DNA, 15 bp, Homo sapiens
agccttatagtctta

SEQ ID NO: 423530 - DNA, 15 bp, Homo sapiens
cagccttatagtctt

SEQ ID NO: 423531 - DNA, 15 bp, Homo sapiens
acagccttatagtct

SEQ ID NO: 423532 - DNA, 15 bp, Homo sapiens
aacagccttatagtc

SEQ ID NO: 423533 - DNA, 15 bp, Homo sapiens
aaacagccttatagt

SEQ ID NO: 423534 - DNA, 15 bp, Homo sapiens
caaacagccttatag

SEQ ID NO: 423535 - DNA, 15 bp, Homo sapiens
gcaaacagccttata

SEQ ID NO: 423536 - DNA, 15 bp, Homo sapiens
tgcaaacagccttat

SEQ ID NO: 423537 - DNA, 15 bp, Homo sapiens
atgcaaacagcctta

SEQ ID NO: 423538 - DNA, 15 bp, Homo sapiens
tatgcaaacagcctt

SEQ ID NO: 423539 - DNA, 15 bp, Homo sapiens
atatgcaaacagcct

SEQ ID NO: 423540 - DNA, 15 bp, Homo sapiens
aatatgcaaacagcc

SEQ ID NO: 423541 - DNA, 15 bp, Homo sapiens
taatatgcaaacagc

SEQ ID NO: 423542 - DNA, 15 bp, Homo sapiens
ataatatgcaaacag

SEQ ID NO: 423543 - DNA, 15 bp, Homo sapiens
tataatatgcaaaca

SEQ ID NO: 423544 - DNA, 15 bp, Homo sapiens
gtataatatgcaaac

SEQ ID NO: 423545 - DNA, 15 bp, Homo sapiens
agtataatatgcaaa

SEQ ID NO: 423546 - DNA, 15 bp, Homo sapiens
gagtataatatgcaa

SEQ ID NO: 423547 - DNA, 15 bp, Homo sapiens
agagtataatatgca

SEQ ID NO: 423548 - DNA, 15 bp, Homo sapiens
tagagtataatatgc

SEQ ID NO: 423549 - DNA, 15 bp, Homo sapiens
atagagtataatatg

SEQ ID NO: 423550 - DNA, 15 bp, Homo sapiens
tatagagtataatat

SEQ ID NO: 423551 - DNA, 15 bp, Homo sapiens
ctatagagtataata

SEQ ID NO: 423552 - DNA, 15 bp, Homo sapiens
actatagagtataat

SEQ ID NO: 423553 - DNA, 15 bp, Homo sapiens
aactatagagtataa

SEQ ID NO: 423554 - DNA, 15 bp, Homo sapiens
aaactatagagtata

SEQ ID NO: 423555 - DNA, 15 bp, Homo sapiens
caaactatagagtat

SEQ ID NO: 423556 - DNA, 15 bp, Homo sapiens
acaaactatagagta

SEQ ID NO: 423557 - DNA, 15 bp, Homo sapiens
gacaaactatagagt

SEQ ID NO: 423558 - DNA, 15 bp, Homo sapiens
agacaaactatagag

SEQ ID NO: 423559 - DNA, 15 bp, Homo sapiens
aagacaaactataga

SEQ ID NO: 423560 - DNA, 15 bp, Homo sapiens
caagacaaactatag

SEQ ID NO: 423561 - DNA, 15 bp, Homo sapiens
acaagacaaactata

SEQ ID NO: 423562 - DNA, 15 bp, Homo sapiens
gacaagacaaactat

SEQ ID NO: 423563 - DNA, 15 bp, Homo sapiens
tgacaagacaaacta

SEQ ID NO: 423564 - DNA, 15 bp, Homo sapiens
atgacaagacaaact

SEQ ID NO: 423565 - DNA, 15 bp, Homo sapiens
catgacaagacaaac

SEQ ID NO: 423566 - DNA, 15 bp, Homo sapiens
acatgacaagacaaa

SEQ ID NO: 423567 - DNA, 15 bp, Homo sapiens
tacatgacaagacaa

SEQ ID NO: 423568 - DNA, 15 bp, Homo sapiens
gtacatgacaagaca

SEQ ID NO: 423569 - DNA, 15 bp, Homo sapiens
tgtacatgacaagac

SEQ ID NO: 423570 - DNA, 15 bp, Homo sapiens
ttgtacatgacaaga

SEQ ID NO: 423571 - DNA, 15 bp, Homo sapiens
gttgtacatgacaag

SEQ ID NO: 423572 - DNA, 15 bp, Homo sapiens
cgttgtacatgacaa

SEQ ID NO: 423573 - DNA, 15 bp, Homo sapiens
acgttgtacatgaca

SEQ ID NO: 423574 - DNA, 15 bp, Homo sapiens
aacgttgtacatgac

SEQ ID NO: 423575 - DNA, 15 bp, Homo sapiens
taacgttgtacatga

SEQ ID NO: 423576 - DNA, 15 bp, Homo sapiens
ataacgttgtacatg

SEQ ID NO: 423577 - DNA, 15 bp, Homo sapiens
aataacgttgtacat

SEQ ID NO: 423578 - DNA, 15 bp, Homo sapiens
taataacgttgtaca

SEQ ID NO: 423579 - DNA, 15 bp, Homo sapiens
ataataacgttgtac

SEQ ID NO: 423580 - DNA, 15 bp, Homo sapiens
cataataacgttgta

SEQ ID NO: 423581 - DNA, 15 bp, Homo sapiens
tcataataacgttgt

SEQ ID NO: 423582 - DNA, 15 bp, Homo sapiens
ctcataataacgttg

SEQ ID NO: 423583 - DNA, 15 bp, Homo sapiens
cctcataataacgtt

SEQ ID NO: 423584 - DNA, 15 bp, Homo sapiens
acctcataataacgt

SEQ ID NO: 423585 - DNA, 15 bp, Homo sapiens
tacctcataataacg

SEQ ID NO: 423586 - DNA, 15 bp, Homo sapiens
atacctcataataac

SEQ ID NO: 423587 - DNA, 15 bp, Homo sapiens
catacctcataataa

SEQ ID NO: 423588 - DNA, 15 bp, Homo sapiens
acatacctcataata

SEQ ID NO: 423589 - DNA, 15 bp, Homo sapiens
aacatacctcataat

SEQ ID NO: 423590 - DNA, 15 bp, Homo sapiens
aaacatacctcataa

SEQ ID NO: 423591 - DNA, 15 bp, Homo sapiens
aaaacatacctcata

SEQ ID NO: 423592 - DNA, 15 bp, Homo sapiens
taaaacatacctcat

SEQ ID NO: 423593 - DNA, 15 bp, Homo sapiens
ctaaaacatacctca

SEQ ID NO: 423594 - DNA, 15 bp, Homo sapiens
tctaaaacatacctc

SEQ ID NO: 423595 - DNA, 15 bp, Homo sapiens
gtctaaaacatacct

SEQ ID NO: 423596 - DNA, 15 bp, Homo sapiens
agtctaaaacatacc

SEQ ID NO: 423597 - DNA, 15 bp, Homo sapiens
cagtctaaaacatac

SEQ ID NO: 423598 - DNA, 15 bp, Homo sapiens
tcagtctaaaacata

SEQ ID NO: 423599 - DNA, 15 bp, Homo sapiens
gtcagtctaaaacat

SEQ ID NO: 423600 - DNA, 15 bp, Homo sapiens
tgtcagtctaaaaca

SEQ ID NO: 423601 - DNA, 15 bp, Homo sapiens
ctgtcagtctaaaac

SEQ ID NO: 423602 - DNA, 15 bp, Homo sapiens
tctgtcagtctaaaa

SEQ ID NO: 423603 - DNA, 15 bp, Homo sapiens
ttctgtcagtctaaa

SEQ ID NO: 423604 - DNA, 15 bp, Homo sapiens
tttctgtcagtctaa

SEQ ID NO: 423605 - DNA, 15 bp, Homo sapiens
ttttctgtcagtcta

SEQ ID NO: 423606 - DNA, 15 bp, Homo sapiens
attttctgtcagtct

SEQ ID NO: 423607 - DNA, 15 bp, Homo sapiens
tattttctgtcagtc

SEQ ID NO: 423608 - DNA, 15 bp, Homo sapiens
ctattttctgtcagt

SEQ ID NO: 423609 - DNA, 15 bp, Homo sapiens
actattttctgtcag

SEQ ID NO: 423610 - DNA, 15 bp, Homo sapiens
aactattttctgtca

SEQ ID NO: 423611 - DNA, 15 bp, Homo sapiens
aaactattttctgtc

SEQ ID NO: 423612 - DNA, 15 bp, Homo sapiens
aaaactattttctgt

SEQ ID NO: 423613 - DNA, 15 bp, Homo sapiens
taaaactattttctg

SEQ ID NO: 423614 - DNA, 15 bp, Homo sapiens
gtaaaactattttct

SEQ ID NO: 423615 - DNA, 15 bp, Homo sapiens
agtaaaactattttc

SEQ ID NO: 423616 - DNA, 15 bp, Homo sapiens
aagtaaaactatttt

SEQ ID NO: 423617 - DNA, 15 bp, Homo sapiens
gaagtaaaactattt

SEQ ID NO: 423618 - DNA, 15 bp, Homo sapiens
agaagtaaaactatt

SEQ ID NO: 423619 - DNA, 15 bp, Homo sapiens
cagaagtaaaactat

SEQ ID NO: 423620 - DNA, 15 bp, Homo sapiens
gcagaagtaaaacta

SEQ ID NO: 423621 - DNA, 15 bp, Homo sapiens
ggcagaagtaaaact

SEQ ID NO: 423622 - DNA, 15 bp, Homo sapiens
aggcagaagtaaaac

SEQ ID NO: 423623 - DNA, 15 bp, Homo sapiens
taggcagaagtaaaa

SEQ ID NO: 423624 - DNA, 15 bp, Homo sapiens
ataggcagaagtaaa

SEQ ID NO: 423625 - DNA, 15 bp, Homo sapiens
tataggcagaagtaa

SEQ ID NO: 423626 - DNA, 15 bp, Homo sapiens
gtataggcagaagta

SEQ ID NO: 423627 - DNA, 15 bp, Homo sapiens
agtataggcagaagt

SEQ ID NO: 423628 - DNA, 15 bp, Homo sapiens
aagtataggcagaag

SEQ ID NO: 423629 - DNA, 15 bp, Homo sapiens
aaagtataggcagaa

SEQ ID NO: 423630 - DNA, 15 bp, Homo sapiens
aaaagtataggcaga

SEQ ID NO: 423631 - DNA, 15 bp, Homo sapiens
taaaagtataggcag

SEQ ID NO: 423632 - DNA, 15 bp, Homo sapiens
ataaaagtataggca

SEQ ID NO: 423633 - DNA, 15 bp, Homo sapiens
gataaaagtataggc

SEQ ID NO: 423634 - DNA, 15 bp, Homo sapiens
agataaaagtatagg

SEQ ID NO: 423635 - DNA, 15 bp, Homo sapiens
tagataaaagtatag

SEQ ID NO: 423636 - DNA, 15 bp, Homo sapiens
atagataaaagtata

SEQ ID NO: 423637 - DNA, 15 bp, Homo sapiens
tatagataaaagtat

SEQ ID NO: 423638 - DNA, 15 bp, Homo sapiens
ttatagataaaagta

SEQ ID NO: 423639 - DNA, 15 bp, Homo sapiens
cttatagataaaagt

SEQ ID NO: 423640 - DNA, 15 bp, Homo sapiens
ccttatagataaaag

SEQ ID NO: 423641 - DNA, 15 bp, Homo sapiens
accttatagataaaa

SEQ ID NO: 423642 - DNA, 15 bp, Homo sapiens
aaccttatagataaa

SEQ ID NO: 423643 - DNA, 15 bp, Homo sapiens
aaaccttatagataa

SEQ ID NO: 423644 - DNA, 15 bp, Homo sapiens
aaaaccttatagata

SEQ ID NO: 423645 - DNA, 15 bp, Homo sapiens
taaaaccttatagat

SEQ ID NO: 423646 - DNA, 15 bp, Homo sapiens
ctaaaaccttataga

SEQ ID NO: 423647 - DNA, 15 bp, Homo sapiens
tctaaaaccttatag

SEQ ID NO: 423648 - DNA, 15 bp, Homo sapiens
ttctaaaaccttata

SEQ ID NO: 423649 - DNA, 15 bp, Homo sapiens
cttctaaaaccttat

SEQ ID NO: 423650 - DNA, 15 bp, Homo sapiens
acttctaaaacctta

SEQ ID NO: 423651 - DNA, 15 bp, Homo sapiens
tacttctaaaacctt

SEQ ID NO: 423652 - DNA, 15 bp, Homo sapiens
ttacttctaaaacct

SEQ ID NO: 423653 - DNA, 15 bp, Homo sapiens
tttacttctaaaacc

SEQ ID NO: 423654 - DNA, 15 bp, Homo sapiens
atttacttctaaaac

SEQ ID NO: 423655 - DNA, 15 bp, Homo sapiens
aatttacttctaaaa

SEQ ID NO: 423656 - DNA, 15 bp, Homo sapiens
gaatttacttctaaa

SEQ ID NO: 423657 - DNA, 15 bp, Homo sapiens
tgaatttacttctaa

SEQ ID NO: 423658 - DNA, 15 bp, Homo sapiens
atgaatttacttcta

SEQ ID NO: 423659 - DNA, 15 bp, Homo sapiens
tatgaatttacttct

SEQ ID NO: 423660 - DNA, 15 bp, Homo sapiens
ctatgaatttacttc

SEQ ID NO: 423661 - DNA, 15 bp, Homo sapiens
tctatgaatttactt

SEQ ID NO: 423662 - DNA, 15 bp, Homo sapiens
ttctatgaatttact

SEQ ID NO: 423663 - DNA, 15 bp, Homo sapiens
attctatgaatttac

SEQ ID NO: 423664 - DNA, 15 bp, Homo sapiens
gattctatgaattta

SEQ ID NO: 423665 - DNA, 15 bp, Homo sapiens
tgattctatgaattt

SEQ ID NO: 423666 - DNA, 15 bp, Homo sapiens
ctgattctatgaatt

SEQ ID NO: 423667 - DNA, 15 bp, Homo sapiens
actgattctatgaat

SEQ ID NO: 423668 - DNA, 15 bp, Homo sapiens
aactgattctatgaa

SEQ ID NO: 423669 - DNA, 15 bp, Homo sapiens
aaactgattctatga

SEQ ID NO: 423670 - DNA, 15 bp, Homo sapiens
caaactgattctatg

SEQ ID NO: 423671 - DNA, 15 bp, Homo sapiens
ccaaactgattctat

SEQ ID NO: 423672 - DNA, 15 bp, Homo sapiens
tccaaactgattcta

SEQ ID NO: 423673 - DNA, 15 bp, Homo sapiens
gtccaaactgattct

SEQ ID NO: 423674 - DNA, 15 bp, Homo sapiens
ggtccaaactgattc

SEQ ID NO: 423675 - DNA, 15 bp, Homo sapiens
aggtccaaactgatt

SEQ ID NO: 423676 - DNA, 15 bp, Homo sapiens
gaggtccaaactgat

SEQ ID NO: 423677 - DNA, 15 bp, Homo sapiens
agaggtccaaactga

SEQ ID NO: 423678 - DNA, 15 bp, Homo sapiens
aagaggtccaaactg

SEQ ID NO: 423679 - DNA, 15 bp, Homo sapiens
caagaggtccaaact

SEQ ID NO: 423680 - DNA, 15 bp, Homo sapiens
tcaagaggtccaaac

SEQ ID NO: 423681 - DNA, 15 bp, Homo sapiens
ttcaagaggtccaaa

SEQ ID NO: 423682 - DNA, 15 bp, Homo sapiens
tttcaagaggtccaa

SEQ ID NO: 423683 - DNA, 15 bp, Homo sapiens
atttcaagaggtcca

SEQ ID NO: 423684 - DNA, 15 bp, Homo sapiens
tatttcaagaggtcc

SEQ ID NO: 423685 - DNA, 15 bp, Homo sapiens
ttatttcaagaggtc

SEQ ID NO: 423686 - DNA, 15 bp, Homo sapiens
attatttcaagaggt

SEQ ID NO: 423687 - DNA, 15 bp, Homo sapiens
aattatttcaagagg

SEQ ID NO: 423688 - DNA, 15 bp, Homo sapiens
aaattatttcaagag

SEQ ID NO: 423689 - DNA, 15 bp, Homo sapiens
aaaattatttcaaga

SEQ ID NO: 423690 - DNA, 15 bp, Homo sapiens
taaaattatttcaag

SEQ ID NO: 423691 - DNA, 15 bp, Homo sapiens
ctaaaattatttcaa

SEQ ID NO: 423692 - DNA, 15 bp, Homo sapiens
cctaaaattatttca

SEQ ID NO: 423693 - DNA, 15 bp, Homo sapiens
tcctaaaattatttc

SEQ ID NO: 423694 - DNA, 15 bp, Homo sapiens
ctcctaaaattattt

SEQ ID NO: 423695 - DNA, 15 bp, Homo sapiens
actcctaaaattatt

SEQ ID NO: 423696 - DNA, 15 bp, Homo sapiens
aactcctaaaattat

SEQ ID NO: 423697 - DNA, 15 bp, Homo sapiens
taactcctaaaatta

SEQ ID NO: 423698 - DNA, 15 bp, Homo sapiens
ataactcctaaaatt

SEQ ID NO: 423699 - DNA, 15 bp, Homo sapiens
cataactcctaaaat

SEQ ID NO: 423700 - DNA, 15 bp, Homo sapiens
tcataactcctaaaa

SEQ ID NO: 423701 - DNA, 15 bp, Homo sapiens
ttcataactcctaaa

SEQ ID NO: 423702 - DNA, 15 bp, Homo sapiens
gttcataactcctaa

SEQ ID NO: 423703 - DNA, 15 bp, Homo sapiens
agttcataactccta

SEQ ID NO: 423704 - DNA, 15 bp, Homo sapiens
tagttcataactcct

SEQ ID NO: 423705 - DNA, 15 bp, Homo sapiens
ctagttcataactcc

SEQ ID NO: 423706 - DNA, 15 bp, Homo sapiens
gctagttcataactc

SEQ ID NO: 423707 - DNA, 15 bp, Homo sapiens
agctagttcataact

SEQ ID NO: 423708 - DNA, 15 bp, Homo sapiens
cagctagttcataac

SEQ ID NO: 423709 - DNA, 15 bp, Homo sapiens
tcagctagttcataa

SEQ ID NO: 423710 - DNA, 15 bp, Homo sapiens
atcagctagttcata

SEQ ID NO: 423711 - DNA, 15 bp, Homo sapiens
aatcagctagttcat

SEQ ID NO: 423712 - DNA, 15 bp, Homo sapiens
aaatcagctagttca

SEQ ID NO: 423713 - DNA, 15 bp, Homo sapiens
aaaatcagctagttc

SEQ ID NO: 423714 - DNA, 15 bp, Homo sapiens
caaaatcagctagtt

SEQ ID NO: 423715 - DNA, 15 bp, Homo sapiens
ccaaaatcagctagt

SEQ ID NO: 423716 - DNA, 15 bp, Homo sapiens
gccaaaatcagctag

SEQ ID NO: 423717 - DNA, 15 bp, Homo sapiens
tgccaaaatcagcta

SEQ ID NO: 423718 - DNA, 15 bp, Homo sapiens
atgccaaaatcagct

SEQ ID NO: 423719 - DNA, 15 bp, Homo sapiens
catgccaaaatcagc

SEQ ID NO: 423720 - DNA, 15 bp, Homo sapiens
gcatgccaaaatcag

SEQ ID NO: 423721 - DNA, 15 bp, Homo sapiens
tgcatgccaaaatca

SEQ ID NO: 423722 - DNA, 15 bp, Homo sapiens
atgcatgccaaaatc

SEQ ID NO: 423723 - DNA, 15 bp, Homo sapiens
gatgcatgccaaaat

SEQ ID NO: 423724 - DNA, 15 bp, Homo sapiens
agatgcatgccaaaa

SEQ ID NO: 423725 - DNA, 15 bp, Homo sapiens
aagatgcatgccaaa

SEQ ID NO: 423726 - DNA, 15 bp, Homo sapiens
caagatgcatgccaa

SEQ ID NO: 423727 - DNA, 15 bp, Homo sapiens
tcaagatgcatgcca

SEQ ID NO: 423728 - DNA, 15 bp, Homo sapiens
atcaagatgcatgcc

SEQ ID NO: 423729 - DNA, 15 bp, Homo sapiens
aatcaagatgcatgc

SEQ ID NO: 423730 - DNA, 15 bp, Homo sapiens
aaatcaagatgcatg

SEQ ID NO: 423731 - DNA, 15 bp, Homo sapiens
caaatcaagatgcat

SEQ ID NO: 423732 - DNA, 15 bp, Homo sapiens
ccaaatcaagatgca

SEQ ID NO: 423733 - DNA, 15 bp, Homo sapiens
gccaaatcaagatgc

SEQ ID NO: 423734 - DNA, 15 bp, Homo sapiens
tgccaaatcaagatg

SEQ ID NO: 423735 - DNA, 15 bp, Homo sapiens
ttgccaaatcaagat

SEQ ID NO: 423736 - DNA, 15 bp, Homo sapiens
cttgccaaatcaaga

SEQ ID NO: 423737 - DNA, 15 bp, Homo sapiens
acttgccaaatcaag

SEQ ID NO: 423738 - DNA, 15 bp, Homo sapiens
cacttgccaaatcaa

SEQ ID NO: 423739 - DNA, 15 bp, Homo sapiens
tcacttgccaaatca

SEQ ID NO: 423740 - DNA, 15 bp, Homo sapiens
ctcacttgccaaatc

SEQ ID NO: 423741 - DNA, 15 bp, Homo sapiens
cctcacttgccaaat

SEQ ID NO: 423742 - DNA, 15 bp, Homo sapiens
tcctcacttgccaaa

SEQ ID NO: 423743 - DNA, 15 bp, Homo sapiens
ttcctcacttgccaa

SEQ ID NO: 423744 - DNA, 15 bp, Homo sapiens
tttcctcacttgcca

SEQ ID NO: 423745 - DNA, 15 bp, Homo sapiens
gtttcctcacttgcc

SEQ ID NO: 423746 - DNA, 15 bp, Homo sapiens
agtttcctcacttgc

SEQ ID NO: 423747 - DNA, 15 bp, Homo sapiens
gagtttcctcacttg

SEQ ID NO: 423748 - DNA, 15 bp, Homo sapiens
tgagtttcctcactt

SEQ ID NO: 423749 - DNA, 15 bp, Homo sapiens
ctgagtttcctcact

SEQ ID NO: 423750 - DNA, 15 bp, Homo sapiens
cctgagtttcctcac

SEQ ID NO: 423751 - DNA, 15 bp, Homo sapiens
gcctgagtttcctca

SEQ ID NO: 423752 - DNA, 15 bp, Homo sapiens
ggcctgagtttcctc

SEQ ID NO: 423753 - DNA, 15 bp, Homo sapiens
gggcctgagtttcct

SEQ ID NO: 423754 - DNA, 15 bp, Homo sapiens
tgggcctgagtttcc

SEQ ID NO: 423755 - DNA, 15 bp, Homo sapiens
ctgggcctgagtttc

SEQ ID NO: 423756 - DNA, 15 bp, Homo sapiens
tctgggcctgagttt

SEQ ID NO: 423757 - DNA, 15 bp, Homo sapiens
ctctgggcctgagtt

SEQ ID NO: 423758 - DNA, 15 bp, Homo sapiens
tctctgggcctgagt

SEQ ID NO: 423759 - DNA, 15 bp, Homo sapiens
ctctctgggcctgag

SEQ ID NO: 423760 - DNA, 15 bp, Homo sapiens
tctctctgggcctga

SEQ ID NO: 423761 - DNA, 15 bp, Homo sapiens
atctctctgggcctg

SEQ ID NO: 423762 - DNA, 15 bp, Homo sapiens
aatctctctgggcct

SEQ ID NO: 423763 - DNA, 15 bp, Homo sapiens
taatctctctgggcc

SEQ ID NO: 423764 - DNA, 15 bp, Homo sapiens
ctaatctctctgggc

SEQ ID NO: 423765 - DNA, 15 bp, Homo sapiens
cctaatctctctggg

SEQ ID NO: 423766 - DNA, 15 bp, Homo sapiens
gcctaatctctctgg

SEQ ID NO: 423767 - DNA, 15 bp, Homo sapiens
tgcctaatctctctg

SEQ ID NO: 423768 - DNA, 15 bp, Homo sapiens
ttgcctaatctctct

SEQ ID NO: 423769 - DNA, 15 bp, Homo sapiens
tttgcctaatctctc

SEQ ID NO: 423770 - DNA, 15 bp, Homo sapiens
ttttgcctaatctct

SEQ ID NO: 423771 - DNA, 15 bp, Homo sapiens
gttttgcctaatctc

SEQ ID NO: 423772 - DNA, 15 bp, Homo sapiens
agttttgcctaatct

SEQ ID NO: 423773 - DNA, 15 bp, Homo sapiens
aagttttgcctaatc

SEQ ID NO: 423774 - DNA, 15 bp, Homo sapiens
aaagttttgcctaat

SEQ ID NO: 423775 - DNA, 15 bp, Homo sapiens
gaaagttttgcctaa

SEQ ID NO: 423776 - DNA, 15 bp, Homo sapiens
ggaaagttttgccta

SEQ ID NO: 423777 - DNA, 15 bp, Homo sapiens
tggaaagttttgcct

SEQ ID NO: 423778 - DNA, 15 bp, Homo sapiens
ttggaaagttttgcc

SEQ ID NO: 423779 - DNA, 15 bp, Homo sapiens
tttggaaagttttgc

SEQ ID NO: 423780 - DNA, 15 bp, Homo sapiens
ctttggaaagttttg

SEQ ID NO: 423781 - DNA, 15 bp, Homo sapiens
actttggaaagtttt

SEQ ID NO: 423782 - DNA, 15 bp, Homo sapiens
gactttggaaagttt

SEQ ID NO: 423783 - DNA, 15 bp, Homo sapiens
ggactttggaaagtt

SEQ ID NO: 423784 - DNA, 15 bp, Homo sapiens
gggactttggaaagt

SEQ ID NO: 423785 - DNA, 15 bp, Homo sapiens
cgggactttggaaag

SEQ ID NO: 423786 - DNA, 15 bp, Homo sapiens
ccgggactttggaaa

SEQ ID NO: 423787 - DNA, 15 bp, Homo sapiens
tccgggactttggaa

SEQ ID NO: 423788 - DNA, 15 bp, Homo sapiens
ctccgggactttgga

SEQ ID NO: 423789 - DNA, 15 bp, Homo sapiens
gctccgggactttgg

SEQ ID NO: 423790 - DNA, 15 bp, Homo sapiens
ggctccgggactttg

SEQ ID NO: 423791 - DNA, 15 bp, Homo sapiens
aggctccgggacttt

SEQ ID NO: 423792 - DNA, 15 bp, Homo sapiens
caggctccgggactt

SEQ ID NO: 423793 - DNA, 15 bp, Homo sapiens
tcaggctccgggact

SEQ ID NO: 423794 - DNA, 15 bp, Homo sapiens
ctcaggctccgggac

SEQ ID NO: 423795 - DNA, 15 bp, Homo sapiens
gctcaggctccggga

SEQ ID NO: 423796 - DNA, 15 bp, Homo sapiens
ggctcaggctccggg

SEQ ID NO: 423797 - DNA, 15 bp, Homo sapiens
tggctcaggctccgg

SEQ ID NO: 423798 - DNA, 15 bp, Homo sapiens
gtggctcaggctccg

SEQ ID NO: 423799 - DNA, 15 bp, Homo sapiens
tgtggctcaggctcc

SEQ ID NO: 423800 - DNA, 15 bp, Homo sapiens
atgtggctcaggctc

SEQ ID NO: 423801 - DNA, 15 bp, Homo sapiens
aatgtggctcaggct

SEQ ID NO: 423802 - DNA, 15 bp, Homo sapiens
aaatgtggctcaggc

SEQ ID NO: 423803 - DNA, 15 bp, Homo sapiens
aaaatgtggctcagg

SEQ ID NO: 423804 - DNA, 15 bp, Homo sapiens
caaaatgtggctcag

SEQ ID NO: 423805 - DNA, 15 bp, Homo sapiens
acaaaatgtggctca

SEQ ID NO: 423806 - DNA, 15 bp, Homo sapiens
cacaaaatgtggctc

SEQ ID NO: 423807 - DNA, 15 bp, Homo sapiens
tcacaaaatgtggct

SEQ ID NO: 423808 - DNA, 15 bp, Homo sapiens
atcacaaaatgtggc

SEQ ID NO: 423809 - DNA, 15 bp, Homo sapiens
aatcacaaaatgtgg

SEQ ID NO: 423810 - DNA, 15 bp, Homo sapiens
taatcacaaaatgtg

SEQ ID NO: 423811 - DNA, 15 bp, Homo sapiens
ttaatcacaaaatgt

SEQ ID NO: 423812 - DNA, 15 bp, Homo sapiens
gttaatcacaaaatg

SEQ ID NO: 423813 - DNA, 15 bp, Homo sapiens
ggttaatcacaaaat

SEQ ID NO: 423814 - DNA, 15 bp, Homo sapiens
tggttaatcacaaaa

SEQ ID NO: 423815 - DNA, 15 bp, Homo sapiens
gtggttaatcacaaa

SEQ ID NO: 423816 - DNA, 15 bp, Homo sapiens
ggtggttaatcacaa

SEQ ID NO: 423817 - DNA, 15 bp, Homo sapiens
gggtggttaatcaca

SEQ ID NO: 423818 - DNA, 15 bp, Homo sapiens
tgggtggttaatcac

SEQ ID NO: 423819 - DNA, 15 bp, Homo sapiens
ctgggtggttaatca

SEQ ID NO: 423820 - DNA, 15 bp, Homo sapiens
tctgggtggttaatc

SEQ ID NO: 423821 - DNA, 15 bp, Homo sapiens
ctctgggtggttaat

SEQ ID NO: 423822 - DNA, 15 bp, Homo sapiens
actctgggtggttaa

SEQ ID NO: 423823 - DNA, 15 bp, Homo sapiens
aactctgggtggtta

SEQ ID NO: 423824 - DNA, 15 bp, Homo sapiens
aaactctgggtggtt

SEQ ID NO: 423825 - DNA, 15 bp, Homo sapiens
aaaactctgggtggt

SEQ ID NO: 423826 - DNA, 15 bp, Homo sapiens
aaaaactctgggtgg

SEQ ID NO: 423827 - DNA, 15 bp, Homo sapiens
gaaaaactctgggtg

SEQ ID NO: 423828 - DNA, 15 bp, Homo sapiens
ggaaaaactctgggt

SEQ ID NO: 423829 - DNA, 15 bp, Homo sapiens
tggaaaaactctggg

SEQ ID NO: 423830 - DNA, 15 bp, Homo sapiens
gtggaaaaactctgg

SEQ ID NO: 423831 - DNA, 15 bp, Homo sapiens
tgtggaaaaactctg

SEQ ID NO: 423832 - DNA, 15 bp, Homo sapiens
atgtggaaaaactct

SEQ ID NO: 423833 - DNA, 15 bp, Homo sapiens
aatgtggaaaaactc

SEQ ID NO: 423834 - DNA, 15 bp, Homo sapiens
caatgtggaaaaact

SEQ ID NO: 423835 - DNA, 15 bp, Homo sapiens
gcaatgtggaaaaac

SEQ ID NO: 423836 - DNA, 15 bp, Homo sapiens
agcaatgtggaaaaa

SEQ ID NO: 423837 - DNA, 15 bp, Homo sapiens
aagcaatgtggaaaa

SEQ ID NO: 423838 - DNA, 15 bp, Homo sapiens
gaagcaatgtggaaa

SEQ ID NO: 423839 - DNA, 15 bp, Homo sapiens
ggaagcaatgtggaa

SEQ ID NO: 423840 - DNA, 15 bp, Homo sapiens
gggaagcaatgtgga

SEQ ID NO: 423841 - DNA, 15 bp, Homo sapiens
tgggaagcaatgtgg

SEQ ID NO: 423842 - DNA, 15 bp, Homo sapiens
atgggaagcaatgtg

SEQ ID NO: 423843 - DNA, 15 bp, Homo sapiens
catgggaagcaatgt

SEQ ID NO: 423844 - DNA, 15 bp, Homo sapiens
acatgggaagcaatg

SEQ ID NO: 423845 - DNA, 15 bp, Homo sapiens
tacatgggaagcaat

SEQ ID NO: 423846 - DNA, 15 bp, Homo sapiens
ttacatgggaagcaa

SEQ ID NO: 423847 - DNA, 15 bp, Homo sapiens
tttacatgggaagca

SEQ ID NO: 423848 - DNA, 15 bp, Homo sapiens
ctttacatgggaagc

SEQ ID NO: 423849 - DNA, 15 bp, Homo sapiens
cctttacatgggaag

SEQ ID NO: 423850 - DNA, 15 bp, Homo sapiens
ccctttacatgggaa

SEQ ID NO: 423851 - DNA, 15 bp, Homo sapiens
accctttacatggga

SEQ ID NO: 423852 - DNA, 15 bp, Homo sapiens
taccctttacatggg

SEQ ID NO: 423853 - DNA, 15 bp, Homo sapiens
ctaccctttacatgg

SEQ ID NO: 423854 - DNA, 15 bp, Homo sapiens
actaccctttacatg

SEQ ID NO: 423855 - DNA, 15 bp, Homo sapiens
cactaccctttacat

SEQ ID NO: 423856 - DNA, 15 bp, Homo sapiens
tcactaccctttaca

SEQ ID NO: 423857 - DNA, 15 bp, Homo sapiens
ttcactaccctttac

SEQ ID NO: 423858 - DNA, 15 bp, Homo sapiens
attcactacccttta

SEQ ID NO: 423859 - DNA, 15 bp, Homo sapiens
tattcactacccttt

SEQ ID NO: 423860 - DNA, 15 bp, Homo sapiens
ctattcactaccctt

SEQ ID NO: 423861 - DNA, 15 bp, Homo sapiens
tctattcactaccct

SEQ ID NO: 423862 - DNA, 15 bp, Homo sapiens
ttctattcactaccc

SEQ ID NO: 423863 - DNA, 15 bp, Homo sapiens
attctattcactacc

SEQ ID NO: 423864 - DNA, 15 bp, Homo sapiens
aattctattcactac

SEQ ID NO: 423865 - DNA, 15 bp, Homo sapiens
taattctattcacta

SEQ ID NO: 423866 - DNA, 15 bp, Homo sapiens
ataattctattcact

SEQ ID NO: 423867 - DNA, 15 bp, Homo sapiens
gataattctattcac

SEQ ID NO: 423868 - DNA, 15 bp, Homo sapiens
agataattctattca

SEQ ID NO: 423869 - DNA, 15 bp, Homo sapiens
aagataattctattc

SEQ ID NO: 423870 - DNA, 15 bp, Homo sapiens
taagataattctatt

SEQ ID NO: 423871 - DNA, 15 bp, Homo sapiens
ataagataattctat

SEQ ID NO: 423872 - DNA, 15 bp, Homo sapiens
gataagataattcta

SEQ ID NO: 423873 - DNA, 15 bp, Homo sapiens
tgataagataattct

SEQ ID NO: 423874 - DNA, 15 bp, Homo sapiens
ttgataagataattc

SEQ ID NO: 423875 - DNA, 15 bp, Homo sapiens
tttgataagataatt

SEQ ID NO: 423876 - DNA, 15 bp, Homo sapiens
atttgataagataat

SEQ ID NO: 423877 - DNA, 15 bp, Homo sapiens
catttgataagataa

SEQ ID NO: 423878 - DNA, 15 bp, Homo sapiens
ccatttgataagata

SEQ ID NO: 423879 - DNA, 15 bp, Homo sapiens
gccatttgataagat

SEQ ID NO: 423880 - DNA, 15 bp, Homo sapiens
tgccatttgataaga

SEQ ID NO: 423881 - DNA, 15 bp, Homo sapiens
ctgccatttgataag

SEQ ID NO: 423882 - DNA, 15 bp, Homo sapiens
cctgccatttgataa

SEQ ID NO: 423883 - DNA, 15 bp, Homo sapiens
tcctgccatttgata

SEQ ID NO: 423884 - DNA, 15 bp, Homo sapiens
ttcctgccatttgat

SEQ ID NO: 423885 - DNA, 15 bp, Homo sapiens
cttcctgccatttga

SEQ ID NO: 423886 - DNA, 15 bp, Homo sapiens
ccttcctgccatttg

SEQ ID NO: 423887 - DNA, 15 bp, Homo sapiens
cccttcctgccattt

SEQ ID NO: 423888 - DNA, 15 bp, Homo sapiens
acccttcctgccatt

SEQ ID NO: 423889 - DNA, 15 bp, Homo sapiens
cacccttcctgccat

SEQ ID NO: 423890 - DNA, 15 bp, Homo sapiens
acacccttcctgcca

SEQ ID NO: 423891 - DNA, 15 bp, Homo sapiens
aacacccttcctgcc

SEQ ID NO: 423892 - DNA, 15 bp, Homo sapiens
aaacacccttcctgc

SEQ ID NO: 423893 - DNA, 15 bp, Homo sapiens
aaaacacccttcctg

SEQ ID NO: 423894 - DNA, 15 bp, Homo sapiens
caaaacacccttcct

SEQ ID NO: 423895 - DNA, 15 bp, Homo sapiens
gcaaaacacccttcc

SEQ ID NO: 423896 - DNA, 15 bp, Homo sapiens
agcaaaacacccttc

SEQ ID NO: 423897 - DNA, 15 bp, Homo sapiens
cagcaaaacaccctt

SEQ ID NO: 423898 - DNA, 15 bp, Homo sapiens
tcagcaaaacaccct

SEQ ID NO: 423899 - DNA, 15 bp, Homo sapiens
ttcagcaaaacaccc

SEQ ID NO: 423900 - DNA, 15 bp, Homo sapiens
attcagcaaaacacc

SEQ ID NO: 423901 - DNA, 15 bp, Homo sapiens
aattcagcaaaacac

SEQ ID NO: 423902 - DNA, 15 bp, Homo sapiens
taattcagcaaaaca

SEQ ID NO: 423903 - DNA, 15 bp, Homo sapiens
ttaattcagcaaaac

SEQ ID NO: 423904 - DNA, 15 bp, Homo sapiens
attaattcagcaaaa

SEQ ID NO: 423905 - DNA, 15 bp, Homo sapiens
aattaattcagcaaa

SEQ ID NO: 423906 - DNA, 15 bp, Homo sapiens
taattaattcagcaa

SEQ ID NO: 423907 - DNA, 15 bp, Homo sapiens
ctaattaattcagca

SEQ ID NO: 423908 - DNA, 15 bp, Homo sapiens
gctaattaattcagc

SEQ ID NO: 423909 - DNA, 15 bp, Homo sapiens
agctaattaattcag

SEQ ID NO: 423910 - DNA, 15 bp, Homo sapiens
aagctaattaattca

SEQ ID NO: 423911 - DNA, 15 bp, Homo sapiens
caagctaattaattc

SEQ ID NO: 423912 - DNA, 15 bp, Homo sapiens
acaagctaattaatt

SEQ ID NO: 423913 - DNA, 15 bp, Homo sapiens
tacaagctaattaat

SEQ ID NO: 423914 - DNA, 15 bp, Homo sapiens
ctacaagctaattaa

SEQ ID NO: 423915 - DNA, 15 bp, Homo sapiens
actacaagctaatta

SEQ ID NO: 423916 - DNA, 15 bp, Homo sapiens
cactacaagctaatt

SEQ ID NO: 423917 - DNA, 15 bp, Homo sapiens
acactacaagctaat

SEQ ID NO: 423918 - DNA, 15 bp, Homo sapiens
gacactacaagctaa

SEQ ID NO: 423919 - DNA, 15 bp, Homo sapiens
tgacactacaagcta

SEQ ID NO: 423920 - DNA, 15 bp, Homo sapiens
gtgacactacaagct

SEQ ID NO: 423921 - DNA, 15 bp, Homo sapiens
agtgacactacaagc

SEQ ID NO: 423922 - DNA, 15 bp, Homo sapiens
cagtgacactacaag

SEQ ID NO: 423923 - DNA, 15 bp, Homo sapiens
tcagtgacactacaa

SEQ ID NO: 423924 - DNA, 15 bp, Homo sapiens
ttcagtgacactaca

SEQ ID NO: 423925 - DNA, 15 bp, Homo sapiens
gttcagtgacactac

SEQ ID NO: 423926 - DNA, 15 bp, Homo sapiens
agttcagtgacacta

SEQ ID NO: 423927 - DNA, 15 bp, Homo sapiens
aagttcagtgacact

SEQ ID NO: 423928 - DNA, 15 bp, Homo sapiens
taagttcagtgacac

SEQ ID NO: 423929 - DNA, 15 bp, Homo sapiens
gtaagttcagtgaca

SEQ ID NO: 423930 - DNA, 15 bp, Homo sapiens
cgtaagttcagtgac

SEQ ID NO: 423931 - DNA, 15 bp, Homo sapiens
gcgtaagttcagtga

SEQ ID NO: 423932 - DNA, 15 bp, Homo sapiens
cgcgtaagttcagtg

SEQ ID NO: 423933 - DNA, 15 bp, Homo sapiens
acgcgtaagttcagt

SEQ ID NO: 423934 - DNA, 15 bp, Homo sapiens
tacgcgtaagttcag

SEQ ID NO: 423935 - DNA, 15 bp, Homo sapiens
ttacgcgtaagttca

SEQ ID NO: 423936 - DNA, 15 bp, Homo sapiens
gttacgcgtaagttc

SEQ ID NO: 423937 - DNA, 15 bp, Homo sapiens
tgttacgcgtaagtt

SEQ ID NO: 423938 - DNA, 15 bp, Homo sapiens
atgttacgcgtaagt

SEQ ID NO: 423939 - DNA, 15 bp, Homo sapiens
aatgttacgcgtaag

SEQ ID NO: 423940 - DNA, 15 bp, Homo sapiens
aaatgttacgcgtaa

SEQ ID NO: 423941 - DNA, 15 bp, Homo sapiens
aaaatgttacgcgta

SEQ ID NO: 423942 - DNA, 15 bp, Homo sapiens
gaaaatgttacgcgt

SEQ ID NO: 423943 - DNA, 15 bp, Homo sapiens
tgaaaatgttacgcg

SEQ ID NO: 423944 - DNA, 15 bp, Homo sapiens
atgaaaatgttacgc

SEQ ID NO: 423945 - DNA, 15 bp, Homo sapiens
tatgaaaatgttacg

SEQ ID NO: 423946 - DNA, 15 bp, Homo sapiens
atatgaaaatgttac

SEQ ID NO: 423947 - DNA, 15 bp, Homo sapiens
aatatgaaaatgtta

SEQ ID NO: 423948 - DNA, 15 bp, Homo sapiens
aaatatgaaaatgtt

SEQ ID NO: 423949 - DNA, 15 bp, Homo sapiens
gaaatatgaaaatgt

SEQ ID NO: 423950 - DNA, 15 bp, Homo sapiens
agaaatatgaaaatg

SEQ ID NO: 423951 - DNA, 15 bp, Homo sapiens
gagaaatatgaaaat

SEQ ID NO: 423952 - DNA, 15 bp, Homo sapiens
agagaaatatgaaaa

SEQ ID NO: 423953 - DNA, 15 bp, Homo sapiens
aagagaaatatgaaa

SEQ ID NO: 423954 - DNA, 15 bp, Homo sapiens
aaagagaaatatgaa

SEQ ID NO: 423955 - DNA, 15 bp, Homo sapiens
caaagagaaatatga

SEQ ID NO: 423956 - DNA, 15 bp, Homo sapiens
acaaagagaaatatg

SEQ ID NO: 423957 - DNA, 15 bp, Homo sapiens
aacaaagagaaatat

SEQ ID NO: 423958 - DNA, 15 bp, Homo sapiens
caacaaagagaaata

SEQ ID NO: 423959 - DNA, 15 bp, Homo sapiens
gcaacaaagagaaat

SEQ ID NO: 423960 - DNA, 15 bp, Homo sapiens
tgcaacaaagagaaa

SEQ ID NO: 423961 - DNA, 15 bp, Homo sapiens
ctgcaacaaagagaa

SEQ ID NO: 423962 - DNA, 15 bp, Homo sapiens
tctgcaacaaagaga

SEQ ID NO: 423963 - DNA, 15 bp, Homo sapiens
ttctgcaacaaagag

SEQ ID NO: 423964 - DNA, 15 bp, Homo sapiens
attctgcaacaaaga

SEQ ID NO: 423965 - DNA, 15 bp, Homo sapiens
cattctgcaacaaag

SEQ ID NO: 423966 - DNA, 15 bp, Homo sapiens
gcattctgcaacaaa

SEQ ID NO: 423967 - DNA, 15 bp, Homo sapiens
tgcattctgcaacaa

SEQ ID NO: 423968 - DNA, 15 bp, Homo sapiens
ttgcattctgcaaca

SEQ ID NO: 423969 - DNA, 15 bp, Homo sapiens
tttgcattctgcaac

SEQ ID NO: 423970 - DNA, 15 bp, Homo sapiens
ctttgcattctgcaa

SEQ ID NO: 423971 - DNA, 15 bp, Homo sapiens
actttgcattctgca

SEQ ID NO: 423972 - DNA, 15 bp, Homo sapiens
tactttgcattctgc

SEQ ID NO: 423973 - DNA, 15 bp, Homo sapiens
atactttgcattctg

SEQ ID NO: 423974 - DNA, 15 bp, Homo sapiens
catactttgcattct

SEQ ID NO: 423975 - DNA, 15 bp, Homo sapiens
ccatactttgcattc

SEQ ID NO: 423976 - DNA, 15 bp, Homo sapiens
gccatactttgcatt

SEQ ID NO: 423977 - DNA, 15 bp, Homo sapiens
cgccatactttgcat

SEQ ID NO: 423978 - DNA, 15 bp, Homo sapiens
tcgccatactttgca

SEQ ID NO: 423979 - DNA, 15 bp, Homo sapiens
ttcgccatactttgc

SEQ ID NO: 423980 - DNA, 15 bp, Homo sapiens
tttcgccatactttg

SEQ ID NO: 423981 - DNA, 15 bp, Homo sapiens
atttcgccatacttt

SEQ ID NO: 423982 - DNA, 15 bp, Homo sapiens
gatttcgccatactt

SEQ ID NO: 423983 - DNA, 15 bp, Homo sapiens
ggatttcgccatact

SEQ ID NO: 423984 - DNA, 15 bp, Homo sapiens
tggatttcgccatac

SEQ ID NO: 423985 - DNA, 15 bp, Homo sapiens
gtggatttcgccata

SEQ ID NO: 423986 - DNA, 15 bp, Homo sapiens
agtggatttcgccat

SEQ ID NO: 423987 - DNA, 15 bp, Homo sapiens
tagtggatttcgcca

SEQ ID NO: 423988 - DNA, 15 bp, Homo sapiens
ttagtggatttcgcc

SEQ ID NO: 423989 - DNA, 15 bp, Homo sapiens
tttagtggatttcgc

SEQ ID NO: 423990 - DNA, 15 bp, Homo sapiens
atttagtggatttcg

SEQ ID NO: 423991 - DNA, 15 bp, Homo sapiens
aatttagtggatttc

SEQ ID NO: 423992 - DNA, 15 bp, Homo sapiens
aaatttagtggattt

SEQ ID NO: 423993 - DNA, 15 bp, Homo sapiens
taaatttagtggatt

SEQ ID NO: 423994 - DNA, 15 bp, Homo sapiens
ataaatttagtggat

SEQ ID NO: 423995 - DNA, 15 bp, Homo sapiens
aataaatttagtgga

SEQ ID NO: 423996 - DNA, 15 bp, Homo sapiens
aaataaatttagtgg

SEQ ID NO: 423997 - DNA, 15 bp, Homo sapiens
taaataaatttagtg

SEQ ID NO: 423998 - DNA, 15 bp, Homo sapiens
ctaaataaatttagt

SEQ ID NO: 423999 - DNA, 15 bp, Homo sapiens
cctaaataaatttag

SEQ ID NO: 424000 - DNA, 15 bp, Homo sapiens
ccctaaataaattta

SEQ ID NO: 424001 - DNA, 15 bp, Homo sapiens
cccctaaataaattt

SEQ ID NO: 424002 - DNA, 15 bp, Homo sapiens
acccctaaataaatt

SEQ ID NO: 424003 - DNA, 15 bp, Homo sapiens
cacccctaaataaat

SEQ ID NO: 424004 - DNA, 15 bp, Homo sapiens
gcacccctaaataaa

SEQ ID NO: 424005 - DNA, 15 bp, Homo sapiens
agcacccctaaataa

SEQ ID NO: 424006 - DNA, 15 bp, Homo sapiens
cagcacccctaaata

SEQ ID NO: 424007 - DNA, 15 bp, Homo sapiens
tcagcacccctaaat

SEQ ID NO: 424008 - DNA, 15 bp, Homo sapiens
ttcagcacccctaaa

SEQ ID NO: 424009 - DNA, 15 bp, Homo sapiens
attcagcacccctaa

SEQ ID NO: 424010 - DNA, 15 bp, Homo sapiens
tattcagcaccccta

SEQ ID NO: 424011 - DNA, 15 bp, Homo sapiens
gtattcagcacccct

SEQ ID NO: 424012 - DNA, 15 bp, Homo sapiens
tgtattcagcacccc

SEQ ID NO: 424013 - DNA, 15 bp, Homo sapiens
ttgtattcagcaccc

SEQ ID NO: 424014 - DNA, 15 bp, Homo sapiens
attgtattcagcacc

SEQ ID NO: 424015 - DNA, 15 bp, Homo sapiens
gattgtattcagcac

SEQ ID NO: 424016 - DNA, 15 bp, Homo sapiens
cgattgtattcagca

SEQ ID NO: 424017 - DNA, 15 bp, Homo sapiens
ccgattgtattcagc

SEQ ID NO: 424018 - DNA, 15 bp, Homo sapiens
accgattgtattcag

SEQ ID NO: 424019 - DNA, 15 bp, Homo sapiens
taccgattgtattca

SEQ ID NO: 424020 - DNA, 15 bp, Homo sapiens
ttaccgattgtattc

SEQ ID NO: 424021 - DNA, 15 bp, Homo sapiens
cttaccgattgtatt

SEQ ID NO: 424022 - DNA, 15 bp, Homo sapiens
gcttaccgattgtat

SEQ ID NO: 424023 - DNA, 15 bp, Homo sapiens
tgcttaccgattgta

SEQ ID NO: 424024 - DNA, 15 bp, Homo sapiens
atgcttaccgattgt

SEQ ID NO: 424025 - DNA, 15 bp, Homo sapiens
aatgcttaccgattg

SEQ ID NO: 424026 - DNA, 15 bp, Homo sapiens
aaatgcttaccgatt

SEQ ID NO: 424027 - DNA, 15 bp, Homo sapiens
aaaatgcttaccgat

SEQ ID NO: 424028 - DNA, 15 bp, Homo sapiens
caaaatgcttaccga

SEQ ID NO: 424029 - DNA, 15 bp, Homo sapiens
tcaaaatgcttaccg

SEQ ID NO: 424030 - DNA, 15 bp, Homo sapiens
gtcaaaatgcttacc

SEQ ID NO: 424031 - DNA, 15 bp, Homo sapiens
tgtcaaaatgcttac

SEQ ID NO: 424032 - DNA, 15 bp, Homo sapiens
ctgtcaaaatgctta

SEQ ID NO: 424033 - DNA, 15 bp, Homo sapiens
gctgtcaaaatgctt

SEQ ID NO: 424034 - DNA, 15 bp, Homo sapiens
agctgtcaaaatgct

SEQ ID NO: 424035 - DNA, 15 bp, Homo sapiens
aagctgtcaaaatgc

SEQ ID NO: 424036 - DNA, 15 bp, Homo sapiens
caagctgtcaaaatg

SEQ ID NO: 424037 - DNA, 15 bp, Homo sapiens
ccaagctgtcaaaat

SEQ ID NO: 424038 - DNA, 15 bp, Homo sapiens
cccaagctgtcaaaa

SEQ ID NO: 424039 - DNA, 15 bp, Homo sapiens
tcccaagctgtcaaa

SEQ ID NO: 424040 - DNA, 15 bp, Homo sapiens
ttcccaagctgtcaa

SEQ ID NO: 424041 - DNA, 15 bp, Homo sapiens
tttcccaagctgtca

SEQ ID NO: 424042 - DNA, 15 bp, Homo sapiens
gtttcccaagctgtc

SEQ ID NO: 424043 - DNA, 15 bp, Homo sapiens
tgtttcccaagctgt

SEQ ID NO: 424044 - DNA, 15 bp, Homo sapiens
ttgtttcccaagctg

SEQ ID NO: 424045 - DNA, 15 bp, Homo sapiens
tttgtttcccaagct

SEQ ID NO: 424046 - DNA, 15 bp, Homo sapiens
atttgtttcccaagc

SEQ ID NO: 424047 - DNA, 15 bp, Homo sapiens
catttgtttcccaag

SEQ ID NO: 424048 - DNA, 15 bp, Homo sapiens
ccatttgtttcccaa

SEQ ID NO: 424049 - DNA, 15 bp, Homo sapiens
cccatttgtttccca

SEQ ID NO: 424050 - DNA, 15 bp, Homo sapiens
acccatttgtttccc

SEQ ID NO: 424051 - DNA, 15 bp, Homo sapiens
gacccatttgtttcc

SEQ ID NO: 424052 - DNA, 15 bp, Homo sapiens
agacccatttgtttc

SEQ ID NO: 424053 - DNA, 15 bp, Homo sapiens
cagacccatttgttt

SEQ ID NO: 424054 - DNA, 15 bp, Homo sapiens
ccagacccatttgtt

SEQ ID NO: 424055 - DNA, 15 bp, Homo sapiens
accagacccatttgt

SEQ ID NO: 424056 - DNA, 15 bp, Homo sapiens
aaccagacccatttg

SEQ ID NO: 424057 - DNA, 15 bp, Homo sapiens
gaaccagacccattt

SEQ ID NO: 424058 - DNA, 15 bp, Homo sapiens
tgaaccagacccatt

SEQ ID NO: 424059 - DNA, 15 bp, Homo sapiens
ctgaaccagacccat

SEQ ID NO: 424060 - DNA, 15 bp, Homo sapiens
tctgaaccagaccca

SEQ ID NO: 424061 - DNA, 15 bp, Homo sapiens
ctctgaaccagaccc

SEQ ID NO: 424062 - DNA, 15 bp, Homo sapiens
tctctgaaccagacc

SEQ ID NO: 424063 - DNA, 15 bp, Homo sapiens
ctctctgaaccagac

SEQ ID NO: 424064 - DNA, 15 bp, Homo sapiens
gctctctgaaccaga

SEQ ID NO: 424065 - DNA, 15 bp, Homo sapiens
tgctctctgaaccag

SEQ ID NO: 424066 - DNA, 15 bp, Homo sapiens
ttgctctctgaacca

SEQ ID NO: 424067 - DNA, 15 bp, Homo sapiens
tttgctctctgaacc

SEQ ID NO: 424068 - DNA, 15 bp, Homo sapiens
ctttgctctctgaac

SEQ ID NO: 424069 - DNA, 15 bp, Homo sapiens
tctttgctctctgaa

SEQ ID NO: 424070 - DNA, 15 bp, Homo sapiens
gtctttgctctctga

SEQ ID NO: 424071 - DNA, 15 bp, Homo sapiens
tgtctttgctctctg

SEQ ID NO: 424072 - DNA, 15 bp, Homo sapiens
ctgtctttgctctct

SEQ ID NO: 424073 - DNA, 15 bp, Homo sapiens
gctgtctttgctctc

SEQ ID NO: 424074 - DNA, 15 bp, Homo sapiens
tgctgtctttgctct

SEQ ID NO: 424075 - DNA, 15 bp, Homo sapiens
ctgctgtctttgctc

SEQ ID NO: 424076 - DNA, 15 bp, Homo sapiens
gctgctgtctttgct

SEQ ID NO: 424077 - DNA, 15 bp, Homo sapiens
tgctgctgtctttgc

SEQ ID NO: 424078 - DNA, 15 bp, Homo sapiens
ttgctgctgtctttg

SEQ ID NO: 424079 - DNA, 15 bp, Homo sapiens
tttgctgctgtcttt

SEQ ID NO: 424080 - DNA, 15 bp, Homo sapiens
atttgctgctgtctt

SEQ ID NO: 424081 - DNA, 15 bp, Homo sapiens
catttgctgctgtct

SEQ ID NO: 424082 - DNA, 15 bp, Homo sapiens
acatttgctgctgtc

SEQ ID NO: 424083 - DNA, 15 bp, Homo sapiens
aacatttgctgctgt

SEQ ID NO: 424084 - DNA, 15 bp, Homo sapiens
aaacatttgctgctg

SEQ ID NO: 424085 - DNA, 15 bp, Homo sapiens
aaaacatttgctgct

SEQ ID NO: 424086 - DNA, 15 bp, Homo sapiens
aaaaacatttgctgc

SEQ ID NO: 424087 - DNA, 15 bp, Homo sapiens
caaaaacatttgctg

SEQ ID NO: 424088 - DNA, 15 bp, Homo sapiens
gcaaaaacatttgct

SEQ ID NO: 424089 - DNA, 15 bp, Homo sapiens
agcaaaaacatttgc

SEQ ID NO: 424090 - DNA, 15 bp, Homo sapiens
cagcaaaaacatttg

SEQ ID NO: 424091 - DNA, 15 bp, Homo sapiens
ccagcaaaaacattt

SEQ ID NO: 424092 - DNA, 15 bp, Homo sapiens
accagcaaaaacatt

SEQ ID NO: 424093 - DNA, 15 bp, Homo sapiens
aaccagcaaaaacat

SEQ ID NO: 424094 - DNA, 15 bp, Homo sapiens
gaaccagcaaaaaca

SEQ ID NO: 424095 - DNA, 15 bp, Homo sapiens
tgaaccagcaaaaac

SEQ ID NO: 424096 - DNA, 15 bp, Homo sapiens
atgaaccagcaaaaa

SEQ ID NO: 424097 - DNA, 15 bp, Homo sapiens
aatgaaccagcaaaa

SEQ ID NO: 424098 - DNA, 15 bp, Homo sapiens
aaatgaaccagcaaa

SEQ ID NO: 424099 - DNA, 15 bp, Homo sapiens
taaatgaaccagcaa

SEQ ID NO: 424100 - DNA, 15 bp, Homo sapiens
ctaaatgaaccagca

SEQ ID NO: 424101 - DNA, 15 bp, Homo sapiens
cctaaatgaaccagc

SEQ ID NO: 424102 - DNA, 15 bp, Homo sapiens
ccctaaatgaaccag

SEQ ID NO: 424103 - DNA, 15 bp, Homo sapiens
cccctaaatgaacca

SEQ ID NO: 424104 - DNA, 15 bp, Homo sapiens
acccctaaatgaacc

SEQ ID NO: 424105 - DNA, 15 bp, Homo sapiens
gacccctaaatgaac

SEQ ID NO: 424106 - DNA, 15 bp, Homo sapiens
tgacccctaaatgaa

SEQ ID NO: 424107 - DNA, 15 bp, Homo sapiens
atgacccctaaatga

SEQ ID NO: 424108 - DNA, 15 bp, Homo sapiens
aatgacccctaaatg

SEQ ID NO: 424109 - DNA, 15 bp, Homo sapiens
caatgacccctaaat

SEQ ID NO: 424110 - DNA, 15 bp, Homo sapiens
acaatgacccctaaa

SEQ ID NO: 424111 - DNA, 15 bp, Homo sapiens
tacaatgacccctaa

SEQ ID NO: 424112 - DNA, 15 bp, Homo sapiens
ttacaatgaccccta

SEQ ID NO: 424113 - DNA, 15 bp, Homo sapiens
gttacaatgacccct

SEQ ID NO: 424114 - DNA, 15 bp, Homo sapiens
tgttacaatgacccc

SEQ ID NO: 424115 - DNA, 15 bp, Homo sapiens
ctgttacaatgaccc

SEQ ID NO: 424116 - DNA, 15 bp, Homo sapiens
actgttacaatgacc

SEQ ID NO: 424117 - DNA, 15 bp, Homo sapiens
gactgttacaatgac

SEQ ID NO: 424118 - DNA, 15 bp, Homo sapiens
agactgttacaatga

SEQ ID NO: 424119 - DNA, 15 bp, Homo sapiens
tagactgttacaatg

SEQ ID NO: 424120 - DNA, 15 bp, Homo sapiens
atagactgttacaat

SEQ ID NO: 424121 - DNA, 15 bp, Homo sapiens
catagactgttacaa

SEQ ID NO: 424122 - DNA, 15 bp, Homo sapiens
acatagactgttaca

SEQ ID NO: 424123 - DNA, 15 bp, Homo sapiens
tacatagactgttac

SEQ ID NO: 424124 - DNA, 15 bp, Homo sapiens
ctacatagactgtta

SEQ ID NO: 424125 - DNA, 15 bp, Homo sapiens
actacatagactgtt

SEQ ID NO: 424126 - DNA, 15 bp, Homo sapiens
cactacatagactgt

SEQ ID NO: 424127 - DNA, 15 bp, Homo sapiens
gcactacatagactg

SEQ ID NO: 424128 - DNA, 15 bp, Homo sapiens
cgcactacatagact

SEQ ID NO: 424129 - DNA, 15 bp, Homo sapiens
acgcactacatagac

SEQ ID NO: 424130 - DNA, 15 bp, Homo sapiens
gacgcactacataga

SEQ ID NO: 424131 - DNA, 15 bp, Homo sapiens
ggacgcactacatag

SEQ ID NO: 424132 - DNA, 15 bp, Homo sapiens
tggacgcactacata

SEQ ID NO: 424133 - DNA, 15 bp, Homo sapiens
atggacgcactacat

SEQ ID NO: 424134 - DNA, 15 bp, Homo sapiens
aatggacgcactaca

SEQ ID NO: 424135 - DNA, 15 bp, Homo sapiens
aaatggacgcactac

SEQ ID NO: 424136 - DNA, 15 bp, Homo sapiens
aaaatggacgcacta

SEQ ID NO: 424137 - DNA, 15 bp, Homo sapiens
aaaaatggacgcact

SEQ ID NO: 424138 - DNA, 15 bp, Homo sapiens
aaaaaatggacgcac

SEQ ID NO: 424139 - DNA, 15 bp, Homo sapiens
taaaaaatggacgca

SEQ ID NO: 424140 - DNA, 15 bp, Homo sapiens
ttaaaaaatggacgc

SEQ ID NO: 424141 - DNA, 15 bp, Homo sapiens
attaaaaaatggacg

SEQ ID NO: 424142 - DNA, 15 bp, Homo sapiens
tattaaaaaatggac

SEQ ID NO: 424143 - DNA, 15 bp, Homo sapiens
gtattaaaaaatgga

SEQ ID NO: 424144 - DNA, 15 bp, Homo sapiens
agtattaaaaaatgg

SEQ ID NO: 424145 - DNA, 15 bp, Homo sapiens
tagtattaaaaaatg

SEQ ID NO: 424146 - DNA, 15 bp, Homo sapiens
atagtattaaaaaat

SEQ ID NO: 424147 - DNA, 15 bp, Homo sapiens
gatagtattaaaaaa

SEQ ID NO: 424148 - DNA, 15 bp, Homo sapiens
agatagtattaaaaa

SEQ ID NO: 424149 - DNA, 15 bp, Homo sapiens
aagatagtattaaaa

SEQ ID NO: 424150 - DNA, 15 bp, Homo sapiens
gaagatagtattaaa

SEQ ID NO: 424151 - DNA, 15 bp, Homo sapiens
tgaagatagtattaa

SEQ ID NO: 424152 - DNA, 15 bp, Homo sapiens
ttgaagatagtatta

SEQ ID NO: 424153 - DNA, 15 bp, Homo sapiens
tttgaagatagtatt

SEQ ID NO: 424154 - DNA, 15 bp, Homo sapiens
atttgaagatagtat

SEQ ID NO: 424155 - DNA, 15 bp, Homo sapiens
catttgaagatagta

SEQ ID NO: 424156 - DNA, 15 bp, Homo sapiens
acatttgaagatagt

SEQ ID NO: 424157 - DNA, 15 bp, Homo sapiens
aacatttgaagatag

SEQ ID NO: 424158 - DNA, 15 bp, Homo sapiens
aaacatttgaagata

SEQ ID NO: 424159 - DNA, 15 bp, Homo sapiens
aaaacatttgaagat

SEQ ID NO: 424160 - DNA, 15 bp, Homo sapiens
caaaacatttgaaga

SEQ ID NO: 424161 - DNA, 15 bp, Homo sapiens
tcaaaacatttgaag

SEQ ID NO: 424162 - DNA, 15 bp, Homo sapiens
atcaaaacatttgaa

SEQ ID NO: 424163 - DNA, 15 bp, Homo sapiens
aatcaaaacatttga

SEQ ID NO: 424164 - DNA, 15 bp, Homo sapiens
aaatcaaaacatttg

SEQ ID NO: 424165 - DNA, 15 bp, Homo sapiens
aaaatcaaaacattt

SEQ ID NO: 424166 - DNA, 15 bp, Homo sapiens
aaaaatcaaaacatt

SEQ ID NO: 424167 - DNA, 15 bp, Homo sapiens
gaaaaatcaaaacat

SEQ ID NO: 424168 - DNA, 15 bp, Homo sapiens
agaaaaatcaaaaca

SEQ ID NO: 424169 - DNA, 15 bp, Homo sapiens
cagaaaaatcaaaac

SEQ ID NO: 424170 - DNA, 15 bp, Homo sapiens
acagaaaaatcaaaa

SEQ ID NO: 424171 - DNA, 15 bp, Homo sapiens
aacagaaaaatcaaa

SEQ ID NO: 424172 - DNA, 15 bp, Homo sapiens
aaacagaaaaatcaa

SEQ ID NO: 424173 - DNA, 15 bp, Homo sapiens
aaaacagaaaaatca

SEQ ID NO: 424174 - DNA, 15 bp, Homo sapiens
taaaacagaaaaatc

SEQ ID NO: 424175 - DNA, 15 bp, Homo sapiens
ataaaacagaaaaat

SEQ ID NO: 424176 - DNA, 15 bp, Homo sapiens
tataaaacagaaaaa

SEQ ID NO: 424177 - DNA, 15 bp, Homo sapiens
ttataaaacagaaaa

SEQ ID NO: 424178 - DNA, 15 bp, Homo sapiens
tttataaaacagaaa

SEQ ID NO: 424179 - DNA, 15 bp, Homo sapiens
atttataaaacagaa

SEQ ID NO: 424180 - DNA, 15 bp, Homo sapiens
tatttataaaacaga

SEQ ID NO: 424181 - DNA, 15 bp, Homo sapiens
atatttataaaacag

SEQ ID NO: 424182 - DNA, 15 bp, Homo sapiens
aatatttataaaaca

SEQ ID NO: 424183 - DNA, 15 bp, Homo sapiens
aaatatttataaaac

SEQ ID NO: 424184 - DNA, 15 bp, Homo sapiens
aaaatatttataaaa

SEQ ID NO: 424185 - DNA, 15 bp, Homo sapiens
taaaatatttataaa

SEQ ID NO: 424186 - DNA, 15 bp, Homo sapiens
ctaaaatatttataa

SEQ ID NO: 424187 - DNA, 15 bp, Homo sapiens
gctaaaatatttata

SEQ ID NO: 424188 - DNA, 15 bp, Homo sapiens
tgctaaaatatttat

SEQ ID NO: 424189 - DNA, 15 bp, Homo sapiens
gtgctaaaatattta

SEQ ID NO: 424190 - DNA, 15 bp, Homo sapiens
agtgctaaaatattt

SEQ ID NO: 424191 - DNA, 15 bp, Homo sapiens
tagtgctaaaatatt

SEQ ID NO: 424192 - DNA, 15 bp, Homo sapiens
ctagtgctaaaatat

SEQ ID NO: 424193 - DNA, 15 bp, Homo sapiens
tctagtgctaaaata

SEQ ID NO: 424194 - DNA, 15 bp, Homo sapiens
atctagtgctaaaat

SEQ ID NO: 424195 - DNA, 15 bp, Homo sapiens
aatctagtgctaaaa

SEQ ID NO: 424196 - DNA, 15 bp, Homo sapiens
aaatctagtgctaaa

SEQ ID NO: 424197 - DNA, 15 bp, Homo sapiens
caaatctagtgctaa

SEQ ID NO: 424198 - DNA, 15 bp, Homo sapiens
ccaaatctagtgcta

SEQ ID NO: 424199 - DNA, 15 bp, Homo sapiens
cccaaatctagtgct

SEQ ID NO: 424200 - DNA, 15 bp, Homo sapiens
tcccaaatctagtgc

SEQ ID NO: 424201 - DNA, 15 bp, Homo sapiens
atcccaaatctagtg

SEQ ID NO: 424202 - DNA, 15 bp, Homo sapiens
tatcccaaatctagt

SEQ ID NO: 424203 - DNA, 15 bp, Homo sapiens
ttatcccaaatctag

SEQ ID NO: 424204 - DNA, 15 bp, Homo sapiens
attatcccaaatcta

SEQ ID NO: 424205 - DNA, 15 bp, Homo sapiens
cattatcccaaatct

SEQ ID NO: 424206 - DNA, 15 bp, Homo sapiens
acattatcccaaatc

SEQ ID NO: 424207 - DNA, 15 bp, Homo sapiens
tacattatcccaaat

SEQ ID NO: 424208 - DNA, 15 bp, Homo sapiens
gtacattatcccaaa

SEQ ID NO: 424209 - DNA, 15 bp, Homo sapiens
tgtacattatcccaa

SEQ ID NO: 424210 - DNA, 15 bp, Homo sapiens
ttgtacattatccca

SEQ ID NO: 424211 - DNA, 15 bp, Homo sapiens
tttgtacattatccc

SEQ ID NO: 424212 - DNA, 15 bp, Homo sapiens
ttttgtacattatcc

SEQ ID NO: 424213 - DNA, 15 bp, Homo sapiens
tttttgtacattatc

SEQ ID NO: 424214 - DNA, 15 bp, Homo sapiens
atttttgtacattat

SEQ ID NO: 424215 - DNA, 15 bp, Homo sapiens
catttttgtacatta

SEQ ID NO: 424216 - DNA, 15 bp, Homo sapiens
acatttttgtacatt

SEQ ID NO: 424217 - DNA, 15 bp, Homo sapiens
cacatttttgtacat

SEQ ID NO: 424218 - DNA, 15 bp, Homo sapiens
acacatttttgtaca

SEQ ID NO: 424219 - DNA, 15 bp, Homo sapiens
tacacatttttgtac

SEQ ID NO: 424220 - DNA, 15 bp, Homo sapiens
ctacacatttttgta

SEQ ID NO: 424221 - DNA, 15 bp, Homo sapiens
actacacatttttgt

SEQ ID NO: 424222 - DNA, 15 bp, Homo sapiens
aactacacatttttg

SEQ ID NO: 424223 - DNA, 15 bp, Homo sapiens
aaactacacattttt

SEQ ID NO: 424224 - DNA, 15 bp, Homo sapiens
aaaactacacatttt

SEQ ID NO: 424225 - DNA, 15 bp, Homo sapiens
aaaaactacacattt

SEQ ID NO: 424226 - DNA, 15 bp, Homo sapiens
taaaaactacacatt

SEQ ID NO: 424227 - DNA, 15 bp, Homo sapiens
ctaaaaactacacat

SEQ ID NO: 424228 - DNA, 15 bp, Homo sapiens
tctaaaaactacaca

SEQ ID NO: 424229 - DNA, 15 bp, Homo sapiens
ctctaaaaactacac

SEQ ID NO: 424230 - DNA, 15 bp, Homo sapiens
actctaaaaactaca

SEQ ID NO: 424231 - DNA, 15 bp, Homo sapiens
aactctaaaaactac

SEQ ID NO: 424232 - DNA, 15 bp, Homo sapiens
aaactctaaaaacta

SEQ ID NO: 424233 - DNA, 15 bp, Homo sapiens
aaaactctaaaaact

SEQ ID NO: 424234 - DNA, 15 bp, Homo sapiens
aaaaactctaaaaac

SEQ ID NO: 424235 - DNA, 15 bp, Homo sapiens
caaaaactctaaaaa

SEQ ID NO: 424236 - DNA, 15 bp, Homo sapiens
acaaaaactctaaaa

SEQ ID NO: 424237 - DNA, 15 bp, Homo sapiens
tacaaaaactctaaa

SEQ ID NO: 424238 - DNA, 15 bp, Homo sapiens
atacaaaaactctaa

SEQ ID NO: 424239 - DNA, 15 bp, Homo sapiens
aatacaaaaactcta

SEQ ID NO: 424240 - DNA, 15 bp, Homo sapiens
taatacaaaaactct

SEQ ID NO: 424241 - DNA, 15 bp, Homo sapiens
ttaatacaaaaactc

SEQ ID NO: 424242 - DNA, 15 bp, Homo sapiens
gttaatacaaaaact

SEQ ID NO: 424243 - DNA, 15 bp, Homo sapiens
tgttaatacaaaaac

SEQ ID NO: 424244 - DNA, 15 bp, Homo sapiens
ctgttaatacaaaaa

SEQ ID NO: 424245 - DNA, 15 bp, Homo sapiens
actgttaatacaaaa

SEQ ID NO: 424246 - DNA, 15 bp, Homo sapiens
aactgttaatacaaa

SEQ ID NO: 424247 - DNA, 15 bp, Homo sapiens
taactgttaatacaa

SEQ ID NO: 424248 - DNA, 15 bp, Homo sapiens
ataactgttaataca

SEQ ID NO: 424249 - DNA, 15 bp, Homo sapiens
aataactgttaatac

SEQ ID NO: 424250 - DNA, 15 bp, Homo sapiens
gaataactgttaata

SEQ ID NO: 424251 - DNA, 15 bp, Homo sapiens
agaataactgttaat

SEQ ID NO: 424252 - DNA, 15 bp, Homo sapiens
aagaataactgttaa

SEQ ID NO: 424253 - DNA, 15 bp, Homo sapiens
aaagaataactgtta

SEQ ID NO: 424254 - DNA, 15 bp, Homo sapiens
aaaagaataactgtt

SEQ ID NO: 424255 - DNA, 15 bp, Homo sapiens
gaaaagaataactgt

SEQ ID NO: 424256 - DNA, 15 bp, Homo sapiens
tgaaaagaataactg

SEQ ID NO: 424257 - DNA, 15 bp, Homo sapiens
ttgaaaagaataact

SEQ ID NO: 424258 - DNA, 15 bp, Homo sapiens
attgaaaagaataac

SEQ ID NO: 424259 - DNA, 15 bp, Homo sapiens
tattgaaaagaataa

SEQ ID NO: 424260 - DNA, 15 bp, Homo sapiens
atattgaaaagaata

SEQ ID NO: 424261 - DNA, 15 bp, Homo sapiens
tatattgaaaagaat

SEQ ID NO: 424262 - DNA, 15 bp, Homo sapiens
atatattgaaaagaa

SEQ ID NO: 424263 - DNA, 15 bp, Homo sapiens
tatatattgaaaaga

SEQ ID NO: 424264 - DNA, 15 bp, Homo sapiens
gtatatattgaaaag

SEQ ID NO: 424265 - DNA, 15 bp, Homo sapiens
agtatatattgaaaa

SEQ ID NO: 424266 - DNA, 15 bp, Homo sapiens
tagtatatattgaaa

SEQ ID NO: 424267 - DNA, 15 bp, Homo sapiens
atagtatatattgaa

SEQ ID NO: 424268 - DNA, 15 bp, Homo sapiens
tatagtatatattga

SEQ ID NO: 424269 - DNA, 15 bp, Homo sapiens
gtatagtatatattg

SEQ ID NO: 424270 - DNA, 15 bp, Homo sapiens
tgtatagtatatatt

SEQ ID NO: 424271 - DNA, 15 bp, Homo sapiens
atgtatagtatatat

SEQ ID NO: 424272 - DNA, 15 bp, Homo sapiens
aatgtatagtatata

SEQ ID NO: 424273 - DNA, 15 bp, Homo sapiens
caatgtatagtatat

SEQ ID NO: 424274 - DNA, 15 bp, Homo sapiens
tcaatgtatagtata

SEQ ID NO: 424275 - DNA, 15 bp, Homo sapiens
ttcaatgtatagtat

SEQ ID NO: 424276 - DNA, 15 bp, Homo sapiens
tttcaatgtatagta

SEQ ID NO: 424277 - DNA, 15 bp, Homo sapiens
ttttcaatgtatagt

SEQ ID NO: 424278 - DNA, 15 bp, Homo sapiens
gttttcaatgtatag

SEQ ID NO: 424279 - DNA, 15 bp, Homo sapiens
tgttttcaatgtata

SEQ ID NO: 424280 - DNA, 15 bp, Homo sapiens
atgttttcaatgtat

SEQ ID NO: 424281 - DNA, 15 bp, Homo sapiens
aatgttttcaatgta

SEQ ID NO: 424282 - DNA, 15 bp, Homo sapiens
aaatgttttcaatgt

SEQ ID NO: 424283 - DNA, 15 bp, Homo sapiens
aaaatgttttcaatg

SEQ ID NO: 424284 - DNA, 15 bp, Homo sapiens
caaaatgttttcaat

SEQ ID NO: 424285 - DNA, 15 bp, Homo sapiens
tcaaaatgttttcaa

SEQ ID NO: 424286 - DNA, 15 bp, Homo sapiens
ttcaaaatgttttca

SEQ ID NO: 424287 - DNA, 15 bp, Homo sapiens
cttcaaaatgttttc

SEQ ID NO: 424288 - DNA, 15 bp, Homo sapiens
gcttcaaaatgtttt

SEQ ID NO: 424289 - DNA, 15 bp, Homo sapiens
agcttcaaaatgttt

SEQ ID NO: 424290 - DNA, 15 bp, Homo sapiens
aagcttcaaaatgtt

SEQ ID NO: 424291 - DNA, 15 bp, Homo sapiens
taagcttcaaaatgt

SEQ ID NO: 424292 - DNA, 15 bp, Homo sapiens
gtaagcttcaaaatg

SEQ ID NO: 424293 - DNA, 15 bp, Homo sapiens
ggtaagcttcaaaat

SEQ ID NO: 424294 - DNA, 15 bp, Homo sapiens
aggtaagcttcaaaa

SEQ ID NO: 424295 - DNA, 15 bp, Homo sapiens
caggtaagcttcaaa

SEQ ID NO: 424296 - DNA, 15 bp, Homo sapiens
ccaggtaagcttcaa

SEQ ID NO: 424297 - DNA, 15 bp, Homo sapiens
tccaggtaagcttca

SEQ ID NO: 424298 - DNA, 15 bp, Homo sapiens
ttccaggtaagcttc

SEQ ID NO: 424299 - DNA, 15 bp, Homo sapiens
attccaggtaagctt

SEQ ID NO: 424300 - DNA, 15 bp, Homo sapiens
tattccaggtaagct

SEQ ID NO: 424301 - DNA, 15 bp, Homo sapiens
atattccaggtaagc

SEQ ID NO: 424302 - DNA, 15 bp, Homo sapiens
catattccaggtaag

SEQ ID NO: 424303 - DNA, 15 bp, Homo sapiens
ccatattccaggtaa

SEQ ID NO: 424304 - DNA, 15 bp, Homo sapiens
accatattccaggta

SEQ ID NO: 424305 - DNA, 15 bp, Homo sapiens
aaccatattccaggt

SEQ ID NO: 424306 - DNA, 15 bp, Homo sapiens
taaccatattccagg

SEQ ID NO: 424307 - DNA, 15 bp, Homo sapiens
ataaccatattccag

SEQ ID NO: 424308 - DNA, 15 bp, Homo sapiens
tataaccatattcca

SEQ ID NO: 424309 - DNA, 15 bp, Homo sapiens
ctataaccatattcc

SEQ ID NO: 424310 - DNA, 15 bp, Homo sapiens
tctataaccatattc

SEQ ID NO: 424311 - DNA, 15 bp, Homo sapiens
ctctataaccatatt

SEQ ID NO: 424312 - DNA, 15 bp, Homo sapiens
tctctataaccatat

SEQ ID NO: 424313 - DNA, 15 bp, Homo sapiens
atctctataaccata

SEQ ID NO: 424314 - DNA, 15 bp, Homo sapiens
catctctataaccat

SEQ ID NO: 424315 - DNA, 15 bp, Homo sapiens
acatctctataacca

SEQ ID NO: 424316 - DNA, 15 bp, Homo sapiens
gacatctctataacc

SEQ ID NO: 424317 - DNA, 15 bp, Homo sapiens
cgacatctctataac

SEQ ID NO: 424318 - DNA, 15 bp, Homo sapiens
gcgacatctctataa

SEQ ID NO: 424319 - DNA, 15 bp, Homo sapiens
tgcgacatctctata

SEQ ID NO: 424320 - DNA, 15 bp, Homo sapiens
ctgcgacatctctat

SEQ ID NO: 424321 - DNA, 15 bp, Homo sapiens
tctgcgacatctcta

SEQ ID NO: 424322 - DNA, 15 bp, Homo sapiens
ttctgcgacatctct

SEQ ID NO: 424323 - DNA, 15 bp, Homo sapiens
cttctgcgacatctc

SEQ ID NO: 424324 - DNA, 15 bp, Homo sapiens
acttctgcgacatct

SEQ ID NO: 424325 - DNA, 15 bp, Homo sapiens
aacttctgcgacatc

SEQ ID NO: 424326 - DNA, 15 bp, Homo sapiens
taacttctgcgacat

SEQ ID NO: 424327 - DNA, 15 bp, Homo sapiens
ataacttctgcgaca

SEQ ID NO: 424328 - DNA, 15 bp, Homo sapiens
cataacttctgcgac

SEQ ID NO: 424329 - DNA, 15 bp, Homo sapiens
acataacttctgcga

SEQ ID NO: 424330 - DNA, 15 bp, Homo sapiens
aacataacttctgcg

SEQ ID NO: 424331 - DNA, 15 bp, Homo sapiens
caacataacttctgc

SEQ ID NO: 424332 - DNA, 15 bp, Homo sapiens
ccaacataacttctg

SEQ ID NO: 424333 - DNA, 15 bp, Homo sapiens
tccaacataacttct

SEQ ID NO: 424334 - DNA, 15 bp, Homo sapiens
ttccaacataacttc

SEQ ID NO: 424335 - DNA, 15 bp, Homo sapiens
attccaacataactt

SEQ ID NO: 424336 - DNA, 15 bp, Homo sapiens
aattccaacataact

SEQ ID NO: 424337 - DNA, 15 bp, Homo sapiens
aaattccaacataac

SEQ ID NO: 424338 - DNA, 15 bp, Homo sapiens
taaattccaacataa

SEQ ID NO: 424339 - DNA, 15 bp, Homo sapiens
ctaaattccaacata

SEQ ID NO: 424340 - DNA, 15 bp, Homo sapiens
actaaattccaacat

SEQ ID NO: 424341 - DNA, 15 bp, Homo sapiens
aactaaattccaaca

SEQ ID NO: 424342 - DNA, 15 bp, Homo sapiens
aaactaaattccaac

SEQ ID NO: 424343 - DNA, 15 bp, Homo sapiens
taaactaaattccaa

SEQ ID NO: 424344 - DNA, 15 bp, Homo sapiens
ctaaactaaattcca

SEQ ID NO: 424345 - DNA, 15 bp, Homo sapiens
gctaaactaaattcc

SEQ ID NO: 424346 - DNA, 15 bp, Homo sapiens
tgctaaactaaattc

SEQ ID NO: 424347 - DNA, 15 bp, Homo sapiens
ttgctaaactaaatt

SEQ ID NO: 424348 - DNA, 15 bp, Homo sapiens
tttgctaaactaaat

SEQ ID NO: 424349 - DNA, 15 bp, Homo sapiens
ctttgctaaactaaa

SEQ ID NO: 424350 - DNA, 15 bp, Homo sapiens
actttgctaaactaa

SEQ ID NO: 424351 - DNA, 15 bp, Homo sapiens
tactttgctaaacta

SEQ ID NO: 424352 - DNA, 15 bp, Homo sapiens
ttactttgctaaact

SEQ ID NO: 424353 - DNA, 15 bp, Homo sapiens
attactttgctaaac

SEQ ID NO: 424354 - DNA, 15 bp, Homo sapiens
aattactttgctaaa

SEQ ID NO: 424355 - DNA, 15 bp, Homo sapiens
taattactttgctaa

SEQ ID NO: 424356 - DNA, 15 bp, Homo sapiens
ctaattactttgcta

SEQ ID NO: 424357 - DNA, 15 bp, Homo sapiens
cctaattactttgct

SEQ ID NO: 424358 - DNA, 15 bp, Homo sapiens
gcctaattactttgc

SEQ ID NO: 424359 - DNA, 15 bp, Homo sapiens
tgcctaattactttg

SEQ ID NO: 424360 - DNA, 15 bp, Homo sapiens
ttgcctaattacttt

SEQ ID NO: 424361 - DNA, 15 bp, Homo sapiens
tttgcctaattactt

SEQ ID NO: 424362 - DNA, 15 bp, Homo sapiens
atttgcctaattact

SEQ ID NO: 424363 - DNA, 15 bp, Homo sapiens
aatttgcctaattac

SEQ ID NO: 424364 - DNA, 15 bp, Homo sapiens
taatttgcctaatta

SEQ ID NO: 424365 - DNA, 15 bp, Homo sapiens
ctaatttgcctaatt

SEQ ID NO: 424366 - DNA, 15 bp, Homo sapiens
tctaatttgcctaat

SEQ ID NO: 424367 - DNA, 15 bp, Homo sapiens
ttctaatttgcctaa

SEQ ID NO: 424368 - DNA, 15 bp, Homo sapiens
attctaatttgccta

SEQ ID NO: 424369 - DNA, 15 bp, Homo sapiens
aattctaatttgcct

SEQ ID NO: 424370 - DNA, 15 bp, Homo sapiens
aaattctaatttgcc

SEQ ID NO: 424371 - DNA, 15 bp, Homo sapiens
aaaattctaatttgc

SEQ ID NO: 424372 - DNA, 15 bp, Homo sapiens
gaaaattctaatttg

SEQ ID NO: 424373 - DNA, 15 bp, Homo sapiens
tgaaaattctaattt

SEQ ID NO: 424374 - DNA, 15 bp, Homo sapiens
atgaaaattctaatt

SEQ ID NO: 424375 - DNA, 15 bp, Homo sapiens
tatgaaaattctaat

SEQ ID NO: 424376 - DNA, 15 bp, Homo sapiens
ctatgaaaattctaa

SEQ ID NO: 424377 - DNA, 15 bp, Homo sapiens
gctatgaaaattcta

SEQ ID NO: 424378 - DNA, 15 bp, Homo sapiens
agctatgaaaattct

SEQ ID NO: 424379 - DNA, 15 bp, Homo sapiens
aagctatgaaaattc

SEQ ID NO: 424380 - DNA, 15 bp, Homo sapiens
aaagctatgaaaatt

SEQ ID NO: 424381 - DNA, 15 bp, Homo sapiens
taaagctatgaaaat

SEQ ID NO: 424382 - DNA, 15 bp, Homo sapiens
ctaaagctatgaaaa

SEQ ID NO: 424383 - DNA, 15 bp, Homo sapiens
cctaaagctatgaaa

SEQ ID NO: 424384 - DNA, 15 bp, Homo sapiens
tcctaaagctatgaa

SEQ ID NO: 424385 - DNA, 15 bp, Homo sapiens
ttcctaaagctatga

SEQ ID NO: 424386 - DNA, 15 bp, Homo sapiens
tttcctaaagctatg

SEQ ID NO: 424387 - DNA, 15 bp, Homo sapiens
ctttcctaaagctat

SEQ ID NO: 424388 - DNA, 15 bp, Homo sapiens
actttcctaaagcta

SEQ ID NO: 424389 - DNA, 15 bp, Homo sapiens
cactttcctaaagct

SEQ ID NO: 424390 - DNA, 15 bp, Homo sapiens
acactttcctaaagc

SEQ ID NO: 424391 - DNA, 15 bp, Homo sapiens
gacactttcctaaag

SEQ ID NO: 424392 - DNA, 15 bp, Homo sapiens
agacactttcctaaa

SEQ ID NO: 424393 - DNA, 15 bp, Homo sapiens
tagacactttcctaa

SEQ ID NO: 424394 - DNA, 15 bp, Homo sapiens
atagacactttccta

SEQ ID NO: 424395 - DNA, 15 bp, Homo sapiens
aatagacactttcct

SEQ ID NO: 424396 - DNA, 15 bp, Homo sapiens
gaatagacactttcc

SEQ ID NO: 424397 - DNA, 15 bp, Homo sapiens
tgaatagacactttc

SEQ ID NO: 424398 - DNA, 15 bp, Homo sapiens
atgaatagacacttt

SEQ ID NO: 424399 - DNA, 15 bp, Homo sapiens
tatgaatagacactt

SEQ ID NO: 424400 - DNA, 15 bp, Homo sapiens
ttatgaatagacact

SEQ ID NO: 424401 - DNA, 15 bp, Homo sapiens
attatgaatagacac

SEQ ID NO: 424402 - DNA, 15 bp, Homo sapiens
tattatgaatagaca

SEQ ID NO: 424403 - DNA, 15 bp, Homo sapiens
atattatgaatagac

SEQ ID NO: 424404 - DNA, 15 bp, Homo sapiens
catattatgaataga

SEQ ID NO: 424405 - DNA, 15 bp, Homo sapiens
tcatattatgaatag

SEQ ID NO: 424406 - DNA, 15 bp, Homo sapiens
ttcatattatgaata

SEQ ID NO: 424407 - DNA, 15 bp, Homo sapiens
attcatattatgaat

SEQ ID NO: 424408 - DNA, 15 bp, Homo sapiens
aattcatattatgaa

SEQ ID NO: 424409 - DNA, 15 bp, Homo sapiens
taattcatattatga

SEQ ID NO: 424410 - DNA, 15 bp, Homo sapiens
ctaattcatattatg

SEQ ID NO: 424411 - DNA, 15 bp, Homo sapiens
cctaattcatattat

SEQ ID NO: 424412 - DNA, 15 bp, Homo sapiens
ccctaattcatatta

SEQ ID NO: 424413 - DNA, 15 bp, Homo sapiens
tccctaattcatatt

SEQ ID NO: 424414 - DNA, 15 bp, Homo sapiens
ttccctaattcatat

SEQ ID NO: 424415 - DNA, 15 bp, Homo sapiens
cttccctaattcata

SEQ ID NO: 424416 - DNA, 15 bp, Homo sapiens
ccttccctaattcat

SEQ ID NO: 424417 - DNA, 15 bp, Homo sapiens
accttccctaattca

SEQ ID NO: 424418 - DNA, 15 bp, Homo sapiens
aaccttccctaattc

SEQ ID NO: 424419 - DNA, 15 bp, Homo sapiens
aaaccttccctaatt

SEQ ID NO: 424420 - DNA, 15 bp, Homo sapiens
aaaaccttccctaat

SEQ ID NO: 424421 - DNA, 15 bp, Homo sapiens
gaaaaccttccctaa

SEQ ID NO: 424422 - DNA, 15 bp, Homo sapiens
tgaaaaccttcccta

SEQ ID NO: 424423 - DNA, 15 bp, Homo sapiens
atgaaaaccttccct

SEQ ID NO: 424424 - DNA, 15 bp, Homo sapiens
aatgaaaaccttccc

SEQ ID NO: 424425 - DNA, 15 bp, Homo sapiens
taatgaaaaccttcc

SEQ ID NO: 424426 - DNA, 15 bp, Homo sapiens
ctaatgaaaaccttc

SEQ ID NO: 424427 - DNA, 15 bp, Homo sapiens
gctaatgaaaacctt

SEQ ID NO: 424428 - DNA, 15 bp, Homo sapiens
tgctaatgaaaacct

SEQ ID NO: 424429 - DNA, 15 bp, Homo sapiens
ttgctaatgaaaacc

SEQ ID NO: 424430 - DNA, 15 bp, Homo sapiens
cttgctaatgaaaac

SEQ ID NO: 424431 - DNA, 15 bp, Homo sapiens
ccttgctaatgaaaa

SEQ ID NO: 424432 - DNA, 15 bp, Homo sapiens
cccttgctaatgaaa

SEQ ID NO: 424433 - DNA, 15 bp, Homo sapiens
gcccttgctaatgaa

SEQ ID NO: 424434 - DNA, 15 bp, Homo sapiens
agcccttgctaatga

SEQ ID NO: 424435 - DNA, 15 bp, Homo sapiens
tagcccttgctaatg

SEQ ID NO: 424436 - DNA, 15 bp, Homo sapiens
ctagcccttgctaat

SEQ ID NO: 424437 - DNA, 15 bp, Homo sapiens
actagcccttgctaa

SEQ ID NO: 424438 - DNA, 15 bp, Homo sapiens
tactagcccttgcta

SEQ ID NO: 424439 - DNA, 15 bp, Homo sapiens
ttactagcccttgct

SEQ ID NO: 424440 - DNA, 15 bp, Homo sapiens
tttactagcccttgc

SEQ ID NO: 424441 - DNA, 15 bp, Homo sapiens
atttactagcccttg

SEQ ID NO: 424442 - DNA, 15 bp, Homo sapiens
aatttactagccctt

SEQ ID NO: 424443 - DNA, 15 bp, Homo sapiens
aaatttactagccct

SEQ ID NO: 424444 - DNA, 15 bp, Homo sapiens
aaaatttactagccc

SEQ ID NO: 424445 - DNA, 15 bp, Homo sapiens
taaaatttactagcc

SEQ ID NO: 424446 - DNA, 15 bp, Homo sapiens
ttaaaatttactagc

SEQ ID NO: 424447 - DNA, 15 bp, Homo sapiens
cttaaaatttactag

SEQ ID NO: 424448 - DNA, 15 bp, Homo sapiens
tcttaaaatttacta

SEQ ID NO: 424449 - DNA, 15 bp, Homo sapiens
gtcttaaaatttact

SEQ ID NO: 424450 - DNA, 15 bp, Homo sapiens
tgtcttaaaatttac

SEQ ID NO: 424451 - DNA, 15 bp, Homo sapiens
ttgtcttaaaattta

SEQ ID NO: 424452 - DNA, 15 bp, Homo sapiens
tttgtcttaaaattt

SEQ ID NO: 424453 - DNA, 15 bp, Homo sapiens
ttttgtcttaaaatt

SEQ ID NO: 424454 - DNA, 15 bp, Homo sapiens
tttttgtcttaaaat

SEQ ID NO: 424455 - DNA, 15 bp, Homo sapiens
gtttttgtcttaaaa

SEQ ID NO: 424456 - DNA, 15 bp, Homo sapiens
tgtttttgtcttaaa

SEQ ID NO: 424457 - DNA, 15 bp, Homo sapiens
gtgtttttgtcttaa

SEQ ID NO: 424458 - DNA, 15 bp, Homo sapiens
tgtgtttttgtctta

SEQ ID NO: 424459 - DNA, 15 bp, Homo sapiens
ctgtgtttttgtctt

SEQ ID NO: 424460 - DNA, 15 bp, Homo sapiens
cctgtgtttttgtct

SEQ ID NO: 424461 - DNA, 15 bp, Homo sapiens
tcctgtgtttttgtc

SEQ ID NO: 424462 - DNA, 15 bp, Homo sapiens
ctcctgtgtttttgt

SEQ ID NO: 424463 - DNA, 15 bp, Homo sapiens
tctcctgtgtttttg

SEQ ID NO: 424464 - DNA, 15 bp, Homo sapiens
ttctcctgtgttttt

SEQ ID NO: 424465 - DNA, 15 bp, Homo sapiens
tttctcctgtgtttt

SEQ ID NO: 424466 - DNA, 15 bp, Homo sapiens
ttttctcctgtgttt

SEQ ID NO: 424467 - DNA, 15 bp, Homo sapiens
attttctcctgtgtt

SEQ ID NO: 424468 - DNA, 15 bp, Homo sapiens
cattttctcctgtgt

SEQ ID NO: 424469 - DNA, 15 bp, Homo sapiens
acattttctcctgtg

SEQ ID NO: 424470 - DNA, 15 bp, Homo sapiens
aacattttctcctgt

SEQ ID NO: 424471 - DNA, 15 bp, Homo sapiens
aaacattttctcctg

SEQ ID NO: 424472 - DNA, 15 bp, Homo sapiens
taaacattttctcct

SEQ ID NO: 424473 - DNA, 15 bp, Homo sapiens
ataaacattttctcc

SEQ ID NO: 424474 - DNA, 15 bp, Homo sapiens
aataaacattttctc

SEQ ID NO: 424475 - DNA, 15 bp, Homo sapiens
aaataaacattttct

SEQ ID NO: 424476 - DNA, 15 bp, Homo sapiens
gaaataaacattttc

SEQ ID NO: 424477 - DNA, 15 bp, Homo sapiens
agaaataaacatttt

SEQ ID NO: 424478 - DNA, 15 bp, Homo sapiens
aagaaataaacattt

SEQ ID NO: 424479 - DNA, 15 bp, Homo sapiens
aaagaaataaacatt

SEQ ID NO: 424480 - DNA, 15 bp, Homo sapiens
aaaagaaataaacat

SEQ ID NO: 424481 - DNA, 15 bp, Homo sapiens
caaaagaaataaaca

SEQ ID NO: 424482 - DNA, 15 bp, Homo sapiens
tcaaaagaaataaac

SEQ ID NO: 424483 - DNA, 15 bp, Homo sapiens
gtcaaaagaaataaa

SEQ ID NO: 424484 - DNA, 15 bp, Homo sapiens
agtcaaaagaaataa

SEQ ID NO: 424485 - DNA, 15 bp, Homo sapiens
cagtcaaaagaaata

SEQ ID NO: 424486 - DNA, 15 bp, Homo sapiens
tcagtcaaaagaaat

SEQ ID NO: 424487 - DNA, 15 bp, Homo sapiens
atcagtcaaaagaaa

SEQ ID NO: 424488 - DNA, 15 bp, Homo sapiens
tatcagtcaaaagaa

SEQ ID NO: 424489 - DNA, 15 bp, Homo sapiens
atatcagtcaaaaga

SEQ ID NO: 424490 - DNA, 15 bp, Homo sapiens
tatatcagtcaaaag

SEQ ID NO: 424491 - DNA, 15 bp, Homo sapiens
ttatatcagtcaaaa

SEQ ID NO: 424492 - DNA, 15 bp, Homo sapiens
attatatcagtcaaa

SEQ ID NO: 424493 - DNA, 15 bp, Homo sapiens
aattatatcagtcaa

SEQ ID NO: 424494 - DNA, 15 bp, Homo sapiens
gaattatatcagtca

SEQ ID NO: 424495 - DNA, 15 bp, Homo sapiens
ggaattatatcagtc

SEQ ID NO: 424496 - DNA, 15 bp, Homo sapiens
aggaattatatcagt

SEQ ID NO: 424497 - DNA, 15 bp, Homo sapiens
caggaattatatcag

SEQ ID NO: 424498 - DNA, 15 bp, Homo sapiens
tcaggaattatatca

SEQ ID NO: 424499 - DNA, 15 bp, Homo sapiens
ttcaggaattatatc

SEQ ID NO: 424500 - DNA, 15 bp, Homo sapiens
cttcaggaattatat

SEQ ID NO: 424501 - DNA, 15 bp, Homo sapiens
ccttcaggaattata

SEQ ID NO: 424502 - DNA, 15 bp, Homo sapiens
cccttcaggaattat

SEQ ID NO: 424503 - DNA, 15 bp, Homo sapiens
tcccttcaggaatta

SEQ ID NO: 424504 - DNA, 15 bp, Homo sapiens
ctcccttcaggaatt

SEQ ID NO: 424505 - DNA, 15 bp, Homo sapiens
tctcccttcaggaat

SEQ ID NO: 424506 - DNA, 15 bp, Homo sapiens
ttctcccttcaggaa

SEQ ID NO: 424507 - DNA, 15 bp, Homo sapiens
attctcccttcagga

SEQ ID NO: 424508 - DNA, 15 bp, Homo sapiens
tattctcccttcagg

SEQ ID NO: 424509 - DNA, 15 bp, Homo sapiens
ttattctcccttcag

SEQ ID NO: 424510 - DNA, 15 bp, Homo sapiens
cttattctcccttca

SEQ ID NO: 424511 - DNA, 15 bp, Homo sapiens
tcttattctcccttc

SEQ ID NO: 424512 - DNA, 15 bp, Homo sapiens
atcttattctccctt

SEQ ID NO: 424513 - DNA, 15 bp, Homo sapiens
catcttattctccct

SEQ ID NO: 424514 - DNA, 15 bp, Homo sapiens
tcatcttattctccc

SEQ ID NO: 424515 - DNA, 15 bp, Homo sapiens
atcatcttattctcc

SEQ ID NO: 424516 - DNA, 15 bp, Homo sapiens
aatcatcttattctc

SEQ ID NO: 424517 - DNA, 15 bp, Homo sapiens
aaatcatcttattct

SEQ ID NO: 424518 - DNA, 15 bp, Homo sapiens
aaaatcatcttattc

SEQ ID NO: 424519 - DNA, 15 bp, Homo sapiens
aaaaatcatcttatt

SEQ ID NO: 424520 - DNA, 15 bp, Homo sapiens
taaaaatcatcttat

SEQ ID NO: 424521 - DNA, 15 bp, Homo sapiens
ttaaaaatcatctta

SEQ ID NO: 424522 - DNA, 15 bp, Homo sapiens
tttaaaaatcatctt

SEQ ID NO: 424523 - DNA, 15 bp, Homo sapiens
ttttaaaaatcatct

SEQ ID NO: 424524 - DNA, 15 bp, Homo sapiens
tttttaaaaatcatc

SEQ ID NO: 424525 - DNA, 15 bp, Homo sapiens
atttttaaaaatcat

SEQ ID NO: 424526 - DNA, 15 bp, Homo sapiens
aatttttaaaaatca

SEQ ID NO: 424527 - DNA, 15 bp, Homo sapiens
aaatttttaaaaatc

SEQ ID NO: 424528 - DNA, 15 bp, Homo sapiens
aaaatttttaaaaat

SEQ ID NO: 424529 - DNA, 15 bp, Homo sapiens
aaaaatttttaaaaa

SEQ ID NO: 424530 - DNA, 15 bp, Homo sapiens
aaaaaatttttaaaa

SEQ ID NO: 424531 - DNA, 15 bp, Homo sapiens
aaaaaaatttttaaa

SEQ ID NO: 424532 - DNA, 15 bp, Homo sapiens
aaaaaaaatttttaa

SEQ ID NO: 424533 - DNA, 15 bp, Homo sapiens
taaaaaaaattttta

SEQ ID NO: 424534 - DNA, 15 bp, Homo sapiens
ataaaaaaaattttt

SEQ ID NO: 424535 - DNA, 15 bp, Homo sapiens
aataaaaaaaatttt

SEQ ID NO: 424536 - DNA, 15 bp, Homo sapiens
gaataaaaaaaattt

SEQ ID NO: 424537 - DNA, 15 bp, Homo sapiens
tgaataaaaaaaatt

SEQ ID NO: 424538 - DNA, 15 bp, Homo sapiens
atgaataaaaaaaat

SEQ ID NO: 424539 - DNA, 15 bp, Homo sapiens
aatgaataaaaaaaa

SEQ ID NO: 424540 - DNA, 15 bp, Homo sapiens
taatgaataaaaaaa

SEQ ID NO: 424541 - DNA, 15 bp, Homo sapiens
ctaatgaataaaaaa

SEQ ID NO: 424542 - DNA, 15 bp, Homo sapiens
gctaatgaataaaaa

SEQ ID NO: 424543 - DNA, 15 bp, Homo sapiens
tgctaatgaataaaa

SEQ ID NO: 424544 - DNA, 15 bp, Homo sapiens
ttgctaatgaataaa

SEQ ID NO: 424545 - DNA, 15 bp, Homo sapiens
tttgctaatgaataa

SEQ ID NO: 424546 - DNA, 15 bp, Homo sapiens
ctttgctaatgaata

SEQ ID NO: 424547 - DNA, 15 bp, Homo sapiens
gctttgctaatgaat

SEQ ID NO: 424548 - DNA, 15 bp, Homo sapiens
agctttgctaatgaa

SEQ ID NO: 424549 - DNA, 15 bp, Homo sapiens
tagctttgctaatga

SEQ ID NO: 424550 - DNA, 15 bp, Homo sapiens
atagctttgctaatg

SEQ ID NO: 424551 - DNA, 15 bp, Homo sapiens
aatagctttgctaat

SEQ ID NO: 424552 - DNA, 15 bp, Homo sapiens
aaatagctttgctaa

SEQ ID NO: 424553 - DNA, 15 bp, Homo sapiens
aaaatagctttgcta

SEQ ID NO: 424554 - DNA, 15 bp, Homo sapiens
taaaatagctttgct

SEQ ID NO: 424555 - DNA, 15 bp, Homo sapiens
ctaaaatagctttgc

SEQ ID NO: 424556 - DNA, 15 bp, Homo sapiens
actaaaatagctttg

SEQ ID NO: 424557 - DNA, 15 bp, Homo sapiens
tactaaaatagcttt

SEQ ID NO: 424558 - DNA, 15 bp, Homo sapiens
atactaaaatagctt

SEQ ID NO: 424559 - DNA, 15 bp, Homo sapiens
aatactaaaatagct

SEQ ID NO: 424560 - DNA, 15 bp, Homo sapiens
gaatactaaaatagc

SEQ ID NO: 424561 - DNA, 15 bp, Homo sapiens
tgaatactaaaatag

SEQ ID NO: 424562 - DNA, 15 bp, Homo sapiens
ctgaatactaaaata

SEQ ID NO: 424563 - DNA, 15 bp, Homo sapiens
actgaatactaaaat

SEQ ID NO: 424564 - DNA, 15 bp, Homo sapiens
aactgaatactaaaa

SEQ ID NO: 424565 - DNA, 15 bp, Homo sapiens
taactgaatactaaa

SEQ ID NO: 424566 - DNA, 15 bp, Homo sapiens
ttaactgaatactaa

SEQ ID NO: 424567 - DNA, 15 bp, Homo sapiens
attaactgaatacta

SEQ ID NO: 424568 - DNA, 15 bp, Homo sapiens
cattaactgaatact

SEQ ID NO: 424569 - DNA, 15 bp, Homo sapiens
ccattaactgaatac

SEQ ID NO: 424570 - DNA, 15 bp, Homo sapiens
accattaactgaata

SEQ ID NO: 424571 - DNA, 15 bp, Homo sapiens
gaccattaactgaat

SEQ ID NO: 424572 - DNA, 15 bp, Homo sapiens
agaccattaactgaa

SEQ ID NO: 424573 - DNA, 15 bp, Homo sapiens
tagaccattaactga

SEQ ID NO: 424574 - DNA, 15 bp, Homo sapiens
atagaccattaactg

SEQ ID NO: 424575 - DNA, 15 bp, Homo sapiens
tatagaccattaact

SEQ ID NO: 424576 - DNA, 15 bp, Homo sapiens
atatagaccattaac

SEQ ID NO: 424577 - DNA, 15 bp, Homo sapiens
aatatagaccattaa

SEQ ID NO: 424578 - DNA, 15 bp, Homo sapiens
aaatatagaccatta

SEQ ID NO: 424579 - DNA, 15 bp, Homo sapiens
gaaatatagaccatt

SEQ ID NO: 424580 - DNA, 15 bp, Homo sapiens
tgaaatatagaccat

SEQ ID NO: 424581 - DNA, 15 bp, Homo sapiens
ttgaaatatagacca

SEQ ID NO: 424582 - DNA, 15 bp, Homo sapiens
gttgaaatatagacc

SEQ ID NO: 424583 - DNA, 15 bp, Homo sapiens
cgttgaaatatagac

SEQ ID NO: 424584 - DNA, 15 bp, Homo sapiens
gcgttgaaatataga

SEQ ID NO: 424585 - DNA, 15 bp, Homo sapiens
ggcgttgaaatatag

SEQ ID NO: 424586 - DNA, 15 bp, Homo sapiens
aggcgttgaaatata

SEQ ID NO: 424587 - DNA, 15 bp, Homo sapiens
gaggcgttgaaatat

SEQ ID NO: 424588 - DNA, 15 bp, Homo sapiens
agaggcgttgaaata

SEQ ID NO: 424589 - DNA, 15 bp, Homo sapiens
cagaggcgttgaaat

SEQ ID NO: 424590 - DNA, 15 bp, Homo sapiens
gcagaggcgttgaaa

SEQ ID NO: 424591 - DNA, 15 bp, Homo sapiens
tgcagaggcgttgaa

SEQ ID NO: 424592 - DNA, 15 bp, Homo sapiens
ctgcagaggcgttga

SEQ ID NO: 424593 - DNA, 15 bp, Homo sapiens
gctgcagaggcgttg

SEQ ID NO: 424594 - DNA, 15 bp, Homo sapiens
agctgcagaggcgtt

SEQ ID NO: 424595 - DNA, 15 bp, Homo sapiens
aagctgcagaggcgt

SEQ ID NO: 424596 - DNA, 15 bp, Homo sapiens
taagctgcagaggcg

SEQ ID NO: 424597 - DNA, 15 bp, Homo sapiens
ttaagctgcagaggc

SEQ ID NO: 424598 - DNA, 15 bp, Homo sapiens
attaagctgcagagg

SEQ ID NO: 424599 - DNA, 15 bp, Homo sapiens
tattaagctgcagag

SEQ ID NO: 424600 - DNA, 15 bp, Homo sapiens
atattaagctgcaga

SEQ ID NO: 424601 - DNA, 15 bp, Homo sapiens
aatattaagctgcag

SEQ ID NO: 424602 - DNA, 15 bp, Homo sapiens
aaatattaagctgca

SEQ ID NO: 424603 - DNA, 15 bp, Homo sapiens
aaaatattaagctgc

SEQ ID NO: 424604 - DNA, 15 bp, Homo sapiens
taaaatattaagctg

SEQ ID NO: 424605 - DNA, 15 bp, Homo sapiens
ataaaatattaagct

SEQ ID NO: 424606 - DNA, 15 bp, Homo sapiens
tataaaatattaagc

SEQ ID NO: 424607 - DNA, 15 bp, Homo sapiens
ctataaaatattaag

SEQ ID NO: 424608 - DNA, 15 bp, Homo sapiens
cctataaaatattaa

SEQ ID NO: 424609 - DNA, 15 bp, Homo sapiens
acctataaaatatta

SEQ ID NO: 424610 - DNA, 15 bp, Homo sapiens
gacctataaaatatt

SEQ ID NO: 424611 - DNA, 15 bp, Homo sapiens
agacctataaaatat

SEQ ID NO: 424612 - DNA, 15 bp, Homo sapiens
aagacctataaaata

SEQ ID NO: 424613 - DNA, 15 bp, Homo sapiens
caagacctataaaat

SEQ ID NO: 424614 - DNA, 15 bp, Homo sapiens
gcaagacctataaaa

SEQ ID NO: 424615 - DNA, 15 bp, Homo sapiens
agcaagacctataaa

SEQ ID NO: 424616 - DNA, 15 bp, Homo sapiens
aagcaagacctataa

SEQ ID NO: 424617 - DNA, 15 bp, Homo sapiens
aaagcaagacctata

SEQ ID NO: 424618 - DNA, 15 bp, Homo sapiens
aaaagcaagacctat

SEQ ID NO: 424619 - DNA, 15 bp, Homo sapiens
gaaaagcaagaccta

SEQ ID NO: 424620 - DNA, 15 bp, Homo sapiens
agaaaagcaagacct

SEQ ID NO: 424621 - DNA, 15 bp, Homo sapiens
gagaaaagcaagacc

SEQ ID NO: 424622 - DNA, 15 bp, Homo sapiens
agagaaaagcaagac

SEQ ID NO: 424623 - DNA, 15 bp, Homo sapiens
gagagaaaagcaaga

SEQ ID NO: 424624 - DNA, 15 bp, Homo sapiens
agagagaaaagcaag

SEQ ID NO: 424625 - DNA, 15 bp, Homo sapiens
gagagagaaaagcaa

SEQ ID NO: 424626 - DNA, 15 bp, Homo sapiens
tgagagagaaaagca

SEQ ID NO: 424627 - DNA, 15 bp, Homo sapiens
ttgagagagaaaagc

SEQ ID NO: 424628 - DNA, 15 bp, Homo sapiens
tttgagagagaaaag

SEQ ID NO: 424629 - DNA, 15 bp, Homo sapiens
ttttgagagagaaaa

SEQ ID NO: 424630 - DNA, 15 bp, Homo sapiens
cttttgagagagaaa

SEQ ID NO: 424631 - DNA, 15 bp, Homo sapiens
acttttgagagagaa

SEQ ID NO: 424632 - DNA, 15 bp, Homo sapiens
cacttttgagagaga

SEQ ID NO: 424633 - DNA, 15 bp, Homo sapiens
acacttttgagagag

SEQ ID NO: 424634 - DNA, 15 bp, Homo sapiens
gacacttttgagaga

SEQ ID NO: 424635 - DNA, 15 bp, Homo sapiens
agacacttttgagag

SEQ ID NO: 424636 - DNA, 15 bp, Homo sapiens
tagacacttttgaga

SEQ ID NO: 424637 - DNA, 15 bp, Homo sapiens
ttagacacttttgag

SEQ ID NO: 424638 - DNA, 15 bp, Homo sapiens
attagacacttttga

SEQ ID NO: 424639 - DNA, 15 bp, Homo sapiens
gattagacacttttg

SEQ ID NO: 424640 - DNA, 15 bp, Homo sapiens
tgattagacactttt

SEQ ID NO: 424641 - DNA, 15 bp, Homo sapiens
atgattagacacttt

SEQ ID NO: 424642 - DNA, 15 bp, Homo sapiens
gatgattagacactt

SEQ ID NO: 424643 - DNA, 15 bp, Homo sapiens
agatgattagacact

SEQ ID NO: 424644 - DNA, 15 bp, Homo sapiens
aagatgattagacac

SEQ ID NO: 424645 - DNA, 15 bp, Homo sapiens
taagatgattagaca

SEQ ID NO: 424646 - DNA, 15 bp, Homo sapiens
ataagatgattagac

SEQ ID NO: 424647 - DNA, 15 bp, Homo sapiens
aataagatgattaga

SEQ ID NO: 424648 - DNA, 15 bp, Homo sapiens
aaataagatgattag

SEQ ID NO: 424649 - DNA, 15 bp, Homo sapiens
gaaataagatgatta

SEQ ID NO: 424650 - DNA, 15 bp, Homo sapiens
agaaataagatgatt

SEQ ID NO: 424651 - DNA, 15 bp, Homo sapiens
gagaaataagatgat

SEQ ID NO: 424652 - DNA, 15 bp, Homo sapiens
ggagaaataagatga

SEQ ID NO: 424653 - DNA, 15 bp, Homo sapiens
aggagaaataagatg

SEQ ID NO: 424654 - DNA, 15 bp, Homo sapiens
aaggagaaataagat

SEQ ID NO: 424655 - DNA, 15 bp, Homo sapiens
aaaggagaaataaga

SEQ ID NO: 424656 - DNA, 15 bp, Homo sapiens
caaaggagaaataag

SEQ ID NO: 424657 - DNA, 15 bp, Homo sapiens
gcaaaggagaaataa

SEQ ID NO: 424658 - DNA, 15 bp, Homo sapiens
tgcaaaggagaaata

SEQ ID NO: 424659 - DNA, 15 bp, Homo sapiens
ctgcaaaggagaaat

SEQ ID NO: 424660 - DNA, 15 bp, Homo sapiens
cctgcaaaggagaaa

SEQ ID NO: 424661 - DNA, 15 bp, Homo sapiens
acctgcaaaggagaa

SEQ ID NO: 424662 - DNA, 15 bp, Homo sapiens
tacctgcaaaggaga

SEQ ID NO: 424663 - DNA, 15 bp, Homo sapiens
atacctgcaaaggag

SEQ ID NO: 424664 - DNA, 15 bp, Homo sapiens
tatacctgcaaagga

SEQ ID NO: 424665 - DNA, 15 bp, Homo sapiens
gtatacctgcaaagg

SEQ ID NO: 424666 - DNA, 15 bp, Homo sapiens
agtatacctgcaaag

SEQ ID NO: 424667 - DNA, 15 bp, Homo sapiens
aagtatacctgcaaa

SEQ ID NO: 424668 - DNA, 15 bp, Homo sapiens
caagtatacctgcaa

SEQ ID NO: 424669 - DNA, 15 bp, Homo sapiens
ccaagtatacctgca

SEQ ID NO: 424670 - DNA, 15 bp, Homo sapiens
cccaagtatacctgc

SEQ ID NO: 424671 - DNA, 15 bp, Homo sapiens
acccaagtatacctg

SEQ ID NO: 424672 - DNA, 15 bp, Homo sapiens
cacccaagtatacct

SEQ ID NO: 424673 - DNA, 15 bp, Homo sapiens
tcacccaagtatacc

SEQ ID NO: 424674 - DNA, 15 bp, Homo sapiens
gtcacccaagtatac

SEQ ID NO: 424675 - DNA, 15 bp, Homo sapiens
tgtcacccaagtata

SEQ ID NO: 424676 - DNA, 15 bp, Homo sapiens
ctgtcacccaagtat

SEQ ID NO: 424677 - DNA, 15 bp, Homo sapiens
cctgtcacccaagta

SEQ ID NO: 424678 - DNA, 15 bp, Homo sapiens
tcctgtcacccaagt

SEQ ID NO: 424679 - DNA, 15 bp, Homo sapiens
gtcctgtcacccaag

SEQ ID NO: 424680 - DNA, 15 bp, Homo sapiens
cgtcctgtcacccaa

SEQ ID NO: 424681 - DNA, 15 bp, Homo sapiens
tcgtcctgtcaccca

SEQ ID NO: 424682 - DNA, 15 bp, Homo sapiens
ctcgtcctgtcaccc

SEQ ID NO: 424683 - DNA, 15 bp, Homo sapiens
tctcgtcctgtcacc

SEQ ID NO: 424684 - DNA, 15 bp, Homo sapiens
ctctcgtcctgtcac

SEQ ID NO: 424685 - DNA, 15 bp, Homo sapiens
gctctcgtcctgtca

SEQ ID NO: 424686 - DNA, 15 bp, Homo sapiens
ggctctcgtcctgtc

SEQ ID NO: 424687 - DNA, 15 bp, Homo sapiens
aggctctcgtcctgt

SEQ ID NO: 424688 - DNA, 15 bp, Homo sapiens
gaggctctcgtcctg

SEQ ID NO: 424689 - DNA, 15 bp, Homo sapiens
agaggctctcgtcct

SEQ ID NO: 424690 - DNA, 15 bp, Homo sapiens
aagaggctctcgtcc

SEQ ID NO: 424691 - DNA, 15 bp, Homo sapiens
taagaggctctcgtc

SEQ ID NO: 424692 - DNA, 15 bp, Homo sapiens
gtaagaggctctcgt

SEQ ID NO: 424693 - DNA, 15 bp, Homo sapiens
agtaagaggctctcg

SEQ ID NO: 424694 - DNA, 15 bp, Homo sapiens
aagtaagaggctctc

SEQ ID NO: 424695 - DNA, 15 bp, Homo sapiens
taagtaagaggctct

SEQ ID NO: 424696 - DNA, 15 bp, Homo sapiens
gtaagtaagaggctc

SEQ ID NO: 424697 - DNA, 15 bp, Homo sapiens
agtaagtaagaggct

SEQ ID NO: 424698 - DNA, 15 bp, Homo sapiens
tagtaagtaagaggc

SEQ ID NO: 424699 - DNA, 15 bp, Homo sapiens
atagtaagtaagagg

SEQ ID NO: 424700 - DNA, 15 bp, Homo sapiens
catagtaagtaagag

SEQ ID NO: 424701 - DNA, 15 bp, Homo sapiens
tcatagtaagtaaga

SEQ ID NO: 424702 - DNA, 15 bp, Homo sapiens
gtcatagtaagtaag

SEQ ID NO: 424703 - DNA, 15 bp, Homo sapiens
tgtcatagtaagtaa

SEQ ID NO: 424704 - DNA, 15 bp, Homo sapiens
atgtcatagtaagta

SEQ ID NO: 424705 - DNA, 15 bp, Homo sapiens
catgtcatagtaagt

SEQ ID NO: 424706 - DNA, 15 bp, Homo sapiens
tcatgtcatagtaag

SEQ ID NO: 424707 - DNA, 15 bp, Homo sapiens
ttcatgtcatagtaa

SEQ ID NO: 424708 - DNA, 15 bp, Homo sapiens
attcatgtcatagta

SEQ ID NO: 424709 - DNA, 15 bp, Homo sapiens
gattcatgtcatagt

SEQ ID NO: 424710 - DNA, 15 bp, Homo sapiens
agattcatgtcatag

SEQ ID NO: 424711 - DNA, 15 bp, Homo sapiens
gagattcatgtcata

SEQ ID NO: 424712 - DNA, 15 bp, Homo sapiens
agagattcatgtcat

SEQ ID NO: 424713 - DNA, 15 bp, Homo sapiens
gagagattcatgtca

SEQ ID NO: 424714 - DNA, 15 bp, Homo sapiens
agagagattcatgtc

SEQ ID NO: 424715 - DNA, 15 bp, Homo sapiens
cagagagattcatgt

SEQ ID NO: 424716 - DNA, 15 bp, Homo sapiens
gcagagagattcatg

SEQ ID NO: 424717 - DNA, 15 bp, Homo sapiens
ggcagagagattcat

SEQ ID NO: 424718 - DNA, 15 bp, Homo sapiens
gggcagagagattca

SEQ ID NO: 424719 - DNA, 15 bp, Homo sapiens
tgggcagagagattc

SEQ ID NO: 424720 - DNA, 15 bp, Homo sapiens
ttgggcagagagatt

SEQ ID NO: 424721 - DNA, 15 bp, Homo sapiens
cttgggcagagagat

SEQ ID NO: 424722 - DNA, 15 bp, Homo sapiens
tcttgggcagagaga

SEQ ID NO: 424723 - DNA, 15 bp, Homo sapiens
gtcttgggcagagag

SEQ ID NO: 424724 - DNA, 15 bp, Homo sapiens
ggtcttgggcagaga

SEQ ID NO: 424725 - DNA, 15 bp, Homo sapiens
tggtcttgggcagag

SEQ ID NO: 424726 - DNA, 15 bp, Homo sapiens
gtggtcttgggcaga

SEQ ID NO: 424727 - DNA, 15 bp, Homo sapiens
ggtggtcttgggcag

SEQ ID NO: 424728 - DNA, 15 bp, Homo sapiens
tggtggtcttgggca

SEQ ID NO: 424729 - DNA, 15 bp, Homo sapiens
ctggtggtcttgggc

SEQ ID NO: 424730 - DNA, 15 bp, Homo sapiens
tctggtggtcttggg

SEQ ID NO: 424731 - DNA, 15 bp, Homo sapiens
gtctggtggtcttgg

SEQ ID NO: 424732 - DNA, 15 bp, Homo sapiens
tgtctggtggtcttg

SEQ ID NO: 424733 - DNA, 15 bp, Homo sapiens
atgtctggtggtctt

SEQ ID NO: 424734 - DNA, 15 bp, Homo sapiens
aatgtctggtggtct

SEQ ID NO: 424735 - DNA, 15 bp, Homo sapiens
gaatgtctggtggtc

SEQ ID NO: 424736 - DNA, 15 bp, Homo sapiens
agaatgtctggtggt

SEQ ID NO: 424737 - DNA, 15 bp, Homo sapiens
aagaatgtctggtgg

SEQ ID NO: 424738 - DNA, 15 bp, Homo sapiens
aaagaatgtctggtg

SEQ ID NO: 424739 - DNA, 15 bp, Homo sapiens
taaagaatgtctggt

SEQ ID NO: 424740 - DNA, 15 bp, Homo sapiens
gtaaagaatgtctgg

SEQ ID NO: 424741 - DNA, 15 bp, Homo sapiens
agtaaagaatgtctg

SEQ ID NO: 424742 - DNA, 15 bp, Homo sapiens
aagtaaagaatgtct

SEQ ID NO: 424743 - DNA, 15 bp, Homo sapiens
caagtaaagaatgtc

SEQ ID NO: 424744 - DNA, 15 bp, Homo sapiens
acaagtaaagaatgt

SEQ ID NO: 424745 - DNA, 15 bp, Homo sapiens
cacaagtaaagaatg

SEQ ID NO: 424746 - DNA, 15 bp, Homo sapiens
tcacaagtaaagaat

SEQ ID NO: 424747 - DNA, 15 bp, Homo sapiens
gtcacaagtaaagaa

SEQ ID NO: 424748 - DNA, 15 bp, Homo sapiens
agtcacaagtaaaga

SEQ ID NO: 424749 - DNA, 15 bp, Homo sapiens
gagtcacaagtaaag

SEQ ID NO: 424750 - DNA, 15 bp, Homo sapiens
cgagtcacaagtaaa

SEQ ID NO: 424751 - DNA, 15 bp, Homo sapiens
tgtcaaccatccaga

SEQ ID NO: 424752 - DNA, 15 bp, Homo sapiens
gtgtcaaccatccag

SEQ ID NO: 424753 - DNA, 15 bp, Homo sapiens
ggtgtcaaccatcca

SEQ ID NO: 424754 - DNA, 15 bp, Homo sapiens
gggtgtcaaccatcc

SEQ ID NO: 424755 - DNA, 15 bp, Homo sapiens
ggggtgtcaaccatc

SEQ ID NO: 424756 - DNA, 15 bp, Homo sapiens
gggggtgtcaaccat

SEQ ID NO: 424757 - DNA, 15 bp, Homo sapiens
tgggggtgtcaacca

SEQ ID NO: 424758 - DNA, 15 bp, Homo sapiens
atgggggtgtcaacc

SEQ ID NO: 424759 - DNA, 15 bp, Homo sapiens
gatgggggtgtcaac

SEQ ID NO: 424760 - DNA, 15 bp, Homo sapiens
tgatgggggtgtcaa

SEQ ID NO: 424761 - DNA, 15 bp, Homo sapiens
gtgatgggggtgtca

SEQ ID NO: 424762 - DNA, 15 bp, Homo sapiens
ggtgatgggggtgtc

SEQ ID NO: 424763 - DNA, 15 bp, Homo sapiens
tggtgatgggggtgt

SEQ ID NO: 424764 - DNA, 15 bp, Homo sapiens
gtggtgatgggggtg

SEQ ID NO: 424765 - DNA, 15 bp, Homo sapiens
tgtggtgatgggggt

SEQ ID NO: 424766 - DNA, 15 bp, Homo sapiens
gtgtggtgatggggg

SEQ ID NO: 424767 - DNA, 15 bp, Homo sapiens
agtgtggtgatgggg

SEQ ID NO: 424768 - DNA, 15 bp, Homo sapiens
aagtgtggtgatggg

SEQ ID NO: 424769 - DNA, 15 bp, Homo sapiens
aaagtgtggtgatgg

SEQ ID NO: 424770 - DNA, 15 bp, Homo sapiens
gaaagtgtggtgatg

SEQ ID NO: 424771 - DNA, 15 bp, Homo sapiens
agaaagtgtggtgat

SEQ ID NO: 424772 - DNA, 15 bp, Homo sapiens
aagaaagtgtggtga

SEQ ID NO: 424773 - DNA, 15 bp, Homo sapiens
caagaaagtgtggtg

SEQ ID NO: 424774 - DNA, 15 bp, Homo sapiens
gcaagaaagtgtggt

SEQ ID NO: 424775 - DNA, 15 bp, Homo sapiens
agcaagaaagtgtgg

SEQ ID NO: 424776 - DNA, 15 bp, Homo sapiens
aagcaagaaagtgtg

SEQ ID NO: 424777 - DNA, 15 bp, Homo sapiens
gaagcaagaaagtgt

SEQ ID NO: 424778 - DNA, 15 bp, Homo sapiens
agaagcaagaaagtg

SEQ ID NO: 424779 - DNA, 15 bp, Homo sapiens
cagaagcaagaaagt

SEQ ID NO: 424780 - DNA, 15 bp, Homo sapiens
acagaagcaagaaag

SEQ ID NO: 424781 - DNA, 15 bp, Homo sapiens
tacagaagcaagaaa

SEQ ID NO: 424782 - DNA, 15 bp, Homo sapiens
atacagaagcaagaa

SEQ ID NO: 424783 - DNA, 15 bp, Homo sapiens
catacagaagcaaga

SEQ ID NO: 424784 - DNA, 15 bp, Homo sapiens
acatacagaagcaag

SEQ ID NO: 424785 - DNA, 15 bp, Homo sapiens
cacatacagaagcaa

SEQ ID NO: 424786 - DNA, 15 bp, Homo sapiens
acacatacagaagca

SEQ ID NO: 424787 - DNA, 15 bp, Homo sapiens
tacacatacagaagc

SEQ ID NO: 424788 - DNA, 15 bp, Homo sapiens
atacacatacagaag

SEQ ID NO: 424789 - DNA, 15 bp, Homo sapiens
aatacacatacagaa

SEQ ID NO: 424790 - DNA, 15 bp, Homo sapiens
caatacacatacaga

SEQ ID NO: 424791 - DNA, 15 bp, Homo sapiens
acaatacacatacag

SEQ ID NO: 424792 - DNA, 15 bp, Homo sapiens
cacaatacacataca

SEQ ID NO: 424793 - DNA, 15 bp, Homo sapiens
acacaatacacatac

SEQ ID NO: 424794 - DNA, 15 bp, Homo sapiens
aacacaatacacata

SEQ ID NO: 424795 - DNA, 15 bp, Homo sapiens
caacacaatacacat

SEQ ID NO: 424796 - DNA, 15 bp, Homo sapiens
acaacacaatacaca

SEQ ID NO: 424797 - DNA, 15 bp, Homo sapiens
cacaacacaatacac

SEQ ID NO: 424798 - DNA, 15 bp, Homo sapiens
tcacaacacaataca

SEQ ID NO: 424799 - DNA, 15 bp, Homo sapiens
gtcacaacacaatac

SEQ ID NO: 424800 - DNA, 15 bp, Homo sapiens
tgtcacaacacaata

SEQ ID NO: 424801 - DNA, 15 bp, Homo sapiens
ttgtcacaacacaat

SEQ ID NO: 424802 - DNA, 15 bp, Homo sapiens
cttgtcacaacacaa

SEQ ID NO: 424803 - DNA, 15 bp, Homo sapiens
ccttgtcacaacaca

SEQ ID NO: 424804 - DNA, 15 bp, Homo sapiens
tccttgtcacaacac

SEQ ID NO: 424805 - DNA, 15 bp, Homo sapiens
atccttgtcacaaca

SEQ ID NO: 424806 - DNA, 15 bp, Homo sapiens
catccttgtcacaac

SEQ ID NO: 424807 - DNA, 15 bp, Homo sapiens
gcatccttgtcacaa

SEQ ID NO: 424808 - DNA, 15 bp, Homo sapiens
tgcatccttgtcaca

SEQ ID NO: 424809 - DNA, 15 bp, Homo sapiens
atgcatccttgtcac

SEQ ID NO: 424810 - DNA, 15 bp, Homo sapiens
gatgcatccttgtca

SEQ ID NO: 424811 - DNA, 15 bp, Homo sapiens
tgatgcatccttgtc

SEQ ID NO: 424812 - DNA, 15 bp, Homo sapiens
atgatgcatccttgt

SEQ ID NO: 424813 - DNA, 15 bp, Homo sapiens
gatgatgcatccttg

SEQ ID NO: 424814 - DNA, 15 bp, Homo sapiens
agatgatgcatcctt

SEQ ID NO: 424815 - DNA, 15 bp, Homo sapiens
tagatgatgcatcct

SEQ ID NO: 424816 - DNA, 15 bp, Homo sapiens
atagatgatgcatcc

SEQ ID NO: 424817 - DNA, 15 bp, Homo sapiens
tatagatgatgcatc

SEQ ID NO: 424818 - DNA, 15 bp, Homo sapiens
atatagatgatgcat

SEQ ID NO: 424819 - DNA, 15 bp, Homo sapiens
gatatagatgatgca

SEQ ID NO: 424820 - DNA, 15 bp, Homo sapiens
agatatagatgatgc

SEQ ID NO: 424821 - DNA, 15 bp, Homo sapiens
aagatatagatgatg

SEQ ID NO: 424822 - DNA, 15 bp, Homo sapiens
gaagatatagatgat

SEQ ID NO: 424823 - DNA, 15 bp, Homo sapiens
ggaagatatagatga

SEQ ID NO: 424824 - DNA, 15 bp, Homo sapiens
tggaagatatagatg

SEQ ID NO: 424825 - DNA, 15 bp, Homo sapiens
atggaagatatagat

SEQ ID NO: 424826 - DNA, 15 bp, Homo sapiens
gatggaagatataga

SEQ ID NO: 424827 - DNA, 15 bp, Homo sapiens
cgatggaagatatag

SEQ ID NO: 424828 - DNA, 15 bp, Homo sapiens
tcgatggaagatata

SEQ ID NO: 424829 - DNA, 15 bp, Homo sapiens
ctcgatggaagatat

SEQ ID NO: 424830 - DNA, 15 bp, Homo sapiens
gctcgatggaagata

SEQ ID NO: 424831 - DNA, 15 bp, Homo sapiens
agctcgatggaagat

SEQ ID NO: 424832 - DNA, 15 bp, Homo sapiens
cagctcgatggaaga

SEQ ID NO: 424833 - DNA, 15 bp, Homo sapiens
tcagctcgatggaag

SEQ ID NO: 424834 - DNA, 15 bp, Homo sapiens
ctcagctcgatggaa

SEQ ID NO: 424835 - DNA, 15 bp, Homo sapiens
gctcagctcgatgga

SEQ ID NO: 424836 - DNA, 15 bp, Homo sapiens
tgctcagctcgatgg

SEQ ID NO: 424837 - DNA, 15 bp, Homo sapiens
ctgctcagctcgatg

SEQ ID NO: 424838 - DNA, 15 bp, Homo sapiens
actgctcagctcgat

SEQ ID NO: 424839 - DNA, 15 bp, Homo sapiens
gactgctcagctcga

SEQ ID NO: 424840 - DNA, 15 bp, Homo sapiens
agactgctcagctcg

SEQ ID NO: 424841 - DNA, 15 bp, Homo sapiens
cagactgctcagctc

SEQ ID NO: 424842 - DNA, 15 bp, Homo sapiens
acagactgctcagct

SEQ ID NO: 424843 - DNA, 15 bp, Homo sapiens
aacagactgctcagc

SEQ ID NO: 424844 - DNA, 15 bp, Homo sapiens
gaacagactgctcag

SEQ ID NO: 424845 - DNA, 15 bp, Homo sapiens
agaacagactgctca

SEQ ID NO: 424846 - DNA, 15 bp, Homo sapiens
cagaacagactgctc

SEQ ID NO: 424847 - DNA, 15 bp, Homo sapiens
acagaacagactgct

SEQ ID NO: 424848 - DNA, 15 bp, Homo sapiens
tacagaacagactgc

SEQ ID NO: 424849 - DNA, 15 bp, Homo sapiens
gtacagaacagactg

SEQ ID NO: 424850 - DNA, 15 bp, Homo sapiens
agtacagaacagact

SEQ ID NO: 424851 - DNA, 15 bp, Homo sapiens
gagtacagaacagac

SEQ ID NO: 424852 - DNA, 15 bp, Homo sapiens
ggagtacagaacaga

SEQ ID NO: 424853 - DNA, 15 bp, Homo sapiens
gggagtacagaacag

SEQ ID NO: 424854 - DNA, 15 bp, Homo sapiens
ggggagtacagaaca

SEQ ID NO: 424855 - DNA, 15 bp, Homo sapiens
tggggagtacagaac

SEQ ID NO: 424856 - DNA, 15 bp, Homo sapiens
ttggggagtacagaa

SEQ ID NO: 424857 - DNA, 15 bp, Homo sapiens
gttggggagtacaga

SEQ ID NO: 424858 - DNA, 15 bp, Homo sapiens
ggttggggagtacag

SEQ ID NO: 424859 - DNA, 15 bp, Homo sapiens
tggttggggagtaca

SEQ ID NO: 424860 - DNA, 15 bp, Homo sapiens
atggttggggagtac

SEQ ID NO: 424861 - DNA, 15 bp, Homo sapiens
aatggttggggagta

SEQ ID NO: 424862 - DNA, 15 bp, Homo sapiens
taatggttggggagt

SEQ ID NO: 424863 - DNA, 15 bp, Homo sapiens
ctaatggttggggag

SEQ ID NO: 424864 - DNA, 15 bp, Homo sapiens
gctaatggttgggga

SEQ ID NO: 424865 - DNA, 15 bp, Homo sapiens
tgctaatggttgggg

SEQ ID NO: 424866 - DNA, 15 bp, Homo sapiens
gtgctaatggttggg

SEQ ID NO: 424867 - DNA, 15 bp, Homo sapiens
agtgctaatggttgg

SEQ ID NO: 424868 - DNA, 15 bp, Homo sapiens
aagtgctaatggttg

SEQ ID NO: 424869 - DNA, 15 bp, Homo sapiens
gaagtgctaatggtt

SEQ ID NO: 424870 - DNA, 15 bp, Homo sapiens
agaagtgctaatggt

SEQ ID NO: 424871 - DNA, 15 bp, Homo sapiens
tagaagtgctaatgg

SEQ ID NO: 424872 - DNA, 15 bp, Homo sapiens
atagaagtgctaatg

SEQ ID NO: 424873 - DNA, 15 bp, Homo sapiens
aatagaagtgctaat

SEQ ID NO: 424874 - DNA, 15 bp, Homo sapiens
caatagaagtgctaa

SEQ ID NO: 424875 - DNA, 15 bp, Homo sapiens
gcaatagaagtgcta

SEQ ID NO: 424876 - DNA, 15 bp, Homo sapiens
agcaatagaagtgct

SEQ ID NO: 424877 - DNA, 15 bp, Homo sapiens
gagcaatagaagtgc

SEQ ID NO: 424878 - DNA, 15 bp, Homo sapiens
agagcaatagaagtg

SEQ ID NO: 424879 - DNA, 15 bp, Homo sapiens
gagagcaatagaagt

SEQ ID NO: 424880 - DNA, 15 bp, Homo sapiens
agagagcaatagaag

SEQ ID NO: 424881 - DNA, 15 bp, Homo sapiens
gagagagcaatagaa

SEQ ID NO: 424882 - DNA, 15 bp, Homo sapiens
ggagagagcaataga

SEQ ID NO: 424883 - DNA, 15 bp, Homo sapiens
aggagagagcaatag

SEQ ID NO: 424884 - DNA, 15 bp, Homo sapiens
aaggagagagcaata

SEQ ID NO: 424885 - DNA, 15 bp, Homo sapiens
aaaggagagagcaat

SEQ ID NO: 424886 - DNA, 15 bp, Homo sapiens
aaaaggagagagcaa

SEQ ID NO: 424887 - DNA, 15 bp, Homo sapiens
aaaaaggagagagca

SEQ ID NO: 424888 - DNA, 15 bp, Homo sapiens
gaaaaaggagagagc

SEQ ID NO: 424889 - DNA, 15 bp, Homo sapiens
ggaaaaaggagagag

SEQ ID NO: 424890 - DNA, 15 bp, Homo sapiens
aggaaaaaggagaga

SEQ ID NO: 424891 - DNA, 15 bp, Homo sapiens
aaggaaaaaggagag

SEQ ID NO: 424892 - DNA, 15 bp, Homo sapiens
gaaggaaaaaggaga

SEQ ID NO: 424893 - DNA, 15 bp, Homo sapiens
tgaaggaaaaaggag

SEQ ID NO: 424894 - DNA, 15 bp, Homo sapiens
gtgaaggaaaaagga

SEQ ID NO: 424895 - DNA, 15 bp, Homo sapiens
agtgaaggaaaaagg

SEQ ID NO: 424896 - DNA, 15 bp, Homo sapiens
gagtgaaggaaaaag

SEQ ID NO: 424897 - DNA, 15 bp, Homo sapiens
tgagtgaaggaaaaa

SEQ ID NO: 424898 - DNA, 15 bp, Homo sapiens
gtgagtgaaggaaaa

SEQ ID NO: 424899 - DNA, 15 bp, Homo sapiens
tgtgagtgaaggaaa

SEQ ID NO: 424900 - DNA, 15 bp, Homo sapiens
ttgtgagtgaaggaa

SEQ ID NO: 424901 - DNA, 15 bp, Homo sapiens
cttgtgagtgaagga

SEQ ID NO: 424902 - DNA, 15 bp, Homo sapiens
gcttgtgagtgaagg

SEQ ID NO: 424903 - DNA, 15 bp, Homo sapiens
agcttgtgagtgaag

SEQ ID NO: 424904 - DNA, 15 bp, Homo sapiens
gagcttgtgagtgaa

SEQ ID NO: 424905 - DNA, 15 bp, Homo sapiens
agagcttgtgagtga

SEQ ID NO: 424906 - DNA, 15 bp, Homo sapiens
aagagcttgtgagtg

SEQ ID NO: 424907 - DNA, 15 bp, Homo sapiens
taagagcttgtgagt

SEQ ID NO: 424908 - DNA, 15 bp, Homo sapiens
ctaagagcttgtgag

SEQ ID NO: 424909 - DNA, 15 bp, Homo sapiens
gctaagagcttgtga

SEQ ID NO: 424910 - DNA, 15 bp, Homo sapiens
tgctaagagcttgtg

SEQ ID NO: 424911 - DNA, 15 bp, Homo sapiens
atgctaagagcttgt

SEQ ID NO: 424912 - DNA, 15 bp, Homo sapiens
catgctaagagcttg

SEQ ID NO: 424913 - DNA, 15 bp, Homo sapiens
acatgctaagagctt

SEQ ID NO: 424914 - DNA, 15 bp, Homo sapiens
aacatgctaagagct

SEQ ID NO: 424915 - DNA, 15 bp, Homo sapiens
aaacatgctaagagc

SEQ ID NO: 424916 - DNA, 15 bp, Homo sapiens
gaaacatgctaagag

SEQ ID NO: 424917 - DNA, 15 bp, Homo sapiens
agaaacatgctaaga

SEQ ID NO: 424918 - DNA, 15 bp, Homo sapiens
tagaaacatgctaag

SEQ ID NO: 424919 - DNA, 15 bp, Homo sapiens
atagaaacatgctaa

SEQ ID NO: 424920 - DNA, 15 bp, Homo sapiens
gatagaaacatgcta

SEQ ID NO: 424921 - DNA, 15 bp, Homo sapiens
ggatagaaacatgct

SEQ ID NO: 424922 - DNA, 15 bp, Homo sapiens
gggatagaaacatgc

SEQ ID NO: 424923 - DNA, 15 bp, Homo sapiens
tgggatagaaacatg

SEQ ID NO: 424924 - DNA, 15 bp, Homo sapiens
ttgggatagaaacat

SEQ ID NO: 424925 - DNA, 15 bp, Homo sapiens
tttgggatagaaaca

SEQ ID NO: 424926 - DNA, 15 bp, Homo sapiens
gtttgggatagaaac

SEQ ID NO: 424927 - DNA, 15 bp, Homo sapiens
agtttgggatagaaa

SEQ ID NO: 424928 - DNA, 15 bp, Homo sapiens
gagtttgggatagaa

SEQ ID NO: 424929 - DNA, 15 bp, Homo sapiens
tgagtttgggataga

SEQ ID NO: 424930 - DNA, 15 bp, Homo sapiens
atgagtttgggatag

SEQ ID NO: 424931 - DNA, 15 bp, Homo sapiens
catgagtttgggata

SEQ ID NO: 424932 - DNA, 15 bp, Homo sapiens
gcatgagtttgggat

SEQ ID NO: 424933 - DNA, 15 bp, Homo sapiens
cgcatgagtttggga

SEQ ID NO: 424934 - DNA, 15 bp, Homo sapiens
acgcatgagtttggg

SEQ ID NO: 424935 - DNA, 15 bp, Homo sapiens
aacgcatgagtttgg

SEQ ID NO: 424936 - DNA, 15 bp, Homo sapiens
aaacgcatgagtttg

SEQ ID NO: 424937 - DNA, 15 bp, Homo sapiens
gaaacgcatgagttt

SEQ ID NO: 424938 - DNA, 15 bp, Homo sapiens
ggaaacgcatgagtt

SEQ ID NO: 424939 - DNA, 15 bp, Homo sapiens
tggaaacgcatgagt

SEQ ID NO: 424940 - DNA, 15 bp, Homo sapiens
gtggaaacgcatgag

SEQ ID NO: 424941 - DNA, 15 bp, Homo sapiens
tgtggaaacgcatga

SEQ ID NO: 424942 - DNA, 15 bp, Homo sapiens
atgtggaaacgcatg

SEQ ID NO: 424943 - DNA, 15 bp, Homo sapiens
tatgtggaaacgcat

SEQ ID NO: 424944 - DNA, 15 bp, Homo sapiens
ctatgtggaaacgca

SEQ ID NO: 424945 - DNA, 15 bp, Homo sapiens
tctatgtggaaacgc

SEQ ID NO: 424946 - DNA, 15 bp, Homo sapiens
atctatgtggaaacg

SEQ ID NO: 424947 - DNA, 15 bp, Homo sapiens
catctatgtggaaac

SEQ ID NO: 424948 - DNA, 15 bp, Homo sapiens
acatctatgtggaaa

SEQ ID NO: 424949 - DNA, 15 bp, Homo sapiens
tacatctatgtggaa

SEQ ID NO: 424950 - DNA, 15 bp, Homo sapiens
atacatctatgtgga

SEQ ID NO: 424951 - DNA, 15 bp, Homo sapiens
catacatctatgtgg

SEQ ID NO: 424952 - DNA, 15 bp, Homo sapiens
acatacatctatgtg

SEQ ID NO: 424953 - DNA, 15 bp, Homo sapiens
aacatacatctatgt

SEQ ID NO: 424954 - DNA, 15 bp, Homo sapiens
aaacatacatctatg

SEQ ID NO: 424955 - DNA, 15 bp, Homo sapiens
gaaacatacatctat

SEQ ID NO: 424956 - DNA, 15 bp, Homo sapiens
agaaacatacatcta

SEQ ID NO: 424957 - DNA, 15 bp, Homo sapiens
aagaaacatacatct

SEQ ID NO: 424958 - DNA, 15 bp, Homo sapiens
caagaaacatacatc

SEQ ID NO: 424959 - DNA, 15 bp, Homo sapiens
ccaagaaacatacat

SEQ ID NO: 424960 - DNA, 15 bp, Homo sapiens
gccaagaaacataca

SEQ ID NO: 424961 - DNA, 15 bp, Homo sapiens
ggccaagaaacatac

SEQ ID NO: 424962 - DNA, 15 bp, Homo sapiens
tggccaagaaacata

SEQ ID NO: 424963 - DNA, 15 bp, Homo sapiens
ctggccaagaaacat

SEQ ID NO: 424964 - DNA, 15 bp, Homo sapiens
actggccaagaaaca

SEQ ID NO: 424965 - DNA, 15 bp, Homo sapiens
tactggccaagaaac

SEQ ID NO: 424966 - DNA, 15 bp, Homo sapiens
ctactggccaagaaa

SEQ ID NO: 424967 - DNA, 15 bp, Homo sapiens
actactggccaagaa

SEQ ID NO: 424968 - DNA, 15 bp, Homo sapiens
cactactggccaaga

SEQ ID NO: 424969 - DNA, 15 bp, Homo sapiens
gcactactggccaag

SEQ ID NO: 424970 - DNA, 15 bp, Homo sapiens
agcactactggccaa

SEQ ID NO: 424971 - DNA, 15 bp, Homo sapiens
tagcactactggcca

SEQ ID NO: 424972 - DNA, 15 bp, Homo sapiens
gtagcactactggcc

SEQ ID NO: 424973 - DNA, 15 bp, Homo sapiens
agtagcactactggc

SEQ ID NO: 424974 - DNA, 15 bp, Homo sapiens
gagtagcactactgg

SEQ ID NO: 424975 - DNA, 15 bp, Homo sapiens
agagtagcactactg

SEQ ID NO: 424976 - DNA, 15 bp, Homo sapiens
cagagtagcactact

SEQ ID NO: 424977 - DNA, 15 bp, Homo sapiens
gcagagtagcactac

SEQ ID NO: 424978 - DNA, 15 bp, Homo sapiens
ggcagagtagcacta

SEQ ID NO: 424979 - DNA, 15 bp, Homo sapiens
aggcagagtagcact

SEQ ID NO: 424980 - DNA, 15 bp, Homo sapiens
gaggcagagtagcac

SEQ ID NO: 424981 - DNA, 15 bp, Homo sapiens
agaggcagagtagca

SEQ ID NO: 424982 - DNA, 15 bp, Homo sapiens
gagaggcagagtagc

SEQ ID NO: 424983 - DNA, 15 bp, Homo sapiens
ggagaggcagagtag

SEQ ID NO: 424984 - DNA, 15 bp, Homo sapiens
aggagaggcagagta

SEQ ID NO: 424985 - DNA, 15 bp, Homo sapiens
gaggagaggcagagt

SEQ ID NO: 424986 - DNA, 15 bp, Homo sapiens
ggaggagaggcagag

SEQ ID NO: 424987 - DNA, 15 bp, Homo sapiens
aggaggagaggcaga

SEQ ID NO: 424988 - DNA, 15 bp, Homo sapiens
taggaggagaggcag

SEQ ID NO: 424989 - DNA, 15 bp, Homo sapiens
ttaggaggagaggca

SEQ ID NO: 424990 - DNA, 15 bp, Homo sapiens
cttaggaggagaggc

SEQ ID NO: 424991 - DNA, 15 bp, Homo sapiens
tcttaggaggagagg

SEQ ID NO: 424992 - DNA, 15 bp, Homo sapiens
ttcttaggaggagag

SEQ ID NO: 424993 - DNA, 15 bp, Homo sapiens
attcttaggaggaga

SEQ ID NO: 424994 - DNA, 15 bp, Homo sapiens
tattcttaggaggag

SEQ ID NO: 424995 - DNA, 15 bp, Homo sapiens
gtattcttaggagga

SEQ ID NO: 424996 - DNA, 15 bp, Homo sapiens
ggtattcttaggagg

SEQ ID NO: 424997 - DNA, 15 bp, Homo sapiens
tggtattcttaggag

SEQ ID NO: 424998 - DNA, 15 bp, Homo sapiens
atggtattcttagga

SEQ ID NO: 424999 - DNA, 15 bp, Homo sapiens
aatggtattcttagg

SEQ ID NO: 425000 - DNA, 15 bp, Homo sapiens
aaatggtattcttag

SEQ ID NO: 425001 - DNA, 15 bp, Homo sapiens
caaatggtattctta

SEQ ID NO: 425002 - DNA, 15 bp, Homo sapiens
tcaaatggtattctt

SEQ ID NO: 425003 - DNA, 15 bp, Homo sapiens
ttcaaatggtattct

SEQ ID NO: 425004 - DNA, 15 bp, Homo sapiens
tttcaaatggtattc

SEQ ID NO: 425005 - DNA, 15 bp, Homo sapiens
atttcaaatggtatt

SEQ ID NO: 425006 - DNA, 15 bp, Homo sapiens
tatttcaaatggtat

SEQ ID NO: 425007 - DNA, 15 bp, Homo sapiens
atatttcaaatggta

SEQ ID NO: 425008 - DNA, 15 bp, Homo sapiens
tatatttcaaatggt

SEQ ID NO: 425009 - DNA, 15 bp, Homo sapiens
ttatatttcaaatgg

SEQ ID NO: 425010 - DNA, 15 bp, Homo sapiens
tttatatttcaaatg

SEQ ID NO: 425011 - DNA, 15 bp, Homo sapiens
atttatatttcaaat

SEQ ID NO: 425012 - DNA, 15 bp, Homo sapiens
tatttatatttcaaa

SEQ ID NO: 425013 - DNA, 15 bp, Homo sapiens
ttatttatatttcaa

SEQ ID NO: 425014 - DNA, 15 bp, Homo sapiens
cttatttatatttca

SEQ ID NO: 425015 - DNA, 15 bp, Homo sapiens
gcttatttatatttc

SEQ ID NO: 425016 - DNA, 15 bp, Homo sapiens
tgcttatttatattt

SEQ ID NO: 425017 - DNA, 15 bp, Homo sapiens
ttgcttatttatatt

SEQ ID NO: 425018 - DNA, 15 bp, Homo sapiens
tttgcttatttatat

SEQ ID NO: 425019 - DNA, 15 bp, Homo sapiens
ctttgcttatttata

SEQ ID NO: 425020 - DNA, 15 bp, Homo sapiens
gctttgcttatttat

SEQ ID NO: 425021 - DNA, 15 bp, Homo sapiens
tgctttgcttattta

SEQ ID NO: 425022 - DNA, 15 bp, Homo sapiens
ttgctttgcttattt

SEQ ID NO: 425023 - DNA, 15 bp, Homo sapiens
cttgctttgcttatt

SEQ ID NO: 425024 - DNA, 15 bp, Homo sapiens
gcttgctttgcttat

SEQ ID NO: 425025 - DNA, 15 bp, Homo sapiens
tgcttgctttgctta

SEQ ID NO: 425026 - DNA, 15 bp, Homo sapiens
ttgcttgctttgctt

SEQ ID NO: 425027 - DNA, 15 bp, Homo sapiens
cttgcttgctttgct

SEQ ID NO: 425028 - DNA, 15 bp, Homo sapiens
gcttgcttgctttgc

SEQ ID NO: 425029 - DNA, 15 bp, Homo sapiens
agcttgcttgctttg

SEQ ID NO: 425030 - DNA, 15 bp, Homo sapiens
tagcttgcttgcttt

SEQ ID NO: 425031 - DNA, 15 bp, Homo sapiens
ctagcttgcttgctt

SEQ ID NO: 425032 - DNA, 15 bp, Homo sapiens
gctagcttgcttgct

SEQ ID NO: 425033 - DNA, 15 bp, Homo sapiens
ggctagcttgcttgc

SEQ ID NO: 425034 - DNA, 15 bp, Homo sapiens
gggctagcttgcttg

SEQ ID NO: 425035 - DNA, 15 bp, Homo sapiens
ggggctagcttgctt

SEQ ID NO: 425036 - DNA, 15 bp, Homo sapiens
tggggctagcttgct

SEQ ID NO: 425037 - DNA, 15 bp, Homo sapiens
ttggggctagcttgc

SEQ ID NO: 425038 - DNA, 15 bp, Homo sapiens
gttggggctagcttg

SEQ ID NO: 425039 - DNA, 15 bp, Homo sapiens
ggttggggctagctt

SEQ ID NO: 425040 - DNA, 15 bp, Homo sapiens
tggttggggctagct

SEQ ID NO: 425041 - DNA, 15 bp, Homo sapiens
atggttggggctagc

SEQ ID NO: 425042 - DNA, 15 bp, Homo sapiens
aatggttggggctag

SEQ ID NO: 425043 - DNA, 15 bp, Homo sapiens
gaatggttggggcta

SEQ ID NO: 425044 - DNA, 15 bp, Homo sapiens
agaatggttggggct

SEQ ID NO: 425045 - DNA, 15 bp, Homo sapiens
aagaatggttggggc

SEQ ID NO: 425046 - DNA, 15 bp, Homo sapiens
caagaatggttgggg

SEQ ID NO: 425047 - DNA, 15 bp, Homo sapiens
ccaagaatggttggg

SEQ ID NO: 425048 - DNA, 15 bp, Homo sapiens
cccaagaatggttgg

SEQ ID NO: 425049 - DNA, 15 bp, Homo sapiens
acccaagaatggttg

SEQ ID NO: 425050 - DNA, 15 bp, Homo sapiens
aacccaagaatggtt

SEQ ID NO: 425051 - DNA, 15 bp, Homo sapiens
gaacccaagaatggt

SEQ ID NO: 425052 - DNA, 15 bp, Homo sapiens
ggaacccaagaatgg

SEQ ID NO: 425053 - DNA, 15 bp, Homo sapiens
gggaacccaagaatg

SEQ ID NO: 425054 - DNA, 15 bp, Homo sapiens
tgggaacccaagaat

SEQ ID NO: 425055 - DNA, 15 bp, Homo sapiens
ctgggaacccaagaa

SEQ ID NO: 425056 - DNA, 15 bp, Homo sapiens
gctgggaacccaaga

SEQ ID NO: 425057 - DNA, 15 bp, Homo sapiens
ggctgggaacccaag

SEQ ID NO: 425058 - DNA, 15 bp, Homo sapiens
gggctgggaacccaa

SEQ ID NO: 425059 - DNA, 15 bp, Homo sapiens
tgggctgggaaccca

SEQ ID NO: 425060 - DNA, 15 bp, Homo sapiens
ttgggctgggaaccc

SEQ ID NO: 425061 - DNA, 15 bp, Homo sapiens
gttgggctgggaacc

SEQ ID NO: 425062 - DNA, 15 bp, Homo sapiens
tgttgggctgggaac

SEQ ID NO: 425063 - DNA, 15 bp, Homo sapiens
ttgttgggctgggaa

SEQ ID NO: 425064 - DNA, 15 bp, Homo sapiens
gttgttgggctggga

SEQ ID NO: 425065 - DNA, 15 bp, Homo sapiens
agttgttgggctggg

SEQ ID NO: 425066 - DNA, 15 bp, Homo sapiens
tagttgttgggctgg

SEQ ID NO: 425067 - DNA, 15 bp, Homo sapiens
gtagttgttgggctg

SEQ ID NO: 425068 - DNA, 15 bp, Homo sapiens
tgtagttgttgggct

SEQ ID NO: 425069 - DNA, 15 bp, Homo sapiens
ttgtagttgttgggc

SEQ ID NO: 425070 - DNA, 15 bp, Homo sapiens
attgtagttgttggg

SEQ ID NO: 425071 - DNA, 15 bp, Homo sapiens
gattgtagttgttgg

SEQ ID NO: 425072 - DNA, 15 bp, Homo sapiens
agattgtagttgttg

SEQ ID NO: 425073 - DNA, 15 bp, Homo sapiens
aagattgtagttgtt

SEQ ID NO: 425074 - DNA, 15 bp, Homo sapiens
taagattgtagttgt

SEQ ID NO: 425075 - DNA, 15 bp, Homo sapiens
ataagattgtagttg

SEQ ID NO: 425076 - DNA, 15 bp, Homo sapiens
tataagattgtagtt

SEQ ID NO: 425077 - DNA, 15 bp, Homo sapiens
ctataagattgtagt

SEQ ID NO: 425078 - DNA, 15 bp, Homo sapiens
gctataagattgtag

SEQ ID NO: 425079 - DNA, 15 bp, Homo sapiens
agctataagattgta

SEQ ID NO: 425080 - DNA, 15 bp, Homo sapiens
tagctataagattgt

SEQ ID NO: 425081 - DNA, 15 bp, Homo sapiens
ttagctataagattg

SEQ ID NO: 425082 - DNA, 15 bp, Homo sapiens
attagctataagatt

SEQ ID NO: 425083 - DNA, 15 bp, Homo sapiens
aattagctataagat

SEQ ID NO: 425084 - DNA, 15 bp, Homo sapiens
gaattagctataaga

SEQ ID NO: 425085 - DNA, 15 bp, Homo sapiens
ggaattagctataag

SEQ ID NO: 425086 - DNA, 15 bp, Homo sapiens
aggaattagctataa

SEQ ID NO: 425087 - DNA, 15 bp, Homo sapiens
gaggaattagctata

SEQ ID NO: 425088 - DNA, 15 bp, Homo sapiens
agaggaattagctat

SEQ ID NO: 425089 - DNA, 15 bp, Homo sapiens
cagaggaattagcta

SEQ ID NO: 425090 - DNA, 15 bp, Homo sapiens
tcagaggaattagct

SEQ ID NO: 425091 - DNA, 15 bp, Homo sapiens
atcagaggaattagc

SEQ ID NO: 425092 - DNA, 15 bp, Homo sapiens
tatcagaggaattag

SEQ ID NO: 425093 - DNA, 15 bp, Homo sapiens
gtatcagaggaatta

SEQ ID NO: 425094 - DNA, 15 bp, Homo sapiens
agtatcagaggaatt

SEQ ID NO: 425095 - DNA, 15 bp, Homo sapiens
cagtatcagaggaat

SEQ ID NO: 425096 - DNA, 15 bp, Homo sapiens
acagtatcagaggaa

SEQ ID NO: 425097 - DNA, 15 bp, Homo sapiens
tacagtatcagagga

SEQ ID NO: 425098 - DNA, 15 bp, Homo sapiens
atacagtatcagagg

SEQ ID NO: 425099 - DNA, 15 bp, Homo sapiens
gatacagtatcagag

SEQ ID NO: 425100 - DNA, 15 bp, Homo sapiens
agatacagtatcaga

SEQ ID NO: 425101 - DNA, 15 bp, Homo sapiens
tagatacagtatcag

SEQ ID NO: 425102 - DNA, 15 bp, Homo sapiens
gtagatacagtatca

SEQ ID NO: 425103 - DNA, 15 bp, Homo sapiens
ggtagatacagtatc

SEQ ID NO: 425104 - DNA, 15 bp, Homo sapiens
tggtagatacagtat

SEQ ID NO: 425105 - DNA, 15 bp, Homo sapiens
gtggtagatacagta

SEQ ID NO: 425106 - DNA, 15 bp, Homo sapiens
agtggtagatacagt

SEQ ID NO: 425107 - DNA, 15 bp, Homo sapiens
gagtggtagatacag

SEQ ID NO: 425108 - DNA, 15 bp, Homo sapiens
tgagtggtagataca

SEQ ID NO: 425109 - DNA, 15 bp, Homo sapiens
ctgagtggtagatac

SEQ ID NO: 425110 - DNA, 15 bp, Homo sapiens
actgagtggtagata

SEQ ID NO: 425111 - DNA, 15 bp, Homo sapiens
tactgagtggtagat

SEQ ID NO: 425112 - DNA, 15 bp, Homo sapiens
atactgagtggtaga

SEQ ID NO: 425113 - DNA, 15 bp, Homo sapiens
aatactgagtggtag

SEQ ID NO: 425114 - DNA, 15 bp, Homo sapiens
taatactgagtggta

SEQ ID NO: 425115 - DNA, 15 bp, Homo sapiens
gtaatactgagtggt

SEQ ID NO: 425116 - DNA, 15 bp, Homo sapiens
tgtaatactgagtgg

SEQ ID NO: 425117 - DNA, 15 bp, Homo sapiens
ttgtaatactgagtg

SEQ ID NO: 425118 - DNA, 15 bp, Homo sapiens
attgtaatactgagt

SEQ ID NO: 425119 - DNA, 15 bp, Homo sapiens
gattgtaatactgag

SEQ ID NO: 425120 - DNA, 15 bp, Homo sapiens
agattgtaatactga

SEQ ID NO: 425121 - DNA, 15 bp, Homo sapiens
gagattgtaatactg

SEQ ID NO: 425122 - DNA, 15 bp, Homo sapiens
tgagattgtaatact

SEQ ID NO: 425123 - DNA, 15 bp, Homo sapiens
ttgagattgtaatac

SEQ ID NO: 425124 - DNA, 15 bp, Homo sapiens
attgagattgtaata

SEQ ID NO: 425125 - DNA, 15 bp, Homo sapiens
aattgagattgtaat

SEQ ID NO: 425126 - DNA, 15 bp, Homo sapiens
aaattgagattgtaa

SEQ ID NO: 425127 - DNA, 15 bp, Homo sapiens
aaaattgagattgta

SEQ ID NO: 425128 - DNA, 15 bp, Homo sapiens
gaaaattgagattgt

SEQ ID NO: 425129 - DNA, 15 bp, Homo sapiens
tgaaaattgagattg

SEQ ID NO: 425130 - DNA, 15 bp, Homo sapiens
gtgaaaattgagatt

SEQ ID NO: 425131 - DNA, 15 bp, Homo sapiens
agtgaaaattgagat

SEQ ID NO: 425132 - DNA, 15 bp, Homo sapiens
aagtgaaaattgaga

SEQ ID NO: 425133 - DNA, 15 bp, Homo sapiens
gaagtgaaaattgag

SEQ ID NO: 425134 - DNA, 15 bp, Homo sapiens
tgaagtgaaaattga

SEQ ID NO: 425135 - DNA, 15 bp, Homo sapiens
atgaagtgaaaattg

SEQ ID NO: 425136 - DNA, 15 bp, Homo sapiens
aatgaagtgaaaatt

SEQ ID NO: 425137 - DNA, 15 bp, Homo sapiens
taatgaagtgaaaat

SEQ ID NO: 425138 - DNA, 15 bp, Homo sapiens
gtaatgaagtgaaaa

SEQ ID NO: 425139 - DNA, 15 bp, Homo sapiens
ggtaatgaagtgaaa

SEQ ID NO: 425140 - DNA, 15 bp, Homo sapiens
gggtaatgaagtgaa

SEQ ID NO: 425141 - DNA, 15 bp, Homo sapiens
agggtaatgaagtga

SEQ ID NO: 425142 - DNA, 15 bp, Homo sapiens
aagggtaatgaagtg

SEQ ID NO: 425143 - DNA, 15 bp, Homo sapiens
caagggtaatgaagt

SEQ ID NO: 425144 - DNA, 15 bp, Homo sapiens
gcaagggtaatgaag

SEQ ID NO: 425145 - DNA, 15 bp, Homo sapiens
ggcaagggtaatgaa

SEQ ID NO: 425146 - DNA, 15 bp, Homo sapiens
aggcaagggtaatga

SEQ ID NO: 425147 - DNA, 15 bp, Homo sapiens
gaggcaagggtaatg

SEQ ID NO: 425148 - DNA, 15 bp, Homo sapiens
tgaggcaagggtaat

SEQ ID NO: 425149 - DNA, 15 bp, Homo sapiens
atgaggcaagggtaa

SEQ ID NO: 425150 - DNA, 15 bp, Homo sapiens
tatgaggcaagggta

SEQ ID NO: 425151 - DNA, 15 bp, Homo sapiens
atatgaggcaagggt

SEQ ID NO: 425152 - DNA, 15 bp, Homo sapiens
aatatgaggcaaggg

SEQ ID NO: 425153 - DNA, 15 bp, Homo sapiens
aaatatgaggcaagg

SEQ ID NO: 425154 - DNA, 15 bp, Homo sapiens
taaatatgaggcaag

SEQ ID NO: 425155 - DNA, 15 bp, Homo sapiens
ataaatatgaggcaa

SEQ ID NO: 425156 - DNA, 15 bp, Homo sapiens
tataaatatgaggca

SEQ ID NO: 425157 - DNA, 15 bp, Homo sapiens
atataaatatgaggc

SEQ ID NO: 425158 - DNA, 15 bp, Homo sapiens
catataaatatgagg

SEQ ID NO: 425159 - DNA, 15 bp, Homo sapiens
acatataaatatgag

SEQ ID NO: 425160 - DNA, 15 bp, Homo sapiens
aacatataaatatga

SEQ ID NO: 425161 - DNA, 15 bp, Homo sapiens
caacatataaatatg

SEQ ID NO: 425162 - DNA, 15 bp, Homo sapiens
ccaacatataaatat

SEQ ID NO: 425163 - DNA, 15 bp, Homo sapiens
gccaacatataaata

SEQ ID NO: 425164 - DNA, 15 bp, Homo sapiens
tgccaacatataaat

SEQ ID NO: 425165 - DNA, 15 bp, Homo sapiens
atgccaacatataaa

SEQ ID NO: 425166 - DNA, 15 bp, Homo sapiens
gatgccaacatataa

SEQ ID NO: 425167 - DNA, 15 bp, Homo sapiens
agatgccaacatata

SEQ ID NO: 425168 - DNA, 15 bp, Homo sapiens
cagatgccaacatat

SEQ ID NO: 425169 - DNA, 15 bp, Homo sapiens
tcagatgccaacata

SEQ ID NO: 425170 - DNA, 15 bp, Homo sapiens
ttcagatgccaacat

SEQ ID NO: 425171 - DNA, 15 bp, Homo sapiens
cttcagatgccaaca

SEQ ID NO: 425172 - DNA, 15 bp, Homo sapiens
gcttcagatgccaac

SEQ ID NO: 425173 - DNA, 15 bp, Homo sapiens
ggcttcagatgccaa

SEQ ID NO: 425174 - DNA, 15 bp, Homo sapiens
aggcttcagatgcca

SEQ ID NO: 425175 - DNA, 15 bp, Homo sapiens
aaggcttcagatgcc

SEQ ID NO: 425176 - DNA, 15 bp, Homo sapiens
taaggcttcagatgc

SEQ ID NO: 425177 - DNA, 15 bp, Homo sapiens
ttaaggcttcagatg

SEQ ID NO: 425178 - DNA, 15 bp, Homo sapiens
cttaaggcttcagat

SEQ ID NO: 425179 - DNA, 15 bp, Homo sapiens
gcttaaggcttcaga

SEQ ID NO: 425180 - DNA, 15 bp, Homo sapiens
tgcttaaggcttcag

SEQ ID NO: 425181 - DNA, 15 bp, Homo sapiens
atgcttaaggcttca

SEQ ID NO: 425182 - DNA, 15 bp, Homo sapiens
aatgcttaaggcttc

SEQ ID NO: 425183 - DNA, 15 bp, Homo sapiens
aaatgcttaaggctt

SEQ ID NO: 425184 - DNA, 15 bp, Homo sapiens
gaaatgcttaaggct

SEQ ID NO: 425185 - DNA, 15 bp, Homo sapiens
agaaatgcttaaggc

SEQ ID NO: 425186 - DNA, 15 bp, Homo sapiens
aagaaatgcttaagg

SEQ ID NO: 425187 - DNA, 15 bp, Homo sapiens
gaagaaatgcttaag

SEQ ID NO: 425188 - DNA, 15 bp, Homo sapiens
agaagaaatgcttaa

SEQ ID NO: 425189 - DNA, 15 bp, Homo sapiens
cagaagaaatgctta

SEQ ID NO: 425190 - DNA, 15 bp, Homo sapiens
tcagaagaaatgctt

SEQ ID NO: 425191 - DNA, 15 bp, Homo sapiens
atcagaagaaatgct

SEQ ID NO: 425192 - DNA, 15 bp, Homo sapiens
catcagaagaaatgc

SEQ ID NO: 425193 - DNA, 15 bp, Homo sapiens
gcatcagaagaaatg

SEQ ID NO: 425194 - DNA, 15 bp, Homo sapiens
ggcatcagaagaaat

SEQ ID NO: 425195 - DNA, 15 bp, Homo sapiens
aggcatcagaagaaa

SEQ ID NO: 425196 - DNA, 15 bp, Homo sapiens
caggcatcagaagaa

SEQ ID NO: 425197 - DNA, 15 bp, Homo sapiens
acaggcatcagaaga

SEQ ID NO: 425198 - DNA, 15 bp, Homo sapiens
gacaggcatcagaag

SEQ ID NO: 425199 - DNA, 15 bp, Homo sapiens
ggacaggcatcagaa

SEQ ID NO: 425200 - DNA, 15 bp, Homo sapiens
gggacaggcatcaga

SEQ ID NO: 425201 - DNA, 15 bp, Homo sapiens
tgggacaggcatcag

SEQ ID NO: 425202 - DNA, 15 bp, Homo sapiens
ctgggacaggcatca

SEQ ID NO: 425203 - DNA, 15 bp, Homo sapiens
actgggacaggcatc

SEQ ID NO: 425204 - DNA, 15 bp, Homo sapiens
aactgggacaggcat

SEQ ID NO: 425205 - DNA, 15 bp, Homo sapiens
taactgggacaggca

SEQ ID NO: 425206 - DNA, 15 bp, Homo sapiens
ataactgggacaggc

SEQ ID NO: 425207 - DNA, 15 bp, Homo sapiens
aataactgggacagg

SEQ ID NO: 425208 - DNA, 15 bp, Homo sapiens
aaataactgggacag

SEQ ID NO: 425209 - DNA, 15 bp, Homo sapiens
aaaataactgggaca

SEQ ID NO: 425210 - DNA, 15 bp, Homo sapiens
gaaaataactgggac

SEQ ID NO: 425211 - DNA, 15 bp, Homo sapiens
agaaaataactggga

SEQ ID NO: 425212 - DNA, 15 bp, Homo sapiens
gagaaaataactggg

SEQ ID NO: 425213 - DNA, 15 bp, Homo sapiens
ggagaaaataactgg

SEQ ID NO: 425214 - DNA, 15 bp, Homo sapiens
tggagaaaataactg

SEQ ID NO: 425215 - DNA, 15 bp, Homo sapiens
ctggagaaaataact

SEQ ID NO: 425216 - DNA, 15 bp, Homo sapiens
actggagaaaataac

SEQ ID NO: 425217 - DNA, 15 bp, Homo sapiens
cactggagaaaataa

SEQ ID NO: 425218 - DNA, 15 bp, Homo sapiens
tcactggagaaaata

SEQ ID NO: 425219 - DNA, 15 bp, Homo sapiens
ttcactggagaaaat

SEQ ID NO: 425220 - DNA, 15 bp, Homo sapiens
attcactggagaaaa

SEQ ID NO: 425221 - DNA, 15 bp, Homo sapiens
gattcactggagaaa

SEQ ID NO: 425222 - DNA, 15 bp, Homo sapiens
tgattcactggagaa

SEQ ID NO: 425223 - DNA, 15 bp, Homo sapiens
gtgattcactggaga

SEQ ID NO: 425224 - DNA, 15 bp, Homo sapiens
agtgattcactggag

SEQ ID NO: 425225 - DNA, 15 bp, Homo sapiens
aagtgattcactgga

SEQ ID NO: 425226 - DNA, 15 bp, Homo sapiens
caagtgattcactgg

SEQ ID NO: 425227 - DNA, 15 bp, Homo sapiens
acaagtgattcactg

SEQ ID NO: 425228 - DNA, 15 bp, Homo sapiens
tacaagtgattcact

SEQ ID NO: 425229 - DNA, 15 bp, Homo sapiens
atacaagtgattcac

SEQ ID NO: 425230 - DNA, 15 bp, Homo sapiens
tatacaagtgattca

SEQ ID NO: 425231 - DNA, 15 bp, Homo sapiens
ctatacaagtgattc

SEQ ID NO: 425232 - DNA, 15 bp, Homo sapiens
actatacaagtgatt

SEQ ID NO: 425233 - DNA, 15 bp, Homo sapiens
aactatacaagtgat

SEQ ID NO: 425234 - DNA, 15 bp, Homo sapiens
aaactatacaagtga

SEQ ID NO: 425235 - DNA, 15 bp, Homo sapiens
gaaactatacaagtg

SEQ ID NO: 425236 - DNA, 15 bp, Homo sapiens
tgaaactatacaagt

SEQ ID NO: 425237 - DNA, 15 bp, Homo sapiens
ctgaaactatacaag

SEQ ID NO: 425238 - DNA, 15 bp, Homo sapiens
gctgaaactatacaa

SEQ ID NO: 425239 - DNA, 15 bp, Homo sapiens
tgctgaaactataca

SEQ ID NO: 425240 - DNA, 15 bp, Homo sapiens
atgctgaaactatac

SEQ ID NO: 425241 - DNA, 15 bp, Homo sapiens
gatgctgaaactata

SEQ ID NO: 425242 - DNA, 15 bp, Homo sapiens
tgatgctgaaactat

SEQ ID NO: 425243 - DNA, 15 bp, Homo sapiens
atgatgctgaaacta

SEQ ID NO: 425244 - DNA, 15 bp, Homo sapiens
aatgatgctgaaact

SEQ ID NO: 425245 - DNA, 15 bp, Homo sapiens
taatgatgctgaaac

SEQ ID NO: 425246 - DNA, 15 bp, Homo sapiens
ataatgatgctgaaa

SEQ ID NO: 425247 - DNA, 15 bp, Homo sapiens
cataatgatgctgaa

SEQ ID NO: 425248 - DNA, 15 bp, Homo sapiens
ccataatgatgctga

SEQ ID NO: 425249 - DNA, 15 bp, Homo sapiens
accataatgatgctg

SEQ ID NO: 425250 - DNA, 15 bp, Homo sapiens
aaccataatgatgct

SEQ ID NO: 425251 - DNA, 15 bp, Homo sapiens
gaaccataatgatgc

SEQ ID NO: 425252 - DNA, 15 bp, Homo sapiens
agaaccataatgatg

SEQ ID NO: 425253 - DNA, 15 bp, Homo sapiens
aagaaccataatgat

SEQ ID NO: 425254 - DNA, 15 bp, Homo sapiens
aaagaaccataatga

SEQ ID NO: 425255 - DNA, 15 bp, Homo sapiens
gaaagaaccataatg

SEQ ID NO: 425256 - DNA, 15 bp, Homo sapiens
ggaaagaaccataat

SEQ ID NO: 425257 - DNA, 15 bp, Homo sapiens
tggaaagaaccataa

SEQ ID NO: 425258 - DNA, 15 bp, Homo sapiens
ttggaaagaaccata

SEQ ID NO: 425259 - DNA, 15 bp, Homo sapiens
cttggaaagaaccat

SEQ ID NO: 425260 - DNA, 15 bp, Homo sapiens
acttggaaagaacca

SEQ ID NO: 425261 - DNA, 15 bp, Homo sapiens
gacttggaaagaacc

SEQ ID NO: 425262 - DNA, 15 bp, Homo sapiens
tgacttggaaagaac

SEQ ID NO: 425263 - DNA, 15 bp, Homo sapiens
atgacttggaaagaa

SEQ ID NO: 425264 - DNA, 15 bp, Homo sapiens
catgacttggaaaga

SEQ ID NO: 425265 - DNA, 15 bp, Homo sapiens
ccatgacttggaaag

SEQ ID NO: 425266 - DNA, 15 bp, Homo sapiens
tccatgacttggaaa

SEQ ID NO: 425267 - DNA, 15 bp, Homo sapiens
atccatgacttggaa

SEQ ID NO: 425268 - DNA, 15 bp, Homo sapiens
catccatgacttgga

SEQ ID NO: 425269 - DNA, 15 bp, Homo sapiens
gcatccatgacttgg

SEQ ID NO: 425270 - DNA, 15 bp, Homo sapiens
agcatccatgacttg

SEQ ID NO: 425271 - DNA, 15 bp, Homo sapiens
cagcatccatgactt

SEQ ID NO: 425272 - DNA, 15 bp, Homo sapiens
gcagcatccatgact

SEQ ID NO: 425273 - DNA, 15 bp, Homo sapiens
ggcagcatccatgac

SEQ ID NO: 425274 - DNA, 15 bp, Homo sapiens
tggcagcatccatga

SEQ ID NO: 425275 - DNA, 15 bp, Homo sapiens
atggcagcatccatg

SEQ ID NO: 425276 - DNA, 15 bp, Homo sapiens
gatggcagcatccat

SEQ ID NO: 425277 - DNA, 15 bp, Homo sapiens
agatggcagcatcca

SEQ ID NO: 425278 - DNA, 15 bp, Homo sapiens
cagatggcagcatcc

SEQ ID NO: 425279 - DNA, 15 bp, Homo sapiens
acagatggcagcatc

SEQ ID NO: 425280 - DNA, 15 bp, Homo sapiens
tacagatggcagcat

SEQ ID NO: 425281 - DNA, 15 bp, Homo sapiens
ctacagatggcagca

SEQ ID NO: 425282 - DNA, 15 bp, Homo sapiens
tctacagatggcagc

SEQ ID NO: 425283 - DNA, 15 bp, Homo sapiens
ttctacagatggcag

SEQ ID NO: 425284 - DNA, 15 bp, Homo sapiens
tttctacagatggca

SEQ ID NO: 425285 - DNA, 15 bp, Homo sapiens
atttctacagatggc

SEQ ID NO: 425286 - DNA, 15 bp, Homo sapiens
aatttctacagatgg

SEQ ID NO: 425287 - DNA, 15 bp, Homo sapiens
caatttctacagatg

SEQ ID NO: 425288 - DNA, 15 bp, Homo sapiens
ccaatttctacagat

SEQ ID NO: 425289 - DNA, 15 bp, Homo sapiens
accaatttctacaga

SEQ ID NO: 425290 - DNA, 15 bp, Homo sapiens
aaccaatttctacag

SEQ ID NO: 425291 - DNA, 15 bp, Homo sapiens
aaaccaatttctaca

SEQ ID NO: 425292 - DNA, 15 bp, Homo sapiens
aaaaccaatttctac

SEQ ID NO: 425293 - DNA, 15 bp, Homo sapiens
taaaaccaatttcta

SEQ ID NO: 425294 - DNA, 15 bp, Homo sapiens
ataaaaccaatttct

SEQ ID NO: 425295 - DNA, 15 bp, Homo sapiens
tataaaaccaatttc

SEQ ID NO: 425296 - DNA, 15 bp, Homo sapiens
ctataaaaccaattt

SEQ ID NO: 425297 - DNA, 15 bp, Homo sapiens
gctataaaaccaatt

SEQ ID NO: 425298 - DNA, 15 bp, Homo sapiens
agctataaaaccaat

SEQ ID NO: 425299 - DNA, 15 bp, Homo sapiens
cagctataaaaccaa

SEQ ID NO: 425300 - DNA, 15 bp, Homo sapiens
acagctataaaacca

SEQ ID NO: 425301 - DNA, 15 bp, Homo sapiens
aacagctataaaacc

SEQ ID NO: 425302 - DNA, 15 bp, Homo sapiens
aaacagctataaaac

SEQ ID NO: 425303 - DNA, 15 bp, Homo sapiens
aaaacagctataaaa

SEQ ID NO: 425304 - DNA, 15 bp, Homo sapiens
aaaaacagctataaa

SEQ ID NO: 425305 - DNA, 15 bp, Homo sapiens
gaaaaacagctataa

SEQ ID NO: 425306 - DNA, 15 bp, Homo sapiens
agaaaaacagctata

SEQ ID NO: 425307 - DNA, 15 bp, Homo sapiens
cagaaaaacagctat

SEQ ID NO: 425308 - DNA, 15 bp, Homo sapiens
ccagaaaaacagcta

SEQ ID NO: 425309 - DNA, 15 bp, Homo sapiens
cccagaaaaacagct

SEQ ID NO: 425310 - DNA, 15 bp, Homo sapiens
gcccagaaaaacagc

SEQ ID NO: 425311 - DNA, 15 bp, Homo sapiens
tgcccagaaaaacag

SEQ ID NO: 425312 - DNA, 15 bp, Homo sapiens
atgcccagaaaaaca

SEQ ID NO: 425313 - DNA, 15 bp, Homo sapiens
aatgcccagaaaaac

SEQ ID NO: 425314 - DNA, 15 bp, Homo sapiens
aaatgcccagaaaaa

SEQ ID NO: 425315 - DNA, 15 bp, Homo sapiens
aaaatgcccagaaaa

SEQ ID NO: 425316 - DNA, 15 bp, Homo sapiens
aaaaatgcccagaaa

SEQ ID NO: 425317 - DNA, 15 bp, Homo sapiens
gaaaaatgcccagaa

SEQ ID NO: 425318 - DNA, 15 bp, Homo sapiens
agaaaaatgcccaga

SEQ ID NO: 425319 - DNA, 15 bp, Homo sapiens
gagaaaaatgcccag

SEQ ID NO: 425320 - DNA, 15 bp, Homo sapiens
ggagaaaaatgccca

SEQ ID NO: 425321 - DNA, 15 bp, Homo sapiens
gggagaaaaatgccc

SEQ ID NO: 425322 - DNA, 15 bp, Homo sapiens
agggagaaaaatgcc

SEQ ID NO: 425323 - DNA, 15 bp, Homo sapiens
tagggagaaaaatgc

SEQ ID NO: 425324 - DNA, 15 bp, Homo sapiens
gtagggagaaaaatg

SEQ ID NO: 425325 - DNA, 15 bp, Homo sapiens
ggtagggagaaaaat

SEQ ID NO: 425326 - DNA, 15 bp, Homo sapiens
aggtagggagaaaaa

SEQ ID NO: 425327 - DNA, 15 bp, Homo sapiens
gaggtagggagaaaa

SEQ ID NO: 425328 - DNA, 15 bp, Homo sapiens
tgaggtagggagaaa

SEQ ID NO: 425329 - DNA, 15 bp, Homo sapiens
gtgaggtagggagaa

SEQ ID NO: 425330 - DNA, 15 bp, Homo sapiens
ggtgaggtagggaga

SEQ ID NO: 425331 - DNA, 15 bp, Homo sapiens
tggtgaggtagggag

SEQ ID NO: 425332 - DNA, 15 bp, Homo sapiens
gtggtgaggtaggga

SEQ ID NO: 425333 - DNA, 15 bp, Homo sapiens
tgtggtgaggtaggg

SEQ ID NO: 425334 - DNA, 15 bp, Homo sapiens
atgtggtgaggtagg

SEQ ID NO: 425335 - DNA, 15 bp, Homo sapiens
aatgtggtgaggtag

SEQ ID NO: 425336 - DNA, 15 bp, Homo sapiens
caatgtggtgaggta

SEQ ID NO: 425337 - DNA, 15 bp, Homo sapiens
acaatgtggtgaggt

SEQ ID NO: 425338 - DNA, 15 bp, Homo sapiens
aacaatgtggtgagg

SEQ ID NO: 425339 - DNA, 15 bp, Homo sapiens
aaacaatgtggtgag

SEQ ID NO: 425340 - DNA, 15 bp, Homo sapiens
taaacaatgtggtga

SEQ ID NO: 425341 - DNA, 15 bp, Homo sapiens
ttaaacaatgtggtg

SEQ ID NO: 425342 - DNA, 15 bp, Homo sapiens
tttaaacaatgtggt

SEQ ID NO: 425343 - DNA, 15 bp, Homo sapiens
ctttaaacaatgtgg

SEQ ID NO: 425344 - DNA, 15 bp, Homo sapiens
gctttaaacaatgtg

SEQ ID NO: 425345 - DNA, 15 bp, Homo sapiens
ggctttaaacaatgt

SEQ ID NO: 425346 - DNA, 15 bp, Homo sapiens
gggctttaaacaatg

SEQ ID NO: 425347 - DNA, 15 bp, Homo sapiens
ggggctttaaacaat

SEQ ID NO: 425348 - DNA, 15 bp, Homo sapiens
tggggctttaaacaa

SEQ ID NO: 425349 - DNA, 15 bp, Homo sapiens
atggggctttaaaca

SEQ ID NO: 425350 - DNA, 15 bp, Homo sapiens
aatggggctttaaac

SEQ ID NO: 425351 - DNA, 15 bp, Homo sapiens
caatggggctttaaa

SEQ ID NO: 425352 - DNA, 15 bp, Homo sapiens
tcaatggggctttaa

SEQ ID NO: 425353 - DNA, 15 bp, Homo sapiens
atcaatggggcttta

SEQ ID NO: 425354 - DNA, 15 bp, Homo sapiens
catcaatggggcttt

SEQ ID NO: 425355 - DNA, 15 bp, Homo sapiens
ccatcaatggggctt

SEQ ID NO: 425356 - DNA, 15 bp, Homo sapiens
accatcaatggggct

SEQ ID NO: 425357 - DNA, 15 bp, Homo sapiens
aaccatcaatggggc

SEQ ID NO: 425358 - DNA, 15 bp, Homo sapiens
gaaccatcaatgggg

SEQ ID NO: 425359 - DNA, 15 bp, Homo sapiens
ggaaccatcaatggg

SEQ ID NO: 425360 - DNA, 15 bp, Homo sapiens
aggaaccatcaatgg

SEQ ID NO: 425361 - DNA, 15 bp, Homo sapiens
caggaaccatcaatg

SEQ ID NO: 425362 - DNA, 15 bp, Homo sapiens
gcaggaaccatcaat

SEQ ID NO: 425363 - DNA, 15 bp, Homo sapiens
ggcaggaaccatcaa

SEQ ID NO: 425364 - DNA, 15 bp, Homo sapiens
aggcaggaaccatca

SEQ ID NO: 425365 - DNA, 15 bp, Homo sapiens
caggcaggaaccatc

SEQ ID NO: 425366 - DNA, 15 bp, Homo sapiens
tcaggcaggaaccat

SEQ ID NO: 425367 - DNA, 15 bp, Homo sapiens
ttcaggcaggaacca

SEQ ID NO: 425368 - DNA, 15 bp, Homo sapiens
tttcaggcaggaacc

SEQ ID NO: 425369 - DNA, 15 bp, Homo sapiens
atttcaggcaggaac

SEQ ID NO: 425370 - DNA, 15 bp, Homo sapiens
aatttcaggcaggaa

SEQ ID NO: 425371 - DNA, 15 bp, Homo sapiens
taatttcaggcagga

SEQ ID NO: 425372 - DNA, 15 bp, Homo sapiens
ctaatttcaggcagg

SEQ ID NO: 425373 - DNA, 15 bp, Homo sapiens
tctaatttcaggcag

SEQ ID NO: 425374 - DNA, 15 bp, Homo sapiens
ctctaatttcaggca

SEQ ID NO: 425375 - DNA, 15 bp, Homo sapiens
tctctaatttcaggc

SEQ ID NO: 425376 - DNA, 15 bp, Homo sapiens
ctctctaatttcagg

SEQ ID NO: 425377 - DNA, 15 bp, Homo sapiens
tctctctaatttcag

SEQ ID NO: 425378 - DNA, 15 bp, Homo sapiens
gtctctctaatttca

SEQ ID NO: 425379 - DNA, 15 bp, Homo sapiens
agtctctctaatttc

SEQ ID NO: 425380 - DNA, 15 bp, Homo sapiens
cagtctctctaattt

SEQ ID NO: 425381 - DNA, 15 bp, Homo sapiens
ccagtctctctaatt

SEQ ID NO: 425382 - DNA, 15 bp, Homo sapiens
gccagtctctctaat

SEQ ID NO: 425383 - DNA, 15 bp, Homo sapiens
agccagtctctctaa

SEQ ID NO: 425384 - DNA, 15 bp, Homo sapiens
tagccagtctctcta

SEQ ID NO: 425385 - DNA, 15 bp, Homo sapiens
ttagccagtctctct

SEQ ID NO: 425386 - DNA, 15 bp, Homo sapiens
tttagccagtctctc

SEQ ID NO: 425387 - DNA, 15 bp, Homo sapiens
ctttagccagtctct

SEQ ID NO: 425388 - DNA, 15 bp, Homo sapiens
tctttagccagtctc

SEQ ID NO: 425389 - DNA, 15 bp, Homo sapiens
gtctttagccagtct

SEQ ID NO: 425390 - DNA, 15 bp, Homo sapiens
ggtctttagccagtc

SEQ ID NO: 425391 - DNA, 15 bp, Homo sapiens
aggtctttagccagt

SEQ ID NO: 425392 - DNA, 15 bp, Homo sapiens
aaggtctttagccag

SEQ ID NO: 425393 - DNA, 15 bp, Homo sapiens
taaggtctttagcca

SEQ ID NO: 425394 - DNA, 15 bp, Homo sapiens
gtaaggtctttagcc

SEQ ID NO: 425395 - DNA, 15 bp, Homo sapiens
tgtaaggtctttagc

SEQ ID NO: 425396 - DNA, 15 bp, Homo sapiens
ctgtaaggtctttag

SEQ ID NO: 425397 - DNA, 15 bp, Homo sapiens
tctgtaaggtcttta

SEQ ID NO: 425398 - DNA, 15 bp, Homo sapiens
gtctgtaaggtcttt

SEQ ID NO: 425399 - DNA, 15 bp, Homo sapiens
ggtctgtaaggtctt

SEQ ID NO: 425400 - DNA, 15 bp, Homo sapiens
gggtctgtaaggtct

SEQ ID NO: 425401 - DNA, 15 bp, Homo sapiens
agggtctgtaaggtc

SEQ ID NO: 425402 - DNA, 15 bp, Homo sapiens
aagggtctgtaaggt

SEQ ID NO: 425403 - DNA, 15 bp, Homo sapiens
gaagggtctgtaagg

SEQ ID NO: 425404 - DNA, 15 bp, Homo sapiens
ggaagggtctgtaag

SEQ ID NO: 425405 - DNA, 15 bp, Homo sapiens
aggaagggtctgtaa

SEQ ID NO: 425406 - DNA, 15 bp, Homo sapiens
taggaagggtctgta

SEQ ID NO: 425407 - DNA, 15 bp, Homo sapiens
ttaggaagggtctgt

SEQ ID NO: 425408 - DNA, 15 bp, Homo sapiens
cttaggaagggtctg

SEQ ID NO: 425409 - DNA, 15 bp, Homo sapiens
ccttaggaagggtct

SEQ ID NO: 425410 - DNA, 15 bp, Homo sapiens
gccttaggaagggtc

SEQ ID NO: 425411 - DNA, 15 bp, Homo sapiens
agccttaggaagggt

SEQ ID NO: 425412 - DNA, 15 bp, Homo sapiens
tagccttaggaaggg

SEQ ID NO: 425413 - DNA, 15 bp, Homo sapiens
ttagccttaggaagg

SEQ ID NO: 425414 - DNA, 15 bp, Homo sapiens
cttagccttaggaag

SEQ ID NO: 425415 - DNA, 15 bp, Homo sapiens
tcttagccttaggaa

SEQ ID NO: 425416 - DNA, 15 bp, Homo sapiens
atcttagccttagga

SEQ ID NO: 425417 - DNA, 15 bp, Homo sapiens
aatcttagccttagg

SEQ ID NO: 425418 - DNA, 15 bp, Homo sapiens
taatcttagccttag

SEQ ID NO: 425419 - DNA, 15 bp, Homo sapiens
ttaatcttagcctta

SEQ ID NO: 425420 - DNA, 15 bp, Homo sapiens
gttaatcttagcctt

SEQ ID NO: 425421 - DNA, 15 bp, Homo sapiens
agttaatcttagcct

SEQ ID NO: 425422 - DNA, 15 bp, Homo sapiens
tagttaatcttagcc

SEQ ID NO: 425423 - DNA, 15 bp, Homo sapiens
ctagttaatcttagc

SEQ ID NO: 425424 - DNA, 15 bp, Homo sapiens
actagttaatcttag

SEQ ID NO: 425425 - DNA, 15 bp, Homo sapiens
tactagttaatctta

SEQ ID NO: 425426 - DNA, 15 bp, Homo sapiens
ctactagttaatctt

SEQ ID NO: 425427 - DNA, 15 bp, Homo sapiens
gctactagttaatct

SEQ ID NO: 425428 - DNA, 15 bp, Homo sapiens
ggctactagttaatc

SEQ ID NO: 425429 - DNA, 15 bp, Homo sapiens
gggctactagttaat

SEQ ID NO: 425430 - DNA, 15 bp, Homo sapiens
ggggctactagttaa

SEQ ID NO: 425431 - DNA, 15 bp, Homo sapiens
tggggctactagtta

SEQ ID NO: 425432 - DNA, 15 bp, Homo sapiens
ctggggctactagtt

SEQ ID NO: 425433 - DNA, 15 bp, Homo sapiens
gctggggctactagt

SEQ ID NO: 425434 - DNA, 15 bp, Homo sapiens
ggctggggctactag

SEQ ID NO: 425435 - DNA, 15 bp, Homo sapiens
gggctggggctacta

SEQ ID NO: 425436 - DNA, 15 bp, Homo sapiens
agggctggggctact

SEQ ID NO: 425437 - DNA, 15 bp, Homo sapiens
aagggctggggctac

SEQ ID NO: 425438 - DNA, 15 bp, Homo sapiens
taagggctggggcta

SEQ ID NO: 425439 - DNA, 15 bp, Homo sapiens
gtaagggctggggct

SEQ ID NO: 425440 - DNA, 15 bp, Homo sapiens
tgtaagggctggggc

SEQ ID NO: 425441 - DNA, 15 bp, Homo sapiens
atgtaagggctgggg

SEQ ID NO: 425442 - DNA, 15 bp, Homo sapiens
aatgtaagggctggg

SEQ ID NO: 425443 - DNA, 15 bp, Homo sapiens
taatgtaagggctgg

SEQ ID NO: 425444 - DNA, 15 bp, Homo sapiens
ctaatgtaagggctg

SEQ ID NO: 425445 - DNA, 15 bp, Homo sapiens
gctaatgtaagggct

SEQ ID NO: 425446 - DNA, 15 bp, Homo sapiens
agctaatgtaagggc

SEQ ID NO: 425447 - DNA, 15 bp, Homo sapiens
cagctaatgtaaggg

SEQ ID NO: 425448 - DNA, 15 bp, Homo sapiens
acagctaatgtaagg

SEQ ID NO: 425449 - DNA, 15 bp, Homo sapiens
cacagctaatgtaag

SEQ ID NO: 425450 - DNA, 15 bp, Homo sapiens
tcacagctaatgtaa

SEQ ID NO: 425451 - DNA, 15 bp, Homo sapiens
ttcacagctaatgta

SEQ ID NO: 425452 - DNA, 15 bp, Homo sapiens
cttcacagctaatgt

SEQ ID NO: 425453 - DNA, 15 bp, Homo sapiens
acttcacagctaatg

SEQ ID NO: 425454 - DNA, 15 bp, Homo sapiens
aacttcacagctaat

SEQ ID NO: 425455 - DNA, 15 bp, Homo sapiens
gaacttcacagctaa

SEQ ID NO: 425456 - DNA, 15 bp, Homo sapiens
tgaacttcacagcta

SEQ ID NO: 425457 - DNA, 15 bp, Homo sapiens
ctgaacttcacagct

SEQ ID NO: 425458 - DNA, 15 bp, Homo sapiens
gctgaacttcacagc

SEQ ID NO: 425459 - DNA, 15 bp, Homo sapiens
ggctgaacttcacag

SEQ ID NO: 425460 - DNA, 15 bp, Homo sapiens
aggctgaacttcaca

SEQ ID NO: 425461 - DNA, 15 bp, Homo sapiens
gaggctgaacttcac

SEQ ID NO: 425462 - DNA, 15 bp, Homo sapiens
ggaggctgaacttca

SEQ ID NO: 425463 - DNA, 15 bp, Homo sapiens
aggaggctgaacttc

SEQ ID NO: 425464 - DNA, 15 bp, Homo sapiens
aaggaggctgaactt

SEQ ID NO: 425465 - DNA, 15 bp, Homo sapiens
aaaggaggctgaact

SEQ ID NO: 425466 - DNA, 15 bp, Homo sapiens
aaaaggaggctgaac

SEQ ID NO: 425467 - DNA, 15 bp, Homo sapiens
gaaaaggaggctgaa

SEQ ID NO: 425468 - DNA, 15 bp, Homo sapiens
ggaaaaggaggctga

SEQ ID NO: 425469 - DNA, 15 bp, Homo sapiens
aggaaaaggaggctg

SEQ ID NO: 425470 - DNA, 15 bp, Homo sapiens
taggaaaaggaggct

SEQ ID NO: 425471 - DNA, 15 bp, Homo sapiens
ctaggaaaaggaggc

SEQ ID NO: 425472 - DNA, 15 bp, Homo sapiens
gctaggaaaaggagg

SEQ ID NO: 425473 - DNA, 15 bp, Homo sapiens
agctaggaaaaggag

SEQ ID NO: 425474 - DNA, 15 bp, Homo sapiens
cagctaggaaaagga

SEQ ID NO: 425475 - DNA, 15 bp, Homo sapiens
ccagctaggaaaagg

SEQ ID NO: 425476 - DNA, 15 bp, Homo sapiens
gccagctaggaaaag

SEQ ID NO: 425477 - DNA, 15 bp, Homo sapiens
agccagctaggaaaa

SEQ ID NO: 425478 - DNA, 15 bp, Homo sapiens
tagccagctaggaaa

SEQ ID NO: 425479 - DNA, 15 bp, Homo sapiens
atagccagctaggaa

SEQ ID NO: 425480 - DNA, 15 bp, Homo sapiens
aatagccagctagga

SEQ ID NO: 425481 - DNA, 15 bp, Homo sapiens
caatagccagctagg

SEQ ID NO: 425482 - DNA, 15 bp, Homo sapiens
gcaatagccagctag

SEQ ID NO: 425483 - DNA, 15 bp, Homo sapiens
tgcaatagccagcta

SEQ ID NO: 425484 - DNA, 15 bp, Homo sapiens
ctgcaatagccagct

SEQ ID NO: 425485 - DNA, 15 bp, Homo sapiens
actgcaatagccagc

SEQ ID NO: 425486 - DNA, 15 bp, Homo sapiens
aactgcaatagccag

SEQ ID NO: 425487 - DNA, 15 bp, Homo sapiens
aaactgcaatagcca

SEQ ID NO: 425488 - DNA, 15 bp, Homo sapiens
caaactgcaatagcc

SEQ ID NO: 425489 - DNA, 15 bp, Homo sapiens
acaaactgcaatagc

SEQ ID NO: 425490 - DNA, 15 bp, Homo sapiens
cacaaactgcaatag

SEQ ID NO: 425491 - DNA, 15 bp, Homo sapiens
ccacaaactgcaata

SEQ ID NO: 425492 - DNA, 15 bp, Homo sapiens
tccacaaactgcaat

SEQ ID NO: 425493 - DNA, 15 bp, Homo sapiens
gtccacaaactgcaa

SEQ ID NO: 425494 - DNA, 15 bp, Homo sapiens
tgtccacaaactgca

SEQ ID NO: 425495 - DNA, 15 bp, Homo sapiens
ctgtccacaaactgc

SEQ ID NO: 425496 - DNA, 15 bp, Homo sapiens
actgtccacaaactg

SEQ ID NO: 425497 - DNA, 15 bp, Homo sapiens
tactgtccacaaact

SEQ ID NO: 425498 - DNA, 15 bp, Homo sapiens
ttactgtccacaaac

SEQ ID NO: 425499 - DNA, 15 bp, Homo sapiens
tttactgtccacaaa

SEQ ID NO: 425500 - DNA, 15 bp, Homo sapiens
ttttactgtccacaa

SEQ ID NO: 425501 - DNA, 15 bp, Homo sapiens
cttttactgtccaca

SEQ ID NO: 425502 - DNA, 15 bp, Homo sapiens
acttttactgtccac

SEQ ID NO: 425503 - DNA, 15 bp, Homo sapiens
tacttttactgtcca

SEQ ID NO: 425504 - DNA, 15 bp, Homo sapiens
ttacttttactgtcc

SEQ ID NO: 425505 - DNA, 15 bp, Homo sapiens
gttacttttactgtc

SEQ ID NO: 425506 - DNA, 15 bp, Homo sapiens
tgttacttttactgt

SEQ ID NO: 425507 - DNA, 15 bp, Homo sapiens
atgttacttttactg

SEQ ID NO: 425508 - DNA, 15 bp, Homo sapiens
aatgttacttttact

SEQ ID NO: 425509 - DNA, 15 bp, Homo sapiens
aaatgttacttttac

SEQ ID NO: 425510 - DNA, 15 bp, Homo sapiens
caaatgttactttta

SEQ ID NO: 425511 - DNA, 15 bp, Homo sapiens
ccaaatgttactttt

SEQ ID NO: 425512 - DNA, 15 bp, Homo sapiens
accaaatgttacttt

SEQ ID NO: 425513 - DNA, 15 bp, Homo sapiens
aaccaaatgttactt

SEQ ID NO: 425514 - DNA, 15 bp, Homo sapiens
aaaccaaatgttact

SEQ ID NO: 425515 - DNA, 15 bp, Homo sapiens
aaaaccaaatgttac

SEQ ID NO: 425516 - DNA, 15 bp, Homo sapiens
taaaaccaaatgtta

SEQ ID NO: 425517 - DNA, 15 bp, Homo sapiens
gtaaaaccaaatgtt

SEQ ID NO: 425518 - DNA, 15 bp, Homo sapiens
agtaaaaccaaatgt

SEQ ID NO: 425519 - DNA, 15 bp, Homo sapiens
aagtaaaaccaaatg

SEQ ID NO: 425520 - DNA, 15 bp, Homo sapiens
aaagtaaaaccaaat

SEQ ID NO: 425521 - DNA, 15 bp, Homo sapiens
gaaagtaaaaccaaa

SEQ ID NO: 425522 - DNA, 15 bp, Homo sapiens
agaaagtaaaaccaa

SEQ ID NO: 425523 - DNA, 15 bp, Homo sapiens
cagaaagtaaaacca

SEQ ID NO: 425524 - DNA, 15 bp, Homo sapiens
acagaaagtaaaacc

SEQ ID NO: 425525 - DNA, 15 bp, Homo sapiens
aacagaaagtaaaac

SEQ ID NO: 425526 - DNA, 15 bp, Homo sapiens
aaacagaaagtaaaa

SEQ ID NO: 425527 - DNA, 15 bp, Homo sapiens
taaacagaaagtaaa

SEQ ID NO: 425528 - DNA, 15 bp, Homo sapiens
ataaacagaaagtaa

SEQ ID NO: 425529 - DNA, 15 bp, Homo sapiens
aataaacagaaagta

SEQ ID NO: 425530 - DNA, 15 bp, Homo sapiens
aaataaacagaaagt

SEQ ID NO: 425531 - DNA, 15 bp, Homo sapiens
aaaataaacagaaag

SEQ ID NO: 425532 - DNA, 15 bp, Homo sapiens
gaaaataaacagaaa

SEQ ID NO: 425533 - DNA, 15 bp, Homo sapiens
agaaaataaacagaa

SEQ ID NO: 425534 - DNA, 15 bp, Homo sapiens
gagaaaataaacaga

SEQ ID NO: 425535 - DNA, 15 bp, Homo sapiens
agagaaaataaacag

SEQ ID NO: 425536 - DNA, 15 bp, Homo sapiens
gagagaaaataaaca

SEQ ID NO: 425537 - DNA, 15 bp, Homo sapiens
agagagaaaataaac

SEQ ID NO: 425538 - DNA, 15 bp, Homo sapiens
aagagagaaaataaa

SEQ ID NO: 425539 - DNA, 15 bp, Homo sapiens
caagagagaaaataa

SEQ ID NO: 425540 - DNA, 15 bp, Homo sapiens
acaagagagaaaata

SEQ ID NO: 425541 - DNA, 15 bp, Homo sapiens
cacaagagagaaaat

SEQ ID NO: 425542 - DNA, 15 bp, Homo sapiens
ccacaagagagaaaa

SEQ ID NO: 425543 - DNA, 15 bp, Homo sapiens
accacaagagagaaa

SEQ ID NO: 425544 - DNA, 15 bp, Homo sapiens
gaccacaagagagaa

SEQ ID NO: 425545 - DNA, 15 bp, Homo sapiens
agaccacaagagaga

SEQ ID NO: 425546 - DNA, 15 bp, Homo sapiens
cagaccacaagagag

SEQ ID NO: 425547 - DNA, 15 bp, Homo sapiens
tcagaccacaagaga

SEQ ID NO: 425548 - DNA, 15 bp, Homo sapiens
atcagaccacaagag

SEQ ID NO: 425549 - DNA, 15 bp, Homo sapiens
catcagaccacaaga

SEQ ID NO: 425550 - DNA, 15 bp, Homo sapiens
ccatcagaccacaag

SEQ ID NO: 425551 - DNA, 15 bp, Homo sapiens
tccatcagaccacaa

SEQ ID NO: 425552 - DNA, 15 bp, Homo sapiens
ttccatcagaccaca

SEQ ID NO: 425553 - DNA, 15 bp, Homo sapiens
tttccatcagaccac

SEQ ID NO: 425554 - DNA, 15 bp, Homo sapiens
atttccatcagacca

SEQ ID NO: 425555 - DNA, 15 bp, Homo sapiens
tatttccatcagacc

SEQ ID NO: 425556 - DNA, 15 bp, Homo sapiens
ttatttccatcagac

SEQ ID NO: 425557 - DNA, 15 bp, Homo sapiens
cttatttccatcaga

SEQ ID NO: 425558 - DNA, 15 bp, Homo sapiens
acttatttccatcag

SEQ ID NO: 425559 - DNA, 15 bp, Homo sapiens
tacttatttccatca

SEQ ID NO: 425560 - DNA, 15 bp, Homo sapiens
ctacttatttccatc

SEQ ID NO: 425561 - DNA, 15 bp, Homo sapiens
cctacttatttccat

SEQ ID NO: 425562 - DNA, 15 bp, Homo sapiens
ccctacttatttcca

SEQ ID NO: 425563 - DNA, 15 bp, Homo sapiens
tccctacttatttcc

SEQ ID NO: 425564 - DNA, 15 bp, Homo sapiens
ttccctacttatttc

SEQ ID NO: 425565 - DNA, 15 bp, Homo sapiens
tttccctacttattt

SEQ ID NO: 425566 - DNA, 15 bp, Homo sapiens
atttccctacttatt

SEQ ID NO: 425567 - DNA, 15 bp, Homo sapiens
catttccctacttat

SEQ ID NO: 425568 - DNA, 15 bp, Homo sapiens
ccatttccctactta

SEQ ID NO: 425569 - DNA, 15 bp, Homo sapiens
gccatttccctactt

SEQ ID NO: 425570 - DNA, 15 bp, Homo sapiens
ggccatttccctact

SEQ ID NO: 425571 - DNA, 15 bp, Homo sapiens
tggccatttccctac

SEQ ID NO: 425572 - DNA, 15 bp, Homo sapiens
gtggccatttcccta

SEQ ID NO: 425573 - DNA, 15 bp, Homo sapiens
tgtggccatttccct

SEQ ID NO: 425574 - DNA, 15 bp, Homo sapiens
ttgtggccatttccc

SEQ ID NO: 425575 - DNA, 15 bp, Homo sapiens
cttgtggccatttcc

SEQ ID NO: 425576 - DNA, 15 bp, Homo sapiens
acttgtggccatttc

SEQ ID NO: 425577 - DNA, 15 bp, Homo sapiens
cacttgtggccattt

SEQ ID NO: 425578 - DNA, 15 bp, Homo sapiens
tcacttgtggccatt

SEQ ID NO: 425579 - DNA, 15 bp, Homo sapiens
ctcacttgtggccat

SEQ ID NO: 425580 - DNA, 15 bp, Homo sapiens
cctcacttgtggcca

SEQ ID NO: 425581 - DNA, 15 bp, Homo sapiens
gcctcacttgtggcc

SEQ ID NO: 425582 - DNA, 15 bp, Homo sapiens
tgcctcacttgtggc

SEQ ID NO: 425583 - DNA, 15 bp, Homo sapiens
ctgcctcacttgtgg

SEQ ID NO: 425584 - DNA, 15 bp, Homo sapiens
actgcctcacttgtg

SEQ ID NO: 425585 - DNA, 15 bp, Homo sapiens
cactgcctcacttgt

SEQ ID NO: 425586 - DNA, 15 bp, Homo sapiens
ccactgcctcacttg

SEQ ID NO: 425587 - DNA, 15 bp, Homo sapiens
cccactgcctcactt

SEQ ID NO: 425588 - DNA, 15 bp, Homo sapiens
ccccactgcctcact

SEQ ID NO: 425589 - DNA, 15 bp, Homo sapiens
tccccactgcctcac

SEQ ID NO: 425590 - DNA, 15 bp, Homo sapiens
ttccccactgcctca

SEQ ID NO: 425591 - DNA, 15 bp, Homo sapiens
cttccccactgcctc

SEQ ID NO: 425592 - DNA, 15 bp, Homo sapiens
ccttccccactgcct

SEQ ID NO: 425593 - DNA, 15 bp, Homo sapiens
tccttccccactgcc

SEQ ID NO: 425594 - DNA, 15 bp, Homo sapiens
ctccttccccactgc

SEQ ID NO: 425595 - DNA, 15 bp, Homo sapiens
tctccttccccactg

SEQ ID NO: 425596 - DNA, 15 bp, Homo sapiens
ctctccttccccact

SEQ ID NO: 425597 - DNA, 15 bp, Homo sapiens
actctccttccccac

SEQ ID NO: 425598 - DNA, 15 bp, Homo sapiens
cactctccttcccca

SEQ ID NO: 425599 - DNA, 15 bp, Homo sapiens
tcactctccttcccc

SEQ ID NO: 425600 - DNA, 15 bp, Homo sapiens
ttcactctccttccc

SEQ ID NO: 425601 - DNA, 15 bp, Homo sapiens
tttcactctccttcc

SEQ ID NO: 425602 - DNA, 15 bp, Homo sapiens
ctttcactctccttc

SEQ ID NO: 425603 - DNA, 15 bp, Homo sapiens
cctttcactctcctt

SEQ ID NO: 425604 - DNA, 15 bp, Homo sapiens
tcctttcactctcct

SEQ ID NO: 425605 - DNA, 15 bp, Homo sapiens
atcctttcactctcc

SEQ ID NO: 425606 - DNA, 15 bp, Homo sapiens
catcctttcactctc

SEQ ID NO: 425607 - DNA, 15 bp, Homo sapiens
ccatcctttcactct

SEQ ID NO: 425608 - DNA, 15 bp, Homo sapiens
cccatcctttcactc

SEQ ID NO: 425609 - DNA, 15 bp, Homo sapiens
acccatcctttcact

SEQ ID NO: 425610 - DNA, 15 bp, Homo sapiens
cacccatcctttcac

SEQ ID NO: 425611 - DNA, 15 bp, Homo sapiens
gcacccatcctttca

SEQ ID NO: 425612 - DNA, 15 bp, Homo sapiens
tgcacccatcctttc

SEQ ID NO: 425613 - DNA, 15 bp, Homo sapiens
ctgcacccatccttt

SEQ ID NO: 425614 - DNA, 15 bp, Homo sapiens
cctgcacccatcctt

SEQ ID NO: 425615 - DNA, 15 bp, Homo sapiens
tcctgcacccatcct

SEQ ID NO: 425616 - DNA, 15 bp, Homo sapiens
gtcctgcacccatcc

SEQ ID NO: 425617 - DNA, 15 bp, Homo sapiens
ggtcctgcacccatc

SEQ ID NO: 425618 - DNA, 15 bp, Homo sapiens
aggtcctgcacccat

SEQ ID NO: 425619 - DNA, 15 bp, Homo sapiens
caggtcctgcaccca

SEQ ID NO: 425620 - DNA, 15 bp, Homo sapiens
gcaggtcctgcaccc

SEQ ID NO: 425621 - DNA, 15 bp, Homo sapiens
cgcaggtcctgcacc

SEQ ID NO: 425622 - DNA, 15 bp, Homo sapiens
acgcaggtcctgcac

SEQ ID NO: 425623 - DNA, 15 bp, Homo sapiens
cacgcaggtcctgca

SEQ ID NO: 425624 - DNA, 15 bp, Homo sapiens
ccacgcaggtcctgc

SEQ ID NO: 425625 - DNA, 15 bp, Homo sapiens
accacgcaggtcctg

SEQ ID NO: 425626 - DNA, 15 bp, Homo sapiens
gaccacgcaggtcct

SEQ ID NO: 425627 - DNA, 15 bp, Homo sapiens
agaccacgcaggtcc

SEQ ID NO: 425628 - DNA, 15 bp, Homo sapiens
cagaccacgcaggtc

SEQ ID NO: 425629 - DNA, 15 bp, Homo sapiens
acagaccacgcaggt

SEQ ID NO: 425630 - DNA, 15 bp, Homo sapiens
aacagaccacgcagg

SEQ ID NO: 425631 - DNA, 15 bp, Homo sapiens
taacagaccacgcag

SEQ ID NO: 425632 - DNA, 15 bp, Homo sapiens
gtaacagaccacgca

SEQ ID NO: 425633 - DNA, 15 bp, Homo sapiens
tgtaacagaccacgc

SEQ ID NO: 425634 - DNA, 15 bp, Homo sapiens
ctgtaacagaccacg

SEQ ID NO: 425635 - DNA, 15 bp, Homo sapiens
gctgtaacagaccac

SEQ ID NO: 425636 - DNA, 15 bp, Homo sapiens
ggctgtaacagacca

SEQ ID NO: 425637 - DNA, 15 bp, Homo sapiens
aggctgtaacagacc

SEQ ID NO: 425638 - DNA, 15 bp, Homo sapiens
gaggctgtaacagac

SEQ ID NO: 425639 - DNA, 15 bp, Homo sapiens
tgaggctgtaacaga

SEQ ID NO: 425640 - DNA, 15 bp, Homo sapiens
gtgaggctgtaacag

SEQ ID NO: 425641 - DNA, 15 bp, Homo sapiens
ggtgaggctgtaaca

SEQ ID NO: 425642 - DNA, 15 bp, Homo sapiens
tggtgaggctgtaac

SEQ ID NO: 425643 - DNA, 15 bp, Homo sapiens
gtggtgaggctgtaa

SEQ ID NO: 425644 - DNA, 15 bp, Homo sapiens
agtggtgaggctgta

SEQ ID NO: 425645 - DNA, 15 bp, Homo sapiens
aagtggtgaggctgt

SEQ ID NO: 425646 - DNA, 15 bp, Homo sapiens
gaagtggtgaggctg

SEQ ID NO: 425647 - DNA, 15 bp, Homo sapiens
ggaagtggtgaggct

SEQ ID NO: 425648 - DNA, 15 bp, Homo sapiens
gggaagtggtgaggc

SEQ ID NO: 425649 - DNA, 15 bp, Homo sapiens
agggaagtggtgagg

SEQ ID NO: 425650 - DNA, 15 bp, Homo sapiens
tagggaagtggtgag

SEQ ID NO: 425651 - DNA, 15 bp, Homo sapiens
atagggaagtggtga

SEQ ID NO: 425652 - DNA, 15 bp, Homo sapiens
aatagggaagtggtg

SEQ ID NO: 425653 - DNA, 15 bp, Homo sapiens
taatagggaagtggt

SEQ ID NO: 425654 - DNA, 15 bp, Homo sapiens
gtaatagggaagtgg

SEQ ID NO: 425655 - DNA, 15 bp, Homo sapiens
tgtaatagggaagtg

SEQ ID NO: 425656 - DNA, 15 bp, Homo sapiens
atgtaatagggaagt

SEQ ID NO: 425657 - DNA, 15 bp, Homo sapiens
aatgtaatagggaag

SEQ ID NO: 425658 - DNA, 15 bp, Homo sapiens
gaatgtaatagggaa

SEQ ID NO: 425659 - DNA, 15 bp, Homo sapiens
ggaatgtaataggga

SEQ ID NO: 425660 - DNA, 15 bp, Homo sapiens
gggaatgtaataggg

SEQ ID NO: 425661 - DNA, 15 bp, Homo sapiens
agggaatgtaatagg

SEQ ID NO: 425662 - DNA, 15 bp, Homo sapiens
aagggaatgtaatag

SEQ ID NO: 425663 - DNA, 15 bp, Homo sapiens
aaagggaatgtaata

SEQ ID NO: 425664 - DNA, 15 bp, Homo sapiens
gaaagggaatgtaat

SEQ ID NO: 425665 - DNA, 15 bp, Homo sapiens
agaaagggaatgtaa

SEQ ID NO: 425666 - DNA, 15 bp, Homo sapiens
aagaaagggaatgta

SEQ ID NO: 425667 - DNA, 15 bp, Homo sapiens
aaagaaagggaatgt

SEQ ID NO: 425668 - DNA, 15 bp, Homo sapiens
caaagaaagggaatg

SEQ ID NO: 425669 - DNA, 15 bp, Homo sapiens
ccaaagaaagggaat

SEQ ID NO: 425670 - DNA, 15 bp, Homo sapiens
gccaaagaaagggaa

SEQ ID NO: 425671 - DNA, 15 bp, Homo sapiens
tgccaaagaaaggga

SEQ ID NO: 425672 - DNA, 15 bp, Homo sapiens
ctgccaaagaaaggg

SEQ ID NO: 425673 - DNA, 15 bp, Homo sapiens
actgccaaagaaagg

SEQ ID NO: 425674 - DNA, 15 bp, Homo sapiens
cactgccaaagaaag

SEQ ID NO: 425675 - DNA, 15 bp, Homo sapiens
ccactgccaaagaaa

SEQ ID NO: 425676 - DNA, 15 bp, Homo sapiens
cccactgccaaagaa

SEQ ID NO: 425677 - DNA, 15 bp, Homo sapiens
acccactgccaaaga

SEQ ID NO: 425678 - DNA, 15 bp, Homo sapiens
aacccactgccaaag

SEQ ID NO: 425679 - DNA, 15 bp, Homo sapiens
caacccactgccaaa

SEQ ID NO: 425680 - DNA, 15 bp, Homo sapiens
acaacccactgccaa

SEQ ID NO: 425681 - DNA, 15 bp, Homo sapiens
aacaacccactgcca

SEQ ID NO: 425682 - DNA, 15 bp, Homo sapiens
gaacaacccactgcc

SEQ ID NO: 425683 - DNA, 15 bp, Homo sapiens
ggaacaacccactgc

SEQ ID NO: 425684 - DNA, 15 bp, Homo sapiens
aggaacaacccactg

SEQ ID NO: 425685 - DNA, 15 bp, Homo sapiens
gaggaacaacccact

SEQ ID NO: 425686 - DNA, 15 bp, Homo sapiens
tgaggaacaacccac

SEQ ID NO: 425687 - DNA, 15 bp, Homo sapiens
atgaggaacaaccca

SEQ ID NO: 425688 - DNA, 15 bp, Homo sapiens
tatgaggaacaaccc

SEQ ID NO: 425689 - DNA, 15 bp, Homo sapiens
atatgaggaacaacc

SEQ ID NO: 425690 - DNA, 15 bp, Homo sapiens
catatgaggaacaac

SEQ ID NO: 425691 - DNA, 15 bp, Homo sapiens
gcatatgaggaacaa

SEQ ID NO: 425692 - DNA, 15 bp, Homo sapiens
agcatatgaggaaca

SEQ ID NO: 425693 - DNA, 15 bp, Homo sapiens
aagcatatgaggaac

SEQ ID NO: 425694 - DNA, 15 bp, Homo sapiens
aaagcatatgaggaa

SEQ ID NO: 425695 - DNA, 15 bp, Homo sapiens
caaagcatatgagga

SEQ ID NO: 425696 - DNA, 15 bp, Homo sapiens
ccaaagcatatgagg

SEQ ID NO: 425697 - DNA, 15 bp, Homo sapiens
tccaaagcatatgag

SEQ ID NO: 425698 - DNA, 15 bp, Homo sapiens
ttccaaagcatatga

SEQ ID NO: 425699 - DNA, 15 bp, Homo sapiens
cttccaaagcatatg

SEQ ID NO: 425700 - DNA, 15 bp, Homo sapiens
ccttccaaagcatat

SEQ ID NO: 425701 - DNA, 15 bp, Homo sapiens
accttccaaagcata

SEQ ID NO: 425702 - DNA, 15 bp, Homo sapiens
aaccttccaaagcat

SEQ ID NO: 425703 - DNA, 15 bp, Homo sapiens
aaaccttccaaagca

SEQ ID NO: 425704 - DNA, 15 bp, Homo sapiens
taaaccttccaaagc

SEQ ID NO: 425705 - DNA, 15 bp, Homo sapiens
ttaaaccttccaaag

SEQ ID NO: 425706 - DNA, 15 bp, Homo sapiens
tttaaaccttccaaa

SEQ ID NO: 425707 - DNA, 15 bp, Homo sapiens
atttaaaccttccaa

SEQ ID NO: 425708 - DNA, 15 bp, Homo sapiens
aatttaaaccttcca

SEQ ID NO: 425709 - DNA, 15 bp, Homo sapiens
gaatttaaaccttcc

SEQ ID NO: 425710 - DNA, 15 bp, Homo sapiens
tgaatttaaaccttc

SEQ ID NO: 425711 - DNA, 15 bp, Homo sapiens
gtgaatttaaacctt

SEQ ID NO: 425712 - DNA, 15 bp, Homo sapiens
tgtgaatttaaacct

SEQ ID NO: 425713 - DNA, 15 bp, Homo sapiens
ttgtgaatttaaacc

SEQ ID NO: 425714 - DNA, 15 bp, Homo sapiens
cttgtgaatttaaac

SEQ ID NO: 425715 - DNA, 15 bp, Homo sapiens
tcttgtgaatttaaa

SEQ ID NO: 425716 - DNA, 15 bp, Homo sapiens
ttcttgtgaatttaa

SEQ ID NO: 425717 - DNA, 15 bp, Homo sapiens
gttcttgtgaattta

SEQ ID NO: 425718 - DNA, 15 bp, Homo sapiens
agttcttgtgaattt

SEQ ID NO: 425719 - DNA, 15 bp, Homo sapiens
gagttcttgtgaatt

SEQ ID NO: 425720 - DNA, 15 bp, Homo sapiens
ggagttcttgtgaat

SEQ ID NO: 425721 - DNA, 15 bp, Homo sapiens
gggagttcttgtgaa

SEQ ID NO: 425722 - DNA, 15 bp, Homo sapiens
ggggagttcttgtga

SEQ ID NO: 425723 - DNA, 15 bp, Homo sapiens
tggggagttcttgtg

SEQ ID NO: 425724 - DNA, 15 bp, Homo sapiens
atggggagttcttgt

SEQ ID NO: 425725 - DNA, 15 bp, Homo sapiens
catggggagttcttg

SEQ ID NO: 425726 - DNA, 15 bp, Homo sapiens
acatggggagttctt

SEQ ID NO: 425727 - DNA, 15 bp, Homo sapiens
aacatggggagttct

SEQ ID NO: 425728 - DNA, 15 bp, Homo sapiens
gaacatggggagttc

SEQ ID NO: 425729 - DNA, 15 bp, Homo sapiens
tgaacatggggagtt

SEQ ID NO: 425730 - DNA, 15 bp, Homo sapiens
atgaacatggggagt

SEQ ID NO: 425731 - DNA, 15 bp, Homo sapiens
aatgaacatggggag

SEQ ID NO: 425732 - DNA, 15 bp, Homo sapiens
taatgaacatgggga

SEQ ID NO: 425733 - DNA, 15 bp, Homo sapiens
ttaatgaacatgggg

SEQ ID NO: 425734 - DNA, 15 bp, Homo sapiens
attaatgaacatggg

SEQ ID NO: 425735 - DNA, 15 bp, Homo sapiens
aattaatgaacatgg

SEQ ID NO: 425736 - DNA, 15 bp, Homo sapiens
taattaatgaacatg

SEQ ID NO: 425737 - DNA, 15 bp, Homo sapiens
ataattaatgaacat

SEQ ID NO: 425738 - DNA, 15 bp, Homo sapiens
gataattaatgaaca

SEQ ID NO: 425739 - DNA, 15 bp, Homo sapiens
ggataattaatgaac

SEQ ID NO: 425740 - DNA, 15 bp, Homo sapiens
aggataattaatgaa

SEQ ID NO: 425741 - DNA, 15 bp, Homo sapiens
aaggataattaatga

SEQ ID NO: 425742 - DNA, 15 bp, Homo sapiens
aaaggataattaatg

SEQ ID NO: 425743 - DNA, 15 bp, Homo sapiens
aaaaggataattaat

SEQ ID NO: 425744 - DNA, 15 bp, Homo sapiens
caaaaggataattaa

SEQ ID NO: 425745 - DNA, 15 bp, Homo sapiens
ccaaaaggataatta

SEQ ID NO: 425746 - DNA, 15 bp, Homo sapiens
gccaaaaggataatt

SEQ ID NO: 425747 - DNA, 15 bp, Homo sapiens
agccaaaaggataat

SEQ ID NO: 425748 - DNA, 15 bp, Homo sapiens
aagccaaaaggataa

SEQ ID NO: 425749 - DNA, 15 bp, Homo sapiens
gaagccaaaaggata

SEQ ID NO: 425750 - DNA, 15 bp, Homo sapiens
ggaagccaaaaggat

SEQ ID NO: 425751 - DNA, 15 bp, Homo sapiens
gggaagccaaaagga

SEQ ID NO: 425752 - DNA, 15 bp, Homo sapiens
tgggaagccaaaagg

SEQ ID NO: 425753 - DNA, 15 bp, Homo sapiens
gtgggaagccaaaag

SEQ ID NO: 425754 - DNA, 15 bp, Homo sapiens
ggtgggaagccaaaa

SEQ ID NO: 425755 - DNA, 15 bp, Homo sapiens
aggtgggaagccaaa

SEQ ID NO: 425756 - DNA, 15 bp, Homo sapiens
taggtgggaagccaa

SEQ ID NO: 425757 - DNA, 15 bp, Homo sapiens
ttaggtgggaagcca

SEQ ID NO: 425758 - DNA, 15 bp, Homo sapiens
cttaggtgggaagcc

SEQ ID NO: 425759 - DNA, 15 bp, Homo sapiens
tcttaggtgggaagc

SEQ ID NO: 425760 - DNA, 15 bp, Homo sapiens
ctcttaggtgggaag

SEQ ID NO: 425761 - DNA, 15 bp, Homo sapiens
cctcttaggtgggaa

SEQ ID NO: 425762 - DNA, 15 bp, Homo sapiens
ccctcttaggtggga

SEQ ID NO: 425763 - DNA, 15 bp, Homo sapiens
accctcttaggtggg

SEQ ID NO: 425764 - DNA, 15 bp, Homo sapiens
aaccctcttaggtgg

SEQ ID NO: 425765 - DNA, 15 bp, Homo sapiens
caaccctcttaggtg

SEQ ID NO: 425766 - DNA, 15 bp, Homo sapiens
acaaccctcttaggt

SEQ ID NO: 425767 - DNA, 15 bp, Homo sapiens
aacaaccctcttagg

SEQ ID NO: 425768 - DNA, 15 bp, Homo sapiens
caacaaccctcttag

SEQ ID NO: 425769 - DNA, 15 bp, Homo sapiens
tcaacaaccctctta

SEQ ID NO: 425770 - DNA, 15 bp, Homo sapiens
ttcaacaaccctctt

SEQ ID NO: 425771 - DNA, 15 bp, Homo sapiens
tttcaacaaccctct

SEQ ID NO: 425772 - DNA, 15 bp, Homo sapiens
ttttcaacaaccctc

SEQ ID NO: 425773 - DNA, 15 bp, Homo sapiens
cttttcaacaaccct

SEQ ID NO: 425774 - DNA, 15 bp, Homo sapiens
tcttttcaacaaccc

SEQ ID NO: 425775 - DNA, 15 bp, Homo sapiens
atcttttcaacaacc

SEQ ID NO: 425776 - DNA, 15 bp, Homo sapiens
aatcttttcaacaac

SEQ ID NO: 425777 - DNA, 15 bp, Homo sapiens
taatcttttcaacaa

SEQ ID NO: 425778 - DNA, 15 bp, Homo sapiens
ataatcttttcaaca

SEQ ID NO: 425779 - DNA, 15 bp, Homo sapiens
tataatcttttcaac

SEQ ID NO: 425780 - DNA, 15 bp, Homo sapiens
atataatcttttcaa

SEQ ID NO: 425781 - DNA, 15 bp, Homo sapiens
catataatcttttca

SEQ ID NO: 425782 - DNA, 15 bp, Homo sapiens
tcatataatcttttc

SEQ ID NO: 425783 - DNA, 15 bp, Homo sapiens
ctcatataatctttt

SEQ ID NO: 425784 - DNA, 15 bp, Homo sapiens
tctcatataatcttt

SEQ ID NO: 425785 - DNA, 15 bp, Homo sapiens
atctcatataatctt

SEQ ID NO: 425786 - DNA, 15 bp, Homo sapiens
catctcatataatct

SEQ ID NO: 425787 - DNA, 15 bp, Homo sapiens
tcatctcatataatc

SEQ ID NO: 425788 - DNA, 15 bp, Homo sapiens
atcatctcatataat

SEQ ID NO: 425789 - DNA, 15 bp, Homo sapiens
tatcatctcatataa

SEQ ID NO: 425790 - DNA, 15 bp, Homo sapiens
atatcatctcatata

SEQ ID NO: 425791 - DNA, 15 bp, Homo sapiens
tatatcatctcatat

SEQ ID NO: 425792 - DNA, 15 bp, Homo sapiens
atatatcatctcata

SEQ ID NO: 425793 - DNA, 15 bp, Homo sapiens
catatatcatctcat

SEQ ID NO: 425794 - DNA, 15 bp, Homo sapiens
acatatatcatctca

SEQ ID NO: 425795 - DNA, 15 bp, Homo sapiens
aacatatatcatctc

SEQ ID NO: 425796 - DNA, 15 bp, Homo sapiens
taacatatatcatct

SEQ ID NO: 425797 - DNA, 15 bp, Homo sapiens
ttaacatatatcatc

SEQ ID NO: 425798 - DNA, 15 bp, Homo sapiens
cttaacatatatcat

SEQ ID NO: 425799 - DNA, 15 bp, Homo sapiens
acttaacatatatca

SEQ ID NO: 425800 - DNA, 15 bp, Homo sapiens
cacttaacatatatc

SEQ ID NO: 425801 - DNA, 15 bp, Homo sapiens
gcacttaacatatat

SEQ ID NO: 425802 - DNA, 15 bp, Homo sapiens
ggcacttaacatata

SEQ ID NO: 425803 - DNA, 15 bp, Homo sapiens
aggcacttaacatat

SEQ ID NO: 425804 - DNA, 15 bp, Homo sapiens
caggcacttaacata

SEQ ID NO: 425805 - DNA, 15 bp, Homo sapiens
ccaggcacttaacat

SEQ ID NO: 425806 - DNA, 15 bp, Homo sapiens
accaggcacttaaca

SEQ ID NO: 425807 - DNA, 15 bp, Homo sapiens
taccaggcacttaac

SEQ ID NO: 425808 - DNA, 15 bp, Homo sapiens
gtaccaggcacttaa

SEQ ID NO: 425809 - DNA, 15 bp, Homo sapiens
tgtaccaggcactta

SEQ ID NO: 425810 - DNA, 15 bp, Homo sapiens
ctgtaccaggcactt

SEQ ID NO: 425811 - DNA, 15 bp, Homo sapiens
actgtaccaggcact

SEQ ID NO: 425812 - DNA, 15 bp, Homo sapiens
cactgtaccaggcac

SEQ ID NO: 425813 - DNA, 15 bp, Homo sapiens
gcactgtaccaggca

SEQ ID NO: 425814 - DNA, 15 bp, Homo sapiens
agcactgtaccaggc

SEQ ID NO: 425815 - DNA, 15 bp, Homo sapiens
aagcactgtaccagg

SEQ ID NO: 425816 - DNA, 15 bp, Homo sapiens
taagcactgtaccag

SEQ ID NO: 425817 - DNA, 15 bp, Homo sapiens
ttaagcactgtacca

SEQ ID NO: 425818 - DNA, 15 bp, Homo sapiens
attaagcactgtacc

SEQ ID NO: 425819 - DNA, 15 bp, Homo sapiens
tattaagcactgtac

SEQ ID NO: 425820 - DNA, 15 bp, Homo sapiens
atattaagcactgta

SEQ ID NO: 425821 - DNA, 15 bp, Homo sapiens
tatattaagcactgt

SEQ ID NO: 425822 - DNA, 15 bp, Homo sapiens
atatattaagcactg

SEQ ID NO: 425823 - DNA, 15 bp, Homo sapiens
tatatattaagcact

SEQ ID NO: 425824 - DNA, 15 bp, Homo sapiens
gtatatattaagcac

SEQ ID NO: 425825 - DNA, 15 bp, Homo sapiens
agtatatattaagca

SEQ ID NO: 425826 - DNA, 15 bp, Homo sapiens
tagtatatattaagc

SEQ ID NO: 425827 - DNA, 15 bp, Homo sapiens
ttagtatatattaag

SEQ ID NO: 425828 - DNA, 15 bp, Homo sapiens
cttagtatatattaa

SEQ ID NO: 425829 - DNA, 15 bp, Homo sapiens
gcttagtatatatta

SEQ ID NO: 425830 - DNA, 15 bp, Homo sapiens
tgcttagtatatatt

SEQ ID NO: 425831 - DNA, 15 bp, Homo sapiens
ttgcttagtatatat

SEQ ID NO: 425832 - DNA, 15 bp, Homo sapiens
gttgcttagtatata

SEQ ID NO: 425833 - DNA, 15 bp, Homo sapiens
tgttgcttagtatat

SEQ ID NO: 425834 - DNA, 15 bp, Homo sapiens
ttgttgcttagtata

SEQ ID NO: 425835 - DNA, 15 bp, Homo sapiens
cttgttgcttagtat

SEQ ID NO: 425836 - DNA, 15 bp, Homo sapiens
acttgttgcttagta

SEQ ID NO: 425837 - DNA, 15 bp, Homo sapiens
cacttgttgcttagt

SEQ ID NO: 425838 - DNA, 15 bp, Homo sapiens
ccacttgttgcttag

SEQ ID NO: 425839 - DNA, 15 bp, Homo sapiens
accacttgttgctta

SEQ ID NO: 425840 - DNA, 15 bp, Homo sapiens
taccacttgttgctt

SEQ ID NO: 425841 - DNA, 15 bp, Homo sapiens
ctaccacttgttgct

SEQ ID NO: 425842 - DNA, 15 bp, Homo sapiens
gctaccacttgttgc

SEQ ID NO: 425843 - DNA, 15 bp, Homo sapiens
agctaccacttgttg

SEQ ID NO: 425844 - DNA, 15 bp, Homo sapiens
tagctaccacttgtt

SEQ ID NO: 425845 - DNA, 15 bp, Homo sapiens
atagctaccacttgt

SEQ ID NO: 425846 - DNA, 15 bp, Homo sapiens
aatagctaccacttg

SEQ ID NO: 425847 - DNA, 15 bp, Homo sapiens
caatagctaccactt

SEQ ID NO: 425848 - DNA, 15 bp, Homo sapiens
acaatagctaccact

SEQ ID NO: 425849 - DNA, 15 bp, Homo sapiens
aacaatagctaccac

SEQ ID NO: 425850 - DNA, 15 bp, Homo sapiens
caacaatagctacca

SEQ ID NO: 425851 - DNA, 15 bp, Homo sapiens
acaacaatagctacc

SEQ ID NO: 425852 - DNA, 15 bp, Homo sapiens
aacaacaatagctac

SEQ ID NO: 425853 - DNA, 15 bp, Homo sapiens
caacaacaatagcta

SEQ ID NO: 425854 - DNA, 15 bp, Homo sapiens
tcaacaacaatagct

SEQ ID NO: 425855 - DNA, 15 bp, Homo sapiens
ttcaacaacaatagc

SEQ ID NO: 425856 - DNA, 15 bp, Homo sapiens
cttcaacaacaatag

SEQ ID NO: 425857 - DNA, 15 bp, Homo sapiens
ccttcaacaacaata

SEQ ID NO: 425858 - DNA, 15 bp, Homo sapiens
gccttcaacaacaat

SEQ ID NO: 425859 - DNA, 15 bp, Homo sapiens
tgccttcaacaacaa

SEQ ID NO: 425860 - DNA, 15 bp, Homo sapiens
atgccttcaacaaca

SEQ ID NO: 425861 - DNA, 15 bp, Homo sapiens
catgccttcaacaac

SEQ ID NO: 425862 - DNA, 15 bp, Homo sapiens
tcatgccttcaacaa

SEQ ID NO: 425863 - DNA, 15 bp, Homo sapiens
ctcatgccttcaaca

SEQ ID NO: 425864 - DNA, 15 bp, Homo sapiens
tctcatgccttcaac

SEQ ID NO: 425865 - DNA, 15 bp, Homo sapiens
atctcatgccttcaa

SEQ ID NO: 425866 - DNA, 15 bp, Homo sapiens
aatctcatgccttca

SEQ ID NO: 425867 - DNA, 15 bp, Homo sapiens
aaatctcatgccttc

SEQ ID NO: 425868 - DNA, 15 bp, Homo sapiens
taaatctcatgcctt

SEQ ID NO: 425869 - DNA, 15 bp, Homo sapiens
ttaaatctcatgcct

SEQ ID NO: 425870 - DNA, 15 bp, Homo sapiens
gttaaatctcatgcc

SEQ ID NO: 425871 - DNA, 15 bp, Homo sapiens
agttaaatctcatgc

SEQ ID NO: 425872 - DNA, 15 bp, Homo sapiens
aagttaaatctcatg

SEQ ID NO: 425873 - DNA, 15 bp, Homo sapiens
caagttaaatctcat

SEQ ID NO: 425874 - DNA, 15 bp, Homo sapiens
acaagttaaatctca

SEQ ID NO: 425875 - DNA, 15 bp, Homo sapiens
aacaagttaaatctc

SEQ ID NO: 425876 - DNA, 15 bp, Homo sapiens
taacaagttaaatct

SEQ ID NO: 425877 - DNA, 15 bp, Homo sapiens
ctaacaagttaaatc

SEQ ID NO: 425878 - DNA, 15 bp, Homo sapiens
gctaacaagttaaat

SEQ ID NO: 425879 - DNA, 15 bp, Homo sapiens
agctaacaagttaaa

SEQ ID NO: 425880 - DNA, 15 bp, Homo sapiens
tagctaacaagttaa

SEQ ID NO: 425881 - DNA, 15 bp, Homo sapiens
gtagctaacaagtta

SEQ ID NO: 425882 - DNA, 15 bp, Homo sapiens
agtagctaacaagtt

SEQ ID NO: 425883 - DNA, 15 bp, Homo sapiens
cagtagctaacaagt

SEQ ID NO: 425884 - DNA, 15 bp, Homo sapiens
acagtagctaacaag

SEQ ID NO: 425885 - DNA, 15 bp, Homo sapiens
cacagtagctaacaa

SEQ ID NO: 425886 - DNA, 15 bp, Homo sapiens
ccacagtagctaaca

SEQ ID NO: 425887 - DNA, 15 bp, Homo sapiens
gccacagtagctaac

SEQ ID NO: 425888 - DNA, 15 bp, Homo sapiens
agccacagtagctaa

SEQ ID NO: 425889 - DNA, 15 bp, Homo sapiens
cagccacagtagcta

SEQ ID NO: 425890 - DNA, 15 bp, Homo sapiens
tcagccacagtagct

SEQ ID NO: 425891 - DNA, 15 bp, Homo sapiens
ctcagccacagtagc

SEQ ID NO: 425892 - DNA, 15 bp, Homo sapiens
actcagccacagtag

SEQ ID NO: 425893 - DNA, 15 bp, Homo sapiens
gactcagccacagta

SEQ ID NO: 425894 - DNA, 15 bp, Homo sapiens
tgactcagccacagt

SEQ ID NO: 425895 - DNA, 15 bp, Homo sapiens
ctgactcagccacag

SEQ ID NO: 425896 - DNA, 15 bp, Homo sapiens
tctgactcagccaca

SEQ ID NO: 425897 - DNA, 15 bp, Homo sapiens
atctgactcagccac

SEQ ID NO: 425898 - DNA, 15 bp, Homo sapiens
aatctgactcagcca

SEQ ID NO: 425899 - DNA, 15 bp, Homo sapiens
aaatctgactcagcc

SEQ ID NO: 425900 - DNA, 15 bp, Homo sapiens
aaaatctgactcagc

SEQ ID NO: 425901 - DNA, 15 bp, Homo sapiens
caaaatctgactcag

SEQ ID NO: 425902 - DNA, 15 bp, Homo sapiens
tcaaaatctgactca

SEQ ID NO: 425903 - DNA, 15 bp, Homo sapiens
ctcaaaatctgactc

SEQ ID NO: 425904 - DNA, 15 bp, Homo sapiens
actcaaaatctgact

SEQ ID NO: 425905 - DNA, 15 bp, Homo sapiens
aactcaaaatctgac

SEQ ID NO: 425906 - DNA, 15 bp, Homo sapiens
gaactcaaaatctga

SEQ ID NO: 425907 - DNA, 15 bp, Homo sapiens
agaactcaaaatctg

SEQ ID NO: 425908 - DNA, 15 bp, Homo sapiens
aagaactcaaaatct

SEQ ID NO: 425909 - DNA, 15 bp, Homo sapiens
gaagaactcaaaatc

SEQ ID NO: 425910 - DNA, 15 bp, Homo sapiens
tgaagaactcaaaat

SEQ ID NO: 425911 - DNA, 15 bp, Homo sapiens
ctgaagaactcaaaa

SEQ ID NO: 425912 - DNA, 15 bp, Homo sapiens
tctgaagaactcaaa

SEQ ID NO: 425913 - DNA, 15 bp, Homo sapiens
ttctgaagaactcaa

SEQ ID NO: 425914 - DNA, 15 bp, Homo sapiens
tttctgaagaactca

SEQ ID NO: 425915 - DNA, 15 bp, Homo sapiens
atttctgaagaactc

SEQ ID NO: 425916 - DNA, 15 bp, Homo sapiens
tatttctgaagaact

SEQ ID NO: 425917 - DNA, 15 bp, Homo sapiens
ttatttctgaagaac

SEQ ID NO: 425918 - DNA, 15 bp, Homo sapiens
gttatttctgaagaa

SEQ ID NO: 425919 - DNA, 15 bp, Homo sapiens
tgttatttctgaaga

SEQ ID NO: 425920 - DNA, 15 bp, Homo sapiens
gtgttatttctgaag

SEQ ID NO: 425921 - DNA, 15 bp, Homo sapiens
agtgttatttctgaa

SEQ ID NO: 425922 - DNA, 15 bp, Homo sapiens
tagtgttatttctga

SEQ ID NO: 425923 - DNA, 15 bp, Homo sapiens
gtagtgttatttctg

SEQ ID NO: 425924 - DNA, 15 bp, Homo sapiens
agtagtgttatttct

SEQ ID NO: 425925 - DNA, 15 bp, Homo sapiens
aagtagtgttatttc

SEQ ID NO: 425926 - DNA, 15 bp, Homo sapiens
caagtagtgttattt

SEQ ID NO: 425927 - DNA, 15 bp, Homo sapiens
acaagtagtgttatt

SEQ ID NO: 425928 - DNA, 15 bp, Homo sapiens
tacaagtagtgttat

SEQ ID NO: 425929 - DNA, 15 bp, Homo sapiens
ctacaagtagtgtta

SEQ ID NO: 425930 - DNA, 15 bp, Homo sapiens
cctacaagtagtgtt

SEQ ID NO: 425931 - DNA, 15 bp, Homo sapiens
acctacaagtagtgt

SEQ ID NO: 425932 - DNA, 15 bp, Homo sapiens
aacctacaagtagtg

SEQ ID NO: 425933 - DNA, 15 bp, Homo sapiens
gaacctacaagtagt

SEQ ID NO: 425934 - DNA, 15 bp, Homo sapiens
agaacctacaagtag

SEQ ID NO: 425935 - DNA, 15 bp, Homo sapiens
aagaacctacaagta

SEQ ID NO: 425936 - DNA, 15 bp, Homo sapiens
gaagaacctacaagt

SEQ ID NO: 425937 - DNA, 15 bp, Homo sapiens
ggaagaacctacaag

SEQ ID NO: 425938 - DNA, 15 bp, Homo sapiens
tggaagaacctacaa

SEQ ID NO: 425939 - DNA, 15 bp, Homo sapiens
ctggaagaacctaca

SEQ ID NO: 425940 - DNA, 15 bp, Homo sapiens
actggaagaacctac

SEQ ID NO: 425941 - DNA, 15 bp, Homo sapiens
cactggaagaaccta

SEQ ID NO: 425942 - DNA, 15 bp, Homo sapiens
acactggaagaacct

SEQ ID NO: 425943 - DNA, 15 bp, Homo sapiens
aacactggaagaacc

SEQ ID NO: 425944 - DNA, 15 bp, Homo sapiens
gaacactggaagaac

SEQ ID NO: 425945 - DNA, 15 bp, Homo sapiens
agaacactggaagaa

SEQ ID NO: 425946 - DNA, 15 bp, Homo sapiens
gagaacactggaaga

SEQ ID NO: 425947 - DNA, 15 bp, Homo sapiens
agagaacactggaag

SEQ ID NO: 425948 - DNA, 15 bp, Homo sapiens
cagagaacactggaa

SEQ ID NO: 425949 - DNA, 15 bp, Homo sapiens
tcagagaacactgga

SEQ ID NO: 425950 - DNA, 15 bp, Homo sapiens
ttcagagaacactgg

SEQ ID NO: 425951 - DNA, 15 bp, Homo sapiens
cttcagagaacactg

SEQ ID NO: 425952 - DNA, 15 bp, Homo sapiens
gcttcagagaacact

SEQ ID NO: 425953 - DNA, 15 bp, Homo sapiens
tgcttcagagaacac

SEQ ID NO: 425954 - DNA, 15 bp, Homo sapiens
ctgcttcagagaaca

SEQ ID NO: 425955 - DNA, 15 bp, Homo sapiens
tctgcttcagagaac

SEQ ID NO: 425956 - DNA, 15 bp, Homo sapiens
ttctgcttcagagaa

SEQ ID NO: 425957 - DNA, 15 bp, Homo sapiens
tttctgcttcagaga

SEQ ID NO: 425958 - DNA, 15 bp, Homo sapiens
ctttctgcttcagag

SEQ ID NO: 425959 - DNA, 15 bp, Homo sapiens
actttctgcttcaga

SEQ ID NO: 425960 - DNA, 15 bp, Homo sapiens
gactttctgcttcag

SEQ ID NO: 425961 - DNA, 15 bp, Homo sapiens
tgactttctgcttca

SEQ ID NO: 425962 - DNA, 15 bp, Homo sapiens
ctgactttctgcttc

SEQ ID NO: 425963 - DNA, 15 bp, Homo sapiens
actgactttctgctt

SEQ ID NO: 425964 - DNA, 15 bp, Homo sapiens
cactgactttctgct

SEQ ID NO: 425965 - DNA, 15 bp, Homo sapiens
gcactgactttctgc

SEQ ID NO: 425966 - DNA, 15 bp, Homo sapiens
agcactgactttctg

SEQ ID NO: 425967 - DNA, 15 bp, Homo sapiens
tagcactgactttct

SEQ ID NO: 425968 - DNA, 15 bp, Homo sapiens
ttagcactgactttc

SEQ ID NO: 425969 - DNA, 15 bp, Homo sapiens
gttagcactgacttt

SEQ ID NO: 425970 - DNA, 15 bp, Homo sapiens
agttagcactgactt

SEQ ID NO: 425971 - DNA, 15 bp, Homo sapiens
cagttagcactgact

SEQ ID NO: 425972 - DNA, 15 bp, Homo sapiens
acagttagcactgac

SEQ ID NO: 425973 - DNA, 15 bp, Homo sapiens
tacagttagcactga

SEQ ID NO: 425974 - DNA, 15 bp, Homo sapiens
ttacagttagcactg

SEQ ID NO: 425975 - DNA, 15 bp, Homo sapiens
tttacagttagcact

SEQ ID NO: 425976 - DNA, 15 bp, Homo sapiens
ctttacagttagcac

SEQ ID NO: 425977 - DNA, 15 bp, Homo sapiens
tctttacagttagca

SEQ ID NO: 425978 - DNA, 15 bp, Homo sapiens
ctctttacagttagc

SEQ ID NO: 425979 - DNA, 15 bp, Homo sapiens
tctctttacagttag

SEQ ID NO: 425980 - DNA, 15 bp, Homo sapiens
atctctttacagtta

SEQ ID NO: 425981 - DNA, 15 bp, Homo sapiens
catctctttacagtt

SEQ ID NO: 425982 - DNA, 15 bp, Homo sapiens
acatctctttacagt

SEQ ID NO: 425983 - DNA, 15 bp, Homo sapiens
aacatctctttacag

SEQ ID NO: 425984 - DNA, 15 bp, Homo sapiens
caacatctctttaca

SEQ ID NO: 425985 - DNA, 15 bp, Homo sapiens
tcaacatctctttac

SEQ ID NO: 425986 - DNA, 15 bp, Homo sapiens
ttcaacatctcttta

SEQ ID NO: 425987 - DNA, 15 bp, Homo sapiens
cttcaacatctcttt

SEQ ID NO: 425988 - DNA, 15 bp, Homo sapiens
gcttcaacatctctt

SEQ ID NO: 425989 - DNA, 15 bp, Homo sapiens
tgcttcaacatctct

SEQ ID NO: 425990 - DNA, 15 bp, Homo sapiens
gtgcttcaacatctc

SEQ ID NO: 425991 - DNA, 15 bp, Homo sapiens
agtgcttcaacatct

SEQ ID NO: 425992 - DNA, 15 bp, Homo sapiens
cagtgcttcaacatc

SEQ ID NO: 425993 - DNA, 15 bp, Homo sapiens
acagtgcttcaacat

SEQ ID NO: 425994 - DNA, 15 bp, Homo sapiens
cacagtgcttcaaca

SEQ ID NO: 425995 - DNA, 15 bp, Homo sapiens
acacagtgcttcaac

SEQ ID NO: 425996 - DNA, 15 bp, Homo sapiens
aacacagtgcttcaa

SEQ ID NO: 425997 - DNA, 15 bp, Homo sapiens
aaacacagtgcttca

SEQ ID NO: 425998 - DNA, 15 bp, Homo sapiens
aaaacacagtgcttc

SEQ ID NO: 425999 - DNA, 15 bp, Homo sapiens
aaaaacacagtgctt

SEQ ID NO: 426000 - DNA, 15 bp, Homo sapiens
aaaaaacacagtgct

SEQ ID NO: 426001 - DNA, 15 bp, Homo sapiens
aaaaaaacacagtgc

SEQ ID NO: 426002 - DNA, 15 bp, Homo sapiens
aaaaaaaacacagtg

SEQ ID NO: 426003 - DNA, 15 bp, Homo sapiens
gaaaaaaaacacagt

SEQ ID NO: 426004 - DNA, 15 bp, Homo sapiens
tgaaaaaaaacacag

SEQ ID NO: 426005 - DNA, 15 bp, Homo sapiens
ctgaaaaaaaacaca

SEQ ID NO: 426006 - DNA, 15 bp, Homo sapiens
actgaaaaaaaacac

SEQ ID NO: 426007 - DNA, 15 bp, Homo sapiens
cactgaaaaaaaaca

SEQ ID NO: 426008 - DNA, 15 bp, Homo sapiens
tcactgaaaaaaaac

SEQ ID NO: 426009 - DNA, 15 bp, Homo sapiens
ctcactgaaaaaaaa

SEQ ID NO: 426010 - DNA, 15 bp, Homo sapiens
actcactgaaaaaaa

SEQ ID NO: 426011 - DNA, 15 bp, Homo sapiens
tactcactgaaaaaa

SEQ ID NO: 426012 - DNA, 15 bp, Homo sapiens
ttactcactgaaaaa

SEQ ID NO: 426013 - DNA, 15 bp, Homo sapiens
gttactcactgaaaa

SEQ ID NO: 426014 - DNA, 15 bp, Homo sapiens
agttactcactgaaa

SEQ ID NO: 426015 - DNA, 15 bp, Homo sapiens
aagttactcactgaa

SEQ ID NO: 426016 - DNA, 15 bp, Homo sapiens
caagttactcactga

SEQ ID NO: 426017 - DNA, 15 bp, Homo sapiens
tcaagttactcactg

SEQ ID NO: 426018 - DNA, 15 bp, Homo sapiens
atcaagttactcact

SEQ ID NO: 426019 - DNA, 15 bp, Homo sapiens
aatcaagttactcac

SEQ ID NO: 426020 - DNA, 15 bp, Homo sapiens
aaatcaagttactca

SEQ ID NO: 426021 - DNA, 15 bp, Homo sapiens
taaatcaagttactc

SEQ ID NO: 426022 - DNA, 15 bp, Homo sapiens
ttaaatcaagttact

SEQ ID NO: 426023 - DNA, 15 bp, Homo sapiens
gttaaatcaagttac

SEQ ID NO: 426024 - DNA, 15 bp, Homo sapiens
cgttaaatcaagtta

SEQ ID NO: 426025 - DNA, 15 bp, Homo sapiens
tcgttaaatcaagtt

SEQ ID NO: 426026 - DNA, 15 bp, Homo sapiens
ttcgttaaatcaagt

SEQ ID NO: 426027 - DNA, 15 bp, Homo sapiens
attcgttaaatcaag

SEQ ID NO: 426028 - DNA, 15 bp, Homo sapiens
aattcgttaaatcaa

SEQ ID NO: 426029 - DNA, 15 bp, Homo sapiens
aaattcgttaaatca

SEQ ID NO: 426030 - DNA, 15 bp, Homo sapiens
gaaattcgttaaatc

SEQ ID NO: 426031 - DNA, 15 bp, Homo sapiens
agaaattcgttaaat

SEQ ID NO: 426032 - DNA, 15 bp, Homo sapiens
aagaaattcgttaaa

SEQ ID NO: 426033 - DNA, 15 bp, Homo sapiens
taagaaattcgttaa

SEQ ID NO: 426034 - DNA, 15 bp, Homo sapiens
ataagaaattcgtta

SEQ ID NO: 426035 - DNA, 15 bp, Homo sapiens
aataagaaattcgtt

SEQ ID NO: 426036 - DNA, 15 bp, Homo sapiens
gaataagaaattcgt

SEQ ID NO: 426037 - DNA, 15 bp, Homo sapiens
agaataagaaattcg

SEQ ID NO: 426038 - DNA, 15 bp, Homo sapiens
cagaataagaaattc

SEQ ID NO: 426039 - DNA, 15 bp, Homo sapiens
tcagaataagaaatt

SEQ ID NO: 426040 - DNA, 15 bp, Homo sapiens
ttcagaataagaaat

SEQ ID NO: 426041 - DNA, 15 bp, Homo sapiens
cttcagaataagaaa

SEQ ID NO: 426042 - DNA, 15 bp, Homo sapiens
tcttcagaataagaa

SEQ ID NO: 426043 - DNA, 15 bp, Homo sapiens
ttcttcagaataaga

SEQ ID NO: 426044 - DNA, 15 bp, Homo sapiens
tttcttcagaataag

SEQ ID NO: 426045 - DNA, 15 bp, Homo sapiens
atttcttcagaataa

SEQ ID NO: 426046 - DNA, 15 bp, Homo sapiens
gatttcttcagaata

SEQ ID NO: 426047 - DNA, 15 bp, Homo sapiens
ggatttcttcagaat

SEQ ID NO: 426048 - DNA, 15 bp, Homo sapiens
aggatttcttcagaa

SEQ ID NO: 426049 - DNA, 15 bp, Homo sapiens
aaggatttcttcaga

SEQ ID NO: 426050 - DNA, 15 bp, Homo sapiens
taaggatttcttcag

SEQ ID NO: 426051 - DNA, 15 bp, Homo sapiens
ctaaggatttcttca

SEQ ID NO: 426052 - DNA, 15 bp, Homo sapiens
tctaaggatttcttc

SEQ ID NO: 426053 - DNA, 15 bp, Homo sapiens
atctaaggatttctt

SEQ ID NO: 426054 - DNA, 15 bp, Homo sapiens
aatctaaggatttct

SEQ ID NO: 426055 - DNA, 15 bp, Homo sapiens
caatctaaggatttc

SEQ ID NO: 426056 - DNA, 15 bp, Homo sapiens
tcaatctaaggattt

SEQ ID NO: 426057 - DNA, 15 bp, Homo sapiens
ttcaatctaaggatt

SEQ ID NO: 426058 - DNA, 15 bp, Homo sapiens
cttcaatctaaggat

SEQ ID NO: 426059 - DNA, 15 bp, Homo sapiens
tcttcaatctaagga

SEQ ID NO: 426060 - DNA, 15 bp, Homo sapiens
atcttcaatctaagg

SEQ ID NO: 426061 - DNA, 15 bp, Homo sapiens
tatcttcaatctaag

SEQ ID NO: 426062 - DNA, 15 bp, Homo sapiens
ttatcttcaatctaa

SEQ ID NO: 426063 - DNA, 15 bp, Homo sapiens
attatcttcaatcta

SEQ ID NO: 426064 - DNA, 15 bp, Homo sapiens
gattatcttcaatct

SEQ ID NO: 426065 - DNA, 15 bp, Homo sapiens
agattatcttcaatc

SEQ ID NO: 426066 - DNA, 15 bp, Homo sapiens
cagattatcttcaat

SEQ ID NO: 426067 - DNA, 15 bp, Homo sapiens
acagattatcttcaa

SEQ ID NO: 426068 - DNA, 15 bp, Homo sapiens
cacagattatcttca

SEQ ID NO: 426069 - DNA, 15 bp, Homo sapiens
acacagattatcttc

SEQ ID NO: 426070 - DNA, 15 bp, Homo sapiens
aacacagattatctt

SEQ ID NO: 426071 - DNA, 15 bp, Homo sapiens
aaacacagattatct

SEQ ID NO: 426072 - DNA, 15 bp, Homo sapiens
taaacacagattatc

SEQ ID NO: 426073 - DNA, 15 bp, Homo sapiens
ctaaacacagattat

SEQ ID NO: 426074 - DNA, 15 bp, Homo sapiens
actaaacacagatta

SEQ ID NO: 426075 - DNA, 15 bp, Homo sapiens
aactaaacacagatt

SEQ ID NO: 426076 - DNA, 15 bp, Homo sapiens
taactaaacacagat

SEQ ID NO: 426077 - DNA, 15 bp, Homo sapiens
ttaactaaacacaga

SEQ ID NO: 426078 - DNA, 15 bp, Homo sapiens
gttaactaaacacag

SEQ ID NO: 426079 - DNA, 15 bp, Homo sapiens
tgttaactaaacaca

SEQ ID NO: 426080 - DNA, 15 bp, Homo sapiens
ctgttaactaaacac

SEQ ID NO: 426081 - DNA, 15 bp, Homo sapiens
tctgttaactaaaca

SEQ ID NO: 426082 - DNA, 15 bp, Homo sapiens
ttctgttaactaaac

SEQ ID NO: 426083 - DNA, 15 bp, Homo sapiens
cttctgttaactaaa

SEQ ID NO: 426084 - DNA, 15 bp, Homo sapiens
acttctgttaactaa

SEQ ID NO: 426085 - DNA, 15 bp, Homo sapiens
tacttctgttaacta

SEQ ID NO: 426086 - DNA, 15 bp, Homo sapiens
ttacttctgttaact

SEQ ID NO: 426087 - DNA, 15 bp, Homo sapiens
tttacttctgttaac

SEQ ID NO: 426088 - DNA, 15 bp, Homo sapiens
gtttacttctgttaa

SEQ ID NO: 426089 - DNA, 15 bp, Homo sapiens
ggtttacttctgtta

SEQ ID NO: 426090 - DNA, 15 bp, Homo sapiens
aggtttacttctgtt

SEQ ID NO: 426091 - DNA, 15 bp, Homo sapiens
caggtttacttctgt

SEQ ID NO: 426092 - DNA, 15 bp, Homo sapiens
acaggtttacttctg

SEQ ID NO: 426093 - DNA, 15 bp, Homo sapiens
tacaggtttacttct

SEQ ID NO: 426094 - DNA, 15 bp, Homo sapiens
atacaggtttacttc

SEQ ID NO: 426095 - DNA, 15 bp, Homo sapiens
tatacaggtttactt

SEQ ID NO: 426096 - DNA, 15 bp, Homo sapiens
atatacaggtttact

SEQ ID NO: 426097 - DNA, 15 bp, Homo sapiens
tatatacaggtttac

SEQ ID NO: 426098 - DNA, 15 bp, Homo sapiens
ctatatacaggttta

SEQ ID NO: 426099 - DNA, 15 bp, Homo sapiens
gctatatacaggttt

SEQ ID NO: 426100 - DNA, 15 bp, Homo sapiens
tgctatatacaggtt

SEQ ID NO: 426101 - DNA, 15 bp, Homo sapiens
gtgctatatacaggt

SEQ ID NO: 426102 - DNA, 15 bp, Homo sapiens
ggtgctatatacagg

SEQ ID NO: 426103 - DNA, 15 bp, Homo sapiens
aggtgctatatacag

SEQ ID NO: 426104 - DNA, 15 bp, Homo sapiens
gaggtgctatataca

SEQ ID NO: 426105 - DNA, 15 bp, Homo sapiens
agaggtgctatatac

SEQ ID NO: 426106 - DNA, 15 bp, Homo sapiens
tagaggtgctatata

SEQ ID NO: 426107 - DNA, 15 bp, Homo sapiens
ttagaggtgctatat

SEQ ID NO: 426108 - DNA, 15 bp, Homo sapiens
gttagaggtgctata

SEQ ID NO: 426109 - DNA, 15 bp, Homo sapiens
agttagaggtgctat

SEQ ID NO: 426110 - DNA, 15 bp, Homo sapiens
aagttagaggtgcta

SEQ ID NO: 426111 - DNA, 15 bp, Homo sapiens
aaagttagaggtgct

SEQ ID NO: 426112 - DNA, 15 bp, Homo sapiens
caaagttagaggtgc

SEQ ID NO: 426113 - DNA, 15 bp, Homo sapiens
tcaaagttagaggtg

SEQ ID NO: 426114 - DNA, 15 bp, Homo sapiens
ctcaaagttagaggt

SEQ ID NO: 426115 - DNA, 15 bp, Homo sapiens
actcaaagttagagg

SEQ ID NO: 426116 - DNA, 15 bp, Homo sapiens
cactcaaagttagag

SEQ ID NO: 426117 - DNA, 15 bp, Homo sapiens
acactcaaagttaga

SEQ ID NO: 426118 - DNA, 15 bp, Homo sapiens
aacactcaaagttag

SEQ ID NO: 426119 - DNA, 15 bp, Homo sapiens
caacactcaaagtta

SEQ ID NO: 426120 - DNA, 15 bp, Homo sapiens
ccaacactcaaagtt

SEQ ID NO: 426121 - DNA, 15 bp, Homo sapiens
tccaacactcaaagt

SEQ ID NO: 426122 - DNA, 15 bp, Homo sapiens
ttccaacactcaaag

SEQ ID NO: 426123 - DNA, 15 bp, Homo sapiens
cttccaacactcaaa

SEQ ID NO: 426124 - DNA, 15 bp, Homo sapiens
ccttccaacactcaa

SEQ ID NO: 426125 - DNA, 15 bp, Homo sapiens
tccttccaacactca

SEQ ID NO: 426126 - DNA, 15 bp, Homo sapiens
ttccttccaacactc

SEQ ID NO: 426127 - DNA, 15 bp, Homo sapiens
gttccttccaacact

SEQ ID NO: 426128 - DNA, 15 bp, Homo sapiens
agttccttccaacac

SEQ ID NO: 426129 - DNA, 15 bp, Homo sapiens
tagttccttccaaca

SEQ ID NO: 426130 - DNA, 15 bp, Homo sapiens
atagttccttccaac

SEQ ID NO: 426131 - DNA, 15 bp, Homo sapiens
aatagttccttccaa

SEQ ID NO: 426132 - DNA, 15 bp, Homo sapiens
aaatagttccttcca

SEQ ID NO: 426133 - DNA, 15 bp, Homo sapiens
taaatagttccttcc

SEQ ID NO: 426134 - DNA, 15 bp, Homo sapiens
ttaaatagttccttc

SEQ ID NO: 426135 - DNA, 15 bp, Homo sapiens
attaaatagttcctt

SEQ ID NO: 426136 - DNA, 15 bp, Homo sapiens
tattaaatagttcct

SEQ ID NO: 426137 - DNA, 15 bp, Homo sapiens
ttattaaatagttcc

SEQ ID NO: 426138 - DNA, 15 bp, Homo sapiens
gttattaaatagttc

SEQ ID NO: 426139 - DNA, 15 bp, Homo sapiens
tgttattaaatagtt

SEQ ID NO: 426140 - DNA, 15 bp, Homo sapiens
ctgttattaaatagt

SEQ ID NO: 426141 - DNA, 15 bp, Homo sapiens
gctgttattaaatag

SEQ ID NO: 426142 - DNA, 15 bp, Homo sapiens
agctgttattaaata

SEQ ID NO: 426143 - DNA, 15 bp, Homo sapiens
cagctgttattaaat

SEQ ID NO: 426144 - DNA, 15 bp, Homo sapiens
acagctgttattaaa

SEQ ID NO: 426145 - DNA, 15 bp, Homo sapiens
aacagctgttattaa

SEQ ID NO: 426146 - DNA, 15 bp, Homo sapiens
taacagctgttatta

SEQ ID NO: 426147 - DNA, 15 bp, Homo sapiens
ataacagctgttatt

SEQ ID NO: 426148 - DNA, 15 bp, Homo sapiens
gataacagctgttat

SEQ ID NO: 426149 - DNA, 15 bp, Homo sapiens
tgataacagctgtta

SEQ ID NO: 426150 - DNA, 15 bp, Homo sapiens
atgataacagctgtt

SEQ ID NO: 426151 - DNA, 15 bp, Homo sapiens
gatgataacagctgt

SEQ ID NO: 426152 - DNA, 15 bp, Homo sapiens
tgatgataacagctg

SEQ ID NO: 426153 - DNA, 15 bp, Homo sapiens
gtgatgataacagct

SEQ ID NO: 426154 - DNA, 15 bp, Homo sapiens
ggtgatgataacagc

SEQ ID NO: 426155 - DNA, 15 bp, Homo sapiens
tggtgatgataacag

SEQ ID NO: 426156 - DNA, 15 bp, Homo sapiens
atggtgatgataaca

SEQ ID NO: 426157 - DNA, 15 bp, Homo sapiens
gatggtgatgataac

SEQ ID NO: 426158 - DNA, 15 bp, Homo sapiens
tgatggtgatgataa

SEQ ID NO: 426159 - DNA, 15 bp, Homo sapiens
gtgatggtgatgata

SEQ ID NO: 426160 - DNA, 15 bp, Homo sapiens
agtgatggtgatgat

SEQ ID NO: 426161 - DNA, 15 bp, Homo sapiens
tagtgatggtgatga

SEQ ID NO: 426162 - DNA, 15 bp, Homo sapiens
ctagtgatggtgatg

SEQ ID NO: 426163 - DNA, 15 bp, Homo sapiens
gctagtgatggtgat

SEQ ID NO: 426164 - DNA, 15 bp, Homo sapiens
agctagtgatggtga

SEQ ID NO: 426165 - DNA, 15 bp, Homo sapiens
cagctagtgatggtg

SEQ ID NO: 426166 - DNA, 15 bp, Homo sapiens
tcagctagtgatggt

SEQ ID NO: 426167 - DNA, 15 bp, Homo sapiens
gtcagctagtgatgg

SEQ ID NO: 426168 - DNA, 15 bp, Homo sapiens
tgtcagctagtgatg

SEQ ID NO: 426169 - DNA, 15 bp, Homo sapiens
atgtcagctagtgat

SEQ ID NO: 426170 - DNA, 15 bp, Homo sapiens
aatgtcagctagtga

SEQ ID NO: 426171 - DNA, 15 bp, Homo sapiens
aaatgtcagctagtg

SEQ ID NO: 426172 - DNA, 15 bp, Homo sapiens
taaatgtcagctagt

SEQ ID NO: 426173 - DNA, 15 bp, Homo sapiens
ataaatgtcagctag

SEQ ID NO: 426174 - DNA, 15 bp, Homo sapiens
aataaatgtcagcta

SEQ ID NO: 426175 - DNA, 15 bp, Homo sapiens
caataaatgtcagct

SEQ ID NO: 426176 - DNA, 15 bp, Homo sapiens
tcaataaatgtcagc

SEQ ID NO: 426177 - DNA, 15 bp, Homo sapiens
ctcaataaatgtcag

SEQ ID NO: 426178 - DNA, 15 bp, Homo sapiens
gctcaataaatgtca

SEQ ID NO: 426179 - DNA, 15 bp, Homo sapiens
tgctcaataaatgtc

SEQ ID NO: 426180 - DNA, 15 bp, Homo sapiens
gtgctcaataaatgt

SEQ ID NO: 426181 - DNA, 15 bp, Homo sapiens
agtgctcaataaatg

SEQ ID NO: 426182 - DNA, 15 bp, Homo sapiens
aagtgctcaataaat

SEQ ID NO: 426183 - DNA, 15 bp, Homo sapiens
taagtgctcaataaa

SEQ ID NO: 426184 - DNA, 15 bp, Homo sapiens
ttaagtgctcaataa

SEQ ID NO: 426185 - DNA, 15 bp, Homo sapiens
gttaagtgctcaata

SEQ ID NO: 426186 - DNA, 15 bp, Homo sapiens
ggttaagtgctcaat

SEQ ID NO: 426187 - DNA, 15 bp, Homo sapiens
tggttaagtgctcaa

SEQ ID NO: 426188 - DNA, 15 bp, Homo sapiens
gtggttaagtgctca

SEQ ID NO: 426189 - DNA, 15 bp, Homo sapiens
tgtggttaagtgctc

SEQ ID NO: 426190 - DNA, 15 bp, Homo sapiens
atgtggttaagtgct

SEQ ID NO: 426191 - DNA, 15 bp, Homo sapiens
catgtggttaagtgc

SEQ ID NO: 426192 - DNA, 15 bp, Homo sapiens
gcatgtggttaagtg

SEQ ID NO: 426193 - DNA, 15 bp, Homo sapiens
agcatgtggttaagt

SEQ ID NO: 426194 - DNA, 15 bp, Homo sapiens
cagcatgtggttaag

SEQ ID NO: 426195 - DNA, 15 bp, Homo sapiens
ccagcatgtggttaa

SEQ ID NO: 426196 - DNA, 15 bp, Homo sapiens
gccagcatgtggtta

SEQ ID NO: 426197 - DNA, 15 bp, Homo sapiens
agccagcatgtggtt

SEQ ID NO: 426198 - DNA, 15 bp, Homo sapiens
tagccagcatgtggt

SEQ ID NO: 426199 - DNA, 15 bp, Homo sapiens
gtagccagcatgtgg

SEQ ID NO: 426200 - DNA, 15 bp, Homo sapiens
agtagccagcatgtg

SEQ ID NO: 426201 - DNA, 15 bp, Homo sapiens
cagtagccagcatgt

SEQ ID NO: 426202 - DNA, 15 bp, Homo sapiens
acagtagccagcatg

SEQ ID NO: 426203 - DNA, 15 bp, Homo sapiens
tacagtagccagcat

SEQ ID NO: 426204 - DNA, 15 bp, Homo sapiens
gtacagtagccagca

SEQ ID NO: 426205 - DNA, 15 bp, Homo sapiens
agtacagtagccagc

SEQ ID NO: 426206 - DNA, 15 bp, Homo sapiens
cagtacagtagccag

SEQ ID NO: 426207 - DNA, 15 bp, Homo sapiens
tcagtacagtagcca

SEQ ID NO: 426208 - DNA, 15 bp, Homo sapiens
ctcagtacagtagcc

SEQ ID NO: 426209 - DNA, 15 bp, Homo sapiens
gctcagtacagtagc

SEQ ID NO: 426210 - DNA, 15 bp, Homo sapiens
tgctcagtacagtag

SEQ ID NO: 426211 - DNA, 15 bp, Homo sapiens
gtgctcagtacagta

SEQ ID NO: 426212 - DNA, 15 bp, Homo sapiens
agtgctcagtacagt

SEQ ID NO: 426213 - DNA, 15 bp, Homo sapiens
aagtgctcagtacag

SEQ ID NO: 426214 - DNA, 15 bp, Homo sapiens
aaagtgctcagtaca

SEQ ID NO: 426215 - DNA, 15 bp, Homo sapiens
taaagtgctcagtac

SEQ ID NO: 426216 - DNA, 15 bp, Homo sapiens
gtaaagtgctcagta

SEQ ID NO: 426217 - DNA, 15 bp, Homo sapiens
tgtaaagtgctcagt

SEQ ID NO: 426218 - DNA, 15 bp, Homo sapiens
atgtaaagtgctcag

SEQ ID NO: 426219 - DNA, 15 bp, Homo sapiens
catgtaaagtgctca

SEQ ID NO: 426220 - DNA, 15 bp, Homo sapiens
gcatgtaaagtgctc

SEQ ID NO: 426221 - DNA, 15 bp, Homo sapiens
tgcatgtaaagtgct

SEQ ID NO: 426222 - DNA, 15 bp, Homo sapiens
atgcatgtaaagtgc

SEQ ID NO: 426223 - DNA, 15 bp, Homo sapiens
gatgcatgtaaagtg

SEQ ID NO: 426224 - DNA, 15 bp, Homo sapiens
tgatgcatgtaaagt

SEQ ID NO: 426225 - DNA, 15 bp, Homo sapiens
gtgatgcatgtaaag

SEQ ID NO: 426226 - DNA, 15 bp, Homo sapiens
ggtgatgcatgtaaa

SEQ ID NO: 426227 - DNA, 15 bp, Homo sapiens
aggtgatgcatgtaa

SEQ ID NO: 426228 - DNA, 15 bp, Homo sapiens
aaggtgatgcatgta

SEQ ID NO: 426229 - DNA, 15 bp, Homo sapiens
taaggtgatgcatgt

SEQ ID NO: 426230 - DNA, 15 bp, Homo sapiens
gtaaggtgatgcatg

SEQ ID NO: 426231 - DNA, 15 bp, Homo sapiens
agtaaggtgatgcat

SEQ ID NO: 426232 - DNA, 15 bp, Homo sapiens
aagtaaggtgatgca

SEQ ID NO: 426233 - DNA, 15 bp, Homo sapiens
taagtaaggtgatgc

SEQ ID NO: 426234 - DNA, 15 bp, Homo sapiens
ttaagtaaggtgatg

SEQ ID NO: 426235 - DNA, 15 bp, Homo sapiens
gttaagtaaggtgat

SEQ ID NO: 426236 - DNA, 15 bp, Homo sapiens
ggttaagtaaggtga

SEQ ID NO: 426237 - DNA, 15 bp, Homo sapiens
aggttaagtaaggtg

SEQ ID NO: 426238 - DNA, 15 bp, Homo sapiens
aaggttaagtaaggt

SEQ ID NO: 426239 - DNA, 15 bp, Homo sapiens
gaaggttaagtaagg

SEQ ID NO: 426240 - DNA, 15 bp, Homo sapiens
tgaaggttaagtaag

SEQ ID NO: 426241 - DNA, 15 bp, Homo sapiens
gtgaaggttaagtaa

SEQ ID NO: 426242 - DNA, 15 bp, Homo sapiens
tgtgaaggttaagta

SEQ ID NO: 426243 - DNA, 15 bp, Homo sapiens
ttgtgaaggttaagt

SEQ ID NO: 426244 - DNA, 15 bp, Homo sapiens
gttgtgaaggttaag

SEQ ID NO: 426245 - DNA, 15 bp, Homo sapiens
tgttgtgaaggttaa

SEQ ID NO: 426246 - DNA, 15 bp, Homo sapiens
ttgttgtgaaggtta

SEQ ID NO: 426247 - DNA, 15 bp, Homo sapiens
gttgttgtgaaggtt

SEQ ID NO: 426248 - DNA, 15 bp, Homo sapiens
tgttgttgtgaaggt

SEQ ID NO: 426249 - DNA, 15 bp, Homo sapiens
gtgttgttgtgaagg

SEQ ID NO: 426250 - DNA, 15 bp, Homo sapiens
agtgttgttgtgaag

SEQ ID NO: 426251 - DNA, 15 bp, Homo sapiens
cagtgttgttgtgaa

SEQ ID NO: 426252 - DNA, 15 bp, Homo sapiens
acagtgttgttgtga

SEQ ID NO: 426253 - DNA, 15 bp, Homo sapiens
cacagtgttgttgtg

SEQ ID NO: 426254 - DNA, 15 bp, Homo sapiens
tcacagtgttgttgt

SEQ ID NO: 426255 - DNA, 15 bp, Homo sapiens
ttcacagtgttgttg

SEQ ID NO: 426256 - DNA, 15 bp, Homo sapiens
gttcacagtgttgtt

SEQ ID NO: 426257 - DNA, 15 bp, Homo sapiens
tgttcacagtgttgt

SEQ ID NO: 426258 - DNA, 15 bp, Homo sapiens
ttgttcacagtgttg

SEQ ID NO: 426259 - DNA, 15 bp, Homo sapiens
tttgttcacagtgtt

SEQ ID NO: 426260 - DNA, 15 bp, Homo sapiens
ctttgttcacagtgt

SEQ ID NO: 426261 - DNA, 15 bp, Homo sapiens
tctttgttcacagtg

SEQ ID NO: 426262 - DNA, 15 bp, Homo sapiens
atctttgttcacagt

SEQ ID NO: 426263 - DNA, 15 bp, Homo sapiens
aatctttgttcacag

SEQ ID NO: 426264 - DNA, 15 bp, Homo sapiens
gaatctttgttcaca

SEQ ID NO: 426265 - DNA, 15 bp, Homo sapiens
ggaatctttgttcac

SEQ ID NO: 426266 - DNA, 15 bp, Homo sapiens
tggaatctttgttca

SEQ ID NO: 426267 - DNA, 15 bp, Homo sapiens
atggaatctttgttc

SEQ ID NO: 426268 - DNA, 15 bp, Homo sapiens
catggaatctttgtt

SEQ ID NO: 426269 - DNA, 15 bp, Homo sapiens
acatggaatctttgt

SEQ ID NO: 426270 - DNA, 15 bp, Homo sapiens
aacatggaatctttg

SEQ ID NO: 426271 - DNA, 15 bp, Homo sapiens
caacatggaatcttt

SEQ ID NO: 426272 - DNA, 15 bp, Homo sapiens
acaacatggaatctt

SEQ ID NO: 426273 - DNA, 15 bp, Homo sapiens
aacaacatggaatct

SEQ ID NO: 426274 - DNA, 15 bp, Homo sapiens
gaacaacatggaatc

SEQ ID NO: 426275 - DNA, 15 bp, Homo sapiens
agaacaacatggaat

SEQ ID NO: 426276 - DNA, 15 bp, Homo sapiens
gagaacaacatggaa

SEQ ID NO: 426277 - DNA, 15 bp, Homo sapiens
ggagaacaacatgga

SEQ ID NO: 426278 - DNA, 15 bp, Homo sapiens
tggagaacaacatgg

SEQ ID NO: 426279 - DNA, 15 bp, Homo sapiens
atggagaacaacatg

SEQ ID NO: 426280 - DNA, 15 bp, Homo sapiens
gatggagaacaacat

SEQ ID NO: 426281 - DNA, 15 bp, Homo sapiens
tgatggagaacaaca

SEQ ID NO: 426282 - DNA, 15 bp, Homo sapiens
ctgatggagaacaac

SEQ ID NO: 426283 - DNA, 15 bp, Homo sapiens
cctgatggagaacaa

SEQ ID NO: 426284 - DNA, 15 bp, Homo sapiens
ccctgatggagaaca

SEQ ID NO: 426285 - DNA, 15 bp, Homo sapiens
tccctgatggagaac

SEQ ID NO: 426286 - DNA, 15 bp, Homo sapiens
ctccctgatggagaa

SEQ ID NO: 426287 - DNA, 15 bp, Homo sapiens
cctccctgatggaga

SEQ ID NO: 426288 - DNA, 15 bp, Homo sapiens
gcctccctgatggag

SEQ ID NO: 426289 - DNA, 15 bp, Homo sapiens
tgcctccctgatgga

SEQ ID NO: 426290 - DNA, 15 bp, Homo sapiens
ctgcctccctgatgg

SEQ ID NO: 426291 - DNA, 15 bp, Homo sapiens
tctgcctccctgatg

SEQ ID NO: 426292 - DNA, 15 bp, Homo sapiens
ctctgcctccctgat

SEQ ID NO: 426293 - DNA, 15 bp, Homo sapiens
actctgcctccctga

SEQ ID NO: 426294 - DNA, 15 bp, Homo sapiens
tactctgcctccctg

SEQ ID NO: 426295 - DNA, 15 bp, Homo sapiens
ttactctgcctccct

SEQ ID NO: 426296 - DNA, 15 bp, Homo sapiens
cttactctgcctccc

SEQ ID NO: 426297 - DNA, 15 bp, Homo sapiens
tcttactctgcctcc

SEQ ID NO: 426298 - DNA, 15 bp, Homo sapiens
ttcttactctgcctc

SEQ ID NO: 426299 - DNA, 15 bp, Homo sapiens
gttcttactctgcct

SEQ ID NO: 426300 - DNA, 15 bp, Homo sapiens
agttcttactctgcc

SEQ ID NO: 426301 - DNA, 15 bp, Homo sapiens
aagttcttactctgc

SEQ ID NO: 426302 - DNA, 15 bp, Homo sapiens
caagttcttactctg

SEQ ID NO: 426303 - DNA, 15 bp, Homo sapiens
gcaagttcttactct

SEQ ID NO: 426304 - DNA, 15 bp, Homo sapiens
ggcaagttcttactc

SEQ ID NO: 426305 - DNA, 15 bp, Homo sapiens
gggcaagttcttact

SEQ ID NO: 426306 - DNA, 15 bp, Homo sapiens
tgggcaagttcttac

SEQ ID NO: 426307 - DNA, 15 bp, Homo sapiens
ttgggcaagttctta

SEQ ID NO: 426308 - DNA, 15 bp, Homo sapiens
tttgggcaagttctt

SEQ ID NO: 426309 - DNA, 15 bp, Homo sapiens
ctttgggcaagttct

SEQ ID NO: 426310 - DNA, 15 bp, Homo sapiens
actttgggcaagttc

SEQ ID NO: 426311 - DNA, 15 bp, Homo sapiens
cactttgggcaagtt

SEQ ID NO: 426312 - DNA, 15 bp, Homo sapiens
tcactttgggcaagt

SEQ ID NO: 426313 - DNA, 15 bp, Homo sapiens
gtcactttgggcaag

SEQ ID NO: 426314 - DNA, 15 bp, Homo sapiens
tgtcactttgggcaa

SEQ ID NO: 426315 - DNA, 15 bp, Homo sapiens
gtgtcactttgggca

SEQ ID NO: 426316 - DNA, 15 bp, Homo sapiens
tgtgtcactttgggc

SEQ ID NO: 426317 - DNA, 15 bp, Homo sapiens
gtgtgtcactttggg

SEQ ID NO: 426318 - DNA, 15 bp, Homo sapiens
agtgtgtcactttgg

SEQ ID NO: 426319 - DNA, 15 bp, Homo sapiens
tagtgtgtcactttg

SEQ ID NO: 426320 - DNA, 15 bp, Homo sapiens
ttagtgtgtcacttt

SEQ ID NO: 426321 - DNA, 15 bp, Homo sapiens
attagtgtgtcactt

SEQ ID NO: 426322 - DNA, 15 bp, Homo sapiens
tattagtgtgtcact

SEQ ID NO: 426323 - DNA, 15 bp, Homo sapiens
atattagtgtgtcac

SEQ ID NO: 426324 - DNA, 15 bp, Homo sapiens
tatattagtgtgtca

SEQ ID NO: 426325 - DNA, 15 bp, Homo sapiens
ttatattagtgtgtc

SEQ ID NO: 426326 - DNA, 15 bp, Homo sapiens
tttatattagtgtgt

SEQ ID NO: 426327 - DNA, 15 bp, Homo sapiens
ctttatattagtgtg

SEQ ID NO: 426328 - DNA, 15 bp, Homo sapiens
cctttatattagtgt

SEQ ID NO: 426329 - DNA, 15 bp, Homo sapiens
ccctttatattagtg

SEQ ID NO: 426330 - DNA, 15 bp, Homo sapiens
accctttatattagt

SEQ ID NO: 426331 - DNA, 15 bp, Homo sapiens
caccctttatattag

SEQ ID NO: 426332 - DNA, 15 bp, Homo sapiens
tcaccctttatatta

SEQ ID NO: 426333 - DNA, 15 bp, Homo sapiens
ttcaccctttatatt

SEQ ID NO: 426334 - DNA, 15 bp, Homo sapiens
cttcaccctttatat

SEQ ID NO: 426335 - DNA, 15 bp, Homo sapiens
acttcaccctttata

SEQ ID NO: 426336 - DNA, 15 bp, Homo sapiens
gacttcaccctttat

SEQ ID NO: 426337 - DNA, 15 bp, Homo sapiens
ggacttcacccttta

SEQ ID NO: 426338 - DNA, 15 bp, Homo sapiens
tggacttcacccttt

SEQ ID NO: 426339 - DNA, 15 bp, Homo sapiens
gtggacttcaccctt

SEQ ID NO: 426340 - DNA, 15 bp, Homo sapiens
tgtggacttcaccct

SEQ ID NO: 426341 - DNA, 15 bp, Homo sapiens
atgtggacttcaccc

SEQ ID NO: 426342 - DNA, 15 bp, Homo sapiens
catgtggacttcacc

SEQ ID NO: 426343 - DNA, 15 bp, Homo sapiens
acatgtggacttcac

SEQ ID NO: 426344 - DNA, 15 bp, Homo sapiens
cacatgtggacttca

SEQ ID NO: 426345 - DNA, 15 bp, Homo sapiens
tcacatgtggacttc

SEQ ID NO: 426346 - DNA, 15 bp, Homo sapiens
ctcacatgtggactt

SEQ ID NO: 426347 - DNA, 15 bp, Homo sapiens
gctcacatgtggact

SEQ ID NO: 426348 - DNA, 15 bp, Homo sapiens
ggctcacatgtggac

SEQ ID NO: 426349 - DNA, 15 bp, Homo sapiens
gggctcacatgtgga

SEQ ID NO: 426350 - DNA, 15 bp, Homo sapiens
ggggctcacatgtgg

SEQ ID NO: 426351 - DNA, 15 bp, Homo sapiens
tggggctcacatgtg

SEQ ID NO: 426352 - DNA, 15 bp, Homo sapiens
atggggctcacatgt

SEQ ID NO: 426353 - DNA, 15 bp, Homo sapiens
catggggctcacatg

SEQ ID NO: 426354 - DNA, 15 bp, Homo sapiens
gcatggggctcacat

SEQ ID NO: 426355 - DNA, 15 bp, Homo sapiens
agcatggggctcaca

SEQ ID NO: 426356 - DNA, 15 bp, Homo sapiens
gagcatggggctcac

SEQ ID NO: 426357 - DNA, 15 bp, Homo sapiens
agagcatggggctca

SEQ ID NO: 426358 - DNA, 15 bp, Homo sapiens
aagagcatggggctc

SEQ ID NO: 426359 - DNA, 15 bp, Homo sapiens
taagagcatggggct

SEQ ID NO: 426360 - DNA, 15 bp, Homo sapiens
ttaagagcatggggc

SEQ ID NO: 426361 - DNA, 15 bp, Homo sapiens
gttaagagcatgggg

SEQ ID NO: 426362 - DNA, 15 bp, Homo sapiens
tgttaagagcatggg

SEQ ID NO: 426363 - DNA, 15 bp, Homo sapiens
gtgttaagagcatgg

SEQ ID NO: 426364 - DNA, 15 bp, Homo sapiens
agtgttaagagcatg

SEQ ID NO: 426365 - DNA, 15 bp, Homo sapiens
tagtgttaagagcat

SEQ ID NO: 426366 - DNA, 15 bp, Homo sapiens
gtagtgttaagagca

SEQ ID NO: 426367 - DNA, 15 bp, Homo sapiens
cgtagtgttaagagc

SEQ ID NO: 426368 - DNA, 15 bp, Homo sapiens
gcgtagtgttaagag

SEQ ID NO: 426369 - DNA, 15 bp, Homo sapiens
tgcgtagtgttaaga

SEQ ID NO: 426370 - DNA, 15 bp, Homo sapiens
atgcgtagtgttaag

SEQ ID NO: 426371 - DNA, 15 bp, Homo sapiens
gatgcgtagtgttaa

SEQ ID NO: 426372 - DNA, 15 bp, Homo sapiens
ggatgcgtagtgtta

SEQ ID NO: 426373 - DNA, 15 bp, Homo sapiens
aggatgcgtagtgtt

SEQ ID NO: 426374 - DNA, 15 bp, Homo sapiens
taggatgcgtagtgt

SEQ ID NO: 426375 - DNA, 15 bp, Homo sapiens
gtaggatgcgtagtg

SEQ ID NO: 426376 - DNA, 15 bp, Homo sapiens
ggtaggatgcgtagt

SEQ ID NO: 426377 - DNA, 15 bp, Homo sapiens
aggtaggatgcgtag

SEQ ID NO: 426378 - DNA, 15 bp, Homo sapiens
gaggtaggatgcgta

SEQ ID NO: 426379 - DNA, 15 bp, Homo sapiens
agaggtaggatgcgt

SEQ ID NO: 426380 - DNA, 15 bp, Homo sapiens
gagaggtaggatgcg

SEQ ID NO: 426381 - DNA, 15 bp, Homo sapiens
tgagaggtaggatgc

SEQ ID NO: 426382 - DNA, 15 bp, Homo sapiens
ttgagaggtaggatg

SEQ ID NO: 426383 - DNA, 15 bp, Homo sapiens
cttgagaggtaggat

SEQ ID NO: 426384 - DNA, 15 bp, Homo sapiens
gcttgagaggtagga

SEQ ID NO: 426385 - DNA, 15 bp, Homo sapiens
agcttgagaggtagg

SEQ ID NO: 426386 - DNA, 15 bp, Homo sapiens
tagcttgagaggtag

SEQ ID NO: 426387 - DNA, 15 bp, Homo sapiens
ttagcttgagaggta

SEQ ID NO: 426388 - DNA, 15 bp, Homo sapiens
tttagcttgagaggt

SEQ ID NO: 426389 - DNA, 15 bp, Homo sapiens
ttttagcttgagagg

SEQ ID NO: 426390 - DNA, 15 bp, Homo sapiens
attttagcttgagag

SEQ ID NO: 426391 - DNA, 15 bp, Homo sapiens
tattttagcttgaga

SEQ ID NO: 426392 - DNA, 15 bp, Homo sapiens
gtattttagcttgag

SEQ ID NO: 426393 - DNA, 15 bp, Homo sapiens
tgtattttagcttga

SEQ ID NO: 426394 - DNA, 15 bp, Homo sapiens
ctgtattttagcttg

SEQ ID NO: 426395 - DNA, 15 bp, Homo sapiens
tctgtattttagctt

SEQ ID NO: 426396 - DNA, 15 bp, Homo sapiens
atctgtattttagct

SEQ ID NO: 426397 - DNA, 15 bp, Homo sapiens
catctgtattttagc

SEQ ID NO: 426398 - DNA, 15 bp, Homo sapiens
acatctgtattttag

SEQ ID NO: 426399 - DNA, 15 bp, Homo sapiens
aacatctgtatttta

SEQ ID NO: 426400 - DNA, 15 bp, Homo sapiens
aaacatctgtatttt

SEQ ID NO: 426401 - DNA, 15 bp, Homo sapiens
gaaacatctgtattt

SEQ ID NO: 426402 - DNA, 15 bp, Homo sapiens
agaaacatctgtatt

SEQ ID NO: 426403 - DNA, 15 bp, Homo sapiens
aagaaacatctgtat

SEQ ID NO: 426404 - DNA, 15 bp, Homo sapiens
aaagaaacatctgta

SEQ ID NO: 426405 - DNA, 15 bp, Homo sapiens
aaaagaaacatctgt

SEQ ID NO: 426406 - DNA, 15 bp, Homo sapiens
caaaagaaacatctg

SEQ ID NO: 426407 - DNA, 15 bp, Homo sapiens
acaaaagaaacatct

SEQ ID NO: 426408 - DNA, 15 bp, Homo sapiens
tacaaaagaaacatc

SEQ ID NO: 426409 - DNA, 15 bp, Homo sapiens
gtacaaaagaaacat

SEQ ID NO: 426410 - DNA, 15 bp, Homo sapiens
ggtacaaaagaaaca

SEQ ID NO: 426411 - DNA, 15 bp, Homo sapiens
tggtacaaaagaaac

SEQ ID NO: 426412 - DNA, 15 bp, Homo sapiens
atggtacaaaagaaa

SEQ ID NO: 426413 - DNA, 15 bp, Homo sapiens
aatggtacaaaagaa

SEQ ID NO: 426414 - DNA, 15 bp, Homo sapiens
taatggtacaaaaga

SEQ ID NO: 426415 - DNA, 15 bp, Homo sapiens
ataatggtacaaaag

SEQ ID NO: 426416 - DNA, 15 bp, Homo sapiens
aataatggtacaaaa

SEQ ID NO: 426417 - DNA, 15 bp, Homo sapiens
aaataatggtacaaa

SEQ ID NO: 426418 - DNA, 15 bp, Homo sapiens
aaaataatggtacaa

SEQ ID NO: 426419 - DNA, 15 bp, Homo sapiens
caaaataatggtaca

SEQ ID NO: 426420 - DNA, 15 bp, Homo sapiens
acaaaataatggtac

SEQ ID NO: 426421 - DNA, 15 bp, Homo sapiens
cacaaaataatggta

SEQ ID NO: 426422 - DNA, 15 bp, Homo sapiens
acacaaaataatggt

SEQ ID NO: 426423 - DNA, 15 bp, Homo sapiens
gacacaaaataatgg

SEQ ID NO: 426424 - DNA, 15 bp, Homo sapiens
tgacacaaaataatg

SEQ ID NO: 426425 - DNA, 15 bp, Homo sapiens
ctgacacaaaataat

SEQ ID NO: 426426 - DNA, 15 bp, Homo sapiens
gctgacacaaaataa

SEQ ID NO: 426427 - DNA, 15 bp, Homo sapiens
tgctgacacaaaata

SEQ ID NO: 426428 - DNA, 15 bp, Homo sapiens
ttgctgacacaaaat

SEQ ID NO: 426429 - DNA, 15 bp, Homo sapiens
gttgctgacacaaaa

SEQ ID NO: 426430 - DNA, 15 bp, Homo sapiens
agttgctgacacaaa

SEQ ID NO: 426431 - DNA, 15 bp, Homo sapiens
tagttgctgacacaa

SEQ ID NO: 426432 - DNA, 15 bp, Homo sapiens
gtagttgctgacaca

SEQ ID NO: 426433 - DNA, 15 bp, Homo sapiens
tgtagttgctgacac

SEQ ID NO: 426434 - DNA, 15 bp, Homo sapiens
ttgtagttgctgaca

SEQ ID NO: 426435 - DNA, 15 bp, Homo sapiens
tttgtagttgctgac

SEQ ID NO: 426436 - DNA, 15 bp, Homo sapiens
gtttgtagttgctga

SEQ ID NO: 426437 - DNA, 15 bp, Homo sapiens
tgtttgtagttgctg

SEQ ID NO: 426438 - DNA, 15 bp, Homo sapiens
ctgtttgtagttgct

SEQ ID NO: 426439 - DNA, 15 bp, Homo sapiens
cctgtttgtagttgc

SEQ ID NO: 426440 - DNA, 15 bp, Homo sapiens
tcctgtttgtagttg

SEQ ID NO: 426441 - DNA, 15 bp, Homo sapiens
ctcctgtttgtagtt

SEQ ID NO: 426442 - DNA, 15 bp, Homo sapiens
actcctgtttgtagt

SEQ ID NO: 426443 - DNA, 15 bp, Homo sapiens
cactcctgtttgtag

SEQ ID NO: 426444 - DNA, 15 bp, Homo sapiens
gcactcctgtttgta

SEQ ID NO: 426445 - DNA, 15 bp, Homo sapiens
tgcactcctgtttgt

SEQ ID NO: 426446 - DNA, 15 bp, Homo sapiens
atgcactcctgtttg

SEQ ID NO: 426447 - DNA, 15 bp, Homo sapiens
catgcactcctgttt

SEQ ID NO: 426448 - DNA, 15 bp, Homo sapiens
tcatgcactcctgtt

SEQ ID NO: 426449 - DNA, 15 bp, Homo sapiens
ttcatgcactcctgt

SEQ ID NO: 426450 - DNA, 15 bp, Homo sapiens
gttcatgcactcctg

SEQ ID NO: 426451 - DNA, 15 bp, Homo sapiens
ggttcatgcactcct

SEQ ID NO: 426452 - DNA, 15 bp, Homo sapiens
tggttcatgcactcc

SEQ ID NO: 426453 - DNA, 15 bp, Homo sapiens
ctggttcatgcactc

SEQ ID NO: 426454 - DNA, 15 bp, Homo sapiens
actggttcatgcact

SEQ ID NO: 426455 - DNA, 15 bp, Homo sapiens
aactggttcatgcac

SEQ ID NO: 426456 - DNA, 15 bp, Homo sapiens
caactggttcatgca

SEQ ID NO: 426457 - DNA, 15 bp, Homo sapiens
ccaactggttcatgc

SEQ ID NO: 426458 - DNA, 15 bp, Homo sapiens
gccaactggttcatg

SEQ ID NO: 426459 - DNA, 15 bp, Homo sapiens
ggccaactggttcat

SEQ ID NO: 426460 - DNA, 15 bp, Homo sapiens
tggccaactggttca

SEQ ID NO: 426461 - DNA, 15 bp, Homo sapiens
gtggccaactggttc

SEQ ID NO: 426462 - DNA, 15 bp, Homo sapiens
agtggccaactggtt

SEQ ID NO: 426463 - DNA, 15 bp, Homo sapiens
gagtggccaactggt

SEQ ID NO: 426464 - DNA, 15 bp, Homo sapiens
agagtggccaactgg

SEQ ID NO: 426465 - DNA, 15 bp, Homo sapiens
cagagtggccaactg

SEQ ID NO: 426466 - DNA, 15 bp, Homo sapiens
gcagagtggccaact

SEQ ID NO: 426467 - DNA, 15 bp, Homo sapiens
tgcagagtggccaac

SEQ ID NO: 426468 - DNA, 15 bp, Homo sapiens
atgcagagtggccaa

SEQ ID NO: 426469 - DNA, 15 bp, Homo sapiens
catgcagagtggcca

SEQ ID NO: 426470 - DNA, 15 bp, Homo sapiens
acatgcagagtggcc

SEQ ID NO: 426471 - DNA, 15 bp, Homo sapiens
aacatgcagagtggc

SEQ ID NO: 426472 - DNA, 15 bp, Homo sapiens
aaacatgcagagtgg

SEQ ID NO: 426473 - DNA, 15 bp, Homo sapiens
aaaacatgcagagtg

SEQ ID NO: 426474 - DNA, 15 bp, Homo sapiens
caaaacatgcagagt

SEQ ID NO: 426475 - DNA, 15 bp, Homo sapiens
ccaaaacatgcagag

SEQ ID NO: 426476 - DNA, 15 bp, Homo sapiens
gccaaaacatgcaga

SEQ ID NO: 426477 - DNA, 15 bp, Homo sapiens
cgccaaaacatgcag

SEQ ID NO: 426478 - DNA, 15 bp, Homo sapiens
acgccaaaacatgca

SEQ ID NO: 426479 - DNA, 15 bp, Homo sapiens
tacgccaaaacatgc

SEQ ID NO: 426480 - DNA, 15 bp, Homo sapiens
ttacgccaaaacatg

SEQ ID NO: 426481 - DNA, 15 bp, Homo sapiens
gttacgccaaaacat

SEQ ID NO: 426482 - DNA, 15 bp, Homo sapiens
agttacgccaaaaca

SEQ ID NO: 426483 - DNA, 15 bp, Homo sapiens
gagttacgccaaaac

SEQ ID NO: 426484 - DNA, 15 bp, Homo sapiens
ggagttacgccaaaa

SEQ ID NO: 426485 - DNA, 15 bp, Homo sapiens
aggagttacgccaaa

SEQ ID NO: 426486 - DNA, 15 bp, Homo sapiens
aaggagttacgccaa

SEQ ID NO: 426487 - DNA, 15 bp, Homo sapiens
caaggagttacgcca

SEQ ID NO: 426488 - DNA, 15 bp, Homo sapiens
gcaaggagttacgcc

SEQ ID NO: 426489 - DNA, 15 bp, Homo sapiens
ggcaaggagttacgc

SEQ ID NO: 426490 - DNA, 15 bp, Homo sapiens
aggcaaggagttacg

SEQ ID NO: 426491 - DNA, 15 bp, Homo sapiens
aaggcaaggagttac

SEQ ID NO: 426492 - DNA, 15 bp, Homo sapiens
aaaggcaaggagtta

SEQ ID NO: 426493 - DNA, 15 bp, Homo sapiens
gaaaggcaaggagtt

SEQ ID NO: 426494 - DNA, 15 bp, Homo sapiens
agaaaggcaaggagt

SEQ ID NO: 426495 - DNA, 15 bp, Homo sapiens
cagaaaggcaaggag

SEQ ID NO: 426496 - DNA, 15 bp, Homo sapiens
gcagaaaggcaagga

SEQ ID NO: 426497 - DNA, 15 bp, Homo sapiens
tgcagaaaggcaagg

SEQ ID NO: 426498 - DNA, 15 bp, Homo sapiens
atgcagaaaggcaag

SEQ ID NO: 426499 - DNA, 15 bp, Homo sapiens
catgcagaaaggcaa

SEQ ID NO: 426500 - DNA, 15 bp, Homo sapiens
tcatgcagaaaggca

SEQ ID NO: 426501 - DNA, 15 bp, Homo sapiens
ctcatgcagaaaggc

SEQ ID NO: 426502 - DNA, 15 bp, Homo sapiens
gctcatgcagaaagg

SEQ ID NO: 426503 - DNA, 15 bp, Homo sapiens
agctcatgcagaaag

SEQ ID NO: 426504 - DNA, 15 bp, Homo sapiens
gagctcatgcagaaa

SEQ ID NO: 426505 - DNA, 15 bp, Homo sapiens
ggagctcatgcagaa

SEQ ID NO: 426506 - DNA, 15 bp, Homo sapiens
aggagctcatgcaga

SEQ ID NO: 426507 - DNA, 15 bp, Homo sapiens
taggagctcatgcag

SEQ ID NO: 426508 - DNA, 15 bp, Homo sapiens
gtaggagctcatgca

SEQ ID NO: 426509 - DNA, 15 bp, Homo sapiens
tgtaggagctcatgc

SEQ ID NO: 426510 - DNA, 15 bp, Homo sapiens
ctgtaggagctcatg

SEQ ID NO: 426511 - DNA, 15 bp, Homo sapiens
actgtaggagctcat

SEQ ID NO: 426512 - DNA, 15 bp, Homo sapiens
gactgtaggagctca

SEQ ID NO: 426513 - DNA, 15 bp, Homo sapiens
agactgtaggagctc

SEQ ID NO: 426514 - DNA, 15 bp, Homo sapiens
tagactgtaggagct

SEQ ID NO: 426515 - DNA, 15 bp, Homo sapiens
atagactgtaggagc

SEQ ID NO: 426516 - DNA, 15 bp, Homo sapiens
aatagactgtaggag

SEQ ID NO: 426517 - DNA, 15 bp, Homo sapiens
taatagactgtagga

SEQ ID NO: 426518 - DNA, 15 bp, Homo sapiens
gtaatagactgtagg

SEQ ID NO: 426519 - DNA, 15 bp, Homo sapiens
ggtaatagactgtag

SEQ ID NO: 426520 - DNA, 15 bp, Homo sapiens
tggtaatagactgta

SEQ ID NO: 426521 - DNA, 15 bp, Homo sapiens
atggtaatagactgt

SEQ ID NO: 426522 - DNA, 15 bp, Homo sapiens
catggtaatagactg

SEQ ID NO: 426523 - DNA, 15 bp, Homo sapiens
acatggtaatagact

SEQ ID NO: 426524 - DNA, 15 bp, Homo sapiens
gacatggtaatagac

SEQ ID NO: 426525 - DNA, 15 bp, Homo sapiens
ggacatggtaataga

SEQ ID NO: 426526 - DNA, 15 bp, Homo sapiens
aggacatggtaatag

SEQ ID NO: 426527 - DNA, 15 bp, Homo sapiens
aaggacatggtaata

SEQ ID NO: 426528 - DNA, 15 bp, Homo sapiens
caaggacatggtaat

SEQ ID NO: 426529 - DNA, 15 bp, Homo sapiens
ccaaggacatggtaa

SEQ ID NO: 426530 - DNA, 15 bp, Homo sapiens
gccaaggacatggta

SEQ ID NO: 426531 - DNA, 15 bp, Homo sapiens
agccaaggacatggt

SEQ ID NO: 426532 - DNA, 15 bp, Homo sapiens
aagccaaggacatgg

SEQ ID NO: 426533 - DNA, 15 bp, Homo sapiens
aaagccaaggacatg

SEQ ID NO: 426534 - DNA, 15 bp, Homo sapiens
caaagccaaggacat

SEQ ID NO: 426535 - DNA, 15 bp, Homo sapiens
acaaagccaaggaca

SEQ ID NO: 426536 - DNA, 15 bp, Homo sapiens
tacaaagccaaggac

SEQ ID NO: 426537 - DNA, 15 bp, Homo sapiens
ttacaaagccaagga

SEQ ID NO: 426538 - DNA, 15 bp, Homo sapiens
attacaaagccaagg

SEQ ID NO: 426539 - DNA, 15 bp, Homo sapiens
aattacaaagccaag

SEQ ID NO: 426540 - DNA, 15 bp, Homo sapiens
caattacaaagccaa

SEQ ID NO: 426541 - DNA, 15 bp, Homo sapiens
tcaattacaaagcca

SEQ ID NO: 426542 - DNA, 15 bp, Homo sapiens
atcaattacaaagcc

SEQ ID NO: 426543 - DNA, 15 bp, Homo sapiens
catcaattacaaagc

SEQ ID NO: 426544 - DNA, 15 bp, Homo sapiens
ccatcaattacaaag

SEQ ID NO: 426545 - DNA, 15 bp, Homo sapiens
accatcaattacaaa

SEQ ID NO: 426546 - DNA, 15 bp, Homo sapiens
caccatcaattacaa

SEQ ID NO: 426547 - DNA, 15 bp, Homo sapiens
ccaccatcaattaca

SEQ ID NO: 426548 - DNA, 15 bp, Homo sapiens
gccaccatcaattac

SEQ ID NO: 426549 - DNA, 15 bp, Homo sapiens
agccaccatcaatta

SEQ ID NO: 426550 - DNA, 15 bp, Homo sapiens
tagccaccatcaatt

SEQ ID NO: 426551 - DNA, 15 bp, Homo sapiens
atagccaccatcaat

SEQ ID NO: 426552 - DNA, 15 bp, Homo sapiens
aatagccaccatcaa

SEQ ID NO: 426553 - DNA, 15 bp, Homo sapiens
taatagccaccatca

SEQ ID NO: 426554 - DNA, 15 bp, Homo sapiens
ataatagccaccatc

SEQ ID NO: 426555 - DNA, 15 bp, Homo sapiens
gataatagccaccat

SEQ ID NO: 426556 - DNA, 15 bp, Homo sapiens
agataatagccacca

SEQ ID NO: 426557 - DNA, 15 bp, Homo sapiens
cagataatagccacc

SEQ ID NO: 426558 - DNA, 15 bp, Homo sapiens
tcagataatagccac

SEQ ID NO: 426559 - DNA, 15 bp, Homo sapiens
ttcagataatagcca

SEQ ID NO: 426560 - DNA, 15 bp, Homo sapiens
attcagataatagcc

SEQ ID NO: 426561 - DNA, 15 bp, Homo sapiens
cattcagataatagc

SEQ ID NO: 426562 - DNA, 15 bp, Homo sapiens
tcattcagataatag

SEQ ID NO: 426563 - DNA, 15 bp, Homo sapiens
ttcattcagataata

SEQ ID NO: 426564 - DNA, 15 bp, Homo sapiens
gttcattcagataat

SEQ ID NO: 426565 - DNA, 15 bp, Homo sapiens
tgttcattcagataa

SEQ ID NO: 426566 - DNA, 15 bp, Homo sapiens
ctgttcattcagata

SEQ ID NO: 426567 - DNA, 15 bp, Homo sapiens
cctgttcattcagat

SEQ ID NO: 426568 - DNA, 15 bp, Homo sapiens
acctgttcattcaga

SEQ ID NO: 426569 - DNA, 15 bp, Homo sapiens
cacctgttcattcag

SEQ ID NO: 426570 - DNA, 15 bp, Homo sapiens
acacctgttcattca

SEQ ID NO: 426571 - DNA, 15 bp, Homo sapiens
cacacctgttcattc

SEQ ID NO: 426572 - DNA, 15 bp, Homo sapiens
gcacacctgttcatt

SEQ ID NO: 426573 - DNA, 15 bp, Homo sapiens
tgcacacctgttcat

SEQ ID NO: 426574 - DNA, 15 bp, Homo sapiens
ttgcacacctgttca

SEQ ID NO: 426575 - DNA, 15 bp, Homo sapiens
gttgcacacctgttc

SEQ ID NO: 426576 - DNA, 15 bp, Homo sapiens
agttgcacacctgtt

SEQ ID NO: 426577 - DNA, 15 bp, Homo sapiens
cagttgcacacctgt

SEQ ID NO: 426578 - DNA, 15 bp, Homo sapiens
gcagttgcacacctg

SEQ ID NO: 426579 - DNA, 15 bp, Homo sapiens
agcagttgcacacct

SEQ ID NO: 426580 - DNA, 15 bp, Homo sapiens
aagcagttgcacacc

SEQ ID NO: 426581 - DNA, 15 bp, Homo sapiens
taagcagttgcacac

SEQ ID NO: 426582 - DNA, 15 bp, Homo sapiens
ataagcagttgcaca

SEQ ID NO: 426583 - DNA, 15 bp, Homo sapiens
tataagcagttgcac

SEQ ID NO: 426584 - DNA, 15 bp, Homo sapiens
atataagcagttgca

SEQ ID NO: 426585 - DNA, 15 bp, Homo sapiens
aatataagcagttgc

SEQ ID NO: 426586 - DNA, 15 bp, Homo sapiens
gaatataagcagttg

SEQ ID NO: 426587 - DNA, 15 bp, Homo sapiens
agaatataagcagtt

SEQ ID NO: 426588 - DNA, 15 bp, Homo sapiens
gagaatataagcagt

SEQ ID NO: 426589 - DNA, 15 bp, Homo sapiens
agagaatataagcag

SEQ ID NO: 426590 - DNA, 15 bp, Homo sapiens
aagagaatataagca

SEQ ID NO: 426591 - DNA, 15 bp, Homo sapiens
caagagaatataagc

SEQ ID NO: 426592 - DNA, 15 bp, Homo sapiens
ccaagagaatataag

SEQ ID NO: 426593 - DNA, 15 bp, Homo sapiens
gccaagagaatataa

SEQ ID NO: 426594 - DNA, 15 bp, Homo sapiens
agccaagagaatata

SEQ ID NO: 426595 - DNA, 15 bp, Homo sapiens
cagccaagagaatat

SEQ ID NO: 426596 - DNA, 15 bp, Homo sapiens
tcagccaagagaata

SEQ ID NO: 426597 - DNA, 15 bp, Homo sapiens
ttcagccaagagaat

SEQ ID NO: 426598 - DNA, 15 bp, Homo sapiens
cttcagccaagagaa

SEQ ID NO: 426599 - DNA, 15 bp, Homo sapiens
tcttcagccaagaga

SEQ ID NO: 426600 - DNA, 15 bp, Homo sapiens
ctcttcagccaagag

SEQ ID NO: 426601 - DNA, 15 bp, Homo sapiens
cctcttcagccaaga

SEQ ID NO: 426602 - DNA, 15 bp, Homo sapiens
tcctcttcagccaag

SEQ ID NO: 426603 - DNA, 15 bp, Homo sapiens
ttcctcttcagccaa

SEQ ID NO: 426604 - DNA, 15 bp, Homo sapiens
cttcctcttcagcca

SEQ ID NO: 426605 - DNA, 15 bp, Homo sapiens
gcttcctcttcagcc

SEQ ID NO: 426606 - DNA, 15 bp, Homo sapiens
tgcttcctcttcagc

SEQ ID NO: 426607 - DNA, 15 bp, Homo sapiens
ttgcttcctcttcag

SEQ ID NO: 426608 - DNA, 15 bp, Homo sapiens
gttgcttcctcttca

SEQ ID NO: 426609 - DNA, 15 bp, Homo sapiens
tgttgcttcctcttc

SEQ ID NO: 426610 - DNA, 15 bp, Homo sapiens
ttgttgcttcctctt

SEQ ID NO: 426611 - DNA, 15 bp, Homo sapiens
gttgttgcttcctct

SEQ ID NO: 426612 - DNA, 15 bp, Homo sapiens
ggttgttgcttcctc

SEQ ID NO: 426613 - DNA, 15 bp, Homo sapiens
tggttgttgcttcct

SEQ ID NO: 426614 - DNA, 15 bp, Homo sapiens
atggttgttgcttcc

SEQ ID NO: 426615 - DNA, 15 bp, Homo sapiens
aatggttgttgcttc

SEQ ID NO: 426616 - DNA, 15 bp, Homo sapiens
caatggttgttgctt

SEQ ID NO: 426617 - DNA, 15 bp, Homo sapiens
gcaatggttgttgct

SEQ ID NO: 426618 - DNA, 15 bp, Homo sapiens
agcaatggttgttgc

SEQ ID NO: 426619 - DNA, 15 bp, Homo sapiens
cagcaatggttgttg

SEQ ID NO: 426620 - DNA, 15 bp, Homo sapiens
tcagcaatggttgtt

SEQ ID NO: 426621 - DNA, 15 bp, Homo sapiens
ttcagcaatggttgt

SEQ ID NO: 426622 - DNA, 15 bp, Homo sapiens
cttcagcaatggttg

SEQ ID NO: 426623 - DNA, 15 bp, Homo sapiens
gcttcagcaatggtt

SEQ ID NO: 426624 - DNA, 15 bp, Homo sapiens
tgcttcagcaatggt

SEQ ID NO: 426625 - DNA, 15 bp, Homo sapiens
ctgcttcagcaatgg

SEQ ID NO: 426626 - DNA, 15 bp, Homo sapiens
tctgcttcagcaatg

SEQ ID NO: 426627 - DNA, 15 bp, Homo sapiens
ttctgcttcagcaat

SEQ ID NO: 426628 - DNA, 15 bp, Homo sapiens
tttctgcttcagcaa

SEQ ID NO: 426629 - DNA, 15 bp, Homo sapiens
ttttctgcttcagca

SEQ ID NO: 426630 - DNA, 15 bp, Homo sapiens
tttttctgcttcagc

SEQ ID NO: 426631 - DNA, 15 bp, Homo sapiens
atttttctgcttcag

SEQ ID NO: 426632 - DNA, 15 bp, Homo sapiens
aatttttctgcttca

SEQ ID NO: 426633 - DNA, 15 bp, Homo sapiens
taatttttctgcttc

SEQ ID NO: 426634 - DNA, 15 bp, Homo sapiens
ataatttttctgctt

SEQ ID NO: 426635 - DNA, 15 bp, Homo sapiens
aataatttttctgct

SEQ ID NO: 426636 - DNA, 15 bp, Homo sapiens
aaataatttttctgc

SEQ ID NO: 426637 - DNA, 15 bp, Homo sapiens
taaataatttttctg

SEQ ID NO: 426638 - DNA, 15 bp, Homo sapiens
ttaaataatttttct

SEQ ID NO: 426639 - DNA, 15 bp, Homo sapiens
cttaaataatttttc

SEQ ID NO: 426640 - DNA, 15 bp, Homo sapiens
gcttaaataattttt

SEQ ID NO: 426641 - DNA, 15 bp, Homo sapiens
tgcttaaataatttt

SEQ ID NO: 426642 - DNA, 15 bp, Homo sapiens
ctgcttaaataattt

SEQ ID NO: 426643 - DNA, 15 bp, Homo sapiens
cctgcttaaataatt

SEQ ID NO: 426644 - DNA, 15 bp, Homo sapiens
gcctgcttaaataat

SEQ ID NO: 426645 - DNA, 15 bp, Homo sapiens
ggcctgcttaaataa

SEQ ID NO: 426646 - DNA, 15 bp, Homo sapiens
gggcctgcttaaata

SEQ ID NO: 426647 - DNA, 15 bp, Homo sapiens
agggcctgcttaaat

SEQ ID NO: 426648 - DNA, 15 bp, Homo sapiens
cagggcctgcttaaa

SEQ ID NO: 426649 - DNA, 15 bp, Homo sapiens
tcagggcctgcttaa

SEQ ID NO: 426650 - DNA, 15 bp, Homo sapiens
ttcagggcctgctta

SEQ ID NO: 426651 - DNA, 15 bp, Homo sapiens
cttcagggcctgctt

SEQ ID NO: 426652 - DNA, 15 bp, Homo sapiens
ccttcagggcctgct

SEQ ID NO: 426653 - DNA, 15 bp, Homo sapiens
gccttcagggcctgc

SEQ ID NO: 426654 - DNA, 15 bp, Homo sapiens
agccttcagggcctg

SEQ ID NO: 426655 - DNA, 15 bp, Homo sapiens
cagccttcagggcct

SEQ ID NO: 426656 - DNA, 15 bp, Homo sapiens
ccagccttcagggcc

SEQ ID NO: 426657 - DNA, 15 bp, Homo sapiens
tccagccttcagggc

SEQ ID NO: 426658 - DNA, 15 bp, Homo sapiens
ctccagccttcaggg

SEQ ID NO: 426659 - DNA, 15 bp, Homo sapiens
tctccagccttcagg

SEQ ID NO: 426660 - DNA, 15 bp, Homo sapiens
atctccagccttcag

SEQ ID NO: 426661 - DNA, 15 bp, Homo sapiens
catctccagccttca

SEQ ID NO: 426662 - DNA, 15 bp, Homo sapiens
ccatctccagccttc

SEQ ID NO: 426663 - DNA, 15 bp, Homo sapiens
gccatctccagcctt

SEQ ID NO: 426664 - DNA, 15 bp, Homo sapiens
agccatctccagcct

SEQ ID NO: 426665 - DNA, 15 bp, Homo sapiens
cagccatctccagcc

SEQ ID NO: 426666 - DNA, 15 bp, Homo sapiens
acagccatctccagc

SEQ ID NO: 426667 - DNA, 15 bp, Homo sapiens
aacagccatctccag

SEQ ID NO: 426668 - DNA, 15 bp, Homo sapiens
taacagccatctcca

SEQ ID NO: 426669 - DNA, 15 bp, Homo sapiens
gtaacagccatctcc

SEQ ID NO: 426670 - DNA, 15 bp, Homo sapiens
ggtaacagccatctc

SEQ ID NO: 426671 - DNA, 15 bp, Homo sapiens
cggtaacagccatct

SEQ ID NO: 426672 - DNA, 15 bp, Homo sapiens
tcggtaacagccatc

SEQ ID NO: 426673 - DNA, 15 bp, Homo sapiens
gtcggtaacagccat

SEQ ID NO: 426674 - DNA, 15 bp, Homo sapiens
cgtcggtaacagcca

SEQ ID NO: 426675 - DNA, 15 bp, Homo sapiens
gcgtcggtaacagcc

SEQ ID NO: 426676 - DNA, 15 bp, Homo sapiens
agcgtcggtaacagc

SEQ ID NO: 426677 - DNA, 15 bp, Homo sapiens
gagcgtcggtaacag

SEQ ID NO: 426678 - DNA, 15 bp, Homo sapiens
agagcgtcggtaaca

SEQ ID NO: 426679 - DNA, 15 bp, Homo sapiens
gagagcgtcggtaac

SEQ ID NO: 426680 - DNA, 15 bp, Homo sapiens
tgagagcgtcggtaa

SEQ ID NO: 426681 - DNA, 15 bp, Homo sapiens
ctgagagcgtcggta

SEQ ID NO: 426682 - DNA, 15 bp, Homo sapiens
gctgagagcgtcggt

SEQ ID NO: 426683 - DNA, 15 bp, Homo sapiens
tgctgagagcgtcgg

SEQ ID NO: 426684 - DNA, 15 bp, Homo sapiens
ctgctgagagcgtcg

SEQ ID NO: 426685 - DNA, 15 bp, Homo sapiens
gctgctgagagcgtc

SEQ ID NO: 426686 - DNA, 15 bp, Homo sapiens
agctgctgagagcgt

SEQ ID NO: 426687 - DNA, 15 bp, Homo sapiens
tagctgctgagagcg

SEQ ID NO: 426688 - DNA, 15 bp, Homo sapiens
gtagctgctgagagc

SEQ ID NO: 426689 - DNA, 15 bp, Homo sapiens
tgtagctgctgagag

SEQ ID NO: 426690 - DNA, 15 bp, Homo sapiens
ttgtagctgctgaga

SEQ ID NO: 426691 - DNA, 15 bp, Homo sapiens
gttgtagctgctgag

SEQ ID NO: 426692 - DNA, 15 bp, Homo sapiens
tgttgtagctgctga

SEQ ID NO: 426693 - DNA, 15 bp, Homo sapiens
atgttgtagctgctg

SEQ ID NO: 426694 - DNA, 15 bp, Homo sapiens
gatgttgtagctgct

SEQ ID NO: 426695 - DNA, 15 bp, Homo sapiens
tgatgttgtagctgc

SEQ ID NO: 426696 - DNA, 15 bp, Homo sapiens
atgatgttgtagctg

SEQ ID NO: 426697 - DNA, 15 bp, Homo sapiens
catgatgttgtagct

SEQ ID NO: 426698 - DNA, 15 bp, Homo sapiens
ccatgatgttgtagc

SEQ ID NO: 426699 - DNA, 15 bp, Homo sapiens
tccatgatgttgtag

SEQ ID NO: 426700 - DNA, 15 bp, Homo sapiens
atccatgatgttgta

SEQ ID NO: 426701 - DNA, 15 bp, Homo sapiens
gatccatgatgttgt

SEQ ID NO: 426702 - DNA, 15 bp, Homo sapiens
ggatccatgatgttg

SEQ ID NO: 426703 - DNA, 15 bp, Homo sapiens
gggatccatgatgtt

SEQ ID NO: 426704 - DNA, 15 bp, Homo sapiens
tgggatccatgatgt

SEQ ID NO: 426705 - DNA, 15 bp, Homo sapiens
ctgggatccatgatg

SEQ ID NO: 426706 - DNA, 15 bp, Homo sapiens
actgggatccatgat

SEQ ID NO: 426707 - DNA, 15 bp, Homo sapiens
tactgggatccatga

SEQ ID NO: 426708 - DNA, 15 bp, Homo sapiens
atactgggatccatg

SEQ ID NO: 426709 - DNA, 15 bp, Homo sapiens
catactgggatccat

SEQ ID NO: 426710 - DNA, 15 bp, Homo sapiens
tcatactgggatcca

SEQ ID NO: 426711 - DNA, 15 bp, Homo sapiens
ttcatactgggatcc

SEQ ID NO: 426712 - DNA, 15 bp, Homo sapiens
cttcatactgggatc

SEQ ID NO: 426713 - DNA, 15 bp, Homo sapiens
gcttcatactgggat

SEQ ID NO: 426714 - DNA, 15 bp, Homo sapiens
ggcttcatactggga

SEQ ID NO: 426715 - DNA, 15 bp, Homo sapiens
gggcttcatactggg

SEQ ID NO: 426716 - DNA, 15 bp, Homo sapiens
tgggcttcatactgg

SEQ ID NO: 426717 - DNA, 15 bp, Homo sapiens
ttgggcttcatactg

SEQ ID NO: 426718 - DNA, 15 bp, Homo sapiens
gttgggcttcatact

SEQ ID NO: 426719 - DNA, 15 bp, Homo sapiens
tgttgggcttcatac

SEQ ID NO: 426720 - DNA, 15 bp, Homo sapiens
atgttgggcttcata

SEQ ID NO: 426721 - DNA, 15 bp, Homo sapiens
tatgttgggcttcat

SEQ ID NO: 426722 - DNA, 15 bp, Homo sapiens
ctatgttgggcttca

SEQ ID NO: 426723 - DNA, 15 bp, Homo sapiens
actatgttgggcttc

SEQ ID NO: 426724 - DNA, 15 bp, Homo sapiens
tactatgttgggctt

SEQ ID NO: 426725 - DNA, 15 bp, Homo sapiens
ttactatgttgggct

SEQ ID NO: 426726 - DNA, 15 bp, Homo sapiens
cttactatgttgggc

SEQ ID NO: 426727 - DNA, 15 bp, Homo sapiens
ccttactatgttggg

SEQ ID NO: 426728 - DNA, 15 bp, Homo sapiens
accttactatgttgg

SEQ ID NO: 426729 - DNA, 15 bp, Homo sapiens
aaccttactatgttg

SEQ ID NO: 426730 - DNA, 15 bp, Homo sapiens
aaaccttactatgtt

SEQ ID NO: 426731 - DNA, 15 bp, Homo sapiens
gaaaccttactatgt

SEQ ID NO: 426732 - DNA, 15 bp, Homo sapiens
ggaaaccttactatg

SEQ ID NO: 426733 - DNA, 15 bp, Homo sapiens
aggaaaccttactat

SEQ ID NO: 426734 - DNA, 15 bp, Homo sapiens
caggaaaccttacta

SEQ ID NO: 426735 - DNA, 15 bp, Homo sapiens
gcaggaaaccttact

SEQ ID NO: 426736 - DNA, 15 bp, Homo sapiens
tgcaggaaaccttac

SEQ ID NO: 426737 - DNA, 15 bp, Homo sapiens
ctgcaggaaacctta

SEQ ID NO: 426738 - DNA, 15 bp, Homo sapiens
cctgcaggaaacctt

SEQ ID NO: 426739 - DNA, 15 bp, Homo sapiens
acctgcaggaaacct

SEQ ID NO: 426740 - DNA, 15 bp, Homo sapiens
aacctgcaggaaacc

SEQ ID NO: 426741 - DNA, 15 bp, Homo sapiens
caacctgcaggaaac

SEQ ID NO: 426742 - DNA, 15 bp, Homo sapiens
tcaacctgcaggaaa

SEQ ID NO: 426743 - DNA, 15 bp, Homo sapiens
atcaacctgcaggaa

SEQ ID NO: 426744 - DNA, 15 bp, Homo sapiens
catcaacctgcagga

SEQ ID NO: 426745 - DNA, 15 bp, Homo sapiens
gcatcaacctgcagg

SEQ ID NO: 426746 - DNA, 15 bp, Homo sapiens
tgcatcaacctgcag

SEQ ID NO: 426747 - DNA, 15 bp, Homo sapiens
atgcatcaacctgca

SEQ ID NO: 426748 - DNA, 15 bp, Homo sapiens
aatgcatcaacctgc

SEQ ID NO: 426749 - DNA, 15 bp, Homo sapiens
caatgcatcaacctg

SEQ ID NO: 426750 - DNA, 15 bp, Homo sapiens
ccaatgcatcaacct

SEQ ID NO: 426751 - DNA, 15 bp, Homo sapiens
cccaatgcatcaacc

SEQ ID NO: 426752 - DNA, 15 bp, Homo sapiens
ccccaatgcatcaac

SEQ ID NO: 426753 - DNA, 15 bp, Homo sapiens
cccccaatgcatcaa

SEQ ID NO: 426754 - DNA, 15 bp, Homo sapiens
tcccccaatgcatca

SEQ ID NO: 426755 - DNA, 15 bp, Homo sapiens
atcccccaatgcatc

SEQ ID NO: 426756 - DNA, 15 bp, Homo sapiens
gatcccccaatgcat

SEQ ID NO: 426757 - DNA, 15 bp, Homo sapiens
tgatcccccaatgca

SEQ ID NO: 426758 - DNA, 15 bp, Homo sapiens
ctgatcccccaatgc

SEQ ID NO: 426759 - DNA, 15 bp, Homo sapiens
tctgatcccccaatg

SEQ ID NO: 426760 - DNA, 15 bp, Homo sapiens
ttctgatcccccaat

SEQ ID NO: 426761 - DNA, 15 bp, Homo sapiens
attctgatcccccaa

SEQ ID NO: 426762 - DNA, 15 bp, Homo sapiens
aattctgatccccca

SEQ ID NO: 426763 - DNA, 15 bp, Homo sapiens
caattctgatccccc

SEQ ID NO: 426764 - DNA, 15 bp, Homo sapiens
acaattctgatcccc

SEQ ID NO: 426765 - DNA, 15 bp, Homo sapiens
tacaattctgatccc

SEQ ID NO: 426766 - DNA, 15 bp, Homo sapiens
ttacaattctgatcc

SEQ ID NO: 426767 - DNA, 15 bp, Homo sapiens
tttacaattctgatc

SEQ ID NO: 426768 - DNA, 15 bp, Homo sapiens
ttttacaattctgat

SEQ ID NO: 426769 - DNA, 15 bp, Homo sapiens
tttttacaattctga

SEQ ID NO: 426770 - DNA, 15 bp, Homo sapiens
atttttacaattctg

SEQ ID NO: 426771 - DNA, 15 bp, Homo sapiens
aatttttacaattct

SEQ ID NO: 426772 - DNA, 15 bp, Homo sapiens
taatttttacaattc

SEQ ID NO: 426773 - DNA, 15 bp, Homo sapiens
ataatttttacaatt

SEQ ID NO: 426774 - DNA, 15 bp, Homo sapiens
aataatttttacaat

SEQ ID NO: 426775 - DNA, 15 bp, Homo sapiens
taataatttttacaa

SEQ ID NO: 426776 - DNA, 15 bp, Homo sapiens
ttaataatttttaca

SEQ ID NO: 426777 - DNA, 15 bp, Homo sapiens
attaataatttttac

SEQ ID NO: 426778 - DNA, 15 bp, Homo sapiens
gattaataattttta

SEQ ID NO: 426779 - DNA, 15 bp, Homo sapiens
tgattaataattttt

SEQ ID NO: 426780 - DNA, 15 bp, Homo sapiens
ctgattaataatttt

SEQ ID NO: 426781 - DNA, 15 bp, Homo sapiens
tctgattaataattt

SEQ ID NO: 426782 - DNA, 15 bp, Homo sapiens
ctctgattaataatt

SEQ ID NO: 426783 - DNA, 15 bp, Homo sapiens
gctctgattaataat

SEQ ID NO: 426784 - DNA, 15 bp, Homo sapiens
tgctctgattaataa

SEQ ID NO: 426785 - DNA, 15 bp, Homo sapiens
ttgctctgattaata

SEQ ID NO: 426786 - DNA, 15 bp, Homo sapiens
tttgctctgattaat

SEQ ID NO: 426787 - DNA, 15 bp, Homo sapiens
atttgctctgattaa

SEQ ID NO: 426788 - DNA, 15 bp, Homo sapiens
aatttgctctgatta

SEQ ID NO: 426789 - DNA, 15 bp, Homo sapiens
aaatttgctctgatt

SEQ ID NO: 426790 - DNA, 15 bp, Homo sapiens
aaaatttgctctgat

SEQ ID NO: 426791 - DNA, 15 bp, Homo sapiens
aaaaatttgctctga

SEQ ID NO: 426792 - DNA, 15 bp, Homo sapiens
taaaaatttgctctg

SEQ ID NO: 426793 - DNA, 15 bp, Homo sapiens
ctaaaaatttgctct

SEQ ID NO: 426794 - DNA, 15 bp, Homo sapiens
actaaaaatttgctc

SEQ ID NO: 426795 - DNA, 15 bp, Homo sapiens
gactaaaaatttgct

SEQ ID NO: 426796 - DNA, 15 bp, Homo sapiens
ggactaaaaatttgc

SEQ ID NO: 426797 - DNA, 15 bp, Homo sapiens
tggactaaaaatttg

SEQ ID NO: 426798 - DNA, 15 bp, Homo sapiens
ctggactaaaaattt

SEQ ID NO: 426799 - DNA, 15 bp, Homo sapiens
actggactaaaaatt

SEQ ID NO: 426800 - DNA, 15 bp, Homo sapiens
aactggactaaaaat

SEQ ID NO: 426801 - DNA, 15 bp, Homo sapiens
gaactggactaaaaa

SEQ ID NO: 426802 - DNA, 15 bp, Homo sapiens
tgaactggactaaaa

SEQ ID NO: 426803 - DNA, 15 bp, Homo sapiens
ttgaactggactaaa

SEQ ID NO: 426804 - DNA, 15 bp, Homo sapiens
tttgaactggactaa

SEQ ID NO: 426805 - DNA, 15 bp, Homo sapiens
ttttgaactggacta

SEQ ID NO: 426806 - DNA, 15 bp, Homo sapiens
attttgaactggact

SEQ ID NO: 426807 - DNA, 15 bp, Homo sapiens
tattttgaactggac

SEQ ID NO: 426808 - DNA, 15 bp, Homo sapiens
atattttgaactgga

SEQ ID NO: 426809 - DNA, 15 bp, Homo sapiens
catattttgaactgg

SEQ ID NO: 426810 - DNA, 15 bp, Homo sapiens
tcatattttgaactg

SEQ ID NO: 426811 - DNA, 15 bp, Homo sapiens
atcatattttgaact

SEQ ID NO: 426812 - DNA, 15 bp, Homo sapiens
aatcatattttgaac

SEQ ID NO: 426813 - DNA, 15 bp, Homo sapiens
gaatcatattttgaa

SEQ ID NO: 426814 - DNA, 15 bp, Homo sapiens
agaatcatattttga

SEQ ID NO: 426815 - DNA, 15 bp, Homo sapiens
gagaatcatattttg

SEQ ID NO: 426816 - DNA, 15 bp, Homo sapiens
ggagaatcatatttt

SEQ ID NO: 426817 - DNA, 15 bp, Homo sapiens
aggagaatcatattt

SEQ ID NO: 426818 - DNA, 15 bp, Homo sapiens
taggagaatcatatt

SEQ ID NO: 426819 - DNA, 15 bp, Homo sapiens
ctaggagaatcatat

SEQ ID NO: 426820 - DNA, 15 bp, Homo sapiens
tctaggagaatcata

SEQ ID NO: 426821 - DNA, 15 bp, Homo sapiens
gtctaggagaatcat

SEQ ID NO: 426822 - DNA, 15 bp, Homo sapiens
tgtctaggagaatca

SEQ ID NO: 426823 - DNA, 15 bp, Homo sapiens
ttgtctaggagaatc

SEQ ID NO: 426824 - DNA, 15 bp, Homo sapiens
cttgtctaggagaat

SEQ ID NO: 426825 - DNA, 15 bp, Homo sapiens
tcttgtctaggagaa

SEQ ID NO: 426826 - DNA, 15 bp, Homo sapiens
ctcttgtctaggaga

SEQ ID NO: 426827 - DNA, 15 bp, Homo sapiens
tctcttgtctaggag

SEQ ID NO: 426828 - DNA, 15 bp, Homo sapiens
ttctcttgtctagga

SEQ ID NO: 426829 - DNA, 15 bp, Homo sapiens
tttctcttgtctagg

SEQ ID NO: 426830 - DNA, 15 bp, Homo sapiens
ttttctcttgtctag

SEQ ID NO: 426831 - DNA, 15 bp, Homo sapiens
attttctcttgtcta

SEQ ID NO: 426832 - DNA, 15 bp, Homo sapiens
tattttctcttgtct

SEQ ID NO: 426833 - DNA, 15 bp, Homo sapiens
atattttctcttgtc

SEQ ID NO: 426834 - DNA, 15 bp, Homo sapiens
aatattttctcttgt

SEQ ID NO: 426835 - DNA, 15 bp, Homo sapiens
caatattttctcttg

SEQ ID NO: 426836 - DNA, 15 bp, Homo sapiens
ccaatattttctctt

SEQ ID NO: 426837 - DNA, 15 bp, Homo sapiens
gccaatattttctct

SEQ ID NO: 426838 - DNA, 15 bp, Homo sapiens
agccaatattttctc

SEQ ID NO: 426839 - DNA, 15 bp, Homo sapiens
aagccaatattttct

SEQ ID NO: 426840 - DNA, 15 bp, Homo sapiens
aaagccaatattttc

SEQ ID NO: 426841 - DNA, 15 bp, Homo sapiens
aaaagccaatatttt

SEQ ID NO: 426842 - DNA, 15 bp, Homo sapiens
caaaagccaatattt

SEQ ID NO: 426843 - DNA, 15 bp, Homo sapiens
gcaaaagccaatatt

SEQ ID NO: 426844 - DNA, 15 bp, Homo sapiens
agcaaaagccaatat

SEQ ID NO: 426845 - DNA, 15 bp, Homo sapiens
aagcaaaagccaata

SEQ ID NO: 426846 - DNA, 15 bp, Homo sapiens
aaagcaaaagccaat

SEQ ID NO: 426847 - DNA, 15 bp, Homo sapiens
caaagcaaaagccaa

SEQ ID NO: 426848 - DNA, 15 bp, Homo sapiens
acaaagcaaaagcca

SEQ ID NO: 426849 - DNA, 15 bp, Homo sapiens
aacaaagcaaaagcc

SEQ ID NO: 426850 - DNA, 15 bp, Homo sapiens
aaacaaagcaaaagc

SEQ ID NO: 426851 - DNA, 15 bp, Homo sapiens
aaaacaaagcaaaag

SEQ ID NO: 426852 - DNA, 15 bp, Homo sapiens
aaaaacaaagcaaaa

SEQ ID NO: 426853 - DNA, 15 bp, Homo sapiens
taaaaacaaagcaaa

SEQ ID NO: 426854 - DNA, 15 bp, Homo sapiens
ataaaaacaaagcaa

SEQ ID NO: 426855 - DNA, 15 bp, Homo sapiens
aataaaaacaaagca

SEQ ID NO: 426856 - DNA, 15 bp, Homo sapiens
taataaaaacaaagc

SEQ ID NO: 426857 - DNA, 15 bp, Homo sapiens
ttaataaaaacaaag

SEQ ID NO: 426858 - DNA, 15 bp, Homo sapiens
attaataaaaacaaa

SEQ ID NO: 426859 - DNA, 15 bp, Homo sapiens
aattaataaaaacaa

SEQ ID NO: 426860 - DNA, 15 bp, Homo sapiens
aaattaataaaaaca

SEQ ID NO: 426861 - DNA, 15 bp, Homo sapiens
aaaattaataaaaac

SEQ ID NO: 426862 - DNA, 15 bp, Homo sapiens
gaaaattaataaaaa

SEQ ID NO: 426863 - DNA, 15 bp, Homo sapiens
agaaaattaataaaa

SEQ ID NO: 426864 - DNA, 15 bp, Homo sapiens
aagaaaattaataaa

SEQ ID NO: 426865 - DNA, 15 bp, Homo sapiens
gaagaaaattaataa

SEQ ID NO: 426866 - DNA, 15 bp, Homo sapiens
agaagaaaattaata

SEQ ID NO: 426867 - DNA, 15 bp, Homo sapiens
aagaagaaaattaat

SEQ ID NO: 426868 - DNA, 15 bp, Homo sapiens
aaagaagaaaattaa

SEQ ID NO: 426869 - DNA, 15 bp, Homo sapiens
gaaagaagaaaatta

SEQ ID NO: 426870 - DNA, 15 bp, Homo sapiens
ggaaagaagaaaatt

SEQ ID NO: 426871 - DNA, 15 bp, Homo sapiens
aggaaagaagaaaat

SEQ ID NO: 426872 - DNA, 15 bp, Homo sapiens
taggaaagaagaaaa

SEQ ID NO: 426873 - DNA, 15 bp, Homo sapiens
ataggaaagaagaaa

SEQ ID NO: 426874 - DNA, 15 bp, Homo sapiens
tataggaaagaagaa

SEQ ID NO: 426875 - DNA, 15 bp, Homo sapiens
ttataggaaagaaga

SEQ ID NO: 426876 - DNA, 15 bp, Homo sapiens
cttataggaaagaag

SEQ ID NO: 426877 - DNA, 15 bp, Homo sapiens
acttataggaaagaa

SEQ ID NO: 426878 - DNA, 15 bp, Homo sapiens
cacttataggaaaga

SEQ ID NO: 426879 - DNA, 15 bp, Homo sapiens
gcacttataggaaag

SEQ ID NO: 426880 - DNA, 15 bp, Homo sapiens
tgcacttataggaaa

SEQ ID NO: 426881 - DNA, 15 bp, Homo sapiens
ctgcacttataggaa

SEQ ID NO: 426882 - DNA, 15 bp, Homo sapiens
actgcacttatagga

SEQ ID NO: 426883 - DNA, 15 bp, Homo sapiens
aactgcacttatagg

SEQ ID NO: 426884 - DNA, 15 bp, Homo sapiens
taactgcacttatag

SEQ ID NO: 426885 - DNA, 15 bp, Homo sapiens
ctaactgcacttata

SEQ ID NO: 426886 - DNA, 15 bp, Homo sapiens
actaactgcacttat

SEQ ID NO: 426887 - DNA, 15 bp, Homo sapiens
tactaactgcactta

SEQ ID NO: 426888 - DNA, 15 bp, Homo sapiens
ttactaactgcactt

SEQ ID NO: 426889 - DNA, 15 bp, Homo sapiens
tttactaactgcact

SEQ ID NO: 426890 - DNA, 15 bp, Homo sapiens
atttactaactgcac

SEQ ID NO: 426891 - DNA, 15 bp, Homo sapiens
tatttactaactgca

SEQ ID NO: 426892 - DNA, 15 bp, Homo sapiens
ttatttactaactgc

SEQ ID NO: 426893 - DNA, 15 bp, Homo sapiens
attatttactaactg

SEQ ID NO: 426894 - DNA, 15 bp, Homo sapiens
aattatttactaact

SEQ ID NO: 426895 - DNA, 15 bp, Homo sapiens
taattatttactaac

SEQ ID NO: 426896 - DNA, 15 bp, Homo sapiens
ttaattatttactaa

SEQ ID NO: 426897 - DNA, 15 bp, Homo sapiens
gttaattatttacta

SEQ ID NO: 426898 - DNA, 15 bp, Homo sapiens
agttaattatttact

SEQ ID NO: 426899 - DNA, 15 bp, Homo sapiens
aagttaattatttac

SEQ ID NO: 426900 - DNA, 15 bp, Homo sapiens
taagttaattattta

SEQ ID NO: 426901 - DNA, 15 bp, Homo sapiens
gtaagttaattattt

SEQ ID NO: 426902 - DNA, 15 bp, Homo sapiens
tgtaagttaattatt

SEQ ID NO: 426903 - DNA, 15 bp, Homo sapiens
ctgtaagttaattat

SEQ ID NO: 426904 - DNA, 15 bp, Homo sapiens
gctgtaagttaatta

SEQ ID NO: 426905 - DNA, 15 bp, Homo sapiens
agctgtaagttaatt

SEQ ID NO: 426906 - DNA, 15 bp, Homo sapiens
aagctgtaagttaat

SEQ ID NO: 426907 - DNA, 15 bp, Homo sapiens
gaagctgtaagttaa

SEQ ID NO: 426908 - DNA, 15 bp, Homo sapiens
tgaagctgtaagtta

SEQ ID NO: 426909 - DNA, 15 bp, Homo sapiens
atgaagctgtaagtt

SEQ ID NO: 426910 - DNA, 15 bp, Homo sapiens
aatgaagctgtaagt

SEQ ID NO: 426911 - DNA, 15 bp, Homo sapiens
caatgaagctgtaag

SEQ ID NO: 426912 - DNA, 15 bp, Homo sapiens
gcaatgaagctgtaa

SEQ ID NO: 426913 - DNA, 15 bp, Homo sapiens
agcaatgaagctgta

SEQ ID NO: 426914 - DNA, 15 bp, Homo sapiens
cagcaatgaagctgt

SEQ ID NO: 426915 - DNA, 15 bp, Homo sapiens
acagcaatgaagctg

SEQ ID NO: 426916 - DNA, 15 bp, Homo sapiens
aacagcaatgaagct

SEQ ID NO: 426917 - DNA, 15 bp, Homo sapiens
aaacagcaatgaagc

SEQ ID NO: 426918 - DNA, 15 bp, Homo sapiens
taaacagcaatgaag

SEQ ID NO: 426919 - DNA, 15 bp, Homo sapiens
ataaacagcaatgaa

SEQ ID NO: 426920 - DNA, 15 bp, Homo sapiens
tataaacagcaatga

SEQ ID NO: 426921 - DNA, 15 bp, Homo sapiens
atataaacagcaatg

SEQ ID NO: 426922 - DNA, 15 bp, Homo sapiens
aatataaacagcaat

SEQ ID NO: 426923 - DNA, 15 bp, Homo sapiens
gaatataaacagcaa

SEQ ID NO: 426924 - DNA, 15 bp, Homo sapiens
tgaatataaacagca

SEQ ID NO: 426925 - DNA, 15 bp, Homo sapiens
gtgaatataaacagc

SEQ ID NO: 426926 - DNA, 15 bp, Homo sapiens
tgtgaatataaacag

SEQ ID NO: 426927 - DNA, 15 bp, Homo sapiens
atgtgaatataaaca

SEQ ID NO: 426928 - DNA, 15 bp, Homo sapiens
aatgtgaatataaac

SEQ ID NO: 426929 - DNA, 15 bp, Homo sapiens
gaatgtgaatataaa

SEQ ID NO: 426930 - DNA, 15 bp, Homo sapiens
agaatgtgaatataa

SEQ ID NO: 426931 - DNA, 15 bp, Homo sapiens
gagaatgtgaatata

SEQ ID NO: 426932 - DNA, 15 bp, Homo sapiens
agagaatgtgaatat

SEQ ID NO: 426933 - DNA, 15 bp, Homo sapiens
aagagaatgtgaata

SEQ ID NO: 426934 - DNA, 15 bp, Homo sapiens
aaagagaatgtgaat

SEQ ID NO: 426935 - DNA, 15 bp, Homo sapiens
gaaagagaatgtgaa

SEQ ID NO: 426936 - DNA, 15 bp, Homo sapiens
ggaaagagaatgtga

SEQ ID NO: 426937 - DNA, 15 bp, Homo sapiens
aggaaagagaatgtg

SEQ ID NO: 426938 - DNA, 15 bp, Homo sapiens
caggaaagagaatgt

SEQ ID NO: 426939 - DNA, 15 bp, Homo sapiens
gcaggaaagagaatg

SEQ ID NO: 426940 - DNA, 15 bp, Homo sapiens
ggcaggaaagagaat

SEQ ID NO: 426941 - DNA, 15 bp, Homo sapiens
gggcaggaaagagaa

SEQ ID NO: 426942 - DNA, 15 bp, Homo sapiens
tgggcaggaaagaga

SEQ ID NO: 426943 - DNA, 15 bp, Homo sapiens
atgggcaggaaagag

SEQ ID NO: 426944 - DNA, 15 bp, Homo sapiens
tatgggcaggaaaga

SEQ ID NO: 426945 - DNA, 15 bp, Homo sapiens
ctatgggcaggaaag

SEQ ID NO: 426946 - DNA, 15 bp, Homo sapiens
tctatgggcaggaaa

SEQ ID NO: 426947 - DNA, 15 bp, Homo sapiens
atctatgggcaggaa

SEQ ID NO: 426948 - DNA, 15 bp, Homo sapiens
aatctatgggcagga

SEQ ID NO: 426949 - DNA, 15 bp, Homo sapiens
gaatctatgggcagg

SEQ ID NO: 426950 - DNA, 15 bp, Homo sapiens
ggaatctatgggcag

SEQ ID NO: 426951 - DNA, 15 bp, Homo sapiens
aggaatctatgggca

SEQ ID NO: 426952 - DNA, 15 bp, Homo sapiens
taggaatctatgggc

SEQ ID NO: 426953 - DNA, 15 bp, Homo sapiens
ttaggaatctatggg

SEQ ID NO: 426954 - DNA, 15 bp, Homo sapiens
gttaggaatctatgg

SEQ ID NO: 426955 - DNA, 15 bp, Homo sapiens
ggttaggaatctatg

SEQ ID NO: 426956 - DNA, 15 bp, Homo sapiens
cggttaggaatctat

SEQ ID NO: 426957 - DNA, 15 bp, Homo sapiens
gcggttaggaatcta

SEQ ID NO: 426958 - DNA, 15 bp, Homo sapiens
tgcggttaggaatct

SEQ ID NO: 426959 - DNA, 15 bp, Homo sapiens
ctgcggttaggaatc

SEQ ID NO: 426960 - DNA, 15 bp, Homo sapiens
tctgcggttaggaat

SEQ ID NO: 426961 - DNA, 15 bp, Homo sapiens
ttctgcggttaggaa

SEQ ID NO: 426962 - DNA, 15 bp, Homo sapiens
tttctgcggttagga

SEQ ID NO: 426963 - DNA, 15 bp, Homo sapiens
atttctgcggttagg

SEQ ID NO: 426964 - DNA, 15 bp, Homo sapiens
tatttctgcggttag

SEQ ID NO: 426965 - DNA, 15 bp, Homo sapiens
ttatttctgcggtta

SEQ ID NO: 426966 - DNA, 15 bp, Homo sapiens
tttatttctgcggtt

SEQ ID NO: 426967 - DNA, 15 bp, Homo sapiens
atttatttctgcggt

SEQ ID NO: 426968 - DNA, 15 bp, Homo sapiens
catttatttctgcgg

SEQ ID NO: 426969 - DNA, 15 bp, Homo sapiens
ccatttatttctgcg

SEQ ID NO: 426970 - DNA, 15 bp, Homo sapiens
gccatttatttctgc

SEQ ID NO: 426971 - DNA, 15 bp, Homo sapiens
tgccatttatttctg

SEQ ID NO: 426972 - DNA, 15 bp, Homo sapiens
ctgccatttatttct

SEQ ID NO: 426973 - DNA, 15 bp, Homo sapiens
actgccatttatttc

SEQ ID NO: 426974 - DNA, 15 bp, Homo sapiens
tactgccatttattt

SEQ ID NO: 426975 - DNA, 15 bp, Homo sapiens
ttactgccatttatt

SEQ ID NO: 426976 - DNA, 15 bp, Homo sapiens
gttactgccatttat

SEQ ID NO: 426977 - DNA, 15 bp, Homo sapiens
ggttactgccattta

SEQ ID NO: 426978 - DNA, 15 bp, Homo sapiens
aggttactgccattt

SEQ ID NO: 426979 - DNA, 15 bp, Homo sapiens
aaggttactgccatt

SEQ ID NO: 426980 - DNA, 15 bp, Homo sapiens
aaaggttactgccat

SEQ ID NO: 426981 - DNA, 15 bp, Homo sapiens
taaaggttactgcca

SEQ ID NO: 426982 - DNA, 15 bp, Homo sapiens
ttaaaggttactgcc

SEQ ID NO: 426983 - DNA, 15 bp, Homo sapiens
attaaaggttactgc

SEQ ID NO: 426984 - DNA, 15 bp, Homo sapiens
tattaaaggttactg

SEQ ID NO: 426985 - DNA, 15 bp, Homo sapiens
ctattaaaggttact

SEQ ID NO: 426986 - DNA, 15 bp, Homo sapiens
actattaaaggttac

SEQ ID NO: 426987 - DNA, 15 bp, Homo sapiens
tactattaaaggtta

SEQ ID NO: 426988 - DNA, 15 bp, Homo sapiens
ttactattaaaggtt

SEQ ID NO: 426989 - DNA, 15 bp, Homo sapiens
gttactattaaaggt

SEQ ID NO: 426990 - DNA, 15 bp, Homo sapiens
ggttactattaaagg

SEQ ID NO: 426991 - DNA, 15 bp, Homo sapiens
aggttactattaaag

SEQ ID NO: 426992 - DNA, 15 bp, Homo sapiens
aaggttactattaaa

SEQ ID NO: 426993 - DNA, 15 bp, Homo sapiens
aaaggttactattaa

SEQ ID NO: 426994 - DNA, 15 bp, Homo sapiens
aaaaggttactatta

SEQ ID NO: 426995 - DNA, 15 bp, Homo sapiens
aaaaaggttactatt

SEQ ID NO: 426996 - DNA, 15 bp, Homo sapiens
aaaaaaggttactat

SEQ ID NO: 426997 - DNA, 15 bp, Homo sapiens
gaaaaaaggttacta

SEQ ID NO: 426998 - DNA, 15 bp, Homo sapiens
ggaaaaaaggttact

SEQ ID NO: 426999 - DNA, 15 bp, Homo sapiens
aggaaaaaaggttac

SEQ ID NO: 427000 - DNA, 15 bp, Homo sapiens
gaggaaaaaaggtta

SEQ ID NO: 427001 - DNA, 15 bp, Homo sapiens
ggaggaaaaaaggtt

SEQ ID NO: 427002 - DNA, 15 bp, Homo sapiens
aggaggaaaaaaggt

SEQ ID NO: 427003 - DNA, 15 bp, Homo sapiens
caggaggaaaaaagg

SEQ ID NO: 427004 - DNA, 15 bp, Homo sapiens
tcaggaggaaaaaag

SEQ ID NO: 427005 - DNA, 15 bp, Homo sapiens
ctcaggaggaaaaaa

SEQ ID NO: 427006 - DNA, 15 bp, Homo sapiens
actcaggaggaaaaa

SEQ ID NO: 427007 - DNA, 15 bp, Homo sapiens
aactcaggaggaaaa

SEQ ID NO: 427008 - DNA, 15 bp, Homo sapiens
gaactcaggaggaaa

SEQ ID NO: 427009 - DNA, 15 bp, Homo sapiens
agaactcaggaggaa

SEQ ID NO: 427010 - DNA, 15 bp, Homo sapiens
aagaactcaggagga

SEQ ID NO: 427011 - DNA, 15 bp, Homo sapiens
taagaactcaggagg

SEQ ID NO: 427012 - DNA, 15 bp, Homo sapiens
gtaagaactcaggag

SEQ ID NO: 427013 - DNA, 15 bp, Homo sapiens
tgtaagaactcagga

SEQ ID NO: 427014 - DNA, 15 bp, Homo sapiens
atgtaagaactcagg

SEQ ID NO: 427015 - DNA, 15 bp, Homo sapiens
tatgtaagaactcag

SEQ ID NO: 427016 - DNA, 15 bp, Homo sapiens
atatgtaagaactca

SEQ ID NO: 427017 - DNA, 15 bp, Homo sapiens
aatatgtaagaactc

SEQ ID NO: 427018 - DNA, 15 bp, Homo sapiens
aaatatgtaagaact

SEQ ID NO: 427019 - DNA, 15 bp, Homo sapiens
gaaatatgtaagaac

SEQ ID NO: 427020 - DNA, 15 bp, Homo sapiens
agaaatatgtaagaa

SEQ ID NO: 427021 - DNA, 15 bp, Homo sapiens
cagaaatatgtaaga

SEQ ID NO: 427022 - DNA, 15 bp, Homo sapiens
acagaaatatgtaag

SEQ ID NO: 427023 - DNA, 15 bp, Homo sapiens
aacagaaatatgtaa

SEQ ID NO: 427024 - DNA, 15 bp, Homo sapiens
gaacagaaatatgta

SEQ ID NO: 427025 - DNA, 15 bp, Homo sapiens
tgaacagaaatatgt

SEQ ID NO: 427026 - DNA, 15 bp, Homo sapiens
atgaacagaaatatg

SEQ ID NO: 427027 - DNA, 15 bp, Homo sapiens
gatgaacagaaatat

SEQ ID NO: 427028 - DNA, 15 bp, Homo sapiens
tgatgaacagaaata

SEQ ID NO: 427029 - DNA, 15 bp, Homo sapiens
ctgatgaacagaaat

SEQ ID NO: 427030 - DNA, 15 bp, Homo sapiens
actgatgaacagaaa

SEQ ID NO: 427031 - DNA, 15 bp, Homo sapiens
aactgatgaacagaa

SEQ ID NO: 427032 - DNA, 15 bp, Homo sapiens
caactgatgaacaga

SEQ ID NO: 427033 - DNA, 15 bp, Homo sapiens
gcaactgatgaacag

SEQ ID NO: 427034 - DNA, 15 bp, Homo sapiens
agcaactgatgaaca

SEQ ID NO: 427035 - DNA, 15 bp, Homo sapiens
aagcaactgatgaac

SEQ ID NO: 427036 - DNA, 15 bp, Homo sapiens
gaagcaactgatgaa

SEQ ID NO: 427037 - DNA, 15 bp, Homo sapiens
agaagcaactgatga

SEQ ID NO: 427038 - DNA, 15 bp, Homo sapiens
cagaagcaactgatg

SEQ ID NO: 427039 - DNA, 15 bp, Homo sapiens
gcagaagcaactgat

SEQ ID NO: 427040 - DNA, 15 bp, Homo sapiens
agcagaagcaactga

SEQ ID NO: 427041 - DNA, 15 bp, Homo sapiens
gagcagaagcaactg

SEQ ID NO: 427042 - DNA, 15 bp, Homo sapiens
tgagcagaagcaact

SEQ ID NO: 427043 - DNA, 15 bp, Homo sapiens
gtgagcagaagcaac

SEQ ID NO: 427044 - DNA, 15 bp, Homo sapiens
tgtgagcagaagcaa

SEQ ID NO: 427045 - DNA, 15 bp, Homo sapiens
ttgtgagcagaagca

SEQ ID NO: 427046 - DNA, 15 bp, Homo sapiens
gttgtgagcagaagc

SEQ ID NO: 427047 - DNA, 15 bp, Homo sapiens
agttgtgagcagaag

SEQ ID NO: 427048 - DNA, 15 bp, Homo sapiens
aagttgtgagcagaa

SEQ ID NO: 427049 - DNA, 15 bp, Homo sapiens
aaagttgtgagcaga

SEQ ID NO: 427050 - DNA, 15 bp, Homo sapiens
taaagttgtgagcag

SEQ ID NO: 427051 - DNA, 15 bp, Homo sapiens
ttaaagttgtgagca

SEQ ID NO: 427052 - DNA, 15 bp, Homo sapiens
tttaaagttgtgagc

SEQ ID NO: 427053 - DNA, 15 bp, Homo sapiens
ttttaaagttgtgag

SEQ ID NO: 427054 - DNA, 15 bp, Homo sapiens
gttttaaagttgtga

SEQ ID NO: 427055 - DNA, 15 bp, Homo sapiens
ggttttaaagttgtg

SEQ ID NO: 427056 - DNA, 15 bp, Homo sapiens
gggttttaaagttgt

SEQ ID NO: 427057 - DNA, 15 bp, Homo sapiens
tgggttttaaagttg

SEQ ID NO: 427058 - DNA, 15 bp, Homo sapiens
ctgggttttaaagtt

SEQ ID NO: 427059 - DNA, 15 bp, Homo sapiens
tctgggttttaaagt

SEQ ID NO: 427060 - DNA, 15 bp, Homo sapiens
atctgggttttaaag

SEQ ID NO: 427061 - DNA, 15 bp, Homo sapiens
catctgggttttaaa

SEQ ID NO: 427062 - DNA, 15 bp, Homo sapiens
ccatctgggttttaa

SEQ ID NO: 427063 - DNA, 15 bp, Homo sapiens
cccatctgggtttta

SEQ ID NO: 427064 - DNA, 15 bp, Homo sapiens
tcccatctgggtttt

SEQ ID NO: 427065 - DNA, 15 bp, Homo sapiens
ttcccatctgggttt

SEQ ID NO: 427066 - DNA, 15 bp, Homo sapiens
tttcccatctgggtt

SEQ ID NO: 427067 - DNA, 15 bp, Homo sapiens
gtttcccatctgggt

SEQ ID NO: 427068 - DNA, 15 bp, Homo sapiens
tgtttcccatctggg

SEQ ID NO: 427069 - DNA, 15 bp, Homo sapiens
ctgtttcccatctgg

SEQ ID NO: 427070 - DNA, 15 bp, Homo sapiens
cctgtttcccatctg

SEQ ID NO: 427071 - DNA, 15 bp, Homo sapiens
tcctgtttcccatct

SEQ ID NO: 427072 - DNA, 15 bp, Homo sapiens
atcctgtttcccatc

SEQ ID NO: 427073 - DNA, 15 bp, Homo sapiens
aatcctgtttcccat

SEQ ID NO: 427074 - DNA, 15 bp, Homo sapiens
aaatcctgtttccca

SEQ ID NO: 427075 - DNA, 15 bp, Homo sapiens
taaatcctgtttccc

SEQ ID NO: 427076 - DNA, 15 bp, Homo sapiens
ttaaatcctgtttcc

SEQ ID NO: 427077 - DNA, 15 bp, Homo sapiens
tttaaatcctgtttc

SEQ ID NO: 427078 - DNA, 15 bp, Homo sapiens
atttaaatcctgttt

SEQ ID NO: 427079 - DNA, 15 bp, Homo sapiens
aatttaaatcctgtt

SEQ ID NO: 427080 - DNA, 15 bp, Homo sapiens
taatttaaatcctgt

SEQ ID NO: 427081 - DNA, 15 bp, Homo sapiens
ctaatttaaatcctg

SEQ ID NO: 427082 - DNA, 15 bp, Homo sapiens
gctaatttaaatcct

SEQ ID NO: 427083 - DNA, 15 bp, Homo sapiens
ggctaatttaaatcc

SEQ ID NO: 427084 - DNA, 15 bp, Homo sapiens
tggctaatttaaatc

SEQ ID NO: 427085 - DNA, 15 bp, Homo sapiens
atggctaatttaaat

SEQ ID NO: 427086 - DNA, 15 bp, Homo sapiens
tatggctaatttaaa

SEQ ID NO: 427087 - DNA, 15 bp, Homo sapiens
ctatggctaatttaa

SEQ ID NO: 427088 - DNA, 15 bp, Homo sapiens
actatggctaattta

SEQ ID NO: 427089 - DNA, 15 bp, Homo sapiens
cactatggctaattt

SEQ ID NO: 427090 - DNA, 15 bp, Homo sapiens
acactatggctaatt

SEQ ID NO: 427091 - DNA, 15 bp, Homo sapiens
aacactatggctaat

SEQ ID NO: 427092 - DNA, 15 bp, Homo sapiens
taacactatggctaa

SEQ ID NO: 427093 - DNA, 15 bp, Homo sapiens
ctaacactatggcta

SEQ ID NO: 427094 - DNA, 15 bp, Homo sapiens
gctaacactatggct

SEQ ID NO: 427095 - DNA, 15 bp, Homo sapiens
tgctaacactatggc

SEQ ID NO: 427096 - DNA, 15 bp, Homo sapiens
ttgctaacactatgg

SEQ ID NO: 427097 - DNA, 15 bp, Homo sapiens
tttgctaacactatg

SEQ ID NO: 427098 - DNA, 15 bp, Homo sapiens
ctttgctaacactat

SEQ ID NO: 427099 - DNA, 15 bp, Homo sapiens
cctttgctaacacta

SEQ ID NO: 427100 - DNA, 15 bp, Homo sapiens
acctttgctaacact

SEQ ID NO: 427101 - DNA, 15 bp, Homo sapiens
aacctttgctaacac

SEQ ID NO: 427102 - DNA, 15 bp, Homo sapiens
aaacctttgctaaca

SEQ ID NO: 427103 - DNA, 15 bp, Homo sapiens
aaaacctttgctaac

SEQ ID NO: 427104 - DNA, 15 bp, Homo sapiens
taaaacctttgctaa

SEQ ID NO: 427105 - DNA, 15 bp, Homo sapiens
ataaaacctttgcta

SEQ ID NO: 427106 - DNA, 15 bp, Homo sapiens
gataaaacctttgct

SEQ ID NO: 427107 - DNA, 15 bp, Homo sapiens
agataaaacctttgc

SEQ ID NO: 427108 - DNA, 15 bp, Homo sapiens
aagataaaacctttg

SEQ ID NO: 427109 - DNA, 15 bp, Homo sapiens
taagataaaaccttt

SEQ ID NO: 427110 - DNA, 15 bp, Homo sapiens
ataagataaaacctt

SEQ ID NO: 427111 - DNA, 15 bp, Homo sapiens
tataagataaaacct

SEQ ID NO: 427112 - DNA, 15 bp, Homo sapiens
ctataagataaaacc

SEQ ID NO: 427113 - DNA, 15 bp, Homo sapiens
tctataagataaaac

SEQ ID NO: 427114 - DNA, 15 bp, Homo sapiens
atctataagataaaa

SEQ ID NO: 427115 - DNA, 15 bp, Homo sapiens
gatctataagataaa

SEQ ID NO: 427116 - DNA, 15 bp, Homo sapiens
agatctataagataa

SEQ ID NO: 427117 - DNA, 15 bp, Homo sapiens
aagatctataagata

SEQ ID NO: 427118 - DNA, 15 bp, Homo sapiens
gaagatctataagat

SEQ ID NO: 427119 - DNA, 15 bp, Homo sapiens
agaagatctataaga

SEQ ID NO: 427120 - DNA, 15 bp, Homo sapiens
tagaagatctataag

SEQ ID NO: 427121 - DNA, 15 bp, Homo sapiens
gtagaagatctataa

SEQ ID NO: 427122 - DNA, 15 bp, Homo sapiens
tgtagaagatctata

SEQ ID NO: 427123 - DNA, 15 bp, Homo sapiens
ttgtagaagatctat

SEQ ID NO: 427124 - DNA, 15 bp, Homo sapiens
gttgtagaagatcta

SEQ ID NO: 427125 - DNA, 15 bp, Homo sapiens
tgttgtagaagatct

SEQ ID NO: 427126 - DNA, 15 bp, Homo sapiens
atgttgtagaagatc

SEQ ID NO: 427127 - DNA, 15 bp, Homo sapiens
catgttgtagaagat

SEQ ID NO: 427128 - DNA, 15 bp, Homo sapiens
ccatgttgtagaaga

SEQ ID NO: 427129 - DNA, 15 bp, Homo sapiens
tccatgttgtagaag

SEQ ID NO: 427130 - DNA, 15 bp, Homo sapiens
atccatgttgtagaa

SEQ ID NO: 427131 - DNA, 15 bp, Homo sapiens
aatccatgttgtaga

SEQ ID NO: 427132 - DNA, 15 bp, Homo sapiens
caatccatgttgtag

SEQ ID NO: 427133 - DNA, 15 bp, Homo sapiens
tcaatccatgttgta

SEQ ID NO: 427134 - DNA, 15 bp, Homo sapiens
ttcaatccatgttgt

SEQ ID NO: 427135 - DNA, 15 bp, Homo sapiens
tttcaatccatgttg

SEQ ID NO: 427136 - DNA, 15 bp, Homo sapiens
atttcaatccatgtt

SEQ ID NO: 427137 - DNA, 15 bp, Homo sapiens
tatttcaatccatgt

SEQ ID NO: 427138 - DNA, 15 bp, Homo sapiens
ctatttcaatccatg

SEQ ID NO: 427139 - DNA, 15 bp, Homo sapiens
cctatttcaatccat

SEQ ID NO: 427140 - DNA, 15 bp, Homo sapiens
tcctatttcaatcca

SEQ ID NO: 427141 - DNA, 15 bp, Homo sapiens
gtcctatttcaatcc

SEQ ID NO: 427142 - DNA, 15 bp, Homo sapiens
tgtcctatttcaatc

SEQ ID NO: 427143 - DNA, 15 bp, Homo sapiens
ttgtcctatttcaat

SEQ ID NO: 427144 - DNA, 15 bp, Homo sapiens
attgtcctatttcaa

SEQ ID NO: 427145 - DNA, 15 bp, Homo sapiens
aattgtcctatttca

SEQ ID NO: 427146 - DNA, 15 bp, Homo sapiens
taattgtcctatttc

SEQ ID NO: 427147 - DNA, 15 bp, Homo sapiens
ttaattgtcctattt

SEQ ID NO: 427148 - DNA, 15 bp, Homo sapiens
cttaattgtcctatt

SEQ ID NO: 427149 - DNA, 15 bp, Homo sapiens
tcttaattgtcctat

SEQ ID NO: 427150 - DNA, 15 bp, Homo sapiens
ttcttaattgtccta

SEQ ID NO: 427151 - DNA, 15 bp, Homo sapiens
attcttaattgtcct

SEQ ID NO: 427152 - DNA, 15 bp, Homo sapiens
tattcttaattgtcc

SEQ ID NO: 427153 - DNA, 15 bp, Homo sapiens
atattcttaattgtc

SEQ ID NO: 427154 - DNA, 15 bp, Homo sapiens
tatattcttaattgt

SEQ ID NO: 427155 - DNA, 15 bp, Homo sapiens
ttatattcttaattg

SEQ ID NO: 427156 - DNA, 15 bp, Homo sapiens
cttatattcttaatt

SEQ ID NO: 427157 - DNA, 15 bp, Homo sapiens
acttatattcttaat

SEQ ID NO: 427158 - DNA, 15 bp, Homo sapiens
aacttatattcttaa

SEQ ID NO: 427159 - DNA, 15 bp, Homo sapiens
taacttatattctta

SEQ ID NO: 427160 - DNA, 15 bp, Homo sapiens
ataacttatattctt

SEQ ID NO: 427161 - DNA, 15 bp, Homo sapiens
aataacttatattct

SEQ ID NO: 427162 - DNA, 15 bp, Homo sapiens
caataacttatattc

SEQ ID NO: 427163 - DNA, 15 bp, Homo sapiens
ccaataacttatatt

SEQ ID NO: 427164 - DNA, 15 bp, Homo sapiens
accaataacttatat

SEQ ID NO: 427165 - DNA, 15 bp, Homo sapiens
caccaataacttata

SEQ ID NO: 427166 - DNA, 15 bp, Homo sapiens
tcaccaataacttat

SEQ ID NO: 427167 - DNA, 15 bp, Homo sapiens
atcaccaataactta

SEQ ID NO: 427168 - DNA, 15 bp, Homo sapiens
aatcaccaataactt

SEQ ID NO: 427169 - DNA, 15 bp, Homo sapiens
caatcaccaataact

SEQ ID NO: 427170 - DNA, 15 bp, Homo sapiens
acaatcaccaataac

SEQ ID NO: 427171 - DNA, 15 bp, Homo sapiens
tacaatcaccaataa

SEQ ID NO: 427172 - DNA, 15 bp, Homo sapiens
atacaatcaccaata

SEQ ID NO: 427173 - DNA, 15 bp, Homo sapiens
gatacaatcaccaat

SEQ ID NO: 427174 - DNA, 15 bp, Homo sapiens
tgatacaatcaccaa

SEQ ID NO: 427175 - DNA, 15 bp, Homo sapiens
ctgatacaatcacca

SEQ ID NO: 427176 - DNA, 15 bp, Homo sapiens
gctgatacaatcacc

SEQ ID NO: 427177 - DNA, 15 bp, Homo sapiens
tgctgatacaatcac

SEQ ID NO: 427178 - DNA, 15 bp, Homo sapiens
atgctgatacaatca

SEQ ID NO: 427179 - DNA, 15 bp, Homo sapiens
aatgctgatacaatc

SEQ ID NO: 427180 - DNA, 15 bp, Homo sapiens
aaatgctgatacaat

SEQ ID NO: 427181 - DNA, 15 bp, Homo sapiens
taaatgctgatacaa

SEQ ID NO: 427182 - DNA, 15 bp, Homo sapiens
ataaatgctgataca

SEQ ID NO: 427183 - DNA, 15 bp, Homo sapiens
gataaatgctgatac

SEQ ID NO: 427184 - DNA, 15 bp, Homo sapiens
agataaatgctgata

SEQ ID NO: 427185 - DNA, 15 bp, Homo sapiens
gagataaatgctgat

SEQ ID NO: 427186 - DNA, 15 bp, Homo sapiens
agagataaatgctga

SEQ ID NO: 427187 - DNA, 15 bp, Homo sapiens
aagagataaatgctg

SEQ ID NO: 427188 - DNA, 15 bp, Homo sapiens
taagagataaatgct

SEQ ID NO: 427189 - DNA, 15 bp, Homo sapiens
gtaagagataaatgc

SEQ ID NO: 427190 - DNA, 15 bp, Homo sapiens
tgtaagagataaatg

SEQ ID NO: 427191 - DNA, 15 bp, Homo sapiens
atgtaagagataaat

SEQ ID NO: 427192 - DNA, 15 bp, Homo sapiens
tatgtaagagataaa

SEQ ID NO: 427193 - DNA, 15 bp, Homo sapiens
ttatgtaagagataa

SEQ ID NO: 427194 - DNA, 15 bp, Homo sapiens
cttatgtaagagata

SEQ ID NO: 427195 - DNA, 15 bp, Homo sapiens
tcttatgtaagagat

SEQ ID NO: 427196 - DNA, 15 bp, Homo sapiens
ttcttatgtaagaga

SEQ ID NO: 427197 - DNA, 15 bp, Homo sapiens
tttcttatgtaagag

SEQ ID NO: 427198 - DNA, 15 bp, Homo sapiens
gtttcttatgtaaga

SEQ ID NO: 427199 - DNA, 15 bp, Homo sapiens
tgtttcttatgtaag

SEQ ID NO: 427200 - DNA, 15 bp, Homo sapiens
atgtttcttatgtaa

SEQ ID NO: 427201 - DNA, 15 bp, Homo sapiens
aatgtttcttatgta

SEQ ID NO: 427202 - DNA, 15 bp, Homo sapiens
caatgtttcttatgt

SEQ ID NO: 427203 - DNA, 15 bp, Homo sapiens
ccaatgtttcttatg

SEQ ID NO: 427204 - DNA, 15 bp, Homo sapiens
accaatgtttcttat

SEQ ID NO: 427205 - DNA, 15 bp, Homo sapiens
taccaatgtttctta

SEQ ID NO: 427206 - DNA, 15 bp, Homo sapiens
ataccaatgtttctt

SEQ ID NO: 427207 - DNA, 15 bp, Homo sapiens
aataccaatgtttct

SEQ ID NO: 427208 - DNA, 15 bp, Homo sapiens
caataccaatgtttc

SEQ ID NO: 427209 - DNA, 15 bp, Homo sapiens
ccaataccaatgttt

SEQ ID NO: 427210 - DNA, 15 bp, Homo sapiens
gccaataccaatgtt

SEQ ID NO: 427211 - DNA, 15 bp, Homo sapiens
agccaataccaatgt

SEQ ID NO: 427212 - DNA, 15 bp, Homo sapiens
aagccaataccaatg

SEQ ID NO: 427213 - DNA, 15 bp, Homo sapiens
gaagccaataccaat

SEQ ID NO: 427214 - DNA, 15 bp, Homo sapiens
ggaagccaataccaa

SEQ ID NO: 427215 - DNA, 15 bp, Homo sapiens
tggaagccaatacca

SEQ ID NO: 427216 - DNA, 15 bp, Homo sapiens
ctggaagccaatacc

SEQ ID NO: 427217 - DNA, 15 bp, Homo sapiens
tctggaagccaatac

SEQ ID NO: 427218 - DNA, 15 bp, Homo sapiens
ctctggaagccaata

SEQ ID NO: 427219 - DNA, 15 bp, Homo sapiens
tctctggaagccaat

SEQ ID NO: 427220 - DNA, 15 bp, Homo sapiens
ctctctggaagccaa

SEQ ID NO: 427221 - DNA, 15 bp, Homo sapiens
tctctctggaagcca

SEQ ID NO: 427222 - DNA, 15 bp, Homo sapiens
ttctctctggaagcc

SEQ ID NO: 427223 - DNA, 15 bp, Homo sapiens
tttctctctggaagc

SEQ ID NO: 427224 - DNA, 15 bp, Homo sapiens
ctttctctctggaag

SEQ ID NO: 427225 - DNA, 15 bp, Homo sapiens
tctttctctctggaa

SEQ ID NO: 427226 - DNA, 15 bp, Homo sapiens
ctctttctctctgga

SEQ ID NO: 427227 - DNA, 15 bp, Homo sapiens
gctctttctctctgg

SEQ ID NO: 427228 - DNA, 15 bp, Homo sapiens
ggctctttctctctg

SEQ ID NO: 427229 - DNA, 15 bp, Homo sapiens
tggctctttctctct

SEQ ID NO: 427230 - DNA, 15 bp, Homo sapiens
atggctctttctctc

SEQ ID NO: 427231 - DNA, 15 bp, Homo sapiens
catggctctttctct

SEQ ID NO: 427232 - DNA, 15 bp, Homo sapiens
tcatggctctttctc

SEQ ID NO: 427233 - DNA, 15 bp, Homo sapiens
ctcatggctctttct

SEQ ID NO: 427234 - DNA, 15 bp, Homo sapiens
gctcatggctctttc

SEQ ID NO: 427235 - DNA, 15 bp, Homo sapiens
agctcatggctcttt

SEQ ID NO: 427236 - DNA, 15 bp, Homo sapiens
gagctcatggctctt

SEQ ID NO: 427237 - DNA, 15 bp, Homo sapiens
ggagctcatggctct

SEQ ID NO: 427238 - DNA, 15 bp, Homo sapiens
aggagctcatggctc

SEQ ID NO: 427239 - DNA, 15 bp, Homo sapiens
taggagctcatggct

SEQ ID NO: 427240 - DNA, 15 bp, Homo sapiens
ctaggagctcatggc

SEQ ID NO: 427241 - DNA, 15 bp, Homo sapiens
actaggagctcatgg

SEQ ID NO: 427242 - DNA, 15 bp, Homo sapiens
aactaggagctcatg

SEQ ID NO: 427243 - DNA, 15 bp, Homo sapiens
taactaggagctcat

SEQ ID NO: 427244 - DNA, 15 bp, Homo sapiens
ataactaggagctca

SEQ ID NO: 427245 - DNA, 15 bp, Homo sapiens
aataactaggagctc

SEQ ID NO: 427246 - DNA, 15 bp, Homo sapiens
aaataactaggagct

SEQ ID NO: 427247 - DNA, 15 bp, Homo sapiens
taaataactaggagc

SEQ ID NO: 427248 - DNA, 15 bp, Homo sapiens
ataaataactaggag

SEQ ID NO: 427249 - DNA, 15 bp, Homo sapiens
gataaataactagga

SEQ ID NO: 427250 - DNA, 15 bp, Homo sapiens
agataaataactagg

SEQ ID NO: 427251 - DNA, 15 bp, Homo sapiens
aagataaataactag

SEQ ID NO: 427252 - DNA, 15 bp, Homo sapiens
aaagataaataacta

SEQ ID NO: 427253 - DNA, 15 bp, Homo sapiens
aaaagataaataact

SEQ ID NO: 427254 - DNA, 15 bp, Homo sapiens
aaaaagataaataac

SEQ ID NO: 427255 - DNA, 15 bp, Homo sapiens
aaaaaagataaataa

SEQ ID NO: 427256 - DNA, 15 bp, Homo sapiens
taaaaaagataaata

SEQ ID NO: 427257 - DNA, 15 bp, Homo sapiens
ataaaaaagataaat

SEQ ID NO: 427258 - DNA, 15 bp, Homo sapiens
tataaaaaagataaa

SEQ ID NO: 427259 - DNA, 15 bp, Homo sapiens
atataaaaaagataa

SEQ ID NO: 427260 - DNA, 15 bp, Homo sapiens
aatataaaaaagata

SEQ ID NO: 427261 - DNA, 15 bp, Homo sapiens
taatataaaaaagat

SEQ ID NO: 427262 - DNA, 15 bp, Homo sapiens
ttaatataaaaaaga

SEQ ID NO: 427263 - DNA, 15 bp, Homo sapiens
tttaatataaaaaag

SEQ ID NO: 427264 - DNA, 15 bp, Homo sapiens
ttttaatataaaaaa

SEQ ID NO: 427265 - DNA, 15 bp, Homo sapiens
attttaatataaaaa

SEQ ID NO: 427266 - DNA, 15 bp, Homo sapiens
tattttaatataaaa

SEQ ID NO: 427267 - DNA, 15 bp, Homo sapiens
ttattttaatataaa

SEQ ID NO: 427268 - DNA, 15 bp, Homo sapiens
attattttaatataa

SEQ ID NO: 427269 - DNA, 15 bp, Homo sapiens
cattattttaatata

SEQ ID NO: 427270 - DNA, 15 bp, Homo sapiens
gcattattttaatat

SEQ ID NO: 427271 - DNA, 15 bp, Homo sapiens
ggcattattttaata

SEQ ID NO: 427272 - DNA, 15 bp, Homo sapiens
aggcattattttaat

SEQ ID NO: 427273 - DNA, 15 bp, Homo sapiens
aaggcattattttaa

SEQ ID NO: 427274 - DNA, 15 bp, Homo sapiens
aaaggcattatttta

SEQ ID NO: 427275 - DNA, 15 bp, Homo sapiens
aaaaggcattatttt

SEQ ID NO: 427276 - DNA, 15 bp, Homo sapiens
aaaaaggcattattt

SEQ ID NO: 427277 - DNA, 15 bp, Homo sapiens
taaaaaggcattatt

SEQ ID NO: 427278 - DNA, 15 bp, Homo sapiens
ttaaaaaggcattat

SEQ ID NO: 427279 - DNA, 15 bp, Homo sapiens
tttaaaaaggcatta

SEQ ID NO: 427280 - DNA, 15 bp, Homo sapiens
gtttaaaaaggcatt

SEQ ID NO: 427281 - DNA, 15 bp, Homo sapiens
agtttaaaaaggcat

SEQ ID NO: 427282 - DNA, 15 bp, Homo sapiens
gagtttaaaaaggca

SEQ ID NO: 427283 - DNA, 15 bp, Homo sapiens
ggagtttaaaaaggc

SEQ ID NO: 427284 - DNA, 15 bp, Homo sapiens
gggagtttaaaaagg

SEQ ID NO: 427285 - DNA, 15 bp, Homo sapiens
ggggagtttaaaaag

SEQ ID NO: 427286 - DNA, 15 bp, Homo sapiens
tggggagtttaaaaa

SEQ ID NO: 427287 - DNA, 15 bp, Homo sapiens
ttggggagtttaaaa

SEQ ID NO: 427288 - DNA, 15 bp, Homo sapiens
tttggggagtttaaa

SEQ ID NO: 427289 - DNA, 15 bp, Homo sapiens
ttttggggagtttaa

SEQ ID NO: 427290 - DNA, 15 bp, Homo sapiens
tttttggggagttta

SEQ ID NO: 427291 - DNA, 15 bp, Homo sapiens
ttttttggggagttt

SEQ ID NO: 427292 - DNA, 15 bp, Homo sapiens
gttttttggggagtt

SEQ ID NO: 427293 - DNA, 15 bp, Homo sapiens
cgttttttggggagt

SEQ ID NO: 427294 - DNA, 15 bp, Homo sapiens
gcgttttttggggag

SEQ ID NO: 427295 - DNA, 15 bp, Homo sapiens
ggcgttttttgggga

SEQ ID NO: 427296 - DNA, 15 bp, Homo sapiens
aggcgttttttgggg

SEQ ID NO: 427297 - DNA, 15 bp, Homo sapiens
aaggcgttttttggg

SEQ ID NO: 427298 - DNA, 15 bp, Homo sapiens
aaaggcgttttttgg

SEQ ID NO: 427299 - DNA, 15 bp, Homo sapiens
aaaaggcgttttttg

SEQ ID NO: 427300 - DNA, 15 bp, Homo sapiens
aaaaaggcgtttttt

SEQ ID NO: 427301 - DNA, 15 bp, Homo sapiens
taaaaaggcgttttt

SEQ ID NO: 427302 - DNA, 15 bp, Homo sapiens
ttaaaaaggcgtttt

SEQ ID NO: 427303 - DNA, 15 bp, Homo sapiens
tttaaaaaggcgttt

SEQ ID NO: 427304 - DNA, 15 bp, Homo sapiens
atttaaaaaggcgtt

SEQ ID NO: 427305 - DNA, 15 bp, Homo sapiens
aatttaaaaaggcgt

SEQ ID NO: 427306 - DNA, 15 bp, Homo sapiens
aaatttaaaaaggcg

SEQ ID NO: 427307 - DNA, 15 bp, Homo sapiens
taaatttaaaaaggc

SEQ ID NO: 427308 - DNA, 15 bp, Homo sapiens
ttaaatttaaaaagg

SEQ ID NO: 427309 - DNA, 15 bp, Homo sapiens
cttaaatttaaaaag

SEQ ID NO: 427310 - DNA, 15 bp, Homo sapiens
tcttaaatttaaaaa

SEQ ID NO: 427311 - DNA, 15 bp, Homo sapiens
atcttaaatttaaaa

SEQ ID NO: 427312 - DNA, 15 bp, Homo sapiens
tatcttaaatttaaa

SEQ ID NO: 427313 - DNA, 15 bp, Homo sapiens
ttatcttaaatttaa

SEQ ID NO: 427314 - DNA, 15 bp, Homo sapiens
gttatcttaaattta

SEQ ID NO: 427315 - DNA, 15 bp, Homo sapiens
agttatcttaaattt

SEQ ID NO: 427316 - DNA, 15 bp, Homo sapiens
gagttatcttaaatt

SEQ ID NO: 427317 - DNA, 15 bp, Homo sapiens
agagttatcttaaat

SEQ ID NO: 427318 - DNA, 15 bp, Homo sapiens
aagagttatcttaaa

SEQ ID NO: 427319 - DNA, 15 bp, Homo sapiens
aaagagttatcttaa

SEQ ID NO: 427320 - DNA, 15 bp, Homo sapiens
taaagagttatctta

SEQ ID NO: 427321 - DNA, 15 bp, Homo sapiens
ttaaagagttatctt

SEQ ID NO: 427322 - DNA, 15 bp, Homo sapiens
tttaaagagttatct

SEQ ID NO: 427323 - DNA, 15 bp, Homo sapiens
ttttaaagagttatc

SEQ ID NO: 427324 - DNA, 15 bp, Homo sapiens
attttaaagagttat

SEQ ID NO: 427325 - DNA, 15 bp, Homo sapiens
gattttaaagagtta

SEQ ID NO: 427326 - DNA, 15 bp, Homo sapiens
agattttaaagagtt

SEQ ID NO: 427327 - DNA, 15 bp, Homo sapiens
cagattttaaagagt

SEQ ID NO: 427328 - DNA, 15 bp, Homo sapiens
tcagattttaaagag

SEQ ID NO: 427329 - DNA, 15 bp, Homo sapiens
ctcagattttaaaga

SEQ ID NO: 427330 - DNA, 15 bp, Homo sapiens
tctcagattttaaag

SEQ ID NO: 427331 - DNA, 15 bp, Homo sapiens
gtctcagattttaaa

SEQ ID NO: 427332 - DNA, 15 bp, Homo sapiens
ggtctcagattttaa

SEQ ID NO: 427333 - DNA, 15 bp, Homo sapiens
aggtctcagatttta

SEQ ID NO: 427334 - DNA, 15 bp, Homo sapiens
aaggtctcagatttt

SEQ ID NO: 427335 - DNA, 15 bp, Homo sapiens
aaaggtctcagattt

SEQ ID NO: 427336 - DNA, 15 bp, Homo sapiens
gaaaggtctcagatt

SEQ ID NO: 427337 - DNA, 15 bp, Homo sapiens
tgaaaggtctcagat

SEQ ID NO: 427338 - DNA, 15 bp, Homo sapiens
gtgaaaggtctcaga

SEQ ID NO: 427339 - DNA, 15 bp, Homo sapiens
agtgaaaggtctcag

SEQ ID NO: 427340 - DNA, 15 bp, Homo sapiens
aagtgaaaggtctca

SEQ ID NO: 427341 - DNA, 15 bp, Homo sapiens
gaagtgaaaggtctc

SEQ ID NO: 427342 - DNA, 15 bp, Homo sapiens
tgaagtgaaaggtct

SEQ ID NO: 427343 - DNA, 15 bp, Homo sapiens
ctgaagtgaaaggtc

SEQ ID NO: 427344 - DNA, 15 bp, Homo sapiens
actgaagtgaaaggt

SEQ ID NO: 427345 - DNA, 15 bp, Homo sapiens
tactgaagtgaaagg

SEQ ID NO: 427346 - DNA, 15 bp, Homo sapiens
atactgaagtgaaag

SEQ ID NO: 427347 - DNA, 15 bp, Homo sapiens
tatactgaagtgaaa

SEQ ID NO: 427348 - DNA, 15 bp, Homo sapiens
gtatactgaagtgaa

SEQ ID NO: 427349 - DNA, 15 bp, Homo sapiens
agtatactgaagtga

SEQ ID NO: 427350 - DNA, 15 bp, Homo sapiens
tagtatactgaagtg

SEQ ID NO: 427351 - DNA, 15 bp, Homo sapiens
ttagtatactgaagt

SEQ ID NO: 427352 - DNA, 15 bp, Homo sapiens
tttagtatactgaag

SEQ ID NO: 427353 - DNA, 15 bp, Homo sapiens
gtttagtatactgaa

SEQ ID NO: 427354 - DNA, 15 bp, Homo sapiens
agtttagtatactga

SEQ ID NO: 427355 - DNA, 15 bp, Homo sapiens
cagtttagtatactg

SEQ ID NO: 427356 - DNA, 15 bp, Homo sapiens
tcagtttagtatact

SEQ ID NO: 427357 - DNA, 15 bp, Homo sapiens
ttcagtttagtatac

SEQ ID NO: 427358 - DNA, 15 bp, Homo sapiens
tttcagtttagtata

SEQ ID NO: 427359 - DNA, 15 bp, Homo sapiens
ctttcagtttagtat

SEQ ID NO: 427360 - DNA, 15 bp, Homo sapiens
gctttcagtttagta

SEQ ID NO: 427361 - DNA, 15 bp, Homo sapiens
ggctttcagtttagt

SEQ ID NO: 427362 - DNA, 15 bp, Homo sapiens
tggctttcagtttag

SEQ ID NO: 427363 - DNA, 15 bp, Homo sapiens
ttggctttcagttta

SEQ ID NO: 427364 - DNA, 15 bp, Homo sapiens
attggctttcagttt

SEQ ID NO: 427365 - DNA, 15 bp, Homo sapiens
cattggctttcagtt

SEQ ID NO: 427366 - DNA, 15 bp, Homo sapiens
tcattggctttcagt

SEQ ID NO: 427367 - DNA, 15 bp, Homo sapiens
gtcattggctttcag

SEQ ID NO: 427368 - DNA, 15 bp, Homo sapiens
tgtcattggctttca

SEQ ID NO: 427369 - DNA, 15 bp, Homo sapiens
atgtcattggctttc

SEQ ID NO: 427370 - DNA, 15 bp, Homo sapiens
aatgtcattggcttt

SEQ ID NO: 427371 - DNA, 15 bp, Homo sapiens
aaatgtcattggctt

SEQ ID NO: 427372 - DNA, 15 bp, Homo sapiens
gaaatgtcattggct

SEQ ID NO: 427373 - DNA, 15 bp, Homo sapiens
cgaaatgtcattggc

SEQ ID NO: 427374 - DNA, 15 bp, Homo sapiens
acgaaatgtcattgg

SEQ ID NO: 427375 - DNA, 15 bp, Homo sapiens
cacgaaatgtcattg

SEQ ID NO: 427376 - DNA, 15 bp, Homo sapiens
ccacgaaatgtcatt

SEQ ID NO: 427377 - DNA, 15 bp, Homo sapiens
cccacgaaatgtcat

SEQ ID NO: 427378 - DNA, 15 bp, Homo sapiens
ccccacgaaatgtca

SEQ ID NO: 427379 - DNA, 15 bp, Homo sapiens
cccccacgaaatgtc

SEQ ID NO: 427380 - DNA, 15 bp, Homo sapiens
tcccccacgaaatgt

SEQ ID NO: 427381 - DNA, 15 bp, Homo sapiens
ttcccccacgaaatg

SEQ ID NO: 427382 - DNA, 15 bp, Homo sapiens
gttcccccacgaaat

SEQ ID NO: 427383 - DNA, 15 bp, Homo sapiens
tgttcccccacgaaa

SEQ ID NO: 427384 - DNA, 15 bp, Homo sapiens
ctgttcccccacgaa

SEQ ID NO: 427385 - DNA, 15 bp, Homo sapiens
actgttcccccacga

SEQ ID NO: 427386 - DNA, 15 bp, Homo sapiens
tactgttcccccacg

SEQ ID NO: 427387 - DNA, 15 bp, Homo sapiens
atactgttcccccac

SEQ ID NO: 427388 - DNA, 15 bp, Homo sapiens
tatactgttccccca

SEQ ID NO: 427389 - DNA, 15 bp, Homo sapiens
ctatactgttccccc

SEQ ID NO: 427390 - DNA, 15 bp, Homo sapiens
tctatactgttcccc

SEQ ID NO: 427391 - DNA, 15 bp, Homo sapiens
ttctatactgttccc

SEQ ID NO: 427392 - DNA, 15 bp, Homo sapiens
tttctatactgttcc

SEQ ID NO: 427393 - DNA, 15 bp, Homo sapiens
gtttctatactgttc

SEQ ID NO: 427394 - DNA, 15 bp, Homo sapiens
tgtttctatactgtt

SEQ ID NO: 427395 - DNA, 15 bp, Homo sapiens
ttgtttctatactgt

SEQ ID NO: 427396 - DNA, 15 bp, Homo sapiens
tttgtttctatactg

SEQ ID NO: 427397 - DNA, 15 bp, Homo sapiens
ttttgtttctatact

SEQ ID NO: 427398 - DNA, 15 bp, Homo sapiens
gttttgtttctatac

SEQ ID NO: 427399 - DNA, 15 bp, Homo sapiens
tgttttgtttctata

SEQ ID NO: 427400 - DNA, 15 bp, Homo sapiens
ttgttttgtttctat

SEQ ID NO: 427401 - DNA, 15 bp, Homo sapiens
gttgttttgtttcta

SEQ ID NO: 427402 - DNA, 15 bp, Homo sapiens
cgttgttttgtttct

SEQ ID NO: 427403 - DNA, 15 bp, Homo sapiens
tcgttgttttgtttc

SEQ ID NO: 427404 - DNA, 15 bp, Homo sapiens
ttcgttgttttgttt

SEQ ID NO: 427405 - DNA, 15 bp, Homo sapiens
tttcgttgttttgtt

SEQ ID NO: 427406 - DNA, 15 bp, Homo sapiens
atttcgttgttttgt

SEQ ID NO: 427407 - DNA, 15 bp, Homo sapiens
gatttcgttgttttg

SEQ ID NO: 427408 - DNA, 15 bp, Homo sapiens
tgatttcgttgtttt

SEQ ID NO: 427409 - DNA, 15 bp, Homo sapiens
atgatttcgttgttt

SEQ ID NO: 427410 - DNA, 15 bp, Homo sapiens
aatgatttcgttgtt

SEQ ID NO: 427411 - DNA, 15 bp, Homo sapiens
aaatgatttcgttgt

SEQ ID NO: 427412 - DNA, 15 bp, Homo sapiens
gaaatgatttcgttg

SEQ ID NO: 427413 - DNA, 15 bp, Homo sapiens
agaaatgatttcgtt

SEQ ID NO: 427414 - DNA, 15 bp, Homo sapiens
cagaaatgatttcgt

SEQ ID NO: 427415 - DNA, 15 bp, Homo sapiens
ccagaaatgatttcg

SEQ ID NO: 427416 - DNA, 15 bp, Homo sapiens
tccagaaatgatttc

SEQ ID NO: 427417 - DNA, 15 bp, Homo sapiens
ttccagaaatgattt

SEQ ID NO: 427418 - DNA, 15 bp, Homo sapiens
attccagaaatgatt

SEQ ID NO: 427419 - DNA, 15 bp, Homo sapiens
aattccagaaatgat

SEQ ID NO: 427420 - DNA, 15 bp, Homo sapiens
gaattccagaaatga

SEQ ID NO: 427421 - DNA, 15 bp, Homo sapiens
ggaattccagaaatg

SEQ ID NO: 427422 - DNA, 15 bp, Homo sapiens
gggaattccagaaat

SEQ ID NO: 427423 - DNA, 15 bp, Homo sapiens
agggaattccagaaa

SEQ ID NO: 427424 - DNA, 15 bp, Homo sapiens
cagggaattccagaa

SEQ ID NO: 427425 - DNA, 15 bp, Homo sapiens
tcagggaattccaga

SEQ ID NO: 427426 - DNA, 15 bp, Homo sapiens
ctcagggaattccag

SEQ ID NO: 427427 - DNA, 15 bp, Homo sapiens
gctcagggaattcca

SEQ ID NO: 427428 - DNA, 15 bp, Homo sapiens
ggctcagggaattcc

SEQ ID NO: 427429 - DNA, 15 bp, Homo sapiens
gggctcagggaattc

SEQ ID NO: 427430 - DNA, 15 bp, Homo sapiens
ggggctcagggaatt

SEQ ID NO: 427431 - DNA, 15 bp, Homo sapiens
aggggctcagggaat

SEQ ID NO: 427432 - DNA, 15 bp, Homo sapiens
gaggggctcagggaa

SEQ ID NO: 427433 - DNA, 15 bp, Homo sapiens
cgaggggctcaggga

SEQ ID NO: 427434 - DNA, 15 bp, Homo sapiens
tcgaggggctcaggg

SEQ ID NO: 427435 - DNA, 15 bp, Homo sapiens
gtcgaggggctcagg

SEQ ID NO: 427436 - DNA, 15 bp, Homo sapiens
agtcgaggggctcag

SEQ ID NO: 427437 - DNA, 15 bp, Homo sapiens
gagtcgaggggctca

SEQ ID NO: 427438 - DNA, 15 bp, Homo sapiens
tgagtcgaggggctc

SEQ ID NO: 427439 - DNA, 15 bp, Homo sapiens
atgagtcgaggggct

SEQ ID NO: 427440 - DNA, 15 bp, Homo sapiens
gatgagtcgaggggc

SEQ ID NO: 427441 - DNA, 15 bp, Homo sapiens
tgatgagtcgagggg

SEQ ID NO: 427442 - DNA, 15 bp, Homo sapiens
ctgatgagtcgaggg

SEQ ID NO: 427443 - DNA, 15 bp, Homo sapiens
actgatgagtcgagg

SEQ ID NO: 427444 - DNA, 15 bp, Homo sapiens
aactgatgagtcgag

SEQ ID NO: 427445 - DNA, 15 bp, Homo sapiens
aaactgatgagtcga

SEQ ID NO: 427446 - DNA, 15 bp, Homo sapiens
caaactgatgagtcg

SEQ ID NO: 427447 - DNA, 15 bp, Homo sapiens
acaaactgatgagtc

SEQ ID NO: 427448 - DNA, 15 bp, Homo sapiens
aacaaactgatgagt

SEQ ID NO: 427449 - DNA, 15 bp, Homo sapiens
aaacaaactgatgag

SEQ ID NO: 427450 - DNA, 15 bp, Homo sapiens
caaacaaactgatga

SEQ ID NO: 427451 - DNA, 15 bp, Homo sapiens
acaaacaaactgatg

SEQ ID NO: 427452 - DNA, 15 bp, Homo sapiens
aacaaacaaactgat

SEQ ID NO: 427453 - DNA, 15 bp, Homo sapiens
caacaaacaaactga

SEQ ID NO: 427454 - DNA, 15 bp, Homo sapiens
acaacaaacaaactg

SEQ ID NO: 427455 - DNA, 15 bp, Homo sapiens
aacaacaaacaaact

SEQ ID NO: 427456 - DNA, 15 bp, Homo sapiens
caacaacaaacaaac

SEQ ID NO: 427457 - DNA, 15 bp, Homo sapiens
tcaacaacaaacaaa

SEQ ID NO: 427458 - DNA, 15 bp, Homo sapiens
ttcaacaacaaacaa

SEQ ID NO: 427459 - DNA, 15 bp, Homo sapiens
cttcaacaacaaaca

SEQ ID NO: 427460 - DNA, 15 bp, Homo sapiens
gcttcaacaacaaac

SEQ ID NO: 427461 - DNA, 15 bp, Homo sapiens
tgcttcaacaacaaa

SEQ ID NO: 427462 - DNA, 15 bp, Homo sapiens
ctgcttcaacaacaa

SEQ ID NO: 427463 - DNA, 15 bp, Homo sapiens
tctgcttcaacaaca

SEQ ID NO: 427464 - DNA, 15 bp, Homo sapiens
ttctgcttcaacaac

SEQ ID NO: 427465 - DNA, 15 bp, Homo sapiens
tttctgcttcaacaa

SEQ ID NO: 427466 - DNA, 15 bp, Homo sapiens
atttctgcttcaaca

SEQ ID NO: 427467 - DNA, 15 bp, Homo sapiens
aatttctgcttcaac

SEQ ID NO: 427468 - DNA, 15 bp, Homo sapiens
aaatttctgcttcaa

SEQ ID NO: 427469 - DNA, 15 bp, Homo sapiens
taaatttctgcttca

SEQ ID NO: 427470 - DNA, 15 bp, Homo sapiens
ctaaatttctgcttc

SEQ ID NO: 427471 - DNA, 15 bp, Homo sapiens
gctaaatttctgctt

SEQ ID NO: 427472 - DNA, 15 bp, Homo sapiens
tgctaaatttctgct

SEQ ID NO: 427473 - DNA, 15 bp, Homo sapiens
ctgctaaatttctgc

SEQ ID NO: 427474 - DNA, 15 bp, Homo sapiens
actgctaaatttctg

SEQ ID NO: 427475 - DNA, 15 bp, Homo sapiens
gactgctaaatttct

SEQ ID NO: 427476 - DNA, 15 bp, Homo sapiens
ggactgctaaatttc

SEQ ID NO: 427477 - DNA, 15 bp, Homo sapiens
aggactgctaaattt

SEQ ID NO: 427478 - DNA, 15 bp, Homo sapiens
aaggactgctaaatt

SEQ ID NO: 427479 - DNA, 15 bp, Homo sapiens
caaggactgctaaat

SEQ ID NO: 427480 - DNA, 15 bp, Homo sapiens
acaaggactgctaaa

SEQ ID NO: 427481 - DNA, 15 bp, Homo sapiens
cacaaggactgctaa

SEQ ID NO: 427482 - DNA, 15 bp, Homo sapiens
ccacaaggactgcta

SEQ ID NO: 427483 - DNA, 15 bp, Homo sapiens
accacaaggactgct

SEQ ID NO: 427484 - DNA, 15 bp, Homo sapiens
taccacaaggactgc

SEQ ID NO: 427485 - DNA, 15 bp, Homo sapiens
ttaccacaaggactg

SEQ ID NO: 427486 - DNA, 15 bp, Homo sapiens
cttaccacaaggact

SEQ ID NO: 427487 - DNA, 15 bp, Homo sapiens
tcttaccacaaggac

SEQ ID NO: 427488 - DNA, 15 bp, Homo sapiens
ctcttaccacaagga

SEQ ID NO: 427489 - DNA, 15 bp, Homo sapiens
tctcttaccacaagg

SEQ ID NO: 427490 - DNA, 15 bp, Homo sapiens
ctctcttaccacaag

SEQ ID NO: 427491 - DNA, 15 bp, Homo sapiens
actctcttaccacaa

SEQ ID NO: 427492 - DNA, 15 bp, Homo sapiens
aactctcttaccaca

SEQ ID NO: 427493 - DNA, 15 bp, Homo sapiens
taactctcttaccac

SEQ ID NO: 427494 - DNA, 15 bp, Homo sapiens
ttaactctcttacca

SEQ ID NO: 427495 - DNA, 15 bp, Homo sapiens
cttaactctcttacc

SEQ ID NO: 427496 - DNA, 15 bp, Homo sapiens
acttaactctcttac

SEQ ID NO: 427497 - DNA, 15 bp, Homo sapiens
tacttaactctctta

SEQ ID NO: 427498 - DNA, 15 bp, Homo sapiens
atacttaactctctt

SEQ ID NO: 427499 - DNA, 15 bp, Homo sapiens
aatacttaactctct

SEQ ID NO: 427500 - DNA, 15 bp, Homo sapiens
aaatacttaactctc

SEQ ID NO: 427501 - DNA, 15 bp, Homo sapiens
gaaatacttaactct

SEQ ID NO: 427502 - DNA, 15 bp, Homo sapiens
ggaaatacttaactc

SEQ ID NO: 427503 - DNA, 15 bp, Homo sapiens
tggaaatacttaact

SEQ ID NO: 427504 - DNA, 15 bp, Homo sapiens
atggaaatacttaac

SEQ ID NO: 427505 - DNA, 15 bp, Homo sapiens
catggaaatacttaa

SEQ ID NO: 427506 - DNA, 15 bp, Homo sapiens
ccatggaaatactta

SEQ ID NO: 427507 - DNA, 15 bp, Homo sapiens
accatggaaatactt

SEQ ID NO: 427508 - DNA, 15 bp, Homo sapiens
gaccatggaaatact

SEQ ID NO: 427509 - DNA, 15 bp, Homo sapiens
ggaccatggaaatac

SEQ ID NO: 427510 - DNA, 15 bp, Homo sapiens
tggaccatggaaata

SEQ ID NO: 427511 - DNA, 15 bp, Homo sapiens
ttggaccatggaaat

SEQ ID NO: 427512 - DNA, 15 bp, Homo sapiens
gttggaccatggaaa

SEQ ID NO: 427513 - DNA, 15 bp, Homo sapiens
ggttggaccatggaa

SEQ ID NO: 427514 - DNA, 15 bp, Homo sapiens
tggttggaccatgga

SEQ ID NO: 427515 - DNA, 15 bp, Homo sapiens
ttggttggaccatgg

SEQ ID NO: 427516 - DNA, 15 bp, Homo sapiens
tttggttggaccatg

SEQ ID NO: 427517 - DNA, 15 bp, Homo sapiens
ttttggttggaccat

SEQ ID NO: 427518 - DNA, 15 bp, Homo sapiens
attttggttggacca

SEQ ID NO: 427519 - DNA, 15 bp, Homo sapiens
aattttggttggacc

SEQ ID NO: 427520 - DNA, 15 bp, Homo sapiens
aaattttggttggac

SEQ ID NO: 427521 - DNA, 15 bp, Homo sapiens
caaattttggttgga

SEQ ID NO: 427522 - DNA, 15 bp, Homo sapiens
tcaaattttggttgg

SEQ ID NO: 427523 - DNA, 15 bp, Homo sapiens
ctcaaattttggttg

SEQ ID NO: 427524 - DNA, 15 bp, Homo sapiens
tctcaaattttggtt

SEQ ID NO: 427525 - DNA, 15 bp, Homo sapiens
ctctcaaattttggt

SEQ ID NO: 427526 - DNA, 15 bp, Homo sapiens
actctcaaattttgg

SEQ ID NO: 427527 - DNA, 15 bp, Homo sapiens
tactctcaaattttg

SEQ ID NO: 427528 - DNA, 15 bp, Homo sapiens
atactctcaaatttt

SEQ ID NO: 427529 - DNA, 15 bp, Homo sapiens
aatactctcaaattt

SEQ ID NO: 427530 - DNA, 15 bp, Homo sapiens
aaatactctcaaatt

SEQ ID NO: 427531 - DNA, 15 bp, Homo sapiens
gaaatactctcaaat

SEQ ID NO: 427532 - DNA, 15 bp, Homo sapiens
ggaaatactctcaaa

SEQ ID NO: 427533 - DNA, 15 bp, Homo sapiens
tggaaatactctcaa

SEQ ID NO: 427534 - DNA, 15 bp, Homo sapiens
atggaaatactctca

SEQ ID NO: 427535 - DNA, 15 bp, Homo sapiens
catggaaatactctc

SEQ ID NO: 427536 - DNA, 15 bp, Homo sapiens
ccatggaaatactct

SEQ ID NO: 427537 - DNA, 15 bp, Homo sapiens
accatggaaatactc

SEQ ID NO: 427538 - DNA, 15 bp, Homo sapiens
gaattttggttggac

SEQ ID NO: 427539 - DNA, 15 bp, Homo sapiens
tgaattttggttgga

SEQ ID NO: 427540 - DNA, 15 bp, Homo sapiens
gtgaattttggttgg

SEQ ID NO: 427541 - DNA, 15 bp, Homo sapiens
tgtgaattttggttg

SEQ ID NO: 427542 - DNA, 15 bp, Homo sapiens
ttgtgaattttggtt

SEQ ID NO: 427543 - DNA, 15 bp, Homo sapiens
tttgtgaattttggt

SEQ ID NO: 427544 - DNA, 15 bp, Homo sapiens
ctttgtgaattttgg

SEQ ID NO: 427545 - DNA, 15 bp, Homo sapiens
actttgtgaattttg

SEQ ID NO: 427546 - DNA, 15 bp, Homo sapiens
aactttgtgaatttt

SEQ ID NO: 427547 - DNA, 15 bp, Homo sapiens
taactttgtgaattt

SEQ ID NO: 427548 - DNA, 15 bp, Homo sapiens
ataactttgtgaatt

SEQ ID NO: 427549 - DNA, 15 bp, Homo sapiens
aataactttgtgaat

SEQ ID NO: 427550 - DNA, 15 bp, Homo sapiens
aaataactttgtgaa

SEQ ID NO: 427551 - DNA, 15 bp, Homo sapiens
aaaataactttgtga

SEQ ID NO: 427552 - DNA, 15 bp, Homo sapiens
caaaataactttgtg

SEQ ID NO: 427553 - DNA, 15 bp, Homo sapiens
acaaaataactttgt

SEQ ID NO: 427554 - DNA, 15 bp, Homo sapiens
aacaaaataactttg

SEQ ID NO: 427555 - DNA, 15 bp, Homo sapiens
aaacaaaataacttt

SEQ ID NO: 427556 - DNA, 15 bp, Homo sapiens
gaaacaaaataactt

SEQ ID NO: 427557 - DNA, 15 bp, Homo sapiens
agaaacaaaataact

SEQ ID NO: 427558 - DNA, 15 bp, Homo sapiens
gagaaacaaaataac

SEQ ID NO: 427559 - DNA, 15 bp, Homo sapiens
tgagaaacaaaataa

SEQ ID NO: 427560 - DNA, 15 bp, Homo sapiens
gtgagaaacaaaata

SEQ ID NO: 427561 - DNA, 15 bp, Homo sapiens
agtgagaaacaaaat

SEQ ID NO: 427562 - DNA, 15 bp, Homo sapiens
aagtgagaaacaaaa

SEQ ID NO: 427563 - DNA, 15 bp, Homo sapiens
taagtgagaaacaaa

SEQ ID NO: 427564 - DNA, 15 bp, Homo sapiens
ctaagtgagaaacaa

SEQ ID NO: 427565 - DNA, 15 bp, Homo sapiens
actaagtgagaaaca

SEQ ID NO: 427566 - DNA, 15 bp, Homo sapiens
aactaagtgagaaac

SEQ ID NO: 427567 - DNA, 15 bp, Homo sapiens
aaactaagtgagaaa

SEQ ID NO: 427568 - DNA, 15 bp, Homo sapiens
gaaactaagtgagaa

SEQ ID NO: 427569 - DNA, 15 bp, Homo sapiens
agaaactaagtgaga

SEQ ID NO: 427570 - DNA, 15 bp, Homo sapiens
gagaaactaagtgag

SEQ ID NO: 427571 - DNA, 15 bp, Homo sapiens
ggagaaactaagtga

SEQ ID NO: 427572 - DNA, 15 bp, Homo sapiens
gggagaaactaagtg

SEQ ID NO: 427573 - DNA, 15 bp, Homo sapiens
agggagaaactaagt

SEQ ID NO: 427574 - DNA, 15 bp, Homo sapiens
gagggagaaactaag

SEQ ID NO: 427575 - DNA, 15 bp, Homo sapiens
ggagggagaaactaa

SEQ ID NO: 427576 - DNA, 15 bp, Homo sapiens
aggagggagaaacta

SEQ ID NO: 427577 - DNA, 15 bp, Homo sapiens
caggagggagaaact

SEQ ID NO: 427578 - DNA, 15 bp, Homo sapiens
tcaggagggagaaac

SEQ ID NO: 427579 - DNA, 15 bp, Homo sapiens
ttcaggagggagaaa

SEQ ID NO: 427580 - DNA, 15 bp, Homo sapiens
tttcaggagggagaa

SEQ ID NO: 427581 - DNA, 15 bp, Homo sapiens
gtttcaggagggaga

SEQ ID NO: 427582 - DNA, 15 bp, Homo sapiens
agtttcaggagggag

SEQ ID NO: 427583 - DNA, 15 bp, Homo sapiens
aagtttcaggaggga

SEQ ID NO: 427584 - DNA, 15 bp, Homo sapiens
taagtttcaggaggg

SEQ ID NO: 427585 - DNA, 15 bp, Homo sapiens
ctaagtttcaggagg

SEQ ID NO: 427586 - DNA, 15 bp, Homo sapiens
tctaagtttcaggag

SEQ ID NO: 427587 - DNA, 15 bp, Homo sapiens
ctctaagtttcagga

SEQ ID NO: 427588 - DNA, 15 bp, Homo sapiens
tctctaagtttcagg

SEQ ID NO: 427589 - DNA, 15 bp, Homo sapiens
ctctctaagtttcag

SEQ ID NO: 427590 - DNA, 15 bp, Homo sapiens
actctctaagtttca

SEQ ID NO: 427591 - DNA, 15 bp, Homo sapiens
tactctctaagtttc

SEQ ID NO: 427592 - DNA, 15 bp, Homo sapiens
ctactctctaagttt

SEQ ID NO: 427593 - DNA, 15 bp, Homo sapiens
cctactctctaagtt

SEQ ID NO: 427594 - DNA, 15 bp, Homo sapiens
ccctactctctaagt

SEQ ID NO: 427595 - DNA, 15 bp, Homo sapiens
tccctactctctaag

SEQ ID NO: 427596 - DNA, 15 bp, Homo sapiens
atccctactctctaa

SEQ ID NO: 427597 - DNA, 15 bp, Homo sapiens
catccctactctcta

SEQ ID NO: 427598 - DNA, 15 bp, Homo sapiens
acatccctactctct

SEQ ID NO: 427599 - DNA, 15 bp, Homo sapiens
tacatccctactctc

SEQ ID NO: 427600 - DNA, 15 bp, Homo sapiens
atacatccctactct

SEQ ID NO: 427601 - DNA, 15 bp, Homo sapiens
gatacatccctactc

SEQ ID NO: 427602 - DNA, 15 bp, Homo sapiens
agatacatccctact

SEQ ID NO: 427603 - DNA, 15 bp, Homo sapiens
gagatacatccctac

SEQ ID NO: 427604 - DNA, 15 bp, Homo sapiens
ggagatacatcccta

SEQ ID NO: 427605 - DNA, 15 bp, Homo sapiens
aggagatacatccct

SEQ ID NO: 427606 - DNA, 15 bp, Homo sapiens
aaggagatacatccc

SEQ ID NO: 427607 - DNA, 15 bp, Homo sapiens
gaaggagatacatcc

SEQ ID NO: 427608 - DNA, 15 bp, Homo sapiens
tgaaggagatacatc

SEQ ID NO: 427609 - DNA, 15 bp, Homo sapiens
atgaaggagatacat

SEQ ID NO: 427610 - DNA, 15 bp, Homo sapiens
tatgaaggagataca

SEQ ID NO: 427611 - DNA, 15 bp, Homo sapiens
atatgaaggagatac

SEQ ID NO: 427612 - DNA, 15 bp, Homo sapiens
aatatgaaggagata

SEQ ID NO: 427613 - DNA, 15 bp, Homo sapiens
aaatatgaaggagat

SEQ ID NO: 427614 - DNA, 15 bp, Homo sapiens
caaatatgaaggaga

SEQ ID NO: 427615 - DNA, 15 bp, Homo sapiens
tcaaatatgaaggag

SEQ ID NO: 427616 - DNA, 15 bp, Homo sapiens
ctcaaatatgaagga

SEQ ID NO: 427617 - DNA, 15 bp, Homo sapiens
tctcaaatatgaagg

SEQ ID NO: 427618 - DNA, 15 bp, Homo sapiens
atctcaaatatgaag

SEQ ID NO: 427619 - DNA, 15 bp, Homo sapiens
aatctcaaatatgaa

SEQ ID NO: 427620 - DNA, 15 bp, Homo sapiens
taatctcaaatatga

SEQ ID NO: 427621 - DNA, 15 bp, Homo sapiens
ataatctcaaatatg

SEQ ID NO: 427622 - DNA, 15 bp, Homo sapiens
tataatctcaaatat

SEQ ID NO: 427623 - DNA, 15 bp, Homo sapiens
ttataatctcaaata

SEQ ID NO: 427624 - DNA, 15 bp, Homo sapiens
tttataatctcaaat

SEQ ID NO: 427625 - DNA, 15 bp, Homo sapiens
ttttataatctcaaa

SEQ ID NO: 427626 - DNA, 15 bp, Homo sapiens
attttataatctcaa

SEQ ID NO: 427627 - DNA, 15 bp, Homo sapiens
aattttataatctca

SEQ ID NO: 427628 - DNA, 15 bp, Homo sapiens
taattttataatctc

SEQ ID NO: 427629 - DNA, 15 bp, Homo sapiens
ttaattttataatct

SEQ ID NO: 427630 - DNA, 15 bp, Homo sapiens
tttaattttataatc

SEQ ID NO: 427631 - DNA, 15 bp, Homo sapiens
atttaattttataat

SEQ ID NO: 427632 - DNA, 15 bp, Homo sapiens
catttaattttataa

SEQ ID NO: 427633 - DNA, 15 bp, Homo sapiens
acatttaattttata

SEQ ID NO: 427634 - DNA, 15 bp, Homo sapiens
aacatttaattttat

SEQ ID NO: 427635 - DNA, 15 bp, Homo sapiens
gttaacatttaattt

SEQ ID NO: 427636 - DNA, 15 bp, Homo sapiens
cgttaacatttaatt

SEQ ID NO: 427637 - DNA, 15 bp, Homo sapiens
acgttaacatttaat

SEQ ID NO: 427638 - DNA, 15 bp, Homo sapiens
aacgttaacatttaa

SEQ ID NO: 427639 - DNA, 15 bp, Homo sapiens
taacgttaacattta

SEQ ID NO: 427640 - DNA, 15 bp, Homo sapiens
ttaacgttaacattt

SEQ ID NO: 427641 - DNA, 15 bp, Homo sapiens
tttaacgttaacatt

SEQ ID NO: 427642 - DNA, 15 bp, Homo sapiens
gtttaacgttaacat

SEQ ID NO: 427643 - DNA, 15 bp, Homo sapiens
agtttaacgttaaca

SEQ ID NO: 427644 - DNA, 15 bp, Homo sapiens
aagtttaacgttaac

SEQ ID NO: 427645 - DNA, 15 bp, Homo sapiens
caagtttaacgttaa

SEQ ID NO: 427646 - DNA, 15 bp, Homo sapiens
ccaagtttaacgtta

SEQ ID NO: 427647 - DNA, 15 bp, Homo sapiens
cccaagtttaacgtt

SEQ ID NO: 427648 - DNA, 15 bp, Homo sapiens
acccaagtttaacgt

SEQ ID NO: 427649 - DNA, 15 bp, Homo sapiens
aacccaagtttaacg

SEQ ID NO: 427650 - DNA, 15 bp, Homo sapiens
aaacccaagtttaac

SEQ ID NO: 427651 - DNA, 15 bp, Homo sapiens
caaacccaagtttaa

SEQ ID NO: 427652 - DNA, 15 bp, Homo sapiens
ccaaacccaagttta

SEQ ID NO: 427653 - DNA, 15 bp, Homo sapiens
accaaacccaagttt

SEQ ID NO: 427654 - DNA, 15 bp, Homo sapiens
caccaaacccaagtt

SEQ ID NO: 427655 - DNA, 15 bp, Homo sapiens
acaccaaacccaagt

SEQ ID NO: 427656 - DNA, 15 bp, Homo sapiens
tacaccaaacccaag

SEQ ID NO: 427657 - DNA, 15 bp, Homo sapiens
ctacaccaaacccaa

SEQ ID NO: 427658 - DNA, 15 bp, Homo sapiens
tctacaccaaaccca

SEQ ID NO: 427659 - DNA, 15 bp, Homo sapiens
ttctacaccaaaccc

SEQ ID NO: 427660 - DNA, 15 bp, Homo sapiens
tttctacaccaaacc

SEQ ID NO: 427661 - DNA, 15 bp, Homo sapiens
gtttctacaccaaac

SEQ ID NO: 427662 - DNA, 15 bp, Homo sapiens
agtttctacaccaaa

SEQ ID NO: 427663 - DNA, 15 bp, Homo sapiens
cagtttctacaccaa

SEQ ID NO: 427664 - DNA, 15 bp, Homo sapiens
tcagtttctacacca

SEQ ID NO: 427665 - DNA, 15 bp, Homo sapiens
gtcagtttctacacc

SEQ ID NO: 427666 - DNA, 15 bp, Homo sapiens
agtcagtttctacac

SEQ ID NO: 427667 - DNA, 15 bp, Homo sapiens
cagtcagtttctaca

SEQ ID NO: 427668 - DNA, 15 bp, Homo sapiens
gcagtcagtttctac

SEQ ID NO: 427669 - DNA, 15 bp, Homo sapiens
tgcagtcagtttcta

SEQ ID NO: 427670 - DNA, 15 bp, Homo sapiens
atgcagtcagtttct

SEQ ID NO: 427671 - DNA, 15 bp, Homo sapiens
aatgcagtcagtttc

SEQ ID NO: 427672 - DNA, 15 bp, Homo sapiens
taatgcagtcagttt

SEQ ID NO: 427673 - DNA, 15 bp, Homo sapiens
ctaatgcagtcagtt

SEQ ID NO: 427674 - DNA, 15 bp, Homo sapiens
actaatgcagtcagt

SEQ ID NO: 427675 - DNA, 15 bp, Homo sapiens
gactaatgcagtcag

SEQ ID NO: 427676 - DNA, 15 bp, Homo sapiens
ggactaatgcagtca

SEQ ID NO: 427677 - DNA, 15 bp, Homo sapiens
gggactaatgcagtc

SEQ ID NO: 427678 - DNA, 15 bp, Homo sapiens
ggggactaatgcagt

SEQ ID NO: 427679 - DNA, 15 bp, Homo sapiens
tggggactaatgcag

SEQ ID NO: 427680 - DNA, 15 bp, Homo sapiens
atggggactaatgca

SEQ ID NO: 427681 - DNA, 15 bp, Homo sapiens
tatggggactaatgc

SEQ ID NO: 427682 - DNA, 15 bp, Homo sapiens
ttatggggactaatg

SEQ ID NO: 427683 - DNA, 15 bp, Homo sapiens
gttatggggactaat

SEQ ID NO: 427684 - DNA, 15 bp, Homo sapiens
agttatggggactaa

SEQ ID NO: 427685 - DNA, 15 bp, Homo sapiens
tagttatggggacta

SEQ ID NO: 427686 - DNA, 15 bp, Homo sapiens
ttagttatggggact

SEQ ID NO: 427687 - DNA, 15 bp, Homo sapiens
cttagttatggggac

SEQ ID NO: 427688 - DNA, 15 bp, Homo sapiens
ccttagttatgggga

SEQ ID NO: 427689 - DNA, 15 bp, Homo sapiens
accttagttatgggg

SEQ ID NO: 427690 - DNA, 15 bp, Homo sapiens
caccttagttatggg

SEQ ID NO: 427691 - DNA, 15 bp, Homo sapiens
gcaccttagttatgg

SEQ ID NO: 427692 - DNA, 15 bp, Homo sapiens
ggcaccttagttatg

SEQ ID NO: 427693 - DNA, 15 bp, Homo sapiens
tggcaccttagttat

SEQ ID NO: 427694 - DNA, 15 bp, Homo sapiens
ctggcaccttagtta

SEQ ID NO: 427695 - DNA, 15 bp, Homo sapiens
gctggcaccttagtt

SEQ ID NO: 427696 - DNA, 15 bp, Homo sapiens
tgctggcaccttagt

SEQ ID NO: 427697 - DNA, 15 bp, Homo sapiens
ttgctggcaccttag

SEQ ID NO: 427698 - DNA, 15 bp, Homo sapiens
tttgctggcacctta

SEQ ID NO: 427699 - DNA, 15 bp, Homo sapiens
ttttgctggcacctt

SEQ ID NO: 427700 - DNA, 15 bp, Homo sapiens
attttgctggcacct

SEQ ID NO: 427701 - DNA, 15 bp, Homo sapiens
gattttgctggcacc

SEQ ID NO: 427702 - DNA, 15 bp, Homo sapiens
agattttgctggcac

SEQ ID NO: 427703 - DNA, 15 bp, Homo sapiens
aagattttgctggca

SEQ ID NO: 427704 - DNA, 15 bp, Homo sapiens
aaagattttgctggc

SEQ ID NO: 427705 - DNA, 15 bp, Homo sapiens
caaagattttgctgg

SEQ ID NO: 427706 - DNA, 15 bp, Homo sapiens
gcaaagattttgctg

SEQ ID NO: 427707 - DNA, 15 bp, Homo sapiens
tgcaaagattttgct

SEQ ID NO: 427708 - DNA, 15 bp, Homo sapiens
atgcaaagattttgc

SEQ ID NO: 427709 - DNA, 15 bp, Homo sapiens
aatgcaaagattttg

SEQ ID NO: 427710 - DNA, 15 bp, Homo sapiens
taatgcaaagatttt

SEQ ID NO: 427711 - DNA, 15 bp, Homo sapiens
ataatgcaaagattt

SEQ ID NO: 427712 - DNA, 15 bp, Homo sapiens
tataatgcaaagatt

SEQ ID NO: 427713 - DNA, 15 bp, Homo sapiens
ctataatgcaaagat

SEQ ID NO: 427714 - DNA, 15 bp, Homo sapiens
gctataatgcaaaga

SEQ ID NO: 427715 - DNA, 15 bp, Homo sapiens
ggctataatgcaaag

SEQ ID NO: 427716 - DNA, 15 bp, Homo sapiens
aggctataatgcaaa

SEQ ID NO: 427717 - DNA, 15 bp, Homo sapiens
caggctataatgcaa

SEQ ID NO: 427718 - DNA, 15 bp, Homo sapiens
gcaggctataatgca

SEQ ID NO: 427719 - DNA, 15 bp, Homo sapiens
tgcaggctataatgc

SEQ ID NO: 427720 - DNA, 15 bp, Homo sapiens
atgcaggctataatg

SEQ ID NO: 427721 - DNA, 15 bp, Homo sapiens
tatgcaggctataat

SEQ ID NO: 427722 - DNA, 15 bp, Homo sapiens
atatgcaggctataa

SEQ ID NO: 427723 - DNA, 15 bp, Homo sapiens
tatatgcaggctata

SEQ ID NO: 427724 - DNA, 15 bp, Homo sapiens
gtatatgcaggctat

SEQ ID NO: 427725 - DNA, 15 bp, Homo sapiens
tgtatatgcaggcta

SEQ ID NO: 427726 - DNA, 15 bp, Homo sapiens
atgtatatgcaggct

SEQ ID NO: 427727 - DNA, 15 bp, Homo sapiens
catgtatatgcaggc

SEQ ID NO: 427728 - DNA, 15 bp, Homo sapiens
tcatgtatatgcagg

SEQ ID NO: 427729 - DNA, 15 bp, Homo sapiens
ctcatgtatatgcag

SEQ ID NO: 427730 - DNA, 15 bp, Homo sapiens
actcatgtatatgca

SEQ ID NO: 427731 - DNA, 15 bp, Homo sapiens
tactcatgtatatgc

SEQ ID NO: 427732 - DNA, 15 bp, Homo sapiens
atactcatgtatatg

SEQ ID NO: 427733 - DNA, 15 bp, Homo sapiens
catactcatgtatat

SEQ ID NO: 427734 - DNA, 15 bp, Homo sapiens
acatactcatgtata

SEQ ID NO: 427735 - DNA, 15 bp, Homo sapiens
gacatactcatgtat

SEQ ID NO: 427736 - DNA, 15 bp, Homo sapiens
ggacatactcatgta

SEQ ID NO: 427737 - DNA, 15 bp, Homo sapiens
aggacatactcatgt

SEQ ID NO: 427738 - DNA, 15 bp, Homo sapiens
gaggacatactcatg

SEQ ID NO: 427739 - DNA, 15 bp, Homo sapiens
tgaggacatactcat

SEQ ID NO: 427740 - DNA, 15 bp, Homo sapiens
gtgaggacatactca

SEQ ID NO: 427741 - DNA, 15 bp, Homo sapiens
tgtgaggacatactc

SEQ ID NO: 427742 - DNA, 15 bp, Homo sapiens
atgtgaggacatact

SEQ ID NO: 427743 - DNA, 15 bp, Homo sapiens
catgtgaggacatac

SEQ ID NO: 427744 - DNA, 15 bp, Homo sapiens
acatgtgaggacata

SEQ ID NO: 427745 - DNA, 15 bp, Homo sapiens
tacatgtgaggacat

SEQ ID NO: 427746 - DNA, 15 bp, Homo sapiens
gtacatgtgaggaca

SEQ ID NO: 427747 - DNA, 15 bp, Homo sapiens
ggtacatgtgaggac

SEQ ID NO: 427748 - DNA, 15 bp, Homo sapiens
tggtacatgtgagga

SEQ ID NO: 427749 - DNA, 15 bp, Homo sapiens
gtggtacatgtgagg

SEQ ID NO: 427750 - DNA, 15 bp, Homo sapiens
tgtggtacatgtgag

SEQ ID NO: 427751 - DNA, 15 bp, Homo sapiens
atgtggtacatgtga

SEQ ID NO: 427752 - DNA, 15 bp, Homo sapiens
gatgtggtacatgtg

SEQ ID NO: 427753 - DNA, 15 bp, Homo sapiens
tgatgtggtacatgt

SEQ ID NO: 427754 - DNA, 15 bp, Homo sapiens
ttgatgtggtacatg

SEQ ID NO: 427755 - DNA, 15 bp, Homo sapiens
attgatgtggtacat

SEQ ID NO: 427756 - DNA, 15 bp, Homo sapiens
aattgatgtggtaca

SEQ ID NO: 427757 - DNA, 15 bp, Homo sapiens
gaattgatgtggtac

SEQ ID NO: 427758 - DNA, 15 bp, Homo sapiens
ggaattgatgtggta

SEQ ID NO: 427759 - DNA, 15 bp, Homo sapiens
aggaattgatgtggt

SEQ ID NO: 427760 - DNA, 15 bp, Homo sapiens
taggaattgatgtgg

SEQ ID NO: 427761 - DNA, 15 bp, Homo sapiens
ttaggaattgatgtg

SEQ ID NO: 427762 - DNA, 15 bp, Homo sapiens
cttaggaattgatgt

SEQ ID NO: 427763 - DNA, 15 bp, Homo sapiens
acttaggaattgatg

SEQ ID NO: 427764 - DNA, 15 bp, Homo sapiens
aacttaggaattgat

SEQ ID NO: 427765 - DNA, 15 bp, Homo sapiens
aaacttaggaattga

SEQ ID NO: 427766 - DNA, 15 bp, Homo sapiens
aaaacttaggaattg

SEQ ID NO: 427767 - DNA, 15 bp, Homo sapiens
aaaaacttaggaatt

SEQ ID NO: 427768 - DNA, 15 bp, Homo sapiens
taaaaacttaggaat

SEQ ID NO: 427769 - DNA, 15 bp, Homo sapiens
ataaaaacttaggaa

SEQ ID NO: 427770 - DNA, 15 bp, Homo sapiens
aataaaaacttagga

SEQ ID NO: 427771 - DNA, 15 bp, Homo sapiens
aaataaaaacttagg

SEQ ID NO: 427772 - DNA, 15 bp, Homo sapiens
aaaataaaaacttag

SEQ ID NO: 427773 - DNA, 15 bp, Homo sapiens
aaaaataaaaactta

SEQ ID NO: 427774 - DNA, 15 bp, Homo sapiens
taaaaataaaaactt

SEQ ID NO: 427775 - DNA, 15 bp, Homo sapiens
ataaaaataaaaact

SEQ ID NO: 427776 - DNA, 15 bp, Homo sapiens
aataaaaataaaaac

SEQ ID NO: 427777 - DNA, 15 bp, Homo sapiens
gaataaaaataaaaa

SEQ ID NO: 427778 - DNA, 15 bp, Homo sapiens
agaataaaaataaaa

SEQ ID NO: 427779 - DNA, 15 bp, Homo sapiens
cagaataaaaataaa

SEQ ID NO: 427780 - DNA, 15 bp, Homo sapiens
gcagaataaaaataa

SEQ ID NO: 427781 - DNA, 15 bp, Homo sapiens
tgcagaataaaaata

SEQ ID NO: 427782 - DNA, 15 bp, Homo sapiens
ctgcagaataaaaat

SEQ ID NO: 427783 - DNA, 15 bp, Homo sapiens
gctgcagaataaaaa

SEQ ID NO: 427784 - DNA, 15 bp, Homo sapiens
tgctgcagaataaaa

SEQ ID NO: 427785 - DNA, 15 bp, Homo sapiens
atgctgcagaataaa

SEQ ID NO: 427786 - DNA, 15 bp, Homo sapiens
tatgctgcagaataa

SEQ ID NO: 427787 - DNA, 15 bp, Homo sapiens
atatgctgcagaata

SEQ ID NO: 427788 - DNA, 15 bp, Homo sapiens
tatatgctgcagaat

SEQ ID NO: 427789 - DNA, 15 bp, Homo sapiens
atatatgctgcagaa

SEQ ID NO: 427790 - DNA, 15 bp, Homo sapiens
tatatatgctgcaga

SEQ ID NO: 427791 - DNA, 15 bp, Homo sapiens
atatatatgctgcag

SEQ ID NO: 427792 - DNA, 15 bp, Homo sapiens
catatatatgctgca

SEQ ID NO: 427793 - DNA, 15 bp, Homo sapiens
gcatatatatgctgc

SEQ ID NO: 427794 - DNA, 15 bp, Homo sapiens
agcatatatatgctg

SEQ ID NO: 427795 - DNA, 15 bp, Homo sapiens
tagcatatatatgct

SEQ ID NO: 427796 - DNA, 15 bp, Homo sapiens
ttagcatatatatgc

SEQ ID NO: 427797 - DNA, 15 bp, Homo sapiens
attagcatatatatg

SEQ ID NO: 427798 - DNA, 15 bp, Homo sapiens
tattagcatatatat

SEQ ID NO: 427799 - DNA, 15 bp, Homo sapiens
ttattagcatatata

SEQ ID NO: 427800 - DNA, 15 bp, Homo sapiens
tttattagcatatat

SEQ ID NO: 427801 - DNA, 15 bp, Homo sapiens
ctttattagcatata

SEQ ID NO: 427802 - DNA, 15 bp, Homo sapiens
actttattagcatat

SEQ ID NO: 427803 - DNA, 15 bp, Homo sapiens
gactttattagcata

SEQ ID NO: 427804 - DNA, 15 bp, Homo sapiens
agactttattagcat

SEQ ID NO: 427805 - DNA, 15 bp, Homo sapiens
gagactttattagca

SEQ ID NO: 427806 - DNA, 15 bp, Homo sapiens
agagactttattagc

SEQ ID NO: 427807 - DNA, 15 bp, Homo sapiens
tagagactttattag

SEQ ID NO: 427808 - DNA, 15 bp, Homo sapiens
ttagagactttatta

SEQ ID NO: 427809 - DNA, 15 bp, Homo sapiens
attagagactttatt

SEQ ID NO: 427810 - DNA, 15 bp, Homo sapiens
gattagagactttat

SEQ ID NO: 427811 - DNA, 15 bp, Homo sapiens
tgattagagacttta

SEQ ID NO: 427812 - DNA, 15 bp, Homo sapiens
gtgattagagacttt

SEQ ID NO: 427813 - DNA, 15 bp, Homo sapiens
ggtgattagagactt

SEQ ID NO: 427814 - DNA, 15 bp, Homo sapiens
tggtgattagagact

SEQ ID NO: 427815 - DNA, 15 bp, Homo sapiens
atggtgattagagac

SEQ ID NO: 427816 - DNA, 15 bp, Homo sapiens
gatggtgattagaga

SEQ ID NO: 427817 - DNA, 15 bp, Homo sapiens
agatggtgattagag

SEQ ID NO: 427818 - DNA, 15 bp, Homo sapiens
tagatggtgattaga

SEQ ID NO: 427819 - DNA, 15 bp, Homo sapiens
atagatggtgattag

SEQ ID NO: 427820 - DNA, 15 bp, Homo sapiens
catagatggtgatta

SEQ ID NO: 427821 - DNA, 15 bp, Homo sapiens
acatagatggtgatt

SEQ ID NO: 427822 - DNA, 15 bp, Homo sapiens
gacatagatggtgat

SEQ ID NO: 427823 - DNA, 15 bp, Homo sapiens
agacatagatggtga

SEQ ID NO: 427824 - DNA, 15 bp, Homo sapiens
gagacatagatggtg

SEQ ID NO: 427825 - DNA, 15 bp, Homo sapiens
tgagacatagatggt

SEQ ID NO: 427826 - DNA, 15 bp, Homo sapiens
gtgagacatagatgg

SEQ ID NO: 427827 - DNA, 15 bp, Homo sapiens
agtgagacatagatg

SEQ ID NO: 427828 - DNA, 15 bp, Homo sapiens
aagtgagacatagat

SEQ ID NO: 427829 - DNA, 15 bp, Homo sapiens
aaagtgagacataga

SEQ ID NO: 427830 - DNA, 15 bp, Homo sapiens
aaaagtgagacatag

SEQ ID NO: 427831 - DNA, 15 bp, Homo sapiens
aaaaagtgagacata

SEQ ID NO: 427832 - DNA, 15 bp, Homo sapiens
taaaaagtgagacat

SEQ ID NO: 427833 - DNA, 15 bp, Homo sapiens
ttaaaaagtgagaca

SEQ ID NO: 427834 - DNA, 15 bp, Homo sapiens
attaaaaagtgagac

SEQ ID NO: 427835 - DNA, 15 bp, Homo sapiens
tattaaaaagtgaga

SEQ ID NO: 427836 - DNA, 15 bp, Homo sapiens
ttattaaaaagtgag

SEQ ID NO: 427837 - DNA, 15 bp, Homo sapiens
tttattaaaaagtga

SEQ ID NO: 427838 - DNA, 15 bp, Homo sapiens
ttttattaaaaagtg

SEQ ID NO: 427839 - DNA, 15 bp, Homo sapiens
tttttattaaaaagt

SEQ ID NO: 427840 - DNA, 15 bp, Homo sapiens
ttttttattaaaaag

SEQ ID NO: 427841 - DNA, 15 bp, Homo sapiens
cttttttattaaaaa

SEQ ID NO: 427842 - DNA, 15 bp, Homo sapiens
acttttttattaaaa

SEQ ID NO: 427843 - DNA, 15 bp, Homo sapiens
tacttttttattaaa

SEQ ID NO: 427844 - DNA, 15 bp, Homo sapiens
atacttttttattaa

SEQ ID NO: 427845 - DNA, 15 bp, Homo sapiens
aatacttttttatta

SEQ ID NO: 427846 - DNA, 15 bp, Homo sapiens
aaatacttttttatt

SEQ ID NO: 427847 - DNA, 15 bp, Homo sapiens
aaaatacttttttat

SEQ ID NO: 427848 - DNA, 15 bp, Homo sapiens
taaaatactttttta

SEQ ID NO: 427849 - DNA, 15 bp, Homo sapiens
ctaaaatactttttt

SEQ ID NO: 427850 - DNA, 15 bp, Homo sapiens
actaaaatacttttt

SEQ ID NO: 427851 - DNA, 15 bp, Homo sapiens
cactaaaatactttt

SEQ ID NO: 427852 - DNA, 15 bp, Homo sapiens
acactaaaatacttt

SEQ ID NO: 427853 - DNA, 15 bp, Homo sapiens
tacactaaaatactt

SEQ ID NO: 427854 - DNA, 15 bp, Homo sapiens
ttacactaaaatact

SEQ ID NO: 427855 - DNA, 15 bp, Homo sapiens
attacactaaaatac

SEQ ID NO: 427856 - DNA, 15 bp, Homo sapiens
cattacactaaaata

SEQ ID NO: 427857 - DNA, 15 bp, Homo sapiens
gcattacactaaaat

SEQ ID NO: 427858 - DNA, 15 bp, Homo sapiens
tgcattacactaaaa

SEQ ID NO: 427859 - DNA, 15 bp, Homo sapiens
ctgcattacactaaa

SEQ ID NO: 427860 - DNA, 15 bp, Homo sapiens
actgcattacactaa

SEQ ID NO: 427861 - DNA, 15 bp, Homo sapiens
cactgcattacacta

SEQ ID NO: 427862 - DNA, 15 bp, Homo sapiens
gcactgcattacact

SEQ ID NO: 427863 - DNA, 15 bp, Homo sapiens
tgcactgcattacac

SEQ ID NO: 427864 - DNA, 15 bp, Homo sapiens
atgcactgcattaca

SEQ ID NO: 427865 - DNA, 15 bp, Homo sapiens
aatgcactgcattac

SEQ ID NO: 427866 - DNA, 15 bp, Homo sapiens
aaatgcactgcatta

SEQ ID NO: 427867 - DNA, 15 bp, Homo sapiens
aaaatgcactgcatt

SEQ ID NO: 427868 - DNA, 15 bp, Homo sapiens
caaaatgcactgcat

SEQ ID NO: 427869 - DNA, 15 bp, Homo sapiens
tcaaaatgcactgca

SEQ ID NO: 427870 - DNA, 15 bp, Homo sapiens
ttcaaaatgcactgc

SEQ ID NO: 427871 - DNA, 15 bp, Homo sapiens
cttcaaaatgcactg

SEQ ID NO: 427872 - DNA, 15 bp, Homo sapiens
tcttcaaaatgcact

SEQ ID NO: 427873 - DNA, 15 bp, Homo sapiens
gtcttcaaaatgcac

SEQ ID NO: 427874 - DNA, 15 bp, Homo sapiens
tgtcttcaaaatgca

SEQ ID NO: 427875 - DNA, 15 bp, Homo sapiens
atgtcttcaaaatgc

SEQ ID NO: 427876 - DNA, 15 bp, Homo sapiens
catgtcttcaaaatg

SEQ ID NO: 427877 - DNA, 15 bp, Homo sapiens
acatgtcttcaaaat

SEQ ID NO: 427878 - DNA, 15 bp, Homo sapiens
tacatgtcttcaaaa

SEQ ID NO: 427879 - DNA, 15 bp, Homo sapiens
ctacatgtcttcaaa

SEQ ID NO: 427880 - DNA, 15 bp, Homo sapiens
actacatgtcttcaa

SEQ ID NO: 427881 - DNA, 15 bp, Homo sapiens
tactacatgtcttca

SEQ ID NO: 427882 - DNA, 15 bp, Homo sapiens
ttactacatgtcttc

SEQ ID NO: 427883 - DNA, 15 bp, Homo sapiens
tttactacatgtctt

SEQ ID NO: 427884 - DNA, 15 bp, Homo sapiens
atttactacatgtct

SEQ ID NO: 427885 - DNA, 15 bp, Homo sapiens
catttactacatgtc

SEQ ID NO: 427886 - DNA, 15 bp, Homo sapiens
acatttactacatgt

SEQ ID NO: 427887 - DNA, 15 bp, Homo sapiens
cacatttactacatg

SEQ ID NO: 427888 - DNA, 15 bp, Homo sapiens
acacatttactacat

SEQ ID NO: 427889 - DNA, 15 bp, Homo sapiens
tacacatttactaca

SEQ ID NO: 427890 - DNA, 15 bp, Homo sapiens
atacacatttactac

SEQ ID NO: 427891 - DNA, 15 bp, Homo sapiens
aatacacatttacta

SEQ ID NO: 427892 - DNA, 15 bp, Homo sapiens
aaatacacatttact

SEQ ID NO: 427893 - DNA, 15 bp, Homo sapiens
aaaatacacatttac

SEQ ID NO: 427894 - DNA, 15 bp, Homo sapiens
caaaatacacattta

SEQ ID NO: 427895 - DNA, 15 bp, Homo sapiens
acaaaatacacattt

SEQ ID NO: 427896 - DNA, 15 bp, Homo sapiens
cacaaaatacacatt

SEQ ID NO: 427897 - DNA, 15 bp, Homo sapiens
tcacaaaatacacat

SEQ ID NO: 427898 - DNA, 15 bp, Homo sapiens
ttcacaaaatacaca

SEQ ID NO: 427899 - DNA, 15 bp, Homo sapiens
gttcacaaaatacac

SEQ ID NO: 427900 - DNA, 15 bp, Homo sapiens
agttcacaaaataca

SEQ ID NO: 427901 - DNA, 15 bp, Homo sapiens
tagttcacaaaatac

SEQ ID NO: 427902 - DNA, 15 bp, Homo sapiens
ttagttcacaaaata

SEQ ID NO: 427903 - DNA, 15 bp, Homo sapiens
tttagttcacaaaat

SEQ ID NO: 427904 - DNA, 15 bp, Homo sapiens
atttagttcacaaaa

SEQ ID NO: 427905 - DNA, 15 bp, Homo sapiens
catttagttcacaaa

SEQ ID NO: 427906 - DNA, 15 bp, Homo sapiens
ccatttagttcacaa

SEQ ID NO: 427907 - DNA, 15 bp, Homo sapiens
tccatttagttcaca

SEQ ID NO: 427908 - DNA, 15 bp, Homo sapiens
ttccatttagttcac

SEQ ID NO: 427909 - DNA, 15 bp, Homo sapiens
tttccatttagttca

SEQ ID NO: 427910 - DNA, 15 bp, Homo sapiens
atttccatttagttc

SEQ ID NO: 427911 - DNA, 15 bp, Homo sapiens
gatttccatttagtt

SEQ ID NO: 427912 - DNA, 15 bp, Homo sapiens
tgatttccatttagt

SEQ ID NO: 427913 - DNA, 15 bp, Homo sapiens
ttgatttccatttag

SEQ ID NO: 427914 - DNA, 15 bp, Homo sapiens
attgatttccattta

SEQ ID NO: 427915 - DNA, 15 bp, Homo sapiens
tattgatttccattt

SEQ ID NO: 427916 - DNA, 15 bp, Homo sapiens
gtattgatttccatt

SEQ ID NO: 427917 - DNA, 15 bp, Homo sapiens
tgtattgatttccat

SEQ ID NO: 427918 - DNA, 15 bp, Homo sapiens
atgtattgatttcca

SEQ ID NO: 427919 - DNA, 15 bp, Homo sapiens
tatgtattgatttcc

SEQ ID NO: 427920 - DNA, 15 bp, Homo sapiens
ttatgtattgatttc

SEQ ID NO: 427921 - DNA, 15 bp, Homo sapiens
tttatgtattgattt

SEQ ID NO: 427922 - DNA, 15 bp, Homo sapiens
ttttatgtattgatt

SEQ ID NO: 427923 - DNA, 15 bp, Homo sapiens
attttatgtattgat

SEQ ID NO: 427924 - DNA, 15 bp, Homo sapiens
aattttatgtattga

SEQ ID NO: 427925 - DNA, 15 bp, Homo sapiens
taattttatgtattg

SEQ ID NO: 427926 - DNA, 15 bp, Homo sapiens
gtaattttatgtatt

SEQ ID NO: 427927 - DNA, 15 bp, Homo sapiens
tgtaattttatgtat

SEQ ID NO: 427928 - DNA, 15 bp, Homo sapiens
atgtaattttatgta

SEQ ID NO: 427929 - DNA, 15 bp, Homo sapiens
tatgtaattttatgt

SEQ ID NO: 427930 - DNA, 15 bp, Homo sapiens
ttatgtaattttatg

SEQ ID NO: 427931 - DNA, 15 bp, Homo sapiens
gttatgtaattttat

SEQ ID NO: 427932 - DNA, 15 bp, Homo sapiens
ggttatgtaatttta

SEQ ID NO: 427933 - DNA, 15 bp, Homo sapiens
aggttatgtaatttt

SEQ ID NO: 427934 - DNA, 15 bp, Homo sapiens
taggttatgtaattt

SEQ ID NO: 427935 - DNA, 15 bp, Homo sapiens
ataggttatgtaatt

SEQ ID NO: 427936 - DNA, 15 bp, Homo sapiens
tataggttatgtaat

SEQ ID NO: 427937 - DNA, 15 bp, Homo sapiens
ttataggttatgtaa

SEQ ID NO: 427938 - DNA, 15 bp, Homo sapiens
attataggttatgta

SEQ ID NO: 427939 - DNA, 15 bp, Homo sapiens
tattataggttatgt

SEQ ID NO: 427940 - DNA, 15 bp, Homo sapiens
gtattataggttatg

SEQ ID NO: 427941 - DNA, 15 bp, Homo sapiens
tgtattataggttat

SEQ ID NO: 427942 - DNA, 15 bp, Homo sapiens
ttgtattataggtta

SEQ ID NO: 427943 - DNA, 15 bp, Homo sapiens
gttgtattataggtt

SEQ ID NO: 427944 - DNA, 15 bp, Homo sapiens
tgttgtattataggt

SEQ ID NO: 427945 - DNA, 15 bp, Homo sapiens
atgttgtattatagg

SEQ ID NO: 427946 - DNA, 15 bp, Homo sapiens
aatgttgtattatag

SEQ ID NO: 427947 - DNA, 15 bp, Homo sapiens
taatgttgtattata

SEQ ID NO: 427948 - DNA, 15 bp, Homo sapiens
ttaatgttgtattat

SEQ ID NO: 427949 - DNA, 15 bp, Homo sapiens
attaatgttgtatta

SEQ ID NO: 427950 - DNA, 15 bp, Homo sapiens
aattaatgttgtatt

SEQ ID NO: 427951 - DNA, 15 bp, Homo sapiens
aaattaatgttgtat

SEQ ID NO: 427952 - DNA, 15 bp, Homo sapiens
aaaattaatgttgta

SEQ ID NO: 427953 - DNA, 15 bp, Homo sapiens
gaaaattaatgttgt

SEQ ID NO: 427954 - DNA, 15 bp, Homo sapiens
agaaaattaatgttg

SEQ ID NO: 427955 - DNA, 15 bp, Homo sapiens
aagaaaattaatgtt

SEQ ID NO: 427956 - DNA, 15 bp, Homo sapiens
aaagaaaattaatgt

SEQ ID NO: 427957 - DNA, 15 bp, Homo sapiens
gaaagaaaattaatg

SEQ ID NO: 427958 - DNA, 15 bp, Homo sapiens
agaaagaaaattaat

SEQ ID NO: 427959 - DNA, 15 bp, Homo sapiens
aagaaagaaaattaa

SEQ ID NO: 427960 - DNA, 15 bp, Homo sapiens
aaagaaagaaaatta

SEQ ID NO: 427961 - DNA, 15 bp, Homo sapiens
gaaaagaaagaaaat

SEQ ID NO: 427962 - DNA, 15 bp, Homo sapiens
agaaaagaaagaaaa

SEQ ID NO: 427963 - DNA, 15 bp, Homo sapiens
aagaaaagaaagaaa

SEQ ID NO: 427964 - DNA, 15 bp, Homo sapiens
gaagaaaagaaagaa

SEQ ID NO: 427965 - DNA, 15 bp, Homo sapiens
agaagaaaagaaaga

SEQ ID NO: 427966 - DNA, 15 bp, Homo sapiens
gagaagaaaagaaag

SEQ ID NO: 427967 - DNA, 15 bp, Homo sapiens
agagaagaaaagaaa

SEQ ID NO: 427968 - DNA, 15 bp, Homo sapiens
tagagaagaaaagaa

SEQ ID NO: 427969 - DNA, 15 bp, Homo sapiens
ttagagaagaaaaga

SEQ ID NO: 427970 - DNA, 15 bp, Homo sapiens
tttagagaagaaaag

SEQ ID NO: 427971 - DNA, 15 bp, Homo sapiens
atttagagaagaaaa

SEQ ID NO: 427972 - DNA, 15 bp, Homo sapiens
aatttagagaagaaa

SEQ ID NO: 427973 - DNA, 15 bp, Homo sapiens
taatttagagaagaa

SEQ ID NO: 427974 - DNA, 15 bp, Homo sapiens
ttaatttagagaaga

SEQ ID NO: 427975 - DNA, 15 bp, Homo sapiens
tttaatttagagaag

SEQ ID NO: 427976 - DNA, 15 bp, Homo sapiens
atttaatttagagaa

SEQ ID NO: 427977 - DNA, 15 bp, Homo sapiens
gatttaatttagaga

SEQ ID NO: 427978 - DNA, 15 bp, Homo sapiens
agatttaatttagag

SEQ ID NO: 427979 - DNA, 15 bp, Homo sapiens
aagatttaatttaga

SEQ ID NO: 427980 - DNA, 15 bp, Homo sapiens
aaagatttaatttag

SEQ ID NO: 427981 - DNA, 15 bp, Homo sapiens
aaaagatttaattta

SEQ ID NO: 427982 - DNA, 15 bp, Homo sapiens
gaaaagatttaattt

SEQ ID NO: 427983 - DNA, 15 bp, Homo sapiens
tgaaaagatttaatt

SEQ ID NO: 427984 - DNA, 15 bp, Homo sapiens
ttgaaaagatttaat

SEQ ID NO: 427985 - DNA, 15 bp, Homo sapiens
gttgaaaagatttaa

SEQ ID NO: 427986 - DNA, 15 bp, Homo sapiens
ggttgaaaagattta

SEQ ID NO: 427987 - DNA, 15 bp, Homo sapiens
aggttgaaaagattt

SEQ ID NO: 427988 - DNA, 15 bp, Homo sapiens
caggttgaaaagatt

SEQ ID NO: 427989 - DNA, 15 bp, Homo sapiens
acaggttgaaaagat

SEQ ID NO: 427990 - DNA, 15 bp, Homo sapiens
aacaggttgaaaaga

SEQ ID NO: 427991 - DNA, 15 bp, Homo sapiens
caacaggttgaaaag

SEQ ID NO: 427992 - DNA, 15 bp, Homo sapiens
gcaacaggttgaaaa

SEQ ID NO: 427993 - DNA, 15 bp, Homo sapiens
ggcaacaggttgaaa

SEQ ID NO: 427994 - DNA, 15 bp, Homo sapiens
aggcaacaggttgaa

SEQ ID NO: 427995 - DNA, 15 bp, Homo sapiens
taggcaacaggttga

SEQ ID NO: 427996 - DNA, 15 bp, Homo sapiens
ttaggcaacaggttg

SEQ ID NO: 427997 - DNA, 15 bp, Homo sapiens
tttaggcaacaggtt

SEQ ID NO: 427998 - DNA, 15 bp, Homo sapiens
atttaggcaacaggt

SEQ ID NO: 427999 - DNA, 15 bp, Homo sapiens
gatttaggcaacagg

SEQ ID NO: 428000 - DNA, 15 bp, Homo sapiens
ggatttaggcaacag

SEQ ID NO: 428001 - DNA, 15 bp, Homo sapiens
tggatttaggcaaca

SEQ ID NO: 428002 - DNA, 15 bp, Homo sapiens
atggatttaggcaac

SEQ ID NO: 428003 - DNA, 15 bp, Homo sapiens
gatggatttaggcaa

SEQ ID NO: 428004 - DNA, 15 bp, Homo sapiens
ggatggatttaggca

SEQ ID NO: 428005 - DNA, 15 bp, Homo sapiens
tggatggatttaggc

SEQ ID NO: 428006 - DNA, 15 bp, Homo sapiens
ttggatggatttagg

SEQ ID NO: 428007 - DNA, 15 bp, Homo sapiens
tttggatggatttag

SEQ ID NO: 428008 - DNA, 15 bp, Homo sapiens
ttttggatggattta

SEQ ID NO: 428009 - DNA, 15 bp, Homo sapiens
tttttggatggattt

SEQ ID NO: 428010 - DNA, 15 bp, Homo sapiens
atttttggatggatt

SEQ ID NO: 428011 - DNA, 15 bp, Homo sapiens
tatttttggatggat

SEQ ID NO: 428012 - DNA, 15 bp, Homo sapiens
atatttttggatgga

SEQ ID NO: 428013 - DNA, 15 bp, Homo sapiens
tatatttttggatgg

SEQ ID NO: 428014 - DNA, 15 bp, Homo sapiens
ttatatttttggatg

SEQ ID NO: 428015 - DNA, 15 bp, Homo sapiens
attatatttttggat

SEQ ID NO: 428016 - DNA, 15 bp, Homo sapiens
gattatatttttgga

SEQ ID NO: 428017 - DNA, 15 bp, Homo sapiens
tgattatatttttgg

SEQ ID NO: 428018 - DNA, 15 bp, Homo sapiens
gtgattatatttttg

SEQ ID NO: 428019 - DNA, 15 bp, Homo sapiens
tgtgattatattttt

SEQ ID NO: 428020 - DNA, 15 bp, Homo sapiens
atgtgattatatttt

SEQ ID NO: 428021 - DNA, 15 bp, Homo sapiens
aatgtgattatattt

SEQ ID NO: 428022 - DNA, 15 bp, Homo sapiens
aaatgtgattatatt

SEQ ID NO: 428023 - DNA, 15 bp, Homo sapiens
aaaatgtgattatat

SEQ ID NO: 428024 - DNA, 15 bp, Homo sapiens
aaaaatgtgattata

SEQ ID NO: 428025 - DNA, 15 bp, Homo sapiens
taaaaatgtgattat

SEQ ID NO: 428026 - DNA, 15 bp, Homo sapiens
ttaaaaatgtgatta

SEQ ID NO: 428027 - DNA, 15 bp, Homo sapiens
tttaaaaatgtgatt

SEQ ID NO: 428028 - DNA, 15 bp, Homo sapiens
ttttaaaaatgtgat

SEQ ID NO: 428029 - DNA, 15 bp, Homo sapiens
attttaaaaatgtga

SEQ ID NO: 428030 - DNA, 15 bp, Homo sapiens
tattttaaaaatgtg

SEQ ID NO: 428031 - DNA, 15 bp, Homo sapiens
ttattttaaaaatgt

SEQ ID NO: 428032 - DNA, 15 bp, Homo sapiens
attattttaaaaatg

SEQ ID NO: 428033 - DNA, 15 bp, Homo sapiens
aattattttaaaaat

SEQ ID NO: 428034 - DNA, 15 bp, Homo sapiens
aaattattttaaaaa

SEQ ID NO: 428035 - DNA, 15 bp, Homo sapiens
caaattattttaaaa

SEQ ID NO: 428036 - DNA, 15 bp, Homo sapiens
acaaattattttaaa

SEQ ID NO: 428037 - DNA, 15 bp, Homo sapiens
tacaaattattttaa

SEQ ID NO: 428038 - DNA, 15 bp, Homo sapiens
ctacaaattatttta

SEQ ID NO: 428039 - DNA, 15 bp, Homo sapiens
cctacaaattatttt

SEQ ID NO: 428040 - DNA, 15 bp, Homo sapiens
acctacaaattattt

SEQ ID NO: 428041 - DNA, 15 bp, Homo sapiens
tacctacaaattatt

SEQ ID NO: 428042 - DNA, 15 bp, Homo sapiens
gtacctacaaattat

SEQ ID NO: 428043 - DNA, 15 bp, Homo sapiens
agtacctacaaatta

SEQ ID NO: 428044 - DNA, 15 bp, Homo sapiens
aagtacctacaaatt

SEQ ID NO: 428045 - DNA, 15 bp, Homo sapiens
caagtacctacaaat

SEQ ID NO: 428046 - DNA, 15 bp, Homo sapiens
ccaagtacctacaaa

SEQ ID NO: 428047 - DNA, 15 bp, Homo sapiens
gccaagtacctacaa

SEQ ID NO: 428048 - DNA, 15 bp, Homo sapiens
tgccaagtacctaca

SEQ ID NO: 428049 - DNA, 15 bp, Homo sapiens
ctgccaagtacctac

SEQ ID NO: 428050 - DNA, 15 bp, Homo sapiens
tctgccaagtaccta

SEQ ID NO: 428051 - DNA, 15 bp, Homo sapiens
atctgccaagtacct

SEQ ID NO: 428052 - DNA, 15 bp, Homo sapiens
aatctgccaagtacc

SEQ ID NO: 428053 - DNA, 15 bp, Homo sapiens
aaatctgccaagtac

SEQ ID NO: 428054 - DNA, 15 bp, Homo sapiens
aaaatctgccaagta

SEQ ID NO: 428055 - DNA, 15 bp, Homo sapiens
gaaaatctgccaagt

SEQ ID NO: 428056 - DNA, 15 bp, Homo sapiens
tgaaaatctgccaag

SEQ ID NO: 428057 - DNA, 15 bp, Homo sapiens
ctgaaaatctgccaa

SEQ ID NO: 428058 - DNA, 15 bp, Homo sapiens
gctgaaaatctgcca

SEQ ID NO: 428059 - DNA, 15 bp, Homo sapiens
tgctgaaaatctgcc

SEQ ID NO: 428060 - DNA, 15 bp, Homo sapiens
gtgctgaaaatctgc

SEQ ID NO: 428061 - DNA, 15 bp, Homo sapiens
tgtgctgaaaatctg

SEQ ID NO: 428062 - DNA, 15 bp, Homo sapiens
gtgtgctgaaaatct

SEQ ID NO: 428063 - DNA, 15 bp, Homo sapiens
tgtgtgctgaaaatc

SEQ ID NO: 428064 - DNA, 15 bp, Homo sapiens
atgtgtgctgaaaat

SEQ ID NO: 428065 - DNA, 15 bp, Homo sapiens
gatgtgtgctgaaaa

SEQ ID NO: 428066 - DNA, 15 bp, Homo sapiens
agatgtgtgctgaaa

SEQ ID NO: 428067 - DNA, 15 bp, Homo sapiens
aagatgtgtgctgaa

SEQ ID NO: 428068 - DNA, 15 bp, Homo sapiens
caagatgtgtgctga

SEQ ID NO: 428069 - DNA, 15 bp, Homo sapiens
acaagatgtgtgctg

SEQ ID NO: 428070 - DNA, 15 bp, Homo sapiens
aacaagatgtgtgct

SEQ ID NO: 428071 - DNA, 15 bp, Homo sapiens
gaacaagatgtgtgc

SEQ ID NO: 428072 - DNA, 15 bp, Homo sapiens
agaacaagatgtgtg

SEQ ID NO: 428073 - DNA, 15 bp, Homo sapiens
gagaacaagatgtgt

SEQ ID NO: 428074 - DNA, 15 bp, Homo sapiens
tgagaacaagatgtg

SEQ ID NO: 428075 - DNA, 15 bp, Homo sapiens
atgagaacaagatgt

SEQ ID NO: 428076 - DNA, 15 bp, Homo sapiens
aatgagaacaagatg

SEQ ID NO: 428077 - DNA, 15 bp, Homo sapiens
caatgagaacaagat

SEQ ID NO: 428078 - DNA, 15 bp, Homo sapiens
acaatgagaacaaga

SEQ ID NO: 428079 - DNA, 15 bp, Homo sapiens
aacaatgagaacaag

SEQ ID NO: 428080 - DNA, 15 bp, Homo sapiens
aaacaatgagaacaa

SEQ ID NO: 428081 - DNA, 15 bp, Homo sapiens
taaacaatgagaaca

SEQ ID NO: 428082 - DNA, 15 bp, Homo sapiens
ttaaacaatgagaac

SEQ ID NO: 428083 - DNA, 15 bp, Homo sapiens
cttaaacaatgagaa

SEQ ID NO: 428084 - DNA, 15 bp, Homo sapiens
acttaaacaatgaga

SEQ ID NO: 428085 - DNA, 15 bp, Homo sapiens
gacttaaacaatgag

SEQ ID NO: 428086 - DNA, 15 bp, Homo sapiens
agacttaaacaatga

SEQ ID NO: 428087 - DNA, 15 bp, Homo sapiens
aagacttaaacaatg

SEQ ID NO: 428088 - DNA, 15 bp, Homo sapiens
caagacttaaacaat

SEQ ID NO: 428089 - DNA, 15 bp, Homo sapiens
tcaagacttaaacaa

SEQ ID NO: 428090 - DNA, 15 bp, Homo sapiens
ttcaagacttaaaca

SEQ ID NO: 428091 - DNA, 15 bp, Homo sapiens
tttcaagacttaaac

SEQ ID NO: 428092 - DNA, 15 bp, Homo sapiens
atttcaagacttaaa

SEQ ID NO: 428093 - DNA, 15 bp, Homo sapiens
catttcaagacttaa

SEQ ID NO: 428094 - DNA, 15 bp, Homo sapiens
acatttcaagactta

SEQ ID NO: 428095 - DNA, 15 bp, Homo sapiens
aacatttcaagactt

SEQ ID NO: 428096 - DNA, 15 bp, Homo sapiens
taacatttcaagact

SEQ ID NO: 428097 - DNA, 15 bp, Homo sapiens
ctaacatttcaagac

SEQ ID NO: 428098 - DNA, 15 bp, Homo sapiens
cctaacatttcaaga

SEQ ID NO: 428099 - DNA, 15 bp, Homo sapiens
tcctaacatttcaag

SEQ ID NO: 428100 - DNA, 15 bp, Homo sapiens
gtcctaacatttcaa

SEQ ID NO: 428101 - DNA, 15 bp, Homo sapiens
agtcctaacatttca

SEQ ID NO: 428102 - DNA, 15 bp, Homo sapiens
aagtcctaacatttc

SEQ ID NO: 428103 - DNA, 15 bp, Homo sapiens
aaagtcctaacattt

SEQ ID NO: 428104 - DNA, 15 bp, Homo sapiens
caaagtcctaacatt

SEQ ID NO: 428105 - DNA, 15 bp, Homo sapiens
ccaaagtcctaacat

SEQ ID NO: 428106 - DNA, 15 bp, Homo sapiens
accaaagtcctaaca

SEQ ID NO: 428107 - DNA, 15 bp, Homo sapiens
gaccaaagtcctaac

SEQ ID NO: 428108 - DNA, 15 bp, Homo sapiens
agaccaaagtcctaa

SEQ ID NO: 428109 - DNA, 15 bp, Homo sapiens
aagaccaaagtccta

SEQ ID NO: 428110 - DNA, 15 bp, Homo sapiens
taagaccaaagtcct

SEQ ID NO: 428111 - DNA, 15 bp, Homo sapiens
ttaagaccaaagtcc

SEQ ID NO: 428112 - DNA, 15 bp, Homo sapiens
gttaagaccaaagtc

SEQ ID NO: 428113 - DNA, 15 bp, Homo sapiens
tgttaagaccaaagt

SEQ ID NO: 428114 - DNA, 15 bp, Homo sapiens
atgttaagaccaaag

SEQ ID NO: 428115 - DNA, 15 bp, Homo sapiens
gatgttaagaccaaa

SEQ ID NO: 428116 - DNA, 15 bp, Homo sapiens
agatgttaagaccaa

SEQ ID NO: 428117 - DNA, 15 bp, Homo sapiens
aagatgttaagacca

SEQ ID NO: 428118 - DNA, 15 bp, Homo sapiens
aaagatgttaagacc

SEQ ID NO: 428119 - DNA, 15 bp, Homo sapiens
aaaagatgttaagac

SEQ ID NO: 428120 - DNA, 15 bp, Homo sapiens
taaaagatgttaaga

SEQ ID NO: 428121 - DNA, 15 bp, Homo sapiens
ttaaaagatgttaag

SEQ ID NO: 428122 - DNA, 15 bp, Homo sapiens
attaaaagatgttaa

SEQ ID NO: 428123 - DNA, 15 bp, Homo sapiens
tattaaaagatgtta

SEQ ID NO: 428124 - DNA, 15 bp, Homo sapiens
ctattaaaagatgtt

SEQ ID NO: 428125 - DNA, 15 bp, Homo sapiens
gctattaaaagatgt

SEQ ID NO: 428126 - DNA, 15 bp, Homo sapiens
agctattaaaagatg

SEQ ID NO: 428127 - DNA, 15 bp, Homo sapiens
cagctattaaaagat

SEQ ID NO: 428128 - DNA, 15 bp, Homo sapiens
gcagctattaaaaga

SEQ ID NO: 428129 - DNA, 15 bp, Homo sapiens
tgcagctattaaaag

SEQ ID NO: 428130 - DNA, 15 bp, Homo sapiens
atgcagctattaaaa

SEQ ID NO: 428131 - DNA, 15 bp, Homo sapiens
tatgcagctattaaa

SEQ ID NO: 428132 - DNA, 15 bp, Homo sapiens
atatgcagctattaa

SEQ ID NO: 428133 - DNA, 15 bp, Homo sapiens
aatatgcagctatta

SEQ ID NO: 428134 - DNA, 15 bp, Homo sapiens
taatatgcagctatt

SEQ ID NO: 428135 - DNA, 15 bp, Homo sapiens
ataatatgcagctat

SEQ ID NO: 428136 - DNA, 15 bp, Homo sapiens
tataatatgcagcta

SEQ ID NO: 428137 - DNA, 15 bp, Homo sapiens
gtataatatgcagct

SEQ ID NO: 428138 - DNA, 15 bp, Homo sapiens
tgtataatatgcagc

SEQ ID NO: 428139 - DNA, 15 bp, Homo sapiens
atgtataatatgcag

SEQ ID NO: 428140 - DNA, 15 bp, Homo sapiens
catgtataatatgca

SEQ ID NO: 428141 - DNA, 15 bp, Homo sapiens
acatgtataatatgc

SEQ ID NO: 428142 - DNA, 15 bp, Homo sapiens
tacatgtataatatg

SEQ ID NO: 428143 - DNA, 15 bp, Homo sapiens
gtacatgtataatat

SEQ ID NO: 428144 - DNA, 15 bp, Homo sapiens
agtacatgtataata

SEQ ID NO: 428145 - DNA, 15 bp, Homo sapiens
aagtacatgtataat

SEQ ID NO: 428146 - DNA, 15 bp, Homo sapiens
taagtacatgtataa

SEQ ID NO: 428147 - DNA, 15 bp, Homo sapiens
ttaagtacatgtata

SEQ ID NO: 428148 - DNA, 15 bp, Homo sapiens
attaagtacatgtat

SEQ ID NO: 428149 - DNA, 15 bp, Homo sapiens
gattaagtacatgta

SEQ ID NO: 428150 - DNA, 15 bp, Homo sapiens
agattaagtacatgt

SEQ ID NO: 428151 - DNA, 15 bp, Homo sapiens
tagattaagtacatg

SEQ ID NO: 428152 - DNA, 15 bp, Homo sapiens
atagattaagtacat

SEQ ID NO: 428153 - DNA, 15 bp, Homo sapiens
tatagattaagtaca

SEQ ID NO: 428154 - DNA, 15 bp, Homo sapiens
ttatagattaagtac

SEQ ID NO: 428155 - DNA, 15 bp, Homo sapiens
gttatagattaagta

SEQ ID NO: 428156 - DNA, 15 bp, Homo sapiens
tgttatagattaagt

SEQ ID NO: 428157 - DNA, 15 bp, Homo sapiens
ctgttatagattaag

SEQ ID NO: 428158 - DNA, 15 bp, Homo sapiens
cctgttatagattaa

SEQ ID NO: 428159 - DNA, 15 bp, Homo sapiens
acctgttatagatta

SEQ ID NO: 428160 - DNA, 15 bp, Homo sapiens
cacctgttatagatt

SEQ ID NO: 428161 - DNA, 15 bp, Homo sapiens
acacctgttatagat

SEQ ID NO: 428162 - DNA, 15 bp, Homo sapiens
cacacctgttataga

SEQ ID NO: 428163 - DNA, 15 bp, Homo sapiens
acacacctgttatag

SEQ ID NO: 428164 - DNA, 15 bp, Homo sapiens
gacacacctgttata

SEQ ID NO: 428165 - DNA, 15 bp, Homo sapiens
tgacacacctgttat

SEQ ID NO: 428166 - DNA, 15 bp, Homo sapiens
atgacacacctgtta

SEQ ID NO: 428167 - DNA, 15 bp, Homo sapiens
tatgacacacctgtt

SEQ ID NO: 428168 - DNA, 15 bp, Homo sapiens
atatgacacacctgt

SEQ ID NO: 428169 - DNA, 15 bp, Homo sapiens
aatatgacacacctg

SEQ ID NO: 428170 - DNA, 15 bp, Homo sapiens
aaatatgacacacct

SEQ ID NO: 428171 - DNA, 15 bp, Homo sapiens
aaaatatgacacacc

SEQ ID NO: 428172 - DNA, 15 bp, Homo sapiens
gaaaatatgacacac

SEQ ID NO: 428173 - DNA, 15 bp, Homo sapiens
agaaaatatgacaca

SEQ ID NO: 428174 - DNA, 15 bp, Homo sapiens
gagaaaatatgacac

SEQ ID NO: 428175 - DNA, 15 bp, Homo sapiens
tgagaaaatatgaca

SEQ ID NO: 428176 - DNA, 15 bp, Homo sapiens
ttgagaaaatatgac

SEQ ID NO: 428177 - DNA, 15 bp, Homo sapiens
tttgagaaaatatga

SEQ ID NO: 428178 - DNA, 15 bp, Homo sapiens
gtttgagaaaatatg

SEQ ID NO: 428179 - DNA, 15 bp, Homo sapiens
tgtttgagaaaatat

SEQ ID NO: 428180 - DNA, 15 bp, Homo sapiens
atgtttgagaaaata

SEQ ID NO: 428181 - DNA, 15 bp, Homo sapiens
catgtttgagaaaat

SEQ ID NO: 428182 - DNA, 15 bp, Homo sapiens
ccatgtttgagaaaa

SEQ ID NO: 428183 - DNA, 15 bp, Homo sapiens
accatgtttgagaaa

SEQ ID NO: 428184 - DNA, 15 bp, Homo sapiens
taccatgtttgagaa

SEQ ID NO: 428185 - DNA, 15 bp, Homo sapiens
ttaccatgtttgaga

SEQ ID NO: 428186 - DNA, 15 bp, Homo sapiens
attaccatgtttgag

SEQ ID NO: 428187 - DNA, 15 bp, Homo sapiens
aattaccatgtttga

SEQ ID NO: 428188 - DNA, 15 bp, Homo sapiens
aaattaccatgtttg

SEQ ID NO: 428189 - DNA, 15 bp, Homo sapiens
aaaattaccatgttt

SEQ ID NO: 428190 - DNA, 15 bp, Homo sapiens
aaaaattaccatgtt

SEQ ID NO: 428191 - DNA, 15 bp, Homo sapiens
taaaaattaccatgt

SEQ ID NO: 428192 - DNA, 15 bp, Homo sapiens
ataaaaattaccatg

SEQ ID NO: 428193 - DNA, 15 bp, Homo sapiens
gataaaaattaccat

SEQ ID NO: 428194 - DNA, 15 bp, Homo sapiens
cgataaaaattacca

SEQ ID NO: 428195 - DNA, 15 bp, Homo sapiens
tcgataaaaattacc

SEQ ID NO: 428196 - DNA, 15 bp, Homo sapiens
ctcgataaaaattac

SEQ ID NO: 428197 - DNA, 15 bp, Homo sapiens
cctcgataaaaatta

SEQ ID NO: 428198 - DNA, 15 bp, Homo sapiens
tcctcgataaaaatt

SEQ ID NO: 428199 - DNA, 15 bp, Homo sapiens
atcctcgataaaaat

SEQ ID NO: 428200 - DNA, 15 bp, Homo sapiens
aatcctcgataaaaa

SEQ ID NO: 428201 - DNA, 15 bp, Homo sapiens
taatcctcgataaaa

SEQ ID NO: 428202 - DNA, 15 bp, Homo sapiens
ttaatcctcgataaa

SEQ ID NO: 428203 - DNA, 15 bp, Homo sapiens
cttaatcctcgataa

SEQ ID NO: 428204 - DNA, 15 bp, Homo sapiens
gcttaatcctcgata

SEQ ID NO: 428205 - DNA, 15 bp, Homo sapiens
tgcttaatcctcgat

SEQ ID NO: 428206 - DNA, 15 bp, Homo sapiens
gtgcttaatcctcga

SEQ ID NO: 428207 - DNA, 15 bp, Homo sapiens
tgtgcttaatcctcg

SEQ ID NO: 428208 - DNA, 15 bp, Homo sapiens
atgtgcttaatcctc

SEQ ID NO: 428209 - DNA, 15 bp, Homo sapiens
catgtgcttaatcct

SEQ ID NO: 428210 - DNA, 15 bp, Homo sapiens
gcatgtgcttaatcc

SEQ ID NO: 428211 - DNA, 15 bp, Homo sapiens
tgcatgtgcttaatc

SEQ ID NO: 428212 - DNA, 15 bp, Homo sapiens
atgcatgtgcttaat

SEQ ID NO: 428213 - DNA, 15 bp, Homo sapiens
catgcatgtgcttaa

SEQ ID NO: 428214 - DNA, 15 bp, Homo sapiens
acatgcatgtgctta

SEQ ID NO: 428215 - DNA, 15 bp, Homo sapiens
aacatgcatgtgctt

SEQ ID NO: 428216 - DNA, 15 bp, Homo sapiens
gaacatgcatgtgct

SEQ ID NO: 428217 - DNA, 15 bp, Homo sapiens
agaacatgcatgtgc

SEQ ID NO: 428218 - DNA, 15 bp, Homo sapiens
gagaacatgcatgtg

SEQ ID NO: 428219 - DNA, 15 bp, Homo sapiens
tgagaacatgcatgt

SEQ ID NO: 428220 - DNA, 15 bp, Homo sapiens
atgagaacatgcatg

SEQ ID NO: 428221 - DNA, 15 bp, Homo sapiens
aatgagaacatgcat

SEQ ID NO: 428222 - DNA, 15 bp, Homo sapiens
caatgagaacatgca

SEQ ID NO: 428223 - DNA, 15 bp, Homo sapiens
ccaatgagaacatgc

SEQ ID NO: 428224 - DNA, 15 bp, Homo sapiens
accaatgagaacatg

SEQ ID NO: 428225 - DNA, 15 bp, Homo sapiens
gaccaatgagaacat

SEQ ID NO: 428226 - DNA, 15 bp, Homo sapiens
agaccaatgagaaca

SEQ ID NO: 428227 - DNA, 15 bp, Homo sapiens
cagaccaatgagaac

SEQ ID NO: 428228 - DNA, 15 bp, Homo sapiens
tcagaccaatgagaa

SEQ ID NO: 428229 - DNA, 15 bp, Homo sapiens
ttcagaccaatgaga

SEQ ID NO: 428230 - DNA, 15 bp, Homo sapiens
tttcagaccaatgag

SEQ ID NO: 428231 - DNA, 15 bp, Homo sapiens
ttttcagaccaatga

SEQ ID NO: 428232 - DNA, 15 bp, Homo sapiens
gttttcagaccaatg

SEQ ID NO: 428233 - DNA, 15 bp, Homo sapiens
tgttttcagaccaat

SEQ ID NO: 428234 - DNA, 15 bp, Homo sapiens
atgttttcagaccaa

SEQ ID NO: 428235 - DNA, 15 bp, Homo sapiens
tatgttttcagacca

SEQ ID NO: 428236 - DNA, 15 bp, Homo sapiens
atatgttttcagacc

SEQ ID NO: 428237 - DNA, 15 bp, Homo sapiens
gatatgttttcagac

SEQ ID NO: 428238 - DNA, 15 bp, Homo sapiens
ggatatgttttcaga

SEQ ID NO: 428239 - DNA, 15 bp, Homo sapiens
tggatatgttttcag

SEQ ID NO: 428240 - DNA, 15 bp, Homo sapiens
ttggatatgttttca

SEQ ID NO: 428241 - DNA, 15 bp, Homo sapiens
gttggatatgttttc

SEQ ID NO: 428242 - DNA, 15 bp, Homo sapiens
tgttggatatgtttt

SEQ ID NO: 428243 - DNA, 15 bp, Homo sapiens
ttgttggatatgttt

SEQ ID NO: 428244 - DNA, 15 bp, Homo sapiens
cttgttggatatgtt

SEQ ID NO: 428245 - DNA, 15 bp, Homo sapiens
tcttgttggatatgt

SEQ ID NO: 428246 - DNA, 15 bp, Homo sapiens
gtcttgttggatatg

SEQ ID NO: 428247 - DNA, 15 bp, Homo sapiens
tgtcttgttggatat

SEQ ID NO: 428248 - DNA, 15 bp, Homo sapiens
atgtcttgttggata

SEQ ID NO: 428249 - DNA, 15 bp, Homo sapiens
tatgtcttgttggat

SEQ ID NO: 428250 - DNA, 15 bp, Homo sapiens
atatgtcttgttgga

SEQ ID NO: 428251 - DNA, 15 bp, Homo sapiens
tatatgtcttgttgg

SEQ ID NO: 428252 - DNA, 15 bp, Homo sapiens
ttatatgtcttgttg

SEQ ID NO: 428253 - DNA, 15 bp, Homo sapiens
attatatgtcttgtt

SEQ ID NO: 428254 - DNA, 15 bp, Homo sapiens
aattatatgtcttgt

SEQ ID NO: 428255 - DNA, 15 bp, Homo sapiens
taattatatgtcttg

SEQ ID NO: 428256 - DNA, 15 bp, Homo sapiens
ttaattatatgtctt

SEQ ID NO: 428257 - DNA, 15 bp, Homo sapiens
tttaattatatgtct

SEQ ID NO: 428258 - DNA, 15 bp, Homo sapiens
atttaattatatgtc

SEQ ID NO: 428259 - DNA, 15 bp, Homo sapiens
tatttaattatatgt

SEQ ID NO: 428260 - DNA, 15 bp, Homo sapiens
ttatttaattatatg

SEQ ID NO: 428261 - DNA, 15 bp, Homo sapiens
tttatttaattatat

SEQ ID NO: 428262 - DNA, 15 bp, Homo sapiens
ttttatttaattata

SEQ ID NO: 428263 - DNA, 15 bp, Homo sapiens
cttttatttaattat

SEQ ID NO: 428264 - DNA, 15 bp, Homo sapiens
tcttttatttaatta

SEQ ID NO: 428265 - DNA, 15 bp, Homo sapiens
atcttttatttaatt

SEQ ID NO: 428266 - DNA, 15 bp, Homo sapiens
aatcttttatttaat

SEQ ID NO: 428267 - DNA, 15 bp, Homo sapiens
taatcttttatttaa

SEQ ID NO: 428268 - DNA, 15 bp, Homo sapiens
ttaatcttttattta

SEQ ID NO: 428269 - DNA, 15 bp, Homo sapiens
cttaatcttttattt

SEQ ID NO: 428270 - DNA, 15 bp, Homo sapiens
tcttaatcttttatt

SEQ ID NO: 428271 - DNA, 15 bp, Homo sapiens
atcttaatcttttat

SEQ ID NO: 428272 - DNA, 15 bp, Homo sapiens
aatcttaatctttta

SEQ ID NO: 428273 - DNA, 15 bp, Homo sapiens
taatcttaatctttt

SEQ ID NO: 428274 - DNA, 15 bp, Homo sapiens
ctaatcttaatcttt

SEQ ID NO: 428275 - DNA, 15 bp, Homo sapiens
tctaatcttaatctt

SEQ ID NO: 428276 - DNA, 15 bp, Homo sapiens
ttctaatcttaatct

SEQ ID NO: 428277 - DNA, 15 bp, Homo sapiens
tttctaatcttaatc

SEQ ID NO: 428278 - DNA, 15 bp, Homo sapiens
atttctaatcttaat

SEQ ID NO: 428279 - DNA, 15 bp, Homo sapiens
aatttctaatcttaa

SEQ ID NO: 428280 - DNA, 15 bp, Homo sapiens
caatttctaatctta

SEQ ID NO: 428281 - DNA, 15 bp, Homo sapiens
acaatttctaatctt

SEQ ID NO: 428282 - DNA, 15 bp, Homo sapiens
aacaatttctaatct

SEQ ID NO: 428283 - DNA, 15 bp, Homo sapiens
taacaatttctaatc

SEQ ID NO: 428284 - DNA, 15 bp, Homo sapiens
ttaacaatttctaat

SEQ ID NO: 428285 - DNA, 15 bp, Homo sapiens
gttaacaatttctaa

SEQ ID NO: 428286 - DNA, 15 bp, Homo sapiens
cgttaacaatttcta

SEQ ID NO: 428287 - DNA, 15 bp, Homo sapiens
acgttaacaatttct

SEQ ID NO: 428288 - DNA, 15 bp, Homo sapiens
tacgttaacaatttc

SEQ ID NO: 428289 - DNA, 15 bp, Homo sapiens
gtacgttaacaattt

SEQ ID NO: 428290 - DNA, 15 bp, Homo sapiens
agtacgttaacaatt

SEQ ID NO: 428291 - DNA, 15 bp, Homo sapiens
aagtacgttaacaat

SEQ ID NO: 428292 - DNA, 15 bp, Homo sapiens
aaagtacgttaacaa

SEQ ID NO: 428293 - DNA, 15 bp, Homo sapiens
aaaagtacgttaaca

SEQ ID NO: 428294 - DNA, 15 bp, Homo sapiens
aaaaagtacgttaac

SEQ ID NO: 428295 - DNA, 15 bp, Homo sapiens
taaaaagtacgttaa

SEQ ID NO: 428296 - DNA, 15 bp, Homo sapiens
ttaaaaagtacgtta

SEQ ID NO: 428297 - DNA, 15 bp, Homo sapiens
cttaaaaagtacgtt

SEQ ID NO: 428298 - DNA, 15 bp, Homo sapiens
tcttaaaaagtacgt

SEQ ID NO: 428299 - DNA, 15 bp, Homo sapiens
ctcttaaaaagtacg

SEQ ID NO: 428300 - DNA, 15 bp, Homo sapiens
actcttaaaaagtac

SEQ ID NO: 428301 - DNA, 15 bp, Homo sapiens
gactcttaaaaagta

SEQ ID NO: 428302 - DNA, 15 bp, Homo sapiens
tgactcttaaaaagt

SEQ ID NO: 428303 - DNA, 15 bp, Homo sapiens
atgactcttaaaaag

SEQ ID NO: 428304 - DNA, 15 bp, Homo sapiens
aatgactcttaaaaa

SEQ ID NO: 428305 - DNA, 15 bp, Homo sapiens
aaatgactcttaaaa

SEQ ID NO: 428306 - DNA, 15 bp, Homo sapiens
aaaatgactcttaaa

SEQ ID NO: 428307 - DNA, 15 bp, Homo sapiens
taaaatgactcttaa

SEQ ID NO: 428308 - DNA, 15 bp, Homo sapiens
ctaaaatgactctta

SEQ ID NO: 428309 - DNA, 15 bp, Homo sapiens
actaaaatgactctt

SEQ ID NO: 428310 - DNA, 15 bp, Homo sapiens
cactaaaatgactct

SEQ ID NO: 428311 - DNA, 15 bp, Homo sapiens
tcactaaaatgactc

SEQ ID NO: 428312 - DNA, 15 bp, Homo sapiens
atcactaaaatgact

SEQ ID NO: 428313 - DNA, 15 bp, Homo sapiens
aatcactaaaatgac

SEQ ID NO: 428314 - DNA, 15 bp, Homo sapiens
caatcactaaaatga

SEQ ID NO: 428315 - DNA, 15 bp, Homo sapiens
acaatcactaaaatg

SEQ ID NO: 428316 - DNA, 15 bp, Homo sapiens
aacaatcactaaaat

SEQ ID NO: 428317 - DNA, 15 bp, Homo sapiens
caacaatcactaaaa

SEQ ID NO: 428318 - DNA, 15 bp, Homo sapiens
acaacaatcactaaa

SEQ ID NO: 428319 - DNA, 15 bp, Homo sapiens
aacaacaatcactaa

SEQ ID NO: 428320 - DNA, 15 bp, Homo sapiens
taacaacaatcacta

SEQ ID NO: 428321 - DNA, 15 bp, Homo sapiens
gtaacaacaatcact

SEQ ID NO: 428322 - DNA, 15 bp, Homo sapiens
tgtaacaacaatcac

SEQ ID NO: 428323 - DNA, 15 bp, Homo sapiens
ttgtaacaacaatca

SEQ ID NO: 428324 - DNA, 15 bp, Homo sapiens
gttgtaacaacaatc

SEQ ID NO: 428325 - DNA, 15 bp, Homo sapiens
agttgtaacaacaat

SEQ ID NO: 428326 - DNA, 15 bp, Homo sapiens
tagttgtaacaacaa

SEQ ID NO: 428327 - DNA, 15 bp, Homo sapiens
atagttgtaacaaca

SEQ ID NO: 428328 - DNA, 15 bp, Homo sapiens
aatagttgtaacaac

SEQ ID NO: 428329 - DNA, 15 bp, Homo sapiens
aaatagttgtaacaa

SEQ ID NO: 428330 - DNA, 15 bp, Homo sapiens
taaatagttgtaaca

SEQ ID NO: 428331 - DNA, 15 bp, Homo sapiens
ctaaatagttgtaac

SEQ ID NO: 428332 - DNA, 15 bp, Homo sapiens
gctaaatagttgtaa

SEQ ID NO: 428333 - DNA, 15 bp, Homo sapiens
agctaaatagttgta

SEQ ID NO: 428334 - DNA, 15 bp, Homo sapiens
aagctaaatagttgt

SEQ ID NO: 428335 - DNA, 15 bp, Homo sapiens
caagctaaatagttg

SEQ ID NO: 428336 - DNA, 15 bp, Homo sapiens
acaagctaaatagtt

SEQ ID NO: 428337 - DNA, 15 bp, Homo sapiens
gacaagctaaatagt

SEQ ID NO: 428338 - DNA, 15 bp, Homo sapiens
tgacaagctaaatag

SEQ ID NO: 428339 - DNA, 15 bp, Homo sapiens
ttgacaagctaaata

SEQ ID NO: 428340 - DNA, 15 bp, Homo sapiens
attgacaagctaaat

SEQ ID NO: 428341 - DNA, 15 bp, Homo sapiens
aattgacaagctaaa

SEQ ID NO: 428342 - DNA, 15 bp, Homo sapiens
gaattgacaagctaa

SEQ ID NO: 428343 - DNA, 15 bp, Homo sapiens
agaattgacaagcta

SEQ ID NO: 428344 - DNA, 15 bp, Homo sapiens
aagaattgacaagct

SEQ ID NO: 428345 - DNA, 15 bp, Homo sapiens
aaagaattgacaagc

SEQ ID NO: 428346 - DNA, 15 bp, Homo sapiens
gaaagaattgacaag

SEQ ID NO: 428347 - DNA, 15 bp, Homo sapiens
agaaagaattgacaa

SEQ ID NO: 428348 - DNA, 15 bp, Homo sapiens
gagaaagaattgaca

SEQ ID NO: 428349 - DNA, 15 bp, Homo sapiens
agagaaagaattgac

SEQ ID NO: 428350 - DNA, 15 bp, Homo sapiens
tagagaaagaattga

SEQ ID NO: 428351 - DNA, 15 bp, Homo sapiens
ttagagaaagaattg

SEQ ID NO: 428352 - DNA, 15 bp, Homo sapiens
gttagagaaagaatt

SEQ ID NO: 428353 - DNA, 15 bp, Homo sapiens
tgttagagaaagaat

SEQ ID NO: 428354 - DNA, 15 bp, Homo sapiens
gtgttagagaaagaa

SEQ ID NO: 428355 - DNA, 15 bp, Homo sapiens
agtgttagagaaaga

SEQ ID NO: 428356 - DNA, 15 bp, Homo sapiens
tagtgttagagaaag

SEQ ID NO: 428357 - DNA, 15 bp, Homo sapiens
ctagtgttagagaaa

SEQ ID NO: 428358 - DNA, 15 bp, Homo sapiens
cctagtgttagagaa

SEQ ID NO: 428359 - DNA, 15 bp, Homo sapiens
ccctagtgttagaga

SEQ ID NO: 428360 - DNA, 15 bp, Homo sapiens
accctagtgttagag

SEQ ID NO: 428361 - DNA, 15 bp, Homo sapiens
taccctagtgttaga

SEQ ID NO: 428362 - DNA, 15 bp, Homo sapiens
ctaccctagtgttag

SEQ ID NO: 428363 - DNA, 15 bp, Homo sapiens
actaccctagtgtta

SEQ ID NO: 428364 - DNA, 15 bp, Homo sapiens
aactaccctagtgtt

SEQ ID NO: 428365 - DNA, 15 bp, Homo sapiens
aaactaccctagtgt

SEQ ID NO: 428366 - DNA, 15 bp, Homo sapiens
aaaactaccctagtg

SEQ ID NO: 428367 - DNA, 15 bp, Homo sapiens
aaaaactaccctagt

SEQ ID NO: 428368 - DNA, 15 bp, Homo sapiens
gaaaaactaccctag

SEQ ID NO: 428369 - DNA, 15 bp, Homo sapiens
tgaaaaactacccta

SEQ ID NO: 428370 - DNA, 15 bp, Homo sapiens
atgaaaaactaccct

SEQ ID NO: 428371 - DNA, 15 bp, Homo sapiens
aatgaaaaactaccc

SEQ ID NO: 428372 - DNA, 15 bp, Homo sapiens
aaatgaaaaactacc

SEQ ID NO: 428373 - DNA, 15 bp, Homo sapiens
aaaatgaaaaactac

SEQ ID NO: 428374 - DNA, 15 bp, Homo sapiens
caaaatgaaaaacta

SEQ ID NO: 428375 - DNA, 15 bp, Homo sapiens
acaaaatgaaaaact

SEQ ID NO: 428376 - DNA, 15 bp, Homo sapiens
aacaaaatgaaaaac

SEQ ID NO: 428377 - DNA, 15 bp, Homo sapiens
caacaaaatgaaaaa

SEQ ID NO: 428378 - DNA, 15 bp, Homo sapiens
gcaacaaaatgaaaa

SEQ ID NO: 428379 - DNA, 15 bp, Homo sapiens
tgcaacaaaatgaaa

SEQ ID NO: 428380 - DNA, 15 bp, Homo sapiens
atgcaacaaaatgaa

SEQ ID NO: 428381 - DNA, 15 bp, Homo sapiens
tatgcaacaaaatga

SEQ ID NO: 428382 - DNA, 15 bp, Homo sapiens
gtatgcaacaaaatg

SEQ ID NO: 428383 - DNA, 15 bp, Homo sapiens
agtatgcaacaaaat

SEQ ID NO: 428384 - DNA, 15 bp, Homo sapiens
gagtatgcaacaaaa

SEQ ID NO: 428385 - DNA, 15 bp, Homo sapiens
agagtatgcaacaaa

SEQ ID NO: 428386 - DNA, 15 bp, Homo sapiens
tagagtatgcaacaa

SEQ ID NO: 428387 - DNA, 15 bp, Homo sapiens
atagagtatgcaaca

SEQ ID NO: 428388 - DNA, 15 bp, Homo sapiens
aatagagtatgcaac

SEQ ID NO: 428389 - DNA, 15 bp, Homo sapiens
caatagagtatgcaa

SEQ ID NO: 428390 - DNA, 15 bp, Homo sapiens
acaatagagtatgca

SEQ ID NO: 428391 - DNA, 15 bp, Homo sapiens
gacaatagagtatgc

SEQ ID NO: 428392 - DNA, 15 bp, Homo sapiens
tgacaatagagtatg

SEQ ID NO: 428393 - DNA, 15 bp, Homo sapiens
atgacaatagagtat

SEQ ID NO: 428394 - DNA, 15 bp, Homo sapiens
tatgacaatagagta

SEQ ID NO: 428395 - DNA, 15 bp, Homo sapiens
atatgacaatagagt

SEQ ID NO: 428396 - DNA, 15 bp, Homo sapiens
gatatgacaatagag

SEQ ID NO: 428397 - DNA, 15 bp, Homo sapiens
agatatgacaataga

SEQ ID NO: 428398 - DNA, 15 bp, Homo sapiens
cagatatgacaatag

SEQ ID NO: 428399 - DNA, 15 bp, Homo sapiens
ccagatatgacaata

SEQ ID NO: 428400 - DNA, 15 bp, Homo sapiens
tccagatatgacaat

SEQ ID NO: 428401 - DNA, 15 bp, Homo sapiens
ttccagatatgacaa

SEQ ID NO: 428402 - DNA, 15 bp, Homo sapiens
attccagatatgaca

SEQ ID NO: 428403 - DNA, 15 bp, Homo sapiens
cattccagatatgac

SEQ ID NO: 428404 - DNA, 15 bp, Homo sapiens
acattccagatatga

SEQ ID NO: 428405 - DNA, 15 bp, Homo sapiens
cacattccagatatg

SEQ ID NO: 428406 - DNA, 15 bp, Homo sapiens
acacattccagatat

SEQ ID NO: 428407 - DNA, 15 bp, Homo sapiens
aacacattccagata

SEQ ID NO: 428408 - DNA, 15 bp, Homo sapiens
taacacattccagat

SEQ ID NO: 428409 - DNA, 15 bp, Homo sapiens
ataacacattccaga

SEQ ID NO: 428410 - DNA, 15 bp, Homo sapiens
tataacacattccag

SEQ ID NO: 428411 - DNA, 15 bp, Homo sapiens
atataacacattcca

SEQ ID NO: 428412 - DNA, 15 bp, Homo sapiens
aatataacacattcc

SEQ ID NO: 428413 - DNA, 15 bp, Homo sapiens
caatataacacattc

SEQ ID NO: 428414 - DNA, 15 bp, Homo sapiens
gcaatataacacatt

SEQ ID NO: 428415 - DNA, 15 bp, Homo sapiens
ggcaatataacacat

SEQ ID NO: 428416 - DNA, 15 bp, Homo sapiens
tggcaatataacaca

SEQ ID NO: 428417 - DNA, 15 bp, Homo sapiens
atggcaatataacac

SEQ ID NO: 428418 - DNA, 15 bp, Homo sapiens
gatggcaatataaca

SEQ ID NO: 428419 - DNA, 15 bp, Homo sapiens
agatggcaatataac

SEQ ID NO: 428420 - DNA, 15 bp, Homo sapiens
tagatggcaatataa

SEQ ID NO: 428421 - DNA, 15 bp, Homo sapiens
ttagatggcaatata

SEQ ID NO: 428422 - DNA, 15 bp, Homo sapiens
tttagatggcaatat

SEQ ID NO: 428423 - DNA, 15 bp, Homo sapiens
ttttagatggcaata

SEQ ID NO: 428424 - DNA, 15 bp, Homo sapiens
attttagatggcaat

SEQ ID NO: 428425 - DNA, 15 bp, Homo sapiens
gattttagatggcaa

SEQ ID NO: 428426 - DNA, 15 bp, Homo sapiens
tgattttagatggca

SEQ ID NO: 428427 - DNA, 15 bp, Homo sapiens
ttgattttagatggc

SEQ ID NO: 428428 - DNA, 15 bp, Homo sapiens
gttgattttagatgg

SEQ ID NO: 428429 - DNA, 15 bp, Homo sapiens
agttgattttagatg

SEQ ID NO: 428430 - DNA, 15 bp, Homo sapiens
cagttgattttagat

SEQ ID NO: 428431 - DNA, 15 bp, Homo sapiens
gcagttgattttaga

SEQ ID NO: 428432 - DNA, 15 bp, Homo sapiens
agcagttgattttag

SEQ ID NO: 428433 - DNA, 15 bp, Homo sapiens
aagcagttgatttta

SEQ ID NO: 428434 - DNA, 15 bp, Homo sapiens
taagcagttgatttt

SEQ ID NO: 428435 - DNA, 15 bp, Homo sapiens
ctaagcagttgattt

SEQ ID NO: 428436 - DNA, 15 bp, Homo sapiens
cctaagcagttgatt

SEQ ID NO: 428437 - DNA, 15 bp, Homo sapiens
ccctaagcagttgat

SEQ ID NO: 428438 - DNA, 15 bp, Homo sapiens
cccctaagcagttga

SEQ ID NO: 428439 - DNA, 15 bp, Homo sapiens
tcccctaagcagttg

SEQ ID NO: 428440 - DNA, 15 bp, Homo sapiens
gtcccctaagcagtt

SEQ ID NO: 428441 - DNA, 15 bp, Homo sapiens
ggtcccctaagcagt

SEQ ID NO: 428442 - DNA, 15 bp, Homo sapiens
aggtcccctaagcag

SEQ ID NO: 428443 - DNA, 15 bp, Homo sapiens
caggtcccctaagca

SEQ ID NO: 428444 - DNA, 15 bp, Homo sapiens
ccaggtcccctaagc

SEQ ID NO: 428445 - DNA, 15 bp, Homo sapiens
tccaggtcccctaag

SEQ ID NO: 428446 - DNA, 15 bp, Homo sapiens
ctccaggtcccctaa

SEQ ID NO: 428447 - DNA, 15 bp, Homo sapiens
tctccaggtccccta

SEQ ID NO: 428448 - DNA, 15 bp, Homo sapiens
atctccaggtcccct

SEQ ID NO: 428449 - DNA, 15 bp, Homo sapiens
catctccaggtcccc

SEQ ID NO: 428450 - DNA, 15 bp, Homo sapiens
tcatctccaggtccc

SEQ ID NO: 428451 - DNA, 15 bp, Homo sapiens
atcatctccaggtcc

SEQ ID NO: 428452 - DNA, 15 bp, Homo sapiens
aatcatctccaggtc

SEQ ID NO: 428453 - DNA, 15 bp, Homo sapiens
taatcatctccaggt

SEQ ID NO: 428454 - DNA, 15 bp, Homo sapiens
ataatcatctccagg

SEQ ID NO: 428455 - DNA, 15 bp, Homo sapiens
cataatcatctccag

SEQ ID NO: 428456 - DNA, 15 bp, Homo sapiens
tcataatcatctcca

SEQ ID NO: 428457 - DNA, 15 bp, Homo sapiens
atcataatcatctcc

SEQ ID NO: 428458 - DNA, 15 bp, Homo sapiens
catcataatcatctc

SEQ ID NO: 428459 - DNA, 15 bp, Homo sapiens
acatcataatcatct

SEQ ID NO: 428460 - DNA, 15 bp, Homo sapiens
gacatcataatcatc

SEQ ID NO: 428461 - DNA, 15 bp, Homo sapiens
tgacatcataatcat

SEQ ID NO: 428462 - DNA, 15 bp, Homo sapiens
gtgacatcataatca

SEQ ID NO: 428463 - DNA, 15 bp, Homo sapiens
agtgacatcataatc

SEQ ID NO: 428464 - DNA, 15 bp, Homo sapiens
tagtgacatcataat

SEQ ID NO: 428465 - DNA, 15 bp, Homo sapiens
ctagtgacatcataa

SEQ ID NO: 428466 - DNA, 15 bp, Homo sapiens
actagtgacatcata

SEQ ID NO: 428467 - DNA, 15 bp, Homo sapiens
cactagtgacatcat

SEQ ID NO: 428468 - DNA, 15 bp, Homo sapiens
acactagtgacatca

SEQ ID NO: 428469 - DNA, 15 bp, Homo sapiens
aacactagtgacatc

SEQ ID NO: 428470 - DNA, 15 bp, Homo sapiens
taacactagtgacat

SEQ ID NO: 428471 - DNA, 15 bp, Homo sapiens
ctaacactagtgaca

SEQ ID NO: 428472 - DNA, 15 bp, Homo sapiens
cctaacactagtgac

SEQ ID NO: 428473 - DNA, 15 bp, Homo sapiens
ccctaacactagtga

SEQ ID NO: 428474 - DNA, 15 bp, Homo sapiens
tccctaacactagtg

SEQ ID NO: 428475 - DNA, 15 bp, Homo sapiens
ttccctaacactagt

SEQ ID NO: 428476 - DNA, 15 bp, Homo sapiens
tttccctaacactag

SEQ ID NO: 428477 - DNA, 15 bp, Homo sapiens
ctttccctaacacta

SEQ ID NO: 428478 - DNA, 15 bp, Homo sapiens
tctttccctaacact

SEQ ID NO: 428479 - DNA, 15 bp, Homo sapiens
ttctttccctaacac

SEQ ID NO: 428480 - DNA, 15 bp, Homo sapiens
attctttccctaaca

SEQ ID NO: 428481 - DNA, 15 bp, Homo sapiens
tattctttccctaac

SEQ ID NO: 428482 - DNA, 15 bp, Homo sapiens
ttattctttccctaa

SEQ ID NO: 428483 - DNA, 15 bp, Homo sapiens
attattctttcccta

SEQ ID NO: 428484 - DNA, 15 bp, Homo sapiens
tattattctttccct

SEQ ID NO: 428485 - DNA, 15 bp, Homo sapiens
atattattctttccc

SEQ ID NO: 428486 - DNA, 15 bp, Homo sapiens
tatattattctttcc

SEQ ID NO: 428487 - DNA, 15 bp, Homo sapiens
ttatattattctttc

SEQ ID NO: 428488 - DNA, 15 bp, Homo sapiens
tttatattattcttt

SEQ ID NO: 428489 - DNA, 15 bp, Homo sapiens
ctttatattattctt

SEQ ID NO: 428490 - DNA, 15 bp, Homo sapiens
gctttatattattct

SEQ ID NO: 428491 - DNA, 15 bp, Homo sapiens
tgctttatattattc

SEQ ID NO: 428492 - DNA, 15 bp, Homo sapiens
ctgctttatattatt

SEQ ID NO: 428493 - DNA, 15 bp, Homo sapiens
tctgctttatattat

SEQ ID NO: 428494 - DNA, 15 bp, Homo sapiens
ttctgctttatatta

SEQ ID NO: 428495 - DNA, 15 bp, Homo sapiens
cttctgctttatatt

SEQ ID NO: 428496 - DNA, 15 bp, Homo sapiens
acttctgctttatat

SEQ ID NO: 428497 - DNA, 15 bp, Homo sapiens
aacttctgctttata

SEQ ID NO: 428498 - DNA, 15 bp, Homo sapiens
aaacttctgctttat

SEQ ID NO: 428499 - DNA, 15 bp, Homo sapiens
taaacttctgcttta

SEQ ID NO: 428500 - DNA, 15 bp, Homo sapiens
ttaaacttctgcttt

SEQ ID NO: 428501 - DNA, 15 bp, Homo sapiens
cttaaacttctgctt

SEQ ID NO: 428502 - DNA, 15 bp, Homo sapiens
tcttaaacttctgct

SEQ ID NO: 428503 - DNA, 15 bp, Homo sapiens
atcttaaacttctgc

SEQ ID NO: 428504 - DNA, 15 bp, Homo sapiens
catcttaaacttctg

SEQ ID NO: 428505 - DNA, 15 bp, Homo sapiens
tcatcttaaacttct

SEQ ID NO: 428506 - DNA, 15 bp, Homo sapiens
ctcatcttaaacttc

SEQ ID NO: 428507 - DNA, 15 bp, Homo sapiens
cctcatcttaaactt

SEQ ID NO: 428508 - DNA, 15 bp, Homo sapiens
gcctcatcttaaact

SEQ ID NO: 428509 - DNA, 15 bp, Homo sapiens
agcctcatcttaaac

SEQ ID NO: 428510 - DNA, 15 bp, Homo sapiens
aagcctcatcttaaa

SEQ ID NO: 428511 - DNA, 15 bp, Homo sapiens
gaagcctcatcttaa

SEQ ID NO: 428512 - DNA, 15 bp, Homo sapiens
agaagcctcatctta

SEQ ID NO: 428513 - DNA, 15 bp, Homo sapiens
gagaagcctcatctt

SEQ ID NO: 428514 - DNA, 15 bp, Homo sapiens
ggagaagcctcatct

SEQ ID NO: 428515 - DNA, 15 bp, Homo sapiens
tggagaagcctcatc

SEQ ID NO: 428516 - DNA, 15 bp, Homo sapiens
ctggagaagcctcat

SEQ ID NO: 428517 - DNA, 15 bp, Homo sapiens
tctggagaagcctca

SEQ ID NO: 428518 - DNA, 15 bp, Homo sapiens
gtctggagaagcctc

SEQ ID NO: 428519 - DNA, 15 bp, Homo sapiens
agtctggagaagcct

SEQ ID NO: 428520 - DNA, 15 bp, Homo sapiens
aagtctggagaagcc

SEQ ID NO: 428521 - DNA, 15 bp, Homo sapiens
taagtctggagaagc

SEQ ID NO: 428522 - DNA, 15 bp, Homo sapiens
ttaagtctggagaag

SEQ ID NO: 428523 - DNA, 15 bp, Homo sapiens
attaagtctggagaa

SEQ ID NO: 428524 - DNA, 15 bp, Homo sapiens
cattaagtctggaga

SEQ ID NO: 428525 - DNA, 15 bp, Homo sapiens
acattaagtctggag

SEQ ID NO: 428526 - DNA, 15 bp, Homo sapiens
gacattaagtctgga

SEQ ID NO: 428527 - DNA, 15 bp, Homo sapiens
tgacattaagtctgg

SEQ ID NO: 428528 - DNA, 15 bp, Homo sapiens
ttgacattaagtctg

SEQ ID NO: 428529 - DNA, 15 bp, Homo sapiens
cttgacattaagtct

SEQ ID NO: 428530 - DNA, 15 bp, Homo sapiens
tcttgacattaagtc

SEQ ID NO: 428531 - DNA, 15 bp, Homo sapiens
ttcttgacattaagt

SEQ ID NO: 428532 - DNA, 15 bp, Homo sapiens
attcttgacattaag

SEQ ID NO: 428533 - DNA, 15 bp, Homo sapiens
cattcttgacattaa

SEQ ID NO: 428534 - DNA, 15 bp, Homo sapiens
tcattcttgacatta

SEQ ID NO: 428535 - DNA, 15 bp, Homo sapiens
ttcattcttgacatt

SEQ ID NO: 428536 - DNA, 15 bp, Homo sapiens
tttcattcttgacat

SEQ ID NO: 428537 - DNA, 15 bp, Homo sapiens
ttttcattcttgaca

SEQ ID NO: 428538 - DNA, 15 bp, Homo sapiens
tttttcattcttgac

SEQ ID NO: 428539 - DNA, 15 bp, Homo sapiens
ttttttcattcttga

SEQ ID NO: 428540 - DNA, 15 bp, Homo sapiens
tttttttcattcttg

SEQ ID NO: 428541 - DNA, 15 bp, Homo sapiens
ttttttttcattctt

SEQ ID NO: 428542 - DNA, 15 bp, Homo sapiens
tttttttttcattct

SEQ ID NO: 428543 - DNA, 15 bp, Homo sapiens
atttttttttcattc

SEQ ID NO: 428544 - DNA, 15 bp, Homo sapiens
tatttttttttcatt

SEQ ID NO: 428545 - DNA, 15 bp, Homo sapiens
ctatttttttttcat

SEQ ID NO: 428546 - DNA, 15 bp, Homo sapiens
actatttttttttca

SEQ ID NO: 428547 - DNA, 15 bp, Homo sapiens
aactatttttttttc

SEQ ID NO: 428548 - DNA, 15 bp, Homo sapiens
gaactattttttttt

SEQ ID NO: 428549 - DNA, 15 bp, Homo sapiens
tgaactatttttttt

SEQ ID NO: 428550 - DNA, 15 bp, Homo sapiens
atgaactattttttt

SEQ ID NO: 428551 - DNA, 15 bp, Homo sapiens
gatgaactatttttt

SEQ ID NO: 428552 - DNA, 15 bp, Homo sapiens
tgatgaactattttt

SEQ ID NO: 428553 - DNA, 15 bp, Homo sapiens
ctgatgaactatttt

SEQ ID NO: 428554 - DNA, 15 bp, Homo sapiens
cctgatgaactattt

SEQ ID NO: 428555 - DNA, 15 bp, Homo sapiens
tcctgatgaactatt

SEQ ID NO: 428556 - DNA, 15 bp, Homo sapiens
atcctgatgaactat

SEQ ID NO: 428557 - DNA, 15 bp, Homo sapiens
catcctgatgaacta

SEQ ID NO: 428558 - DNA, 15 bp, Homo sapiens
acatcctgatgaact

SEQ ID NO: 428559 - DNA, 15 bp, Homo sapiens
tacatcctgatgaac

SEQ ID NO: 428560 - DNA, 15 bp, Homo sapiens
ttacatcctgatgaa

SEQ ID NO: 428561 - DNA, 15 bp, Homo sapiens
gttacatcctgatga

SEQ ID NO: 428562 - DNA, 15 bp, Homo sapiens
ggttacatcctgatg

SEQ ID NO: 428563 - DNA, 15 bp, Homo sapiens
aggttacatcctgat

SEQ ID NO: 428564 - DNA, 15 bp, Homo sapiens
caggttacatcctga

SEQ ID NO: 428565 - DNA, 15 bp, Homo sapiens
tcaggttacatcctg

SEQ ID NO: 428566 - DNA, 15 bp, Homo sapiens
ctcaggttacatcct

SEQ ID NO: 428567 - DNA, 15 bp, Homo sapiens
tctcaggttacatcc

SEQ ID NO: 428568 - DNA, 15 bp, Homo sapiens
atctcaggttacatc

SEQ ID NO: 428569 - DNA, 15 bp, Homo sapiens
aatctcaggttacat

SEQ ID NO: 428570 - DNA, 15 bp, Homo sapiens
gaatctcaggttaca

SEQ ID NO: 428571 - DNA, 15 bp, Homo sapiens
tgaatctcaggttac

SEQ ID NO: 428572 - DNA, 15 bp, Homo sapiens
gtgaatctcaggtta

SEQ ID NO: 428573 - DNA, 15 bp, Homo sapiens
ggtgaatctcaggtt

SEQ ID NO: 428574 - DNA, 15 bp, Homo sapiens
aggtgaatctcaggt

SEQ ID NO: 428575 - DNA, 15 bp, Homo sapiens
gaggtgaatctcagg

SEQ ID NO: 428576 - DNA, 15 bp, Homo sapiens
agaggtgaatctcag

SEQ ID NO: 428577 - DNA, 15 bp, Homo sapiens
cagaggtgaatctca

SEQ ID NO: 428578 - DNA, 15 bp, Homo sapiens
gcagaggtgaatctc

SEQ ID NO: 428579 - DNA, 15 bp, Homo sapiens
tgcagaggtgaatct

SEQ ID NO: 428580 - DNA, 15 bp, Homo sapiens
atgcagaggtgaatc

SEQ ID NO: 428581 - DNA, 15 bp, Homo sapiens
gatgcagaggtgaat

SEQ ID NO: 428582 - DNA, 15 bp, Homo sapiens
agatgcagaggtgaa

SEQ ID NO: 428583 - DNA, 15 bp, Homo sapiens
aagatgcagaggtga

SEQ ID NO: 428584 - DNA, 15 bp, Homo sapiens
aaagatgcagaggtg

SEQ ID NO: 428585 - DNA, 15 bp, Homo sapiens
taaagatgcagaggt

SEQ ID NO: 428586 - DNA, 15 bp, Homo sapiens
gtaaagatgcagagg

SEQ ID NO: 428587 - DNA, 15 bp, Homo sapiens
ggtaaagatgcagag

SEQ ID NO: 428588 - DNA, 15 bp, Homo sapiens
tggtaaagatgcaga

SEQ ID NO: 428589 - DNA, 15 bp, Homo sapiens
ttggtaaagatgcag

SEQ ID NO: 428590 - DNA, 15 bp, Homo sapiens
tttggtaaagatgca

SEQ ID NO: 428591 - DNA, 15 bp, Homo sapiens
ttttggtaaagatgc

SEQ ID NO: 428592 - DNA, 15 bp, Homo sapiens
cttttggtaaagatg

SEQ ID NO: 428593 - DNA, 15 bp, Homo sapiens
tcttttggtaaagat

SEQ ID NO: 428594 - DNA, 15 bp, Homo sapiens
ttcttttggtaaaga

SEQ ID NO: 428595 - DNA, 15 bp, Homo sapiens
attcttttggtaaag

SEQ ID NO: 428596 - DNA, 15 bp, Homo sapiens
cattcttttggtaaa

SEQ ID NO: 428597 - DNA, 15 bp, Homo sapiens
gcattcttttggtaa

SEQ ID NO: 428598 - DNA, 15 bp, Homo sapiens
tgcattcttttggta

SEQ ID NO: 428599 - DNA, 15 bp, Homo sapiens
gtgcattcttttggt

SEQ ID NO: 428600 - DNA, 15 bp, Homo sapiens
cgtgcattcttttgg

SEQ ID NO: 428601 - DNA, 15 bp, Homo sapiens
gcgtgcattcttttg

SEQ ID NO: 428602 - DNA, 15 bp, Homo sapiens
agcgtgcattctttt

SEQ ID NO: 428603 - DNA, 15 bp, Homo sapiens
aagcgtgcattcttt

SEQ ID NO: 428604 - DNA, 15 bp, Homo sapiens
caagcgtgcattctt

SEQ ID NO: 428605 - DNA, 15 bp, Homo sapiens
tcaagcgtgcattct

SEQ ID NO: 428606 - DNA, 15 bp, Homo sapiens
ttcaagcgtgcattc

SEQ ID NO: 428607 - DNA, 15 bp, Homo sapiens
cttcaagcgtgcatt

SEQ ID NO: 428608 - DNA, 15 bp, Homo sapiens
tcttcaagcgtgcat

SEQ ID NO: 428609 - DNA, 15 bp, Homo sapiens
ttcttcaagcgtgca

SEQ ID NO: 428610 - DNA, 15 bp, Homo sapiens
attcttcaagcgtgc

SEQ ID NO: 428611 - DNA, 15 bp, Homo sapiens
cattcttcaagcgtg

SEQ ID NO: 428612 - DNA, 15 bp, Homo sapiens
acattcttcaagcgt

SEQ ID NO: 428613 - DNA, 15 bp, Homo sapiens
cacattcttcaagcg

SEQ ID NO: 428614 - DNA, 15 bp, Homo sapiens
ccacattcttcaagc

SEQ ID NO: 428615 - DNA, 15 bp, Homo sapiens
tccacattcttcaag

SEQ ID NO: 428616 - DNA, 15 bp, Homo sapiens
ttccacattcttcaa

SEQ ID NO: 428617 - DNA, 15 bp, Homo sapiens
attccacattcttca

SEQ ID NO: 428618 - DNA, 15 bp, Homo sapiens
aattccacattcttc

SEQ ID NO: 428619 - DNA, 15 bp, Homo sapiens
gaattccacattctt

SEQ ID NO: 428620 - DNA, 15 bp, Homo sapiens
ggaattccacattct

SEQ ID NO: 428621 - DNA, 15 bp, Homo sapiens
aggaattccacattc

SEQ ID NO: 428622 - DNA, 15 bp, Homo sapiens
caggaattccacatt

SEQ ID NO: 428623 - DNA, 15 bp, Homo sapiens
gcaggaattccacat

SEQ ID NO: 428624 - DNA, 15 bp, Homo sapiens
agcaggaattccaca

SEQ ID NO: 428625 - DNA, 15 bp, Homo sapiens
aagcaggaattccac

SEQ ID NO: 428626 - DNA, 15 bp, Homo sapiens
caagcaggaattcca

SEQ ID NO: 428627 - DNA, 15 bp, Homo sapiens
acaagcaggaattcc

SEQ ID NO: 428628 - DNA, 15 bp, Homo sapiens
tacaagcaggaattc

SEQ ID NO: 428629 - DNA, 15 bp, Homo sapiens
ttacaagcaggaatt

SEQ ID NO: 428630 - DNA, 15 bp, Homo sapiens
tttacaagcaggaat

SEQ ID NO: 428631 - DNA, 15 bp, Homo sapiens
gtttacaagcaggaa

SEQ ID NO: 428632 - DNA, 15 bp, Homo sapiens
ggtttacaagcagga

SEQ ID NO: 428633 - DNA, 15 bp, Homo sapiens
cggtttacaagcagg

SEQ ID NO: 428634 - DNA, 15 bp, Homo sapiens
acggtttacaagcag

SEQ ID NO: 428635 - DNA, 15 bp, Homo sapiens
tacggtttacaagca

SEQ ID NO: 428636 - DNA, 15 bp, Homo sapiens
atacggtttacaagc

SEQ ID NO: 428637 - DNA, 15 bp, Homo sapiens
tatacggtttacaag

SEQ ID NO: 428638 - DNA, 15 bp, Homo sapiens
gtatacggtttacaa

SEQ ID NO: 428639 - DNA, 15 bp, Homo sapiens
tgtatacggtttaca

SEQ ID NO: 428640 - DNA, 15 bp, Homo sapiens
gtgtatacggtttac

SEQ ID NO: 428641 - DNA, 15 bp, Homo sapiens
agtgtatacggttta

SEQ ID NO: 428642 - DNA, 15 bp, Homo sapiens
cagtgtatacggttt

SEQ ID NO: 428643 - DNA, 15 bp, Homo sapiens
acagtgtatacggtt

SEQ ID NO: 428644 - DNA, 15 bp, Homo sapiens
cacagtgtatacggt

SEQ ID NO: 428645 - DNA, 15 bp, Homo sapiens
ccacagtgtatacgg

SEQ ID NO: 428646 - DNA, 15 bp, Homo sapiens
cccacagtgtatacg

SEQ ID NO: 428647 - DNA, 15 bp, Homo sapiens
acccacagtgtatac

SEQ ID NO: 428648 - DNA, 15 bp, Homo sapiens
tacccacagtgtata

SEQ ID NO: 428649 - DNA, 15 bp, Homo sapiens
atacccacagtgtat

SEQ ID NO: 428650 - DNA, 15 bp, Homo sapiens
catacccacagtgta

SEQ ID NO: 428651 - DNA, 15 bp, Homo sapiens
acatacccacagtgt

SEQ ID NO: 428652 - DNA, 15 bp, Homo sapiens
aacatacccacagtg

SEQ ID NO: 428653 - DNA, 15 bp, Homo sapiens
gaacatacccacagt

SEQ ID NO: 428654 - DNA, 15 bp, Homo sapiens
tgaacatacccacag

SEQ ID NO: 428655 - DNA, 15 bp, Homo sapiens
atgaacatacccaca

SEQ ID NO: 428656 - DNA, 15 bp, Homo sapiens
aatgaacatacccac

SEQ ID NO: 428657 - DNA, 15 bp, Homo sapiens
aaatgaacataccca

SEQ ID NO: 428658 - DNA, 15 bp, Homo sapiens
aaaatgaacataccc

SEQ ID NO: 428659 - DNA, 15 bp, Homo sapiens
gaaaatgaacatacc

SEQ ID NO: 428660 - DNA, 15 bp, Homo sapiens
cgaaaatgaacatac

SEQ ID NO: 428661 - DNA, 15 bp, Homo sapiens
gcgaaaatgaacata

SEQ ID NO: 428662 - DNA, 15 bp, Homo sapiens
tgcgaaaatgaacat

SEQ ID NO: 428663 - DNA, 15 bp, Homo sapiens
ctgcgaaaatgaaca

SEQ ID NO: 428664 - DNA, 15 bp, Homo sapiens
gctgcgaaaatgaac

SEQ ID NO: 428665 - DNA, 15 bp, Homo sapiens
tgctgcgaaaatgaa

SEQ ID NO: 428666 - DNA, 15 bp, Homo sapiens
gtgctgcgaaaatga

SEQ ID NO: 428667 - DNA, 15 bp, Homo sapiens
agtgctgcgaaaatg

SEQ ID NO: 428668 - DNA, 15 bp, Homo sapiens
aagtgctgcgaaaat

SEQ ID NO: 428669 - DNA, 15 bp, Homo sapiens
aaagtgctgcgaaaa

SEQ ID NO: 428670 - DNA, 15 bp, Homo sapiens
caaagtgctgcgaaa

SEQ ID NO: 428671 - DNA, 15 bp, Homo sapiens
acaaagtgctgcgaa

SEQ ID NO: 428672 - DNA, 15 bp, Homo sapiens
cacaaagtgctgcga

SEQ ID NO: 428673 - DNA, 15 bp, Homo sapiens
ccacaaagtgctgcg

SEQ ID NO: 428674 - DNA, 15 bp, Homo sapiens
gccacaaagtgctgc

SEQ ID NO: 428675 - DNA, 15 bp, Homo sapiens
tgccacaaagtgctg

SEQ ID NO: 428676 - DNA, 15 bp, Homo sapiens
ctgccacaaagtgct

SEQ ID NO: 428677 - DNA, 15 bp, Homo sapiens
tctgccacaaagtgc

SEQ ID NO: 428678 - DNA, 15 bp, Homo sapiens
atctgccacaaagtg

SEQ ID NO: 428679 - DNA, 15 bp, Homo sapiens
catctgccacaaagt

SEQ ID NO: 428680 - DNA, 15 bp, Homo sapiens
tcatctgccacaaag

SEQ ID NO: 428681 - DNA, 15 bp, Homo sapiens
atcatctgccacaaa

SEQ ID NO: 428682 - DNA, 15 bp, Homo sapiens
aatcatctgccacaa

SEQ ID NO: 428683 - DNA, 15 bp, Homo sapiens
aaatcatctgccaca

SEQ ID NO: 428684 - DNA, 15 bp, Homo sapiens
aaaatcatctgccac

SEQ ID NO: 428685 - DNA, 15 bp, Homo sapiens
taaaatcatctgcca

SEQ ID NO: 428686 - DNA, 15 bp, Homo sapiens
ataaaatcatctgcc

SEQ ID NO: 428687 - DNA, 15 bp, Homo sapiens
aataaaatcatctgc

SEQ ID NO: 428688 - DNA, 15 bp, Homo sapiens
aaataaaatcatctg

SEQ ID NO: 428689 - DNA, 15 bp, Homo sapiens
taaataaaatcatct

SEQ ID NO: 428690 - DNA, 15 bp, Homo sapiens
ataaataaaatcatc

SEQ ID NO: 428691 - DNA, 15 bp, Homo sapiens
aataaataaaatcat

SEQ ID NO: 428692 - DNA, 15 bp, Homo sapiens
taataaataaaatca

SEQ ID NO: 428693 - DNA, 15 bp, Homo sapiens
ataataaataaaatc

SEQ ID NO: 428694 - DNA, 15 bp, Homo sapiens
gataataaataaaat

SEQ ID NO: 428695 - DNA, 15 bp, Homo sapiens
tgataataaataaaa

SEQ ID NO: 428696 - DNA, 15 bp, Homo sapiens
ttgataataaataaa

SEQ ID NO: 428697 - DNA, 15 bp, Homo sapiens
tttgataataaataa

SEQ ID NO: 428698 - DNA, 15 bp, Homo sapiens
atttgataataaata

SEQ ID NO: 428699 - DNA, 15 bp, Homo sapiens
tatttgataataaat

SEQ ID NO: 428700 - DNA, 15 bp, Homo sapiens
atatttgataataaa

SEQ ID NO: 428701 - DNA, 15 bp, Homo sapiens
aatatttgataataa

SEQ ID NO: 428702 - DNA, 15 bp, Homo sapiens
gaatatttgataata

SEQ ID NO: 428703 - DNA, 15 bp, Homo sapiens
tgaatatttgataat

SEQ ID NO: 428704 - DNA, 15 bp, Homo sapiens
ttgaatatttgataa

SEQ ID NO: 428705 - DNA, 15 bp, Homo sapiens
gttgaatatttgata

SEQ ID NO: 428706 - DNA, 15 bp, Homo sapiens
tgttgaatatttgat

SEQ ID NO: 428707 - DNA, 15 bp, Homo sapiens
atgttgaatatttga

SEQ ID NO: 428708 - DNA, 15 bp, Homo sapiens
gatgttgaatatttg

SEQ ID NO: 428709 - DNA, 15 bp, Homo sapiens
ggatgttgaatattt

SEQ ID NO: 428710 - DNA, 15 bp, Homo sapiens
aggatgttgaatatt

SEQ ID NO: 428711 - DNA, 15 bp, Homo sapiens
gaggatgttgaatat

SEQ ID NO: 428712 - DNA, 15 bp, Homo sapiens
tgaggatgttgaata

SEQ ID NO: 428713 - DNA, 15 bp, Homo sapiens
gtgaggatgttgaat

SEQ ID NO: 428714 - DNA, 15 bp, Homo sapiens
agtgaggatgttgaa

SEQ ID NO: 428715 - DNA, 15 bp, Homo sapiens
gagtgaggatgttga

SEQ ID NO: 428716 - DNA, 15 bp, Homo sapiens
tgagtgaggatgttg

SEQ ID NO: 428717 - DNA, 15 bp, Homo sapiens
ttgagtgaggatgtt

SEQ ID NO: 428718 - DNA, 15 bp, Homo sapiens
tttgagtgaggatgt

SEQ ID NO: 428719 - DNA, 15 bp, Homo sapiens
ttttgagtgaggatg

SEQ ID NO: 428720 - DNA, 15 bp, Homo sapiens
cttttgagtgaggat

SEQ ID NO: 428721 - DNA, 15 bp, Homo sapiens
gcttttgagtgagga

SEQ ID NO: 428722 - DNA, 15 bp, Homo sapiens
tgcttttgagtgagg

SEQ ID NO: 428723 - DNA, 15 bp, Homo sapiens
atgcttttgagtgag

SEQ ID NO: 428724 - DNA, 15 bp, Homo sapiens
catgcttttgagtga

SEQ ID NO: 428725 - DNA, 15 bp, Homo sapiens
ccatgcttttgagtg

SEQ ID NO: 428726 - DNA, 15 bp, Homo sapiens
tccatgcttttgagt

SEQ ID NO: 428727 - DNA, 15 bp, Homo sapiens
atccatgcttttgag

SEQ ID NO: 428728 - DNA, 15 bp, Homo sapiens
aatccatgcttttga

SEQ ID NO: 428729 - DNA, 15 bp, Homo sapiens
taatccatgcttttg

SEQ ID NO: 428730 - DNA, 15 bp, Homo sapiens
ctaatccatgctttt

SEQ ID NO: 428731 - DNA, 15 bp, Homo sapiens
cctaatccatgcttt

SEQ ID NO: 428732 - DNA, 15 bp, Homo sapiens
acctaatccatgctt

SEQ ID NO: 428733 - DNA, 15 bp, Homo sapiens
tacctaatccatgct

SEQ ID NO: 428734 - DNA, 15 bp, Homo sapiens
ttacctaatccatgc

SEQ ID NO: 428735 - DNA, 15 bp, Homo sapiens
attacctaatccatg

SEQ ID NO: 428736 - DNA, 15 bp, Homo sapiens
aattacctaatccat

SEQ ID NO: 428737 - DNA, 15 bp, Homo sapiens
taattacctaatcca

SEQ ID NO: 428738 - DNA, 15 bp, Homo sapiens
ctaattacctaatcc

SEQ ID NO: 428739 - DNA, 15 bp, Homo sapiens
actaattacctaatc

SEQ ID NO: 428740 - DNA, 15 bp, Homo sapiens
gactaattacctaat

SEQ ID NO: 428741 - DNA, 15 bp, Homo sapiens
tgactaattacctaa

SEQ ID NO: 428742 - DNA, 15 bp, Homo sapiens
ctgactaattaccta

SEQ ID NO: 428743 - DNA, 15 bp, Homo sapiens
tctgactaattacct

SEQ ID NO: 428744 - DNA, 15 bp, Homo sapiens
atctgactaattacc

SEQ ID NO: 428745 - DNA, 15 bp, Homo sapiens
catctgactaattac

SEQ ID NO: 428746 - DNA, 15 bp, Homo sapiens
tcatctgactaatta

SEQ ID NO: 428747 - DNA, 15 bp, Homo sapiens
atcatctgactaatt

SEQ ID NO: 428748 - DNA, 15 bp, Homo sapiens
aatcatctgactaat

SEQ ID NO: 428749 - DNA, 15 bp, Homo sapiens
aaatcatctgactaa

SEQ ID NO: 428750 - DNA, 15 bp, Homo sapiens
caaatcatctgacta

SEQ ID NO: 428751 - DNA, 15 bp, Homo sapiens
tcaaatcatctgact

SEQ ID NO: 428752 - DNA, 15 bp, Homo sapiens
gtcaaatcatctgac

SEQ ID NO: 428753 - DNA, 15 bp, Homo sapiens
ggtcaaatcatctga

SEQ ID NO: 428754 - DNA, 15 bp, Homo sapiens
aggtcaaatcatctg

SEQ ID NO: 428755 - DNA, 15 bp, Homo sapiens
aaggtcaaatcatct

SEQ ID NO: 428756 - DNA, 15 bp, Homo sapiens
aaaggtcaaatcatc

SEQ ID NO: 428757 - DNA, 15 bp, Homo sapiens
caaaggtcaaatcat

SEQ ID NO: 428758 - DNA, 15 bp, Homo sapiens
ccaaaggtcaaatca

SEQ ID NO: 428759 - DNA, 15 bp, Homo sapiens
cccaaaggtcaaatc

SEQ ID NO: 428760 - DNA, 15 bp, Homo sapiens
tcccaaaggtcaaat

SEQ ID NO: 428761 - DNA, 15 bp, Homo sapiens
ctcccaaaggtcaaa

SEQ ID NO: 428762 - DNA, 15 bp, Homo sapiens
actcccaaaggtcaa

SEQ ID NO: 428763 - DNA, 15 bp, Homo sapiens
gactcccaaaggtca

SEQ ID NO: 428764 - DNA, 15 bp, Homo sapiens
agactcccaaaggtc

SEQ ID NO: 428765 - DNA, 15 bp, Homo sapiens
tagactcccaaaggt

SEQ ID NO: 428766 - DNA, 15 bp, Homo sapiens
ttagactcccaaagg

SEQ ID NO: 428767 - DNA, 15 bp, Homo sapiens
cttagactcccaaag

SEQ ID NO: 428768 - DNA, 15 bp, Homo sapiens
acttagactcccaaa

SEQ ID NO: 428769 - DNA, 15 bp, Homo sapiens
cacttagactcccaa

SEQ ID NO: 428770 - DNA, 15 bp, Homo sapiens
gcacttagactccca

SEQ ID NO: 428771 - DNA, 15 bp, Homo sapiens
agcacttagactccc

SEQ ID NO: 428772 - DNA, 15 bp, Homo sapiens
aagcacttagactcc

SEQ ID NO: 428773 - DNA, 15 bp, Homo sapiens
aaagcacttagactc

SEQ ID NO: 428774 - DNA, 15 bp, Homo sapiens
aaaagcacttagact

SEQ ID NO: 428775 - DNA, 15 bp, Homo sapiens
taaaagcacttagac

SEQ ID NO: 428776 - DNA, 15 bp, Homo sapiens
gtaaaagcacttaga

SEQ ID NO: 428777 - DNA, 15 bp, Homo sapiens
agtaaaagcacttag

SEQ ID NO: 428778 - DNA, 15 bp, Homo sapiens
aagtaaaagcactta

SEQ ID NO: 428779 - DNA, 15 bp, Homo sapiens
aaagtaaaagcactt

SEQ ID NO: 428780 - DNA, 15 bp, Homo sapiens
taaagtaaaagcact

SEQ ID NO: 428781 - DNA, 15 bp, Homo sapiens
gtaaagtaaaagcac

SEQ ID NO: 428782 - DNA, 15 bp, Homo sapiens
agtaaagtaaaagca

SEQ ID NO: 428783 - DNA, 15 bp, Homo sapiens
aagtaaagtaaaagc

SEQ ID NO: 428784 - DNA, 15 bp, Homo sapiens
caagtaaagtaaaag

SEQ ID NO: 428785 - DNA, 15 bp, Homo sapiens
tcaagtaaagtaaaa

SEQ ID NO: 428786 - DNA, 15 bp, Homo sapiens
atcaagtaaagtaaa

SEQ ID NO: 428787 - DNA, 15 bp, Homo sapiens
gatcaagtaaagtaa

SEQ ID NO: 428788 - DNA, 15 bp, Homo sapiens
agatcaagtaaagta

SEQ ID NO: 428789 - DNA, 15 bp, Homo sapiens
aagatcaagtaaagt

SEQ ID NO: 428790 - DNA, 15 bp, Homo sapiens
gaagatcaagtaaag

SEQ ID NO: 428791 - DNA, 15 bp, Homo sapiens
tgaagatcaagtaaa

SEQ ID NO: 428792 - DNA, 15 bp, Homo sapiens
atgaagatcaagtaa

SEQ ID NO: 428793 - DNA, 15 bp, Homo sapiens
aatgaagatcaagta

SEQ ID NO: 428794 - DNA, 15 bp, Homo sapiens
gaatgaagatcaagt

SEQ ID NO: 428795 - DNA, 15 bp, Homo sapiens
agaatgaagatcaag

SEQ ID NO: 428796 - DNA, 15 bp, Homo sapiens
tagaatgaagatcaa

SEQ ID NO: 428797 - DNA, 15 bp, Homo sapiens
gtagaatgaagatca

SEQ ID NO: 428798 - DNA, 15 bp, Homo sapiens
agtagaatgaagatc

SEQ ID NO: 428799 - DNA, 15 bp, Homo sapiens
tagtagaatgaagat

SEQ ID NO: 428800 - DNA, 15 bp, Homo sapiens
atagtagaatgaaga

SEQ ID NO: 428801 - DNA, 15 bp, Homo sapiens
aatagtagaatgaag

SEQ ID NO: 428802 - DNA, 15 bp, Homo sapiens
taatagtagaatgaa

SEQ ID NO: 428803 - DNA, 15 bp, Homo sapiens
ttaatagtagaatga

SEQ ID NO: 428804 - DNA, 15 bp, Homo sapiens
gttaatagtagaatg

SEQ ID NO: 428805 - DNA, 15 bp, Homo sapiens
tgttaatagtagaat

SEQ ID NO: 428806 - DNA, 15 bp, Homo sapiens
ttgttaatagtagaa

SEQ ID NO: 428807 - DNA, 15 bp, Homo sapiens
tttgttaatagtaga

SEQ ID NO: 428808 - DNA, 15 bp, Homo sapiens
ctttgttaatagtag

SEQ ID NO: 428809 - DNA, 15 bp, Homo sapiens
actttgttaatagta

SEQ ID NO: 428810 - DNA, 15 bp, Homo sapiens
aactttgttaatagt

SEQ ID NO: 428811 - DNA, 15 bp, Homo sapiens
caactttgttaatag

SEQ ID NO: 428812 - DNA, 15 bp, Homo sapiens
acaactttgttaata

SEQ ID NO: 428813 - DNA, 15 bp, Homo sapiens
gacaactttgttaat

SEQ ID NO: 428814 - DNA, 15 bp, Homo sapiens
tgacaactttgttaa

SEQ ID NO: 428815 - DNA, 15 bp, Homo sapiens
ctgacaactttgtta

SEQ ID NO: 428816 - DNA, 15 bp, Homo sapiens
actgacaactttgtt

SEQ ID NO: 428817 - DNA, 15 bp, Homo sapiens
cactgacaactttgt

SEQ ID NO: 428818 - DNA, 15 bp, Homo sapiens
gcactgacaactttg

SEQ ID NO: 428819 - DNA, 15 bp, Homo sapiens
agcactgacaacttt

SEQ ID NO: 428820 - DNA, 15 bp, Homo sapiens
tagcactgacaactt

SEQ ID NO: 428821 - DNA, 15 bp, Homo sapiens
atagcactgacaact

SEQ ID NO: 428822 - DNA, 15 bp, Homo sapiens
catagcactgacaac

SEQ ID NO: 428823 - DNA, 15 bp, Homo sapiens
tcatagcactgacaa

SEQ ID NO: 428824 - DNA, 15 bp, Homo sapiens
ttcatagcactgaca

SEQ ID NO: 428825 - DNA, 15 bp, Homo sapiens
tttcatagcactgac

SEQ ID NO: 428826 - DNA, 15 bp, Homo sapiens
ttttcatagcactga

SEQ ID NO: 428827 - DNA, 15 bp, Homo sapiens
attttcatagcactg

SEQ ID NO: 428828 - DNA, 15 bp, Homo sapiens
aattttcatagcact

SEQ ID NO: 428829 - DNA, 15 bp, Homo sapiens
aaattttcatagcac

SEQ ID NO: 428830 - DNA, 15 bp, Homo sapiens
gaaattttcatagca

SEQ ID NO: 428831 - DNA, 15 bp, Homo sapiens
ggaaattttcatagc

SEQ ID NO: 428832 - DNA, 15 bp, Homo sapiens
aggaaattttcatag

SEQ ID NO: 428833 - DNA, 15 bp, Homo sapiens
aaggaaattttcata

SEQ ID NO: 428834 - DNA, 15 bp, Homo sapiens
aaaggaaattttcat

SEQ ID NO: 428835 - DNA, 15 bp, Homo sapiens
taaaggaaattttca

SEQ ID NO: 428836 - DNA, 15 bp, Homo sapiens
ctaaaggaaattttc

SEQ ID NO: 428837 - DNA, 15 bp, Homo sapiens
cctaaaggaaatttt

SEQ ID NO: 428838 - DNA, 15 bp, Homo sapiens
ccctaaaggaaattt

SEQ ID NO: 428839 - DNA, 15 bp, Homo sapiens
cccctaaaggaaatt

SEQ ID NO: 428840 - DNA, 15 bp, Homo sapiens
gcccctaaaggaaat

SEQ ID NO: 428841 - DNA, 15 bp, Homo sapiens
tgcccctaaaggaaa

SEQ ID NO: 428842 - DNA, 15 bp, Homo sapiens
ttgcccctaaaggaa

SEQ ID NO: 428843 - DNA, 15 bp, Homo sapiens
cttgcccctaaagga

SEQ ID NO: 428844 - DNA, 15 bp, Homo sapiens
ccttgcccctaaagg

SEQ ID NO: 428845 - DNA, 15 bp, Homo sapiens
gccttgcccctaaag

SEQ ID NO: 428846 - DNA, 15 bp, Homo sapiens
tgccttgcccctaaa

SEQ ID NO: 428847 - DNA, 15 bp, Homo sapiens
ttgccttgcccctaa

SEQ ID NO: 428848 - DNA, 15 bp, Homo sapiens
tttgccttgccccta

SEQ ID NO: 428849 - DNA, 15 bp, Homo sapiens
atttgccttgcccct

SEQ ID NO: 428850 - DNA, 15 bp, Homo sapiens
catttgccttgcccc

SEQ ID NO: 428851 - DNA, 15 bp, Homo sapiens
ccatttgccttgccc

SEQ ID NO: 428852 - DNA, 15 bp, Homo sapiens
cccatttgccttgcc

SEQ ID NO: 428853 - DNA, 15 bp, Homo sapiens
gcccatttgccttgc

SEQ ID NO: 428854 - DNA, 15 bp, Homo sapiens
ggcccatttgccttg

SEQ ID NO: 428855 - DNA, 15 bp, Homo sapiens
aggcccatttgcctt

SEQ ID NO: 428856 - DNA, 15 bp, Homo sapiens
gaggcccatttgcct

SEQ ID NO: 428857 - DNA, 15 bp, Homo sapiens
agaggcccatttgcc

SEQ ID NO: 428858 - DNA, 15 bp, Homo sapiens
cagaggcccatttgc

SEQ ID NO: 428859 - DNA, 15 bp, Homo sapiens
acagaggcccatttg

SEQ ID NO: 428860 - DNA, 15 bp, Homo sapiens
tacagaggcccattt

SEQ ID NO: 428861 - DNA, 15 bp, Homo sapiens
atacagaggcccatt

SEQ ID NO: 428862 - DNA, 15 bp, Homo sapiens
aatacagaggcccat

SEQ ID NO: 428863 - DNA, 15 bp, Homo sapiens
aaatacagaggccca

SEQ ID NO: 428864 - DNA, 15 bp, Homo sapiens
aaaatacagaggccc

SEQ ID NO: 428865 - DNA, 15 bp, Homo sapiens
aaaaatacagaggcc

SEQ ID NO: 428866 - DNA, 15 bp, Homo sapiens
aaaaaatacagaggc

SEQ ID NO: 428867 - DNA, 15 bp, Homo sapiens
aaaaaaatacagagg

SEQ ID NO: 428868 - DNA, 15 bp, Homo sapiens
aaaaaaaatacagag

SEQ ID NO: 428869 - DNA, 15 bp, Homo sapiens
aaaaaaaaatacaga

SEQ ID NO: 428870 - DNA, 15 bp, Homo sapiens
aaaaaaaaaatacag

SEQ ID NO: 428871 - DNA, 15 bp, Homo sapiens
aaaaaaaaaaataca

SEQ ID NO: 428872 - DNA, 15 bp, Homo sapiens
aaaaaaaaaaaatac

SEQ ID NO: 428873 - DNA, 15 bp, Homo sapiens
aacatttaaaaaaaa

SEQ ID NO: 428874 - DNA, 15 bp, Homo sapiens
caacatttaaaaaaa

SEQ ID NO: 428875 - DNA, 15 bp, Homo sapiens
ccaacatttaaaaaa

SEQ ID NO: 428876 - DNA, 15 bp, Homo sapiens
accaacatttaaaaa

SEQ ID NO: 428877 - DNA, 15 bp, Homo sapiens
caccaacatttaaaa

SEQ ID NO: 428878 - DNA, 15 bp, Homo sapiens
acaccaacatttaaa

SEQ ID NO: 428879 - DNA, 15 bp, Homo sapiens
aacaccaacatttaa

SEQ ID NO: 428880 - DNA, 15 bp, Homo sapiens
aaacaccaacattta

SEQ ID NO: 428881 - DNA, 15 bp, Homo sapiens
aaaacaccaacattt

SEQ ID NO: 428882 - DNA, 15 bp, Homo sapiens
taaaacaccaacatt

SEQ ID NO: 428883 - DNA, 15 bp, Homo sapiens
ataaaacaccaacat

SEQ ID NO: 428884 - DNA, 15 bp, Homo sapiens
tataaaacaccaaca

SEQ ID NO: 428885 - DNA, 15 bp, Homo sapiens
atataaaacaccaac

SEQ ID NO: 428886 - DNA, 15 bp, Homo sapiens
gatataaaacaccaa

SEQ ID NO: 428887 - DNA, 15 bp, Homo sapiens
agatataaaacacca

SEQ ID NO: 428888 - DNA, 15 bp, Homo sapiens
gagatataaaacacc

SEQ ID NO: 428889 - DNA, 15 bp, Homo sapiens
ggagatataaaacac

SEQ ID NO: 428890 - DNA, 15 bp, Homo sapiens
gggagatataaaaca

SEQ ID NO: 428891 - DNA, 15 bp, Homo sapiens
agggagatataaaac

SEQ ID NO: 428892 - DNA, 15 bp, Homo sapiens
gagggagatataaaa

SEQ ID NO: 428893 - DNA, 15 bp, Homo sapiens
agagggagatataaa

SEQ ID NO: 428894 - DNA, 15 bp, Homo sapiens
aagagggagatataa

SEQ ID NO: 428895 - DNA, 15 bp, Homo sapiens
gaagagggagatata

SEQ ID NO: 428896 - DNA, 15 bp, Homo sapiens
tgaagagggagatat

SEQ ID NO: 428897 - DNA, 15 bp, Homo sapiens
ctgaagagggagata

SEQ ID NO: 428898 - DNA, 15 bp, Homo sapiens
cctgaagagggagat

SEQ ID NO: 428899 - DNA, 15 bp, Homo sapiens
tcctgaagagggaga

SEQ ID NO: 428900 - DNA, 15 bp, Homo sapiens
gtcctgaagagggag

SEQ ID NO: 428901 - DNA, 15 bp, Homo sapiens
cgtcctgaagaggga

SEQ ID NO: 428902 - DNA, 15 bp, Homo sapiens
tcgtcctgaagaggg

SEQ ID NO: 428903 - DNA, 15 bp, Homo sapiens
ctcgtcctgaagagg

SEQ ID NO: 428904 - DNA, 15 bp, Homo sapiens
tctcgtcctgaagag

SEQ ID NO: 428905 - DNA, 15 bp, Homo sapiens
gtctcgtcctgaaga

SEQ ID NO: 428906 - DNA, 15 bp, Homo sapiens
tgtctcgtcctgaag

SEQ ID NO: 428907 - DNA, 15 bp, Homo sapiens
gtgtctcgtcctgaa

SEQ ID NO: 428908 - DNA, 15 bp, Homo sapiens
ggtgtctcgtcctga

SEQ ID NO: 428909 - DNA, 15 bp, Homo sapiens
tggtgtctcgtcctg

SEQ ID NO: 428910 - DNA, 15 bp, Homo sapiens
ttggtgtctcgtcct

SEQ ID NO: 428911 - DNA, 15 bp, Homo sapiens
attggtgtctcgtcc

SEQ ID NO: 428912 - DNA, 15 bp, Homo sapiens
cattggtgtctcgtc

SEQ ID NO: 428913 - DNA, 15 bp, Homo sapiens
acattggtgtctcgt

SEQ ID NO: 428914 - DNA, 15 bp, Homo sapiens
gacattggtgtctcg

SEQ ID NO: 428915 - DNA, 15 bp, Homo sapiens
agacattggtgtctc

SEQ ID NO: 428916 - DNA, 15 bp, Homo sapiens
aagacattggtgtct

SEQ ID NO: 428917 - DNA, 15 bp, Homo sapiens
caagacattggtgtc

SEQ ID NO: 428918 - DNA, 15 bp, Homo sapiens
ccaagacattggtgt

SEQ ID NO: 428919 - DNA, 15 bp, Homo sapiens
accaagacattggtg

SEQ ID NO: 428920 - DNA, 15 bp, Homo sapiens
caccaagacattggt

SEQ ID NO: 428921 - DNA, 15 bp, Homo sapiens
acaccaagacattgg

SEQ ID NO: 428922 - DNA, 15 bp, Homo sapiens
tacaccaagacattg

SEQ ID NO: 428923 - DNA, 15 bp, Homo sapiens
gtacaccaagacatt

SEQ ID NO: 428924 - DNA, 15 bp, Homo sapiens
tgtacaccaagacat

SEQ ID NO: 428925 - DNA, 15 bp, Homo sapiens
atgtacaccaagaca

SEQ ID NO: 428926 - DNA, 15 bp, Homo sapiens
gatgtacaccaagac

SEQ ID NO: 428927 - DNA, 15 bp, Homo sapiens
tgatgtacaccaaga

SEQ ID NO: 428928 - DNA, 15 bp, Homo sapiens
ttgatgtacaccaag

SEQ ID NO: 428929 - DNA, 15 bp, Homo sapiens
tttgatgtacaccaa

SEQ ID NO: 428930 - DNA, 15 bp, Homo sapiens
ttttgatgtacacca

SEQ ID NO: 428931 - DNA, 15 bp, Homo sapiens
cttttgatgtacacc

SEQ ID NO: 428932 - DNA, 15 bp, Homo sapiens
tcttttgatgtacac

SEQ ID NO: 428933 - DNA, 15 bp, Homo sapiens
ttcttttgatgtaca

SEQ ID NO: 428934 - DNA, 15 bp, Homo sapiens
cttcttttgatgtac

SEQ ID NO: 428935 - DNA, 15 bp, Homo sapiens
ccttcttttgatgta

SEQ ID NO: 428936 - DNA, 15 bp, Homo sapiens
gccttcttttgatgt

SEQ ID NO: 428937 - DNA, 15 bp, Homo sapiens
agccttcttttgatg

SEQ ID NO: 428938 - DNA, 15 bp, Homo sapiens
tagccttcttttgat

SEQ ID NO: 428939 - DNA, 15 bp, Homo sapiens
ctagccttcttttga

SEQ ID NO: 428940 - DNA, 15 bp, Homo sapiens
gctagccttcttttg

SEQ ID NO: 428941 - DNA, 15 bp, Homo sapiens
tgctagccttctttt

SEQ ID NO: 428942 - DNA, 15 bp, Homo sapiens
ttgctagccttcttt

SEQ ID NO: 428943 - DNA, 15 bp, Homo sapiens
attgctagccttctt

SEQ ID NO: 428944 - DNA, 15 bp, Homo sapiens
cattgctagccttct

SEQ ID NO: 428945 - DNA, 15 bp, Homo sapiens
acattgctagccttc

SEQ ID NO: 428946 - DNA, 15 bp, Homo sapiens
cacattgctagcctt

SEQ ID NO: 428947 - DNA, 15 bp, Homo sapiens
acacattgctagcct

SEQ ID NO: 428948 - DNA, 15 bp, Homo sapiens
cacacattgctagcc

SEQ ID NO: 428949 - DNA, 15 bp, Homo sapiens
gcacacattgctagc

SEQ ID NO: 428950 - DNA, 15 bp, Homo sapiens
ggcacacattgctag

SEQ ID NO: 428951 - DNA, 15 bp, Homo sapiens
tggcacacattgcta

SEQ ID NO: 428952 - DNA, 15 bp, Homo sapiens
ctggcacacattgct

SEQ ID NO: 428953 - DNA, 15 bp, Homo sapiens
tctggcacacattgc

SEQ ID NO: 428954 - DNA, 15 bp, Homo sapiens
ttctggcacacattg

SEQ ID NO: 428955 - DNA, 15 bp, Homo sapiens
cttctggcacacatt

SEQ ID NO: 428956 - DNA, 15 bp, Homo sapiens
tcttctggcacacat

SEQ ID NO: 428957 - DNA, 15 bp, Homo sapiens
gtcttctggcacaca

SEQ ID NO: 428958 - DNA, 15 bp, Homo sapiens
agtcttctggcacac

SEQ ID NO: 428959 - DNA, 15 bp, Homo sapiens
gagtcttctggcaca

SEQ ID NO: 428960 - DNA, 15 bp, Homo sapiens
cgagtcttctggcac

SEQ ID NO: 428961 - DNA, 15 bp, Homo sapiens
ccgagtcttctggca

SEQ ID NO: 428962 - DNA, 15 bp, Homo sapiens
cccgagtcttctggc

SEQ ID NO: 428963 - DNA, 15 bp, Homo sapiens
tcccgagtcttctgg

SEQ ID NO: 428964 - DNA, 15 bp, Homo sapiens
ctcccgagtcttctg

SEQ ID NO: 428965 - DNA, 15 bp, Homo sapiens
cctcccgagtcttct

SEQ ID NO: 428966 - DNA, 15 bp, Homo sapiens
tcctcccgagtcttc

SEQ ID NO: 428967 - DNA, 15 bp, Homo sapiens
gtcctcccgagtctt

SEQ ID NO: 428968 - DNA, 15 bp, Homo sapiens
ggtcctcccgagtct

SEQ ID NO: 428969 - DNA, 15 bp, Homo sapiens
tggtcctcccgagtc

SEQ ID NO: 428970 - DNA, 15 bp, Homo sapiens
ctggtcctcccgagt

SEQ ID NO: 428971 - DNA, 15 bp, Homo sapiens
cctggtcctcccgag

SEQ ID NO: 428972 - DNA, 15 bp, Homo sapiens
ccctggtcctcccga

SEQ ID NO: 428973 - DNA, 15 bp, Homo sapiens
tccctggtcctcccg

SEQ ID NO: 428974 - DNA, 15 bp, Homo sapiens
ttccctggtcctccc

SEQ ID NO: 428975 - DNA, 15 bp, Homo sapiens
cttccctggtcctcc

SEQ ID NO: 428976 - DNA, 15 bp, Homo sapiens
gcttccctggtcctc

SEQ ID NO: 428977 - DNA, 15 bp, Homo sapiens
tgcttccctggtcct

SEQ ID NO: 428978 - DNA, 15 bp, Homo sapiens
ctgcttccctggtcc

SEQ ID NO: 428979 - DNA, 15 bp, Homo sapiens
actgcttccctggtc

SEQ ID NO: 428980 - DNA, 15 bp, Homo sapiens
cactgcttccctggt

SEQ ID NO: 428981 - DNA, 15 bp, Homo sapiens
tcactgcttccctgg

SEQ ID NO: 428982 - DNA, 15 bp, Homo sapiens
ttcactgcttccctg

SEQ ID NO: 428983 - DNA, 15 bp, Homo sapiens
tttcactgcttccct

SEQ ID NO: 428984 - DNA, 15 bp, Homo sapiens
ttttcactgcttccc

SEQ ID NO: 428985 - DNA, 15 bp, Homo sapiens
attttcactgcttcc

SEQ ID NO: 428986 - DNA, 15 bp, Homo sapiens
cattttcactgcttc

SEQ ID NO: 428987 - DNA, 15 bp, Homo sapiens
tcattttcactgctt

SEQ ID NO: 428988 - DNA, 15 bp, Homo sapiens
atcattttcactgct

SEQ ID NO: 428989 - DNA, 15 bp, Homo sapiens
catcattttcactgc

SEQ ID NO: 428990 - DNA, 15 bp, Homo sapiens
tcatcattttcactg

SEQ ID NO: 428991 - DNA, 15 bp, Homo sapiens
ctcatcattttcact

SEQ ID NO: 428992 - DNA, 15 bp, Homo sapiens
tctcatcattttcac

SEQ ID NO: 428993 - DNA, 15 bp, Homo sapiens
ctctcatcattttca

SEQ ID NO: 428994 - DNA, 15 bp, Homo sapiens
tctctcatcattttc

SEQ ID NO: 428995 - DNA, 15 bp, Homo sapiens
atctctcatcatttt

SEQ ID NO: 428996 - DNA, 15 bp, Homo sapiens
catctctcatcattt

SEQ ID NO: 428997 - DNA, 15 bp, Homo sapiens
acatctctcatcatt

SEQ ID NO: 428998 - DNA, 15 bp, Homo sapiens
cacatctctcatcat

SEQ ID NO: 428999 - DNA, 15 bp, Homo sapiens
tcacatctctcatca

SEQ ID NO: 429000 - DNA, 15 bp, Homo sapiens
ctcacatctctcatc

SEQ ID NO: 429001 - DNA, 15 bp, Homo sapiens
actcacatctctcat

SEQ ID NO: 429002 - DNA, 15 bp, Homo sapiens
aactcacatctctca

SEQ ID NO: 429003 - DNA, 15 bp, Homo sapiens
aaactcacatctctc

SEQ ID NO: 429004 - DNA, 15 bp, Homo sapiens
caaactcacatctct

SEQ ID NO: 429005 - DNA, 15 bp, Homo sapiens
tcaaactcacatctc

SEQ ID NO: 429006 - DNA, 15 bp, Homo sapiens
ctcaaactcacatct

SEQ ID NO: 429007 - DNA, 15 bp, Homo sapiens
actcaaactcacatc

SEQ ID NO: 429008 - DNA, 15 bp, Homo sapiens
aactcaaactcacat

SEQ ID NO: 429009 - DNA, 15 bp, Homo sapiens
aaactcaaactcaca

SEQ ID NO: 429010 - DNA, 15 bp, Homo sapiens
caaactcaaactcac

SEQ ID NO: 429011 - DNA, 15 bp, Homo sapiens
acaaactcaaactca

SEQ ID NO: 429012 - DNA, 15 bp, Homo sapiens
cacaaactcaaactc

SEQ ID NO: 429013 - DNA, 15 bp, Homo sapiens
acacaaactcaaact

SEQ ID NO: 429014 - DNA, 15 bp, Homo sapiens
aacacaaactcaaac

SEQ ID NO: 429015 - DNA, 15 bp, Homo sapiens
aaacacaaactcaaa

SEQ ID NO: 429016 - DNA, 15 bp, Homo sapiens
caaacacaaactcaa

SEQ ID NO: 429017 - DNA, 15 bp, Homo sapiens
ccaaacacaaactca

SEQ ID NO: 429018 - DNA, 15 bp, Homo sapiens
cccaaacacaaactc

SEQ ID NO: 429019 - DNA, 15 bp, Homo sapiens
tcccaaacacaaact

SEQ ID NO: 429020 - DNA, 15 bp, Homo sapiens
atcccaaacacaaac

SEQ ID NO: 429021 - DNA, 15 bp, Homo sapiens
gatcccaaacacaaa

SEQ ID NO: 429022 - DNA, 15 bp, Homo sapiens
tgatcccaaacacaa

SEQ ID NO: 429023 - DNA, 15 bp, Homo sapiens
ctgatcccaaacaca

SEQ ID NO: 429024 - DNA, 15 bp, Homo sapiens
actgatcccaaacac

SEQ ID NO: 429025 - DNA, 15 bp, Homo sapiens
cactgatcccaaaca

SEQ ID NO: 429026 - DNA, 15 bp, Homo sapiens
ccactgatcccaaac

SEQ ID NO: 429027 - DNA, 15 bp, Homo sapiens
gccactgatcccaaa

SEQ ID NO: 429028 - DNA, 15 bp, Homo sapiens
agccactgatcccaa

SEQ ID NO: 429029 - DNA, 15 bp, Homo sapiens
aagccactgatccca

SEQ ID NO: 429030 - DNA, 15 bp, Homo sapiens
taagccactgatccc

SEQ ID NO: 429031 - DNA, 15 bp, Homo sapiens
gtaagccactgatcc

SEQ ID NO: 429032 - DNA, 15 bp, Homo sapiens
tgtaagccactgatc

SEQ ID NO: 429033 - DNA, 15 bp, Homo sapiens
ctgtaagccactgat

SEQ ID NO: 429034 - DNA, 15 bp, Homo sapiens
tctgtaagccactga

SEQ ID NO: 429035 - DNA, 15 bp, Homo sapiens
atctgtaagccactg

SEQ ID NO: 429036 - DNA, 15 bp, Homo sapiens
tatctgtaagccact

SEQ ID NO: 429037 - DNA, 15 bp, Homo sapiens
atatctgtaagccac

SEQ ID NO: 429038 - DNA, 15 bp, Homo sapiens
tatatctgtaagcca

SEQ ID NO: 429039 - DNA, 15 bp, Homo sapiens
ctatatctgtaagcc

SEQ ID NO: 429040 - DNA, 15 bp, Homo sapiens
cctatatctgtaagc

SEQ ID NO: 429041 - DNA, 15 bp, Homo sapiens
tcctatatctgtaag

SEQ ID NO: 429042 - DNA, 15 bp, Homo sapiens
ctcctatatctgtaa

SEQ ID NO: 429043 - DNA, 15 bp, Homo sapiens
gctcctatatctgta

SEQ ID NO: 429044 - DNA, 15 bp, Homo sapiens
ggctcctatatctgt

SEQ ID NO: 429045 - DNA, 15 bp, Homo sapiens
gggctcctatatctg

SEQ ID NO: 429046 - DNA, 15 bp, Homo sapiens
cgggctcctatatct

SEQ ID NO: 429047 - DNA, 15 bp, Homo sapiens
gcgggctcctatatc

SEQ ID NO: 429048 - DNA, 15 bp, Homo sapiens
agcgggctcctatat

SEQ ID NO: 429049 - DNA, 15 bp, Homo sapiens
cagcgggctcctata

SEQ ID NO: 429050 - DNA, 15 bp, Homo sapiens
tcagcgggctcctat

SEQ ID NO: 429051 - DNA, 15 bp, Homo sapiens
ttcagcgggctccta

SEQ ID NO: 429052 - DNA, 15 bp, Homo sapiens
attcagcgggctcct

SEQ ID NO: 429053 - DNA, 15 bp, Homo sapiens
cattcagcgggctcc

SEQ ID NO: 429054 - DNA, 15 bp, Homo sapiens
ccattcagcgggctc

SEQ ID NO: 429055 - DNA, 15 bp, Homo sapiens
gccattcagcgggct

SEQ ID NO: 429056 - DNA, 15 bp, Homo sapiens
ggccattcagcgggc

SEQ ID NO: 429057 - DNA, 15 bp, Homo sapiens
tggccattcagcggg

SEQ ID NO: 429058 - DNA, 15 bp, Homo sapiens
atggccattcagcgg

SEQ ID NO: 429059 - DNA, 15 bp, Homo sapiens
tatggccattcagcg

SEQ ID NO: 429060 - DNA, 15 bp, Homo sapiens
ctatggccattcagc

SEQ ID NO: 429061 - DNA, 15 bp, Homo sapiens
gctatggccattcag

SEQ ID NO: 429062 - DNA, 15 bp, Homo sapiens
tgctatggccattca

SEQ ID NO: 429063 - DNA, 15 bp, Homo sapiens
ctgctatggccattc

SEQ ID NO: 429064 - DNA, 15 bp, Homo sapiens
actgctatggccatt

SEQ ID NO: 429065 - DNA, 15 bp, Homo sapiens
gactgctatggccat

SEQ ID NO: 429066 - DNA, 15 bp, Homo sapiens
agactgctatggcca

SEQ ID NO: 429067 - DNA, 15 bp, Homo sapiens
cagactgctatggcc

SEQ ID NO: 429068 - DNA, 15 bp, Homo sapiens
acagactgctatggc

SEQ ID NO: 429069 - DNA, 15 bp, Homo sapiens
tacagactgctatgg

SEQ ID NO: 429070 - DNA, 15 bp, Homo sapiens
gtacagactgctatg

SEQ ID NO: 429071 - DNA, 15 bp, Homo sapiens
ggtacagactgctat

SEQ ID NO: 429072 - DNA, 15 bp, Homo sapiens
tggtacagactgcta

SEQ ID NO: 429073 - DNA, 15 bp, Homo sapiens
ctggtacagactgct

SEQ ID NO: 429074 - DNA, 15 bp, Homo sapiens
actggtacagactgc

SEQ ID NO: 429075 - DNA, 15 bp, Homo sapiens
cactggtacagactg

SEQ ID NO: 429076 - DNA, 15 bp, Homo sapiens
tcactggtacagact

SEQ ID NO: 429077 - DNA, 15 bp, Homo sapiens
atcactggtacagac

SEQ ID NO: 429078 - DNA, 15 bp, Homo sapiens
catcactggtacaga

SEQ ID NO: 429079 - DNA, 15 bp, Homo sapiens
ccatcactggtacag

SEQ ID NO: 429080 - DNA, 15 bp, Homo sapiens
accatcactggtaca

SEQ ID NO: 429081 - DNA, 15 bp, Homo sapiens
caccatcactggtac

SEQ ID NO: 429082 - DNA, 15 bp, Homo sapiens
acaccatcactggta

SEQ ID NO: 429083 - DNA, 15 bp, Homo sapiens
cacaccatcactggt

SEQ ID NO: 429084 - DNA, 15 bp, Homo sapiens
ccacaccatcactgg

SEQ ID NO: 429085 - DNA, 15 bp, Homo sapiens
accacaccatcactg

SEQ ID NO: 429086 - DNA, 15 bp, Homo sapiens
caccacaccatcact

SEQ ID NO: 429087 - DNA, 15 bp, Homo sapiens
ccaccacaccatcac

SEQ ID NO: 429088 - DNA, 15 bp, Homo sapiens
accaccacaccatca

SEQ ID NO: 429089 - DNA, 15 bp, Homo sapiens
gaccaccacaccatc

SEQ ID NO: 429090 - DNA, 15 bp, Homo sapiens
ggaccaccacaccat

SEQ ID NO: 429091 - DNA, 15 bp, Homo sapiens
gggaccaccacacca

SEQ ID NO: 429092 - DNA, 15 bp, Homo sapiens
tgggaccaccacacc

SEQ ID NO: 429093 - DNA, 15 bp, Homo sapiens
atgggaccaccacac

SEQ ID NO: 429094 - DNA, 15 bp, Homo sapiens
catgggaccaccaca

SEQ ID NO: 429095 - DNA, 15 bp, Homo sapiens
ccatgggaccaccac

SEQ ID NO: 429096 - DNA, 15 bp, Homo sapiens
cccatgggaccacca

SEQ ID NO: 429097 - DNA, 15 bp, Homo sapiens
acccatgggaccacc

SEQ ID NO: 429098 - DNA, 15 bp, Homo sapiens
aacccatgggaccac

SEQ ID NO: 429099 - DNA, 15 bp, Homo sapiens
gaacccatgggacca

SEQ ID NO: 429100 - DNA, 15 bp, Homo sapiens
agaacccatgggacc

SEQ ID NO: 429101 - DNA, 15 bp, Homo sapiens
cagaacccatgggac

SEQ ID NO: 429102 - DNA, 15 bp, Homo sapiens
ccagaacccatggga

SEQ ID NO: 429103 - DNA, 15 bp, Homo sapiens
tccagaacccatggg

SEQ ID NO: 429104 - DNA, 15 bp, Homo sapiens
ctccagaacccatgg

SEQ ID NO: 429105 - DNA, 15 bp, Homo sapiens
gctccagaacccatg

SEQ ID NO: 429106 - DNA, 15 bp, Homo sapiens
ggctccagaacccat

SEQ ID NO: 429107 - DNA, 15 bp, Homo sapiens
tggctccagaaccca

SEQ ID NO: 429108 - DNA, 15 bp, Homo sapiens
ctggctccagaaccc

SEQ ID NO: 429109 - DNA, 15 bp, Homo sapiens
tctggctccagaacc

SEQ ID NO: 429110 - DNA, 15 bp, Homo sapiens
gtctggctccagaac

SEQ ID NO: 429111 - DNA, 15 bp, Homo sapiens
agtctggctccagaa

SEQ ID NO: 429112 - DNA, 15 bp, Homo sapiens
cagtctggctccaga

SEQ ID NO: 429113 - DNA, 15 bp, Homo sapiens
acagtctggctccag

SEQ ID NO: 429114 - DNA, 15 bp, Homo sapiens
cacagtctggctcca

SEQ ID NO: 429115 - DNA, 15 bp, Homo sapiens
acacagtctggctcc

SEQ ID NO: 429116 - DNA, 15 bp, Homo sapiens
cacacagtctggctc

SEQ ID NO: 429117 - DNA, 15 bp, Homo sapiens
ccacacagtctggct

SEQ ID NO: 429118 - DNA, 15 bp, Homo sapiens
cccacacagtctggc

SEQ ID NO: 429119 - DNA, 15 bp, Homo sapiens
ccccacacagtctgg

SEQ ID NO: 429120 - DNA, 15 bp, Homo sapiens
accccacacagtctg

SEQ ID NO: 429121 - DNA, 15 bp, Homo sapiens
aaccccacacagtct

SEQ ID NO: 429122 - DNA, 15 bp, Homo sapiens
gaaccccacacagtc

SEQ ID NO: 429123 - DNA, 15 bp, Homo sapiens
tgaaccccacacagt

SEQ ID NO: 429124 - DNA, 15 bp, Homo sapiens
ttgaaccccacacag

SEQ ID NO: 429125 - DNA, 15 bp, Homo sapiens
gttgaaccccacaca

SEQ ID NO: 429126 - DNA, 15 bp, Homo sapiens
agttgaaccccacac

SEQ ID NO: 429127 - DNA, 15 bp, Homo sapiens
gagttgaaccccaca

SEQ ID NO: 429128 - DNA, 15 bp, Homo sapiens
agagttgaaccccac

SEQ ID NO: 429129 - DNA, 15 bp, Homo sapiens
tagagttgaacccca

SEQ ID NO: 429130 - DNA, 15 bp, Homo sapiens
ctagagttgaacccc

SEQ ID NO: 429131 - DNA, 15 bp, Homo sapiens
actagagttgaaccc

SEQ ID NO: 429132 - DNA, 15 bp, Homo sapiens
aactagagttgaacc

SEQ ID NO: 429133 - DNA, 15 bp, Homo sapiens
gaactagagttgaac

SEQ ID NO: 429134 - DNA, 15 bp, Homo sapiens
ggaactagagttgaa

SEQ ID NO: 429135 - DNA, 15 bp, Homo sapiens
gggaactagagttga

SEQ ID NO: 429136 - DNA, 15 bp, Homo sapiens
tgggaactagagttg

SEQ ID NO: 429137 - DNA, 15 bp, Homo sapiens
ttgggaactagagtt

SEQ ID NO: 429138 - DNA, 15 bp, Homo sapiens
attgggaactagagt

SEQ ID NO: 429139 - DNA, 15 bp, Homo sapiens
aattgggaactagag

SEQ ID NO: 429140 - DNA, 15 bp, Homo sapiens
aaattgggaactaga

SEQ ID NO: 429141 - DNA, 15 bp, Homo sapiens
taaattgggaactag

SEQ ID NO: 429142 - DNA, 15 bp, Homo sapiens
gtaaattgggaacta

SEQ ID NO: 429143 - DNA, 15 bp, Homo sapiens
agtaaattgggaact

SEQ ID NO: 429144 - DNA, 15 bp, Homo sapiens
tagtaaattgggaac

SEQ ID NO: 429145 - DNA, 15 bp, Homo sapiens
ctagtaaattgggaa

SEQ ID NO: 429146 - DNA, 15 bp, Homo sapiens
tctagtaaattggga

SEQ ID NO: 429147 - DNA, 15 bp, Homo sapiens
atctagtaaattggg

SEQ ID NO: 429148 - DNA, 15 bp, Homo sapiens
catctagtaaattgg

SEQ ID NO: 429149 - DNA, 15 bp, Homo sapiens
tcatctagtaaattg

SEQ ID NO: 429150 - DNA, 15 bp, Homo sapiens
ttcatctagtaaatt

SEQ ID NO: 429151 - DNA, 15 bp, Homo sapiens
attcatctagtaaat

SEQ ID NO: 429152 - DNA, 15 bp, Homo sapiens
cattcatctagtaaa

SEQ ID NO: 429153 - DNA, 15 bp, Homo sapiens
tcattcatctagtaa

SEQ ID NO: 429154 - DNA, 15 bp, Homo sapiens
atcattcatctagta

SEQ ID NO: 429155 - DNA, 15 bp, Homo sapiens
catcattcatctagt

SEQ ID NO: 429156 - DNA, 15 bp, Homo sapiens
acatcattcatctag

SEQ ID NO: 429157 - DNA, 15 bp, Homo sapiens
tacatcattcatcta

SEQ ID NO: 429158 - DNA, 15 bp, Homo sapiens
atacatcattcatct

SEQ ID NO: 429159 - DNA, 15 bp, Homo sapiens
catacatcattcatc

SEQ ID NO: 429160 - DNA, 15 bp, Homo sapiens
acatacatcattcat

SEQ ID NO: 429161 - DNA, 15 bp, Homo sapiens
aacatacatcattca

SEQ ID NO: 429162 - DNA, 15 bp, Homo sapiens
caacatacatcattc

SEQ ID NO: 429163 - DNA, 15 bp, Homo sapiens
ccaacatacatcatt

SEQ ID NO: 429164 - DNA, 15 bp, Homo sapiens
cccaacatacatcat

SEQ ID NO: 429165 - DNA, 15 bp, Homo sapiens
gcccaacatacatca

SEQ ID NO: 429166 - DNA, 15 bp, Homo sapiens
tgcccaacatacatc

SEQ ID NO: 429167 - DNA, 15 bp, Homo sapiens
ttgcccaacatacat

SEQ ID NO: 429168 - DNA, 15 bp, Homo sapiens
cttgcccaacataca

SEQ ID NO: 429169 - DNA, 15 bp, Homo sapiens
acttgcccaacatac

SEQ ID NO: 429170 - DNA, 15 bp, Homo sapiens
aacttgcccaacata

SEQ ID NO: 429171 - DNA, 15 bp, Homo sapiens
taacttgcccaacat

SEQ ID NO: 429172 - DNA, 15 bp, Homo sapiens
gtaacttgcccaaca

SEQ ID NO: 429173 - DNA, 15 bp, Homo sapiens
agtaacttgcccaac

SEQ ID NO: 429174 - DNA, 15 bp, Homo sapiens
gagtaacttgcccaa

SEQ ID NO: 429175 - DNA, 15 bp, Homo sapiens
tgagtaacttgccca

SEQ ID NO: 429176 - DNA, 15 bp, Homo sapiens
ctgagtaacttgccc

SEQ ID NO: 429177 - DNA, 15 bp, Homo sapiens
gctgagtaacttgcc

SEQ ID NO: 429178 - DNA, 15 bp, Homo sapiens
agctgagtaacttgc

SEQ ID NO: 429179 - DNA, 15 bp, Homo sapiens
aagctgagtaacttg

SEQ ID NO: 429180 - DNA, 15 bp, Homo sapiens
gaagctgagtaactt

SEQ ID NO: 429181 - DNA, 15 bp, Homo sapiens
agaagctgagtaact

SEQ ID NO: 429182 - DNA, 15 bp, Homo sapiens
gagaagctgagtaac

SEQ ID NO: 429183 - DNA, 15 bp, Homo sapiens
agagaagctgagtaa

SEQ ID NO: 429184 - DNA, 15 bp, Homo sapiens
aagagaagctgagta

SEQ ID NO: 429185 - DNA, 15 bp, Homo sapiens
aaagagaagctgagt

SEQ ID NO: 429186 - DNA, 15 bp, Homo sapiens
caaagagaagctgag

SEQ ID NO: 429187 - DNA, 15 bp, Homo sapiens
gcaaagagaagctga

SEQ ID NO: 429188 - DNA, 15 bp, Homo sapiens
ggcaaagagaagctg

SEQ ID NO: 429189 - DNA, 15 bp, Homo sapiens
gggcaaagagaagct

SEQ ID NO: 429190 - DNA, 15 bp, Homo sapiens
agggcaaagagaagc

SEQ ID NO: 429191 - DNA, 15 bp, Homo sapiens
tagggcaaagagaag

SEQ ID NO: 429192 - DNA, 15 bp, Homo sapiens
ctagggcaaagagaa

SEQ ID NO: 429193 - DNA, 15 bp, Homo sapiens
actagggcaaagaga

SEQ ID NO: 429194 - DNA, 15 bp, Homo sapiens
aactagggcaaagag

SEQ ID NO: 429195 - DNA, 15 bp, Homo sapiens
aaactagggcaaaga

SEQ ID NO: 429196 - DNA, 15 bp, Homo sapiens
gaaactagggcaaag

SEQ ID NO: 429197 - DNA, 15 bp, Homo sapiens
agaaactagggcaaa

SEQ ID NO: 429198 - DNA, 15 bp, Homo sapiens
aagaaactagggcaa

SEQ ID NO: 429199 - DNA, 15 bp, Homo sapiens
gaagaaactagggca

SEQ ID NO: 429200 - DNA, 15 bp, Homo sapiens
tgaagaaactagggc

SEQ ID NO: 429201 - DNA, 15 bp, Homo sapiens
atgaagaaactaggg

SEQ ID NO: 429202 - DNA, 15 bp, Homo sapiens
gatgaagaaactagg

SEQ ID NO: 429203 - DNA, 15 bp, Homo sapiens
agatgaagaaactag

SEQ ID NO: 429204 - DNA, 15 bp, Homo sapiens
gagatgaagaaacta

SEQ ID NO: 429205 - DNA, 15 bp, Homo sapiens
agagatgaagaaact

SEQ ID NO: 429206 - DNA, 15 bp, Homo sapiens
tagagatgaagaaac

SEQ ID NO: 429207 - DNA, 15 bp, Homo sapiens
ttagagatgaagaaa

SEQ ID NO: 429208 - DNA, 15 bp, Homo sapiens
tcccattttagagat

SEQ ID NO: 429209 - DNA, 15 bp, Homo sapiens
ttcccattttagaga

SEQ ID NO: 429210 - DNA, 15 bp, Homo sapiens
gttcccattttagag

SEQ ID NO: 429211 - DNA, 15 bp, Homo sapiens
tgttcccattttaga

SEQ ID NO: 429212 - DNA, 15 bp, Homo sapiens
ttgttcccattttag

SEQ ID NO: 429213 - DNA, 15 bp, Homo sapiens
gttgttcccatttta

SEQ ID NO: 429214 - DNA, 15 bp, Homo sapiens
tgttgttcccatttt

SEQ ID NO: 429215 - DNA, 15 bp, Homo sapiens
ttgttgttcccattt

SEQ ID NO: 429216 - DNA, 15 bp, Homo sapiens
attgttgttcccatt

SEQ ID NO: 429217 - DNA, 15 bp, Homo sapiens
tattgttgttcccat

SEQ ID NO: 429218 - DNA, 15 bp, Homo sapiens
ttattgttgttccca

SEQ ID NO: 429219 - DNA, 15 bp, Homo sapiens
gttattgttgttccc

SEQ ID NO: 429220 - DNA, 15 bp, Homo sapiens
tgttattgttgttcc

SEQ ID NO: 429221 - DNA, 15 bp, Homo sapiens
ctgttattgttgttc

SEQ ID NO: 429222 - DNA, 15 bp, Homo sapiens
actgttattgttgtt

SEQ ID NO: 429223 - DNA, 15 bp, Homo sapiens
gactgttattgttgt

SEQ ID NO: 429224 - DNA, 15 bp, Homo sapiens
ggactgttattgttg

SEQ ID NO: 429225 - DNA, 15 bp, Homo sapiens
aggactgttattgtt

SEQ ID NO: 429226 - DNA, 15 bp, Homo sapiens
gaggactgttattgt

SEQ ID NO: 429227 - DNA, 15 bp, Homo sapiens
tgaggactgttattg

SEQ ID NO: 429228 - DNA, 15 bp, Homo sapiens
gtgaggactgttatt

SEQ ID NO: 429229 - DNA, 15 bp, Homo sapiens
tgtgaggactgttat

SEQ ID NO: 429230 - DNA, 15 bp, Homo sapiens
ttgtgaggactgtta

SEQ ID NO: 429231 - DNA, 15 bp, Homo sapiens
attgtgaggactgtt

SEQ ID NO: 429232 - DNA, 15 bp, Homo sapiens
aattgtgaggactgt

SEQ ID NO: 429233 - DNA, 15 bp, Homo sapiens
taattgtgaggactg

SEQ ID NO: 429234 - DNA, 15 bp, Homo sapiens
gtaattgtgaggact

SEQ ID NO: 429235 - DNA, 15 bp, Homo sapiens
agtaattgtgaggac

SEQ ID NO: 429236 - DNA, 15 bp, Homo sapiens
aagtaattgtgagga

SEQ ID NO: 429237 - DNA, 15 bp, Homo sapiens
gaagtaattgtgagg

SEQ ID NO: 429238 - DNA, 15 bp, Homo sapiens
agaagtaattgtgag

SEQ ID NO: 429239 - DNA, 15 bp, Homo sapiens
aagaagtaattgtga

SEQ ID NO: 429240 - DNA, 15 bp, Homo sapiens
taagaagtaattgtg

SEQ ID NO: 429241 - DNA, 15 bp, Homo sapiens
ctaagaagtaattgt

SEQ ID NO: 429242 - DNA, 15 bp, Homo sapiens
tctaagaagtaattg

SEQ ID NO: 429243 - DNA, 15 bp, Homo sapiens
ttctaagaagtaatt

SEQ ID NO: 429244 - DNA, 15 bp, Homo sapiens
attctaagaagtaat

SEQ ID NO: 429245 - DNA, 15 bp, Homo sapiens
aattctaagaagtaa

SEQ ID NO: 429246 - DNA, 15 bp, Homo sapiens
aaattctaagaagta

SEQ ID NO: 429247 - DNA, 15 bp, Homo sapiens
aaaattctaagaagt

SEQ ID NO: 429248 - DNA, 15 bp, Homo sapiens
aaaaattctaagaag

SEQ ID NO: 429249 - DNA, 15 bp, Homo sapiens
aaaaaattctaagaa

SEQ ID NO: 429250 - DNA, 15 bp, Homo sapiens
gaaaaaattctaaga

SEQ ID NO: 429251 - DNA, 15 bp, Homo sapiens
cgaaaaaattctaag

SEQ ID NO: 429252 - DNA, 15 bp, Homo sapiens
tcgaaaaaattctaa

SEQ ID NO: 429253 - DNA, 15 bp, Homo sapiens
ctcgaaaaaattcta

SEQ ID NO: 429254 - DNA, 15 bp, Homo sapiens
cctcgaaaaaattct

SEQ ID NO: 429255 - DNA, 15 bp, Homo sapiens
tcctcgaaaaaattc

SEQ ID NO: 429256 - DNA, 15 bp, Homo sapiens
gtcctcgaaaaaatt

SEQ ID NO: 429257 - DNA, 15 bp, Homo sapiens
agtcctcgaaaaaat

SEQ ID NO: 429258 - DNA, 15 bp, Homo sapiens
tagtcctcgaaaaaa

SEQ ID NO: 429259 - DNA, 15 bp, Homo sapiens
ttagtcctcgaaaaa

SEQ ID NO: 429260 - DNA, 15 bp, Homo sapiens
tttagtcctcgaaaa

SEQ ID NO: 429261 - DNA, 15 bp, Homo sapiens
atttagtcctcgaaa

SEQ ID NO: 429262 - DNA, 15 bp, Homo sapiens
catttagtcctcgaa

SEQ ID NO: 429263 - DNA, 15 bp, Homo sapiens
tcatttagtcctcga

SEQ ID NO: 429264 - DNA, 15 bp, Homo sapiens
ctcatttagtcctcg

SEQ ID NO: 429265 - DNA, 15 bp, Homo sapiens
tctcatttagtcctc

SEQ ID NO: 429266 - DNA, 15 bp, Homo sapiens
atctcatttagtcct

SEQ ID NO: 429267 - DNA, 15 bp, Homo sapiens
tatctcatttagtcc

SEQ ID NO: 429268 - DNA, 15 bp, Homo sapiens
ttatctcatttagtc

SEQ ID NO: 429269 - DNA, 15 bp, Homo sapiens
attatctcatttagt

SEQ ID NO: 429270 - DNA, 15 bp, Homo sapiens
tattatctcatttag

SEQ ID NO: 429271 - DNA, 15 bp, Homo sapiens
gtattatctcattta

SEQ ID NO: 429272 - DNA, 15 bp, Homo sapiens
tgtattatctcattt

SEQ ID NO: 429273 - DNA, 15 bp, Homo sapiens
atgtattatctcatt

SEQ ID NO: 429274 - DNA, 15 bp, Homo sapiens
tatgtattatctcat

SEQ ID NO: 429275 - DNA, 15 bp, Homo sapiens
gtatgtattatctca

SEQ ID NO: 429276 - DNA, 15 bp, Homo sapiens
tgtatgtattatctc

SEQ ID NO: 429277 - DNA, 15 bp, Homo sapiens
ttgtatgtattatct

SEQ ID NO: 429278 - DNA, 15 bp, Homo sapiens
cttgtatgtattatc

SEQ ID NO: 429279 - DNA, 15 bp, Homo sapiens
gcttgtatgtattat

SEQ ID NO: 429280 - DNA, 15 bp, Homo sapiens
agcttgtatgtatta

SEQ ID NO: 429281 - DNA, 15 bp, Homo sapiens
aagcttgtatgtatt

SEQ ID NO: 429282 - DNA, 15 bp, Homo sapiens
gaagcttgtatgtat

SEQ ID NO: 429283 - DNA, 15 bp, Homo sapiens
agaagcttgtatgta

SEQ ID NO: 429284 - DNA, 15 bp, Homo sapiens
tagaagcttgtatgt

SEQ ID NO: 429285 - DNA, 15 bp, Homo sapiens
ttagaagcttgtatg

SEQ ID NO: 429286 - DNA, 15 bp, Homo sapiens
attagaagcttgtat

SEQ ID NO: 429287 - DNA, 15 bp, Homo sapiens
tattagaagcttgta

SEQ ID NO: 429288 - DNA, 15 bp, Homo sapiens
ctattagaagcttgt

SEQ ID NO: 429289 - DNA, 15 bp, Homo sapiens
tctattagaagcttg

SEQ ID NO: 429290 - DNA, 15 bp, Homo sapiens
ctctattagaagctt

SEQ ID NO: 429291 - DNA, 15 bp, Homo sapiens
actctattagaagct

SEQ ID NO: 429292 - DNA, 15 bp, Homo sapiens
cactctattagaagc

SEQ ID NO: 429293 - DNA, 15 bp, Homo sapiens
ccactctattagaag

SEQ ID NO: 429294 - DNA, 15 bp, Homo sapiens
gccactctattagaa

SEQ ID NO: 429295 - DNA, 15 bp, Homo sapiens
agccactctattaga

SEQ ID NO: 429296 - DNA, 15 bp, Homo sapiens
cagccactctattag

SEQ ID NO: 429297 - DNA, 15 bp, Homo sapiens
ccagccactctatta

SEQ ID NO: 429298 - DNA, 15 bp, Homo sapiens
gccagccactctatt

SEQ ID NO: 429299 - DNA, 15 bp, Homo sapiens
tgccagccactctat

SEQ ID NO: 429300 - DNA, 15 bp, Homo sapiens
atgccagccactcta

SEQ ID NO: 429301 - DNA, 15 bp, Homo sapiens
tatgccagccactct

SEQ ID NO: 429302 - DNA, 15 bp, Homo sapiens
atatgccagccactc

SEQ ID NO: 429303 - DNA, 15 bp, Homo sapiens
aatatgccagccact

SEQ ID NO: 429304 - DNA, 15 bp, Homo sapiens
aaatatgccagccac

SEQ ID NO: 429305 - DNA, 15 bp, Homo sapiens
aaaatatgccagcca

SEQ ID NO: 429306 - DNA, 15 bp, Homo sapiens
taaaatatgccagcc

SEQ ID NO: 429307 - DNA, 15 bp, Homo sapiens
ttaaaatatgccagc

SEQ ID NO: 429308 - DNA, 15 bp, Homo sapiens
tttaaaatatgccag

SEQ ID NO: 429309 - DNA, 15 bp, Homo sapiens
ttttaaaatatgcca

SEQ ID NO: 429310 - DNA, 15 bp, Homo sapiens
tttttaaaatatgcc

SEQ ID NO: 429311 - DNA, 15 bp, Homo sapiens
atttttaaaatatgc

SEQ ID NO: 429312 - DNA, 15 bp, Homo sapiens
catttttaaaatatg

SEQ ID NO: 429313 - DNA, 15 bp, Homo sapiens
acatttttaaaatat

SEQ ID NO: 429314 - DNA, 15 bp, Homo sapiens
gacatttttaaaata

SEQ ID NO: 429315 - DNA, 15 bp, Homo sapiens
tgacatttttaaaat

SEQ ID NO: 429316 - DNA, 15 bp, Homo sapiens
ttgacatttttaaaa

SEQ ID NO: 429317 - DNA, 15 bp, Homo sapiens
attgacatttttaaa

SEQ ID NO: 429318 - DNA, 15 bp, Homo sapiens
tattgacatttttaa

SEQ ID NO: 429319 - DNA, 15 bp, Homo sapiens
ctattgacattttta

SEQ ID NO: 429320 - DNA, 15 bp, Homo sapiens
tctattgacattttt

SEQ ID NO: 429321 - DNA, 15 bp, Homo sapiens
atctattgacatttt

SEQ ID NO: 429322 - DNA, 15 bp, Homo sapiens
catctattgacattt

SEQ ID NO: 429323 - DNA, 15 bp, Homo sapiens
acatctattgacatt

SEQ ID NO: 429324 - DNA, 15 bp, Homo sapiens
gacatctattgacat

SEQ ID NO: 429325 - DNA, 15 bp, Homo sapiens
ggacatctattgaca

SEQ ID NO: 429326 - DNA, 15 bp, Homo sapiens
aggacatctattgac

SEQ ID NO: 429327 - DNA, 15 bp, Homo sapiens
aaggacatctattga

SEQ ID NO: 429328 - DNA, 15 bp, Homo sapiens
taaggacatctattg

SEQ ID NO: 429329 - DNA, 15 bp, Homo sapiens
ataaggacatctatt

SEQ ID NO: 429330 - DNA, 15 bp, Homo sapiens
aataaggacatctat

SEQ ID NO: 429331 - DNA, 15 bp, Homo sapiens
taataaggacatcta

SEQ ID NO: 429332 - DNA, 15 bp, Homo sapiens
ttaataaggacatct

SEQ ID NO: 429333 - DNA, 15 bp, Homo sapiens
tttaataaggacatc

SEQ ID NO: 429334 - DNA, 15 bp, Homo sapiens
gtttaataaggacat

SEQ ID NO: 429335 - DNA, 15 bp, Homo sapiens
ggtttaataaggaca

SEQ ID NO: 429336 - DNA, 15 bp, Homo sapiens
aggtttaataaggac

SEQ ID NO: 429337 - DNA, 15 bp, Homo sapiens
aaggtttaataagga

SEQ ID NO: 429338 - DNA, 15 bp, Homo sapiens
aaaggtttaataagg

SEQ ID NO: 429339 - DNA, 15 bp, Homo sapiens
caaaggtttaataag

SEQ ID NO: 429340 - DNA, 15 bp, Homo sapiens
ccaaaggtttaataa

SEQ ID NO: 429341 - DNA, 15 bp, Homo sapiens
cccaaaggtttaata

SEQ ID NO: 429342 - DNA, 15 bp, Homo sapiens
ccccaaaggtttaat

SEQ ID NO: 429343 - DNA, 15 bp, Homo sapiens
gccccaaaggtttaa

SEQ ID NO: 429344 - DNA, 15 bp, Homo sapiens
agccccaaaggttta

SEQ ID NO: 429345 - DNA, 15 bp, Homo sapiens
cagccccaaaggttt

SEQ ID NO: 429346 - DNA, 15 bp, Homo sapiens
gcagccccaaaggtt

SEQ ID NO: 429347 - DNA, 15 bp, Homo sapiens
tgcagccccaaaggt

SEQ ID NO: 429348 - DNA, 15 bp, Homo sapiens
ctgcagccccaaagg

SEQ ID NO: 429349 - DNA, 15 bp, Homo sapiens
gctgcagccccaaag

SEQ ID NO: 429350 - DNA, 15 bp, Homo sapiens
agctgcagccccaaa

SEQ ID NO: 429351 - DNA, 15 bp, Homo sapiens
cagctgcagccccaa

SEQ ID NO: 429352 - DNA, 15 bp, Homo sapiens
ccagctgcagcccca

SEQ ID NO: 429353 - DNA, 15 bp, Homo sapiens
tccagctgcagcccc

SEQ ID NO: 429354 - DNA, 15 bp, Homo sapiens
ttccagctgcagccc

SEQ ID NO: 429355 - DNA, 15 bp, Homo sapiens
cttccagctgcagcc

SEQ ID NO: 429356 - DNA, 15 bp, Homo sapiens
gcttccagctgcagc

SEQ ID NO: 429357 - DNA, 15 bp, Homo sapiens
ggcttccagctgcag

SEQ ID NO: 429358 - DNA, 15 bp, Homo sapiens
tggcttccagctgca

SEQ ID NO: 429359 - DNA, 15 bp, Homo sapiens
ttggcttccagctgc

SEQ ID NO: 429360 - DNA, 15 bp, Homo sapiens
attggcttccagctg

SEQ ID NO: 429361 - DNA, 15 bp, Homo sapiens
tattggcttccagct

SEQ ID NO: 429362 - DNA, 15 bp, Homo sapiens
ttattggcttccagc

SEQ ID NO: 429363 - DNA, 15 bp, Homo sapiens
attattggcttccag

SEQ ID NO: 429364 - DNA, 15 bp, Homo sapiens
cattattggcttcca

SEQ ID NO: 429365 - DNA, 15 bp, Homo sapiens
tcattattggcttcc

SEQ ID NO: 429366 - DNA, 15 bp, Homo sapiens
ctcattattggcttc

SEQ ID NO: 429367 - DNA, 15 bp, Homo sapiens
tctcattattggctt

SEQ ID NO: 429368 - DNA, 15 bp, Homo sapiens
gtctcattattggct

SEQ ID NO: 429369 - DNA, 15 bp, Homo sapiens
ggtctcattattggc

SEQ ID NO: 429370 - DNA, 15 bp, Homo sapiens
tggtctcattattgg

SEQ ID NO: 429371 - DNA, 15 bp, Homo sapiens
ctggtctcattattg

SEQ ID NO: 429372 - DNA, 15 bp, Homo sapiens
gctggtctcattatt

SEQ ID NO: 429373 - DNA, 15 bp, Homo sapiens
ggctggtctcattat

SEQ ID NO: 429374 - DNA, 15 bp, Homo sapiens
tggctggtctcatta

SEQ ID NO: 429375 - DNA, 15 bp, Homo sapiens
atggctggtctcatt

SEQ ID NO: 429376 - DNA, 15 bp, Homo sapiens
catggctggtctcat

SEQ ID NO: 429377 - DNA, 15 bp, Homo sapiens
acatggctggtctca

SEQ ID NO: 429378 - DNA, 15 bp, Homo sapiens
aacatggctggtctc

SEQ ID NO: 429379 - DNA, 15 bp, Homo sapiens
taacatggctggtct

SEQ ID NO: 429380 - DNA, 15 bp, Homo sapiens
ctaacatggctggtc

SEQ ID NO: 429381 - DNA, 15 bp, Homo sapiens
gctaacatggctggt

SEQ ID NO: 429382 - DNA, 15 bp, Homo sapiens
tgctaacatggctgg

SEQ ID NO: 429383 - DNA, 15 bp, Homo sapiens
ttgctaacatggctg

SEQ ID NO: 429384 - DNA, 15 bp, Homo sapiens
tttgctaacatggct

SEQ ID NO: 429385 - DNA, 15 bp, Homo sapiens
gtttgctaacatggc

SEQ ID NO: 429386 - DNA, 15 bp, Homo sapiens
agtttgctaacatgg

SEQ ID NO: 429387 - DNA, 15 bp, Homo sapiens
cagtttgctaacatg

SEQ ID NO: 429388 - DNA, 15 bp, Homo sapiens
tcagtttgctaacat

SEQ ID NO: 429389 - DNA, 15 bp, Homo sapiens
atcagtttgctaaca

SEQ ID NO: 429390 - DNA, 15 bp, Homo sapiens
aatcagtttgctaac

SEQ ID NO: 429391 - DNA, 15 bp, Homo sapiens
aaatcagtttgctaa

SEQ ID NO: 429392 - DNA, 15 bp, Homo sapiens
aaaatcagtttgcta

SEQ ID NO: 429393 - DNA, 15 bp, Homo sapiens
aaaaatcagtttgct

SEQ ID NO: 429394 - DNA, 15 bp, Homo sapiens
aaaaaatcagtttgc

SEQ ID NO: 429395 - DNA, 15 bp, Homo sapiens
aaaaaaatcagtttg

SEQ ID NO: 429396 - DNA, 15 bp, Homo sapiens
aaaaaaaatcagttt

SEQ ID NO: 429397 - DNA, 15 bp, Homo sapiens
gaaaaaaaatcagtt

SEQ ID NO: 429398 - DNA, 15 bp, Homo sapiens
agaaaaaaaatcagt

SEQ ID NO: 429399 - DNA, 15 bp, Homo sapiens
cagaaaaaaaatcag

SEQ ID NO: 429400 - DNA, 15 bp, Homo sapiens
acagaaaaaaaatca

SEQ ID NO: 429401 - DNA, 15 bp, Homo sapiens
cacagaaaaaaaatc

SEQ ID NO: 429402 - DNA, 15 bp, Homo sapiens
acacagaaaaaaaat

SEQ ID NO: 429403 - DNA, 15 bp, Homo sapiens
tacacagaaaaaaaa

SEQ ID NO: 429404 - DNA, 15 bp, Homo sapiens
ctacacagaaaaaaa

SEQ ID NO: 429405 - DNA, 15 bp, Homo sapiens
actacacagaaaaaa

SEQ ID NO: 429406 - DNA, 15 bp, Homo sapiens
aactacacagaaaaa

SEQ ID NO: 429407 - DNA, 15 bp, Homo sapiens
caactacacagaaaa

SEQ ID NO: 429408 - DNA, 15 bp, Homo sapiens
acaactacacagaaa

SEQ ID NO: 429409 - DNA, 15 bp, Homo sapiens
aacaactacacagaa

SEQ ID NO: 429410 - DNA, 15 bp, Homo sapiens
taacaactacacaga

SEQ ID NO: 429411 - DNA, 15 bp, Homo sapiens
ctaacaactacacag

SEQ ID NO: 429412 - DNA, 15 bp, Homo sapiens
cctaacaactacaca

SEQ ID NO: 429413 - DNA, 15 bp, Homo sapiens
tcctaacaactacac

SEQ ID NO: 429414 - DNA, 15 bp, Homo sapiens
ttcctaacaactaca

SEQ ID NO: 429415 - DNA, 15 bp, Homo sapiens
cttcctaacaactac

SEQ ID NO: 429416 - DNA, 15 bp, Homo sapiens
tcttcctaacaacta

SEQ ID NO: 429417 - DNA, 15 bp, Homo sapiens
atcttcctaacaact

SEQ ID NO: 429418 - DNA, 15 bp, Homo sapiens
aatcttcctaacaac

SEQ ID NO: 429419 - DNA, 15 bp, Homo sapiens
gaatcttcctaacaa

SEQ ID NO: 429420 - DNA, 15 bp, Homo sapiens
cgaatcttcctaaca

SEQ ID NO: 429421 - DNA, 15 bp, Homo sapiens
tcgaatcttcctaac

SEQ ID NO: 429422 - DNA, 15 bp, Homo sapiens
ttcgaatcttcctaa

SEQ ID NO: 429423 - DNA, 15 bp, Homo sapiens
attcgaatcttccta

SEQ ID NO: 429424 - DNA, 15 bp, Homo sapiens
aattcgaatcttcct

SEQ ID NO: 429425 - DNA, 15 bp, Homo sapiens
taattcgaatcttcc

SEQ ID NO: 429426 - DNA, 15 bp, Homo sapiens
ttaattcgaatcttc

SEQ ID NO: 429427 - DNA, 15 bp, Homo sapiens
attaattcgaatctt

SEQ ID NO: 429428 - DNA, 15 bp, Homo sapiens
aattaattcgaatct

SEQ ID NO: 429429 - DNA, 15 bp, Homo sapiens
taattaattcgaatc

SEQ ID NO: 429430 - DNA, 15 bp, Homo sapiens
ataattaattcgaat

SEQ ID NO: 429431 - DNA, 15 bp, Homo sapiens
cataattaattcgaa

SEQ ID NO: 429432 - DNA, 15 bp, Homo sapiens
ccataattaattcga

SEQ ID NO: 429433 - DNA, 15 bp, Homo sapiens
cccataattaattcg

SEQ ID NO: 429434 - DNA, 15 bp, Homo sapiens
acccataattaattc

SEQ ID NO: 429435 - DNA, 15 bp, Homo sapiens
gacccataattaatt

SEQ ID NO: 429436 - DNA, 15 bp, Homo sapiens
tgacccataattaat

SEQ ID NO: 429437 - DNA, 15 bp, Homo sapiens
ttgacccataattaa

SEQ ID NO: 429438 - DNA, 15 bp, Homo sapiens
tttgacccataatta

SEQ ID NO: 429439 - DNA, 15 bp, Homo sapiens
atttgacccataatt

SEQ ID NO: 429440 - DNA, 15 bp, Homo sapiens
aatttgacccataat

SEQ ID NO: 429441 - DNA, 15 bp, Homo sapiens
taatttgacccataa

SEQ ID NO: 429442 - DNA, 15 bp, Homo sapiens
gtaatttgacccata

SEQ ID NO: 429443 - DNA, 15 bp, Homo sapiens
agtaatttgacccat

SEQ ID NO: 429444 - DNA, 15 bp, Homo sapiens
tagtaatttgaccca

SEQ ID NO: 429445 - DNA, 15 bp, Homo sapiens
gtagtaatttgaccc

SEQ ID NO: 429446 - DNA, 15 bp, Homo sapiens
agtagtaatttgacc

SEQ ID NO: 429447 - DNA, 15 bp, Homo sapiens
gagtagtaatttgac

SEQ ID NO: 429448 - DNA, 15 bp, Homo sapiens
agagtagtaatttga

SEQ ID NO: 429449 - DNA, 15 bp, Homo sapiens
gagagtagtaatttg

SEQ ID NO: 429450 - DNA, 15 bp, Homo sapiens
tgagagtagtaattt

SEQ ID NO: 429451 - DNA, 15 bp, Homo sapiens
ttgagagtagtaatt

SEQ ID NO: 429452 - DNA, 15 bp, Homo sapiens
tttgagagtagtaat

SEQ ID NO: 429453 - DNA, 15 bp, Homo sapiens
atttgagagtagtaa

SEQ ID NO: 429454 - DNA, 15 bp, Homo sapiens
aatttgagagtagta

SEQ ID NO: 429455 - DNA, 15 bp, Homo sapiens
aaatttgagagtagt

SEQ ID NO: 429456 - DNA, 15 bp, Homo sapiens
taaatttgagagtag

SEQ ID NO: 429457 - DNA, 15 bp, Homo sapiens
ttaaatttgagagta

SEQ ID NO: 429458 - DNA, 15 bp, Homo sapiens
attaaatttgagagt

SEQ ID NO: 429459 - DNA, 15 bp, Homo sapiens
tattaaatttgagag

SEQ ID NO: 429460 - DNA, 15 bp, Homo sapiens
ttattaaatttgaga

SEQ ID NO: 429461 - DNA, 15 bp, Homo sapiens
attattaaatttgag

SEQ ID NO: 429462 - DNA, 15 bp, Homo sapiens
tattattaaatttga

SEQ ID NO: 429463 - DNA, 15 bp, Homo sapiens
atattattaaatttg

SEQ ID NO: 429464 - DNA, 15 bp, Homo sapiens
aatattattaaattt

SEQ ID NO: 429465 - DNA, 15 bp, Homo sapiens
taatattattaaatt

SEQ ID NO: 429466 - DNA, 15 bp, Homo sapiens
ataatattattaaat

SEQ ID NO: 429467 - DNA, 15 bp, Homo sapiens
ctcataatattatta

SEQ ID NO: 429468 - DNA, 15 bp, Homo sapiens
actcataatattatt

SEQ ID NO: 429469 - DNA, 15 bp, Homo sapiens
aactcataatattat

SEQ ID NO: 429470 - DNA, 15 bp, Homo sapiens
taactcataatatta

SEQ ID NO: 429471 - DNA, 15 bp, Homo sapiens
ttaactcataatatt

SEQ ID NO: 429472 - DNA, 15 bp, Homo sapiens
attaactcataatat

SEQ ID NO: 429473 - DNA, 15 bp, Homo sapiens
gattaactcataata

SEQ ID NO: 429474 - DNA, 15 bp, Homo sapiens
ggattaactcataat

SEQ ID NO: 429475 - DNA, 15 bp, Homo sapiens
aggattaactcataa

SEQ ID NO: 429476 - DNA, 15 bp, Homo sapiens
taggattaactcata

SEQ ID NO: 429477 - DNA, 15 bp, Homo sapiens
ataggattaactcat

SEQ ID NO: 429478 - DNA, 15 bp, Homo sapiens
aataggattaactca

SEQ ID NO: 429479 - DNA, 15 bp, Homo sapiens
caataggattaactc

SEQ ID NO: 429480 - DNA, 15 bp, Homo sapiens
acaataggattaact

SEQ ID NO: 429481 - DNA, 15 bp, Homo sapiens
tacaataggattaac

SEQ ID NO: 429482 - DNA, 15 bp, Homo sapiens
ctacaataggattaa

SEQ ID NO: 429483 - DNA, 15 bp, Homo sapiens
actacaataggatta

SEQ ID NO: 429484 - DNA, 15 bp, Homo sapiens
aactacaataggatt

SEQ ID NO: 429485 - DNA, 15 bp, Homo sapiens
caactacaataggat

SEQ ID NO: 429486 - DNA, 15 bp, Homo sapiens
acaactacaatagga

SEQ ID NO: 429487 - DNA, 15 bp, Homo sapiens
aacaactacaatagg

SEQ ID NO: 429488 - DNA, 15 bp, Homo sapiens
aaacaactacaatag

SEQ ID NO: 429489 - DNA, 15 bp, Homo sapiens
gaaacaactacaata

SEQ ID NO: 429490 - DNA, 15 bp, Homo sapiens
tgaaacaactacaat

SEQ ID NO: 429491 - DNA, 15 bp, Homo sapiens
ttgaaacaactacaa

SEQ ID NO: 429492 - DNA, 15 bp, Homo sapiens
cttgaaacaactaca

SEQ ID NO: 429493 - DNA, 15 bp, Homo sapiens
gcttgaaacaactac

SEQ ID NO: 429494 - DNA, 15 bp, Homo sapiens
tgcttgaaacaacta

SEQ ID NO: 429495 - DNA, 15 bp, Homo sapiens
atgcttgaaacaact

SEQ ID NO: 429496 - DNA, 15 bp, Homo sapiens
aatgcttgaaacaac

SEQ ID NO: 429497 - DNA, 15 bp, Homo sapiens
aaatgcttgaaacaa

SEQ ID NO: 429498 - DNA, 15 bp, Homo sapiens
aaaatgcttgaaaca

SEQ ID NO: 429499 - DNA, 15 bp, Homo sapiens
gaaaatgcttgaaac

SEQ ID NO: 429500 - DNA, 15 bp, Homo sapiens
ggaaaatgcttgaaa

SEQ ID NO: 429501 - DNA, 15 bp, Homo sapiens
aggaaaatgcttgaa

SEQ ID NO: 429502 - DNA, 15 bp, Homo sapiens
taggaaaatgcttga

SEQ ID NO: 429503 - DNA, 15 bp, Homo sapiens
ctaggaaaatgcttg

SEQ ID NO: 429504 - DNA, 15 bp, Homo sapiens
tctaggaaaatgctt

SEQ ID NO: 429505 - DNA, 15 bp, Homo sapiens
atctaggaaaatgct

SEQ ID NO: 429506 - DNA, 15 bp, Homo sapiens
aatctaggaaaatgc

SEQ ID NO: 429507 - DNA, 15 bp, Homo sapiens
gaatctaggaaaatg

SEQ ID NO: 429508 - DNA, 15 bp, Homo sapiens
agaatctaggaaaat

SEQ ID NO: 429509 - DNA, 15 bp, Homo sapiens
aagaatctaggaaaa

SEQ ID NO: 429510 - DNA, 15 bp, Homo sapiens
caagaatctaggaaa

SEQ ID NO: 429511 - DNA, 15 bp, Homo sapiens
tcaagaatctaggaa

SEQ ID NO: 429512 - DNA, 15 bp, Homo sapiens
ttcaagaatctagga

SEQ ID NO: 429513 - DNA, 15 bp, Homo sapiens
gttcaagaatctagg

SEQ ID NO: 429514 - DNA, 15 bp, Homo sapiens
ggttcaagaatctag

SEQ ID NO: 429515 - DNA, 15 bp, Homo sapiens
tggttcaagaatcta

SEQ ID NO: 429516 - DNA, 15 bp, Homo sapiens
ctggttcaagaatct

SEQ ID NO: 429517 - DNA, 15 bp, Homo sapiens
cctggttcaagaatc

SEQ ID NO: 429518 - DNA, 15 bp, Homo sapiens
tcctggttcaagaat

SEQ ID NO: 429519 - DNA, 15 bp, Homo sapiens
atcctggttcaagaa

SEQ ID NO: 429520 - DNA, 15 bp, Homo sapiens
aatcctggttcaaga

SEQ ID NO: 429521 - DNA, 15 bp, Homo sapiens
gaatcctggttcaag

SEQ ID NO: 429522 - DNA, 15 bp, Homo sapiens
agaatcctggttcaa

SEQ ID NO: 429523 - DNA, 15 bp, Homo sapiens
aagaatcctggttca

SEQ ID NO: 429524 - DNA, 15 bp, Homo sapiens
aaagaatcctggttc

SEQ ID NO: 429525 - DNA, 15 bp, Homo sapiens
taaagaatcctggtt

SEQ ID NO: 429526 - DNA, 15 bp, Homo sapiens
ataaagaatcctggt

SEQ ID NO: 429527 - DNA, 15 bp, Homo sapiens
aataaagaatcctgg

SEQ ID NO: 429528 - DNA, 15 bp, Homo sapiens
taataaagaatcctg

SEQ ID NO: 429529 - DNA, 15 bp, Homo sapiens
ctaataaagaatcct

SEQ ID NO: 429530 - DNA, 15 bp, Homo sapiens
actaataaagaatcc

SEQ ID NO: 429531 - DNA, 15 bp, Homo sapiens
tactaataaagaatc

SEQ ID NO: 429532 - DNA, 15 bp, Homo sapiens
ctactaataaagaat

SEQ ID NO: 429533 - DNA, 15 bp, Homo sapiens
actactaataaagaa

SEQ ID NO: 429534 - DNA, 15 bp, Homo sapiens
gactactaataaaga

SEQ ID NO: 429535 - DNA, 15 bp, Homo sapiens
tgactactaataaag

SEQ ID NO: 429536 - DNA, 15 bp, Homo sapiens
ttgactactaataaa

SEQ ID NO: 429537 - DNA, 15 bp, Homo sapiens
cttgactactaataa

SEQ ID NO: 429538 - DNA, 15 bp, Homo sapiens
tcttgactactaata

SEQ ID NO: 429539 - DNA, 15 bp, Homo sapiens
gtcttgactactaat

SEQ ID NO: 429540 - DNA, 15 bp, Homo sapiens
tgtcttgactactaa

SEQ ID NO: 429541 - DNA, 15 bp, Homo sapiens
ttgtcttgactacta

SEQ ID NO: 429542 - DNA, 15 bp, Homo sapiens
tttgtcttgactact

SEQ ID NO: 429543 - DNA, 15 bp, Homo sapiens
ttttgtcttgactac

SEQ ID NO: 429544 - DNA, 15 bp, Homo sapiens
cttttgtcttgacta

SEQ ID NO: 429545 - DNA, 15 bp, Homo sapiens
tcttttgtcttgact

SEQ ID NO: 429546 - DNA, 15 bp, Homo sapiens
ttcttttgtcttgac

SEQ ID NO: 429547 - DNA, 15 bp, Homo sapiens
cttcttttgtcttga

SEQ ID NO: 429548 - DNA, 15 bp, Homo sapiens
tcttcttttgtcttg

SEQ ID NO: 429549 - DNA, 15 bp, Homo sapiens
ctcttcttttgtctt

SEQ ID NO: 429550 - DNA, 15 bp, Homo sapiens
tctcttcttttgtct

SEQ ID NO: 429551 - DNA, 15 bp, Homo sapiens
ctctcttcttttgtc

SEQ ID NO: 429552 - DNA, 15 bp, Homo sapiens
gctctcttcttttgt

SEQ ID NO: 429553 - DNA, 15 bp, Homo sapiens
tgctctcttcttttg

SEQ ID NO: 429554 - DNA, 15 bp, Homo sapiens
ttgctctcttctttt

SEQ ID NO: 429555 - DNA, 15 bp, Homo sapiens
tttgctctcttcttt

SEQ ID NO: 429556 - DNA, 15 bp, Homo sapiens
atttgctctcttctt

SEQ ID NO: 429557 - DNA, 15 bp, Homo sapiens
tatttgctctcttct

SEQ ID NO: 429558 - DNA, 15 bp, Homo sapiens
ctatttgctctcttc

SEQ ID NO: 429559 - DNA, 15 bp, Homo sapiens
cctatttgctctctt

SEQ ID NO: 429560 - DNA, 15 bp, Homo sapiens
acctatttgctctct

SEQ ID NO: 429561 - DNA, 15 bp, Homo sapiens
cacctatttgctctc

SEQ ID NO: 429562 - DNA, 15 bp, Homo sapiens
ccacctatttgctct

SEQ ID NO: 429563 - DNA, 15 bp, Homo sapiens
tccacctatttgctc

SEQ ID NO: 429564 - DNA, 15 bp, Homo sapiens
ttccacctatttgct

SEQ ID NO: 429565 - DNA, 15 bp, Homo sapiens
cttccacctatttgc

SEQ ID NO: 429566 - DNA, 15 bp, Homo sapiens
acttccacctatttg

SEQ ID NO: 429567 - DNA, 15 bp, Homo sapiens
aacttccacctattt

SEQ ID NO: 429568 - DNA, 15 bp, Homo sapiens
aaacttccacctatt

SEQ ID NO: 429569 - DNA, 15 bp, Homo sapiens
aaaacttccacctat

SEQ ID NO: 429570 - DNA, 15 bp, Homo sapiens
taaaacttccaccta

SEQ ID NO: 429571 - DNA, 15 bp, Homo sapiens
ttaaaacttccacct

SEQ ID NO: 429572 - DNA, 15 bp, Homo sapiens
tttaaaacttccacc

SEQ ID NO: 429573 - DNA, 15 bp, Homo sapiens
ttttaaaacttccac

SEQ ID NO: 429574 - DNA, 15 bp, Homo sapiens
gttttaaaacttcca

SEQ ID NO: 429575 - DNA, 15 bp, Homo sapiens
tgttttaaaacttcc

SEQ ID NO: 429576 - DNA, 15 bp, Homo sapiens
ttgttttaaaacttc

SEQ ID NO: 429577 - DNA, 15 bp, Homo sapiens
tttgttttaaaactt

SEQ ID NO: 429578 - DNA, 15 bp, Homo sapiens
ttttgttttaaaact

SEQ ID NO: 429579 - DNA, 15 bp, Homo sapiens
cttttgttttaaaac

SEQ ID NO: 429580 - DNA, 15 bp, Homo sapiens
tcttttgttttaaaa

SEQ ID NO: 429581 - DNA, 15 bp, Homo sapiens
ctcttttgttttaaa

SEQ ID NO: 429582 - DNA, 15 bp, Homo sapiens
tctcttttgttttaa

SEQ ID NO: 429583 - DNA, 15 bp, Homo sapiens
ttctcttttgtttta

SEQ ID NO: 429584 - DNA, 15 bp, Homo sapiens
gttctcttttgtttt

SEQ ID NO: 429585 - DNA, 15 bp, Homo sapiens
ggttctcttttgttt

SEQ ID NO: 429586 - DNA, 15 bp, Homo sapiens
tggttctcttttgtt

SEQ ID NO: 429587 - DNA, 15 bp, Homo sapiens
ttggttctcttttgt

SEQ ID NO: 429588 - DNA, 15 bp, Homo sapiens
cttggttctcttttg

SEQ ID NO: 429589 - DNA, 15 bp, Homo sapiens
ccttggttctctttt

SEQ ID NO: 429590 - DNA, 15 bp, Homo sapiens
cccttggttctcttt

SEQ ID NO: 429591 - DNA, 15 bp, Homo sapiens
tcccttggttctctt

SEQ ID NO: 429592 - DNA, 15 bp, Homo sapiens
ctcccttggttctct

SEQ ID NO: 429593 - DNA, 15 bp, Homo sapiens
cctcccttggttctc

SEQ ID NO: 429594 - DNA, 15 bp, Homo sapiens
acctcccttggttct

SEQ ID NO: 429595 - DNA, 15 bp, Homo sapiens
aacctcccttggttc

SEQ ID NO: 429596 - DNA, 15 bp, Homo sapiens
taacctcccttggtt

SEQ ID NO: 429597 - DNA, 15 bp, Homo sapiens
ataacctcccttggt

SEQ ID NO: 429598 - DNA, 15 bp, Homo sapiens
aataacctcccttgg

SEQ ID NO: 429599 - DNA, 15 bp, Homo sapiens
taataacctcccttg

SEQ ID NO: 429600 - DNA, 15 bp, Homo sapiens
ataataacctccctt

SEQ ID NO: 429601 - DNA, 15 bp, Homo sapiens
aataataacctccct

SEQ ID NO: 429602 - DNA, 15 bp, Homo sapiens
taataataacctccc

SEQ ID NO: 429603 - DNA, 15 bp, Homo sapiens
ataataataacctcc

SEQ ID NO: 429604 - DNA, 15 bp, Homo sapiens
cataataataacctc

SEQ ID NO: 429605 - DNA, 15 bp, Homo sapiens
acataataataacct

SEQ ID NO: 429606 - DNA, 15 bp, Homo sapiens
tacataataataacc

SEQ ID NO: 429607 - DNA, 15 bp, Homo sapiens
ttacataataataac

SEQ ID NO: 429608 - DNA, 15 bp, Homo sapiens
gttacataataataa

SEQ ID NO: 429609 - DNA, 15 bp, Homo sapiens
agttacataataata

SEQ ID NO: 429610 - DNA, 15 bp, Homo sapiens
aagttacataataat

SEQ ID NO: 429611 - DNA, 15 bp, Homo sapiens
aaagttacataataa

SEQ ID NO: 429612 - DNA, 15 bp, Homo sapiens
taaagttacataata

SEQ ID NO: 429613 - DNA, 15 bp, Homo sapiens
ttaaagttacataat

SEQ ID NO: 429614 - DNA, 15 bp, Homo sapiens
tttaaagttacataa

SEQ ID NO: 429615 - DNA, 15 bp, Homo sapiens
ttttaaagttacata

SEQ ID NO: 429616 - DNA, 15 bp, Homo sapiens
gttttaaagttacat

SEQ ID NO: 429617 - DNA, 15 bp, Homo sapiens
tgttttaaagttaca

SEQ ID NO: 429618 - DNA, 15 bp, Homo sapiens
ttgttttaaagttac

SEQ ID NO: 429619 - DNA, 15 bp, Homo sapiens
tttgttttaaagtta

SEQ ID NO: 429620 - DNA, 15 bp, Homo sapiens
ttttgttttaaagtt

SEQ ID NO: 429621 - DNA, 15 bp, Homo sapiens
gttttgttttaaagt

SEQ ID NO: 429622 - DNA, 15 bp, Homo sapiens
tgttttgttttaaag

SEQ ID NO: 429623 - DNA, 15 bp, Homo sapiens
ctgttttgttttaaa

SEQ ID NO: 429624 - DNA, 15 bp, Homo sapiens
tctgttttgttttaa

SEQ ID NO: 429625 - DNA, 15 bp, Homo sapiens
ctctgttttgtttta

SEQ ID NO: 429626 - DNA, 15 bp, Homo sapiens
cctctgttttgtttt

SEQ ID NO: 429627 - DNA, 15 bp, Homo sapiens
acctctgttttgttt

SEQ ID NO: 429628 - DNA, 15 bp, Homo sapiens
aacctctgttttgtt

SEQ ID NO: 429629 - DNA, 15 bp, Homo sapiens
aaacctctgttttgt

SEQ ID NO: 429630 - DNA, 15 bp, Homo sapiens
aaaacctctgttttg

SEQ ID NO: 429631 - DNA, 15 bp, Homo sapiens
taaaacctctgtttt

SEQ ID NO: 429632 - DNA, 15 bp, Homo sapiens
ttaaaacctctgttt

SEQ ID NO: 429633 - DNA, 15 bp, Homo sapiens
cttaaaacctctgtt

SEQ ID NO: 429634 - DNA, 15 bp, Homo sapiens
ccttaaaacctctgt

SEQ ID NO: 429635 - DNA, 15 bp, Homo sapiens
cccttaaaacctctg

SEQ ID NO: 429636 - DNA, 15 bp, Homo sapiens
tcccttaaaacctct

SEQ ID NO: 429637 - DNA, 15 bp, Homo sapiens
ttcccttaaaacctc

SEQ ID NO: 429638 - DNA, 15 bp, Homo sapiens
tttcccttaaaacct

SEQ ID NO: 429639 - DNA, 15 bp, Homo sapiens
gtttcccttaaaacc

SEQ ID NO: 429640 - DNA, 15 bp, Homo sapiens
ggtttcccttaaaac

SEQ ID NO: 429641 - DNA, 15 bp, Homo sapiens
tggtttcccttaaaa

SEQ ID NO: 429642 - DNA, 15 bp, Homo sapiens
ctggtttcccttaaa

SEQ ID NO: 429643 - DNA, 15 bp, Homo sapiens
actggtttcccttaa

SEQ ID NO: 429644 - DNA, 15 bp, Homo sapiens
aactggtttccctta

SEQ ID NO: 429645 - DNA, 15 bp, Homo sapiens
caactggtttccctt

SEQ ID NO: 429646 - DNA, 15 bp, Homo sapiens
ccaactggtttccct

SEQ ID NO: 429647 - DNA, 15 bp, Homo sapiens
cccaactggtttccc

SEQ ID NO: 429648 - DNA, 15 bp, Homo sapiens
ccccaactggtttcc

SEQ ID NO: 429649 - DNA, 15 bp, Homo sapiens
tccccaactggtttc

SEQ ID NO: 429650 - DNA, 15 bp, Homo sapiens
ttccccaactggttt

SEQ ID NO: 429651 - DNA, 15 bp, Homo sapiens
gttccccaactggtt

SEQ ID NO: 429652 - DNA, 15 bp, Homo sapiens
agttccccaactggt

SEQ ID NO: 429653 - DNA, 15 bp, Homo sapiens
aagttccccaactgg

SEQ ID NO: 429654 - DNA, 15 bp, Homo sapiens
caagttccccaactg

SEQ ID NO: 429655 - DNA, 15 bp, Homo sapiens
ccaagttccccaact

SEQ ID NO: 429656 - DNA, 15 bp, Homo sapiens
tccaagttccccaac

SEQ ID NO: 429657 - DNA, 15 bp, Homo sapiens
atccaagttccccaa

SEQ ID NO: 429658 - DNA, 15 bp, Homo sapiens
aatccaagttcccca

SEQ ID NO: 429659 - DNA, 15 bp, Homo sapiens
aaatccaagttcccc

SEQ ID NO: 429660 - DNA, 15 bp, Homo sapiens
gaaatccaagttccc

SEQ ID NO: 429661 - DNA, 15 bp, Homo sapiens
ggaaatccaagttcc

SEQ ID NO: 429662 - DNA, 15 bp, Homo sapiens
cggaaatccaagttc

SEQ ID NO: 429663 - DNA, 15 bp, Homo sapiens
acggaaatccaagtt

SEQ ID NO: 429664 - DNA, 15 bp, Homo sapiens
cacggaaatccaagt

SEQ ID NO: 429665 - DNA, 15 bp, Homo sapiens
acacggaaatccaag

SEQ ID NO: 429666 - DNA, 15 bp, Homo sapiens
aacacggaaatccaa

SEQ ID NO: 429667 - DNA, 15 bp, Homo sapiens
aaacacggaaatcca

SEQ ID NO: 429668 - DNA, 15 bp, Homo sapiens
aaaacacggaaatcc

SEQ ID NO: 429669 - DNA, 15 bp, Homo sapiens
aaaaacacggaaatc

SEQ ID NO: 429670 - DNA, 15 bp, Homo sapiens
aaaaaacacggaaat

SEQ ID NO: 429671 - DNA, 15 bp, Homo sapiens
caaaaaacacggaaa

SEQ ID NO: 429672 - DNA, 15 bp, Homo sapiens
acaaaaaacacggaa

SEQ ID NO: 429673 - DNA, 15 bp, Homo sapiens
aacaaaaaacacgga

SEQ ID NO: 429674 - DNA, 15 bp, Homo sapiens
taacaaaaaacacgg

SEQ ID NO: 429675 - DNA, 15 bp, Homo sapiens
ttaacaaaaaacacg

SEQ ID NO: 429676 - DNA, 15 bp, Homo sapiens
attaacaaaaaacac

SEQ ID NO: 429677 - DNA, 15 bp, Homo sapiens
tattaacaaaaaaca

SEQ ID NO: 429678 - DNA, 15 bp, Homo sapiens
ctattaacaaaaaac

SEQ ID NO: 429679 - DNA, 15 bp, Homo sapiens
cctattaacaaaaaa

SEQ ID NO: 429680 - DNA, 15 bp, Homo sapiens
tcctattaacaaaaa

SEQ ID NO: 429681 - DNA, 15 bp, Homo sapiens
ttcctattaacaaaa

SEQ ID NO: 429682 - DNA, 15 bp, Homo sapiens
tttcctattaacaaa

SEQ ID NO: 429683 - DNA, 15 bp, Homo sapiens
atttcctattaacaa

SEQ ID NO: 429684 - DNA, 15 bp, Homo sapiens
tatttcctattaaca

SEQ ID NO: 429685 - DNA, 15 bp, Homo sapiens
gtatttcctattaac

SEQ ID NO: 429686 - DNA, 15 bp, Homo sapiens
agtatttcctattaa

SEQ ID NO: 429687 - DNA, 15 bp, Homo sapiens
aagtatttcctatta

SEQ ID NO: 429688 - DNA, 15 bp, Homo sapiens
aaagtatttcctatt

SEQ ID NO: 429689 - DNA, 15 bp, Homo sapiens
aaaagtatttcctat

SEQ ID NO: 429690 - DNA, 15 bp, Homo sapiens
gaaaagtatttccta

SEQ ID NO: 429691 - DNA, 15 bp, Homo sapiens
tgaaaagtatttcct

SEQ ID NO: 429692 - DNA, 15 bp, Homo sapiens
atgaaaagtatttcc

SEQ ID NO: 429693 - DNA, 15 bp, Homo sapiens
tatgaaaagtatttc

SEQ ID NO: 429694 - DNA, 15 bp, Homo sapiens
tttatgaaaagtatt

SEQ ID NO: 429695 - DNA, 15 bp, Homo sapiens
ctttatgaaaagtat

SEQ ID NO: 429696 - DNA, 15 bp, Homo sapiens
tctttatgaaaagta

SEQ ID NO: 429697 - DNA, 15 bp, Homo sapiens
ttctttatgaaaagt

SEQ ID NO: 429698 - DNA, 15 bp, Homo sapiens
tttctttatgaaaag

SEQ ID NO: 429699 - DNA, 15 bp, Homo sapiens
gtttctttatgaaaa

SEQ ID NO: 429700 - DNA, 15 bp, Homo sapiens
agtttctttatgaaa

SEQ ID NO: 429701 - DNA, 15 bp, Homo sapiens
cagtttctttatgaa

SEQ ID NO: 429702 - DNA, 15 bp, Homo sapiens
tcagtttctttatga

SEQ ID NO: 429703 - DNA, 15 bp, Homo sapiens
gtcagtttctttatg

SEQ ID NO: 429704 - DNA, 15 bp, Homo sapiens
tgtcagtttctttat

SEQ ID NO: 429705 - DNA, 15 bp, Homo sapiens
gtgtcagtttcttta

SEQ ID NO: 429706 - DNA, 15 bp, Homo sapiens
ggtgtcagtttcttt

SEQ ID NO: 429707 - DNA, 15 bp, Homo sapiens
tggtgtcagtttctt

SEQ ID NO: 429708 - DNA, 15 bp, Homo sapiens
ctggtgtcagtttct

SEQ ID NO: 429709 - DNA, 15 bp, Homo sapiens
actggtgtcagtttc

SEQ ID NO: 429710 - DNA, 15 bp, Homo sapiens
tactggtgtcagttt

SEQ ID NO: 429711 - DNA, 15 bp, Homo sapiens
atactggtgtcagtt

SEQ ID NO: 429712 - DNA, 15 bp, Homo sapiens
catactggtgtcagt

SEQ ID NO: 429713 - DNA, 15 bp, Homo sapiens
tcatactggtgtcag

SEQ ID NO: 429714 - DNA, 15 bp, Homo sapiens
ttcatactggtgtca

SEQ ID NO: 429715 - DNA, 15 bp, Homo sapiens
attcatactggtgtc

SEQ ID NO: 429716 - DNA, 15 bp, Homo sapiens
aattcatactggtgt

SEQ ID NO: 429717 - DNA, 15 bp, Homo sapiens
caattcatactggtg

SEQ ID NO: 429718 - DNA, 15 bp, Homo sapiens
acaattcatactggt

SEQ ID NO: 429719 - DNA, 15 bp, Homo sapiens
tacaattcatactgg

SEQ ID NO: 429720 - DNA, 15 bp, Homo sapiens
atacaattcatactg

SEQ ID NO: 429721 - DNA, 15 bp, Homo sapiens
aatacaattcatact

SEQ ID NO: 429722 - DNA, 15 bp, Homo sapiens
aaatacaattcatac

SEQ ID NO: 429723 - DNA, 15 bp, Homo sapiens
taaatacaattcata

SEQ ID NO: 429724 - DNA, 15 bp, Homo sapiens
ataaatacaattcat

SEQ ID NO: 429725 - DNA, 15 bp, Homo sapiens
tataaatacaattca

SEQ ID NO: 429726 - DNA, 15 bp, Homo sapiens
ctataaatacaattc

SEQ ID NO: 429727 - DNA, 15 bp, Homo sapiens
cctataaatacaatt

SEQ ID NO: 429728 - DNA, 15 bp, Homo sapiens
gcctataaatacaat

SEQ ID NO: 429729 - DNA, 15 bp, Homo sapiens
agcctataaatacaa

SEQ ID NO: 429730 - DNA, 15 bp, Homo sapiens
tagcctataaataca

SEQ ID NO: 429731 - DNA, 15 bp, Homo sapiens
atagcctataaatac

SEQ ID NO: 429732 - DNA, 15 bp, Homo sapiens
aatagcctataaata

SEQ ID NO: 429733 - DNA, 15 bp, Homo sapiens
aaatagcctataaat

SEQ ID NO: 429734 - DNA, 15 bp, Homo sapiens
aaaatagcctataaa

SEQ ID NO: 429735 - DNA, 15 bp, Homo sapiens
gaaaatagcctataa

SEQ ID NO: 429736 - DNA, 15 bp, Homo sapiens
agaaaatagcctata

SEQ ID NO: 429737 - DNA, 15 bp, Homo sapiens
aagaaaatagcctat

SEQ ID NO: 429738 - DNA, 15 bp, Homo sapiens
aaagaaaatagccta

SEQ ID NO: 429739 - DNA, 15 bp, Homo sapiens
aaaagaaaatagcct

SEQ ID NO: 429740 - DNA, 15 bp, Homo sapiens
aaaaagaaaatagcc

SEQ ID NO: 429741 - DNA, 15 bp, Homo sapiens
taaaaagaaaatagc

SEQ ID NO: 429742 - DNA, 15 bp, Homo sapiens
ttaaaaagaaaatag

SEQ ID NO: 429743 - DNA, 15 bp, Homo sapiens
tttaaaaagaaaata

SEQ ID NO: 429744 - DNA, 15 bp, Homo sapiens
ttttaaaaagaaaat

SEQ ID NO: 429745 - DNA, 15 bp, Homo sapiens
tttttaaaaagaaaa

SEQ ID NO: 429746 - DNA, 15 bp, Homo sapiens
ttgtttttaaaaaga

SEQ ID NO: 429747 - DNA, 15 bp, Homo sapiens
attgtttttaaaaag

SEQ ID NO: 429748 - DNA, 15 bp, Homo sapiens
gattgtttttaaaaa

SEQ ID NO: 429749 - DNA, 15 bp, Homo sapiens
agattgtttttaaaa

SEQ ID NO: 429750 - DNA, 15 bp, Homo sapiens
gagattgtttttaaa

SEQ ID NO: 429751 - DNA, 15 bp, Homo sapiens
tgagattgtttttaa

SEQ ID NO: 429752 - DNA, 15 bp, Homo sapiens
ctgagattgttttta

SEQ ID NO: 429753 - DNA, 15 bp, Homo sapiens
tctgagattgttttt

SEQ ID NO: 429754 - DNA, 15 bp, Homo sapiens
ttctgagattgtttt

SEQ ID NO: 429755 - DNA, 15 bp, Homo sapiens
tttctgagattgttt

SEQ ID NO: 429756 - DNA, 15 bp, Homo sapiens
ttttctgagattgtt

SEQ ID NO: 429757 - DNA, 15 bp, Homo sapiens
gttttctgagattgt

SEQ ID NO: 429758 - DNA, 15 bp, Homo sapiens
ggttttctgagattg

SEQ ID NO: 429759 - DNA, 15 bp, Homo sapiens
aggttttctgagatt

SEQ ID NO: 429760 - DNA, 15 bp, Homo sapiens
aaggttttctgagat

SEQ ID NO: 429761 - DNA, 15 bp, Homo sapiens
aaaggttttctgaga

SEQ ID NO: 429762 - DNA, 15 bp, Homo sapiens
caaaggttttctgag

SEQ ID NO: 429763 - DNA, 15 bp, Homo sapiens
acaaaggttttctga

SEQ ID NO: 429764 - DNA, 15 bp, Homo sapiens
gacaaaggttttctg

SEQ ID NO: 429765 - DNA, 15 bp, Homo sapiens
tgacaaaggttttct

SEQ ID NO: 429766 - DNA, 15 bp, Homo sapiens
ttgacaaaggttttc

SEQ ID NO: 429767 - DNA, 15 bp, Homo sapiens
gttgacaaaggtttt

SEQ ID NO: 429768 - DNA, 15 bp, Homo sapiens
tgttgacaaaggttt

SEQ ID NO: 429769 - DNA, 15 bp, Homo sapiens
atgttgacaaaggtt

SEQ ID NO: 429770 - DNA, 15 bp, Homo sapiens
aatgttgacaaaggt

SEQ ID NO: 429771 - DNA, 15 bp, Homo sapiens
aaatgttgacaaagg

SEQ ID NO: 429772 - DNA, 15 bp, Homo sapiens
gaaatgttgacaaag

SEQ ID NO: 429773 - DNA, 15 bp, Homo sapiens
tgaaatgttgacaaa

SEQ ID NO: 429774 - DNA, 15 bp, Homo sapiens
atgaaatgttgacaa

SEQ ID NO: 429775 - DNA, 15 bp, Homo sapiens
aatgaaatgttgaca

SEQ ID NO: 429776 - DNA, 15 bp, Homo sapiens
gaatgaaatgttgac

SEQ ID NO: 429777 - DNA, 15 bp, Homo sapiens
agaatgaaatgttga

SEQ ID NO: 429778 - DNA, 15 bp, Homo sapiens
aagaatgaaatgttg

SEQ ID NO: 429779 - DNA, 15 bp, Homo sapiens
aaagaatgaaatgtt

SEQ ID NO: 429780 - DNA, 15 bp, Homo sapiens
aaaagaatgaaatgt

SEQ ID NO: 429781 - DNA, 15 bp, Homo sapiens
caaaagaatgaaatg

SEQ ID NO: 429782 - DNA, 15 bp, Homo sapiens
gcaaaagaatgaaat

SEQ ID NO: 429783 - DNA, 15 bp, Homo sapiens
agcaaaagaatgaaa

SEQ ID NO: 429784 - DNA, 15 bp, Homo sapiens
cagcaaaagaatgaa

SEQ ID NO: 429785 - DNA, 15 bp, Homo sapiens
tcagcaaaagaatga

SEQ ID NO: 429786 - DNA, 15 bp, Homo sapiens
ttcagcaaaagaatg

SEQ ID NO: 429787 - DNA, 15 bp, Homo sapiens
attcagcaaaagaat

SEQ ID NO: 429788 - DNA, 15 bp, Homo sapiens
aattcagcaaaagaa

SEQ ID NO: 429789 - DNA, 15 bp, Homo sapiens
taattcagcaaaaga

SEQ ID NO: 429790 - DNA, 15 bp, Homo sapiens
ctaattcagcaaaag

SEQ ID NO: 429791 - DNA, 15 bp, Homo sapiens
tctaattcagcaaaa

SEQ ID NO: 429792 - DNA, 15 bp, Homo sapiens
ttctaattcagcaaa

SEQ ID NO: 429793 - DNA, 15 bp, Homo sapiens
cttctaattcagcaa

SEQ ID NO: 429794 - DNA, 15 bp, Homo sapiens
ccttctaattcagca

SEQ ID NO: 429795 - DNA, 15 bp, Homo sapiens
gccttctaattcagc

SEQ ID NO: 429796 - DNA, 15 bp, Homo sapiens
tgccttctaattcag

SEQ ID NO: 429797 - DNA, 15 bp, Homo sapiens
atgccttctaattca

SEQ ID NO: 429798 - DNA, 15 bp, Homo sapiens
tatgccttctaattc

SEQ ID NO: 429799 - DNA, 15 bp, Homo sapiens
gtatgccttctaatt

SEQ ID NO: 429800 - DNA, 15 bp, Homo sapiens
tgtatgccttctaat

SEQ ID NO: 429801 - DNA, 15 bp, Homo sapiens
atgtatgccttctaa

SEQ ID NO: 429802 - DNA, 15 bp, Homo sapiens
tatgtatgccttcta

SEQ ID NO: 429803 - DNA, 15 bp, Homo sapiens
ttatgtatgccttct

SEQ ID NO: 429804 - DNA, 15 bp, Homo sapiens
gttatgtatgccttc

SEQ ID NO: 429805 - DNA, 15 bp, Homo sapiens
agttatgtatgcctt

SEQ ID NO: 429806 - DNA, 15 bp, Homo sapiens
cagttatgtatgcct

SEQ ID NO: 429807 - DNA, 15 bp, Homo sapiens
gcagttatgtatgcc

SEQ ID NO: 429808 - DNA, 15 bp, Homo sapiens
ggcagttatgtatgc

SEQ ID NO: 429809 - DNA, 15 bp, Homo sapiens
aggcagttatgtatg

SEQ ID NO: 429810 - DNA, 15 bp, Homo sapiens
taggcagttatgtat

SEQ ID NO: 429811 - DNA, 15 bp, Homo sapiens
ataggcagttatgta

SEQ ID NO: 429812 - DNA, 15 bp, Homo sapiens
aataggcagttatgt

SEQ ID NO: 429813 - DNA, 15 bp, Homo sapiens
taataggcagttatg

SEQ ID NO: 429814 - DNA, 15 bp, Homo sapiens
ataataggcagttat

SEQ ID NO: 429815 - DNA, 15 bp, Homo sapiens
tataataggcagtta

SEQ ID NO: 429816 - DNA, 15 bp, Homo sapiens
ttataataggcagtt

SEQ ID NO: 429817 - DNA, 15 bp, Homo sapiens
tttataataggcagt

SEQ ID NO: 429818 - DNA, 15 bp, Homo sapiens
ttttataataggcag

SEQ ID NO: 429819 - DNA, 15 bp, Homo sapiens
tttttataataggca

SEQ ID NO: 429820 - DNA, 15 bp, Homo sapiens
atttttataataggc

SEQ ID NO: 429821 - DNA, 15 bp, Homo sapiens
catttttataatagg

SEQ ID NO: 429822 - DNA, 15 bp, Homo sapiens
tcatttttataatag

SEQ ID NO: 429823 - DNA, 15 bp, Homo sapiens
ttcatttttataata

SEQ ID NO: 429824 - DNA, 15 bp, Homo sapiens
tttcatttttataat

SEQ ID NO: 429825 - DNA, 15 bp, Homo sapiens
ctttcatttttataa

SEQ ID NO: 429826 - DNA, 15 bp, Homo sapiens
tctttcatttttata

SEQ ID NO: 429827 - DNA, 15 bp, Homo sapiens
ttctttcatttttat

SEQ ID NO: 429828 - DNA, 15 bp, Homo sapiens
gttctttcattttta

SEQ ID NO: 429829 - DNA, 15 bp, Homo sapiens
ggttctttcattttt

SEQ ID NO: 429830 - DNA, 15 bp, Homo sapiens
tggttctttcatttt

SEQ ID NO: 429831 - DNA, 15 bp, Homo sapiens
ttggttctttcattt

SEQ ID NO: 429832 - DNA, 15 bp, Homo sapiens
cttggttctttcatt

SEQ ID NO: 429833 - DNA, 15 bp, Homo sapiens
gcttggttctttcat

SEQ ID NO: 429834 - DNA, 15 bp, Homo sapiens
cgcttggttctttca

SEQ ID NO: 429835 - DNA, 15 bp, Homo sapiens
ccgcttggttctttc

SEQ ID NO: 429836 - DNA, 15 bp, Homo sapiens
gccgcttggttcttt

SEQ ID NO: 429837 - DNA, 15 bp, Homo sapiens
tgccgcttggttctt

SEQ ID NO: 429838 - DNA, 15 bp, Homo sapiens
ttgccgcttggttct

SEQ ID NO: 429839 - DNA, 15 bp, Homo sapiens
cttgccgcttggttc

SEQ ID NO: 429840 - DNA, 15 bp, Homo sapiens
tcttgccgcttggtt

SEQ ID NO: 429841 - DNA, 15 bp, Homo sapiens
atcttgccgcttggt

SEQ ID NO: 429842 - DNA, 15 bp, Homo sapiens
tatcttgccgcttgg

SEQ ID NO: 429843 - DNA, 15 bp, Homo sapiens
ttatcttgccgcttg

SEQ ID NO: 429844 - DNA, 15 bp, Homo sapiens
tttatcttgccgctt

SEQ ID NO: 429845 - DNA, 15 bp, Homo sapiens
ttttatcttgccgct

SEQ ID NO: 429846 - DNA, 15 bp, Homo sapiens
cttttatcttgccgc

SEQ ID NO: 429847 - DNA, 15 bp, Homo sapiens
acttttatcttgccg

SEQ ID NO: 429848 - DNA, 15 bp, Homo sapiens
cacttttatcttgcc

SEQ ID NO: 429849 - DNA, 15 bp, Homo sapiens
ccacttttatcttgc

SEQ ID NO: 429850 - DNA, 15 bp, Homo sapiens
gccacttttatcttg

SEQ ID NO: 429851 - DNA, 15 bp, Homo sapiens
tgccacttttatctt

SEQ ID NO: 429852 - DNA, 15 bp, Homo sapiens
atgccacttttatct

SEQ ID NO: 429853 - DNA, 15 bp, Homo sapiens
gatgccacttttatc

SEQ ID NO: 429854 - DNA, 15 bp, Homo sapiens
agatgccacttttat

SEQ ID NO: 429855 - DNA, 15 bp, Homo sapiens
aagatgccactttta

SEQ ID NO: 429856 - DNA, 15 bp, Homo sapiens
caagatgccactttt

SEQ ID NO: 429857 - DNA, 15 bp, Homo sapiens
gcaagatgccacttt

SEQ ID NO: 429858 - DNA, 15 bp, Homo sapiens
agcaagatgccactt

SEQ ID NO: 429859 - DNA, 15 bp, Homo sapiens
gagcaagatgccact

SEQ ID NO: 429860 - DNA, 15 bp, Homo sapiens
tgagcaagatgccac

SEQ ID NO: 429861 - DNA, 15 bp, Homo sapiens
ttgagcaagatgcca

SEQ ID NO: 429862 - DNA, 15 bp, Homo sapiens
attgagcaagatgcc

SEQ ID NO: 429863 - DNA, 15 bp, Homo sapiens
aattgagcaagatgc

SEQ ID NO: 429864 - DNA, 15 bp, Homo sapiens
gaattgagcaagatg

SEQ ID NO: 429865 - DNA, 15 bp, Homo sapiens
agaattgagcaagat

SEQ ID NO: 429866 - DNA, 15 bp, Homo sapiens
gagaattgagcaaga

SEQ ID NO: 429867 - DNA, 15 bp, Homo sapiens
tgagaattgagcaag

SEQ ID NO: 429868 - DNA, 15 bp, Homo sapiens
ctgagaattgagcaa

SEQ ID NO: 429869 - DNA, 15 bp, Homo sapiens
gctgagaattgagca

SEQ ID NO: 429870 - DNA, 15 bp, Homo sapiens
agctgagaattgagc

SEQ ID NO: 429871 - DNA, 15 bp, Homo sapiens
gagctgagaattgag

SEQ ID NO: 429872 - DNA, 15 bp, Homo sapiens
tgagctgagaattga

SEQ ID NO: 429873 - DNA, 15 bp, Homo sapiens
atgagctgagaattg

SEQ ID NO: 429874 - DNA, 15 bp, Homo sapiens
catgagctgagaatt

SEQ ID NO: 429875 - DNA, 15 bp, Homo sapiens
ccatgagctgagaat

SEQ ID NO: 429876 - DNA, 15 bp, Homo sapiens
tccatgagctgagaa

SEQ ID NO: 429877 - DNA, 15 bp, Homo sapiens
atccatgagctgaga

SEQ ID NO: 429878 - DNA, 15 bp, Homo sapiens
aatccatgagctgag

SEQ ID NO: 429879 - DNA, 15 bp, Homo sapiens
aaatccatgagctga

SEQ ID NO: 429880 - DNA, 15 bp, Homo sapiens
caaatccatgagctg

SEQ ID NO: 429881 - DNA, 15 bp, Homo sapiens
tcaaatccatgagct

SEQ ID NO: 429882 - DNA, 15 bp, Homo sapiens
ctcaaatccatgagc

SEQ ID NO: 429883 - DNA, 15 bp, Homo sapiens
gctcaaatccatgag

SEQ ID NO: 429884 - DNA, 15 bp, Homo sapiens
tgctcaaatccatga

SEQ ID NO: 429885 - DNA, 15 bp, Homo sapiens
gtgctcaaatccatg

SEQ ID NO: 429886 - DNA, 15 bp, Homo sapiens
tgtgctcaaatccat

SEQ ID NO: 429887 - DNA, 15 bp, Homo sapiens
gtgtgctcaaatcca

SEQ ID NO: 429888 - DNA, 15 bp, Homo sapiens
agtgtgctcaaatcc

SEQ ID NO: 429889 - DNA, 15 bp, Homo sapiens
tagtgtgctcaaatc

SEQ ID NO: 429890 - DNA, 15 bp, Homo sapiens
ctagtgtgctcaaat

SEQ ID NO: 429891 - DNA, 15 bp, Homo sapiens
cctagtgtgctcaaa

SEQ ID NO: 429892 - DNA, 15 bp, Homo sapiens
tcctagtgtgctcaa

SEQ ID NO: 429893 - DNA, 15 bp, Homo sapiens
gtcctagtgtgctca

SEQ ID NO: 429894 - DNA, 15 bp, Homo sapiens
agtcctagtgtgctc

SEQ ID NO: 429895 - DNA, 15 bp, Homo sapiens
cagtcctagtgtgct

SEQ ID NO: 429896 - DNA, 15 bp, Homo sapiens
gcagtcctagtgtgc

SEQ ID NO: 429897 - DNA, 15 bp, Homo sapiens
tgcagtcctagtgtg

SEQ ID NO: 429898 - DNA, 15 bp, Homo sapiens
gtgcagtcctagtgt

SEQ ID NO: 429899 - DNA, 15 bp, Homo sapiens
tgtgcagtcctagtg

SEQ ID NO: 429900 - DNA, 15 bp, Homo sapiens
gtgtgcagtcctagt

SEQ ID NO: 429901 - DNA, 15 bp, Homo sapiens
agtgtgcagtcctag

SEQ ID NO: 429902 - DNA, 15 bp, Homo sapiens
aagtgtgcagtccta

SEQ ID NO: 429903 - DNA, 15 bp, Homo sapiens
caagtgtgcagtcct

SEQ ID NO: 429904 - DNA, 15 bp, Homo sapiens
ccaagtgtgcagtcc

SEQ ID NO: 429905 - DNA, 15 bp, Homo sapiens
accaagtgtgcagtc

SEQ ID NO: 429906 - DNA, 15 bp, Homo sapiens
caccaagtgtgcagt

SEQ ID NO: 429907 - DNA, 15 bp, Homo sapiens
tcaccaagtgtgcag

SEQ ID NO: 429908 - DNA, 15 bp, Homo sapiens
ctcaccaagtgtgca

SEQ ID NO: 429909 - DNA, 15 bp, Homo sapiens
gctcaccaagtgtgc

SEQ ID NO: 429910 - DNA, 15 bp, Homo sapiens
ggctcaccaagtgtg

SEQ ID NO: 429911 - DNA, 15 bp, Homo sapiens
aggctcaccaagtgt

SEQ ID NO: 429912 - DNA, 15 bp, Homo sapiens
aaggctcaccaagtg

SEQ ID NO: 429913 - DNA, 15 bp, Homo sapiens
aaaggctcaccaagt

SEQ ID NO: 429914 - DNA, 15 bp, Homo sapiens
aaaaggctcaccaag

SEQ ID NO: 429915 - DNA, 15 bp, Homo sapiens
gaaaaggctcaccaa

SEQ ID NO: 429916 - DNA, 15 bp, Homo sapiens
agaaaaggctcacca

SEQ ID NO: 429917 - DNA, 15 bp, Homo sapiens
cagaaaaggctcacc

SEQ ID NO: 429918 - DNA, 15 bp, Homo sapiens
tcagaaaaggctcac

SEQ ID NO: 429919 - DNA, 15 bp, Homo sapiens
ctcagaaaaggctca

SEQ ID NO: 429920 - DNA, 15 bp, Homo sapiens
actcagaaaaggctc

SEQ ID NO: 429921 - DNA, 15 bp, Homo sapiens
aactcagaaaaggct

SEQ ID NO: 429922 - DNA, 15 bp, Homo sapiens
aaactcagaaaaggc

SEQ ID NO: 429923 - DNA, 15 bp, Homo sapiens
caaactcagaaaagg

SEQ ID NO: 429924 - DNA, 15 bp, Homo sapiens
acaaactcagaaaag

SEQ ID NO: 429925 - DNA, 15 bp, Homo sapiens
gacaaactcagaaaa

SEQ ID NO: 429926 - DNA, 15 bp, Homo sapiens
agacaaactcagaaa

SEQ ID NO: 429927 - DNA, 15 bp, Homo sapiens
gagacaaactcagaa

SEQ ID NO: 429928 - DNA, 15 bp, Homo sapiens
agagacaaactcaga

SEQ ID NO: 429929 - DNA, 15 bp, Homo sapiens
cagagacaaactcag

SEQ ID NO: 429930 - DNA, 15 bp, Homo sapiens
ccagagacaaactca

SEQ ID NO: 429931 - DNA, 15 bp, Homo sapiens
tccagagacaaactc

SEQ ID NO: 429932 - DNA, 15 bp, Homo sapiens
ttccagagacaaact

SEQ ID NO: 429933 - DNA, 15 bp, Homo sapiens
tttccagagacaaac

SEQ ID NO: 429934 - DNA, 15 bp, Homo sapiens
ctttccagagacaaa

SEQ ID NO: 429935 - DNA, 15 bp, Homo sapiens
tctttccagagacaa

SEQ ID NO: 429936 - DNA, 15 bp, Homo sapiens
gtctttccagagaca

SEQ ID NO: 429937 - DNA, 15 bp, Homo sapiens
tgtctttccagagac

SEQ ID NO: 429938 - DNA, 15 bp, Homo sapiens
ctgtctttccagaga

SEQ ID NO: 429939 - DNA, 15 bp, Homo sapiens
actgtctttccagag

SEQ ID NO: 429940 - DNA, 15 bp, Homo sapiens
aactgtctttccaga

SEQ ID NO: 429941 - DNA, 15 bp, Homo sapiens
taactgtctttccag

SEQ ID NO: 429942 - DNA, 15 bp, Homo sapiens
ataactgtctttcca

SEQ ID NO: 429943 - DNA, 15 bp, Homo sapiens
aataactgtctttcc

SEQ ID NO: 429944 - DNA, 15 bp, Homo sapiens
gaataactgtctttc

SEQ ID NO: 429945 - DNA, 15 bp, Homo sapiens
agaataactgtcttt

SEQ ID NO: 429946 - DNA, 15 bp, Homo sapiens
aagaataactgtctt

SEQ ID NO: 429947 - DNA, 15 bp, Homo sapiens
caagaataactgtct

SEQ ID NO: 429948 - DNA, 15 bp, Homo sapiens
acaagaataactgtc

SEQ ID NO: 429949 - DNA, 15 bp, Homo sapiens
cacaagaataactgt

SEQ ID NO: 429950 - DNA, 15 bp, Homo sapiens
tcacaagaataactg

SEQ ID NO: 429951 - DNA, 15 bp, Homo sapiens
ttcacaagaataact

SEQ ID NO: 429952 - DNA, 15 bp, Homo sapiens
attcacaagaataac

SEQ ID NO: 429953 - DNA, 15 bp, Homo sapiens
aattcacaagaataa

SEQ ID NO: 429954 - DNA, 15 bp, Homo sapiens
gaattcacaagaata

SEQ ID NO: 429955 - DNA, 15 bp, Homo sapiens
ggaattcacaagaat

SEQ ID NO: 429956 - DNA, 15 bp, Homo sapiens
gggaattcacaagaa

SEQ ID NO: 429957 - DNA, 15 bp, Homo sapiens
cgggaattcacaaga

SEQ ID NO: 429958 - DNA, 15 bp, Homo sapiens
ccgggaattcacaag

SEQ ID NO: 429959 - DNA, 15 bp, Homo sapiens
accgggaattcacaa

SEQ ID NO: 429960 - DNA, 15 bp, Homo sapiens
aaccgggaattcaca

SEQ ID NO: 429961 - DNA, 15 bp, Homo sapiens
taaccgggaattcac

SEQ ID NO: 429962 - DNA, 15 bp, Homo sapiens
gtaaccgggaattca

SEQ ID NO: 429963 - DNA, 15 bp, Homo sapiens
agtaaccgggaattc

SEQ ID NO: 429964 - DNA, 15 bp, Homo sapiens
gagtaaccgggaatt

SEQ ID NO: 429965 - DNA, 15 bp, Homo sapiens
agagtaaccgggaat

SEQ ID NO: 429966 - DNA, 15 bp, Homo sapiens
aagagtaaccgggaa

SEQ ID NO: 429967 - DNA, 15 bp, Homo sapiens
aaagagtaaccggga

SEQ ID NO: 429968 - DNA, 15 bp, Homo sapiens
caaagagtaaccggg

SEQ ID NO: 429969 - DNA, 15 bp, Homo sapiens
ccaaagagtaaccgg

SEQ ID NO: 429970 - DNA, 15 bp, Homo sapiens
tccaaagagtaaccg

SEQ ID NO: 429971 - DNA, 15 bp, Homo sapiens
ctccaaagagtaacc

SEQ ID NO: 429972 - DNA, 15 bp, Homo sapiens
cctccaaagagtaac

SEQ ID NO: 429973 - DNA, 15 bp, Homo sapiens
tcctccaaagagtaa

SEQ ID NO: 429974 - DNA, 15 bp, Homo sapiens
ctcctccaaagagta

SEQ ID NO: 429975 - DNA, 15 bp, Homo sapiens
cctcctccaaagagt

SEQ ID NO: 429976 - DNA, 15 bp, Homo sapiens
ccctcctccaaagag

SEQ ID NO: 429977 - DNA, 15 bp, Homo sapiens
tccctcctccaaaga

SEQ ID NO: 429978 - DNA, 15 bp, Homo sapiens
ctccctcctccaaag

SEQ ID NO: 429979 - DNA, 15 bp, Homo sapiens
gctccctcctccaaa

SEQ ID NO: 429980 - DNA, 15 bp, Homo sapiens
tgctccctcctccaa

SEQ ID NO: 429981 - DNA, 15 bp, Homo sapiens
gtgctccctcctcca

SEQ ID NO: 429982 - DNA, 15 bp, Homo sapiens
ggtgctccctcctcc

SEQ ID NO: 429983 - DNA, 15 bp, Homo sapiens
tggtgctccctcctc

SEQ ID NO: 429984 - DNA, 15 bp, Homo sapiens
ttggtgctccctcct

SEQ ID NO: 429985 - DNA, 15 bp, Homo sapiens
gttggtgctccctcc

SEQ ID NO: 429986 - DNA, 15 bp, Homo sapiens
tgttggtgctccctc

SEQ ID NO: 429987 - DNA, 15 bp, Homo sapiens
gtgttggtgctccct

SEQ ID NO: 429988 - DNA, 15 bp, Homo sapiens
agtgttggtgctccc

SEQ ID NO: 429989 - DNA, 15 bp, Homo sapiens
gagtgttggtgctcc

SEQ ID NO: 429990 - DNA, 15 bp, Homo sapiens
tgagtgttggtgctc

SEQ ID NO: 429991 - DNA, 15 bp, Homo sapiens
ttgagtgttggtgct

SEQ ID NO: 429992 - DNA, 15 bp, Homo sapiens
gttgagtgttggtgc

SEQ ID NO: 429993 - DNA, 15 bp, Homo sapiens
cgttgagtgttggtg

SEQ ID NO: 429994 - DNA, 15 bp, Homo sapiens
gcgttgagtgttggt

SEQ ID NO: 429995 - DNA, 15 bp, Homo sapiens
agcgttgagtgttgg

SEQ ID NO: 429996 - DNA, 15 bp, Homo sapiens
gagcgttgagtgttg

SEQ ID NO: 429997 - DNA, 15 bp, Homo sapiens
tgagcgttgagtgtt

SEQ ID NO: 429998 - DNA, 15 bp, Homo sapiens
gtgagcgttgagtgt

SEQ ID NO: 429999 - DNA, 15 bp, Homo sapiens
ggtgagcgttgagtg

SEQ ID NO: 430000 - DNA, 15 bp, Homo sapiens
gggtgagcgttgagt

SEQ ID NO: 430001 - DNA, 15 bp, Homo sapiens
ggggtgagcgttgag

SEQ ID NO: 430002 - DNA, 15 bp, Homo sapiens
aggggtgagcgttga

SEQ ID NO: 430003 - DNA, 15 bp, Homo sapiens
caggggtgagcgttg

SEQ ID NO: 430004 - DNA, 15 bp, Homo sapiens
ccaggggtgagcgtt

SEQ ID NO: 430005 - DNA, 15 bp, Homo sapiens
accaggggtgagcgt

SEQ ID NO: 430006 - DNA, 15 bp, Homo sapiens
aaccaggggtgagcg

SEQ ID NO: 430007 - DNA, 15 bp, Homo sapiens
taaccaggggtgagc

SEQ ID NO: 430008 - DNA, 15 bp, Homo sapiens
ataaccaggggtgag

SEQ ID NO: 430009 - DNA, 15 bp, Homo sapiens
aataaccaggggtga

SEQ ID NO: 430010 - DNA, 15 bp, Homo sapiens
aaataaccaggggtg

SEQ ID NO: 430011 - DNA, 15 bp, Homo sapiens
gaaataaccaggggt

SEQ ID NO: 430012 - DNA, 15 bp, Homo sapiens
agaaataaccagggg

SEQ ID NO: 430013 - DNA, 15 bp, Homo sapiens
cagaaataaccaggg

SEQ ID NO: 430014 - DNA, 15 bp, Homo sapiens
gcagaaataaccagg

SEQ ID NO: 430015 - DNA, 15 bp, Homo sapiens
tgcagaaataaccag

SEQ ID NO: 430016 - DNA, 15 bp, Homo sapiens
ttgcagaaataacca

SEQ ID NO: 430017 - DNA, 15 bp, Homo sapiens
cttgcagaaataacc

SEQ ID NO: 430018 - DNA, 15 bp, Homo sapiens
acttgcagaaataac

SEQ ID NO: 430019 - DNA, 15 bp, Homo sapiens
aacttgcagaaataa

SEQ ID NO: 430020 - DNA, 15 bp, Homo sapiens
taacttgcagaaata

SEQ ID NO: 430021 - DNA, 15 bp, Homo sapiens
gtaacttgcagaaat

SEQ ID NO: 430022 - DNA, 15 bp, Homo sapiens
tgtaacttgcagaaa

SEQ ID NO: 430023 - DNA, 15 bp, Homo sapiens
ctgtaacttgcagaa

SEQ ID NO: 430024 - DNA, 15 bp, Homo sapiens
gctgtaacttgcaga

SEQ ID NO: 430025 - DNA, 15 bp, Homo sapiens
tgctgtaacttgcag

SEQ ID NO: 430026 - DNA, 15 bp, Homo sapiens
atgctgtaacttgca

SEQ ID NO: 430027 - DNA, 15 bp, Homo sapiens
catgctgtaacttgc

SEQ ID NO: 430028 - DNA, 15 bp, Homo sapiens
tcatgctgtaacttg

SEQ ID NO: 430029 - DNA, 15 bp, Homo sapiens
atcatgctgtaactt

SEQ ID NO: 430030 - DNA, 15 bp, Homo sapiens
catcatgctgtaact

SEQ ID NO: 430031 - DNA, 15 bp, Homo sapiens
acatcatgctgtaac

SEQ ID NO: 430032 - DNA, 15 bp, Homo sapiens
cacatcatgctgtaa

SEQ ID NO: 430033 - DNA, 15 bp, Homo sapiens
tcacatcatgctgta

SEQ ID NO: 430034 - DNA, 15 bp, Homo sapiens
ctcacatcatgctgt

SEQ ID NO: 430035 - DNA, 15 bp, Homo sapiens
tctcacatcatgctg

SEQ ID NO: 430036 - DNA, 15 bp, Homo sapiens
ttctcacatcatgct

SEQ ID NO: 430037 - DNA, 15 bp, Homo sapiens
cttctcacatcatgc

SEQ ID NO: 430038 - DNA, 15 bp, Homo sapiens
ccttctcacatcatg

SEQ ID NO: 430039 - DNA, 15 bp, Homo sapiens
gccttctcacatcat

SEQ ID NO: 430040 - DNA, 15 bp, Homo sapiens
ggccttctcacatca

SEQ ID NO: 430041 - DNA, 15 bp, Homo sapiens
gggccttctcacatc

SEQ ID NO: 430042 - DNA, 15 bp, Homo sapiens
tgggccttctcacat

SEQ ID NO: 430043 - DNA, 15 bp, Homo sapiens
ttgggccttctcaca

SEQ ID NO: 430044 - DNA, 15 bp, Homo sapiens
cttgggccttctcac

SEQ ID NO: 430045 - DNA, 15 bp, Homo sapiens
acttgggccttctca

SEQ ID NO: 430046 - DNA, 15 bp, Homo sapiens
cacttgggccttctc

SEQ ID NO: 430047 - DNA, 15 bp, Homo sapiens
tcacttgggccttct

SEQ ID NO: 430048 - DNA, 15 bp, Homo sapiens
ctcacttgggccttc

SEQ ID NO: 430049 - DNA, 15 bp, Homo sapiens
tctcacttgggcctt

SEQ ID NO: 430050 - DNA, 15 bp, Homo sapiens
gtctcacttgggcct

SEQ ID NO: 430051 - DNA, 15 bp, Homo sapiens
agtctcacttgggcc

SEQ ID NO: 430052 - DNA, 15 bp, Homo sapiens
gagtctcacttgggc

SEQ ID NO: 430053 - DNA, 15 bp, Homo sapiens
tgagtctcacttggg

SEQ ID NO: 430054 - DNA, 15 bp, Homo sapiens
atgagtctcacttgg

SEQ ID NO: 430055 - DNA, 15 bp, Homo sapiens
catgagtctcacttg

SEQ ID NO: 430056 - DNA, 15 bp, Homo sapiens
gcatgagtctcactt

SEQ ID NO: 430057 - DNA, 15 bp, Homo sapiens
agcatgagtctcact

SEQ ID NO: 430058 - DNA, 15 bp, Homo sapiens
aagcatgagtctcac

SEQ ID NO: 430059 - DNA, 15 bp, Homo sapiens
aaagcatgagtctca

SEQ ID NO: 430060 - DNA, 15 bp, Homo sapiens
caaagcatgagtctc

SEQ ID NO: 430061 - DNA, 15 bp, Homo sapiens
ccaaagcatgagtct

SEQ ID NO: 430062 - DNA, 15 bp, Homo sapiens
accaaagcatgagtc

SEQ ID NO: 430063 - DNA, 15 bp, Homo sapiens
aaccaaagcatgagt

SEQ ID NO: 430064 - DNA, 15 bp, Homo sapiens
aaaccaaagcatgag

SEQ ID NO: 430065 - DNA, 15 bp, Homo sapiens
aaaaccaaagcatga

SEQ ID NO: 430066 - DNA, 15 bp, Homo sapiens
caaaaccaaagcatg

SEQ ID NO: 430067 - DNA, 15 bp, Homo sapiens
ccaaaaccaaagcat

SEQ ID NO: 430068 - DNA, 15 bp, Homo sapiens
gccaaaaccaaagca

SEQ ID NO: 430069 - DNA, 15 bp, Homo sapiens
ggccaaaaccaaagc

SEQ ID NO: 430070 - DNA, 15 bp, Homo sapiens
tggccaaaaccaaag

SEQ ID NO: 430071 - DNA, 15 bp, Homo sapiens
gtggccaaaaccaaa

SEQ ID NO: 430072 - DNA, 15 bp, Homo sapiens
agtggccaaaaccaa

SEQ ID NO: 430073 - DNA, 15 bp, Homo sapiens
gagtggccaaaacca

SEQ ID NO: 430074 - DNA, 15 bp, Homo sapiens
ggagtggccaaaacc

SEQ ID NO: 430075 - DNA, 15 bp, Homo sapiens
tggagtggccaaaac

SEQ ID NO: 430076 - DNA, 15 bp, Homo sapiens
atggagtggccaaaa

SEQ ID NO: 430077 - DNA, 15 bp, Homo sapiens
aatggagtggccaaa

SEQ ID NO: 430078 - DNA, 15 bp, Homo sapiens
taatggagtggccaa

SEQ ID NO: 430079 - DNA, 15 bp, Homo sapiens
ctaatggagtggcca

SEQ ID NO: 430080 - DNA, 15 bp, Homo sapiens
cctaatggagtggcc

SEQ ID NO: 430081 - DNA, 15 bp, Homo sapiens
gcctaatggagtggc

SEQ ID NO: 430082 - DNA, 15 bp, Homo sapiens
tgcctaatggagtgg

SEQ ID NO: 430083 - DNA, 15 bp, Homo sapiens
ttgcctaatggagtg

SEQ ID NO: 430084 - DNA, 15 bp, Homo sapiens
gttgcctaatggagt

SEQ ID NO: 430085 - DNA, 15 bp, Homo sapiens
tgttgcctaatggag

SEQ ID NO: 430086 - DNA, 15 bp, Homo sapiens
ctgttgcctaatgga

SEQ ID NO: 430087 - DNA, 15 bp, Homo sapiens
actgttgcctaatgg

SEQ ID NO: 430088 - DNA, 15 bp, Homo sapiens
cactgttgcctaatg

SEQ ID NO: 430089 - DNA, 15 bp, Homo sapiens
acactgttgcctaat

SEQ ID NO: 430090 - DNA, 15 bp, Homo sapiens
tacactgttgcctaa

SEQ ID NO: 430091 - DNA, 15 bp, Homo sapiens
ctacactgttgccta

SEQ ID NO: 430092 - DNA, 15 bp, Homo sapiens
gctacactgttgcct

SEQ ID NO: 430093 - DNA, 15 bp, Homo sapiens
ggctacactgttgcc

SEQ ID NO: 430094 - DNA, 15 bp, Homo sapiens
gggctacactgttgc

SEQ ID NO: 430095 - DNA, 15 bp, Homo sapiens
ggggctacactgttg

SEQ ID NO: 430096 - DNA, 15 bp, Homo sapiens
gggggctacactgtt

SEQ ID NO: 430097 - DNA, 15 bp, Homo sapiens
tgggggctacactgt

SEQ ID NO: 430098 - DNA, 15 bp, Homo sapiens
ttgggggctacactg

SEQ ID NO: 430099 - DNA, 15 bp, Homo sapiens
tttgggggctacact

SEQ ID NO: 430100 - DNA, 15 bp, Homo sapiens
atttgggggctacac

SEQ ID NO: 430101 - DNA, 15 bp, Homo sapiens
gatttgggggctaca

SEQ ID NO: 430102 - DNA, 15 bp, Homo sapiens
agatttgggggctac

SEQ ID NO: 430103 - DNA, 15 bp, Homo sapiens
cagatttgggggcta

SEQ ID NO: 430104 - DNA, 15 bp, Homo sapiens
tcagatttgggggct

SEQ ID NO: 430105 - DNA, 15 bp, Homo sapiens
ctcagatttgggggc

SEQ ID NO: 430106 - DNA, 15 bp, Homo sapiens
cctcagatttggggg

SEQ ID NO: 430107 - DNA, 15 bp, Homo sapiens
tcctcagatttgggg

SEQ ID NO: 430108 - DNA, 15 bp, Homo sapiens
ctcctcagatttggg

SEQ ID NO: 430109 - DNA, 15 bp, Homo sapiens
tctcctcagatttgg

SEQ ID NO: 430110 - DNA, 15 bp, Homo sapiens
ctctcctcagatttg

SEQ ID NO: 430111 - DNA, 15 bp, Homo sapiens
cctctcctcagattt

SEQ ID NO: 430112 - DNA, 15 bp, Homo sapiens
tcctctcctcagatt

SEQ ID NO: 430113 - DNA, 15 bp, Homo sapiens
ttcctctcctcagat

SEQ ID NO: 430114 - DNA, 15 bp, Homo sapiens
gttcctctcctcaga

SEQ ID NO: 430115 - DNA, 15 bp, Homo sapiens
agttcctctcctcag

SEQ ID NO: 430116 - DNA, 15 bp, Homo sapiens
tagttcctctcctca

SEQ ID NO: 430117 - DNA, 15 bp, Homo sapiens
ctagttcctctcctc

SEQ ID NO: 430118 - DNA, 15 bp, Homo sapiens
tctagttcctctcct

SEQ ID NO: 430119 - DNA, 15 bp, Homo sapiens
ttctagttcctctcc

SEQ ID NO: 430120 - DNA, 15 bp, Homo sapiens
cttctagttcctctc

SEQ ID NO: 430121 - DNA, 15 bp, Homo sapiens
ccttctagttcctct

SEQ ID NO: 430122 - DNA, 15 bp, Homo sapiens
cccttctagttcctc

SEQ ID NO: 430123 - DNA, 15 bp, Homo sapiens
tcccttctagttcct

SEQ ID NO: 430124 - DNA, 15 bp, Homo sapiens
ttcccttctagttcc

SEQ ID NO: 430125 - DNA, 15 bp, Homo sapiens
cttcccttctagttc

SEQ ID NO: 430126 - DNA, 15 bp, Homo sapiens
ccttcccttctagtt

SEQ ID NO: 430127 - DNA, 15 bp, Homo sapiens
accttcccttctagt

SEQ ID NO: 430128 - DNA, 15 bp, Homo sapiens
aaccttcccttctag

SEQ ID NO: 430129 - DNA, 15 bp, Homo sapiens
taaccttcccttcta

SEQ ID NO: 430130 - DNA, 15 bp, Homo sapiens
ataaccttcccttct

SEQ ID NO: 430131 - DNA, 15 bp, Homo sapiens
tataaccttcccttc

SEQ ID NO: 430132 - DNA, 15 bp, Homo sapiens
ttataaccttccctt

SEQ ID NO: 430133 - DNA, 15 bp, Homo sapiens
tttataaccttccct

SEQ ID NO: 430134 - DNA, 15 bp, Homo sapiens
ctttataaccttccc

SEQ ID NO: 430135 - DNA, 15 bp, Homo sapiens
actttataaccttcc

SEQ ID NO: 430136 - DNA, 15 bp, Homo sapiens
tactttataaccttc

SEQ ID NO: 430137 - DNA, 15 bp, Homo sapiens
atactttataacctt

SEQ ID NO: 430138 - DNA, 15 bp, Homo sapiens
aatactttataacct

SEQ ID NO: 430139 - DNA, 15 bp, Homo sapiens
aaatactttataacc

SEQ ID NO: 430140 - DNA, 15 bp, Homo sapiens
gaaatactttataac

SEQ ID NO: 430141 - DNA, 15 bp, Homo sapiens
agaaatactttataa

SEQ ID NO: 430142 - DNA, 15 bp, Homo sapiens
gagaaatactttata

SEQ ID NO: 430143 - DNA, 15 bp, Homo sapiens
agagaaatactttat

SEQ ID NO: 430144 - DNA, 15 bp, Homo sapiens
aagagaaatacttta

SEQ ID NO: 430145 - DNA, 15 bp, Homo sapiens
aaagagaaatacttt

SEQ ID NO: 430146 - DNA, 15 bp, Homo sapiens
caaagagaaatactt

SEQ ID NO: 430147 - DNA, 15 bp, Homo sapiens
tcaaagagaaatact

SEQ ID NO: 430148 - DNA, 15 bp, Homo sapiens
gtcaaagagaaatac

SEQ ID NO: 430149 - DNA, 15 bp, Homo sapiens
agtcaaagagaaata

SEQ ID NO: 430150 - DNA, 15 bp, Homo sapiens
cagtcaaagagaaat

SEQ ID NO: 430151 - DNA, 15 bp, Homo sapiens
gcagtcaaagagaaa

SEQ ID NO: 430152 - DNA, 15 bp, Homo sapiens
tgcagtcaaagagaa

SEQ ID NO: 430153 - DNA, 15 bp, Homo sapiens
ctgcagtcaaagaga

SEQ ID NO: 430154 - DNA, 15 bp, Homo sapiens
cctgcagtcaaagag

SEQ ID NO: 430155 - DNA, 15 bp, Homo sapiens
acctgcagtcaaaga

SEQ ID NO: 430156 - DNA, 15 bp, Homo sapiens
cacctgcagtcaaag

SEQ ID NO: 430157 - DNA, 15 bp, Homo sapiens
tcacctgcagtcaaa

SEQ ID NO: 430158 - DNA, 15 bp, Homo sapiens
tatcacctgcagtca

SEQ ID NO: 430159 - DNA, 15 bp, Homo sapiens
ctatcacctgcagtc

SEQ ID NO: 430160 - DNA, 15 bp, Homo sapiens
tctatcacctgcagt

SEQ ID NO: 430161 - DNA, 15 bp, Homo sapiens
atctatcacctgcag

SEQ ID NO: 430162 - DNA, 15 bp, Homo sapiens
catctatcacctgca

SEQ ID NO: 430163 - DNA, 15 bp, Homo sapiens
gcatctatcacctgc

SEQ ID NO: 430164 - DNA, 15 bp, Homo sapiens
agcatctatcacctg

SEQ ID NO: 430165 - DNA, 15 bp, Homo sapiens
gagcatctatcacct

SEQ ID NO: 430166 - DNA, 15 bp, Homo sapiens
agagcatctatcacc

SEQ ID NO: 430167 - DNA, 15 bp, Homo sapiens
gagagcatctatcac

SEQ ID NO: 430168 - DNA, 15 bp, Homo sapiens
agagagcatctatca

SEQ ID NO: 430169 - DNA, 15 bp, Homo sapiens
tagagagcatctatc

SEQ ID NO: 430170 - DNA, 15 bp, Homo sapiens
ctagagagcatctat

SEQ ID NO: 430171 - DNA, 15 bp, Homo sapiens
cctagagagcatcta

SEQ ID NO: 430172 - DNA, 15 bp, Homo sapiens
tcctagagagcatct

SEQ ID NO: 430173 - DNA, 15 bp, Homo sapiens
ttcctagagagcatc

SEQ ID NO: 430174 - DNA, 15 bp, Homo sapiens
tttcctagagagcat

SEQ ID NO: 430175 - DNA, 15 bp, Homo sapiens
ctttcctagagagca

SEQ ID NO: 430176 - DNA, 15 bp, Homo sapiens
tctttcctagagagc

SEQ ID NO: 430177 - DNA, 15 bp, Homo sapiens
ctctttcctagagag

SEQ ID NO: 430178 - DNA, 15 bp, Homo sapiens
tctctttcctagaga

SEQ ID NO: 430179 - DNA, 15 bp, Homo sapiens
ttctctttcctagag

SEQ ID NO: 430180 - DNA, 15 bp, Homo sapiens
attctctttcctaga

SEQ ID NO: 430181 - DNA, 15 bp, Homo sapiens
gattctctttcctag

SEQ ID NO: 430182 - DNA, 15 bp, Homo sapiens
agattctctttccta

SEQ ID NO: 430183 - DNA, 15 bp, Homo sapiens
gagattctctttcct

SEQ ID NO: 430184 - DNA, 15 bp, Homo sapiens
ggagattctctttcc

SEQ ID NO: 430185 - DNA, 15 bp, Homo sapiens
gggagattctctttc

SEQ ID NO: 430186 - DNA, 15 bp, Homo sapiens
agggagattctcttt

SEQ ID NO: 430187 - DNA, 15 bp, Homo sapiens
gagggagattctctt

SEQ ID NO: 430188 - DNA, 15 bp, Homo sapiens
tgagggagattctct

SEQ ID NO: 430189 - DNA, 15 bp, Homo sapiens
ttgagggagattctc

SEQ ID NO: 430190 - DNA, 15 bp, Homo sapiens
attgagggagattct

SEQ ID NO: 430191 - DNA, 15 bp, Homo sapiens
aattgagggagattc

SEQ ID NO: 430192 - DNA, 15 bp, Homo sapiens
taattgagggagatt

SEQ ID NO: 430193 - DNA, 15 bp, Homo sapiens
ttaattgagggagat

SEQ ID NO: 430194 - DNA, 15 bp, Homo sapiens
tttaattgagggaga

SEQ ID NO: 430195 - DNA, 15 bp, Homo sapiens
atttaattgagggag

SEQ ID NO: 430196 - DNA, 15 bp, Homo sapiens
aatttaattgaggga

SEQ ID NO: 430197 - DNA, 15 bp, Homo sapiens
taatttaattgaggg

SEQ ID NO: 430198 - DNA, 15 bp, Homo sapiens
ataatttaattgagg

SEQ ID NO: 430199 - DNA, 15 bp, Homo sapiens
aataatttaattgag

SEQ ID NO: 430200 - DNA, 15 bp, Homo sapiens
aaataatttaattga

SEQ ID NO: 430201 - DNA, 15 bp, Homo sapiens
aaaataatttaattg

SEQ ID NO: 430202 - DNA, 15 bp, Homo sapiens
caaaataatttaatt

SEQ ID NO: 430203 - DNA, 15 bp, Homo sapiens
acaaaataatttaat

SEQ ID NO: 430204 - DNA, 15 bp, Homo sapiens
aacaaaataatttaa

SEQ ID NO: 430205 - DNA, 15 bp, Homo sapiens
aaacaaaataattta

SEQ ID NO: 430206 - DNA, 15 bp, Homo sapiens
caaacaaaataattt

SEQ ID NO: 430207 - DNA, 15 bp, Homo sapiens
tcaaacaaaataatt

SEQ ID NO: 430208 - DNA, 15 bp, Homo sapiens
ttcaaacaaaataat

SEQ ID NO: 430209 - DNA, 15 bp, Homo sapiens
cttcaaacaaaataa

SEQ ID NO: 430210 - DNA, 15 bp, Homo sapiens
ccttcaaacaaaata

SEQ ID NO: 430211 - DNA, 15 bp, Homo sapiens
tccttcaaacaaaat

SEQ ID NO: 430212 - DNA, 15 bp, Homo sapiens
ttccttcaaacaaaa

SEQ ID NO: 430213 - DNA, 15 bp, Homo sapiens
cttccttcaaacaaa

SEQ ID NO: 430214 - DNA, 15 bp, Homo sapiens
tcttccttcaaacaa

SEQ ID NO: 430215 - DNA, 15 bp, Homo sapiens
ttcttccttcaaaca

SEQ ID NO: 430216 - DNA, 15 bp, Homo sapiens
attcttccttcaaac

SEQ ID NO: 430217 - DNA, 15 bp, Homo sapiens
aattcttccttcaaa

SEQ ID NO: 430218 - DNA, 15 bp, Homo sapiens
gaattcttccttcaa

SEQ ID NO: 430219 - DNA, 15 bp, Homo sapiens
tgaattcttccttca

SEQ ID NO: 430220 - DNA, 15 bp, Homo sapiens
ttgaattcttccttc

SEQ ID NO: 430221 - DNA, 15 bp, Homo sapiens
tttgaattcttcctt

SEQ ID NO: 430222 - DNA, 15 bp, Homo sapiens
ctttgaattcttcct

SEQ ID NO: 430223 - DNA, 15 bp, Homo sapiens
tctttgaattcttcc

SEQ ID NO: 430224 - DNA, 15 bp, Homo sapiens
ttctttgaattcttc

SEQ ID NO: 430225 - DNA, 15 bp, Homo sapiens
attctttgaattctt

SEQ ID NO: 430226 - DNA, 15 bp, Homo sapiens
cattctttgaattct

SEQ ID NO: 430227 - DNA, 15 bp, Homo sapiens
acattctttgaattc

SEQ ID NO: 430228 - DNA, 15 bp, Homo sapiens
aacattctttgaatt

SEQ ID NO: 430229 - DNA, 15 bp, Homo sapiens
taacattctttgaat

SEQ ID NO: 430230 - DNA, 15 bp, Homo sapiens
ataacattctttgaa

SEQ ID NO: 430231 - DNA, 15 bp, Homo sapiens
tataacattctttga

SEQ ID NO: 430232 - DNA, 15 bp, Homo sapiens
atataacattctttg

SEQ ID NO: 430233 - DNA, 15 bp, Homo sapiens
catataacattcttt

SEQ ID NO: 430234 - DNA, 15 bp, Homo sapiens
ccatataacattctt

SEQ ID NO: 430235 - DNA, 15 bp, Homo sapiens
accatataacattct

SEQ ID NO: 430236 - DNA, 15 bp, Homo sapiens
taccatataacattc

SEQ ID NO: 430237 - DNA, 15 bp, Homo sapiens
ataccatataacatt

SEQ ID NO: 430238 - DNA, 15 bp, Homo sapiens
tataccatataacat

SEQ ID NO: 430239 - DNA, 15 bp, Homo sapiens
ttataccatataaca

SEQ ID NO: 430240 - DNA, 15 bp, Homo sapiens
cttataccatataac

SEQ ID NO: 430241 - DNA, 15 bp, Homo sapiens
acttataccatataa

SEQ ID NO: 430242 - DNA, 15 bp, Homo sapiens
cacttataccatata

SEQ ID NO: 430243 - DNA, 15 bp, Homo sapiens
gcacttataccatat

SEQ ID NO: 430244 - DNA, 15 bp, Homo sapiens
agcacttataccata

SEQ ID NO: 430245 - DNA, 15 bp, Homo sapiens
tagcacttataccat

SEQ ID NO: 430246 - DNA, 15 bp, Homo sapiens
ttagcacttatacca

SEQ ID NO: 430247 - DNA, 15 bp, Homo sapiens
attagcacttatacc

SEQ ID NO: 430248 - DNA, 15 bp, Homo sapiens
aattagcacttatac

SEQ ID NO: 430249 - DNA, 15 bp, Homo sapiens
aaattagcacttata

SEQ ID NO: 430250 - DNA, 15 bp, Homo sapiens
aaaattagcacttat

SEQ ID NO: 430251 - DNA, 15 bp, Homo sapiens
taaaattagcactta

SEQ ID NO: 430252 - DNA, 15 bp, Homo sapiens
ttaaaattagcactt

SEQ ID NO: 430253 - DNA, 15 bp, Homo sapiens
cttaaaattagcact

SEQ ID NO: 430254 - DNA, 15 bp, Homo sapiens
tcttaaaattagcac

SEQ ID NO: 430255 - DNA, 15 bp, Homo sapiens
ttcttaaaattagca

SEQ ID NO: 430256 - DNA, 15 bp, Homo sapiens
tttcttaaaattagc

SEQ ID NO: 430257 - DNA, 15 bp, Homo sapiens
ttttcttaaaattag

SEQ ID NO: 430258 - DNA, 15 bp, Homo sapiens
cttttcttaaaatta

SEQ ID NO: 430259 - DNA, 15 bp, Homo sapiens
ccttttcttaaaatt

SEQ ID NO: 430260 - DNA, 15 bp, Homo sapiens
tccttttcttaaaat

SEQ ID NO: 430261 - DNA, 15 bp, Homo sapiens
ctccttttcttaaaa

SEQ ID NO: 430262 - DNA, 15 bp, Homo sapiens
tctccttttcttaaa

SEQ ID NO: 430263 - DNA, 15 bp, Homo sapiens
atctccttttcttaa

SEQ ID NO: 430264 - DNA, 15 bp, Homo sapiens
aatctccttttctta

SEQ ID NO: 430265 - DNA, 15 bp, Homo sapiens
aaatctccttttctt

SEQ ID NO: 430266 - DNA, 15 bp, Homo sapiens
gaaatctccttttct

SEQ ID NO: 430267 - DNA, 15 bp, Homo sapiens
agaaatctccttttc

SEQ ID NO: 430268 - DNA, 15 bp, Homo sapiens
cagaaatctcctttt

SEQ ID NO: 430269 - DNA, 15 bp, Homo sapiens
gcagaaatctccttt

SEQ ID NO: 430270 - DNA, 15 bp, Homo sapiens
ggcagaaatctcctt

SEQ ID NO: 430271 - DNA, 15 bp, Homo sapiens
cggcagaaatctcct

SEQ ID NO: 430272 - DNA, 15 bp, Homo sapiens
tcggcagaaatctcc

SEQ ID NO: 430273 - DNA, 15 bp, Homo sapiens
ctcggcagaaatctc

SEQ ID NO: 430274 - DNA, 15 bp, Homo sapiens
tctcggcagaaatct

SEQ ID NO: 430275 - DNA, 15 bp, Homo sapiens
atctcggcagaaatc

SEQ ID NO: 430276 - DNA, 15 bp, Homo sapiens
tatctcggcagaaat

SEQ ID NO: 430277 - DNA, 15 bp, Homo sapiens
atatctcggcagaaa

SEQ ID NO: 430278 - DNA, 15 bp, Homo sapiens
catatctcggcagaa

SEQ ID NO: 430279 - DNA, 15 bp, Homo sapiens
tcatatctcggcaga

SEQ ID NO: 430280 - DNA, 15 bp, Homo sapiens
ttcatatctcggcag

SEQ ID NO: 430281 - DNA, 15 bp, Homo sapiens
gttcatatctcggca

SEQ ID NO: 430282 - DNA, 15 bp, Homo sapiens
agttcatatctcggc

SEQ ID NO: 430283 - DNA, 15 bp, Homo sapiens
aagttcatatctcgg

SEQ ID NO: 430284 - DNA, 15 bp, Homo sapiens
caagttcatatctcg

SEQ ID NO: 430285 - DNA, 15 bp, Homo sapiens
gcaagttcatatctc

SEQ ID NO: 430286 - DNA, 15 bp, Homo sapiens
agcaagttcatatct

SEQ ID NO: 430287 - DNA, 15 bp, Homo sapiens
gagcaagttcatatc

SEQ ID NO: 430288 - DNA, 15 bp, Homo sapiens
agagcaagttcatat

SEQ ID NO: 430289 - DNA, 15 bp, Homo sapiens
gagagcaagttcata

SEQ ID NO: 430290 - DNA, 15 bp, Homo sapiens
tgagagcaagttcat

SEQ ID NO: 430291 - DNA, 15 bp, Homo sapiens
ttgagagcaagttca

SEQ ID NO: 430292 - DNA, 15 bp, Homo sapiens
tttgagagcaagttc

SEQ ID NO: 430293 - DNA, 15 bp, Homo sapiens
ctttgagagcaagtt

SEQ ID NO: 430294 - DNA, 15 bp, Homo sapiens
gctttgagagcaagt

SEQ ID NO: 430295 - DNA, 15 bp, Homo sapiens
agctttgagagcaag

SEQ ID NO: 430296 - DNA, 15 bp, Homo sapiens
aagctttgagagcaa

SEQ ID NO: 430297 - DNA, 15 bp, Homo sapiens
aaagctttgagagca

SEQ ID NO: 430298 - DNA, 15 bp, Homo sapiens
aaaagctttgagagc

SEQ ID NO: 430299 - DNA, 15 bp, Homo sapiens
aaaaagctttgagag

SEQ ID NO: 430300 - DNA, 15 bp, Homo sapiens
taaaaagctttgaga

SEQ ID NO: 430301 - DNA, 15 bp, Homo sapiens
ttaaaaagctttgag

SEQ ID NO: 430302 - DNA, 15 bp, Homo sapiens
gttaaaaagctttga

SEQ ID NO: 430303 - DNA, 15 bp, Homo sapiens
agttaaaaagctttg

SEQ ID NO: 430304 - DNA, 15 bp, Homo sapiens
aagttaaaaagcttt

SEQ ID NO: 430305 - DNA, 15 bp, Homo sapiens
taagttaaaaagctt

SEQ ID NO: 430306 - DNA, 15 bp, Homo sapiens
gtaagttaaaaagct

SEQ ID NO: 430307 - DNA, 15 bp, Homo sapiens
tgtaagttaaaaagc

SEQ ID NO: 430308 - DNA, 15 bp, Homo sapiens
ctgtaagttaaaaag

SEQ ID NO: 430309 - DNA, 15 bp, Homo sapiens
tctgtaagttaaaaa

SEQ ID NO: 430310 - DNA, 15 bp, Homo sapiens
ttctgtaagttaaaa

SEQ ID NO: 430311 - DNA, 15 bp, Homo sapiens
tttctgtaagttaaa

SEQ ID NO: 430312 - DNA, 15 bp, Homo sapiens
atttctgtaagttaa

SEQ ID NO: 430313 - DNA, 15 bp, Homo sapiens
aatttctgtaagtta

SEQ ID NO: 430314 - DNA, 15 bp, Homo sapiens
gaatttctgtaagtt

SEQ ID NO: 430315 - DNA, 15 bp, Homo sapiens
ggaatttctgtaagt

SEQ ID NO: 430316 - DNA, 15 bp, Homo sapiens
tggaatttctgtaag

SEQ ID NO: 430317 - DNA, 15 bp, Homo sapiens
atggaatttctgtaa

SEQ ID NO: 430318 - DNA, 15 bp, Homo sapiens
gatggaatttctgta

SEQ ID NO: 430319 - DNA, 15 bp, Homo sapiens
ggatggaatttctgt

SEQ ID NO: 430320 - DNA, 15 bp, Homo sapiens
aggatggaatttctg

SEQ ID NO: 430321 - DNA, 15 bp, Homo sapiens
aaggatggaatttct

SEQ ID NO: 430322 - DNA, 15 bp, Homo sapiens
aaaggatggaatttc

SEQ ID NO: 430323 - DNA, 15 bp, Homo sapiens
caaaggatggaattt

SEQ ID NO: 430324 - DNA, 15 bp, Homo sapiens
tcaaaggatggaatt

SEQ ID NO: 430325 - DNA, 15 bp, Homo sapiens
atcaaaggatggaat

SEQ ID NO: 430326 - DNA, 15 bp, Homo sapiens
tatcaaaggatggaa

SEQ ID NO: 430327 - DNA, 15 bp, Homo sapiens
atatcaaaggatgga

SEQ ID NO: 430328 - DNA, 15 bp, Homo sapiens
tatatcaaaggatgg

SEQ ID NO: 430329 - DNA, 15 bp, Homo sapiens
gtatatcaaaggatg

SEQ ID NO: 430330 - DNA, 15 bp, Homo sapiens
agtatatcaaaggat

SEQ ID NO: 430331 - DNA, 15 bp, Homo sapiens
aagtatatcaaagga

SEQ ID NO: 430332 - DNA, 15 bp, Homo sapiens
gaagtatatcaaagg

SEQ ID NO: 430333 - DNA, 15 bp, Homo sapiens
tgaagtatatcaaag

SEQ ID NO: 430334 - DNA, 15 bp, Homo sapiens
atgaagtatatcaaa

SEQ ID NO: 430335 - DNA, 15 bp, Homo sapiens
gatgaagtatatcaa

SEQ ID NO: 430336 - DNA, 15 bp, Homo sapiens
ggatgaagtatatca

SEQ ID NO: 430337 - DNA, 15 bp, Homo sapiens
gggatgaagtatatc

SEQ ID NO: 430338 - DNA, 15 bp, Homo sapiens
agggatgaagtatat

SEQ ID NO: 430339 - DNA, 15 bp, Homo sapiens
gagggatgaagtata

SEQ ID NO: 430340 - DNA, 15 bp, Homo sapiens
agagggatgaagtat

SEQ ID NO: 430341 - DNA, 15 bp, Homo sapiens
cagagggatgaagta

SEQ ID NO: 430342 - DNA, 15 bp, Homo sapiens
gcagagggatgaagt

SEQ ID NO: 430343 - DNA, 15 bp, Homo sapiens
ggcagagggatgaag

SEQ ID NO: 430344 - DNA, 15 bp, Homo sapiens
tggcagagggatgaa

SEQ ID NO: 430345 - DNA, 15 bp, Homo sapiens
ctggcagagggatga

SEQ ID NO: 430346 - DNA, 15 bp, Homo sapiens
actggcagagggatg

SEQ ID NO: 430347 - DNA, 15 bp, Homo sapiens
gactggcagagggat

SEQ ID NO: 430348 - DNA, 15 bp, Homo sapiens
tgactggcagaggga

SEQ ID NO: 430349 - DNA, 15 bp, Homo sapiens
gtgactggcagaggg

SEQ ID NO: 430350 - DNA, 15 bp, Homo sapiens
agtgactggcagagg

SEQ ID NO: 430351 - DNA, 15 bp, Homo sapiens
aagtgactggcagag

SEQ ID NO: 430352 - DNA, 15 bp, Homo sapiens
aaagtgactggcaga

SEQ ID NO: 430353 - DNA, 15 bp, Homo sapiens
caaagtgactggcag

SEQ ID NO: 430354 - DNA, 15 bp, Homo sapiens
ccaaagtgactggca

SEQ ID NO: 430355 - DNA, 15 bp, Homo sapiens
gccaaagtgactggc

SEQ ID NO: 430356 - DNA, 15 bp, Homo sapiens
agccaaagtgactgg

SEQ ID NO: 430357 - DNA, 15 bp, Homo sapiens
gagccaaagtgactg

SEQ ID NO: 430358 - DNA, 15 bp, Homo sapiens
agagccaaagtgact

SEQ ID NO: 430359 - DNA, 15 bp, Homo sapiens
cagagccaaagtgac

SEQ ID NO: 430360 - DNA, 15 bp, Homo sapiens
tcagagccaaagtga

SEQ ID NO: 430361 - DNA, 15 bp, Homo sapiens
ttcagagccaaagtg

SEQ ID NO: 430362 - DNA, 15 bp, Homo sapiens
cttcagagccaaagt

SEQ ID NO: 430363 - DNA, 15 bp, Homo sapiens
ccttcagagccaaag

SEQ ID NO: 430364 - DNA, 15 bp, Homo sapiens
tccttcagagccaaa

SEQ ID NO: 430365 - DNA, 15 bp, Homo sapiens
ctccttcagagccaa

SEQ ID NO: 430366 - DNA, 15 bp, Homo sapiens
gctccttcagagcca

SEQ ID NO: 430367 - DNA, 15 bp, Homo sapiens
agctccttcagagcc

SEQ ID NO: 430368 - DNA, 15 bp, Homo sapiens
cagctccttcagagc

SEQ ID NO: 430369 - DNA, 15 bp, Homo sapiens
ccagctccttcagag

SEQ ID NO: 430370 - DNA, 15 bp, Homo sapiens
cccagctccttcaga

SEQ ID NO: 430371 - DNA, 15 bp, Homo sapiens
acccagctccttcag

SEQ ID NO: 430372 - DNA, 15 bp, Homo sapiens
cacccagctccttca

SEQ ID NO: 430373 - DNA, 15 bp, Homo sapiens
acacccagctccttc

SEQ ID NO: 430374 - DNA, 15 bp, Homo sapiens
aacacccagctcctt

SEQ ID NO: 430375 - DNA, 15 bp, Homo sapiens
aaacacccagctcct

SEQ ID NO: 430376 - DNA, 15 bp, Homo sapiens
aaaacacccagctcc

SEQ ID NO: 430377 - DNA, 15 bp, Homo sapiens
taaaacacccagctc

SEQ ID NO: 430378 - DNA, 15 bp, Homo sapiens
ataaaacacccagct

SEQ ID NO: 430379 - DNA, 15 bp, Homo sapiens
cataaaacacccagc

SEQ ID NO: 430380 - DNA, 15 bp, Homo sapiens
tcataaaacacccag

SEQ ID NO: 430381 - DNA, 15 bp, Homo sapiens
ttcataaaacaccca

SEQ ID NO: 430382 - DNA, 15 bp, Homo sapiens
cttcataaaacaccc

SEQ ID NO: 430383 - DNA, 15 bp, Homo sapiens
ccttcataaaacacc

SEQ ID NO: 430384 - DNA, 15 bp, Homo sapiens
tccttcataaaacac

SEQ ID NO: 430385 - DNA, 15 bp, Homo sapiens
atccttcataaaaca

SEQ ID NO: 430386 - DNA, 15 bp, Homo sapiens
catccttcataaaac

SEQ ID NO: 430387 - DNA, 15 bp, Homo sapiens
tcatccttcataaaa

SEQ ID NO: 430388 - DNA, 15 bp, Homo sapiens
ctcatccttcataaa

SEQ ID NO: 430389 - DNA, 15 bp, Homo sapiens
cctcatccttcataa

SEQ ID NO: 430390 - DNA, 15 bp, Homo sapiens
acctcatccttcata

SEQ ID NO: 430391 - DNA, 15 bp, Homo sapiens
tacctcatccttcat

SEQ ID NO: 430392 - DNA, 15 bp, Homo sapiens
atacctcatccttca

SEQ ID NO: 430393 - DNA, 15 bp, Homo sapiens
aatacctcatccttc

SEQ ID NO: 430394 - DNA, 15 bp, Homo sapiens
aaatacctcatcctt

SEQ ID NO: 430395 - DNA, 15 bp, Homo sapiens
gaaatacctcatcct

SEQ ID NO: 430396 - DNA, 15 bp, Homo sapiens
agaaatacctcatcc

SEQ ID NO: 430397 - DNA, 15 bp, Homo sapiens
gagaaatacctcatc

SEQ ID NO: 430398 - DNA, 15 bp, Homo sapiens
agagaaatacctcat

SEQ ID NO: 430399 - DNA, 15 bp, Homo sapiens
tagagaaatacctca

SEQ ID NO: 430400 - DNA, 15 bp, Homo sapiens
atagagaaatacctc

SEQ ID NO: 430401 - DNA, 15 bp, Homo sapiens
gatagagaaatacct

SEQ ID NO: 430402 - DNA, 15 bp, Homo sapiens
agatagagaaatacc

SEQ ID NO: 430403 - DNA, 15 bp, Homo sapiens
aagatagagaaatac

SEQ ID NO: 430404 - DNA, 15 bp, Homo sapiens
taagatagagaaata

SEQ ID NO: 430405 - DNA, 15 bp, Homo sapiens
ttaagatagagaaat

SEQ ID NO: 430406 - DNA, 15 bp, Homo sapiens
gttaagatagagaaa

SEQ ID NO: 430407 - DNA, 15 bp, Homo sapiens
ggttaagatagagaa

SEQ ID NO: 430408 - DNA, 15 bp, Homo sapiens
aggttaagatagaga

SEQ ID NO: 430409 - DNA, 15 bp, Homo sapiens
caggttaagatagag

SEQ ID NO: 430410 - DNA, 15 bp, Homo sapiens
ccaggttaagataga

SEQ ID NO: 430411 - DNA, 15 bp, Homo sapiens
gccaggttaagatag

SEQ ID NO: 430412 - DNA, 15 bp, Homo sapiens
ggccaggttaagata

SEQ ID NO: 430413 - DNA, 15 bp, Homo sapiens
gggccaggttaagat

SEQ ID NO: 430414 - DNA, 15 bp, Homo sapiens
tgggccaggttaaga

SEQ ID NO: 430415 - DNA, 15 bp, Homo sapiens
ctgggccaggttaag

SEQ ID NO: 430416 - DNA, 15 bp, Homo sapiens
gctgggccaggttaa

SEQ ID NO: 430417 - DNA, 15 bp, Homo sapiens
ggctgggccaggtta

SEQ ID NO: 430418 - DNA, 15 bp, Homo sapiens
tggctgggccaggtt

SEQ ID NO: 430419 - DNA, 15 bp, Homo sapiens
gtggctgggccaggt

SEQ ID NO: 430420 - DNA, 15 bp, Homo sapiens
tgtggctgggccagg

SEQ ID NO: 430421 - DNA, 15 bp, Homo sapiens
atgtggctgggccag

SEQ ID NO: 430422 - DNA, 15 bp, Homo sapiens
aatgtggctgggcca

SEQ ID NO: 430423 - DNA, 15 bp, Homo sapiens
gaatgtggctgggcc

SEQ ID NO: 430424 - DNA, 15 bp, Homo sapiens
tgaatgtggctgggc

SEQ ID NO: 430425 - DNA, 15 bp, Homo sapiens
ctgaatgtggctggg

SEQ ID NO: 430426 - DNA, 15 bp, Homo sapiens
gctgaatgtggctgg

SEQ ID NO: 430427 - DNA, 15 bp, Homo sapiens
agctgaatgtggctg

SEQ ID NO: 430428 - DNA, 15 bp, Homo sapiens
aagctgaatgtggct

SEQ ID NO: 430429 - DNA, 15 bp, Homo sapiens
aaagctgaatgtggc

SEQ ID NO: 430430 - DNA, 15 bp, Homo sapiens
aaaagctgaatgtgg

SEQ ID NO: 430431 - DNA, 15 bp, Homo sapiens
taaaagctgaatgtg

SEQ ID NO: 430432 - DNA, 15 bp, Homo sapiens
ttaaaagctgaatgt

SEQ ID NO: 430433 - DNA, 15 bp, Homo sapiens
tttaaaagctgaatg

SEQ ID NO: 430434 - DNA, 15 bp, Homo sapiens
gtttaaaagctgaat

SEQ ID NO: 430435 - DNA, 15 bp, Homo sapiens
tgtttaaaagctgaa

SEQ ID NO: 430436 - DNA, 15 bp, Homo sapiens
ctgtttaaaagctga

SEQ ID NO: 430437 - DNA, 15 bp, Homo sapiens
tctgtttaaaagctg

SEQ ID NO: 430438 - DNA, 15 bp, Homo sapiens
ctctgtttaaaagct

SEQ ID NO: 430439 - DNA, 15 bp, Homo sapiens
actctgtttaaaagc

SEQ ID NO: 430440 - DNA, 15 bp, Homo sapiens
aactctgtttaaaag

SEQ ID NO: 430441 - DNA, 15 bp, Homo sapiens
aaactctgtttaaaa

SEQ ID NO: 430442 - DNA, 15 bp, Homo sapiens
aaaactctgtttaaa

SEQ ID NO: 430443 - DNA, 15 bp, Homo sapiens
gaaaactctgtttaa

SEQ ID NO: 430444 - DNA, 15 bp, Homo sapiens
agaaaactctgttta

SEQ ID NO: 430445 - DNA, 15 bp, Homo sapiens
aagaaaactctgttt

SEQ ID NO: 430446 - DNA, 15 bp, Homo sapiens
taagaaaactctgtt

SEQ ID NO: 430447 - DNA, 15 bp, Homo sapiens
ttaagaaaactctgt

SEQ ID NO: 430448 - DNA, 15 bp, Homo sapiens
gttaagaaaactctg

SEQ ID NO: 430449 - DNA, 15 bp, Homo sapiens
agttaagaaaactct

SEQ ID NO: 430450 - DNA, 15 bp, Homo sapiens
aagttaagaaaactc

SEQ ID NO: 430451 - DNA, 15 bp, Homo sapiens
aaagttaagaaaact

SEQ ID NO: 430452 - DNA, 15 bp, Homo sapiens
taaagttaagaaaac

SEQ ID NO: 430453 - DNA, 15 bp, Homo sapiens
ttaaagttaagaaaa

SEQ ID NO: 430454 - DNA, 15 bp, Homo sapiens
attaaagttaagaaa

SEQ ID NO: 430455 - DNA, 15 bp, Homo sapiens
aattaaagttaagaa

SEQ ID NO: 430456 - DNA, 15 bp, Homo sapiens
taattaaagttaaga

SEQ ID NO: 430457 - DNA, 15 bp, Homo sapiens
ctaattaaagttaag

SEQ ID NO: 430458 - DNA, 15 bp, Homo sapiens
gctaattaaagttaa

SEQ ID NO: 430459 - DNA, 15 bp, Homo sapiens
agctaattaaagtta

SEQ ID NO: 430460 - DNA, 15 bp, Homo sapiens
aagctaattaaagtt

SEQ ID NO: 430461 - DNA, 15 bp, Homo sapiens
caagctaattaaagt

SEQ ID NO: 430462 - DNA, 15 bp, Homo sapiens
ccaagctaattaaag

SEQ ID NO: 430463 - DNA, 15 bp, Homo sapiens
tccaagctaattaaa

SEQ ID NO: 430464 - DNA, 15 bp, Homo sapiens
ttccaagctaattaa

SEQ ID NO: 430465 - DNA, 15 bp, Homo sapiens
gttccaagctaatta

SEQ ID NO: 430466 - DNA, 15 bp, Homo sapiens
tgttccaagctaatt

SEQ ID NO: 430467 - DNA, 15 bp, Homo sapiens
ctgttccaagctaat

SEQ ID NO: 430468 - DNA, 15 bp, Homo sapiens
cctgttccaagctaa

SEQ ID NO: 430469 - DNA, 15 bp, Homo sapiens
gcctgttccaagcta

SEQ ID NO: 430470 - DNA, 15 bp, Homo sapiens
tgcctgttccaagct

SEQ ID NO: 430471 - DNA, 15 bp, Homo sapiens
atgcctgttccaagc

SEQ ID NO: 430472 - DNA, 15 bp, Homo sapiens
catgcctgttccaag

SEQ ID NO: 430473 - DNA, 15 bp, Homo sapiens
gcatgcctgttccaa

SEQ ID NO: 430474 - DNA, 15 bp, Homo sapiens
tgcatgcctgttcca

SEQ ID NO: 430475 - DNA, 15 bp, Homo sapiens
atgcatgcctgttcc

SEQ ID NO: 430476 - DNA, 15 bp, Homo sapiens
aatgcatgcctgttc

SEQ ID NO: 430477 - DNA, 15 bp, Homo sapiens
caatgcatgcctgtt

SEQ ID NO: 430478 - DNA, 15 bp, Homo sapiens
tcaatgcatgcctgt

SEQ ID NO: 430479 - DNA, 15 bp, Homo sapiens
ctcaatgcatgcctg

SEQ ID NO: 430480 - DNA, 15 bp, Homo sapiens
cctcaatgcatgcct

SEQ ID NO: 430481 - DNA, 15 bp, Homo sapiens
tcctcaatgcatgcc

SEQ ID NO: 430482 - DNA, 15 bp, Homo sapiens
ctcctcaatgcatgc

SEQ ID NO: 430483 - DNA, 15 bp, Homo sapiens
gctcctcaatgcatg

SEQ ID NO: 430484 - DNA, 15 bp, Homo sapiens
agctcctcaatgcat

SEQ ID NO: 430485 - DNA, 15 bp, Homo sapiens
tagctcctcaatgca

SEQ ID NO: 430486 - DNA, 15 bp, Homo sapiens
ttagctcctcaatgc

SEQ ID NO: 430487 - DNA, 15 bp, Homo sapiens
attagctcctcaatg

SEQ ID NO: 430488 - DNA, 15 bp, Homo sapiens
aattagctcctcaat

SEQ ID NO: 430489 - DNA, 15 bp, Homo sapiens
aaattagctcctcaa

SEQ ID NO: 430490 - DNA, 15 bp, Homo sapiens
aaaattagctcctca

SEQ ID NO: 430491 - DNA, 15 bp, Homo sapiens
caaaattagctcctc

SEQ ID NO: 430492 - DNA, 15 bp, Homo sapiens
ccaaaattagctcct

SEQ ID NO: 430493 - DNA, 15 bp, Homo sapiens
accaaaattagctcc

SEQ ID NO: 430494 - DNA, 15 bp, Homo sapiens
caccaaaattagctc

SEQ ID NO: 430495 - DNA, 15 bp, Homo sapiens
tcaccaaaattagct

SEQ ID NO: 430496 - DNA, 15 bp, Homo sapiens
atcaccaaaattagc

SEQ ID NO: 430497 - DNA, 15 bp, Homo sapiens
aatcaccaaaattag

SEQ ID NO: 430498 - DNA, 15 bp, Homo sapiens
aaatcaccaaaatta

SEQ ID NO: 430499 - DNA, 15 bp, Homo sapiens
aaaatcaccaaaatt

SEQ ID NO: 430500 - DNA, 15 bp, Homo sapiens
gaaaatcaccaaaat

SEQ ID NO: 430501 - DNA, 15 bp, Homo sapiens
agaaaatcaccaaaa

SEQ ID NO: 430502 - DNA, 15 bp, Homo sapiens
aagaaaatcaccaaa

SEQ ID NO: 430503 - DNA, 15 bp, Homo sapiens
caagaaaatcaccaa

SEQ ID NO: 430504 - DNA, 15 bp, Homo sapiens
tcaagaaaatcacca

SEQ ID NO: 430505 - DNA, 15 bp, Homo sapiens
ctcaagaaaatcacc

SEQ ID NO: 430506 - DNA, 15 bp, Homo sapiens
actcaagaaaatcac

SEQ ID NO: 430507 - DNA, 15 bp, Homo sapiens
cactcaagaaaatca

SEQ ID NO: 430508 - DNA, 15 bp, Homo sapiens
gcactcaagaaaatc

SEQ ID NO: 430509 - DNA, 15 bp, Homo sapiens
agcactcaagaaaat

SEQ ID NO: 430510 - DNA, 15 bp, Homo sapiens
aagcactcaagaaaa

SEQ ID NO: 430511 - DNA, 15 bp, Homo sapiens
taagcactcaagaaa

SEQ ID NO: 430512 - DNA, 15 bp, Homo sapiens
ttaagcactcaagaa

SEQ ID NO: 430513 - DNA, 15 bp, Homo sapiens
cttaagcactcaaga

SEQ ID NO: 430514 - DNA, 15 bp, Homo sapiens
gcttaagcactcaag

SEQ ID NO: 430515 - DNA, 15 bp, Homo sapiens
tgcttaagcactcaa

SEQ ID NO: 430516 - DNA, 15 bp, Homo sapiens
ttgcttaagcactca

SEQ ID NO: 430517 - DNA, 15 bp, Homo sapiens
gttgcttaagcactc

SEQ ID NO: 430518 - DNA, 15 bp, Homo sapiens
agttgcttaagcact

SEQ ID NO: 430519 - DNA, 15 bp, Homo sapiens
aagttgcttaagcac

SEQ ID NO: 430520 - DNA, 15 bp, Homo sapiens
taagttgcttaagca

SEQ ID NO: 430521 - DNA, 15 bp, Homo sapiens
ttaagttgcttaagc

SEQ ID NO: 430522 - DNA, 15 bp, Homo sapiens
attaagttgcttaag

SEQ ID NO: 430523 - DNA, 15 bp, Homo sapiens
tattaagttgcttaa

SEQ ID NO: 430524 - DNA, 15 bp, Homo sapiens
ctattaagttgctta

SEQ ID NO: 430525 - DNA, 15 bp, Homo sapiens
cctattaagttgctt

SEQ ID NO: 430526 - DNA, 15 bp, Homo sapiens
tcctattaagttgct

SEQ ID NO: 430527 - DNA, 15 bp, Homo sapiens
ctcctattaagttgc

SEQ ID NO: 430528 - DNA, 15 bp, Homo sapiens
cctcctattaagttg

SEQ ID NO: 430529 - DNA, 15 bp, Homo sapiens
tcctcctattaagtt

SEQ ID NO: 430530 - DNA, 15 bp, Homo sapiens
ttcctcctattaagt

SEQ ID NO: 430531 - DNA, 15 bp, Homo sapiens
gttcctcctattaag

SEQ ID NO: 430532 - DNA, 15 bp, Homo sapiens
tgttcctcctattaa

SEQ ID NO: 430533 - DNA, 15 bp, Homo sapiens
ttgttcctcctatta

SEQ ID NO: 430534 - DNA, 15 bp, Homo sapiens
tttgttcctcctatt

SEQ ID NO: 430535 - DNA, 15 bp, Homo sapiens
atttgttcctcctat

SEQ ID NO: 430536 - DNA, 15 bp, Homo sapiens
aatttgttcctccta

SEQ ID NO: 430537 - DNA, 15 bp, Homo sapiens
gaatttgttcctcct

SEQ ID NO: 430538 - DNA, 15 bp, Homo sapiens
agaatttgttcctcc

SEQ ID NO: 430539 - DNA, 15 bp, Homo sapiens
cagaatttgttcctc

SEQ ID NO: 430540 - DNA, 15 bp, Homo sapiens
tcagaatttgttcct

SEQ ID NO: 430541 - DNA, 15 bp, Homo sapiens
atcagaatttgttcc

SEQ ID NO: 430542 - DNA, 15 bp, Homo sapiens
catcagaatttgttc

SEQ ID NO: 430543 - DNA, 15 bp, Homo sapiens
tcatcagaatttgtt

SEQ ID NO: 430544 - DNA, 15 bp, Homo sapiens
atcatcagaatttgt

SEQ ID NO: 430545 - DNA, 15 bp, Homo sapiens
aatcatcagaatttg

SEQ ID NO: 430546 - DNA, 15 bp, Homo sapiens
aaatcatcagaattt

SEQ ID NO: 430547 - DNA, 15 bp, Homo sapiens
aaaatcatcagaatt

SEQ ID NO: 430548 - DNA, 15 bp, Homo sapiens
taaaatcatcagaat

SEQ ID NO: 430549 - DNA, 15 bp, Homo sapiens
ttaaaatcatcagaa

SEQ ID NO: 430550 - DNA, 15 bp, Homo sapiens
attaaaatcatcaga

SEQ ID NO: 430551 - DNA, 15 bp, Homo sapiens
aattaaaatcatcag

SEQ ID NO: 430552 - DNA, 15 bp, Homo sapiens
aaattaaaatcatca

SEQ ID NO: 430553 - DNA, 15 bp, Homo sapiens
gaaattaaaatcatc

SEQ ID NO: 430554 - DNA, 15 bp, Homo sapiens
tgaaattaaaatcat

SEQ ID NO: 430555 - DNA, 15 bp, Homo sapiens
ctgaaattaaaatca

SEQ ID NO: 430556 - DNA, 15 bp, Homo sapiens
cctgaaattaaaatc

SEQ ID NO: 430557 - DNA, 15 bp, Homo sapiens
acctgaaattaaaat

SEQ ID NO: 430558 - DNA, 15 bp, Homo sapiens
aacctgaaattaaaa

SEQ ID NO: 430559 - DNA, 15 bp, Homo sapiens
aaacctgaaattaaa

SEQ ID NO: 430560 - DNA, 15 bp, Homo sapiens
aaaacctgaaattaa

SEQ ID NO: 430561 - DNA, 15 bp, Homo sapiens
aaaaacctgaaatta

SEQ ID NO: 430562 - DNA, 15 bp, Homo sapiens
aaaaaacctgaaatt

SEQ ID NO: 430563 - DNA, 15 bp, Homo sapiens
gaaaaaacctgaaat

SEQ ID NO: 430564 - DNA, 15 bp, Homo sapiens
agaaaaaacctgaaa

SEQ ID NO: 430565 - DNA, 15 bp, Homo sapiens
cagaaaaaacctgaa

SEQ ID NO: 430566 - DNA, 15 bp, Homo sapiens
acagaaaaaacctga

SEQ ID NO: 430567 - DNA, 15 bp, Homo sapiens
gacagaaaaaacctg

SEQ ID NO: 430568 - DNA, 15 bp, Homo sapiens
tgacagaaaaaacct

SEQ ID NO: 430569 - DNA, 15 bp, Homo sapiens
ctgacagaaaaaacc

SEQ ID NO: 430570 - DNA, 15 bp, Homo sapiens
actgacagaaaaaac

SEQ ID NO: 430571 - DNA, 15 bp, Homo sapiens
gactgacagaaaaaa

SEQ ID NO: 430572 - DNA, 15 bp, Homo sapiens
agactgacagaaaaa

SEQ ID NO: 430573 - DNA, 15 bp, Homo sapiens
gagactgacagaaaa

SEQ ID NO: 430574 - DNA, 15 bp, Homo sapiens
agagactgacagaaa

SEQ ID NO: 430575 - DNA, 15 bp, Homo sapiens
aagagactgacagaa

SEQ ID NO: 430576 - DNA, 15 bp, Homo sapiens
caagagactgacaga

SEQ ID NO: 430577 - DNA, 15 bp, Homo sapiens
ccaagagactgacag

SEQ ID NO: 430578 - DNA, 15 bp, Homo sapiens
accaagagactgaca

SEQ ID NO: 430579 - DNA, 15 bp, Homo sapiens
aaccaagagactgac

SEQ ID NO: 430580 - DNA, 15 bp, Homo sapiens
taaccaagagactga

SEQ ID NO: 430581 - DNA, 15 bp, Homo sapiens
ataaccaagagactg

SEQ ID NO: 430582 - DNA, 15 bp, Homo sapiens
gataaccaagagact

SEQ ID NO: 430583 - DNA, 15 bp, Homo sapiens
tgataaccaagagac

SEQ ID NO: 430584 - DNA, 15 bp, Homo sapiens
atgataaccaagaga

SEQ ID NO: 430585 - DNA, 15 bp, Homo sapiens
tatgataaccaagag

SEQ ID NO: 430586 - DNA, 15 bp, Homo sapiens
ttatgataaccaaga

SEQ ID NO: 430587 - DNA, 15 bp, Homo sapiens
attatgataaccaag

SEQ ID NO: 430588 - DNA, 15 bp, Homo sapiens
aattatgataaccaa

SEQ ID NO: 430589 - DNA, 15 bp, Homo sapiens
aaattatgataacca

SEQ ID NO: 430590 - DNA, 15 bp, Homo sapiens
aaaattatgataacc

SEQ ID NO: 430591 - DNA, 15 bp, Homo sapiens
gaaaattatgataac

SEQ ID NO: 430592 - DNA, 15 bp, Homo sapiens
tgaaaattatgataa

SEQ ID NO: 430593 - DNA, 15 bp, Homo sapiens
ctgaaaattatgata

SEQ ID NO: 430594 - DNA, 15 bp, Homo sapiens
actgaaaattatgat

SEQ ID NO: 430595 - DNA, 15 bp, Homo sapiens
tactgaaaattatga

SEQ ID NO: 430596 - DNA, 15 bp, Homo sapiens
gtactgaaaattatg

SEQ ID NO: 430597 - DNA, 15 bp, Homo sapiens
tgtactgaaaattat

SEQ ID NO: 430598 - DNA, 15 bp, Homo sapiens
atgtactgaaaatta

SEQ ID NO: 430599 - DNA, 15 bp, Homo sapiens
tatgtactgaaaatt

SEQ ID NO: 430600 - DNA, 15 bp, Homo sapiens
atatgtactgaaaat

SEQ ID NO: 430601 - DNA, 15 bp, Homo sapiens
tatatgtactgaaaa

SEQ ID NO: 430602 - DNA, 15 bp, Homo sapiens
ttatatgtactgaaa

SEQ ID NO: 430603 - DNA, 15 bp, Homo sapiens
tttatatgtactgaa

SEQ ID NO: 430604 - DNA, 15 bp, Homo sapiens
ttttatatgtactga

SEQ ID NO: 430605 - DNA, 15 bp, Homo sapiens
attttatatgtactg

SEQ ID NO: 430606 - DNA, 15 bp, Homo sapiens
aattttatatgtact

SEQ ID NO: 430607 - DNA, 15 bp, Homo sapiens
aaattttatatgtac

SEQ ID NO: 430608 - DNA, 15 bp, Homo sapiens
gaaattttatatgta

SEQ ID NO: 430609 - DNA, 15 bp, Homo sapiens
tgaaattttatatgt

SEQ ID NO: 430610 - DNA, 15 bp, Homo sapiens
atgaaattttatatg

SEQ ID NO: 430611 - DNA, 15 bp, Homo sapiens
catgaaattttatat

SEQ ID NO: 430612 - DNA, 15 bp, Homo sapiens
acatgaaattttata

SEQ ID NO: 430613 - DNA, 15 bp, Homo sapiens
cacatgaaattttat

SEQ ID NO: 430614 - DNA, 15 bp, Homo sapiens
tcacatgaaatttta

SEQ ID NO: 430615 - DNA, 15 bp, Homo sapiens
atcacatgaaatttt

SEQ ID NO: 430616 - DNA, 15 bp, Homo sapiens
aatcacatgaaattt

SEQ ID NO: 430617 - DNA, 15 bp, Homo sapiens
taatcacatgaaatt

SEQ ID NO: 430618 - DNA, 15 bp, Homo sapiens
ttaatcacatgaaat

SEQ ID NO: 430619 - DNA, 15 bp, Homo sapiens
tttaatcacatgaaa

SEQ ID NO: 430620 - DNA, 15 bp, Homo sapiens
ttttaatcacatgaa

SEQ ID NO: 430621 - DNA, 15 bp, Homo sapiens
attttaatcacatga

SEQ ID NO: 430622 - DNA, 15 bp, Homo sapiens
gattttaatcacatg

SEQ ID NO: 430623 - DNA, 15 bp, Homo sapiens
tgattttaatcacat

SEQ ID NO: 430624 - DNA, 15 bp, Homo sapiens
ttgattttaatcaca

SEQ ID NO: 430625 - DNA, 15 bp, Homo sapiens
attgattttaatcac

SEQ ID NO: 430626 - DNA, 15 bp, Homo sapiens
cattgattttaatca

SEQ ID NO: 430627 - DNA, 15 bp, Homo sapiens
gcattgattttaatc

SEQ ID NO: 430628 - DNA, 15 bp, Homo sapiens
tgcattgattttaat

SEQ ID NO: 430629 - DNA, 15 bp, Homo sapiens
atgcattgattttaa

SEQ ID NO: 430630 - DNA, 15 bp, Homo sapiens
gatgcattgatttta

SEQ ID NO: 430631 - DNA, 15 bp, Homo sapiens
agatgcattgatttt

SEQ ID NO: 430632 - DNA, 15 bp, Homo sapiens
tagatgcattgattt

SEQ ID NO: 430633 - DNA, 15 bp, Homo sapiens
gtagatgcattgatt

SEQ ID NO: 430634 - DNA, 15 bp, Homo sapiens
tgtagatgcattgat

SEQ ID NO: 430635 - DNA, 15 bp, Homo sapiens
atgtagatgcattga

SEQ ID NO: 430636 - DNA, 15 bp, Homo sapiens
aatgtagatgcattg

SEQ ID NO: 430637 - DNA, 15 bp, Homo sapiens
taatgtagatgcatt

SEQ ID NO: 430638 - DNA, 15 bp, Homo sapiens
ataatgtagatgcat

SEQ ID NO: 430639 - DNA, 15 bp, Homo sapiens
cataatgtagatgca

SEQ ID NO: 430640 - DNA, 15 bp, Homo sapiens
tcataatgtagatgc

SEQ ID NO: 430641 - DNA, 15 bp, Homo sapiens
atcataatgtagatg

SEQ ID NO: 430642 - DNA, 15 bp, Homo sapiens
aatcataatgtagat

SEQ ID NO: 430643 - DNA, 15 bp, Homo sapiens
aaatcataatgtaga

SEQ ID NO: 430644 - DNA, 15 bp, Homo sapiens
caaatcataatgtag

SEQ ID NO: 430645 - DNA, 15 bp, Homo sapiens
gcaaatcataatgta

SEQ ID NO: 430646 - DNA, 15 bp, Homo sapiens
agcaaatcataatgt

SEQ ID NO: 430647 - DNA, 15 bp, Homo sapiens
aagcaaatcataatg

SEQ ID NO: 430648 - DNA, 15 bp, Homo sapiens
aaagcaaatcataat

SEQ ID NO: 430649 - DNA, 15 bp, Homo sapiens
aaaagcaaatcataa

SEQ ID NO: 430650 - DNA, 15 bp, Homo sapiens
aaaaagcaaatcata

SEQ ID NO: 430651 - DNA, 15 bp, Homo sapiens
caaaaagcaaatcat

SEQ ID NO: 430652 - DNA, 15 bp, Homo sapiens
acaaaaagcaaatca

SEQ ID NO: 430653 - DNA, 15 bp, Homo sapiens
aacaaaaagcaaatc

SEQ ID NO: 430654 - DNA, 15 bp, Homo sapiens
aaacaaaaagcaaat

SEQ ID NO: 430655 - DNA, 15 bp, Homo sapiens
taaacaaaaagcaaa

SEQ ID NO: 430656 - DNA, 15 bp, Homo sapiens
gtaaacaaaaagcaa

SEQ ID NO: 430657 - DNA, 15 bp, Homo sapiens
agtaaacaaaaagca

SEQ ID NO: 430658 - DNA, 15 bp, Homo sapiens
tagtaaacaaaaagc

SEQ ID NO: 430659 - DNA, 15 bp, Homo sapiens
atagtaaacaaaaag

SEQ ID NO: 430660 - DNA, 15 bp, Homo sapiens
aatagtaaacaaaaa

SEQ ID NO: 430661 - DNA, 15 bp, Homo sapiens
taatagtaaacaaaa

SEQ ID NO: 430662 - DNA, 15 bp, Homo sapiens
ataatagtaaacaaa

SEQ ID NO: 430663 - DNA, 15 bp, Homo sapiens
aataatagtaaacaa

SEQ ID NO: 430664 - DNA, 15 bp, Homo sapiens
aaataatagtaaaca

SEQ ID NO: 430665 - DNA, 15 bp, Homo sapiens
aaaataatagtaaac

SEQ ID NO: 430666 - DNA, 15 bp, Homo sapiens
taaaataatagtaaa

SEQ ID NO: 430667 - DNA, 15 bp, Homo sapiens
tataaaataatagta

SEQ ID NO: 430668 - DNA, 15 bp, Homo sapiens
gtataaaataatagt

SEQ ID NO: 430669 - DNA, 15 bp, Homo sapiens
agtataaaataatag

SEQ ID NO: 430670 - DNA, 15 bp, Homo sapiens
aagtataaaataata

SEQ ID NO: 430671 - DNA, 15 bp, Homo sapiens
taagtataaaataat

SEQ ID NO: 430672 - DNA, 15 bp, Homo sapiens
gtaagtataaaataa

SEQ ID NO: 430673 - DNA, 15 bp, Homo sapiens
tgtaagtataaaata

SEQ ID NO: 430674 - DNA, 15 bp, Homo sapiens
ttgtaagtataaaat

SEQ ID NO: 430675 - DNA, 15 bp, Homo sapiens
attgtaagtataaaa

SEQ ID NO: 430676 - DNA, 15 bp, Homo sapiens
aattgtaagtataaa

SEQ ID NO: 430677 - DNA, 15 bp, Homo sapiens
gaattgtaagtataa

SEQ ID NO: 430678 - DNA, 15 bp, Homo sapiens
ggaattgtaagtata

SEQ ID NO: 430679 - DNA, 15 bp, Homo sapiens
tggaattgtaagtat

SEQ ID NO: 430680 - DNA, 15 bp, Homo sapiens
atggaattgtaagta

SEQ ID NO: 430681 - DNA, 15 bp, Homo sapiens
aatggaattgtaagt

SEQ ID NO: 430682 - DNA, 15 bp, Homo sapiens
caatggaattgtaag

SEQ ID NO: 430683 - DNA, 15 bp, Homo sapiens
tcaatggaattgtaa

SEQ ID NO: 430684 - DNA, 15 bp, Homo sapiens
atcaatggaattgta

SEQ ID NO: 430685 - DNA, 15 bp, Homo sapiens
aatcaatggaattgt

SEQ ID NO: 430686 - DNA, 15 bp, Homo sapiens
caatcaatggaattg

SEQ ID NO: 430687 - DNA, 15 bp, Homo sapiens
tcaatcaatggaatt

SEQ ID NO: 430688 - DNA, 15 bp, Homo sapiens
gtcaatcaatggaat

SEQ ID NO: 430689 - DNA, 15 bp, Homo sapiens
ggtcaatcaatggaa

SEQ ID NO: 430690 - DNA, 15 bp, Homo sapiens
aggtcaatcaatgga

SEQ ID NO: 430691 - DNA, 15 bp, Homo sapiens
taggtcaatcaatgg

SEQ ID NO: 430692 - DNA, 15 bp, Homo sapiens
ctaggtcaatcaatg

SEQ ID NO: 430693 - DNA, 15 bp, Homo sapiens
actaggtcaatcaat

SEQ ID NO: 430694 - DNA, 15 bp, Homo sapiens
aactaggtcaatcaa

SEQ ID NO: 430695 - DNA, 15 bp, Homo sapiens
gaactaggtcaatca

SEQ ID NO: 430696 - DNA, 15 bp, Homo sapiens
tgaactaggtcaatc

SEQ ID NO: 430697 - DNA, 15 bp, Homo sapiens
gtgaactaggtcaat

SEQ ID NO: 430698 - DNA, 15 bp, Homo sapiens
tgtgaactaggtcaa

SEQ ID NO: 430699 - DNA, 15 bp, Homo sapiens
atgtgaactaggtca

SEQ ID NO: 430700 - DNA, 15 bp, Homo sapiens
catgtgaactaggtc

SEQ ID NO: 430701 - DNA, 15 bp, Homo sapiens
acatgtgaactaggt

SEQ ID NO: 430702 - DNA, 15 bp, Homo sapiens
tacatgtgaactagg

SEQ ID NO: 430703 - DNA, 15 bp, Homo sapiens
ctacatgtgaactag

SEQ ID NO: 430704 - DNA, 15 bp, Homo sapiens
tctacatgtgaacta

SEQ ID NO: 430705 - DNA, 15 bp, Homo sapiens
atctacatgtgaact

SEQ ID NO: 430706 - DNA, 15 bp, Homo sapiens
gatctacatgtgaac

SEQ ID NO: 430707 - DNA, 15 bp, Homo sapiens
agatctacatgtgaa

SEQ ID NO: 430708 - DNA, 15 bp, Homo sapiens
aagatctacatgtga

SEQ ID NO: 430709 - DNA, 15 bp, Homo sapiens
caagatctacatgtg

SEQ ID NO: 430710 - DNA, 15 bp, Homo sapiens
ccaagatctacatgt

SEQ ID NO: 430711 - DNA, 15 bp, Homo sapiens
cccaagatctacatg

SEQ ID NO: 430712 - DNA, 15 bp, Homo sapiens
ccccaagatctacat

SEQ ID NO: 430713 - DNA, 15 bp, Homo sapiens
cccccaagatctaca

SEQ ID NO: 430714 - DNA, 15 bp, Homo sapiens
tcccccaagatctac

SEQ ID NO: 430715 - DNA, 15 bp, Homo sapiens
ctcccccaagatcta

SEQ ID NO: 430716 - DNA, 15 bp, Homo sapiens
tctcccccaagatct

SEQ ID NO: 430717 - DNA, 15 bp, Homo sapiens
ctctcccccaagatc

SEQ ID NO: 430718 - DNA, 15 bp, Homo sapiens
tctctcccccaagat

SEQ ID NO: 430719 - DNA, 15 bp, Homo sapiens
atctctcccccaaga

SEQ ID NO: 430720 - DNA, 15 bp, Homo sapiens
catctctcccccaag

SEQ ID NO: 430721 - DNA, 15 bp, Homo sapiens
ccatctctcccccaa

SEQ ID NO: 430722 - DNA, 15 bp, Homo sapiens
tccatctctccccca

SEQ ID NO: 430723 - DNA, 15 bp, Homo sapiens
atccatctctccccc

SEQ ID NO: 430724 - DNA, 15 bp, Homo sapiens
catccatctctcccc

SEQ ID NO: 430725 - DNA, 15 bp, Homo sapiens
gcatccatctctccc

SEQ ID NO: 430726 - DNA, 15 bp, Homo sapiens
tgcatccatctctcc

SEQ ID NO: 430727 - DNA, 15 bp, Homo sapiens
ctgcatccatctctc

SEQ ID NO: 430728 - DNA, 15 bp, Homo sapiens
actgcatccatctct

SEQ ID NO: 430729 - DNA, 15 bp, Homo sapiens
cactgcatccatctc

SEQ ID NO: 430730 - DNA, 15 bp, Homo sapiens
ccactgcatccatct

SEQ ID NO: 430731 - DNA, 15 bp, Homo sapiens
cccactgcatccatc

SEQ ID NO: 430732 - DNA, 15 bp, Homo sapiens
tcccactgcatccat

SEQ ID NO: 430733 - DNA, 15 bp, Homo sapiens
ctcccactgcatcca

SEQ ID NO: 430734 - DNA, 15 bp, Homo sapiens
tctcccactgcatcc

SEQ ID NO: 430735 - DNA, 15 bp, Homo sapiens
ttctcccactgcatc

SEQ ID NO: 430736 - DNA, 15 bp, Homo sapiens
tttctcccactgcat

SEQ ID NO: 430737 - DNA, 15 bp, Homo sapiens
gtttctcccactgca

SEQ ID NO: 430738 - DNA, 15 bp, Homo sapiens
tgtttctcccactgc

SEQ ID NO: 430739 - DNA, 15 bp, Homo sapiens
gtgtttctcccactg

SEQ ID NO: 430740 - DNA, 15 bp, Homo sapiens
agtgtttctcccact

SEQ ID NO: 430741 - DNA, 15 bp, Homo sapiens
tagtgtttctcccac

SEQ ID NO: 430742 - DNA, 15 bp, Homo sapiens
ttagtgtttctccca

SEQ ID NO: 430743 - DNA, 15 bp, Homo sapiens
cttagtgtttctccc

SEQ ID NO: 430744 - DNA, 15 bp, Homo sapiens
gcttagtgtttctcc

SEQ ID NO: 430745 - DNA, 15 bp, Homo sapiens
tgcttagtgtttctc

SEQ ID NO: 430746 - DNA, 15 bp, Homo sapiens
ctgcttagtgtttct

SEQ ID NO: 430747 - DNA, 15 bp, Homo sapiens
cctgcttagtgtttc

SEQ ID NO: 430748 - DNA, 15 bp, Homo sapiens
tcctgcttagtgttt

SEQ ID NO: 430749 - DNA, 15 bp, Homo sapiens
ctcctgcttagtgtt

SEQ ID NO: 430750 - DNA, 15 bp, Homo sapiens
actcctgcttagtgt

SEQ ID NO: 430751 - DNA, 15 bp, Homo sapiens
gactcctgcttagtg

SEQ ID NO: 430752 - DNA, 15 bp, Homo sapiens
tgactcctgcttagt

SEQ ID NO: 430753 - DNA, 15 bp, Homo sapiens
ttgactcctgcttag

SEQ ID NO: 430754 - DNA, 15 bp, Homo sapiens
tttgactcctgctta

SEQ ID NO: 430755 - DNA, 15 bp, Homo sapiens
ttttgactcctgctt

SEQ ID NO: 430756 - DNA, 15 bp, Homo sapiens
gttttgactcctgct

SEQ ID NO: 430757 - DNA, 15 bp, Homo sapiens
tgttttgactcctgc

SEQ ID NO: 430758 - DNA, 15 bp, Homo sapiens
gtgttttgactcctg

SEQ ID NO: 430759 - DNA, 15 bp, Homo sapiens
ggtgttttgactcct

SEQ ID NO: 430760 - DNA, 15 bp, Homo sapiens
aggtgttttgactcc

SEQ ID NO: 430761 - DNA, 15 bp, Homo sapiens
caggtgttttgactc

SEQ ID NO: 430762 - DNA, 15 bp, Homo sapiens
ccaggtgttttgact

SEQ ID NO: 430763 - DNA, 15 bp, Homo sapiens
tccaggtgttttgac

SEQ ID NO: 430764 - DNA, 15 bp, Homo sapiens
atccaggtgttttga

SEQ ID NO: 430765 - DNA, 15 bp, Homo sapiens
catccaggtgttttg

SEQ ID NO: 430766 - DNA, 15 bp, Homo sapiens
acatccaggtgtttt

SEQ ID NO: 430767 - DNA, 15 bp, Homo sapiens
cacatccaggtgttt

SEQ ID NO: 430768 - DNA, 15 bp, Homo sapiens
ccacatccaggtgtt

SEQ ID NO: 430769 - DNA, 15 bp, Homo sapiens
tccacatccaggtgt

SEQ ID NO: 430770 - DNA, 15 bp, Homo sapiens
atccacatccaggtg

SEQ ID NO: 430771 - DNA, 15 bp, Homo sapiens
gatccacatccaggt

SEQ ID NO: 430772 - DNA, 15 bp, Homo sapiens
agatccacatccagg

SEQ ID NO: 430773 - DNA, 15 bp, Homo sapiens
gagatccacatccag

SEQ ID NO: 430774 - DNA, 15 bp, Homo sapiens
tgagatccacatcca

SEQ ID NO: 430775 - DNA, 15 bp, Homo sapiens
ctgagatccacatcc

SEQ ID NO: 430776 - DNA, 15 bp, Homo sapiens
gctgagatccacatc

SEQ ID NO: 430777 - DNA, 15 bp, Homo sapiens
agctgagatccacat

SEQ ID NO: 430778 - DNA, 15 bp, Homo sapiens
aagctgagatccaca

SEQ ID NO: 430779 - DNA, 15 bp, Homo sapiens
aaagctgagatccac

SEQ ID NO: 430780 - DNA, 15 bp, Homo sapiens
caaagctgagatcca

SEQ ID NO: 430781 - DNA, 15 bp, Homo sapiens
gcaaagctgagatcc

SEQ ID NO: 430782 - DNA, 15 bp, Homo sapiens
agcaaagctgagatc

SEQ ID NO: 430783 - DNA, 15 bp, Homo sapiens
gagcaaagctgagat

SEQ ID NO: 430784 - DNA, 15 bp, Homo sapiens
agagcaaagctgaga

SEQ ID NO: 430785 - DNA, 15 bp, Homo sapiens
aagagcaaagctgag

SEQ ID NO: 430786 - DNA, 15 bp, Homo sapiens
aaagagcaaagctga

SEQ ID NO: 430787 - DNA, 15 bp, Homo sapiens
taaagagcaaagctg

SEQ ID NO: 430788 - DNA, 15 bp, Homo sapiens
gtaaagagcaaagct

SEQ ID NO: 430789 - DNA, 15 bp, Homo sapiens
ggtaaagagcaaagc

SEQ ID NO: 430790 - DNA, 15 bp, Homo sapiens
tggtaaagagcaaag

SEQ ID NO: 430791 - DNA, 15 bp, Homo sapiens
ctggtaaagagcaaa

SEQ ID NO: 430792 - DNA, 15 bp, Homo sapiens
gctggtaaagagcaa

SEQ ID NO: 430793 - DNA, 15 bp, Homo sapiens
agctggtaaagagca

SEQ ID NO: 430794 - DNA, 15 bp, Homo sapiens
aagctggtaaagagc

SEQ ID NO: 430795 - DNA, 15 bp, Homo sapiens
gaagctggtaaagag

SEQ ID NO: 430796 - DNA, 15 bp, Homo sapiens
tgaagctggtaaaga

SEQ ID NO: 430797 - DNA, 15 bp, Homo sapiens
atgaagctggtaaag

SEQ ID NO: 430798 - DNA, 15 bp, Homo sapiens
catgaagctggtaaa

SEQ ID NO: 430799 - DNA, 15 bp, Homo sapiens
tcatgaagctggtaa

SEQ ID NO: 430800 - DNA, 15 bp, Homo sapiens
gtcatgaagctggta

SEQ ID NO: 430801 - DNA, 15 bp, Homo sapiens
ggtcatgaagctggt

SEQ ID NO: 430802 - DNA, 15 bp, Homo sapiens
gggtcatgaagctgg

SEQ ID NO: 430803 - DNA, 15 bp, Homo sapiens
tgggtcatgaagctg

SEQ ID NO: 430804 - DNA, 15 bp, Homo sapiens
ttgggtcatgaagct

SEQ ID NO: 430805 - DNA, 15 bp, Homo sapiens
cttgggtcatgaagc

SEQ ID NO: 430806 - DNA, 15 bp, Homo sapiens
ccttgggtcatgaag

SEQ ID NO: 430807 - DNA, 15 bp, Homo sapiens
gccttgggtcatgaa

SEQ ID NO: 430808 - DNA, 15 bp, Homo sapiens
tgccttgggtcatga

SEQ ID NO: 430809 - DNA, 15 bp, Homo sapiens
ttgccttgggtcatg

SEQ ID NO: 430810 - DNA, 15 bp, Homo sapiens
gttgccttgggtcat

SEQ ID NO: 430811 - DNA, 15 bp, Homo sapiens
agttgccttgggtca

SEQ ID NO: 430812 - DNA, 15 bp, Homo sapiens
aagttgccttgggtc

SEQ ID NO: 430813 - DNA, 15 bp, Homo sapiens
taagttgccttgggt

SEQ ID NO: 430814 - DNA, 15 bp, Homo sapiens
ataagttgccttggg

SEQ ID NO: 430815 - DNA, 15 bp, Homo sapiens
aataagttgccttgg

SEQ ID NO: 430816 - DNA, 15 bp, Homo sapiens
taataagttgccttg

SEQ ID NO: 430817 - DNA, 15 bp, Homo sapiens
ttaataagttgcctt

SEQ ID NO: 430818 - DNA, 15 bp, Homo sapiens
attaataagttgcct

SEQ ID NO: 430819 - DNA, 15 bp, Homo sapiens
tattaataagttgcc

SEQ ID NO: 430820 - DNA, 15 bp, Homo sapiens
gtattaataagttgc

SEQ ID NO: 430821 - DNA, 15 bp, Homo sapiens
ggtattaataagttg

SEQ ID NO: 430822 - DNA, 15 bp, Homo sapiens
aggtattaataagtt

SEQ ID NO: 430823 - DNA, 15 bp, Homo sapiens
aaggtattaataagt

SEQ ID NO: 430824 - DNA, 15 bp, Homo sapiens
aaaggtattaataag

SEQ ID NO: 430825 - DNA, 15 bp, Homo sapiens
aaaaggtattaataa

SEQ ID NO: 430826 - DNA, 15 bp, Homo sapiens
taaaaggtattaata

SEQ ID NO: 430827 - DNA, 15 bp, Homo sapiens
ataaaaggtattaat

SEQ ID NO: 430828 - DNA, 15 bp, Homo sapiens
cataaaaggtattaa

SEQ ID NO: 430829 - DNA, 15 bp, Homo sapiens
acataaaaggtatta

SEQ ID NO: 430830 - DNA, 15 bp, Homo sapiens
cacataaaaggtatt

SEQ ID NO: 430831 - DNA, 15 bp, Homo sapiens
gcacataaaaggtat

SEQ ID NO: 430832 - DNA, 15 bp, Homo sapiens
agcacataaaaggta

SEQ ID NO: 430833 - DNA, 15 bp, Homo sapiens
aagcacataaaaggt

SEQ ID NO: 430834 - DNA, 15 bp, Homo sapiens
aaagcacataaaagg

SEQ ID NO: 430835 - DNA, 15 bp, Homo sapiens
aaaagcacataaaag

SEQ ID NO: 430836 - DNA, 15 bp, Homo sapiens
gaaaagcacataaaa

SEQ ID NO: 430837 - DNA, 15 bp, Homo sapiens
tgaaaagcacataaa

SEQ ID NO: 430838 - DNA, 15 bp, Homo sapiens
atgaaaagcacataa

SEQ ID NO: 430839 - DNA, 15 bp, Homo sapiens
aatgaaaagcacata

SEQ ID NO: 430840 - DNA, 15 bp, Homo sapiens
aaatgaaaagcacat

SEQ ID NO: 430841 - DNA, 15 bp, Homo sapiens
taaatgaaaagcaca

SEQ ID NO: 430842 - DNA, 15 bp, Homo sapiens
ctaaatgaaaagcac

SEQ ID NO: 430843 - DNA, 15 bp, Homo sapiens
actaaatgaaaagca

SEQ ID NO: 430844 - DNA, 15 bp, Homo sapiens
gactaaatgaaaagc

SEQ ID NO: 430845 - DNA, 15 bp, Homo sapiens
agactaaatgaaaag

SEQ ID NO: 430846 - DNA, 15 bp, Homo sapiens
aagactaaatgaaaa

SEQ ID NO: 430847 - DNA, 15 bp, Homo sapiens
gaagactaaatgaaa

SEQ ID NO: 430848 - DNA, 15 bp, Homo sapiens
agaagactaaatgaa

SEQ ID NO: 430849 - DNA, 15 bp, Homo sapiens
cagaagactaaatga

SEQ ID NO: 430850 - DNA, 15 bp, Homo sapiens
acagaagactaaatg

SEQ ID NO: 430851 - DNA, 15 bp, Homo sapiens
tacagaagactaaat

SEQ ID NO: 430852 - DNA, 15 bp, Homo sapiens
ttacagaagactaaa

SEQ ID NO: 430853 - DNA, 15 bp, Homo sapiens
tttacagaagactaa

SEQ ID NO: 430854 - DNA, 15 bp, Homo sapiens
atttacagaagacta

SEQ ID NO: 430855 - DNA, 15 bp, Homo sapiens
aatttacagaagact

SEQ ID NO: 430856 - DNA, 15 bp, Homo sapiens
caatttacagaagac

SEQ ID NO: 430857 - DNA, 15 bp, Homo sapiens
ccaatttacagaaga

SEQ ID NO: 430858 - DNA, 15 bp, Homo sapiens
cccaatttacagaag

SEQ ID NO: 430859 - DNA, 15 bp, Homo sapiens
ccccaatttacagaa

SEQ ID NO: 430860 - DNA, 15 bp, Homo sapiens
tccccaatttacaga

SEQ ID NO: 430861 - DNA, 15 bp, Homo sapiens
atccccaatttacag

SEQ ID NO: 430862 - DNA, 15 bp, Homo sapiens
tatccccaatttaca

SEQ ID NO: 430863 - DNA, 15 bp, Homo sapiens
ttatccccaatttac

SEQ ID NO: 430864 - DNA, 15 bp, Homo sapiens
attatccccaattta

SEQ ID NO: 430865 - DNA, 15 bp, Homo sapiens
cattatccccaattt

SEQ ID NO: 430866 - DNA, 15 bp, Homo sapiens
tcattatccccaatt

SEQ ID NO: 430867 - DNA, 15 bp, Homo sapiens
atcattatccccaat

SEQ ID NO: 430868 - DNA, 15 bp, Homo sapiens
aatcattatccccaa

SEQ ID NO: 430869 - DNA, 15 bp, Homo sapiens
gaatcattatcccca

SEQ ID NO: 430870 - DNA, 15 bp, Homo sapiens
agaatcattatcccc

SEQ ID NO: 430871 - DNA, 15 bp, Homo sapiens
aagaatcattatccc

SEQ ID NO: 430872 - DNA, 15 bp, Homo sapiens
taagaatcattatcc

SEQ ID NO: 430873 - DNA, 15 bp, Homo sapiens
gtaagaatcattatc

SEQ ID NO: 430874 - DNA, 15 bp, Homo sapiens
ggtaagaatcattat

SEQ ID NO: 430875 - DNA, 15 bp, Homo sapiens
aggtaagaatcatta

SEQ ID NO: 430876 - DNA, 15 bp, Homo sapiens
caggtaagaatcatt

SEQ ID NO: 430877 - DNA, 15 bp, Homo sapiens
tcaggtaagaatcat

SEQ ID NO: 430878 - DNA, 15 bp, Homo sapiens
ttcaggtaagaatca

SEQ ID NO: 430879 - DNA, 15 bp, Homo sapiens
tttcaggtaagaatc

SEQ ID NO: 430880 - DNA, 15 bp, Homo sapiens
gtttcaggtaagaat

SEQ ID NO: 430881 - DNA, 15 bp, Homo sapiens
cgtttcaggtaagaa

SEQ ID NO: 430882 - DNA, 15 bp, Homo sapiens
tcgtttcaggtaaga

SEQ ID NO: 430883 - DNA, 15 bp, Homo sapiens
atcgtttcaggtaag

SEQ ID NO: 430884 - DNA, 15 bp, Homo sapiens
tatcgtttcaggtaa

SEQ ID NO: 430885 - DNA, 15 bp, Homo sapiens
ttatcgtttcaggta

SEQ ID NO: 430886 - DNA, 15 bp, Homo sapiens
attatcgtttcaggt

SEQ ID NO: 430887 - DNA, 15 bp, Homo sapiens
aattatcgtttcagg

SEQ ID NO: 430888 - DNA, 15 bp, Homo sapiens
caattatcgtttcag

SEQ ID NO: 430889 - DNA, 15 bp, Homo sapiens
tcaattatcgtttca

SEQ ID NO: 430890 - DNA, 15 bp, Homo sapiens
gtcaattatcgtttc

SEQ ID NO: 430891 - DNA, 15 bp, Homo sapiens
agtcaattatcgttt

SEQ ID NO: 430892 - DNA, 15 bp, Homo sapiens
cagtcaattatcgtt

SEQ ID NO: 430893 - DNA, 15 bp, Homo sapiens
ccagtcaattatcgt

SEQ ID NO: 430894 - DNA, 15 bp, Homo sapiens
cccagtcaattatcg

SEQ ID NO: 430895 - DNA, 15 bp, Homo sapiens
tcccagtcaattatc

SEQ ID NO: 430896 - DNA, 15 bp, Homo sapiens
ctcccagtcaattat

SEQ ID NO: 430897 - DNA, 15 bp, Homo sapiens
tctcccagtcaatta

SEQ ID NO: 430898 - DNA, 15 bp, Homo sapiens
ttctcccagtcaatt

SEQ ID NO: 430899 - DNA, 15 bp, Homo sapiens
attctcccagtcaat

SEQ ID NO: 430900 - DNA, 15 bp, Homo sapiens
aattctcccagtcaa

SEQ ID NO: 430901 - DNA, 15 bp, Homo sapiens
taattctcccagtca

SEQ ID NO: 430902 - DNA, 15 bp, Homo sapiens
ttaattctcccagtc

SEQ ID NO: 430903 - DNA, 15 bp, Homo sapiens
tttaattctcccagt

SEQ ID NO: 430904 - DNA, 15 bp, Homo sapiens
atttaattctcccag

SEQ ID NO: 430905 - DNA, 15 bp, Homo sapiens
tatttaattctccca

SEQ ID NO: 430906 - DNA, 15 bp, Homo sapiens
ttatttaattctccc

SEQ ID NO: 430907 - DNA, 15 bp, Homo sapiens
cttatttaattctcc

SEQ ID NO: 430908 - DNA, 15 bp, Homo sapiens
tcttatttaattctc

SEQ ID NO: 430909 - DNA, 15 bp, Homo sapiens
atcttatttaattct

SEQ ID NO: 430910 - DNA, 15 bp, Homo sapiens
tatcttatttaattc

SEQ ID NO: 430911 - DNA, 15 bp, Homo sapiens
ttatcttatttaatt

SEQ ID NO: 430912 - DNA, 15 bp, Homo sapiens
attatcttatttaat

SEQ ID NO: 430913 - DNA, 15 bp, Homo sapiens
cattatcttatttaa

SEQ ID NO: 430914 - DNA, 15 bp, Homo sapiens
acattatcttattta

SEQ ID NO: 430915 - DNA, 15 bp, Homo sapiens
cacattatcttattt

SEQ ID NO: 430916 - DNA, 15 bp, Homo sapiens
tcacattatcttatt

SEQ ID NO: 430917 - DNA, 15 bp, Homo sapiens
ttcacattatcttat

SEQ ID NO: 430918 - DNA, 15 bp, Homo sapiens
tttcacattatctta

SEQ ID NO: 430919 - DNA, 15 bp, Homo sapiens
ttttcacattatctt

SEQ ID NO: 430920 - DNA, 15 bp, Homo sapiens
gttttcacattatct

SEQ ID NO: 430921 - DNA, 15 bp, Homo sapiens
tgttttcacattatc

SEQ ID NO: 430922 - DNA, 15 bp, Homo sapiens
gtgttttcacattat

SEQ ID NO: 430923 - DNA, 15 bp, Homo sapiens
ggtgttttcacatta

SEQ ID NO: 430924 - DNA, 15 bp, Homo sapiens
aggtgttttcacatt

SEQ ID NO: 430925 - DNA, 15 bp, Homo sapiens
caggtgttttcacat

SEQ ID NO: 430926 - DNA, 15 bp, Homo sapiens
tcaggtgttttcaca

SEQ ID NO: 430927 - DNA, 15 bp, Homo sapiens
gtcaggtgttttcac

SEQ ID NO: 430928 - DNA, 15 bp, Homo sapiens
tgtcaggtgttttca

SEQ ID NO: 430929 - DNA, 15 bp, Homo sapiens
atgtcaggtgttttc

SEQ ID NO: 430930 - DNA, 15 bp, Homo sapiens
tatgtcaggtgtttt

SEQ ID NO: 430931 - DNA, 15 bp, Homo sapiens
atatgtcaggtgttt

SEQ ID NO: 430932 - DNA, 15 bp, Homo sapiens
tatatgtcaggtgtt

SEQ ID NO: 430933 - DNA, 15 bp, Homo sapiens
ctatatgtcaggtgt

SEQ ID NO: 430934 - DNA, 15 bp, Homo sapiens
actatatgtcaggtg

SEQ ID NO: 430935 - DNA, 15 bp, Homo sapiens
tactatatgtcaggt

SEQ ID NO: 430936 - DNA, 15 bp, Homo sapiens
ctactatatgtcagg

SEQ ID NO: 430937 - DNA, 15 bp, Homo sapiens
cctactatatgtcag

SEQ ID NO: 430938 - DNA, 15 bp, Homo sapiens
gcctactatatgtca

SEQ ID NO: 430939 - DNA, 15 bp, Homo sapiens
tgcctactatatgtc

SEQ ID NO: 430940 - DNA, 15 bp, Homo sapiens
atgcctactatatgt

SEQ ID NO: 430941 - DNA, 15 bp, Homo sapiens
catgcctactatatg

SEQ ID NO: 430942 - DNA, 15 bp, Homo sapiens
gcatgcctactatat

SEQ ID NO: 430943 - DNA, 15 bp, Homo sapiens
agcatgcctactata

SEQ ID NO: 430944 - DNA, 15 bp, Homo sapiens
aagcatgcctactat

SEQ ID NO: 430945 - DNA, 15 bp, Homo sapiens
taagcatgcctacta

SEQ ID NO: 430946 - DNA, 15 bp, Homo sapiens
gtaagcatgcctact

SEQ ID NO: 430947 - DNA, 15 bp, Homo sapiens
tgtaagcatgcctac

SEQ ID NO: 430948 - DNA, 15 bp, Homo sapiens
ttgtaagcatgccta

SEQ ID NO: 430949 - DNA, 15 bp, Homo sapiens
attgtaagcatgcct

SEQ ID NO: 430950 - DNA, 15 bp, Homo sapiens
aattgtaagcatgcc

SEQ ID NO: 430951 - DNA, 15 bp, Homo sapiens
aaattgtaagcatgc

SEQ ID NO: 430952 - DNA, 15 bp, Homo sapiens
aaaattgtaagcatg

SEQ ID NO: 430953 - DNA, 15 bp, Homo sapiens
aaaaattgtaagcat

SEQ ID NO: 430954 - DNA, 15 bp, Homo sapiens
aaaaaattgtaagca

SEQ ID NO: 430955 - DNA, 15 bp, Homo sapiens
aaaaaaattgtaagc

SEQ ID NO: 430956 - DNA, 15 bp, Homo sapiens
aaaaaaaattgtaag

SEQ ID NO: 430957 - DNA, 15 bp, Homo sapiens
gaaaaaaaattgtaa

SEQ ID NO: 430958 - DNA, 15 bp, Homo sapiens
ggaaaaaaaattgta

SEQ ID NO: 430959 - DNA, 15 bp, Homo sapiens
cggaaaaaaaattgt

SEQ ID NO: 430960 - DNA, 15 bp, Homo sapiens
tcggaaaaaaaattg

SEQ ID NO: 430961 - DNA, 15 bp, Homo sapiens
atcggaaaaaaaatt

SEQ ID NO: 430962 - DNA, 15 bp, Homo sapiens
aatcggaaaaaaaat

SEQ ID NO: 430963 - DNA, 15 bp, Homo sapiens
aaatcggaaaaaaaa

SEQ ID NO: 430964 - DNA, 15 bp, Homo sapiens
aaaatcggaaaaaaa

SEQ ID NO: 430965 - DNA, 15 bp, Homo sapiens
aaaaatcggaaaaaa

SEQ ID NO: 430966 - DNA, 15 bp, Homo sapiens
gaaaaatcggaaaaa

SEQ ID NO: 430967 - DNA, 15 bp, Homo sapiens
agaaaaatcggaaaa

SEQ ID NO: 430968 - DNA, 15 bp, Homo sapiens
gagaaaaatcggaaa

SEQ ID NO: 430969 - DNA, 15 bp, Homo sapiens
ggagaaaaatcggaa

SEQ ID NO: 430970 - DNA, 15 bp, Homo sapiens
cggagaaaaatcgga

SEQ ID NO: 430971 - DNA, 15 bp, Homo sapiens
acggagaaaaatcgg

SEQ ID NO: 430972 - DNA, 15 bp, Homo sapiens
aacggagaaaaatcg

SEQ ID NO: 430973 - DNA, 15 bp, Homo sapiens
taacggagaaaaatc

SEQ ID NO: 430974 - DNA, 15 bp, Homo sapiens
ataacggagaaaaat

SEQ ID NO: 430975 - DNA, 15 bp, Homo sapiens
tataacggagaaaaa

SEQ ID NO: 430976 - DNA, 15 bp, Homo sapiens
atataacggagaaaa

SEQ ID NO: 430977 - DNA, 15 bp, Homo sapiens
tatataacggagaaa

SEQ ID NO: 430978 - DNA, 15 bp, Homo sapiens
ttatataacggagaa

SEQ ID NO: 430979 - DNA, 15 bp, Homo sapiens
tttatataacggaga

SEQ ID NO: 430980 - DNA, 15 bp, Homo sapiens
atttatataacggag

SEQ ID NO: 430981 - DNA, 15 bp, Homo sapiens
tatttatataacgga

SEQ ID NO: 430982 - DNA, 15 bp, Homo sapiens
atatttatataacgg

SEQ ID NO: 430983 - DNA, 15 bp, Homo sapiens
catatttatataacg

SEQ ID NO: 430984 - DNA, 15 bp, Homo sapiens
gcatatttatataac

SEQ ID NO: 430985 - DNA, 15 bp, Homo sapiens
ggcatatttatataa

SEQ ID NO: 430986 - DNA, 15 bp, Homo sapiens
tggcatatttatata

SEQ ID NO: 430987 - DNA, 15 bp, Homo sapiens
atggcatatttatat

SEQ ID NO: 430988 - DNA, 15 bp, Homo sapiens
gatggcatatttata

SEQ ID NO: 430989 - DNA, 15 bp, Homo sapiens
tgatggcatatttat

SEQ ID NO: 430990 - DNA, 15 bp, Homo sapiens
atgatggcatattta

SEQ ID NO: 430991 - DNA, 15 bp, Homo sapiens
aatgatggcatattt

SEQ ID NO: 430992 - DNA, 15 bp, Homo sapiens
aaatgatggcatatt

SEQ ID NO: 430993 - DNA, 15 bp, Homo sapiens
caaatgatggcatat

SEQ ID NO: 430994 - DNA, 15 bp, Homo sapiens
gcaaatgatggcata

SEQ ID NO: 430995 - DNA, 15 bp, Homo sapiens
ctaaagaaaaaatat

SEQ ID NO: 430996 - DNA, 15 bp, Homo sapiens
actaaagaaaaaata

SEQ ID NO: 430997 - DNA, 15 bp, Homo sapiens
tactaaagaaaaaat

SEQ ID NO: 430998 - DNA, 15 bp, Homo sapiens
ttactaaagaaaaaa

SEQ ID NO: 430999 - DNA, 15 bp, Homo sapiens
cttactaaagaaaaa

SEQ ID NO: 431000 - DNA, 15 bp, Homo sapiens
gcttactaaagaaaa

SEQ ID NO: 431001 - DNA, 15 bp, Homo sapiens
tgcttactaaagaaa

SEQ ID NO: 431002 - DNA, 15 bp, Homo sapiens
atgcttactaaagaa

SEQ ID NO: 431003 - DNA, 15 bp, Homo sapiens
gatgcttactaaaga

SEQ ID NO: 431004 - DNA, 15 bp, Homo sapiens
agatgcttactaaag

SEQ ID NO: 431005 - DNA, 15 bp, Homo sapiens
aagatgcttactaaa

SEQ ID NO: 431006 - DNA, 15 bp, Homo sapiens
gaagatgcttactaa

SEQ ID NO: 431007 - DNA, 15 bp, Homo sapiens
tgaagatgcttacta

SEQ ID NO: 431008 - DNA, 15 bp, Homo sapiens
ctgaagatgcttact

SEQ ID NO: 431009 - DNA, 15 bp, Homo sapiens
actgaagatgcttac

SEQ ID NO: 431010 - DNA, 15 bp, Homo sapiens
cactgaagatgctta

SEQ ID NO: 431011 - DNA, 15 bp, Homo sapiens
gcactgaagatgctt

SEQ ID NO: 431012 - DNA, 15 bp, Homo sapiens
tgcactgaagatgct

SEQ ID NO: 431013 - DNA, 15 bp, Homo sapiens
atgcactgaagatgc

SEQ ID NO: 431014 - DNA, 15 bp, Homo sapiens
aatgcactgaagatg

SEQ ID NO: 431015 - DNA, 15 bp, Homo sapiens
aaatgcactgaagat

SEQ ID NO: 431016 - DNA, 15 bp, Homo sapiens
taaatgcactgaaga

SEQ ID NO: 431017 - DNA, 15 bp, Homo sapiens
ttaaatgcactgaag

SEQ ID NO: 431018 - DNA, 15 bp, Homo sapiens
tttaaatgcactgaa

SEQ ID NO: 431019 - DNA, 15 bp, Homo sapiens
ctttaaatgcactga

SEQ ID NO: 431020 - DNA, 15 bp, Homo sapiens
actttaaatgcactg

SEQ ID NO: 431021 - DNA, 15 bp, Homo sapiens
cactttaaatgcact

SEQ ID NO: 431022 - DNA, 15 bp, Homo sapiens
gcactttaaatgcac

SEQ ID NO: 431023 - DNA, 15 bp, Homo sapiens
tgcactttaaatgca

SEQ ID NO: 431024 - DNA, 15 bp, Homo sapiens
atgcactttaaatgc

SEQ ID NO: 431025 - DNA, 15 bp, Homo sapiens
aatgcactttaaatg

SEQ ID NO: 431026 - DNA, 15 bp, Homo sapiens
aaatgcactttaaat

SEQ ID NO: 431027 - DNA, 15 bp, Homo sapiens
taaatgcactttaaa

SEQ ID NO: 431028 - DNA, 15 bp, Homo sapiens
ttaaatgcactttaa

SEQ ID NO: 431029 - DNA, 15 bp, Homo sapiens
tttaaatgcacttta

SEQ ID NO: 431030 - DNA, 15 bp, Homo sapiens
ctttaaatgcacttt

SEQ ID NO: 431031 - DNA, 15 bp, Homo sapiens
tctttaaatgcactt

SEQ ID NO: 431032 - DNA, 15 bp, Homo sapiens
ttctttaaatgcact

SEQ ID NO: 431033 - DNA, 15 bp, Homo sapiens
attctttaaatgcac

SEQ ID NO: 431034 - DNA, 15 bp, Homo sapiens
aattctttaaatgca

SEQ ID NO: 431035 - DNA, 15 bp, Homo sapiens
taattctttaaatgc

SEQ ID NO: 431036 - DNA, 15 bp, Homo sapiens
ataattctttaaatg

SEQ ID NO: 431037 - DNA, 15 bp, Homo sapiens
aataattctttaaat

SEQ ID NO: 431038 - DNA, 15 bp, Homo sapiens
gaataattctttaaa

SEQ ID NO: 431039 - DNA, 15 bp, Homo sapiens
tgaataattctttaa

SEQ ID NO: 431040 - DNA, 15 bp, Homo sapiens
ctgaataattcttta

SEQ ID NO: 431041 - DNA, 15 bp, Homo sapiens
tctgaataattcttt

SEQ ID NO: 431042 - DNA, 15 bp, Homo sapiens
atctgaataattctt

SEQ ID NO: 431043 - DNA, 15 bp, Homo sapiens
aatctgaataattct

SEQ ID NO: 431044 - DNA, 15 bp, Homo sapiens
taatctgaataattc

SEQ ID NO: 431045 - DNA, 15 bp, Homo sapiens
gtaatctgaataatt

SEQ ID NO: 431046 - DNA, 15 bp, Homo sapiens
tgtaatctgaataat

SEQ ID NO: 431047 - DNA, 15 bp, Homo sapiens
ttgtaatctgaataa

SEQ ID NO: 431048 - DNA, 15 bp, Homo sapiens
tttgtaatctgaata

SEQ ID NO: 431049 - DNA, 15 bp, Homo sapiens
ttttgtaatctgaat

SEQ ID NO: 431050 - DNA, 15 bp, Homo sapiens
gttttgtaatctgaa

SEQ ID NO: 431051 - DNA, 15 bp, Homo sapiens
tgttttgtaatctga

SEQ ID NO: 431052 - DNA, 15 bp, Homo sapiens
atgttttgtaatctg

SEQ ID NO: 431053 - DNA, 15 bp, Homo sapiens
tatgttttgtaatct

SEQ ID NO: 431054 - DNA, 15 bp, Homo sapiens
gtatgttttgtaatc

SEQ ID NO: 431055 - DNA, 15 bp, Homo sapiens
tgtatgttttgtaat

SEQ ID NO: 431056 - DNA, 15 bp, Homo sapiens
ctgtatgttttgtaa

SEQ ID NO: 431057 - DNA, 15 bp, Homo sapiens
tctgtatgttttgta

SEQ ID NO: 431058 - DNA, 15 bp, Homo sapiens
ctctgtatgttttgt

SEQ ID NO: 431059 - DNA, 15 bp, Homo sapiens
gctctgtatgttttg

SEQ ID NO: 431060 - DNA, 15 bp, Homo sapiens
tgctctgtatgtttt

SEQ ID NO: 431061 - DNA, 15 bp, Homo sapiens
ttgctctgtatgttt

SEQ ID NO: 431062 - DNA, 15 bp, Homo sapiens
tttgctctgtatgtt

SEQ ID NO: 431063 - DNA, 15 bp, Homo sapiens
gtttgctctgtatgt

SEQ ID NO: 431064 - DNA, 15 bp, Homo sapiens
agtttgctctgtatg

SEQ ID NO: 431065 - DNA, 15 bp, Homo sapiens
tagtttgctctgtat

SEQ ID NO: 431066 - DNA, 15 bp, Homo sapiens
atagtttgctctgta

SEQ ID NO: 431067 - DNA, 15 bp, Homo sapiens
tatagtttgctctgt

SEQ ID NO: 431068 - DNA, 15 bp, Homo sapiens
gtatagtttgctctg

SEQ ID NO: 431069 - DNA, 15 bp, Homo sapiens
ggtatagtttgctct

SEQ ID NO: 431070 - DNA, 15 bp, Homo sapiens
tggtatagtttgctc

SEQ ID NO: 431071 - DNA, 15 bp, Homo sapiens
atggtatagtttgct

SEQ ID NO: 431072 - DNA, 15 bp, Homo sapiens
aatggtatagtttgc

SEQ ID NO: 431073 - DNA, 15 bp, Homo sapiens
aaatggtatagtttg

SEQ ID NO: 431074 - DNA, 15 bp, Homo sapiens
caaatggtatagttt

SEQ ID NO: 431075 - DNA, 15 bp, Homo sapiens
ccaaatggtatagtt

SEQ ID NO: 431076 - DNA, 15 bp, Homo sapiens
cccaaatggtatagt

SEQ ID NO: 431077 - DNA, 15 bp, Homo sapiens
acccaaatggtatag

SEQ ID NO: 431078 - DNA, 15 bp, Homo sapiens
gacccaaatggtata

SEQ ID NO: 431079 - DNA, 15 bp, Homo sapiens
agacccaaatggtat

SEQ ID NO: 431080 - DNA, 15 bp, Homo sapiens
aagacccaaatggta

SEQ ID NO: 431081 - DNA, 15 bp, Homo sapiens
aaagacccaaatggt

SEQ ID NO: 431082 - DNA, 15 bp, Homo sapiens
aaaagacccaaatgg

SEQ ID NO: 431083 - DNA, 15 bp, Homo sapiens
aaaaagacccaaatg

SEQ ID NO: 431084 - DNA, 15 bp, Homo sapiens
aaaaaagacccaaat

SEQ ID NO: 431085 - DNA, 15 bp, Homo sapiens
aaaaaaagacccaaa

SEQ ID NO: 431086 - DNA, 15 bp, Homo sapiens
aaaaaaaagacccaa

SEQ ID NO: 431087 - DNA, 15 bp, Homo sapiens
aaaaaaaaagaccca

SEQ ID NO: 431088 - DNA, 15 bp, Homo sapiens
aaaaaaaaaagaccc

SEQ ID NO: 431089 - DNA, 15 bp, Homo sapiens
aaaaaaaaaaagacc

SEQ ID NO: 431090 - DNA, 15 bp, Homo sapiens
ctcttaaaaaaaaaa

SEQ ID NO: 431091 - DNA, 15 bp, Homo sapiens
tctcttaaaaaaaaa

SEQ ID NO: 431092 - DNA, 15 bp, Homo sapiens
ctctcttaaaaaaaa

SEQ ID NO: 431093 - DNA, 15 bp, Homo sapiens
tctctcttaaaaaaa

SEQ ID NO: 431094 - DNA, 15 bp, Homo sapiens
atctctcttaaaaaa

SEQ ID NO: 431095 - DNA, 15 bp, Homo sapiens
tatctctcttaaaaa

SEQ ID NO: 431096 - DNA, 15 bp, Homo sapiens
ctatctctcttaaaa

SEQ ID NO: 431097 - DNA, 15 bp, Homo sapiens
cctatctctcttaaa

SEQ ID NO: 431098 - DNA, 15 bp, Homo sapiens
ccctatctctcttaa

SEQ ID NO: 431099 - DNA, 15 bp, Homo sapiens
gccctatctctctta

SEQ ID NO: 431100 - DNA, 15 bp, Homo sapiens
ggccctatctctctt

SEQ ID NO: 431101 - DNA, 15 bp, Homo sapiens
aggccctatctctct

SEQ ID NO: 431102 - DNA, 15 bp, Homo sapiens
aaggccctatctctc

SEQ ID NO: 431103 - DNA, 15 bp, Homo sapiens
gaaggccctatctct

SEQ ID NO: 431104 - DNA, 15 bp, Homo sapiens
ggaaggccctatctc

SEQ ID NO: 431105 - DNA, 15 bp, Homo sapiens
aggaaggccctatct

SEQ ID NO: 431106 - DNA, 15 bp, Homo sapiens
gaggaaggccctatc

SEQ ID NO: 431107 - DNA, 15 bp, Homo sapiens
agaggaaggccctat

SEQ ID NO: 431108 - DNA, 15 bp, Homo sapiens
gagaggaaggcccta

SEQ ID NO: 431109 - DNA, 15 bp, Homo sapiens
agagaggaaggccct

SEQ ID NO: 431110 - DNA, 15 bp, Homo sapiens
cagagaggaaggccc

SEQ ID NO: 431111 - DNA, 15 bp, Homo sapiens
acagagaggaaggcc

SEQ ID NO: 431112 - DNA, 15 bp, Homo sapiens
gacagagaggaaggc

SEQ ID NO: 431113 - DNA, 15 bp, Homo sapiens
tgacagagaggaagg

SEQ ID NO: 431114 - DNA, 15 bp, Homo sapiens
gtgacagagaggaag

SEQ ID NO: 431115 - DNA, 15 bp, Homo sapiens
ggtgacagagaggaa

SEQ ID NO: 431116 - DNA, 15 bp, Homo sapiens
gggtgacagagagga

SEQ ID NO: 431117 - DNA, 15 bp, Homo sapiens
ggggtgacagagagg

SEQ ID NO: 431118 - DNA, 15 bp, Homo sapiens
tggggtgacagagag

SEQ ID NO: 431119 - DNA, 15 bp, Homo sapiens
ctggggtgacagaga

SEQ ID NO: 431120 - DNA, 15 bp, Homo sapiens
tctggggtgacagag

SEQ ID NO: 431121 - DNA, 15 bp, Homo sapiens
atctggggtgacaga

SEQ ID NO: 431122 - DNA, 15 bp, Homo sapiens
catctggggtgacag

SEQ ID NO: 431123 - DNA, 15 bp, Homo sapiens
ccatctggggtgaca

SEQ ID NO: 431124 - DNA, 15 bp, Homo sapiens
tccatctggggtgac

SEQ ID NO: 431125 - DNA, 15 bp, Homo sapiens
ctccatctggggtga

SEQ ID NO: 431126 - DNA, 15 bp, Homo sapiens
actccatctggggtg

SEQ ID NO: 431127 - DNA, 15 bp, Homo sapiens
tactccatctggggt

SEQ ID NO: 431128 - DNA, 15 bp, Homo sapiens
atactccatctgggg

SEQ ID NO: 431129 - DNA, 15 bp, Homo sapiens
tatactccatctggg

SEQ ID NO: 431130 - DNA, 15 bp, Homo sapiens
ctatactccatctgg

SEQ ID NO: 431131 - DNA, 15 bp, Homo sapiens
actatactccatctg

SEQ ID NO: 431132 - DNA, 15 bp, Homo sapiens
cactatactccatct

SEQ ID NO: 431133 - DNA, 15 bp, Homo sapiens
ccactatactccatc

SEQ ID NO: 431134 - DNA, 15 bp, Homo sapiens
accactatactccat

SEQ ID NO: 431135 - DNA, 15 bp, Homo sapiens
taccactatactcca

SEQ ID NO: 431136 - DNA, 15 bp, Homo sapiens
ataccactatactcc

SEQ ID NO: 431137 - DNA, 15 bp, Homo sapiens
cataccactatactc

SEQ ID NO: 431138 - DNA, 15 bp, Homo sapiens
tcataccactatact

SEQ ID NO: 431139 - DNA, 15 bp, Homo sapiens
atcataccactatac

SEQ ID NO: 431140 - DNA, 15 bp, Homo sapiens
gatcataccactata

SEQ ID NO: 431141 - DNA, 15 bp, Homo sapiens
tgatcataccactat

SEQ ID NO: 431142 - DNA, 15 bp, Homo sapiens
atgatcataccacta

SEQ ID NO: 431143 - DNA, 15 bp, Homo sapiens
tatgatcataccact

SEQ ID NO: 431144 - DNA, 15 bp, Homo sapiens
ctatgatcataccac

SEQ ID NO: 431145 - DNA, 15 bp, Homo sapiens
actatgatcatacca

SEQ ID NO: 431146 - DNA, 15 bp, Homo sapiens
aactatgatcatacc

SEQ ID NO: 431147 - DNA, 15 bp, Homo sapiens
gaactatgatcatac

SEQ ID NO: 431148 - DNA, 15 bp, Homo sapiens
tgaactatgatcata

SEQ ID NO: 431149 - DNA, 15 bp, Homo sapiens
gtgaactatgatcat

SEQ ID NO: 431150 - DNA, 15 bp, Homo sapiens
agtgaactatgatca

SEQ ID NO: 431151 - DNA, 15 bp, Homo sapiens
tagtgaactatgatc

SEQ ID NO: 431152 - DNA, 15 bp, Homo sapiens
atagtgaactatgat

SEQ ID NO: 431153 - DNA, 15 bp, Homo sapiens
tatagtgaactatga

SEQ ID NO: 431154 - DNA, 15 bp, Homo sapiens
ttatagtgaactatg

SEQ ID NO: 431155 - DNA, 15 bp, Homo sapiens
gttatagtgaactat

SEQ ID NO: 431156 - DNA, 15 bp, Homo sapiens
ggttatagtgaacta

SEQ ID NO: 431157 - DNA, 15 bp, Homo sapiens
aggttatagtgaact

SEQ ID NO: 431158 - DNA, 15 bp, Homo sapiens
aaggttatagtgaac

SEQ ID NO: 431159 - DNA, 15 bp, Homo sapiens
caaggttatagtgaa

SEQ ID NO: 431160 - DNA, 15 bp, Homo sapiens
tcaaggttatagtga

SEQ ID NO: 431161 - DNA, 15 bp, Homo sapiens
ttcaaggttatagtg

SEQ ID NO: 431162 - DNA, 15 bp, Homo sapiens
gttcaaggttatagt

SEQ ID NO: 431163 - DNA, 15 bp, Homo sapiens
agttcaaggttatag

SEQ ID NO: 431164 - DNA, 15 bp, Homo sapiens
gagttcaaggttata

SEQ ID NO: 431165 - DNA, 15 bp, Homo sapiens
ggagttcaaggttat

SEQ ID NO: 431166 - DNA, 15 bp, Homo sapiens
aggagttcaaggtta

SEQ ID NO: 431167 - DNA, 15 bp, Homo sapiens
caggagttcaaggtt

SEQ ID NO: 431168 - DNA, 15 bp, Homo sapiens
ccaggagttcaaggt

SEQ ID NO: 431169 - DNA, 15 bp, Homo sapiens
cccaggagttcaagg

SEQ ID NO: 431170 - DNA, 15 bp, Homo sapiens
acccaggagttcaag

SEQ ID NO: 431171 - DNA, 15 bp, Homo sapiens
aacccaggagttcaa

SEQ ID NO: 431172 - DNA, 15 bp, Homo sapiens
gaacccaggagttca

SEQ ID NO: 431173 - DNA, 15 bp, Homo sapiens
agaacccaggagttc

SEQ ID NO: 431174 - DNA, 15 bp, Homo sapiens
tagaacccaggagtt

SEQ ID NO: 431175 - DNA, 15 bp, Homo sapiens
ctagaacccaggagt

SEQ ID NO: 431176 - DNA, 15 bp, Homo sapiens
gctagaacccaggag

SEQ ID NO: 431177 - DNA, 15 bp, Homo sapiens
ggctagaacccagga

SEQ ID NO: 431178 - DNA, 15 bp, Homo sapiens
tggctagaacccagg

SEQ ID NO: 431179 - DNA, 15 bp, Homo sapiens
atggctagaacccag

SEQ ID NO: 431180 - DNA, 15 bp, Homo sapiens
gatggctagaaccca

SEQ ID NO: 431181 - DNA, 15 bp, Homo sapiens
ggatggctagaaccc

SEQ ID NO: 431182 - DNA, 15 bp, Homo sapiens
aggatggctagaacc

SEQ ID NO: 431183 - DNA, 15 bp, Homo sapiens
gaggatggctagaac

SEQ ID NO: 431184 - DNA, 15 bp, Homo sapiens
ggaggatggctagaa

SEQ ID NO: 431185 - DNA, 15 bp, Homo sapiens
aggaggatggctaga

SEQ ID NO: 431186 - DNA, 15 bp, Homo sapiens
caggaggatggctag

SEQ ID NO: 431187 - DNA, 15 bp, Homo sapiens
gcaggaggatggcta

SEQ ID NO: 431188 - DNA, 15 bp, Homo sapiens
agcaggaggatggct

SEQ ID NO: 431189 - DNA, 15 bp, Homo sapiens
aagcaggaggatggc

SEQ ID NO: 431190 - DNA, 15 bp, Homo sapiens
gaagcaggaggatgg

SEQ ID NO: 431191 - DNA, 15 bp, Homo sapiens
tgaagcaggaggatg

SEQ ID NO: 431192 - DNA, 15 bp, Homo sapiens
ctgaagcaggaggat

SEQ ID NO: 431193 - DNA, 15 bp, Homo sapiens
gctgaagcaggagga

SEQ ID NO: 431194 - DNA, 15 bp, Homo sapiens
ggctgaagcaggagg

SEQ ID NO: 431195 - DNA, 15 bp, Homo sapiens
gggaggctgaagcag

SEQ ID NO: 431196 - DNA, 15 bp, Homo sapiens
tgggaggctgaagca

SEQ ID NO: 431197 - DNA, 15 bp, Homo sapiens
ttgggaggctgaagc

SEQ ID NO: 431198 - DNA, 15 bp, Homo sapiens
cttgggaggctgaag

SEQ ID NO: 431199 - DNA, 15 bp, Homo sapiens
acttgggaggctgaa

SEQ ID NO: 431200 - DNA, 15 bp, Homo sapiens
cacttgggaggctga

SEQ ID NO: 431201 - DNA, 15 bp, Homo sapiens
tcacttgggaggctg

SEQ ID NO: 431202 - DNA, 15 bp, Homo sapiens
gtcacttgggaggct

SEQ ID NO: 431203 - DNA, 15 bp, Homo sapiens
agtcacttgggaggc

SEQ ID NO: 431204 - DNA, 15 bp, Homo sapiens
tagtcacttgggagg

SEQ ID NO: 431205 - DNA, 15 bp, Homo sapiens
ctagtcacttgggag

SEQ ID NO: 431206 - DNA, 15 bp, Homo sapiens
cctagtcacttggga

SEQ ID NO: 431207 - DNA, 15 bp, Homo sapiens
tcctagtcacttggg

SEQ ID NO: 431208 - DNA, 15 bp, Homo sapiens
gtcctagtcacttgg

SEQ ID NO: 431209 - DNA, 15 bp, Homo sapiens
agtcctagtcacttg

SEQ ID NO: 431210 - DNA, 15 bp, Homo sapiens
tagtcctagtcactt

SEQ ID NO: 431211 - DNA, 15 bp, Homo sapiens
atagtcctagtcact

SEQ ID NO: 431212 - DNA, 15 bp, Homo sapiens
tatagtcctagtcac

SEQ ID NO: 431213 - DNA, 15 bp, Homo sapiens
ctatagtcctagtca

SEQ ID NO: 431214 - DNA, 15 bp, Homo sapiens
cctatagtcctagtc

SEQ ID NO: 431215 - DNA, 15 bp, Homo sapiens
tcctatagtcctagt

SEQ ID NO: 431216 - DNA, 15 bp, Homo sapiens
ctcctatagtcctag

SEQ ID NO: 431217 - DNA, 15 bp, Homo sapiens
actcctatagtccta

SEQ ID NO: 431218 - DNA, 15 bp, Homo sapiens
cactcctatagtcct

SEQ ID NO: 431219 - DNA, 15 bp, Homo sapiens
acactcctatagtcc

SEQ ID NO: 431220 - DNA, 15 bp, Homo sapiens
cacactcctatagtc

SEQ ID NO: 431221 - DNA, 15 bp, Homo sapiens
gcacactcctatagt

SEQ ID NO: 431222 - DNA, 15 bp, Homo sapiens
ggcacactcctatag

SEQ ID NO: 431223 - DNA, 15 bp, Homo sapiens
tggcacactcctata

SEQ ID NO: 431224 - DNA, 15 bp, Homo sapiens
atggcacactcctat

SEQ ID NO: 431225 - DNA, 15 bp, Homo sapiens
gatggcacactccta

SEQ ID NO: 431226 - DNA, 15 bp, Homo sapiens
tgatggcacactcct

SEQ ID NO: 431227 - DNA, 15 bp, Homo sapiens
atgatggcacactcc

SEQ ID NO: 431228 - DNA, 15 bp, Homo sapiens
catgatggcacactc

SEQ ID NO: 431229 - DNA, 15 bp, Homo sapiens
gcatgatggcacact

SEQ ID NO: 431230 - DNA, 15 bp, Homo sapiens
agcatgatggcacac

SEQ ID NO: 431231 - DNA, 15 bp, Homo sapiens
aagcatgatggcaca

SEQ ID NO: 431232 - DNA, 15 bp, Homo sapiens
caagcatgatggcac

SEQ ID NO: 431233 - DNA, 15 bp, Homo sapiens
ccaagcatgatggca

SEQ ID NO: 431234 - DNA, 15 bp, Homo sapiens
gccaagcatgatggc

SEQ ID NO: 431235 - DNA, 15 bp, Homo sapiens
agccaagcatgatgg

SEQ ID NO: 431236 - DNA, 15 bp, Homo sapiens
tagccaagcatgatg

SEQ ID NO: 431237 - DNA, 15 bp, Homo sapiens
ttagccaagcatgat

SEQ ID NO: 431238 - DNA, 15 bp, Homo sapiens
attagccaagcatga

SEQ ID NO: 431239 - DNA, 15 bp, Homo sapiens
aattagccaagcatg

SEQ ID NO: 431240 - DNA, 15 bp, Homo sapiens
aaattagccaagcat

SEQ ID NO: 431241 - DNA, 15 bp, Homo sapiens
aaaattagccaagca

SEQ ID NO: 431242 - DNA, 15 bp, Homo sapiens
aaaaattagccaagc

SEQ ID NO: 431243 - DNA, 15 bp, Homo sapiens
taaaaattagccaag

SEQ ID NO: 431244 - DNA, 15 bp, Homo sapiens
ttaaaaattagccaa

SEQ ID NO: 431245 - DNA, 15 bp, Homo sapiens
atttaaaaattagcc

SEQ ID NO: 431246 - DNA, 15 bp, Homo sapiens
aatttaaaaattagc

SEQ ID NO: 431247 - DNA, 15 bp, Homo sapiens
aaatttaaaaattag

SEQ ID NO: 431248 - DNA, 15 bp, Homo sapiens
aaaatttaaaaatta

SEQ ID NO: 431249 - DNA, 15 bp, Homo sapiens
aaaaatttaaaaatt

SEQ ID NO: 431250 - DNA, 15 bp, Homo sapiens
aaaaaatttaaaaat

SEQ ID NO: 431251 - DNA, 15 bp, Homo sapiens
aaaaaaatttaaaaa

SEQ ID NO: 431252 - DNA, 15 bp, Homo sapiens
aaaaaaaatttaaaa

SEQ ID NO: 431253 - DNA, 15 bp, Homo sapiens
caaaaaaaatttaaa

SEQ ID NO: 431254 - DNA, 15 bp, Homo sapiens
acaaaaaaaatttaa

SEQ ID NO: 431255 - DNA, 15 bp, Homo sapiens
tacaaaaaaaattta

SEQ ID NO: 431256 - DNA, 15 bp, Homo sapiens
ctacaaaaaaaattt

SEQ ID NO: 431257 - DNA, 15 bp, Homo sapiens
tctacaaaaaaaatt

SEQ ID NO: 431258 - DNA, 15 bp, Homo sapiens
ctctacaaaaaaaat

SEQ ID NO: 431259 - DNA, 15 bp, Homo sapiens
accagtctctacaaa

SEQ ID NO: 431260 - DNA, 15 bp, Homo sapiens
aaccagtctctacaa

SEQ ID NO: 431261 - DNA, 15 bp, Homo sapiens
taaccagtctctaca

SEQ ID NO: 431262 - DNA, 15 bp, Homo sapiens
ataaccagtctctac

SEQ ID NO: 431263 - DNA, 15 bp, Homo sapiens
gataaccagtctcta

SEQ ID NO: 431264 - DNA, 15 bp, Homo sapiens
cgataaccagtctct

SEQ ID NO: 431265 - DNA, 15 bp, Homo sapiens
acgataaccagtctc

SEQ ID NO: 431266 - DNA, 15 bp, Homo sapiens
aacgataaccagtct

SEQ ID NO: 431267 - DNA, 15 bp, Homo sapiens
taacgataaccagtc

SEQ ID NO: 431268 - DNA, 15 bp, Homo sapiens
ataacgataaccagt

SEQ ID NO: 431269 - DNA, 15 bp, Homo sapiens
cataacgataaccag

SEQ ID NO: 431270 - DNA, 15 bp, Homo sapiens
acataacgataacca

SEQ ID NO: 431271 - DNA, 15 bp, Homo sapiens
aacataacgataacc

SEQ ID NO: 431272 - DNA, 15 bp, Homo sapiens
taacataacgataac

SEQ ID NO: 431273 - DNA, 15 bp, Homo sapiens
gtaacataacgataa

SEQ ID NO: 431274 - DNA, 15 bp, Homo sapiens
ggtaacataacgata

SEQ ID NO: 431275 - DNA, 15 bp, Homo sapiens
gggtaacataacgat

SEQ ID NO: 431276 - DNA, 15 bp, Homo sapiens
tgggtaacataacga

SEQ ID NO: 431277 - DNA, 15 bp, Homo sapiens
ctgggtaacataacg

SEQ ID NO: 431278 - DNA, 15 bp, Homo sapiens
cctgggtaacataac

SEQ ID NO: 431279 - DNA, 15 bp, Homo sapiens
gcctgggtaacataa

SEQ ID NO: 431280 - DNA, 15 bp, Homo sapiens
agcctgggtaacata

SEQ ID NO: 431281 - DNA, 15 bp, Homo sapiens
cagcctgggtaacat

SEQ ID NO: 431282 - DNA, 15 bp, Homo sapiens
accagcctgggtaac

SEQ ID NO: 431283 - DNA, 15 bp, Homo sapiens
gaccagcctgggtaa

SEQ ID NO: 431284 - DNA, 15 bp, Homo sapiens
agaccagcctgggta

SEQ ID NO: 431285 - DNA, 15 bp, Homo sapiens
gagaccagcctgggt

SEQ ID NO: 431286 - DNA, 15 bp, Homo sapiens
acaggagtttgagac

SEQ ID NO: 431287 - DNA, 15 bp, Homo sapiens
cacaggagtttgaga

SEQ ID NO: 431288 - DNA, 15 bp, Homo sapiens
tcacaggagtttgag

SEQ ID NO: 431289 - DNA, 15 bp, Homo sapiens
ttcacaggagtttga

SEQ ID NO: 431290 - DNA, 15 bp, Homo sapiens
gttcacaggagtttg

SEQ ID NO: 431291 - DNA, 15 bp, Homo sapiens
agttcacaggagttt

SEQ ID NO: 431292 - DNA, 15 bp, Homo sapiens
aagttcacaggagtt

SEQ ID NO: 431293 - DNA, 15 bp, Homo sapiens
gaagttcacaggagt

SEQ ID NO: 431294 - DNA, 15 bp, Homo sapiens
ggaagttcacaggag

SEQ ID NO: 431295 - DNA, 15 bp, Homo sapiens
gggaagttcacagga

SEQ ID NO: 431296 - DNA, 15 bp, Homo sapiens
tgggaagttcacagg

SEQ ID NO: 431297 - DNA, 15 bp, Homo sapiens
gtgggaagttcacag

SEQ ID NO: 431298 - DNA, 15 bp, Homo sapiens
ggtgggaagttcaca

SEQ ID NO: 431299 - DNA, 15 bp, Homo sapiens
aggtgggaagttcac

SEQ ID NO: 431300 - DNA, 15 bp, Homo sapiens
aaggtgggaagttca

SEQ ID NO: 431301 - DNA, 15 bp, Homo sapiens
caaggtgggaagttc

SEQ ID NO: 431302 - DNA, 15 bp, Homo sapiens
ccaaggtgggaagtt

SEQ ID NO: 431303 - DNA, 15 bp, Homo sapiens
gccaaggtgggaagt

SEQ ID NO: 431304 - DNA, 15 bp, Homo sapiens
ggccaaggtgggaag

SEQ ID NO: 431305 - DNA, 15 bp, Homo sapiens
gggccaaggtgggaa

SEQ ID NO: 431306 - DNA, 15 bp, Homo sapiens
ggggccaaggtggga

SEQ ID NO: 431307 - DNA, 15 bp, Homo sapiens
cggggccaaggtggg

SEQ ID NO: 431308 - DNA, 15 bp, Homo sapiens
gcggggccaaggtgg

SEQ ID NO: 431309 - DNA, 15 bp, Homo sapiens
tgcggggccaaggtg

SEQ ID NO: 431310 - DNA, 15 bp, Homo sapiens
ttgcggggccaaggt

SEQ ID NO: 431311 - DNA, 15 bp, Homo sapiens
cttgcggggccaagg

SEQ ID NO: 431312 - DNA, 15 bp, Homo sapiens
ccttgcggggccaag

SEQ ID NO: 431313 - DNA, 15 bp, Homo sapiens
gccttgcggggccaa

SEQ ID NO: 431314 - DNA, 15 bp, Homo sapiens
tgccttgcggggcca

SEQ ID NO: 431315 - DNA, 15 bp, Homo sapiens
gtgccttgcggggcc

SEQ ID NO: 431316 - DNA, 15 bp, Homo sapiens
agtgccttgcggggc

SEQ ID NO: 431317 - DNA, 15 bp, Homo sapiens
cagtgccttgcgggg

SEQ ID NO: 431318 - DNA, 15 bp, Homo sapiens
ccagtgccttgcggg

SEQ ID NO: 431319 - DNA, 15 bp, Homo sapiens
cccagtgccttgcgg

SEQ ID NO: 431320 - DNA, 15 bp, Homo sapiens
tcccagtgccttgcg

SEQ ID NO: 431321 - DNA, 15 bp, Homo sapiens
ctcccagtgccttgc

SEQ ID NO: 431322 - DNA, 15 bp, Homo sapiens
actcccagtgccttg

SEQ ID NO: 431323 - DNA, 15 bp, Homo sapiens
tactcccagtgcctt

SEQ ID NO: 431324 - DNA, 15 bp, Homo sapiens
gtactcccagtgcct

SEQ ID NO: 431325 - DNA, 15 bp, Homo sapiens
tgtactcccagtgcc

SEQ ID NO: 431326 - DNA, 15 bp, Homo sapiens
ctgtactcccagtgc

SEQ ID NO: 431327 - DNA, 15 bp, Homo sapiens
cctgtactcccagtg

SEQ ID NO: 431328 - DNA, 15 bp, Homo sapiens
gcctgtactcccagt

SEQ ID NO: 431329 - DNA, 15 bp, Homo sapiens
cgcctgtactcccag

SEQ ID NO: 431330 - DNA, 15 bp, Homo sapiens
acgcctgtactccca

SEQ ID NO: 431331 - DNA, 15 bp, Homo sapiens
cacgcctgtactccc

SEQ ID NO: 431332 - DNA, 15 bp, Homo sapiens
tcacgcctgtactcc

SEQ ID NO: 431333 - DNA, 15 bp, Homo sapiens
ctcacgcctgtactc

SEQ ID NO: 431334 - DNA, 15 bp, Homo sapiens
gctcacgcctgtact

SEQ ID NO: 431335 - DNA, 15 bp, Homo sapiens
ggctcacgcctgtac

SEQ ID NO: 431336 - DNA, 15 bp, Homo sapiens
tgtggtggctcacgc

SEQ ID NO: 431337 - DNA, 15 bp, Homo sapiens
gtgtggtggctcacg

SEQ ID NO: 431338 - DNA, 15 bp, Homo sapiens
ggtgtggtggctcac

SEQ ID NO: 431339 - DNA, 15 bp, Homo sapiens
aggtgtggtggctca

SEQ ID NO: 431340 - DNA, 15 bp, Homo sapiens
caggtgtggtggctc

SEQ ID NO: 431341 - DNA, 15 bp, Homo sapiens
ggccaggtgtggtgg

SEQ ID NO: 431342 - DNA, 15 bp, Homo sapiens
tggccaggtgtggtg

SEQ ID NO: 431343 - DNA, 15 bp, Homo sapiens
atggccaggtgtggt

SEQ ID NO: 431344 - DNA, 15 bp, Homo sapiens
aatggccaggtgtgg

SEQ ID NO: 431345 - DNA, 15 bp, Homo sapiens
caatggccaggtgtg

SEQ ID NO: 431346 - DNA, 15 bp, Homo sapiens
ccaatggccaggtgt

SEQ ID NO: 431347 - DNA, 15 bp, Homo sapiens
cccaatggccaggtg

SEQ ID NO: 431348 - DNA, 15 bp, Homo sapiens
acccaatggccaggt

SEQ ID NO: 431349 - DNA, 15 bp, Homo sapiens
gacccaatggccagg

SEQ ID NO: 431350 - DNA, 15 bp, Homo sapiens
agacccaatggccag

SEQ ID NO: 431351 - DNA, 15 bp, Homo sapiens
aagacccaatggcca

SEQ ID NO: 431352 - DNA, 15 bp, Homo sapiens
taagacccaatggcc

SEQ ID NO: 431353 - DNA, 15 bp, Homo sapiens
ataagacccaatggc

SEQ ID NO: 431354 - DNA, 15 bp, Homo sapiens
aataagacccaatgg

SEQ ID NO: 431355 - DNA, 15 bp, Homo sapiens
aaataagacccaatg

SEQ ID NO: 431356 - DNA, 15 bp, Homo sapiens
aaaataagacccaat

SEQ ID NO: 431357 - DNA, 15 bp, Homo sapiens
aaaaataagacccaa

SEQ ID NO: 431358 - DNA, 15 bp, Homo sapiens
caaaaataagaccca

SEQ ID NO: 431359 - DNA, 15 bp, Homo sapiens
tcaaaaataagaccc

SEQ ID NO: 431360 - DNA, 15 bp, Homo sapiens
gtcaaaaataagacc

SEQ ID NO: 431361 - DNA, 15 bp, Homo sapiens
tgtcaaaaataagac

SEQ ID NO: 431362 - DNA, 15 bp, Homo sapiens
gtgtcaaaaataaga

SEQ ID NO: 431363 - DNA, 15 bp, Homo sapiens
tgtgtcaaaaataag

SEQ ID NO: 431364 - DNA, 15 bp, Homo sapiens
atgtgtcaaaaataa

SEQ ID NO: 431365 - DNA, 15 bp, Homo sapiens
aatgtgtcaaaaata

SEQ ID NO: 431366 - DNA, 15 bp, Homo sapiens
aaatgtgtcaaaaat

SEQ ID NO: 431367 - DNA, 15 bp, Homo sapiens
gaaatgtgtcaaaaa

SEQ ID NO: 431368 - DNA, 15 bp, Homo sapiens
agaaatgtgtcaaaa

SEQ ID NO: 431369 - DNA, 15 bp, Homo sapiens
aagaaatgtgtcaaa

SEQ ID NO: 431370 - DNA, 15 bp, Homo sapiens
gaagaaatgtgtcaa

SEQ ID NO: 431371 - DNA, 15 bp, Homo sapiens
tgaagaaatgtgtca

SEQ ID NO: 431372 - DNA, 15 bp, Homo sapiens
atgaagaaatgtgtc

SEQ ID NO: 431373 - DNA, 15 bp, Homo sapiens
tatgaagaaatgtgt

SEQ ID NO: 431374 - DNA, 15 bp, Homo sapiens
ttatgaagaaatgtg

SEQ ID NO: 431375 - DNA, 15 bp, Homo sapiens
cttatgaagaaatgt

SEQ ID NO: 431376 - DNA, 15 bp, Homo sapiens
ccttatgaagaaatg

SEQ ID NO: 431377 - DNA, 15 bp, Homo sapiens
tccttatgaagaaat

SEQ ID NO: 431378 - DNA, 15 bp, Homo sapiens
ttccttatgaagaaa

SEQ ID NO: 431379 - DNA, 15 bp, Homo sapiens
attccttatgaagaa

SEQ ID NO: 431380 - DNA, 15 bp, Homo sapiens
gattccttatgaaga

SEQ ID NO: 431381 - DNA, 15 bp, Homo sapiens
agattccttatgaag

SEQ ID NO: 431382 - DNA, 15 bp, Homo sapiens
gagattccttatgaa

SEQ ID NO: 431383 - DNA, 15 bp, Homo sapiens
agagattccttatga

SEQ ID NO: 431384 - DNA, 15 bp, Homo sapiens
cagagattccttatg

SEQ ID NO: 431385 - DNA, 15 bp, Homo sapiens
tcagagattccttat

SEQ ID NO: 431386 - DNA, 15 bp, Homo sapiens
ttcagagattcctta

SEQ ID NO: 431387 - DNA, 15 bp, Homo sapiens
tttcagagattcctt

SEQ ID NO: 431388 - DNA, 15 bp, Homo sapiens
atttcagagattcct

SEQ ID NO: 431389 - DNA, 15 bp, Homo sapiens
catttcagagattcc

SEQ ID NO: 431390 - DNA, 15 bp, Homo sapiens
ccatttcagagattc

SEQ ID NO: 431391 - DNA, 15 bp, Homo sapiens
cccatttcagagatt

SEQ ID NO: 431392 - DNA, 15 bp, Homo sapiens
acccatttcagagat

SEQ ID NO: 431393 - DNA, 15 bp, Homo sapiens
cacccatttcagaga

SEQ ID NO: 431394 - DNA, 15 bp, Homo sapiens
tcacccatttcagag

SEQ ID NO: 431395 - DNA, 15 bp, Homo sapiens
ctcacccatttcaga

SEQ ID NO: 431396 - DNA, 15 bp, Homo sapiens
tctcacccatttcag

SEQ ID NO: 431397 - DNA, 15 bp, Homo sapiens
ctctcacccatttca

SEQ ID NO: 431398 - DNA, 15 bp, Homo sapiens
actctcacccatttc

SEQ ID NO: 431399 - DNA, 15 bp, Homo sapiens
aactctcacccattt

SEQ ID NO: 431400 - DNA, 15 bp, Homo sapiens
taactctcacccatt

SEQ ID NO: 431401 - DNA, 15 bp, Homo sapiens
ataactctcacccat

SEQ ID NO: 431402 - DNA, 15 bp, Homo sapiens
gataactctcaccca

SEQ ID NO: 431403 - DNA, 15 bp, Homo sapiens
tgataactctcaccc

SEQ ID NO: 431404 - DNA, 15 bp, Homo sapiens
atgataactctcacc

SEQ ID NO: 431405 - DNA, 15 bp, Homo sapiens
gatgataactctcac

SEQ ID NO: 431406 - DNA, 15 bp, Homo sapiens
agatgataactctca

SEQ ID NO: 431407 - DNA, 15 bp, Homo sapiens
gagatgataactctc

SEQ ID NO: 431408 - DNA, 15 bp, Homo sapiens
ggagatgataactct

SEQ ID NO: 431409 - DNA, 15 bp, Homo sapiens
aggagatgataactc

SEQ ID NO: 431410 - DNA, 15 bp, Homo sapiens
taggagatgataact

SEQ ID NO: 431411 - DNA, 15 bp, Homo sapiens
ataggagatgataac

SEQ ID NO: 431412 - DNA, 15 bp, Homo sapiens
tataggagatgataa

SEQ ID NO: 431413 - DNA, 15 bp, Homo sapiens
ctataggagatgata

SEQ ID NO: 431414 - DNA, 15 bp, Homo sapiens
actataggagatgat

SEQ ID NO: 431415 - DNA, 15 bp, Homo sapiens
aactataggagatga

SEQ ID NO: 431416 - DNA, 15 bp, Homo sapiens
caactataggagatg

SEQ ID NO: 431417 - DNA, 15 bp, Homo sapiens
tcaactataggagat

SEQ ID NO: 431418 - DNA, 15 bp, Homo sapiens
ctcaactataggaga

SEQ ID NO: 431419 - DNA, 15 bp, Homo sapiens
cctcaactataggag

SEQ ID NO: 431420 - DNA, 15 bp, Homo sapiens
ccctcaactatagga

SEQ ID NO: 431421 - DNA, 15 bp, Homo sapiens
tccctcaactatagg

SEQ ID NO: 431422 - DNA, 15 bp, Homo sapiens
ttccctcaactatag

SEQ ID NO: 431423 - DNA, 15 bp, Homo sapiens
gttccctcaactata

SEQ ID NO: 431424 - DNA, 15 bp, Homo sapiens
agttccctcaactat

SEQ ID NO: 431425 - DNA, 15 bp, Homo sapiens
gagttccctcaacta

SEQ ID NO: 431426 - DNA, 15 bp, Homo sapiens
tgagttccctcaact

SEQ ID NO: 431427 - DNA, 15 bp, Homo sapiens
ctgagttccctcaac

SEQ ID NO: 431428 - DNA, 15 bp, Homo sapiens
cctgagttccctcaa

SEQ ID NO: 431429 - DNA, 15 bp, Homo sapiens
gcctgagttccctca

SEQ ID NO: 431430 - DNA, 15 bp, Homo sapiens
tgcctgagttccctc

SEQ ID NO: 431431 - DNA, 15 bp, Homo sapiens
atgcctgagttccct

SEQ ID NO: 431432 - DNA, 15 bp, Homo sapiens
aatgcctgagttccc

SEQ ID NO: 431433 - DNA, 15 bp, Homo sapiens
taatgcctgagttcc

SEQ ID NO: 431434 - DNA, 15 bp, Homo sapiens
ataatgcctgagttc

SEQ ID NO: 431435 - DNA, 15 bp, Homo sapiens
cataatgcctgagtt

SEQ ID NO: 431436 - DNA, 15 bp, Homo sapiens
tcataatgcctgagt

SEQ ID NO: 431437 - DNA, 15 bp, Homo sapiens
ctcataatgcctgag

SEQ ID NO: 431438 - DNA, 15 bp, Homo sapiens
tctcataatgcctga

SEQ ID NO: 431439 - DNA, 15 bp, Homo sapiens
gtctcataatgcctg

SEQ ID NO: 431440 - DNA, 15 bp, Homo sapiens
agtctcataatgcct

SEQ ID NO: 431441 - DNA, 15 bp, Homo sapiens
cagtctcataatgcc

SEQ ID NO: 431442 - DNA, 15 bp, Homo sapiens
acagtctcataatgc

SEQ ID NO: 431443 - DNA, 15 bp, Homo sapiens
aacagtctcataatg

SEQ ID NO: 431444 - DNA, 15 bp, Homo sapiens
aaacagtctcataat

SEQ ID NO: 431445 - DNA, 15 bp, Homo sapiens
aaaacagtctcataa

SEQ ID NO: 431446 - DNA, 15 bp, Homo sapiens
aaaaacagtctcata

SEQ ID NO: 431447 - DNA, 15 bp, Homo sapiens
caaaaacagtctcat

SEQ ID NO: 431448 - DNA, 15 bp, Homo sapiens
acaaaaacagtctca

SEQ ID NO: 431449 - DNA, 15 bp, Homo sapiens
aacaaaaacagtctc

SEQ ID NO: 431450 - DNA, 15 bp, Homo sapiens
aaacaaaaacagtct

SEQ ID NO: 431451 - DNA, 15 bp, Homo sapiens
aaaacaaaaacagtc

SEQ ID NO: 431452 - DNA, 15 bp, Homo sapiens
aaaaacaaaaacagt

SEQ ID NO: 431453 - DNA, 15 bp, Homo sapiens
caaaaacaaaaacag

SEQ ID NO: 431454 - DNA, 15 bp, Homo sapiens
gaaacaaaaacaaaa

SEQ ID NO: 431455 - DNA, 15 bp, Homo sapiens
tgaaacaaaaacaaa

SEQ ID NO: 431456 - DNA, 15 bp, Homo sapiens
atgaaacaaaaacaa

SEQ ID NO: 431457 - DNA, 15 bp, Homo sapiens
aatgaaacaaaaaca

SEQ ID NO: 431458 - DNA, 15 bp, Homo sapiens
aaatgaaacaaaaac

SEQ ID NO: 431459 - DNA, 15 bp, Homo sapiens
aaaatgaaacaaaaa

SEQ ID NO: 431460 - DNA, 15 bp, Homo sapiens
gaaaatgaaacaaaa

SEQ ID NO: 431461 - DNA, 15 bp, Homo sapiens
agaaaatgaaacaaa

SEQ ID NO: 431462 - DNA, 15 bp, Homo sapiens
aagaaaatgaaacaa

SEQ ID NO: 431463 - DNA, 15 bp, Homo sapiens
gaagaaaatgaaaca

SEQ ID NO: 431464 - DNA, 15 bp, Homo sapiens
tgaagaaaatgaaac

SEQ ID NO: 431465 - DNA, 15 bp, Homo sapiens
ttgaagaaaatgaaa

SEQ ID NO: 431466 - DNA, 15 bp, Homo sapiens
tttgaagaaaatgaa

SEQ ID NO: 431467 - DNA, 15 bp, Homo sapiens
atttgaagaaaatga

SEQ ID NO: 431468 - DNA, 15 bp, Homo sapiens
aatttgaagaaaatg

SEQ ID NO: 431469 - DNA, 15 bp, Homo sapiens
aaatttgaagaaaat

SEQ ID NO: 431470 - DNA, 15 bp, Homo sapiens
aaaatttgaagaaaa

SEQ ID NO: 431471 - DNA, 15 bp, Homo sapiens
aaaaatttgaagaaa

SEQ ID NO: 431472 - DNA, 15 bp, Homo sapiens
aaaaaatttgaagaa

SEQ ID NO: 431473 - DNA, 15 bp, Homo sapiens
gaaaaaatttgaaga

SEQ ID NO: 431474 - DNA, 15 bp, Homo sapiens
agaaaaaatttgaag

SEQ ID NO: 431475 - DNA, 15 bp, Homo sapiens
gagaaaaaatttgaa

SEQ ID NO: 431476 - DNA, 15 bp, Homo sapiens
tgagaaaaaatttga

SEQ ID NO: 431477 - DNA, 15 bp, Homo sapiens
ttgagaaaaaatttg

SEQ ID NO: 431478 - DNA, 15 bp, Homo sapiens
tttgagaaaaaattt

SEQ ID NO: 431479 - DNA, 15 bp, Homo sapiens
atttgagaaaaaatt

SEQ ID NO: 431480 - DNA, 15 bp, Homo sapiens
tatttgagaaaaaat

SEQ ID NO: 431481 - DNA, 15 bp, Homo sapiens
atatttgagaaaaaa

SEQ ID NO: 431482 - DNA, 15 bp, Homo sapiens
tatatttgagaaaaa

SEQ ID NO: 431483 - DNA, 15 bp, Homo sapiens
atatatttgagaaaa

SEQ ID NO: 431484 - DNA, 15 bp, Homo sapiens
catatatttgagaaa

SEQ ID NO: 431485 - DNA, 15 bp, Homo sapiens
ccatatatttgagaa

SEQ ID NO: 431486 - DNA, 15 bp, Homo sapiens
tccatatatttgaga

SEQ ID NO: 431487 - DNA, 15 bp, Homo sapiens
ttccatatatttgag

SEQ ID NO: 431488 - DNA, 15 bp, Homo sapiens
tttccatatatttga

SEQ ID NO: 431489 - DNA, 15 bp, Homo sapiens
gtttccatatatttg

SEQ ID NO: 431490 - DNA, 15 bp, Homo sapiens
cgtttccatatattt

SEQ ID NO: 431491 - DNA, 15 bp, Homo sapiens
tcgtttccatatatt

SEQ ID NO: 431492 - DNA, 15 bp, Homo sapiens
ttcgtttccatatat

SEQ ID NO: 431493 - DNA, 15 bp, Homo sapiens
tttcgtttccatata

SEQ ID NO: 431494 - DNA, 15 bp, Homo sapiens
ttttcgtttccatat

SEQ ID NO: 431495 - DNA, 15 bp, Homo sapiens
cttttcgtttccata

SEQ ID NO: 431496 - DNA, 15 bp, Homo sapiens
gcttttcgtttccat

SEQ ID NO: 431497 - DNA, 15 bp, Homo sapiens
ggcttttcgtttcca

SEQ ID NO: 431498 - DNA, 15 bp, Homo sapiens
aggcttttcgtttcc

SEQ ID NO: 431499 - DNA, 15 bp, Homo sapiens
aaggcttttcgtttc

SEQ ID NO: 431500 - DNA, 15 bp, Homo sapiens
gaaggcttttcgttt

SEQ ID NO: 431501 - DNA, 15 bp, Homo sapiens
tgaaggcttttcgtt

SEQ ID NO: 431502 - DNA, 15 bp, Homo sapiens
ctgaaggcttttcgt

SEQ ID NO: 431503 - DNA, 15 bp, Homo sapiens
gctgaaggcttttcg

SEQ ID NO: 431504 - DNA, 15 bp, Homo sapiens
ggctgaaggcttttc

SEQ ID NO: 431505 - DNA, 15 bp, Homo sapiens
tggctgaaggctttt

SEQ ID NO: 431506 - DNA, 15 bp, Homo sapiens
ctggctgaaggcttt

SEQ ID NO: 431507 - DNA, 15 bp, Homo sapiens
actggctgaaggctt

SEQ ID NO: 431508 - DNA, 15 bp, Homo sapiens
cactggctgaaggct

SEQ ID NO: 431509 - DNA, 15 bp, Homo sapiens
tcactggctgaaggc

SEQ ID NO: 431510 - DNA, 15 bp, Homo sapiens
atcactggctgaagg

SEQ ID NO: 431511 - DNA, 15 bp, Homo sapiens
catcactggctgaag

SEQ ID NO: 431512 - DNA, 15 bp, Homo sapiens
ccatcactggctgaa

SEQ ID NO: 431513 - DNA, 15 bp, Homo sapiens
gccatcactggctga

SEQ ID NO: 431514 - DNA, 15 bp, Homo sapiens
tgccatcactggctg

SEQ ID NO: 431515 - DNA, 15 bp, Homo sapiens
atgccatcactggct

SEQ ID NO: 431516 - DNA, 15 bp, Homo sapiens
gatgccatcactggc

SEQ ID NO: 431517 - DNA, 15 bp, Homo sapiens
tgatgccatcactgg

SEQ ID NO: 431518 - DNA, 15 bp, Homo sapiens
atgatgccatcactg

SEQ ID NO: 431519 - DNA, 15 bp, Homo sapiens
aatgatgccatcact

SEQ ID NO: 431520 - DNA, 15 bp, Homo sapiens
aaatgatgccatcac

SEQ ID NO: 431521 - DNA, 15 bp, Homo sapiens
aaaatgatgccatca

SEQ ID NO: 431522 - DNA, 15 bp, Homo sapiens
caaaatgatgccatc

SEQ ID NO: 431523 - DNA, 15 bp, Homo sapiens
gcaaaatgatgccat

SEQ ID NO: 431524 - DNA, 15 bp, Homo sapiens
ggcaaaatgatgcca

SEQ ID NO: 431525 - DNA, 15 bp, Homo sapiens
aggcaaaatgatgcc

SEQ ID NO: 431526 - DNA, 15 bp, Homo sapiens
caggcaaaatgatgc

SEQ ID NO: 431527 - DNA, 15 bp, Homo sapiens
acaggcaaaatgatg

SEQ ID NO: 431528 - DNA, 15 bp, Homo sapiens
cacaggcaaaatgat

SEQ ID NO: 431529 - DNA, 15 bp, Homo sapiens
gcacaggcaaaatga

SEQ ID NO: 431530 - DNA, 15 bp, Homo sapiens
tgcacaggcaaaatg

SEQ ID NO: 431531 - DNA, 15 bp, Homo sapiens
ctgcacaggcaaaat

SEQ ID NO: 431532 - DNA, 15 bp, Homo sapiens
tctgcacaggcaaaa

SEQ ID NO: 431533 - DNA, 15 bp, Homo sapiens
gtctgcacaggcaaa

SEQ ID NO: 431534 - DNA, 15 bp, Homo sapiens
tgtctgcacaggcaa

SEQ ID NO: 431535 - DNA, 15 bp, Homo sapiens
atgtctgcacaggca

SEQ ID NO: 431536 - DNA, 15 bp, Homo sapiens
tatgtctgcacaggc

SEQ ID NO: 431537 - DNA, 15 bp, Homo sapiens
ttatgtctgcacagg

SEQ ID NO: 431538 - DNA, 15 bp, Homo sapiens
cttatgtctgcacag

SEQ ID NO: 431539 - DNA, 15 bp, Homo sapiens
acttatgtctgcaca

SEQ ID NO: 431540 - DNA, 15 bp, Homo sapiens
tacttatgtctgcac

SEQ ID NO: 431541 - DNA, 15 bp, Homo sapiens
gtacttatgtctgca

SEQ ID NO: 431542 - DNA, 15 bp, Homo sapiens
ggtacttatgtctgc

SEQ ID NO: 431543 - DNA, 15 bp, Homo sapiens
gggtacttatgtctg

SEQ ID NO: 431544 - DNA, 15 bp, Homo sapiens
agggtacttatgtct

SEQ ID NO: 431545 - DNA, 15 bp, Homo sapiens
cagggtacttatgtc

SEQ ID NO: 431546 - DNA, 15 bp, Homo sapiens
acagggtacttatgt

SEQ ID NO: 431547 - DNA, 15 bp, Homo sapiens
cacagggtacttatg

SEQ ID NO: 431548 - DNA, 15 bp, Homo sapiens
acacagggtacttat

SEQ ID NO: 431549 - DNA, 15 bp, Homo sapiens
tacacagggtactta

SEQ ID NO: 431550 - DNA, 15 bp, Homo sapiens
ttacacagggtactt

SEQ ID NO: 431551 - DNA, 15 bp, Homo sapiens
gttacacagggtact

SEQ ID NO: 431552 - DNA, 15 bp, Homo sapiens
tgttacacagggtac

SEQ ID NO: 431553 - DNA, 15 bp, Homo sapiens
ttgttacacagggta

SEQ ID NO: 431554 - DNA, 15 bp, Homo sapiens
cttgttacacagggt

SEQ ID NO: 431555 - DNA, 15 bp, Homo sapiens
tcttgttacacaggg

SEQ ID NO: 431556 - DNA, 15 bp, Homo sapiens
atcttgttacacagg

SEQ ID NO: 431557 - DNA, 15 bp, Homo sapiens
tatcttgttacacag

SEQ ID NO: 431558 - DNA, 15 bp, Homo sapiens
atatcttgttacaca

SEQ ID NO: 431559 - DNA, 15 bp, Homo sapiens
tatatcttgttacac

SEQ ID NO: 431560 - DNA, 15 bp, Homo sapiens
atatatcttgttaca

SEQ ID NO: 431561 - DNA, 15 bp, Homo sapiens
catatatcttgttac

SEQ ID NO: 431562 - DNA, 15 bp, Homo sapiens
gcatatatcttgtta

SEQ ID NO: 431563 - DNA, 15 bp, Homo sapiens
agcatatatcttgtt

SEQ ID NO: 431564 - DNA, 15 bp, Homo sapiens
tagcatatatcttgt

SEQ ID NO: 431565 - DNA, 15 bp, Homo sapiens
gtagcatatatcttg

SEQ ID NO: 431566 - DNA, 15 bp, Homo sapiens
ggtagcatatatctt

SEQ ID NO: 431567 - DNA, 15 bp, Homo sapiens
aggtagcatatatct

SEQ ID NO: 431568 - DNA, 15 bp, Homo sapiens
taggtagcatatatc

SEQ ID NO: 431569 - DNA, 15 bp, Homo sapiens
ctaggtagcatatat

SEQ ID NO: 431570 - DNA, 15 bp, Homo sapiens
actaggtagcatata

SEQ ID NO: 431571 - DNA, 15 bp, Homo sapiens
tactaggtagcatat

SEQ ID NO: 431572 - DNA, 15 bp, Homo sapiens
atactaggtagcata

SEQ ID NO: 431573 - DNA, 15 bp, Homo sapiens
catactaggtagcat

SEQ ID NO: 431574 - DNA, 15 bp, Homo sapiens
ccatactaggtagca

SEQ ID NO: 431575 - DNA, 15 bp, Homo sapiens
tccatactaggtagc

SEQ ID NO: 431576 - DNA, 15 bp, Homo sapiens
ttccatactaggtag

SEQ ID NO: 431577 - DNA, 15 bp, Homo sapiens
gttccatactaggta

SEQ ID NO: 431578 - DNA, 15 bp, Homo sapiens
agttccatactaggt

SEQ ID NO: 431579 - DNA, 15 bp, Homo sapiens
cagttccatactagg

SEQ ID NO: 431580 - DNA, 15 bp, Homo sapiens
tcagttccatactag

SEQ ID NO: 431581 - DNA, 15 bp, Homo sapiens
atcagttccatacta

SEQ ID NO: 431582 - DNA, 15 bp, Homo sapiens
aatcagttccatact

SEQ ID NO: 431583 - DNA, 15 bp, Homo sapiens
aaatcagttccatac

SEQ ID NO: 431584 - DNA, 15 bp, Homo sapiens
caaatcagttccata

SEQ ID NO: 431585 - DNA, 15 bp, Homo sapiens
tcaaatcagttccat

SEQ ID NO: 431586 - DNA, 15 bp, Homo sapiens
ctcaaatcagttcca

SEQ ID NO: 431587 - DNA, 15 bp, Homo sapiens
tctcaaatcagttcc

SEQ ID NO: 431588 - DNA, 15 bp, Homo sapiens
ttctcaaatcagttc

SEQ ID NO: 431589 - DNA, 15 bp, Homo sapiens
tttctcaaatcagtt

SEQ ID NO: 431590 - DNA, 15 bp, Homo sapiens
gtttctcaaatcagt

SEQ ID NO: 431591 - DNA, 15 bp, Homo sapiens
tgtttctcaaatcag

SEQ ID NO: 431592 - DNA, 15 bp, Homo sapiens
ctgtttctcaaatca

SEQ ID NO: 431593 - DNA, 15 bp, Homo sapiens
tctgtttctcaaatc

SEQ ID NO: 431594 - DNA, 15 bp, Homo sapiens
ctctgtttctcaaat

SEQ ID NO: 431595 - DNA, 15 bp, Homo sapiens
tctctgtttctcaaa

SEQ ID NO: 431596 - DNA, 15 bp, Homo sapiens
ttctctgtttctcaa

SEQ ID NO: 431597 - DNA, 15 bp, Homo sapiens
tttctctgtttctca

SEQ ID NO: 431598 - DNA, 15 bp, Homo sapiens
ttttctctgtttctc

SEQ ID NO: 431599 - DNA, 15 bp, Homo sapiens
cttttctctgtttct

SEQ ID NO: 431600 - DNA, 15 bp, Homo sapiens
acttttctctgtttc

SEQ ID NO: 431601 - DNA, 15 bp, Homo sapiens
tacttttctctgttt

SEQ ID NO: 431602 - DNA, 15 bp, Homo sapiens
atacttttctctgtt

SEQ ID NO: 431603 - DNA, 15 bp, Homo sapiens
aatacttttctctgt

SEQ ID NO: 431604 - DNA, 15 bp, Homo sapiens
aaatacttttctctg

SEQ ID NO: 431605 - DNA, 15 bp, Homo sapiens
caaatacttttctct

SEQ ID NO: 431606 - DNA, 15 bp, Homo sapiens
acaaatacttttctc

SEQ ID NO: 431607 - DNA, 15 bp, Homo sapiens
cacaaatacttttct

SEQ ID NO: 431608 - DNA, 15 bp, Homo sapiens
ccacaaatacttttc

SEQ ID NO: 431609 - DNA, 15 bp, Homo sapiens
tccacaaatactttt

SEQ ID NO: 431610 - DNA, 15 bp, Homo sapiens
ctccacaaatacttt

SEQ ID NO: 431611 - DNA, 15 bp, Homo sapiens
gctccacaaatactt

SEQ ID NO: 431612 - DNA, 15 bp, Homo sapiens
tgctccacaaatact

SEQ ID NO: 431613 - DNA, 15 bp, Homo sapiens
gtgctccacaaatac

SEQ ID NO: 431614 - DNA, 15 bp, Homo sapiens
agtgctccacaaata

SEQ ID NO: 431615 - DNA, 15 bp, Homo sapiens
aagtgctccacaaat

SEQ ID NO: 431616 - DNA, 15 bp, Homo sapiens
aaagtgctccacaaa

SEQ ID NO: 431617 - DNA, 15 bp, Homo sapiens
aaaagtgctccacaa

SEQ ID NO: 431618 - DNA, 15 bp, Homo sapiens
taaaagtgctccaca

SEQ ID NO: 431619 - DNA, 15 bp, Homo sapiens
ttaaaagtgctccac

SEQ ID NO: 431620 - DNA, 15 bp, Homo sapiens
cttaaaagtgctcca

SEQ ID NO: 431621 - DNA, 15 bp, Homo sapiens
acttaaaagtgctcc

SEQ ID NO: 431622 - DNA, 15 bp, Homo sapiens
tacttaaaagtgctc

SEQ ID NO: 431623 - DNA, 15 bp, Homo sapiens
ttacttaaaagtgct

SEQ ID NO: 431624 - DNA, 15 bp, Homo sapiens
tttacttaaaagtgc

SEQ ID NO: 431625 - DNA, 15 bp, Homo sapiens
gtttacttaaaagtg

SEQ ID NO: 431626 - DNA, 15 bp, Homo sapiens
tgtttacttaaaagt

SEQ ID NO: 431627 - DNA, 15 bp, Homo sapiens
ttgtttacttaaaag

SEQ ID NO: 431628 - DNA, 15 bp, Homo sapiens
tttgtttacttaaaa

SEQ ID NO: 431629 - DNA, 15 bp, Homo sapiens
ttttgtttacttaaa

SEQ ID NO: 431630 - DNA, 15 bp, Homo sapiens
attttgtttacttaa

SEQ ID NO: 431631 - DNA, 15 bp, Homo sapiens
tattttgtttactta

SEQ ID NO: 431632 - DNA, 15 bp, Homo sapiens
ttattttgtttactt

SEQ ID NO: 431633 - DNA, 15 bp, Homo sapiens
tttattttgtttact

SEQ ID NO: 431634 - DNA, 15 bp, Homo sapiens
ctttattttgtttac

SEQ ID NO: 431635 - DNA, 15 bp, Homo sapiens
tctttattttgttta

SEQ ID NO: 431636 - DNA, 15 bp, Homo sapiens
gtctttattttgttt

SEQ ID NO: 431637 - DNA, 15 bp, Homo sapiens
agtctttattttgtt

SEQ ID NO: 431638 - DNA, 15 bp, Homo sapiens
cagtctttattttgt

SEQ ID NO: 431639 - DNA, 15 bp, Homo sapiens
acagtctttattttg

SEQ ID NO: 431640 - DNA, 15 bp, Homo sapiens
aacagtctttatttt

SEQ ID NO: 431641 - DNA, 15 bp, Homo sapiens
aaacagtctttattt

SEQ ID NO: 431642 - DNA, 15 bp, Homo sapiens
caaacagtctttatt

SEQ ID NO: 431643 - DNA, 15 bp, Homo sapiens
ccaaacagtctttat

SEQ ID NO: 431644 - DNA, 15 bp, Homo sapiens
gccaaacagtcttta

SEQ ID NO: 431645 - DNA, 15 bp, Homo sapiens
agccaaacagtcttt

SEQ ID NO: 431646 - DNA, 15 bp, Homo sapiens
aagccaaacagtctt

SEQ ID NO: 431647 - DNA, 15 bp, Homo sapiens
aaagccaaacagtct

SEQ ID NO: 431648 - DNA, 15 bp, Homo sapiens
gaaagccaaacagtc

SEQ ID NO: 431649 - DNA, 15 bp, Homo sapiens
tgaaagccaaacagt

SEQ ID NO: 431650 - DNA, 15 bp, Homo sapiens
atgaaagccaaacag

SEQ ID NO: 431651 - DNA, 15 bp, Homo sapiens
catgaaagccaaaca

SEQ ID NO: 431652 - DNA, 15 bp, Homo sapiens
acatgaaagccaaac

SEQ ID NO: 431653 - DNA, 15 bp, Homo sapiens
gacatgaaagccaaa

SEQ ID NO: 431654 - DNA, 15 bp, Homo sapiens
tgacatgaaagccaa

SEQ ID NO: 431655 - DNA, 15 bp, Homo sapiens
ctgacatgaaagcca

SEQ ID NO: 431656 - DNA, 15 bp, Homo sapiens
gctgacatgaaagcc

SEQ ID NO: 431657 - DNA, 15 bp, Homo sapiens
agctgacatgaaagc

SEQ ID NO: 431658 - DNA, 15 bp, Homo sapiens
gagctgacatgaaag

SEQ ID NO: 431659 - DNA, 15 bp, Homo sapiens
tgagctgacatgaaa

SEQ ID NO: 431660 - DNA, 15 bp, Homo sapiens
gtgagctgacatgaa

SEQ ID NO: 431661 - DNA, 15 bp, Homo sapiens
agtgagctgacatga

SEQ ID NO: 431662 - DNA, 15 bp, Homo sapiens
aagtgagctgacatg

SEQ ID NO: 431663 - DNA, 15 bp, Homo sapiens
caagtgagctgacat

SEQ ID NO: 431664 - DNA, 15 bp, Homo sapiens
acaagtgagctgaca

SEQ ID NO: 431665 - DNA, 15 bp, Homo sapiens
tacaagtgagctgac

SEQ ID NO: 431666 - DNA, 15 bp, Homo sapiens
atacaagtgagctga

SEQ ID NO: 431667 - DNA, 15 bp, Homo sapiens
aatacaagtgagctg

SEQ ID NO: 431668 - DNA, 15 bp, Homo sapiens
gaatacaagtgagct

SEQ ID NO: 431669 - DNA, 15 bp, Homo sapiens
agaatacaagtgagc

SEQ ID NO: 431670 - DNA, 15 bp, Homo sapiens
gagaatacaagtgag

SEQ ID NO: 431671 - DNA, 15 bp, Homo sapiens
agagaatacaagtga

SEQ ID NO: 431672 - DNA, 15 bp, Homo sapiens
tagagaatacaagtg

SEQ ID NO: 431673 - DNA, 15 bp, Homo sapiens
atagagaatacaagt

SEQ ID NO: 431674 - DNA, 15 bp, Homo sapiens
aatagagaatacaag

SEQ ID NO: 431675 - DNA, 15 bp, Homo sapiens
aaatagagaatacaa

SEQ ID NO: 431676 - DNA, 15 bp, Homo sapiens
taaatagagaataca

SEQ ID NO: 431677 - DNA, 15 bp, Homo sapiens
ataaatagagaatac

SEQ ID NO: 431678 - DNA, 15 bp, Homo sapiens
tataaatagagaata

SEQ ID NO: 431679 - DNA, 15 bp, Homo sapiens
atataaatagagaat

SEQ ID NO: 431680 - DNA, 15 bp, Homo sapiens
catataaatagagaa

SEQ ID NO: 431681 - DNA, 15 bp, Homo sapiens
gcatataaatagaga

SEQ ID NO: 431682 - DNA, 15 bp, Homo sapiens
agcatataaatagag

SEQ ID NO: 431683 - DNA, 15 bp, Homo sapiens
tagcatataaataga

SEQ ID NO: 431684 - DNA, 15 bp, Homo sapiens
ttagcatataaatag

SEQ ID NO: 431685 - DNA, 15 bp, Homo sapiens
tttagcatataaata

SEQ ID NO: 431686 - DNA, 15 bp, Homo sapiens
ttttagcatataaat

SEQ ID NO: 431687 - DNA, 15 bp, Homo sapiens
attttagcatataaa

SEQ ID NO: 431688 - DNA, 15 bp, Homo sapiens
gattttagcatataa

SEQ ID NO: 431689 - DNA, 15 bp, Homo sapiens
agattttagcatata

SEQ ID NO: 431690 - DNA, 15 bp, Homo sapiens
aagattttagcatat

SEQ ID NO: 431691 - DNA, 15 bp, Homo sapiens
taagattttagcata

SEQ ID NO: 431692 - DNA, 15 bp, Homo sapiens
gtaagattttagcat

SEQ ID NO: 431693 - DNA, 15 bp, Homo sapiens
agtaagattttagca

SEQ ID NO: 431694 - DNA, 15 bp, Homo sapiens
gagtaagattttagc

SEQ ID NO: 431695 - DNA, 15 bp, Homo sapiens
tgagtaagattttag

SEQ ID NO: 431696 - DNA, 15 bp, Homo sapiens
atgagtaagatttta

SEQ ID NO: 431697 - DNA, 15 bp, Homo sapiens
catgagtaagatttt

SEQ ID NO: 431698 - DNA, 15 bp, Homo sapiens
ccatgagtaagattt

SEQ ID NO: 431699 - DNA, 15 bp, Homo sapiens
accatgagtaagatt

SEQ ID NO: 431700 - DNA, 15 bp, Homo sapiens
aaccatgagtaagat

SEQ ID NO: 431701 - DNA, 15 bp, Homo sapiens
gaaccatgagtaaga

SEQ ID NO: 431702 - DNA, 15 bp, Homo sapiens
tgaaccatgagtaag

SEQ ID NO: 431703 - DNA, 15 bp, Homo sapiens
ctgaaccatgagtaa

SEQ ID NO: 431704 - DNA, 15 bp, Homo sapiens
gctgaaccatgagta

SEQ ID NO: 431705 - DNA, 15 bp, Homo sapiens
agctgaaccatgagt

SEQ ID NO: 431706 - DNA, 15 bp, Homo sapiens
tagctgaaccatgag

SEQ ID NO: 431707 - DNA, 15 bp, Homo sapiens
ttagctgaaccatga

SEQ ID NO: 431708 - DNA, 15 bp, Homo sapiens
tttagctgaaccatg

SEQ ID NO: 431709 - DNA, 15 bp, Homo sapiens
gtttagctgaaccat

SEQ ID NO: 431710 - DNA, 15 bp, Homo sapiens
tgtttagctgaacca

SEQ ID NO: 431711 - DNA, 15 bp, Homo sapiens
ctgtttagctgaacc

SEQ ID NO: 431712 - DNA, 15 bp, Homo sapiens
actgtttagctgaac

SEQ ID NO: 431713 - DNA, 15 bp, Homo sapiens
cactgtttagctgaa

SEQ ID NO: 431714 - DNA, 15 bp, Homo sapiens
ccactgtttagctga

SEQ ID NO: 431715 - DNA, 15 bp, Homo sapiens
accactgtttagctg

SEQ ID NO: 431716 - DNA, 15 bp, Homo sapiens
gaccactgtttagct

SEQ ID NO: 431717 - DNA, 15 bp, Homo sapiens
ggaccactgtttagc

SEQ ID NO: 431718 - DNA, 15 bp, Homo sapiens
tggaccactgtttag

SEQ ID NO: 431719 - DNA, 15 bp, Homo sapiens
ttggaccactgttta

SEQ ID NO: 431720 - DNA, 15 bp, Homo sapiens
cttggaccactgttt

SEQ ID NO: 431721 - DNA, 15 bp, Homo sapiens
gcttggaccactgtt

SEQ ID NO: 431722 - DNA, 15 bp, Homo sapiens
agcttggaccactgt

SEQ ID NO: 431723 - DNA, 15 bp, Homo sapiens
aagcttggaccactg

SEQ ID NO: 431724 - DNA, 15 bp, Homo sapiens
taagcttggaccact

SEQ ID NO: 431725 - DNA, 15 bp, Homo sapiens
ctaagcttggaccac

SEQ ID NO: 431726 - DNA, 15 bp, Homo sapiens
cctaagcttggacca

SEQ ID NO: 431727 - DNA, 15 bp, Homo sapiens
ccctaagcttggacc

SEQ ID NO: 431728 - DNA, 15 bp, Homo sapiens
cccctaagcttggac

SEQ ID NO: 431729 - DNA, 15 bp, Homo sapiens
acccctaagcttgga

SEQ ID NO: 431730 - DNA, 15 bp, Homo sapiens
gacccctaagcttgg

SEQ ID NO: 431731 - DNA, 15 bp, Homo sapiens
agacccctaagcttg

SEQ ID NO: 431732 - DNA, 15 bp, Homo sapiens
tagacccctaagctt

SEQ ID NO: 431733 - DNA, 15 bp, Homo sapiens
ttagacccctaagct

SEQ ID NO: 431734 - DNA, 15 bp, Homo sapiens
tttagacccctaagc

SEQ ID NO: 431735 - DNA, 15 bp, Homo sapiens
gtttagacccctaag

SEQ ID NO: 431736 - DNA, 15 bp, Homo sapiens
agtttagacccctaa

SEQ ID NO: 431737 - DNA, 15 bp, Homo sapiens
tagtttagaccccta

SEQ ID NO: 431738 - DNA, 15 bp, Homo sapiens
atagtttagacccct

SEQ ID NO: 431739 - DNA, 15 bp, Homo sapiens
aatagtttagacccc

SEQ ID NO: 431740 - DNA, 15 bp, Homo sapiens
caatagtttagaccc

SEQ ID NO: 431741 - DNA, 15 bp, Homo sapiens
ccaatagtttagacc

SEQ ID NO: 431742 - DNA, 15 bp, Homo sapiens
cccaatagtttagac

SEQ ID NO: 431743 - DNA, 15 bp, Homo sapiens
gcccaatagtttaga

SEQ ID NO: 431744 - DNA, 15 bp, Homo sapiens
agcccaatagtttag

SEQ ID NO: 431745 - DNA, 15 bp, Homo sapiens
cagcccaatagttta

SEQ ID NO: 431746 - DNA, 15 bp, Homo sapiens
gcagcccaatagttt

SEQ ID NO: 431747 - DNA, 15 bp, Homo sapiens
ggcagcccaatagtt

SEQ ID NO: 431748 - DNA, 15 bp, Homo sapiens
aggcagcccaatagt

SEQ ID NO: 431749 - DNA, 15 bp, Homo sapiens
aaggcagcccaatag

SEQ ID NO: 431750 - DNA, 15 bp, Homo sapiens
caaggcagcccaata

SEQ ID NO: 431751 - DNA, 15 bp, Homo sapiens
acaaggcagcccaat

SEQ ID NO: 431752 - DNA, 15 bp, Homo sapiens
tacaaggcagcccaa

SEQ ID NO: 431753 - DNA, 15 bp, Homo sapiens
ctacaaggcagccca

SEQ ID NO: 431754 - DNA, 15 bp, Homo sapiens
cctacaaggcagccc

SEQ ID NO: 431755 - DNA, 15 bp, Homo sapiens
gcctacaaggcagcc

SEQ ID NO: 431756 - DNA, 15 bp, Homo sapiens
tgcctacaaggcagc

SEQ ID NO: 431757 - DNA, 15 bp, Homo sapiens
ttgcctacaaggcag

SEQ ID NO: 431758 - DNA, 15 bp, Homo sapiens
tttgcctacaaggca

SEQ ID NO: 431759 - DNA, 15 bp, Homo sapiens
ttttgcctacaaggc

SEQ ID NO: 431760 - DNA, 15 bp, Homo sapiens
tttttgcctacaagg

SEQ ID NO: 431761 - DNA, 15 bp, Homo sapiens
atttttgcctacaag

SEQ ID NO: 431762 - DNA, 15 bp, Homo sapiens
gatttttgcctacaa

SEQ ID NO: 431763 - DNA, 15 bp, Homo sapiens
ggatttttgcctaca

SEQ ID NO: 431764 - DNA, 15 bp, Homo sapiens
aggatttttgcctac

SEQ ID NO: 431765 - DNA, 15 bp, Homo sapiens
gaggatttttgccta

SEQ ID NO: 431766 - DNA, 15 bp, Homo sapiens
cgaggatttttgcct

SEQ ID NO: 431767 - DNA, 15 bp, Homo sapiens
acgaggatttttgcc

SEQ ID NO: 431768 - DNA, 15 bp, Homo sapiens
tacgaggatttttgc

SEQ ID NO: 431769 - DNA, 15 bp, Homo sapiens
atacgaggatttttg

SEQ ID NO: 431770 - DNA, 15 bp, Homo sapiens
catacgaggattttt

SEQ ID NO: 431771 - DNA, 15 bp, Homo sapiens
acatacgaggatttt

SEQ ID NO: 431772 - DNA, 15 bp, Homo sapiens
aacatacgaggattt

SEQ ID NO: 431773 - DNA, 15 bp, Homo sapiens
caacatacgaggatt

SEQ ID NO: 431774 - DNA, 15 bp, Homo sapiens
tcaacatacgaggat

SEQ ID NO: 431775 - DNA, 15 bp, Homo sapiens
gtcaacatacgagga

SEQ ID NO: 431776 - DNA, 15 bp, Homo sapiens
tgtcaacatacgagg

SEQ ID NO: 431777 - DNA, 15 bp, Homo sapiens
atgtcaacatacgag

SEQ ID NO: 431778 - DNA, 15 bp, Homo sapiens
aatgtcaacatacga

SEQ ID NO: 431779 - DNA, 15 bp, Homo sapiens
gaatgtcaacatacg

SEQ ID NO: 431780 - DNA, 15 bp, Homo sapiens
agaatgtcaacatac

SEQ ID NO: 431781 - DNA, 15 bp, Homo sapiens
aagaatgtcaacata

SEQ ID NO: 431782 - DNA, 15 bp, Homo sapiens
aaagaatgtcaacat

SEQ ID NO: 431783 - DNA, 15 bp, Homo sapiens
aaaagaatgtcaaca

SEQ ID NO: 431784 - DNA, 15 bp, Homo sapiens
taaaagaatgtcaac

SEQ ID NO: 431785 - DNA, 15 bp, Homo sapiens
ctaaaagaatgtcaa

SEQ ID NO: 431786 - DNA, 15 bp, Homo sapiens
actaaaagaatgtca

SEQ ID NO: 431787 - DNA, 15 bp, Homo sapiens
tactaaaagaatgtc

SEQ ID NO: 431788 - DNA, 15 bp, Homo sapiens
gtactaaaagaatgt

SEQ ID NO: 431789 - DNA, 15 bp, Homo sapiens
ggtactaaaagaatg

SEQ ID NO: 431790 - DNA, 15 bp, Homo sapiens
tggtactaaaagaat

SEQ ID NO: 431791 - DNA, 15 bp, Homo sapiens
ttggtactaaaagaa

SEQ ID NO: 431792 - DNA, 15 bp, Homo sapiens
tttggtactaaaaga

SEQ ID NO: 431793 - DNA, 15 bp, Homo sapiens
ctttggtactaaaag

SEQ ID NO: 431794 - DNA, 15 bp, Homo sapiens
cctttggtactaaaa

SEQ ID NO: 431795 - DNA, 15 bp, Homo sapiens
tcctttggtactaaa

SEQ ID NO: 431796 - DNA, 15 bp, Homo sapiens
ttcctttggtactaa

SEQ ID NO: 431797 - DNA, 15 bp, Homo sapiens
attcctttggtacta

SEQ ID NO: 431798 - DNA, 15 bp, Homo sapiens
aattcctttggtact

SEQ ID NO: 431799 - DNA, 15 bp, Homo sapiens
gaattcctttggtac

SEQ ID NO: 431800 - DNA, 15 bp, Homo sapiens
tgaattcctttggta

SEQ ID NO: 431801 - DNA, 15 bp, Homo sapiens
ctgaattcctttggt

SEQ ID NO: 431802 - DNA, 15 bp, Homo sapiens
actgaattcctttgg

SEQ ID NO: 431803 - DNA, 15 bp, Homo sapiens
gactgaattcctttg

SEQ ID NO: 431804 - DNA, 15 bp, Homo sapiens
ggactgaattccttt

SEQ ID NO: 431805 - DNA, 15 bp, Homo sapiens
gggactgaattcctt

SEQ ID NO: 431806 - DNA, 15 bp, Homo sapiens
tgggactgaattcct

SEQ ID NO: 431807 - DNA, 15 bp, Homo sapiens
atgggactgaattcc

SEQ ID NO: 431808 - DNA, 15 bp, Homo sapiens
catgggactgaattc

SEQ ID NO: 431809 - DNA, 15 bp, Homo sapiens
ccatgggactgaatt

SEQ ID NO: 431810 - DNA, 15 bp, Homo sapiens
gccatgggactgaat

SEQ ID NO: 431811 - DNA, 15 bp, Homo sapiens
ggccatgggactgaa

SEQ ID NO: 431812 - DNA, 15 bp, Homo sapiens
tggccatgggactga

SEQ ID NO: 431813 - DNA, 15 bp, Homo sapiens
atggccatgggactg

SEQ ID NO: 431814 - DNA, 15 bp, Homo sapiens
catggccatgggact

SEQ ID NO: 431815 - DNA, 15 bp, Homo sapiens
ccatggccatgggac

SEQ ID NO: 431816 - DNA, 15 bp, Homo sapiens
cccatggccatggga

SEQ ID NO: 431817 - DNA, 15 bp, Homo sapiens
acccatggccatggg

SEQ ID NO: 431818 - DNA, 15 bp, Homo sapiens
aacccatggccatgg

SEQ ID NO: 431819 - DNA, 15 bp, Homo sapiens
gaacccatggccatg

SEQ ID NO: 431820 - DNA, 15 bp, Homo sapiens
tgaacccatggccat

SEQ ID NO: 431821 - DNA, 15 bp, Homo sapiens
ctgaacccatggcca

SEQ ID NO: 431822 - DNA, 15 bp, Homo sapiens
cctgaacccatggcc

SEQ ID NO: 431823 - DNA, 15 bp, Homo sapiens
gcctgaacccatggc

SEQ ID NO: 431824 - DNA, 15 bp, Homo sapiens
tgcctgaacccatgg

SEQ ID NO: 431825 - DNA, 15 bp, Homo sapiens
ctgcctgaacccatg

SEQ ID NO: 431826 - DNA, 15 bp, Homo sapiens
gctgcctgaacccat

SEQ ID NO: 431827 - DNA, 15 bp, Homo sapiens
tgctgcctgaaccca

SEQ ID NO: 431828 - DNA, 15 bp, Homo sapiens
ctgctgcctgaaccc

SEQ ID NO: 431829 - DNA, 15 bp, Homo sapiens
actgctgcctgaacc

SEQ ID NO: 431830 - DNA, 15 bp, Homo sapiens
cactgctgcctgaac

SEQ ID NO: 431831 - DNA, 15 bp, Homo sapiens
gcactgctgcctgaa

SEQ ID NO: 431832 - DNA, 15 bp, Homo sapiens
tgcactgctgcctga

SEQ ID NO: 431833 - DNA, 15 bp, Homo sapiens
gtgcactgctgcctg

SEQ ID NO: 431834 - DNA, 15 bp, Homo sapiens
agtgcactgctgcct

SEQ ID NO: 431835 - DNA, 15 bp, Homo sapiens
aagtgcactgctgcc

SEQ ID NO: 431836 - DNA, 15 bp, Homo sapiens
aaagtgcactgctgc

SEQ ID NO: 431837 - DNA, 15 bp, Homo sapiens
aaaagtgcactgctg

SEQ ID NO: 431838 - DNA, 15 bp, Homo sapiens
gaaaagtgcactgct

SEQ ID NO: 431839 - DNA, 15 bp, Homo sapiens
ggaaaagtgcactgc

SEQ ID NO: 431840 - DNA, 15 bp, Homo sapiens
tggaaaagtgcactg

SEQ ID NO: 431841 - DNA, 15 bp, Homo sapiens
ttggaaaagtgcact

SEQ ID NO: 431842 - DNA, 15 bp, Homo sapiens
tttggaaaagtgcac

SEQ ID NO: 431843 - DNA, 15 bp, Homo sapiens
atttggaaaagtgca

SEQ ID NO: 431844 - DNA, 15 bp, Homo sapiens
catttggaaaagtgc

SEQ ID NO: 431845 - DNA, 15 bp, Homo sapiens
gcatttggaaaagtg

SEQ ID NO: 431846 - DNA, 15 bp, Homo sapiens
ggcatttggaaaagt

SEQ ID NO: 431847 - DNA, 15 bp, Homo sapiens
tggcatttggaaaag

SEQ ID NO: 431848 - DNA, 15 bp, Homo sapiens
gtggcatttggaaaa

SEQ ID NO: 431849 - DNA, 15 bp, Homo sapiens
agtggcatttggaaa

SEQ ID NO: 431850 - DNA, 15 bp, Homo sapiens
gagtggcatttggaa

SEQ ID NO: 431851 - DNA, 15 bp, Homo sapiens
agagtggcatttgga

SEQ ID NO: 431852 - DNA, 15 bp, Homo sapiens
cagagtggcatttgg

SEQ ID NO: 431853 - DNA, 15 bp, Homo sapiens
acagagtggcatttg

SEQ ID NO: 431854 - DNA, 15 bp, Homo sapiens
tacagagtggcattt

SEQ ID NO: 431855 - DNA, 15 bp, Homo sapiens
ctacagagtggcatt

SEQ ID NO: 431856 - DNA, 15 bp, Homo sapiens
gctacagagtggcat

SEQ ID NO: 431857 - DNA, 15 bp, Homo sapiens
ggctacagagtggca

SEQ ID NO: 431858 - DNA, 15 bp, Homo sapiens
tggctacagagtggc

SEQ ID NO: 431859 - DNA, 15 bp, Homo sapiens
atggctacagagtgg

SEQ ID NO: 431860 - DNA, 15 bp, Homo sapiens
gatggctacagagtg

SEQ ID NO: 431861 - DNA, 15 bp, Homo sapiens
tgatggctacagagt

SEQ ID NO: 431862 - DNA, 15 bp, Homo sapiens
ttgatggctacagag

SEQ ID NO: 431863 - DNA, 15 bp, Homo sapiens
attgatggctacaga

SEQ ID NO: 431864 - DNA, 15 bp, Homo sapiens
cattgatggctacag

SEQ ID NO: 431865 - DNA, 15 bp, Homo sapiens
gcattgatggctaca

SEQ ID NO: 431866 - DNA, 15 bp, Homo sapiens
ggcattgatggctac

SEQ ID NO: 431867 - DNA, 15 bp, Homo sapiens
tggcattgatggcta

SEQ ID NO: 431868 - DNA, 15 bp, Homo sapiens
atggcattgatggct

SEQ ID NO: 431869 - DNA, 15 bp, Homo sapiens
tatggcattgatggc

SEQ ID NO: 431870 - DNA, 15 bp, Homo sapiens
ctatggcattgatgg

SEQ ID NO: 431871 - DNA, 15 bp, Homo sapiens
gctatggcattgatg

SEQ ID NO: 431872 - DNA, 15 bp, Homo sapiens
tgctatggcattgat

SEQ ID NO: 431873 - DNA, 15 bp, Homo sapiens
ttgctatggcattga

SEQ ID NO: 431874 - DNA, 15 bp, Homo sapiens
attgctatggcattg

SEQ ID NO: 431875 - DNA, 15 bp, Homo sapiens
gattgctatggcatt

SEQ ID NO: 431876 - DNA, 15 bp, Homo sapiens
ggattgctatggcat

SEQ ID NO: 431877 - DNA, 15 bp, Homo sapiens
aggattgctatggca

SEQ ID NO: 431878 - DNA, 15 bp, Homo sapiens
aaggattgctatggc

SEQ ID NO: 431879 - DNA, 15 bp, Homo sapiens
taaggattgctatgg

SEQ ID NO: 431880 - DNA, 15 bp, Homo sapiens
ttaaggattgctatg

SEQ ID NO: 431881 - DNA, 15 bp, Homo sapiens
attaaggattgctat

SEQ ID NO: 431882 - DNA, 15 bp, Homo sapiens
cattaaggattgcta

SEQ ID NO: 431883 - DNA, 15 bp, Homo sapiens
gcattaaggattgct

SEQ ID NO: 431884 - DNA, 15 bp, Homo sapiens
agcattaaggattgc

SEQ ID NO: 431885 - DNA, 15 bp, Homo sapiens
cagcattaaggattg

SEQ ID NO: 431886 - DNA, 15 bp, Homo sapiens
tcagcattaaggatt

SEQ ID NO: 431887 - DNA, 15 bp, Homo sapiens
gtcagcattaaggat

SEQ ID NO: 431888 - DNA, 15 bp, Homo sapiens
ggtcagcattaagga

SEQ ID NO: 431889 - DNA, 15 bp, Homo sapiens
aggtcagcattaagg

SEQ ID NO: 431890 - DNA, 15 bp, Homo sapiens
taggtcagcattaag

SEQ ID NO: 431891 - DNA, 15 bp, Homo sapiens
ataggtcagcattaa

SEQ ID NO: 431892 - DNA, 15 bp, Homo sapiens
tataggtcagcatta

SEQ ID NO: 431893 - DNA, 15 bp, Homo sapiens
gtataggtcagcatt

SEQ ID NO: 431894 - DNA, 15 bp, Homo sapiens
agtataggtcagcat

SEQ ID NO: 431895 - DNA, 15 bp, Homo sapiens
gagtataggtcagca

SEQ ID NO: 431896 - DNA, 15 bp, Homo sapiens
tgagtataggtcagc

SEQ ID NO: 431897 - DNA, 15 bp, Homo sapiens
ttgagtataggtcag

SEQ ID NO: 431898 - DNA, 15 bp, Homo sapiens
attgagtataggtca

SEQ ID NO: 431899 - DNA, 15 bp, Homo sapiens
gattgagtataggtc

SEQ ID NO: 431900 - DNA, 15 bp, Homo sapiens
agattgagtataggt

SEQ ID NO: 431901 - DNA, 15 bp, Homo sapiens
cagattgagtatagg

SEQ ID NO: 431902 - DNA, 15 bp, Homo sapiens
tcagattgagtatag

SEQ ID NO: 431903 - DNA, 15 bp, Homo sapiens
atcagattgagtata

SEQ ID NO: 431904 - DNA, 15 bp, Homo sapiens
catcagattgagtat

SEQ ID NO: 431905 - DNA, 15 bp, Homo sapiens
acatcagattgagta

SEQ ID NO: 431906 - DNA, 15 bp, Homo sapiens
aacatcagattgagt

SEQ ID NO: 431907 - DNA, 15 bp, Homo sapiens
taacatcagattgag

SEQ ID NO: 431908 - DNA, 15 bp, Homo sapiens
ataacatcagattga

SEQ ID NO: 431909 - DNA, 15 bp, Homo sapiens
gataacatcagattg

SEQ ID NO: 431910 - DNA, 15 bp, Homo sapiens
tgataacatcagatt

SEQ ID NO: 431911 - DNA, 15 bp, Homo sapiens
ttgataacatcagat

SEQ ID NO: 431912 - DNA, 15 bp, Homo sapiens
cttgataacatcaga

SEQ ID NO: 431913 - DNA, 15 bp, Homo sapiens
gcttgataacatcag

SEQ ID NO: 431914 - DNA, 15 bp, Homo sapiens
ggcttgataacatca

SEQ ID NO: 431915 - DNA, 15 bp, Homo sapiens
aggcttgataacatc

SEQ ID NO: 431916 - DNA, 15 bp, Homo sapiens
aaggcttgataacat

SEQ ID NO: 431917 - DNA, 15 bp, Homo sapiens
gaaggcttgataaca

SEQ ID NO: 431918 - DNA, 15 bp, Homo sapiens
tgaaggcttgataac

SEQ ID NO: 431919 - DNA, 15 bp, Homo sapiens
ctgaaggcttgataa

SEQ ID NO: 431920 - DNA, 15 bp, Homo sapiens
tctgaaggcttgata

SEQ ID NO: 431921 - DNA, 15 bp, Homo sapiens
ttctgaaggcttgat

SEQ ID NO: 431922 - DNA, 15 bp, Homo sapiens
tttctgaaggcttga

SEQ ID NO: 431923 - DNA, 15 bp, Homo sapiens
atttctgaaggcttg

SEQ ID NO: 431924 - DNA, 15 bp, Homo sapiens
tatttctgaaggctt

SEQ ID NO: 431925 - DNA, 15 bp, Homo sapiens
ttatttctgaaggct

SEQ ID NO: 431926 - DNA, 15 bp, Homo sapiens
tttatttctgaaggc

SEQ ID NO: 431927 - DNA, 15 bp, Homo sapiens
ttttatttctgaagg

SEQ ID NO: 431928 - DNA, 15 bp, Homo sapiens
gttttatttctgaag

SEQ ID NO: 431929 - DNA, 15 bp, Homo sapiens
agttttatttctgaa

SEQ ID NO: 431930 - DNA, 15 bp, Homo sapiens
aagttttatttctga

SEQ ID NO: 431931 - DNA, 15 bp, Homo sapiens
aaagttttatttctg

SEQ ID NO: 431932 - DNA, 15 bp, Homo sapiens
taaagttttatttct

SEQ ID NO: 431933 - DNA, 15 bp, Homo sapiens
ttaaagttttatttc

SEQ ID NO: 431934 - DNA, 15 bp, Homo sapiens
attaaagttttattt

SEQ ID NO: 431935 - DNA, 15 bp, Homo sapiens
gattaaagttttatt

SEQ ID NO: 431936 - DNA, 15 bp, Homo sapiens
tgattaaagttttat

SEQ ID NO: 431937 - DNA, 15 bp, Homo sapiens
ctgattaaagtttta

SEQ ID NO: 431938 - DNA, 15 bp, Homo sapiens
actgattaaagtttt

SEQ ID NO: 431939 - DNA, 15 bp, Homo sapiens
tactgattaaagttt

SEQ ID NO: 431940 - DNA, 15 bp, Homo sapiens
ctactgattaaagtt

SEQ ID NO: 431941 - DNA, 15 bp, Homo sapiens
tctactgattaaagt

SEQ ID NO: 431942 - DNA, 15 bp, Homo sapiens
ctctactgattaaag

SEQ ID NO: 431943 - DNA, 15 bp, Homo sapiens
gctctactgattaaa

SEQ ID NO: 431944 - DNA, 15 bp, Homo sapiens
ggctctactgattaa

SEQ ID NO: 431945 - DNA, 15 bp, Homo sapiens
aggctctactgatta

SEQ ID NO: 431946 - DNA, 15 bp, Homo sapiens
aaggctctactgatt

SEQ ID NO: 431947 - DNA, 15 bp, Homo sapiens
aaaggctctactgat

SEQ ID NO: 431948 - DNA, 15 bp, Homo sapiens
caaaggctctactga

SEQ ID NO: 431949 - DNA, 15 bp, Homo sapiens
ccaaaggctctactg

SEQ ID NO: 431950 - DNA, 15 bp, Homo sapiens
cccaaaggctctact

SEQ ID NO: 431951 - DNA, 15 bp, Homo sapiens
tcccaaaggctctac

SEQ ID NO: 431952 - DNA, 15 bp, Homo sapiens
atcccaaaggctcta

SEQ ID NO: 431953 - DNA, 15 bp, Homo sapiens
catcccaaaggctct

SEQ ID NO: 431954 - DNA, 15 bp, Homo sapiens
ccatcccaaaggctc

SEQ ID NO: 431955 - DNA, 15 bp, Homo sapiens
gccatcccaaaggct

SEQ ID NO: 431956 - DNA, 15 bp, Homo sapiens
tgccatcccaaaggc

SEQ ID NO: 431957 - DNA, 15 bp, Homo sapiens
ttgccatcccaaagg

SEQ ID NO: 431958 - DNA, 15 bp, Homo sapiens
cttgccatcccaaag

SEQ ID NO: 431959 - DNA, 15 bp, Homo sapiens
gcttgccatcccaaa

SEQ ID NO: 431960 - DNA, 15 bp, Homo sapiens
ggcttgccatcccaa

SEQ ID NO: 431961 - DNA, 15 bp, Homo sapiens
aggcttgccatccca

SEQ ID NO: 431962 - DNA, 15 bp, Homo sapiens
gaggcttgccatccc

SEQ ID NO: 431963 - DNA, 15 bp, Homo sapiens
agaggcttgccatcc

SEQ ID NO: 431964 - DNA, 15 bp, Homo sapiens
aagaggcttgccatc

SEQ ID NO: 431965 - DNA, 15 bp, Homo sapiens
taagaggcttgccat

SEQ ID NO: 431966 - DNA, 15 bp, Homo sapiens
ttaagaggcttgcca

SEQ ID NO: 431967 - DNA, 15 bp, Homo sapiens
cttaagaggcttgcc

SEQ ID NO: 431968 - DNA, 15 bp, Homo sapiens
ccttaagaggcttgc

SEQ ID NO: 431969 - DNA, 15 bp, Homo sapiens
gccttaagaggcttg

SEQ ID NO: 431970 - DNA, 15 bp, Homo sapiens
agccttaagaggctt

SEQ ID NO: 431971 - DNA, 15 bp, Homo sapiens
gagccttaagaggct

SEQ ID NO: 431972 - DNA, 15 bp, Homo sapiens
ggagccttaagaggc

SEQ ID NO: 431973 - DNA, 15 bp, Homo sapiens
aggagccttaagagg

SEQ ID NO: 431974 - DNA, 15 bp, Homo sapiens
aaggagccttaagag

SEQ ID NO: 431975 - DNA, 15 bp, Homo sapiens
aaaggagccttaaga

SEQ ID NO: 431976 - DNA, 15 bp, Homo sapiens
gaaaggagccttaag

SEQ ID NO: 431977 - DNA, 15 bp, Homo sapiens
tgaaaggagccttaa

SEQ ID NO: 431978 - DNA, 15 bp, Homo sapiens
atgaaaggagcctta

SEQ ID NO: 431979 - DNA, 15 bp, Homo sapiens
catgaaaggagcctt

SEQ ID NO: 431980 - DNA, 15 bp, Homo sapiens
tcatgaaaggagcct

SEQ ID NO: 431981 - DNA, 15 bp, Homo sapiens
ttcatgaaaggagcc

SEQ ID NO: 431982 - DNA, 15 bp, Homo sapiens
cttcatgaaaggagc

SEQ ID NO: 431983 - DNA, 15 bp, Homo sapiens
tcttcatgaaaggag

SEQ ID NO: 431984 - DNA, 15 bp, Homo sapiens
atcttcatgaaagga

SEQ ID NO: 431985 - DNA, 15 bp, Homo sapiens
gatcttcatgaaagg

SEQ ID NO: 431986 - DNA, 15 bp, Homo sapiens
agatcttcatgaaag

SEQ ID NO: 431987 - DNA, 15 bp, Homo sapiens
gagatcttcatgaaa

SEQ ID NO: 431988 - DNA, 15 bp, Homo sapiens
ggagatcttcatgaa

SEQ ID NO: 431989 - DNA, 15 bp, Homo sapiens
tggagatcttcatga

SEQ ID NO: 431990 - DNA, 15 bp, Homo sapiens
atggagatcttcatg

SEQ ID NO: 431991 - DNA, 15 bp, Homo sapiens
aatggagatcttcat

SEQ ID NO: 431992 - DNA, 15 bp, Homo sapiens
aaatggagatcttca

SEQ ID NO: 431993 - DNA, 15 bp, Homo sapiens
caaatggagatcttc

SEQ ID NO: 431994 - DNA, 15 bp, Homo sapiens
acaaatggagatctt

SEQ ID NO: 431995 - DNA, 15 bp, Homo sapiens
aacaaatggagatct

SEQ ID NO: 431996 - DNA, 15 bp, Homo sapiens
taacaaatggagatc

SEQ ID NO: 431997 - DNA, 15 bp, Homo sapiens
gtaacaaatggagat

SEQ ID NO: 431998 - DNA, 15 bp, Homo sapiens
tgtaacaaatggaga

SEQ ID NO: 431999 - DNA, 15 bp, Homo sapiens
ctgtaacaaatggag

SEQ ID NO: 432000 - DNA, 15 bp, Homo sapiens
tctgtaacaaatgga

SEQ ID NO: 432001 - DNA, 15 bp, Homo sapiens
ttctgtaacaaatgg

SEQ ID NO: 432002 - DNA, 15 bp, Homo sapiens
tttctgtaacaaatg

SEQ ID NO: 432003 - DNA, 15 bp, Homo sapiens
atttctgtaacaaat

SEQ ID NO: 432004 - DNA, 15 bp, Homo sapiens
gatttctgtaacaaa

SEQ ID NO: 432005 - DNA, 15 bp, Homo sapiens
tgatttctgtaacaa

SEQ ID NO: 432006 - DNA, 15 bp, Homo sapiens
atgatttctgtaaca

SEQ ID NO: 432007 - DNA, 15 bp, Homo sapiens
gatgatttctgtaac

SEQ ID NO: 432008 - DNA, 15 bp, Homo sapiens
tgatgatttctgtaa

SEQ ID NO: 432009 - DNA, 15 bp, Homo sapiens
ctgatgatttctgta

SEQ ID NO: 432010 - DNA, 15 bp, Homo sapiens
gctgatgatttctgt

SEQ ID NO: 432011 - DNA, 15 bp, Homo sapiens
ggctgatgatttctg

SEQ ID NO: 432012 - DNA, 15 bp, Homo sapiens
aggctgatgatttct

SEQ ID NO: 432013 - DNA, 15 bp, Homo sapiens
gaggctgatgatttc

SEQ ID NO: 432014 - DNA, 15 bp, Homo sapiens
cgaggctgatgattt

SEQ ID NO: 432015 - DNA, 15 bp, Homo sapiens
acgaggctgatgatt

SEQ ID NO: 432016 - DNA, 15 bp, Homo sapiens
cacgaggctgatgat

SEQ ID NO: 432017 - DNA, 15 bp, Homo sapiens
acacgaggctgatga

SEQ ID NO: 432018 - DNA, 15 bp, Homo sapiens
aacacgaggctgatg

SEQ ID NO: 432019 - DNA, 15 bp, Homo sapiens
taacacgaggctgat

SEQ ID NO: 432020 - DNA, 15 bp, Homo sapiens
ataacacgaggctga

SEQ ID NO: 432021 - DNA, 15 bp, Homo sapiens
tataacacgaggctg

SEQ ID NO: 432022 - DNA, 15 bp, Homo sapiens
ttataacacgaggct

SEQ ID NO: 432023 - DNA, 15 bp, Homo sapiens
cttataacacgaggc

SEQ ID NO: 432024 - DNA, 15 bp, Homo sapiens
tcttataacacgagg

SEQ ID NO: 432025 - DNA, 15 bp, Homo sapiens
gtcttataacacgag

SEQ ID NO: 432026 - DNA, 15 bp, Homo sapiens
agtcttataacacga

SEQ ID NO: 432027 - DNA, 15 bp, Homo sapiens
cagtcttataacacg

SEQ ID NO: 432028 - DNA, 15 bp, Homo sapiens
tcagtcttataacac

SEQ ID NO: 432029 - DNA, 15 bp, Homo sapiens
atcagtcttataaca

SEQ ID NO: 432030 - DNA, 15 bp, Homo sapiens
aatcagtcttataac

SEQ ID NO: 432031 - DNA, 15 bp, Homo sapiens
caatcagtcttataa

SEQ ID NO: 432032 - DNA, 15 bp, Homo sapiens
acaatcagtcttata

SEQ ID NO: 432033 - DNA, 15 bp, Homo sapiens
tacaatcagtcttat

SEQ ID NO: 432034 - DNA, 15 bp, Homo sapiens
ttacaatcagtctta

SEQ ID NO: 432035 - DNA, 15 bp, Homo sapiens
tttacaatcagtctt

SEQ ID NO: 432036 - DNA, 15 bp, Homo sapiens
ttttacaatcagtct

SEQ ID NO: 432037 - DNA, 15 bp, Homo sapiens
attttacaatcagtc

SEQ ID NO: 432038 - DNA, 15 bp, Homo sapiens
tattttacaatcagt

SEQ ID NO: 432039 - DNA, 15 bp, Homo sapiens
ttattttacaatcag

SEQ ID NO: 432040 - DNA, 15 bp, Homo sapiens
tttattttacaatca

SEQ ID NO: 432041 - DNA, 15 bp, Homo sapiens
ctttattttacaatc

SEQ ID NO: 432042 - DNA, 15 bp, Homo sapiens
tctttattttacaat

SEQ ID NO: 432043 - DNA, 15 bp, Homo sapiens
ttctttattttacaa

SEQ ID NO: 432044 - DNA, 15 bp, Homo sapiens
tttctttattttaca

SEQ ID NO: 432045 - DNA, 15 bp, Homo sapiens
atttctttattttac

SEQ ID NO: 432046 - DNA, 15 bp, Homo sapiens
catttctttatttta

SEQ ID NO: 432047 - DNA, 15 bp, Homo sapiens
ccatttctttatttt

SEQ ID NO: 432048 - DNA, 15 bp, Homo sapiens
tccatttctttattt

SEQ ID NO: 432049 - DNA, 15 bp, Homo sapiens
ttccatttctttatt

SEQ ID NO: 432050 - DNA, 15 bp, Homo sapiens
gttccatttctttat

SEQ ID NO: 432051 - DNA, 15 bp, Homo sapiens
agttccatttcttta

SEQ ID NO: 432052 - DNA, 15 bp, Homo sapiens
gagttccatttcttt

SEQ ID NO: 432053 - DNA, 15 bp, Homo sapiens
agagttccatttctt

SEQ ID NO: 432054 - DNA, 15 bp, Homo sapiens
gagagttccatttct

SEQ ID NO: 432055 - DNA, 15 bp, Homo sapiens
ggagagttccatttc

SEQ ID NO: 432056 - DNA, 15 bp, Homo sapiens
tggagagttccattt

SEQ ID NO: 432057 - DNA, 15 bp, Homo sapiens
atggagagttccatt

SEQ ID NO: 432058 - DNA, 15 bp, Homo sapiens
aatggagagttccat

SEQ ID NO: 432059 - DNA, 15 bp, Homo sapiens
caatggagagttcca

SEQ ID NO: 432060 - DNA, 15 bp, Homo sapiens
acaatggagagttcc

SEQ ID NO: 432061 - DNA, 15 bp, Homo sapiens
gacaatggagagttc

SEQ ID NO: 432062 - DNA, 15 bp, Homo sapiens
agacaatggagagtt

SEQ ID NO: 432063 - DNA, 15 bp, Homo sapiens
gagacaatggagagt

SEQ ID NO: 432064 - DNA, 15 bp, Homo sapiens
agagacaatggagag

SEQ ID NO: 432065 - DNA, 15 bp, Homo sapiens
tagagacaatggaga

SEQ ID NO: 432066 - DNA, 15 bp, Homo sapiens
ttagagacaatggag

SEQ ID NO: 432067 - DNA, 15 bp, Homo sapiens
gttagagacaatgga

SEQ ID NO: 432068 - DNA, 15 bp, Homo sapiens
agttagagacaatgg

SEQ ID NO: 432069 - DNA, 15 bp, Homo sapiens
tagttagagacaatg

SEQ ID NO: 432070 - DNA, 15 bp, Homo sapiens
atagttagagacaat

SEQ ID NO: 432071 - DNA, 15 bp, Homo sapiens
aatagttagagacaa

SEQ ID NO: 432072 - DNA, 15 bp, Homo sapiens
gaatagttagagaca

SEQ ID NO: 432073 - DNA, 15 bp, Homo sapiens
ggaatagttagagac

SEQ ID NO: 432074 - DNA, 15 bp, Homo sapiens
tggaatagttagaga

SEQ ID NO: 432075 - DNA, 15 bp, Homo sapiens
atggaatagttagag

SEQ ID NO: 432076 - DNA, 15 bp, Homo sapiens
aatggaatagttaga

SEQ ID NO: 432077 - DNA, 15 bp, Homo sapiens
caatggaatagttag

SEQ ID NO: 432078 - DNA, 15 bp, Homo sapiens
gcaatggaatagtta

SEQ ID NO: 432079 - DNA, 15 bp, Homo sapiens
tgcaatggaatagtt

SEQ ID NO: 432080 - DNA, 15 bp, Homo sapiens
gtgcaatggaatagt

SEQ ID NO: 432081 - DNA, 15 bp, Homo sapiens
tgtgcaatggaatag

SEQ ID NO: 432082 - DNA, 15 bp, Homo sapiens
ctgtgcaatggaata

SEQ ID NO: 432083 - DNA, 15 bp, Homo sapiens
gctgtgcaatggaat

SEQ ID NO: 432084 - DNA, 15 bp, Homo sapiens
ggctgtgcaatggaa

SEQ ID NO: 432085 - DNA, 15 bp, Homo sapiens
aggctgtgcaatgga

SEQ ID NO: 432086 - DNA, 15 bp, Homo sapiens
gaggctgtgcaatgg

SEQ ID NO: 432087 - DNA, 15 bp, Homo sapiens
agaggctgtgcaatg

SEQ ID NO: 432088 - DNA, 15 bp, Homo sapiens
cagaggctgtgcaat

SEQ ID NO: 432089 - DNA, 15 bp, Homo sapiens
acagaggctgtgcaa

SEQ ID NO: 432090 - DNA, 15 bp, Homo sapiens
aacagaggctgtgca

SEQ ID NO: 432091 - DNA, 15 bp, Homo sapiens
gaacagaggctgtgc

SEQ ID NO: 432092 - DNA, 15 bp, Homo sapiens
ggaacagaggctgtg

SEQ ID NO: 432093 - DNA, 15 bp, Homo sapiens
tggaacagaggctgt

SEQ ID NO: 432094 - DNA, 15 bp, Homo sapiens
gtggaacagaggctg

SEQ ID NO: 432095 - DNA, 15 bp, Homo sapiens
tgtggaacagaggct

SEQ ID NO: 432096 - DNA, 15 bp, Homo sapiens
ttgtggaacagaggc

SEQ ID NO: 432097 - DNA, 15 bp, Homo sapiens
gttgtggaacagagg

SEQ ID NO: 432098 - DNA, 15 bp, Homo sapiens
tgttgtggaacagag

SEQ ID NO: 432099 - DNA, 15 bp, Homo sapiens
atgttgtggaacaga

SEQ ID NO: 432100 - DNA, 15 bp, Homo sapiens
aatgttgtggaacag

SEQ ID NO: 432101 - DNA, 15 bp, Homo sapiens
gaatgttgtggaaca

SEQ ID NO: 432102 - DNA, 15 bp, Homo sapiens
tgaatgttgtggaac

SEQ ID NO: 432103 - DNA, 15 bp, Homo sapiens
ttgaatgttgtggaa

SEQ ID NO: 432104 - DNA, 15 bp, Homo sapiens
tttgaatgttgtgga

SEQ ID NO: 432105 - DNA, 15 bp, Homo sapiens
ttttgaatgttgtgg

SEQ ID NO: 432106 - DNA, 15 bp, Homo sapiens
tttttgaatgttgtg

SEQ ID NO: 432107 - DNA, 15 bp, Homo sapiens
gtttttgaatgttgt

SEQ ID NO: 432108 - DNA, 15 bp, Homo sapiens
agtttttgaatgttg

SEQ ID NO: 432109 - DNA, 15 bp, Homo sapiens
cagtttttgaatgtt

SEQ ID NO: 432110 - DNA, 15 bp, Homo sapiens
tcagtttttgaatgt

SEQ ID NO: 432111 - DNA, 15 bp, Homo sapiens
atcagtttttgaatg

SEQ ID NO: 432112 - DNA, 15 bp, Homo sapiens
aatcagtttttgaat

SEQ ID NO: 432113 - DNA, 15 bp, Homo sapiens
aaatcagtttttgaa

SEQ ID NO: 432114 - DNA, 15 bp, Homo sapiens
taaatcagtttttga

SEQ ID NO: 432115 - DNA, 15 bp, Homo sapiens
ataaatcagtttttg

SEQ ID NO: 432116 - DNA, 15 bp, Homo sapiens
aataaatcagttttt

SEQ ID NO: 432117 - DNA, 15 bp, Homo sapiens
taataaatcagtttt

SEQ ID NO: 432118 - DNA, 15 bp, Homo sapiens
ctaataaatcagttt

SEQ ID NO: 432119 - DNA, 15 bp, Homo sapiens
tctaataaatcagtt

SEQ ID NO: 432120 - DNA, 15 bp, Homo sapiens
atctaataaatcagt

SEQ ID NO: 432121 - DNA, 15 bp, Homo sapiens
aatctaataaatcag

SEQ ID NO: 432122 - DNA, 15 bp, Homo sapiens
gaatctaataaatca

SEQ ID NO: 432123 - DNA, 15 bp, Homo sapiens
agaatctaataaatc

SEQ ID NO: 432124 - DNA, 15 bp, Homo sapiens
cagaatctaataaat

SEQ ID NO: 432125 - DNA, 15 bp, Homo sapiens
tcagaatctaataaa

SEQ ID NO: 432126 - DNA, 15 bp, Homo sapiens
atcagaatctaataa

SEQ ID NO: 432127 - DNA, 15 bp, Homo sapiens
tatcagaatctaata

SEQ ID NO: 432128 - DNA, 15 bp, Homo sapiens
ttatcagaatctaat

SEQ ID NO: 432129 - DNA, 15 bp, Homo sapiens
gttatcagaatctaa

SEQ ID NO: 432130 - DNA, 15 bp, Homo sapiens
tgttatcagaatcta

SEQ ID NO: 432131 - DNA, 15 bp, Homo sapiens
atgttatcagaatct

SEQ ID NO: 432132 - DNA, 15 bp, Homo sapiens
tatgttatcagaatc

SEQ ID NO: 432133 - DNA, 15 bp, Homo sapiens
atatgttatcagaat

SEQ ID NO: 432134 - DNA, 15 bp, Homo sapiens
catatgttatcagaa

SEQ ID NO: 432135 - DNA, 15 bp, Homo sapiens
acatatgttatcaga

SEQ ID NO: 432136 - DNA, 15 bp, Homo sapiens
aacatatgttatcag

SEQ ID NO: 432137 - DNA, 15 bp, Homo sapiens
gaacatatgttatca

SEQ ID NO: 432138 - DNA, 15 bp, Homo sapiens
tgaacatatgttatc

SEQ ID NO: 432139 - DNA, 15 bp, Homo sapiens
gtgaacatatgttat

SEQ ID NO: 432140 - DNA, 15 bp, Homo sapiens
tgtgaacatatgtta

SEQ ID NO: 432141 - DNA, 15 bp, Homo sapiens
atgtgaacatatgtt

SEQ ID NO: 432142 - DNA, 15 bp, Homo sapiens
aatgtgaacatatgt

SEQ ID NO: 432143 - DNA, 15 bp, Homo sapiens
taatgtgaacatatg

SEQ ID NO: 432144 - DNA, 15 bp, Homo sapiens
ataatgtgaacatat

SEQ ID NO: 432145 - DNA, 15 bp, Homo sapiens
aataatgtgaacata

SEQ ID NO: 432146 - DNA, 15 bp, Homo sapiens
aaataatgtgaacat

SEQ ID NO: 432147 - DNA, 15 bp, Homo sapiens
caaataatgtgaaca

SEQ ID NO: 432148 - DNA, 15 bp, Homo sapiens
acaaataatgtgaac

SEQ ID NO: 432149 - DNA, 15 bp, Homo sapiens
aacaaataatgtgaa

SEQ ID NO: 432150 - DNA, 15 bp, Homo sapiens
taacaaataatgtga

SEQ ID NO: 432151 - DNA, 15 bp, Homo sapiens
gtaacaaataatgtg

SEQ ID NO: 432152 - DNA, 15 bp, Homo sapiens
tgtaacaaataatgt

SEQ ID NO: 432153 - DNA, 15 bp, Homo sapiens
ttgtaacaaataatg

SEQ ID NO: 432154 - DNA, 15 bp, Homo sapiens
gttgtaacaaataat

SEQ ID NO: 432155 - DNA, 15 bp, Homo sapiens
tgttgtaacaaataa

SEQ ID NO: 432156 - DNA, 15 bp, Homo sapiens
ctgttgtaacaaata

SEQ ID NO: 432157 - DNA, 15 bp, Homo sapiens
gctgttgtaacaaat

SEQ ID NO: 432158 - DNA, 15 bp, Homo sapiens
ggctgttgtaacaaa

SEQ ID NO: 432159 - DNA, 15 bp, Homo sapiens
gggctgttgtaacaa

SEQ ID NO: 432160 - DNA, 15 bp, Homo sapiens
cgggctgttgtaaca

SEQ ID NO: 432161 - DNA, 15 bp, Homo sapiens
acgggctgttgtaac

SEQ ID NO: 432162 - DNA, 15 bp, Homo sapiens
gacgggctgttgtaa

SEQ ID NO: 432163 - DNA, 15 bp, Homo sapiens
ggacgggctgttgta

SEQ ID NO: 432164 - DNA, 15 bp, Homo sapiens
gggacgggctgttgt

SEQ ID NO: 432165 - DNA, 15 bp, Homo sapiens
tgggacgggctgttg

SEQ ID NO: 432166 - DNA, 15 bp, Homo sapiens
gtgggacgggctgtt

SEQ ID NO: 432167 - DNA, 15 bp, Homo sapiens
ggtgggacgggctgt

SEQ ID NO: 432168 - DNA, 15 bp, Homo sapiens
gggtgggacgggctg

SEQ ID NO: 432169 - DNA, 15 bp, Homo sapiens
agggtgggacgggct

SEQ ID NO: 432170 - DNA, 15 bp, Homo sapiens
gagggtgggacgggc

SEQ ID NO: 432171 - DNA, 15 bp, Homo sapiens
ggagggtgggacggg

SEQ ID NO: 432172 - DNA, 15 bp, Homo sapiens
tggagggtgggacgg

SEQ ID NO: 432173 - DNA, 15 bp, Homo sapiens
gtggagggtgggacg

SEQ ID NO: 432174 - DNA, 15 bp, Homo sapiens
agtggagggtgggac

SEQ ID NO: 432175 - DNA, 15 bp, Homo sapiens
cagtggagggtggga

SEQ ID NO: 432176 - DNA, 15 bp, Homo sapiens
tcagtggagggtggg

SEQ ID NO: 432177 - DNA, 15 bp, Homo sapiens
ttcagtggagggtgg

SEQ ID NO: 432178 - DNA, 15 bp, Homo sapiens
tttcagtggagggtg

SEQ ID NO: 432179 - DNA, 15 bp, Homo sapiens
gtttcagtggagggt

SEQ ID NO: 432180 - DNA, 15 bp, Homo sapiens
agtttcagtggaggg

SEQ ID NO: 432181 - DNA, 15 bp, Homo sapiens
aagtttcagtggagg

SEQ ID NO: 432182 - DNA, 15 bp, Homo sapiens
caagtttcagtggag

SEQ ID NO: 432183 - DNA, 15 bp, Homo sapiens
ccaagtttcagtgga

SEQ ID NO: 432184 - DNA, 15 bp, Homo sapiens
gccaagtttcagtgg

SEQ ID NO: 432185 - DNA, 15 bp, Homo sapiens
agccaagtttcagtg

SEQ ID NO: 432186 - DNA, 15 bp, Homo sapiens
gagccaagtttcagt

SEQ ID NO: 432187 - DNA, 15 bp, Homo sapiens
tgagccaagtttcag

SEQ ID NO: 432188 - DNA, 15 bp, Homo sapiens
gtgagccaagtttca

SEQ ID NO: 432189 - DNA, 15 bp, Homo sapiens
tgtgagccaagtttc

SEQ ID NO: 432190 - DNA, 15 bp, Homo sapiens
gtgtgagccaagttt

SEQ ID NO: 432191 - DNA, 15 bp, Homo sapiens
agtgtgagccaagtt

SEQ ID NO: 432192 - DNA, 15 bp, Homo sapiens
aagtgtgagccaagt

SEQ ID NO: 432193 - DNA, 15 bp, Homo sapiens
aaagtgtgagccaag

SEQ ID NO: 432194 - DNA, 15 bp, Homo sapiens
caaagtgtgagccaa

SEQ ID NO: 432195 - DNA, 15 bp, Homo sapiens
tcaaagtgtgagcca

SEQ ID NO: 432196 - DNA, 15 bp, Homo sapiens
ttcaaagtgtgagcc

SEQ ID NO: 432197 - DNA, 15 bp, Homo sapiens
tttcaaagtgtgagc

SEQ ID NO: 432198 - DNA, 15 bp, Homo sapiens
ttttcaaagtgtgag

SEQ ID NO: 432199 - DNA, 15 bp, Homo sapiens
tttttcaaagtgtga

SEQ ID NO: 432200 - DNA, 15 bp, Homo sapiens
atttttcaaagtgtg

SEQ ID NO: 432201 - DNA, 15 bp, Homo sapiens
aatttttcaaagtgt

SEQ ID NO: 432202 - DNA, 15 bp, Homo sapiens
gaatttttcaaagtg

SEQ ID NO: 432203 - DNA, 15 bp, Homo sapiens
agaatttttcaaagt

SEQ ID NO: 432204 - DNA, 15 bp, Homo sapiens
aagaatttttcaaag

SEQ ID NO: 432205 - DNA, 15 bp, Homo sapiens
aaagaatttttcaaa

SEQ ID NO: 432206 - DNA, 15 bp, Homo sapiens
aaaagaatttttcaa

SEQ ID NO: 432207 - DNA, 15 bp, Homo sapiens
caaaagaatttttca

SEQ ID NO: 432208 - DNA, 15 bp, Homo sapiens
acaaaagaatttttc

SEQ ID NO: 432209 - DNA, 15 bp, Homo sapiens
aacaaaagaattttt

SEQ ID NO: 432210 - DNA, 15 bp, Homo sapiens
caacaaaagaatttt

SEQ ID NO: 432211 - DNA, 15 bp, Homo sapiens
gcaacaaaagaattt

SEQ ID NO: 432212 - DNA, 15 bp, Homo sapiens
tgcaacaaaagaatt

SEQ ID NO: 432213 - DNA, 15 bp, Homo sapiens
ttgcaacaaaagaat

SEQ ID NO: 432214 - DNA, 15 bp, Homo sapiens
tttgcaacaaaagaa

SEQ ID NO: 432215 - DNA, 15 bp, Homo sapiens
atttgcaacaaaaga

SEQ ID NO: 432216 - DNA, 15 bp, Homo sapiens
catttgcaacaaaag

SEQ ID NO: 432217 - DNA, 15 bp, Homo sapiens
ccatttgcaacaaaa

SEQ ID NO: 432218 - DNA, 15 bp, Homo sapiens
tccatttgcaacaaa

SEQ ID NO: 432219 - DNA, 15 bp, Homo sapiens
gtccatttgcaacaa

SEQ ID NO: 432220 - DNA, 15 bp, Homo sapiens
tgtccatttgcaaca

SEQ ID NO: 432221 - DNA, 15 bp, Homo sapiens
ttgtccatttgcaac

SEQ ID NO: 432222 - DNA, 15 bp, Homo sapiens
tttgtccatttgcaa

SEQ ID NO: 432223 - DNA, 15 bp, Homo sapiens
gtttgtccatttgca

SEQ ID NO: 432224 - DNA, 15 bp, Homo sapiens
agtttgtccatttgc

SEQ ID NO: 432225 - DNA, 15 bp, Homo sapiens
gagtttgtccatttg

SEQ ID NO: 432226 - DNA, 15 bp, Homo sapiens
tgagtttgtccattt

SEQ ID NO: 432227 - DNA, 15 bp, Homo sapiens
gtgagtttgtccatt

SEQ ID NO: 432228 - DNA, 15 bp, Homo sapiens
ggtgagtttgtccat

SEQ ID NO: 432229 - DNA, 15 bp, Homo sapiens
tggtgagtttgtcca

SEQ ID NO: 432230 - DNA, 15 bp, Homo sapiens
atggtgagtttgtcc

SEQ ID NO: 432231 - DNA, 15 bp, Homo sapiens
tatggtgagtttgtc

SEQ ID NO: 432232 - DNA, 15 bp, Homo sapiens
gtatggtgagtttgt

SEQ ID NO: 432233 - DNA, 15 bp, Homo sapiens
ggtatggtgagtttg

SEQ ID NO: 432234 - DNA, 15 bp, Homo sapiens
tggtatggtgagttt

SEQ ID NO: 432235 - DNA, 15 bp, Homo sapiens
ttggtatggtgagtt

SEQ ID NO: 432236 - DNA, 15 bp, Homo sapiens
cttggtatggtgagt

SEQ ID NO: 432237 - DNA, 15 bp, Homo sapiens
ccttggtatggtgag

SEQ ID NO: 432238 - DNA, 15 bp, Homo sapiens
gccttggtatggtga

SEQ ID NO: 432239 - DNA, 15 bp, Homo sapiens
ggccttggtatggtg

SEQ ID NO: 432240 - DNA, 15 bp, Homo sapiens
gggccttggtatggt

SEQ ID NO: 432241 - DNA, 15 bp, Homo sapiens
agggccttggtatgg

SEQ ID NO: 432242 - DNA, 15 bp, Homo sapiens
aagggccttggtatg

SEQ ID NO: 432243 - DNA, 15 bp, Homo sapiens
caagggccttggtat

SEQ ID NO: 432244 - DNA, 15 bp, Homo sapiens
acaagggccttggta

SEQ ID NO: 432245 - DNA, 15 bp, Homo sapiens
cacaagggccttggt

SEQ ID NO: 432246 - DNA, 15 bp, Homo sapiens
acacaagggccttgg

SEQ ID NO: 432247 - DNA, 15 bp, Homo sapiens
aacacaagggccttg

SEQ ID NO: 432248 - DNA, 15 bp, Homo sapiens
caacacaagggcctt

SEQ ID NO: 432249 - DNA, 15 bp, Homo sapiens
tcaacacaagggcct

SEQ ID NO: 432250 - DNA, 15 bp, Homo sapiens
ctcaacacaagggcc

SEQ ID NO: 432251 - DNA, 15 bp, Homo sapiens
gctcaacacaagggc

SEQ ID NO: 432252 - DNA, 15 bp, Homo sapiens
agctcaacacaaggg

SEQ ID NO: 432253 - DNA, 15 bp, Homo sapiens
aagctcaacacaagg

SEQ ID NO: 432254 - DNA, 15 bp, Homo sapiens
aaagctcaacacaag

SEQ ID NO: 432255 - DNA, 15 bp, Homo sapiens
caaagctcaacacaa

SEQ ID NO: 432256 - DNA, 15 bp, Homo sapiens
acaaagctcaacaca

SEQ ID NO: 432257 - DNA, 15 bp, Homo sapiens
aacaaagctcaacac

SEQ ID NO: 432258 - DNA, 15 bp, Homo sapiens
aaacaaagctcaaca

SEQ ID NO: 432259 - DNA, 15 bp, Homo sapiens
taaacaaagctcaac

SEQ ID NO: 432260 - DNA, 15 bp, Homo sapiens
ataaacaaagctcaa

SEQ ID NO: 432261 - DNA, 15 bp, Homo sapiens
cataaacaaagctca

SEQ ID NO: 432262 - DNA, 15 bp, Homo sapiens
acataaacaaagctc

SEQ ID NO: 432263 - DNA, 15 bp, Homo sapiens
aacataaacaaagct

SEQ ID NO: 432264 - DNA, 15 bp, Homo sapiens
caacataaacaaagc

SEQ ID NO: 432265 - DNA, 15 bp, Homo sapiens
acaacataaacaaag

SEQ ID NO: 432266 - DNA, 15 bp, Homo sapiens
cacaacataaacaaa

SEQ ID NO: 432267 - DNA, 15 bp, Homo sapiens
acacaacataaacaa

SEQ ID NO: 432268 - DNA, 15 bp, Homo sapiens
tacacaacataaaca

SEQ ID NO: 432269 - DNA, 15 bp, Homo sapiens
gtacacaacataaac

SEQ ID NO: 432270 - DNA, 15 bp, Homo sapiens
ggtacacaacataaa

SEQ ID NO: 432271 - DNA, 15 bp, Homo sapiens
aggtacacaacataa

SEQ ID NO: 432272 - DNA, 15 bp, Homo sapiens
caggtacacaacata

SEQ ID NO: 432273 - DNA, 15 bp, Homo sapiens
ccaggtacacaacat

SEQ ID NO: 432274 - DNA, 15 bp, Homo sapiens
gccaggtacacaaca

SEQ ID NO: 432275 - DNA, 15 bp, Homo sapiens
tgccaggtacacaac

SEQ ID NO: 432276 - DNA, 15 bp, Homo sapiens
ttgccaggtacacaa

SEQ ID NO: 432277 - DNA, 15 bp, Homo sapiens
gttgccaggtacaca

SEQ ID NO: 432278 - DNA, 15 bp, Homo sapiens
tgttgccaggtacac

SEQ ID NO: 432279 - DNA, 15 bp, Homo sapiens
ctgttgccaggtaca

SEQ ID NO: 432280 - DNA, 15 bp, Homo sapiens
tctgttgccaggtac

SEQ ID NO: 432281 - DNA, 15 bp, Homo sapiens
ctctgttgccaggta

SEQ ID NO: 432282 - DNA, 15 bp, Homo sapiens
tctctgttgccaggt

SEQ ID NO: 432283 - DNA, 15 bp, Homo sapiens
atctctgttgccagg

SEQ ID NO: 432284 - DNA, 15 bp, Homo sapiens
catctctgttgccag

SEQ ID NO: 432285 - DNA, 15 bp, Homo sapiens
tcatctctgttgcca

SEQ ID NO: 432286 - DNA, 15 bp, Homo sapiens
atcatctctgttgcc

SEQ ID NO: 432287 - DNA, 15 bp, Homo sapiens
catcatctctgttgc

SEQ ID NO: 432288 - DNA, 15 bp, Homo sapiens
acatcatctctgttg

SEQ ID NO: 432289 - DNA, 15 bp, Homo sapiens
aacatcatctctgtt

SEQ ID NO: 432290 - DNA, 15 bp, Homo sapiens
gaacatcatctctgt

SEQ ID NO: 432291 - DNA, 15 bp, Homo sapiens
agaacatcatctctg

SEQ ID NO: 432292 - DNA, 15 bp, Homo sapiens
aagaacatcatctct

SEQ ID NO: 432293 - DNA, 15 bp, Homo sapiens
caagaacatcatctc

SEQ ID NO: 432294 - DNA, 15 bp, Homo sapiens
acaagaacatcatct

SEQ ID NO: 432295 - DNA, 15 bp, Homo sapiens
aacaagaacatcatc

SEQ ID NO: 432296 - DNA, 15 bp, Homo sapiens
gaacaagaacatcat

SEQ ID NO: 432297 - DNA, 15 bp, Homo sapiens
tgaacaagaacatca

SEQ ID NO: 432298 - DNA, 15 bp, Homo sapiens
atgaacaagaacatc

SEQ ID NO: 432299 - DNA, 15 bp, Homo sapiens
aatgaacaagaacat

SEQ ID NO: 432300 - DNA, 15 bp, Homo sapiens
taatgaacaagaaca

SEQ ID NO: 432301 - DNA, 15 bp, Homo sapiens
ataatgaacaagaac

SEQ ID NO: 432302 - DNA, 15 bp, Homo sapiens
aataatgaacaagaa

SEQ ID NO: 432303 - DNA, 15 bp, Homo sapiens
gaataatgaacaaga

SEQ ID NO: 432304 - DNA, 15 bp, Homo sapiens
tgaataatgaacaag

SEQ ID NO: 432305 - DNA, 15 bp, Homo sapiens
atgaataatgaacaa

SEQ ID NO: 432306 - DNA, 15 bp, Homo sapiens
catgaataatgaaca

SEQ ID NO: 432307 - DNA, 15 bp, Homo sapiens
ccatgaataatgaac

SEQ ID NO: 432308 - DNA, 15 bp, Homo sapiens
tccatgaataatgaa

SEQ ID NO: 432309 - DNA, 15 bp, Homo sapiens
ttccatgaataatga

SEQ ID NO: 432310 - DNA, 15 bp, Homo sapiens
tttccatgaataatg

SEQ ID NO: 432311 - DNA, 15 bp, Homo sapiens
ttttccatgaataat

SEQ ID NO: 432312 - DNA, 15 bp, Homo sapiens
tttttccatgaataa

SEQ ID NO: 432313 - DNA, 15 bp, Homo sapiens
ctttttccatgaata

SEQ ID NO: 432314 - DNA, 15 bp, Homo sapiens
tctttttccatgaat

SEQ ID NO: 432315 - DNA, 15 bp, Homo sapiens
ctctttttccatgaa

SEQ ID NO: 432316 - DNA, 15 bp, Homo sapiens
gctctttttccatga

SEQ ID NO: 432317 - DNA, 15 bp, Homo sapiens
ggctctttttccatg

SEQ ID NO: 432318 - DNA, 15 bp, Homo sapiens
aggctctttttccat

SEQ ID NO: 432319 - DNA, 15 bp, Homo sapiens
gaggctctttttcca

SEQ ID NO: 432320 - DNA, 15 bp, Homo sapiens
tgaggctctttttcc

SEQ ID NO: 432321 - DNA, 15 bp, Homo sapiens
atgaggctctttttc

SEQ ID NO: 432322 - DNA, 15 bp, Homo sapiens
aatgaggctcttttt

SEQ ID NO: 432323 - DNA, 15 bp, Homo sapiens
taatgaggctctttt

SEQ ID NO: 432324 - DNA, 15 bp, Homo sapiens
ctaatgaggctcttt

SEQ ID NO: 432325 - DNA, 15 bp, Homo sapiens
actaatgaggctctt

SEQ ID NO: 432326 - DNA, 15 bp, Homo sapiens
cactaatgaggctct

SEQ ID NO: 432327 - DNA, 15 bp, Homo sapiens
ccactaatgaggctc

SEQ ID NO: 432328 - DNA, 15 bp, Homo sapiens
gccactaatgaggct

SEQ ID NO: 432329 - DNA, 15 bp, Homo sapiens
tgccactaatgaggc

SEQ ID NO: 432330 - DNA, 15 bp, Homo sapiens
ctgccactaatgagg

SEQ ID NO: 432331 - DNA, 15 bp, Homo sapiens
cctgccactaatgag

SEQ ID NO: 432332 - DNA, 15 bp, Homo sapiens
tcctgccactaatga

SEQ ID NO: 432333 - DNA, 15 bp, Homo sapiens
gtcctgccactaatg

SEQ ID NO: 432334 - DNA, 15 bp, Homo sapiens
tgtcctgccactaat

SEQ ID NO: 432335 - DNA, 15 bp, Homo sapiens
gtgtcctgccactaa

SEQ ID NO: 432336 - DNA, 15 bp, Homo sapiens
tgtgtcctgccacta

SEQ ID NO: 432337 - DNA, 15 bp, Homo sapiens
atgtgtcctgccact

SEQ ID NO: 432338 - DNA, 15 bp, Homo sapiens
tatgtgtcctgccac

SEQ ID NO: 432339 - DNA, 15 bp, Homo sapiens
atatgtgtcctgcca

SEQ ID NO: 432340 - DNA, 15 bp, Homo sapiens
aatatgtgtcctgcc

SEQ ID NO: 432341 - DNA, 15 bp, Homo sapiens
caatatgtgtcctgc

SEQ ID NO: 432342 - DNA, 15 bp, Homo sapiens
acaatatgtgtcctg

SEQ ID NO: 432343 - DNA, 15 bp, Homo sapiens
aacaatatgtgtcct

SEQ ID NO: 432344 - DNA, 15 bp, Homo sapiens
caacaatatgtgtcc

SEQ ID NO: 432345 - DNA, 15 bp, Homo sapiens
gcaacaatatgtgtc

SEQ ID NO: 432346 - DNA, 15 bp, Homo sapiens
agcaacaatatgtgt

SEQ ID NO: 432347 - DNA, 15 bp, Homo sapiens
cagcaacaatatgtg

SEQ ID NO: 432348 - DNA, 15 bp, Homo sapiens
tcagcaacaatatgt

SEQ ID NO: 432349 - DNA, 15 bp, Homo sapiens
ctcagcaacaatatg

SEQ ID NO: 432350 - DNA, 15 bp, Homo sapiens
tctcagcaacaatat

SEQ ID NO: 432351 - DNA, 15 bp, Homo sapiens
atctcagcaacaata

SEQ ID NO: 432352 - DNA, 15 bp, Homo sapiens
catctcagcaacaat

SEQ ID NO: 432353 - DNA, 15 bp, Homo sapiens
gcatctcagcaacaa

SEQ ID NO: 432354 - DNA, 15 bp, Homo sapiens
ggcatctcagcaaca

SEQ ID NO: 432355 - DNA, 15 bp, Homo sapiens
aggcatctcagcaac

SEQ ID NO: 432356 - DNA, 15 bp, Homo sapiens
gaggcatctcagcaa

SEQ ID NO: 432357 - DNA, 15 bp, Homo sapiens
cgaggcatctcagca

SEQ ID NO: 432358 - DNA, 15 bp, Homo sapiens
acgaggcatctcagc

SEQ ID NO: 432359 - DNA, 15 bp, Homo sapiens
aacgaggcatctcag

SEQ ID NO: 432360 - DNA, 15 bp, Homo sapiens
taacgaggcatctca

SEQ ID NO: 432361 - DNA, 15 bp, Homo sapiens
ctaacgaggcatctc

SEQ ID NO: 432362 - DNA, 15 bp, Homo sapiens
cctaacgaggcatct

SEQ ID NO: 432363 - DNA, 15 bp, Homo sapiens
ccctaacgaggcatc

SEQ ID NO: 432364 - DNA, 15 bp, Homo sapiens
cccctaacgaggcat

SEQ ID NO: 432365 - DNA, 15 bp, Homo sapiens
acccctaacgaggca

SEQ ID NO: 432366 - DNA, 15 bp, Homo sapiens
aacccctaacgaggc

SEQ ID NO: 432367 - DNA, 15 bp, Homo sapiens
aaacccctaacgagg

SEQ ID NO: 432368 - DNA, 15 bp, Homo sapiens
aaaacccctaacgag

SEQ ID NO: 432369 - DNA, 15 bp, Homo sapiens
caaaacccctaacga

SEQ ID NO: 432370 - DNA, 15 bp, Homo sapiens
tcaaaacccctaacg

SEQ ID NO: 432371 - DNA, 15 bp, Homo sapiens
ctcaaaacccctaac

SEQ ID NO: 432372 - DNA, 15 bp, Homo sapiens
actcaaaacccctaa

SEQ ID NO: 432373 - DNA, 15 bp, Homo sapiens
aactcaaaaccccta

SEQ ID NO: 432374 - DNA, 15 bp, Homo sapiens
gaactcaaaacccct

SEQ ID NO: 432375 - DNA, 15 bp, Homo sapiens
tgaactcaaaacccc

SEQ ID NO: 432376 - DNA, 15 bp, Homo sapiens
ctgaactcaaaaccc

SEQ ID NO: 432377 - DNA, 15 bp, Homo sapiens
gctgaactcaaaacc

SEQ ID NO: 432378 - DNA, 15 bp, Homo sapiens
tgctgaactcaaaac

SEQ ID NO: 432379 - DNA, 15 bp, Homo sapiens
ctgctgaactcaaaa

SEQ ID NO: 432380 - DNA, 15 bp, Homo sapiens
actgctgaactcaaa

SEQ ID NO: 432381 - DNA, 15 bp, Homo sapiens
aactgctgaactcaa

SEQ ID NO: 432382 - DNA, 15 bp, Homo sapiens
caactgctgaactca

SEQ ID NO: 432383 - DNA, 15 bp, Homo sapiens
acaactgctgaactc

SEQ ID NO: 432384 - DNA, 15 bp, Homo sapiens
gacaactgctgaact

SEQ ID NO: 432385 - DNA, 15 bp, Homo sapiens
tgacaactgctgaac

SEQ ID NO: 432386 - DNA, 15 bp, Homo sapiens
ttgacaactgctgaa

SEQ ID NO: 432387 - DNA, 15 bp, Homo sapiens
attgacaactgctga

SEQ ID NO: 432388 - DNA, 15 bp, Homo sapiens
tattgacaactgctg

SEQ ID NO: 432389 - DNA, 15 bp, Homo sapiens
ctattgacaactgct

SEQ ID NO: 432390 - DNA, 15 bp, Homo sapiens
tctattgacaactgc

SEQ ID NO: 432391 - DNA, 15 bp, Homo sapiens
ctctattgacaactg

SEQ ID NO: 432392 - DNA, 15 bp, Homo sapiens
actctattgacaact

SEQ ID NO: 432393 - DNA, 15 bp, Homo sapiens
tactctattgacaac

SEQ ID NO: 432394 - DNA, 15 bp, Homo sapiens
gtactctattgacaa

SEQ ID NO: 432395 - DNA, 15 bp, Homo sapiens
tgtactctattgaca

SEQ ID NO: 432396 - DNA, 15 bp, Homo sapiens
ctgtactctattgac

SEQ ID NO: 432397 - DNA, 15 bp, Homo sapiens
tctgtactctattga

SEQ ID NO: 432398 - DNA, 15 bp, Homo sapiens
atctgtactctattg

SEQ ID NO: 432399 - DNA, 15 bp, Homo sapiens
catctgtactctatt

SEQ ID NO: 432400 - DNA, 15 bp, Homo sapiens
tcatctgtactctat

SEQ ID NO: 432401 - DNA, 15 bp, Homo sapiens
gtcatctgtactcta

SEQ ID NO: 432402 - DNA, 15 bp, Homo sapiens
ggtcatctgtactct

SEQ ID NO: 432403 - DNA, 15 bp, Homo sapiens
aggtcatctgtactc

SEQ ID NO: 432404 - DNA, 15 bp, Homo sapiens
taggtcatctgtact

SEQ ID NO: 432405 - DNA, 15 bp, Homo sapiens
ttaggtcatctgtac

SEQ ID NO: 432406 - DNA, 15 bp, Homo sapiens
gttaggtcatctgta

SEQ ID NO: 432407 - DNA, 15 bp, Homo sapiens
tgttaggtcatctgt

SEQ ID NO: 432408 - DNA, 15 bp, Homo sapiens
gtgttaggtcatctg

SEQ ID NO: 432409 - DNA, 15 bp, Homo sapiens
ggtgttaggtcatct

SEQ ID NO: 432410 - DNA, 15 bp, Homo sapiens
cggtgttaggtcatc

SEQ ID NO: 432411 - DNA, 15 bp, Homo sapiens
tcggtgttaggtcat

SEQ ID NO: 432412 - DNA, 15 bp, Homo sapiens
gtcggtgttaggtca

SEQ ID NO: 432413 - DNA, 15 bp, Homo sapiens
agtcggtgttaggtc

SEQ ID NO: 432414 - DNA, 15 bp, Homo sapiens
cagtcggtgttaggt

SEQ ID NO: 432415 - DNA, 15 bp, Homo sapiens
tcagtcggtgttagg

SEQ ID NO: 432416 - DNA, 15 bp, Homo sapiens
ttcagtcggtgttag

SEQ ID NO: 432417 - DNA, 15 bp, Homo sapiens
attcagtcggtgtta

SEQ ID NO: 432418 - DNA, 15 bp, Homo sapiens
aattcagtcggtgtt

SEQ ID NO: 432419 - DNA, 15 bp, Homo sapiens
gaattcagtcggtgt

SEQ ID NO: 432420 - DNA, 15 bp, Homo sapiens
agaattcagtcggtg

SEQ ID NO: 432421 - DNA, 15 bp, Homo sapiens
cagaattcagtcggt

SEQ ID NO: 432422 - DNA, 15 bp, Homo sapiens
tcagaattcagtcgg

SEQ ID NO: 432423 - DNA, 15 bp, Homo sapiens
ttcagaattcagtcg

SEQ ID NO: 432424 - DNA, 15 bp, Homo sapiens
cttcagaattcagtc

SEQ ID NO: 432425 - DNA, 15 bp, Homo sapiens
ccttcagaattcagt

SEQ ID NO: 432426 - DNA, 15 bp, Homo sapiens
cccttcagaattcag

SEQ ID NO: 432427 - DNA, 15 bp, Homo sapiens
tcccttcagaattca

SEQ ID NO: 432428 - DNA, 15 bp, Homo sapiens
ctcccttcagaattc

SEQ ID NO: 432429 - DNA, 15 bp, Homo sapiens
actcccttcagaatt

SEQ ID NO: 432430 - DNA, 15 bp, Homo sapiens
aactcccttcagaat

SEQ ID NO: 432431 - DNA, 15 bp, Homo sapiens
aaactcccttcagaa

SEQ ID NO: 432432 - DNA, 15 bp, Homo sapiens
aaaactcccttcaga

SEQ ID NO: 432433 - DNA, 15 bp, Homo sapiens
caaaactcccttcag

SEQ ID NO: 432434 - DNA, 15 bp, Homo sapiens
ccaaaactcccttca

SEQ ID NO: 432435 - DNA, 15 bp, Homo sapiens
accaaaactcccttc

SEQ ID NO: 432436 - DNA, 15 bp, Homo sapiens
caccaaaactccctt

SEQ ID NO: 432437 - DNA, 15 bp, Homo sapiens
gcaccaaaactccct

SEQ ID NO: 432438 - DNA, 15 bp, Homo sapiens
agcaccaaaactccc

SEQ ID NO: 432439 - DNA, 15 bp, Homo sapiens
cagcaccaaaactcc

SEQ ID NO: 432440 - DNA, 15 bp, Homo sapiens
tcagcaccaaaactc

SEQ ID NO: 432441 - DNA, 15 bp, Homo sapiens
gtcagcaccaaaact

SEQ ID NO: 432442 - DNA, 15 bp, Homo sapiens
agtcagcaccaaaac

SEQ ID NO: 432443 - DNA, 15 bp, Homo sapiens
aagtcagcaccaaaa

SEQ ID NO: 432444 - DNA, 15 bp, Homo sapiens
caagtcagcaccaaa

SEQ ID NO: 432445 - DNA, 15 bp, Homo sapiens
ccaagtcagcaccaa

SEQ ID NO: 432446 - DNA, 15 bp, Homo sapiens
gccaagtcagcacca

SEQ ID NO: 432447 - DNA, 15 bp, Homo sapiens
agccaagtcagcacc

SEQ ID NO: 432448 - DNA, 15 bp, Homo sapiens
gagccaagtcagcac

SEQ ID NO: 432449 - DNA, 15 bp, Homo sapiens
tgagccaagtcagca

SEQ ID NO: 432450 - DNA, 15 bp, Homo sapiens
ctgagccaagtcagc

SEQ ID NO: 432451 - DNA, 15 bp, Homo sapiens
cctgagccaagtcag

SEQ ID NO: 432452 - DNA, 15 bp, Homo sapiens
gcctgagccaagtca

SEQ ID NO: 432453 - DNA, 15 bp, Homo sapiens
ggcctgagccaagtc

SEQ ID NO: 432454 - DNA, 15 bp, Homo sapiens
aggcctgagccaagt

SEQ ID NO: 432455 - DNA, 15 bp, Homo sapiens
caggcctgagccaag

SEQ ID NO: 432456 - DNA, 15 bp, Homo sapiens
acaggcctgagccaa

SEQ ID NO: 432457 - DNA, 15 bp, Homo sapiens
tacaggcctgagcca

SEQ ID NO: 432458 - DNA, 15 bp, Homo sapiens
atacaggcctgagcc

SEQ ID NO: 432459 - DNA, 15 bp, Homo sapiens
gatacaggcctgagc

SEQ ID NO: 432460 - DNA, 15 bp, Homo sapiens
tgatacaggcctgag

SEQ ID NO: 432461 - DNA, 15 bp, Homo sapiens
atgatacaggcctga

SEQ ID NO: 432462 - DNA, 15 bp, Homo sapiens
aatgatacaggcctg

SEQ ID NO: 432463 - DNA, 15 bp, Homo sapiens
aaatgatacaggcct

SEQ ID NO: 432464 - DNA, 15 bp, Homo sapiens
taaatgatacaggcc

SEQ ID NO: 432465 - DNA, 15 bp, Homo sapiens
gtaaatgatacaggc

SEQ ID NO: 432466 - DNA, 15 bp, Homo sapiens
tgtaaatgatacagg

SEQ ID NO: 432467 - DNA, 15 bp, Homo sapiens
ctgtaaatgatacag

SEQ ID NO: 432468 - DNA, 15 bp, Homo sapiens
actgtaaatgataca

SEQ ID NO: 432469 - DNA, 15 bp, Homo sapiens
tactgtaaatgatac

SEQ ID NO: 432470 - DNA, 15 bp, Homo sapiens
ctactgtaaatgata

SEQ ID NO: 432471 - DNA, 15 bp, Homo sapiens
tctactgtaaatgat

SEQ ID NO: 432472 - DNA, 15 bp, Homo sapiens
ttctactgtaaatga

SEQ ID NO: 432473 - DNA, 15 bp, Homo sapiens
tttctactgtaaatg

SEQ ID NO: 432474 - DNA, 15 bp, Homo sapiens
atttctactgtaaat

SEQ ID NO: 432475 - DNA, 15 bp, Homo sapiens
tatttctactgtaaa

SEQ ID NO: 432476 - DNA, 15 bp, Homo sapiens
atatttctactgtaa

SEQ ID NO: 432477 - DNA, 15 bp, Homo sapiens
tatatttctactgta

SEQ ID NO: 432478 - DNA, 15 bp, Homo sapiens
ttatatttctactgt

SEQ ID NO: 432479 - DNA, 15 bp, Homo sapiens
attatatttctactg

SEQ ID NO: 432480 - DNA, 15 bp, Homo sapiens
cattatatttctact

SEQ ID NO: 432481 - DNA, 15 bp, Homo sapiens
tcattatatttctac

SEQ ID NO: 432482 - DNA, 15 bp, Homo sapiens
ttcattatatttcta

SEQ ID NO: 432483 - DNA, 15 bp, Homo sapiens
cttcattatatttct

SEQ ID NO: 432484 - DNA, 15 bp, Homo sapiens
acttcattatatttc

SEQ ID NO: 432485 - DNA, 15 bp, Homo sapiens
cacttcattatattt

SEQ ID NO: 432486 - DNA, 15 bp, Homo sapiens
ccacttcattatatt

SEQ ID NO: 432487 - DNA, 15 bp, Homo sapiens
gccacttcattatat

SEQ ID NO: 432488 - DNA, 15 bp, Homo sapiens
agccacttcattata

SEQ ID NO: 432489 - DNA, 15 bp, Homo sapiens
cagccacttcattat

SEQ ID NO: 432490 - DNA, 15 bp, Homo sapiens
gcagccacttcatta

SEQ ID NO: 432491 - DNA, 15 bp, Homo sapiens
agcagccacttcatt

SEQ ID NO: 432492 - DNA, 15 bp, Homo sapiens
cagcagccacttcat

SEQ ID NO: 432493 - DNA, 15 bp, Homo sapiens
tcagcagccacttca

SEQ ID NO: 432494 - DNA, 15 bp, Homo sapiens
ttcagcagccacttc

SEQ ID NO: 432495 - DNA, 15 bp, Homo sapiens
cttcagcagccactt

SEQ ID NO: 432496 - DNA, 15 bp, Homo sapiens
acttcagcagccact

SEQ ID NO: 432497 - DNA, 15 bp, Homo sapiens
aacttcagcagccac

SEQ ID NO: 432498 - DNA, 15 bp, Homo sapiens
taacttcagcagcca

SEQ ID NO: 432499 - DNA, 15 bp, Homo sapiens
gtaacttcagcagcc

SEQ ID NO: 432500 - DNA, 15 bp, Homo sapiens
agtaacttcagcagc

SEQ ID NO: 432501 - DNA, 15 bp, Homo sapiens
cagtaacttcagcag

SEQ ID NO: 432502 - DNA, 15 bp, Homo sapiens
acagtaacttcagca

SEQ ID NO: 432503 - DNA, 15 bp, Homo sapiens
aacagtaacttcagc

SEQ ID NO: 432504 - DNA, 15 bp, Homo sapiens
gaacagtaacttcag

SEQ ID NO: 432505 - DNA, 15 bp, Homo sapiens
agaacagtaacttca

SEQ ID NO: 432506 - DNA, 15 bp, Homo sapiens
aagaacagtaacttc

SEQ ID NO: 432507 - DNA, 15 bp, Homo sapiens
caagaacagtaactt

SEQ ID NO: 432508 - DNA, 15 bp, Homo sapiens
tcaagaacagtaact

SEQ ID NO: 432509 - DNA, 15 bp, Homo sapiens
ctcaagaacagtaac

SEQ ID NO: 432510 - DNA, 15 bp, Homo sapiens
cctcaagaacagtaa

SEQ ID NO: 432511 - DNA, 15 bp, Homo sapiens
ccctcaagaacagta

SEQ ID NO: 432512 - DNA, 15 bp, Homo sapiens
accctcaagaacagt

SEQ ID NO: 432513 - DNA, 15 bp, Homo sapiens
aaccctcaagaacag

SEQ ID NO: 432514 - DNA, 15 bp, Homo sapiens
caaccctcaagaaca

SEQ ID NO: 432515 - DNA, 15 bp, Homo sapiens
tcaaccctcaagaac

SEQ ID NO: 432516 - DNA, 15 bp, Homo sapiens
ctcaaccctcaagaa

SEQ ID NO: 432517 - DNA, 15 bp, Homo sapiens
gctcaaccctcaaga

SEQ ID NO: 432518 - DNA, 15 bp, Homo sapiens
agctcaaccctcaag

SEQ ID NO: 432519 - DNA, 15 bp, Homo sapiens
cagctcaaccctcaa

SEQ ID NO: 432520 - DNA, 15 bp, Homo sapiens
gcagctcaaccctca

SEQ ID NO: 432521 - DNA, 15 bp, Homo sapiens
tgcagctcaaccctc

SEQ ID NO: 432522 - DNA, 15 bp, Homo sapiens
ctgcagctcaaccct

SEQ ID NO: 432523 - DNA, 15 bp, Homo sapiens
gctgcagctcaaccc

SEQ ID NO: 432524 - DNA, 15 bp, Homo sapiens
ggctgcagctcaacc

SEQ ID NO: 432525 - DNA, 15 bp, Homo sapiens
tggctgcagctcaac

SEQ ID NO: 432526 - DNA, 15 bp, Homo sapiens
gtggctgcagctcaa

SEQ ID NO: 432527 - DNA, 15 bp, Homo sapiens
agtggctgcagctca

SEQ ID NO: 432528 - DNA, 15 bp, Homo sapiens
cagtggctgcagctc

SEQ ID NO: 432529 - DNA, 15 bp, Homo sapiens
tcagtggctgcagct

SEQ ID NO: 432530 - DNA, 15 bp, Homo sapiens
ttcagtggctgcagc

SEQ ID NO: 432531 - DNA, 15 bp, Homo sapiens
cttcagtggctgcag

SEQ ID NO: 432532 - DNA, 15 bp, Homo sapiens
tcttcagtggctgca

SEQ ID NO: 432533 - DNA, 15 bp, Homo sapiens
atcttcagtggctgc

SEQ ID NO: 432534 - DNA, 15 bp, Homo sapiens
aatcttcagtggctg

SEQ ID NO: 432535 - DNA, 15 bp, Homo sapiens
caatcttcagtggct

SEQ ID NO: 432536 - DNA, 15 bp, Homo sapiens
acaatcttcagtggc

SEQ ID NO: 432537 - DNA, 15 bp, Homo sapiens
cacaatcttcagtgg

SEQ ID NO: 432538 - DNA, 15 bp, Homo sapiens
ccacaatcttcagtg

SEQ ID NO: 432539 - DNA, 15 bp, Homo sapiens
tccacaatcttcagt

SEQ ID NO: 432540 - DNA, 15 bp, Homo sapiens
ttccacaatcttcag

SEQ ID NO: 432541 - DNA, 15 bp, Homo sapiens
tttccacaatcttca

SEQ ID NO: 432542 - DNA, 15 bp, Homo sapiens
ttttccacaatcttc

SEQ ID NO: 432543 - DNA, 15 bp, Homo sapiens
tttttccacaatctt

SEQ ID NO: 432544 - DNA, 15 bp, Homo sapiens
gtttttccacaatct

SEQ ID NO: 432545 - DNA, 15 bp, Homo sapiens
tgtttttccacaatc

SEQ ID NO: 432546 - DNA, 15 bp, Homo sapiens
atgtttttccacaat

SEQ ID NO: 432547 - DNA, 15 bp, Homo sapiens
catgtttttccacaa

SEQ ID NO: 432548 - DNA, 15 bp, Homo sapiens
gcatgtttttccaca

SEQ ID NO: 432549 - DNA, 15 bp, Homo sapiens
ggcatgtttttccac

SEQ ID NO: 432550 - DNA, 15 bp, Homo sapiens
aggcatgtttttcca

SEQ ID NO: 432551 - DNA, 15 bp, Homo sapiens
gaggcatgtttttcc

SEQ ID NO: 432552 - DNA, 15 bp, Homo sapiens
agaggcatgtttttc

SEQ ID NO: 432553 - DNA, 15 bp, Homo sapiens
aagaggcatgttttt

SEQ ID NO: 432554 - DNA, 15 bp, Homo sapiens
caagaggcatgtttt

SEQ ID NO: 432555 - DNA, 15 bp, Homo sapiens
acaagaggcatgttt

SEQ ID NO: 432556 - DNA, 15 bp, Homo sapiens
aacaagaggcatgtt

SEQ ID NO: 432557 - DNA, 15 bp, Homo sapiens
aaacaagaggcatgt

SEQ ID NO: 432558 - DNA, 15 bp, Homo sapiens
gaaacaagaggcatg

SEQ ID NO: 432559 - DNA, 15 bp, Homo sapiens
agaaacaagaggcat

SEQ ID NO: 432560 - DNA, 15 bp, Homo sapiens
gagaaacaagaggca

SEQ ID NO: 432561 - DNA, 15 bp, Homo sapiens
tgagaaacaagaggc

SEQ ID NO: 432562 - DNA, 15 bp, Homo sapiens
gtgagaaacaagagg

SEQ ID NO: 432563 - DNA, 15 bp, Homo sapiens
ggtgagaaacaagag

SEQ ID NO: 432564 - DNA, 15 bp, Homo sapiens
gggtgagaaacaaga

SEQ ID NO: 432565 - DNA, 15 bp, Homo sapiens
ggggtgagaaacaag

SEQ ID NO: 432566 - DNA, 15 bp, Homo sapiens
tggggtgagaaacaa

SEQ ID NO: 432567 - DNA, 15 bp, Homo sapiens
atggggtgagaaaca

SEQ ID NO: 432568 - DNA, 15 bp, Homo sapiens
tatggggtgagaaac

SEQ ID NO: 432569 - DNA, 15 bp, Homo sapiens
atatggggtgagaaa

SEQ ID NO: 432570 - DNA, 15 bp, Homo sapiens
gatatggggtgagaa

SEQ ID NO: 432571 - DNA, 15 bp, Homo sapiens
tgatatggggtgaga

SEQ ID NO: 432572 - DNA, 15 bp, Homo sapiens
atgatatggggtgag

SEQ ID NO: 432573 - DNA, 15 bp, Homo sapiens
catgatatggggtga

SEQ ID NO: 432574 - DNA, 15 bp, Homo sapiens
tcatgatatggggtg

SEQ ID NO: 432575 - DNA, 15 bp, Homo sapiens
ttcatgatatggggt

SEQ ID NO: 432576 - DNA, 15 bp, Homo sapiens
tttcatgatatgggg

SEQ ID NO: 432577 - DNA, 15 bp, Homo sapiens
atttcatgatatggg

SEQ ID NO: 432578 - DNA, 15 bp, Homo sapiens
catttcatgatatgg

SEQ ID NO: 432579 - DNA, 15 bp, Homo sapiens
ccatttcatgatatg

SEQ ID NO: 432580 - DNA, 15 bp, Homo sapiens
cccatttcatgatat

SEQ ID NO: 432581 - DNA, 15 bp, Homo sapiens
acccatttcatgata

SEQ ID NO: 432582 - DNA, 15 bp, Homo sapiens
aacccatttcatgat

SEQ ID NO: 432583 - DNA, 15 bp, Homo sapiens
gaacccatttcatga

SEQ ID NO: 432584 - DNA, 15 bp, Homo sapiens
agaacccatttcatg

SEQ ID NO: 432585 - DNA, 15 bp, Homo sapiens
aagaacccatttcat

SEQ ID NO: 432586 - DNA, 15 bp, Homo sapiens
aaagaacccatttca

SEQ ID NO: 432587 - DNA, 15 bp, Homo sapiens
gaaagaacccatttc

SEQ ID NO: 432588 - DNA, 15 bp, Homo sapiens
tgaaagaacccattt

SEQ ID NO: 432589 - DNA, 15 bp, Homo sapiens
ttgaaagaacccatt

SEQ ID NO: 432590 - DNA, 15 bp, Homo sapiens
cttgaaagaacccat

SEQ ID NO: 432591 - DNA, 15 bp, Homo sapiens
acttgaaagaaccca

SEQ ID NO: 432592 - DNA, 15 bp, Homo sapiens
aacttgaaagaaccc

SEQ ID NO: 432593 - DNA, 15 bp, Homo sapiens
aaacttgaaagaacc

SEQ ID NO: 432594 - DNA, 15 bp, Homo sapiens
taaacttgaaagaac

SEQ ID NO: 432595 - DNA, 15 bp, Homo sapiens
ataaacttgaaagaa

SEQ ID NO: 432596 - DNA, 15 bp, Homo sapiens
gataaacttgaaaga

SEQ ID NO: 432597 - DNA, 15 bp, Homo sapiens
ggataaacttgaaag

SEQ ID NO: 432598 - DNA, 15 bp, Homo sapiens
gggataaacttgaaa

SEQ ID NO: 432599 - DNA, 15 bp, Homo sapiens
agggataaacttgaa

SEQ ID NO: 432600 - DNA, 15 bp, Homo sapiens
cagggataaacttga

SEQ ID NO: 432601 - DNA, 15 bp, Homo sapiens
gcagggataaacttg

SEQ ID NO: 432602 - DNA, 15 bp, Homo sapiens
agcagggataaactt

SEQ ID NO: 432603 - DNA, 15 bp, Homo sapiens
cagcagggataaact

SEQ ID NO: 432604 - DNA, 15 bp, Homo sapiens
gcagcagggataaac

SEQ ID NO: 432605 - DNA, 15 bp, Homo sapiens
agcagcagggataaa

SEQ ID NO: 432606 - DNA, 15 bp, Homo sapiens
aagcagcagggataa

SEQ ID NO: 432607 - DNA, 15 bp, Homo sapiens
aaagcagcagggata

SEQ ID NO: 432608 - DNA, 15 bp, Homo sapiens
aaaagcagcagggat

SEQ ID NO: 432609 - DNA, 15 bp, Homo sapiens
gaaaagcagcaggga

SEQ ID NO: 432610 - DNA, 15 bp, Homo sapiens
ggaaaagcagcaggg

SEQ ID NO: 432611 - DNA, 15 bp, Homo sapiens
aggaaaagcagcagg

SEQ ID NO: 432612 - DNA, 15 bp, Homo sapiens
caggaaaagcagcag

SEQ ID NO: 432613 - DNA, 15 bp, Homo sapiens
ccaggaaaagcagca

SEQ ID NO: 432614 - DNA, 15 bp, Homo sapiens
tccaggaaaagcagc

SEQ ID NO: 432615 - DNA, 15 bp, Homo sapiens
ctccaggaaaagcag

SEQ ID NO: 432616 - DNA, 15 bp, Homo sapiens
tctccaggaaaagca

SEQ ID NO: 432617 - DNA, 15 bp, Homo sapiens
gtctccaggaaaagc

SEQ ID NO: 432618 - DNA, 15 bp, Homo sapiens
cgtctccaggaaaag

SEQ ID NO: 432619 - DNA, 15 bp, Homo sapiens
acgtctccaggaaaa

SEQ ID NO: 432620 - DNA, 15 bp, Homo sapiens
gacgtctccaggaaa

SEQ ID NO: 432621 - DNA, 15 bp, Homo sapiens
agacgtctccaggaa

SEQ ID NO: 432622 - DNA, 15 bp, Homo sapiens
tagacgtctccagga

SEQ ID NO: 432623 - DNA, 15 bp, Homo sapiens
gtagacgtctccagg

SEQ ID NO: 432624 - DNA, 15 bp, Homo sapiens
agtagacgtctccag

SEQ ID NO: 432625 - DNA, 15 bp, Homo sapiens
cagtagacgtctcca

SEQ ID NO: 432626 - DNA, 15 bp, Homo sapiens
tcagtagacgtctcc

SEQ ID NO: 432627 - DNA, 15 bp, Homo sapiens
ctcagtagacgtctc

SEQ ID NO: 432628 - DNA, 15 bp, Homo sapiens
actcagtagacgtct

SEQ ID NO: 432629 - DNA, 15 bp, Homo sapiens
aactcagtagacgtc

SEQ ID NO: 432630 - DNA, 15 bp, Homo sapiens
caactcagtagacgt

SEQ ID NO: 432631 - DNA, 15 bp, Homo sapiens
gcaactcagtagacg

SEQ ID NO: 432632 - DNA, 15 bp, Homo sapiens
agcaactcagtagac

SEQ ID NO: 432633 - DNA, 15 bp, Homo sapiens
cagcaactcagtaga

SEQ ID NO: 432634 - DNA, 15 bp, Homo sapiens
ccagcaactcagtag

SEQ ID NO: 432635 - DNA, 15 bp, Homo sapiens
accagcaactcagta

SEQ ID NO: 432636 - DNA, 15 bp, Homo sapiens
aaccagcaactcagt

SEQ ID NO: 432637 - DNA, 15 bp, Homo sapiens
gaaccagcaactcag

SEQ ID NO: 432638 - DNA, 15 bp, Homo sapiens
ggaaccagcaactca

SEQ ID NO: 432639 - DNA, 15 bp, Homo sapiens
aggaaccagcaactc

SEQ ID NO: 432640 - DNA, 15 bp, Homo sapiens
aaggaaccagcaact

SEQ ID NO: 432641 - DNA, 15 bp, Homo sapiens
taaggaaccagcaac

SEQ ID NO: 432642 - DNA, 15 bp, Homo sapiens
ataaggaaccagcaa

SEQ ID NO: 432643 - DNA, 15 bp, Homo sapiens
gataaggaaccagca

SEQ ID NO: 432644 - DNA, 15 bp, Homo sapiens
agataaggaaccagc

SEQ ID NO: 432645 - DNA, 15 bp, Homo sapiens
cagataaggaaccag

SEQ ID NO: 432646 - DNA, 15 bp, Homo sapiens
ccagataaggaacca

SEQ ID NO: 432647 - DNA, 15 bp, Homo sapiens
gccagataaggaacc

SEQ ID NO: 432648 - DNA, 15 bp, Homo sapiens
ggccagataaggaac

SEQ ID NO: 432649 - DNA, 15 bp, Homo sapiens
gggccagataaggaa

SEQ ID NO: 432650 - DNA, 15 bp, Homo sapiens
agggccagataagga

SEQ ID NO: 432651 - DNA, 15 bp, Homo sapiens
cagggccagataagg

SEQ ID NO: 432652 - DNA, 15 bp, Homo sapiens
ccagggccagataag

SEQ ID NO: 432653 - DNA, 15 bp, Homo sapiens
cccagggccagataa

SEQ ID NO: 432654 - DNA, 15 bp, Homo sapiens
gcccagggccagata

SEQ ID NO: 432655 - DNA, 15 bp, Homo sapiens
cgcccagggccagat

SEQ ID NO: 432656 - DNA, 15 bp, Homo sapiens
tcgcccagggccaga

SEQ ID NO: 432657 - DNA, 15 bp, Homo sapiens
ctcgcccagggccag

SEQ ID NO: 432658 - DNA, 15 bp, Homo sapiens
cctcgcccagggcca

SEQ ID NO: 432659 - DNA, 15 bp, Homo sapiens
tcctcgcccagggcc

SEQ ID NO: 432660 - DNA, 15 bp, Homo sapiens
ttcctcgcccagggc

SEQ ID NO: 432661 - DNA, 15 bp, Homo sapiens
cttcctcgcccaggg

SEQ ID NO: 432662 - DNA, 15 bp, Homo sapiens
acttcctcgcccagg

SEQ ID NO: 432663 - DNA, 15 bp, Homo sapiens
cacttcctcgcccag

SEQ ID NO: 432664 - DNA, 15 bp, Homo sapiens
ccacttcctcgccca

SEQ ID NO: 432665 - DNA, 15 bp, Homo sapiens
cccacttcctcgccc

SEQ ID NO: 432666 - DNA, 15 bp, Homo sapiens
acccacttcctcgcc

SEQ ID NO: 432667 - DNA, 15 bp, Homo sapiens
cacccacttcctcgc

SEQ ID NO: 432668 - DNA, 15 bp, Homo sapiens
gcacccacttcctcg

SEQ ID NO: 432669 - DNA, 15 bp, Homo sapiens
agcacccacttcctc

SEQ ID NO: 432670 - DNA, 15 bp, Homo sapiens
aagcacccacttcct

SEQ ID NO: 432671 - DNA, 15 bp, Homo sapiens
aaagcacccacttcc

SEQ ID NO: 432672 - DNA, 15 bp, Homo sapiens
taaagcacccacttc

SEQ ID NO: 432673 - DNA, 15 bp, Homo sapiens
ctaaagcacccactt

SEQ ID NO: 432674 - DNA, 15 bp, Homo sapiens
tctaaagcacccact

SEQ ID NO: 432675 - DNA, 15 bp, Homo sapiens
ctctaaagcacccac

SEQ ID NO: 432676 - DNA, 15 bp, Homo sapiens
cctctaaagcaccca

SEQ ID NO: 432677 - DNA, 15 bp, Homo sapiens
acctctaaagcaccc

SEQ ID NO: 432678 - DNA, 15 bp, Homo sapiens
gacctctaaagcacc

SEQ ID NO: 432679 - DNA, 15 bp, Homo sapiens
agacctctaaagcac

SEQ ID NO: 432680 - DNA, 15 bp, Homo sapiens
aagacctctaaagca

SEQ ID NO: 432681 - DNA, 15 bp, Homo sapiens
taagacctctaaagc

SEQ ID NO: 432682 - DNA, 15 bp, Homo sapiens
ctaagacctctaaag

SEQ ID NO: 432683 - DNA, 15 bp, Homo sapiens
tctaagacctctaaa

SEQ ID NO: 432684 - DNA, 15 bp, Homo sapiens
ctctaagacctctaa

SEQ ID NO: 432685 - DNA, 15 bp, Homo sapiens
actctaagacctcta

SEQ ID NO: 432686 - DNA, 15 bp, Homo sapiens
tactctaagacctct

SEQ ID NO: 432687 - DNA, 15 bp, Homo sapiens
gtactctaagacctc

SEQ ID NO: 432688 - DNA, 15 bp, Homo sapiens
tgtactctaagacct

SEQ ID NO: 432689 - DNA, 15 bp, Homo sapiens
ctgtactctaagacc

SEQ ID NO: 432690 - DNA, 15 bp, Homo sapiens
tctgtactctaagac

SEQ ID NO: 432691 - DNA, 15 bp, Homo sapiens
gtctgtactctaaga

SEQ ID NO: 432692 - DNA, 15 bp, Homo sapiens
tgtctgtactctaag

SEQ ID NO: 432693 - DNA, 15 bp, Homo sapiens
ctgtctgtactctaa

SEQ ID NO: 432694 - DNA, 15 bp, Homo sapiens
gctgtctgtactcta

SEQ ID NO: 432695 - DNA, 15 bp, Homo sapiens
agctgtctgtactct

SEQ ID NO: 432696 - DNA, 15 bp, Homo sapiens
aagctgtctgtactc

SEQ ID NO: 432697 - DNA, 15 bp, Homo sapiens
aaagctgtctgtact

SEQ ID NO: 432698 - DNA, 15 bp, Homo sapiens
aaaagctgtctgtac

SEQ ID NO: 432699 - DNA, 15 bp, Homo sapiens
taaaagctgtctgta

SEQ ID NO: 432700 - DNA, 15 bp, Homo sapiens
ctaaaagctgtctgt

SEQ ID NO: 432701 - DNA, 15 bp, Homo sapiens
cctaaaagctgtctg

SEQ ID NO: 432702 - DNA, 15 bp, Homo sapiens
ccctaaaagctgtct

SEQ ID NO: 432703 - DNA, 15 bp, Homo sapiens
gccctaaaagctgtc

SEQ ID NO: 432704 - DNA, 15 bp, Homo sapiens
tgccctaaaagctgt

SEQ ID NO: 432705 - DNA, 15 bp, Homo sapiens
atgccctaaaagctg

SEQ ID NO: 432706 - DNA, 15 bp, Homo sapiens
aatgccctaaaagct

SEQ ID NO: 432707 - DNA, 15 bp, Homo sapiens
gaatgccctaaaagc

SEQ ID NO: 432708 - DNA, 15 bp, Homo sapiens
agaatgccctaaaag

SEQ ID NO: 432709 - DNA, 15 bp, Homo sapiens
cagaatgccctaaaa

SEQ ID NO: 432710 - DNA, 15 bp, Homo sapiens
tcagaatgccctaaa

SEQ ID NO: 432711 - DNA, 15 bp, Homo sapiens
atcagaatgccctaa

SEQ ID NO: 432712 - DNA, 15 bp, Homo sapiens
gatcagaatgcccta

SEQ ID NO: 432713 - DNA, 15 bp, Homo sapiens
agatcagaatgccct

SEQ ID NO: 432714 - DNA, 15 bp, Homo sapiens
aagatcagaatgccc

SEQ ID NO: 432715 - DNA, 15 bp, Homo sapiens
gaagatcagaatgcc

SEQ ID NO: 432716 - DNA, 15 bp, Homo sapiens
tgaagatcagaatgc

SEQ ID NO: 432717 - DNA, 15 bp, Homo sapiens
gtgaagatcagaatg

SEQ ID NO: 432718 - DNA, 15 bp, Homo sapiens
ggtgaagatcagaat

SEQ ID NO: 432719 - DNA, 15 bp, Homo sapiens
gggtgaagatcagaa

SEQ ID NO: 432720 - DNA, 15 bp, Homo sapiens
agggtgaagatcaga

SEQ ID NO: 432721 - DNA, 15 bp, Homo sapiens
cagggtgaagatcag

SEQ ID NO: 432722 - DNA, 15 bp, Homo sapiens
ccagggtgaagatca

SEQ ID NO: 432723 - DNA, 15 bp, Homo sapiens
accagggtgaagatc

SEQ ID NO: 432724 - DNA, 15 bp, Homo sapiens
aaccagggtgaagat

SEQ ID NO: 432725 - DNA, 15 bp, Homo sapiens
gaaccagggtgaaga

SEQ ID NO: 432726 - DNA, 15 bp, Homo sapiens
tgaaccagggtgaag

SEQ ID NO: 432727 - DNA, 15 bp, Homo sapiens
ctgaaccagggtgaa

SEQ ID NO: 432728 - DNA, 15 bp, Homo sapiens
tctgaaccagggtga

SEQ ID NO: 432729 - DNA, 15 bp, Homo sapiens
atctgaaccagggtg

SEQ ID NO: 432730 - DNA, 15 bp, Homo sapiens
catctgaaccagggt

SEQ ID NO: 432731 - DNA, 15 bp, Homo sapiens
acatctgaaccaggg

SEQ ID NO: 432732 - DNA, 15 bp, Homo sapiens
gacatctgaaccagg

SEQ ID NO: 432733 - DNA, 15 bp, Homo sapiens
agacatctgaaccag

SEQ ID NO: 432734 - DNA, 15 bp, Homo sapiens
tagacatctgaacca

SEQ ID NO: 432735 - DNA, 15 bp, Homo sapiens
ttagacatctgaacc

SEQ ID NO: 432736 - DNA, 15 bp, Homo sapiens
attagacatctgaac

SEQ ID NO: 432737 - DNA, 15 bp, Homo sapiens
gattagacatctgaa

SEQ ID NO: 432738 - DNA, 15 bp, Homo sapiens
ggattagacatctga

SEQ ID NO: 432739 - DNA, 15 bp, Homo sapiens
tggattagacatctg

SEQ ID NO: 432740 - DNA, 15 bp, Homo sapiens
atggattagacatct

SEQ ID NO: 432741 - DNA, 15 bp, Homo sapiens
catggattagacatc

SEQ ID NO: 432742 - DNA, 15 bp, Homo sapiens
tcatggattagacat

SEQ ID NO: 432743 - DNA, 15 bp, Homo sapiens
ctcatggattagaca

SEQ ID NO: 432744 - DNA, 15 bp, Homo sapiens
tctcatggattagac

SEQ ID NO: 432745 - DNA, 15 bp, Homo sapiens
atctcatggattaga

SEQ ID NO: 432746 - DNA, 15 bp, Homo sapiens
catctcatggattag

SEQ ID NO: 432747 - DNA, 15 bp, Homo sapiens
gcatctcatggatta

SEQ ID NO: 432748 - DNA, 15 bp, Homo sapiens
agcatctcatggatt

SEQ ID NO: 432749 - DNA, 15 bp, Homo sapiens
cagcatctcatggat

SEQ ID NO: 432750 - DNA, 15 bp, Homo sapiens
ccagcatctcatgga

SEQ ID NO: 432751 - DNA, 15 bp, Homo sapiens
tccagcatctcatgg

SEQ ID NO: 432752 - DNA, 15 bp, Homo sapiens
ctccagcatctcatg

SEQ ID NO: 432753 - DNA, 15 bp, Homo sapiens
tctccagcatctcat

SEQ ID NO: 432754 - DNA, 15 bp, Homo sapiens
gtctccagcatctca

SEQ ID NO: 432755 - DNA, 15 bp, Homo sapiens
tgtctccagcatctc

SEQ ID NO: 432756 - DNA, 15 bp, Homo sapiens
ctgtctccagcatct

SEQ ID NO: 432757 - DNA, 15 bp, Homo sapiens
gctgtctccagcatc

SEQ ID NO: 432758 - DNA, 15 bp, Homo sapiens
tgctgtctccagcat

SEQ ID NO: 432759 - DNA, 15 bp, Homo sapiens
gtgctgtctccagca

SEQ ID NO: 432760 - DNA, 15 bp, Homo sapiens
agtgctgtctccagc

SEQ ID NO: 432761 - DNA, 15 bp, Homo sapiens
aagtgctgtctccag

SEQ ID NO: 432762 - DNA, 15 bp, Homo sapiens
taagtgctgtctcca

SEQ ID NO: 432763 - DNA, 15 bp, Homo sapiens
ctaagtgctgtctcc

SEQ ID NO: 432764 - DNA, 15 bp, Homo sapiens
tctaagtgctgtctc

SEQ ID NO: 432765 - DNA, 15 bp, Homo sapiens
ttctaagtgctgtct

SEQ ID NO: 432766 - DNA, 15 bp, Homo sapiens
attctaagtgctgtc

SEQ ID NO: 432767 - DNA, 15 bp, Homo sapiens
gattctaagtgctgt

SEQ ID NO: 432768 - DNA, 15 bp, Homo sapiens
ggattctaagtgctg

SEQ ID NO: 432769 - DNA, 15 bp, Homo sapiens
gggattctaagtgct

SEQ ID NO: 432770 - DNA, 15 bp, Homo sapiens
tgggattctaagtgc

SEQ ID NO: 432771 - DNA, 15 bp, Homo sapiens
ctgggattctaagtg

SEQ ID NO: 432772 - DNA, 15 bp, Homo sapiens
gctgggattctaagt

SEQ ID NO: 432773 - DNA, 15 bp, Homo sapiens
ggctgggattctaag

SEQ ID NO: 432774 - DNA, 15 bp, Homo sapiens
gggctgggattctaa

SEQ ID NO: 432775 - DNA, 15 bp, Homo sapiens
ggggctgggattcta

SEQ ID NO: 432776 - DNA, 15 bp, Homo sapiens
aggggctgggattct

SEQ ID NO: 432777 - DNA, 15 bp, Homo sapiens
aaggggctgggattc

SEQ ID NO: 432778 - DNA, 15 bp, Homo sapiens
gaaggggctgggatt

SEQ ID NO: 432779 - DNA, 15 bp, Homo sapiens
tgaaggggctgggat

SEQ ID NO: 432780 - DNA, 15 bp, Homo sapiens
atgaaggggctggga

SEQ ID NO: 432781 - DNA, 15 bp, Homo sapiens
gatgaaggggctggg

SEQ ID NO: 432782 - DNA, 15 bp, Homo sapiens
ggatgaaggggctgg

SEQ ID NO: 432783 - DNA, 15 bp, Homo sapiens
gggatgaaggggctg

SEQ ID NO: 432784 - DNA, 15 bp, Homo sapiens
agggatgaaggggct

SEQ ID NO: 432785 - DNA, 15 bp, Homo sapiens
gagggatgaaggggc

SEQ ID NO: 432786 - DNA, 15 bp, Homo sapiens
agagggatgaagggg

SEQ ID NO: 432787 - DNA, 15 bp, Homo sapiens
gagagggatgaaggg

SEQ ID NO: 432788 - DNA, 15 bp, Homo sapiens
agagagggatgaagg

SEQ ID NO: 432789 - DNA, 15 bp, Homo sapiens
cagagagggatgaag

SEQ ID NO: 432790 - DNA, 15 bp, Homo sapiens
acagagagggatgaa

SEQ ID NO: 432791 - DNA, 15 bp, Homo sapiens
tacagagagggatga

SEQ ID NO: 432792 - DNA, 15 bp, Homo sapiens
ctacagagagggatg

SEQ ID NO: 432793 - DNA, 15 bp, Homo sapiens
tctacagagagggat

SEQ ID NO: 432794 - DNA, 15 bp, Homo sapiens
ctctacagagaggga

SEQ ID NO: 432795 - DNA, 15 bp, Homo sapiens
gctctacagagaggg

SEQ ID NO: 432796 - DNA, 15 bp, Homo sapiens
ggctctacagagagg

SEQ ID NO: 432797 - DNA, 15 bp, Homo sapiens
tggctctacagagag

SEQ ID NO: 432798 - DNA, 15 bp, Homo sapiens
gtggctctacagaga

SEQ ID NO: 432799 - DNA, 15 bp, Homo sapiens
tgtggctctacagag

SEQ ID NO: 432800 - DNA, 15 bp, Homo sapiens
gtgtggctctacaga

SEQ ID NO: 432801 - DNA, 15 bp, Homo sapiens
ggtgtggctctacag

SEQ ID NO: 432802 - DNA, 15 bp, Homo sapiens
gggtgtggctctaca

SEQ ID NO: 432803 - DNA, 15 bp, Homo sapiens
tgggtgtggctctac

SEQ ID NO: 432804 - DNA, 15 bp, Homo sapiens
ttgggtgtggctcta

SEQ ID NO: 432805 - DNA, 15 bp, Homo sapiens
tttgggtgtggctct

SEQ ID NO: 432806 - DNA, 15 bp, Homo sapiens
ctttgggtgtggctc

SEQ ID NO: 432807 - DNA, 15 bp, Homo sapiens
gctttgggtgtggct

SEQ ID NO: 432808 - DNA, 15 bp, Homo sapiens
tgctttgggtgtggc

SEQ ID NO: 432809 - DNA, 15 bp, Homo sapiens
ctgctttgggtgtgg

SEQ ID NO: 432810 - DNA, 15 bp, Homo sapiens
gctgctttgggtgtg

SEQ ID NO: 432811 - DNA, 15 bp, Homo sapiens
tgctgctttgggtgt

SEQ ID NO: 432812 - DNA, 15 bp, Homo sapiens
ctgctgctttgggtg

SEQ ID NO: 432813 - DNA, 15 bp, Homo sapiens
cctgctgctttgggt

SEQ ID NO: 432814 - DNA, 15 bp, Homo sapiens
tcctgctgctttggg

SEQ ID NO: 432815 - DNA, 15 bp, Homo sapiens
atcctgctgctttgg

SEQ ID NO: 432816 - DNA, 15 bp, Homo sapiens
aatcctgctgctttg

SEQ ID NO: 432817 - DNA, 15 bp, Homo sapiens
taatcctgctgcttt

SEQ ID NO: 432818 - DNA, 15 bp, Homo sapiens
ataatcctgctgctt

SEQ ID NO: 432819 - DNA, 15 bp, Homo sapiens
tataatcctgctgct

SEQ ID NO: 432820 - DNA, 15 bp, Homo sapiens
atataatcctgctgc

SEQ ID NO: 432821 - DNA, 15 bp, Homo sapiens
catataatcctgctg

SEQ ID NO: 432822 - DNA, 15 bp, Homo sapiens
acatataatcctgct

SEQ ID NO: 432823 - DNA, 15 bp, Homo sapiens
gacatataatcctgc

SEQ ID NO: 432824 - DNA, 15 bp, Homo sapiens
ggacatataatcctg

SEQ ID NO: 432825 - DNA, 15 bp, Homo sapiens
aggacatataatcct

SEQ ID NO: 432826 - DNA, 15 bp, Homo sapiens
aaggacatataatcc

SEQ ID NO: 432827 - DNA, 15 bp, Homo sapiens
aaaggacatataatc

SEQ ID NO: 432828 - DNA, 15 bp, Homo sapiens
aaaaggacatataat

SEQ ID NO: 432829 - DNA, 15 bp, Homo sapiens
aaaaaggacatataa

SEQ ID NO: 432830 - DNA, 15 bp, Homo sapiens
taaaaaggacatata

SEQ ID NO: 432831 - DNA, 15 bp, Homo sapiens
gtaaaaaggacatat

SEQ ID NO: 432832 - DNA, 15 bp, Homo sapiens
agtaaaaaggacata

SEQ ID NO: 432833 - DNA, 15 bp, Homo sapiens
tagtaaaaaggacat

SEQ ID NO: 432834 - DNA, 15 bp, Homo sapiens
ttagtaaaaaggaca

SEQ ID NO: 432835 - DNA, 15 bp, Homo sapiens
attagtaaaaaggac

SEQ ID NO: 432836 - DNA, 15 bp, Homo sapiens
aattagtaaaaagga

SEQ ID NO: 432837 - DNA, 15 bp, Homo sapiens
caattagtaaaaagg

SEQ ID NO: 432838 - DNA, 15 bp, Homo sapiens
ccaattagtaaaaag

SEQ ID NO: 432839 - DNA, 15 bp, Homo sapiens
tccaattagtaaaaa

SEQ ID NO: 432840 - DNA, 15 bp, Homo sapiens
ttccaattagtaaaa

SEQ ID NO: 432841 - DNA, 15 bp, Homo sapiens
attccaattagtaaa

SEQ ID NO: 432842 - DNA, 15 bp, Homo sapiens
cattccaattagtaa

SEQ ID NO: 432843 - DNA, 15 bp, Homo sapiens
gcattccaattagta

SEQ ID NO: 432844 - DNA, 15 bp, Homo sapiens
agcattccaattagt

SEQ ID NO: 432845 - DNA, 15 bp, Homo sapiens
gagcattccaattag

SEQ ID NO: 432846 - DNA, 15 bp, Homo sapiens
agagcattccaatta

SEQ ID NO: 432847 - DNA, 15 bp, Homo sapiens
cagagcattccaatt

SEQ ID NO: 432848 - DNA, 15 bp, Homo sapiens
ccagagcattccaat

SEQ ID NO: 432849 - DNA, 15 bp, Homo sapiens
accagagcattccaa

SEQ ID NO: 432850 - DNA, 15 bp, Homo sapiens
aaccagagcattcca

SEQ ID NO: 432851 - DNA, 15 bp, Homo sapiens
caaccagagcattcc

SEQ ID NO: 432852 - DNA, 15 bp, Homo sapiens
ccaaccagagcattc

SEQ ID NO: 432853 - DNA, 15 bp, Homo sapiens
cccaaccagagcatt

SEQ ID NO: 432854 - DNA, 15 bp, Homo sapiens
acccaaccagagcat

SEQ ID NO: 432855 - DNA, 15 bp, Homo sapiens
tacccaaccagagca

SEQ ID NO: 432856 - DNA, 15 bp, Homo sapiens
ctacccaaccagagc

SEQ ID NO: 432857 - DNA, 15 bp, Homo sapiens
gctacccaaccagag

SEQ ID NO: 432858 - DNA, 15 bp, Homo sapiens
ggctacccaaccaga

SEQ ID NO: 432859 - DNA, 15 bp, Homo sapiens
cggctacccaaccag

SEQ ID NO: 432860 - DNA, 15 bp, Homo sapiens
acggctacccaacca

SEQ ID NO: 432861 - DNA, 15 bp, Homo sapiens
aacggctacccaacc

SEQ ID NO: 432862 - DNA, 15 bp, Homo sapiens
aaacggctacccaac

SEQ ID NO: 432863 - DNA, 15 bp, Homo sapiens
aaaacggctacccaa

SEQ ID NO: 432864 - DNA, 15 bp, Homo sapiens
aaaaacggctaccca

SEQ ID NO: 432865 - DNA, 15 bp, Homo sapiens
aaaaaacggctaccc

SEQ ID NO: 432866 - DNA, 15 bp, Homo sapiens
caaaaaacggctacc

SEQ ID NO: 432867 - DNA, 15 bp, Homo sapiens
ccaaaaaacggctac

SEQ ID NO: 432868 - DNA, 15 bp, Homo sapiens
tccaaaaaacggcta

SEQ ID NO: 432869 - DNA, 15 bp, Homo sapiens
atccaaaaaacggct

SEQ ID NO: 432870 - DNA, 15 bp, Homo sapiens
aatccaaaaaacggc

SEQ ID NO: 432871 - DNA, 15 bp, Homo sapiens
caatccaaaaaacgg

SEQ ID NO: 432872 - DNA, 15 bp, Homo sapiens
acaatccaaaaaacg

SEQ ID NO: 432873 - DNA, 15 bp, Homo sapiens
aacaatccaaaaaac

SEQ ID NO: 432874 - DNA, 15 bp, Homo sapiens
aaacaatccaaaaaa

SEQ ID NO: 432875 - DNA, 15 bp, Homo sapiens
aaaacaatccaaaaa

SEQ ID NO: 432876 - DNA, 15 bp, Homo sapiens
aaaaacaatccaaaa

SEQ ID NO: 432877 - DNA, 15 bp, Homo sapiens
caaaaacaatccaaa

SEQ ID NO: 432878 - DNA, 15 bp, Homo sapiens
ccaaaaacaatccaa

SEQ ID NO: 432879 - DNA, 15 bp, Homo sapiens
cccaaaaacaatcca

SEQ ID NO: 432880 - DNA, 15 bp, Homo sapiens
acccaaaaacaatcc

SEQ ID NO: 432881 - DNA, 15 bp, Homo sapiens
tacccaaaaacaatc

SEQ ID NO: 432882 - DNA, 15 bp, Homo sapiens
gtacccaaaaacaat

SEQ ID NO: 432883 - DNA, 15 bp, Homo sapiens
tgtacccaaaaacaa

SEQ ID NO: 432884 - DNA, 15 bp, Homo sapiens
ctgtacccaaaaaca

SEQ ID NO: 432885 - DNA, 15 bp, Homo sapiens
gctgtacccaaaaac

SEQ ID NO: 432886 - DNA, 15 bp, Homo sapiens
tgctgtacccaaaaa

SEQ ID NO: 432887 - DNA, 15 bp, Homo sapiens
ttgctgtacccaaaa

SEQ ID NO: 432888 - DNA, 15 bp, Homo sapiens
attgctgtacccaaa

SEQ ID NO: 432889 - DNA, 15 bp, Homo sapiens
gattgctgtacccaa

SEQ ID NO: 432890 - DNA, 15 bp, Homo sapiens
ggattgctgtaccca

SEQ ID NO: 432891 - DNA, 15 bp, Homo sapiens
aggattgctgtaccc

SEQ ID NO: 432892 - DNA, 15 bp, Homo sapiens
aaggattgctgtacc

SEQ ID NO: 432893 - DNA, 15 bp, Homo sapiens
gaaggattgctgtac

SEQ ID NO: 432894 - DNA, 15 bp, Homo sapiens
agaaggattgctgta

SEQ ID NO: 432895 - DNA, 15 bp, Homo sapiens
aagaaggattgctgt

SEQ ID NO: 432896 - DNA, 15 bp, Homo sapiens
aaagaaggattgctg

SEQ ID NO: 432897 - DNA, 15 bp, Homo sapiens
taaagaaggattgct

SEQ ID NO: 432898 - DNA, 15 bp, Homo sapiens
ataaagaaggattgc

SEQ ID NO: 432899 - DNA, 15 bp, Homo sapiens
aataaagaaggattg

SEQ ID NO: 432900 - DNA, 15 bp, Homo sapiens
taataaagaaggatt

SEQ ID NO: 432901 - DNA, 15 bp, Homo sapiens
gtaataaagaaggat

SEQ ID NO: 432902 - DNA, 15 bp, Homo sapiens
tgtaataaagaagga

SEQ ID NO: 432903 - DNA, 15 bp, Homo sapiens
atgtaataaagaagg

SEQ ID NO: 432904 - DNA, 15 bp, Homo sapiens
aatgtaataaagaag

SEQ ID NO: 432905 - DNA, 15 bp, Homo sapiens
aaatgtaataaagaa

SEQ ID NO: 432906 - DNA, 15 bp, Homo sapiens
caaatgtaataaaga

SEQ ID NO: 432907 - DNA, 15 bp, Homo sapiens
gcaaatgtaataaag

SEQ ID NO: 432908 - DNA, 15 bp, Homo sapiens
agcaaatgtaataaa

SEQ ID NO: 432909 - DNA, 15 bp, Homo sapiens
tagcaaatgtaataa

SEQ ID NO: 432910 - DNA, 15 bp, Homo sapiens
ctagcaaatgtaata

SEQ ID NO: 432911 - DNA, 15 bp, Homo sapiens
cctagcaaatgtaat

SEQ ID NO: 432912 - DNA, 15 bp, Homo sapiens
acctagcaaatgtaa

SEQ ID NO: 432913 - DNA, 15 bp, Homo sapiens
cacctagcaaatgta

SEQ ID NO: 432914 - DNA, 15 bp, Homo sapiens
ccacctagcaaatgt

SEQ ID NO: 432915 - DNA, 15 bp, Homo sapiens
gccacctagcaaatg

SEQ ID NO: 432916 - DNA, 15 bp, Homo sapiens
agccacctagcaaat

SEQ ID NO: 432917 - DNA, 15 bp, Homo sapiens
cagccacctagcaaa

SEQ ID NO: 432918 - DNA, 15 bp, Homo sapiens
tcagccacctagcaa

SEQ ID NO: 432919 - DNA, 15 bp, Homo sapiens
ttcagccacctagca

SEQ ID NO: 432920 - DNA, 15 bp, Homo sapiens
attcagccacctagc

SEQ ID NO: 432921 - DNA, 15 bp, Homo sapiens
aattcagccacctag

SEQ ID NO: 432922 - DNA, 15 bp, Homo sapiens
aaattcagccaccta

SEQ ID NO: 432923 - DNA, 15 bp, Homo sapiens
aaaattcagccacct

SEQ ID NO: 432924 - DNA, 15 bp, Homo sapiens
aaaaattcagccacc

SEQ ID NO: 432925 - DNA, 15 bp, Homo sapiens
aaaaaattcagccac

SEQ ID NO: 432926 - DNA, 15 bp, Homo sapiens
taaaaaattcagcca

SEQ ID NO: 432927 - DNA, 15 bp, Homo sapiens
ttaaaaaattcagcc

SEQ ID NO: 432928 - DNA, 15 bp, Homo sapiens
cttaaaaaattcagc

SEQ ID NO: 432929 - DNA, 15 bp, Homo sapiens
acttaaaaaattcag

SEQ ID NO: 432930 - DNA, 15 bp, Homo sapiens
tacttaaaaaattca

SEQ ID NO: 432931 - DNA, 15 bp, Homo sapiens
ctacttaaaaaattc

SEQ ID NO: 432932 - DNA, 15 bp, Homo sapiens
actacttaaaaaatt

SEQ ID NO: 432933 - DNA, 15 bp, Homo sapiens
tactacttaaaaaat

SEQ ID NO: 432934 - DNA, 15 bp, Homo sapiens
atactacttaaaaaa

SEQ ID NO: 432935 - DNA, 15 bp, Homo sapiens
catactacttaaaaa

SEQ ID NO: 432936 - DNA, 15 bp, Homo sapiens
gcatactacttaaaa

SEQ ID NO: 432937 - DNA, 15 bp, Homo sapiens
agcatactacttaaa

SEQ ID NO: 432938 - DNA, 15 bp, Homo sapiens
cagcatactacttaa

SEQ ID NO: 432939 - DNA, 15 bp, Homo sapiens
ccagcatactactta

SEQ ID NO: 432940 - DNA, 15 bp, Homo sapiens
cccagcatactactt

SEQ ID NO: 432941 - DNA, 15 bp, Homo sapiens
tcccagcatactact

SEQ ID NO: 432942 - DNA, 15 bp, Homo sapiens
ttcccagcatactac

SEQ ID NO: 432943 - DNA, 15 bp, Homo sapiens
gttcccagcatacta

SEQ ID NO: 432944 - DNA, 15 bp, Homo sapiens
tgttcccagcatact

SEQ ID NO: 432945 - DNA, 15 bp, Homo sapiens
gtgttcccagcatac

SEQ ID NO: 432946 - DNA, 15 bp, Homo sapiens
tgtgttcccagcata

SEQ ID NO: 432947 - DNA, 15 bp, Homo sapiens
ttgtgttcccagcat

SEQ ID NO: 432948 - DNA, 15 bp, Homo sapiens
attgtgttcccagca

SEQ ID NO: 432949 - DNA, 15 bp, Homo sapiens
cattgtgttcccagc

SEQ ID NO: 432950 - DNA, 15 bp, Homo sapiens
ccattgtgttcccag

SEQ ID NO: 432951 - DNA, 15 bp, Homo sapiens
cccattgtgttccca

SEQ ID NO: 432952 - DNA, 15 bp, Homo sapiens
tcccattgtgttccc

SEQ ID NO: 432953 - DNA, 15 bp, Homo sapiens
atcccattgtgttcc

SEQ ID NO: 432954 - DNA, 15 bp, Homo sapiens
aatcccattgtgttc

SEQ ID NO: 432955 - DNA, 15 bp, Homo sapiens
taatcccattgtgtt

SEQ ID NO: 432956 - DNA, 15 bp, Homo sapiens
ctaatcccattgtgt

SEQ ID NO: 432957 - DNA, 15 bp, Homo sapiens
actaatcccattgtg

SEQ ID NO: 432958 - DNA, 15 bp, Homo sapiens
aactaatcccattgt

SEQ ID NO: 432959 - DNA, 15 bp, Homo sapiens
gaactaatcccattg

SEQ ID NO: 432960 - DNA, 15 bp, Homo sapiens
agaactaatcccatt

SEQ ID NO: 432961 - DNA, 15 bp, Homo sapiens
cagaactaatcccat

SEQ ID NO: 432962 - DNA, 15 bp, Homo sapiens
gcagaactaatccca

SEQ ID NO: 432963 - DNA, 15 bp, Homo sapiens
agcagaactaatccc

SEQ ID NO: 432964 - DNA, 15 bp, Homo sapiens
aagcagaactaatcc

SEQ ID NO: 432965 - DNA, 15 bp, Homo sapiens
aaagcagaactaatc

SEQ ID NO: 432966 - DNA, 15 bp, Homo sapiens
aaaagcagaactaat

SEQ ID NO: 432967 - DNA, 15 bp, Homo sapiens
gaaaagcagaactaa

SEQ ID NO: 432968 - DNA, 15 bp, Homo sapiens
agaaaagcagaacta

SEQ ID NO: 432969 - DNA, 15 bp, Homo sapiens
cagaaaagcagaact

SEQ ID NO: 432970 - DNA, 15 bp, Homo sapiens
tcagaaaagcagaac

SEQ ID NO: 432971 - DNA, 15 bp, Homo sapiens
gtcagaaaagcagaa

SEQ ID NO: 432972 - DNA, 15 bp, Homo sapiens
ggtcagaaaagcaga

SEQ ID NO: 432973 - DNA, 15 bp, Homo sapiens
aggtcagaaaagcag

SEQ ID NO: 432974 - DNA, 15 bp, Homo sapiens
aaggtcagaaaagca

SEQ ID NO: 432975 - DNA, 15 bp, Homo sapiens
aaaggtcagaaaagc

SEQ ID NO: 432976 - DNA, 15 bp, Homo sapiens
aaaaggtcagaaaag

SEQ ID NO: 432977 - DNA, 15 bp, Homo sapiens
tgaaaaggtcagaaa

SEQ ID NO: 432978 - DNA, 15 bp, Homo sapiens
ttgaaaaggtcagaa

SEQ ID NO: 432979 - DNA, 15 bp, Homo sapiens
tttgaaaaggtcaga

SEQ ID NO: 432980 - DNA, 15 bp, Homo sapiens
ttttgaaaaggtcag

SEQ ID NO: 432981 - DNA, 15 bp, Homo sapiens
tttttgaaaaggtca

SEQ ID NO: 432982 - DNA, 15 bp, Homo sapiens
ctttttgaaaaggtc

SEQ ID NO: 432983 - DNA, 15 bp, Homo sapiens
tctttttgaaaaggt

SEQ ID NO: 432984 - DNA, 15 bp, Homo sapiens
atctttttgaaaagg

SEQ ID NO: 432985 - DNA, 15 bp, Homo sapiens
aatctttttgaaaag

SEQ ID NO: 432986 - DNA, 15 bp, Homo sapiens
aaatctttttgaaaa

SEQ ID NO: 432987 - DNA, 15 bp, Homo sapiens
taaatctttttgaaa

SEQ ID NO: 432988 - DNA, 15 bp, Homo sapiens
ctaaatctttttgaa

SEQ ID NO: 432989 - DNA, 15 bp, Homo sapiens
tctaaatctttttga

SEQ ID NO: 432990 - DNA, 15 bp, Homo sapiens
ttctaaatctttttg

SEQ ID NO: 432991 - DNA, 15 bp, Homo sapiens
tttctaaatcttttt

SEQ ID NO: 432992 - DNA, 15 bp, Homo sapiens
ttttctaaatctttt

SEQ ID NO: 432993 - DNA, 15 bp, Homo sapiens
tttttctaaatcttt

SEQ ID NO: 432994 - DNA, 15 bp, Homo sapiens
atttttctaaatctt

SEQ ID NO: 432995 - DNA, 15 bp, Homo sapiens
catttttctaaatct

SEQ ID NO: 432996 - DNA, 15 bp, Homo sapiens
ccatttttctaaatc

SEQ ID NO: 432997 - DNA, 15 bp, Homo sapiens
gccatttttctaaat

SEQ ID NO: 432998 - DNA, 15 bp, Homo sapiens
tgccatttttctaaa

SEQ ID NO: 432999 - DNA, 15 bp, Homo sapiens
ttgccatttttctaa

SEQ ID NO: 433000 - DNA, 15 bp, Homo sapiens
cttgccatttttcta

SEQ ID NO: 433001 - DNA, 15 bp, Homo sapiens
ccttgccatttttct

SEQ ID NO: 433002 - DNA, 15 bp, Homo sapiens
gccttgccatttttc

SEQ ID NO: 433003 - DNA, 15 bp, Homo sapiens
tgccttgccattttt

SEQ ID NO: 433004 - DNA, 15 bp, Homo sapiens
gtgccttgccatttt

SEQ ID NO: 433005 - DNA, 15 bp, Homo sapiens
agtgccttgccattt

SEQ ID NO: 433006 - DNA, 15 bp, Homo sapiens
cagtgccttgccatt

SEQ ID NO: 433007 - DNA, 15 bp, Homo sapiens
ccagtgccttgccat

SEQ ID NO: 433008 - DNA, 15 bp, Homo sapiens
cccagtgccttgcca

SEQ ID NO: 433009 - DNA, 15 bp, Homo sapiens
ccccagtgccttgcc

SEQ ID NO: 433010 - DNA, 15 bp, Homo sapiens
cccccagtgccttgc

SEQ ID NO: 433011 - DNA, 15 bp, Homo sapiens
gcccccagtgccttg

SEQ ID NO: 433012 - DNA, 15 bp, Homo sapiens
ggcccccagtgcctt

SEQ ID NO: 433013 - DNA, 15 bp, Homo sapiens
tggcccccagtgcct

SEQ ID NO: 433014 - DNA, 15 bp, Homo sapiens
ctggcccccagtgcc

SEQ ID NO: 433015 - DNA, 15 bp, Homo sapiens
cctggcccccagtgc

SEQ ID NO: 433016 - DNA, 15 bp, Homo sapiens
ccctggcccccagtg

SEQ ID NO: 433017 - DNA, 15 bp, Homo sapiens
tccctggcccccagt

SEQ ID NO: 433018 - DNA, 15 bp, Homo sapiens
atccctggcccccag

SEQ ID NO: 433019 - DNA, 15 bp, Homo sapiens
catccctggccccca

SEQ ID NO: 433020 - DNA, 15 bp, Homo sapiens
ccatccctggccccc

SEQ ID NO: 433021 - DNA, 15 bp, Homo sapiens
cccatccctggcccc

SEQ ID NO: 433022 - DNA, 15 bp, Homo sapiens
ccccatccctggccc

SEQ ID NO: 433023 - DNA, 15 bp, Homo sapiens
cccccatccctggcc

SEQ ID NO: 433024 - DNA, 15 bp, Homo sapiens
acccccatccctggc

SEQ ID NO: 433025 - DNA, 15 bp, Homo sapiens
cacccccatccctgg

SEQ ID NO: 433026 - DNA, 15 bp, Homo sapiens
acacccccatccctg

SEQ ID NO: 433027 - DNA, 15 bp, Homo sapiens
gacacccccatccct

SEQ ID NO: 433028 - DNA, 15 bp, Homo sapiens
cgacacccccatccc

SEQ ID NO: 433029 - DNA, 15 bp, Homo sapiens
tcgacacccccatcc

SEQ ID NO: 433030 - DNA, 15 bp, Homo sapiens
ttcgacacccccatc

SEQ ID NO: 433031 - DNA, 15 bp, Homo sapiens
cttcgacacccccat

SEQ ID NO: 433032 - DNA, 15 bp, Homo sapiens
tcttcgacaccccca

SEQ ID NO: 433033 - DNA, 15 bp, Homo sapiens
ttcttcgacaccccc

SEQ ID NO: 433034 - DNA, 15 bp, Homo sapiens
gttcttcgacacccc

SEQ ID NO: 433035 - DNA, 15 bp, Homo sapiens
tgttcttcgacaccc

SEQ ID NO: 433036 - DNA, 15 bp, Homo sapiens
atgttcttcgacacc

SEQ ID NO: 433037 - DNA, 15 bp, Homo sapiens
tatgttcttcgacac

SEQ ID NO: 433038 - DNA, 15 bp, Homo sapiens
atatgttcttcgaca

SEQ ID NO: 433039 - DNA, 15 bp, Homo sapiens
aatatgttcttcgac

SEQ ID NO: 433040 - DNA, 15 bp, Homo sapiens
aaatatgttcttcga

SEQ ID NO: 433041 - DNA, 15 bp, Homo sapiens
aaaatatgttcttcg

SEQ ID NO: 433042 - DNA, 15 bp, Homo sapiens
caaaatatgttcttc

SEQ ID NO: 433043 - DNA, 15 bp, Homo sapiens
ccaaaatatgttctt

SEQ ID NO: 433044 - DNA, 15 bp, Homo sapiens
cccaaaatatgttct

SEQ ID NO: 433045 - DNA, 15 bp, Homo sapiens
ccccaaaatatgttc

SEQ ID NO: 433046 - DNA, 15 bp, Homo sapiens
cccccaaaatatgtt

SEQ ID NO: 433047 - DNA, 15 bp, Homo sapiens
tcccccaaaatatgt

SEQ ID NO: 433048 - DNA, 15 bp, Homo sapiens
ttcccccaaaatatg

SEQ ID NO: 433049 - DNA, 15 bp, Homo sapiens
tttcccccaaaatat

SEQ ID NO: 433050 - DNA, 15 bp, Homo sapiens
ctttcccccaaaata

SEQ ID NO: 433051 - DNA, 15 bp, Homo sapiens
tctttcccccaaaat

SEQ ID NO: 433052 - DNA, 15 bp, Homo sapiens
ttctttcccccaaaa

SEQ ID NO: 433053 - DNA, 15 bp, Homo sapiens
cttctttcccccaaa

SEQ ID NO: 433054 - DNA, 15 bp, Homo sapiens
ccttctttcccccaa

SEQ ID NO: 433055 - DNA, 15 bp, Homo sapiens
cccttctttccccca

SEQ ID NO: 433056 - DNA, 15 bp, Homo sapiens
tcccttctttccccc

SEQ ID NO: 433057 - DNA, 15 bp, Homo sapiens
ctcccttctttcccc

SEQ ID NO: 433058 - DNA, 15 bp, Homo sapiens
cctcccttctttccc

SEQ ID NO: 433059 - DNA, 15 bp, Homo sapiens
gcctcccttctttcc

SEQ ID NO: 433060 - DNA, 15 bp, Homo sapiens
tgcctcccttctttc

SEQ ID NO: 433061 - DNA, 15 bp, Homo sapiens
ttgcctcccttcttt

SEQ ID NO: 433062 - DNA, 15 bp, Homo sapiens
tttgcctcccttctt

SEQ ID NO: 433063 - DNA, 15 bp, Homo sapiens
ttttgcctcccttct

SEQ ID NO: 433064 - DNA, 15 bp, Homo sapiens
attttgcctcccttc

SEQ ID NO: 433065 - DNA, 15 bp, Homo sapiens
cattttgcctccctt

SEQ ID NO: 433066 - DNA, 15 bp, Homo sapiens
acattttgcctccct

SEQ ID NO: 433067 - DNA, 15 bp, Homo sapiens
tacattttgcctccc

SEQ ID NO: 433068 - DNA, 15 bp, Homo sapiens
atacattttgcctcc

SEQ ID NO: 433069 - DNA, 15 bp, Homo sapiens
aatacattttgcctc

SEQ ID NO: 433070 - DNA, 15 bp, Homo sapiens
gaatacattttgcct

SEQ ID NO: 433071 - DNA, 15 bp, Homo sapiens
ggaatacattttgcc

SEQ ID NO: 433072 - DNA, 15 bp, Homo sapiens
gggaatacattttgc

SEQ ID NO: 433073 - DNA, 15 bp, Homo sapiens
ggggaatacattttg

SEQ ID NO: 433074 - DNA, 15 bp, Homo sapiens
aggggaatacatttt

SEQ ID NO: 433075 - DNA, 15 bp, Homo sapiens
aaggggaatacattt

SEQ ID NO: 433076 - DNA, 15 bp, Homo sapiens
caaggggaatacatt

SEQ ID NO: 433077 - DNA, 15 bp, Homo sapiens
acaaggggaatacat

SEQ ID NO: 433078 - DNA, 15 bp, Homo sapiens
gacaaggggaataca

SEQ ID NO: 433079 - DNA, 15 bp, Homo sapiens
agacaaggggaatac

SEQ ID NO: 433080 - DNA, 15 bp, Homo sapiens
gagacaaggggaata

SEQ ID NO: 433081 - DNA, 15 bp, Homo sapiens
tgagacaaggggaat

SEQ ID NO: 433082 - DNA, 15 bp, Homo sapiens
atgagacaaggggaa

SEQ ID NO: 433083 - DNA, 15 bp, Homo sapiens
aatgagacaagggga

SEQ ID NO: 433084 - DNA, 15 bp, Homo sapiens
caatgagacaagggg

SEQ ID NO: 433085 - DNA, 15 bp, Homo sapiens
acaatgagacaaggg

SEQ ID NO: 433086 - DNA, 15 bp, Homo sapiens
aacaatgagacaagg

SEQ ID NO: 433087 - DNA, 15 bp, Homo sapiens
gaacaatgagacaag

SEQ ID NO: 433088 - DNA, 15 bp, Homo sapiens
agaacaatgagacaa

SEQ ID NO: 433089 - DNA, 15 bp, Homo sapiens
aagaacaatgagaca

SEQ ID NO: 433090 - DNA, 15 bp, Homo sapiens
gaagaacaatgagac

SEQ ID NO: 433091 - DNA, 15 bp, Homo sapiens
tgaagaacaatgaga

SEQ ID NO: 433092 - DNA, 15 bp, Homo sapiens
gtgaagaacaatgag

SEQ ID NO: 433093 - DNA, 15 bp, Homo sapiens
ggtgaagaacaatga

SEQ ID NO: 433094 - DNA, 15 bp, Homo sapiens
tggtgaagaacaatg

SEQ ID NO: 433095 - DNA, 15 bp, Homo sapiens
gtggtgaagaacaat

SEQ ID NO: 433096 - DNA, 15 bp, Homo sapiens
ggtggtgaagaacaa

SEQ ID NO: 433097 - DNA, 15 bp, Homo sapiens
aggtggtgaagaaca

SEQ ID NO: 433098 - DNA, 15 bp, Homo sapiens
aaggtggtgaagaac

SEQ ID NO: 433099 - DNA, 15 bp, Homo sapiens
taaggtggtgaagaa

SEQ ID NO: 433100 - DNA, 15 bp, Homo sapiens
ttaaggtggtgaaga

SEQ ID NO: 433101 - DNA, 15 bp, Homo sapiens
tttaaggtggtgaag

SEQ ID NO: 433102 - DNA, 15 bp, Homo sapiens
ttttaaggtggtgaa

SEQ ID NO: 433103 - DNA, 15 bp, Homo sapiens
tttttaaggtggtga

SEQ ID NO: 433104 - DNA, 15 bp, Homo sapiens
ttttttaaggtggtg

SEQ ID NO: 433105 - DNA, 15 bp, Homo sapiens
tttttttaaggtggt

SEQ ID NO: 433106 - DNA, 15 bp, Homo sapiens
ctttttttaaggtgg

SEQ ID NO: 433107 - DNA, 15 bp, Homo sapiens
actttttttaaggtg

SEQ ID NO: 433108 - DNA, 15 bp, Homo sapiens
aactttttttaaggt

SEQ ID NO: 433109 - DNA, 15 bp, Homo sapiens
aaactttttttaagg

SEQ ID NO: 433110 - DNA, 15 bp, Homo sapiens
caaactttttttaag

SEQ ID NO: 433111 - DNA, 15 bp, Homo sapiens
ccaaactttttttaa

SEQ ID NO: 433112 - DNA, 15 bp, Homo sapiens
gccaaacttttttta

SEQ ID NO: 433113 - DNA, 15 bp, Homo sapiens
agccaaacttttttt

SEQ ID NO: 433114 - DNA, 15 bp, Homo sapiens
aagccaaactttttt

SEQ ID NO: 433115 - DNA, 15 bp, Homo sapiens
aaagccaaacttttt

SEQ ID NO: 433116 - DNA, 15 bp, Homo sapiens
caaagccaaactttt

SEQ ID NO: 433117 - DNA, 15 bp, Homo sapiens
tcaaagccaaacttt

SEQ ID NO: 433118 - DNA, 15 bp, Homo sapiens
ctcaaagccaaactt

SEQ ID NO: 433119 - DNA, 15 bp, Homo sapiens
actcaaagccaaact

SEQ ID NO: 433120 - DNA, 15 bp, Homo sapiens
aactcaaagccaaac

SEQ ID NO: 433121 - DNA, 15 bp, Homo sapiens
aaactcaaagccaaa

SEQ ID NO: 433122 - DNA, 15 bp, Homo sapiens
taaactcaaagccaa

SEQ ID NO: 433123 - DNA, 15 bp, Homo sapiens
ataaactcaaagcca

SEQ ID NO: 433124 - DNA, 15 bp, Homo sapiens
tataaactcaaagcc

SEQ ID NO: 433125 - DNA, 15 bp, Homo sapiens
ttataaactcaaagc

SEQ ID NO: 433126 - DNA, 15 bp, Homo sapiens
tttataaactcaaag

SEQ ID NO: 433127 - DNA, 15 bp, Homo sapiens
atttataaactcaaa

SEQ ID NO: 433128 - DNA, 15 bp, Homo sapiens
gatttataaactcaa

SEQ ID NO: 433129 - DNA, 15 bp, Homo sapiens
tgatttataaactca

SEQ ID NO: 433130 - DNA, 15 bp, Homo sapiens
ctgatttataaactc

SEQ ID NO: 433131 - DNA, 15 bp, Homo sapiens
actgatttataaact

SEQ ID NO: 433132 - DNA, 15 bp, Homo sapiens
tactgatttataaac

SEQ ID NO: 433133 - DNA, 15 bp, Homo sapiens
ttactgatttataaa

SEQ ID NO: 433134 - DNA, 15 bp, Homo sapiens
gttactgatttataa

SEQ ID NO: 433135 - DNA, 15 bp, Homo sapiens
tgttactgatttata

SEQ ID NO: 433136 - DNA, 15 bp, Homo sapiens
ttgttactgatttat

SEQ ID NO: 433137 - DNA, 15 bp, Homo sapiens
attgttactgattta

SEQ ID NO: 433138 - DNA, 15 bp, Homo sapiens
gattgttactgattt

SEQ ID NO: 433139 - DNA, 15 bp, Homo sapiens
tgattgttactgatt

SEQ ID NO: 433140 - DNA, 15 bp, Homo sapiens
atgattgttactgat

SEQ ID NO: 433141 - DNA, 15 bp, Homo sapiens
tatgattgttactga

SEQ ID NO: 433142 - DNA, 15 bp, Homo sapiens
atatgattgttactg

SEQ ID NO: 433143 - DNA, 15 bp, Homo sapiens
tatatgattgttact

SEQ ID NO: 433144 - DNA, 15 bp, Homo sapiens
gtatatgattgttac

SEQ ID NO: 433145 - DNA, 15 bp, Homo sapiens
agtatatgattgtta

SEQ ID NO: 433146 - DNA, 15 bp, Homo sapiens
gagtatatgattgtt

SEQ ID NO: 433147 - DNA, 15 bp, Homo sapiens
ggagtatatgattgt

SEQ ID NO: 433148 - DNA, 15 bp, Homo sapiens
aggagtatatgattg

SEQ ID NO: 433149 - DNA, 15 bp, Homo sapiens
caggagtatatgatt

SEQ ID NO: 433150 - DNA, 15 bp, Homo sapiens
acaggagtatatgat

SEQ ID NO: 433151 - DNA, 15 bp, Homo sapiens
cacaggagtatatga

SEQ ID NO: 433152 - DNA, 15 bp, Homo sapiens
acacaggagtatatg

SEQ ID NO: 433153 - DNA, 15 bp, Homo sapiens
gacacaggagtatat

SEQ ID NO: 433154 - DNA, 15 bp, Homo sapiens
ggacacaggagtata

SEQ ID NO: 433155 - DNA, 15 bp, Homo sapiens
gggacacaggagtat

SEQ ID NO: 433156 - DNA, 15 bp, Homo sapiens
ggggacacaggagta

SEQ ID NO: 433157 - DNA, 15 bp, Homo sapiens
tggggacacaggagt

SEQ ID NO: 433158 - DNA, 15 bp, Homo sapiens
gtggggacacaggag

SEQ ID NO: 433159 - DNA, 15 bp, Homo sapiens
tgtggggacacagga

SEQ ID NO: 433160 - DNA, 15 bp, Homo sapiens
ttgtggggacacagg

SEQ ID NO: 433161 - DNA, 15 bp, Homo sapiens
tttgtggggacacag

SEQ ID NO: 433162 - DNA, 15 bp, Homo sapiens
ctttgtggggacaca

SEQ ID NO: 433163 - DNA, 15 bp, Homo sapiens
tctttgtggggacac

SEQ ID NO: 433164 - DNA, 15 bp, Homo sapiens
atctttgtggggaca

SEQ ID NO: 433165 - DNA, 15 bp, Homo sapiens
aatctttgtggggac

SEQ ID NO: 433166 - DNA, 15 bp, Homo sapiens
taatctttgtgggga

SEQ ID NO: 433167 - DNA, 15 bp, Homo sapiens
gtaatctttgtgggg

SEQ ID NO: 433168 - DNA, 15 bp, Homo sapiens
ggtaatctttgtggg

SEQ ID NO: 433169 - DNA, 15 bp, Homo sapiens
tggtaatctttgtgg

SEQ ID NO: 433170 - DNA, 15 bp, Homo sapiens
ctggtaatctttgtg

SEQ ID NO: 433171 - DNA, 15 bp, Homo sapiens
actggtaatctttgt

SEQ ID NO: 433172 - DNA, 15 bp, Homo sapiens
aactggtaatctttg

SEQ ID NO: 433173 - DNA, 15 bp, Homo sapiens
caactggtaatcttt

SEQ ID NO: 433174 - DNA, 15 bp, Homo sapiens
tcaactggtaatctt

SEQ ID NO: 433175 - DNA, 15 bp, Homo sapiens
atcaactggtaatct

SEQ ID NO: 433176 - DNA, 15 bp, Homo sapiens
aatcaactggtaatc

SEQ ID NO: 433177 - DNA, 15 bp, Homo sapiens
caatcaactggtaat

SEQ ID NO: 433178 - DNA, 15 bp, Homo sapiens
ccaatcaactggtaa

SEQ ID NO: 433179 - DNA, 15 bp, Homo sapiens
tccaatcaactggta

SEQ ID NO: 433180 - DNA, 15 bp, Homo sapiens
gtccaatcaactggt

SEQ ID NO: 433181 - DNA, 15 bp, Homo sapiens
tgtccaatcaactgg

SEQ ID NO: 433182 - DNA, 15 bp, Homo sapiens
atgtccaatcaactg

SEQ ID NO: 433183 - DNA, 15 bp, Homo sapiens
tatgtccaatcaact

SEQ ID NO: 433184 - DNA, 15 bp, Homo sapiens
atatgtccaatcaac

SEQ ID NO: 433185 - DNA, 15 bp, Homo sapiens
tatatgtccaatcaa

SEQ ID NO: 433186 - DNA, 15 bp, Homo sapiens
atatatgtccaatca

SEQ ID NO: 433187 - DNA, 15 bp, Homo sapiens
gatatatgtccaatc

SEQ ID NO: 433188 - DNA, 15 bp, Homo sapiens
ggatatatgtccaat

SEQ ID NO: 433189 - DNA, 15 bp, Homo sapiens
tggatatatgtccaa

SEQ ID NO: 433190 - DNA, 15 bp, Homo sapiens
atggatatatgtcca

SEQ ID NO: 433191 - DNA, 15 bp, Homo sapiens
catggatatatgtcc

SEQ ID NO: 433192 - DNA, 15 bp, Homo sapiens
acatggatatatgtc

SEQ ID NO: 433193 - DNA, 15 bp, Homo sapiens
tacatggatatatgt

SEQ ID NO: 433194 - DNA, 15 bp, Homo sapiens
ctacatggatatatg

SEQ ID NO: 433195 - DNA, 15 bp, Homo sapiens
actacatggatatat

SEQ ID NO: 433196 - DNA, 15 bp, Homo sapiens
gactacatggatata

SEQ ID NO: 433197 - DNA, 15 bp, Homo sapiens
agactacatggatat

SEQ ID NO: 433198 - DNA, 15 bp, Homo sapiens
cagactacatggata

SEQ ID NO: 433199 - DNA, 15 bp, Homo sapiens
gcagactacatggat

SEQ ID NO: 433200 - DNA, 15 bp, Homo sapiens
tgcagactacatgga

SEQ ID NO: 433201 - DNA, 15 bp, Homo sapiens
ctgcagactacatgg

SEQ ID NO: 433202 - DNA, 15 bp, Homo sapiens
actgcagactacatg

SEQ ID NO: 433203 - DNA, 15 bp, Homo sapiens
gactgcagactacat

SEQ ID NO: 433204 - DNA, 15 bp, Homo sapiens
agactgcagactaca

SEQ ID NO: 433205 - DNA, 15 bp, Homo sapiens
cagactgcagactac

SEQ ID NO: 433206 - DNA, 15 bp, Homo sapiens
tcagactgcagacta

SEQ ID NO: 433207 - DNA, 15 bp, Homo sapiens
atcagactgcagact

SEQ ID NO: 433208 - DNA, 15 bp, Homo sapiens
aatcagactgcagac

SEQ ID NO: 433209 - DNA, 15 bp, Homo sapiens
aaatcagactgcaga

SEQ ID NO: 433210 - DNA, 15 bp, Homo sapiens
aaaatcagactgcag

SEQ ID NO: 433211 - DNA, 15 bp, Homo sapiens
caaaatcagactgca

SEQ ID NO: 433212 - DNA, 15 bp, Homo sapiens
tcaaaatcagactgc

SEQ ID NO: 433213 - DNA, 15 bp, Homo sapiens
atcaaaatcagactg

SEQ ID NO: 433214 - DNA, 15 bp, Homo sapiens
aatcaaaatcagact

SEQ ID NO: 433215 - DNA, 15 bp, Homo sapiens
aaatcaaaatcagac

SEQ ID NO: 433216 - DNA, 15 bp, Homo sapiens
aaaatcaaaatcaga

SEQ ID NO: 433217 - DNA, 15 bp, Homo sapiens
aaaaatcaaaatcag

SEQ ID NO: 433218 - DNA, 15 bp, Homo sapiens
gcaaaaatcaaaatc

SEQ ID NO: 433219 - DNA, 15 bp, Homo sapiens
ggcaaaaatcaaaat

SEQ ID NO: 433220 - DNA, 15 bp, Homo sapiens
tggcaaaaatcaaaa

SEQ ID NO: 433221 - DNA, 15 bp, Homo sapiens
atggcaaaaatcaaa

SEQ ID NO: 433222 - DNA, 15 bp, Homo sapiens
aatggcaaaaatcaa

SEQ ID NO: 433223 - DNA, 15 bp, Homo sapiens
caatggcaaaaatca

SEQ ID NO: 433224 - DNA, 15 bp, Homo sapiens
tcaatggcaaaaatc

SEQ ID NO: 433225 - DNA, 15 bp, Homo sapiens
ctcaatggcaaaaat

SEQ ID NO: 433226 - DNA, 15 bp, Homo sapiens
tctcaatggcaaaaa

SEQ ID NO: 433227 - DNA, 15 bp, Homo sapiens
atctcaatggcaaaa

SEQ ID NO: 433228 - DNA, 15 bp, Homo sapiens
tatctcaatggcaaa

SEQ ID NO: 433229 - DNA, 15 bp, Homo sapiens
ttatctcaatggcaa

SEQ ID NO: 433230 - DNA, 15 bp, Homo sapiens
gttatctcaatggca

SEQ ID NO: 433231 - DNA, 15 bp, Homo sapiens
agttatctcaatggc

SEQ ID NO: 433232 - DNA, 15 bp, Homo sapiens
aagttatctcaatgg

SEQ ID NO: 433233 - DNA, 15 bp, Homo sapiens
gaagttatctcaatg

SEQ ID NO: 433234 - DNA, 15 bp, Homo sapiens
agaagttatctcaat

SEQ ID NO: 433235 - DNA, 15 bp, Homo sapiens
tagaagttatctcaa

SEQ ID NO: 433236 - DNA, 15 bp, Homo sapiens
ttagaagttatctca

SEQ ID NO: 433237 - DNA, 15 bp, Homo sapiens
attagaagttatctc

SEQ ID NO: 433238 - DNA, 15 bp, Homo sapiens
cattagaagttatct

SEQ ID NO: 433239 - DNA, 15 bp, Homo sapiens
gcattagaagttatc

SEQ ID NO: 433240 - DNA, 15 bp, Homo sapiens
agcattagaagttat

SEQ ID NO: 433241 - DNA, 15 bp, Homo sapiens
aagcattagaagtta

SEQ ID NO: 433242 - DNA, 15 bp, Homo sapiens
aaagcattagaagtt

SEQ ID NO: 433243 - DNA, 15 bp, Homo sapiens
taaagcattagaagt

SEQ ID NO: 433244 - DNA, 15 bp, Homo sapiens
ataaagcattagaag

SEQ ID NO: 433245 - DNA, 15 bp, Homo sapiens
aataaagcattagaa

SEQ ID NO: 433246 - DNA, 15 bp, Homo sapiens
taataaagcattaga

SEQ ID NO: 433247 - DNA, 15 bp, Homo sapiens
ataataaagcattag

SEQ ID NO: 433248 - DNA, 15 bp, Homo sapiens
aataataaagcatta

SEQ ID NO: 433249 - DNA, 15 bp, Homo sapiens
gaataataaagcatt

SEQ ID NO: 433250 - DNA, 15 bp, Homo sapiens
ggaataataaagcat

SEQ ID NO: 433251 - DNA, 15 bp, Homo sapiens
tggaataataaagca

SEQ ID NO: 433252 - DNA, 15 bp, Homo sapiens
ctggaataataaagc

SEQ ID NO: 433253 - DNA, 15 bp, Homo sapiens
cctggaataataaag

SEQ ID NO: 433254 - DNA, 15 bp, Homo sapiens
acctggaataataaa

SEQ ID NO: 433255 - DNA, 15 bp, Homo sapiens
tacctggaataataa

SEQ ID NO: 433256 - DNA, 15 bp, Homo sapiens
atacctggaataata

SEQ ID NO: 433257 - DNA, 15 bp, Homo sapiens
aatacctggaataat

SEQ ID NO: 433258 - DNA, 15 bp, Homo sapiens
taatacctggaataa

SEQ ID NO: 433259 - DNA, 15 bp, Homo sapiens
ctaatacctggaata

SEQ ID NO: 433260 - DNA, 15 bp, Homo sapiens
actaatacctggaat

SEQ ID NO: 433261 - DNA, 15 bp, Homo sapiens
gactaatacctggaa

SEQ ID NO: 433262 - DNA, 15 bp, Homo sapiens
agactaatacctgga

SEQ ID NO: 433263 - DNA, 15 bp, Homo sapiens
tagactaatacctgg

SEQ ID NO: 433264 - DNA, 15 bp, Homo sapiens
ttagactaatacctg

SEQ ID NO: 433265 - DNA, 15 bp, Homo sapiens
tttagactaatacct

SEQ ID NO: 433266 - DNA, 15 bp, Homo sapiens
ttttagactaatacc

SEQ ID NO: 433267 - DNA, 15 bp, Homo sapiens
attttagactaatac

SEQ ID NO: 433268 - DNA, 15 bp, Homo sapiens
tattttagactaata

SEQ ID NO: 433269 - DNA, 15 bp, Homo sapiens
gtattttagactaat

SEQ ID NO: 433270 - DNA, 15 bp, Homo sapiens
agtattttagactaa

SEQ ID NO: 433271 - DNA, 15 bp, Homo sapiens
tagtattttagacta

SEQ ID NO: 433272 - DNA, 15 bp, Homo sapiens
atagtattttagact

SEQ ID NO: 433273 - DNA, 15 bp, Homo sapiens
tatagtattttagac

SEQ ID NO: 433274 - DNA, 15 bp, Homo sapiens
atatagtattttaga

SEQ ID NO: 433275 - DNA, 15 bp, Homo sapiens
aatatagtattttag

SEQ ID NO: 433276 - DNA, 15 bp, Homo sapiens
caatatagtatttta

SEQ ID NO: 433277 - DNA, 15 bp, Homo sapiens
gcaatatagtatttt

SEQ ID NO: 433278 - DNA, 15 bp, Homo sapiens
agcaatatagtattt

SEQ ID NO: 433279 - DNA, 15 bp, Homo sapiens
tagcaatatagtatt

SEQ ID NO: 433280 - DNA, 15 bp, Homo sapiens
atagcaatatagtat

SEQ ID NO: 433281 - DNA, 15 bp, Homo sapiens
gatagcaatatagta

SEQ ID NO: 433282 - DNA, 15 bp, Homo sapiens
ggatagcaatatagt

SEQ ID NO: 433283 - DNA, 15 bp, Homo sapiens
aggatagcaatatag

SEQ ID NO: 433284 - DNA, 15 bp, Homo sapiens
gaggatagcaatata

SEQ ID NO: 433285 - DNA, 15 bp, Homo sapiens
tgaggatagcaatat

SEQ ID NO: 433286 - DNA, 15 bp, Homo sapiens
ctgaggatagcaata

SEQ ID NO: 433287 - DNA, 15 bp, Homo sapiens
cctgaggatagcaat

SEQ ID NO: 433288 - DNA, 15 bp, Homo sapiens
tcctgaggatagcaa

SEQ ID NO: 433289 - DNA, 15 bp, Homo sapiens
atcctgaggatagca

SEQ ID NO: 433290 - DNA, 15 bp, Homo sapiens
aatcctgaggatagc

SEQ ID NO: 433291 - DNA, 15 bp, Homo sapiens
aaatcctgaggatag

SEQ ID NO: 433292 - DNA, 15 bp, Homo sapiens
aaaatcctgaggata

SEQ ID NO: 433293 - DNA, 15 bp, Homo sapiens
aaaaatcctgaggat

SEQ ID NO: 433294 - DNA, 15 bp, Homo sapiens
gaaaaatcctgagga

SEQ ID NO: 433295 - DNA, 15 bp, Homo sapiens
tgaaaaatcctgagg

SEQ ID NO: 433296 - DNA, 15 bp, Homo sapiens
atgaaaaatcctgag

SEQ ID NO: 433297 - DNA, 15 bp, Homo sapiens
tatgaaaaatcctga

SEQ ID NO: 433298 - DNA, 15 bp, Homo sapiens
gtatgaaaaatcctg

SEQ ID NO: 433299 - DNA, 15 bp, Homo sapiens
agtatgaaaaatcct

SEQ ID NO: 433300 - DNA, 15 bp, Homo sapiens
gagtatgaaaaatcc

SEQ ID NO: 433301 - DNA, 15 bp, Homo sapiens
agagtatgaaaaatc

SEQ ID NO: 433302 - DNA, 15 bp, Homo sapiens
aagagtatgaaaaat

SEQ ID NO: 433303 - DNA, 15 bp, Homo sapiens
caagagtatgaaaaa

SEQ ID NO: 433304 - DNA, 15 bp, Homo sapiens
acaagagtatgaaaa

SEQ ID NO: 433305 - DNA, 15 bp, Homo sapiens
tacaagagtatgaaa

SEQ ID NO: 433306 - DNA, 15 bp, Homo sapiens
atacaagagtatgaa

SEQ ID NO: 433307 - DNA, 15 bp, Homo sapiens
aatacaagagtatga

SEQ ID NO: 433308 - DNA, 15 bp, Homo sapiens
aaatacaagagtatg

SEQ ID NO: 433309 - DNA, 15 bp, Homo sapiens
aaaatacaagagtat

SEQ ID NO: 433310 - DNA, 15 bp, Homo sapiens
gaaaatacaagagta

SEQ ID NO: 433311 - DNA, 15 bp, Homo sapiens
tgaaaatacaagagt

SEQ ID NO: 433312 - DNA, 15 bp, Homo sapiens
ttgaaaatacaagag

SEQ ID NO: 433313 - DNA, 15 bp, Homo sapiens
attgaaaatacaaga

SEQ ID NO: 433314 - DNA, 15 bp, Homo sapiens
aattgaaaatacaag

SEQ ID NO: 433315 - DNA, 15 bp, Homo sapiens
aaattgaaaatacaa

SEQ ID NO: 433316 - DNA, 15 bp, Homo sapiens
caaattgaaaataca

SEQ ID NO: 433317 - DNA, 15 bp, Homo sapiens
acaaattgaaaatac

SEQ ID NO: 433318 - DNA, 15 bp, Homo sapiens
cacaaattgaaaata

SEQ ID NO: 433319 - DNA, 15 bp, Homo sapiens
tcacaaattgaaaat

SEQ ID NO: 433320 - DNA, 15 bp, Homo sapiens
atcacaaattgaaaa

SEQ ID NO: 433321 - DNA, 15 bp, Homo sapiens
aatcacaaattgaaa

SEQ ID NO: 433322 - DNA, 15 bp, Homo sapiens
gaatcacaaattgaa

SEQ ID NO: 433323 - DNA, 15 bp, Homo sapiens
tgaatcacaaattga

SEQ ID NO: 433324 - DNA, 15 bp, Homo sapiens
ttgaatcacaaattg

SEQ ID NO: 433325 - DNA, 15 bp, Homo sapiens
gttgaatcacaaatt

SEQ ID NO: 433326 - DNA, 15 bp, Homo sapiens
tgttgaatcacaaat

SEQ ID NO: 433327 - DNA, 15 bp, Homo sapiens
atgttgaatcacaaa

SEQ ID NO: 433328 - DNA, 15 bp, Homo sapiens
aatgttgaatcacaa

SEQ ID NO: 433329 - DNA, 15 bp, Homo sapiens
taatgttgaatcaca

SEQ ID NO: 433330 - DNA, 15 bp, Homo sapiens
ataatgttgaatcac

SEQ ID NO: 433331 - DNA, 15 bp, Homo sapiens
tataatgttgaatca

SEQ ID NO: 433332 - DNA, 15 bp, Homo sapiens
ctataatgttgaatc

SEQ ID NO: 433333 - DNA, 15 bp, Homo sapiens
cctataatgttgaat

SEQ ID NO: 433334 - DNA, 15 bp, Homo sapiens
acctataatgttgaa

SEQ ID NO: 433335 - DNA, 15 bp, Homo sapiens
cacctataatgttga

SEQ ID NO: 433336 - DNA, 15 bp, Homo sapiens
ccacctataatgttg

SEQ ID NO: 433337 - DNA, 15 bp, Homo sapiens
cccacctataatgtt

SEQ ID NO: 433338 - DNA, 15 bp, Homo sapiens
gcccacctataatgt

SEQ ID NO: 433339 - DNA, 15 bp, Homo sapiens
tgcccacctataatg

SEQ ID NO: 433340 - DNA, 15 bp, Homo sapiens
ctgcccacctataat

SEQ ID NO: 433341 - DNA, 15 bp, Homo sapiens
actgcccacctataa

SEQ ID NO: 433342 - DNA, 15 bp, Homo sapiens
aactgcccacctata

SEQ ID NO: 433343 - DNA, 15 bp, Homo sapiens
aaactgcccacctat

SEQ ID NO: 433344 - DNA, 15 bp, Homo sapiens
aaaactgcccaccta

SEQ ID NO: 433345 - DNA, 15 bp, Homo sapiens
taaaactgcccacct

SEQ ID NO: 433346 - DNA, 15 bp, Homo sapiens
ataaaactgcccacc

SEQ ID NO: 433347 - DNA, 15 bp, Homo sapiens
aataaaactgcccac

SEQ ID NO: 433348 - DNA, 15 bp, Homo sapiens
gaataaaactgccca

SEQ ID NO: 433349 - DNA, 15 bp, Homo sapiens
ggaataaaactgccc

SEQ ID NO: 433350 - DNA, 15 bp, Homo sapiens
tggaataaaactgcc

SEQ ID NO: 433351 - DNA, 15 bp, Homo sapiens
ctggaataaaactgc

SEQ ID NO: 433352 - DNA, 15 bp, Homo sapiens
cctggaataaaactg

SEQ ID NO: 433353 - DNA, 15 bp, Homo sapiens
acctggaataaaact

SEQ ID NO: 433354 - DNA, 15 bp, Homo sapiens
cacctggaataaaac

SEQ ID NO: 433355 - DNA, 15 bp, Homo sapiens
ccacctggaataaaa

SEQ ID NO: 433356 - DNA, 15 bp, Homo sapiens
gccacctggaataaa

SEQ ID NO: 433357 - DNA, 15 bp, Homo sapiens
agccacctggaataa

SEQ ID NO: 433358 - DNA, 15 bp, Homo sapiens
cagccacctggaata

SEQ ID NO: 433359 - DNA, 15 bp, Homo sapiens
tcagccacctggaat

SEQ ID NO: 433360 - DNA, 15 bp, Homo sapiens
atcagccacctggaa

SEQ ID NO: 433361 - DNA, 15 bp, Homo sapiens
gatcagccacctgga

SEQ ID NO: 433362 - DNA, 15 bp, Homo sapiens
ggatcagccacctgg

SEQ ID NO: 433363 - DNA, 15 bp, Homo sapiens
aggatcagccacctg

SEQ ID NO: 433364 - DNA, 15 bp, Homo sapiens
caggatcagccacct

SEQ ID NO: 433365 - DNA, 15 bp, Homo sapiens
ccaggatcagccacc

SEQ ID NO: 433366 - DNA, 15 bp, Homo sapiens
accaggatcagccac

SEQ ID NO: 433367 - DNA, 15 bp, Homo sapiens
aaccaggatcagcca

SEQ ID NO: 433368 - DNA, 15 bp, Homo sapiens
gaaccaggatcagcc

SEQ ID NO: 433369 - DNA, 15 bp, Homo sapiens
agaaccaggatcagc

SEQ ID NO: 433370 - DNA, 15 bp, Homo sapiens
tagaaccaggatcag

SEQ ID NO: 433371 - DNA, 15 bp, Homo sapiens
atagaaccaggatca

SEQ ID NO: 433372 - DNA, 15 bp, Homo sapiens
tatagaaccaggatc

SEQ ID NO: 433373 - DNA, 15 bp, Homo sapiens
ttatagaaccaggat

SEQ ID NO: 433374 - DNA, 15 bp, Homo sapiens
attatagaaccagga

SEQ ID NO: 433375 - DNA, 15 bp, Homo sapiens
cattatagaaccagg

SEQ ID NO: 433376 - DNA, 15 bp, Homo sapiens
acattatagaaccag

SEQ ID NO: 433377 - DNA, 15 bp, Homo sapiens
aacattatagaacca

SEQ ID NO: 433378 - DNA, 15 bp, Homo sapiens
gaacattatagaacc

SEQ ID NO: 433379 - DNA, 15 bp, Homo sapiens
agaacattatagaac

SEQ ID NO: 433380 - DNA, 15 bp, Homo sapiens
aagaacattatagaa

SEQ ID NO: 433381 - DNA, 15 bp, Homo sapiens
gaagaacattataga

SEQ ID NO: 433382 - DNA, 15 bp, Homo sapiens
tgaagaacattatag

SEQ ID NO: 433383 - DNA, 15 bp, Homo sapiens
gtgaagaacattata

SEQ ID NO: 433384 - DNA, 15 bp, Homo sapiens
tgtgaagaacattat

SEQ ID NO: 433385 - DNA, 15 bp, Homo sapiens
gtgtgaagaacatta

SEQ ID NO: 433386 - DNA, 15 bp, Homo sapiens
tgtgtgaagaacatt

SEQ ID NO: 433387 - DNA, 15 bp, Homo sapiens
ctgtgtgaagaacat

SEQ ID NO: 433388 - DNA, 15 bp, Homo sapiens
actgtgtgaagaaca

SEQ ID NO: 433389 - DNA, 15 bp, Homo sapiens
cactgtgtgaagaac

SEQ ID NO: 433390 - DNA, 15 bp, Homo sapiens
tcactgtgtgaagaa

SEQ ID NO: 433391 - DNA, 15 bp, Homo sapiens
gtcactgtgtgaaga

SEQ ID NO: 433392 - DNA, 15 bp, Homo sapiens
agtcactgtgtgaag

SEQ ID NO: 433393 - DNA, 15 bp, Homo sapiens
tagtcactgtgtgaa

SEQ ID NO: 433394 - DNA, 15 bp, Homo sapiens
ttagtcactgtgtga

SEQ ID NO: 433395 - DNA, 15 bp, Homo sapiens
tttagtcactgtgtg

SEQ ID NO: 433396 - DNA, 15 bp, Homo sapiens
ttttagtcactgtgt

SEQ ID NO: 433397 - DNA, 15 bp, Homo sapiens
attttagtcactgtg

SEQ ID NO: 433398 - DNA, 15 bp, Homo sapiens
tattttagtcactgt

SEQ ID NO: 433399 - DNA, 15 bp, Homo sapiens
ctattttagtcactg

SEQ ID NO: 433400 - DNA, 15 bp, Homo sapiens
gctattttagtcact

SEQ ID NO: 433401 - DNA, 15 bp, Homo sapiens
tgctattttagtcac

SEQ ID NO: 433402 - DNA, 15 bp, Homo sapiens
ctgctattttagtca

SEQ ID NO: 433403 - DNA, 15 bp, Homo sapiens
gctgctattttagtc

SEQ ID NO: 433404 - DNA, 15 bp, Homo sapiens
tgctgctattttagt

SEQ ID NO: 433405 - DNA, 15 bp, Homo sapiens
ttgctgctattttag

SEQ ID NO: 433406 - DNA, 15 bp, Homo sapiens
gttgctgctatttta

SEQ ID NO: 433407 - DNA, 15 bp, Homo sapiens
tgttgctgctatttt

SEQ ID NO: 433408 - DNA, 15 bp, Homo sapiens
ctgttgctgctattt

SEQ ID NO: 433409 - DNA, 15 bp, Homo sapiens
gctgttgctgctatt

SEQ ID NO: 433410 - DNA, 15 bp, Homo sapiens
agctgttgctgctat

SEQ ID NO: 433411 - DNA, 15 bp, Homo sapiens
tagctgttgctgcta

SEQ ID NO: 433412 - DNA, 15 bp, Homo sapiens
ctagctgttgctgct

SEQ ID NO: 433413 - DNA, 15 bp, Homo sapiens
gctagctgttgctgc

SEQ ID NO: 433414 - DNA, 15 bp, Homo sapiens
tgctagctgttgctg

SEQ ID NO: 433415 - DNA, 15 bp, Homo sapiens
atgctagctgttgct

SEQ ID NO: 433416 - DNA, 15 bp, Homo sapiens
aatgctagctgttgc

SEQ ID NO: 433417 - DNA, 15 bp, Homo sapiens
aaatgctagctgttg

SEQ ID NO: 433418 - DNA, 15 bp, Homo sapiens
taaatgctagctgtt

SEQ ID NO: 433419 - DNA, 15 bp, Homo sapiens
ataaatgctagctgt

SEQ ID NO: 433420 - DNA, 15 bp, Homo sapiens
aataaatgctagctg

SEQ ID NO: 433421 - DNA, 15 bp, Homo sapiens
caataaatgctagct

SEQ ID NO: 433422 - DNA, 15 bp, Homo sapiens
tcaataaatgctagc

SEQ ID NO: 433423 - DNA, 15 bp, Homo sapiens
ctcaataaatgctag

SEQ ID NO: 433424 - DNA, 15 bp, Homo sapiens
actcaataaatgcta

SEQ ID NO: 433425 - DNA, 15 bp, Homo sapiens
aactcaataaatgct

SEQ ID NO: 433426 - DNA, 15 bp, Homo sapiens
gaactcaataaatgc

SEQ ID NO: 433427 - DNA, 15 bp, Homo sapiens
agaactcaataaatg

SEQ ID NO: 433428 - DNA, 15 bp, Homo sapiens
aagaactcaataaat

SEQ ID NO: 433429 - DNA, 15 bp, Homo sapiens
caagaactcaataaa

SEQ ID NO: 433430 - DNA, 15 bp, Homo sapiens
acaagaactcaataa

SEQ ID NO: 433431 - DNA, 15 bp, Homo sapiens
tacaagaactcaata

SEQ ID NO: 433432 - DNA, 15 bp, Homo sapiens
ttacaagaactcaat

SEQ ID NO: 433433 - DNA, 15 bp, Homo sapiens
attacaagaactcaa

SEQ ID NO: 433434 - DNA, 15 bp, Homo sapiens
cattacaagaactca

SEQ ID NO: 433435 - DNA, 15 bp, Homo sapiens
acattacaagaactc

SEQ ID NO: 433436 - DNA, 15 bp, Homo sapiens
tacattacaagaact

SEQ ID NO: 433437 - DNA, 15 bp, Homo sapiens
atacattacaagaac

SEQ ID NO: 433438 - DNA, 15 bp, Homo sapiens
gatacattacaagaa

SEQ ID NO: 433439 - DNA, 15 bp, Homo sapiens
tgatacattacaaga

SEQ ID NO: 433440 - DNA, 15 bp, Homo sapiens
ctgatacattacaag

SEQ ID NO: 433441 - DNA, 15 bp, Homo sapiens
actgatacattacaa

SEQ ID NO: 433442 - DNA, 15 bp, Homo sapiens
tactgatacattaca

SEQ ID NO: 433443 - DNA, 15 bp, Homo sapiens
atactgatacattac

SEQ ID NO: 433444 - DNA, 15 bp, Homo sapiens
gatactgatacatta

SEQ ID NO: 433445 - DNA, 15 bp, Homo sapiens
tgatactgatacatt

SEQ ID NO: 433446 - DNA, 15 bp, Homo sapiens
atgatactgatacat

SEQ ID NO: 433447 - DNA, 15 bp, Homo sapiens
tatgatactgataca

SEQ ID NO: 433448 - DNA, 15 bp, Homo sapiens
gtatgatactgatac

SEQ ID NO: 433449 - DNA, 15 bp, Homo sapiens
tgtatgatactgata

SEQ ID NO: 433450 - DNA, 15 bp, Homo sapiens
atgtatgatactgat

SEQ ID NO: 433451 - DNA, 15 bp, Homo sapiens
catgtatgatactga

SEQ ID NO: 433452 - DNA, 15 bp, Homo sapiens
tcatgtatgatactg

SEQ ID NO: 433453 - DNA, 15 bp, Homo sapiens
atcatgtatgatact

SEQ ID NO: 433454 - DNA, 15 bp, Homo sapiens
aatcatgtatgatac

SEQ ID NO: 433455 - DNA, 15 bp, Homo sapiens
gaatcatgtatgata

SEQ ID NO: 433456 - DNA, 15 bp, Homo sapiens
tgaatcatgtatgat

SEQ ID NO: 433457 - DNA, 15 bp, Homo sapiens
ttgaatcatgtatga

SEQ ID NO: 433458 - DNA, 15 bp, Homo sapiens
tttgaatcatgtatg

SEQ ID NO: 433459 - DNA, 15 bp, Homo sapiens
gtttgaatcatgtat

SEQ ID NO: 433460 - DNA, 15 bp, Homo sapiens
ggtttgaatcatgta

SEQ ID NO: 433461 - DNA, 15 bp, Homo sapiens
tggtttgaatcatgt

SEQ ID NO: 433462 - DNA, 15 bp, Homo sapiens
gtggtttgaatcatg

SEQ ID NO: 433463 - DNA, 15 bp, Homo sapiens
tgtggtttgaatcat

SEQ ID NO: 433464 - DNA, 15 bp, Homo sapiens
ttgtggtttgaatca

SEQ ID NO: 433465 - DNA, 15 bp, Homo sapiens
cttgtggtttgaatc

SEQ ID NO: 433466 - DNA, 15 bp, Homo sapiens
gcttgtggtttgaat

SEQ ID NO: 433467 - DNA, 15 bp, Homo sapiens
tgcttgtggtttgaa

SEQ ID NO: 433468 - DNA, 15 bp, Homo sapiens
atgcttgtggtttga

SEQ ID NO: 433469 - DNA, 15 bp, Homo sapiens
tatgcttgtggtttg

SEQ ID NO: 433470 - DNA, 15 bp, Homo sapiens
atatgcttgtggttt

SEQ ID NO: 433471 - DNA, 15 bp, Homo sapiens
aatatgcttgtggtt

SEQ ID NO: 433472 - DNA, 15 bp, Homo sapiens
aaatatgcttgtggt

SEQ ID NO: 433473 - DNA, 15 bp, Homo sapiens
caaatatgcttgtgg

SEQ ID NO: 433474 - DNA, 15 bp, Homo sapiens
ccaaatatgcttgtg

SEQ ID NO: 433475 - DNA, 15 bp, Homo sapiens
accaaatatgcttgt

SEQ ID NO: 433476 - DNA, 15 bp, Homo sapiens
taccaaatatgcttg

SEQ ID NO: 433477 - DNA, 15 bp, Homo sapiens
ctaccaaatatgctt

SEQ ID NO: 433478 - DNA, 15 bp, Homo sapiens
tctaccaaatatgct

SEQ ID NO: 433479 - DNA, 15 bp, Homo sapiens
atctaccaaatatgc

SEQ ID NO: 433480 - DNA, 15 bp, Homo sapiens
tatctaccaaatatg

SEQ ID NO: 433481 - DNA, 15 bp, Homo sapiens
gtatctaccaaatat

SEQ ID NO: 433482 - DNA, 15 bp, Homo sapiens
agtatctaccaaata

SEQ ID NO: 433483 - DNA, 15 bp, Homo sapiens
cagtatctaccaaat

SEQ ID NO: 433484 - DNA, 15 bp, Homo sapiens
acagtatctaccaaa

SEQ ID NO: 433485 - DNA, 15 bp, Homo sapiens
aacagtatctaccaa

SEQ ID NO: 433486 - DNA, 15 bp, Homo sapiens
caacagtatctacca

SEQ ID NO: 433487 - DNA, 15 bp, Homo sapiens
acaacagtatctacc

SEQ ID NO: 433488 - DNA, 15 bp, Homo sapiens
aacaacagtatctac

SEQ ID NO: 433489 - DNA, 15 bp, Homo sapiens
taacaacagtatcta

SEQ ID NO: 433490 - DNA, 15 bp, Homo sapiens
ctaacaacagtatct

SEQ ID NO: 433491 - DNA, 15 bp, Homo sapiens
gctaacaacagtatc

SEQ ID NO: 433492 - DNA, 15 bp, Homo sapiens
ggctaacaacagtat

SEQ ID NO: 433493 - DNA, 15 bp, Homo sapiens
gggctaacaacagta

SEQ ID NO: 433494 - DNA, 15 bp, Homo sapiens
ggggctaacaacagt

SEQ ID NO: 433495 - DNA, 15 bp, Homo sapiens
tggggctaacaacag

SEQ ID NO: 433496 - DNA, 15 bp, Homo sapiens
atggggctaacaaca

SEQ ID NO: 433497 - DNA, 15 bp, Homo sapiens
aatggggctaacaac

SEQ ID NO: 433498 - DNA, 15 bp, Homo sapiens
aaatggggctaacaa

SEQ ID NO: 433499 - DNA, 15 bp, Homo sapiens
aaaatggggctaaca

SEQ ID NO: 433500 - DNA, 15 bp, Homo sapiens
caaaatggggctaac

SEQ ID NO: 433501 - DNA, 15 bp, Homo sapiens
gcaaaatggggctaa

SEQ ID NO: 433502 - DNA, 15 bp, Homo sapiens
tgcaaaatggggcta

SEQ ID NO: 433503 - DNA, 15 bp, Homo sapiens
ctgcaaaatggggct

SEQ ID NO: 433504 - DNA, 15 bp, Homo sapiens
cctgcaaaatggggc

SEQ ID NO: 433505 - DNA, 15 bp, Homo sapiens
acctgcaaaatgggg

SEQ ID NO: 433506 - DNA, 15 bp, Homo sapiens
tacctgcaaaatggg

SEQ ID NO: 433507 - DNA, 15 bp, Homo sapiens
atacctgcaaaatgg

SEQ ID NO: 433508 - DNA, 15 bp, Homo sapiens
catacctgcaaaatg

SEQ ID NO: 433509 - DNA, 15 bp, Homo sapiens
ccatacctgcaaaat

SEQ ID NO: 433510 - DNA, 15 bp, Homo sapiens
accatacctgcaaaa

SEQ ID NO: 433511 - DNA, 15 bp, Homo sapiens
taccatacctgcaaa

SEQ ID NO: 433512 - DNA, 15 bp, Homo sapiens
ttaccatacctgcaa

SEQ ID NO: 433513 - DNA, 15 bp, Homo sapiens
gttaccatacctgca

SEQ ID NO: 433514 - DNA, 15 bp, Homo sapiens
agttaccatacctgc

SEQ ID NO: 433515 - DNA, 15 bp, Homo sapiens
cagttaccatacctg

SEQ ID NO: 433516 - DNA, 15 bp, Homo sapiens
ccagttaccatacct

SEQ ID NO: 433517 - DNA, 15 bp, Homo sapiens
accagttaccatacc

SEQ ID NO: 433518 - DNA, 15 bp, Homo sapiens
taccagttaccatac

SEQ ID NO: 433519 - DNA, 15 bp, Homo sapiens
gtaccagttaccata

SEQ ID NO: 433520 - DNA, 15 bp, Homo sapiens
tgtaccagttaccat

SEQ ID NO: 433521 - DNA, 15 bp, Homo sapiens
ttgtaccagttacca

SEQ ID NO: 433522 - DNA, 15 bp, Homo sapiens
tttgtaccagttacc

SEQ ID NO: 433523 - DNA, 15 bp, Homo sapiens
ttttgtaccagttac

SEQ ID NO: 433524 - DNA, 15 bp, Homo sapiens
tttttgtaccagtta

SEQ ID NO: 433525 - DNA, 15 bp, Homo sapiens
ctttttgtaccagtt

SEQ ID NO: 433526 - DNA, 15 bp, Homo sapiens
tctttttgtaccagt

SEQ ID NO: 433527 - DNA, 15 bp, Homo sapiens
ttctttttgtaccag

SEQ ID NO: 433528 - DNA, 15 bp, Homo sapiens
cttctttttgtacca

SEQ ID NO: 433529 - DNA, 15 bp, Homo sapiens
ccttctttttgtacc

SEQ ID NO: 433530 - DNA, 15 bp, Homo sapiens
accttctttttgtac

SEQ ID NO: 433531 - DNA, 15 bp, Homo sapiens
taccttctttttgta

SEQ ID NO: 433532 - DNA, 15 bp, Homo sapiens
ttaccttctttttgt

SEQ ID NO: 433533 - DNA, 15 bp, Homo sapiens
attaccttctttttg

SEQ ID NO: 433534 - DNA, 15 bp, Homo sapiens
aattaccttcttttt

SEQ ID NO: 433535 - DNA, 15 bp, Homo sapiens
caattaccttctttt

SEQ ID NO: 433536 - DNA, 15 bp, Homo sapiens
gcaattaccttcttt

SEQ ID NO: 433537 - DNA, 15 bp, Homo sapiens
agcaattaccttctt

SEQ ID NO: 433538 - DNA, 15 bp, Homo sapiens
gagcaattaccttct

SEQ ID NO: 433539 - DNA, 15 bp, Homo sapiens
tgagcaattaccttc

SEQ ID NO: 433540 - DNA, 15 bp, Homo sapiens
gtgagcaattacctt

SEQ ID NO: 433541 - DNA, 15 bp, Homo sapiens
tgtgagcaattacct

SEQ ID NO: 433542 - DNA, 15 bp, Homo sapiens
ctgtgagcaattacc

SEQ ID NO: 433543 - DNA, 15 bp, Homo sapiens
cctgtgagcaattac

SEQ ID NO: 433544 - DNA, 15 bp, Homo sapiens
tcctgtgagcaatta

SEQ ID NO: 433545 - DNA, 15 bp, Homo sapiens
ttcctgtgagcaatt

SEQ ID NO: 433546 - DNA, 15 bp, Homo sapiens
cttcctgtgagcaat

SEQ ID NO: 433547 - DNA, 15 bp, Homo sapiens
tcttcctgtgagcaa

SEQ ID NO: 433548 - DNA, 15 bp, Homo sapiens
ctcttcctgtgagca

SEQ ID NO: 433549 - DNA, 15 bp, Homo sapiens
gctcttcctgtgagc

SEQ ID NO: 433550 - DNA, 15 bp, Homo sapiens
ggctcttcctgtgag

SEQ ID NO: 433551 - DNA, 15 bp, Homo sapiens
aggctcttcctgtga

SEQ ID NO: 433552 - DNA, 15 bp, Homo sapiens
taggctcttcctgtg

SEQ ID NO: 433553 - DNA, 15 bp, Homo sapiens
ataggctcttcctgt

SEQ ID NO: 433554 - DNA, 15 bp, Homo sapiens
tataggctcttcctg

SEQ ID NO: 433555 - DNA, 15 bp, Homo sapiens
ttataggctcttcct

SEQ ID NO: 433556 - DNA, 15 bp, Homo sapiens
attataggctcttcc

SEQ ID NO: 433557 - DNA, 15 bp, Homo sapiens
tattataggctcttc

SEQ ID NO: 433558 - DNA, 15 bp, Homo sapiens
atattataggctctt

SEQ ID NO: 433559 - DNA, 15 bp, Homo sapiens
gatattataggctct

SEQ ID NO: 433560 - DNA, 15 bp, Homo sapiens
tgatattataggctc

SEQ ID NO: 433561 - DNA, 15 bp, Homo sapiens
ttgatattataggct

SEQ ID NO: 433562 - DNA, 15 bp, Homo sapiens
tttgatattataggc

SEQ ID NO: 433563 - DNA, 15 bp, Homo sapiens
ctttgatattatagg

SEQ ID NO: 433564 - DNA, 15 bp, Homo sapiens
actttgatattatag

SEQ ID NO: 433565 - DNA, 15 bp, Homo sapiens
tactttgatattata

SEQ ID NO: 433566 - DNA, 15 bp, Homo sapiens
ttactttgatattat

SEQ ID NO: 433567 - DNA, 15 bp, Homo sapiens
tttactttgatatta

SEQ ID NO: 433568 - DNA, 15 bp, Homo sapiens
ctttactttgatatt

SEQ ID NO: 433569 - DNA, 15 bp, Homo sapiens
gctttactttgatat

SEQ ID NO: 433570 - DNA, 15 bp, Homo sapiens
ggctttactttgata

SEQ ID NO: 433571 - DNA, 15 bp, Homo sapiens
tggctttactttgat

SEQ ID NO: 433572 - DNA, 15 bp, Homo sapiens
atggctttactttga

SEQ ID NO: 433573 - DNA, 15 bp, Homo sapiens
catggctttactttg

SEQ ID NO: 433574 - DNA, 15 bp, Homo sapiens
acatggctttacttt

SEQ ID NO: 433575 - DNA, 15 bp, Homo sapiens
tacatggctttactt

SEQ ID NO: 433576 - DNA, 15 bp, Homo sapiens
ctacatggctttact

SEQ ID NO: 433577 - DNA, 15 bp, Homo sapiens
tctacatggctttac

SEQ ID NO: 433578 - DNA, 15 bp, Homo sapiens
atctacatggcttta

SEQ ID NO: 433579 - DNA, 15 bp, Homo sapiens
catctacatggcttt

SEQ ID NO: 433580 - DNA, 15 bp, Homo sapiens
acatctacatggctt

SEQ ID NO: 433581 - DNA, 15 bp, Homo sapiens
cacatctacatggct

SEQ ID NO: 433582 - DNA, 15 bp, Homo sapiens
tcacatctacatggc

SEQ ID NO: 433583 - DNA, 15 bp, Homo sapiens
atcacatctacatgg

SEQ ID NO: 433584 - DNA, 15 bp, Homo sapiens
catcacatctacatg

SEQ ID NO: 433585 - DNA, 15 bp, Homo sapiens
acatcacatctacat

SEQ ID NO: 433586 - DNA, 15 bp, Homo sapiens
aacatcacatctaca

SEQ ID NO: 433587 - DNA, 15 bp, Homo sapiens
taacatcacatctac

SEQ ID NO: 433588 - DNA, 15 bp, Homo sapiens
ataacatcacatcta

SEQ ID NO: 433589 - DNA, 15 bp, Homo sapiens
cataacatcacatct

SEQ ID NO: 433590 - DNA, 15 bp, Homo sapiens
tcataacatcacatc

SEQ ID NO: 433591 - DNA, 15 bp, Homo sapiens
ctcataacatcacat

SEQ ID NO: 433592 - DNA, 15 bp, Homo sapiens
tctcataacatcaca

SEQ ID NO: 433593 - DNA, 15 bp, Homo sapiens
ctctcataacatcac

SEQ ID NO: 433594 - DNA, 15 bp, Homo sapiens
tctctcataacatca

SEQ ID NO: 433595 - DNA, 15 bp, Homo sapiens
ttctctcataacatc

SEQ ID NO: 433596 - DNA, 15 bp, Homo sapiens
tttctctcataacat

SEQ ID NO: 433597 - DNA, 15 bp, Homo sapiens
ttttctctcataaca

SEQ ID NO: 433598 - DNA, 15 bp, Homo sapiens
cttttctctcataac

SEQ ID NO: 433599 - DNA, 15 bp, Homo sapiens
acttttctctcataa

SEQ ID NO: 433600 - DNA, 15 bp, Homo sapiens
cacttttctctcata

SEQ ID NO: 433601 - DNA, 15 bp, Homo sapiens
tcacttttctctcat

SEQ ID NO: 433602 - DNA, 15 bp, Homo sapiens
atcacttttctctca

SEQ ID NO: 433603 - DNA, 15 bp, Homo sapiens
gatcacttttctctc

SEQ ID NO: 433604 - DNA, 15 bp, Homo sapiens
cgatcacttttctct

SEQ ID NO: 433605 - DNA, 15 bp, Homo sapiens
tcgatcacttttctc

SEQ ID NO: 433606 - DNA, 15 bp, Homo sapiens
gtcgatcacttttct

SEQ ID NO: 433607 - DNA, 15 bp, Homo sapiens
agtcgatcacttttc

SEQ ID NO: 433608 - DNA, 15 bp, Homo sapiens
cagtcgatcactttt

SEQ ID NO: 433609 - DNA, 15 bp, Homo sapiens
tcagtcgatcacttt

SEQ ID NO: 433610 - DNA, 15 bp, Homo sapiens
ctcagtcgatcactt

SEQ ID NO: 433611 - DNA, 15 bp, Homo sapiens
tctcagtcgatcact

SEQ ID NO: 433612 - DNA, 15 bp, Homo sapiens
ttctcagtcgatcac

SEQ ID NO: 433613 - DNA, 15 bp, Homo sapiens
gttctcagtcgatca

SEQ ID NO: 433614 - DNA, 15 bp, Homo sapiens
tgttctcagtcgatc

SEQ ID NO: 433615 - DNA, 15 bp, Homo sapiens
ttgttctcagtcgat

SEQ ID NO: 433616 - DNA, 15 bp, Homo sapiens
gttgttctcagtcga

SEQ ID NO: 433617 - DNA, 15 bp, Homo sapiens
agttgttctcagtcg

SEQ ID NO: 433618 - DNA, 15 bp, Homo sapiens
aagttgttctcagtc

SEQ ID NO: 433619 - DNA, 15 bp, Homo sapiens
gaagttgttctcagt

SEQ ID NO: 433620 - DNA, 15 bp, Homo sapiens
tgaagttgttctcag

SEQ ID NO: 433621 - DNA, 15 bp, Homo sapiens
atgaagttgttctca

SEQ ID NO: 433622 - DNA, 15 bp, Homo sapiens
aatgaagttgttctc

SEQ ID NO: 433623 - DNA, 15 bp, Homo sapiens
taatgaagttgttct

SEQ ID NO: 433624 - DNA, 15 bp, Homo sapiens
ttaatgaagttgttc

SEQ ID NO: 433625 - DNA, 15 bp, Homo sapiens
tttaatgaagttgtt

SEQ ID NO: 433626 - DNA, 15 bp, Homo sapiens
atttaatgaagttgt

SEQ ID NO: 433627 - DNA, 15 bp, Homo sapiens
tatttaatgaagttg

SEQ ID NO: 433628 - DNA, 15 bp, Homo sapiens
atatttaatgaagtt

SEQ ID NO: 433629 - DNA, 15 bp, Homo sapiens
catatttaatgaagt

SEQ ID NO: 433630 - DNA, 15 bp, Homo sapiens
tcatatttaatgaag

SEQ ID NO: 433631 - DNA, 15 bp, Homo sapiens
atcatatttaatgaa

SEQ ID NO: 433632 - DNA, 15 bp, Homo sapiens
catcatatttaatga

SEQ ID NO: 433633 - DNA, 15 bp, Homo sapiens
acatcatatttaatg

SEQ ID NO: 433634 - DNA, 15 bp, Homo sapiens
cacatcatatttaat

SEQ ID NO: 433635 - DNA, 15 bp, Homo sapiens
tcacatcatatttaa

SEQ ID NO: 433636 - DNA, 15 bp, Homo sapiens
ttcacatcatattta

SEQ ID NO: 433637 - DNA, 15 bp, Homo sapiens
attcacatcatattt

SEQ ID NO: 433638 - DNA, 15 bp, Homo sapiens
aattcacatcatatt

SEQ ID NO: 433639 - DNA, 15 bp, Homo sapiens
gaattcacatcatat

SEQ ID NO: 433640 - DNA, 15 bp, Homo sapiens
agaattcacatcata

SEQ ID NO: 433641 - DNA, 15 bp, Homo sapiens
tagaattcacatcat

SEQ ID NO: 433642 - DNA, 15 bp, Homo sapiens
gtagaattcacatca

SEQ ID NO: 433643 - DNA, 15 bp, Homo sapiens
tgtagaattcacatc

SEQ ID NO: 433644 - DNA, 15 bp, Homo sapiens
ttgtagaattcacat

SEQ ID NO: 433645 - DNA, 15 bp, Homo sapiens
cttgtagaattcaca

SEQ ID NO: 433646 - DNA, 15 bp, Homo sapiens
acttgtagaattcac

SEQ ID NO: 433647 - DNA, 15 bp, Homo sapiens
tacttgtagaattca

SEQ ID NO: 433648 - DNA, 15 bp, Homo sapiens
ttacttgtagaattc

SEQ ID NO: 433649 - DNA, 15 bp, Homo sapiens
tttacttgtagaatt

SEQ ID NO: 433650 - DNA, 15 bp, Homo sapiens
ctttacttgtagaat

SEQ ID NO: 433651 - DNA, 15 bp, Homo sapiens
cctttacttgtagaa

SEQ ID NO: 433652 - DNA, 15 bp, Homo sapiens
tcctttacttgtaga

SEQ ID NO: 433653 - DNA, 15 bp, Homo sapiens
ttcctttacttgtag

SEQ ID NO: 433654 - DNA, 15 bp, Homo sapiens
tttcctttacttgta

SEQ ID NO: 433655 - DNA, 15 bp, Homo sapiens
ctttcctttacttgt

SEQ ID NO: 433656 - DNA, 15 bp, Homo sapiens
gctttcctttacttg

SEQ ID NO: 433657 - DNA, 15 bp, Homo sapiens
ggctttcctttactt

SEQ ID NO: 433658 - DNA, 15 bp, Homo sapiens
tggctttcctttact

SEQ ID NO: 433659 - DNA, 15 bp, Homo sapiens
ctggctttcctttac

SEQ ID NO: 433660 - DNA, 15 bp, Homo sapiens
cctggctttccttta

SEQ ID NO: 433661 - DNA, 15 bp, Homo sapiens
tcctggctttccttt

SEQ ID NO: 433662 - DNA, 15 bp, Homo sapiens
atcctggctttcctt

SEQ ID NO: 433663 - DNA, 15 bp, Homo sapiens
tatcctggctttcct

SEQ ID NO: 433664 - DNA, 15 bp, Homo sapiens
ttatcctggctttcc

SEQ ID NO: 433665 - DNA, 15 bp, Homo sapiens
tttatcctggctttc

SEQ ID NO: 433666 - DNA, 15 bp, Homo sapiens
ttttatcctggcttt

SEQ ID NO: 433667 - DNA, 15 bp, Homo sapiens
tttttatcctggctt

SEQ ID NO: 433668 - DNA, 15 bp, Homo sapiens
gtttttatcctggct

SEQ ID NO: 433669 - DNA, 15 bp, Homo sapiens
cgtttttatcctggc

SEQ ID NO: 433670 - DNA, 15 bp, Homo sapiens
ccgtttttatcctgg

SEQ ID NO: 433671 - DNA, 15 bp, Homo sapiens
tccgtttttatcctg

SEQ ID NO: 433672 - DNA, 15 bp, Homo sapiens
ctccgtttttatcct

SEQ ID NO: 433673 - DNA, 15 bp, Homo sapiens
cctccgtttttatcc

SEQ ID NO: 433674 - DNA, 15 bp, Homo sapiens
acctccgtttttatc

SEQ ID NO: 433675 - DNA, 15 bp, Homo sapiens
cacctccgtttttat

SEQ ID NO: 433676 - DNA, 15 bp, Homo sapiens
ccacctccgttttta

SEQ ID NO: 433677 - DNA, 15 bp, Homo sapiens
accacctccgttttt

SEQ ID NO: 433678 - DNA, 15 bp, Homo sapiens
gaccacctccgtttt

SEQ ID NO: 433679 - DNA, 15 bp, Homo sapiens
agaccacctccgttt

SEQ ID NO: 433680 - DNA, 15 bp, Homo sapiens
gagaccacctccgtt

SEQ ID NO: 433681 - DNA, 15 bp, Homo sapiens
tgagaccacctccgt

SEQ ID NO: 433682 - DNA, 15 bp, Homo sapiens
gtgagaccacctccg

SEQ ID NO: 433683 - DNA, 15 bp, Homo sapiens
agtgagaccacctcc

SEQ ID NO: 433684 - DNA, 15 bp, Homo sapiens
gagtgagaccacctc

SEQ ID NO: 433685 - DNA, 15 bp, Homo sapiens
ggagtgagaccacct

SEQ ID NO: 433686 - DNA, 15 bp, Homo sapiens
tggagtgagaccacc

SEQ ID NO: 433687 - DNA, 15 bp, Homo sapiens
ctggagtgagaccac

SEQ ID NO: 433688 - DNA, 15 bp, Homo sapiens
tctggagtgagacca

SEQ ID NO: 433689 - DNA, 15 bp, Homo sapiens
gtctggagtgagacc

SEQ ID NO: 433690 - DNA, 15 bp, Homo sapiens
ggtctggagtgagac

SEQ ID NO: 433691 - DNA, 15 bp, Homo sapiens
gggtctggagtgaga

SEQ ID NO: 433692 - DNA, 15 bp, Homo sapiens
tgggtctggagtgag

SEQ ID NO: 433693 - DNA, 15 bp, Homo sapiens
atgggtctggagtga

SEQ ID NO: 433694 - DNA, 15 bp, Homo sapiens
catgggtctggagtg

SEQ ID NO: 433695 - DNA, 15 bp, Homo sapiens
gcatgggtctggagt

SEQ ID NO: 433696 - DNA, 15 bp, Homo sapiens
agcatgggtctggag

SEQ ID NO: 433697 - DNA, 15 bp, Homo sapiens
aagcatgggtctgga

SEQ ID NO: 433698 - DNA, 15 bp, Homo sapiens
aaagcatgggtctgg

SEQ ID NO: 433699 - DNA, 15 bp, Homo sapiens
aaaagcatgggtctg

SEQ ID NO: 433700 - DNA, 15 bp, Homo sapiens
catcttggtgacaga

SEQ ID NO: 433701 - DNA, 15 bp, Homo sapiens
ccatcttggtgacag

SEQ ID NO: 433702 - DNA, 15 bp, Homo sapiens
accatcttggtgaca

SEQ ID NO: 433703 - DNA, 15 bp, Homo sapiens
aaccatcttggtgac

SEQ ID NO: 433704 - DNA, 15 bp, Homo sapiens
aaaccatcttggtga

SEQ ID NO: 433705 - DNA, 15 bp, Homo sapiens
gaaaccatcttggtg

SEQ ID NO: 433706 - DNA, 15 bp, Homo sapiens
tgaaaccatcttggt

SEQ ID NO: 433707 - DNA, 15 bp, Homo sapiens
ctgaaaccatcttgg

SEQ ID NO: 433708 - DNA, 15 bp, Homo sapiens
actgaaaccatcttg

SEQ ID NO: 433709 - DNA, 15 bp, Homo sapiens
gactgaaaccatctt

SEQ ID NO: 433710 - DNA, 15 bp, Homo sapiens
agactgaaaccatct

SEQ ID NO: 433711 - DNA, 15 bp, Homo sapiens
tagactgaaaccatc

SEQ ID NO: 433712 - DNA, 15 bp, Homo sapiens
ctagactgaaaccat

SEQ ID NO: 433713 - DNA, 15 bp, Homo sapiens
actagactgaaacca

SEQ ID NO: 433714 - DNA, 15 bp, Homo sapiens
tactagactgaaacc

SEQ ID NO: 433715 - DNA, 15 bp, Homo sapiens
ctactagactgaaac

SEQ ID NO: 433716 - DNA, 15 bp, Homo sapiens
tctactagactgaaa

SEQ ID NO: 433717 - DNA, 15 bp, Homo sapiens
ctctactagactgaa

SEQ ID NO: 433718 - DNA, 15 bp, Homo sapiens
tctctactagactga

SEQ ID NO: 433719 - DNA, 15 bp, Homo sapiens
ttctctactagactg

SEQ ID NO: 433720 - DNA, 15 bp, Homo sapiens
tttctctactagact

SEQ ID NO: 433721 - DNA, 15 bp, Homo sapiens
ctttctctactagac

SEQ ID NO: 433722 - DNA, 15 bp, Homo sapiens
tctttctctactaga

SEQ ID NO: 433723 - DNA, 15 bp, Homo sapiens
atctttctctactag

SEQ ID NO: 433724 - DNA, 15 bp, Homo sapiens
catctttctctacta

SEQ ID NO: 433725 - DNA, 15 bp, Homo sapiens
acatctttctctact

SEQ ID NO: 433726 - DNA, 15 bp, Homo sapiens
aacatctttctctac

SEQ ID NO: 433727 - DNA, 15 bp, Homo sapiens
taacatctttctcta

SEQ ID NO: 433728 - DNA, 15 bp, Homo sapiens
ttaacatctttctct

SEQ ID NO: 433729 - DNA, 15 bp, Homo sapiens
tttaacatctttctc

SEQ ID NO: 433730 - DNA, 15 bp, Homo sapiens
ttttaacatctttct

SEQ ID NO: 433731 - DNA, 15 bp, Homo sapiens
tttttaacatctttc

SEQ ID NO: 433732 - DNA, 15 bp, Homo sapiens
ttttttaacatcttt

SEQ ID NO: 433733 - DNA, 15 bp, Homo sapiens
gttttttaacatctt

SEQ ID NO: 433734 - DNA, 15 bp, Homo sapiens
tgttttttaacatct

SEQ ID NO: 433735 - DNA, 15 bp, Homo sapiens
ttgttttttaacatc

SEQ ID NO: 433736 - DNA, 15 bp, Homo sapiens
tttgttttttaacat

SEQ ID NO: 433737 - DNA, 15 bp, Homo sapiens
ttttgttttttaaca

SEQ ID NO: 433738 - DNA, 15 bp, Homo sapiens
tttttgttttttaac

SEQ ID NO: 433739 - DNA, 15 bp, Homo sapiens
atttttgttttttaa

SEQ ID NO: 433740 - DNA, 15 bp, Homo sapiens
tatttttgtttttta

SEQ ID NO: 433741 - DNA, 15 bp, Homo sapiens
gtatttttgtttttt

SEQ ID NO: 433742 - DNA, 15 bp, Homo sapiens
tgtatttttgttttt

SEQ ID NO: 433743 - DNA, 15 bp, Homo sapiens
ttgtatttttgtttt

SEQ ID NO: 433744 - DNA, 15 bp, Homo sapiens
tttgtatttttgttt

SEQ ID NO: 433745 - DNA, 15 bp, Homo sapiens
ttttgtatttttgtt

SEQ ID NO: 433746 - DNA, 15 bp, Homo sapiens
tttttgtatttttgt

SEQ ID NO: 433747 - DNA, 15 bp, Homo sapiens
ttttttgtatttttg

SEQ ID NO: 433748 - DNA, 15 bp, Homo sapiens
gtttttttgtatttt

SEQ ID NO: 433749 - DNA, 15 bp, Homo sapiens
tgtttttttgtattt

SEQ ID NO: 433750 - DNA, 15 bp, Homo sapiens
ctgtttttttgtatt

SEQ ID NO: 433751 - DNA, 15 bp, Homo sapiens
cctgtttttttgtat

SEQ ID NO: 433752 - DNA, 15 bp, Homo sapiens
gcctgtttttttgta

SEQ ID NO: 433753 - DNA, 15 bp, Homo sapiens
cgcctgtttttttgt

SEQ ID NO: 433754 - DNA, 15 bp, Homo sapiens
tcgcctgtttttttg

SEQ ID NO: 433755 - DNA, 15 bp, Homo sapiens
ttcgcctgttttttt

SEQ ID NO: 433756 - DNA, 15 bp, Homo sapiens
cttcgcctgtttttt

SEQ ID NO: 433757 - DNA, 15 bp, Homo sapiens
gcttcgcctgttttt

SEQ ID NO: 433758 - DNA, 15 bp, Homo sapiens
cgcttcgcctgtttt

SEQ ID NO: 433759 - DNA, 15 bp, Homo sapiens
tcgcttcgcctgttt

SEQ ID NO: 433760 - DNA, 15 bp, Homo sapiens
ctcgcttcgcctgtt

SEQ ID NO: 433761 - DNA, 15 bp, Homo sapiens
tctcgcttcgcctgt

SEQ ID NO: 433762 - DNA, 15 bp, Homo sapiens
atctcgcttcgcctg

SEQ ID NO: 433763 - DNA, 15 bp, Homo sapiens
catctcgcttcgcct

SEQ ID NO: 433764 - DNA, 15 bp, Homo sapiens
tcatctcgcttcgcc

SEQ ID NO: 433765 - DNA, 15 bp, Homo sapiens
ttcatctcgcttcgc

SEQ ID NO: 433766 - DNA, 15 bp, Homo sapiens
attcatctcgcttcg

SEQ ID NO: 433767 - DNA, 15 bp, Homo sapiens
gattcatctcgcttc

SEQ ID NO: 433768 - DNA, 15 bp, Homo sapiens
tgattcatctcgctt

SEQ ID NO: 433769 - DNA, 15 bp, Homo sapiens
ctgattcatctcgct

SEQ ID NO: 433770 - DNA, 15 bp, Homo sapiens
actgattcatctcgc

SEQ ID NO: 433771 - DNA, 15 bp, Homo sapiens
cactgattcatctcg

SEQ ID NO: 433772 - DNA, 15 bp, Homo sapiens
gcactgattcatctc

SEQ ID NO: 433773 - DNA, 15 bp, Homo sapiens
agcactgattcatct

SEQ ID NO: 433774 - DNA, 15 bp, Homo sapiens
gagcactgattcatc

SEQ ID NO: 433775 - DNA, 15 bp, Homo sapiens
tgagcactgattcat

SEQ ID NO: 433776 - DNA, 15 bp, Homo sapiens
ctgagcactgattca

SEQ ID NO: 433777 - DNA, 15 bp, Homo sapiens
actgagcactgattc

SEQ ID NO: 433778 - DNA, 15 bp, Homo sapiens
cactgagcactgatt

SEQ ID NO: 433779 - DNA, 15 bp, Homo sapiens
tcactgagcactgat

SEQ ID NO: 433780 - DNA, 15 bp, Homo sapiens
ctcactgagcactga

SEQ ID NO: 433781 - DNA, 15 bp, Homo sapiens
actcactgagcactg

SEQ ID NO: 433782 - DNA, 15 bp, Homo sapiens
gactcactgagcact

SEQ ID NO: 433783 - DNA, 15 bp, Homo sapiens
agactcactgagcac

SEQ ID NO: 433784 - DNA, 15 bp, Homo sapiens
cagactcactgagca

SEQ ID NO: 433785 - DNA, 15 bp, Homo sapiens
acagactcactgagc

SEQ ID NO: 433786 - DNA, 15 bp, Homo sapiens
aacagactcactgag

SEQ ID NO: 433787 - DNA, 15 bp, Homo sapiens
aaacagactcactga

SEQ ID NO: 433788 - DNA, 15 bp, Homo sapiens
caaacagactcactg

SEQ ID NO: 433789 - DNA, 15 bp, Homo sapiens
tcaaacagactcact

SEQ ID NO: 433790 - DNA, 15 bp, Homo sapiens
ttcaaacagactcac

SEQ ID NO: 433791 - DNA, 15 bp, Homo sapiens
tttcaaacagactca

SEQ ID NO: 433792 - DNA, 15 bp, Homo sapiens
gtttcaaacagactc

SEQ ID NO: 433793 - DNA, 15 bp, Homo sapiens
tgtttcaaacagact

SEQ ID NO: 433794 - DNA, 15 bp, Homo sapiens
ttgtttcaaacagac

SEQ ID NO: 433795 - DNA, 15 bp, Homo sapiens
cttgtttcaaacaga

SEQ ID NO: 433796 - DNA, 15 bp, Homo sapiens
gcttgtttcaaacag

SEQ ID NO: 433797 - DNA, 15 bp, Homo sapiens
agcttgtttcaaaca

SEQ ID NO: 433798 - DNA, 15 bp, Homo sapiens
cagcttgtttcaaac

SEQ ID NO: 433799 - DNA, 15 bp, Homo sapiens
acagcttgtttcaaa

SEQ ID NO: 433800 - DNA, 15 bp, Homo sapiens
cacagcttgtttcaa

SEQ ID NO: 433801 - DNA, 15 bp, Homo sapiens
ccacagcttgtttca

SEQ ID NO: 433802 - DNA, 15 bp, Homo sapiens
cccacagcttgtttc

SEQ ID NO: 433803 - DNA, 15 bp, Homo sapiens
ccccacagcttgttt

SEQ ID NO: 433804 - DNA, 15 bp, Homo sapiens
tccccacagcttgtt

SEQ ID NO: 433805 - DNA, 15 bp, Homo sapiens
ctccccacagcttgt

SEQ ID NO: 433806 - DNA, 15 bp, Homo sapiens
actccccacagcttg

SEQ ID NO: 433807 - DNA, 15 bp, Homo sapiens
cactccccacagctt

SEQ ID NO: 433808 - DNA, 15 bp, Homo sapiens
gcactccccacagct

SEQ ID NO: 433809 - DNA, 15 bp, Homo sapiens
tgcactccccacagc

SEQ ID NO: 433810 - DNA, 15 bp, Homo sapiens
ctgcactccccacag

SEQ ID NO: 433811 - DNA, 15 bp, Homo sapiens
tctgcactccccaca

SEQ ID NO: 433812 - DNA, 15 bp, Homo sapiens
ctctgcactccccac

SEQ ID NO: 433813 - DNA, 15 bp, Homo sapiens
tctctgcactcccca

SEQ ID NO: 433814 - DNA, 15 bp, Homo sapiens
ttctctgcactcccc

SEQ ID NO: 433815 - DNA, 15 bp, Homo sapiens
tttctctgcactccc

SEQ ID NO: 433816 - DNA, 15 bp, Homo sapiens
ctttctctgcactcc

SEQ ID NO: 433817 - DNA, 15 bp, Homo sapiens
tctttctctgcactc

SEQ ID NO: 433818 - DNA, 15 bp, Homo sapiens
ttctttctctgcact

SEQ ID NO: 433819 - DNA, 15 bp, Homo sapiens
tttctttctctgcac

SEQ ID NO: 433820 - DNA, 15 bp, Homo sapiens
ctttctttctctgca

SEQ ID NO: 433821 - DNA, 15 bp, Homo sapiens
gctttctttctctgc

SEQ ID NO: 433822 - DNA, 15 bp, Homo sapiens
ggctttctttctctg

SEQ ID NO: 433823 - DNA, 15 bp, Homo sapiens
gggctttctttctct

SEQ ID NO: 433824 - DNA, 15 bp, Homo sapiens
agggctttctttctc

SEQ ID NO: 433825 - DNA, 15 bp, Homo sapiens
aagggctttctttct

SEQ ID NO: 433826 - DNA, 15 bp, Homo sapiens
caagggctttctttc

SEQ ID NO: 433827 - DNA, 15 bp, Homo sapiens
tcaagggctttcttt

SEQ ID NO: 433828 - DNA, 15 bp, Homo sapiens
ctcaagggctttctt

SEQ ID NO: 433829 - DNA, 15 bp, Homo sapiens
tctcaagggctttct

SEQ ID NO: 433830 - DNA, 15 bp, Homo sapiens
ctctcaagggctttc

SEQ ID NO: 433831 - DNA, 15 bp, Homo sapiens
gctctcaagggcttt

SEQ ID NO: 433832 - DNA, 15 bp, Homo sapiens
tgctctcaagggctt

SEQ ID NO: 433833 - DNA, 15 bp, Homo sapiens
ttgctctcaagggct

SEQ ID NO: 433834 - DNA, 15 bp, Homo sapiens
tttgctctcaagggc

SEQ ID NO: 433835 - DNA, 15 bp, Homo sapiens
gtttgctctcaaggg

SEQ ID NO: 433836 - DNA, 15 bp, Homo sapiens
agtttgctctcaagg

SEQ ID NO: 433837 - DNA, 15 bp, Homo sapiens
gagtttgctctcaag

SEQ ID NO: 433838 - DNA, 15 bp, Homo sapiens
tgagtttgctctcaa

SEQ ID NO: 433839 - DNA, 15 bp, Homo sapiens
atgagtttgctctca

SEQ ID NO: 433840 - DNA, 15 bp, Homo sapiens
catgagtttgctctc

SEQ ID NO: 433841 - DNA, 15 bp, Homo sapiens
gcatgagtttgctct

SEQ ID NO: 433842 - DNA, 15 bp, Homo sapiens
ggcatgagtttgctc

SEQ ID NO: 433843 - DNA, 15 bp, Homo sapiens
gggcatgagtttgct

SEQ ID NO: 433844 - DNA, 15 bp, Homo sapiens
ggggcatgagtttgc

SEQ ID NO: 433845 - DNA, 15 bp, Homo sapiens
gggggcatgagtttg

SEQ ID NO: 433846 - DNA, 15 bp, Homo sapiens
ggggggcatgagttt

SEQ ID NO: 433847 - DNA, 15 bp, Homo sapiens
aggggggcatgagtt

SEQ ID NO: 433848 - DNA, 15 bp, Homo sapiens
taggggggcatgagt

SEQ ID NO: 433849 - DNA, 15 bp, Homo sapiens
gtaggggggcatgag

SEQ ID NO: 433850 - DNA, 15 bp, Homo sapiens
agtaggggggcatga

SEQ ID NO: 433851 - DNA, 15 bp, Homo sapiens
aagtaggggggcatg

SEQ ID NO: 433852 - DNA, 15 bp, Homo sapiens
aaagtaggggggcat

SEQ ID NO: 433853 - DNA, 15 bp, Homo sapiens
gaaagtaggggggca

SEQ ID NO: 433854 - DNA, 15 bp, Homo sapiens
tgaaagtaggggggc

SEQ ID NO: 433855 - DNA, 15 bp, Homo sapiens
atgaaagtagggggg

SEQ ID NO: 433856 - DNA, 15 bp, Homo sapiens
gatgaaagtaggggg

SEQ ID NO: 433857 - DNA, 15 bp, Homo sapiens
agatgaaagtagggg

SEQ ID NO: 433858 - DNA, 15 bp, Homo sapiens
gagatgaaagtaggg

SEQ ID NO: 433859 - DNA, 15 bp, Homo sapiens
tgagatgaaagtagg

SEQ ID NO: 433860 - DNA, 15 bp, Homo sapiens
ttgagatgaaagtag

SEQ ID NO: 433861 - DNA, 15 bp, Homo sapiens
gttgagatgaaagta

SEQ ID NO: 433862 - DNA, 15 bp, Homo sapiens
ggttgagatgaaagt

SEQ ID NO: 433863 - DNA, 15 bp, Homo sapiens
aggttgagatgaaag

SEQ ID NO: 433864 - DNA, 15 bp, Homo sapiens
gaggttgagatgaaa

SEQ ID NO: 433865 - DNA, 15 bp, Homo sapiens
agaggttgagatgaa

SEQ ID NO: 433866 - DNA, 15 bp, Homo sapiens
cagaggttgagatga

SEQ ID NO: 433867 - DNA, 15 bp, Homo sapiens
acagaggttgagatg

SEQ ID NO: 433868 - DNA, 15 bp, Homo sapiens
cacagaggttgagat

SEQ ID NO: 433869 - DNA, 15 bp, Homo sapiens
acacagaggttgaga

SEQ ID NO: 433870 - DNA, 15 bp, Homo sapiens
tacacagaggttgag

SEQ ID NO: 433871 - DNA, 15 bp, Homo sapiens
gtacacagaggttga

SEQ ID NO: 433872 - DNA, 15 bp, Homo sapiens
agtacacagaggttg

SEQ ID NO: 433873 - DNA, 15 bp, Homo sapiens
tagtacacagaggtt

SEQ ID NO: 433874 - DNA, 15 bp, Homo sapiens
ctagtacacagaggt

SEQ ID NO: 433875 - DNA, 15 bp, Homo sapiens
cctagtacacagagg

SEQ ID NO: 433876 - DNA, 15 bp, Homo sapiens
ccctagtacacagag

SEQ ID NO: 433877 - DNA, 15 bp, Homo sapiens
accctagtacacaga

SEQ ID NO: 433878 - DNA, 15 bp, Homo sapiens
taccctagtacacag

SEQ ID NO: 433879 - DNA, 15 bp, Homo sapiens
ctaccctagtacaca

SEQ ID NO: 433880 - DNA, 15 bp, Homo sapiens
actaccctagtacac

SEQ ID NO: 433881 - DNA, 15 bp, Homo sapiens
gactaccctagtaca

SEQ ID NO: 433882 - DNA, 15 bp, Homo sapiens
tgactaccctagtac

SEQ ID NO: 433883 - DNA, 15 bp, Homo sapiens
atgactaccctagta

SEQ ID NO: 433884 - DNA, 15 bp, Homo sapiens
aatgactaccctagt

SEQ ID NO: 433885 - DNA, 15 bp, Homo sapiens
caatgactaccctag

SEQ ID NO: 433886 - DNA, 15 bp, Homo sapiens
ccaatgactacccta

SEQ ID NO: 433887 - DNA, 15 bp, Homo sapiens
cccaatgactaccct

SEQ ID NO: 433888 - DNA, 15 bp, Homo sapiens
tcccaatgactaccc

SEQ ID NO: 433889 - DNA, 15 bp, Homo sapiens
ttcccaatgactacc

SEQ ID NO: 433890 - DNA, 15 bp, Homo sapiens
attcccaatgactac

SEQ ID NO: 433891 - DNA, 15 bp, Homo sapiens
tattcccaatgacta

SEQ ID NO: 433892 - DNA, 15 bp, Homo sapiens
atattcccaatgact

SEQ ID NO: 433893 - DNA, 15 bp, Homo sapiens
gatattcccaatgac

SEQ ID NO: 433894 - DNA, 15 bp, Homo sapiens
agatattcccaatga

SEQ ID NO: 433895 - DNA, 15 bp, Homo sapiens
cagatattcccaatg

SEQ ID NO: 433896 - DNA, 15 bp, Homo sapiens
acagatattcccaat

SEQ ID NO: 433897 - DNA, 15 bp, Homo sapiens
cacagatattcccaa

SEQ ID NO: 433898 - DNA, 15 bp, Homo sapiens
ccacagatattccca

SEQ ID NO: 433899 - DNA, 15 bp, Homo sapiens
accacagatattccc

SEQ ID NO: 433900 - DNA, 15 bp, Homo sapiens
gaccacagatattcc

SEQ ID NO: 433901 - DNA, 15 bp, Homo sapiens
agaccacagatattc

SEQ ID NO: 433902 - DNA, 15 bp, Homo sapiens
cagaccacagatatt

SEQ ID NO: 433903 - DNA, 15 bp, Homo sapiens
acagaccacagatat

SEQ ID NO: 433904 - DNA, 15 bp, Homo sapiens
cacagaccacagata

SEQ ID NO: 433905 - DNA, 15 bp, Homo sapiens
tcacagaccacagat

SEQ ID NO: 433906 - DNA, 15 bp, Homo sapiens
ctcacagaccacaga

SEQ ID NO: 433907 - DNA, 15 bp, Homo sapiens
actcacagaccacag

SEQ ID NO: 433908 - DNA, 15 bp, Homo sapiens
cactcacagaccaca

SEQ ID NO: 433909 - DNA, 15 bp, Homo sapiens
tcactcacagaccac

SEQ ID NO: 433910 - DNA, 15 bp, Homo sapiens
ttcactcacagacca

SEQ ID NO: 433911 - DNA, 15 bp, Homo sapiens
attcactcacagacc

SEQ ID NO: 433912 - DNA, 15 bp, Homo sapiens
aattcactcacagac

SEQ ID NO: 433913 - DNA, 15 bp, Homo sapiens
caattcactcacaga

SEQ ID NO: 433914 - DNA, 15 bp, Homo sapiens
tcaattcactcacag

SEQ ID NO: 433915 - DNA, 15 bp, Homo sapiens
atcaattcactcaca

SEQ ID NO: 433916 - DNA, 15 bp, Homo sapiens
tatcaattcactcac

SEQ ID NO: 433917 - DNA, 15 bp, Homo sapiens
gtatcaattcactca

SEQ ID NO: 433918 - DNA, 15 bp, Homo sapiens
tgtatcaattcactc

SEQ ID NO: 433919 - DNA, 15 bp, Homo sapiens
atgtatcaattcact

SEQ ID NO: 433920 - DNA, 15 bp, Homo sapiens
tatgtatcaattcac

SEQ ID NO: 433921 - DNA, 15 bp, Homo sapiens
ttatgtatcaattca

SEQ ID NO: 433922 - DNA, 15 bp, Homo sapiens
cttatgtatcaattc

SEQ ID NO: 433923 - DNA, 15 bp, Homo sapiens
tcttatgtatcaatt

SEQ ID NO: 433924 - DNA, 15 bp, Homo sapiens
atcttatgtatcaat

SEQ ID NO: 433925 - DNA, 15 bp, Homo sapiens
gatcttatgtatcaa

SEQ ID NO: 433926 - DNA, 15 bp, Homo sapiens
ggatcttatgtatca

SEQ ID NO: 433927 - DNA, 15 bp, Homo sapiens
gggatcttatgtatc

SEQ ID NO: 433928 - DNA, 15 bp, Homo sapiens
tgggatcttatgtat

SEQ ID NO: 433929 - DNA, 15 bp, Homo sapiens
gtgggatcttatgta

SEQ ID NO: 433930 - DNA, 15 bp, Homo sapiens
agtgggatcttatgt

SEQ ID NO: 433931 - DNA, 15 bp, Homo sapiens
tagtgggatcttatg

SEQ ID NO: 433932 - DNA, 15 bp, Homo sapiens
gtagtgggatcttat

SEQ ID NO: 433933 - DNA, 15 bp, Homo sapiens
cgtagtgggatctta

SEQ ID NO: 433934 - DNA, 15 bp, Homo sapiens
tcgtagtgggatctt

SEQ ID NO: 433935 - DNA, 15 bp, Homo sapiens
gtcgtagtgggatct

SEQ ID NO: 433936 - DNA, 15 bp, Homo sapiens
tgtcgtagtgggatc

SEQ ID NO: 433937 - DNA, 15 bp, Homo sapiens
gtgtcgtagtgggat

SEQ ID NO: 433938 - DNA, 15 bp, Homo sapiens
tgtgtcgtagtggga

SEQ ID NO: 433939 - DNA, 15 bp, Homo sapiens
ctgtgtcgtagtggg

SEQ ID NO: 433940 - DNA, 15 bp, Homo sapiens
actgtgtcgtagtgg

SEQ ID NO: 433941 - DNA, 15 bp, Homo sapiens
cactgtgtcgtagtg

SEQ ID NO: 433942 - DNA, 15 bp, Homo sapiens
acactgtgtcgtagt

SEQ ID NO: 433943 - DNA, 15 bp, Homo sapiens
aacactgtgtcgtag

SEQ ID NO: 433944 - DNA, 15 bp, Homo sapiens
gaacactgtgtcgta

SEQ ID NO: 433945 - DNA, 15 bp, Homo sapiens
agaacactgtgtcgt

SEQ ID NO: 433946 - DNA, 15 bp, Homo sapiens
gagaacactgtgtcg

SEQ ID NO: 433947 - DNA, 15 bp, Homo sapiens
tgagaacactgtgtc

SEQ ID NO: 433948 - DNA, 15 bp, Homo sapiens
atgagaacactgtgt

SEQ ID NO: 433949 - DNA, 15 bp, Homo sapiens
aatgagaacactgtg

SEQ ID NO: 433950 - DNA, 15 bp, Homo sapiens
aaatgagaacactgt

SEQ ID NO: 433951 - DNA, 15 bp, Homo sapiens
caaatgagaacactg

SEQ ID NO: 433952 - DNA, 15 bp, Homo sapiens
acaaatgagaacact

SEQ ID NO: 433953 - DNA, 15 bp, Homo sapiens
cacaaatgagaacac

SEQ ID NO: 433954 - DNA, 15 bp, Homo sapiens
tcacaaatgagaaca

SEQ ID NO: 433955 - DNA, 15 bp, Homo sapiens
ctcacaaatgagaac

SEQ ID NO: 433956 - DNA, 15 bp, Homo sapiens
tctcacaaatgagaa

SEQ ID NO: 433957 - DNA, 15 bp, Homo sapiens
atctcacaaatgaga

SEQ ID NO: 433958 - DNA, 15 bp, Homo sapiens
catctcacaaatgag

SEQ ID NO: 433959 - DNA, 15 bp, Homo sapiens
ccatctcacaaatga

SEQ ID NO: 433960 - DNA, 15 bp, Homo sapiens
accatctcacaaatg

SEQ ID NO: 433961 - DNA, 15 bp, Homo sapiens
aaccatctcacaaat

SEQ ID NO: 433962 - DNA, 15 bp, Homo sapiens
aaaccatctcacaaa

SEQ ID NO: 433963 - DNA, 15 bp, Homo sapiens
caaaccatctcacaa

SEQ ID NO: 433964 - DNA, 15 bp, Homo sapiens
ccaaaccatctcaca

SEQ ID NO: 433965 - DNA, 15 bp, Homo sapiens
cccaaaccatctcac

SEQ ID NO: 433966 - DNA, 15 bp, Homo sapiens
tcccaaaccatctca

SEQ ID NO: 433967 - DNA, 15 bp, Homo sapiens
atcccaaaccatctc

SEQ ID NO: 433968 - DNA, 15 bp, Homo sapiens
aatcccaaaccatct

SEQ ID NO: 433969 - DNA, 15 bp, Homo sapiens
aaatcccaaaccatc

SEQ ID NO: 433970 - DNA, 15 bp, Homo sapiens
taaatcccaaaccat

SEQ ID NO: 433971 - DNA, 15 bp, Homo sapiens
ataaatcccaaacca

SEQ ID NO: 433972 - DNA, 15 bp, Homo sapiens
tataaatcccaaacc

SEQ ID NO: 433973 - DNA, 15 bp, Homo sapiens
atataaatcccaaac

SEQ ID NO: 433974 - DNA, 15 bp, Homo sapiens
tatataaatcccaaa

SEQ ID NO: 433975 - DNA, 15 bp, Homo sapiens
atatataaatcccaa

SEQ ID NO: 433976 - DNA, 15 bp, Homo sapiens
gatatataaatccca

SEQ ID NO: 433977 - DNA, 15 bp, Homo sapiens
agatatataaatccc

SEQ ID NO: 433978 - DNA, 15 bp, Homo sapiens
tagatatataaatcc

SEQ ID NO: 433979 - DNA, 15 bp, Homo sapiens
gtagatatataaatc

SEQ ID NO: 433980 - DNA, 15 bp, Homo sapiens
agtagatatataaat

SEQ ID NO: 433981 - DNA, 15 bp, Homo sapiens
aagtagatatataaa

SEQ ID NO: 433982 - DNA, 15 bp, Homo sapiens
caagtagatatataa

SEQ ID NO: 433983 - DNA, 15 bp, Homo sapiens
gcaagtagatatata

SEQ ID NO: 433984 - DNA, 15 bp, Homo sapiens
agcaagtagatatat

SEQ ID NO: 433985 - DNA, 15 bp, Homo sapiens
cagcaagtagatata

SEQ ID NO: 433986 - DNA, 15 bp, Homo sapiens
gcagcaagtagatat

SEQ ID NO: 433987 - DNA, 15 bp, Homo sapiens
ggcagcaagtagata

SEQ ID NO: 433988 - DNA, 15 bp, Homo sapiens
tggcagcaagtagat

SEQ ID NO: 433989 - DNA, 15 bp, Homo sapiens
gtggcagcaagtaga

SEQ ID NO: 433990 - DNA, 15 bp, Homo sapiens
ggtggcagcaagtag

SEQ ID NO: 433991 - DNA, 15 bp, Homo sapiens
aggtggcagcaagta

SEQ ID NO: 433992 - DNA, 15 bp, Homo sapiens
aaggtggcagcaagt

SEQ ID NO: 433993 - DNA, 15 bp, Homo sapiens
aaaggtggcagcaag

SEQ ID NO: 433994 - DNA, 15 bp, Homo sapiens
caaaggtggcagcaa

SEQ ID NO: 433995 - DNA, 15 bp, Homo sapiens
tcaaaggtggcagca

SEQ ID NO: 433996 - DNA, 15 bp, Homo sapiens
ttcaaaggtggcagc

SEQ ID NO: 433997 - DNA, 15 bp, Homo sapiens
tttcaaaggtggcag

SEQ ID NO: 433998 - DNA, 15 bp, Homo sapiens
ttttcaaaggtggca

SEQ ID NO: 433999 - DNA, 15 bp, Homo sapiens
tttttcaaaggtggc

SEQ ID NO: 434000 - DNA, 15 bp, Homo sapiens
ttttttcaaaggtgg

SEQ ID NO: 434001 - DNA, 15 bp, Homo sapiens
attttttcaaaggtg

SEQ ID NO: 434002 - DNA, 15 bp, Homo sapiens
aattttttcaaaggt

SEQ ID NO: 434003 - DNA, 15 bp, Homo sapiens
aaattttttcaaagg

SEQ ID NO: 434004 - DNA, 15 bp, Homo sapiens
aaaattttttcaaag

SEQ ID NO: 434005 - DNA, 15 bp, Homo sapiens
taaaattttttcaaa

SEQ ID NO: 434006 - DNA, 15 bp, Homo sapiens
ctaaaattttttcaa

SEQ ID NO: 434007 - DNA, 15 bp, Homo sapiens
tctaaaattttttca

SEQ ID NO: 434008 - DNA, 15 bp, Homo sapiens
atctaaaattttttc

SEQ ID NO: 434009 - DNA, 15 bp, Homo sapiens
aatctaaaatttttt

SEQ ID NO: 434010 - DNA, 15 bp, Homo sapiens
gaatctaaaattttt

SEQ ID NO: 434011 - DNA, 15 bp, Homo sapiens
tgaatctaaaatttt

SEQ ID NO: 434012 - DNA, 15 bp, Homo sapiens
atgaatctaaaattt

SEQ ID NO: 434013 - DNA, 15 bp, Homo sapiens
tatgaatctaaaatt

SEQ ID NO: 434014 - DNA, 15 bp, Homo sapiens
ctatgaatctaaaat

SEQ ID NO: 434015 - DNA, 15 bp, Homo sapiens
tctatgaatctaaaa

SEQ ID NO: 434016 - DNA, 15 bp, Homo sapiens
atctatgaatctaaa

SEQ ID NO: 434017 - DNA, 15 bp, Homo sapiens
tatctatgaatctaa

SEQ ID NO: 434018 - DNA, 15 bp, Homo sapiens
atatctatgaatcta

SEQ ID NO: 434019 - DNA, 15 bp, Homo sapiens
catatctatgaatct

SEQ ID NO: 434020 - DNA, 15 bp, Homo sapiens
tcatatctatgaatc

SEQ ID NO: 434021 - DNA, 15 bp, Homo sapiens
ctcatatctatgaat

SEQ ID NO: 434022 - DNA, 15 bp, Homo sapiens
tctcatatctatgaa

SEQ ID NO: 434023 - DNA, 15 bp, Homo sapiens
ttctcatatctatga

SEQ ID NO: 434024 - DNA, 15 bp, Homo sapiens
attctcatatctatg

SEQ ID NO: 434025 - DNA, 15 bp, Homo sapiens
aattctcatatctat

SEQ ID NO: 434026 - DNA, 15 bp, Homo sapiens
caattctcatatcta

SEQ ID NO: 434027 - DNA, 15 bp, Homo sapiens
tcaattctcatatct

SEQ ID NO: 434028 - DNA, 15 bp, Homo sapiens
gtcaattctcatatc

SEQ ID NO: 434029 - DNA, 15 bp, Homo sapiens
ggtcaattctcatat

SEQ ID NO: 434030 - DNA, 15 bp, Homo sapiens
gggtcaattctcata

SEQ ID NO: 434031 - DNA, 15 bp, Homo sapiens
agggtcaattctcat

SEQ ID NO: 434032 - DNA, 15 bp, Homo sapiens
gagggtcaattctca

SEQ ID NO: 434033 - DNA, 15 bp, Homo sapiens
tgagggtcaattctc

SEQ ID NO: 434034 - DNA, 15 bp, Homo sapiens
ctgagggtcaattct

SEQ ID NO: 434035 - DNA, 15 bp, Homo sapiens
actgagggtcaattc

SEQ ID NO: 434036 - DNA, 15 bp, Homo sapiens
aactgagggtcaatt

SEQ ID NO: 434037 - DNA, 15 bp, Homo sapiens
caactgagggtcaat

SEQ ID NO: 434038 - DNA, 15 bp, Homo sapiens
tcaactgagggtcaa

SEQ ID NO: 434039 - DNA, 15 bp, Homo sapiens
gtcaactgagggtca

SEQ ID NO: 434040 - DNA, 15 bp, Homo sapiens
ggtcaactgagggtc

SEQ ID NO: 434041 - DNA, 15 bp, Homo sapiens
aggtcaactgagggt

SEQ ID NO: 434042 - DNA, 15 bp, Homo sapiens
taggtcaactgaggg

SEQ ID NO: 434043 - DNA, 15 bp, Homo sapiens
ataggtcaactgagg

SEQ ID NO: 434044 - DNA, 15 bp, Homo sapiens
gataggtcaactgag

SEQ ID NO: 434045 - DNA, 15 bp, Homo sapiens
tgataggtcaactga

SEQ ID NO: 434046 - DNA, 15 bp, Homo sapiens
atgataggtcaactg

SEQ ID NO: 434047 - DNA, 15 bp, Homo sapiens
catgataggtcaact

SEQ ID NO: 434048 - DNA, 15 bp, Homo sapiens
gcatgataggtcaac

SEQ ID NO: 434049 - DNA, 15 bp, Homo sapiens
tgcatgataggtcaa

SEQ ID NO: 434050 - DNA, 15 bp, Homo sapiens
atgcatgataggtca

SEQ ID NO: 434051 - DNA, 15 bp, Homo sapiens
tatgcatgataggtc

SEQ ID NO: 434052 - DNA, 15 bp, Homo sapiens
ttatgcatgataggt

SEQ ID NO: 434053 - DNA, 15 bp, Homo sapiens
cttatgcatgatagg

SEQ ID NO: 434054 - DNA, 15 bp, Homo sapiens
tcttatgcatgatag

SEQ ID NO: 434055 - DNA, 15 bp, Homo sapiens
ttcttatgcatgata

SEQ ID NO: 434056 - DNA, 15 bp, Homo sapiens
attcttatgcatgat

SEQ ID NO: 434057 - DNA, 15 bp, Homo sapiens
tattcttatgcatga

SEQ ID NO: 434058 - DNA, 15 bp, Homo sapiens
ctattcttatgcatg

SEQ ID NO: 434059 - DNA, 15 bp, Homo sapiens
actattcttatgcat

SEQ ID NO: 434060 - DNA, 15 bp, Homo sapiens
tactattcttatgca

SEQ ID NO: 434061 - DNA, 15 bp, Homo sapiens
ttactattcttatgc

SEQ ID NO: 434062 - DNA, 15 bp, Homo sapiens
attactattcttatg

SEQ ID NO: 434063 - DNA, 15 bp, Homo sapiens
cattactattcttat

SEQ ID NO: 434064 - DNA, 15 bp, Homo sapiens
tcattactattctta

SEQ ID NO: 434065 - DNA, 15 bp, Homo sapiens
atcattactattctt

SEQ ID NO: 434066 - DNA, 15 bp, Homo sapiens
gatcattactattct

SEQ ID NO: 434067 - DNA, 15 bp, Homo sapiens
ggatcattactattc

SEQ ID NO: 434068 - DNA, 15 bp, Homo sapiens
aggatcattactatt

SEQ ID NO: 434069 - DNA, 15 bp, Homo sapiens
aaggatcattactat

SEQ ID NO: 434070 - DNA, 15 bp, Homo sapiens
aaaggatcattacta

SEQ ID NO: 434071 - DNA, 15 bp, Homo sapiens
aaaaggatcattact

SEQ ID NO: 434072 - DNA, 15 bp, Homo sapiens
taaaaggatcattac

SEQ ID NO: 434073 - DNA, 15 bp, Homo sapiens
ttaaaaggatcatta

SEQ ID NO: 434074 - DNA, 15 bp, Homo sapiens
tttaaaaggatcatt

SEQ ID NO: 434075 - DNA, 15 bp, Homo sapiens
ttttaaaaggatcat

SEQ ID NO: 434076 - DNA, 15 bp, Homo sapiens
gttttaaaaggatca

SEQ ID NO: 434077 - DNA, 15 bp, Homo sapiens
agttttaaaaggatc

SEQ ID NO: 434078 - DNA, 15 bp, Homo sapiens
tagttttaaaaggat

SEQ ID NO: 434079 - DNA, 15 bp, Homo sapiens
gtagttttaaaagga

SEQ ID NO: 434080 - DNA, 15 bp, Homo sapiens
cgtagttttaaaagg

SEQ ID NO: 434081 - DNA, 15 bp, Homo sapiens
acgtagttttaaaag

SEQ ID NO: 434082 - DNA, 15 bp, Homo sapiens
gacgtagttttaaaa

SEQ ID NO: 434083 - DNA, 15 bp, Homo sapiens
agacgtagttttaaa

SEQ ID NO: 434084 - DNA, 15 bp, Homo sapiens
aagacgtagttttaa

SEQ ID NO: 434085 - DNA, 15 bp, Homo sapiens
caagacgtagtttta

SEQ ID NO: 434086 - DNA, 15 bp, Homo sapiens
tcaagacgtagtttt

SEQ ID NO: 434087 - DNA, 15 bp, Homo sapiens
atcaagacgtagttt

SEQ ID NO: 434088 - DNA, 15 bp, Homo sapiens
aatcaagacgtagtt

SEQ ID NO: 434089 - DNA, 15 bp, Homo sapiens
caatcaagacgtagt

SEQ ID NO: 434090 - DNA, 15 bp, Homo sapiens
acaatcaagacgtag

SEQ ID NO: 434091 - DNA, 15 bp, Homo sapiens
aacaatcaagacgta

SEQ ID NO: 434092 - DNA, 15 bp, Homo sapiens
taacaatcaagacgt

SEQ ID NO: 434093 - DNA, 15 bp, Homo sapiens
ataacaatcaagacg

SEQ ID NO: 434094 - DNA, 15 bp, Homo sapiens
aataacaatcaagac

SEQ ID NO: 434095 - DNA, 15 bp, Homo sapiens
taataacaatcaaga

SEQ ID NO: 434096 - DNA, 15 bp, Homo sapiens
gtaataacaatcaag

SEQ ID NO: 434097 - DNA, 15 bp, Homo sapiens
agtaataacaatcaa

SEQ ID NO: 434098 - DNA, 15 bp, Homo sapiens
cagtaataacaatca

SEQ ID NO: 434099 - DNA, 15 bp, Homo sapiens
ccagtaataacaatc

SEQ ID NO: 434100 - DNA, 15 bp, Homo sapiens
cccagtaataacaat

SEQ ID NO: 434101 - DNA, 15 bp, Homo sapiens
tcccagtaataacaa

SEQ ID NO: 434102 - DNA, 15 bp, Homo sapiens
ctcccagtaataaca

SEQ ID NO: 434103 - DNA, 15 bp, Homo sapiens
tctcccagtaataac

SEQ ID NO: 434104 - DNA, 15 bp, Homo sapiens
atctcccagtaataa

SEQ ID NO: 434105 - DNA, 15 bp, Homo sapiens
catctcccagtaata

SEQ ID NO: 434106 - DNA, 15 bp, Homo sapiens
tcatctcccagtaat

SEQ ID NO: 434107 - DNA, 15 bp, Homo sapiens
ttcatctcccagtaa

SEQ ID NO: 434108 - DNA, 15 bp, Homo sapiens
gttcatctcccagta

SEQ ID NO: 434109 - DNA, 15 bp, Homo sapiens
tgttcatctcccagt

SEQ ID NO: 434110 - DNA, 15 bp, Homo sapiens
ttgttcatctcccag

SEQ ID NO: 434111 - DNA, 15 bp, Homo sapiens
tttgttcatctccca

SEQ ID NO: 434112 - DNA, 15 bp, Homo sapiens
ttttgttcatctccc

SEQ ID NO: 434113 - DNA, 15 bp, Homo sapiens
cttttgttcatctcc

SEQ ID NO: 434114 - DNA, 15 bp, Homo sapiens
ccttttgttcatctc

SEQ ID NO: 434115 - DNA, 15 bp, Homo sapiens
tccttttgttcatct

SEQ ID NO: 434116 - DNA, 15 bp, Homo sapiens
atccttttgttcatc

SEQ ID NO: 434117 - DNA, 15 bp, Homo sapiens
tatccttttgttcat

SEQ ID NO: 434118 - DNA, 15 bp, Homo sapiens
atatccttttgttca

SEQ ID NO: 434119 - DNA, 15 bp, Homo sapiens
aatatccttttgttc

SEQ ID NO: 434120 - DNA, 15 bp, Homo sapiens
taatatccttttgtt

SEQ ID NO: 434121 - DNA, 15 bp, Homo sapiens
ctaatatccttttgt

SEQ ID NO: 434122 - DNA, 15 bp, Homo sapiens
cctaatatccttttg

SEQ ID NO: 434123 - DNA, 15 bp, Homo sapiens
acctaatatcctttt

SEQ ID NO: 434124 - DNA, 15 bp, Homo sapiens
gacctaatatccttt

SEQ ID NO: 434125 - DNA, 15 bp, Homo sapiens
tgacctaatatcctt

SEQ ID NO: 434126 - DNA, 15 bp, Homo sapiens
ttgacctaatatcct

SEQ ID NO: 434127 - DNA, 15 bp, Homo sapiens
tttgacctaatatcc

SEQ ID NO: 434128 - DNA, 15 bp, Homo sapiens
ttttgacctaatatc

SEQ ID NO: 434129 - DNA, 15 bp, Homo sapiens
tttttgacctaatat

SEQ ID NO: 434130 - DNA, 15 bp, Homo sapiens
ctttttgacctaata

SEQ ID NO: 434131 - DNA, 15 bp, Homo sapiens
cctttttgacctaat

SEQ ID NO: 434132 - DNA, 15 bp, Homo sapiens
acctttttgacctaa

SEQ ID NO: 434133 - DNA, 15 bp, Homo sapiens
aacctttttgaccta

SEQ ID NO: 434134 - DNA, 15 bp, Homo sapiens
taacctttttgacct

SEQ ID NO: 434135 - DNA, 15 bp, Homo sapiens
ataacctttttgacc

SEQ ID NO: 434136 - DNA, 15 bp, Homo sapiens
gataacctttttgac

SEQ ID NO: 434137 - DNA, 15 bp, Homo sapiens
tgataacctttttga

SEQ ID NO: 434138 - DNA, 15 bp, Homo sapiens
atgataacctttttg

SEQ ID NO: 434139 - DNA, 15 bp, Homo sapiens
catgataaccttttt

SEQ ID NO: 434140 - DNA, 15 bp, Homo sapiens
ccatgataacctttt

SEQ ID NO: 434141 - DNA, 15 bp, Homo sapiens
tccatgataaccttt

SEQ ID NO: 434142 - DNA, 15 bp, Homo sapiens
ttccatgataacctt

SEQ ID NO: 434143 - DNA, 15 bp, Homo sapiens
tttccatgataacct

SEQ ID NO: 434144 - DNA, 15 bp, Homo sapiens
ttttccatgataacc

SEQ ID NO: 434145 - DNA, 15 bp, Homo sapiens
gttttccatgataac

SEQ ID NO: 434146 - DNA, 15 bp, Homo sapiens
agttttccatgataa

SEQ ID NO: 434147 - DNA, 15 bp, Homo sapiens
cagttttccatgata

SEQ ID NO: 434148 - DNA, 15 bp, Homo sapiens
acagttttccatgat

SEQ ID NO: 434149 - DNA, 15 bp, Homo sapiens
aacagttttccatga

SEQ ID NO: 434150 - DNA, 15 bp, Homo sapiens
gaacagttttccatg

SEQ ID NO: 434151 - DNA, 15 bp, Homo sapiens
agaacagttttccat

SEQ ID NO: 434152 - DNA, 15 bp, Homo sapiens
tagaacagttttcca

SEQ ID NO: 434153 - DNA, 15 bp, Homo sapiens
atagaacagttttcc

SEQ ID NO: 434154 - DNA, 15 bp, Homo sapiens
gatagaacagttttc

SEQ ID NO: 434155 - DNA, 15 bp, Homo sapiens
ggatagaacagtttt

SEQ ID NO: 434156 - DNA, 15 bp, Homo sapiens
aggatagaacagttt

SEQ ID NO: 434157 - DNA, 15 bp, Homo sapiens
caggatagaacagtt

SEQ ID NO: 434158 - DNA, 15 bp, Homo sapiens
acaggatagaacagt

SEQ ID NO: 434159 - DNA, 15 bp, Homo sapiens
gacaggatagaacag

SEQ ID NO: 434160 - DNA, 15 bp, Homo sapiens
agacaggatagaaca

SEQ ID NO: 434161 - DNA, 15 bp, Homo sapiens
tagacaggatagaac

SEQ ID NO: 434162 - DNA, 15 bp, Homo sapiens
ttagacaggatagaa

SEQ ID NO: 434163 - DNA, 15 bp, Homo sapiens
tttagacaggataga

SEQ ID NO: 434164 - DNA, 15 bp, Homo sapiens
ctttagacaggatag

SEQ ID NO: 434165 - DNA, 15 bp, Homo sapiens
actttagacaggata

SEQ ID NO: 434166 - DNA, 15 bp, Homo sapiens
aactttagacaggat

SEQ ID NO: 434167 - DNA, 15 bp, Homo sapiens
aaactttagacagga

SEQ ID NO: 434168 - DNA, 15 bp, Homo sapiens
aaaactttagacagg

SEQ ID NO: 434169 - DNA, 15 bp, Homo sapiens
caaaactttagacag

SEQ ID NO: 434170 - DNA, 15 bp, Homo sapiens
gcaaaactttagaca

SEQ ID NO: 434171 - DNA, 15 bp, Homo sapiens
tgcaaaactttagac

SEQ ID NO: 434172 - DNA, 15 bp, Homo sapiens
gtgcaaaactttaga

SEQ ID NO: 434173 - DNA, 15 bp, Homo sapiens
ggtgcaaaactttag

SEQ ID NO: 434174 - DNA, 15 bp, Homo sapiens
tggtgcaaaacttta

SEQ ID NO: 434175 - DNA, 15 bp, Homo sapiens
atggtgcaaaacttt

SEQ ID NO: 434176 - DNA, 15 bp, Homo sapiens
tatggtgcaaaactt

SEQ ID NO: 434177 - DNA, 15 bp, Homo sapiens
ttatggtgcaaaact

SEQ ID NO: 434178 - DNA, 15 bp, Homo sapiens
cttatggtgcaaaac

SEQ ID NO: 434179 - DNA, 15 bp, Homo sapiens
acttatggtgcaaaa

SEQ ID NO: 434180 - DNA, 15 bp, Homo sapiens
aacttatggtgcaaa

SEQ ID NO: 434181 - DNA, 15 bp, Homo sapiens
aaacttatggtgcaa

SEQ ID NO: 434182 - DNA, 15 bp, Homo sapiens
aaaacttatggtgca

SEQ ID NO: 434183 - DNA, 15 bp, Homo sapiens
gaaaacttatggtgc

SEQ ID NO: 434184 - DNA, 15 bp, Homo sapiens
ggaaaacttatggtg

SEQ ID NO: 434185 - DNA, 15 bp, Homo sapiens
tggaaaacttatggt

SEQ ID NO: 434186 - DNA, 15 bp, Homo sapiens
ttggaaaacttatgg

SEQ ID NO: 434187 - DNA, 15 bp, Homo sapiens
cttggaaaacttatg

SEQ ID NO: 434188 - DNA, 15 bp, Homo sapiens
tcttggaaaacttat

SEQ ID NO: 434189 - DNA, 15 bp, Homo sapiens
gtcttggaaaactta

SEQ ID NO: 434190 - DNA, 15 bp, Homo sapiens
ggtcttggaaaactt

SEQ ID NO: 434191 - DNA, 15 bp, Homo sapiens
gggtcttggaaaact

SEQ ID NO: 434192 - DNA, 15 bp, Homo sapiens
tgggtcttggaaaac

SEQ ID NO: 434193 - DNA, 15 bp, Homo sapiens
atgggtcttggaaaa

SEQ ID NO: 434194 - DNA, 15 bp, Homo sapiens
gatgggtcttggaaa

SEQ ID NO: 434195 - DNA, 15 bp, Homo sapiens
agatgggtcttggaa

SEQ ID NO: 434196 - DNA, 15 bp, Homo sapiens
tagatgggtcttgga

SEQ ID NO: 434197 - DNA, 15 bp, Homo sapiens
ttagatgggtcttgg

SEQ ID NO: 434198 - DNA, 15 bp, Homo sapiens
attagatgggtcttg

SEQ ID NO: 434199 - DNA, 15 bp, Homo sapiens
aattagatgggtctt

SEQ ID NO: 434200 - DNA, 15 bp, Homo sapiens
caattagatgggtct

SEQ ID NO: 434201 - DNA, 15 bp, Homo sapiens
tcaattagatgggtc

SEQ ID NO: 434202 - DNA, 15 bp, Homo sapiens
gtcaattagatgggt

SEQ ID NO: 434203 - DNA, 15 bp, Homo sapiens
tgtcaattagatggg

SEQ ID NO: 434204 - DNA, 15 bp, Homo sapiens
ctgtcaattagatgg

SEQ ID NO: 434205 - DNA, 15 bp, Homo sapiens
actgtcaattagatg

SEQ ID NO: 434206 - DNA, 15 bp, Homo sapiens
aactgtcaattagat

SEQ ID NO: 434207 - DNA, 15 bp, Homo sapiens
aaactgtcaattaga

SEQ ID NO: 434208 - DNA, 15 bp, Homo sapiens
aaaactgtcaattag

SEQ ID NO: 434209 - DNA, 15 bp, Homo sapiens
taaaactgtcaatta

SEQ ID NO: 434210 - DNA, 15 bp, Homo sapiens
gtaaaactgtcaatt

SEQ ID NO: 434211 - DNA, 15 bp, Homo sapiens
agtaaaactgtcaat

SEQ ID NO: 434212 - DNA, 15 bp, Homo sapiens
gagtaaaactgtcaa

SEQ ID NO: 434213 - DNA, 15 bp, Homo sapiens
tgagtaaaactgtca

SEQ ID NO: 434214 - DNA, 15 bp, Homo sapiens
atgagtaaaactgtc

SEQ ID NO: 434215 - DNA, 15 bp, Homo sapiens
tatgagtaaaactgt

SEQ ID NO: 434216 - DNA, 15 bp, Homo sapiens
ttatgagtaaaactg

SEQ ID NO: 434217 - DNA, 15 bp, Homo sapiens
attatgagtaaaact

SEQ ID NO: 434218 - DNA, 15 bp, Homo sapiens
aattatgagtaaaac

SEQ ID NO: 434219 - DNA, 15 bp, Homo sapiens
taattatgagtaaaa

SEQ ID NO: 434220 - DNA, 15 bp, Homo sapiens
gtaattatgagtaaa

SEQ ID NO: 434221 - DNA, 15 bp, Homo sapiens
tgtaattatgagtaa

SEQ ID NO: 434222 - DNA, 15 bp, Homo sapiens
ctgtaattatgagta

SEQ ID NO: 434223 - DNA, 15 bp, Homo sapiens
tctgtaattatgagt

SEQ ID NO: 434224 - DNA, 15 bp, Homo sapiens
gtctgtaattatgag

SEQ ID NO: 434225 - DNA, 15 bp, Homo sapiens
tgtctgtaattatga

SEQ ID NO: 434226 - DNA, 15 bp, Homo sapiens
atgtctgtaattatg

SEQ ID NO: 434227 - DNA, 15 bp, Homo sapiens
aatgtctgtaattat

SEQ ID NO: 434228 - DNA, 15 bp, Homo sapiens
aaatgtctgtaatta

SEQ ID NO: 434229 - DNA, 15 bp, Homo sapiens
gaaatgtctgtaatt

SEQ ID NO: 434230 - DNA, 15 bp, Homo sapiens
agaaatgtctgtaat

SEQ ID NO: 434231 - DNA, 15 bp, Homo sapiens
aagaaatgtctgtaa

SEQ ID NO: 434232 - DNA, 15 bp, Homo sapiens
gaagaaatgtctgta

SEQ ID NO: 434233 - DNA, 15 bp, Homo sapiens
ggaagaaatgtctgt

SEQ ID NO: 434234 - DNA, 15 bp, Homo sapiens
tggaagaaatgtctg

SEQ ID NO: 434235 - DNA, 15 bp, Homo sapiens
ttggaagaaatgtct

SEQ ID NO: 434236 - DNA, 15 bp, Homo sapiens
cttggaagaaatgtc

SEQ ID NO: 434237 - DNA, 15 bp, Homo sapiens
tcttggaagaaatgt

SEQ ID NO: 434238 - DNA, 15 bp, Homo sapiens
atcttggaagaaatg

SEQ ID NO: 434239 - DNA, 15 bp, Homo sapiens
aatcttggaagaaat

SEQ ID NO: 434240 - DNA, 15 bp, Homo sapiens
taatcttggaagaaa

SEQ ID NO: 434241 - DNA, 15 bp, Homo sapiens
ataatcttggaagaa

SEQ ID NO: 434242 - DNA, 15 bp, Homo sapiens
aataatcttggaaga

SEQ ID NO: 434243 - DNA, 15 bp, Homo sapiens
caataatcttggaag

SEQ ID NO: 434244 - DNA, 15 bp, Homo sapiens
tcaataatcttggaa

SEQ ID NO: 434245 - DNA, 15 bp, Homo sapiens
ttcaataatcttgga

SEQ ID NO: 434246 - DNA, 15 bp, Homo sapiens
attcaataatcttgg

SEQ ID NO: 434247 - DNA, 15 bp, Homo sapiens
aattcaataatcttg

SEQ ID NO: 434248 - DNA, 15 bp, Homo sapiens
taattcaataatctt

SEQ ID NO: 434249 - DNA, 15 bp, Homo sapiens
ttaattcaataatct

SEQ ID NO: 434250 - DNA, 15 bp, Homo sapiens
tttaattcaataatc

SEQ ID NO: 434251 - DNA, 15 bp, Homo sapiens
ctttaattcaataat

SEQ ID NO: 434252 - DNA, 15 bp, Homo sapiens
actttaattcaataa

SEQ ID NO: 434253 - DNA, 15 bp, Homo sapiens
aactttaattcaata

SEQ ID NO: 434254 - DNA, 15 bp, Homo sapiens
aaactttaattcaat

SEQ ID NO: 434255 - DNA, 15 bp, Homo sapiens
caaactttaattcaa

SEQ ID NO: 434256 - DNA, 15 bp, Homo sapiens
ccaaactttaattca

SEQ ID NO: 434257 - DNA, 15 bp, Homo sapiens
gccaaactttaattc

SEQ ID NO: 434258 - DNA, 15 bp, Homo sapiens
agccaaactttaatt

SEQ ID NO: 434259 - DNA, 15 bp, Homo sapiens
tagccaaactttaat

SEQ ID NO: 434260 - DNA, 15 bp, Homo sapiens
atagccaaactttaa

SEQ ID NO: 434261 - DNA, 15 bp, Homo sapiens
aatagccaaacttta

SEQ ID NO: 434262 - DNA, 15 bp, Homo sapiens
taatagccaaacttt

SEQ ID NO: 434263 - DNA, 15 bp, Homo sapiens
ataatagccaaactt

SEQ ID NO: 434264 - DNA, 15 bp, Homo sapiens
cataatagccaaact

SEQ ID NO: 434265 - DNA, 15 bp, Homo sapiens
tcataatagccaaac

SEQ ID NO: 434266 - DNA, 15 bp, Homo sapiens
ttcataatagccaaa

SEQ ID NO: 434267 - DNA, 15 bp, Homo sapiens
gttcataatagccaa

SEQ ID NO: 434268 - DNA, 15 bp, Homo sapiens
ggttcataatagcca

SEQ ID NO: 434269 - DNA, 15 bp, Homo sapiens
tggttcataatagcc

SEQ ID NO: 434270 - DNA, 15 bp, Homo sapiens
gtggttcataatagc

SEQ ID NO: 434271 - DNA, 15 bp, Homo sapiens
agtggttcataatag

SEQ ID NO: 434272 - DNA, 15 bp, Homo sapiens
aagtggttcataata

SEQ ID NO: 434273 - DNA, 15 bp, Homo sapiens
taagtggttcataat

SEQ ID NO: 434274 - DNA, 15 bp, Homo sapiens
ataagtggttcataa

SEQ ID NO: 434275 - DNA, 15 bp, Homo sapiens
cataagtggttcata

SEQ ID NO: 434276 - DNA, 15 bp, Homo sapiens
tcataagtggttcat

SEQ ID NO: 434277 - DNA, 15 bp, Homo sapiens
gtcataagtggttca

SEQ ID NO: 434278 - DNA, 15 bp, Homo sapiens
agtcataagtggttc

SEQ ID NO: 434279 - DNA, 15 bp, Homo sapiens
aagtcataagtggtt

SEQ ID NO: 434280 - DNA, 15 bp, Homo sapiens
aaagtcataagtggt

SEQ ID NO: 434281 - DNA, 15 bp, Homo sapiens
aaaagtcataagtgg

SEQ ID NO: 434282 - DNA, 15 bp, Homo sapiens
caaaagtcataagtg

SEQ ID NO: 434283 - DNA, 15 bp, Homo sapiens
tcaaaagtcataagt

SEQ ID NO: 434284 - DNA, 15 bp, Homo sapiens
ttcaaaagtcataag

SEQ ID NO: 434285 - DNA, 15 bp, Homo sapiens
tttcaaaagtcataa

SEQ ID NO: 434286 - DNA, 15 bp, Homo sapiens
ttttcaaaagtcata

SEQ ID NO: 434287 - DNA, 15 bp, Homo sapiens
attttcaaaagtcat

SEQ ID NO: 434288 - DNA, 15 bp, Homo sapiens
aattttcaaaagtca

SEQ ID NO: 434289 - DNA, 15 bp, Homo sapiens
gaattttcaaaagtc

SEQ ID NO: 434290 - DNA, 15 bp, Homo sapiens
tgaattttcaaaagt

SEQ ID NO: 434291 - DNA, 15 bp, Homo sapiens
ttgaattttcaaaag

SEQ ID NO: 434292 - DNA, 15 bp, Homo sapiens
cttgaattttcaaaa

SEQ ID NO: 434293 - DNA, 15 bp, Homo sapiens
tcttgaattttcaaa

SEQ ID NO: 434294 - DNA, 15 bp, Homo sapiens
ctcttgaattttcaa

SEQ ID NO: 434295 - DNA, 15 bp, Homo sapiens
actcttgaattttca

SEQ ID NO: 434296 - DNA, 15 bp, Homo sapiens
gactcttgaattttc

SEQ ID NO: 434297 - DNA, 15 bp, Homo sapiens
tgactcttgaatttt

SEQ ID NO: 434298 - DNA, 15 bp, Homo sapiens
atgactcttgaattt

SEQ ID NO: 434299 - DNA, 15 bp, Homo sapiens
aatgactcttgaatt

SEQ ID NO: 434300 - DNA, 15 bp, Homo sapiens
gaatgactcttgaat

SEQ ID NO: 434301 - DNA, 15 bp, Homo sapiens
agaatgactcttgaa

SEQ ID NO: 434302 - DNA, 15 bp, Homo sapiens
gagaatgactcttga

SEQ ID NO: 434303 - DNA, 15 bp, Homo sapiens
ggagaatgactcttg

SEQ ID NO: 434304 - DNA, 15 bp, Homo sapiens
gggagaatgactctt

SEQ ID NO: 434305 - DNA, 15 bp, Homo sapiens
agggagaatgactct

SEQ ID NO: 434306 - DNA, 15 bp, Homo sapiens
tagggagaatgactc

SEQ ID NO: 434307 - DNA, 15 bp, Homo sapiens
ttagggagaatgact

SEQ ID NO: 434308 - DNA, 15 bp, Homo sapiens
cttagggagaatgac

SEQ ID NO: 434309 - DNA, 15 bp, Homo sapiens
tcttagggagaatga

SEQ ID NO: 434310 - DNA, 15 bp, Homo sapiens
atcttagggagaatg

SEQ ID NO: 434311 - DNA, 15 bp, Homo sapiens
catcttagggagaat

SEQ ID NO: 434312 - DNA, 15 bp, Homo sapiens
tcatcttagggagaa

SEQ ID NO: 434313 - DNA, 15 bp, Homo sapiens
gtcatcttagggaga

SEQ ID NO: 434314 - DNA, 15 bp, Homo sapiens
ggtcatcttagggag

SEQ ID NO: 434315 - DNA, 15 bp, Homo sapiens
aggtcatcttaggga

SEQ ID NO: 434316 - DNA, 15 bp, Homo sapiens
aaggtcatcttaggg

SEQ ID NO: 434317 - DNA, 15 bp, Homo sapiens
aaaggtcatcttagg

SEQ ID NO: 434318 - DNA, 15 bp, Homo sapiens
aaaaggtcatcttag

SEQ ID NO: 434319 - DNA, 15 bp, Homo sapiens
caaaaggtcatctta

SEQ ID NO: 434320 - DNA, 15 bp, Homo sapiens
acaaaaggtcatctt

SEQ ID NO: 434321 - DNA, 15 bp, Homo sapiens
aacaaaaggtcatct

SEQ ID NO: 434322 - DNA, 15 bp, Homo sapiens
aaacaaaaggtcatc

SEQ ID NO: 434323 - DNA, 15 bp, Homo sapiens
gaaacaaaaggtcat

SEQ ID NO: 434324 - DNA, 15 bp, Homo sapiens
tgaaacaaaaggtca

SEQ ID NO: 434325 - DNA, 15 bp, Homo sapiens
ctgaaacaaaaggtc

SEQ ID NO: 434326 - DNA, 15 bp, Homo sapiens
gctgaaacaaaaggt

SEQ ID NO: 434327 - DNA, 15 bp, Homo sapiens
tgctgaaacaaaagg

SEQ ID NO: 434328 - DNA, 15 bp, Homo sapiens
ctgctgaaacaaaag

SEQ ID NO: 434329 - DNA, 15 bp, Homo sapiens
gctgctgaaacaaaa

SEQ ID NO: 434330 - DNA, 15 bp, Homo sapiens
tgctgctgaaacaaa

SEQ ID NO: 434331 - DNA, 15 bp, Homo sapiens
ctgctgctgaaacaa

SEQ ID NO: 434332 - DNA, 15 bp, Homo sapiens
gctgctgctgaaaca

SEQ ID NO: 434333 - DNA, 15 bp, Homo sapiens
tgctgctgctgaaac

SEQ ID NO: 434334 - DNA, 15 bp, Homo sapiens
atgctgctgctgaaa

SEQ ID NO: 434335 - DNA, 15 bp, Homo sapiens
aatgctgctgctgaa

SEQ ID NO: 434336 - DNA, 15 bp, Homo sapiens
gaatgctgctgctga

SEQ ID NO: 434337 - DNA, 15 bp, Homo sapiens
ggaatgctgctgctg

SEQ ID NO: 434338 - DNA, 15 bp, Homo sapiens
tggaatgctgctgct

SEQ ID NO: 434339 - DNA, 15 bp, Homo sapiens
ttggaatgctgctgc

SEQ ID NO: 434340 - DNA, 15 bp, Homo sapiens
attggaatgctgctg

SEQ ID NO: 434341 - DNA, 15 bp, Homo sapiens
tattggaatgctgct

SEQ ID NO: 434342 - DNA, 15 bp, Homo sapiens
ttattggaatgctgc

SEQ ID NO: 434343 - DNA, 15 bp, Homo sapiens
gttattggaatgctg

SEQ ID NO: 434344 - DNA, 15 bp, Homo sapiens
cgttattggaatgct

SEQ ID NO: 434345 - DNA, 15 bp, Homo sapiens
ccgttattggaatgc

SEQ ID NO: 434346 - DNA, 15 bp, Homo sapiens
cccgttattggaatg

SEQ ID NO: 434347 - DNA, 15 bp, Homo sapiens
acccgttattggaat

SEQ ID NO: 434348 - DNA, 15 bp, Homo sapiens
gacccgttattggaa

SEQ ID NO: 434349 - DNA, 15 bp, Homo sapiens
ggacccgttattgga

SEQ ID NO: 434350 - DNA, 15 bp, Homo sapiens
aggacccgttattgg

SEQ ID NO: 434351 - DNA, 15 bp, Homo sapiens
aaggacccgttattg

SEQ ID NO: 434352 - DNA, 15 bp, Homo sapiens
taaggacccgttatt

SEQ ID NO: 434353 - DNA, 15 bp, Homo sapiens
ttaaggacccgttat

SEQ ID NO: 434354 - DNA, 15 bp, Homo sapiens
cttaaggacccgtta

SEQ ID NO: 434355 - DNA, 15 bp, Homo sapiens
ccttaaggacccgtt

SEQ ID NO: 434356 - DNA, 15 bp, Homo sapiens
tccttaaggacccgt

SEQ ID NO: 434357 - DNA, 15 bp, Homo sapiens
ctccttaaggacccg

SEQ ID NO: 434358 - DNA, 15 bp, Homo sapiens
gctccttaaggaccc

SEQ ID NO: 434359 - DNA, 15 bp, Homo sapiens
ggctccttaaggacc

SEQ ID NO: 434360 - DNA, 15 bp, Homo sapiens
tggctccttaaggac

SEQ ID NO: 434361 - DNA, 15 bp, Homo sapiens
ctggctccttaagga

SEQ ID NO: 434362 - DNA, 15 bp, Homo sapiens
tctggctccttaagg

SEQ ID NO: 434363 - DNA, 15 bp, Homo sapiens
ttctggctccttaag

SEQ ID NO: 434364 - DNA, 15 bp, Homo sapiens
cttctggctccttaa

SEQ ID NO: 434365 - DNA, 15 bp, Homo sapiens
tcttctggctcctta

SEQ ID NO: 434366 - DNA, 15 bp, Homo sapiens
ctcttctggctcctt

SEQ ID NO: 434367 - DNA, 15 bp, Homo sapiens
cctcttctggctcct

SEQ ID NO: 434368 - DNA, 15 bp, Homo sapiens
acctcttctggctcc

SEQ ID NO: 434369 - DNA, 15 bp, Homo sapiens
cacctcttctggctc

SEQ ID NO: 434370 - DNA, 15 bp, Homo sapiens
acacctcttctggct

SEQ ID NO: 434371 - DNA, 15 bp, Homo sapiens
cacacctcttctggc

SEQ ID NO: 434372 - DNA, 15 bp, Homo sapiens
ccacacctcttctgg

SEQ ID NO: 434373 - DNA, 15 bp, Homo sapiens
accacacctcttctg

SEQ ID NO: 434374 - DNA, 15 bp, Homo sapiens
aaccacacctcttct

SEQ ID NO: 434375 - DNA, 15 bp, Homo sapiens
aaaccacacctcttc

SEQ ID NO: 434376 - DNA, 15 bp, Homo sapiens
aaaaccacacctctt

SEQ ID NO: 434377 - DNA, 15 bp, Homo sapiens
gaaaaccacacctct

SEQ ID NO: 434378 - DNA, 15 bp, Homo sapiens
agaaaaccacacctc

SEQ ID NO: 434379 - DNA, 15 bp, Homo sapiens
aagaaaaccacacct

SEQ ID NO: 434380 - DNA, 15 bp, Homo sapiens
aaagaaaaccacacc

SEQ ID NO: 434381 - DNA, 15 bp, Homo sapiens
caaagaaaaccacac

SEQ ID NO: 434382 - DNA, 15 bp, Homo sapiens
acaaagaaaaccaca

SEQ ID NO: 434383 - DNA, 15 bp, Homo sapiens
aacaaagaaaaccac

SEQ ID NO: 434384 - DNA, 15 bp, Homo sapiens
aaacaaagaaaacca

SEQ ID NO: 434385 - DNA, 15 bp, Homo sapiens
aaaacaaagaaaacc

SEQ ID NO: 434386 - DNA, 15 bp, Homo sapiens
aaaaacaaagaaaac

SEQ ID NO: 434387 - DNA, 15 bp, Homo sapiens
aaaaaacaaagaaaa

SEQ ID NO: 434388 - DNA, 15 bp, Homo sapiens
gaaaaaacaaagaaa

SEQ ID NO: 434389 - DNA, 15 bp, Homo sapiens
agaaaaaacaaagaa

SEQ ID NO: 434390 - DNA, 15 bp, Homo sapiens
tagaaaaaacaaaga

SEQ ID NO: 434391 - DNA, 15 bp, Homo sapiens
gtagaaaaaacaaag

SEQ ID NO: 434392 - DNA, 15 bp, Homo sapiens
agtagaaaaaacaaa

SEQ ID NO: 434393 - DNA, 15 bp, Homo sapiens
aagtagaaaaaacaa

SEQ ID NO: 434394 - DNA, 15 bp, Homo sapiens
aaagtagaaaaaaca

SEQ ID NO: 434395 - DNA, 15 bp, Homo sapiens
aaaagtagaaaaaac

SEQ ID NO: 434396 - DNA, 15 bp, Homo sapiens
gaaaagtagaaaaaa

SEQ ID NO: 434397 - DNA, 15 bp, Homo sapiens
agaaaagtagaaaaa

SEQ ID NO: 434398 - DNA, 15 bp, Homo sapiens
aagaaaagtagaaaa

SEQ ID NO: 434399 - DNA, 15 bp, Homo sapiens
gaagaaaagtagaaa

SEQ ID NO: 434400 - DNA, 15 bp, Homo sapiens
tgaagaaaagtagaa

SEQ ID NO: 434401 - DNA, 15 bp, Homo sapiens
ttgaagaaaagtaga

SEQ ID NO: 434402 - DNA, 15 bp, Homo sapiens
gttgaagaaaagtag

SEQ ID NO: 434403 - DNA, 15 bp, Homo sapiens
ggttgaagaaaagta

SEQ ID NO: 434404 - DNA, 15 bp, Homo sapiens
aggttgaagaaaagt

SEQ ID NO: 434405 - DNA, 15 bp, Homo sapiens
aaggttgaagaaaag

SEQ ID NO: 434406 - DNA, 15 bp, Homo sapiens
caaggttgaagaaaa

SEQ ID NO: 434407 - DNA, 15 bp, Homo sapiens
acaaggttgaagaaa

SEQ ID NO: 434408 - DNA, 15 bp, Homo sapiens
aacaaggttgaagaa

SEQ ID NO: 434409 - DNA, 15 bp, Homo sapiens
aaacaaggttgaaga

SEQ ID NO: 434410 - DNA, 15 bp, Homo sapiens
gaaacaaggttgaag

SEQ ID NO: 434411 - DNA, 15 bp, Homo sapiens
tgaaacaaggttgaa

SEQ ID NO: 434412 - DNA, 15 bp, Homo sapiens
ctgaaacaaggttga

SEQ ID NO: 434413 - DNA, 15 bp, Homo sapiens
actgaaacaaggttg

SEQ ID NO: 434414 - DNA, 15 bp, Homo sapiens
aactgaaacaaggtt

SEQ ID NO: 434415 - DNA, 15 bp, Homo sapiens
aaactgaaacaaggt

SEQ ID NO: 434416 - DNA, 15 bp, Homo sapiens
aaaactgaaacaagg

SEQ ID NO: 434417 - DNA, 15 bp, Homo sapiens
aaaaactgaaacaag

SEQ ID NO: 434418 - DNA, 15 bp, Homo sapiens
taaaaactgaaacaa

SEQ ID NO: 434419 - DNA, 15 bp, Homo sapiens
gtaaaaactgaaaca

SEQ ID NO: 434420 - DNA, 15 bp, Homo sapiens
agtaaaaactgaaac

SEQ ID NO: 434421 - DNA, 15 bp, Homo sapiens
aagtaaaaactgaaa

SEQ ID NO: 434422 - DNA, 15 bp, Homo sapiens
aaagtaaaaactgaa

SEQ ID NO: 434423 - DNA, 15 bp, Homo sapiens
taaagtaaaaactga

SEQ ID NO: 434424 - DNA, 15 bp, Homo sapiens
ataaagtaaaaactg

SEQ ID NO: 434425 - DNA, 15 bp, Homo sapiens
aataaagtaaaaact

SEQ ID NO: 434426 - DNA, 15 bp, Homo sapiens
caataaagtaaaaac

SEQ ID NO: 434427 - DNA, 15 bp, Homo sapiens
acaataaagtaaaaa

SEQ ID NO: 434428 - DNA, 15 bp, Homo sapiens
aacaataaagtaaaa

SEQ ID NO: 434429 - DNA, 15 bp, Homo sapiens
aaacaataaagtaaa

SEQ ID NO: 434430 - DNA, 15 bp, Homo sapiens
aaaacaataaagtaa

SEQ ID NO: 434431 - DNA, 15 bp, Homo sapiens
aaaaacaataaagta

SEQ ID NO: 434432 - DNA, 15 bp, Homo sapiens
gaaaaacaataaagt

SEQ ID NO: 434433 - DNA, 15 bp, Homo sapiens
agaaaaacaataaag

SEQ ID NO: 434434 - DNA, 15 bp, Homo sapiens
aagaaaaacaataaa

SEQ ID NO: 434435 - DNA, 15 bp, Homo sapiens
gaagaaaaacaataa

SEQ ID NO: 434436 - DNA, 15 bp, Homo sapiens
tgaagaaaaacaata

SEQ ID NO: 434437 - DNA, 15 bp, Homo sapiens
atgaagaaaaacaat

SEQ ID NO: 434438 - DNA, 15 bp, Homo sapiens
gatgaagaaaaacaa

SEQ ID NO: 434439 - DNA, 15 bp, Homo sapiens
ggatgaagaaaaaca

SEQ ID NO: 434440 - DNA, 15 bp, Homo sapiens
aggatgaagaaaaac

SEQ ID NO: 434441 - DNA, 15 bp, Homo sapiens
caggatgaagaaaaa

SEQ ID NO: 434442 - DNA, 15 bp, Homo sapiens
gcaggatgaagaaaa

SEQ ID NO: 434443 - DNA, 15 bp, Homo sapiens
ggcaggatgaagaaa

SEQ ID NO: 434444 - DNA, 15 bp, Homo sapiens
gggcaggatgaagaa

SEQ ID NO: 434445 - DNA, 15 bp, Homo sapiens
ggggcaggatgaaga

SEQ ID NO: 434446 - DNA, 15 bp, Homo sapiens
tggggcaggatgaag

SEQ ID NO: 434447 - DNA, 15 bp, Homo sapiens
atggggcaggatgaa

SEQ ID NO: 434448 - DNA, 15 bp, Homo sapiens
tatggggcaggatga

SEQ ID NO: 434449 - DNA, 15 bp, Homo sapiens
ttatggggcaggatg

SEQ ID NO: 434450 - DNA, 15 bp, Homo sapiens
attatggggcaggat

SEQ ID NO: 434451 - DNA, 15 bp, Homo sapiens
aattatggggcagga

SEQ ID NO: 434452 - DNA, 15 bp, Homo sapiens
aaattatggggcagg

SEQ ID NO: 434453 - DNA, 15 bp, Homo sapiens
gaaattatggggcag

SEQ ID NO: 434454 - DNA, 15 bp, Homo sapiens
tgaaattatggggca

SEQ ID NO: 434455 - DNA, 15 bp, Homo sapiens
atgaaattatggggc

SEQ ID NO: 434456 - DNA, 15 bp, Homo sapiens
aatgaaattatgggg

SEQ ID NO: 434457 - DNA, 15 bp, Homo sapiens
gaatgaaattatggg

SEQ ID NO: 434458 - DNA, 15 bp, Homo sapiens
ggaatgaaattatgg

SEQ ID NO: 434459 - DNA, 15 bp, Homo sapiens
tggaatgaaattatg

SEQ ID NO: 434460 - DNA, 15 bp, Homo sapiens
gtggaatgaaattat

SEQ ID NO: 434461 - DNA, 15 bp, Homo sapiens
agtggaatgaaatta

SEQ ID NO: 434462 - DNA, 15 bp, Homo sapiens
cagtggaatgaaatt

SEQ ID NO: 434463 - DNA, 15 bp, Homo sapiens
gcagtggaatgaaat

SEQ ID NO: 434464 - DNA, 15 bp, Homo sapiens
agcagtggaatgaaa

SEQ ID NO: 434465 - DNA, 15 bp, Homo sapiens
cagcagtggaatgaa

SEQ ID NO: 434466 - DNA, 15 bp, Homo sapiens
acagcagtggaatga

SEQ ID NO: 434467 - DNA, 15 bp, Homo sapiens
aacagcagtggaatg

SEQ ID NO: 434468 - DNA, 15 bp, Homo sapiens
aaacagcagtggaat

SEQ ID NO: 434469 - DNA, 15 bp, Homo sapiens
gaaacagcagtggaa

SEQ ID NO: 434470 - DNA, 15 bp, Homo sapiens
tgaaacagcagtgga

SEQ ID NO: 434471 - DNA, 15 bp, Homo sapiens
ttgaaacagcagtgg

SEQ ID NO: 434472 - DNA, 15 bp, Homo sapiens
tttgaaacagcagtg

SEQ ID NO: 434473 - DNA, 15 bp, Homo sapiens
atttgaaacagcagt

SEQ ID NO: 434474 - DNA, 15 bp, Homo sapiens
tatttgaaacagcag

SEQ ID NO: 434475 - DNA, 15 bp, Homo sapiens
ctatttgaaacagca

SEQ ID NO: 434476 - DNA, 15 bp, Homo sapiens
tctatttgaaacagc

SEQ ID NO: 434477 - DNA, 15 bp, Homo sapiens
gtctatttgaaacag

SEQ ID NO: 434478 - DNA, 15 bp, Homo sapiens
tgtctatttgaaaca

SEQ ID NO: 434479 - DNA, 15 bp, Homo sapiens
atgtctatttgaaac

SEQ ID NO: 434480 - DNA, 15 bp, Homo sapiens
gatgtctatttgaaa

SEQ ID NO: 434481 - DNA, 15 bp, Homo sapiens
cgatgtctatttgaa

SEQ ID NO: 434482 - DNA, 15 bp, Homo sapiens
tcgatgtctatttga

SEQ ID NO: 434483 - DNA, 15 bp, Homo sapiens
ctcgatgtctatttg

SEQ ID NO: 434484 - DNA, 15 bp, Homo sapiens
tctcgatgtctattt

SEQ ID NO: 434485 - DNA, 15 bp, Homo sapiens
atctcgatgtctatt

SEQ ID NO: 434486 - DNA, 15 bp, Homo sapiens
aatctcgatgtctat

SEQ ID NO: 434487 - DNA, 15 bp, Homo sapiens
taatctcgatgtcta

SEQ ID NO: 434488 - DNA, 15 bp, Homo sapiens
ctaatctcgatgtct

SEQ ID NO: 434489 - DNA, 15 bp, Homo sapiens
tctaatctcgatgtc

SEQ ID NO: 434490 - DNA, 15 bp, Homo sapiens
ctctaatctcgatgt

SEQ ID NO: 434491 - DNA, 15 bp, Homo sapiens
gctctaatctcgatg

SEQ ID NO: 434492 - DNA, 15 bp, Homo sapiens
tgctctaatctcgat

SEQ ID NO: 434493 - DNA, 15 bp, Homo sapiens
gtgctctaatctcga

SEQ ID NO: 434494 - DNA, 15 bp, Homo sapiens
ggtgctctaatctcg

SEQ ID NO: 434495 - DNA, 15 bp, Homo sapiens
tggtgctctaatctc

SEQ ID NO: 434496 - DNA, 15 bp, Homo sapiens
ttggtgctctaatct

SEQ ID NO: 434497 - DNA, 15 bp, Homo sapiens
gttggtgctctaatc

SEQ ID NO: 434498 - DNA, 15 bp, Homo sapiens
tgttggtgctctaat

SEQ ID NO: 434499 - DNA, 15 bp, Homo sapiens
gtgttggtgctctaa

SEQ ID NO: 434500 - DNA, 15 bp, Homo sapiens
tgtgttggtgctcta

SEQ ID NO: 434501 - DNA, 15 bp, Homo sapiens
ttgtgttggtgctct

SEQ ID NO: 434502 - DNA, 15 bp, Homo sapiens
attgtgttggtgctc

SEQ ID NO: 434503 - DNA, 15 bp, Homo sapiens
aattgtgttggtgct

SEQ ID NO: 434504 - DNA, 15 bp, Homo sapiens
aaattgtgttggtgc

SEQ ID NO: 434505 - DNA, 15 bp, Homo sapiens
gaaattgtgttggtg

SEQ ID NO: 434506 - DNA, 15 bp, Homo sapiens
tgaaattgtgttggt

SEQ ID NO: 434507 - DNA, 15 bp, Homo sapiens
ttgaaattgtgttgg

SEQ ID NO: 434508 - DNA, 15 bp, Homo sapiens
tttgaaattgtgttg

SEQ ID NO: 434509 - DNA, 15 bp, Homo sapiens
gtttgaaattgtgtt

SEQ ID NO: 434510 - DNA, 15 bp, Homo sapiens
agtttgaaattgtgt

SEQ ID NO: 434511 - DNA, 15 bp, Homo sapiens
gagtttgaaattgtg

SEQ ID NO: 434512 - DNA, 15 bp, Homo sapiens
agagtttgaaattgt

SEQ ID NO: 434513 - DNA, 15 bp, Homo sapiens
cagagtttgaaattg

SEQ ID NO: 434514 - DNA, 15 bp, Homo sapiens
gcagagtttgaaatt

SEQ ID NO: 434515 - DNA, 15 bp, Homo sapiens
agcagagtttgaaat

SEQ ID NO: 434516 - DNA, 15 bp, Homo sapiens
cagcagagtttgaaa

SEQ ID NO: 434517 - DNA, 15 bp, Homo sapiens
ccagcagagtttgaa

SEQ ID NO: 434518 - DNA, 15 bp, Homo sapiens
tccagcagagtttga

SEQ ID NO: 434519 - DNA, 15 bp, Homo sapiens
ttccagcagagtttg

SEQ ID NO: 434520 - DNA, 15 bp, Homo sapiens
gttccagcagagttt

SEQ ID NO: 434521 - DNA, 15 bp, Homo sapiens
agttccagcagagtt

SEQ ID NO: 434522 - DNA, 15 bp, Homo sapiens
cagttccagcagagt

SEQ ID NO: 434523 - DNA, 15 bp, Homo sapiens
acagttccagcagag

SEQ ID NO: 434524 - DNA, 15 bp, Homo sapiens
tacagttccagcaga

SEQ ID NO: 434525 - DNA, 15 bp, Homo sapiens
ttacagttccagcag

SEQ ID NO: 434526 - DNA, 15 bp, Homo sapiens
cttacagttccagca

SEQ ID NO: 434527 - DNA, 15 bp, Homo sapiens
gcttacagttccagc

SEQ ID NO: 434528 - DNA, 15 bp, Homo sapiens
tgcttacagttccag

SEQ ID NO: 434529 - DNA, 15 bp, Homo sapiens
ttgcttacagttcca

SEQ ID NO: 434530 - DNA, 15 bp, Homo sapiens
tttgcttacagttcc

SEQ ID NO: 434531 - DNA, 15 bp, Homo sapiens
ctttgcttacagttc

SEQ ID NO: 434532 - DNA, 15 bp, Homo sapiens
tctttgcttacagtt

SEQ ID NO: 434533 - DNA, 15 bp, Homo sapiens
atctttgcttacagt

SEQ ID NO: 434534 - DNA, 15 bp, Homo sapiens
tatctttgcttacag

SEQ ID NO: 434535 - DNA, 15 bp, Homo sapiens
ttatctttgcttaca

SEQ ID NO: 434536 - DNA, 15 bp, Homo sapiens
tttatctttgcttac

SEQ ID NO: 434537 - DNA, 15 bp, Homo sapiens
atttatctttgctta

SEQ ID NO: 434538 - DNA, 15 bp, Homo sapiens
catttatctttgctt

SEQ ID NO: 434539 - DNA, 15 bp, Homo sapiens
gcatttatctttgct

SEQ ID NO: 434540 - DNA, 15 bp, Homo sapiens
tgcatttatctttgc

SEQ ID NO: 434541 - DNA, 15 bp, Homo sapiens
ctgcatttatctttg

SEQ ID NO: 434542 - DNA, 15 bp, Homo sapiens
actgcatttatcttt

SEQ ID NO: 434543 - DNA, 15 bp, Homo sapiens
tactgcatttatctt

SEQ ID NO: 434544 - DNA, 15 bp, Homo sapiens
gtactgcatttatct

SEQ ID NO: 434545 - DNA, 15 bp, Homo sapiens
tgtactgcatttatc

SEQ ID NO: 434546 - DNA, 15 bp, Homo sapiens
gtgtactgcatttat

SEQ ID NO: 434547 - DNA, 15 bp, Homo sapiens
tgtgtactgcattta

SEQ ID NO: 434548 - DNA, 15 bp, Homo sapiens
atgtgtactgcattt

SEQ ID NO: 434549 - DNA, 15 bp, Homo sapiens
catgtgtactgcatt

SEQ ID NO: 434550 - DNA, 15 bp, Homo sapiens
acatgtgtactgcat

SEQ ID NO: 434551 - DNA, 15 bp, Homo sapiens
aacatgtgtactgca

SEQ ID NO: 434552 - DNA, 15 bp, Homo sapiens
caacatgtgtactgc

SEQ ID NO: 434553 - DNA, 15 bp, Homo sapiens
tcaacatgtgtactg

SEQ ID NO: 434554 - DNA, 15 bp, Homo sapiens
ctcaacatgtgtact

SEQ ID NO: 434555 - DNA, 15 bp, Homo sapiens
tctcaacatgtgtac

SEQ ID NO: 434556 - DNA, 15 bp, Homo sapiens
ttctcaacatgtgta

SEQ ID NO: 434557 - DNA, 15 bp, Homo sapiens
tttctcaacatgtgt

SEQ ID NO: 434558 - DNA, 15 bp, Homo sapiens
atttctcaacatgtg

SEQ ID NO: 434559 - DNA, 15 bp, Homo sapiens
tatttctcaacatgt

SEQ ID NO: 434560 - DNA, 15 bp, Homo sapiens
ttatttctcaacatg

SEQ ID NO: 434561 - DNA, 15 bp, Homo sapiens
gttatttctcaacat

SEQ ID NO: 434562 - DNA, 15 bp, Homo sapiens
tgttatttctcaaca

SEQ ID NO: 434563 - DNA, 15 bp, Homo sapiens
ttgttatttctcaac

SEQ ID NO: 434564 - DNA, 15 bp, Homo sapiens
cttgttatttctcaa

SEQ ID NO: 434565 - DNA, 15 bp, Homo sapiens
acttgttatttctca

SEQ ID NO: 434566 - DNA, 15 bp, Homo sapiens
aacttgttatttctc

SEQ ID NO: 434567 - DNA, 15 bp, Homo sapiens
aaacttgttatttct

SEQ ID NO: 434568 - DNA, 15 bp, Homo sapiens
gaaacttgttatttc

SEQ ID NO: 434569 - DNA, 15 bp, Homo sapiens
agaaacttgttattt

SEQ ID NO: 434570 - DNA, 15 bp, Homo sapiens
cagaaacttgttatt

SEQ ID NO: 434571 - DNA, 15 bp, Homo sapiens
tcagaaacttgttat

SEQ ID NO: 434572 - DNA, 15 bp, Homo sapiens
atcagaaacttgtta

SEQ ID NO: 434573 - DNA, 15 bp, Homo sapiens
aatcagaaacttgtt

SEQ ID NO: 434574 - DNA, 15 bp, Homo sapiens
gaatcagaaacttgt

SEQ ID NO: 434575 - DNA, 15 bp, Homo sapiens
ggaatcagaaacttg

SEQ ID NO: 434576 - DNA, 15 bp, Homo sapiens
gggaatcagaaactt

SEQ ID NO: 434577 - DNA, 15 bp, Homo sapiens
agggaatcagaaact

SEQ ID NO: 434578 - DNA, 15 bp, Homo sapiens
tagggaatcagaaac

SEQ ID NO: 434579 - DNA, 15 bp, Homo sapiens
atagggaatcagaaa

SEQ ID NO: 434580 - DNA, 15 bp, Homo sapiens
aatagggaatcagaa

SEQ ID NO: 434581 - DNA, 15 bp, Homo sapiens
taatagggaatcaga

SEQ ID NO: 434582 - DNA, 15 bp, Homo sapiens
ctaatagggaatcag

SEQ ID NO: 434583 - DNA, 15 bp, Homo sapiens
tctaatagggaatca

SEQ ID NO: 434584 - DNA, 15 bp, Homo sapiens
ttctaatagggaatc

SEQ ID NO: 434585 - DNA, 15 bp, Homo sapiens
gttctaatagggaat

SEQ ID NO: 434586 - DNA, 15 bp, Homo sapiens
cgttctaatagggaa

SEQ ID NO: 434587 - DNA, 15 bp, Homo sapiens
acgttctaataggga

SEQ ID NO: 434588 - DNA, 15 bp, Homo sapiens
tacgttctaataggg

SEQ ID NO: 434589 - DNA, 15 bp, Homo sapiens
gtacgttctaatagg

SEQ ID NO: 434590 - DNA, 15 bp, Homo sapiens
tgtacgttctaatag

SEQ ID NO: 434591 - DNA, 15 bp, Homo sapiens
ttgtacgttctaata

SEQ ID NO: 434592 - DNA, 15 bp, Homo sapiens
gttgtacgttctaat

SEQ ID NO: 434593 - DNA, 15 bp, Homo sapiens
tgttgtacgttctaa

SEQ ID NO: 434594 - DNA, 15 bp, Homo sapiens
gtgttgtacgttcta

SEQ ID NO: 434595 - DNA, 15 bp, Homo sapiens
agtgttgtacgttct

SEQ ID NO: 434596 - DNA, 15 bp, Homo sapiens
cagtgttgtacgttc

SEQ ID NO: 434597 - DNA, 15 bp, Homo sapiens
tcagtgttgtacgtt

SEQ ID NO: 434598 - DNA, 15 bp, Homo sapiens
atcagtgttgtacgt

SEQ ID NO: 434599 - DNA, 15 bp, Homo sapiens
gatcagtgttgtacg

SEQ ID NO: 434600 - DNA, 15 bp, Homo sapiens
tgatcagtgttgtac

SEQ ID NO: 434601 - DNA, 15 bp, Homo sapiens
ttgatcagtgttgta

SEQ ID NO: 434602 - DNA, 15 bp, Homo sapiens
attgatcagtgttgt

SEQ ID NO: 434603 - DNA, 15 bp, Homo sapiens
aattgatcagtgttg

SEQ ID NO: 434604 - DNA, 15 bp, Homo sapiens
aaattgatcagtgtt

SEQ ID NO: 434605 - DNA, 15 bp, Homo sapiens
aaaattgatcagtgt

SEQ ID NO: 434606 - DNA, 15 bp, Homo sapiens
caaaattgatcagtg

SEQ ID NO: 434607 - DNA, 15 bp, Homo sapiens
ccaaaattgatcagt

SEQ ID NO: 434608 - DNA, 15 bp, Homo sapiens
gccaaaattgatcag

SEQ ID NO: 434609 - DNA, 15 bp, Homo sapiens
agccaaaattgatca

SEQ ID NO: 434610 - DNA, 15 bp, Homo sapiens
aagccaaaattgatc

SEQ ID NO: 434611 - DNA, 15 bp, Homo sapiens
gaagccaaaattgat

SEQ ID NO: 434612 - DNA, 15 bp, Homo sapiens
agaagccaaaattga

SEQ ID NO: 434613 - DNA, 15 bp, Homo sapiens
tagaagccaaaattg

SEQ ID NO: 434614 - DNA, 15 bp, Homo sapiens
ctagaagccaaaatt

SEQ ID NO: 434615 - DNA, 15 bp, Homo sapiens
cctagaagccaaaat

SEQ ID NO: 434616 - DNA, 15 bp, Homo sapiens
tcctagaagccaaaa

SEQ ID NO: 434617 - DNA, 15 bp, Homo sapiens
ctcctagaagccaaa

SEQ ID NO: 434618 - DNA, 15 bp, Homo sapiens
gctcctagaagccaa

SEQ ID NO: 434619 - DNA, 15 bp, Homo sapiens
agctcctagaagcca

SEQ ID NO: 434620 - DNA, 15 bp, Homo sapiens
tagctcctagaagcc

SEQ ID NO: 434621 - DNA, 15 bp, Homo sapiens
ttagctcctagaagc

SEQ ID NO: 434622 - DNA, 15 bp, Homo sapiens
tttagctcctagaag

SEQ ID NO: 434623 - DNA, 15 bp, Homo sapiens
atttagctcctagaa

SEQ ID NO: 434624 - DNA, 15 bp, Homo sapiens
aatttagctcctaga

SEQ ID NO: 434625 - DNA, 15 bp, Homo sapiens
caatttagctcctag

SEQ ID NO: 434626 - DNA, 15 bp, Homo sapiens
ccaatttagctccta

SEQ ID NO: 434627 - DNA, 15 bp, Homo sapiens
tccaatttagctcct

SEQ ID NO: 434628 - DNA, 15 bp, Homo sapiens
atccaatttagctcc

SEQ ID NO: 434629 - DNA, 15 bp, Homo sapiens
catccaatttagctc

SEQ ID NO: 434630 - DNA, 15 bp, Homo sapiens
acatccaatttagct

SEQ ID NO: 434631 - DNA, 15 bp, Homo sapiens
tacatccaatttagc

SEQ ID NO: 434632 - DNA, 15 bp, Homo sapiens
ttacatccaatttag

SEQ ID NO: 434633 - DNA, 15 bp, Homo sapiens
tttacatccaattta

SEQ ID NO: 434634 - DNA, 15 bp, Homo sapiens
atttacatccaattt

SEQ ID NO: 434635 - DNA, 15 bp, Homo sapiens
catttacatccaatt

SEQ ID NO: 434636 - DNA, 15 bp, Homo sapiens
acatttacatccaat

SEQ ID NO: 434637 - DNA, 15 bp, Homo sapiens
aacatttacatccaa

SEQ ID NO: 434638 - DNA, 15 bp, Homo sapiens
aaacatttacatcca

SEQ ID NO: 434639 - DNA, 15 bp, Homo sapiens
caaacatttacatcc

SEQ ID NO: 434640 - DNA, 15 bp, Homo sapiens
gcaaacatttacatc

SEQ ID NO: 434641 - DNA, 15 bp, Homo sapiens
tgcaaacatttacat

SEQ ID NO: 434642 - DNA, 15 bp, Homo sapiens
ttgcaaacatttaca

SEQ ID NO: 434643 - DNA, 15 bp, Homo sapiens
tttgcaaacatttac

SEQ ID NO: 434644 - DNA, 15 bp, Homo sapiens
ttttgcaaacattta

SEQ ID NO: 434645 - DNA, 15 bp, Homo sapiens
attttgcaaacattt

SEQ ID NO: 434646 - DNA, 15 bp, Homo sapiens
cattttgcaaacatt

SEQ ID NO: 434647 - DNA, 15 bp, Homo sapiens
tcattttgcaaacat

SEQ ID NO: 434648 - DNA, 15 bp, Homo sapiens
ttcattttgcaaaca

SEQ ID NO: 434649 - DNA, 15 bp, Homo sapiens
cttcattttgcaaac

SEQ ID NO: 434650 - DNA, 15 bp, Homo sapiens
ccttcattttgcaaa

SEQ ID NO: 434651 - DNA, 15 bp, Homo sapiens
tccttcattttgcaa

SEQ ID NO: 434652 - DNA, 15 bp, Homo sapiens
ttccttcattttgca

SEQ ID NO: 434653 - DNA, 15 bp, Homo sapiens
cttccttcattttgc

SEQ ID NO: 434654 - DNA, 15 bp, Homo sapiens
gcttccttcattttg

SEQ ID NO: 434655 - DNA, 15 bp, Homo sapiens
agcttccttcatttt

SEQ ID NO: 434656 - DNA, 15 bp, Homo sapiens
tagcttccttcattt

SEQ ID NO: 434657 - DNA, 15 bp, Homo sapiens
ttagcttccttcatt

SEQ ID NO: 434658 - DNA, 15 bp, Homo sapiens
attagcttccttcat

SEQ ID NO: 434659 - DNA, 15 bp, Homo sapiens
tattagcttccttca

SEQ ID NO: 434660 - DNA, 15 bp, Homo sapiens
atattagcttccttc

SEQ ID NO: 434661 - DNA, 15 bp, Homo sapiens
gatattagcttcctt

SEQ ID NO: 434662 - DNA, 15 bp, Homo sapiens
tgatattagcttcct

SEQ ID NO: 434663 - DNA, 15 bp, Homo sapiens
ttgatattagcttcc

SEQ ID NO: 434664 - DNA, 15 bp, Homo sapiens
cttgatattagcttc

SEQ ID NO: 434665 - DNA, 15 bp, Homo sapiens
tcttgatattagctt

SEQ ID NO: 434666 - DNA, 15 bp, Homo sapiens
atcttgatattagct

SEQ ID NO: 434667 - DNA, 15 bp, Homo sapiens
tatcttgatattagc

SEQ ID NO: 434668 - DNA, 15 bp, Homo sapiens
atatcttgatattag

SEQ ID NO: 434669 - DNA, 15 bp, Homo sapiens
aatatcttgatatta

SEQ ID NO: 434670 - DNA, 15 bp, Homo sapiens
aaatatcttgatatt

SEQ ID NO: 434671 - DNA, 15 bp, Homo sapiens
caaatatcttgatat

SEQ ID NO: 434672 - DNA, 15 bp, Homo sapiens
tcaaatatcttgata

SEQ ID NO: 434673 - DNA, 15 bp, Homo sapiens
ctcaaatatcttgat

SEQ ID NO: 434674 - DNA, 15 bp, Homo sapiens
tctcaaatatcttga

SEQ ID NO: 434675 - DNA, 15 bp, Homo sapiens
atctcaaatatcttg

SEQ ID NO: 434676 - DNA, 15 bp, Homo sapiens
catctcaaatatctt

SEQ ID NO: 434677 - DNA, 15 bp, Homo sapiens
acatctcaaatatct

SEQ ID NO: 434678 - DNA, 15 bp, Homo sapiens
aacatctcaaatatc

SEQ ID NO: 434679 - DNA, 15 bp, Homo sapiens
taacatctcaaatat

SEQ ID NO: 434680 - DNA, 15 bp, Homo sapiens
ctaacatctcaaata

SEQ ID NO: 434681 - DNA, 15 bp, Homo sapiens
actaacatctcaaat

SEQ ID NO: 434682 - DNA, 15 bp, Homo sapiens
tactaacatctcaaa

SEQ ID NO: 434683 - DNA, 15 bp, Homo sapiens
gtactaacatctcaa

SEQ ID NO: 434684 - DNA, 15 bp, Homo sapiens
tgtactaacatctca

SEQ ID NO: 434685 - DNA, 15 bp, Homo sapiens
atgtactaacatctc

SEQ ID NO: 434686 - DNA, 15 bp, Homo sapiens
aatgtactaacatct

SEQ ID NO: 434687 - DNA, 15 bp, Homo sapiens
taatgtactaacatc

SEQ ID NO: 434688 - DNA, 15 bp, Homo sapiens
ttaatgtactaacat

SEQ ID NO: 434689 - DNA, 15 bp, Homo sapiens
attaatgtactaaca

SEQ ID NO: 434690 - DNA, 15 bp, Homo sapiens
aattaatgtactaac

SEQ ID NO: 434691 - DNA, 15 bp, Homo sapiens
aaattaatgtactaa

SEQ ID NO: 434692 - DNA, 15 bp, Homo sapiens
taaattaatgtacta

SEQ ID NO: 434693 - DNA, 15 bp, Homo sapiens
ctaaattaatgtact

SEQ ID NO: 434694 - DNA, 15 bp, Homo sapiens
cctaaattaatgtac

SEQ ID NO: 434695 - DNA, 15 bp, Homo sapiens
tcctaaattaatgta

SEQ ID NO: 434696 - DNA, 15 bp, Homo sapiens
atcctaaattaatgt

SEQ ID NO: 434697 - DNA, 15 bp, Homo sapiens
aatcctaaattaatg

SEQ ID NO: 434698 - DNA, 15 bp, Homo sapiens
aaatcctaaattaat

SEQ ID NO: 434699 - DNA, 15 bp, Homo sapiens
aaaatcctaaattaa

SEQ ID NO: 434700 - DNA, 15 bp, Homo sapiens
taaaatcctaaatta

SEQ ID NO: 434701 - DNA, 15 bp, Homo sapiens
ataaaatcctaaatt

SEQ ID NO: 434702 - DNA, 15 bp, Homo sapiens
aataaaatcctaaat

SEQ ID NO: 434703 - DNA, 15 bp, Homo sapiens
gaataaaatcctaaa

SEQ ID NO: 434704 - DNA, 15 bp, Homo sapiens
tgaataaaatcctaa

SEQ ID NO: 434705 - DNA, 15 bp, Homo sapiens
ctgaataaaatccta

SEQ ID NO: 434706 - DNA, 15 bp, Homo sapiens
gctgaataaaatcct

SEQ ID NO: 434707 - DNA, 15 bp, Homo sapiens
tgctgaataaaatcc

SEQ ID NO: 434708 - DNA, 15 bp, Homo sapiens
ttgctgaataaaatc

SEQ ID NO: 434709 - DNA, 15 bp, Homo sapiens
tttgctgaataaaat

SEQ ID NO: 434710 - DNA, 15 bp, Homo sapiens
gtttgctgaataaaa

SEQ ID NO: 434711 - DNA, 15 bp, Homo sapiens
tgtttgctgaataaa

SEQ ID NO: 434712 - DNA, 15 bp, Homo sapiens
gtgtttgctgaataa

SEQ ID NO: 434713 - DNA, 15 bp, Homo sapiens
agtgtttgctgaata

SEQ ID NO: 434714 - DNA, 15 bp, Homo sapiens
cagtgtttgctgaat

SEQ ID NO: 434715 - DNA, 15 bp, Homo sapiens
tcagtgtttgctgaa

SEQ ID NO: 434716 - DNA, 15 bp, Homo sapiens
ctcagtgtttgctga

SEQ ID NO: 434717 - DNA, 15 bp, Homo sapiens
gctcagtgtttgctg

SEQ ID NO: 434718 - DNA, 15 bp, Homo sapiens
cgctcagtgtttgct

SEQ ID NO: 434719 - DNA, 15 bp, Homo sapiens
gcgctcagtgtttgc

SEQ ID NO: 434720 - DNA, 15 bp, Homo sapiens
ggcgctcagtgtttg

SEQ ID NO: 434721 - DNA, 15 bp, Homo sapiens
tggcgctcagtgttt

SEQ ID NO: 434722 - DNA, 15 bp, Homo sapiens
ttggcgctcagtgtt

SEQ ID NO: 434723 - DNA, 15 bp, Homo sapiens
gttggcgctcagtgt

SEQ ID NO: 434724 - DNA, 15 bp, Homo sapiens
agttggcgctcagtg

SEQ ID NO: 434725 - DNA, 15 bp, Homo sapiens
tagttggcgctcagt

SEQ ID NO: 434726 - DNA, 15 bp, Homo sapiens
atagttggcgctcag

SEQ ID NO: 434727 - DNA, 15 bp, Homo sapiens
tatagttggcgctca

SEQ ID NO: 434728 - DNA, 15 bp, Homo sapiens
atatagttggcgctc

SEQ ID NO: 434729 - DNA, 15 bp, Homo sapiens
aatatagttggcgct

SEQ ID NO: 434730 - DNA, 15 bp, Homo sapiens
aaatatagttggcgc

SEQ ID NO: 434731 - DNA, 15 bp, Homo sapiens
gaaatatagttggcg

SEQ ID NO: 434732 - DNA, 15 bp, Homo sapiens
tgaaatatagttggc

SEQ ID NO: 434733 - DNA, 15 bp, Homo sapiens
ctgaaatatagttgg

SEQ ID NO: 434734 - DNA, 15 bp, Homo sapiens
tctgaaatatagttg

SEQ ID NO: 434735 - DNA, 15 bp, Homo sapiens
gtctgaaatatagtt

SEQ ID NO: 434736 - DNA, 15 bp, Homo sapiens
tgtctgaaatatagt

SEQ ID NO: 434737 - DNA, 15 bp, Homo sapiens
atgtctgaaatatag

SEQ ID NO: 434738 - DNA, 15 bp, Homo sapiens
aatgtctgaaatata

SEQ ID NO: 434739 - DNA, 15 bp, Homo sapiens
caatgtctgaaatat

SEQ ID NO: 434740 - DNA, 15 bp, Homo sapiens
acaatgtctgaaata

SEQ ID NO: 434741 - DNA, 15 bp, Homo sapiens
aacaatgtctgaaat

SEQ ID NO: 434742 - DNA, 15 bp, Homo sapiens
aaacaatgtctgaaa

SEQ ID NO: 434743 - DNA, 15 bp, Homo sapiens
aaaacaatgtctgaa

SEQ ID NO: 434744 - DNA, 15 bp, Homo sapiens
aaaaacaatgtctga

SEQ ID NO: 434745 - DNA, 15 bp, Homo sapiens
aaaaaacaatgtctg

SEQ ID NO: 434746 - DNA, 15 bp, Homo sapiens
caaaaaacaatgtct

SEQ ID NO: 434747 - DNA, 15 bp, Homo sapiens
acaaaaaacaatgtc

SEQ ID NO: 434748 - DNA, 15 bp, Homo sapiens
aacaaaaaacaatgt

SEQ ID NO: 434749 - DNA, 15 bp, Homo sapiens
caacaaaaaacaatg

SEQ ID NO: 434750 - DNA, 15 bp, Homo sapiens
acaacaaaaaacaat

SEQ ID NO: 434751 - DNA, 15 bp, Homo sapiens
cacaacaaaaaacaa

SEQ ID NO: 434752 - DNA, 15 bp, Homo sapiens
ccacaacaaaaaaca

SEQ ID NO: 434753 - DNA, 15 bp, Homo sapiens
cccacaacaaaaaac

SEQ ID NO: 434754 - DNA, 15 bp, Homo sapiens
acccacaacaaaaaa

SEQ ID NO: 434755 - DNA, 15 bp, Homo sapiens
cacccacaacaaaaa

SEQ ID NO: 434756 - DNA, 15 bp, Homo sapiens
gcacccacaacaaaa

SEQ ID NO: 434757 - DNA, 15 bp, Homo sapiens
tgcacccacaacaaa

SEQ ID NO: 434758 - DNA, 15 bp, Homo sapiens
ttgcacccacaacaa

SEQ ID NO: 434759 - DNA, 15 bp, Homo sapiens
cttgcacccacaaca

SEQ ID NO: 434760 - DNA, 15 bp, Homo sapiens
ccttgcacccacaac

SEQ ID NO: 434761 - DNA, 15 bp, Homo sapiens
accttgcacccacaa

SEQ ID NO: 434762 - DNA, 15 bp, Homo sapiens
caccttgcacccaca

SEQ ID NO: 434763 - DNA, 15 bp, Homo sapiens
tcaccttgcacccac

SEQ ID NO: 434764 - DNA, 15 bp, Homo sapiens
atcaccttgcaccca

SEQ ID NO: 434765 - DNA, 15 bp, Homo sapiens
catcaccttgcaccc

SEQ ID NO: 434766 - DNA, 15 bp, Homo sapiens
tcatcaccttgcacc

SEQ ID NO: 434767 - DNA, 15 bp, Homo sapiens
ttcatcaccttgcac

SEQ ID NO: 434768 - DNA, 15 bp, Homo sapiens
cttcatcaccttgca

SEQ ID NO: 434769 - DNA, 15 bp, Homo sapiens
tcttcatcaccttgc

SEQ ID NO: 434770 - DNA, 15 bp, Homo sapiens
ttcttcatcaccttg

SEQ ID NO: 434771 - DNA, 15 bp, Homo sapiens
cttcttcatcacctt

SEQ ID NO: 434772 - DNA, 15 bp, Homo sapiens
gcttcttcatcacct

SEQ ID NO: 434773 - DNA, 15 bp, Homo sapiens
tgcttcttcatcacc

SEQ ID NO: 434774 - DNA, 15 bp, Homo sapiens
gtgcttcttcatcac

SEQ ID NO: 434775 - DNA, 15 bp, Homo sapiens
tgtgcttcttcatca

SEQ ID NO: 434776 - DNA, 15 bp, Homo sapiens
ctgtgcttcttcatc

SEQ ID NO: 434777 - DNA, 15 bp, Homo sapiens
gctgtgcttcttcat

SEQ ID NO: 434778 - DNA, 15 bp, Homo sapiens
agctgtgcttcttca

SEQ ID NO: 434779 - DNA, 15 bp, Homo sapiens
aagctgtgcttcttc

SEQ ID NO: 434780 - DNA, 15 bp, Homo sapiens
aaagctgtgcttctt

SEQ ID NO: 434781 - DNA, 15 bp, Homo sapiens
aaaagctgtgcttct

SEQ ID NO: 434782 - DNA, 15 bp, Homo sapiens
taaaagctgtgcttc

SEQ ID NO: 434783 - DNA, 15 bp, Homo sapiens
gtaaaagctgtgctt

SEQ ID NO: 434784 - DNA, 15 bp, Homo sapiens
agtaaaagctgtgct

SEQ ID NO: 434785 - DNA, 15 bp, Homo sapiens
gagtaaaagctgtgc

SEQ ID NO: 434786 - DNA, 15 bp, Homo sapiens
ggagtaaaagctgtg

SEQ ID NO: 434787 - DNA, 15 bp, Homo sapiens
aggagtaaaagctgt

SEQ ID NO: 434788 - DNA, 15 bp, Homo sapiens
taggagtaaaagctg

SEQ ID NO: 434789 - DNA, 15 bp, Homo sapiens
ttaggagtaaaagct

SEQ ID NO: 434790 - DNA, 15 bp, Homo sapiens
tttaggagtaaaagc

SEQ ID NO: 434791 - DNA, 15 bp, Homo sapiens
atttaggagtaaaag

SEQ ID NO: 434792 - DNA, 15 bp, Homo sapiens
gatttaggagtaaaa

SEQ ID NO: 434793 - DNA, 15 bp, Homo sapiens
tgatttaggagtaaa

SEQ ID NO: 434794 - DNA, 15 bp, Homo sapiens
gtgatttaggagtaa

SEQ ID NO: 434795 - DNA, 15 bp, Homo sapiens
tgtgatttaggagta

SEQ ID NO: 434796 - DNA, 15 bp, Homo sapiens
gtgtgatttaggagt

SEQ ID NO: 434797 - DNA, 15 bp, Homo sapiens
ggtgtgatttaggag

SEQ ID NO: 434798 - DNA, 15 bp, Homo sapiens
tggtgtgatttagga

SEQ ID NO: 434799 - DNA, 15 bp, Homo sapiens
atggtgtgatttagg

SEQ ID NO: 434800 - DNA, 15 bp, Homo sapiens
catggtgtgatttag

SEQ ID NO: 434801 - DNA, 15 bp, Homo sapiens
acatggtgtgattta

SEQ ID NO: 434802 - DNA, 15 bp, Homo sapiens
tacatggtgtgattt

SEQ ID NO: 434803 - DNA, 15 bp, Homo sapiens
gtacatggtgtgatt

SEQ ID NO: 434804 - DNA, 15 bp, Homo sapiens
cgtacatggtgtgat

SEQ ID NO: 434805 - DNA, 15 bp, Homo sapiens
gcgtacatggtgtga

SEQ ID NO: 434806 - DNA, 15 bp, Homo sapiens
tgcgtacatggtgtg

SEQ ID NO: 434807 - DNA, 15 bp, Homo sapiens
ctgcgtacatggtgt

SEQ ID NO: 434808 - DNA, 15 bp, Homo sapiens
cctgcgtacatggtg

SEQ ID NO: 434809 - DNA, 15 bp, Homo sapiens
tcctgcgtacatggt

SEQ ID NO: 434810 - DNA, 15 bp, Homo sapiens
gtcctgcgtacatgg

SEQ ID NO: 434811 - DNA, 15 bp, Homo sapiens
tgtcctgcgtacatg

SEQ ID NO: 434812 - DNA, 15 bp, Homo sapiens
ctgtcctgcgtacat

SEQ ID NO: 434813 - DNA, 15 bp, Homo sapiens
cctgtcctgcgtaca

SEQ ID NO: 434814 - DNA, 15 bp, Homo sapiens
ccctgtcctgcgtac

SEQ ID NO: 434815 - DNA, 15 bp, Homo sapiens
tccctgtcctgcgta

SEQ ID NO: 434816 - DNA, 15 bp, Homo sapiens
ttccctgtcctgcgt

SEQ ID NO: 434817 - DNA, 15 bp, Homo sapiens
cttccctgtcctgcg

SEQ ID NO: 434818 - DNA, 15 bp, Homo sapiens
acttccctgtcctgc

SEQ ID NO: 434819 - DNA, 15 bp, Homo sapiens
tacttccctgtcctg

SEQ ID NO: 434820 - DNA, 15 bp, Homo sapiens
ttacttccctgtcct

SEQ ID NO: 434821 - DNA, 15 bp, Homo sapiens
cttacttccctgtcc

SEQ ID NO: 434822 - DNA, 15 bp, Homo sapiens
tcttacttccctgtc

SEQ ID NO: 434823 - DNA, 15 bp, Homo sapiens
ctcttacttccctgt

SEQ ID NO: 434824 - DNA, 15 bp, Homo sapiens
tctcttacttccctg

SEQ ID NO: 434825 - DNA, 15 bp, Homo sapiens
ttctcttacttccct

SEQ ID NO: 434826 - DNA, 15 bp, Homo sapiens
gttctcttacttccc

SEQ ID NO: 434827 - DNA, 15 bp, Homo sapiens
tgttctcttacttcc

SEQ ID NO: 434828 - DNA, 15 bp, Homo sapiens
ctgttctcttacttc

SEQ ID NO: 434829 - DNA, 15 bp, Homo sapiens
cctgttctcttactt

SEQ ID NO: 434830 - DNA, 15 bp, Homo sapiens
gcctgttctcttact

SEQ ID NO: 434831 - DNA, 15 bp, Homo sapiens
tgcctgttctcttac

SEQ ID NO: 434832 - DNA, 15 bp, Homo sapiens
ttgcctgttctctta

SEQ ID NO: 434833 - DNA, 15 bp, Homo sapiens
attgcctgttctctt

SEQ ID NO: 434834 - DNA, 15 bp, Homo sapiens
aattgcctgttctct

SEQ ID NO: 434835 - DNA, 15 bp, Homo sapiens
caattgcctgttctc

SEQ ID NO: 434836 - DNA, 15 bp, Homo sapiens
gcaattgcctgttct

SEQ ID NO: 434837 - DNA, 15 bp, Homo sapiens
agcaattgcctgttc

SEQ ID NO: 434838 - DNA, 15 bp, Homo sapiens
cagcaattgcctgtt

SEQ ID NO: 434839 - DNA, 15 bp, Homo sapiens
acagcaattgcctgt

SEQ ID NO: 434840 - DNA, 15 bp, Homo sapiens
aacagcaattgcctg

SEQ ID NO: 434841 - DNA, 15 bp, Homo sapiens
taacagcaattgcct

SEQ ID NO: 434842 - DNA, 15 bp, Homo sapiens
ttaacagcaattgcc

SEQ ID NO: 434843 - DNA, 15 bp, Homo sapiens
cttaacagcaattgc

SEQ ID NO: 434844 - DNA, 15 bp, Homo sapiens
acttaacagcaattg

SEQ ID NO: 434845 - DNA, 15 bp, Homo sapiens
tacttaacagcaatt

SEQ ID NO: 434846 - DNA, 15 bp, Homo sapiens
atacttaacagcaat

SEQ ID NO: 434847 - DNA, 15 bp, Homo sapiens
tatacttaacagcaa

SEQ ID NO: 434848 - DNA, 15 bp, Homo sapiens
ttatacttaacagca

SEQ ID NO: 434849 - DNA, 15 bp, Homo sapiens
tttatacttaacagc

SEQ ID NO: 434850 - DNA, 15 bp, Homo sapiens
ctttatacttaacag

SEQ ID NO: 434851 - DNA, 15 bp, Homo sapiens
tctttatacttaaca

SEQ ID NO: 434852 - DNA, 15 bp, Homo sapiens
atctttatacttaac

SEQ ID NO: 434853 - DNA, 15 bp, Homo sapiens
aatctttatacttaa

SEQ ID NO: 434854 - DNA, 15 bp, Homo sapiens
caatctttatactta

SEQ ID NO: 434855 - DNA, 15 bp, Homo sapiens
acaatctttatactt

SEQ ID NO: 434856 - DNA, 15 bp, Homo sapiens
cacaatctttatact

SEQ ID NO: 434857 - DNA, 15 bp, Homo sapiens
tcacaatctttatac

SEQ ID NO: 434858 - DNA, 15 bp, Homo sapiens
atcacaatctttata

SEQ ID NO: 434859 - DNA, 15 bp, Homo sapiens
tatcacaatctttat

SEQ ID NO: 434860 - DNA, 15 bp, Homo sapiens
gtatcacaatcttta

SEQ ID NO: 434861 - DNA, 15 bp, Homo sapiens
tgtatcacaatcttt

SEQ ID NO: 434862 - DNA, 15 bp, Homo sapiens
gtgtatcacaatctt

SEQ ID NO: 434863 - DNA, 15 bp, Homo sapiens
agtgtatcacaatct

SEQ ID NO: 434864 - DNA, 15 bp, Homo sapiens
aagtgtatcacaatc

SEQ ID NO: 434865 - DNA, 15 bp, Homo sapiens
aaagtgtatcacaat

SEQ ID NO: 434866 - DNA, 15 bp, Homo sapiens
taaagtgtatcacaa

SEQ ID NO: 434867 - DNA, 15 bp, Homo sapiens
ctaaagtgtatcaca

SEQ ID NO: 434868 - DNA, 15 bp, Homo sapiens
gctaaagtgtatcac

SEQ ID NO: 434869 - DNA, 15 bp, Homo sapiens
ggctaaagtgtatca

SEQ ID NO: 434870 - DNA, 15 bp, Homo sapiens
gggctaaagtgtatc

SEQ ID NO: 434871 - DNA, 15 bp, Homo sapiens
tgggctaaagtgtat

SEQ ID NO: 434872 - DNA, 15 bp, Homo sapiens
ctgggctaaagtgta

SEQ ID NO: 434873 - DNA, 15 bp, Homo sapiens
cctgggctaaagtgt

SEQ ID NO: 434874 - DNA, 15 bp, Homo sapiens
tcctgggctaaagtg

SEQ ID NO: 434875 - DNA, 15 bp, Homo sapiens
atcctgggctaaagt

SEQ ID NO: 434876 - DNA, 15 bp, Homo sapiens
catcctgggctaaag

SEQ ID NO: 434877 - DNA, 15 bp, Homo sapiens
ccatcctgggctaaa

SEQ ID NO: 434878 - DNA, 15 bp, Homo sapiens
tccatcctgggctaa

SEQ ID NO: 434879 - DNA, 15 bp, Homo sapiens
ttccatcctgggcta

SEQ ID NO: 434880 - DNA, 15 bp, Homo sapiens
cttccatcctgggct

SEQ ID NO: 434881 - DNA, 15 bp, Homo sapiens
ccttccatcctgggc

SEQ ID NO: 434882 - DNA, 15 bp, Homo sapiens
cccttccatcctggg

SEQ ID NO: 434883 - DNA, 15 bp, Homo sapiens
ccccttccatcctgg

SEQ ID NO: 434884 - DNA, 15 bp, Homo sapiens
gccccttccatcctg

SEQ ID NO: 434885 - DNA, 15 bp, Homo sapiens
tgccccttccatcct

SEQ ID NO: 434886 - DNA, 15 bp, Homo sapiens
gtgccccttccatcc

SEQ ID NO: 434887 - DNA, 15 bp, Homo sapiens
agtgccccttccatc

SEQ ID NO: 434888 - DNA, 15 bp, Homo sapiens
cagtgccccttccat

SEQ ID NO: 434889 - DNA, 15 bp, Homo sapiens
gcagtgccccttcca

SEQ ID NO: 434890 - DNA, 15 bp, Homo sapiens
tgcagtgccccttcc

SEQ ID NO: 434891 - DNA, 15 bp, Homo sapiens
atgcagtgccccttc

SEQ ID NO: 434892 - DNA, 15 bp, Homo sapiens
catgcagtgcccctt

SEQ ID NO: 434893 - DNA, 15 bp, Homo sapiens
gcatgcagtgcccct

SEQ ID NO: 434894 - DNA, 15 bp, Homo sapiens
tgcatgcagtgcccc

SEQ ID NO: 434895 - DNA, 15 bp, Homo sapiens
ctgcatgcagtgccc

SEQ ID NO: 434896 - DNA, 15 bp, Homo sapiens
gctgcatgcagtgcc

SEQ ID NO: 434897 - DNA, 15 bp, Homo sapiens
tgctgcatgcagtgc

SEQ ID NO: 434898 - DNA, 15 bp, Homo sapiens
ttgctgcatgcagtg

SEQ ID NO: 434899 - DNA, 15 bp, Homo sapiens
cttgctgcatgcagt

SEQ ID NO: 434900 - DNA, 15 bp, Homo sapiens
ccttgctgcatgcag

SEQ ID NO: 434901 - DNA, 15 bp, Homo sapiens
tccttgctgcatgca

SEQ ID NO: 434902 - DNA, 15 bp, Homo sapiens
ctccttgctgcatgc

SEQ ID NO: 434903 - DNA, 15 bp, Homo sapiens
cctccttgctgcatg

SEQ ID NO: 434904 - DNA, 15 bp, Homo sapiens
tcctccttgctgcat

SEQ ID NO: 434905 - DNA, 15 bp, Homo sapiens
ctcctccttgctgca

SEQ ID NO: 434906 - DNA, 15 bp, Homo sapiens
actcctccttgctgc

SEQ ID NO: 434907 - DNA, 15 bp, Homo sapiens
cactcctccttgctg

SEQ ID NO: 434908 - DNA, 15 bp, Homo sapiens
tcactcctccttgct

SEQ ID NO: 434909 - DNA, 15 bp, Homo sapiens
gtcactcctccttgc

SEQ ID NO: 434910 - DNA, 15 bp, Homo sapiens
cgtcactcctccttg

SEQ ID NO: 434911 - DNA, 15 bp, Homo sapiens
ccgtcactcctcctt

SEQ ID NO: 434912 - DNA, 15 bp, Homo sapiens
cccgtcactcctcct

SEQ ID NO: 434913 - DNA, 15 bp, Homo sapiens
tcccgtcactcctcc

SEQ ID NO: 434914 - DNA, 15 bp, Homo sapiens
ctcccgtcactcctc

SEQ ID NO: 434915 - DNA, 15 bp, Homo sapiens
actcccgtcactcct

SEQ ID NO: 434916 - DNA, 15 bp, Homo sapiens
gactcccgtcactcc

SEQ ID NO: 434917 - DNA, 15 bp, Homo sapiens
agactcccgtcactc

SEQ ID NO: 434918 - DNA, 15 bp, Homo sapiens
aagactcccgtcact

SEQ ID NO: 434919 - DNA, 15 bp, Homo sapiens
gaagactcccgtcac

SEQ ID NO: 434920 - DNA, 15 bp, Homo sapiens
ggaagactcccgtca

SEQ ID NO: 434921 - DNA, 15 bp, Homo sapiens
gggaagactcccgtc

SEQ ID NO: 434922 - DNA, 15 bp, Homo sapiens
ggggaagactcccgt

SEQ ID NO: 434923 - DNA, 15 bp, Homo sapiens
aggggaagactcccg

SEQ ID NO: 434924 - DNA, 15 bp, Homo sapiens
aaggggaagactccc

SEQ ID NO: 434925 - DNA, 15 bp, Homo sapiens
caaggggaagactcc

SEQ ID NO: 434926 - DNA, 15 bp, Homo sapiens
ccaaggggaagactc

SEQ ID NO: 434927 - DNA, 15 bp, Homo sapiens
tccaaggggaagact

SEQ ID NO: 434928 - DNA, 15 bp, Homo sapiens
ctccaaggggaagac

SEQ ID NO: 434929 - DNA, 15 bp, Homo sapiens
cctccaaggggaaga

SEQ ID NO: 434930 - DNA, 15 bp, Homo sapiens
acctccaaggggaag

SEQ ID NO: 434931 - DNA, 15 bp, Homo sapiens
cacctccaaggggaa

SEQ ID NO: 434932 - DNA, 15 bp, Homo sapiens
ccacctccaagggga

SEQ ID NO: 434933 - DNA, 15 bp, Homo sapiens
accacctccaagggg

SEQ ID NO: 434934 - DNA, 15 bp, Homo sapiens
caccacctccaaggg

SEQ ID NO: 434935 - DNA, 15 bp, Homo sapiens
acaccacctccaagg

SEQ ID NO: 434936 - DNA, 15 bp, Homo sapiens
gacaccacctccaag

SEQ ID NO: 434937 - DNA, 15 bp, Homo sapiens
agacaccacctccaa

SEQ ID NO: 434938 - DNA, 15 bp, Homo sapiens
cagacaccacctcca

SEQ ID NO: 434939 - DNA, 15 bp, Homo sapiens
tcagacaccacctcc

SEQ ID NO: 434940 - DNA, 15 bp, Homo sapiens
ttcagacaccacctc

SEQ ID NO: 434941 - DNA, 15 bp, Homo sapiens
gttcagacaccacct

SEQ ID NO: 434942 - DNA, 15 bp, Homo sapiens
agttcagacaccacc

SEQ ID NO: 434943 - DNA, 15 bp, Homo sapiens
cagttcagacaccac

SEQ ID NO: 434944 - DNA, 15 bp, Homo sapiens
ccagttcagacacca

SEQ ID NO: 434945 - DNA, 15 bp, Homo sapiens
tccagttcagacacc

SEQ ID NO: 434946 - DNA, 15 bp, Homo sapiens
gtccagttcagacac

SEQ ID NO: 434947 - DNA, 15 bp, Homo sapiens
tgtccagttcagaca

SEQ ID NO: 434948 - DNA, 15 bp, Homo sapiens
ctgtccagttcagac

SEQ ID NO: 434949 - DNA, 15 bp, Homo sapiens
gctgtccagttcaga

SEQ ID NO: 434950 - DNA, 15 bp, Homo sapiens
tgctgtccagttcag

SEQ ID NO: 434951 - DNA, 15 bp, Homo sapiens
ttgctgtccagttca

SEQ ID NO: 434952 - DNA, 15 bp, Homo sapiens
tttgctgtccagttc

SEQ ID NO: 434953 - DNA, 15 bp, Homo sapiens
ctttgctgtccagtt

SEQ ID NO: 434954 - DNA, 15 bp, Homo sapiens
cctttgctgtccagt

SEQ ID NO: 434955 - DNA, 15 bp, Homo sapiens
acctttgctgtccag

SEQ ID NO: 434956 - DNA, 15 bp, Homo sapiens
cacctttgctgtcca

SEQ ID NO: 434957 - DNA, 15 bp, Homo sapiens
gcacctttgctgtcc

SEQ ID NO: 434958 - DNA, 15 bp, Homo sapiens
agcacctttgctgtc

SEQ ID NO: 434959 - DNA, 15 bp, Homo sapiens
aagcacctttgctgt

SEQ ID NO: 434960 - DNA, 15 bp, Homo sapiens
caagcacctttgctg

SEQ ID NO: 434961 - DNA, 15 bp, Homo sapiens
tcaagcacctttgct

SEQ ID NO: 434962 - DNA, 15 bp, Homo sapiens
ctcaagcacctttgc

SEQ ID NO: 434963 - DNA, 15 bp, Homo sapiens
cctcaagcacctttg

SEQ ID NO: 434964 - DNA, 15 bp, Homo sapiens
gcctcaagcaccttt

SEQ ID NO: 434965 - DNA, 15 bp, Homo sapiens
tgcctcaagcacctt

SEQ ID NO: 434966 - DNA, 15 bp, Homo sapiens
ttgcctcaagcacct

SEQ ID NO: 434967 - DNA, 15 bp, Homo sapiens
cttgcctcaagcacc

SEQ ID NO: 434968 - DNA, 15 bp, Homo sapiens
ccttgcctcaagcac

SEQ ID NO: 434969 - DNA, 15 bp, Homo sapiens
tccttgcctcaagca

SEQ ID NO: 434970 - DNA, 15 bp, Homo sapiens
ttccttgcctcaagc

SEQ ID NO: 434971 - DNA, 15 bp, Homo sapiens
tttccttgcctcaag

SEQ ID NO: 434972 - DNA, 15 bp, Homo sapiens
ctttccttgcctcaa

SEQ ID NO: 434973 - DNA, 15 bp, Homo sapiens
gctttccttgcctca

SEQ ID NO: 434974 - DNA, 15 bp, Homo sapiens
tgctttccttgcctc

SEQ ID NO: 434975 - DNA, 15 bp, Homo sapiens
atgctttccttgcct

SEQ ID NO: 434976 - DNA, 15 bp, Homo sapiens
tatgctttccttgcc

SEQ ID NO: 434977 - DNA, 15 bp, Homo sapiens
atatgctttccttgc

SEQ ID NO: 434978 - DNA, 15 bp, Homo sapiens
catatgctttccttg

SEQ ID NO: 434979 - DNA, 15 bp, Homo sapiens
ccatatgctttcctt

SEQ ID NO: 434980 - DNA, 15 bp, Homo sapiens
tccatatgctttcct

SEQ ID NO: 434981 - DNA, 15 bp, Homo sapiens
ttccatatgctttcc

SEQ ID NO: 434982 - DNA, 15 bp, Homo sapiens
tttccatatgctttc

SEQ ID NO: 434983 - DNA, 15 bp, Homo sapiens
atttccatatgcttt

SEQ ID NO: 434984 - DNA, 15 bp, Homo sapiens
catttccatatgctt

SEQ ID NO: 434985 - DNA, 15 bp, Homo sapiens
acatttccatatgct

SEQ ID NO: 434986 - DNA, 15 bp, Homo sapiens
cacatttccatatgc

SEQ ID NO: 434987 - DNA, 15 bp, Homo sapiens
gcacatttccatatg

SEQ ID NO: 434988 - DNA, 15 bp, Homo sapiens
tgcacatttccatat

SEQ ID NO: 434989 - DNA, 15 bp, Homo sapiens
ctgcacatttccata

SEQ ID NO: 434990 - DNA, 15 bp, Homo sapiens
tctgcacatttccat

SEQ ID NO: 434991 - DNA, 15 bp, Homo sapiens
ctctgcacatttcca

SEQ ID NO: 434992 - DNA, 15 bp, Homo sapiens
cctctgcacatttcc

SEQ ID NO: 434993 - DNA, 15 bp, Homo sapiens
gcctctgcacatttc

SEQ ID NO: 434994 - DNA, 15 bp, Homo sapiens
tgcctctgcacattt

SEQ ID NO: 434995 - DNA, 15 bp, Homo sapiens
gtgcctctgcacatt

SEQ ID NO: 434996 - DNA, 15 bp, Homo sapiens
tgtgcctctgcacat

SEQ ID NO: 434997 - DNA, 15 bp, Homo sapiens
ttgtgcctctgcaca

SEQ ID NO: 434998 - DNA, 15 bp, Homo sapiens
attgtgcctctgcac

SEQ ID NO: 434999 - DNA, 15 bp, Homo sapiens
aattgtgcctctgca

SEQ ID NO: 435000 - DNA, 15 bp, Homo sapiens
caattgtgcctctgc

SEQ ID NO: 435001 - DNA, 15 bp, Homo sapiens
ccaattgtgcctctg

SEQ ID NO: 435002 - DNA, 15 bp, Homo sapiens
gccaattgtgcctct

SEQ ID NO: 435003 - DNA, 15 bp, Homo sapiens
tgccaattgtgcctc

SEQ ID NO: 435004 - DNA, 15 bp, Homo sapiens
atgccaattgtgcct

SEQ ID NO: 435005 - DNA, 15 bp, Homo sapiens
catgccaattgtgcc

SEQ ID NO: 435006 - DNA, 15 bp, Homo sapiens
ccatgccaattgtgc

SEQ ID NO: 435007 - DNA, 15 bp, Homo sapiens
gccatgccaattgtg

SEQ ID NO: 435008 - DNA, 15 bp, Homo sapiens
agccatgccaattgt

SEQ ID NO: 435009 - DNA, 15 bp, Homo sapiens
aagccatgccaattg

SEQ ID NO: 435010 - DNA, 15 bp, Homo sapiens
taagccatgccaatt

SEQ ID NO: 435011 - DNA, 15 bp, Homo sapiens
ataagccatgccaat

SEQ ID NO: 435012 - DNA, 15 bp, Homo sapiens
aataagccatgccaa

SEQ ID NO: 435013 - DNA, 15 bp, Homo sapiens
aaataagccatgcca

SEQ ID NO: 435014 - DNA, 15 bp, Homo sapiens
caaataagccatgcc

SEQ ID NO: 435015 - DNA, 15 bp, Homo sapiens
ccaaataagccatgc

SEQ ID NO: 435016 - DNA, 15 bp, Homo sapiens
tccaaataagccatg

SEQ ID NO: 435017 - DNA, 15 bp, Homo sapiens
ctccaaataagccat

SEQ ID NO: 435018 - DNA, 15 bp, Homo sapiens
tctccaaataagcca

SEQ ID NO: 435019 - DNA, 15 bp, Homo sapiens
ttctccaaataagcc

SEQ ID NO: 435020 - DNA, 15 bp, Homo sapiens
attctccaaataagc

SEQ ID NO: 435021 - DNA, 15 bp, Homo sapiens
aattctccaaataag

SEQ ID NO: 435022 - DNA, 15 bp, Homo sapiens
caattctccaaataa

SEQ ID NO: 435023 - DNA, 15 bp, Homo sapiens
acaattctccaaata

SEQ ID NO: 435024 - DNA, 15 bp, Homo sapiens
gacaattctccaaat

SEQ ID NO: 435025 - DNA, 15 bp, Homo sapiens
agacaattctccaaa

SEQ ID NO: 435026 - DNA, 15 bp, Homo sapiens
cagacaattctccaa

SEQ ID NO: 435027 - DNA, 15 bp, Homo sapiens
acagacaattctcca

SEQ ID NO: 435028 - DNA, 15 bp, Homo sapiens
tacagacaattctcc

SEQ ID NO: 435029 - DNA, 15 bp, Homo sapiens
atacagacaattctc

SEQ ID NO: 435030 - DNA, 15 bp, Homo sapiens
gatacagacaattct

SEQ ID NO: 435031 - DNA, 15 bp, Homo sapiens
ggatacagacaattc

SEQ ID NO: 435032 - DNA, 15 bp, Homo sapiens
gggatacagacaatt

SEQ ID NO: 435033 - DNA, 15 bp, Homo sapiens
agggatacagacaat

SEQ ID NO: 435034 - DNA, 15 bp, Homo sapiens
aagggatacagacaa

SEQ ID NO: 435035 - DNA, 15 bp, Homo sapiens
taagggatacagaca

SEQ ID NO: 435036 - DNA, 15 bp, Homo sapiens
ctaagggatacagac

SEQ ID NO: 435037 - DNA, 15 bp, Homo sapiens
tctaagggatacaga

SEQ ID NO: 435038 - DNA, 15 bp, Homo sapiens
ctctaagggatacag

SEQ ID NO: 435039 - DNA, 15 bp, Homo sapiens
gctctaagggataca

SEQ ID NO: 435040 - DNA, 15 bp, Homo sapiens
tgctctaagggatac

SEQ ID NO: 435041 - DNA, 15 bp, Homo sapiens
ctgctctaagggata

SEQ ID NO: 435042 - DNA, 15 bp, Homo sapiens
tctgctctaagggat

SEQ ID NO: 435043 - DNA, 15 bp, Homo sapiens
ctctgctctaaggga

SEQ ID NO: 435044 - DNA, 15 bp, Homo sapiens
cctctgctctaaggg

SEQ ID NO: 435045 - DNA, 15 bp, Homo sapiens
ccctctgctctaagg

SEQ ID NO: 435046 - DNA, 15 bp, Homo sapiens
tccctctgctctaag

SEQ ID NO: 435047 - DNA, 15 bp, Homo sapiens
atccctctgctctaa

SEQ ID NO: 435048 - DNA, 15 bp, Homo sapiens
catccctctgctcta

SEQ ID NO: 435049 - DNA, 15 bp, Homo sapiens
tcatccctctgctct

SEQ ID NO: 435050 - DNA, 15 bp, Homo sapiens
ctcatccctctgctc

SEQ ID NO: 435051 - DNA, 15 bp, Homo sapiens
cctcatccctctgct

SEQ ID NO: 435052 - DNA, 15 bp, Homo sapiens
tcctcatccctctgc

SEQ ID NO: 435053 - DNA, 15 bp, Homo sapiens
ctcctcatccctctg

SEQ ID NO: 435054 - DNA, 15 bp, Homo sapiens
cctcctcatccctct

SEQ ID NO: 435055 - DNA, 15 bp, Homo sapiens
ccctcctcatccctc

SEQ ID NO: 435056 - DNA, 15 bp, Homo sapiens
tccctcctcatccct

SEQ ID NO: 435057 - DNA, 15 bp, Homo sapiens
atccctcctcatccc

SEQ ID NO: 435058 - DNA, 15 bp, Homo sapiens
catccctcctcatcc

SEQ ID NO: 435059 - DNA, 15 bp, Homo sapiens
gcatccctcctcatc

SEQ ID NO: 435060 - DNA, 15 bp, Homo sapiens
tgcatccctcctcat

SEQ ID NO: 435061 - DNA, 15 bp, Homo sapiens
ctgcatccctcctca

SEQ ID NO: 435062 - DNA, 15 bp, Homo sapiens
actgcatccctcctc

SEQ ID NO: 435063 - DNA, 15 bp, Homo sapiens
cactgcatccctcct

SEQ ID NO: 435064 - DNA, 15 bp, Homo sapiens
tcactgcatccctcc

SEQ ID NO: 435065 - DNA, 15 bp, Homo sapiens
ttcactgcatccctc

SEQ ID NO: 435066 - DNA, 15 bp, Homo sapiens
cttcactgcatccct

SEQ ID NO: 435067 - DNA, 15 bp, Homo sapiens
ccttcactgcatccc

SEQ ID NO: 435068 - DNA, 15 bp, Homo sapiens
cccttcactgcatcc

SEQ ID NO: 435069 - DNA, 15 bp, Homo sapiens
gcccttcactgcatc

SEQ ID NO: 435070 - DNA, 15 bp, Homo sapiens
tgcccttcactgcat

SEQ ID NO: 435071 - DNA, 15 bp, Homo sapiens
ctgcccttcactgca

SEQ ID NO: 435072 - DNA, 15 bp, Homo sapiens
tctgcccttcactgc

SEQ ID NO: 435073 - DNA, 15 bp, Homo sapiens
ttctgcccttcactg

SEQ ID NO: 435074 - DNA, 15 bp, Homo sapiens
cttctgcccttcact

SEQ ID NO: 435075 - DNA, 15 bp, Homo sapiens
tcttctgcccttcac

SEQ ID NO: 435076 - DNA, 15 bp, Homo sapiens
atcttctgcccttca

SEQ ID NO: 435077 - DNA, 15 bp, Homo sapiens
catcttctgcccttc

SEQ ID NO: 435078 - DNA, 15 bp, Homo sapiens
gcatcttctgccctt

SEQ ID NO: 435079 - DNA, 15 bp, Homo sapiens
ggcatcttctgccct

SEQ ID NO: 435080 - DNA, 15 bp, Homo sapiens
aggcatcttctgccc

SEQ ID NO: 435081 - DNA, 15 bp, Homo sapiens
aaggcatcttctgcc

SEQ ID NO: 435082 - DNA, 15 bp, Homo sapiens
caaggcatcttctgc

SEQ ID NO: 435083 - DNA, 15 bp, Homo sapiens
ccaaggcatcttctg

SEQ ID NO: 435084 - DNA, 15 bp, Homo sapiens
cccaaggcatcttct

SEQ ID NO: 435085 - DNA, 15 bp, Homo sapiens
acccaaggcatcttc

SEQ ID NO: 435086 - DNA, 15 bp, Homo sapiens
cacccaaggcatctt

SEQ ID NO: 435087 - DNA, 15 bp, Homo sapiens
tcacccaaggcatct

SEQ ID NO: 435088 - DNA, 15 bp, Homo sapiens
ctcacccaaggcatc

SEQ ID NO: 435089 - DNA, 15 bp, Homo sapiens
actcacccaaggcat

SEQ ID NO: 435090 - DNA, 15 bp, Homo sapiens
aactcacccaaggca

SEQ ID NO: 435091 - DNA, 15 bp, Homo sapiens
taactcacccaaggc

SEQ ID NO: 435092 - DNA, 15 bp, Homo sapiens
ctaactcacccaagg

SEQ ID NO: 435093 - DNA, 15 bp, Homo sapiens
gctaactcacccaag

SEQ ID NO: 435094 - DNA, 15 bp, Homo sapiens
agctaactcacccaa

SEQ ID NO: 435095 - DNA, 15 bp, Homo sapiens
cagctaactcaccca

SEQ ID NO: 435096 - DNA, 15 bp, Homo sapiens
ccagctaactcaccc

SEQ ID NO: 435097 - DNA, 15 bp, Homo sapiens
cccagctaactcacc

SEQ ID NO: 435098 - DNA, 15 bp, Homo sapiens
ccccagctaactcac

SEQ ID NO: 435099 - DNA, 15 bp, Homo sapiens
cccccagctaactca

SEQ ID NO: 435100 - DNA, 15 bp, Homo sapiens
acccccagctaactc

SEQ ID NO: 435101 - DNA, 15 bp, Homo sapiens
cacccccagctaact

SEQ ID NO: 435102 - DNA, 15 bp, Homo sapiens
acacccccagctaac

SEQ ID NO: 435103 - DNA, 15 bp, Homo sapiens
cacacccccagctaa

SEQ ID NO: 435104 - DNA, 15 bp, Homo sapiens
ccacacccccagcta

SEQ ID NO: 435105 - DNA, 15 bp, Homo sapiens
cccacacccccagct

SEQ ID NO: 435106 - DNA, 15 bp, Homo sapiens
ccccacacccccagc

SEQ ID NO: 435107 - DNA, 15 bp, Homo sapiens
cccccacacccccag

SEQ ID NO: 435108 - DNA, 15 bp, Homo sapiens
ccccccacaccccca

SEQ ID NO: 435109 - DNA, 15 bp, Homo sapiens
cccccccacaccccc

SEQ ID NO: 435110 - DNA, 15 bp, Homo sapiens
acccccccacacccc

SEQ ID NO: 435111 - DNA, 15 bp, Homo sapiens
tacccccccacaccc

SEQ ID NO: 435112 - DNA, 15 bp, Homo sapiens
ctacccccccacacc

SEQ ID NO: 435113 - DNA, 15 bp, Homo sapiens
cctacccccccacac

SEQ ID NO: 435114 - DNA, 15 bp, Homo sapiens
ccctacccccccaca

SEQ ID NO: 435115 - DNA, 15 bp, Homo sapiens
cccctacccccccac

SEQ ID NO: 435116 - DNA, 15 bp, Homo sapiens
ccccctaccccccca

SEQ ID NO: 435117 - DNA, 15 bp, Homo sapiens
tccccctaccccccc

SEQ ID NO: 435118 - DNA, 15 bp, Homo sapiens
gtccccctacccccc

SEQ ID NO: 435119 - DNA, 15 bp, Homo sapiens
agtccccctaccccc

SEQ ID NO: 435120 - DNA, 15 bp, Homo sapiens
cagtccccctacccc

SEQ ID NO: 435121 - DNA, 15 bp, Homo sapiens
ccagtccccctaccc

SEQ ID NO: 435122 - DNA, 15 bp, Homo sapiens
tccagtccccctacc

SEQ ID NO: 435123 - DNA, 15 bp, Homo sapiens
atccagtccccctac

SEQ ID NO: 435124 - DNA, 15 bp, Homo sapiens
aatccagtcccccta

SEQ ID NO: 435125 - DNA, 15 bp, Homo sapiens
taatccagtccccct

SEQ ID NO: 435126 - DNA, 15 bp, Homo sapiens
ttaatccagtccccc

SEQ ID NO: 435127 - DNA, 15 bp, Homo sapiens
tttaatccagtcccc

SEQ ID NO: 435128 - DNA, 15 bp, Homo sapiens
ttttaatccagtccc

SEQ ID NO: 435129 - DNA, 15 bp, Homo sapiens
attttaatccagtcc

SEQ ID NO: 435130 - DNA, 15 bp, Homo sapiens
gattttaatccagtc

SEQ ID NO: 435131 - DNA, 15 bp, Homo sapiens
ggattttaatccagt

SEQ ID NO: 435132 - DNA, 15 bp, Homo sapiens
tggattttaatccag

SEQ ID NO: 435133 - DNA, 15 bp, Homo sapiens
ttggattttaatcca

SEQ ID NO: 435134 - DNA, 15 bp, Homo sapiens
cttggattttaatcc

SEQ ID NO: 435135 - DNA, 15 bp, Homo sapiens
gcttggattttaatc

SEQ ID NO: 435136 - DNA, 15 bp, Homo sapiens
agcttggattttaat

SEQ ID NO: 435137 - DNA, 15 bp, Homo sapiens
aagcttggattttaa

SEQ ID NO: 435138 - DNA, 15 bp, Homo sapiens
caagcttggatttta

SEQ ID NO: 435139 - DNA, 15 bp, Homo sapiens
ccaagcttggatttt

SEQ ID NO: 435140 - DNA, 15 bp, Homo sapiens
tccaagcttggattt

SEQ ID NO: 435141 - DNA, 15 bp, Homo sapiens
atccaagcttggatt

SEQ ID NO: 435142 - DNA, 15 bp, Homo sapiens
aatccaagcttggat

SEQ ID NO: 435143 - DNA, 15 bp, Homo sapiens
aaatccaagcttgga

SEQ ID NO: 435144 - DNA, 15 bp, Homo sapiens
aaaatccaagcttgg

SEQ ID NO: 435145 - DNA, 15 bp, Homo sapiens
taaaatccaagcttg

SEQ ID NO: 435146 - DNA, 15 bp, Homo sapiens
ataaaatccaagctt

SEQ ID NO: 435147 - DNA, 15 bp, Homo sapiens
aataaaatccaagct

SEQ ID NO: 435148 - DNA, 15 bp, Homo sapiens
aaataaaatccaagc

SEQ ID NO: 435149 - DNA, 15 bp, Homo sapiens
aaaataaaatccaag

SEQ ID NO: 435150 - DNA, 15 bp, Homo sapiens
taaaataaaatccaa

SEQ ID NO: 435151 - DNA, 15 bp, Homo sapiens
ataaaataaaatcca

SEQ ID NO: 435152 - DNA, 15 bp, Homo sapiens
cataaaataaaatcc

SEQ ID NO: 435153 - DNA, 15 bp, Homo sapiens
ccataaaataaaatc

SEQ ID NO: 435154 - DNA, 15 bp, Homo sapiens
cccataaaataaaat

SEQ ID NO: 435155 - DNA, 15 bp, Homo sapiens
gcccataaaataaaa

SEQ ID NO: 435156 - DNA, 15 bp, Homo sapiens
ggcccataaaataaa

SEQ ID NO: 435157 - DNA, 15 bp, Homo sapiens
gggcccataaaataa

SEQ ID NO: 435158 - DNA, 15 bp, Homo sapiens
agggcccataaaata

SEQ ID NO: 435159 - DNA, 15 bp, Homo sapiens
cagggcccataaaat

SEQ ID NO: 435160 - DNA, 15 bp, Homo sapiens
ccagggcccataaaa

SEQ ID NO: 435161 - DNA, 15 bp, Homo sapiens
tccagggcccataaa

SEQ ID NO: 435162 - DNA, 15 bp, Homo sapiens
ctccagggcccataa

SEQ ID NO: 435163 - DNA, 15 bp, Homo sapiens
tctccagggcccata

SEQ ID NO: 435164 - DNA, 15 bp, Homo sapiens
ctctccagggcccat

SEQ ID NO: 435165 - DNA, 15 bp, Homo sapiens
cctctccagggccca

SEQ ID NO: 435166 - DNA, 15 bp, Homo sapiens
gcctctccagggccc

SEQ ID NO: 435167 - DNA, 15 bp, Homo sapiens
ggcctctccagggcc

SEQ ID NO: 435168 - DNA, 15 bp, Homo sapiens
aggcctctccagggc

SEQ ID NO: 435169 - DNA, 15 bp, Homo sapiens
caggcctctccaggg

SEQ ID NO: 435170 - DNA, 15 bp, Homo sapiens
ccaggcctctccagg

SEQ ID NO: 435171 - DNA, 15 bp, Homo sapiens
cccaggcctctccag

SEQ ID NO: 435172 - DNA, 15 bp, Homo sapiens
ccccaggcctctcca

SEQ ID NO: 435173 - DNA, 15 bp, Homo sapiens
gccccaggcctctcc

SEQ ID NO: 435174 - DNA, 15 bp, Homo sapiens
tgccccaggcctctc

SEQ ID NO: 435175 - DNA, 15 bp, Homo sapiens
ttgccccaggcctct

SEQ ID NO: 435176 - DNA, 15 bp, Homo sapiens
attgccccaggcctc

SEQ ID NO: 435177 - DNA, 15 bp, Homo sapiens
aattgccccaggcct

SEQ ID NO: 435178 - DNA, 15 bp, Homo sapiens
aaattgccccaggcc

SEQ ID NO: 435179 - DNA, 15 bp, Homo sapiens
gaaattgccccaggc

SEQ ID NO: 435180 - DNA, 15 bp, Homo sapiens
tgaaattgccccagg

SEQ ID NO: 435181 - DNA, 15 bp, Homo sapiens
ctgaaattgccccag

SEQ ID NO: 435182 - DNA, 15 bp, Homo sapiens
cctgaaattgcccca

SEQ ID NO: 435183 - DNA, 15 bp, Homo sapiens
acctgaaattgcccc

SEQ ID NO: 435184 - DNA, 15 bp, Homo sapiens
tacctgaaattgccc

SEQ ID NO: 435185 - DNA, 15 bp, Homo sapiens
ctacctgaaattgcc

SEQ ID NO: 435186 - DNA, 15 bp, Homo sapiens
cctacctgaaattgc

SEQ ID NO: 435187 - DNA, 15 bp, Homo sapiens
ccctacctgaaattg

SEQ ID NO: 435188 - DNA, 15 bp, Homo sapiens
gccctacctgaaatt

SEQ ID NO: 435189 - DNA, 15 bp, Homo sapiens
agccctacctgaaat

SEQ ID NO: 435190 - DNA, 15 bp, Homo sapiens
aagccctacctgaaa

SEQ ID NO: 435191 - DNA, 15 bp, Homo sapiens
gaagccctacctgaa

SEQ ID NO: 435192 - DNA, 15 bp, Homo sapiens
tgaagccctacctga

SEQ ID NO: 435193 - DNA, 15 bp, Homo sapiens
ctgaagccctacctg

SEQ ID NO: 435194 - DNA, 15 bp, Homo sapiens
actgaagccctacct

SEQ ID NO: 435195 - DNA, 15 bp, Homo sapiens
gactgaagccctacc

SEQ ID NO: 435196 - DNA, 15 bp, Homo sapiens
cgactgaagccctac

SEQ ID NO: 435197 - DNA, 15 bp, Homo sapiens
tcgactgaagcccta

SEQ ID NO: 435198 - DNA, 15 bp, Homo sapiens
ctcgactgaagccct

SEQ ID NO: 435199 - DNA, 15 bp, Homo sapiens
gctcgactgaagccc

SEQ ID NO: 435200 - DNA, 15 bp, Homo sapiens
ggctcgactgaagcc

SEQ ID NO: 435201 - DNA, 15 bp, Homo sapiens
gggctcgactgaagc

SEQ ID NO: 435202 - DNA, 15 bp, Homo sapiens
tgggctcgactgaag

SEQ ID NO: 435203 - DNA, 15 bp, Homo sapiens
ctgggctcgactgaa

SEQ ID NO: 435204 - DNA, 15 bp, Homo sapiens
tctgggctcgactga

SEQ ID NO: 435205 - DNA, 15 bp, Homo sapiens
ctctgggctcgactg

SEQ ID NO: 435206 - DNA, 15 bp, Homo sapiens
actctgggctcgact

SEQ ID NO: 435207 - DNA, 15 bp, Homo sapiens
cactctgggctcgac

SEQ ID NO: 435208 - DNA, 15 bp, Homo sapiens
tcactctgggctcga

SEQ ID NO: 435209 - DNA, 15 bp, Homo sapiens
ttcactctgggctcg

SEQ ID NO: 435210 - DNA, 15 bp, Homo sapiens
cttcactctgggctc

SEQ ID NO: 435211 - DNA, 15 bp, Homo sapiens
ccttcactctgggct

SEQ ID NO: 435212 - DNA, 15 bp, Homo sapiens
cccttcactctgggc

SEQ ID NO: 435213 - DNA, 15 bp, Homo sapiens
ccccttcactctggg

SEQ ID NO: 435214 - DNA, 15 bp, Homo sapiens
cccccttcactctgg

SEQ ID NO: 435215 - DNA, 15 bp, Homo sapiens
acccccttcactctg

SEQ ID NO: 435216 - DNA, 15 bp, Homo sapiens
cacccccttcactct

SEQ ID NO: 435217 - DNA, 15 bp, Homo sapiens
ccacccccttcactc

SEQ ID NO: 435218 - DNA, 15 bp, Homo sapiens
gccacccccttcact

SEQ ID NO: 435219 - DNA, 15 bp, Homo sapiens
tgccacccccttcac

SEQ ID NO: 435220 - DNA, 15 bp, Homo sapiens
gtgccacccccttca

SEQ ID NO: 435221 - DNA, 15 bp, Homo sapiens
tgtgccacccccttc

SEQ ID NO: 435222 - DNA, 15 bp, Homo sapiens
ttgtgccaccccctt

SEQ ID NO: 435223 - DNA, 15 bp, Homo sapiens
attgtgccaccccct

SEQ ID NO: 435224 - DNA, 15 bp, Homo sapiens
tattgtgccaccccc

SEQ ID NO: 435225 - DNA, 15 bp, Homo sapiens
gtattgtgccacccc

SEQ ID NO: 435226 - DNA, 15 bp, Homo sapiens
tgtattgtgccaccc

SEQ ID NO: 435227 - DNA, 15 bp, Homo sapiens
atgtattgtgccacc

SEQ ID NO: 435228 - DNA, 15 bp, Homo sapiens
aatgtattgtgccac

SEQ ID NO: 435229 - DNA, 15 bp, Homo sapiens
gaatgtattgtgcca

SEQ ID NO: 435230 - DNA, 15 bp, Homo sapiens
tgaatgtattgtgcc

SEQ ID NO: 435231 - DNA, 15 bp, Homo sapiens
gtgaatgtattgtgc

SEQ ID NO: 435232 - DNA, 15 bp, Homo sapiens
tgtgaatgtattgtg

SEQ ID NO: 435233 - DNA, 15 bp, Homo sapiens
gtgtgaatgtattgt

SEQ ID NO: 435234 - DNA, 15 bp, Homo sapiens
ggtgtgaatgtattg

SEQ ID NO: 435235 - DNA, 15 bp, Homo sapiens
tggtgtgaatgtatt

SEQ ID NO: 435236 - DNA, 15 bp, Homo sapiens
atggtgtgaatgtat

SEQ ID NO: 435237 - DNA, 15 bp, Homo sapiens
catggtgtgaatgta

SEQ ID NO: 435238 - DNA, 15 bp, Homo sapiens
gcatggtgtgaatgt

SEQ ID NO: 435239 - DNA, 15 bp, Homo sapiens
ggcatggtgtgaatg

SEQ ID NO: 435240 - DNA, 15 bp, Homo sapiens
gggcatggtgtgaat

SEQ ID NO: 435241 - DNA, 15 bp, Homo sapiens
ggggcatggtgtgaa

SEQ ID NO: 435242 - DNA, 15 bp, Homo sapiens
gggggcatggtgtga

SEQ ID NO: 435243 - DNA, 15 bp, Homo sapiens
agggggcatggtgtg

SEQ ID NO: 435244 - DNA, 15 bp, Homo sapiens
aagggggcatggtgt

SEQ ID NO: 435245 - DNA, 15 bp, Homo sapiens
aaagggggcatggtg

SEQ ID NO: 435246 - DNA, 15 bp, Homo sapiens
aaaagggggcatggt

SEQ ID NO: 435247 - DNA, 15 bp, Homo sapiens
caaaagggggcatgg

SEQ ID NO: 435248 - DNA, 15 bp, Homo sapiens
tcaaaagggggcatg

SEQ ID NO: 435249 - DNA, 15 bp, Homo sapiens
ctcaaaagggggcat

SEQ ID NO: 435250 - DNA, 15 bp, Homo sapiens
actcaaaagggggca

SEQ ID NO: 435251 - DNA, 15 bp, Homo sapiens
cactcaaaagggggc

SEQ ID NO: 435252 - DNA, 15 bp, Homo sapiens
ccactcaaaaggggg

SEQ ID NO: 435253 - DNA, 15 bp, Homo sapiens
tccactcaaaagggg

SEQ ID NO: 435254 - DNA, 15 bp, Homo sapiens
ctccactcaaaaggg

SEQ ID NO: 435255 - DNA, 15 bp, Homo sapiens
cctccactcaaaagg

SEQ ID NO: 435256 - DNA, 15 bp, Homo sapiens
acctccactcaaaag

SEQ ID NO: 435257 - DNA, 15 bp, Homo sapiens
tacctccactcaaaa

SEQ ID NO: 435258 - DNA, 15 bp, Homo sapiens
gtacctccactcaaa

SEQ ID NO: 435259 - DNA, 15 bp, Homo sapiens
agtacctccactcaa

SEQ ID NO: 435260 - DNA, 15 bp, Homo sapiens
aagtacctccactca

SEQ ID NO: 435261 - DNA, 15 bp, Homo sapiens
caagtacctccactc

SEQ ID NO: 435262 - DNA, 15 bp, Homo sapiens
tcaagtacctccact

SEQ ID NO: 435263 - DNA, 15 bp, Homo sapiens
ctcaagtacctccac

SEQ ID NO: 435264 - DNA, 15 bp, Homo sapiens
tctcaagtacctcca

SEQ ID NO: 435265 - DNA, 15 bp, Homo sapiens
ttctcaagtacctcc

SEQ ID NO: 435266 - DNA, 15 bp, Homo sapiens
tttctcaagtacctc

SEQ ID NO: 435267 - DNA, 15 bp, Homo sapiens
atttctcaagtacct

SEQ ID NO: 435268 - DNA, 15 bp, Homo sapiens
gatttctcaagtacc

SEQ ID NO: 435269 - DNA, 15 bp, Homo sapiens
tgatttctcaagtac

SEQ ID NO: 435270 - DNA, 15 bp, Homo sapiens
gtgatttctcaagta

SEQ ID NO: 435271 - DNA, 15 bp, Homo sapiens
tgtgatttctcaagt

SEQ ID NO: 435272 - DNA, 15 bp, Homo sapiens
ctgtgatttctcaag

SEQ ID NO: 435273 - DNA, 15 bp, Homo sapiens
actgtgatttctcaa

SEQ ID NO: 435274 - DNA, 15 bp, Homo sapiens
cactgtgatttctca

SEQ ID NO: 435275 - DNA, 15 bp, Homo sapiens
ccactgtgatttctc

SEQ ID NO: 435276 - DNA, 15 bp, Homo sapiens
cccactgtgatttct

SEQ ID NO: 435277 - DNA, 15 bp, Homo sapiens
tcccactgtgatttc

SEQ ID NO: 435278 - DNA, 15 bp, Homo sapiens
ttcccactgtgattt

SEQ ID NO: 435279 - DNA, 15 bp, Homo sapiens
tttcccactgtgatt

SEQ ID NO: 435280 - DNA, 15 bp, Homo sapiens
ctttcccactgtgat

SEQ ID NO: 435281 - DNA, 15 bp, Homo sapiens
gctttcccactgtga

SEQ ID NO: 435282 - DNA, 15 bp, Homo sapiens
tgctttcccactgtg

SEQ ID NO: 435283 - DNA, 15 bp, Homo sapiens
gtgctttcccactgt

SEQ ID NO: 435284 - DNA, 15 bp, Homo sapiens
agtgctttcccactg

SEQ ID NO: 435285 - DNA, 15 bp, Homo sapiens
gagtgctttcccact

SEQ ID NO: 435286 - DNA, 15 bp, Homo sapiens
tgagtgctttcccac

SEQ ID NO: 435287 - DNA, 15 bp, Homo sapiens
ctgagtgctttccca

SEQ ID NO: 435288 - DNA, 15 bp, Homo sapiens
tctgagtgctttccc

SEQ ID NO: 435289 - DNA, 15 bp, Homo sapiens
atctgagtgctttcc

SEQ ID NO: 435290 - DNA, 15 bp, Homo sapiens
catctgagtgctttc

SEQ ID NO: 435291 - DNA, 15 bp, Homo sapiens
acatctgagtgcttt

SEQ ID NO: 435292 - DNA, 15 bp, Homo sapiens
cacatctgagtgctt

SEQ ID NO: 435293 - DNA, 15 bp, Homo sapiens
ccacatctgagtgct

SEQ ID NO: 435294 - DNA, 15 bp, Homo sapiens
tccacatctgagtgc

SEQ ID NO: 435295 - DNA, 15 bp, Homo sapiens
ttccacatctgagtg

SEQ ID NO: 435296 - DNA, 15 bp, Homo sapiens
cttccacatctgagt

SEQ ID NO: 435297 - DNA, 15 bp, Homo sapiens
tcttccacatctgag

SEQ ID NO: 435298 - DNA, 15 bp, Homo sapiens
ctcttccacatctga

SEQ ID NO: 435299 - DNA, 15 bp, Homo sapiens
actcttccacatctg

SEQ ID NO: 435300 - DNA, 15 bp, Homo sapiens
cactcttccacatct

SEQ ID NO: 435301 - DNA, 15 bp, Homo sapiens
ccactcttccacatc

SEQ ID NO: 435302 - DNA, 15 bp, Homo sapiens
tccactcttccacat

SEQ ID NO: 435303 - DNA, 15 bp, Homo sapiens
ctccactcttccaca

SEQ ID NO: 435304 - DNA, 15 bp, Homo sapiens
actccactcttccac

SEQ ID NO: 435305 - DNA, 15 bp, Homo sapiens
cactccactcttcca

SEQ ID NO: 435306 - DNA, 15 bp, Homo sapiens
gcactccactcttcc

SEQ ID NO: 435307 - DNA, 15 bp, Homo sapiens
ggcactccactcttc

SEQ ID NO: 435308 - DNA, 15 bp, Homo sapiens
tggcactccactctt

SEQ ID NO: 435309 - DNA, 15 bp, Homo sapiens
gtggcactccactct

SEQ ID NO: 435310 - DNA, 15 bp, Homo sapiens
agtggcactccactc

SEQ ID NO: 435311 - DNA, 15 bp, Homo sapiens
cagtggcactccact

SEQ ID NO: 435312 - DNA, 15 bp, Homo sapiens
gcagtggcactccac

SEQ ID NO: 435313 - DNA, 15 bp, Homo sapiens
tgcagtggcactcca

SEQ ID NO: 435314 - DNA, 15 bp, Homo sapiens
ctgcagtggcactcc

SEQ ID NO: 435315 - DNA, 15 bp, Homo sapiens
actgcagtggcactc

SEQ ID NO: 435316 - DNA, 15 bp, Homo sapiens
cactgcagtggcact

SEQ ID NO: 435317 - DNA, 15 bp, Homo sapiens
ccactgcagtggcac

SEQ ID NO: 435318 - DNA, 15 bp, Homo sapiens
cccactgcagtggca

SEQ ID NO: 435319 - DNA, 15 bp, Homo sapiens
gcccactgcagtggc

SEQ ID NO: 435320 - DNA, 15 bp, Homo sapiens
agcccactgcagtgg

SEQ ID NO: 435321 - DNA, 15 bp, Homo sapiens
cagcccactgcagtg

SEQ ID NO: 435322 - DNA, 15 bp, Homo sapiens
ccagcccactgcagt

SEQ ID NO: 435323 - DNA, 15 bp, Homo sapiens
gccagcccactgcag

SEQ ID NO: 435324 - DNA, 15 bp, Homo sapiens
cgccagcccactgca

SEQ ID NO: 435325 - DNA, 15 bp, Homo sapiens
tcgccagcccactgc

SEQ ID NO: 435326 - DNA, 15 bp, Homo sapiens
ctcgccagcccactg

SEQ ID NO: 435327 - DNA, 15 bp, Homo sapiens
cctcgccagcccact

SEQ ID NO: 435328 - DNA, 15 bp, Homo sapiens
acctcgccagcccac

SEQ ID NO: 435329 - DNA, 15 bp, Homo sapiens
cacctcgccagccca

SEQ ID NO: 435330 - DNA, 15 bp, Homo sapiens
tcacctcgccagccc

SEQ ID NO: 435331 - DNA, 15 bp, Homo sapiens
gtcacctcgccagcc

SEQ ID NO: 435332 - DNA, 15 bp, Homo sapiens
ggtcacctcgccagc

SEQ ID NO: 435333 - DNA, 15 bp, Homo sapiens
aggtcacctcgccag

SEQ ID NO: 435334 - DNA, 15 bp, Homo sapiens
gaggtcacctcgcca

SEQ ID NO: 435335 - DNA, 15 bp, Homo sapiens
agaggtcacctcgcc

SEQ ID NO: 435336 - DNA, 15 bp, Homo sapiens
cagaggtcacctcgc

SEQ ID NO: 435337 - DNA, 15 bp, Homo sapiens
tcagaggtcacctcg

SEQ ID NO: 435338 - DNA, 15 bp, Homo sapiens
gtcagaggtcacctc

SEQ ID NO: 435339 - DNA, 15 bp, Homo sapiens
tgtcagaggtcacct

SEQ ID NO: 435340 - DNA, 15 bp, Homo sapiens
gtgtcagaggtcacc

SEQ ID NO: 435341 - DNA, 15 bp, Homo sapiens
agtgtcagaggtcac

SEQ ID NO: 435342 - DNA, 15 bp, Homo sapiens
tagtgtcagaggtca

SEQ ID NO: 435343 - DNA, 15 bp, Homo sapiens
atagtgtcagaggtc

SEQ ID NO: 435344 - DNA, 15 bp, Homo sapiens
tatagtgtcagaggt

SEQ ID NO: 435345 - DNA, 15 bp, Homo sapiens
ctatagtgtcagagg

SEQ ID NO: 435346 - DNA, 15 bp, Homo sapiens
actatagtgtcagag

SEQ ID NO: 435347 - DNA, 15 bp, Homo sapiens
cactatagtgtcaga

SEQ ID NO: 435348 - DNA, 15 bp, Homo sapiens
ccactatagtgtcag

SEQ ID NO: 435349 - DNA, 15 bp, Homo sapiens
tccactatagtgtca

SEQ ID NO: 435350 - DNA, 15 bp, Homo sapiens
ctccactatagtgtc

SEQ ID NO: 435351 - DNA, 15 bp, Homo sapiens
gctccactatagtgt

SEQ ID NO: 435352 - DNA, 15 bp, Homo sapiens
tgctccactatagtg

SEQ ID NO: 435353 - DNA, 15 bp, Homo sapiens
gtgctccactatagt

SEQ ID NO: 435354 - DNA, 15 bp, Homo sapiens
tgtgctccactatag

SEQ ID NO: 435355 - DNA, 15 bp, Homo sapiens
atgtgctccactata

SEQ ID NO: 435356 - DNA, 15 bp, Homo sapiens
aatgtgctccactat

SEQ ID NO: 435357 - DNA, 15 bp, Homo sapiens
gaatgtgctccacta

SEQ ID NO: 435358 - DNA, 15 bp, Homo sapiens
agaatgtgctccact

SEQ ID NO: 435359 - DNA, 15 bp, Homo sapiens
cagaatgtgctccac

SEQ ID NO: 435360 - DNA, 15 bp, Homo sapiens
acagaatgtgctcca

SEQ ID NO: 435361 - DNA, 15 bp, Homo sapiens
gacagaatgtgctcc

SEQ ID NO: 435362 - DNA, 15 bp, Homo sapiens
ggacagaatgtgctc

SEQ ID NO: 435363 - DNA, 15 bp, Homo sapiens
aggacagaatgtgct

SEQ ID NO: 435364 - DNA, 15 bp, Homo sapiens
caggacagaatgtgc

SEQ ID NO: 435365 - DNA, 15 bp, Homo sapiens
ccaggacagaatgtg

SEQ ID NO: 435366 - DNA, 15 bp, Homo sapiens
tccaggacagaatgt

SEQ ID NO: 435367 - DNA, 15 bp, Homo sapiens
ctccaggacagaatg

SEQ ID NO: 435368 - DNA, 15 bp, Homo sapiens
cctccaggacagaat

SEQ ID NO: 435369 - DNA, 15 bp, Homo sapiens
ccctccaggacagaa

SEQ ID NO: 435370 - DNA, 15 bp, Homo sapiens
tccctccaggacaga

SEQ ID NO: 435371 - DNA, 15 bp, Homo sapiens
ctccctccaggacag

SEQ ID NO: 435372 - DNA, 15 bp, Homo sapiens
tctccctccaggaca

SEQ ID NO: 435373 - DNA, 15 bp, Homo sapiens
gtctccctccaggac

SEQ ID NO: 435374 - DNA, 15 bp, Homo sapiens
tgtctccctccagga

SEQ ID NO: 435375 - DNA, 15 bp, Homo sapiens
atgtctccctccagg

SEQ ID NO: 435376 - DNA, 15 bp, Homo sapiens
aatgtctccctccag

SEQ ID NO: 435377 - DNA, 15 bp, Homo sapiens
aaatgtctccctcca

SEQ ID NO: 435378 - DNA, 15 bp, Homo sapiens
caaatgtctccctcc

SEQ ID NO: 435379 - DNA, 15 bp, Homo sapiens
acaaatgtctccctc

SEQ ID NO: 435380 - DNA, 15 bp, Homo sapiens
cacaaatgtctccct

SEQ ID NO: 435381 - DNA, 15 bp, Homo sapiens
tcacaaatgtctccc

SEQ ID NO: 435382 - DNA, 15 bp, Homo sapiens
ctcacaaatgtctcc

SEQ ID NO: 435383 - DNA, 15 bp, Homo sapiens
cctcacaaatgtctc

SEQ ID NO: 435384 - DNA, 15 bp, Homo sapiens
acctcacaaatgtct

SEQ ID NO: 435385 - DNA, 15 bp, Homo sapiens
aacctcacaaatgtc

SEQ ID NO: 435386 - DNA, 15 bp, Homo sapiens
aaacctcacaaatgt

SEQ ID NO: 435387 - DNA, 15 bp, Homo sapiens
aaaacctcacaaatg

SEQ ID NO: 435388 - DNA, 15 bp, Homo sapiens
gaaaacctcacaaat

SEQ ID NO: 435389 - DNA, 15 bp, Homo sapiens
agaaaacctcacaaa

SEQ ID NO: 435390 - DNA, 15 bp, Homo sapiens
cagaaaacctcacaa

SEQ ID NO: 435391 - DNA, 15 bp, Homo sapiens
tcagaaaacctcaca

SEQ ID NO: 435392 - DNA, 15 bp, Homo sapiens
ttcagaaaacctcac

SEQ ID NO: 435393 - DNA, 15 bp, Homo sapiens
gttcagaaaacctca

SEQ ID NO: 435394 - DNA, 15 bp, Homo sapiens
tgttcagaaaacctc

SEQ ID NO: 435395 - DNA, 15 bp, Homo sapiens
atgttcagaaaacct

SEQ ID NO: 435396 - DNA, 15 bp, Homo sapiens
aatgttcagaaaacc

SEQ ID NO: 435397 - DNA, 15 bp, Homo sapiens
caatgttcagaaaac

SEQ ID NO: 435398 - DNA, 15 bp, Homo sapiens
ccaatgttcagaaaa

SEQ ID NO: 435399 - DNA, 15 bp, Homo sapiens
accaatgttcagaaa

SEQ ID NO: 435400 - DNA, 15 bp, Homo sapiens
caccaatgttcagaa

SEQ ID NO: 435401 - DNA, 15 bp, Homo sapiens
acaccaatgttcaga

SEQ ID NO: 435402 - DNA, 15 bp, Homo sapiens
tacaccaatgttcag

SEQ ID NO: 435403 - DNA, 15 bp, Homo sapiens
ttacaccaatgttca

SEQ ID NO: 435404 - DNA, 15 bp, Homo sapiens
tttacaccaatgttc

SEQ ID NO: 435405 - DNA, 15 bp, Homo sapiens
ttttacaccaatgtt

SEQ ID NO: 435406 - DNA, 15 bp, Homo sapiens
cttttacaccaatgt

SEQ ID NO: 435407 - DNA, 15 bp, Homo sapiens
tcttttacaccaatg

SEQ ID NO: 435408 - DNA, 15 bp, Homo sapiens
ctcttttacaccaat

SEQ ID NO: 435409 - DNA, 15 bp, Homo sapiens
actcttttacaccaa

SEQ ID NO: 435410 - DNA, 15 bp, Homo sapiens
aactcttttacacca

SEQ ID NO: 435411 - DNA, 15 bp, Homo sapiens
taactcttttacacc

SEQ ID NO: 435412 - DNA, 15 bp, Homo sapiens
ctaactcttttacac

SEQ ID NO: 435413 - DNA, 15 bp, Homo sapiens
tctaactcttttaca

SEQ ID NO: 435414 - DNA, 15 bp, Homo sapiens
ttctaactcttttac

SEQ ID NO: 435415 - DNA, 15 bp, Homo sapiens
attctaactctttta

SEQ ID NO: 435416 - DNA, 15 bp, Homo sapiens
aattctaactctttt

SEQ ID NO: 435417 - DNA, 15 bp, Homo sapiens
aaattctaactcttt

SEQ ID NO: 435418 - DNA, 15 bp, Homo sapiens
caaattctaactctt

SEQ ID NO: 435419 - DNA, 15 bp, Homo sapiens
ccaaattctaactct

SEQ ID NO: 435420 - DNA, 15 bp, Homo sapiens
accaaattctaactc

SEQ ID NO: 435421 - DNA, 15 bp, Homo sapiens
aaccaaattctaact

SEQ ID NO: 435422 - DNA, 15 bp, Homo sapiens
aaaccaaattctaac

SEQ ID NO: 435423 - DNA, 15 bp, Homo sapiens
aaaaccaaattctaa

SEQ ID NO: 435424 - DNA, 15 bp, Homo sapiens
aaaaaccaaattcta

SEQ ID NO: 435425 - DNA, 15 bp, Homo sapiens
gaaaaaccaaattct

SEQ ID NO: 435426 - DNA, 15 bp, Homo sapiens
agaaaaaccaaattc

SEQ ID NO: 435427 - DNA, 15 bp, Homo sapiens
aagaaaaaccaaatt

SEQ ID NO: 435428 - DNA, 15 bp, Homo sapiens
aaagaaaaaccaaat

SEQ ID NO: 435429 - DNA, 15 bp, Homo sapiens
gaaagaaaaaccaaa

SEQ ID NO: 435430 - DNA, 15 bp, Homo sapiens
agaaagaaaaaccaa

SEQ ID NO: 435431 - DNA, 15 bp, Homo sapiens
aagaaagaaaaacca

SEQ ID NO: 435432 - DNA, 15 bp, Homo sapiens
taagaaagaaaaacc

SEQ ID NO: 435433 - DNA, 15 bp, Homo sapiens
ttaagaaagaaaaac

SEQ ID NO: 435434 - DNA, 15 bp, Homo sapiens
cttaagaaagaaaaa

SEQ ID NO: 435435 - DNA, 15 bp, Homo sapiens
gcttaagaaagaaaa

SEQ ID NO: 435436 - DNA, 15 bp, Homo sapiens
tgcttaagaaagaaa

SEQ ID NO: 435437 - DNA, 15 bp, Homo sapiens
ttgcttaagaaagaa

SEQ ID NO: 435438 - DNA, 15 bp, Homo sapiens
gttgcttaagaaaga

SEQ ID NO: 435439 - DNA, 15 bp, Homo sapiens
tgttgcttaagaaag

SEQ ID NO: 435440 - DNA, 15 bp, Homo sapiens
ttgttgcttaagaaa

SEQ ID NO: 435441 - DNA, 15 bp, Homo sapiens
tttgttgcttaagaa

SEQ ID NO: 435442 - DNA, 15 bp, Homo sapiens
atttgttgcttaaga

SEQ ID NO: 435443 - DNA, 15 bp, Homo sapiens
catttgttgcttaag

SEQ ID NO: 435444 - DNA, 15 bp, Homo sapiens
ccatttgttgcttaa

SEQ ID NO: 435445 - DNA, 15 bp, Homo sapiens
cccatttgttgctta

SEQ ID NO: 435446 - DNA, 15 bp, Homo sapiens
tcccatttgttgctt

SEQ ID NO: 435447 - DNA, 15 bp, Homo sapiens
ttcccatttgttgct

SEQ ID NO: 435448 - DNA, 15 bp, Homo sapiens
attcccatttgttgc

SEQ ID NO: 435449 - DNA, 15 bp, Homo sapiens
gattcccatttgttg

SEQ ID NO: 435450 - DNA, 15 bp, Homo sapiens
ggattcccatttgtt

SEQ ID NO: 435451 - DNA, 15 bp, Homo sapiens
aggattcccatttgt

SEQ ID NO: 435452 - DNA, 15 bp, Homo sapiens
taggattcccatttg

SEQ ID NO: 435453 - DNA, 15 bp, Homo sapiens
ctaggattcccattt

SEQ ID NO: 435454 - DNA, 15 bp, Homo sapiens
actaggattcccatt

SEQ ID NO: 435455 - DNA, 15 bp, Homo sapiens
cactaggattcccat

SEQ ID NO: 435456 - DNA, 15 bp, Homo sapiens
gcactaggattccca

SEQ ID NO: 435457 - DNA, 15 bp, Homo sapiens
tgcactaggattccc

SEQ ID NO: 435458 - DNA, 15 bp, Homo sapiens
ctgcactaggattcc

SEQ ID NO: 435459 - DNA, 15 bp, Homo sapiens
tctgcactaggattc

SEQ ID NO: 435460 - DNA, 15 bp, Homo sapiens
ttctgcactaggatt

SEQ ID NO: 435461 - DNA, 15 bp, Homo sapiens
tttctgcactaggat

SEQ ID NO: 435462 - DNA, 15 bp, Homo sapiens
gtttctgcactagga

SEQ ID NO: 435463 - DNA, 15 bp, Homo sapiens
agtttctgcactagg

SEQ ID NO: 435464 - DNA, 15 bp, Homo sapiens
aagtttctgcactag

SEQ ID NO: 435465 - DNA, 15 bp, Homo sapiens
aaagtttctgcacta

SEQ ID NO: 435466 - DNA, 15 bp, Homo sapiens
aaaagtttctgcact

SEQ ID NO: 435467 - DNA, 15 bp, Homo sapiens
caaaagtttctgcac

SEQ ID NO: 435468 - DNA, 15 bp, Homo sapiens
acaaaagtttctgca

SEQ ID NO: 435469 - DNA, 15 bp, Homo sapiens
gacaaaagtttctgc

SEQ ID NO: 435470 - DNA, 15 bp, Homo sapiens
agacaaaagtttctg

SEQ ID NO: 435471 - DNA, 15 bp, Homo sapiens
gagacaaaagtttct

SEQ ID NO: 435472 - DNA, 15 bp, Homo sapiens
ggagacaaaagtttc

SEQ ID NO: 435473 - DNA, 15 bp, Homo sapiens
aggagacaaaagttt

SEQ ID NO: 435474 - DNA, 15 bp, Homo sapiens
caggagacaaaagtt

SEQ ID NO: 435475 - DNA, 15 bp, Homo sapiens
ccaggagacaaaagt

SEQ ID NO: 435476 - DNA, 15 bp, Homo sapiens
cccaggagacaaaag

SEQ ID NO: 435477 - DNA, 15 bp, Homo sapiens
acccaggagacaaaa

SEQ ID NO: 435478 - DNA, 15 bp, Homo sapiens
cacccaggagacaaa

SEQ ID NO: 435479 - DNA, 15 bp, Homo sapiens
ccacccaggagacaa

SEQ ID NO: 435480 - DNA, 15 bp, Homo sapiens
cccacccaggagaca

SEQ ID NO: 435481 - DNA, 15 bp, Homo sapiens
tcccacccaggagac

SEQ ID NO: 435482 - DNA, 15 bp, Homo sapiens
ttcccacccaggaga

SEQ ID NO: 435483 - DNA, 15 bp, Homo sapiens
tttcccacccaggag

SEQ ID NO: 435484 - DNA, 15 bp, Homo sapiens
ttttcccacccagga

SEQ ID NO: 435485 - DNA, 15 bp, Homo sapiens
gttttcccacccagg

SEQ ID NO: 435486 - DNA, 15 bp, Homo sapiens
agttttcccacccag

SEQ ID NO: 435487 - DNA, 15 bp, Homo sapiens
aagttttcccaccca

SEQ ID NO: 435488 - DNA, 15 bp, Homo sapiens
gaagttttcccaccc

SEQ ID NO: 435489 - DNA, 15 bp, Homo sapiens
agaagttttcccacc

SEQ ID NO: 435490 - DNA, 15 bp, Homo sapiens
aagaagttttcccac

SEQ ID NO: 435491 - DNA, 15 bp, Homo sapiens
taagaagttttccca

SEQ ID NO: 435492 - DNA, 15 bp, Homo sapiens
ataagaagttttccc

SEQ ID NO: 435493 - DNA, 15 bp, Homo sapiens
aataagaagttttcc

SEQ ID NO: 435494 - DNA, 15 bp, Homo sapiens
aaataagaagttttc

SEQ ID NO: 435495 - DNA, 15 bp, Homo sapiens
aaaataagaagtttt

SEQ ID NO: 435496 - DNA, 15 bp, Homo sapiens
taaaataagaagttt

SEQ ID NO: 435497 - DNA, 15 bp, Homo sapiens
ttaaaataagaagtt

SEQ ID NO: 435498 - DNA, 15 bp, Homo sapiens
tttaaaataagaagt

SEQ ID NO: 435499 - DNA, 15 bp, Homo sapiens
gtttaaaataagaag

SEQ ID NO: 435500 - DNA, 15 bp, Homo sapiens
agtttaaaataagaa

SEQ ID NO: 435501 - DNA, 15 bp, Homo sapiens
tagtttaaaataaga

SEQ ID NO: 435502 - DNA, 15 bp, Homo sapiens
atagtttaaaataag

SEQ ID NO: 435503 - DNA, 15 bp, Homo sapiens
tatagtttaaaataa

SEQ ID NO: 435504 - DNA, 15 bp, Homo sapiens
ttatagtttaaaata

SEQ ID NO: 435505 - DNA, 15 bp, Homo sapiens
gttatagtttaaaat

SEQ ID NO: 435506 - DNA, 15 bp, Homo sapiens
ggttatagtttaaaa

SEQ ID NO: 435507 - DNA, 15 bp, Homo sapiens
tggttatagtttaaa

SEQ ID NO: 435508 - DNA, 15 bp, Homo sapiens
gtggttatagtttaa

SEQ ID NO: 435509 - DNA, 15 bp, Homo sapiens
agtggttatagttta

SEQ ID NO: 435510 - DNA, 15 bp, Homo sapiens
aagtggttatagttt

SEQ ID NO: 435511 - DNA, 15 bp, Homo sapiens
aaagtggttatagtt

SEQ ID NO: 435512 - DNA, 15 bp, Homo sapiens
taaagtggttatagt

SEQ ID NO: 435513 - DNA, 15 bp, Homo sapiens
ataaagtggttatag

SEQ ID NO: 435514 - DNA, 15 bp, Homo sapiens
aataaagtggttata

SEQ ID NO: 435515 - DNA, 15 bp, Homo sapiens
aaataaagtggttat

SEQ ID NO: 435516 - DNA, 15 bp, Homo sapiens
gaaataaagtggtta

SEQ ID NO: 435517 - DNA, 15 bp, Homo sapiens
tgaaataaagtggtt

SEQ ID NO: 435518 - DNA, 15 bp, Homo sapiens
atgaaataaagtggt

SEQ ID NO: 435519 - DNA, 15 bp, Homo sapiens
aatgaaataaagtgg

SEQ ID NO: 435520 - DNA, 15 bp, Homo sapiens
aaatgaaataaagtg

SEQ ID NO: 435521 - DNA, 15 bp, Homo sapiens
caaatgaaataaagt

SEQ ID NO: 435522 - DNA, 15 bp, Homo sapiens
gcaaatgaaataaag

SEQ ID NO: 435523 - DNA, 15 bp, Homo sapiens
agcaaatgaaataaa

SEQ ID NO: 435524 - DNA, 15 bp, Homo sapiens
aagcaaatgaaataa

SEQ ID NO: 435525 - DNA, 15 bp, Homo sapiens
gaagcaaatgaaata

SEQ ID NO: 435526 - DNA, 15 bp, Homo sapiens
ggaagcaaatgaaat

SEQ ID NO: 435527 - DNA, 15 bp, Homo sapiens
cggaagcaaatgaaa

SEQ ID NO: 435528 - DNA, 15 bp, Homo sapiens
ccggaagcaaatgaa

SEQ ID NO: 435529 - DNA, 15 bp, Homo sapiens
cccggaagcaaatga

SEQ ID NO: 435530 - DNA, 15 bp, Homo sapiens
acccggaagcaaatg

SEQ ID NO: 435531 - DNA, 15 bp, Homo sapiens
tacccggaagcaaat

SEQ ID NO: 435532 - DNA, 15 bp, Homo sapiens
ttacccggaagcaaa

SEQ ID NO: 435533 - DNA, 15 bp, Homo sapiens
attacccggaagcaa

SEQ ID NO: 435534 - DNA, 15 bp, Homo sapiens
gattacccggaagca

SEQ ID NO: 435535 - DNA, 15 bp, Homo sapiens
agattacccggaagc

SEQ ID NO: 435536 - DNA, 15 bp, Homo sapiens
gagattacccggaag

SEQ ID NO: 435537 - DNA, 15 bp, Homo sapiens
agagattacccggaa

SEQ ID NO: 435538 - DNA, 15 bp, Homo sapiens
aagagattacccgga

SEQ ID NO: 435539 - DNA, 15 bp, Homo sapiens
taagagattacccgg

SEQ ID NO: 435540 - DNA, 15 bp, Homo sapiens
ttaagagattacccg

SEQ ID NO: 435541 - DNA, 15 bp, Homo sapiens
gttaagagattaccc

SEQ ID NO: 435542 - DNA, 15 bp, Homo sapiens
agttaagagattacc

SEQ ID NO: 435543 - DNA, 15 bp, Homo sapiens
tagttaagagattac

SEQ ID NO: 435544 - DNA, 15 bp, Homo sapiens
gtagttaagagatta

SEQ ID NO: 435545 - DNA, 15 bp, Homo sapiens
tgtagttaagagatt

SEQ ID NO: 435546 - DNA, 15 bp, Homo sapiens
ttgtagttaagagat

SEQ ID NO: 435547 - DNA, 15 bp, Homo sapiens
cttgtagttaagaga

SEQ ID NO: 435548 - DNA, 15 bp, Homo sapiens
tcttgtagttaagag

SEQ ID NO: 435549 - DNA, 15 bp, Homo sapiens
ttcttgtagttaaga

SEQ ID NO: 435550 - DNA, 15 bp, Homo sapiens
tttcttgtagttaag

SEQ ID NO: 435551 - DNA, 15 bp, Homo sapiens
gtttcttgtagttaa

SEQ ID NO: 435552 - DNA, 15 bp, Homo sapiens
agtttcttgtagtta

SEQ ID NO: 435553 - DNA, 15 bp, Homo sapiens
cagtttcttgtagtt

SEQ ID NO: 435554 - DNA, 15 bp, Homo sapiens
tcagtttcttgtagt

SEQ ID NO: 435555 - DNA, 15 bp, Homo sapiens
ttcagtttcttgtag

SEQ ID NO: 435556 - DNA, 15 bp, Homo sapiens
gttcagtttcttgta

SEQ ID NO: 435557 - DNA, 15 bp, Homo sapiens
ggttcagtttcttgt

SEQ ID NO: 435558 - DNA, 15 bp, Homo sapiens
gggttcagtttcttg

SEQ ID NO: 435559 - DNA, 15 bp, Homo sapiens
agggttcagtttctt

SEQ ID NO: 435560 - DNA, 15 bp, Homo sapiens
tagggttcagtttct

SEQ ID NO: 435561 - DNA, 15 bp, Homo sapiens
atagggttcagtttc

SEQ ID NO: 435562 - DNA, 15 bp, Homo sapiens
catagggttcagttt

SEQ ID NO: 435563 - DNA, 15 bp, Homo sapiens
acatagggttcagtt

SEQ ID NO: 435564 - DNA, 15 bp, Homo sapiens
tacatagggttcagt

SEQ ID NO: 435565 - DNA, 15 bp, Homo sapiens
ctacatagggttcag

SEQ ID NO: 435566 - DNA, 15 bp, Homo sapiens
tctacatagggttca

SEQ ID NO: 435567 - DNA, 15 bp, Homo sapiens
gtctacatagggttc

SEQ ID NO: 435568 - DNA, 15 bp, Homo sapiens
ggtctacatagggtt

SEQ ID NO: 435569 - DNA, 15 bp, Homo sapiens
gggtctacatagggt

SEQ ID NO: 435570 - DNA, 15 bp, Homo sapiens
tgggtctacataggg

SEQ ID NO: 435571 - DNA, 15 bp, Homo sapiens
gtgggtctacatagg

SEQ ID NO: 435572 - DNA, 15 bp, Homo sapiens
ggtgggtctacatag

SEQ ID NO: 435573 - DNA, 15 bp, Homo sapiens
tggtgggtctacata

SEQ ID NO: 435574 - DNA, 15 bp, Homo sapiens
atggtgggtctacat

SEQ ID NO: 435575 - DNA, 15 bp, Homo sapiens
tatggtgggtctaca

SEQ ID NO: 435576 - DNA, 15 bp, Homo sapiens
ttatggtgggtctac

SEQ ID NO: 435577 - DNA, 15 bp, Homo sapiens
gttatggtgggtcta

SEQ ID NO: 435578 - DNA, 15 bp, Homo sapiens
ggttatggtgggtct

SEQ ID NO: 435579 - DNA, 15 bp, Homo sapiens
gggttatggtgggtc

SEQ ID NO: 435580 - DNA, 15 bp, Homo sapiens
tgggttatggtgggt

SEQ ID NO: 435581 - DNA, 15 bp, Homo sapiens
gtgggttatggtggg

SEQ ID NO: 435582 - DNA, 15 bp, Homo sapiens
tgtgggttatggtgg

SEQ ID NO: 435583 - DNA, 15 bp, Homo sapiens
ctgtgggttatggtg

SEQ ID NO: 435584 - DNA, 15 bp, Homo sapiens
tctgtgggttatggt

SEQ ID NO: 435585 - DNA, 15 bp, Homo sapiens
atctgtgggttatgg

SEQ ID NO: 435586 - DNA, 15 bp, Homo sapiens
tatctgtgggttatg

SEQ ID NO: 435587 - DNA, 15 bp, Homo sapiens
ttatctgtgggttat

SEQ ID NO: 435588 - DNA, 15 bp, Homo sapiens
attatctgtgggtta

SEQ ID NO: 435589 - DNA, 15 bp, Homo sapiens
gattatctgtgggtt

SEQ ID NO: 435590 - DNA, 15 bp, Homo sapiens
agattatctgtgggt

SEQ ID NO: 435591 - DNA, 15 bp, Homo sapiens
aagattatctgtggg

SEQ ID NO: 435592 - DNA, 15 bp, Homo sapiens
aaagattatctgtgg

SEQ ID NO: 435593 - DNA, 15 bp, Homo sapiens
gaaagattatctgtg

SEQ ID NO: 435594 - DNA, 15 bp, Homo sapiens
tgaaagattatctgt

SEQ ID NO: 435595 - DNA, 15 bp, Homo sapiens
ttgaaagattatctg

SEQ ID NO: 435596 - DNA, 15 bp, Homo sapiens
cttgaaagattatct

SEQ ID NO: 435597 - DNA, 15 bp, Homo sapiens
ccttgaaagattatc

SEQ ID NO: 435598 - DNA, 15 bp, Homo sapiens
cccttgaaagattat

SEQ ID NO: 435599 - DNA, 15 bp, Homo sapiens
tcccttgaaagatta

SEQ ID NO: 435600 - DNA, 15 bp, Homo sapiens
ctcccttgaaagatt

SEQ ID NO: 435601 - DNA, 15 bp, Homo sapiens
gctcccttgaaagat

SEQ ID NO: 435602 - DNA, 15 bp, Homo sapiens
tgctcccttgaaaga

SEQ ID NO: 435603 - DNA, 15 bp, Homo sapiens
atgctcccttgaaag

SEQ ID NO: 435604 - DNA, 15 bp, Homo sapiens
tatgctcccttgaaa

SEQ ID NO: 435605 - DNA, 15 bp, Homo sapiens
ttatgctcccttgaa

SEQ ID NO: 435606 - DNA, 15 bp, Homo sapiens
gttatgctcccttga

SEQ ID NO: 435607 - DNA, 15 bp, Homo sapiens
agttatgctcccttg

SEQ ID NO: 435608 - DNA, 15 bp, Homo sapiens
tagttatgctccctt

SEQ ID NO: 435609 - DNA, 15 bp, Homo sapiens
ttagttatgctccct

SEQ ID NO: 435610 - DNA, 15 bp, Homo sapiens
cttagttatgctccc

SEQ ID NO: 435611 - DNA, 15 bp, Homo sapiens
ccttagttatgctcc

SEQ ID NO: 435612 - DNA, 15 bp, Homo sapiens
cccttagttatgctc

SEQ ID NO: 435613 - DNA, 15 bp, Homo sapiens
tcccttagttatgct

SEQ ID NO: 435614 - DNA, 15 bp, Homo sapiens
ctcccttagttatgc

SEQ ID NO: 435615 - DNA, 15 bp, Homo sapiens
tctcccttagttatg

SEQ ID NO: 435616 - DNA, 15 bp, Homo sapiens
ttctcccttagttat

SEQ ID NO: 435617 - DNA, 15 bp, Homo sapiens
cttctcccttagtta

SEQ ID NO: 435618 - DNA, 15 bp, Homo sapiens
tcttctcccttagtt

SEQ ID NO: 435619 - DNA, 15 bp, Homo sapiens
ctcttctcccttagt

SEQ ID NO: 435620 - DNA, 15 bp, Homo sapiens
gctcttctcccttag

SEQ ID NO: 435621 - DNA, 15 bp, Homo sapiens
ggctcttctccctta

SEQ ID NO: 435622 - DNA, 15 bp, Homo sapiens
aggctcttctccctt

SEQ ID NO: 435623 - DNA, 15 bp, Homo sapiens
caggctcttctccct

SEQ ID NO: 435624 - DNA, 15 bp, Homo sapiens
acaggctcttctccc

SEQ ID NO: 435625 - DNA, 15 bp, Homo sapiens
gacaggctcttctcc

SEQ ID NO: 435626 - DNA, 15 bp, Homo sapiens
tgacaggctcttctc

SEQ ID NO: 435627 - DNA, 15 bp, Homo sapiens
ctgacaggctcttct

SEQ ID NO: 435628 - DNA, 15 bp, Homo sapiens
cctgacaggctcttc

SEQ ID NO: 435629 - DNA, 15 bp, Homo sapiens
tcctgacaggctctt

SEQ ID NO: 435630 - DNA, 15 bp, Homo sapiens
gtcctgacaggctct

SEQ ID NO: 435631 - DNA, 15 bp, Homo sapiens
ggtcctgacaggctc

SEQ ID NO: 435632 - DNA, 15 bp, Homo sapiens
aggtcctgacaggct

SEQ ID NO: 435633 - DNA, 15 bp, Homo sapiens
taggtcctgacaggc

SEQ ID NO: 435634 - DNA, 15 bp, Homo sapiens
ataggtcctgacagg

SEQ ID NO: 435635 - DNA, 15 bp, Homo sapiens
cataggtcctgacag

SEQ ID NO: 435636 - DNA, 15 bp, Homo sapiens
acataggtcctgaca

SEQ ID NO: 435637 - DNA, 15 bp, Homo sapiens
tacataggtcctgac

SEQ ID NO: 435638 - DNA, 15 bp, Homo sapiens
ctacataggtcctga

SEQ ID NO: 435639 - DNA, 15 bp, Homo sapiens
gctacataggtcctg

SEQ ID NO: 435640 - DNA, 15 bp, Homo sapiens
ggctacataggtcct

SEQ ID NO: 435641 - DNA, 15 bp, Homo sapiens
gggctacataggtcc

SEQ ID NO: 435642 - DNA, 15 bp, Homo sapiens
tgggctacataggtc

SEQ ID NO: 435643 - DNA, 15 bp, Homo sapiens
atgggctacataggt

SEQ ID NO: 435644 - DNA, 15 bp, Homo sapiens
gatgggctacatagg

SEQ ID NO: 435645 - DNA, 15 bp, Homo sapiens
tgatgggctacatag

SEQ ID NO: 435646 - DNA, 15 bp, Homo sapiens
ctgatgggctacata

SEQ ID NO: 435647 - DNA, 15 bp, Homo sapiens
actgatgggctacat

SEQ ID NO: 435648 - DNA, 15 bp, Homo sapiens
cactgatgggctaca

SEQ ID NO: 435649 - DNA, 15 bp, Homo sapiens
gcactgatgggctac

SEQ ID NO: 435650 - DNA, 15 bp, Homo sapiens
ggcactgatgggcta

SEQ ID NO: 435651 - DNA, 15 bp, Homo sapiens
aggcactgatgggct

SEQ ID NO: 435652 - DNA, 15 bp, Homo sapiens
taggcactgatgggc

SEQ ID NO: 435653 - DNA, 15 bp, Homo sapiens
gtaggcactgatggg

SEQ ID NO: 435654 - DNA, 15 bp, Homo sapiens
ggtaggcactgatgg

SEQ ID NO: 435655 - DNA, 15 bp, Homo sapiens
aggtaggcactgatg

SEQ ID NO: 435656 - DNA, 15 bp, Homo sapiens
taggtaggcactgat

SEQ ID NO: 435657 - DNA, 15 bp, Homo sapiens
gtaggtaggcactga

SEQ ID NO: 435658 - DNA, 15 bp, Homo sapiens
agtaggtaggcactg

SEQ ID NO: 435659 - DNA, 15 bp, Homo sapiens
aagtaggtaggcact

SEQ ID NO: 435660 - DNA, 15 bp, Homo sapiens
gaagtaggtaggcac

SEQ ID NO: 435661 - DNA, 15 bp, Homo sapiens
agaagtaggtaggca

SEQ ID NO: 435662 - DNA, 15 bp, Homo sapiens
cagaagtaggtaggc

SEQ ID NO: 435663 - DNA, 15 bp, Homo sapiens
gcagaagtaggtagg

SEQ ID NO: 435664 - DNA, 15 bp, Homo sapiens
agcagaagtaggtag

SEQ ID NO: 435665 - DNA, 15 bp, Homo sapiens
cagcagaagtaggta

SEQ ID NO: 435666 - DNA, 15 bp, Homo sapiens
tcagcagaagtaggt

SEQ ID NO: 435667 - DNA, 15 bp, Homo sapiens
ctcagcagaagtagg

SEQ ID NO: 435668 - DNA, 15 bp, Homo sapiens
actcagcagaagtag

SEQ ID NO: 435669 - DNA, 15 bp, Homo sapiens
gactcagcagaagta

SEQ ID NO: 435670 - DNA, 15 bp, Homo sapiens
cgactcagcagaagt

SEQ ID NO: 435671 - DNA, 15 bp, Homo sapiens
acgactcagcagaag

SEQ ID NO: 435672 - DNA, 15 bp, Homo sapiens
aacgactcagcagaa

SEQ ID NO: 435673 - DNA, 15 bp, Homo sapiens
taacgactcagcaga

SEQ ID NO: 435674 - DNA, 15 bp, Homo sapiens
ttaacgactcagcag

SEQ ID NO: 435675 - DNA, 15 bp, Homo sapiens
gttaacgactcagca

SEQ ID NO: 435676 - DNA, 15 bp, Homo sapiens
tgttaacgactcagc

SEQ ID NO: 435677 - DNA, 15 bp, Homo sapiens
ttgttaacgactcag

SEQ ID NO: 435678 - DNA, 15 bp, Homo sapiens
attgttaacgactca

SEQ ID NO: 435679 - DNA, 15 bp, Homo sapiens
cattgttaacgactc

SEQ ID NO: 435680 - DNA, 15 bp, Homo sapiens
tcattgttaacgact

SEQ ID NO: 435681 - DNA, 15 bp, Homo sapiens
gtcattgttaacgac

SEQ ID NO: 435682 - DNA, 15 bp, Homo sapiens
tgtcattgttaacga

SEQ ID NO: 435683 - DNA, 15 bp, Homo sapiens
atgtcattgttaacg

SEQ ID NO: 435684 - DNA, 15 bp, Homo sapiens
catgtcattgttaac

SEQ ID NO: 435685 - DNA, 15 bp, Homo sapiens
tcatgtcattgttaa

SEQ ID NO: 435686 - DNA, 15 bp, Homo sapiens
ctcatgtcattgtta

SEQ ID NO: 435687 - DNA, 15 bp, Homo sapiens
cctcatgtcattgtt

SEQ ID NO: 435688 - DNA, 15 bp, Homo sapiens
tcctcatgtcattgt

SEQ ID NO: 435689 - DNA, 15 bp, Homo sapiens
ctcctcatgtcattg

SEQ ID NO: 435690 - DNA, 15 bp, Homo sapiens
tctcctcatgtcatt

SEQ ID NO: 435691 - DNA, 15 bp, Homo sapiens
ttctcctcatgtcat

SEQ ID NO: 435692 - DNA, 15 bp, Homo sapiens
tttctcctcatgtca

SEQ ID NO: 435693 - DNA, 15 bp, Homo sapiens
ttttctcctcatgtc

SEQ ID NO: 435694 - DNA, 15 bp, Homo sapiens
tttttctcctcatgt

SEQ ID NO: 435695 - DNA, 15 bp, Homo sapiens
ttttttctcctcatg

SEQ ID NO: 435696 - DNA, 15 bp, Homo sapiens
attttttctcctcat

SEQ ID NO: 435697 - DNA, 15 bp, Homo sapiens
cattttttctcctca

SEQ ID NO: 435698 - DNA, 15 bp, Homo sapiens
acattttttctcctc

SEQ ID NO: 435699 - DNA, 15 bp, Homo sapiens
cacattttttctcct

SEQ ID NO: 435700 - DNA, 15 bp, Homo sapiens
ccacattttttctcc

SEQ ID NO: 435701 - DNA, 15 bp, Homo sapiens
tccacattttttctc

SEQ ID NO: 435702 - DNA, 15 bp, Homo sapiens
ttccacattttttct

SEQ ID NO: 435703 - DNA, 15 bp, Homo sapiens
cttccacattttttc

SEQ ID NO: 435704 - DNA, 15 bp, Homo sapiens
tcttccacatttttt

SEQ ID NO: 435705 - DNA, 15 bp, Homo sapiens
ctcttccacattttt

SEQ ID NO: 435706 - DNA, 15 bp, Homo sapiens
cctcttccacatttt

SEQ ID NO: 435707 - DNA, 15 bp, Homo sapiens
ccctcttccacattt

SEQ ID NO: 435708 - DNA, 15 bp, Homo sapiens
cccctcttccacatt

SEQ ID NO: 435709 - DNA, 15 bp, Homo sapiens
tcccctcttccacat

SEQ ID NO: 435710 - DNA, 15 bp, Homo sapiens
ttcccctcttccaca

SEQ ID NO: 435711 - DNA, 15 bp, Homo sapiens
gttcccctcttccac

SEQ ID NO: 435712 - DNA, 15 bp, Homo sapiens
tgttcccctcttcca

SEQ ID NO: 435713 - DNA, 15 bp, Homo sapiens
ctgttcccctcttcc

SEQ ID NO: 435714 - DNA, 15 bp, Homo sapiens
cctgttcccctcttc

SEQ ID NO: 435715 - DNA, 15 bp, Homo sapiens
acctgttcccctctt

SEQ ID NO: 435716 - DNA, 15 bp, Homo sapiens
cacctgttcccctct

SEQ ID NO: 435717 - DNA, 15 bp, Homo sapiens
accacctgttcccct

SEQ ID NO: 435718 - DNA, 15 bp, Homo sapiens
caccacctgttcccc

SEQ ID NO: 435719 - DNA, 15 bp, Homo sapiens
acaccacctgttccc

SEQ ID NO: 435720 - DNA, 15 bp, Homo sapiens
cacaccacctgttcc

SEQ ID NO: 435721 - DNA, 15 bp, Homo sapiens
acacaccacctgttc

SEQ ID NO: 435722 - DNA, 15 bp, Homo sapiens
tacacaccacctgtt

SEQ ID NO: 435723 - DNA, 15 bp, Homo sapiens
gtacacaccacctgt

SEQ ID NO: 435724 - DNA, 15 bp, Homo sapiens
tgtacacaccacctg

SEQ ID NO: 435725 - DNA, 15 bp, Homo sapiens
ctgtacacaccacct

SEQ ID NO: 435726 - DNA, 15 bp, Homo sapiens
gctgtacacaccacc

SEQ ID NO: 435727 - DNA, 15 bp, Homo sapiens
agctgtacacaccac

SEQ ID NO: 435728 - DNA, 15 bp, Homo sapiens
cagctgtacacacca

SEQ ID NO: 435729 - DNA, 15 bp, Homo sapiens
acagctgtacacacc

SEQ ID NO: 435730 - DNA, 15 bp, Homo sapiens
tacagctgtacacac

SEQ ID NO: 435731 - DNA, 15 bp, Homo sapiens
gtacagctgtacaca

SEQ ID NO: 435732 - DNA, 15 bp, Homo sapiens
agtacagctgtacac

SEQ ID NO: 435733 - DNA, 15 bp, Homo sapiens
aagtacagctgtaca

SEQ ID NO: 435734 - DNA, 15 bp, Homo sapiens
aaagtacagctgtac

SEQ ID NO: 435735 - DNA, 15 bp, Homo sapiens
gaaagtacagctgta

SEQ ID NO: 435736 - DNA, 15 bp, Homo sapiens
agaaagtacagctgt

SEQ ID NO: 435737 - DNA, 15 bp, Homo sapiens
tagaaagtacagctg

SEQ ID NO: 435738 - DNA, 15 bp, Homo sapiens
atagaaagtacagct

SEQ ID NO: 435739 - DNA, 15 bp, Homo sapiens
tatagaaagtacagc

SEQ ID NO: 435740 - DNA, 15 bp, Homo sapiens
ttatagaaagtacag

SEQ ID NO: 435741 - DNA, 15 bp, Homo sapiens
tttatagaaagtaca

SEQ ID NO: 435742 - DNA, 15 bp, Homo sapiens
ctttatagaaagtac

SEQ ID NO: 435743 - DNA, 15 bp, Homo sapiens
cctttatagaaagta

SEQ ID NO: 435744 - DNA, 15 bp, Homo sapiens
gcctttatagaaagt

SEQ ID NO: 435745 - DNA, 15 bp, Homo sapiens
agcctttatagaaag

SEQ ID NO: 435746 - DNA, 15 bp, Homo sapiens
cagcctttatagaaa

SEQ ID NO: 435747 - DNA, 15 bp, Homo sapiens
acagcctttatagaa

SEQ ID NO: 435748 - DNA, 15 bp, Homo sapiens
cacagcctttataga

SEQ ID NO: 435749 - DNA, 15 bp, Homo sapiens
tcacagcctttatag

SEQ ID NO: 435750 - DNA, 15 bp, Homo sapiens
ttcacagcctttata

SEQ ID NO: 435751 - DNA, 15 bp, Homo sapiens
attcacagcctttat

SEQ ID NO: 435752 - DNA, 15 bp, Homo sapiens
aattcacagccttta

SEQ ID NO: 435753 - DNA, 15 bp, Homo sapiens
aaattcacagccttt

SEQ ID NO: 435754 - DNA, 15 bp, Homo sapiens
caaattcacagcctt

SEQ ID NO: 435755 - DNA, 15 bp, Homo sapiens
tcaaattcacagcct

SEQ ID NO: 435756 - DNA, 15 bp, Homo sapiens
ttcaaattcacagcc

SEQ ID NO: 435757 - DNA, 15 bp, Homo sapiens
cttcaaattcacagc

SEQ ID NO: 435758 - DNA, 15 bp, Homo sapiens
tcttcaaattcacag

SEQ ID NO: 435759 - DNA, 15 bp, Homo sapiens
atcttcaaattcaca

SEQ ID NO: 435760 - DNA, 15 bp, Homo sapiens
tatcttcaaattcac

SEQ ID NO: 435761 - DNA, 15 bp, Homo sapiens
ctatcttcaaattca

SEQ ID NO: 435762 - DNA, 15 bp, Homo sapiens
actatcttcaaattc

SEQ ID NO: 435763 - DNA, 15 bp, Homo sapiens
tactatcttcaaatt

SEQ ID NO: 435764 - DNA, 15 bp, Homo sapiens
ctactatcttcaaat

SEQ ID NO: 435765 - DNA, 15 bp, Homo sapiens
tctactatcttcaaa

SEQ ID NO: 435766 - DNA, 15 bp, Homo sapiens
ctctactatcttcaa

SEQ ID NO: 435767 - DNA, 15 bp, Homo sapiens
cctctactatcttca

SEQ ID NO: 435768 - DNA, 15 bp, Homo sapiens
tcctctactatcttc

SEQ ID NO: 435769 - DNA, 15 bp, Homo sapiens
gtcctctactatctt

SEQ ID NO: 435770 - DNA, 15 bp, Homo sapiens
tgtcctctactatct

SEQ ID NO: 435771 - DNA, 15 bp, Homo sapiens
atgtcctctactatc

SEQ ID NO: 435772 - DNA, 15 bp, Homo sapiens
catgtcctctactat

SEQ ID NO: 435773 - DNA, 15 bp, Homo sapiens
tcatgtcctctacta

SEQ ID NO: 435774 - DNA, 15 bp, Homo sapiens
atcatgtcctctact

SEQ ID NO: 435775 - DNA, 15 bp, Homo sapiens
catcatgtcctctac

SEQ ID NO: 435776 - DNA, 15 bp, Homo sapiens
gcatcatgtcctcta

SEQ ID NO: 435777 - DNA, 15 bp, Homo sapiens
cgcatcatgtcctct

SEQ ID NO: 435778 - DNA, 15 bp, Homo sapiens
tcgcatcatgtcctc

SEQ ID NO: 435779 - DNA, 15 bp, Homo sapiens
ttcgcatcatgtcct

SEQ ID NO: 435780 - DNA, 15 bp, Homo sapiens
attcgcatcatgtcc

SEQ ID NO: 435781 - DNA, 15 bp, Homo sapiens
cattcgcatcatgtc

SEQ ID NO: 435782 - DNA, 15 bp, Homo sapiens
gcattcgcatcatgt

SEQ ID NO: 435783 - DNA, 15 bp, Homo sapiens
ggcattcgcatcatg

SEQ ID NO: 435784 - DNA, 15 bp, Homo sapiens
aggcattcgcatcat

SEQ ID NO: 435785 - DNA, 15 bp, Homo sapiens
caggcattcgcatca

SEQ ID NO: 435786 - DNA, 15 bp, Homo sapiens
acaggcattcgcatc

SEQ ID NO: 435787 - DNA, 15 bp, Homo sapiens
tacaggcattcgcat

SEQ ID NO: 435788 - DNA, 15 bp, Homo sapiens
atacaggcattcgca

SEQ ID NO: 435789 - DNA, 15 bp, Homo sapiens
tatacaggcattcgc

SEQ ID NO: 435790 - DNA, 15 bp, Homo sapiens
ttatacaggcattcg

SEQ ID NO: 435791 - DNA, 15 bp, Homo sapiens
tttatacaggcattc

SEQ ID NO: 435792 - DNA, 15 bp, Homo sapiens
atttatacaggcatt

SEQ ID NO: 435793 - DNA, 15 bp, Homo sapiens
gatttatacaggcat

SEQ ID NO: 435794 - DNA, 15 bp, Homo sapiens
agatttatacaggca

SEQ ID NO: 435795 - DNA, 15 bp, Homo sapiens
gagatttatacaggc

SEQ ID NO: 435796 - DNA, 15 bp, Homo sapiens
tgagatttatacagg

SEQ ID NO: 435797 - DNA, 15 bp, Homo sapiens
gtgagatttatacag

SEQ ID NO: 435798 - DNA, 15 bp, Homo sapiens
agtgagatttataca

SEQ ID NO: 435799 - DNA, 15 bp, Homo sapiens
aagtgagatttatac

SEQ ID NO: 435800 - DNA, 15 bp, Homo sapiens
caagtgagatttata

SEQ ID NO: 435801 - DNA, 15 bp, Homo sapiens
gcaagtgagatttat

SEQ ID NO: 435802 - DNA, 15 bp, Homo sapiens
agcaagtgagattta

SEQ ID NO: 435803 - DNA, 15 bp, Homo sapiens
tagcaagtgagattt

SEQ ID NO: 435804 - DNA, 15 bp, Homo sapiens
ttagcaagtgagatt

SEQ ID NO: 435805 - DNA, 15 bp, Homo sapiens
tttagcaagtgagat

SEQ ID NO: 435806 - DNA, 15 bp, Homo sapiens
ttttagcaagtgaga

SEQ ID NO: 435807 - DNA, 15 bp, Homo sapiens
attttagcaagtgag

SEQ ID NO: 435808 - DNA, 15 bp, Homo sapiens
gattttagcaagtga

SEQ ID NO: 435809 - DNA, 15 bp, Homo sapiens
tgattttagcaagtg

SEQ ID NO: 435810 - DNA, 15 bp, Homo sapiens
ttgattttagcaagt

SEQ ID NO: 435811 - DNA, 15 bp, Homo sapiens
tttgattttagcaag

SEQ ID NO: 435812 - DNA, 15 bp, Homo sapiens
gtttgattttagcaa

SEQ ID NO: 435813 - DNA, 15 bp, Homo sapiens
ggtttgattttagca

SEQ ID NO: 435814 - DNA, 15 bp, Homo sapiens
tggtttgattttagc

SEQ ID NO: 435815 - DNA, 15 bp, Homo sapiens
atggtttgattttag

SEQ ID NO: 435816 - DNA, 15 bp, Homo sapiens
gatggtttgatttta

SEQ ID NO: 435817 - DNA, 15 bp, Homo sapiens
agatggtttgatttt

SEQ ID NO: 435818 - DNA, 15 bp, Homo sapiens
cagatggtttgattt

SEQ ID NO: 435819 - DNA, 15 bp, Homo sapiens
tcagatggtttgatt

SEQ ID NO: 435820 - DNA, 15 bp, Homo sapiens
ttcagatggtttgat

SEQ ID NO: 435821 - DNA, 15 bp, Homo sapiens
tttcagatggtttga

SEQ ID NO: 435822 - DNA, 15 bp, Homo sapiens
ttttcagatggtttg

SEQ ID NO: 435823 - DNA, 15 bp, Homo sapiens
tttttcagatggttt

SEQ ID NO: 435824 - DNA, 15 bp, Homo sapiens
atttttcagatggtt

SEQ ID NO: 435825 - DNA, 15 bp, Homo sapiens
aatttttcagatggt

SEQ ID NO: 435826 - DNA, 15 bp, Homo sapiens
gaatttttcagatgg

SEQ ID NO: 435827 - DNA, 15 bp, Homo sapiens
ggaatttttcagatg

SEQ ID NO: 435828 - DNA, 15 bp, Homo sapiens
aggaatttttcagat

SEQ ID NO: 435829 - DNA, 15 bp, Homo sapiens
caggaatttttcaga

SEQ ID NO: 435830 - DNA, 15 bp, Homo sapiens
gcaggaatttttcag

SEQ ID NO: 435831 - DNA, 15 bp, Homo sapiens
ggcaggaatttttca

SEQ ID NO: 435832 - DNA, 15 bp, Homo sapiens
aggcaggaatttttc

SEQ ID NO: 435833 - DNA, 15 bp, Homo sapiens
aaggcaggaattttt

SEQ ID NO: 435834 - DNA, 15 bp, Homo sapiens
caaggcaggaatttt

SEQ ID NO: 435835 - DNA, 15 bp, Homo sapiens
acaaggcaggaattt

SEQ ID NO: 435836 - DNA, 15 bp, Homo sapiens
aacaaggcaggaatt

SEQ ID NO: 435837 - DNA, 15 bp, Homo sapiens
caacaaggcaggaat

SEQ ID NO: 435838 - DNA, 15 bp, Homo sapiens
tcaacaaggcaggaa

SEQ ID NO: 435839 - DNA, 15 bp, Homo sapiens
atcaacaaggcagga

SEQ ID NO: 435840 - DNA, 15 bp, Homo sapiens
tatcaacaaggcagg

SEQ ID NO: 435841 - DNA, 15 bp, Homo sapiens
gtatcaacaaggcag

SEQ ID NO: 435842 - DNA, 15 bp, Homo sapiens
agtatcaacaaggca

SEQ ID NO: 435843 - DNA, 15 bp, Homo sapiens
aagtatcaacaaggc

SEQ ID NO: 435844 - DNA, 15 bp, Homo sapiens
gaagtatcaacaagg

SEQ ID NO: 435845 - DNA, 15 bp, Homo sapiens
tgaagtatcaacaag

SEQ ID NO: 435846 - DNA, 15 bp, Homo sapiens
ctgaagtatcaacaa

SEQ ID NO: 435847 - DNA, 15 bp, Homo sapiens
actgaagtatcaaca

SEQ ID NO: 435848 - DNA, 15 bp, Homo sapiens
aactgaagtatcaac

SEQ ID NO: 435849 - DNA, 15 bp, Homo sapiens
taactgaagtatcaa

SEQ ID NO: 435850 - DNA, 15 bp, Homo sapiens
gtaactgaagtatca

SEQ ID NO: 435851 - DNA, 15 bp, Homo sapiens
agtaactgaagtatc

SEQ ID NO: 435852 - DNA, 15 bp, Homo sapiens
tagtaactgaagtat

SEQ ID NO: 435853 - DNA, 15 bp, Homo sapiens
gtagtaactgaagta

SEQ ID NO: 435854 - DNA, 15 bp, Homo sapiens
agtagtaactgaagt

SEQ ID NO: 435855 - DNA, 15 bp, Homo sapiens
tagtagtaactgaag

SEQ ID NO: 435856 - DNA, 15 bp, Homo sapiens
ttagtagtaactgaa

SEQ ID NO: 435857 - DNA, 15 bp, Homo sapiens
tttagtagtaactga

SEQ ID NO: 435858 - DNA, 15 bp, Homo sapiens
ctttagtagtaactg

SEQ ID NO: 435859 - DNA, 15 bp, Homo sapiens
actttagtagtaact

SEQ ID NO: 435860 - DNA, 15 bp, Homo sapiens
tactttagtagtaac

SEQ ID NO: 435861 - DNA, 15 bp, Homo sapiens
ctactttagtagtaa

SEQ ID NO: 435862 - DNA, 15 bp, Homo sapiens
tctactttagtagta

SEQ ID NO: 435863 - DNA, 15 bp, Homo sapiens
gtctactttagtagt

SEQ ID NO: 435864 - DNA, 15 bp, Homo sapiens
tgtctactttagtag

SEQ ID NO: 435865 - DNA, 15 bp, Homo sapiens
ttgtctactttagta

SEQ ID NO: 435866 - DNA, 15 bp, Homo sapiens
tttgtctactttagt

SEQ ID NO: 435867 - DNA, 15 bp, Homo sapiens
ctttgtctactttag

SEQ ID NO: 435868 - DNA, 15 bp, Homo sapiens
gctttgtctacttta

SEQ ID NO: 435869 - DNA, 15 bp, Homo sapiens
tgctttgtctacttt

SEQ ID NO: 435870 - DNA, 15 bp, Homo sapiens
atgctttgtctactt

SEQ ID NO: 435871 - DNA, 15 bp, Homo sapiens
catgctttgtctact

SEQ ID NO: 435872 - DNA, 15 bp, Homo sapiens
tcatgctttgtctac

SEQ ID NO: 435873 - DNA, 15 bp, Homo sapiens
ctcatgctttgtcta

SEQ ID NO: 435874 - DNA, 15 bp, Homo sapiens
tctcatgctttgtct

SEQ ID NO: 435875 - DNA, 15 bp, Homo sapiens
ttctcatgctttgtc

SEQ ID NO: 435876 - DNA, 15 bp, Homo sapiens
attctcatgctttgt

SEQ ID NO: 435877 - DNA, 15 bp, Homo sapiens
tattctcatgctttg

SEQ ID NO: 435878 - DNA, 15 bp, Homo sapiens
ttattctcatgcttt

SEQ ID NO: 435879 - DNA, 15 bp, Homo sapiens
attattctcatgctt

SEQ ID NO: 435880 - DNA, 15 bp, Homo sapiens
tattattctcatgct

SEQ ID NO: 435881 - DNA, 15 bp, Homo sapiens
gtattattctcatgc

SEQ ID NO: 435882 - DNA, 15 bp, Homo sapiens
ggtattattctcatg

SEQ ID NO: 435883 - DNA, 15 bp, Homo sapiens
tggtattattctcat

SEQ ID NO: 435884 - DNA, 15 bp, Homo sapiens
atggtattattctca

SEQ ID NO: 435885 - DNA, 15 bp, Homo sapiens
catggtattattctc

SEQ ID NO: 435886 - DNA, 15 bp, Homo sapiens
ccatggtattattct

SEQ ID NO: 435887 - DNA, 15 bp, Homo sapiens
tccatggtattattc

SEQ ID NO: 435888 - DNA, 15 bp, Homo sapiens
atccatggtattatt

SEQ ID NO: 435889 - DNA, 15 bp, Homo sapiens
aatccatggtattat

SEQ ID NO: 435890 - DNA, 15 bp, Homo sapiens
aaatccatggtatta

SEQ ID NO: 435891 - DNA, 15 bp, Homo sapiens
taaatccatggtatt

SEQ ID NO: 435892 - DNA, 15 bp, Homo sapiens
ttaaatccatggtat

SEQ ID NO: 435893 - DNA, 15 bp, Homo sapiens
attaaatccatggta

SEQ ID NO: 435894 - DNA, 15 bp, Homo sapiens
aattaaatccatggt

SEQ ID NO: 435895 - DNA, 15 bp, Homo sapiens
gaattaaatccatgg

SEQ ID NO: 435896 - DNA, 15 bp, Homo sapiens
agaattaaatccatg

SEQ ID NO: 435897 - DNA, 15 bp, Homo sapiens
aagaattaaatccat

SEQ ID NO: 435898 - DNA, 15 bp, Homo sapiens
taagaattaaatcca

SEQ ID NO: 435899 - DNA, 15 bp, Homo sapiens
gtaagaattaaatcc

SEQ ID NO: 435900 - DNA, 15 bp, Homo sapiens
ggtaagaattaaatc

SEQ ID NO: 435901 - DNA, 15 bp, Homo sapiens
cggtaagaattaaat

SEQ ID NO: 435902 - DNA, 15 bp, Homo sapiens
tcggtaagaattaaa

SEQ ID NO: 435903 - DNA, 15 bp, Homo sapiens
ttcggtaagaattaa

SEQ ID NO: 435904 - DNA, 15 bp, Homo sapiens
tttcggtaagaatta

SEQ ID NO: 435905 - DNA, 15 bp, Homo sapiens
ttttcggtaagaatt

SEQ ID NO: 435906 - DNA, 15 bp, Homo sapiens
cttttcggtaagaat

SEQ ID NO: 435907 - DNA, 15 bp, Homo sapiens
ccttttcggtaagaa

SEQ ID NO: 435908 - DNA, 15 bp, Homo sapiens
tccttttcggtaaga

SEQ ID NO: 435909 - DNA, 15 bp, Homo sapiens
ttccttttcggtaag

SEQ ID NO: 435910 - DNA, 15 bp, Homo sapiens
cttccttttcggtaa

SEQ ID NO: 435911 - DNA, 15 bp, Homo sapiens
tcttccttttcggta

SEQ ID NO: 435912 - DNA, 15 bp, Homo sapiens
ttcttccttttcggt

SEQ ID NO: 435913 - DNA, 15 bp, Homo sapiens
cttcttccttttcgg

SEQ ID NO: 435914 - DNA, 15 bp, Homo sapiens
gcttcttccttttcg

SEQ ID NO: 435915 - DNA, 15 bp, Homo sapiens
agcttcttccttttc

SEQ ID NO: 435916 - DNA, 15 bp, Homo sapiens
aagcttcttcctttt

SEQ ID NO: 435917 - DNA, 15 bp, Homo sapiens
taagcttcttccttt

SEQ ID NO: 435918 - DNA, 15 bp, Homo sapiens
ttaagcttcttcctt

SEQ ID NO: 435919 - DNA, 15 bp, Homo sapiens
cttaagcttcttcct

SEQ ID NO: 435920 - DNA, 15 bp, Homo sapiens
tcttaagcttcttcc

SEQ ID NO: 435921 - DNA, 15 bp, Homo sapiens
ctcttaagcttcttc

SEQ ID NO: 435922 - DNA, 15 bp, Homo sapiens
tctcttaagcttctt

SEQ ID NO: 435923 - DNA, 15 bp, Homo sapiens
ttctcttaagcttct

SEQ ID NO: 435924 - DNA, 15 bp, Homo sapiens
tttctcttaagcttc

SEQ ID NO: 435925 - DNA, 15 bp, Homo sapiens
ctttctcttaagctt

SEQ ID NO: 435926 - DNA, 15 bp, Homo sapiens
tctttctcttaagct

SEQ ID NO: 435927 - DNA, 15 bp, Homo sapiens
ctctttctcttaagc

SEQ ID NO: 435928 - DNA, 15 bp, Homo sapiens
tctctttctcttaag

SEQ ID NO: 435929 - DNA, 15 bp, Homo sapiens
gtctctttctcttaa

SEQ ID NO: 435930 - DNA, 15 bp, Homo sapiens
ggtctctttctctta

SEQ ID NO: 435931 - DNA, 15 bp, Homo sapiens
tggtctctttctctt

SEQ ID NO: 435932 - DNA, 15 bp, Homo sapiens
atggtctctttctct

SEQ ID NO: 435933 - DNA, 15 bp, Homo sapiens
catggtctctttctc

SEQ ID NO: 435934 - DNA, 15 bp, Homo sapiens
acatggtctctttct

SEQ ID NO: 435935 - DNA, 15 bp, Homo sapiens
aacatggtctctttc

SEQ ID NO: 435936 - DNA, 15 bp, Homo sapiens
taacatggtctcttt

SEQ ID NO: 435937 - DNA, 15 bp, Homo sapiens
ataacatggtctctt

SEQ ID NO: 435938 - DNA, 15 bp, Homo sapiens
gataacatggtctct

SEQ ID NO: 435939 - DNA, 15 bp, Homo sapiens
ggataacatggtctc

SEQ ID NO: 435940 - DNA, 15 bp, Homo sapiens
aggataacatggtct

SEQ ID NO: 435941 - DNA, 15 bp, Homo sapiens
caggataacatggtc

SEQ ID NO: 435942 - DNA, 15 bp, Homo sapiens
acaggataacatggt

SEQ ID NO: 435943 - DNA, 15 bp, Homo sapiens
tacaggataacatgg

SEQ ID NO: 435944 - DNA, 15 bp, Homo sapiens
ctacaggataacatg

SEQ ID NO: 435945 - DNA, 15 bp, Homo sapiens
gctacaggataacat

SEQ ID NO: 435946 - DNA, 15 bp, Homo sapiens
agctacaggataaca

SEQ ID NO: 435947 - DNA, 15 bp, Homo sapiens
tagctacaggataac

SEQ ID NO: 435948 - DNA, 15 bp, Homo sapiens
atagctacaggataa

SEQ ID NO: 435949 - DNA, 15 bp, Homo sapiens
tatagctacaggata

SEQ ID NO: 435950 - DNA, 15 bp, Homo sapiens
ctatagctacaggat

SEQ ID NO: 435951 - DNA, 15 bp, Homo sapiens
actatagctacagga

SEQ ID NO: 435952 - DNA, 15 bp, Homo sapiens
aactatagctacagg

SEQ ID NO: 435953 - DNA, 15 bp, Homo sapiens
taactatagctacag

SEQ ID NO: 435954 - DNA, 15 bp, Homo sapiens
ttaactatagctaca

SEQ ID NO: 435955 - DNA, 15 bp, Homo sapiens
tttaactatagctac

SEQ ID NO: 435956 - DNA, 15 bp, Homo sapiens
ttttaactatagcta

SEQ ID NO: 435957 - DNA, 15 bp, Homo sapiens
tttttaactatagct

SEQ ID NO: 435958 - DNA, 15 bp, Homo sapiens
ttttttaactatagc

SEQ ID NO: 435959 - DNA, 15 bp, Homo sapiens
tttttttaactatag

SEQ ID NO: 435960 - DNA, 15 bp, Homo sapiens
atttttttaactata

SEQ ID NO: 435961 - DNA, 15 bp, Homo sapiens
tatttttttaactat

SEQ ID NO: 435962 - DNA, 15 bp, Homo sapiens
ttatttttttaacta

SEQ ID NO: 435963 - DNA, 15 bp, Homo sapiens
tttatttttttaact

SEQ ID NO: 435964 - DNA, 15 bp, Homo sapiens
atttatttttttaac

SEQ ID NO: 435965 - DNA, 15 bp, Homo sapiens
tatttatttttttaa

SEQ ID NO: 435966 - DNA, 15 bp, Homo sapiens
ttatttattttttta

SEQ ID NO: 435967 - DNA, 15 bp, Homo sapiens
tttatttattttttt

SEQ ID NO: 435968 - DNA, 15 bp, Homo sapiens
cttttatttatttat

SEQ ID NO: 435969 - DNA, 15 bp, Homo sapiens
ccttttatttattta

SEQ ID NO: 435970 - DNA, 15 bp, Homo sapiens
tccttttatttattt

SEQ ID NO: 435971 - DNA, 15 bp, Homo sapiens
ttccttttatttatt

SEQ ID NO: 435972 - DNA, 15 bp, Homo sapiens
attccttttatttat

SEQ ID NO: 435973 - DNA, 15 bp, Homo sapiens
tattccttttattta

SEQ ID NO: 435974 - DNA, 15 bp, Homo sapiens
atattccttttattt

SEQ ID NO: 435975 - DNA, 15 bp, Homo sapiens
aatattccttttatt

SEQ ID NO: 435976 - DNA, 15 bp, Homo sapiens
taatattccttttat

SEQ ID NO: 435977 - DNA, 15 bp, Homo sapiens
ctaatattcctttta

SEQ ID NO: 435978 - DNA, 15 bp, Homo sapiens
cctaatattcctttt

SEQ ID NO: 435979 - DNA, 15 bp, Homo sapiens
gcctaatattccttt

SEQ ID NO: 435980 - DNA, 15 bp, Homo sapiens
tgcctaatattcctt

SEQ ID NO: 435981 - DNA, 15 bp, Homo sapiens
gtgcctaatattcct

SEQ ID NO: 435982 - DNA, 15 bp, Homo sapiens
tgtgcctaatattcc

SEQ ID NO: 435983 - DNA, 15 bp, Homo sapiens
ctgtgcctaatattc

SEQ ID NO: 435984 - DNA, 15 bp, Homo sapiens
cctgtgcctaatatt

SEQ ID NO: 435985 - DNA, 15 bp, Homo sapiens
acctgtgcctaatat

SEQ ID NO: 435986 - DNA, 15 bp, Homo sapiens
cacctgtgcctaata

SEQ ID NO: 435987 - DNA, 15 bp, Homo sapiens
acacctgtgcctaat

SEQ ID NO: 435988 - DNA, 15 bp, Homo sapiens
tacacctgtgcctaa

SEQ ID NO: 435989 - DNA, 15 bp, Homo sapiens
gtacacctgtgccta

SEQ ID NO: 435990 - DNA, 15 bp, Homo sapiens
ggtacacctgtgcct

SEQ ID NO: 435991 - DNA, 15 bp, Homo sapiens
aggtacacctgtgcc

SEQ ID NO: 435992 - DNA, 15 bp, Homo sapiens
aaggtacacctgtgc

SEQ ID NO: 435993 - DNA, 15 bp, Homo sapiens
caaggtacacctgtg

SEQ ID NO: 435994 - DNA, 15 bp, Homo sapiens
tcaaggtacacctgt

SEQ ID NO: 435995 - DNA, 15 bp, Homo sapiens
ttcaaggtacacctg

SEQ ID NO: 435996 - DNA, 15 bp, Homo sapiens
attcaaggtacacct

SEQ ID NO: 435997 - DNA, 15 bp, Homo sapiens
gattcaaggtacacc

SEQ ID NO: 435998 - DNA, 15 bp, Homo sapiens
agattcaaggtacac

SEQ ID NO: 435999 - DNA, 15 bp, Homo sapiens
cagattcaaggtaca

SEQ ID NO: 436000 - DNA, 15 bp, Homo sapiens
tcagattcaaggtac

SEQ ID NO: 436001 - DNA, 15 bp, Homo sapiens
ttcagattcaaggta

SEQ ID NO: 436002 - DNA, 15 bp, Homo sapiens
tttcagattcaaggt

SEQ ID NO: 436003 - DNA, 15 bp, Homo sapiens
gtttcagattcaagg

SEQ ID NO: 436004 - DNA, 15 bp, Homo sapiens
tgtttcagattcaag

SEQ ID NO: 436005 - DNA, 15 bp, Homo sapiens
ttgtttcagattcaa

SEQ ID NO: 436006 - DNA, 15 bp, Homo sapiens
tttgtttcagattca

SEQ ID NO: 436007 - DNA, 15 bp, Homo sapiens
gtttgtttcagattc

SEQ ID NO: 436008 - DNA, 15 bp, Homo sapiens
tgtttgtttcagatt

SEQ ID NO: 436009 - DNA, 15 bp, Homo sapiens
ttgtttgtttcagat

SEQ ID NO: 436010 - DNA, 15 bp, Homo sapiens
tttgtttgtttcaga

SEQ ID NO: 436011 - DNA, 15 bp, Homo sapiens
ttttgtttgtttcag

SEQ ID NO: 436012 - DNA, 15 bp, Homo sapiens
cttttgtttgtttca

SEQ ID NO: 436013 - DNA, 15 bp, Homo sapiens
acttttgtttgtttc

SEQ ID NO: 436014 - DNA, 15 bp, Homo sapiens
tacttttgtttgttt

SEQ ID NO: 436015 - DNA, 15 bp, Homo sapiens
ttacttttgtttgtt

SEQ ID NO: 436016 - DNA, 15 bp, Homo sapiens
gttacttttgtttgt

SEQ ID NO: 436017 - DNA, 15 bp, Homo sapiens
tgttacttttgtttg

SEQ ID NO: 436018 - DNA, 15 bp, Homo sapiens
ttgttacttttgttt

SEQ ID NO: 436019 - DNA, 15 bp, Homo sapiens
tttgttacttttgtt

SEQ ID NO: 436020 - DNA, 15 bp, Homo sapiens
ttttgttacttttgt

SEQ ID NO: 436021 - DNA, 15 bp, Homo sapiens
tttttgttacttttg

SEQ ID NO: 436022 - DNA, 15 bp, Homo sapiens
ctttttgttactttt

SEQ ID NO: 436023 - DNA, 15 bp, Homo sapiens
actttttgttacttt

SEQ ID NO: 436024 - DNA, 15 bp, Homo sapiens
cactttttgttactt

SEQ ID NO: 436025 - DNA, 15 bp, Homo sapiens
tcactttttgttact

SEQ ID NO: 436026 - DNA, 15 bp, Homo sapiens
ttcactttttgttac

SEQ ID NO: 436027 - DNA, 15 bp, Homo sapiens
tttcactttttgtta

SEQ ID NO: 436028 - DNA, 15 bp, Homo sapiens
ctttcactttttgtt

SEQ ID NO: 436029 - DNA, 15 bp, Homo sapiens
gctttcactttttgt

SEQ ID NO: 436030 - DNA, 15 bp, Homo sapiens
ggctttcactttttg

SEQ ID NO: 436031 - DNA, 15 bp, Homo sapiens
tggctttcacttttt

SEQ ID NO: 436032 - DNA, 15 bp, Homo sapiens
atggctttcactttt

SEQ ID NO: 436033 - DNA, 15 bp, Homo sapiens
catggctttcacttt

SEQ ID NO: 436034 - DNA, 15 bp, Homo sapiens
gcatggctttcactt

SEQ ID NO: 436035 - DNA, 15 bp, Homo sapiens
agcatggctttcact

SEQ ID NO: 436036 - DNA, 15 bp, Homo sapiens
gagcatggctttcac

SEQ ID NO: 436037 - DNA, 15 bp, Homo sapiens
agagcatggctttca

SEQ ID NO: 436038 - DNA, 15 bp, Homo sapiens
aagagcatggctttc

SEQ ID NO: 436039 - DNA, 15 bp, Homo sapiens
aaagagcatggcttt

SEQ ID NO: 436040 - DNA, 15 bp, Homo sapiens
aaaagagcatggctt

SEQ ID NO: 436041 - DNA, 15 bp, Homo sapiens
aaaaagagcatggct

SEQ ID NO: 436042 - DNA, 15 bp, Homo sapiens
aaaaaagagcatggc

SEQ ID NO: 436043 - DNA, 15 bp, Homo sapiens
caaaaaagagcatgg

SEQ ID NO: 436044 - DNA, 15 bp, Homo sapiens
acaaaaaagagcatg

SEQ ID NO: 436045 - DNA, 15 bp, Homo sapiens
aacaaaaaagagcat

SEQ ID NO: 436046 - DNA, 15 bp, Homo sapiens
caacaaaaaagagca

SEQ ID NO: 436047 - DNA, 15 bp, Homo sapiens
acaacaaaaaagagc

SEQ ID NO: 436048 - DNA, 15 bp, Homo sapiens
aacaacaaaaaagag

SEQ ID NO: 436049 - DNA, 15 bp, Homo sapiens
aaacaacaaaaaaga

SEQ ID NO: 436050 - DNA, 15 bp, Homo sapiens
aaaacaacaaaaaag

SEQ ID NO: 436051 - DNA, 15 bp, Homo sapiens
aaaaacaacaaaaaa

SEQ ID NO: 436052 - DNA, 15 bp, Homo sapiens
caaaaacaacaaaaa

SEQ ID NO: 436053 - DNA, 15 bp, Homo sapiens
acaaaaacaacaaaa

SEQ ID NO: 436054 - DNA, 15 bp, Homo sapiens
aacaaaaacaacaaa

SEQ ID NO: 436055 - DNA, 15 bp, Homo sapiens
aaacaaaaacaacaa

SEQ ID NO: 436056 - DNA, 15 bp, Homo sapiens
aaaacaaaaacaaca

SEQ ID NO: 436057 - DNA, 15 bp, Homo sapiens
caaaacaaaaacaac

SEQ ID NO: 436058 - DNA, 15 bp, Homo sapiens
tcaaaacaaaaacaa

SEQ ID NO: 436059 - DNA, 15 bp, Homo sapiens
ctcaaaacaaaaaca

SEQ ID NO: 436060 - DNA, 15 bp, Homo sapiens
tctcaaaacaaaaac

SEQ ID NO: 436061 - DNA, 15 bp, Homo sapiens
gtctcaaaacaaaaa

SEQ ID NO: 436062 - DNA, 15 bp, Homo sapiens
tgtctcaaaacaaaa

SEQ ID NO: 436063 - DNA, 15 bp, Homo sapiens
ctgtctcaaaacaaa

SEQ ID NO: 436064 - DNA, 15 bp, Homo sapiens
cctgtctcaaaacaa

SEQ ID NO: 436065 - DNA, 15 bp, Homo sapiens
ccctgtctcaaaaca

SEQ ID NO: 436066 - DNA, 15 bp, Homo sapiens
accctgtctcaaaac

SEQ ID NO: 436067 - DNA, 15 bp, Homo sapiens
taccctgtctcaaaa

SEQ ID NO: 436068 - DNA, 15 bp, Homo sapiens
ataccctgtctcaaa

SEQ ID NO: 436069 - DNA, 15 bp, Homo sapiens
tataccctgtctcaa

SEQ ID NO: 436070 - DNA, 15 bp, Homo sapiens
ctataccctgtctca

SEQ ID NO: 436071 - DNA, 15 bp, Homo sapiens
gctataccctgtctc

SEQ ID NO: 436072 - DNA, 15 bp, Homo sapiens
agctataccctgtct

SEQ ID NO: 436073 - DNA, 15 bp, Homo sapiens
gagctataccctgtc

SEQ ID NO: 436074 - DNA, 15 bp, Homo sapiens
agagctataccctgt

SEQ ID NO: 436075 - DNA, 15 bp, Homo sapiens
cagagctataccctg

SEQ ID NO: 436076 - DNA, 15 bp, Homo sapiens
acagagctataccct

SEQ ID NO: 436077 - DNA, 15 bp, Homo sapiens
gacagagctataccc

SEQ ID NO: 436078 - DNA, 15 bp, Homo sapiens
cgacagagctatacc

SEQ ID NO: 436079 - DNA, 15 bp, Homo sapiens
gcgacagagctatac

SEQ ID NO: 436080 - DNA, 15 bp, Homo sapiens
ggcgacagagctata

SEQ ID NO: 436081 - DNA, 15 bp, Homo sapiens
aggcgacagagctat

SEQ ID NO: 436082 - DNA, 15 bp, Homo sapiens
taggcgacagagcta

SEQ ID NO: 436083 - DNA, 15 bp, Homo sapiens
ctaggcgacagagct

SEQ ID NO: 436084 - DNA, 15 bp, Homo sapiens
tctaggcgacagagc

SEQ ID NO: 436085 - DNA, 15 bp, Homo sapiens
gtctaggcgacagag

SEQ ID NO: 436086 - DNA, 15 bp, Homo sapiens
agtctaggcgacaga

SEQ ID NO: 436087 - DNA, 15 bp, Homo sapiens
cagtctaggcgacag

SEQ ID NO: 436088 - DNA, 15 bp, Homo sapiens
ccagtctaggcgaca

SEQ ID NO: 436089 - DNA, 15 bp, Homo sapiens
tccagtctaggcgac

SEQ ID NO: 436090 - DNA, 15 bp, Homo sapiens
ctccagtctaggcga

SEQ ID NO: 436091 - DNA, 15 bp, Homo sapiens
actccagtctaggcg

SEQ ID NO: 436092 - DNA, 15 bp, Homo sapiens
tactccagtctaggc

SEQ ID NO: 436093 - DNA, 15 bp, Homo sapiens
gtactccagtctagg

SEQ ID NO: 436094 - DNA, 15 bp, Homo sapiens
tgtactccagtctag

SEQ ID NO: 436095 - DNA, 15 bp, Homo sapiens
ctgtactccagtcta

SEQ ID NO: 436096 - DNA, 15 bp, Homo sapiens
actgtactccagtct

SEQ ID NO: 436097 - DNA, 15 bp, Homo sapiens
cactgtactccagtc

SEQ ID NO: 436098 - DNA, 15 bp, Homo sapiens
tcactgtactccagt

SEQ ID NO: 436099 - DNA, 15 bp, Homo sapiens
gtcactgtactccag

SEQ ID NO: 436100 - DNA, 15 bp, Homo sapiens
tgtcactgtactcca

SEQ ID NO: 436101 - DNA, 15 bp, Homo sapiens
atgtcactgtactcc

SEQ ID NO: 436102 - DNA, 15 bp, Homo sapiens
catgtcactgtactc

SEQ ID NO: 436103 - DNA, 15 bp, Homo sapiens
tcatgtcactgtact

SEQ ID NO: 436104 - DNA, 15 bp, Homo sapiens
atcatgtcactgtac

SEQ ID NO: 436105 - DNA, 15 bp, Homo sapiens
gatcatgtcactgta

SEQ ID NO: 436106 - DNA, 15 bp, Homo sapiens
tgatcatgtcactgt

SEQ ID NO: 436107 - DNA, 15 bp, Homo sapiens
gtgatcatgtcactg

SEQ ID NO: 436108 - DNA, 15 bp, Homo sapiens
tgtgatcatgtcact

SEQ ID NO: 436109 - DNA, 15 bp, Homo sapiens
ctgtgatcatgtcac

SEQ ID NO: 436110 - DNA, 15 bp, Homo sapiens
gctgtgatcatgtca

SEQ ID NO: 436111 - DNA, 15 bp, Homo sapiens
agctgtgatcatgtc

SEQ ID NO: 436112 - DNA, 15 bp, Homo sapiens
gagctgtgatcatgt

SEQ ID NO: 436113 - DNA, 15 bp, Homo sapiens
tgagctgtgatcatg

SEQ ID NO: 436114 - DNA, 15 bp, Homo sapiens
gtgagctgtgatcat

SEQ ID NO: 436115 - DNA, 15 bp, Homo sapiens
agtgagctgtgatca

SEQ ID NO: 436116 - DNA, 15 bp, Homo sapiens
cagtgagctgtgatc

SEQ ID NO: 436117 - DNA, 15 bp, Homo sapiens
gcagtgagctgtgat

SEQ ID NO: 436118 - DNA, 15 bp, Homo sapiens
actgcagtgagctgt

SEQ ID NO: 436119 - DNA, 15 bp, Homo sapiens
gactgcagtgagctg

SEQ ID NO: 436120 - DNA, 15 bp, Homo sapiens
agactgcagtgagct

SEQ ID NO: 436121 - DNA, 15 bp, Homo sapiens
tgagactgcagtgag

SEQ ID NO: 436122 - DNA, 15 bp, Homo sapiens
ttgagactgcagtga

SEQ ID NO: 436123 - DNA, 15 bp, Homo sapiens
gttgagactgcagtg

SEQ ID NO: 436124 - DNA, 15 bp, Homo sapiens
agttgagactgcagt

SEQ ID NO: 436125 - DNA, 15 bp, Homo sapiens
aagttgagactgcag

SEQ ID NO: 436126 - DNA, 15 bp, Homo sapiens
gaagttgagactgca

SEQ ID NO: 436127 - DNA, 15 bp, Homo sapiens
ggaagttgagactgc

SEQ ID NO: 436128 - DNA, 15 bp, Homo sapiens
gggaagttgagactg

SEQ ID NO: 436129 - DNA, 15 bp, Homo sapiens
tgggaagttgagact

SEQ ID NO: 436130 - DNA, 15 bp, Homo sapiens
atgggaagttgagac

SEQ ID NO: 436131 - DNA, 15 bp, Homo sapiens
catgggaagttgaga

SEQ ID NO: 436132 - DNA, 15 bp, Homo sapiens
gcatgggaagttgag

SEQ ID NO: 436133 - DNA, 15 bp, Homo sapiens
agcatgggaagttga

SEQ ID NO: 436134 - DNA, 15 bp, Homo sapiens
gagcatgggaagttg

SEQ ID NO: 436135 - DNA, 15 bp, Homo sapiens
tgagcatgggaagtt

SEQ ID NO: 436136 - DNA, 15 bp, Homo sapiens
ttgagcatgggaagt

SEQ ID NO: 436137 - DNA, 15 bp, Homo sapiens
cttgagcatgggaag

SEQ ID NO: 436138 - DNA, 15 bp, Homo sapiens
acttgagcatgggaa

SEQ ID NO: 436139 - DNA, 15 bp, Homo sapiens
cacttgagcatggga

SEQ ID NO: 436140 - DNA, 15 bp, Homo sapiens
tcacttgagcatggg

SEQ ID NO: 436141 - DNA, 15 bp, Homo sapiens
atcacttgagcatgg

SEQ ID NO: 436142 - DNA, 15 bp, Homo sapiens
gatcacttgagcatg

SEQ ID NO: 436143 - DNA, 15 bp, Homo sapiens
ggatcacttgagcat

SEQ ID NO: 436144 - DNA, 15 bp, Homo sapiens
aggatcacttgagca

SEQ ID NO: 436145 - DNA, 15 bp, Homo sapiens
tgggaggatcacttg

SEQ ID NO: 436146 - DNA, 15 bp, Homo sapiens
gtgggaggatcactt

SEQ ID NO: 436147 - DNA, 15 bp, Homo sapiens
ggtgggaggatcact

SEQ ID NO: 436148 - DNA, 15 bp, Homo sapiens
aggtgggaggatcac

SEQ ID NO: 436149 - DNA, 15 bp, Homo sapiens
gaggtgggaggatca

SEQ ID NO: 436150 - DNA, 15 bp, Homo sapiens
acacctgtagtccca

SEQ ID NO: 436151 - DNA, 15 bp, Homo sapiens
cacacctgtagtccc

SEQ ID NO: 436152 - DNA, 15 bp, Homo sapiens
tcacacctgtagtcc

SEQ ID NO: 436153 - DNA, 15 bp, Homo sapiens
ttcacacctgtagtc

SEQ ID NO: 436154 - DNA, 15 bp, Homo sapiens
gttcacacctgtagt

SEQ ID NO: 436155 - DNA, 15 bp, Homo sapiens
ggttcacacctgtag

SEQ ID NO: 436156 - DNA, 15 bp, Homo sapiens
tggttcacacctgta

SEQ ID NO: 436157 - DNA, 15 bp, Homo sapiens
gtggttcacacctgt

SEQ ID NO: 436158 - DNA, 15 bp, Homo sapiens
agtggttcacacctg

SEQ ID NO: 436159 - DNA, 15 bp, Homo sapiens
tagtggttcacacct

SEQ ID NO: 436160 - DNA, 15 bp, Homo sapiens
atagtggttcacacc

SEQ ID NO: 436161 - DNA, 15 bp, Homo sapiens
catagtggttcacac

SEQ ID NO: 436162 - DNA, 15 bp, Homo sapiens
gcatagtggttcaca

SEQ ID NO: 436163 - DNA, 15 bp, Homo sapiens
ggcatagtggttcac

SEQ ID NO: 436164 - DNA, 15 bp, Homo sapiens
aggcatagtggttca

SEQ ID NO: 436165 - DNA, 15 bp, Homo sapiens
caggcatagtggttc

SEQ ID NO: 436166 - DNA, 15 bp, Homo sapiens
ccaggcatagtggtt

SEQ ID NO: 436167 - DNA, 15 bp, Homo sapiens
gccaggcatagtggt

SEQ ID NO: 436168 - DNA, 15 bp, Homo sapiens
ttggccaggcatagt

SEQ ID NO: 436169 - DNA, 15 bp, Homo sapiens
attggccaggcatag

SEQ ID NO: 436170 - DNA, 15 bp, Homo sapiens
aattggccaggcata

SEQ ID NO: 436171 - DNA, 15 bp, Homo sapiens
aaattggccaggcat

SEQ ID NO: 436172 - DNA, 15 bp, Homo sapiens
aaaattggccaggca

SEQ ID NO: 436173 - DNA, 15 bp, Homo sapiens
aaaaattggccaggc

SEQ ID NO: 436174 - DNA, 15 bp, Homo sapiens
aaaaaattggccagg

SEQ ID NO: 436175 - DNA, 15 bp, Homo sapiens
gaaaaaattggccag

SEQ ID NO: 436176 - DNA, 15 bp, Homo sapiens
agaaaaaattggcca

SEQ ID NO: 436177 - DNA, 15 bp, Homo sapiens
tagaaaaaattggcc

SEQ ID NO: 436178 - DNA, 15 bp, Homo sapiens
atagaaaaaattggc

SEQ ID NO: 436179 - DNA, 15 bp, Homo sapiens
aatagaaaaaattgg

SEQ ID NO: 436180 - DNA, 15 bp, Homo sapiens
aaatagaaaaaattg

SEQ ID NO: 436181 - DNA, 15 bp, Homo sapiens
aaaatagaaaaaatt

SEQ ID NO: 436182 - DNA, 15 bp, Homo sapiens
aaaaatagaaaaaat

SEQ ID NO: 436183 - DNA, 15 bp, Homo sapiens
aaaaaatagaaaaaa

SEQ ID NO: 436184 - DNA, 15 bp, Homo sapiens
caaaaaatagaaaaa

SEQ ID NO: 436185 - DNA, 15 bp, Homo sapiens
acaaaaaatagaaaa

SEQ ID NO: 436186 - DNA, 15 bp, Homo sapiens
tacaaaaaatagaaa

SEQ ID NO: 436187 - DNA, 15 bp, Homo sapiens
ctacaaaaaatagaa

SEQ ID NO: 436188 - DNA, 15 bp, Homo sapiens
tctacaaaaaataga

SEQ ID NO: 436189 - DNA, 15 bp, Homo sapiens
ctctacaaaaaatag

SEQ ID NO: 436190 - DNA, 15 bp, Homo sapiens
atctctacaaaaaat

SEQ ID NO: 436191 - DNA, 15 bp, Homo sapiens
catctctacaaaaaa

SEQ ID NO: 436192 - DNA, 15 bp, Homo sapiens
tcatctctacaaaaa

SEQ ID NO: 436193 - DNA, 15 bp, Homo sapiens
ctcatctctacaaaa

SEQ ID NO: 436194 - DNA, 15 bp, Homo sapiens
cctcatctctacaaa

SEQ ID NO: 436195 - DNA, 15 bp, Homo sapiens
acctcatctctacaa

SEQ ID NO: 436196 - DNA, 15 bp, Homo sapiens
gacctcatctctaca

SEQ ID NO: 436197 - DNA, 15 bp, Homo sapiens
agacctcatctctac

SEQ ID NO: 436198 - DNA, 15 bp, Homo sapiens
gagacctcatctcta

SEQ ID NO: 436199 - DNA, 15 bp, Homo sapiens
tgagacctcatctct

SEQ ID NO: 436200 - DNA, 15 bp, Homo sapiens
gtgagacctcatctc

SEQ ID NO: 436201 - DNA, 15 bp, Homo sapiens
agtgagacctcatct

SEQ ID NO: 436202 - DNA, 15 bp, Homo sapiens
aagtgagacctcatc

SEQ ID NO: 436203 - DNA, 15 bp, Homo sapiens
aaagtgagacctcat

SEQ ID NO: 436204 - DNA, 15 bp, Homo sapiens
caaagtgagacctca

SEQ ID NO: 436205 - DNA, 15 bp, Homo sapiens
acaaagtgagacctc

SEQ ID NO: 436206 - DNA, 15 bp, Homo sapiens
gacaaagtgagacct

SEQ ID NO: 436207 - DNA, 15 bp, Homo sapiens
tgacaaagtgagacc

SEQ ID NO: 436208 - DNA, 15 bp, Homo sapiens
gtgacaaagtgagac

SEQ ID NO: 436209 - DNA, 15 bp, Homo sapiens
ggtgacaaagtgaga

SEQ ID NO: 436210 - DNA, 15 bp, Homo sapiens
aggtgacaaagtgag

SEQ ID NO: 436211 - DNA, 15 bp, Homo sapiens
taggtgacaaagtga

SEQ ID NO: 436212 - DNA, 15 bp, Homo sapiens
ctaggtgacaaagtg

SEQ ID NO: 436213 - DNA, 15 bp, Homo sapiens
cctaggtgacaaagt

SEQ ID NO: 436214 - DNA, 15 bp, Homo sapiens
acctaggtgacaaag

SEQ ID NO: 436215 - DNA, 15 bp, Homo sapiens
aacctaggtgacaaa

SEQ ID NO: 436216 - DNA, 15 bp, Homo sapiens
caacctaggtgacaa

SEQ ID NO: 436217 - DNA, 15 bp, Homo sapiens
acaacctaggtgaca

SEQ ID NO: 436218 - DNA, 15 bp, Homo sapiens
aacaacctaggtgac

SEQ ID NO: 436219 - DNA, 15 bp, Homo sapiens
aaacaacctaggtga

SEQ ID NO: 436220 - DNA, 15 bp, Homo sapiens
gaaacaacctaggtg

SEQ ID NO: 436221 - DNA, 15 bp, Homo sapiens
agaaacaacctaggt

SEQ ID NO: 436222 - DNA, 15 bp, Homo sapiens
aagaaacaacctagg

SEQ ID NO: 436223 - DNA, 15 bp, Homo sapiens
caagaaacaacctag

SEQ ID NO: 436224 - DNA, 15 bp, Homo sapiens
tcaagaaacaaccta

SEQ ID NO: 436225 - DNA, 15 bp, Homo sapiens
ttcaagaaacaacct

SEQ ID NO: 436226 - DNA, 15 bp, Homo sapiens
attcaagaaacaacc

SEQ ID NO: 436227 - DNA, 15 bp, Homo sapiens
aattcaagaaacaac

SEQ ID NO: 436228 - DNA, 15 bp, Homo sapiens
gaattcaagaaacaa

SEQ ID NO: 436229 - DNA, 15 bp, Homo sapiens
ggaattcaagaaaca

SEQ ID NO: 436230 - DNA, 15 bp, Homo sapiens
aggaattcaagaaac

SEQ ID NO: 436231 - DNA, 15 bp, Homo sapiens
caggaattcaagaaa

SEQ ID NO: 436232 - DNA, 15 bp, Homo sapiens
ccaggaattcaagaa

SEQ ID NO: 436233 - DNA, 15 bp, Homo sapiens
cccaggaattcaaga

SEQ ID NO: 436234 - DNA, 15 bp, Homo sapiens
gcccaggaattcaag

SEQ ID NO: 436235 - DNA, 15 bp, Homo sapiens
acttgagcccaggaa

SEQ ID NO: 436236 - DNA, 15 bp, Homo sapiens
agaggatcacttgag

SEQ ID NO: 436237 - DNA, 15 bp, Homo sapiens
aagaggatcacttga

SEQ ID NO: 436238 - DNA, 15 bp, Homo sapiens
caagaggatcacttg

SEQ ID NO: 436239 - DNA, 15 bp, Homo sapiens
gcaagaggatcactt

SEQ ID NO: 436240 - DNA, 15 bp, Homo sapiens
ggcaagaggatcact

SEQ ID NO: 436241 - DNA, 15 bp, Homo sapiens
aggcaagaggatcac

SEQ ID NO: 436242 - DNA, 15 bp, Homo sapiens
aaggcaagaggatca

SEQ ID NO: 436243 - DNA, 15 bp, Homo sapiens
caaggcaagaggatc

SEQ ID NO: 436244 - DNA, 15 bp, Homo sapiens
ccaaggcaagaggat

SEQ ID NO: 436245 - DNA, 15 bp, Homo sapiens
gccaaggcaagagga

SEQ ID NO: 436246 - DNA, 15 bp, Homo sapiens
ggccaaggcaagagg

SEQ ID NO: 436247 - DNA, 15 bp, Homo sapiens
aggccaaggcaagag

SEQ ID NO: 436248 - DNA, 15 bp, Homo sapiens
gaggccaaggcaaga

SEQ ID NO: 436249 - DNA, 15 bp, Homo sapiens
ggaggccaaggcaag

SEQ ID NO: 436250 - DNA, 15 bp, Homo sapiens
gggaggccaaggcaa

SEQ ID NO: 436251 - DNA, 15 bp, Homo sapiens
atggtggctcacacc

SEQ ID NO: 436252 - DNA, 15 bp, Homo sapiens
catggtggctcacac

SEQ ID NO: 436253 - DNA, 15 bp, Homo sapiens
gcatggtggctcaca

SEQ ID NO: 436254 - DNA, 15 bp, Homo sapiens
gggcatggtggctca

SEQ ID NO: 436255 - DNA, 15 bp, Homo sapiens
tgggcatggtggctc

SEQ ID NO: 436256 - DNA, 15 bp, Homo sapiens
ctgggcatggtggct

SEQ ID NO: 436257 - DNA, 15 bp, Homo sapiens
taaaaggctgggcat

SEQ ID NO: 436258 - DNA, 15 bp, Homo sapiens
ataaaaggctgggca

SEQ ID NO: 436259 - DNA, 15 bp, Homo sapiens
aataaaaggctgggc

SEQ ID NO: 436260 - DNA, 15 bp, Homo sapiens
aaataaaaggctggg

SEQ ID NO: 436261 - DNA, 15 bp, Homo sapiens
caaataaaaggctgg

SEQ ID NO: 436262 - DNA, 15 bp, Homo sapiens
acaaataaaaggctg

SEQ ID NO: 436263 - DNA, 15 bp, Homo sapiens
aacaaataaaaggct

SEQ ID NO: 436264 - DNA, 15 bp, Homo sapiens
aaacaaataaaaggc

SEQ ID NO: 436265 - DNA, 15 bp, Homo sapiens
taaacaaataaaagg

SEQ ID NO: 436266 - DNA, 15 bp, Homo sapiens
ataaacaaataaaag

SEQ ID NO: 436267 - DNA, 15 bp, Homo sapiens
aataaacaaataaaa

SEQ ID NO: 436268 - DNA, 15 bp, Homo sapiens
aaataaacaaataaa

SEQ ID NO: 436269 - DNA, 15 bp, Homo sapiens
aaaataaacaaataa

SEQ ID NO: 436270 - DNA, 15 bp, Homo sapiens
taaaataaacaaata

SEQ ID NO: 436271 - DNA, 15 bp, Homo sapiens
ttaaaataaacaaat

SEQ ID NO: 436272 - DNA, 15 bp, Homo sapiens
attaaaataaacaaa

SEQ ID NO: 436273 - DNA, 15 bp, Homo sapiens
aattaaaataaacaa

SEQ ID NO: 436274 - DNA, 15 bp, Homo sapiens
gaattaaaataaaca

SEQ ID NO: 436275 - DNA, 15 bp, Homo sapiens
tgaattaaaataaac

SEQ ID NO: 436276 - DNA, 15 bp, Homo sapiens
ctgaattaaaataaa

SEQ ID NO: 436277 - DNA, 15 bp, Homo sapiens
tctgaattaaaataa

SEQ ID NO: 436278 - DNA, 15 bp, Homo sapiens
ctctgaattaaaata

SEQ ID NO: 436279 - DNA, 15 bp, Homo sapiens
cctctgaattaaaat

SEQ ID NO: 436280 - DNA, 15 bp, Homo sapiens
tcctctgaattaaaa

SEQ ID NO: 436281 - DNA, 15 bp, Homo sapiens
ttcctctgaattaaa

SEQ ID NO: 436282 - DNA, 15 bp, Homo sapiens
tttcctctgaattaa

SEQ ID NO: 436283 - DNA, 15 bp, Homo sapiens
ctttcctctgaatta

SEQ ID NO: 436284 - DNA, 15 bp, Homo sapiens
tctttcctctgaatt

SEQ ID NO: 436285 - DNA, 15 bp, Homo sapiens
atctttcctctgaat

SEQ ID NO: 436286 - DNA, 15 bp, Homo sapiens
tatctttcctctgaa

SEQ ID NO: 436287 - DNA, 15 bp, Homo sapiens
ttatctttcctctga

SEQ ID NO: 436288 - DNA, 15 bp, Homo sapiens
tttatctttcctctg

SEQ ID NO: 436289 - DNA, 15 bp, Homo sapiens
atttatctttcctct

SEQ ID NO: 436290 - DNA, 15 bp, Homo sapiens
tatttatctttcctc

SEQ ID NO: 436291 - DNA, 15 bp, Homo sapiens
atatttatctttcct

SEQ ID NO: 436292 - DNA, 15 bp, Homo sapiens
catatttatctttcc

SEQ ID NO: 436293 - DNA, 15 bp, Homo sapiens
tcatatttatctttc

SEQ ID NO: 436294 - DNA, 15 bp, Homo sapiens
ttcatatttatcttt

SEQ ID NO: 436295 - DNA, 15 bp, Homo sapiens
tttcatatttatctt

SEQ ID NO: 436296 - DNA, 15 bp, Homo sapiens
gtttcatatttatct

SEQ ID NO: 436297 - DNA, 15 bp, Homo sapiens
ggtttcatatttatc

SEQ ID NO: 436298 - DNA, 15 bp, Homo sapiens
tggtttcatatttat

SEQ ID NO: 436299 - DNA, 15 bp, Homo sapiens
gtggtttcatattta

SEQ ID NO: 436300 - DNA, 15 bp, Homo sapiens
tgtggtttcatattt

SEQ ID NO: 436301 - DNA, 15 bp, Homo sapiens
ttgtggtttcatatt

SEQ ID NO: 436302 - DNA, 15 bp, Homo sapiens
tttgtggtttcatat

SEQ ID NO: 436303 - DNA, 15 bp, Homo sapiens
atttgtggtttcata

SEQ ID NO: 436304 - DNA, 15 bp, Homo sapiens
catttgtggtttcat

SEQ ID NO: 436305 - DNA, 15 bp, Homo sapiens
ccatttgtggtttca

SEQ ID NO: 436306 - DNA, 15 bp, Homo sapiens
tccatttgtggtttc

SEQ ID NO: 436307 - DNA, 15 bp, Homo sapiens
ttccatttgtggttt

SEQ ID NO: 436308 - DNA, 15 bp, Homo sapiens
attccatttgtggtt

SEQ ID NO: 436309 - DNA, 15 bp, Homo sapiens
aattccatttgtggt

SEQ ID NO: 436310 - DNA, 15 bp, Homo sapiens
aaattccatttgtgg

SEQ ID NO: 436311 - DNA, 15 bp, Homo sapiens
gaaattccatttgtg

SEQ ID NO: 436312 - DNA, 15 bp, Homo sapiens
tgaaattccatttgt

SEQ ID NO: 436313 - DNA, 15 bp, Homo sapiens
ttgaaattccatttg

SEQ ID NO: 436314 - DNA, 15 bp, Homo sapiens
attgaaattccattt

SEQ ID NO: 436315 - DNA, 15 bp, Homo sapiens
aattgaaattccatt

SEQ ID NO: 436316 - DNA, 15 bp, Homo sapiens
taattgaaattccat

SEQ ID NO: 436317 - DNA, 15 bp, Homo sapiens
ttaattgaaattcca

SEQ ID NO: 436318 - DNA, 15 bp, Homo sapiens
attaattgaaattcc

SEQ ID NO: 436319 - DNA, 15 bp, Homo sapiens
tattaattgaaattc

SEQ ID NO: 436320 - DNA, 15 bp, Homo sapiens
atattaattgaaatt

SEQ ID NO: 436321 - DNA, 15 bp, Homo sapiens
tatattaattgaaat

SEQ ID NO: 436322 - DNA, 15 bp, Homo sapiens
ttatattaattgaaa

SEQ ID NO: 436323 - DNA, 15 bp, Homo sapiens
gttatattaattgaa

SEQ ID NO: 436324 - DNA, 15 bp, Homo sapiens
agttatattaattga

SEQ ID NO: 436325 - DNA, 15 bp, Homo sapiens
aagttatattaattg

SEQ ID NO: 436326 - DNA, 15 bp, Homo sapiens
taagttatattaatt

SEQ ID NO: 436327 - DNA, 15 bp, Homo sapiens
gtaagttatattaat

SEQ ID NO: 436328 - DNA, 15 bp, Homo sapiens
agtaagttatattaa

SEQ ID NO: 436329 - DNA, 15 bp, Homo sapiens
aagtaagttatatta

SEQ ID NO: 436330 - DNA, 15 bp, Homo sapiens
aaagtaagttatatt

SEQ ID NO: 436331 - DNA, 15 bp, Homo sapiens
taaagtaagttatat

SEQ ID NO: 436332 - DNA, 15 bp, Homo sapiens
ataaagtaagttata

SEQ ID NO: 436333 - DNA, 15 bp, Homo sapiens
cataaagtaagttat

SEQ ID NO: 436334 - DNA, 15 bp, Homo sapiens
gcataaagtaagtta

SEQ ID NO: 436335 - DNA, 15 bp, Homo sapiens
agcataaagtaagtt

SEQ ID NO: 436336 - DNA, 15 bp, Homo sapiens
cagcataaagtaagt

SEQ ID NO: 436337 - DNA, 15 bp, Homo sapiens
tcagcataaagtaag

SEQ ID NO: 436338 - DNA, 15 bp, Homo sapiens
ctcagcataaagtaa

SEQ ID NO: 436339 - DNA, 15 bp, Homo sapiens
tctcagcataaagta

SEQ ID NO: 436340 - DNA, 15 bp, Homo sapiens
gtctcagcataaagt

SEQ ID NO: 436341 - DNA, 15 bp, Homo sapiens
agtctcagcataaag

SEQ ID NO: 436342 - DNA, 15 bp, Homo sapiens
tagtctcagcataaa

SEQ ID NO: 436343 - DNA, 15 bp, Homo sapiens
atagtctcagcataa

SEQ ID NO: 436344 - DNA, 15 bp, Homo sapiens
aatagtctcagcata

SEQ ID NO: 436345 - DNA, 15 bp, Homo sapiens
aaatagtctcagcat

SEQ ID NO: 436346 - DNA, 15 bp, Homo sapiens
caaatagtctcagca

SEQ ID NO: 436347 - DNA, 15 bp, Homo sapiens
ccaaatagtctcagc

SEQ ID NO: 436348 - DNA, 15 bp, Homo sapiens
gccaaatagtctcag

SEQ ID NO: 436349 - DNA, 15 bp, Homo sapiens
tgccaaatagtctca

SEQ ID NO: 436350 - DNA, 15 bp, Homo sapiens
atgccaaatagtctc

SEQ ID NO: 436351 - DNA, 15 bp, Homo sapiens
tatgccaaatagtct

SEQ ID NO: 436352 - DNA, 15 bp, Homo sapiens
ctatgccaaatagtc

SEQ ID NO: 436353 - DNA, 15 bp, Homo sapiens
cctatgccaaatagt

SEQ ID NO: 436354 - DNA, 15 bp, Homo sapiens
tcctatgccaaatag

SEQ ID NO: 436355 - DNA, 15 bp, Homo sapiens
ctcctatgccaaata

SEQ ID NO: 436356 - DNA, 15 bp, Homo sapiens
tctcctatgccaaat

SEQ ID NO: 436357 - DNA, 15 bp, Homo sapiens
atctcctatgccaaa

SEQ ID NO: 436358 - DNA, 15 bp, Homo sapiens
tatctcctatgccaa

SEQ ID NO: 436359 - DNA, 15 bp, Homo sapiens
gtatctcctatgcca

SEQ ID NO: 436360 - DNA, 15 bp, Homo sapiens
tgtatctcctatgcc

SEQ ID NO: 436361 - DNA, 15 bp, Homo sapiens
ctgtatctcctatgc

SEQ ID NO: 436362 - DNA, 15 bp, Homo sapiens
tctgtatctcctatg

SEQ ID NO: 436363 - DNA, 15 bp, Homo sapiens
ctctgtatctcctat

SEQ ID NO: 436364 - DNA, 15 bp, Homo sapiens
tctctgtatctccta

SEQ ID NO: 436365 - DNA, 15 bp, Homo sapiens
ctctctgtatctcct

SEQ ID NO: 436366 - DNA, 15 bp, Homo sapiens
actctctgtatctcc

SEQ ID NO: 436367 - DNA, 15 bp, Homo sapiens
aactctctgtatctc

SEQ ID NO: 436368 - DNA, 15 bp, Homo sapiens
aaactctctgtatct

SEQ ID NO: 436369 - DNA, 15 bp, Homo sapiens
aaaactctctgtatc

SEQ ID NO: 436370 - DNA, 15 bp, Homo sapiens
aaaaactctctgtat

SEQ ID NO: 436371 - DNA, 15 bp, Homo sapiens
aaaaaactctctgta

SEQ ID NO: 436372 - DNA, 15 bp, Homo sapiens
aaaaaaactctctgt

SEQ ID NO: 436373 - DNA, 15 bp, Homo sapiens
taaaaaaactctctg

SEQ ID NO: 436374 - DNA, 15 bp, Homo sapiens
ttaaaaaaactctct

SEQ ID NO: 436375 - DNA, 15 bp, Homo sapiens
tttaaaaaaactctc

SEQ ID NO: 436376 - DNA, 15 bp, Homo sapiens
ttttaaaaaaactct

SEQ ID NO: 436377 - DNA, 15 bp, Homo sapiens
gttttaaaaaaactc

SEQ ID NO: 436378 - DNA, 15 bp, Homo sapiens
agttttaaaaaaact

SEQ ID NO: 436379 - DNA, 15 bp, Homo sapiens
cagttttaaaaaaac

SEQ ID NO: 436380 - DNA, 15 bp, Homo sapiens
ccagttttaaaaaaa

SEQ ID NO: 436381 - DNA, 15 bp, Homo sapiens
tccagttttaaaaaa

SEQ ID NO: 436382 - DNA, 15 bp, Homo sapiens
ttccagttttaaaaa

SEQ ID NO: 436383 - DNA, 15 bp, Homo sapiens
tttccagttttaaaa

SEQ ID NO: 436384 - DNA, 15 bp, Homo sapiens
ttttccagttttaaa

SEQ ID NO: 436385 - DNA, 15 bp, Homo sapiens
attttccagttttaa

SEQ ID NO: 436386 - DNA, 15 bp, Homo sapiens
cattttccagtttta

SEQ ID NO: 436387 - DNA, 15 bp, Homo sapiens
ccattttccagtttt

SEQ ID NO: 436388 - DNA, 15 bp, Homo sapiens
accattttccagttt

SEQ ID NO: 436389 - DNA, 15 bp, Homo sapiens
aaccattttccagtt

SEQ ID NO: 436390 - DNA, 15 bp, Homo sapiens
gaaccattttccagt

SEQ ID NO: 436391 - DNA, 15 bp, Homo sapiens
cgaaccattttccag

SEQ ID NO: 436392 - DNA, 15 bp, Homo sapiens
acgaaccattttcca

SEQ ID NO: 436393 - DNA, 15 bp, Homo sapiens
cacgaaccattttcc

SEQ ID NO: 436394 - DNA, 15 bp, Homo sapiens
tcacgaaccattttc

SEQ ID NO: 436395 - DNA, 15 bp, Homo sapiens
ttcacgaaccatttt

SEQ ID NO: 436396 - DNA, 15 bp, Homo sapiens
cttcacgaaccattt

SEQ ID NO: 436397 - DNA, 15 bp, Homo sapiens
ccttcacgaaccatt

SEQ ID NO: 436398 - DNA, 15 bp, Homo sapiens
tccttcacgaaccat

SEQ ID NO: 436399 - DNA, 15 bp, Homo sapiens
atccttcacgaacca

SEQ ID NO: 436400 - DNA, 15 bp, Homo sapiens
catccttcacgaacc

SEQ ID NO: 436401 - DNA, 15 bp, Homo sapiens
tcatccttcacgaac

SEQ ID NO: 436402 - DNA, 15 bp, Homo sapiens
ttcatccttcacgaa

SEQ ID NO: 436403 - DNA, 15 bp, Homo sapiens
tttcatccttcacga

SEQ ID NO: 436404 - DNA, 15 bp, Homo sapiens
ctttcatccttcacg

SEQ ID NO: 436405 - DNA, 15 bp, Homo sapiens
tctttcatccttcac

SEQ ID NO: 436406 - DNA, 15 bp, Homo sapiens
gtctttcatccttca

SEQ ID NO: 436407 - DNA, 15 bp, Homo sapiens
agtctttcatccttc

SEQ ID NO: 436408 - DNA, 15 bp, Homo sapiens
tagtctttcatcctt

SEQ ID NO: 436409 - DNA, 15 bp, Homo sapiens
ttagtctttcatcct

SEQ ID NO: 436410 - DNA, 15 bp, Homo sapiens
tttagtctttcatcc

SEQ ID NO: 436411 - DNA, 15 bp, Homo sapiens
ttttagtctttcatc

SEQ ID NO: 436412 - DNA, 15 bp, Homo sapiens
cttttagtctttcat

SEQ ID NO: 436413 - DNA, 15 bp, Homo sapiens
acttttagtctttca

SEQ ID NO: 436414 - DNA, 15 bp, Homo sapiens
aacttttagtctttc

SEQ ID NO: 436415 - DNA, 15 bp, Homo sapiens
caacttttagtcttt

SEQ ID NO: 436416 - DNA, 15 bp, Homo sapiens
tcaacttttagtctt

SEQ ID NO: 436417 - DNA, 15 bp, Homo sapiens
ttcaacttttagtct

SEQ ID NO: 436418 - DNA, 15 bp, Homo sapiens
tttcaacttttagtc

SEQ ID NO: 436419 - DNA, 15 bp, Homo sapiens
atttcaacttttagt

SEQ ID NO: 436420 - DNA, 15 bp, Homo sapiens
aatttcaacttttag

SEQ ID NO: 436421 - DNA, 15 bp, Homo sapiens
caatttcaactttta

SEQ ID NO: 436422 - DNA, 15 bp, Homo sapiens
gcaatttcaactttt

SEQ ID NO: 436423 - DNA, 15 bp, Homo sapiens
tgcaatttcaacttt

SEQ ID NO: 436424 - DNA, 15 bp, Homo sapiens
ttgcaatttcaactt

SEQ ID NO: 436425 - DNA, 15 bp, Homo sapiens
attgcaatttcaact

SEQ ID NO: 436426 - DNA, 15 bp, Homo sapiens
aattgcaatttcaac

SEQ ID NO: 436427 - DNA, 15 bp, Homo sapiens
taattgcaatttcaa

SEQ ID NO: 436428 - DNA, 15 bp, Homo sapiens
ctaattgcaatttca

SEQ ID NO: 436429 - DNA, 15 bp, Homo sapiens
actaattgcaatttc

SEQ ID NO: 436430 - DNA, 15 bp, Homo sapiens
gactaattgcaattt

SEQ ID NO: 436431 - DNA, 15 bp, Homo sapiens
ggactaattgcaatt

SEQ ID NO: 436432 - DNA, 15 bp, Homo sapiens
gggactaattgcaat

SEQ ID NO: 436433 - DNA, 15 bp, Homo sapiens
tgggactaattgcaa

SEQ ID NO: 436434 - DNA, 15 bp, Homo sapiens
ttgggactaattgca

SEQ ID NO: 436435 - DNA, 15 bp, Homo sapiens
attgggactaattgc

SEQ ID NO: 436436 - DNA, 15 bp, Homo sapiens
tattgggactaattg

SEQ ID NO: 436437 - DNA, 15 bp, Homo sapiens
ctattgggactaatt

SEQ ID NO: 436438 - DNA, 15 bp, Homo sapiens
tctattgggactaat

SEQ ID NO: 436439 - DNA, 15 bp, Homo sapiens
atctattgggactaa

SEQ ID NO: 436440 - DNA, 15 bp, Homo sapiens
tatctattgggacta

SEQ ID NO: 436441 - DNA, 15 bp, Homo sapiens
ttatctattgggact

SEQ ID NO: 436442 - DNA, 15 bp, Homo sapiens
tttatctattgggac

SEQ ID NO: 436443 - DNA, 15 bp, Homo sapiens
ttttatctattggga

SEQ ID NO: 436444 - DNA, 15 bp, Homo sapiens
cttttatctattggg

SEQ ID NO: 436445 - DNA, 15 bp, Homo sapiens
acttttatctattgg

SEQ ID NO: 436446 - DNA, 15 bp, Homo sapiens
cacttttatctattg

SEQ ID NO: 436447 - DNA, 15 bp, Homo sapiens
acacttttatctatt

SEQ ID NO: 436448 - DNA, 15 bp, Homo sapiens
tacacttttatctat

SEQ ID NO: 436449 - DNA, 15 bp, Homo sapiens
ttacacttttatcta

SEQ ID NO: 436450 - DNA, 15 bp, Homo sapiens
cttacacttttatct

SEQ ID NO: 436451 - DNA, 15 bp, Homo sapiens
ccttacacttttatc

SEQ ID NO: 436452 - DNA, 15 bp, Homo sapiens
tccttacacttttat

SEQ ID NO: 436453 - DNA, 15 bp, Homo sapiens
ttccttacactttta

SEQ ID NO: 436454 - DNA, 15 bp, Homo sapiens
tttccttacactttt

SEQ ID NO: 436455 - DNA, 15 bp, Homo sapiens
atttccttacacttt

SEQ ID NO: 436456 - DNA, 15 bp, Homo sapiens
tatttccttacactt

SEQ ID NO: 436457 - DNA, 15 bp, Homo sapiens
atatttccttacact

SEQ ID NO: 436458 - DNA, 15 bp, Homo sapiens
tatatttccttacac

SEQ ID NO: 436459 - DNA, 15 bp, Homo sapiens
ttatatttccttaca

SEQ ID NO: 436460 - DNA, 15 bp, Homo sapiens
tttatatttccttac

SEQ ID NO: 436461 - DNA, 15 bp, Homo sapiens
atttatatttcctta

SEQ ID NO: 436462 - DNA, 15 bp, Homo sapiens
catttatatttcctt

SEQ ID NO: 436463 - DNA, 15 bp, Homo sapiens
tcatttatatttcct

SEQ ID NO: 436464 - DNA, 15 bp, Homo sapiens
atcatttatatttcc

SEQ ID NO: 436465 - DNA, 15 bp, Homo sapiens
aatcatttatatttc

SEQ ID NO: 436466 - DNA, 15 bp, Homo sapiens
taatcatttatattt

SEQ ID NO: 436467 - DNA, 15 bp, Homo sapiens
ttaatcatttatatt

SEQ ID NO: 436468 - DNA, 15 bp, Homo sapiens
tttaatcatttatat

SEQ ID NO: 436469 - DNA, 15 bp, Homo sapiens
ctttaatcatttata

SEQ ID NO: 436470 - DNA, 15 bp, Homo sapiens
actttaatcatttat

SEQ ID NO: 436471 - DNA, 15 bp, Homo sapiens
cactttaatcattta

SEQ ID NO: 436472 - DNA, 15 bp, Homo sapiens
acactttaatcattt

SEQ ID NO: 436473 - DNA, 15 bp, Homo sapiens
tacactttaatcatt

SEQ ID NO: 436474 - DNA, 15 bp, Homo sapiens
gtacactttaatcat

SEQ ID NO: 436475 - DNA, 15 bp, Homo sapiens
tgtacactttaatca

SEQ ID NO: 436476 - DNA, 15 bp, Homo sapiens
ttgtacactttaatc

SEQ ID NO: 436477 - DNA, 15 bp, Homo sapiens
tttgtacactttaat

SEQ ID NO: 436478 - DNA, 15 bp, Homo sapiens
ttttgtacactttaa

SEQ ID NO: 436479 - DNA, 15 bp, Homo sapiens
tttttgtacacttta

SEQ ID NO: 436480 - DNA, 15 bp, Homo sapiens
ctttttgtacacttt

SEQ ID NO: 436481 - DNA, 15 bp, Homo sapiens
tctttttgtacactt

SEQ ID NO: 436482 - DNA, 15 bp, Homo sapiens
atctttttgtacact

SEQ ID NO: 436483 - DNA, 15 bp, Homo sapiens
gatctttttgtacac

SEQ ID NO: 436484 - DNA, 15 bp, Homo sapiens
tgatctttttgtaca

SEQ ID NO: 436485 - DNA, 15 bp, Homo sapiens
ctgatctttttgtac

SEQ ID NO: 436486 - DNA, 15 bp, Homo sapiens
tctgatctttttgta

SEQ ID NO: 436487 - DNA, 15 bp, Homo sapiens
ttctgatctttttgt

SEQ ID NO: 436488 - DNA, 15 bp, Homo sapiens
attctgatctttttg

SEQ ID NO: 436489 - DNA, 15 bp, Homo sapiens
cattctgatcttttt

SEQ ID NO: 436490 - DNA, 15 bp, Homo sapiens
tcattctgatctttt

SEQ ID NO: 436491 - DNA, 15 bp, Homo sapiens
gtcattctgatcttt

SEQ ID NO: 436492 - DNA, 15 bp, Homo sapiens
tgtcattctgatctt

SEQ ID NO: 436493 - DNA, 15 bp, Homo sapiens
ctgtcattctgatct

SEQ ID NO: 436494 - DNA, 15 bp, Homo sapiens
tctgtcattctgatc

SEQ ID NO: 436495 - DNA, 15 bp, Homo sapiens
atctgtcattctgat

SEQ ID NO: 436496 - DNA, 15 bp, Homo sapiens
tatctgtcattctga

SEQ ID NO: 436497 - DNA, 15 bp, Homo sapiens
ctatctgtcattctg

SEQ ID NO: 436498 - DNA, 15 bp, Homo sapiens
gctatctgtcattct

SEQ ID NO: 436499 - DNA, 15 bp, Homo sapiens
agctatctgtcattc

SEQ ID NO: 436500 - DNA, 15 bp, Homo sapiens
tagctatctgtcatt

SEQ ID NO: 436501 - DNA, 15 bp, Homo sapiens
ttagctatctgtcat

SEQ ID NO: 436502 - DNA, 15 bp, Homo sapiens
tttagctatctgtca

SEQ ID NO: 436503 - DNA, 15 bp, Homo sapiens
atttagctatctgtc

SEQ ID NO: 436504 - DNA, 15 bp, Homo sapiens
tatttagctatctgt

SEQ ID NO: 436505 - DNA, 15 bp, Homo sapiens
ttatttagctatctg

SEQ ID NO: 436506 - DNA, 15 bp, Homo sapiens
cttatttagctatct

SEQ ID NO: 436507 - DNA, 15 bp, Homo sapiens
acttatttagctatc

SEQ ID NO: 436508 - DNA, 15 bp, Homo sapiens
tacttatttagctat

SEQ ID NO: 436509 - DNA, 15 bp, Homo sapiens
gtacttatttagcta

SEQ ID NO: 436510 - DNA, 15 bp, Homo sapiens
cgtacttatttagct

SEQ ID NO: 436511 - DNA, 15 bp, Homo sapiens
acgtacttatttagc

SEQ ID NO: 436512 - DNA, 15 bp, Homo sapiens
tacgtacttatttag

SEQ ID NO: 436513 - DNA, 15 bp, Homo sapiens
gtacgtacttattta

SEQ ID NO: 436514 - DNA, 15 bp, Homo sapiens
tgtacgtacttattt

SEQ ID NO: 436515 - DNA, 15 bp, Homo sapiens
ttgtacgtacttatt

SEQ ID NO: 436516 - DNA, 15 bp, Homo sapiens
cttgtacgtacttat

SEQ ID NO: 436517 - DNA, 15 bp, Homo sapiens
acttgtacgtactta

SEQ ID NO: 436518 - DNA, 15 bp, Homo sapiens
gacttgtacgtactt

SEQ ID NO: 436519 - DNA, 15 bp, Homo sapiens
tgacttgtacgtact

SEQ ID NO: 436520 - DNA, 15 bp, Homo sapiens
ctgacttgtacgtac

SEQ ID NO: 436521 - DNA, 15 bp, Homo sapiens
cctgacttgtacgta

SEQ ID NO: 436522 - DNA, 15 bp, Homo sapiens
acctgacttgtacgt

SEQ ID NO: 436523 - DNA, 15 bp, Homo sapiens
tacctgacttgtacg

SEQ ID NO: 436524 - DNA, 15 bp, Homo sapiens
atacctgacttgtac

SEQ ID NO: 436525 - DNA, 15 bp, Homo sapiens
tatacctgacttgta

SEQ ID NO: 436526 - DNA, 15 bp, Homo sapiens
ttatacctgacttgt

SEQ ID NO: 436527 - DNA, 15 bp, Homo sapiens
tttatacctgacttg

SEQ ID NO: 436528 - DNA, 15 bp, Homo sapiens
gtttatacctgactt

SEQ ID NO: 436529 - DNA, 15 bp, Homo sapiens
agtttatacctgact

SEQ ID NO: 436530 - DNA, 15 bp, Homo sapiens
aagtttatacctgac

SEQ ID NO: 436531 - DNA, 15 bp, Homo sapiens
taagtttatacctga

SEQ ID NO: 436532 - DNA, 15 bp, Homo sapiens
ctaagtttatacctg

SEQ ID NO: 436533 - DNA, 15 bp, Homo sapiens
tctaagtttatacct

SEQ ID NO: 436534 - DNA, 15 bp, Homo sapiens
ttctaagtttatacc

SEQ ID NO: 436535 - DNA, 15 bp, Homo sapiens
cttctaagtttatac

SEQ ID NO: 436536 - DNA, 15 bp, Homo sapiens
gcttctaagtttata

SEQ ID NO: 436537 - DNA, 15 bp, Homo sapiens
tgcttctaagtttat

SEQ ID NO: 436538 - DNA, 15 bp, Homo sapiens
ctgcttctaagttta

SEQ ID NO: 436539 - DNA, 15 bp, Homo sapiens
cctgcttctaagttt

SEQ ID NO: 436540 - DNA, 15 bp, Homo sapiens
acctgcttctaagtt

SEQ ID NO: 436541 - DNA, 15 bp, Homo sapiens
aacctgcttctaagt

SEQ ID NO: 436542 - DNA, 15 bp, Homo sapiens
aaacctgcttctaag

SEQ ID NO: 436543 - DNA, 15 bp, Homo sapiens
aaaacctgcttctaa

SEQ ID NO: 436544 - DNA, 15 bp, Homo sapiens
gaaaacctgcttcta

SEQ ID NO: 436545 - DNA, 15 bp, Homo sapiens
tgaaaacctgcttct

SEQ ID NO: 436546 - DNA, 15 bp, Homo sapiens
ctgaaaacctgcttc

SEQ ID NO: 436547 - DNA, 15 bp, Homo sapiens
cctgaaaacctgctt

SEQ ID NO: 436548 - DNA, 15 bp, Homo sapiens
ccctgaaaacctgct

SEQ ID NO: 436549 - DNA, 15 bp, Homo sapiens
accctgaaaacctgc

SEQ ID NO: 436550 - DNA, 15 bp, Homo sapiens
caccctgaaaacctg

SEQ ID NO: 436551 - DNA, 15 bp, Homo sapiens
ccaccctgaaaacct

SEQ ID NO: 436552 - DNA, 15 bp, Homo sapiens
gccaccctgaaaacc

SEQ ID NO: 436553 - DNA, 15 bp, Homo sapiens
agccaccctgaaaac

SEQ ID NO: 436554 - DNA, 15 bp, Homo sapiens
tagccaccctgaaaa

SEQ ID NO: 436555 - DNA, 15 bp, Homo sapiens
ttagccaccctgaaa

SEQ ID NO: 436556 - DNA, 15 bp, Homo sapiens
tttagccaccctgaa

SEQ ID NO: 436557 - DNA, 15 bp, Homo sapiens
gtttagccaccctga

SEQ ID NO: 436558 - DNA, 15 bp, Homo sapiens
tgtttagccaccctg

SEQ ID NO: 436559 - DNA, 15 bp, Homo sapiens
gtgtttagccaccct

SEQ ID NO: 436560 - DNA, 15 bp, Homo sapiens
ggtgtttagccaccc

SEQ ID NO: 436561 - DNA, 15 bp, Homo sapiens
tggtgtttagccacc

SEQ ID NO: 436562 - DNA, 15 bp, Homo sapiens
ctggtgtttagccac

SEQ ID NO: 436563 - DNA, 15 bp, Homo sapiens
tctggtgtttagcca

SEQ ID NO: 436564 - DNA, 15 bp, Homo sapiens
ctctggtgtttagcc

SEQ ID NO: 436565 - DNA, 15 bp, Homo sapiens
cctctggtgtttagc

SEQ ID NO: 436566 - DNA, 15 bp, Homo sapiens
tcctctggtgtttag

SEQ ID NO: 436567 - DNA, 15 bp, Homo sapiens
ttcctctggtgttta

SEQ ID NO: 436568 - DNA, 15 bp, Homo sapiens
cttcctctggtgttt

SEQ ID NO: 436569 - DNA, 15 bp, Homo sapiens
gcttcctctggtgtt

SEQ ID NO: 436570 - DNA, 15 bp, Homo sapiens
agcttcctctggtgt

SEQ ID NO: 436571 - DNA, 15 bp, Homo sapiens
tagcttcctctggtg

SEQ ID NO: 436572 - DNA, 15 bp, Homo sapiens
ttagcttcctctggt

SEQ ID NO: 436573 - DNA, 15 bp, Homo sapiens
tttagcttcctctgg

SEQ ID NO: 436574 - DNA, 15 bp, Homo sapiens
ctttagcttcctctg

SEQ ID NO: 436575 - DNA, 15 bp, Homo sapiens
actttagcttcctct

SEQ ID NO: 436576 - DNA, 15 bp, Homo sapiens
gactttagcttcctc

SEQ ID NO: 436577 - DNA, 15 bp, Homo sapiens
agactttagcttcct

SEQ ID NO: 436578 - DNA, 15 bp, Homo sapiens
gagactttagcttcc

SEQ ID NO: 436579 - DNA, 15 bp, Homo sapiens
ggagactttagcttc

SEQ ID NO: 436580 - DNA, 15 bp, Homo sapiens
gggagactttagctt

SEQ ID NO: 436581 - DNA, 15 bp, Homo sapiens
tgggagactttagct

SEQ ID NO: 436582 - DNA, 15 bp, Homo sapiens
gtgggagactttagc

SEQ ID NO: 436583 - DNA, 15 bp, Homo sapiens
tgtgggagactttag

SEQ ID NO: 436584 - DNA, 15 bp, Homo sapiens
atgtgggagacttta

SEQ ID NO: 436585 - DNA, 15 bp, Homo sapiens
aatgtgggagacttt

SEQ ID NO: 436586 - DNA, 15 bp, Homo sapiens
taatgtgggagactt

SEQ ID NO: 436587 - DNA, 15 bp, Homo sapiens
gtaatgtgggagact

SEQ ID NO: 436588 - DNA, 15 bp, Homo sapiens
tgtaatgtgggagac

SEQ ID NO: 436589 - DNA, 15 bp, Homo sapiens
ctgtaatgtgggaga

SEQ ID NO: 436590 - DNA, 15 bp, Homo sapiens
cctgtaatgtgggag

SEQ ID NO: 436591 - DNA, 15 bp, Homo sapiens
tcctgtaatgtggga

SEQ ID NO: 436592 - DNA, 15 bp, Homo sapiens
atcctgtaatgtggg

SEQ ID NO: 436593 - DNA, 15 bp, Homo sapiens
aatcctgtaatgtgg

SEQ ID NO: 436594 - DNA, 15 bp, Homo sapiens
aaatcctgtaatgtg

SEQ ID NO: 436595 - DNA, 15 bp, Homo sapiens
taaatcctgtaatgt

SEQ ID NO: 436596 - DNA, 15 bp, Homo sapiens
ttaaatcctgtaatg

SEQ ID NO: 436597 - DNA, 15 bp, Homo sapiens
attaaatcctgtaat

SEQ ID NO: 436598 - DNA, 15 bp, Homo sapiens
cattaaatcctgtaa

SEQ ID NO: 436599 - DNA, 15 bp, Homo sapiens
acattaaatcctgta

SEQ ID NO: 436600 - DNA, 15 bp, Homo sapiens
tacattaaatcctgt

SEQ ID NO: 436601 - DNA, 15 bp, Homo sapiens
atacattaaatcctg

SEQ ID NO: 436602 - DNA, 15 bp, Homo sapiens
catacattaaatcct

SEQ ID NO: 436603 - DNA, 15 bp, Homo sapiens
tcatacattaaatcc

SEQ ID NO: 436604 - DNA, 15 bp, Homo sapiens
gtcatacattaaatc

SEQ ID NO: 436605 - DNA, 15 bp, Homo sapiens
agtcatacattaaat

SEQ ID NO: 436606 - DNA, 15 bp, Homo sapiens
gagtcatacattaaa

SEQ ID NO: 436607 - DNA, 15 bp, Homo sapiens
agagtcatacattaa

SEQ ID NO: 436608 - DNA, 15 bp, Homo sapiens
tagagtcatacatta

SEQ ID NO: 436609 - DNA, 15 bp, Homo sapiens
atagagtcatacatt

SEQ ID NO: 436610 - DNA, 15 bp, Homo sapiens
aatagagtcatacat

SEQ ID NO: 436611 - DNA, 15 bp, Homo sapiens
caatagagtcataca

SEQ ID NO: 436612 - DNA, 15 bp, Homo sapiens
acaatagagtcatac

SEQ ID NO: 436613 - DNA, 15 bp, Homo sapiens
gacaatagagtcata

SEQ ID NO: 436614 - DNA, 15 bp, Homo sapiens
ggacaatagagtcat

SEQ ID NO: 436615 - DNA, 15 bp, Homo sapiens
tggacaatagagtca

SEQ ID NO: 436616 - DNA, 15 bp, Homo sapiens
ttggacaatagagtc

SEQ ID NO: 436617 - DNA, 15 bp, Homo sapiens
tttggacaatagagt

SEQ ID NO: 436618 - DNA, 15 bp, Homo sapiens
ttttggacaatagag

SEQ ID NO: 436619 - DNA, 15 bp, Homo sapiens
tttttggacaataga

SEQ ID NO: 436620 - DNA, 15 bp, Homo sapiens
ttttttggacaatag

SEQ ID NO: 436621 - DNA, 15 bp, Homo sapiens
tttttttggacaata

SEQ ID NO: 436622 - DNA, 15 bp, Homo sapiens
gtttttttggacaat

SEQ ID NO: 436623 - DNA, 15 bp, Homo sapiens
tgtttttttggacaa

SEQ ID NO: 436624 - DNA, 15 bp, Homo sapiens
ctgtttttttggaca

SEQ ID NO: 436625 - DNA, 15 bp, Homo sapiens
actgtttttttggac

SEQ ID NO: 436626 - DNA, 15 bp, Homo sapiens
cactgtttttttgga

SEQ ID NO: 436627 - DNA, 15 bp, Homo sapiens
tcactgtttttttgg

SEQ ID NO: 436628 - DNA, 15 bp, Homo sapiens
ttcactgtttttttg

SEQ ID NO: 436629 - DNA, 15 bp, Homo sapiens
cttcactgttttttt

SEQ ID NO: 436630 - DNA, 15 bp, Homo sapiens
tcttcactgtttttt

SEQ ID NO: 436631 - DNA, 15 bp, Homo sapiens
ttcttcactgttttt

SEQ ID NO: 436632 - DNA, 15 bp, Homo sapiens
attcttcactgtttt

SEQ ID NO: 436633 - DNA, 15 bp, Homo sapiens
cattcttcactgttt

SEQ ID NO: 436634 - DNA, 15 bp, Homo sapiens
tcattcttcactgtt

SEQ ID NO: 436635 - DNA, 15 bp, Homo sapiens
atcattcttcactgt

SEQ ID NO: 436636 - DNA, 15 bp, Homo sapiens
catcattcttcactg

SEQ ID NO: 436637 - DNA, 15 bp, Homo sapiens
tcatcattcttcact

SEQ ID NO: 436638 - DNA, 15 bp, Homo sapiens
atcatcattcttcac

SEQ ID NO: 436639 - DNA, 15 bp, Homo sapiens
tatcatcattcttca

SEQ ID NO: 436640 - DNA, 15 bp, Homo sapiens
ctatcatcattcttc

SEQ ID NO: 436641 - DNA, 15 bp, Homo sapiens
cctatcatcattctt

SEQ ID NO: 436642 - DNA, 15 bp, Homo sapiens
ccctatcatcattct

SEQ ID NO: 436643 - DNA, 15 bp, Homo sapiens
tccctatcatcattc

SEQ ID NO: 436644 - DNA, 15 bp, Homo sapiens
ttccctatcatcatt

SEQ ID NO: 436645 - DNA, 15 bp, Homo sapiens
tttccctatcatcat

SEQ ID NO: 436646 - DNA, 15 bp, Homo sapiens
ctttccctatcatca

SEQ ID NO: 436647 - DNA, 15 bp, Homo sapiens
actttccctatcatc

SEQ ID NO: 436648 - DNA, 15 bp, Homo sapiens
tactttccctatcat

SEQ ID NO: 436649 - DNA, 15 bp, Homo sapiens
ttactttccctatca

SEQ ID NO: 436650 - DNA, 15 bp, Homo sapiens
tttactttccctatc

SEQ ID NO: 436651 - DNA, 15 bp, Homo sapiens
ttttactttccctat

SEQ ID NO: 436652 - DNA, 15 bp, Homo sapiens
cttttactttcccta

SEQ ID NO: 436653 - DNA, 15 bp, Homo sapiens
gcttttactttccct

SEQ ID NO: 436654 - DNA, 15 bp, Homo sapiens
tgcttttactttccc

SEQ ID NO: 436655 - DNA, 15 bp, Homo sapiens
ctgcttttactttcc

SEQ ID NO: 436656 - DNA, 15 bp, Homo sapiens
cctgcttttactttc

SEQ ID NO: 436657 - DNA, 15 bp, Homo sapiens
acctgcttttacttt

SEQ ID NO: 436658 - DNA, 15 bp, Homo sapiens
tacctgcttttactt

SEQ ID NO: 436659 - DNA, 15 bp, Homo sapiens
atacctgcttttact

SEQ ID NO: 436660 - DNA, 15 bp, Homo sapiens
gatacctgcttttac

SEQ ID NO: 436661 - DNA, 15 bp, Homo sapiens
tgatacctgctttta

SEQ ID NO: 436662 - DNA, 15 bp, Homo sapiens
gtgatacctgctttt

SEQ ID NO: 436663 - DNA, 15 bp, Homo sapiens
tgtgatacctgcttt

SEQ ID NO: 436664 - DNA, 15 bp, Homo sapiens
gtgtgatacctgctt

SEQ ID NO: 436665 - DNA, 15 bp, Homo sapiens
agtgtgatacctgct

SEQ ID NO: 436666 - DNA, 15 bp, Homo sapiens
tagtgtgatacctgc

SEQ ID NO: 436667 - DNA, 15 bp, Homo sapiens
ttagtgtgatacctg

SEQ ID NO: 436668 - DNA, 15 bp, Homo sapiens
gttagtgtgatacct

SEQ ID NO: 436669 - DNA, 15 bp, Homo sapiens
tgttagtgtgatacc

SEQ ID NO: 436670 - DNA, 15 bp, Homo sapiens
atgttagtgtgatac

SEQ ID NO: 436671 - DNA, 15 bp, Homo sapiens
aatgttagtgtgata

SEQ ID NO: 436672 - DNA, 15 bp, Homo sapiens
taatgttagtgtgat

SEQ ID NO: 436673 - DNA, 15 bp, Homo sapiens
ataatgttagtgtga

SEQ ID NO: 436674 - DNA, 15 bp, Homo sapiens
cataatgttagtgtg

SEQ ID NO: 436675 - DNA, 15 bp, Homo sapiens
ccataatgttagtgt

SEQ ID NO: 436676 - DNA, 15 bp, Homo sapiens
cccataatgttagtg

SEQ ID NO: 436677 - DNA, 15 bp, Homo sapiens
tcccataatgttagt

SEQ ID NO: 436678 - DNA, 15 bp, Homo sapiens
atcccataatgttag

SEQ ID NO: 436679 - DNA, 15 bp, Homo sapiens
tatcccataatgtta

SEQ ID NO: 436680 - DNA, 15 bp, Homo sapiens
ctatcccataatgtt

SEQ ID NO: 436681 - DNA, 15 bp, Homo sapiens
actatcccataatgt

SEQ ID NO: 436682 - DNA, 15 bp, Homo sapiens
cactatcccataatg

SEQ ID NO: 436683 - DNA, 15 bp, Homo sapiens
tcactatcccataat

SEQ ID NO: 436684 - DNA, 15 bp, Homo sapiens
gtcactatcccataa

SEQ ID NO: 436685 - DNA, 15 bp, Homo sapiens
tgtcactatcccata

SEQ ID NO: 436686 - DNA, 15 bp, Homo sapiens
ttgtcactatcccat

SEQ ID NO: 436687 - DNA, 15 bp, Homo sapiens
cttgtcactatccca

SEQ ID NO: 436688 - DNA, 15 bp, Homo sapiens
ccttgtcactatccc

SEQ ID NO: 436689 - DNA, 15 bp, Homo sapiens
tccttgtcactatcc

SEQ ID NO: 436690 - DNA, 15 bp, Homo sapiens
gtccttgtcactatc

SEQ ID NO: 436691 - DNA, 15 bp, Homo sapiens
tgtccttgtcactat

SEQ ID NO: 436692 - DNA, 15 bp, Homo sapiens
atgtccttgtcacta

SEQ ID NO: 436693 - DNA, 15 bp, Homo sapiens
catgtccttgtcact

SEQ ID NO: 436694 - DNA, 15 bp, Homo sapiens
ccatgtccttgtcac

SEQ ID NO: 436695 - DNA, 15 bp, Homo sapiens
accatgtccttgtca

SEQ ID NO: 436696 - DNA, 15 bp, Homo sapiens
taccatgtccttgtc

SEQ ID NO: 436697 - DNA, 15 bp, Homo sapiens
ataccatgtccttgt

SEQ ID NO: 436698 - DNA, 15 bp, Homo sapiens
aataccatgtccttg

SEQ ID NO: 436699 - DNA, 15 bp, Homo sapiens
caataccatgtcctt

SEQ ID NO: 436700 - DNA, 15 bp, Homo sapiens
gcaataccatgtcct

SEQ ID NO: 436701 - DNA, 15 bp, Homo sapiens
tgcaataccatgtcc

SEQ ID NO: 436702 - DNA, 15 bp, Homo sapiens
ctgcaataccatgtc

SEQ ID NO: 436703 - DNA, 15 bp, Homo sapiens
cctgcaataccatgt

SEQ ID NO: 436704 - DNA, 15 bp, Homo sapiens
acctgcaataccatg

SEQ ID NO: 436705 - DNA, 15 bp, Homo sapiens
aacctgcaataccat

SEQ ID NO: 436706 - DNA, 15 bp, Homo sapiens
gaacctgcaatacca

SEQ ID NO: 436707 - DNA, 15 bp, Homo sapiens
tgaacctgcaatacc

SEQ ID NO: 436708 - DNA, 15 bp, Homo sapiens
ctgaacctgcaatac

SEQ ID NO: 436709 - DNA, 15 bp, Homo sapiens
actgaacctgcaata

SEQ ID NO: 436710 - DNA, 15 bp, Homo sapiens
aactgaacctgcaat

SEQ ID NO: 436711 - DNA, 15 bp, Homo sapiens
gaactgaacctgcaa

SEQ ID NO: 436712 - DNA, 15 bp, Homo sapiens
agaactgaacctgca

SEQ ID NO: 436713 - DNA, 15 bp, Homo sapiens
cagaactgaacctgc

SEQ ID NO: 436714 - DNA, 15 bp, Homo sapiens
gcagaactgaacctg

SEQ ID NO: 436715 - DNA, 15 bp, Homo sapiens
ggcagaactgaacct

SEQ ID NO: 436716 - DNA, 15 bp, Homo sapiens
tggcagaactgaacc

SEQ ID NO: 436717 - DNA, 15 bp, Homo sapiens
gtggcagaactgaac

SEQ ID NO: 436718 - DNA, 15 bp, Homo sapiens
agtggcagaactgaa

SEQ ID NO: 436719 - DNA, 15 bp, Homo sapiens
gagtggcagaactga

SEQ ID NO: 436720 - DNA, 15 bp, Homo sapiens
tgagtggcagaactg

SEQ ID NO: 436721 - DNA, 15 bp, Homo sapiens
atgagtggcagaact

SEQ ID NO: 436722 - DNA, 15 bp, Homo sapiens
aatgagtggcagaac

SEQ ID NO: 436723 - DNA, 15 bp, Homo sapiens
aaatgagtggcagaa

SEQ ID NO: 436724 - DNA, 15 bp, Homo sapiens
caaatgagtggcaga

SEQ ID NO: 436725 - DNA, 15 bp, Homo sapiens
acaaatgagtggcag

SEQ ID NO: 436726 - DNA, 15 bp, Homo sapiens
aacaaatgagtggca

SEQ ID NO: 436727 - DNA, 15 bp, Homo sapiens
taacaaatgagtggc

SEQ ID NO: 436728 - DNA, 15 bp, Homo sapiens
ctaacaaatgagtgg

SEQ ID NO: 436729 - DNA, 15 bp, Homo sapiens
cctaacaaatgagtg

SEQ ID NO: 436730 - DNA, 15 bp, Homo sapiens
acctaacaaatgagt

SEQ ID NO: 436731 - DNA, 15 bp, Homo sapiens
cacctaacaaatgag

SEQ ID NO: 436732 - DNA, 15 bp, Homo sapiens
ccacctaacaaatga

SEQ ID NO: 436733 - DNA, 15 bp, Homo sapiens
gccacctaacaaatg

SEQ ID NO: 436734 - DNA, 15 bp, Homo sapiens
agccacctaacaaat

SEQ ID NO: 436735 - DNA, 15 bp, Homo sapiens
gagccacctaacaaa

SEQ ID NO: 436736 - DNA, 15 bp, Homo sapiens
agagccacctaacaa

SEQ ID NO: 436737 - DNA, 15 bp, Homo sapiens
aagagccacctaaca

SEQ ID NO: 436738 - DNA, 15 bp, Homo sapiens
taagagccacctaac

SEQ ID NO: 436739 - DNA, 15 bp, Homo sapiens
ttaagagccacctaa

SEQ ID NO: 436740 - DNA, 15 bp, Homo sapiens
cttaagagccaccta

SEQ ID NO: 436741 - DNA, 15 bp, Homo sapiens
tcttaagagccacct

SEQ ID NO: 436742 - DNA, 15 bp, Homo sapiens
ttcttaagagccacc

SEQ ID NO: 436743 - DNA, 15 bp, Homo sapiens
tttcttaagagccac

SEQ ID NO: 436744 - DNA, 15 bp, Homo sapiens
ttttcttaagagcca

SEQ ID NO: 436745 - DNA, 15 bp, Homo sapiens
attttcttaagagcc

SEQ ID NO: 436746 - DNA, 15 bp, Homo sapiens
gattttcttaagagc

SEQ ID NO: 436747 - DNA, 15 bp, Homo sapiens
cgattttcttaagag

SEQ ID NO: 436748 - DNA, 15 bp, Homo sapiens
acgattttcttaaga

SEQ ID NO: 436749 - DNA, 15 bp, Homo sapiens
aacgattttcttaag

SEQ ID NO: 436750 - DNA, 15 bp, Homo sapiens
aaacgattttcttaa

SEQ ID NO: 436751 - DNA, 15 bp, Homo sapiens
taaacgattttctta

SEQ ID NO: 436752 - DNA, 15 bp, Homo sapiens
ttaaacgattttctt

SEQ ID NO: 436753 - DNA, 15 bp, Homo sapiens
gttaaacgattttct

SEQ ID NO: 436754 - DNA, 15 bp, Homo sapiens
agttaaacgattttc

SEQ ID NO: 436755 - DNA, 15 bp, Homo sapiens
aagttaaacgatttt

SEQ ID NO: 436756 - DNA, 15 bp, Homo sapiens
aaagttaaacgattt

SEQ ID NO: 436757 - DNA, 15 bp, Homo sapiens
caaagttaaacgatt

SEQ ID NO: 436758 - DNA, 15 bp, Homo sapiens
gcaaagttaaacgat

SEQ ID NO: 436759 - DNA, 15 bp, Homo sapiens
agcaaagttaaacga

SEQ ID NO: 436760 - DNA, 15 bp, Homo sapiens
cagcaaagttaaacg

SEQ ID NO: 436761 - DNA, 15 bp, Homo sapiens
ccagcaaagttaaac

SEQ ID NO: 436762 - DNA, 15 bp, Homo sapiens
cccagcaaagttaaa

SEQ ID NO: 436763 - DNA, 15 bp, Homo sapiens
gcccagcaaagttaa

SEQ ID NO: 436764 - DNA, 15 bp, Homo sapiens
ggcccagcaaagtta

SEQ ID NO: 436765 - DNA, 15 bp, Homo sapiens
gggcccagcaaagtt

SEQ ID NO: 436766 - DNA, 15 bp, Homo sapiens
tgggcccagcaaagt

SEQ ID NO: 436767 - DNA, 15 bp, Homo sapiens
atgggcccagcaaag

SEQ ID NO: 436768 - DNA, 15 bp, Homo sapiens
tatgggcccagcaaa

SEQ ID NO: 436769 - DNA, 15 bp, Homo sapiens
atatgggcccagcaa

SEQ ID NO: 436770 - DNA, 15 bp, Homo sapiens
aatatgggcccagca

SEQ ID NO: 436771 - DNA, 15 bp, Homo sapiens
aaatatgggcccagc

SEQ ID NO: 436772 - DNA, 15 bp, Homo sapiens
gaaatatgggcccag

SEQ ID NO: 436773 - DNA, 15 bp, Homo sapiens
agaaatatgggccca

SEQ ID NO: 436774 - DNA, 15 bp, Homo sapiens
gagaaatatgggccc

SEQ ID NO: 436775 - DNA, 15 bp, Homo sapiens
tgagaaatatgggcc

SEQ ID NO: 436776 - DNA, 15 bp, Homo sapiens
gtgagaaatatgggc

SEQ ID NO: 436777 - DNA, 15 bp, Homo sapiens
ggtgagaaatatggg

SEQ ID NO: 436778 - DNA, 15 bp, Homo sapiens
aggtgagaaatatgg

SEQ ID NO: 436779 - DNA, 15 bp, Homo sapiens
taggtgagaaatatg

SEQ ID NO: 436780 - DNA, 15 bp, Homo sapiens
ataggtgagaaatat

SEQ ID NO: 436781 - DNA, 15 bp, Homo sapiens
tataggtgagaaata

SEQ ID NO: 436782 - DNA, 15 bp, Homo sapiens
ttataggtgagaaat

SEQ ID NO: 436783 - DNA, 15 bp, Homo sapiens
tttataggtgagaaa

SEQ ID NO: 436784 - DNA, 15 bp, Homo sapiens
ttttataggtgagaa

SEQ ID NO: 436785 - DNA, 15 bp, Homo sapiens
cttttataggtgaga

SEQ ID NO: 436786 - DNA, 15 bp, Homo sapiens
tcttttataggtgag

SEQ ID NO: 436787 - DNA, 15 bp, Homo sapiens
ttcttttataggtga

SEQ ID NO: 436788 - DNA, 15 bp, Homo sapiens
tttcttttataggtg

SEQ ID NO: 436789 - DNA, 15 bp, Homo sapiens
ttttcttttataggt

SEQ ID NO: 436790 - DNA, 15 bp, Homo sapiens
tttttcttttatagg

SEQ ID NO: 436791 - DNA, 15 bp, Homo sapiens
ctttttcttttatag

SEQ ID NO: 436792 - DNA, 15 bp, Homo sapiens
tctttttcttttata

SEQ ID NO: 436793 - DNA, 15 bp, Homo sapiens
atctttttcttttat

SEQ ID NO: 436794 - DNA, 15 bp, Homo sapiens
aatctttttctttta

SEQ ID NO: 436795 - DNA, 15 bp, Homo sapiens
aaatctttttctttt

SEQ ID NO: 436796 - DNA, 15 bp, Homo sapiens
aaaatctttttcttt

SEQ ID NO: 436797 - DNA, 15 bp, Homo sapiens
caaaatctttttctt

SEQ ID NO: 436798 - DNA, 15 bp, Homo sapiens
ccaaaatctttttct

SEQ ID NO: 436799 - DNA, 15 bp, Homo sapiens
cccaaaatctttttc

SEQ ID NO: 436800 - DNA, 15 bp, Homo sapiens
tcccaaaatcttttt

SEQ ID NO: 436801 - DNA, 15 bp, Homo sapiens
ctcccaaaatctttt

SEQ ID NO: 436802 - DNA, 15 bp, Homo sapiens
cctcccaaaatcttt

SEQ ID NO: 436803 - DNA, 15 bp, Homo sapiens
acctcccaaaatctt

SEQ ID NO: 436804 - DNA, 15 bp, Homo sapiens
aacctcccaaaatct

SEQ ID NO: 436805 - DNA, 15 bp, Homo sapiens
caacctcccaaaatc

SEQ ID NO: 436806 - DNA, 15 bp, Homo sapiens
tcaacctcccaaaat

SEQ ID NO: 436807 - DNA, 15 bp, Homo sapiens
gtcaacctcccaaaa

SEQ ID NO: 436808 - DNA, 15 bp, Homo sapiens
ggtcaacctcccaaa

SEQ ID NO: 436809 - DNA, 15 bp, Homo sapiens
aggtcaacctcccaa

SEQ ID NO: 436810 - DNA, 15 bp, Homo sapiens
aaggtcaacctccca

SEQ ID NO: 436811 - DNA, 15 bp, Homo sapiens
caaggtcaacctccc

SEQ ID NO: 436812 - DNA, 15 bp, Homo sapiens
ccaaggtcaacctcc

SEQ ID NO: 436813 - DNA, 15 bp, Homo sapiens
gccaaggtcaacctc

SEQ ID NO: 436814 - DNA, 15 bp, Homo sapiens
tgccaaggtcaacct

SEQ ID NO: 436815 - DNA, 15 bp, Homo sapiens
ctgccaaggtcaacc

SEQ ID NO: 436816 - DNA, 15 bp, Homo sapiens
actgccaaggtcaac

SEQ ID NO: 436817 - DNA, 15 bp, Homo sapiens
gactgccaaggtcaa

SEQ ID NO: 436818 - DNA, 15 bp, Homo sapiens
ggactgccaaggtca

SEQ ID NO: 436819 - DNA, 15 bp, Homo sapiens
aggactgccaaggtc

SEQ ID NO: 436820 - DNA, 15 bp, Homo sapiens
caggactgccaaggt

SEQ ID NO: 436821 - DNA, 15 bp, Homo sapiens
acaggactgccaagg

SEQ ID NO: 436822 - DNA, 15 bp, Homo sapiens
tacaggactgccaag

SEQ ID NO: 436823 - DNA, 15 bp, Homo sapiens
gtacaggactgccaa

SEQ ID NO: 436824 - DNA, 15 bp, Homo sapiens
agtacaggactgcca

SEQ ID NO: 436825 - DNA, 15 bp, Homo sapiens
cagtacaggactgcc

SEQ ID NO: 436826 - DNA, 15 bp, Homo sapiens
acagtacaggactgc

SEQ ID NO: 436827 - DNA, 15 bp, Homo sapiens
aacagtacaggactg

SEQ ID NO: 436828 - DNA, 15 bp, Homo sapiens
caacagtacaggact

SEQ ID NO: 436829 - DNA, 15 bp, Homo sapiens
acaacagtacaggac

SEQ ID NO: 436830 - DNA, 15 bp, Homo sapiens
aacaacagtacagga

SEQ ID NO: 436831 - DNA, 15 bp, Homo sapiens
gaacaacagtacagg

SEQ ID NO: 436832 - DNA, 15 bp, Homo sapiens
tgaacaacagtacag

SEQ ID NO: 436833 - DNA, 15 bp, Homo sapiens
ctgaacaacagtaca

SEQ ID NO: 436834 - DNA, 15 bp, Homo sapiens
actgaacaacagtac

SEQ ID NO: 436835 - DNA, 15 bp, Homo sapiens
aactgaacaacagta

SEQ ID NO: 436836 - DNA, 15 bp, Homo sapiens
aaactgaacaacagt

SEQ ID NO: 436837 - DNA, 15 bp, Homo sapiens
aaaactgaacaacag

SEQ ID NO: 436838 - DNA, 15 bp, Homo sapiens
aaaaactgaacaaca

SEQ ID NO: 436839 - DNA, 15 bp, Homo sapiens
gaaaaactgaacaac

SEQ ID NO: 436840 - DNA, 15 bp, Homo sapiens
cgaaaaactgaacaa

SEQ ID NO: 436841 - DNA, 15 bp, Homo sapiens
acgaaaaactgaaca

SEQ ID NO: 436842 - DNA, 15 bp, Homo sapiens
gacgaaaaactgaac

SEQ ID NO: 436843 - DNA, 15 bp, Homo sapiens
agacgaaaaactgaa

SEQ ID NO: 436844 - DNA, 15 bp, Homo sapiens
cagacgaaaaactga

SEQ ID NO: 436845 - DNA, 15 bp, Homo sapiens
acagacgaaaaactg

SEQ ID NO: 436846 - DNA, 15 bp, Homo sapiens
tacagacgaaaaact

SEQ ID NO: 436847 - DNA, 15 bp, Homo sapiens
atacagacgaaaaac

SEQ ID NO: 436848 - DNA, 15 bp, Homo sapiens
gatacagacgaaaaa

SEQ ID NO: 436849 - DNA, 15 bp, Homo sapiens
agatacagacgaaaa

SEQ ID NO: 436850 - DNA, 15 bp, Homo sapiens
aagatacagacgaaa

SEQ ID NO: 436851 - DNA, 15 bp, Homo sapiens
caagatacagacgaa

SEQ ID NO: 436852 - DNA, 15 bp, Homo sapiens
acaagatacagacga

SEQ ID NO: 436853 - DNA, 15 bp, Homo sapiens
cacaagatacagacg

SEQ ID NO: 436854 - DNA, 15 bp, Homo sapiens
ccacaagatacagac

SEQ ID NO: 436855 - DNA, 15 bp, Homo sapiens
accacaagatacaga

SEQ ID NO: 436856 - DNA, 15 bp, Homo sapiens
taccacaagatacag

SEQ ID NO: 436857 - DNA, 15 bp, Homo sapiens
ctaccacaagataca

SEQ ID NO: 436858 - DNA, 15 bp, Homo sapiens
actaccacaagatac

SEQ ID NO: 436859 - DNA, 15 bp, Homo sapiens
tactaccacaagata

SEQ ID NO: 436860 - DNA, 15 bp, Homo sapiens
gtactaccacaagat

SEQ ID NO: 436861 - DNA, 15 bp, Homo sapiens
agtactaccacaaga

SEQ ID NO: 436862 - DNA, 15 bp, Homo sapiens
cagtactaccacaag

SEQ ID NO: 436863 - DNA, 15 bp, Homo sapiens
acagtactaccacaa

SEQ ID NO: 436864 - DNA, 15 bp, Homo sapiens
aacagtactaccaca

SEQ ID NO: 436865 - DNA, 15 bp, Homo sapiens
aaacagtactaccac

SEQ ID NO: 436866 - DNA, 15 bp, Homo sapiens
aaaacagtactacca

SEQ ID NO: 436867 - DNA, 15 bp, Homo sapiens
caaaacagtactacc

SEQ ID NO: 436868 - DNA, 15 bp, Homo sapiens
tcaaaacagtactac

SEQ ID NO: 436869 - DNA, 15 bp, Homo sapiens
ctcaaaacagtacta

SEQ ID NO: 436870 - DNA, 15 bp, Homo sapiens
gctcaaaacagtact

SEQ ID NO: 436871 - DNA, 15 bp, Homo sapiens
tgctcaaaacagtac

SEQ ID NO: 436872 - DNA, 15 bp, Homo sapiens
ctgctcaaaacagta

SEQ ID NO: 436873 - DNA, 15 bp, Homo sapiens
tctgctcaaaacagt

SEQ ID NO: 436874 - DNA, 15 bp, Homo sapiens
ttctgctcaaaacag

SEQ ID NO: 436875 - DNA, 15 bp, Homo sapiens
tttctgctcaaaaca

SEQ ID NO: 436876 - DNA, 15 bp, Homo sapiens
ttttctgctcaaaac

SEQ ID NO: 436877 - DNA, 15 bp, Homo sapiens
attttctgctcaaaa

SEQ ID NO: 436878 - DNA, 15 bp, Homo sapiens
tattttctgctcaaa

SEQ ID NO: 436879 - DNA, 15 bp, Homo sapiens
atattttctgctcaa

SEQ ID NO: 436880 - DNA, 15 bp, Homo sapiens
aatattttctgctca

SEQ ID NO: 436881 - DNA, 15 bp, Homo sapiens
caatattttctgctc

SEQ ID NO: 436882 - DNA, 15 bp, Homo sapiens
acaatattttctgct

SEQ ID NO: 436883 - DNA, 15 bp, Homo sapiens
tacaatattttctgc

SEQ ID NO: 436884 - DNA, 15 bp, Homo sapiens
atacaatattttctg

SEQ ID NO: 436885 - DNA, 15 bp, Homo sapiens
aatacaatattttct

SEQ ID NO: 436886 - DNA, 15 bp, Homo sapiens
taatacaatattttc

SEQ ID NO: 436887 - DNA, 15 bp, Homo sapiens
ttaatacaatatttt

SEQ ID NO: 436888 - DNA, 15 bp, Homo sapiens
attaatacaatattt

SEQ ID NO: 436889 - DNA, 15 bp, Homo sapiens
tattaatacaatatt

SEQ ID NO: 436890 - DNA, 15 bp, Homo sapiens
gtattaatacaatat

SEQ ID NO: 436891 - DNA, 15 bp, Homo sapiens
cgtattaatacaata

SEQ ID NO: 436892 - DNA, 15 bp, Homo sapiens
acgtattaatacaat

SEQ ID NO: 436893 - DNA, 15 bp, Homo sapiens
aacgtattaatacaa

SEQ ID NO: 436894 - DNA, 15 bp, Homo sapiens
caacgtattaataca

SEQ ID NO: 436895 - DNA, 15 bp, Homo sapiens
gcaacgtattaatac

SEQ ID NO: 436896 - DNA, 15 bp, Homo sapiens
agcaacgtattaata

SEQ ID NO: 436897 - DNA, 15 bp, Homo sapiens
cagcaacgtattaat

SEQ ID NO: 436898 - DNA, 15 bp, Homo sapiens
tcagcaacgtattaa

SEQ ID NO: 436899 - DNA, 15 bp, Homo sapiens
ctcagcaacgtatta

SEQ ID NO: 436900 - DNA, 15 bp, Homo sapiens
cctcagcaacgtatt

SEQ ID NO: 436901 - DNA, 15 bp, Homo sapiens
acctcagcaacgtat

SEQ ID NO: 436902 - DNA, 15 bp, Homo sapiens
tacctcagcaacgta

SEQ ID NO: 436903 - DNA, 15 bp, Homo sapiens
atacctcagcaacgt

SEQ ID NO: 436904 - DNA, 15 bp, Homo sapiens
tatacctcagcaacg

SEQ ID NO: 436905 - DNA, 15 bp, Homo sapiens
ttatacctcagcaac

SEQ ID NO: 436906 - DNA, 15 bp, Homo sapiens
attatacctcagcaa

SEQ ID NO: 436907 - DNA, 15 bp, Homo sapiens
aattatacctcagca

SEQ ID NO: 436908 - DNA, 15 bp, Homo sapiens
taattatacctcagc

SEQ ID NO: 436909 - DNA, 15 bp, Homo sapiens
ataattatacctcag

SEQ ID NO: 436910 - DNA, 15 bp, Homo sapiens
aataattatacctca

SEQ ID NO: 436911 - DNA, 15 bp, Homo sapiens
gaataattatacctc

SEQ ID NO: 436912 - DNA, 15 bp, Homo sapiens
tgaataattatacct

SEQ ID NO: 436913 - DNA, 15 bp, Homo sapiens
atgaataattatacc

SEQ ID NO: 436914 - DNA, 15 bp, Homo sapiens
aatgaataattatac

SEQ ID NO: 436915 - DNA, 15 bp, Homo sapiens
gaatgaataattata

SEQ ID NO: 436916 - DNA, 15 bp, Homo sapiens
ggaatgaataattat

SEQ ID NO: 436917 - DNA, 15 bp, Homo sapiens
aggaatgaataatta

SEQ ID NO: 436918 - DNA, 15 bp, Homo sapiens
taggaatgaataatt

SEQ ID NO: 436919 - DNA, 15 bp, Homo sapiens
ataggaatgaataat

SEQ ID NO: 436920 - DNA, 15 bp, Homo sapiens
aataggaatgaataa

SEQ ID NO: 436921 - DNA, 15 bp, Homo sapiens
aaataggaatgaata

SEQ ID NO: 436922 - DNA, 15 bp, Homo sapiens
aaaataggaatgaat

SEQ ID NO: 436923 - DNA, 15 bp, Homo sapiens
taaaataggaatgaa

SEQ ID NO: 436924 - DNA, 15 bp, Homo sapiens
ataaaataggaatga

SEQ ID NO: 436925 - DNA, 15 bp, Homo sapiens
tataaaataggaatg

SEQ ID NO: 436926 - DNA, 15 bp, Homo sapiens
atataaaataggaat

SEQ ID NO: 436927 - DNA, 15 bp, Homo sapiens
aatataaaataggaa

SEQ ID NO: 436928 - DNA, 15 bp, Homo sapiens
aaatataaaatagga

SEQ ID NO: 436929 - DNA, 15 bp, Homo sapiens
gaaatataaaatagg

SEQ ID NO: 436930 - DNA, 15 bp, Homo sapiens
ggaaatataaaatag

SEQ ID NO: 436931 - DNA, 15 bp, Homo sapiens
gggaaatataaaata

SEQ ID NO: 436932 - DNA, 15 bp, Homo sapiens
agggaaatataaaat

SEQ ID NO: 436933 - DNA, 15 bp, Homo sapiens
aagggaaatataaaa

SEQ ID NO: 436934 - DNA, 15 bp, Homo sapiens
aaagggaaatataaa

SEQ ID NO: 436935 - DNA, 15 bp, Homo sapiens
taaagggaaatataa

SEQ ID NO: 436936 - DNA, 15 bp, Homo sapiens
ctaaagggaaatata

SEQ ID NO: 436937 - DNA, 15 bp, Homo sapiens
actaaagggaaatat

SEQ ID NO: 436938 - DNA, 15 bp, Homo sapiens
tactaaagggaaata

SEQ ID NO: 436939 - DNA, 15 bp, Homo sapiens
atactaaagggaaat

SEQ ID NO: 436940 - DNA, 15 bp, Homo sapiens
aatactaaagggaaa

SEQ ID NO: 436941 - DNA, 15 bp, Homo sapiens
aaatactaaagggaa

SEQ ID NO: 436942 - DNA, 15 bp, Homo sapiens
aaaatactaaaggga

SEQ ID NO: 436943 - DNA, 15 bp, Homo sapiens
aaaaatactaaaggg

SEQ ID NO: 436944 - DNA, 15 bp, Homo sapiens
aaaaaatactaaagg

SEQ ID NO: 436945 - DNA, 15 bp, Homo sapiens
taaaaaatactaaag

SEQ ID NO: 436946 - DNA, 15 bp, Homo sapiens
gtaaaaaatactaaa

SEQ ID NO: 436947 - DNA, 15 bp, Homo sapiens
agtaaaaaatactaa

SEQ ID NO: 436948 - DNA, 15 bp, Homo sapiens
aagtaaaaaatacta

SEQ ID NO: 436949 - DNA, 15 bp, Homo sapiens
aaagtaaaaaatact

SEQ ID NO: 436950 - DNA, 15 bp, Homo sapiens
aaaagtaaaaaatac

SEQ ID NO: 436951 - DNA, 15 bp, Homo sapiens
aaaaagtaaaaaata

SEQ ID NO: 436952 - DNA, 15 bp, Homo sapiens
taaaaagtaaaaaat

SEQ ID NO: 436953 - DNA, 15 bp, Homo sapiens
ttaaaaagtaaaaaa

SEQ ID NO: 436954 - DNA, 15 bp, Homo sapiens
tttaaaaagtaaaaa

SEQ ID NO: 436955 - DNA, 15 bp, Homo sapiens
ttttaaaaagtaaaa

SEQ ID NO: 436956 - DNA, 15 bp, Homo sapiens
cttttaaaaagtaaa

SEQ ID NO: 436957 - DNA, 15 bp, Homo sapiens
tcttttaaaaagtaa

SEQ ID NO: 436958 - DNA, 15 bp, Homo sapiens
ttcttttaaaaagta

SEQ ID NO: 436959 - DNA, 15 bp, Homo sapiens
attcttttaaaaagt

SEQ ID NO: 436960 - DNA, 15 bp, Homo sapiens
cattcttttaaaaag

SEQ ID NO: 436961 - DNA, 15 bp, Homo sapiens
acattcttttaaaaa

SEQ ID NO: 436962 - DNA, 15 bp, Homo sapiens
tacattcttttaaaa

SEQ ID NO: 436963 - DNA, 15 bp, Homo sapiens
atacattcttttaaa

SEQ ID NO: 436964 - DNA, 15 bp, Homo sapiens
gatacattcttttaa

SEQ ID NO: 436965 - DNA, 15 bp, Homo sapiens
tgatacattctttta

SEQ ID NO: 436966 - DNA, 15 bp, Homo sapiens
ttgatacattctttt

SEQ ID NO: 436967 - DNA, 15 bp, Homo sapiens
cttgatacattcttt

SEQ ID NO: 436968 - DNA, 15 bp, Homo sapiens
acttgatacattctt

SEQ ID NO: 436969 - DNA, 15 bp, Homo sapiens
gacttgatacattct

SEQ ID NO: 436970 - DNA, 15 bp, Homo sapiens
tgacttgatacattc

SEQ ID NO: 436971 - DNA, 15 bp, Homo sapiens
ttgacttgatacatt

SEQ ID NO: 436972 - DNA, 15 bp, Homo sapiens
attgacttgatacat

SEQ ID NO: 436973 - DNA, 15 bp, Homo sapiens
gattgacttgataca

SEQ ID NO: 436974 - DNA, 15 bp, Homo sapiens
ggattgacttgatac

SEQ ID NO: 436975 - DNA, 15 bp, Homo sapiens
gggattgacttgata

SEQ ID NO: 436976 - DNA, 15 bp, Homo sapiens
tgggattgacttgat

SEQ ID NO: 436977 - DNA, 15 bp, Homo sapiens
ttgggattgacttga

SEQ ID NO: 436978 - DNA, 15 bp, Homo sapiens
cttgggattgacttg

SEQ ID NO: 436979 - DNA, 15 bp, Homo sapiens
gcttgggattgactt

SEQ ID NO: 436980 - DNA, 15 bp, Homo sapiens
tgcttgggattgact

SEQ ID NO: 436981 - DNA, 15 bp, Homo sapiens
ttgcttgggattgac

SEQ ID NO: 436982 - DNA, 15 bp, Homo sapiens
tttgcttgggattga

SEQ ID NO: 436983 - DNA, 15 bp, Homo sapiens
atttgcttgggattg

SEQ ID NO: 436984 - DNA, 15 bp, Homo sapiens
gatttgcttgggatt

SEQ ID NO: 436985 - DNA, 15 bp, Homo sapiens
ggatttgcttgggat

SEQ ID NO: 436986 - DNA, 15 bp, Homo sapiens
aggatttgcttggga

SEQ ID NO: 436987 - DNA, 15 bp, Homo sapiens
caggatttgcttggg

SEQ ID NO: 436988 - DNA, 15 bp, Homo sapiens
ccaggatttgcttgg

SEQ ID NO: 436989 - DNA, 15 bp, Homo sapiens
tccaggatttgcttg

SEQ ID NO: 436990 - DNA, 15 bp, Homo sapiens
ttccaggatttgctt

SEQ ID NO: 436991 - DNA, 15 bp, Homo sapiens
tttccaggatttgct

SEQ ID NO: 436992 - DNA, 15 bp, Homo sapiens
atttccaggatttgc

SEQ ID NO: 436993 - DNA, 15 bp, Homo sapiens
tatttccaggatttg

SEQ ID NO: 436994 - DNA, 15 bp, Homo sapiens
ttatttccaggattt

SEQ ID NO: 436995 - DNA, 15 bp, Homo sapiens
attatttccaggatt

SEQ ID NO: 436996 - DNA, 15 bp, Homo sapiens
aattatttccaggat

SEQ ID NO: 436997 - DNA, 15 bp, Homo sapiens
taattatttccagga

SEQ ID NO: 436998 - DNA, 15 bp, Homo sapiens
ataattatttccagg

SEQ ID NO: 436999 - DNA, 15 bp, Homo sapiens
cataattatttccag

SEQ ID NO: 437000 - DNA, 15 bp, Homo sapiens
acataattatttcca

SEQ ID NO: 437001 - DNA, 15 bp, Homo sapiens
cacataattatttcc

SEQ ID NO: 437002 - DNA, 15 bp, Homo sapiens
ccacataattatttc

SEQ ID NO: 437003 - DNA, 15 bp, Homo sapiens
accacataattattt

SEQ ID NO: 437004 - DNA, 15 bp, Homo sapiens
aaccacataattatt

SEQ ID NO: 437005 - DNA, 15 bp, Homo sapiens
aaaccacataattat

SEQ ID NO: 437006 - DNA, 15 bp, Homo sapiens
aaaaccacataatta

SEQ ID NO: 437007 - DNA, 15 bp, Homo sapiens
aaaaaccacataatt

SEQ ID NO: 437008 - DNA, 15 bp, Homo sapiens
caaaaaccacataat

SEQ ID NO: 437009 - DNA, 15 bp, Homo sapiens
tcaaaaaccacataa

SEQ ID NO: 437010 - DNA, 15 bp, Homo sapiens
gtcaaaaaccacata

SEQ ID NO: 437011 - DNA, 15 bp, Homo sapiens
ggtcaaaaaccacat

SEQ ID NO: 437012 - DNA, 15 bp, Homo sapiens
tggtcaaaaaccaca

SEQ ID NO: 437013 - DNA, 15 bp, Homo sapiens
gtggtcaaaaaccac

SEQ ID NO: 437014 - DNA, 15 bp, Homo sapiens
tgtggtcaaaaacca

SEQ ID NO: 437015 - DNA, 15 bp, Homo sapiens
ctgtggtcaaaaacc

SEQ ID NO: 437016 - DNA, 15 bp, Homo sapiens
cctgtggtcaaaaac

SEQ ID NO: 437017 - DNA, 15 bp, Homo sapiens
tcctgtggtcaaaaa

SEQ ID NO: 437018 - DNA, 15 bp, Homo sapiens
ttcctgtggtcaaaa

SEQ ID NO: 437019 - DNA, 15 bp, Homo sapiens
tttcctgtggtcaaa

SEQ ID NO: 437020 - DNA, 15 bp, Homo sapiens
ttttcctgtggtcaa

SEQ ID NO: 437021 - DNA, 15 bp, Homo sapiens
tttttcctgtggtca

SEQ ID NO: 437022 - DNA, 15 bp, Homo sapiens
ttttttcctgtggtc

SEQ ID NO: 437023 - DNA, 15 bp, Homo sapiens
cttttttcctgtggt

SEQ ID NO: 437024 - DNA, 15 bp, Homo sapiens
tcttttttcctgtgg

SEQ ID NO: 437025 - DNA, 15 bp, Homo sapiens
atcttttttcctgtg

SEQ ID NO: 437026 - DNA, 15 bp, Homo sapiens
catcttttttcctgt

SEQ ID NO: 437027 - DNA, 15 bp, Homo sapiens
ccatcttttttcctg

SEQ ID NO: 437028 - DNA, 15 bp, Homo sapiens
accatcttttttcct

SEQ ID NO: 437029 - DNA, 15 bp, Homo sapiens
caccatcttttttcc

SEQ ID NO: 437030 - DNA, 15 bp, Homo sapiens
tcaccatcttttttc

SEQ ID NO: 437031 - DNA, 15 bp, Homo sapiens
atcaccatctttttt

SEQ ID NO: 437032 - DNA, 15 bp, Homo sapiens
aatcaccatcttttt

SEQ ID NO: 437033 - DNA, 15 bp, Homo sapiens
caatcaccatctttt

SEQ ID NO: 437034 - DNA, 15 bp, Homo sapiens
ccaatcaccatcttt

SEQ ID NO: 437035 - DNA, 15 bp, Homo sapiens
cccaatcaccatctt

SEQ ID NO: 437036 - DNA, 15 bp, Homo sapiens
ccccaatcaccatct

SEQ ID NO: 437037 - DNA, 15 bp, Homo sapiens
tccccaatcaccatc

SEQ ID NO: 437038 - DNA, 15 bp, Homo sapiens
atccccaatcaccat

SEQ ID NO: 437039 - DNA, 15 bp, Homo sapiens
gatccccaatcacca

SEQ ID NO: 437040 - DNA, 15 bp, Homo sapiens
agatccccaatcacc

SEQ ID NO: 437041 - DNA, 15 bp, Homo sapiens
tagatccccaatcac

SEQ ID NO: 437042 - DNA, 15 bp, Homo sapiens
ttagatccccaatca

SEQ ID NO: 437043 - DNA, 15 bp, Homo sapiens
gttagatccccaatc

SEQ ID NO: 437044 - DNA, 15 bp, Homo sapiens
tgttagatccccaat

SEQ ID NO: 437045 - DNA, 15 bp, Homo sapiens
ttgttagatccccaa

SEQ ID NO: 437046 - DNA, 15 bp, Homo sapiens
attgttagatcccca

SEQ ID NO: 437047 - DNA, 15 bp, Homo sapiens
tattgttagatcccc

SEQ ID NO: 437048 - DNA, 15 bp, Homo sapiens
ctattgttagatccc

SEQ ID NO: 437049 - DNA, 15 bp, Homo sapiens
tctattgttagatcc

SEQ ID NO: 437050 - DNA, 15 bp, Homo sapiens
atctattgttagatc

SEQ ID NO: 437051 - DNA, 15 bp, Homo sapiens
aatctattgttagat

SEQ ID NO: 437052 - DNA, 15 bp, Homo sapiens
aaatctattgttaga

SEQ ID NO: 437053 - DNA, 15 bp, Homo sapiens
taaatctattgttag

SEQ ID NO: 437054 - DNA, 15 bp, Homo sapiens
ataaatctattgtta

SEQ ID NO: 437055 - DNA, 15 bp, Homo sapiens
aataaatctattgtt

SEQ ID NO: 437056 - DNA, 15 bp, Homo sapiens
taataaatctattgt

SEQ ID NO: 437057 - DNA, 15 bp, Homo sapiens
ttaataaatctattg

SEQ ID NO: 437058 - DNA, 15 bp, Homo sapiens
cttaataaatctatt

SEQ ID NO: 437059 - DNA, 15 bp, Homo sapiens
tcttaataaatctat

SEQ ID NO: 437060 - DNA, 15 bp, Homo sapiens
ttcttaataaatcta

SEQ ID NO: 437061 - DNA, 15 bp, Homo sapiens
tttcttaataaatct

SEQ ID NO: 437062 - DNA, 15 bp, Homo sapiens
ttttcttaataaatc

SEQ ID NO: 437063 - DNA, 15 bp, Homo sapiens
tttttcttaataaat

SEQ ID NO: 437064 - DNA, 15 bp, Homo sapiens
ttttttcttaataaa

SEQ ID NO: 437065 - DNA, 15 bp, Homo sapiens
attttttcttaataa

SEQ ID NO: 437066 - DNA, 15 bp, Homo sapiens
aattttttcttaata

SEQ ID NO: 437067 - DNA, 15 bp, Homo sapiens
caattttttcttaat

SEQ ID NO: 437068 - DNA, 15 bp, Homo sapiens
acaattttttcttaa

SEQ ID NO: 437069 - DNA, 15 bp, Homo sapiens
cacaattttttctta

SEQ ID NO: 437070 - DNA, 15 bp, Homo sapiens
acacaattttttctt

SEQ ID NO: 437071 - DNA, 15 bp, Homo sapiens
gacacaattttttct

SEQ ID NO: 437072 - DNA, 15 bp, Homo sapiens
tgacacaattttttc

SEQ ID NO: 437073 - DNA, 15 bp, Homo sapiens
ttgacacaatttttt

SEQ ID NO: 437074 - DNA, 15 bp, Homo sapiens
tttgacacaattttt

SEQ ID NO: 437075 - DNA, 15 bp, Homo sapiens
atttgacacaatttt

SEQ ID NO: 437076 - DNA, 15 bp, Homo sapiens
tatttgacacaattt

SEQ ID NO: 437077 - DNA, 15 bp, Homo sapiens
ttatttgacacaatt

SEQ ID NO: 437078 - DNA, 15 bp, Homo sapiens
tttatttgacacaat

SEQ ID NO: 437079 - DNA, 15 bp, Homo sapiens
gtttatttgacacaa

SEQ ID NO: 437080 - DNA, 15 bp, Homo sapiens
tgtttatttgacaca

SEQ ID NO: 437081 - DNA, 15 bp, Homo sapiens
gtgtttatttgacac

SEQ ID NO: 437082 - DNA, 15 bp, Homo sapiens
tgtgtttatttgaca

SEQ ID NO: 437083 - DNA, 15 bp, Homo sapiens
ctgtgtttatttgac

SEQ ID NO: 437084 - DNA, 15 bp, Homo sapiens
tctgtgtttatttga

SEQ ID NO: 437085 - DNA, 15 bp, Homo sapiens
atctgtgtttatttg

SEQ ID NO: 437086 - DNA, 15 bp, Homo sapiens
catctgtgtttattt

SEQ ID NO: 437087 - DNA, 15 bp, Homo sapiens
tcatctgtgtttatt

SEQ ID NO: 437088 - DNA, 15 bp, Homo sapiens
ctcatctgtgtttat

SEQ ID NO: 437089 - DNA, 15 bp, Homo sapiens
tctcatctgtgttta

SEQ ID NO: 437090 - DNA, 15 bp, Homo sapiens
atctcatctgtgttt

SEQ ID NO: 437091 - DNA, 15 bp, Homo sapiens
tatctcatctgtgtt

SEQ ID NO: 437092 - DNA, 15 bp, Homo sapiens
ctatctcatctgtgt

SEQ ID NO: 437093 - DNA, 15 bp, Homo sapiens
actatctcatctgtg

SEQ ID NO: 437094 - DNA, 15 bp, Homo sapiens
cactatctcatctgt

SEQ ID NO: 437095 - DNA, 15 bp, Homo sapiens
ccactatctcatctg

SEQ ID NO: 437096 - DNA, 15 bp, Homo sapiens
tccactatctcatct

SEQ ID NO: 437097 - DNA, 15 bp, Homo sapiens
atccactatctcatc

SEQ ID NO: 437098 - DNA, 15 bp, Homo sapiens
tatccactatctcat

SEQ ID NO: 437099 - DNA, 15 bp, Homo sapiens
atatccactatctca

SEQ ID NO: 437100 - DNA, 15 bp, Homo sapiens
catatccactatctc

SEQ ID NO: 437101 - DNA, 15 bp, Homo sapiens
tcatatccactatct

SEQ ID NO: 437102 - DNA, 15 bp, Homo sapiens
ttcatatccactatc

SEQ ID NO: 437103 - DNA, 15 bp, Homo sapiens
tttcatatccactat

SEQ ID NO: 437104 - DNA, 15 bp, Homo sapiens
ttttcatatccacta

SEQ ID NO: 437105 - DNA, 15 bp, Homo sapiens
attttcatatccact

SEQ ID NO: 437106 - DNA, 15 bp, Homo sapiens
tattttcatatccac

SEQ ID NO: 437107 - DNA, 15 bp, Homo sapiens
gtattttcatatcca

SEQ ID NO: 437108 - DNA, 15 bp, Homo sapiens
agtattttcatatcc

SEQ ID NO: 437109 - DNA, 15 bp, Homo sapiens
cagtattttcatatc

SEQ ID NO: 437110 - DNA, 15 bp, Homo sapiens
acagtattttcatat

SEQ ID NO: 437111 - DNA, 15 bp, Homo sapiens
aacagtattttcata

SEQ ID NO: 437112 - DNA, 15 bp, Homo sapiens
aaacagtattttcat

SEQ ID NO: 437113 - DNA, 15 bp, Homo sapiens
caaacagtattttca

SEQ ID NO: 437114 - DNA, 15 bp, Homo sapiens
acaaacagtattttc

SEQ ID NO: 437115 - DNA, 15 bp, Homo sapiens
gacaaacagtatttt

SEQ ID NO: 437116 - DNA, 15 bp, Homo sapiens
agacaaacagtattt

SEQ ID NO: 437117 - DNA, 15 bp, Homo sapiens
tagacaaacagtatt

SEQ ID NO: 437118 - DNA, 15 bp, Homo sapiens
atagacaaacagtat

SEQ ID NO: 437119 - DNA, 15 bp, Homo sapiens
tatagacaaacagta

SEQ ID NO: 437120 - DNA, 15 bp, Homo sapiens
gtatagacaaacagt

SEQ ID NO: 437121 - DNA, 15 bp, Homo sapiens
tgtatagacaaacag

SEQ ID NO: 437122 - DNA, 15 bp, Homo sapiens
ttgtatagacaaaca

SEQ ID NO: 437123 - DNA, 15 bp, Homo sapiens
attgtatagacaaac

SEQ ID NO: 437124 - DNA, 15 bp, Homo sapiens
tattgtatagacaaa

SEQ ID NO: 437125 - DNA, 15 bp, Homo sapiens
ctattgtatagacaa

SEQ ID NO: 437126 - DNA, 15 bp, Homo sapiens
actattgtatagaca

SEQ ID NO: 437127 - DNA, 15 bp, Homo sapiens
tactattgtatagac

SEQ ID NO: 437128 - DNA, 15 bp, Homo sapiens
atactattgtataga

SEQ ID NO: 437129 - DNA, 15 bp, Homo sapiens
aatactattgtatag

SEQ ID NO: 437130 - DNA, 15 bp, Homo sapiens
aaatactattgtata

SEQ ID NO: 437131 - DNA, 15 bp, Homo sapiens
taaatactattgtat

SEQ ID NO: 437132 - DNA, 15 bp, Homo sapiens
ttaaatactattgta

SEQ ID NO: 437133 - DNA, 15 bp, Homo sapiens
tttaaatactattgt

SEQ ID NO: 437134 - DNA, 15 bp, Homo sapiens
atttaaatactattg

SEQ ID NO: 437135 - DNA, 15 bp, Homo sapiens
catttaaatactatt

SEQ ID NO: 437136 - DNA, 15 bp, Homo sapiens
acatttaaatactat

SEQ ID NO: 437137 - DNA, 15 bp, Homo sapiens
aacatttaaatacta

SEQ ID NO: 437138 - DNA, 15 bp, Homo sapiens
aaacatttaaatact

SEQ ID NO: 437139 - DNA, 15 bp, Homo sapiens
taaacatttaaatac

SEQ ID NO: 437140 - DNA, 15 bp, Homo sapiens
ataaacatttaaata

SEQ ID NO: 437141 - DNA, 15 bp, Homo sapiens
gataaacatttaaat

SEQ ID NO: 437142 - DNA, 15 bp, Homo sapiens
agataaacatttaaa

SEQ ID NO: 437143 - DNA, 15 bp, Homo sapiens
aagataaacatttaa

SEQ ID NO: 437144 - DNA, 15 bp, Homo sapiens
taagataaacattta

SEQ ID NO: 437145 - DNA, 15 bp, Homo sapiens
ataagataaacattt

SEQ ID NO: 437146 - DNA, 15 bp, Homo sapiens
aataagataaacatt

SEQ ID NO: 437147 - DNA, 15 bp, Homo sapiens
taataagataaacat

SEQ ID NO: 437148 - DNA, 15 bp, Homo sapiens
ctaataagataaaca

SEQ ID NO: 437149 - DNA, 15 bp, Homo sapiens
actaataagataaac

SEQ ID NO: 437150 - DNA, 15 bp, Homo sapiens
cactaataagataaa

SEQ ID NO: 437151 - DNA, 15 bp, Homo sapiens
acactaataagataa

SEQ ID NO: 437152 - DNA, 15 bp, Homo sapiens
tacactaataagata

SEQ ID NO: 437153 - DNA, 15 bp, Homo sapiens
ttacactaataagat

SEQ ID NO: 437154 - DNA, 15 bp, Homo sapiens
tttacactaataaga

SEQ ID NO: 437155 - DNA, 15 bp, Homo sapiens
atttacactaataag

SEQ ID NO: 437156 - DNA, 15 bp, Homo sapiens
catttacactaataa

SEQ ID NO: 437157 - DNA, 15 bp, Homo sapiens
ccatttacactaata

SEQ ID NO: 437158 - DNA, 15 bp, Homo sapiens
gccatttacactaat

SEQ ID NO: 437159 - DNA, 15 bp, Homo sapiens
ggccatttacactaa

SEQ ID NO: 437160 - DNA, 15 bp, Homo sapiens
gggccatttacacta

SEQ ID NO: 437161 - DNA, 15 bp, Homo sapiens
agggccatttacact

SEQ ID NO: 437162 - DNA, 15 bp, Homo sapiens
aagggccatttacac

SEQ ID NO: 437163 - DNA, 15 bp, Homo sapiens
aaagggccatttaca

SEQ ID NO: 437164 - DNA, 15 bp, Homo sapiens
aaaagggccatttac

SEQ ID NO: 437165 - DNA, 15 bp, Homo sapiens
gaaaagggccattta

SEQ ID NO: 437166 - DNA, 15 bp, Homo sapiens
ggaaaagggccattt

SEQ ID NO: 437167 - DNA, 15 bp, Homo sapiens
aggaaaagggccatt

SEQ ID NO: 437168 - DNA, 15 bp, Homo sapiens
aaggaaaagggccat

SEQ ID NO: 437169 - DNA, 15 bp, Homo sapiens
aaaggaaaagggcca

SEQ ID NO: 437170 - DNA, 15 bp, Homo sapiens
caaaggaaaagggcc

SEQ ID NO: 437171 - DNA, 15 bp, Homo sapiens
acaaaggaaaagggc

SEQ ID NO: 437172 - DNA, 15 bp, Homo sapiens
gacaaaggaaaaggg

SEQ ID NO: 437173 - DNA, 15 bp, Homo sapiens
agacaaaggaaaagg

SEQ ID NO: 437174 - DNA, 15 bp, Homo sapiens
aagacaaaggaaaag

SEQ ID NO: 437175 - DNA, 15 bp, Homo sapiens
aaagacaaaggaaaa

SEQ ID NO: 437176 - DNA, 15 bp, Homo sapiens
gaaagacaaaggaaa

SEQ ID NO: 437177 - DNA, 15 bp, Homo sapiens
agaaagacaaaggaa

SEQ ID NO: 437178 - DNA, 15 bp, Homo sapiens
cagaaagacaaagga

SEQ ID NO: 437179 - DNA, 15 bp, Homo sapiens
tcagaaagacaaagg

SEQ ID NO: 437180 - DNA, 15 bp, Homo sapiens
ttcagaaagacaaag

SEQ ID NO: 437181 - DNA, 15 bp, Homo sapiens
tttcagaaagacaaa

SEQ ID NO: 437182 - DNA, 15 bp, Homo sapiens
atttcagaaagacaa

SEQ ID NO: 437183 - DNA, 15 bp, Homo sapiens
tatttcagaaagaca

SEQ ID NO: 437184 - DNA, 15 bp, Homo sapiens
ctatttcagaaagac

SEQ ID NO: 437185 - DNA, 15 bp, Homo sapiens
cctatttcagaaaga

SEQ ID NO: 437186 - DNA, 15 bp, Homo sapiens
tcctatttcagaaag

SEQ ID NO: 437187 - DNA, 15 bp, Homo sapiens
ctcctatttcagaaa

SEQ ID NO: 437188 - DNA, 15 bp, Homo sapiens
tctcctatttcagaa

SEQ ID NO: 437189 - DNA, 15 bp, Homo sapiens
ttctcctatttcaga

SEQ ID NO: 437190 - DNA, 15 bp, Homo sapiens
attctcctatttcag

SEQ ID NO: 437191 - DNA, 15 bp, Homo sapiens
tattctcctatttca

SEQ ID NO: 437192 - DNA, 15 bp, Homo sapiens
gtattctcctatttc

SEQ ID NO: 437193 - DNA, 15 bp, Homo sapiens
ggtattctcctattt

SEQ ID NO: 437194 - DNA, 15 bp, Homo sapiens
tggtattctcctatt

SEQ ID NO: 437195 - DNA, 15 bp, Homo sapiens
atggtattctcctat

SEQ ID NO: 437196 - DNA, 15 bp, Homo sapiens
tatggtattctccta

SEQ ID NO: 437197 - DNA, 15 bp, Homo sapiens
ttatggtattctcct

SEQ ID NO: 437198 - DNA, 15 bp, Homo sapiens
tttatggtattctcc

SEQ ID NO: 437199 - DNA, 15 bp, Homo sapiens
atttatggtattctc

SEQ ID NO: 437200 - DNA, 15 bp, Homo sapiens
catttatggtattct

SEQ ID NO: 437201 - DNA, 15 bp, Homo sapiens
acatttatggtattc

SEQ ID NO: 437202 - DNA, 15 bp, Homo sapiens
cacatttatggtatt

SEQ ID NO: 437203 - DNA, 15 bp, Homo sapiens
acacatttatggtat

SEQ ID NO: 437204 - DNA, 15 bp, Homo sapiens
aacacatttatggta

SEQ ID NO: 437205 - DNA, 15 bp, Homo sapiens
aaacacatttatggt

SEQ ID NO: 437206 - DNA, 15 bp, Homo sapiens
taaacacatttatgg

SEQ ID NO: 437207 - DNA, 15 bp, Homo sapiens
gtaaacacatttatg

SEQ ID NO: 437208 - DNA, 15 bp, Homo sapiens
tgtaaacacatttat

SEQ ID NO: 437209 - DNA, 15 bp, Homo sapiens
atgtaaacacattta

SEQ ID NO: 437210 - DNA, 15 bp, Homo sapiens
gatgtaaacacattt

SEQ ID NO: 437211 - DNA, 15 bp, Homo sapiens
agatgtaaacacatt

SEQ ID NO: 437212 - DNA, 15 bp, Homo sapiens
aagatgtaaacacat

SEQ ID NO: 437213 - DNA, 15 bp, Homo sapiens
aaagatgtaaacaca

SEQ ID NO: 437214 - DNA, 15 bp, Homo sapiens
taaagatgtaaacac

SEQ ID NO: 437215 - DNA, 15 bp, Homo sapiens
ataaagatgtaaaca

SEQ ID NO: 437216 - DNA, 15 bp, Homo sapiens
aataaagatgtaaac

SEQ ID NO: 437217 - DNA, 15 bp, Homo sapiens
aaataaagatgtaaa

SEQ ID NO: 437218 - DNA, 15 bp, Homo sapiens
taaataaagatgtaa

SEQ ID NO: 437219 - DNA, 15 bp, Homo sapiens
ttaaataaagatgta

SEQ ID NO: 437220 - DNA, 15 bp, Homo sapiens
tttaaataaagatgt

SEQ ID NO: 437221 - DNA, 15 bp, Homo sapiens
gtttaaataaagatg

SEQ ID NO: 437222 - DNA, 15 bp, Homo sapiens
tgtttaaataaagat

SEQ ID NO: 437223 - DNA, 15 bp, Homo sapiens
ttgtttaaataaaga

SEQ ID NO: 437224 - DNA, 15 bp, Homo sapiens
tttgtttaaataaag

SEQ ID NO: 437225 - DNA, 15 bp, Homo sapiens
ctttgtttaaataaa

SEQ ID NO: 437226 - DNA, 15 bp, Homo sapiens
gctttgtttaaataa

SEQ ID NO: 437227 - DNA, 15 bp, Homo sapiens
tgctttgtttaaata

SEQ ID NO: 437228 - DNA, 15 bp, Homo sapiens
atgctttgtttaaat

SEQ ID NO: 437229 - DNA, 15 bp, Homo sapiens
aatgctttgtttaaa

SEQ ID NO: 437230 - DNA, 15 bp, Homo sapiens
aaatgctttgtttaa

SEQ ID NO: 437231 - DNA, 15 bp, Homo sapiens
caaatgctttgttta

SEQ ID NO: 437232 - DNA, 15 bp, Homo sapiens
ccaaatgctttgttt

SEQ ID NO: 437233 - DNA, 15 bp, Homo sapiens
accaaatgctttgtt

SEQ ID NO: 437234 - DNA, 15 bp, Homo sapiens
taccaaatgctttgt

SEQ ID NO: 437235 - DNA, 15 bp, Homo sapiens
ttaccaaatgctttg

SEQ ID NO: 437236 - DNA, 15 bp, Homo sapiens
attaccaaatgcttt

SEQ ID NO: 437237 - DNA, 15 bp, Homo sapiens
tattaccaaatgctt

SEQ ID NO: 437238 - DNA, 15 bp, Homo sapiens
atattaccaaatgct

SEQ ID NO: 437239 - DNA, 15 bp, Homo sapiens
aatattaccaaatgc

SEQ ID NO: 437240 - DNA, 15 bp, Homo sapiens
aaatattaccaaatg

SEQ ID NO: 437241 - DNA, 15 bp, Homo sapiens
aaaatattaccaaat

SEQ ID NO: 437242 - DNA, 15 bp, Homo sapiens
taaaatattaccaaa

SEQ ID NO: 437243 - DNA, 15 bp, Homo sapiens
ttaaaatattaccaa

SEQ ID NO: 437244 - DNA, 15 bp, Homo sapiens
tttaaaatattacca

SEQ ID NO: 437245 - DNA, 15 bp, Homo sapiens
atttaaaatattacc

SEQ ID NO: 437246 - DNA, 15 bp, Homo sapiens
catttaaaatattac

SEQ ID NO: 437247 - DNA, 15 bp, Homo sapiens
gcatttaaaatatta

SEQ ID NO: 437248 - DNA, 15 bp, Homo sapiens
agcatttaaaatatt

SEQ ID NO: 437249 - DNA, 15 bp, Homo sapiens
cagcatttaaaatat

SEQ ID NO: 437250 - DNA, 15 bp, Homo sapiens
acagcatttaaaata

SEQ ID NO: 437251 - DNA, 15 bp, Homo sapiens
gacagcatttaaaat

SEQ ID NO: 437252 - DNA, 15 bp, Homo sapiens
ggacagcatttaaaa

SEQ ID NO: 437253 - DNA, 15 bp, Homo sapiens
aggacagcatttaaa

SEQ ID NO: 437254 - DNA, 15 bp, Homo sapiens
aaggacagcatttaa

SEQ ID NO: 437255 - DNA, 15 bp, Homo sapiens
aaaggacagcattta

SEQ ID NO: 437256 - DNA, 15 bp, Homo sapiens
gaaaggacagcattt

SEQ ID NO: 437257 - DNA, 15 bp, Homo sapiens
tgaaaggacagcatt

SEQ ID NO: 437258 - DNA, 15 bp, Homo sapiens
ctgaaaggacagcat

SEQ ID NO: 437259 - DNA, 15 bp, Homo sapiens
cctgaaaggacagca

SEQ ID NO: 437260 - DNA, 15 bp, Homo sapiens
acctgaaaggacagc

SEQ ID NO: 437261 - DNA, 15 bp, Homo sapiens
tacctgaaaggacag

SEQ ID NO: 437262 - DNA, 15 bp, Homo sapiens
gtacctgaaaggaca

SEQ ID NO: 437263 - DNA, 15 bp, Homo sapiens
ggtacctgaaaggac

SEQ ID NO: 437264 - DNA, 15 bp, Homo sapiens
tggtacctgaaagga

SEQ ID NO: 437265 - DNA, 15 bp, Homo sapiens
atggtacctgaaagg

SEQ ID NO: 437266 - DNA, 15 bp, Homo sapiens
catggtacctgaaag

SEQ ID NO: 437267 - DNA, 15 bp, Homo sapiens
ccatggtacctgaaa

SEQ ID NO: 437268 - DNA, 15 bp, Homo sapiens
tccatggtacctgaa

SEQ ID NO: 437269 - DNA, 15 bp, Homo sapiens
ctccatggtacctga

SEQ ID NO: 437270 - DNA, 15 bp, Homo sapiens
cctccatggtacctg

SEQ ID NO: 437271 - DNA, 15 bp, Homo sapiens
tcctccatggtacct

SEQ ID NO: 437272 - DNA, 15 bp, Homo sapiens
ttcctccatggtacc

SEQ ID NO: 437273 - DNA, 15 bp, Homo sapiens
attcctccatggtac

SEQ ID NO: 437274 - DNA, 15 bp, Homo sapiens
tattcctccatggta

SEQ ID NO: 437275 - DNA, 15 bp, Homo sapiens
atattcctccatggt

SEQ ID NO: 437276 - DNA, 15 bp, Homo sapiens
catattcctccatgg

SEQ ID NO: 437277 - DNA, 15 bp, Homo sapiens
ccatattcctccatg

SEQ ID NO: 437278 - DNA, 15 bp, Homo sapiens
tccatattcctccat

SEQ ID NO: 437279 - DNA, 15 bp, Homo sapiens
atccatattcctcca

SEQ ID NO: 437280 - DNA, 15 bp, Homo sapiens
tatccatattcctcc

SEQ ID NO: 437281 - DNA, 15 bp, Homo sapiens
atatccatattcctc

SEQ ID NO: 437282 - DNA, 15 bp, Homo sapiens
tatatccatattcct

SEQ ID NO: 437283 - DNA, 15 bp, Homo sapiens
ttatatccatattcc

SEQ ID NO: 437284 - DNA, 15 bp, Homo sapiens
attatatccatattc

SEQ ID NO: 437285 - DNA, 15 bp, Homo sapiens
tattatatccatatt

SEQ ID NO: 437286 - DNA, 15 bp, Homo sapiens
gtattatatccatat

SEQ ID NO: 437287 - DNA, 15 bp, Homo sapiens
ggtattatatccata

SEQ ID NO: 437288 - DNA, 15 bp, Homo sapiens
aggtattatatccat

SEQ ID NO: 437289 - DNA, 15 bp, Homo sapiens
taggtattatatcca

SEQ ID NO: 437290 - DNA, 15 bp, Homo sapiens
ttaggtattatatcc

SEQ ID NO: 437291 - DNA, 15 bp, Homo sapiens
attaggtattatatc

SEQ ID NO: 437292 - DNA, 15 bp, Homo sapiens
aattaggtattatat

SEQ ID NO: 437293 - DNA, 15 bp, Homo sapiens
taattaggtattata

SEQ ID NO: 437294 - DNA, 15 bp, Homo sapiens
ttaattaggtattat

SEQ ID NO: 437295 - DNA, 15 bp, Homo sapiens
attaattaggtatta

SEQ ID NO: 437296 - DNA, 15 bp, Homo sapiens
tattaattaggtatt

SEQ ID NO: 437297 - DNA, 15 bp, Homo sapiens
ttattaattaggtat

SEQ ID NO: 437298 - DNA, 15 bp, Homo sapiens
cttattaattaggta

SEQ ID NO: 437299 - DNA, 15 bp, Homo sapiens
acttattaattaggt

SEQ ID NO: 437300 - DNA, 15 bp, Homo sapiens
cacttattaattagg

SEQ ID NO: 437301 - DNA, 15 bp, Homo sapiens
ccacttattaattag

SEQ ID NO: 437302 - DNA, 15 bp, Homo sapiens
accacttattaatta

SEQ ID NO: 437303 - DNA, 15 bp, Homo sapiens
aaccacttattaatt

SEQ ID NO: 437304 - DNA, 15 bp, Homo sapiens
caaccacttattaat

SEQ ID NO: 437305 - DNA, 15 bp, Homo sapiens
gcaaccacttattaa

SEQ ID NO: 437306 - DNA, 15 bp, Homo sapiens
tgcaaccacttatta

SEQ ID NO: 437307 - DNA, 15 bp, Homo sapiens
ctgcaaccacttatt

SEQ ID NO: 437308 - DNA, 15 bp, Homo sapiens
tctgcaaccacttat

SEQ ID NO: 437309 - DNA, 15 bp, Homo sapiens
gtctgcaaccactta

SEQ ID NO: 437310 - DNA, 15 bp, Homo sapiens
tgtctgcaaccactt

SEQ ID NO: 437311 - DNA, 15 bp, Homo sapiens
atgtctgcaaccact

SEQ ID NO: 437312 - DNA, 15 bp, Homo sapiens
tatgtctgcaaccac

SEQ ID NO: 437313 - DNA, 15 bp, Homo sapiens
atatgtctgcaacca

SEQ ID NO: 437314 - DNA, 15 bp, Homo sapiens
gatatgtctgcaacc

SEQ ID NO: 437315 - DNA, 15 bp, Homo sapiens
tgatatgtctgcaac

SEQ ID NO: 437316 - DNA, 15 bp, Homo sapiens
atgatatgtctgcaa

SEQ ID NO: 437317 - DNA, 15 bp, Homo sapiens
aatgatatgtctgca

SEQ ID NO: 437318 - DNA, 15 bp, Homo sapiens
caatgatatgtctgc

SEQ ID NO: 437319 - DNA, 15 bp, Homo sapiens
gcaatgatatgtctg

SEQ ID NO: 437320 - DNA, 15 bp, Homo sapiens
tgcaatgatatgtct

SEQ ID NO: 437321 - DNA, 15 bp, Homo sapiens
ctgcaatgatatgtc

SEQ ID NO: 437322 - DNA, 15 bp, Homo sapiens
tctgcaatgatatgt

SEQ ID NO: 437323 - DNA, 15 bp, Homo sapiens
gtctgcaatgatatg

SEQ ID NO: 437324 - DNA, 15 bp, Homo sapiens
agtctgcaatgatat

SEQ ID NO: 437325 - DNA, 15 bp, Homo sapiens
cagtctgcaatgata

SEQ ID NO: 437326 - DNA, 15 bp, Homo sapiens
acagtctgcaatgat

SEQ ID NO: 437327 - DNA, 15 bp, Homo sapiens
aacagtctgcaatga

SEQ ID NO: 437328 - DNA, 15 bp, Homo sapiens
caacagtctgcaatg

SEQ ID NO: 437329 - DNA, 15 bp, Homo sapiens
gcaacagtctgcaat

SEQ ID NO: 437330 - DNA, 15 bp, Homo sapiens
tgcaacagtctgcaa

SEQ ID NO: 437331 - DNA, 15 bp, Homo sapiens
ttgcaacagtctgca

SEQ ID NO: 437332 - DNA, 15 bp, Homo sapiens
tttgcaacagtctgc

SEQ ID NO: 437333 - DNA, 15 bp, Homo sapiens
atttgcaacagtctg

SEQ ID NO: 437334 - DNA, 15 bp, Homo sapiens
aatttgcaacagtct

SEQ ID NO: 437335 - DNA, 15 bp, Homo sapiens
caatttgcaacagtc

SEQ ID NO: 437336 - DNA, 15 bp, Homo sapiens
tcaatttgcaacagt

SEQ ID NO: 437337 - DNA, 15 bp, Homo sapiens
ctcaatttgcaacag

SEQ ID NO: 437338 - DNA, 15 bp, Homo sapiens
cctcaatttgcaaca

SEQ ID NO: 437339 - DNA, 15 bp, Homo sapiens
ccctcaatttgcaac

SEQ ID NO: 437340 - DNA, 15 bp, Homo sapiens
accctcaatttgcaa

SEQ ID NO: 437341 - DNA, 15 bp, Homo sapiens
caccctcaatttgca

SEQ ID NO: 437342 - DNA, 15 bp, Homo sapiens
tcaccctcaatttgc

SEQ ID NO: 437343 - DNA, 15 bp, Homo sapiens
atcaccctcaatttg

SEQ ID NO: 437344 - DNA, 15 bp, Homo sapiens
gatcaccctcaattt

SEQ ID NO: 437345 - DNA, 15 bp, Homo sapiens
agatcaccctcaatt

SEQ ID NO: 437346 - DNA, 15 bp, Homo sapiens
gagatcaccctcaat

SEQ ID NO: 437347 - DNA, 15 bp, Homo sapiens
agagatcaccctcaa

SEQ ID NO: 437348 - DNA, 15 bp, Homo sapiens
tagagatcaccctca

SEQ ID NO: 437349 - DNA, 15 bp, Homo sapiens
ctagagatcaccctc

SEQ ID NO: 437350 - DNA, 15 bp, Homo sapiens
tctagagatcaccct

SEQ ID NO: 437351 - DNA, 15 bp, Homo sapiens
ttctagagatcaccc

SEQ ID NO: 437352 - DNA, 15 bp, Homo sapiens
attctagagatcacc

SEQ ID NO: 437353 - DNA, 15 bp, Homo sapiens
gattctagagatcac

SEQ ID NO: 437354 - DNA, 15 bp, Homo sapiens
ggattctagagatca

SEQ ID NO: 437355 - DNA, 15 bp, Homo sapiens
aggattctagagatc

SEQ ID NO: 437356 - DNA, 15 bp, Homo sapiens
taggattctagagat

SEQ ID NO: 437357 - DNA, 15 bp, Homo sapiens
ataggattctagaga

SEQ ID NO: 437358 - DNA, 15 bp, Homo sapiens
aataggattctagag

SEQ ID NO: 437359 - DNA, 15 bp, Homo sapiens
gaataggattctaga

SEQ ID NO: 437360 - DNA, 15 bp, Homo sapiens
ggaataggattctag

SEQ ID NO: 437361 - DNA, 15 bp, Homo sapiens
gggaataggattcta

SEQ ID NO: 437362 - DNA, 15 bp, Homo sapiens
tgggaataggattct

SEQ ID NO: 437363 - DNA, 15 bp, Homo sapiens
ctgggaataggattc

SEQ ID NO: 437364 - DNA, 15 bp, Homo sapiens
tctgggaataggatt

SEQ ID NO: 437365 - DNA, 15 bp, Homo sapiens
atctgggaataggat

SEQ ID NO: 437366 - DNA, 15 bp, Homo sapiens
aatctgggaatagga

SEQ ID NO: 437367 - DNA, 15 bp, Homo sapiens
gaatctgggaatagg

SEQ ID NO: 437368 - DNA, 15 bp, Homo sapiens
agaatctgggaatag

SEQ ID NO: 437369 - DNA, 15 bp, Homo sapiens
gagaatctgggaata

SEQ ID NO: 437370 - DNA, 15 bp, Homo sapiens
agagaatctgggaat

SEQ ID NO: 437371 - DNA, 15 bp, Homo sapiens
gagagaatctgggaa

SEQ ID NO: 437372 - DNA, 15 bp, Homo sapiens
tgagagaatctggga

SEQ ID NO: 437373 - DNA, 15 bp, Homo sapiens
atgagagaatctggg

SEQ ID NO: 437374 - DNA, 15 bp, Homo sapiens
aatgagagaatctgg

SEQ ID NO: 437375 - DNA, 15 bp, Homo sapiens
caatgagagaatctg

SEQ ID NO: 437376 - DNA, 15 bp, Homo sapiens
ccaatgagagaatct

SEQ ID NO: 437377 - DNA, 15 bp, Homo sapiens
accaatgagagaatc

SEQ ID NO: 437378 - DNA, 15 bp, Homo sapiens
taccaatgagagaat

SEQ ID NO: 437379 - DNA, 15 bp, Homo sapiens
ataccaatgagagaa

SEQ ID NO: 437380 - DNA, 15 bp, Homo sapiens
aataccaatgagaga

SEQ ID NO: 437381 - DNA, 15 bp, Homo sapiens
caataccaatgagag

SEQ ID NO: 437382 - DNA, 15 bp, Homo sapiens
gcaataccaatgaga

SEQ ID NO: 437383 - DNA, 15 bp, Homo sapiens
ggcaataccaatgag

SEQ ID NO: 437384 - DNA, 15 bp, Homo sapiens
tggcaataccaatga

SEQ ID NO: 437385 - DNA, 15 bp, Homo sapiens
atggcaataccaatg

SEQ ID NO: 437386 - DNA, 15 bp, Homo sapiens
catggcaataccaat

SEQ ID NO: 437387 - DNA, 15 bp, Homo sapiens
ccatggcaataccaa

SEQ ID NO: 437388 - DNA, 15 bp, Homo sapiens
accatggcaatacca

SEQ ID NO: 437389 - DNA, 15 bp, Homo sapiens
gaccatggcaatacc

SEQ ID NO: 437390 - DNA, 15 bp, Homo sapiens
tgaccatggcaatac

SEQ ID NO: 437391 - DNA, 15 bp, Homo sapiens
ctgaccatggcaata

SEQ ID NO: 437392 - DNA, 15 bp, Homo sapiens
actgaccatggcaat

SEQ ID NO: 437393 - DNA, 15 bp, Homo sapiens
tactgaccatggcaa

SEQ ID NO: 437394 - DNA, 15 bp, Homo sapiens
atactgaccatggca

SEQ ID NO: 437395 - DNA, 15 bp, Homo sapiens
aatactgaccatggc

SEQ ID NO: 437396 - DNA, 15 bp, Homo sapiens
aaatactgaccatgg

SEQ ID NO: 437397 - DNA, 15 bp, Homo sapiens
gaaatactgaccatg

SEQ ID NO: 437398 - DNA, 15 bp, Homo sapiens
agaaatactgaccat

SEQ ID NO: 437399 - DNA, 15 bp, Homo sapiens
tagaaatactgacca

SEQ ID NO: 437400 - DNA, 15 bp, Homo sapiens
ttagaaatactgacc

SEQ ID NO: 437401 - DNA, 15 bp, Homo sapiens
tttagaaatactgac

SEQ ID NO: 437402 - DNA, 15 bp, Homo sapiens
ttttagaaatactga

SEQ ID NO: 437403 - DNA, 15 bp, Homo sapiens
tttttagaaatactg

SEQ ID NO: 437404 - DNA, 15 bp, Homo sapiens
atttttagaaatact

SEQ ID NO: 437405 - DNA, 15 bp, Homo sapiens
gatttttagaaatac

SEQ ID NO: 437406 - DNA, 15 bp, Homo sapiens
tgatttttagaaata

SEQ ID NO: 437407 - DNA, 15 bp, Homo sapiens
ctgatttttagaaat

SEQ ID NO: 437408 - DNA, 15 bp, Homo sapiens
tctgatttttagaaa

SEQ ID NO: 437409 - DNA, 15 bp, Homo sapiens
atctgatttttagaa

SEQ ID NO: 437410 - DNA, 15 bp, Homo sapiens
gatctgatttttaga

SEQ ID NO: 437411 - DNA, 15 bp, Homo sapiens
agatctgatttttag

SEQ ID NO: 437412 - DNA, 15 bp, Homo sapiens
aagatctgattttta

SEQ ID NO: 437413 - DNA, 15 bp, Homo sapiens
caagatctgattttt

SEQ ID NO: 437414 - DNA, 15 bp, Homo sapiens
ccaagatctgatttt

SEQ ID NO: 437415 - DNA, 15 bp, Homo sapiens
tccaagatctgattt

SEQ ID NO: 437416 - DNA, 15 bp, Homo sapiens
ttccaagatctgatt

SEQ ID NO: 437417 - DNA, 15 bp, Homo sapiens
tttccaagatctgat

SEQ ID NO: 437418 - DNA, 15 bp, Homo sapiens
gtttccaagatctga

SEQ ID NO: 437419 - DNA, 15 bp, Homo sapiens
tgtttccaagatctg

SEQ ID NO: 437420 - DNA, 15 bp, Homo sapiens
gtgtttccaagatct

SEQ ID NO: 437421 - DNA, 15 bp, Homo sapiens
tgtgtttccaagatc

SEQ ID NO: 437422 - DNA, 15 bp, Homo sapiens
atgtgtttccaagat

SEQ ID NO: 437423 - DNA, 15 bp, Homo sapiens
tatgtgtttccaaga

SEQ ID NO: 437424 - DNA, 15 bp, Homo sapiens
ctatgtgtttccaag

SEQ ID NO: 437425 - DNA, 15 bp, Homo sapiens
gctatgtgtttccaa

SEQ ID NO: 437426 - DNA, 15 bp, Homo sapiens
tgctatgtgtttcca

SEQ ID NO: 437427 - DNA, 15 bp, Homo sapiens
gtgctatgtgtttcc

SEQ ID NO: 437428 - DNA, 15 bp, Homo sapiens
tgtgctatgtgtttc

SEQ ID NO: 437429 - DNA, 15 bp, Homo sapiens
ctgtgctatgtgttt

SEQ ID NO: 437430 - DNA, 15 bp, Homo sapiens
actgtgctatgtgtt

SEQ ID NO: 437431 - DNA, 15 bp, Homo sapiens
aactgtgctatgtgt

SEQ ID NO: 437432 - DNA, 15 bp, Homo sapiens
aaactgtgctatgtg

SEQ ID NO: 437433 - DNA, 15 bp, Homo sapiens
taaactgtgctatgt

SEQ ID NO: 437434 - DNA, 15 bp, Homo sapiens
ttaaactgtgctatg

SEQ ID NO: 437435 - DNA, 15 bp, Homo sapiens
tttaaactgtgctat

SEQ ID NO: 437436 - DNA, 15 bp, Homo sapiens
ttttaaactgtgcta

SEQ ID NO: 437437 - DNA, 15 bp, Homo sapiens
attttaaactgtgct

SEQ ID NO: 437438 - DNA, 15 bp, Homo sapiens
gattttaaactgtgc

SEQ ID NO: 437439 - DNA, 15 bp, Homo sapiens
tgattttaaactgtg

SEQ ID NO: 437440 - DNA, 15 bp, Homo sapiens
atgattttaaactgt

SEQ ID NO: 437441 - DNA, 15 bp, Homo sapiens
catgattttaaactg

SEQ ID NO: 437442 - DNA, 15 bp, Homo sapiens
acatgattttaaact

SEQ ID NO: 437443 - DNA, 15 bp, Homo sapiens
cacatgattttaaac

SEQ ID NO: 437444 - DNA, 15 bp, Homo sapiens
gcacatgattttaaa

SEQ ID NO: 437445 - DNA, 15 bp, Homo sapiens
agcacatgattttaa

SEQ ID NO: 437446 - DNA, 15 bp, Homo sapiens
gagcacatgatttta

SEQ ID NO: 437447 - DNA, 15 bp, Homo sapiens
tgagcacatgatttt

SEQ ID NO: 437448 - DNA, 15 bp, Homo sapiens
ctgagcacatgattt

SEQ ID NO: 437449 - DNA, 15 bp, Homo sapiens
tctgagcacatgatt

SEQ ID NO: 437450 - DNA, 15 bp, Homo sapiens
atctgagcacatgat

SEQ ID NO: 437451 - DNA, 15 bp, Homo sapiens
aatctgagcacatga

SEQ ID NO: 437452 - DNA, 15 bp, Homo sapiens
aaatctgagcacatg

SEQ ID NO: 437453 - DNA, 15 bp, Homo sapiens
caaatctgagcacat

SEQ ID NO: 437454 - DNA, 15 bp, Homo sapiens
acaaatctgagcaca

SEQ ID NO: 437455 - DNA, 15 bp, Homo sapiens
aacaaatctgagcac

SEQ ID NO: 437456 - DNA, 15 bp, Homo sapiens
gaacaaatctgagca

SEQ ID NO: 437457 - DNA, 15 bp, Homo sapiens
agaacaaatctgagc

SEQ ID NO: 437458 - DNA, 15 bp, Homo sapiens
tagaacaaatctgag

SEQ ID NO: 437459 - DNA, 15 bp, Homo sapiens
ctagaacaaatctga

SEQ ID NO: 437460 - DNA, 15 bp, Homo sapiens
tctagaacaaatctg

SEQ ID NO: 437461 - DNA, 15 bp, Homo sapiens
atctagaacaaatct

SEQ ID NO: 437462 - DNA, 15 bp, Homo sapiens
aatctagaacaaatc

SEQ ID NO: 437463 - DNA, 15 bp, Homo sapiens
aaatctagaacaaat

SEQ ID NO: 437464 - DNA, 15 bp, Homo sapiens
caaatctagaacaaa

SEQ ID NO: 437465 - DNA, 15 bp, Homo sapiens
acaaatctagaacaa

SEQ ID NO: 437466 - DNA, 15 bp, Homo sapiens
cacaaatctagaaca

SEQ ID NO: 437467 - DNA, 15 bp, Homo sapiens
tcacaaatctagaac

SEQ ID NO: 437468 - DNA, 15 bp, Homo sapiens
atcacaaatctagaa

SEQ ID NO: 437469 - DNA, 15 bp, Homo sapiens
tatcacaaatctaga

SEQ ID NO: 437470 - DNA, 15 bp, Homo sapiens
atatcacaaatctag

SEQ ID NO: 437471 - DNA, 15 bp, Homo sapiens
aatatcacaaatcta

SEQ ID NO: 437472 - DNA, 15 bp, Homo sapiens
caatatcacaaatct

SEQ ID NO: 437473 - DNA, 15 bp, Homo sapiens
ccaatatcacaaatc

SEQ ID NO: 437474 - DNA, 15 bp, Homo sapiens
gccaatatcacaaat

SEQ ID NO: 437475 - DNA, 15 bp, Homo sapiens
tgccaatatcacaaa

SEQ ID NO: 437476 - DNA, 15 bp, Homo sapiens
atgccaatatcacaa

SEQ ID NO: 437477 - DNA, 15 bp, Homo sapiens
tatgccaatatcaca

SEQ ID NO: 437478 - DNA, 15 bp, Homo sapiens
atatgccaatatcac

SEQ ID NO: 437479 - DNA, 15 bp, Homo sapiens
aatatgccaatatca

SEQ ID NO: 437480 - DNA, 15 bp, Homo sapiens
aaatatgccaatatc

SEQ ID NO: 437481 - DNA, 15 bp, Homo sapiens
gaaatatgccaatat

SEQ ID NO: 437482 - DNA, 15 bp, Homo sapiens
agaaatatgccaata

SEQ ID NO: 437483 - DNA, 15 bp, Homo sapiens
aagaaatatgccaat

SEQ ID NO: 437484 - DNA, 15 bp, Homo sapiens
taagaaatatgccaa

SEQ ID NO: 437485 - DNA, 15 bp, Homo sapiens
ttaagaaatatgcca

SEQ ID NO: 437486 - DNA, 15 bp, Homo sapiens
gttaagaaatatgcc

SEQ ID NO: 437487 - DNA, 15 bp, Homo sapiens
ggttaagaaatatgc

SEQ ID NO: 437488 - DNA, 15 bp, Homo sapiens
tggttaagaaatatg

SEQ ID NO: 437489 - DNA, 15 bp, Homo sapiens
atggttaagaaatat

SEQ ID NO: 437490 - DNA, 15 bp, Homo sapiens
aatggttaagaaata

SEQ ID NO: 437491 - DNA, 15 bp, Homo sapiens
gaatggttaagaaat

SEQ ID NO: 437492 - DNA, 15 bp, Homo sapiens
agaatggttaagaaa

SEQ ID NO: 437493 - DNA, 15 bp, Homo sapiens
cagaatggttaagaa

SEQ ID NO: 437494 - DNA, 15 bp, Homo sapiens
acagaatggttaaga

SEQ ID NO: 437495 - DNA, 15 bp, Homo sapiens
cacagaatggttaag

SEQ ID NO: 437496 - DNA, 15 bp, Homo sapiens
gcacagaatggttaa

SEQ ID NO: 437497 - DNA, 15 bp, Homo sapiens
agcacagaatggtta

SEQ ID NO: 437498 - DNA, 15 bp, Homo sapiens
aagcacagaatggtt

SEQ ID NO: 437499 - DNA, 15 bp, Homo sapiens
gaagcacagaatggt

SEQ ID NO: 437500 - DNA, 15 bp, Homo sapiens
tgaagcacagaatgg

SEQ ID NO: 437501 - DNA, 15 bp, Homo sapiens
atgaagcacagaatg

SEQ ID NO: 437502 - DNA, 15 bp, Homo sapiens
aatgaagcacagaat

SEQ ID NO: 437503 - DNA, 15 bp, Homo sapiens
aaatgaagcacagaa

SEQ ID NO: 437504 - DNA, 15 bp, Homo sapiens
aaaatgaagcacaga

SEQ ID NO: 437505 - DNA, 15 bp, Homo sapiens
gaaaatgaagcacag

SEQ ID NO: 437506 - DNA, 15 bp, Homo sapiens
ggaaaatgaagcaca

SEQ ID NO: 437507 - DNA, 15 bp, Homo sapiens
gggaaaatgaagcac

SEQ ID NO: 437508 - DNA, 15 bp, Homo sapiens
ggggaaaatgaagca

SEQ ID NO: 437509 - DNA, 15 bp, Homo sapiens
tggggaaaatgaagc

SEQ ID NO: 437510 - DNA, 15 bp, Homo sapiens
atggggaaaatgaag

SEQ ID NO: 437511 - DNA, 15 bp, Homo sapiens
gatggggaaaatgaa

SEQ ID NO: 437512 - DNA, 15 bp, Homo sapiens
agatggggaaaatga

SEQ ID NO: 437513 - DNA, 15 bp, Homo sapiens
tagatggggaaaatg

SEQ ID NO: 437514 - DNA, 15 bp, Homo sapiens
atagatggggaaaat

SEQ ID NO: 437515 - DNA, 15 bp, Homo sapiens
tatagatggggaaaa

SEQ ID NO: 437516 - DNA, 15 bp, Homo sapiens
ttatagatggggaaa

SEQ ID NO: 437517 - DNA, 15 bp, Homo sapiens
tttatagatggggaa

SEQ ID NO: 437518 - DNA, 15 bp, Homo sapiens
ttttatagatgggga

SEQ ID NO: 437519 - DNA, 15 bp, Homo sapiens
gttttatagatgggg

SEQ ID NO: 437520 - DNA, 15 bp, Homo sapiens
tgttttatagatggg

SEQ ID NO: 437521 - DNA, 15 bp, Homo sapiens
ctgttttatagatgg

SEQ ID NO: 437522 - DNA, 15 bp, Homo sapiens
cctgttttatagatg

SEQ ID NO: 437523 - DNA, 15 bp, Homo sapiens
ccctgttttatagat

SEQ ID NO: 437524 - DNA, 15 bp, Homo sapiens
gccctgttttataga

SEQ ID NO: 437525 - DNA, 15 bp, Homo sapiens
agccctgttttatag

SEQ ID NO: 437526 - DNA, 15 bp, Homo sapiens
tagccctgttttata

SEQ ID NO: 437527 - DNA, 15 bp, Homo sapiens
ttagccctgttttat

SEQ ID NO: 437528 - DNA, 15 bp, Homo sapiens
gttagccctgtttta

SEQ ID NO: 437529 - DNA, 15 bp, Homo sapiens
tgttagccctgtttt

SEQ ID NO: 437530 - DNA, 15 bp, Homo sapiens
ctgttagccctgttt

SEQ ID NO: 437531 - DNA, 15 bp, Homo sapiens
actgttagccctgtt

SEQ ID NO: 437532 - DNA, 15 bp, Homo sapiens
gactgttagccctgt

SEQ ID NO: 437533 - DNA, 15 bp, Homo sapiens
ggactgttagccctg

SEQ ID NO: 437534 - DNA, 15 bp, Homo sapiens
aggactgttagccct

SEQ ID NO: 437535 - DNA, 15 bp, Homo sapiens
taggactgttagccc

SEQ ID NO: 437536 - DNA, 15 bp, Homo sapiens
gtaggactgttagcc

SEQ ID NO: 437537 - DNA, 15 bp, Homo sapiens
ggtaggactgttagc

SEQ ID NO: 437538 - DNA, 15 bp, Homo sapiens
aggtaggactgttag

SEQ ID NO: 437539 - DNA, 15 bp, Homo sapiens
gaggtaggactgtta

SEQ ID NO: 437540 - DNA, 15 bp, Homo sapiens
tgaggtaggactgtt

SEQ ID NO: 437541 - DNA, 15 bp, Homo sapiens
atgaggtaggactgt

SEQ ID NO: 437542 - DNA, 15 bp, Homo sapiens
tatgaggtaggactg

SEQ ID NO: 437543 - DNA, 15 bp, Homo sapiens
ctatgaggtaggact

SEQ ID NO: 437544 - DNA, 15 bp, Homo sapiens
cctatgaggtaggac

SEQ ID NO: 437545 - DNA, 15 bp, Homo sapiens
tcctatgaggtagga

SEQ ID NO: 437546 - DNA, 15 bp, Homo sapiens
gtcctatgaggtagg

SEQ ID NO: 437547 - DNA, 15 bp, Homo sapiens
agtcctatgaggtag

SEQ ID NO: 437548 - DNA, 15 bp, Homo sapiens
gcagtcctatgaggt

SEQ ID NO: 437549 - DNA, 15 bp, Homo sapiens
agcagtcctatgagg

SEQ ID NO: 437550 - DNA, 15 bp, Homo sapiens
gagcagtcctatgag

SEQ ID NO: 437551 - DNA, 15 bp, Homo sapiens
agagcagtcctatga

SEQ ID NO: 437552 - DNA, 15 bp, Homo sapiens
cagagcagtcctatg

SEQ ID NO: 437553 - DNA, 15 bp, Homo sapiens
tcagagcagtcctat

SEQ ID NO: 437554 - DNA, 15 bp, Homo sapiens
ctcagagcagtccta

SEQ ID NO: 437555 - DNA, 15 bp, Homo sapiens
cctcagagcagtcct

SEQ ID NO: 437556 - DNA, 15 bp, Homo sapiens
tcctcagagcagtcc

SEQ ID NO: 437557 - DNA, 15 bp, Homo sapiens
atcctcagagcagtc

SEQ ID NO: 437558 - DNA, 15 bp, Homo sapiens
aatcctcagagcagt

SEQ ID NO: 437559 - DNA, 15 bp, Homo sapiens
taatcctcagagcag

SEQ ID NO: 437560 - DNA, 15 bp, Homo sapiens
ttaatcctcagagca

SEQ ID NO: 437561 - DNA, 15 bp, Homo sapiens
tttaatcctcagagc

SEQ ID NO: 437562 - DNA, 15 bp, Homo sapiens
atttaatcctcagag

SEQ ID NO: 437563 - DNA, 15 bp, Homo sapiens
tatttaatcctcaga

SEQ ID NO: 437564 - DNA, 15 bp, Homo sapiens
ctatttaatcctcag

SEQ ID NO: 437565 - DNA, 15 bp, Homo sapiens
cctatttaatcctca

SEQ ID NO: 437566 - DNA, 15 bp, Homo sapiens
tcctatttaatcctc

SEQ ID NO: 437567 - DNA, 15 bp, Homo sapiens
atcctatttaatcct

SEQ ID NO: 437568 - DNA, 15 bp, Homo sapiens
tatcctatttaatcc

SEQ ID NO: 437569 - DNA, 15 bp, Homo sapiens
ttatcctatttaatc

SEQ ID NO: 437570 - DNA, 15 bp, Homo sapiens
attatcctatttaat

SEQ ID NO: 437571 - DNA, 15 bp, Homo sapiens
cattatcctatttaa

SEQ ID NO: 437572 - DNA, 15 bp, Homo sapiens
acattatcctattta

SEQ ID NO: 437573 - DNA, 15 bp, Homo sapiens
tacattatcctattt

SEQ ID NO: 437574 - DNA, 15 bp, Homo sapiens
atacattatcctatt

SEQ ID NO: 437575 - DNA, 15 bp, Homo sapiens
tatacattatcctat

SEQ ID NO: 437576 - DNA, 15 bp, Homo sapiens
atatacattatccta

SEQ ID NO: 437577 - DNA, 15 bp, Homo sapiens
tatatacattatcct

SEQ ID NO: 437578 - DNA, 15 bp, Homo sapiens
ttatatacattatcc

SEQ ID NO: 437579 - DNA, 15 bp, Homo sapiens
gttatatacattatc

SEQ ID NO: 437580 - DNA, 15 bp, Homo sapiens
agttatatacattat

SEQ ID NO: 437581 - DNA, 15 bp, Homo sapiens
cagttatatacatta

SEQ ID NO: 437582 - DNA, 15 bp, Homo sapiens
tcagttatatacatt

SEQ ID NO: 437583 - DNA, 15 bp, Homo sapiens
atcagttatatacat

SEQ ID NO: 437584 - DNA, 15 bp, Homo sapiens
aatcagttatataca

SEQ ID NO: 437585 - DNA, 15 bp, Homo sapiens
taatcagttatatac

SEQ ID NO: 437586 - DNA, 15 bp, Homo sapiens
ttaatcagttatata

SEQ ID NO: 437587 - DNA, 15 bp, Homo sapiens
gttaatcagttatat

SEQ ID NO: 437588 - DNA, 15 bp, Homo sapiens
tgttaatcagttata

SEQ ID NO: 437589 - DNA, 15 bp, Homo sapiens
gtgttaatcagttat

SEQ ID NO: 437590 - DNA, 15 bp, Homo sapiens
ggtgttaatcagtta

SEQ ID NO: 437591 - DNA, 15 bp, Homo sapiens
tggtgttaatcagtt

SEQ ID NO: 437592 - DNA, 15 bp, Homo sapiens
ctggtgttaatcagt

SEQ ID NO: 437593 - DNA, 15 bp, Homo sapiens
actggtgttaatcag

SEQ ID NO: 437594 - DNA, 15 bp, Homo sapiens
cactggtgttaatca

SEQ ID NO: 437595 - DNA, 15 bp, Homo sapiens
gcactggtgttaatc

SEQ ID NO: 437596 - DNA, 15 bp, Homo sapiens
ggcactggtgttaat

SEQ ID NO: 437597 - DNA, 15 bp, Homo sapiens
aggcactggtgttaa

SEQ ID NO: 437598 - DNA, 15 bp, Homo sapiens
caggcactggtgtta

SEQ ID NO: 437599 - DNA, 15 bp, Homo sapiens
ccaggcactggtgtt

SEQ ID NO: 437600 - DNA, 15 bp, Homo sapiens
tccaggcactggtgt

SEQ ID NO: 437601 - DNA, 15 bp, Homo sapiens
ttccaggcactggtg

SEQ ID NO: 437602 - DNA, 15 bp, Homo sapiens
cttccaggcactggt

SEQ ID NO: 437603 - DNA, 15 bp, Homo sapiens
acttccaggcactgg

SEQ ID NO: 437604 - DNA, 15 bp, Homo sapiens
aacttccaggcactg

SEQ ID NO: 437605 - DNA, 15 bp, Homo sapiens
taacttccaggcact

SEQ ID NO: 437606 - DNA, 15 bp, Homo sapiens
ctaacttccaggcac

SEQ ID NO: 437607 - DNA, 15 bp, Homo sapiens
gctaacttccaggca

SEQ ID NO: 437608 - DNA, 15 bp, Homo sapiens
ggctaacttccaggc

SEQ ID NO: 437609 - DNA, 15 bp, Homo sapiens
aggctaacttccagg

SEQ ID NO: 437610 - DNA, 15 bp, Homo sapiens
aaggctaacttccag

SEQ ID NO: 437611 - DNA, 15 bp, Homo sapiens
aaaggctaacttcca

SEQ ID NO: 437612 - DNA, 15 bp, Homo sapiens
taaaggctaacttcc

SEQ ID NO: 437613 - DNA, 15 bp, Homo sapiens
ctaaaggctaacttc

SEQ ID NO: 437614 - DNA, 15 bp, Homo sapiens
actaaaggctaactt

SEQ ID NO: 437615 - DNA, 15 bp, Homo sapiens
tactaaaggctaact

SEQ ID NO: 437616 - DNA, 15 bp, Homo sapiens
ttactaaaggctaac

SEQ ID NO: 437617 - DNA, 15 bp, Homo sapiens
cttactaaaggctaa

SEQ ID NO: 437618 - DNA, 15 bp, Homo sapiens
acttactaaaggcta

SEQ ID NO: 437619 - DNA, 15 bp, Homo sapiens
cacttactaaaggct

SEQ ID NO: 437620 - DNA, 15 bp, Homo sapiens
acacttactaaaggc

SEQ ID NO: 437621 - DNA, 15 bp, Homo sapiens
aacacttactaaagg

SEQ ID NO: 437622 - DNA, 15 bp, Homo sapiens
caacacttactaaag

SEQ ID NO: 437623 - DNA, 15 bp, Homo sapiens
ccaacacttactaaa

SEQ ID NO: 437624 - DNA, 15 bp, Homo sapiens
gccaacacttactaa

SEQ ID NO: 437625 - DNA, 15 bp, Homo sapiens
tgccaacacttacta

SEQ ID NO: 437626 - DNA, 15 bp, Homo sapiens
ctgccaacacttact

SEQ ID NO: 437627 - DNA, 15 bp, Homo sapiens
actgccaacacttac

SEQ ID NO: 437628 - DNA, 15 bp, Homo sapiens
gactgccaacactta

SEQ ID NO: 437629 - DNA, 15 bp, Homo sapiens
tgactgccaacactt

SEQ ID NO: 437630 - DNA, 15 bp, Homo sapiens
atgactgccaacact

SEQ ID NO: 437631 - DNA, 15 bp, Homo sapiens
aatgactgccaacac

SEQ ID NO: 437632 - DNA, 15 bp, Homo sapiens
aaatgactgccaaca

SEQ ID NO: 437633 - DNA, 15 bp, Homo sapiens
aaaatgactgccaac

SEQ ID NO: 437634 - DNA, 15 bp, Homo sapiens
caaaatgactgccaa

SEQ ID NO: 437635 - DNA, 15 bp, Homo sapiens
tcaaaatgactgcca

SEQ ID NO: 437636 - DNA, 15 bp, Homo sapiens
atcaaaatgactgcc

SEQ ID NO: 437637 - DNA, 15 bp, Homo sapiens
catcaaaatgactgc

SEQ ID NO: 437638 - DNA, 15 bp, Homo sapiens
tcatcaaaatgactg

SEQ ID NO: 437639 - DNA, 15 bp, Homo sapiens
atcatcaaaatgact

SEQ ID NO: 437640 - DNA, 15 bp, Homo sapiens
catcatcaaaatgac

SEQ ID NO: 437641 - DNA, 15 bp, Homo sapiens
tcatcatcaaaatga

SEQ ID NO: 437642 - DNA, 15 bp, Homo sapiens
atcatcatcaaaatg

SEQ ID NO: 437643 - DNA, 15 bp, Homo sapiens
tatcatcatcaaaat

SEQ ID NO: 437644 - DNA, 15 bp, Homo sapiens
ttatcatcatcaaaa

SEQ ID NO: 437645 - DNA, 15 bp, Homo sapiens
attatcatcatcaaa

SEQ ID NO: 437646 - DNA, 15 bp, Homo sapiens
cattatcatcatcaa

SEQ ID NO: 437647 - DNA, 15 bp, Homo sapiens
ccattatcatcatca

SEQ ID NO: 437648 - DNA, 15 bp, Homo sapiens
accattatcatcatc

SEQ ID NO: 437649 - DNA, 15 bp, Homo sapiens
gaccattatcatcat

SEQ ID NO: 437650 - DNA, 15 bp, Homo sapiens
tgaccattatcatca

SEQ ID NO: 437651 - DNA, 15 bp, Homo sapiens
atgaccattatcatc

SEQ ID NO: 437652 - DNA, 15 bp, Homo sapiens
aatgaccattatcat

SEQ ID NO: 437653 - DNA, 15 bp, Homo sapiens
aaatgaccattatca

SEQ ID NO: 437654 - DNA, 15 bp, Homo sapiens
taaatgaccattatc

SEQ ID NO: 437655 - DNA, 15 bp, Homo sapiens
ctaaatgaccattat

SEQ ID NO: 437656 - DNA, 15 bp, Homo sapiens
cctaaatgaccatta

SEQ ID NO: 437657 - DNA, 15 bp, Homo sapiens
ccctaaatgaccatt

SEQ ID NO: 437658 - DNA, 15 bp, Homo sapiens
tccctaaatgaccat

SEQ ID NO: 437659 - DNA, 15 bp, Homo sapiens
ttccctaaatgacca

SEQ ID NO: 437660 - DNA, 15 bp, Homo sapiens
cttccctaaatgacc

SEQ ID NO: 437661 - DNA, 15 bp, Homo sapiens
tcttccctaaatgac

SEQ ID NO: 437662 - DNA, 15 bp, Homo sapiens
ttcttccctaaatga

SEQ ID NO: 437663 - DNA, 15 bp, Homo sapiens
cttcttccctaaatg

SEQ ID NO: 437664 - DNA, 15 bp, Homo sapiens
tcttcttccctaaat

SEQ ID NO: 437665 - DNA, 15 bp, Homo sapiens
atcttcttccctaaa

SEQ ID NO: 437666 - DNA, 15 bp, Homo sapiens
tatcttcttccctaa

SEQ ID NO: 437667 - DNA, 15 bp, Homo sapiens
atatcttcttcccta

SEQ ID NO: 437668 - DNA, 15 bp, Homo sapiens
catatcttcttccct

SEQ ID NO: 437669 - DNA, 15 bp, Homo sapiens
ccatatcttcttccc

SEQ ID NO: 437670 - DNA, 15 bp, Homo sapiens
tccatatcttcttcc

SEQ ID NO: 437671 - DNA, 15 bp, Homo sapiens
ctccatatcttcttc

SEQ ID NO: 437672 - DNA, 15 bp, Homo sapiens
cctccatatcttctt

SEQ ID NO: 437673 - DNA, 15 bp, Homo sapiens
ccctccatatcttct

SEQ ID NO: 437674 - DNA, 15 bp, Homo sapiens
tccctccatatcttc

SEQ ID NO: 437675 - DNA, 15 bp, Homo sapiens
ctccctccatatctt

SEQ ID NO: 437676 - DNA, 15 bp, Homo sapiens
gctccctccatatct

SEQ ID NO: 437677 - DNA, 15 bp, Homo sapiens
tgctccctccatatc

SEQ ID NO: 437678 - DNA, 15 bp, Homo sapiens
ttgctccctccatat

SEQ ID NO: 437679 - DNA, 15 bp, Homo sapiens
tttgctccctccata

SEQ ID NO: 437680 - DNA, 15 bp, Homo sapiens
ctttgctccctccat

SEQ ID NO: 437681 - DNA, 15 bp, Homo sapiens
gctttgctccctcca

SEQ ID NO: 437682 - DNA, 15 bp, Homo sapiens
agctttgctccctcc

SEQ ID NO: 437683 - DNA, 15 bp, Homo sapiens
cagctttgctccctc

SEQ ID NO: 437684 - DNA, 15 bp, Homo sapiens
acagctttgctccct

SEQ ID NO: 437685 - DNA, 15 bp, Homo sapiens
cacagctttgctccc

SEQ ID NO: 437686 - DNA, 15 bp, Homo sapiens
gcacagctttgctcc

SEQ ID NO: 437687 - DNA, 15 bp, Homo sapiens
tgcacagctttgctc

SEQ ID NO: 437688 - DNA, 15 bp, Homo sapiens
atgcacagctttgct

SEQ ID NO: 437689 - DNA, 15 bp, Homo sapiens
catgcacagctttgc

SEQ ID NO: 437690 - DNA, 15 bp, Homo sapiens
ccatgcacagctttg

SEQ ID NO: 437691 - DNA, 15 bp, Homo sapiens
accatgcacagcttt

SEQ ID NO: 437692 - DNA, 15 bp, Homo sapiens
taccatgcacagctt

SEQ ID NO: 437693 - DNA, 15 bp, Homo sapiens
ctaccatgcacagct

SEQ ID NO: 437694 - DNA, 15 bp, Homo sapiens
gctaccatgcacagc

SEQ ID NO: 437695 - DNA, 15 bp, Homo sapiens
agctaccatgcacag

SEQ ID NO: 437696 - DNA, 15 bp, Homo sapiens
aagctaccatgcaca

SEQ ID NO: 437697 - DNA, 15 bp, Homo sapiens
caagctaccatgcac

SEQ ID NO: 437698 - DNA, 15 bp, Homo sapiens
tcaagctaccatgca

SEQ ID NO: 437699 - DNA, 15 bp, Homo sapiens
ttcaagctaccatgc

SEQ ID NO: 437700 - DNA, 15 bp, Homo sapiens
attcaagctaccatg

SEQ ID NO: 437701 - DNA, 15 bp, Homo sapiens
gattcaagctaccat

SEQ ID NO: 437702 - DNA, 15 bp, Homo sapiens
tgattcaagctacca

SEQ ID NO: 437703 - DNA, 15 bp, Homo sapiens
ctgattcaagctacc

SEQ ID NO: 437704 - DNA, 15 bp, Homo sapiens
tctgattcaagctac

SEQ ID NO: 437705 - DNA, 15 bp, Homo sapiens
ttctgattcaagcta

SEQ ID NO: 437706 - DNA, 15 bp, Homo sapiens
tttctgattcaagct

SEQ ID NO: 437707 - DNA, 15 bp, Homo sapiens
ttttctgattcaagc

SEQ ID NO: 437708 - DNA, 15 bp, Homo sapiens
tttttctgattcaag

SEQ ID NO: 437709 - DNA, 15 bp, Homo sapiens
atttttctgattcaa

SEQ ID NO: 437710 - DNA, 15 bp, Homo sapiens
catttttctgattca

SEQ ID NO: 437711 - DNA, 15 bp, Homo sapiens
tcatttttctgattc

SEQ ID NO: 437712 - DNA, 15 bp, Homo sapiens
gtcatttttctgatt

SEQ ID NO: 437713 - DNA, 15 bp, Homo sapiens
agtcatttttctgat

SEQ ID NO: 437714 - DNA, 15 bp, Homo sapiens
tagtcatttttctga

SEQ ID NO: 437715 - DNA, 15 bp, Homo sapiens
ttagtcatttttctg

SEQ ID NO: 437716 - DNA, 15 bp, Homo sapiens
attagtcatttttct

SEQ ID NO: 437717 - DNA, 15 bp, Homo sapiens
tattagtcatttttc

SEQ ID NO: 437718 - DNA, 15 bp, Homo sapiens
ttattagtcattttt

SEQ ID NO: 437719 - DNA, 15 bp, Homo sapiens
cttattagtcatttt

SEQ ID NO: 437720 - DNA, 15 bp, Homo sapiens
gcttattagtcattt

SEQ ID NO: 437721 - DNA, 15 bp, Homo sapiens
agcttattagtcatt

SEQ ID NO: 437722 - DNA, 15 bp, Homo sapiens
cagcttattagtcat

SEQ ID NO: 437723 - DNA, 15 bp, Homo sapiens
ccagcttattagtca

SEQ ID NO: 437724 - DNA, 15 bp, Homo sapiens
tccagcttattagtc

SEQ ID NO: 437725 - DNA, 15 bp, Homo sapiens
ttccagcttattagt

SEQ ID NO: 437726 - DNA, 15 bp, Homo sapiens
attccagcttattag

SEQ ID NO: 437727 - DNA, 15 bp, Homo sapiens
cattccagcttatta

SEQ ID NO: 437728 - DNA, 15 bp, Homo sapiens
tcattccagcttatt

SEQ ID NO: 437729 - DNA, 15 bp, Homo sapiens
gtcattccagcttat

SEQ ID NO: 437730 - DNA, 15 bp, Homo sapiens
cgtcattccagctta

SEQ ID NO: 437731 - DNA, 15 bp, Homo sapiens
acgtcattccagctt

SEQ ID NO: 437732 - DNA, 15 bp, Homo sapiens
tacgtcattccagct

SEQ ID NO: 437733 - DNA, 15 bp, Homo sapiens
gtacgtcattccagc

SEQ ID NO: 437734 - DNA, 15 bp, Homo sapiens
agtacgtcattccag

SEQ ID NO: 437735 - DNA, 15 bp, Homo sapiens
cagtacgtcattcca

SEQ ID NO: 437736 - DNA, 15 bp, Homo sapiens
tcagtacgtcattcc

SEQ ID NO: 437737 - DNA, 15 bp, Homo sapiens
ttcagtacgtcattc

SEQ ID NO: 437738 - DNA, 15 bp, Homo sapiens
tttcagtacgtcatt

SEQ ID NO: 437739 - DNA, 15 bp, Homo sapiens
gtttcagtacgtcat

SEQ ID NO: 437740 - DNA, 15 bp, Homo sapiens
agtttcagtacgtca

SEQ ID NO: 437741 - DNA, 15 bp, Homo sapiens
tagtttcagtacgtc

SEQ ID NO: 437742 - DNA, 15 bp, Homo sapiens
atagtttcagtacgt

SEQ ID NO: 437743 - DNA, 15 bp, Homo sapiens
aatagtttcagtacg

SEQ ID NO: 437744 - DNA, 15 bp, Homo sapiens
taatagtttcagtac

SEQ ID NO: 437745 - DNA, 15 bp, Homo sapiens
ttaatagtttcagta

SEQ ID NO: 437746 - DNA, 15 bp, Homo sapiens
cttaatagtttcagt

SEQ ID NO: 437747 - DNA, 15 bp, Homo sapiens
tcttaatagtttcag

SEQ ID NO: 437748 - DNA, 15 bp, Homo sapiens
atcttaatagtttca

SEQ ID NO: 437749 - DNA, 15 bp, Homo sapiens
aatcttaatagtttc

SEQ ID NO: 437750 - DNA, 15 bp, Homo sapiens
aaatcttaatagttt

SEQ ID NO: 437751 - DNA, 15 bp, Homo sapiens
taaatcttaatagtt

SEQ ID NO: 437752 - DNA, 15 bp, Homo sapiens
ttaaatcttaatagt

SEQ ID NO: 437753 - DNA, 15 bp, Homo sapiens
attaaatcttaatag

SEQ ID NO: 437754 - DNA, 15 bp, Homo sapiens
cattaaatcttaata

SEQ ID NO: 437755 - DNA, 15 bp, Homo sapiens
ccattaaatcttaat

SEQ ID NO: 437756 - DNA, 15 bp, Homo sapiens
gccattaaatcttaa

SEQ ID NO: 437757 - DNA, 15 bp, Homo sapiens
agccattaaatctta

SEQ ID NO: 437758 - DNA, 15 bp, Homo sapiens
gagccattaaatctt

SEQ ID NO: 437759 - DNA, 15 bp, Homo sapiens
tgagccattaaatct

SEQ ID NO: 437760 - DNA, 15 bp, Homo sapiens
ctgagccattaaatc

SEQ ID NO: 437761 - DNA, 15 bp, Homo sapiens
tctgagccattaaat

SEQ ID NO: 437762 - DNA, 15 bp, Homo sapiens
atctgagccattaaa

SEQ ID NO: 437763 - DNA, 15 bp, Homo sapiens
aatctgagccattaa

SEQ ID NO: 437764 - DNA, 15 bp, Homo sapiens
aaatctgagccatta

SEQ ID NO: 437765 - DNA, 15 bp, Homo sapiens
taaatctgagccatt

SEQ ID NO: 437766 - DNA, 15 bp, Homo sapiens
ttaaatctgagccat

SEQ ID NO: 437767 - DNA, 15 bp, Homo sapiens
attaaatctgagcca

SEQ ID NO: 437768 - DNA, 15 bp, Homo sapiens
aattaaatctgagcc

SEQ ID NO: 437769 - DNA, 15 bp, Homo sapiens
aaattaaatctgagc

SEQ ID NO: 437770 - DNA, 15 bp, Homo sapiens
aaaattaaatctgag

SEQ ID NO: 437771 - DNA, 15 bp, Homo sapiens
taaaattaaatctga

SEQ ID NO: 437772 - DNA, 15 bp, Homo sapiens
ttaaaattaaatctg

SEQ ID NO: 437773 - DNA, 15 bp, Homo sapiens
cttaaaattaaatct

SEQ ID NO: 437774 - DNA, 15 bp, Homo sapiens
tcttaaaattaaatc

SEQ ID NO: 437775 - DNA, 15 bp, Homo sapiens
atcttaaaattaaat

SEQ ID NO: 437776 - DNA, 15 bp, Homo sapiens
aatcttaaaattaaa

SEQ ID NO: 437777 - DNA, 15 bp, Homo sapiens
aaatcttaaaattaa

SEQ ID NO: 437778 - DNA, 15 bp, Homo sapiens
caaatcttaaaatta

SEQ ID NO: 437779 - DNA, 15 bp, Homo sapiens
tcaaatcttaaaatt

SEQ ID NO: 437780 - DNA, 15 bp, Homo sapiens
ttcaaatcttaaaat

SEQ ID NO: 437781 - DNA, 15 bp, Homo sapiens
tttcaaatcttaaaa

SEQ ID NO: 437782 - DNA, 15 bp, Homo sapiens
atttcaaatcttaaa

SEQ ID NO: 437783 - DNA, 15 bp, Homo sapiens
aatttcaaatcttaa

SEQ ID NO: 437784 - DNA, 15 bp, Homo sapiens
aaatttcaaatctta

SEQ ID NO: 437785 - DNA, 15 bp, Homo sapiens
taaatttcaaatctt

SEQ ID NO: 437786 - DNA, 15 bp, Homo sapiens
ttaaatttcaaatct

SEQ ID NO: 437787 - DNA, 15 bp, Homo sapiens
attaaatttcaaatc

SEQ ID NO: 437788 - DNA, 15 bp, Homo sapiens
cattaaatttcaaat

SEQ ID NO: 437789 - DNA, 15 bp, Homo sapiens
ccattaaatttcaaa

SEQ ID NO: 437790 - DNA, 15 bp, Homo sapiens
tccattaaatttcaa

SEQ ID NO: 437791 - DNA, 15 bp, Homo sapiens
ttccattaaatttca

SEQ ID NO: 437792 - DNA, 15 bp, Homo sapiens
attccattaaatttc

SEQ ID NO: 437793 - DNA, 15 bp, Homo sapiens
gattccattaaattt

SEQ ID NO: 437794 - DNA, 15 bp, Homo sapiens
tgattccattaaatt

SEQ ID NO: 437795 - DNA, 15 bp, Homo sapiens
ctgattccattaaat

SEQ ID NO: 437796 - DNA, 15 bp, Homo sapiens
tctgattccattaaa

SEQ ID NO: 437797 - DNA, 15 bp, Homo sapiens
atctgattccattaa

SEQ ID NO: 437798 - DNA, 15 bp, Homo sapiens
catctgattccatta

SEQ ID NO: 437799 - DNA, 15 bp, Homo sapiens
acatctgattccatt

SEQ ID NO: 437800 - DNA, 15 bp, Homo sapiens
cacatctgattccat

SEQ ID NO: 437801 - DNA, 15 bp, Homo sapiens
tcacatctgattcca

SEQ ID NO: 437802 - DNA, 15 bp, Homo sapiens
ttcacatctgattcc

SEQ ID NO: 437803 - DNA, 15 bp, Homo sapiens
tttcacatctgattc

SEQ ID NO: 437804 - DNA, 15 bp, Homo sapiens
atttcacatctgatt

SEQ ID NO: 437805 - DNA, 15 bp, Homo sapiens
gatttcacatctgat

SEQ ID NO: 437806 - DNA, 15 bp, Homo sapiens
ggatttcacatctga

SEQ ID NO: 437807 - DNA, 15 bp, Homo sapiens
aggatttcacatctg

SEQ ID NO: 437808 - DNA, 15 bp, Homo sapiens
caggatttcacatct

SEQ ID NO: 437809 - DNA, 15 bp, Homo sapiens
gcaggatttcacatc

SEQ ID NO: 437810 - DNA, 15 bp, Homo sapiens
ggcaggatttcacat

SEQ ID NO: 437811 - DNA, 15 bp, Homo sapiens
aggcaggatttcaca

SEQ ID NO: 437812 - DNA, 15 bp, Homo sapiens
caggcaggatttcac

SEQ ID NO: 437813 - DNA, 15 bp, Homo sapiens
acaggcaggatttca

SEQ ID NO: 437814 - DNA, 15 bp, Homo sapiens
tacaggcaggatttc

SEQ ID NO: 437815 - DNA, 15 bp, Homo sapiens
atacaggcaggattt

SEQ ID NO: 437816 - DNA, 15 bp, Homo sapiens
catacaggcaggatt

SEQ ID NO: 437817 - DNA, 15 bp, Homo sapiens
acatacaggcaggat

SEQ ID NO: 437818 - DNA, 15 bp, Homo sapiens
aacatacaggcagga

SEQ ID NO: 437819 - DNA, 15 bp, Homo sapiens
aaacatacaggcagg

SEQ ID NO: 437820 - DNA, 15 bp, Homo sapiens
aaaacatacaggcag

SEQ ID NO: 437821 - DNA, 15 bp, Homo sapiens
aaaaacatacaggca

SEQ ID NO: 437822 - DNA, 15 bp, Homo sapiens
taaaaacatacaggc

SEQ ID NO: 437823 - DNA, 15 bp, Homo sapiens
ataaaaacatacagg

SEQ ID NO: 437824 - DNA, 15 bp, Homo sapiens
aataaaaacatacag

SEQ ID NO: 437825 - DNA, 15 bp, Homo sapiens
aaataaaaacataca

SEQ ID NO: 437826 - DNA, 15 bp, Homo sapiens
aaaataaaaacatac

SEQ ID NO: 437827 - DNA, 15 bp, Homo sapiens
aaaaataaaaacata

SEQ ID NO: 437828 - DNA, 15 bp, Homo sapiens
taaaaataaaaacat

SEQ ID NO: 437829 - DNA, 15 bp, Homo sapiens
ataaaaataaaaaca

SEQ ID NO: 437830 - DNA, 15 bp, Homo sapiens
aaaaaataaaaataa

SEQ ID NO: 437831 - DNA, 15 bp, Homo sapiens
taaaaaataaaaata

SEQ ID NO: 437832 - DNA, 15 bp, Homo sapiens
ttaaaaaataaaaat

SEQ ID NO: 437833 - DNA, 15 bp, Homo sapiens
attaaaaaataaaaa

SEQ ID NO: 437834 - DNA, 15 bp, Homo sapiens
cattaaaaaataaaa

SEQ ID NO: 437835 - DNA, 15 bp, Homo sapiens
acattaaaaaataaa

SEQ ID NO: 437836 - DNA, 15 bp, Homo sapiens
aacattaaaaaataa

SEQ ID NO: 437837 - DNA, 15 bp, Homo sapiens
tgaacattaaaaaat

SEQ ID NO: 437838 - DNA, 15 bp, Homo sapiens
atgaacattaaaaaa

SEQ ID NO: 437839 - DNA, 15 bp, Homo sapiens
catgaacattaaaaa

SEQ ID NO: 437840 - DNA, 15 bp, Homo sapiens
ccatgaacattaaaa

SEQ ID NO: 437841 - DNA, 15 bp, Homo sapiens
gccatgaacattaaa

SEQ ID NO: 437842 - DNA, 15 bp, Homo sapiens
agccatgaacattaa

SEQ ID NO: 437843 - DNA, 15 bp, Homo sapiens
aagccatgaacatta

SEQ ID NO: 437844 - DNA, 15 bp, Homo sapiens
taagccatgaacatt

SEQ ID NO: 437845 - DNA, 15 bp, Homo sapiens
gtaagccatgaacat

SEQ ID NO: 437846 - DNA, 15 bp, Homo sapiens
tgtaagccatgaaca

SEQ ID NO: 437847 - DNA, 15 bp, Homo sapiens
atgtaagccatgaac

SEQ ID NO: 437848 - DNA, 15 bp, Homo sapiens
tatgtaagccatgaa

SEQ ID NO: 437849 - DNA, 15 bp, Homo sapiens
ttatgtaagccatga

SEQ ID NO: 437850 - DNA, 15 bp, Homo sapiens
tttatgtaagccatg

SEQ ID NO: 437851 - DNA, 15 bp, Homo sapiens
ttttatgtaagccat

SEQ ID NO: 437852 - DNA, 15 bp, Homo sapiens
cttttatgtaagcca

SEQ ID NO: 437853 - DNA, 15 bp, Homo sapiens
ccttttatgtaagcc

SEQ ID NO: 437854 - DNA, 15 bp, Homo sapiens
cccttttatgtaagc

SEQ ID NO: 437855 - DNA, 15 bp, Homo sapiens
tcccttttatgtaag

SEQ ID NO: 437856 - DNA, 15 bp, Homo sapiens
ctcccttttatgtaa

SEQ ID NO: 437857 - DNA, 15 bp, Homo sapiens
tctcccttttatgta

SEQ ID NO: 437858 - DNA, 15 bp, Homo sapiens
ttctcccttttatgt

SEQ ID NO: 437859 - DNA, 15 bp, Homo sapiens
tttctcccttttatg

SEQ ID NO: 437860 - DNA, 15 bp, Homo sapiens
ttttctcccttttat

SEQ ID NO: 437861 - DNA, 15 bp, Homo sapiens
cttttctccctttta

SEQ ID NO: 437862 - DNA, 15 bp, Homo sapiens
tcttttctccctttt

SEQ ID NO: 437863 - DNA, 15 bp, Homo sapiens
gtcttttctcccttt

SEQ ID NO: 437864 - DNA, 15 bp, Homo sapiens
ggtcttttctccctt

SEQ ID NO: 437865 - DNA, 15 bp, Homo sapiens
aggtcttttctccct

SEQ ID NO: 437866 - DNA, 15 bp, Homo sapiens
caggtcttttctccc

SEQ ID NO: 437867 - DNA, 15 bp, Homo sapiens
tcaggtcttttctcc

SEQ ID NO: 437868 - DNA, 15 bp, Homo sapiens
gtcaggtcttttctc

SEQ ID NO: 437869 - DNA, 15 bp, Homo sapiens
agtcaggtcttttct

SEQ ID NO: 437870 - DNA, 15 bp, Homo sapiens
aagtcaggtcttttc

SEQ ID NO: 437871 - DNA, 15 bp, Homo sapiens
aaagtcaggtctttt

SEQ ID NO: 437872 - DNA, 15 bp, Homo sapiens
taaagtcaggtcttt

SEQ ID NO: 437873 - DNA, 15 bp, Homo sapiens
ctaaagtcaggtctt

SEQ ID NO: 437874 - DNA, 15 bp, Homo sapiens
gctaaagtcaggtct

SEQ ID NO: 437875 - DNA, 15 bp, Homo sapiens
agctaaagtcaggtc

SEQ ID NO: 437876 - DNA, 15 bp, Homo sapiens
cagctaaagtcaggt

SEQ ID NO: 437877 - DNA, 15 bp, Homo sapiens
tcagctaaagtcagg

SEQ ID NO: 437878 - DNA, 15 bp, Homo sapiens
ttcagctaaagtcag

SEQ ID NO: 437879 - DNA, 15 bp, Homo sapiens
cttcagctaaagtca

SEQ ID NO: 437880 - DNA, 15 bp, Homo sapiens
acttcagctaaagtc

SEQ ID NO: 437881 - DNA, 15 bp, Homo sapiens
gacttcagctaaagt

SEQ ID NO: 437882 - DNA, 15 bp, Homo sapiens
agacttcagctaaag

SEQ ID NO: 437883 - DNA, 15 bp, Homo sapiens
tagacttcagctaaa

SEQ ID NO: 437884 - DNA, 15 bp, Homo sapiens
atagacttcagctaa

SEQ ID NO: 437885 - DNA, 15 bp, Homo sapiens
aatagacttcagcta

SEQ ID NO: 437886 - DNA, 15 bp, Homo sapiens
aaatagacttcagct

SEQ ID NO: 437887 - DNA, 15 bp, Homo sapiens
caaatagacttcagc

SEQ ID NO: 437888 - DNA, 15 bp, Homo sapiens
tcaaatagacttcag

SEQ ID NO: 437889 - DNA, 15 bp, Homo sapiens
ttcaaatagacttca

SEQ ID NO: 437890 - DNA, 15 bp, Homo sapiens
attcaaatagacttc

SEQ ID NO: 437891 - DNA, 15 bp, Homo sapiens
tattcaaatagactt

SEQ ID NO: 437892 - DNA, 15 bp, Homo sapiens
ctattcaaatagact

SEQ ID NO: 437893 - DNA, 15 bp, Homo sapiens
tctattcaaatagac

SEQ ID NO: 437894 - DNA, 15 bp, Homo sapiens
ttctattcaaataga

SEQ ID NO: 437895 - DNA, 15 bp, Homo sapiens
attctattcaaatag

SEQ ID NO: 437896 - DNA, 15 bp, Homo sapiens
aattctattcaaata

SEQ ID NO: 437897 - DNA, 15 bp, Homo sapiens
caattctattcaaat

SEQ ID NO: 437898 - DNA, 15 bp, Homo sapiens
ccaattctattcaaa

SEQ ID NO: 437899 - DNA, 15 bp, Homo sapiens
tccaattctattcaa

SEQ ID NO: 437900 - DNA, 15 bp, Homo sapiens
ctccaattctattca

SEQ ID NO: 437901 - DNA, 15 bp, Homo sapiens
cctccaattctattc

SEQ ID NO: 437902 - DNA, 15 bp, Homo sapiens
acctccaattctatt

SEQ ID NO: 437903 - DNA, 15 bp, Homo sapiens
cacctccaattctat

SEQ ID NO: 437904 - DNA, 15 bp, Homo sapiens
ccacctccaattcta

SEQ ID NO: 437905 - DNA, 15 bp, Homo sapiens
cccacctccaattct

SEQ ID NO: 437906 - DNA, 15 bp, Homo sapiens
ccccacctccaattc

SEQ ID NO: 437907 - DNA, 15 bp, Homo sapiens
cccccacctccaatt

SEQ ID NO: 437908 - DNA, 15 bp, Homo sapiens
ccccccacctccaat

SEQ ID NO: 437909 - DNA, 15 bp, Homo sapiens
accccccacctccaa

SEQ ID NO: 437910 - DNA, 15 bp, Homo sapiens
taccccccacctcca

SEQ ID NO: 437911 - DNA, 15 bp, Homo sapiens
ataccccccacctcc

SEQ ID NO: 437912 - DNA, 15 bp, Homo sapiens
aataccccccacctc

SEQ ID NO: 437913 - DNA, 15 bp, Homo sapiens
caataccccccacct

SEQ ID NO: 437914 - DNA, 15 bp, Homo sapiens
acaataccccccacc

SEQ ID NO: 437915 - DNA, 15 bp, Homo sapiens
aacaataccccccac

SEQ ID NO: 437916 - DNA, 15 bp, Homo sapiens
caacaatacccccca

SEQ ID NO: 437917 - DNA, 15 bp, Homo sapiens
tcaacaatacccccc

SEQ ID NO: 437918 - DNA, 15 bp, Homo sapiens
gtcaacaataccccc

SEQ ID NO: 437919 - DNA, 15 bp, Homo sapiens
ggtcaacaatacccc

SEQ ID NO: 437920 - DNA, 15 bp, Homo sapiens
tggtcaacaataccc

SEQ ID NO: 437921 - DNA, 15 bp, Homo sapiens
gtggtcaacaatacc

SEQ ID NO: 437922 - DNA, 15 bp, Homo sapiens
tgtggtcaacaatac

SEQ ID NO: 437923 - DNA, 15 bp, Homo sapiens
gtgtggtcaacaata

SEQ ID NO: 437924 - DNA, 15 bp, Homo sapiens
tgtgtggtcaacaat

SEQ ID NO: 437925 - DNA, 15 bp, Homo sapiens
ttgtgtggtcaacaa

SEQ ID NO: 437926 - DNA, 15 bp, Homo sapiens
attgtgtggtcaaca

SEQ ID NO: 437927 - DNA, 15 bp, Homo sapiens
gattgtgtggtcaac

SEQ ID NO: 437928 - DNA, 15 bp, Homo sapiens
tgattgtgtggtcaa

SEQ ID NO: 437929 - DNA, 15 bp, Homo sapiens
atgattgtgtggtca

SEQ ID NO: 437930 - DNA, 15 bp, Homo sapiens
tatgattgtgtggtc

SEQ ID NO: 437931 - DNA, 15 bp, Homo sapiens
ctatgattgtgtggt

SEQ ID NO: 437932 - DNA, 15 bp, Homo sapiens
cctatgattgtgtgg

SEQ ID NO: 437933 - DNA, 15 bp, Homo sapiens
tcctatgattgtgtg

SEQ ID NO: 437934 - DNA, 15 bp, Homo sapiens
ttcctatgattgtgt

SEQ ID NO: 437935 - DNA, 15 bp, Homo sapiens
gttcctatgattgtg

SEQ ID NO: 437936 - DNA, 15 bp, Homo sapiens
tgttcctatgattgt

SEQ ID NO: 437937 - DNA, 15 bp, Homo sapiens
ttgttcctatgattg

SEQ ID NO: 437938 - DNA, 15 bp, Homo sapiens
tttgttcctatgatt

SEQ ID NO: 437939 - DNA, 15 bp, Homo sapiens
gtttgttcctatgat

SEQ ID NO: 437940 - DNA, 15 bp, Homo sapiens
tgtttgttcctatga

SEQ ID NO: 437941 - DNA, 15 bp, Homo sapiens
ctgtttgttcctatg

SEQ ID NO: 437942 - DNA, 15 bp, Homo sapiens
tctgtttgttcctat

SEQ ID NO: 437943 - DNA, 15 bp, Homo sapiens
ctctgtttgttccta

SEQ ID NO: 437944 - DNA, 15 bp, Homo sapiens
actctgtttgttcct

SEQ ID NO: 437945 - DNA, 15 bp, Homo sapiens
gactctgtttgttcc

SEQ ID NO: 437946 - DNA, 15 bp, Homo sapiens
ggactctgtttgttc

SEQ ID NO: 437947 - DNA, 15 bp, Homo sapiens
gggactctgtttgtt

SEQ ID NO: 437948 - DNA, 15 bp, Homo sapiens
tgggactctgtttgt

SEQ ID NO: 437949 - DNA, 15 bp, Homo sapiens
ctgggactctgtttg

SEQ ID NO: 437950 - DNA, 15 bp, Homo sapiens
gctgggactctgttt

SEQ ID NO: 437951 - DNA, 15 bp, Homo sapiens
agctgggactctgtt

SEQ ID NO: 437952 - DNA, 15 bp, Homo sapiens
cagctgggactctgt

SEQ ID NO: 437953 - DNA, 15 bp, Homo sapiens
gcagctgggactctg

SEQ ID NO: 437954 - DNA, 15 bp, Homo sapiens
agcagctgggactct

SEQ ID NO: 437955 - DNA, 15 bp, Homo sapiens
gagcagctgggactc

SEQ ID NO: 437956 - DNA, 15 bp, Homo sapiens
tgagcagctgggact

SEQ ID NO: 437957 - DNA, 15 bp, Homo sapiens
ttgagcagctgggac

SEQ ID NO: 437958 - DNA, 15 bp, Homo sapiens
gttgagcagctggga

SEQ ID NO: 437959 - DNA, 15 bp, Homo sapiens
tgttgagcagctggg

SEQ ID NO: 437960 - DNA, 15 bp, Homo sapiens
gtgttgagcagctgg

SEQ ID NO: 437961 - DNA, 15 bp, Homo sapiens
ggtgttgagcagctg

SEQ ID NO: 437962 - DNA, 15 bp, Homo sapiens
tggtgttgagcagct

SEQ ID NO: 437963 - DNA, 15 bp, Homo sapiens
ctggtgttgagcagc

SEQ ID NO: 437964 - DNA, 15 bp, Homo sapiens
cctggtgttgagcag

SEQ ID NO: 437965 - DNA, 15 bp, Homo sapiens
ccctggtgttgagca

SEQ ID NO: 437966 - DNA, 15 bp, Homo sapiens
gccctggtgttgagc

SEQ ID NO: 437967 - DNA, 15 bp, Homo sapiens
ggccctggtgttgag

SEQ ID NO: 437968 - DNA, 15 bp, Homo sapiens
cggccctggtgttga

SEQ ID NO: 437969 - DNA, 15 bp, Homo sapiens
acggccctggtgttg

SEQ ID NO: 437970 - DNA, 15 bp, Homo sapiens
aacggccctggtgtt

SEQ ID NO: 437971 - DNA, 15 bp, Homo sapiens
gaacggccctggtgt

SEQ ID NO: 437972 - DNA, 15 bp, Homo sapiens
agaacggccctggtg

SEQ ID NO: 437973 - DNA, 15 bp, Homo sapiens
tagaacggccctggt

SEQ ID NO: 437974 - DNA, 15 bp, Homo sapiens
ctagaacggccctgg

SEQ ID NO: 437975 - DNA, 15 bp, Homo sapiens
gctagaacggccctg

SEQ ID NO: 437976 - DNA, 15 bp, Homo sapiens
agctagaacggccct

SEQ ID NO: 437977 - DNA, 15 bp, Homo sapiens
cagctagaacggccc

SEQ ID NO: 437978 - DNA, 15 bp, Homo sapiens
ccagctagaacggcc

SEQ ID NO: 437979 - DNA, 15 bp, Homo sapiens
accagctagaacggc

SEQ ID NO: 437980 - DNA, 15 bp, Homo sapiens
taccagctagaacgg

SEQ ID NO: 437981 - DNA, 15 bp, Homo sapiens
ataccagctagaacg

SEQ ID NO: 437982 - DNA, 15 bp, Homo sapiens
aataccagctagaac

SEQ ID NO: 437983 - DNA, 15 bp, Homo sapiens
gaataccagctagaa

SEQ ID NO: 437984 - DNA, 15 bp, Homo sapiens
tgaataccagctaga

SEQ ID NO: 437985 - DNA, 15 bp, Homo sapiens
ctgaataccagctag

SEQ ID NO: 437986 - DNA, 15 bp, Homo sapiens
tctgaataccagcta

SEQ ID NO: 437987 - DNA, 15 bp, Homo sapiens
ctctgaataccagct

SEQ ID NO: 437988 - DNA, 15 bp, Homo sapiens
tctctgaataccagc

SEQ ID NO: 437989 - DNA, 15 bp, Homo sapiens
gtctctgaataccag

SEQ ID NO: 437990 - DNA, 15 bp, Homo sapiens
cgtctctgaatacca

SEQ ID NO: 437991 - DNA, 15 bp, Homo sapiens
acgtctctgaatacc

SEQ ID NO: 437992 - DNA, 15 bp, Homo sapiens
tacgtctctgaatac

SEQ ID NO: 437993 - DNA, 15 bp, Homo sapiens
ctacgtctctgaata

SEQ ID NO: 437994 - DNA, 15 bp, Homo sapiens
tctacgtctctgaat

SEQ ID NO: 437995 - DNA, 15 bp, Homo sapiens
ctctacgtctctgaa

SEQ ID NO: 437996 - DNA, 15 bp, Homo sapiens
actctacgtctctga

SEQ ID NO: 437997 - DNA, 15 bp, Homo sapiens
cactctacgtctctg

SEQ ID NO: 437998 - DNA, 15 bp, Homo sapiens
ccactctacgtctct

SEQ ID NO: 437999 - DNA, 15 bp, Homo sapiens
gccactctacgtctc

SEQ ID NO: 438000 - DNA, 15 bp, Homo sapiens
tgccactctacgtct

SEQ ID NO: 438001 - DNA, 15 bp, Homo sapiens
gtgccactctacgtc

SEQ ID NO: 438002 - DNA, 15 bp, Homo sapiens
tgtgccactctacgt

SEQ ID NO: 438003 - DNA, 15 bp, Homo sapiens
ctgtgccactctacg

SEQ ID NO: 438004 - DNA, 15 bp, Homo sapiens
gctgtgccactctac

SEQ ID NO: 438005 - DNA, 15 bp, Homo sapiens
agctgtgccactcta

SEQ ID NO: 438006 - DNA, 15 bp, Homo sapiens
gagctgtgccactct

SEQ ID NO: 438007 - DNA, 15 bp, Homo sapiens
ggagctgtgccactc

SEQ ID NO: 438008 - DNA, 15 bp, Homo sapiens
aggagctgtgccact

SEQ ID NO: 438009 - DNA, 15 bp, Homo sapiens
gaggagctgtgccac

SEQ ID NO: 438010 - DNA, 15 bp, Homo sapiens
tgaggagctgtgcca

SEQ ID NO: 438011 - DNA, 15 bp, Homo sapiens
ctgaggagctgtgcc

SEQ ID NO: 438012 - DNA, 15 bp, Homo sapiens
tctgaggagctgtgc

SEQ ID NO: 438013 - DNA, 15 bp, Homo sapiens
gtctgaggagctgtg

SEQ ID NO: 438014 - DNA, 15 bp, Homo sapiens
agtctgaggagctgt

SEQ ID NO: 438015 - DNA, 15 bp, Homo sapiens
cagtctgaggagctg

SEQ ID NO: 438016 - DNA, 15 bp, Homo sapiens
gcagtctgaggagct

SEQ ID NO: 438017 - DNA, 15 bp, Homo sapiens
tgcagtctgaggagc

SEQ ID NO: 438018 - DNA, 15 bp, Homo sapiens
gtgcagtctgaggag

SEQ ID NO: 438019 - DNA, 15 bp, Homo sapiens
cgtgcagtctgagga

SEQ ID NO: 438020 - DNA, 15 bp, Homo sapiens
acgtgcagtctgagg

SEQ ID NO: 438021 - DNA, 15 bp, Homo sapiens
aacgtgcagtctgag

SEQ ID NO: 438022 - DNA, 15 bp, Homo sapiens
aaacgtgcagtctga

SEQ ID NO: 438023 - DNA, 15 bp, Homo sapiens
aaaacgtgcagtctg

SEQ ID NO: 438024 - DNA, 15 bp, Homo sapiens
gaaaacgtgcagtct

SEQ ID NO: 438025 - DNA, 15 bp, Homo sapiens
ggaaaacgtgcagtc

SEQ ID NO: 438026 - DNA, 15 bp, Homo sapiens
gggaaaacgtgcagt

SEQ ID NO: 438027 - DNA, 15 bp, Homo sapiens
agggaaaacgtgcag

SEQ ID NO: 438028 - DNA, 15 bp, Homo sapiens
cagggaaaacgtgca

SEQ ID NO: 438029 - DNA, 15 bp, Homo sapiens
tcagggaaaacgtgc

SEQ ID NO: 438030 - DNA, 15 bp, Homo sapiens
ctcagggaaaacgtg

SEQ ID NO: 438031 - DNA, 15 bp, Homo sapiens
gctcagggaaaacgt

SEQ ID NO: 438032 - DNA, 15 bp, Homo sapiens
agctcagggaaaacg

SEQ ID NO: 438033 - DNA, 15 bp, Homo sapiens
gagctcagggaaaac

SEQ ID NO: 438034 - DNA, 15 bp, Homo sapiens
agagctcagggaaaa

SEQ ID NO: 438035 - DNA, 15 bp, Homo sapiens
gagagctcagggaaa

SEQ ID NO: 438036 - DNA, 15 bp, Homo sapiens
agagagctcagggaa

SEQ ID NO: 438037 - DNA, 15 bp, Homo sapiens
tagagagctcaggga

SEQ ID NO: 438038 - DNA, 15 bp, Homo sapiens
gtagagagctcaggg

SEQ ID NO: 438039 - DNA, 15 bp, Homo sapiens
agtagagagctcagg

SEQ ID NO: 438040 - DNA, 15 bp, Homo sapiens
cagtagagagctcag

SEQ ID NO: 438041 - DNA, 15 bp, Homo sapiens
ccagtagagagctca

SEQ ID NO: 438042 - DNA, 15 bp, Homo sapiens
accagtagagagctc

SEQ ID NO: 438043 - DNA, 15 bp, Homo sapiens
gaccagtagagagct

SEQ ID NO: 438044 - DNA, 15 bp, Homo sapiens
tgaccagtagagagc

SEQ ID NO: 438045 - DNA, 15 bp, Homo sapiens
ctgaccagtagagag

SEQ ID NO: 438046 - DNA, 15 bp, Homo sapiens
actgaccagtagaga

SEQ ID NO: 438047 - DNA, 15 bp, Homo sapiens
aactgaccagtagag

SEQ ID NO: 438048 - DNA, 15 bp, Homo sapiens
aaactgaccagtaga

SEQ ID NO: 438049 - DNA, 15 bp, Homo sapiens
caaactgaccagtag

SEQ ID NO: 438050 - DNA, 15 bp, Homo sapiens
ccaaactgaccagta

SEQ ID NO: 438051 - DNA, 15 bp, Homo sapiens
cccaaactgaccagt

SEQ ID NO: 438052 - DNA, 15 bp, Homo sapiens
ccccaaactgaccag

SEQ ID NO: 438053 - DNA, 15 bp, Homo sapiens
cccccaaactgacca

SEQ ID NO: 438054 - DNA, 15 bp, Homo sapiens
tcccccaaactgacc

SEQ ID NO: 438055 - DNA, 15 bp, Homo sapiens
atcccccaaactgac

SEQ ID NO: 438056 - DNA, 15 bp, Homo sapiens
aatcccccaaactga

SEQ ID NO: 438057 - DNA, 15 bp, Homo sapiens
aaatcccccaaactg

SEQ ID NO: 438058 - DNA, 15 bp, Homo sapiens
taaatcccccaaact

SEQ ID NO: 438059 - DNA, 15 bp, Homo sapiens
ctaaatcccccaaac

SEQ ID NO: 438060 - DNA, 15 bp, Homo sapiens
tctaaatcccccaaa

SEQ ID NO: 438061 - DNA, 15 bp, Homo sapiens
ctctaaatcccccaa

SEQ ID NO: 438062 - DNA, 15 bp, Homo sapiens
cctctaaatccccca

SEQ ID NO: 438063 - DNA, 15 bp, Homo sapiens
tcctctaaatccccc

SEQ ID NO: 438064 - DNA, 15 bp, Homo sapiens
atcctctaaatcccc

SEQ ID NO: 438065 - DNA, 15 bp, Homo sapiens
aatcctctaaatccc

SEQ ID NO: 438066 - DNA, 15 bp, Homo sapiens
caatcctctaaatcc

SEQ ID NO: 438067 - DNA, 15 bp, Homo sapiens
acaatcctctaaatc

SEQ ID NO: 438068 - DNA, 15 bp, Homo sapiens
aacaatcctctaaat

SEQ ID NO: 438069 - DNA, 15 bp, Homo sapiens
aaacaatcctctaaa

SEQ ID NO: 438070 - DNA, 15 bp, Homo sapiens
aaaacaatcctctaa

SEQ ID NO: 438071 - DNA, 15 bp, Homo sapiens
gaaaacaatcctcta

SEQ ID NO: 438072 - DNA, 15 bp, Homo sapiens
tgaaaacaatcctct

SEQ ID NO: 438073 - DNA, 15 bp, Homo sapiens
atgaaaacaatcctc

SEQ ID NO: 438074 - DNA, 15 bp, Homo sapiens
aatgaaaacaatcct

SEQ ID NO: 438075 - DNA, 15 bp, Homo sapiens
aaatgaaaacaatcc

SEQ ID NO: 438076 - DNA, 15 bp, Homo sapiens
gaaatgaaaacaatc

SEQ ID NO: 438077 - DNA, 15 bp, Homo sapiens
agaaatgaaaacaat

SEQ ID NO: 438078 - DNA, 15 bp, Homo sapiens
tagaaatgaaaacaa

SEQ ID NO: 438079 - DNA, 15 bp, Homo sapiens
ttagaaatgaaaaca

SEQ ID NO: 438080 - DNA, 15 bp, Homo sapiens
attagaaatgaaaac

SEQ ID NO: 438081 - DNA, 15 bp, Homo sapiens
aattagaaatgaaaa

SEQ ID NO: 438082 - DNA, 15 bp, Homo sapiens
gaattagaaatgaaa

SEQ ID NO: 438083 - DNA, 15 bp, Homo sapiens
agaattagaaatgaa

SEQ ID NO: 438084 - DNA, 15 bp, Homo sapiens
gagaattagaaatga

SEQ ID NO: 438085 - DNA, 15 bp, Homo sapiens
tgagaattagaaatg

SEQ ID NO: 438086 - DNA, 15 bp, Homo sapiens
atgagaattagaaat

SEQ ID NO: 438087 - DNA, 15 bp, Homo sapiens
tatgagaattagaaa

SEQ ID NO: 438088 - DNA, 15 bp, Homo sapiens
atatgagaattagaa

SEQ ID NO: 438089 - DNA, 15 bp, Homo sapiens
aatatgagaattaga

SEQ ID NO: 438090 - DNA, 15 bp, Homo sapiens
aaatatgagaattag

SEQ ID NO: 438091 - DNA, 15 bp, Homo sapiens
aaaatatgagaatta

SEQ ID NO: 438092 - DNA, 15 bp, Homo sapiens
caaaatatgagaatt

SEQ ID NO: 438093 - DNA, 15 bp, Homo sapiens
tcaaaatatgagaat

SEQ ID NO: 438094 - DNA, 15 bp, Homo sapiens
ttcaaaatatgagaa

SEQ ID NO: 438095 - DNA, 15 bp, Homo sapiens
tttcaaaatatgaga

SEQ ID NO: 438096 - DNA, 15 bp, Homo sapiens
atttcaaaatatgag

SEQ ID NO: 438097 - DNA, 15 bp, Homo sapiens
gatttcaaaatatga

SEQ ID NO: 438098 - DNA, 15 bp, Homo sapiens
tgatttcaaaatatg

SEQ ID NO: 438099 - DNA, 15 bp, Homo sapiens
gtgatttcaaaatat

SEQ ID NO: 438100 - DNA, 15 bp, Homo sapiens
tgtgatttcaaaata

SEQ ID NO: 438101 - DNA, 15 bp, Homo sapiens
atgtgatttcaaaat

SEQ ID NO: 438102 - DNA, 15 bp, Homo sapiens
catgtgatttcaaaa

SEQ ID NO: 438103 - DNA, 15 bp, Homo sapiens
acatgtgatttcaaa

SEQ ID NO: 438104 - DNA, 15 bp, Homo sapiens
cacatgtgatttcaa

SEQ ID NO: 438105 - DNA, 15 bp, Homo sapiens
ccacatgtgatttca

SEQ ID NO: 438106 - DNA, 15 bp, Homo sapiens
gccacatgtgatttc

SEQ ID NO: 438107 - DNA, 15 bp, Homo sapiens
ggccacatgtgattt

SEQ ID NO: 438108 - DNA, 15 bp, Homo sapiens
tggccacatgtgatt

SEQ ID NO: 438109 - DNA, 15 bp, Homo sapiens
ctggccacatgtgat

SEQ ID NO: 438110 - DNA, 15 bp, Homo sapiens
cctggccacatgtga

SEQ ID NO: 438111 - DNA, 15 bp, Homo sapiens
acctggccacatgtg

SEQ ID NO: 438112 - DNA, 15 bp, Homo sapiens
tacctggccacatgt

SEQ ID NO: 438113 - DNA, 15 bp, Homo sapiens
ttacctggccacatg

SEQ ID NO: 438114 - DNA, 15 bp, Homo sapiens
attacctggccacat

SEQ ID NO: 438115 - DNA, 15 bp, Homo sapiens
tattacctggccaca

SEQ ID NO: 438116 - DNA, 15 bp, Homo sapiens
ttattacctggccac

SEQ ID NO: 438117 - DNA, 15 bp, Homo sapiens
tttattacctggcca

SEQ ID NO: 438118 - DNA, 15 bp, Homo sapiens
ttttattacctggcc

SEQ ID NO: 438119 - DNA, 15 bp, Homo sapiens
tttttattacctggc

SEQ ID NO: 438120 - DNA, 15 bp, Homo sapiens
atttttattacctgg

SEQ ID NO: 438121 - DNA, 15 bp, Homo sapiens
tatttttattacctg

SEQ ID NO: 438122 - DNA, 15 bp, Homo sapiens
ctatttttattacct

SEQ ID NO: 438123 - DNA, 15 bp, Homo sapiens
tctatttttattacc

SEQ ID NO: 438124 - DNA, 15 bp, Homo sapiens
atctatttttattac

SEQ ID NO: 438125 - DNA, 15 bp, Homo sapiens
catctatttttatta

SEQ ID NO: 438126 - DNA, 15 bp, Homo sapiens
tcatctatttttatt

SEQ ID NO: 438127 - DNA, 15 bp, Homo sapiens
ctcatctatttttat

SEQ ID NO: 438128 - DNA, 15 bp, Homo sapiens
tctcatctattttta

SEQ ID NO: 438129 - DNA, 15 bp, Homo sapiens
ttctcatctattttt

SEQ ID NO: 438130 - DNA, 15 bp, Homo sapiens
cttctcatctatttt

SEQ ID NO: 438131 - DNA, 15 bp, Homo sapiens
acttctcatctattt

SEQ ID NO: 438132 - DNA, 15 bp, Homo sapiens
aacttctcatctatt

SEQ ID NO: 438133 - DNA, 15 bp, Homo sapiens
gaacttctcatctat

SEQ ID NO: 438134 - DNA, 15 bp, Homo sapiens
agaacttctcatcta

SEQ ID NO: 438135 - DNA, 15 bp, Homo sapiens
cagaacttctcatct

SEQ ID NO: 438136 - DNA, 15 bp, Homo sapiens
tcagaacttctcatc

SEQ ID NO: 438137 - DNA, 15 bp, Homo sapiens
ttcagaacttctcat

SEQ ID NO: 438138 - DNA, 15 bp, Homo sapiens
cttcagaacttctca

SEQ ID NO: 438139 - DNA, 15 bp, Homo sapiens
tcttcagaacttctc

SEQ ID NO: 438140 - DNA, 15 bp, Homo sapiens
ttcttcagaacttct

SEQ ID NO: 438141 - DNA, 15 bp, Homo sapiens
attcttcagaacttc

SEQ ID NO: 438142 - DNA, 15 bp, Homo sapiens
tattcttcagaactt

SEQ ID NO: 438143 - DNA, 15 bp, Homo sapiens
atattcttcagaact

SEQ ID NO: 438144 - DNA, 15 bp, Homo sapiens
catattcttcagaac

SEQ ID NO: 438145 - DNA, 15 bp, Homo sapiens
acatattcttcagaa

SEQ ID NO: 438146 - DNA, 15 bp, Homo sapiens
gacatattcttcaga

SEQ ID NO: 438147 - DNA, 15 bp, Homo sapiens
tgacatattcttcag

SEQ ID NO: 438148 - DNA, 15 bp, Homo sapiens
ctgacatattcttca

SEQ ID NO: 438149 - DNA, 15 bp, Homo sapiens
actgacatattcttc

SEQ ID NO: 438150 - DNA, 15 bp, Homo sapiens
aactgacatattctt

SEQ ID NO: 438151 - DNA, 15 bp, Homo sapiens
caactgacatattct

SEQ ID NO: 438152 - DNA, 15 bp, Homo sapiens
tcaactgacatattc

SEQ ID NO: 438153 - DNA, 15 bp, Homo sapiens
ctcaactgacatatt

SEQ ID NO: 438154 - DNA, 15 bp, Homo sapiens
cctcaactgacatat

SEQ ID NO: 438155 - DNA, 15 bp, Homo sapiens
tcctcaactgacata

SEQ ID NO: 438156 - DNA, 15 bp, Homo sapiens
ttcctcaactgacat

SEQ ID NO: 438157 - DNA, 15 bp, Homo sapiens
gttcctcaactgaca

SEQ ID NO: 438158 - DNA, 15 bp, Homo sapiens
agttcctcaactgac

SEQ ID NO: 438159 - DNA, 15 bp, Homo sapiens
cagttcctcaactga

SEQ ID NO: 438160 - DNA, 15 bp, Homo sapiens
ccagttcctcaactg

SEQ ID NO: 438161 - DNA, 15 bp, Homo sapiens
tccagttcctcaact

SEQ ID NO: 438162 - DNA, 15 bp, Homo sapiens
ctccagttcctcaac

SEQ ID NO: 438163 - DNA, 15 bp, Homo sapiens
cctccagttcctcaa

SEQ ID NO: 438164 - DNA, 15 bp, Homo sapiens
acctccagttcctca

SEQ ID NO: 438165 - DNA, 15 bp, Homo sapiens
tacctccagttcctc

SEQ ID NO: 438166 - DNA, 15 bp, Homo sapiens
atacctccagttcct

SEQ ID NO: 438167 - DNA, 15 bp, Homo sapiens
aatacctccagttcc

SEQ ID NO: 438168 - DNA, 15 bp, Homo sapiens
aaatacctccagttc

SEQ ID NO: 438169 - DNA, 15 bp, Homo sapiens
taaatacctccagtt

SEQ ID NO: 438170 - DNA, 15 bp, Homo sapiens
ataaatacctccagt

SEQ ID NO: 438171 - DNA, 15 bp, Homo sapiens
gataaatacctccag

SEQ ID NO: 438172 - DNA, 15 bp, Homo sapiens
ggataaatacctcca

SEQ ID NO: 438173 - DNA, 15 bp, Homo sapiens
aggataaatacctcc

SEQ ID NO: 438174 - DNA, 15 bp, Homo sapiens
taggataaatacctc

SEQ ID NO: 438175 - DNA, 15 bp, Homo sapiens
gtaggataaatacct

SEQ ID NO: 438176 - DNA, 15 bp, Homo sapiens
tgtaggataaatacc

SEQ ID NO: 438177 - DNA, 15 bp, Homo sapiens
ctgtaggataaatac

SEQ ID NO: 438178 - DNA, 15 bp, Homo sapiens
tctgtaggataaata

SEQ ID NO: 438179 - DNA, 15 bp, Homo sapiens
ttctgtaggataaat

SEQ ID NO: 438180 - DNA, 15 bp, Homo sapiens
cttctgtaggataaa

SEQ ID NO: 438181 - DNA, 15 bp, Homo sapiens
tcttctgtaggataa

SEQ ID NO: 438182 - DNA, 15 bp, Homo sapiens
atcttctgtaggata

SEQ ID NO: 438183 - DNA, 15 bp, Homo sapiens
aatcttctgtaggat

SEQ ID NO: 438184 - DNA, 15 bp, Homo sapiens
caatcttctgtagga

SEQ ID NO: 438185 - DNA, 15 bp, Homo sapiens
gcaatcttctgtagg

SEQ ID NO: 438186 - DNA, 15 bp, Homo sapiens
agcaatcttctgtag

SEQ ID NO: 438187 - DNA, 15 bp, Homo sapiens
tagcaatcttctgta

SEQ ID NO: 438188 - DNA, 15 bp, Homo sapiens
atagcaatcttctgt

SEQ ID NO: 438189 - DNA, 15 bp, Homo sapiens
tatagcaatcttctg

SEQ ID NO: 438190 - DNA, 15 bp, Homo sapiens
ctatagcaatcttct

SEQ ID NO: 438191 - DNA, 15 bp, Homo sapiens
tctatagcaatcttc

SEQ ID NO: 438192 - DNA, 15 bp, Homo sapiens
ttctatagcaatctt

SEQ ID NO: 438193 - DNA, 15 bp, Homo sapiens
cttctatagcaatct

SEQ ID NO: 438194 - DNA, 15 bp, Homo sapiens
tcttctatagcaatc

SEQ ID NO: 438195 - DNA, 15 bp, Homo sapiens
ctcttctatagcaat

SEQ ID NO: 438196 - DNA, 15 bp, Homo sapiens
tctcttctatagcaa

SEQ ID NO: 438197 - DNA, 15 bp, Homo sapiens
atctcttctatagca

SEQ ID NO: 438198 - DNA, 15 bp, Homo sapiens
tatctcttctatagc

SEQ ID NO: 438199 - DNA, 15 bp, Homo sapiens
atatctcttctatag

SEQ ID NO: 438200 - DNA, 15 bp, Homo sapiens
catatctcttctata

SEQ ID NO: 438201 - DNA, 15 bp, Homo sapiens
acatatctcttctat

SEQ ID NO: 438202 - DNA, 15 bp, Homo sapiens
aacatatctcttcta

SEQ ID NO: 438203 - DNA, 15 bp, Homo sapiens
taacatatctcttct

SEQ ID NO: 438204 - DNA, 15 bp, Homo sapiens
ttaacatatctcttc

SEQ ID NO: 438205 - DNA, 15 bp, Homo sapiens
gttaacatatctctt

SEQ ID NO: 438206 - DNA, 15 bp, Homo sapiens
ggttaacatatctct

SEQ ID NO: 438207 - DNA, 15 bp, Homo sapiens
tggttaacatatctc

SEQ ID NO: 438208 - DNA, 15 bp, Homo sapiens
atggttaacatatct

SEQ ID NO: 438209 - DNA, 15 bp, Homo sapiens
gatggttaacatatc

SEQ ID NO: 438210 - DNA, 15 bp, Homo sapiens
agatggttaacatat

SEQ ID NO: 438211 - DNA, 15 bp, Homo sapiens
aagatggttaacata

SEQ ID NO: 438212 - DNA, 15 bp, Homo sapiens
taagatggttaacat

SEQ ID NO: 438213 - DNA, 15 bp, Homo sapiens
ttaagatggttaaca

SEQ ID NO: 438214 - DNA, 15 bp, Homo sapiens
attaagatggttaac

SEQ ID NO: 438215 - DNA, 15 bp, Homo sapiens
aattaagatggttaa

SEQ ID NO: 438216 - DNA, 15 bp, Homo sapiens
gaattaagatggtta

SEQ ID NO: 438217 - DNA, 15 bp, Homo sapiens
agaattaagatggtt

SEQ ID NO: 438218 - DNA, 15 bp, Homo sapiens
aagaattaagatggt

SEQ ID NO: 438219 - DNA, 15 bp, Homo sapiens
caagaattaagatgg

SEQ ID NO: 438220 - DNA, 15 bp, Homo sapiens
tcaagaattaagatg

SEQ ID NO: 438221 - DNA, 15 bp, Homo sapiens
ttcaagaattaagat

SEQ ID NO: 438222 - DNA, 15 bp, Homo sapiens
tttcaagaattaaga

SEQ ID NO: 438223 - DNA, 15 bp, Homo sapiens
ctttcaagaattaag

SEQ ID NO: 438224 - DNA, 15 bp, Homo sapiens
tctttcaagaattaa

SEQ ID NO: 438225 - DNA, 15 bp, Homo sapiens
atctttcaagaatta

SEQ ID NO: 438226 - DNA, 15 bp, Homo sapiens
aatctttcaagaatt

SEQ ID NO: 438227 - DNA, 15 bp, Homo sapiens
caatctttcaagaat

SEQ ID NO: 438228 - DNA, 15 bp, Homo sapiens
tcaatctttcaagaa

SEQ ID NO: 438229 - DNA, 15 bp, Homo sapiens
gtcaatctttcaaga

SEQ ID NO: 438230 - DNA, 15 bp, Homo sapiens
cgtcaatctttcaag

SEQ ID NO: 438231 - DNA, 15 bp, Homo sapiens
tcgtcaatctttcaa

SEQ ID NO: 438232 - DNA, 15 bp, Homo sapiens
ttcgtcaatctttca

SEQ ID NO: 438233 - DNA, 15 bp, Homo sapiens
gttcgtcaatctttc

SEQ ID NO: 438234 - DNA, 15 bp, Homo sapiens
tgttcgtcaatcttt

SEQ ID NO: 438235 - DNA, 15 bp, Homo sapiens
ttgttcgtcaatctt

SEQ ID NO: 438236 - DNA, 15 bp, Homo sapiens
attgttcgtcaatct

SEQ ID NO: 438237 - DNA, 15 bp, Homo sapiens
tattgttcgtcaatc

SEQ ID NO: 438238 - DNA, 15 bp, Homo sapiens
ttattgttcgtcaat

SEQ ID NO: 438239 - DNA, 15 bp, Homo sapiens
attattgttcgtcaa

SEQ ID NO: 438240 - DNA, 15 bp, Homo sapiens
gattattgttcgtca

SEQ ID NO: 438241 - DNA, 15 bp, Homo sapiens
tgattattgttcgtc

SEQ ID NO: 438242 - DNA, 15 bp, Homo sapiens
ctgattattgttcgt

SEQ ID NO: 438243 - DNA, 15 bp, Homo sapiens
tctgattattgttcg

SEQ ID NO: 438244 - DNA, 15 bp, Homo sapiens
atctgattattgttc

SEQ ID NO: 438245 - DNA, 15 bp, Homo sapiens
aatctgattattgtt

SEQ ID NO: 438246 - DNA, 15 bp, Homo sapiens
gaatctgattattgt

SEQ ID NO: 438247 - DNA, 15 bp, Homo sapiens
agaatctgattattg

SEQ ID NO: 438248 - DNA, 15 bp, Homo sapiens
cagaatctgattatt

SEQ ID NO: 438249 - DNA, 15 bp, Homo sapiens
acagaatctgattat

SEQ ID NO: 438250 - DNA, 15 bp, Homo sapiens
aacagaatctgatta

SEQ ID NO: 438251 - DNA, 15 bp, Homo sapiens
aaacagaatctgatt

SEQ ID NO: 438252 - DNA, 15 bp, Homo sapiens
aaaacagaatctgat

SEQ ID NO: 438253 - DNA, 15 bp, Homo sapiens
gaaaacagaatctga

SEQ ID NO: 438254 - DNA, 15 bp, Homo sapiens
agaaaacagaatctg

SEQ ID NO: 438255 - DNA, 15 bp, Homo sapiens
aagaaaacagaatct

SEQ ID NO: 438256 - DNA, 15 bp, Homo sapiens
taagaaaacagaatc

SEQ ID NO: 438257 - DNA, 15 bp, Homo sapiens
ataagaaaacagaat

SEQ ID NO: 438258 - DNA, 15 bp, Homo sapiens
cataagaaaacagaa

SEQ ID NO: 438259 - DNA, 15 bp, Homo sapiens
ccataagaaaacaga

SEQ ID NO: 438260 - DNA, 15 bp, Homo sapiens
tccataagaaaacag

SEQ ID NO: 438261 - DNA, 15 bp, Homo sapiens
ttccataagaaaaca

SEQ ID NO: 438262 - DNA, 15 bp, Homo sapiens
cttccataagaaaac

SEQ ID NO: 438263 - DNA, 15 bp, Homo sapiens
ccttccataagaaaa

SEQ ID NO: 438264 - DNA, 15 bp, Homo sapiens
accttccataagaaa

SEQ ID NO: 438265 - DNA, 15 bp, Homo sapiens
caccttccataagaa

SEQ ID NO: 438266 - DNA, 15 bp, Homo sapiens
acaccttccataaga

SEQ ID NO: 438267 - DNA, 15 bp, Homo sapiens
tacaccttccataag

SEQ ID NO: 438268 - DNA, 15 bp, Homo sapiens
ttacaccttccataa

SEQ ID NO: 438269 - DNA, 15 bp, Homo sapiens
cttacaccttccata

SEQ ID NO: 438270 - DNA, 15 bp, Homo sapiens
acttacaccttccat

SEQ ID NO: 438271 - DNA, 15 bp, Homo sapiens
cacttacaccttcca

SEQ ID NO: 438272 - DNA, 15 bp, Homo sapiens
tcacttacaccttcc

SEQ ID NO: 438273 - DNA, 15 bp, Homo sapiens
atcacttacaccttc

SEQ ID NO: 438274 - DNA, 15 bp, Homo sapiens
aatcacttacacctt

SEQ ID NO: 438275 - DNA, 15 bp, Homo sapiens
aaatcacttacacct

SEQ ID NO: 438276 - DNA, 15 bp, Homo sapiens
aaaatcacttacacc

SEQ ID NO: 438277 - DNA, 15 bp, Homo sapiens
aaaaatcacttacac

SEQ ID NO: 438278 - DNA, 15 bp, Homo sapiens
taaaaatcacttaca

SEQ ID NO: 438279 - DNA, 15 bp, Homo sapiens
ctaaaaatcacttac

SEQ ID NO: 438280 - DNA, 15 bp, Homo sapiens
tctaaaaatcactta

SEQ ID NO: 438281 - DNA, 15 bp, Homo sapiens
atctaaaaatcactt

SEQ ID NO: 438282 - DNA, 15 bp, Homo sapiens
tatctaaaaatcact

SEQ ID NO: 438283 - DNA, 15 bp, Homo sapiens
ttatctaaaaatcac

SEQ ID NO: 438284 - DNA, 15 bp, Homo sapiens
cttatctaaaaatca

SEQ ID NO: 438285 - DNA, 15 bp, Homo sapiens
ccttatctaaaaatc

SEQ ID NO: 438286 - DNA, 15 bp, Homo sapiens
tccttatctaaaaat

SEQ ID NO: 438287 - DNA, 15 bp, Homo sapiens
atccttatctaaaaa

SEQ ID NO: 438288 - DNA, 15 bp, Homo sapiens
aatccttatctaaaa

SEQ ID NO: 438289 - DNA, 15 bp, Homo sapiens
aaatccttatctaaa

SEQ ID NO: 438290 - DNA, 15 bp, Homo sapiens
caaatccttatctaa

SEQ ID NO: 438291 - DNA, 15 bp, Homo sapiens
acaaatccttatcta

SEQ ID NO: 438292 - DNA, 15 bp, Homo sapiens
cacaaatccttatct

SEQ ID NO: 438293 - DNA, 15 bp, Homo sapiens
ccacaaatccttatc

SEQ ID NO: 438294 - DNA, 15 bp, Homo sapiens
tccacaaatccttat

SEQ ID NO: 438295 - DNA, 15 bp, Homo sapiens
ctccacaaatcctta

SEQ ID NO: 438296 - DNA, 15 bp, Homo sapiens
tctccacaaatcctt

SEQ ID NO: 438297 - DNA, 15 bp, Homo sapiens
ctctccacaaatcct

SEQ ID NO: 438298 - DNA, 15 bp, Homo sapiens
tctctccacaaatcc

SEQ ID NO: 438299 - DNA, 15 bp, Homo sapiens
ttctctccacaaatc

SEQ ID NO: 438300 - DNA, 15 bp, Homo sapiens
attctctccacaaat

SEQ ID NO: 438301 - DNA, 15 bp, Homo sapiens
cattctctccacaaa

SEQ ID NO: 438302 - DNA, 15 bp, Homo sapiens
ccattctctccacaa

SEQ ID NO: 438303 - DNA, 15 bp, Homo sapiens
tccattctctccaca

SEQ ID NO: 438304 - DNA, 15 bp, Homo sapiens
ctccattctctccac

SEQ ID NO: 438305 - DNA, 15 bp, Homo sapiens
actccattctctcca

SEQ ID NO: 438306 - DNA, 15 bp, Homo sapiens
cactccattctctcc

SEQ ID NO: 438307 - DNA, 15 bp, Homo sapiens
ccactccattctctc

SEQ ID NO: 438308 - DNA, 15 bp, Homo sapiens
cccactccattctct

SEQ ID NO: 438309 - DNA, 15 bp, Homo sapiens
ccccactccattctc

SEQ ID NO: 438310 - DNA, 15 bp, Homo sapiens
gccccactccattct

SEQ ID NO: 438311 - DNA, 15 bp, Homo sapiens
tgccccactccattc

SEQ ID NO: 438312 - DNA, 15 bp, Homo sapiens
ctgccccactccatt

SEQ ID NO: 438313 - DNA, 15 bp, Homo sapiens
tctgccccactccat

SEQ ID NO: 438314 - DNA, 15 bp, Homo sapiens
ttctgccccactcca

SEQ ID NO: 438315 - DNA, 15 bp, Homo sapiens
attctgccccactcc

SEQ ID NO: 438316 - DNA, 15 bp, Homo sapiens
cattctgccccactc

SEQ ID NO: 438317 - DNA, 15 bp, Homo sapiens
tcattctgccccact

SEQ ID NO: 438318 - DNA, 15 bp, Homo sapiens
atcattctgccccac

SEQ ID NO: 438319 - DNA, 15 bp, Homo sapiens
tatcattctgcccca

SEQ ID NO: 438320 - DNA, 15 bp, Homo sapiens
ttatcattctgcccc

SEQ ID NO: 438321 - DNA, 15 bp, Homo sapiens
tttatcattctgccc

SEQ ID NO: 438322 - DNA, 15 bp, Homo sapiens
ttttatcattctgcc

SEQ ID NO: 438323 - DNA, 15 bp, Homo sapiens
cttttatcattctgc

SEQ ID NO: 438324 - DNA, 15 bp, Homo sapiens
ccttttatcattctg

SEQ ID NO: 438325 - DNA, 15 bp, Homo sapiens
gccttttatcattct

SEQ ID NO: 438326 - DNA, 15 bp, Homo sapiens
tgccttttatcattc

SEQ ID NO: 438327 - DNA, 15 bp, Homo sapiens
ttgccttttatcatt

SEQ ID NO: 438328 - DNA, 15 bp, Homo sapiens
cttgccttttatcat

SEQ ID NO: 438329 - DNA, 15 bp, Homo sapiens
acttgccttttatca

SEQ ID NO: 438330 - DNA, 15 bp, Homo sapiens
tacttgccttttatc

SEQ ID NO: 438331 - DNA, 15 bp, Homo sapiens
ttacttgccttttat

SEQ ID NO: 438332 - DNA, 15 bp, Homo sapiens
tttacttgcctttta

SEQ ID NO: 438333 - DNA, 15 bp, Homo sapiens
ttttacttgcctttt

SEQ ID NO: 438334 - DNA, 15 bp, Homo sapiens
attttacttgccttt

SEQ ID NO: 438335 - DNA, 15 bp, Homo sapiens
cattttacttgcctt

SEQ ID NO: 438336 - DNA, 15 bp, Homo sapiens
acattttacttgcct

SEQ ID NO: 438337 - DNA, 15 bp, Homo sapiens
aacattttacttgcc

SEQ ID NO: 438338 - DNA, 15 bp, Homo sapiens
taacattttacttgc

SEQ ID NO: 438339 - DNA, 15 bp, Homo sapiens
ataacattttacttg

SEQ ID NO: 438340 - DNA, 15 bp, Homo sapiens
cataacattttactt

SEQ ID NO: 438341 - DNA, 15 bp, Homo sapiens
ccataacattttact

SEQ ID NO: 438342 - DNA, 15 bp, Homo sapiens
tccataacattttac

SEQ ID NO: 438343 - DNA, 15 bp, Homo sapiens
ctccataacatttta

SEQ ID NO: 438344 - DNA, 15 bp, Homo sapiens
cctccataacatttt

SEQ ID NO: 438345 - DNA, 15 bp, Homo sapiens
acctccataacattt

SEQ ID NO: 438346 - DNA, 15 bp, Homo sapiens
gacctccataacatt

SEQ ID NO: 438347 - DNA, 15 bp, Homo sapiens
tgacctccataacat

SEQ ID NO: 438348 - DNA, 15 bp, Homo sapiens
ctgacctccataaca

SEQ ID NO: 438349 - DNA, 15 bp, Homo sapiens
tctgacctccataac

SEQ ID NO: 438350 - DNA, 15 bp, Homo sapiens
atctgacctccataa

SEQ ID NO: 438351 - DNA, 15 bp, Homo sapiens
aatctgacctccata

SEQ ID NO: 438352 - DNA, 15 bp, Homo sapiens
caatctgacctccat

SEQ ID NO: 438353 - DNA, 15 bp, Homo sapiens
ccaatctgacctcca

SEQ ID NO: 438354 - DNA, 15 bp, Homo sapiens
accaatctgacctcc

SEQ ID NO: 438355 - DNA, 15 bp, Homo sapiens
taccaatctgacctc

SEQ ID NO: 438356 - DNA, 15 bp, Homo sapiens
ttaccaatctgacct

SEQ ID NO: 438357 - DNA, 15 bp, Homo sapiens
cttaccaatctgacc

SEQ ID NO: 438358 - DNA, 15 bp, Homo sapiens
tcttaccaatctgac

SEQ ID NO: 438359 - DNA, 15 bp, Homo sapiens
atcttaccaatctga

SEQ ID NO: 438360 - DNA, 15 bp, Homo sapiens
tatcttaccaatctg

SEQ ID NO: 438361 - DNA, 15 bp, Homo sapiens
ttatcttaccaatct

SEQ ID NO: 438362 - DNA, 15 bp, Homo sapiens
cttatcttaccaatc

SEQ ID NO: 438363 - DNA, 15 bp, Homo sapiens
tcttatcttaccaat

SEQ ID NO: 438364 - DNA, 15 bp, Homo sapiens
gtcttatcttaccaa

SEQ ID NO: 438365 - DNA, 15 bp, Homo sapiens
tgtcttatcttacca

SEQ ID NO: 438366 - DNA, 15 bp, Homo sapiens
atgtcttatcttacc

SEQ ID NO: 438367 - DNA, 15 bp, Homo sapiens
gatgtcttatcttac

SEQ ID NO: 438368 - DNA, 15 bp, Homo sapiens
agatgtcttatctta

SEQ ID NO: 438369 - DNA, 15 bp, Homo sapiens
aagatgtcttatctt

SEQ ID NO: 438370 - DNA, 15 bp, Homo sapiens
gaagatgtcttatct

SEQ ID NO: 438371 - DNA, 15 bp, Homo sapiens
tgaagatgtcttatc

SEQ ID NO: 438372 - DNA, 15 bp, Homo sapiens
ctgaagatgtcttat

SEQ ID NO: 438373 - DNA, 15 bp, Homo sapiens
cctgaagatgtctta

SEQ ID NO: 438374 - DNA, 15 bp, Homo sapiens
acctgaagatgtctt

SEQ ID NO: 438375 - DNA, 15 bp, Homo sapiens
cacctgaagatgtct

SEQ ID NO: 438376 - DNA, 15 bp, Homo sapiens
tcacctgaagatgtc

SEQ ID NO: 438377 - DNA, 15 bp, Homo sapiens
gtcacctgaagatgt

SEQ ID NO: 438378 - DNA, 15 bp, Homo sapiens
ggtcacctgaagatg

SEQ ID NO: 438379 - DNA, 15 bp, Homo sapiens
tggtcacctgaagat

SEQ ID NO: 438380 - DNA, 15 bp, Homo sapiens
gtggtcacctgaaga

SEQ ID NO: 438381 - DNA, 15 bp, Homo sapiens
tgtggtcacctgaag

SEQ ID NO: 438382 - DNA, 15 bp, Homo sapiens
ttgtggtcacctgaa

SEQ ID NO: 438383 - DNA, 15 bp, Homo sapiens
cttgtggtcacctga

SEQ ID NO: 438384 - DNA, 15 bp, Homo sapiens
tcttgtggtcacctg

SEQ ID NO: 438385 - DNA, 15 bp, Homo sapiens
atcttgtggtcacct

SEQ ID NO: 438386 - DNA, 15 bp, Homo sapiens
aatcttgtggtcacc

SEQ ID NO: 438387 - DNA, 15 bp, Homo sapiens
aaatcttgtggtcac

SEQ ID NO: 438388 - DNA, 15 bp, Homo sapiens
aaaatcttgtggtca

SEQ ID NO: 438389 - DNA, 15 bp, Homo sapiens
taaaatcttgtggtc

SEQ ID NO: 438390 - DNA, 15 bp, Homo sapiens
ctaaaatcttgtggt

SEQ ID NO: 438391 - DNA, 15 bp, Homo sapiens
cctaaaatcttgtgg

SEQ ID NO: 438392 - DNA, 15 bp, Homo sapiens
acctaaaatcttgtg

SEQ ID NO: 438393 - DNA, 15 bp, Homo sapiens
aacctaaaatcttgt

SEQ ID NO: 438394 - DNA, 15 bp, Homo sapiens
aaacctaaaatcttg

SEQ ID NO: 438395 - DNA, 15 bp, Homo sapiens
aaaacctaaaatctt

SEQ ID NO: 438396 - DNA, 15 bp, Homo sapiens
aaaaacctaaaatct

SEQ ID NO: 438397 - DNA, 15 bp, Homo sapiens
aaaaaacctaaaatc

SEQ ID NO: 438398 - DNA, 15 bp, Homo sapiens
aaaaaaacctaaaat

SEQ ID NO: 438399 - DNA, 15 bp, Homo sapiens
acaaaaaaacctaaa

SEQ ID NO: 438400 - DNA, 15 bp, Homo sapiens
aacaaaaaaacctaa

SEQ ID NO: 438401 - DNA, 15 bp, Homo sapiens
aaacaaaaaaaccta

SEQ ID NO: 438402 - DNA, 15 bp, Homo sapiens
caaacaaaaaaacct

SEQ ID NO: 438403 - DNA, 15 bp, Homo sapiens
acaaacaaaaaaacc

SEQ ID NO: 438404 - DNA, 15 bp, Homo sapiens
caaacaaacaaaaaa

SEQ ID NO: 438405 - DNA, 15 bp, Homo sapiens
taaaacaaacaaaca

SEQ ID NO: 438406 - DNA, 15 bp, Homo sapiens
ttaaaacaaacaaac

SEQ ID NO: 438407 - DNA, 15 bp, Homo sapiens
attaaaacaaacaaa

SEQ ID NO: 438408 - DNA, 15 bp, Homo sapiens
aattaaaacaaacaa

SEQ ID NO: 438409 - DNA, 15 bp, Homo sapiens
aaattaaaacaaaca

SEQ ID NO: 438410 - DNA, 15 bp, Homo sapiens
aaaattaaaacaaac

SEQ ID NO: 438411 - DNA, 15 bp, Homo sapiens
aaaaattaaaacaaa

SEQ ID NO: 438412 - DNA, 15 bp, Homo sapiens
aaaaaattaaaacaa

SEQ ID NO: 438413 - DNA, 15 bp, Homo sapiens
taaaaaattaaaaca

SEQ ID NO: 438414 - DNA, 15 bp, Homo sapiens
ataaaaaattaaaac

SEQ ID NO: 438415 - DNA, 15 bp, Homo sapiens
aataaaaaattaaaa

SEQ ID NO: 438416 - DNA, 15 bp, Homo sapiens
caataaaaaattaaa

SEQ ID NO: 438417 - DNA, 15 bp, Homo sapiens
ccaataaaaaattaa

SEQ ID NO: 438418 - DNA, 15 bp, Homo sapiens
gccaataaaaaatta

SEQ ID NO: 438419 - DNA, 15 bp, Homo sapiens
agccaataaaaaatt

SEQ ID NO: 438420 - DNA, 15 bp, Homo sapiens
tagccaataaaaaat

SEQ ID NO: 438421 - DNA, 15 bp, Homo sapiens
ctagccaataaaaaa

SEQ ID NO: 438422 - DNA, 15 bp, Homo sapiens
cctagccaataaaaa

SEQ ID NO: 438423 - DNA, 15 bp, Homo sapiens
acctagccaataaaa

SEQ ID NO: 438424 - DNA, 15 bp, Homo sapiens
cacctagccaataaa

SEQ ID NO: 438425 - DNA, 15 bp, Homo sapiens
gcacctagccaataa

SEQ ID NO: 438426 - DNA, 15 bp, Homo sapiens
cgcacctagccaata

SEQ ID NO: 438427 - DNA, 15 bp, Homo sapiens
ccgcacctagccaat

SEQ ID NO: 438428 - DNA, 15 bp, Homo sapiens
accgcacctagccaa

SEQ ID NO: 438429 - DNA, 15 bp, Homo sapiens
caccgcacctagcca

SEQ ID NO: 438430 - DNA, 15 bp, Homo sapiens
ccaccgcacctagcc

SEQ ID NO: 438431 - DNA, 15 bp, Homo sapiens
gccaccgcacctagc

SEQ ID NO: 438432 - DNA, 15 bp, Homo sapiens
agccaccgcacctag

SEQ ID NO: 438433 - DNA, 15 bp, Homo sapiens
gagccaccgcaccta

SEQ ID NO: 438434 - DNA, 15 bp, Homo sapiens
atgagccaccgcacc

SEQ ID NO: 438435 - DNA, 15 bp, Homo sapiens
catgagccaccgcac

SEQ ID NO: 438436 - DNA, 15 bp, Homo sapiens
gcatgagccaccgca

SEQ ID NO: 438437 - DNA, 15 bp, Homo sapiens
ggcatgagccaccgc

SEQ ID NO: 438438 - DNA, 15 bp, Homo sapiens
aggcatgagccaccg

SEQ ID NO: 438439 - DNA, 15 bp, Homo sapiens
atgctgggattacag

SEQ ID NO: 438440 - DNA, 15 bp, Homo sapiens
aatgctgggattaca

SEQ ID NO: 438441 - DNA, 15 bp, Homo sapiens
aaatgctgggattac

SEQ ID NO: 438442 - DNA, 15 bp, Homo sapiens
aaaatgctgggatta

SEQ ID NO: 438443 - DNA, 15 bp, Homo sapiens
caaaatgctgggatt

SEQ ID NO: 438444 - DNA, 15 bp, Homo sapiens
ccaaaatgctgggat

SEQ ID NO: 438445 - DNA, 15 bp, Homo sapiens
cccaaaatgctggga

SEQ ID NO: 438446 - DNA, 15 bp, Homo sapiens
tcccaaaatgctggg

SEQ ID NO: 438447 - DNA, 15 bp, Homo sapiens
ctcccaaaatgctgg

SEQ ID NO: 438448 - DNA, 15 bp, Homo sapiens
cctcccaaaatgctg

SEQ ID NO: 438449 - DNA, 15 bp, Homo sapiens
gcctcccaaaatgct

SEQ ID NO: 438450 - DNA, 15 bp, Homo sapiens
ggcctcccaaaatgc

SEQ ID NO: 438451 - DNA, 15 bp, Homo sapiens
tggcctcccaaaatg

SEQ ID NO: 438452 - DNA, 15 bp, Homo sapiens
ttggcctcccaaaat

SEQ ID NO: 438453 - DNA, 15 bp, Homo sapiens
cttggcctcccaaaa

SEQ ID NO: 438454 - DNA, 15 bp, Homo sapiens
tgcccaccttggcct

SEQ ID NO: 438455 - DNA, 15 bp, Homo sapiens
ctgcccaccttggcc

SEQ ID NO: 438456 - DNA, 15 bp, Homo sapiens
tctgcccaccttggc

SEQ ID NO: 438457 - DNA, 15 bp, Homo sapiens
ttctgcccaccttgg

SEQ ID NO: 438458 - DNA, 15 bp, Homo sapiens
gttctgcccaccttg

SEQ ID NO: 438459 - DNA, 15 bp, Homo sapiens
tgttctgcccacctt

SEQ ID NO: 438460 - DNA, 15 bp, Homo sapiens
ctgttctgcccacct

SEQ ID NO: 438461 - DNA, 15 bp, Homo sapiens
actgttctgcccacc

SEQ ID NO: 438462 - DNA, 15 bp, Homo sapiens
aactgttctgcccac

SEQ ID NO: 438463 - DNA, 15 bp, Homo sapiens
caactgttctgccca

SEQ ID NO: 438464 - DNA, 15 bp, Homo sapiens
tcaactgttctgccc

SEQ ID NO: 438465 - DNA, 15 bp, Homo sapiens
ctcaactgttctgcc

SEQ ID NO: 438466 - DNA, 15 bp, Homo sapiens
cctcaactgttctgc

SEQ ID NO: 438467 - DNA, 15 bp, Homo sapiens
tcctcaactgttctg

SEQ ID NO: 438468 - DNA, 15 bp, Homo sapiens
gtcctcaactgttct

SEQ ID NO: 438469 - DNA, 15 bp, Homo sapiens
tgtcctcaactgttc

SEQ ID NO: 438470 - DNA, 15 bp, Homo sapiens
atgtcctcaactgtt

SEQ ID NO: 438471 - DNA, 15 bp, Homo sapiens
catgtcctcaactgt

SEQ ID NO: 438472 - DNA, 15 bp, Homo sapiens
tcatgtcctcaactg

SEQ ID NO: 438473 - DNA, 15 bp, Homo sapiens
ctcatgtcctcaact

SEQ ID NO: 438474 - DNA, 15 bp, Homo sapiens
actcatgtcctcaac

SEQ ID NO: 438475 - DNA, 15 bp, Homo sapiens
aactcatgtcctcaa

SEQ ID NO: 438476 - DNA, 15 bp, Homo sapiens
gaactcatgtcctca

SEQ ID NO: 438477 - DNA, 15 bp, Homo sapiens
cgaactcatgtcctc

SEQ ID NO: 438478 - DNA, 15 bp, Homo sapiens
tcgaactcatgtcct

SEQ ID NO: 438479 - DNA, 15 bp, Homo sapiens
ctcgaactcatgtcc

SEQ ID NO: 438480 - DNA, 15 bp, Homo sapiens
tctcgaactcatgtc

SEQ ID NO: 438481 - DNA, 15 bp, Homo sapiens
gtctcgaactcatgt

SEQ ID NO: 438482 - DNA, 15 bp, Homo sapiens
agtctcgaactcatg

SEQ ID NO: 438483 - DNA, 15 bp, Homo sapiens
tagtctcgaactcat

SEQ ID NO: 438484 - DNA, 15 bp, Homo sapiens
gtagtctcgaactca

SEQ ID NO: 438485 - DNA, 15 bp, Homo sapiens
ggtagtctcgaactc

SEQ ID NO: 438486 - DNA, 15 bp, Homo sapiens
aggtagtctcgaact

SEQ ID NO: 438487 - DNA, 15 bp, Homo sapiens
aaggtagtctcgaac

SEQ ID NO: 438488 - DNA, 15 bp, Homo sapiens
caaggtagtctcgaa

SEQ ID NO: 438489 - DNA, 15 bp, Homo sapiens
ccaaggtagtctcga

SEQ ID NO: 438490 - DNA, 15 bp, Homo sapiens
gccaaggtagtctcg

SEQ ID NO: 438491 - DNA, 15 bp, Homo sapiens
ggccaaggtagtctc

SEQ ID NO: 438492 - DNA, 15 bp, Homo sapiens
tggccaaggtagtct

SEQ ID NO: 438493 - DNA, 15 bp, Homo sapiens
ttggccaaggtagtc

SEQ ID NO: 438494 - DNA, 15 bp, Homo sapiens
gttggccaaggtagt

SEQ ID NO: 438495 - DNA, 15 bp, Homo sapiens
cgttggccaaggtag

SEQ ID NO: 438496 - DNA, 15 bp, Homo sapiens
acgttggccaaggta

SEQ ID NO: 438497 - DNA, 15 bp, Homo sapiens
cacgttggccaaggt

SEQ ID NO: 438498 - DNA, 15 bp, Homo sapiens
ccacgttggccaagg

SEQ ID NO: 438499 - DNA, 15 bp, Homo sapiens
accacgttggccaag

SEQ ID NO: 438500 - DNA, 15 bp, Homo sapiens
caccacgttggccaa

SEQ ID NO: 438501 - DNA, 15 bp, Homo sapiens
agggtttcaccacgt

SEQ ID NO: 438502 - DNA, 15 bp, Homo sapiens
cagggtttcaccacg

SEQ ID NO: 438503 - DNA, 15 bp, Homo sapiens
acagggtttcaccac

SEQ ID NO: 438504 - DNA, 15 bp, Homo sapiens
ataatttttgtattt

SEQ ID NO: 438505 - DNA, 15 bp, Homo sapiens
gataatttttgtatt

SEQ ID NO: 438506 - DNA, 15 bp, Homo sapiens
ggataatttttgtat

SEQ ID NO: 438507 - DNA, 15 bp, Homo sapiens
tggataatttttgta

SEQ ID NO: 438508 - DNA, 15 bp, Homo sapiens
ctggataatttttgt

SEQ ID NO: 438509 - DNA, 15 bp, Homo sapiens
cctggataatttttg

SEQ ID NO: 438510 - DNA, 15 bp, Homo sapiens
gcctggataattttt

SEQ ID NO: 438511 - DNA, 15 bp, Homo sapiens
cgcctggataatttt

SEQ ID NO: 438512 - DNA, 15 bp, Homo sapiens
acgcctggataattt

SEQ ID NO: 438513 - DNA, 15 bp, Homo sapiens
cacgcctggataatt

SEQ ID NO: 438514 - DNA, 15 bp, Homo sapiens
ccacgcctggataat

SEQ ID NO: 438515 - DNA, 15 bp, Homo sapiens
accacgcctggataa

SEQ ID NO: 438516 - DNA, 15 bp, Homo sapiens
caccacgcctggata

SEQ ID NO: 438517 - DNA, 15 bp, Homo sapiens
ccaccacgcctggat

SEQ ID NO: 438518 - DNA, 15 bp, Homo sapiens
accaccacgcctgga

SEQ ID NO: 438519 - DNA, 15 bp, Homo sapiens
caccaccacgcctgg

SEQ ID NO: 438520 - DNA, 15 bp, Homo sapiens
acaccaccacgcctg

SEQ ID NO: 438521 - DNA, 15 bp, Homo sapiens
cacaccaccacgcct

SEQ ID NO: 438522 - DNA, 15 bp, Homo sapiens
gcacaccaccacgcc

SEQ ID NO: 438523 - DNA, 15 bp, Homo sapiens
tgcacaccaccacgc

SEQ ID NO: 438524 - DNA, 15 bp, Homo sapiens
gtgcacaccaccacg

SEQ ID NO: 438525 - DNA, 15 bp, Homo sapiens
taggtgcacaccacc

SEQ ID NO: 438526 - DNA, 15 bp, Homo sapiens
ataggtgcacaccac

SEQ ID NO: 438527 - DNA, 15 bp, Homo sapiens
tataggtgcacacca

SEQ ID NO: 438528 - DNA, 15 bp, Homo sapiens
ctataggtgcacacc

SEQ ID NO: 438529 - DNA, 15 bp, Homo sapiens
actataggtgcacac

SEQ ID NO: 438530 - DNA, 15 bp, Homo sapiens
gactataggtgcaca

SEQ ID NO: 438531 - DNA, 15 bp, Homo sapiens
ggactataggtgcac

SEQ ID NO: 438532 - DNA, 15 bp, Homo sapiens
gggactataggtgca

SEQ ID NO: 438533 - DNA, 15 bp, Homo sapiens
tgggactataggtgc

SEQ ID NO: 438534 - DNA, 15 bp, Homo sapiens
ctgggactataggtg

SEQ ID NO: 438535 - DNA, 15 bp, Homo sapiens
gctgggactataggt

SEQ ID NO: 438536 - DNA, 15 bp, Homo sapiens
gtgcctcagcctccc

SEQ ID NO: 438537 - DNA, 15 bp, Homo sapiens
tgtgcctcagcctcc

SEQ ID NO: 438538 - DNA, 15 bp, Homo sapiens
ttgtgcctcagcctc

SEQ ID NO: 438539 - DNA, 15 bp, Homo sapiens
cttgtgcctcagcct

SEQ ID NO: 438540 - DNA, 15 bp, Homo sapiens
tcttgtgcctcagcc

SEQ ID NO: 438541 - DNA, 15 bp, Homo sapiens
ttcttgtgcctcagc

SEQ ID NO: 438542 - DNA, 15 bp, Homo sapiens
attcttgtgcctcag

SEQ ID NO: 438543 - DNA, 15 bp, Homo sapiens
aattcttgtgcctca

SEQ ID NO: 438544 - DNA, 15 bp, Homo sapiens
caattcttgtgcctc

SEQ ID NO: 438545 - DNA, 15 bp, Homo sapiens
gcaattcttgtgcct

SEQ ID NO: 438546 - DNA, 15 bp, Homo sapiens
agcaattcttgtgcc

SEQ ID NO: 438547 - DNA, 15 bp, Homo sapiens
aagcaattcttgtgc

SEQ ID NO: 438548 - DNA, 15 bp, Homo sapiens
caagcaattcttgtg

SEQ ID NO: 438549 - DNA, 15 bp, Homo sapiens
tcaagcaattcttgt

SEQ ID NO: 438550 - DNA, 15 bp, Homo sapiens
tcctgttctctgctt

SEQ ID NO: 438551 - DNA, 15 bp, Homo sapiens
ttcctgttctctgct

SEQ ID NO: 438552 - DNA, 15 bp, Homo sapiens
tttcctgttctctgc

SEQ ID NO: 438553 - DNA, 15 bp, Homo sapiens
gtttcctgttctctg

SEQ ID NO: 438554 - DNA, 15 bp, Homo sapiens
ggtttcctgttctct

SEQ ID NO: 438555 - DNA, 15 bp, Homo sapiens
tggtttcctgttctc

SEQ ID NO: 438556 - DNA, 15 bp, Homo sapiens
ctggtttcctgttct

SEQ ID NO: 438557 - DNA, 15 bp, Homo sapiens
gctggtttcctgttc

SEQ ID NO: 438558 - DNA, 15 bp, Homo sapiens
ggctggtttcctgtt

SEQ ID NO: 438559 - DNA, 15 bp, Homo sapiens
aggctggtttcctgt

SEQ ID NO: 438560 - DNA, 15 bp, Homo sapiens
gaggctggtttcctg

SEQ ID NO: 438561 - DNA, 15 bp, Homo sapiens
agaggctggtttcct

SEQ ID NO: 438562 - DNA, 15 bp, Homo sapiens
cagaggctggtttcc

SEQ ID NO: 438563 - DNA, 15 bp, Homo sapiens
gcagaggctggtttc

SEQ ID NO: 438564 - DNA, 15 bp, Homo sapiens
agcagaggctggttt

SEQ ID NO: 438565 - DNA, 15 bp, Homo sapiens
cagcagaggctggtt

SEQ ID NO: 438566 - DNA, 15 bp, Homo sapiens
acagcagaggctggt

SEQ ID NO: 438567 - DNA, 15 bp, Homo sapiens
tacagcagaggctgg

SEQ ID NO: 438568 - DNA, 15 bp, Homo sapiens
atacagcagaggctg

SEQ ID NO: 438569 - DNA, 15 bp, Homo sapiens
gatacagcagaggct

SEQ ID NO: 438570 - DNA, 15 bp, Homo sapiens
tgatacagcagaggc

SEQ ID NO: 438571 - DNA, 15 bp, Homo sapiens
ctgatacagcagagg

SEQ ID NO: 438572 - DNA, 15 bp, Homo sapiens
tctgatacagcagag

SEQ ID NO: 438573 - DNA, 15 bp, Homo sapiens
gtctgatacagcaga

SEQ ID NO: 438574 - DNA, 15 bp, Homo sapiens
tgtctgatacagcag

SEQ ID NO: 438575 - DNA, 15 bp, Homo sapiens
ctgtctgatacagca

SEQ ID NO: 438576 - DNA, 15 bp, Homo sapiens
cctgtctgatacagc

SEQ ID NO: 438577 - DNA, 15 bp, Homo sapiens
acctgtctgatacag

SEQ ID NO: 438578 - DNA, 15 bp, Homo sapiens
aacctgtctgataca

SEQ ID NO: 438579 - DNA, 15 bp, Homo sapiens
aaacctgtctgatac

SEQ ID NO: 438580 - DNA, 15 bp, Homo sapiens
caaacctgtctgata

SEQ ID NO: 438581 - DNA, 15 bp, Homo sapiens
gcaaacctgtctgat

SEQ ID NO: 438582 - DNA, 15 bp, Homo sapiens
agcaaacctgtctga

SEQ ID NO: 438583 - DNA, 15 bp, Homo sapiens
cagcaaacctgtctg

SEQ ID NO: 438584 - DNA, 15 bp, Homo sapiens
acagcaaacctgtct

SEQ ID NO: 438585 - DNA, 15 bp, Homo sapiens
aacagcaaacctgtc

SEQ ID NO: 438586 - DNA, 15 bp, Homo sapiens
taacagcaaacctgt

SEQ ID NO: 438587 - DNA, 15 bp, Homo sapiens
ttaacagcaaacctg

SEQ ID NO: 438588 - DNA, 15 bp, Homo sapiens
cttaacagcaaacct

SEQ ID NO: 438589 - DNA, 15 bp, Homo sapiens
acttaacagcaaacc

SEQ ID NO: 438590 - DNA, 15 bp, Homo sapiens
cacttaacagcaaac

SEQ ID NO: 438591 - DNA, 15 bp, Homo sapiens
acacttaacagcaaa

SEQ ID NO: 438592 - DNA, 15 bp, Homo sapiens
cacacttaacagcaa

SEQ ID NO: 438593 - DNA, 15 bp, Homo sapiens
acacacttaacagca

SEQ ID NO: 438594 - DNA, 15 bp, Homo sapiens
cacacacttaacagc

SEQ ID NO: 438595 - DNA, 15 bp, Homo sapiens
acacacacttaacag

SEQ ID NO: 438596 - DNA, 15 bp, Homo sapiens
tacacacacttaaca

SEQ ID NO: 438597 - DNA, 15 bp, Homo sapiens
gtacacacacttaac

SEQ ID NO: 438598 - DNA, 15 bp, Homo sapiens
tgtacacacacttaa

SEQ ID NO: 438599 - DNA, 15 bp, Homo sapiens
gtgtacacacactta

SEQ ID NO: 438600 - DNA, 15 bp, Homo sapiens
agtgtacacacactt

SEQ ID NO: 438601 - DNA, 15 bp, Homo sapiens
aagtgtacacacact

SEQ ID NO: 438602 - DNA, 15 bp, Homo sapiens
gaagtgtacacacac

SEQ ID NO: 438603 - DNA, 15 bp, Homo sapiens
tgaagtgtacacaca

SEQ ID NO: 438604 - DNA, 15 bp, Homo sapiens
ttgaagtgtacacac

SEQ ID NO: 438605 - DNA, 15 bp, Homo sapiens
cttgaagtgtacaca

SEQ ID NO: 438606 - DNA, 15 bp, Homo sapiens
tcttgaagtgtacac

SEQ ID NO: 438607 - DNA, 15 bp, Homo sapiens
gtcttgaagtgtaca

SEQ ID NO: 438608 - DNA, 15 bp, Homo sapiens
ggtcttgaagtgtac

SEQ ID NO: 438609 - DNA, 15 bp, Homo sapiens
tggtcttgaagtgta

SEQ ID NO: 438610 - DNA, 15 bp, Homo sapiens
ttggtcttgaagtgt

SEQ ID NO: 438611 - DNA, 15 bp, Homo sapiens
tttggtcttgaagtg

SEQ ID NO: 438612 - DNA, 15 bp, Homo sapiens
ctttggtcttgaagt

SEQ ID NO: 438613 - DNA, 15 bp, Homo sapiens
actttggtcttgaag

SEQ ID NO: 438614 - DNA, 15 bp, Homo sapiens
tactttggtcttgaa

SEQ ID NO: 438615 - DNA, 15 bp, Homo sapiens
ttactttggtcttga

SEQ ID NO: 438616 - DNA, 15 bp, Homo sapiens
attactttggtcttg

SEQ ID NO: 438617 - DNA, 15 bp, Homo sapiens
aattactttggtctt

SEQ ID NO: 438618 - DNA, 15 bp, Homo sapiens
aaattactttggtct

SEQ ID NO: 438619 - DNA, 15 bp, Homo sapiens
aaaattactttggtc

SEQ ID NO: 438620 - DNA, 15 bp, Homo sapiens
gaaaattactttggt

SEQ ID NO: 438621 - DNA, 15 bp, Homo sapiens
agaaaattactttgg

SEQ ID NO: 438622 - DNA, 15 bp, Homo sapiens
aagaaaattactttg

SEQ ID NO: 438623 - DNA, 15 bp, Homo sapiens
aaagaaaattacttt

SEQ ID NO: 438624 - DNA, 15 bp, Homo sapiens
gaaagaaaattactt

SEQ ID NO: 438625 - DNA, 15 bp, Homo sapiens
tgaaagaaaattact

SEQ ID NO: 438626 - DNA, 15 bp, Homo sapiens
atgaaagaaaattac

SEQ ID NO: 438627 - DNA, 15 bp, Homo sapiens
aatgaaagaaaatta

SEQ ID NO: 438628 - DNA, 15 bp, Homo sapiens
gaatgaaagaaaatt

SEQ ID NO: 438629 - DNA, 15 bp, Homo sapiens
agaatgaaagaaaat

SEQ ID NO: 438630 - DNA, 15 bp, Homo sapiens
aagaatgaaagaaaa

SEQ ID NO: 438631 - DNA, 15 bp, Homo sapiens
aaagaatgaaagaaa

SEQ ID NO: 438632 - DNA, 15 bp, Homo sapiens
aaaagaatgaaagaa

SEQ ID NO: 438633 - DNA, 15 bp, Homo sapiens
aaaaagaatgaaaga

SEQ ID NO: 438634 - DNA, 15 bp, Homo sapiens
aaaaaagaatgaaag

SEQ ID NO: 438635 - DNA, 15 bp, Homo sapiens
taaaaaagaatgaaa

SEQ ID NO: 438636 - DNA, 15 bp, Homo sapiens
ataaaaaagaatgaa

SEQ ID NO: 438637 - DNA, 15 bp, Homo sapiens
gataaaaaagaatga

SEQ ID NO: 438638 - DNA, 15 bp, Homo sapiens
ggataaaaaagaatg

SEQ ID NO: 438639 - DNA, 15 bp, Homo sapiens
aggataaaaaagaat

SEQ ID NO: 438640 - DNA, 15 bp, Homo sapiens
caggataaaaaagaa

SEQ ID NO: 438641 - DNA, 15 bp, Homo sapiens
acaggataaaaaaga

SEQ ID NO: 438642 - DNA, 15 bp, Homo sapiens
tacaggataaaaaag

SEQ ID NO: 438643 - DNA, 15 bp, Homo sapiens
ctacaggataaaaaa

SEQ ID NO: 438644 - DNA, 15 bp, Homo sapiens
tctacaggataaaaa

SEQ ID NO: 438645 - DNA, 15 bp, Homo sapiens
atctacaggataaaa

SEQ ID NO: 438646 - DNA, 15 bp, Homo sapiens
gatctacaggataaa

SEQ ID NO: 438647 - DNA, 15 bp, Homo sapiens
cgatctacaggataa

SEQ ID NO: 438648 - DNA, 15 bp, Homo sapiens
gcgatctacaggata

SEQ ID NO: 438649 - DNA, 15 bp, Homo sapiens
ggcgatctacaggat

SEQ ID NO: 438650 - DNA, 15 bp, Homo sapiens
tggcgatctacagga

SEQ ID NO: 438651 - DNA, 15 bp, Homo sapiens
ctggcgatctacagg

SEQ ID NO: 438652 - DNA, 15 bp, Homo sapiens
actggcgatctacag

SEQ ID NO: 438653 - DNA, 15 bp, Homo sapiens
tactggcgatctaca

SEQ ID NO: 438654 - DNA, 15 bp, Homo sapiens
gtactggcgatctac

SEQ ID NO: 438655 - DNA, 15 bp, Homo sapiens
ggtactggcgatcta

SEQ ID NO: 438656 - DNA, 15 bp, Homo sapiens
aggtactggcgatct

SEQ ID NO: 438657 - DNA, 15 bp, Homo sapiens
taggtactggcgatc

SEQ ID NO: 438658 - DNA, 15 bp, Homo sapiens
gtaggtactggcgat

SEQ ID NO: 438659 - DNA, 15 bp, Homo sapiens
agtaggtactggcga

SEQ ID NO: 438660 - DNA, 15 bp, Homo sapiens
cagtaggtactggcg

SEQ ID NO: 438661 - DNA, 15 bp, Homo sapiens
gcagtaggtactggc

SEQ ID NO: 438662 - DNA, 15 bp, Homo sapiens
tgcagtaggtactgg

SEQ ID NO: 438663 - DNA, 15 bp, Homo sapiens
ttgcagtaggtactg

SEQ ID NO: 438664 - DNA, 15 bp, Homo sapiens
gttgcagtaggtact

SEQ ID NO: 438665 - DNA, 15 bp, Homo sapiens
tgttgcagtaggtac

SEQ ID NO: 438666 - DNA, 15 bp, Homo sapiens
atgttgcagtaggta

SEQ ID NO: 438667 - DNA, 15 bp, Homo sapiens
gatgttgcagtaggt

SEQ ID NO: 438668 - DNA, 15 bp, Homo sapiens
agatgttgcagtagg

SEQ ID NO: 438669 - DNA, 15 bp, Homo sapiens
aagatgttgcagtag

SEQ ID NO: 438670 - DNA, 15 bp, Homo sapiens
aaagatgttgcagta

SEQ ID NO: 438671 - DNA, 15 bp, Homo sapiens
aaaagatgttgcagt

SEQ ID NO: 438672 - DNA, 15 bp, Homo sapiens
gaaaagatgttgcag

SEQ ID NO: 438673 - DNA, 15 bp, Homo sapiens
agaaaagatgttgca

SEQ ID NO: 438674 - DNA, 15 bp, Homo sapiens
gagaaaagatgttgc

SEQ ID NO: 438675 - DNA, 15 bp, Homo sapiens
ggagaaaagatgttg

SEQ ID NO: 438676 - DNA, 15 bp, Homo sapiens
gggagaaaagatgtt

SEQ ID NO: 438677 - DNA, 15 bp, Homo sapiens
agggagaaaagatgt

SEQ ID NO: 438678 - DNA, 15 bp, Homo sapiens
tagggagaaaagatg

SEQ ID NO: 438679 - DNA, 15 bp, Homo sapiens
gtagggagaaaagat

SEQ ID NO: 438680 - DNA, 15 bp, Homo sapiens
tgtagggagaaaaga

SEQ ID NO: 438681 - DNA, 15 bp, Homo sapiens
gtgtagggagaaaag

SEQ ID NO: 438682 - DNA, 15 bp, Homo sapiens
tgtgtagggagaaaa

SEQ ID NO: 438683 - DNA, 15 bp, Homo sapiens
ctgtgtagggagaaa

SEQ ID NO: 438684 - DNA, 15 bp, Homo sapiens
gctgtgtagggagaa

SEQ ID NO: 438685 - DNA, 15 bp, Homo sapiens
cgctgtgtagggaga

SEQ ID NO: 438686 - DNA, 15 bp, Homo sapiens
tcgctgtgtagggag

SEQ ID NO: 438687 - DNA, 15 bp, Homo sapiens
gtcgctgtgtaggga

SEQ ID NO: 438688 - DNA, 15 bp, Homo sapiens
agtcgctgtgtaggg

SEQ ID NO: 438689 - DNA, 15 bp, Homo sapiens
gagtcgctgtgtagg

SEQ ID NO: 438690 - DNA, 15 bp, Homo sapiens
ggagtcgctgtgtag

SEQ ID NO: 438691 - DNA, 15 bp, Homo sapiens
tggagtcgctgtgta

SEQ ID NO: 438692 - DNA, 15 bp, Homo sapiens
ctggagtcgctgtgt

SEQ ID NO: 438693 - DNA, 15 bp, Homo sapiens
gctggagtcgctgtg

SEQ ID NO: 438694 - DNA, 15 bp, Homo sapiens
agctggagtcgctgt

SEQ ID NO: 438695 - DNA, 15 bp, Homo sapiens
aagctggagtcgctg

SEQ ID NO: 438696 - DNA, 15 bp, Homo sapiens
caagctggagtcgct

SEQ ID NO: 438697 - DNA, 15 bp, Homo sapiens
ccaagctggagtcgc

SEQ ID NO: 438698 - DNA, 15 bp, Homo sapiens
cccaagctggagtcg

SEQ ID NO: 438699 - DNA, 15 bp, Homo sapiens
tcccaagctggagtc

SEQ ID NO: 438700 - DNA, 15 bp, Homo sapiens
ctcccaagctggagt

SEQ ID NO: 438701 - DNA, 15 bp, Homo sapiens
cctcccaagctggag

SEQ ID NO: 438702 - DNA, 15 bp, Homo sapiens
ccctcccaagctgga

SEQ ID NO: 438703 - DNA, 15 bp, Homo sapiens
gccctcccaagctgg

SEQ ID NO: 438704 - DNA, 15 bp, Homo sapiens
tgccctcccaagctg

SEQ ID NO: 438705 - DNA, 15 bp, Homo sapiens
ctgccctcccaagct

SEQ ID NO: 438706 - DNA, 15 bp, Homo sapiens
cctgccctcccaagc

SEQ ID NO: 438707 - DNA, 15 bp, Homo sapiens
ccctgccctcccaag

SEQ ID NO: 438708 - DNA, 15 bp, Homo sapiens
gccctgccctcccaa

SEQ ID NO: 438709 - DNA, 15 bp, Homo sapiens
ggccctgccctccca

SEQ ID NO: 438710 - DNA, 15 bp, Homo sapiens
tggccctgccctccc

SEQ ID NO: 438711 - DNA, 15 bp, Homo sapiens
ctggccctgccctcc

SEQ ID NO: 438712 - DNA, 15 bp, Homo sapiens
cctggccctgccctc

SEQ ID NO: 438713 - DNA, 15 bp, Homo sapiens
ccctggccctgccct

SEQ ID NO: 438714 - DNA, 15 bp, Homo sapiens
accctggccctgccc

SEQ ID NO: 438715 - DNA, 15 bp, Homo sapiens
aaccctggccctgcc

SEQ ID NO: 438716 - DNA, 15 bp, Homo sapiens
caaccctggccctgc

SEQ ID NO: 438717 - DNA, 15 bp, Homo sapiens
acaaccctggccctg

SEQ ID NO: 438718 - DNA, 15 bp, Homo sapiens
gacaaccctggccct

SEQ ID NO: 438719 - DNA, 15 bp, Homo sapiens
tgacaaccctggccc

SEQ ID NO: 438720 - DNA, 15 bp, Homo sapiens
gtgacaaccctggcc

SEQ ID NO: 438721 - DNA, 15 bp, Homo sapiens
tgtgacaaccctggc

SEQ ID NO: 438722 - DNA, 15 bp, Homo sapiens
ctgtgacaaccctgg

SEQ ID NO: 438723 - DNA, 15 bp, Homo sapiens
gctgtgacaaccctg

SEQ ID NO: 438724 - DNA, 15 bp, Homo sapiens
agctgtgacaaccct

SEQ ID NO: 438725 - DNA, 15 bp, Homo sapiens
aagctgtgacaaccc

SEQ ID NO: 438726 - DNA, 15 bp, Homo sapiens
gaagctgtgacaacc

SEQ ID NO: 438727 - DNA, 15 bp, Homo sapiens
ggaagctgtgacaac

SEQ ID NO: 438728 - DNA, 15 bp, Homo sapiens
gggaagctgtgacaa

SEQ ID NO: 438729 - DNA, 15 bp, Homo sapiens
ggggaagctgtgaca

SEQ ID NO: 438730 - DNA, 15 bp, Homo sapiens
aggggaagctgtgac

SEQ ID NO: 438731 - DNA, 15 bp, Homo sapiens
caggggaagctgtga

SEQ ID NO: 438732 - DNA, 15 bp, Homo sapiens
acaggggaagctgtg

SEQ ID NO: 438733 - DNA, 15 bp, Homo sapiens
cacaggggaagctgt

SEQ ID NO: 438734 - DNA, 15 bp, Homo sapiens
ccacaggggaagctg

SEQ ID NO: 438735 - DNA, 15 bp, Homo sapiens
accacaggggaagct

SEQ ID NO: 438736 - DNA, 15 bp, Homo sapiens
caccacaggggaagc

SEQ ID NO: 438737 - DNA, 15 bp, Homo sapiens
acaccacaggggaag

SEQ ID NO: 438738 - DNA, 15 bp, Homo sapiens
gacaccacaggggaa

SEQ ID NO: 438739 - DNA, 15 bp, Homo sapiens
agacaccacagggga

SEQ ID NO: 438740 - DNA, 15 bp, Homo sapiens
cagacaccacagggg

SEQ ID NO: 438741 - DNA, 15 bp, Homo sapiens
gcagacaccacaggg

SEQ ID NO: 438742 - DNA, 15 bp, Homo sapiens
ggcagacaccacagg

SEQ ID NO: 438743 - DNA, 15 bp, Homo sapiens
aggcagacaccacag

SEQ ID NO: 438744 - DNA, 15 bp, Homo sapiens
caggcagacaccaca

SEQ ID NO: 438745 - DNA, 15 bp, Homo sapiens
gcaggcagacaccac

SEQ ID NO: 438746 - DNA, 15 bp, Homo sapiens
ggcaggcagacacca

SEQ ID NO: 438747 - DNA, 15 bp, Homo sapiens
tggcaggcagacacc

SEQ ID NO: 438748 - DNA, 15 bp, Homo sapiens
ttggcaggcagacac

SEQ ID NO: 438749 - DNA, 15 bp, Homo sapiens
cttggcaggcagaca

SEQ ID NO: 438750 - DNA, 15 bp, Homo sapiens
gcttggcaggcagac

SEQ ID NO: 438751 - DNA, 15 bp, Homo sapiens
tgcttggcaggcaga

SEQ ID NO: 438752 - DNA, 15 bp, Homo sapiens
gtgcttggcaggcag

SEQ ID NO: 438753 - DNA, 15 bp, Homo sapiens
tgtgcttggcaggca

SEQ ID NO: 438754 - DNA, 15 bp, Homo sapiens
ctgtgcttggcaggc

SEQ ID NO: 438755 - DNA, 15 bp, Homo sapiens
gctgtgcttggcagg

SEQ ID NO: 438756 - DNA, 15 bp, Homo sapiens
agctgtgcttggcag

SEQ ID NO: 438757 - DNA, 15 bp, Homo sapiens
gagctgtgcttggca

SEQ ID NO: 438758 - DNA, 15 bp, Homo sapiens
agagctgtgcttggc

SEQ ID NO: 438759 - DNA, 15 bp, Homo sapiens
cagagctgtgcttgg

SEQ ID NO: 438760 - DNA, 15 bp, Homo sapiens
ccagagctgtgcttg

SEQ ID NO: 438761 - DNA, 15 bp, Homo sapiens
tccagagctgtgctt

SEQ ID NO: 438762 - DNA, 15 bp, Homo sapiens
ctccagagctgtgct

SEQ ID NO: 438763 - DNA, 15 bp, Homo sapiens
actccagagctgtgc

SEQ ID NO: 438764 - DNA, 15 bp, Homo sapiens
aactccagagctgtg

SEQ ID NO: 438765 - DNA, 15 bp, Homo sapiens
taactccagagctgt

SEQ ID NO: 438766 - DNA, 15 bp, Homo sapiens
ctaactccagagctg

SEQ ID NO: 438767 - DNA, 15 bp, Homo sapiens
gctaactccagagct

SEQ ID NO: 438768 - DNA, 15 bp, Homo sapiens
ggctaactccagagc

SEQ ID NO: 438769 - DNA, 15 bp, Homo sapiens
gggctaactccagag

SEQ ID NO: 438770 - DNA, 15 bp, Homo sapiens
agggctaactccaga

SEQ ID NO: 438771 - DNA, 15 bp, Homo sapiens
cagggctaactccag

SEQ ID NO: 438772 - DNA, 15 bp, Homo sapiens
ccagggctaactcca

SEQ ID NO: 438773 - DNA, 15 bp, Homo sapiens
cccagggctaactcc

SEQ ID NO: 438774 - DNA, 15 bp, Homo sapiens
acccagggctaactc

SEQ ID NO: 438775 - DNA, 15 bp, Homo sapiens
cacccagggctaact

SEQ ID NO: 438776 - DNA, 15 bp, Homo sapiens
acacccagggctaac

SEQ ID NO: 438777 - DNA, 15 bp, Homo sapiens
cacacccagggctaa

SEQ ID NO: 438778 - DNA, 15 bp, Homo sapiens
tcacacccagggcta

SEQ ID NO: 438779 - DNA, 15 bp, Homo sapiens
ctcacacccagggct

SEQ ID NO: 438780 - DNA, 15 bp, Homo sapiens
cctcacacccagggc

SEQ ID NO: 438781 - DNA, 15 bp, Homo sapiens
acctcacacccaggg

SEQ ID NO: 438782 - DNA, 15 bp, Homo sapiens
cacctcacacccagg

SEQ ID NO: 438783 - DNA, 15 bp, Homo sapiens
tcacctcacacccag

SEQ ID NO: 438784 - DNA, 15 bp, Homo sapiens
ctcacctcacaccca

SEQ ID NO: 438785 - DNA, 15 bp, Homo sapiens
tctcacctcacaccc

SEQ ID NO: 438786 - DNA, 15 bp, Homo sapiens
ttctcacctcacacc

SEQ ID NO: 438787 - DNA, 15 bp, Homo sapiens
tttctcacctcacac

SEQ ID NO: 438788 - DNA, 15 bp, Homo sapiens
ctttctcacctcaca

SEQ ID NO: 438789 - DNA, 15 bp, Homo sapiens
tctttctcacctcac

SEQ ID NO: 438790 - DNA, 15 bp, Homo sapiens
ctctttctcacctca

SEQ ID NO: 438791 - DNA, 15 bp, Homo sapiens
tctctttctcacctc

SEQ ID NO: 438792 - DNA, 15 bp, Homo sapiens
atctctttctcacct

SEQ ID NO: 438793 - DNA, 15 bp, Homo sapiens
aatctctttctcacc

SEQ ID NO: 438794 - DNA, 15 bp, Homo sapiens
caatctctttctcac

SEQ ID NO: 438795 - DNA, 15 bp, Homo sapiens
gcaatctctttctca

SEQ ID NO: 438796 - DNA, 15 bp, Homo sapiens
tgcaatctctttctc

SEQ ID NO: 438797 - DNA, 15 bp, Homo sapiens
atgcaatctctttct

SEQ ID NO: 438798 - DNA, 15 bp, Homo sapiens
catgcaatctctttc

SEQ ID NO: 438799 - DNA, 15 bp, Homo sapiens
ccatgcaatctcttt

SEQ ID NO: 438800 - DNA, 15 bp, Homo sapiens
accatgcaatctctt

SEQ ID NO: 438801 - DNA, 15 bp, Homo sapiens
gaccatgcaatctct

SEQ ID NO: 438802 - DNA, 15 bp, Homo sapiens
agaccatgcaatctc

SEQ ID NO: 438803 - DNA, 15 bp, Homo sapiens
cagaccatgcaatct

SEQ ID NO: 438804 - DNA, 15 bp, Homo sapiens
ccagaccatgcaatc

SEQ ID NO: 438805 - DNA, 15 bp, Homo sapiens
accagaccatgcaat

SEQ ID NO: 438806 - DNA, 15 bp, Homo sapiens
aaccagaccatgcaa

SEQ ID NO: 438807 - DNA, 15 bp, Homo sapiens
aaaccagaccatgca

SEQ ID NO: 438808 - DNA, 15 bp, Homo sapiens
aaaaccagaccatgc

SEQ ID NO: 438809 - DNA, 15 bp, Homo sapiens
aaaaaccagaccatg

SEQ ID NO: 438810 - DNA, 15 bp, Homo sapiens
aaaaaaccagaccat

SEQ ID NO: 438811 - DNA, 15 bp, Homo sapiens
aaaaaaaccagacca

SEQ ID NO: 438812 - DNA, 15 bp, Homo sapiens
gaaaaaaaccagacc

SEQ ID NO: 438813 - DNA, 15 bp, Homo sapiens
tgaaaaaaaccagac

SEQ ID NO: 438814 - DNA, 15 bp, Homo sapiens
atgaaaaaaaccaga

SEQ ID NO: 438815 - DNA, 15 bp, Homo sapiens
aatgaaaaaaaccag

SEQ ID NO: 438816 - DNA, 15 bp, Homo sapiens
gaatgaaaaaaacca

SEQ ID NO: 438817 - DNA, 15 bp, Homo sapiens
tgaatgaaaaaaacc

SEQ ID NO: 438818 - DNA, 15 bp, Homo sapiens
gtgaatgaaaaaaac

SEQ ID NO: 438819 - DNA, 15 bp, Homo sapiens
agtgaatgaaaaaaa

SEQ ID NO: 438820 - DNA, 15 bp, Homo sapiens
aagtgaatgaaaaaa

SEQ ID NO: 438821 - DNA, 15 bp, Homo sapiens
caagtgaatgaaaaa

SEQ ID NO: 438822 - DNA, 15 bp, Homo sapiens
ccaagtgaatgaaaa

SEQ ID NO: 438823 - DNA, 15 bp, Homo sapiens
cccaagtgaatgaaa

SEQ ID NO: 438824 - DNA, 15 bp, Homo sapiens
gcccaagtgaatgaa

SEQ ID NO: 438825 - DNA, 15 bp, Homo sapiens
tgcccaagtgaatga

SEQ ID NO: 438826 - DNA, 15 bp, Homo sapiens
ctgcccaagtgaatg

SEQ ID NO: 438827 - DNA, 15 bp, Homo sapiens
cctgcccaagtgaat

SEQ ID NO: 438828 - DNA, 15 bp, Homo sapiens
acctgcccaagtgaa

SEQ ID NO: 438829 - DNA, 15 bp, Homo sapiens
cacctgcccaagtga

SEQ ID NO: 438830 - DNA, 15 bp, Homo sapiens
acacctgcccaagtg

SEQ ID NO: 438831 - DNA, 15 bp, Homo sapiens
gacacctgcccaagt

SEQ ID NO: 438832 - DNA, 15 bp, Homo sapiens
agacacctgcccaag

SEQ ID NO: 438833 - DNA, 15 bp, Homo sapiens
aagacacctgcccaa

SEQ ID NO: 438834 - DNA, 15 bp, Homo sapiens
caagacacctgccca

SEQ ID NO: 438835 - DNA, 15 bp, Homo sapiens
gcaagacacctgccc

SEQ ID NO: 438836 - DNA, 15 bp, Homo sapiens
ggcaagacacctgcc

SEQ ID NO: 438837 - DNA, 15 bp, Homo sapiens
gggcaagacacctgc

SEQ ID NO: 438838 - DNA, 15 bp, Homo sapiens
cgggcaagacacctg

SEQ ID NO: 438839 - DNA, 15 bp, Homo sapiens
gcgggcaagacacct

SEQ ID NO: 438840 - DNA, 15 bp, Homo sapiens
tgcgggcaagacacc

SEQ ID NO: 438841 - DNA, 15 bp, Homo sapiens
ctgcgggcaagacac

SEQ ID NO: 438842 - DNA, 15 bp, Homo sapiens
actgcgggcaagaca

SEQ ID NO: 438843 - DNA, 15 bp, Homo sapiens
aactgcgggcaagac

SEQ ID NO: 438844 - DNA, 15 bp, Homo sapiens
aaactgcgggcaaga

SEQ ID NO: 438845 - DNA, 15 bp, Homo sapiens
caaactgcgggcaag

SEQ ID NO: 438846 - DNA, 15 bp, Homo sapiens
ccaaactgcgggcaa

SEQ ID NO: 438847 - DNA, 15 bp, Homo sapiens
cccaaactgcgggca

SEQ ID NO: 438848 - DNA, 15 bp, Homo sapiens
gcccaaactgcgggc

SEQ ID NO: 438849 - DNA, 15 bp, Homo sapiens
tgcccaaactgcggg

SEQ ID NO: 438850 - DNA, 15 bp, Homo sapiens
atgcccaaactgcgg

SEQ ID NO: 438851 - DNA, 15 bp, Homo sapiens
catgcccaaactgcg

SEQ ID NO: 438852 - DNA, 15 bp, Homo sapiens
gcatgcccaaactgc

SEQ ID NO: 438853 - DNA, 15 bp, Homo sapiens
tgcatgcccaaactg

SEQ ID NO: 438854 - DNA, 15 bp, Homo sapiens
gtgcatgcccaaact

SEQ ID NO: 438855 - DNA, 15 bp, Homo sapiens
tgtgcatgcccaaac

SEQ ID NO: 438856 - DNA, 15 bp, Homo sapiens
gtgtgcatgcccaaa

SEQ ID NO: 438857 - DNA, 15 bp, Homo sapiens
tgtgtgcatgcccaa

SEQ ID NO: 438858 - DNA, 15 bp, Homo sapiens
gtgtgtgcatgccca

SEQ ID NO: 438859 - DNA, 15 bp, Homo sapiens
ggtgtgtgcatgccc

SEQ ID NO: 438860 - DNA, 15 bp, Homo sapiens
gggtgtgtgcatgcc

SEQ ID NO: 438861 - DNA, 15 bp, Homo sapiens
agggtgtgtgcatgc

SEQ ID NO: 438862 - DNA, 15 bp, Homo sapiens
gagggtgtgtgcatg

SEQ ID NO: 438863 - DNA, 15 bp, Homo sapiens
agagggtgtgtgcat

SEQ ID NO: 438864 - DNA, 15 bp, Homo sapiens
cagagggtgtgtgca

SEQ ID NO: 438865 - DNA, 15 bp, Homo sapiens
gcagagggtgtgtgc

SEQ ID NO: 438866 - DNA, 15 bp, Homo sapiens
ggcagagggtgtgtg

SEQ ID NO: 438867 - DNA, 15 bp, Homo sapiens
cggcagagggtgtgt

SEQ ID NO: 438868 - DNA, 15 bp, Homo sapiens
ccggcagagggtgtg

SEQ ID NO: 438869 - DNA, 15 bp, Homo sapiens
tccggcagagggtgt

SEQ ID NO: 438870 - DNA, 15 bp, Homo sapiens
ttccggcagagggtg

SEQ ID NO: 438871 - DNA, 15 bp, Homo sapiens
attccggcagagggt

SEQ ID NO: 438872 - DNA, 15 bp, Homo sapiens
cattccggcagaggg

SEQ ID NO: 438873 - DNA, 15 bp, Homo sapiens
ccattccggcagagg

SEQ ID NO: 438874 - DNA, 15 bp, Homo sapiens
gccattccggcagag

SEQ ID NO: 438875 - DNA, 15 bp, Homo sapiens
ggccattccggcaga

SEQ ID NO: 438876 - DNA, 15 bp, Homo sapiens
gggccattccggcag

SEQ ID NO: 438877 - DNA, 15 bp, Homo sapiens
ggggccattccggca

SEQ ID NO: 438878 - DNA, 15 bp, Homo sapiens
tggggccattccggc

SEQ ID NO: 438879 - DNA, 15 bp, Homo sapiens
ttggggccattccgg

SEQ ID NO: 438880 - DNA, 15 bp, Homo sapiens
cttggggccattccg

SEQ ID NO: 438881 - DNA, 15 bp, Homo sapiens
gcttggggccattcc

SEQ ID NO: 438882 - DNA, 15 bp, Homo sapiens
tgcttggggccattc

SEQ ID NO: 438883 - DNA, 15 bp, Homo sapiens
ctgcttggggccatt

SEQ ID NO: 438884 - DNA, 15 bp, Homo sapiens
cctgcttggggccat

SEQ ID NO: 438885 - DNA, 15 bp, Homo sapiens
gcctgcttggggcca

SEQ ID NO: 438886 - DNA, 15 bp, Homo sapiens
agcctgcttggggcc

SEQ ID NO: 438887 - DNA, 15 bp, Homo sapiens
gagcctgcttggggc

SEQ ID NO: 438888 - DNA, 15 bp, Homo sapiens
cgagcctgcttgggg

SEQ ID NO: 438889 - DNA, 15 bp, Homo sapiens
gcgagcctgcttggg

SEQ ID NO: 438890 - DNA, 15 bp, Homo sapiens
ggcgagcctgcttgg

SEQ ID NO: 438891 - DNA, 15 bp, Homo sapiens
aggcgagcctgcttg

SEQ ID NO: 438892 - DNA, 15 bp, Homo sapiens
caggcgagcctgctt

SEQ ID NO: 438893 - DNA, 15 bp, Homo sapiens
gcaggcgagcctgct

SEQ ID NO: 438894 - DNA, 15 bp, Homo sapiens
agcaggcgagcctgc

SEQ ID NO: 438895 - DNA, 15 bp, Homo sapiens
cagcaggcgagcctg

SEQ ID NO: 438896 - DNA, 15 bp, Homo sapiens
gcagcaggcgagcct

SEQ ID NO: 438897 - DNA, 15 bp, Homo sapiens
agcagcaggcgagcc

SEQ ID NO: 438898 - DNA, 15 bp, Homo sapiens
cagcagcaggcgagc

SEQ ID NO: 438899 - DNA, 15 bp, Homo sapiens
tcagcagcaggcgag

SEQ ID NO: 438900 - DNA, 15 bp, Homo sapiens
ttcagcagcaggcga

SEQ ID NO: 438901 - DNA, 15 bp, Homo sapiens
cttcagcagcaggcg

SEQ ID NO: 438902 - DNA, 15 bp, Homo sapiens
gcttcagcagcaggc

SEQ ID NO: 438903 - DNA, 15 bp, Homo sapiens
agcttcagcagcagg

SEQ ID NO: 438904 - DNA, 15 bp, Homo sapiens
cagcttcagcagcag

SEQ ID NO: 438905 - DNA, 15 bp, Homo sapiens
gcagcttcagcagca

SEQ ID NO: 438906 - DNA, 15 bp, Homo sapiens
tgcagcttcagcagc

SEQ ID NO: 438907 - DNA, 15 bp, Homo sapiens
ttgcagcttcagcag

SEQ ID NO: 438908 - DNA, 15 bp, Homo sapiens
gttgcagcttcagca

SEQ ID NO: 438909 - DNA, 15 bp, Homo sapiens
cgttgcagcttcagc

SEQ ID NO: 438910 - DNA, 15 bp, Homo sapiens
tcgttgcagcttcag

SEQ ID NO: 438911 - DNA, 15 bp, Homo sapiens
atcgttgcagcttca

SEQ ID NO: 438912 - DNA, 15 bp, Homo sapiens
aatcgttgcagcttc

SEQ ID NO: 438913 - DNA, 15 bp, Homo sapiens
aaatcgttgcagctt

SEQ ID NO: 438914 - DNA, 15 bp, Homo sapiens
taaatcgttgcagct

SEQ ID NO: 438915 - DNA, 15 bp, Homo sapiens
ttaaatcgttgcagc

SEQ ID NO: 438916 - DNA, 15 bp, Homo sapiens
gttaaatcgttgcag

SEQ ID NO: 438917 - DNA, 15 bp, Homo sapiens
ggttaaatcgttgca

SEQ ID NO: 438918 - DNA, 15 bp, Homo sapiens
aggttaaatcgttgc

SEQ ID NO: 438919 - DNA, 15 bp, Homo sapiens
gaggttaaatcgttg

SEQ ID NO: 438920 - DNA, 15 bp, Homo sapiens
ggaggttaaatcgtt

SEQ ID NO: 438921 - DNA, 15 bp, Homo sapiens
tggaggttaaatcgt

SEQ ID NO: 438922 - DNA, 15 bp, Homo sapiens
atggaggttaaatcg

SEQ ID NO: 438923 - DNA, 15 bp, Homo sapiens
gatggaggttaaatc

SEQ ID NO: 438924 - DNA, 15 bp, Homo sapiens
cgatggaggttaaat

SEQ ID NO: 438925 - DNA, 15 bp, Homo sapiens
gcgatggaggttaaa

SEQ ID NO: 438926 - DNA, 15 bp, Homo sapiens
tgcgatggaggttaa

SEQ ID NO: 438927 - DNA, 15 bp, Homo sapiens
ctgcgatggaggtta

SEQ ID NO: 438928 - DNA, 15 bp, Homo sapiens
gctgcgatggaggtt

SEQ ID NO: 438929 - DNA, 15 bp, Homo sapiens
tgctgcgatggaggt

SEQ ID NO: 438930 - DNA, 15 bp, Homo sapiens
gtgctgcgatggagg

SEQ ID NO: 438931 - DNA, 15 bp, Homo sapiens
agtgctgcgatggag

SEQ ID NO: 438932 - DNA, 15 bp, Homo sapiens
cagtgctgcgatgga

SEQ ID NO: 438933 - DNA, 15 bp, Homo sapiens
tcagtgctgcgatgg

SEQ ID NO: 438934 - DNA, 15 bp, Homo sapiens
gtcagtgctgcgatg

SEQ ID NO: 438935 - DNA, 15 bp, Homo sapiens
tgtcagtgctgcgat

SEQ ID NO: 438936 - DNA, 15 bp, Homo sapiens
atgtcagtgctgcga

SEQ ID NO: 438937 - DNA, 15 bp, Homo sapiens
aatgtcagtgctgcg

SEQ ID NO: 438938 - DNA, 15 bp, Homo sapiens
caatgtcagtgctgc

SEQ ID NO: 438939 - DNA, 15 bp, Homo sapiens
ccaatgtcagtgctg

SEQ ID NO: 438940 - DNA, 15 bp, Homo sapiens
cccaatgtcagtgct

SEQ ID NO: 438941 - DNA, 15 bp, Homo sapiens
acccaatgtcagtgc

SEQ ID NO: 438942 - DNA, 15 bp, Homo sapiens
cacccaatgtcagtg

SEQ ID NO: 438943 - DNA, 15 bp, Homo sapiens
ccacccaatgtcagt

SEQ ID NO: 438944 - DNA, 15 bp, Homo sapiens
cccacccaatgtcag

SEQ ID NO: 438945 - DNA, 15 bp, Homo sapiens
tcccacccaatgtca

SEQ ID NO: 438946 - DNA, 15 bp, Homo sapiens
ctcccacccaatgtc

SEQ ID NO: 438947 - DNA, 15 bp, Homo sapiens
cctcccacccaatgt

SEQ ID NO: 438948 - DNA, 15 bp, Homo sapiens
gcctcccacccaatg

SEQ ID NO: 438949 - DNA, 15 bp, Homo sapiens
ggcctcccacccaat

SEQ ID NO: 438950 - DNA, 15 bp, Homo sapiens
aggcctcccacccaa

SEQ ID NO: 438951 - DNA, 15 bp, Homo sapiens
gaggcctcccaccca

SEQ ID NO: 438952 - DNA, 15 bp, Homo sapiens
ggaggcctcccaccc

SEQ ID NO: 438953 - DNA, 15 bp, Homo sapiens
aggaggcctcccacc

SEQ ID NO: 438954 - DNA, 15 bp, Homo sapiens
aaggaggcctcccac

SEQ ID NO: 438955 - DNA, 15 bp, Homo sapiens
aaaggaggcctccca

SEQ ID NO: 438956 - DNA, 15 bp, Homo sapiens
gaaaggaggcctccc

SEQ ID NO: 438957 - DNA, 15 bp, Homo sapiens
tgaaaggaggcctcc

SEQ ID NO: 438958 - DNA, 15 bp, Homo sapiens
ttgaaaggaggcctc

SEQ ID NO: 438959 - DNA, 15 bp, Homo sapiens
tttgaaaggaggcct

SEQ ID NO: 438960 - DNA, 15 bp, Homo sapiens
atttgaaaggaggcc

SEQ ID NO: 438961 - DNA, 15 bp, Homo sapiens
gatttgaaaggaggc

SEQ ID NO: 438962 - DNA, 15 bp, Homo sapiens
ggatttgaaaggagg

SEQ ID NO: 438963 - DNA, 15 bp, Homo sapiens
aggatttgaaaggag

SEQ ID NO: 438964 - DNA, 15 bp, Homo sapiens
aaggatttgaaagga

SEQ ID NO: 438965 - DNA, 15 bp, Homo sapiens
gaaggatttgaaagg

SEQ ID NO: 438966 - DNA, 15 bp, Homo sapiens
ggaaggatttgaaag

SEQ ID NO: 438967 - DNA, 15 bp, Homo sapiens
gggaaggatttgaaa

SEQ ID NO: 438968 - DNA, 15 bp, Homo sapiens
tgggaaggatttgaa

SEQ ID NO: 438969 - DNA, 15 bp, Homo sapiens
ctgggaaggatttga

SEQ ID NO: 438970 - DNA, 15 bp, Homo sapiens
actgggaaggatttg

SEQ ID NO: 438971 - DNA, 15 bp, Homo sapiens
aactgggaaggattt

SEQ ID NO: 438972 - DNA, 15 bp, Homo sapiens
gaactgggaaggatt

SEQ ID NO: 438973 - DNA, 15 bp, Homo sapiens
agaactgggaaggat

SEQ ID NO: 438974 - DNA, 15 bp, Homo sapiens
cagaactgggaagga

SEQ ID NO: 438975 - DNA, 15 bp, Homo sapiens
acagaactgggaagg

SEQ ID NO: 438976 - DNA, 15 bp, Homo sapiens
aacagaactgggaag

SEQ ID NO: 438977 - DNA, 15 bp, Homo sapiens
aaacagaactgggaa

SEQ ID NO: 438978 - DNA, 15 bp, Homo sapiens
aaaacagaactggga

SEQ ID NO: 438979 - DNA, 15 bp, Homo sapiens
aaaaacagaactggg

SEQ ID NO: 438980 - DNA, 15 bp, Homo sapiens
taaaaacagaactgg

SEQ ID NO: 438981 - DNA, 15 bp, Homo sapiens
ttaaaaacagaactg

SEQ ID NO: 438982 - DNA, 15 bp, Homo sapiens
gttaaaaacagaact

SEQ ID NO: 438983 - DNA, 15 bp, Homo sapiens
ggttaaaaacagaac

SEQ ID NO: 438984 - DNA, 15 bp, Homo sapiens
tggttaaaaacagaa

SEQ ID NO: 438985 - DNA, 15 bp, Homo sapiens
ttggttaaaaacaga

SEQ ID NO: 438986 - DNA, 15 bp, Homo sapiens
cttggttaaaaacag

SEQ ID NO: 438987 - DNA, 15 bp, Homo sapiens
acttggttaaaaaca

SEQ ID NO: 438988 - DNA, 15 bp, Homo sapiens
cacttggttaaaaac

SEQ ID NO: 438989 - DNA, 15 bp, Homo sapiens
gcacttggttaaaaa

SEQ ID NO: 438990 - DNA, 15 bp, Homo sapiens
cgcacttggttaaaa

SEQ ID NO: 438991 - DNA, 15 bp, Homo sapiens
gcgcacttggttaaa

SEQ ID NO: 438992 - DNA, 15 bp, Homo sapiens
agcgcacttggttaa

SEQ ID NO: 438993 - DNA, 15 bp, Homo sapiens
gagcgcacttggtta

SEQ ID NO: 438994 - DNA, 15 bp, Homo sapiens
agagcgcacttggtt

SEQ ID NO: 438995 - DNA, 15 bp, Homo sapiens
aagagcgcacttggt

SEQ ID NO: 438996 - DNA, 15 bp, Homo sapiens
gaagagcgcacttgg

SEQ ID NO: 438997 - DNA, 15 bp, Homo sapiens
agaagagcgcacttg

SEQ ID NO: 438998 - DNA, 15 bp, Homo sapiens
cagaagagcgcactt

SEQ ID NO: 438999 - DNA, 15 bp, Homo sapiens
acagaagagcgcact

SEQ ID NO: 439000 - DNA, 15 bp, Homo sapiens
tacagaagagcgcac

SEQ ID NO: 439001 - DNA, 15 bp, Homo sapiens
ttacagaagagcgca

SEQ ID NO: 439002 - DNA, 15 bp, Homo sapiens
gttacagaagagcgc

SEQ ID NO: 439003 - DNA, 15 bp, Homo sapiens
ggttacagaagagcg

SEQ ID NO: 439004 - DNA, 15 bp, Homo sapiens
aggttacagaagagc

SEQ ID NO: 439005 - DNA, 15 bp, Homo sapiens
taggttacagaagag

SEQ ID NO: 439006 - DNA, 15 bp, Homo sapiens
ctaggttacagaaga

SEQ ID NO: 439007 - DNA, 15 bp, Homo sapiens
actaggttacagaag

SEQ ID NO: 439008 - DNA, 15 bp, Homo sapiens
aactaggttacagaa

SEQ ID NO: 439009 - DNA, 15 bp, Homo sapiens
aaactaggttacaga

SEQ ID NO: 439010 - DNA, 15 bp, Homo sapiens
aaaactaggttacag

SEQ ID NO: 439011 - DNA, 15 bp, Homo sapiens
gaaaactaggttaca

SEQ ID NO: 439012 - DNA, 15 bp, Homo sapiens
agaaaactaggttac

SEQ ID NO: 439013 - DNA, 15 bp, Homo sapiens
gagaaaactaggtta

SEQ ID NO: 439014 - DNA, 15 bp, Homo sapiens
agagaaaactaggtt

SEQ ID NO: 439015 - DNA, 15 bp, Homo sapiens
aagagaaaactaggt

SEQ ID NO: 439016 - DNA, 15 bp, Homo sapiens
aaagagaaaactagg

SEQ ID NO: 439017 - DNA, 15 bp, Homo sapiens
aaaagagaaaactag

SEQ ID NO: 439018 - DNA, 15 bp, Homo sapiens
aaaaagagaaaacta

SEQ ID NO: 439019 - DNA, 15 bp, Homo sapiens
gaaaaagagaaaact

SEQ ID NO: 439020 - DNA, 15 bp, Homo sapiens
ggaaaaagagaaaac

SEQ ID NO: 439021 - DNA, 15 bp, Homo sapiens
aggaaaaagagaaaa

SEQ ID NO: 439022 - DNA, 15 bp, Homo sapiens
taggaaaaagagaaa

SEQ ID NO: 439023 - DNA, 15 bp, Homo sapiens
gtaggaaaaagagaa

SEQ ID NO: 439024 - DNA, 15 bp, Homo sapiens
tgtaggaaaaagaga

SEQ ID NO: 439025 - DNA, 15 bp, Homo sapiens
gtgtaggaaaaagag

SEQ ID NO: 439026 - DNA, 15 bp, Homo sapiens
agtgtaggaaaaaga

SEQ ID NO: 439027 - DNA, 15 bp, Homo sapiens
cagtgtaggaaaaag

SEQ ID NO: 439028 - DNA, 15 bp, Homo sapiens
acagtgtaggaaaaa

SEQ ID NO: 439029 - DNA, 15 bp, Homo sapiens
gacagtgtaggaaaa

SEQ ID NO: 439030 - DNA, 15 bp, Homo sapiens
agacagtgtaggaaa

SEQ ID NO: 439031 - DNA, 15 bp, Homo sapiens
cagacagtgtaggaa

SEQ ID NO: 439032 - DNA, 15 bp, Homo sapiens
gcagacagtgtagga

SEQ ID NO: 439033 - DNA, 15 bp, Homo sapiens
ggcagacagtgtagg

SEQ ID NO: 439034 - DNA, 15 bp, Homo sapiens
gggcagacagtgtag

SEQ ID NO: 439035 - DNA, 15 bp, Homo sapiens
agggcagacagtgta

SEQ ID NO: 439036 - DNA, 15 bp, Homo sapiens
aagggcagacagtgt

SEQ ID NO: 439037 - DNA, 15 bp, Homo sapiens
caagggcagacagtg

SEQ ID NO: 439038 - DNA, 15 bp, Homo sapiens
acaagggcagacagt

SEQ ID NO: 439039 - DNA, 15 bp, Homo sapiens
gacaagggcagacag

SEQ ID NO: 439040 - DNA, 15 bp, Homo sapiens
tgacaagggcagaca

SEQ ID NO: 439041 - DNA, 15 bp, Homo sapiens
ctgacaagggcagac

SEQ ID NO: 439042 - DNA, 15 bp, Homo sapiens
actgacaagggcaga

SEQ ID NO: 439043 - DNA, 15 bp, Homo sapiens
gactgacaagggcag

SEQ ID NO: 439044 - DNA, 15 bp, Homo sapiens
ggactgacaagggca

SEQ ID NO: 439045 - DNA, 15 bp, Homo sapiens
aggactgacaagggc

SEQ ID NO: 439046 - DNA, 15 bp, Homo sapiens
taggactgacaaggg

SEQ ID NO: 439047 - DNA, 15 bp, Homo sapiens
gtaggactgacaagg

SEQ ID NO: 439048 - DNA, 15 bp, Homo sapiens
ggtaggactgacaag

SEQ ID NO: 439049 - DNA, 15 bp, Homo sapiens
aggtaggactgacaa

SEQ ID NO: 439050 - DNA, 15 bp, Homo sapiens
gaggtaggactgaca

SEQ ID NO: 439051 - DNA, 15 bp, Homo sapiens
agaggtaggactgac

SEQ ID NO: 439052 - DNA, 15 bp, Homo sapiens
aagaggtaggactga

SEQ ID NO: 439053 - DNA, 15 bp, Homo sapiens
gaagaggtaggactg

SEQ ID NO: 439054 - DNA, 15 bp, Homo sapiens
ggaagaggtaggact

SEQ ID NO: 439055 - DNA, 15 bp, Homo sapiens
gggaagaggtaggac

SEQ ID NO: 439056 - DNA, 15 bp, Homo sapiens
ggggaagaggtagga

SEQ ID NO: 439057 - DNA, 15 bp, Homo sapiens
aggggaagaggtagg

SEQ ID NO: 439058 - DNA, 15 bp, Homo sapiens
caggggaagaggtag

SEQ ID NO: 439059 - DNA, 15 bp, Homo sapiens
tcaggggaagaggta

SEQ ID NO: 439060 - DNA, 15 bp, Homo sapiens
gtcaggggaagaggt

SEQ ID NO: 439061 - DNA, 15 bp, Homo sapiens
ggtcaggggaagagg

SEQ ID NO: 439062 - DNA, 15 bp, Homo sapiens
aggtcaggggaagag

SEQ ID NO: 439063 - DNA, 15 bp, Homo sapiens
caggtcaggggaaga

SEQ ID NO: 439064 - DNA, 15 bp, Homo sapiens
tcaggtcaggggaag

SEQ ID NO: 439065 - DNA, 15 bp, Homo sapiens
ctcaggtcaggggaa

SEQ ID NO: 439066 - DNA, 15 bp, Homo sapiens
gctcaggtcagggga

SEQ ID NO: 439067 - DNA, 15 bp, Homo sapiens
tgctcaggtcagggg

SEQ ID NO: 439068 - DNA, 15 bp, Homo sapiens
ctgctcaggtcaggg

SEQ ID NO: 439069 - DNA, 15 bp, Homo sapiens
cctgctcaggtcagg

SEQ ID NO: 439070 - DNA, 15 bp, Homo sapiens
acctgctcaggtcag

SEQ ID NO: 439071 - DNA, 15 bp, Homo sapiens
tacctgctcaggtca

SEQ ID NO: 439072 - DNA, 15 bp, Homo sapiens
gtacctgctcaggtc

SEQ ID NO: 439073 - DNA, 15 bp, Homo sapiens
ggtacctgctcaggt

SEQ ID NO: 439074 - DNA, 15 bp, Homo sapiens
aggtacctgctcagg

SEQ ID NO: 439075 - DNA, 15 bp, Homo sapiens
gaggtacctgctcag

SEQ ID NO: 439076 - DNA, 15 bp, Homo sapiens
cgaggtacctgctca

SEQ ID NO: 439077 - DNA, 15 bp, Homo sapiens
acgaggtacctgctc

SEQ ID NO: 439078 - DNA, 15 bp, Homo sapiens
tacgaggtacctgct

SEQ ID NO: 439079 - DNA, 15 bp, Homo sapiens
ctacgaggtacctgc

SEQ ID NO: 439080 - DNA, 15 bp, Homo sapiens
tctacgaggtacctg

SEQ ID NO: 439081 - DNA, 15 bp, Homo sapiens
ttctacgaggtacct

SEQ ID NO: 439082 - DNA, 15 bp, Homo sapiens
cttctacgaggtacc

SEQ ID NO: 439083 - DNA, 15 bp, Homo sapiens
tcttctacgaggtac

SEQ ID NO: 439084 - DNA, 15 bp, Homo sapiens
atcttctacgaggta

SEQ ID NO: 439085 - DNA, 15 bp, Homo sapiens
aatcttctacgaggt

SEQ ID NO: 439086 - DNA, 15 bp, Homo sapiens
aaatcttctacgagg

SEQ ID NO: 439087 - DNA, 15 bp, Homo sapiens
taaatcttctacgag

SEQ ID NO: 439088 - DNA, 15 bp, Homo sapiens
ctaaatcttctacga

SEQ ID NO: 439089 - DNA, 15 bp, Homo sapiens
tctaaatcttctacg

SEQ ID NO: 439090 - DNA, 15 bp, Homo sapiens
atctaaatcttctac

SEQ ID NO: 439091 - DNA, 15 bp, Homo sapiens
aatctaaatcttcta

SEQ ID NO: 439092 - DNA, 15 bp, Homo sapiens
taatctaaatcttct

SEQ ID NO: 439093 - DNA, 15 bp, Homo sapiens
ctaatctaaatcttc

SEQ ID NO: 439094 - DNA, 15 bp, Homo sapiens
gctaatctaaatctt

SEQ ID NO: 439095 - DNA, 15 bp, Homo sapiens
ggctaatctaaatct

SEQ ID NO: 439096 - DNA, 15 bp, Homo sapiens
tggctaatctaaatc

SEQ ID NO: 439097 - DNA, 15 bp, Homo sapiens
atggctaatctaaat

SEQ ID NO: 439098 - DNA, 15 bp, Homo sapiens
aatggctaatctaaa

SEQ ID NO: 439099 - DNA, 15 bp, Homo sapiens
aaatggctaatctaa

SEQ ID NO: 439100 - DNA, 15 bp, Homo sapiens
taaatggctaatcta

SEQ ID NO: 439101 - DNA, 15 bp, Homo sapiens
ctaaatggctaatct

SEQ ID NO: 439102 - DNA, 15 bp, Homo sapiens
tctaaatggctaatc

SEQ ID NO: 439103 - DNA, 15 bp, Homo sapiens
gtctaaatggctaat

SEQ ID NO: 439104 - DNA, 15 bp, Homo sapiens
tgtctaaatggctaa

SEQ ID NO: 439105 - DNA, 15 bp, Homo sapiens
ctgtctaaatggcta

SEQ ID NO: 439106 - DNA, 15 bp, Homo sapiens
tctgtctaaatggct

SEQ ID NO: 439107 - DNA, 15 bp, Homo sapiens
ctctgtctaaatggc

SEQ ID NO: 439108 - DNA, 15 bp, Homo sapiens
tctctgtctaaatgg

SEQ ID NO: 439109 - DNA, 15 bp, Homo sapiens
gtctctgtctaaatg

SEQ ID NO: 439110 - DNA, 15 bp, Homo sapiens
agtctctgtctaaat

SEQ ID NO: 439111 - DNA, 15 bp, Homo sapiens
aagtctctgtctaaa

SEQ ID NO: 439112 - DNA, 15 bp, Homo sapiens
caagtctctgtctaa

SEQ ID NO: 439113 - DNA, 15 bp, Homo sapiens
tcaagtctctgtcta

SEQ ID NO: 439114 - DNA, 15 bp, Homo sapiens
gtcaagtctctgtct

SEQ ID NO: 439115 - DNA, 15 bp, Homo sapiens
tgtcaagtctctgtc

SEQ ID NO: 439116 - DNA, 15 bp, Homo sapiens
ctgtcaagtctctgt

SEQ ID NO: 439117 - DNA, 15 bp, Homo sapiens
gctgtcaagtctctg

SEQ ID NO: 439118 - DNA, 15 bp, Homo sapiens
ggctgtcaagtctct

SEQ ID NO: 439119 - DNA, 15 bp, Homo sapiens
cggctgtcaagtctc

SEQ ID NO: 439120 - DNA, 15 bp, Homo sapiens
tcggctgtcaagtct

SEQ ID NO: 439121 - DNA, 15 bp, Homo sapiens
ttcggctgtcaagtc

SEQ ID NO: 439122 - DNA, 15 bp, Homo sapiens
attcggctgtcaagt

SEQ ID NO: 439123 - DNA, 15 bp, Homo sapiens
aattcggctgtcaag

SEQ ID NO: 439124 - DNA, 15 bp, Homo sapiens
aaattcggctgtcaa

SEQ ID NO: 439125 - DNA, 15 bp, Homo sapiens
taaattcggctgtca

SEQ ID NO: 439126 - DNA, 15 bp, Homo sapiens
ttaaattcggctgtc

SEQ ID NO: 439127 - DNA, 15 bp, Homo sapiens
gttaaattcggctgt

SEQ ID NO: 439128 - DNA, 15 bp, Homo sapiens
agttaaattcggctg

SEQ ID NO: 439129 - DNA, 15 bp, Homo sapiens
gagttaaattcggct

SEQ ID NO: 439130 - DNA, 15 bp, Homo sapiens
ggagttaaattcggc

SEQ ID NO: 439131 - DNA, 15 bp, Homo sapiens
aggagttaaattcgg

SEQ ID NO: 439132 - DNA, 15 bp, Homo sapiens
caggagttaaattcg

SEQ ID NO: 439133 - DNA, 15 bp, Homo sapiens
gcaggagttaaattc

SEQ ID NO: 439134 - DNA, 15 bp, Homo sapiens
ggcaggagttaaatt

SEQ ID NO: 439135 - DNA, 15 bp, Homo sapiens
tggcaggagttaaat

SEQ ID NO: 439136 - DNA, 15 bp, Homo sapiens
atggcaggagttaaa

SEQ ID NO: 439137 - DNA, 15 bp, Homo sapiens
catggcaggagttaa

SEQ ID NO: 439138 - DNA, 15 bp, Homo sapiens
tcatggcaggagtta

SEQ ID NO: 439139 - DNA, 15 bp, Homo sapiens
gtcatggcaggagtt

SEQ ID NO: 439140 - DNA, 15 bp, Homo sapiens
agtcatggcaggagt

SEQ ID NO: 439141 - DNA, 15 bp, Homo sapiens
tagtcatggcaggag

SEQ ID NO: 439142 - DNA, 15 bp, Homo sapiens
ctagtcatggcagga

SEQ ID NO: 439143 - DNA, 15 bp, Homo sapiens
tctagtcatggcagg

SEQ ID NO: 439144 - DNA, 15 bp, Homo sapiens
atctagtcatggcag

SEQ ID NO: 439145 - DNA, 15 bp, Homo sapiens
catctagtcatggca

SEQ ID NO: 439146 - DNA, 15 bp, Homo sapiens
gcatctagtcatggc

SEQ ID NO: 439147 - DNA, 15 bp, Homo sapiens
tgcatctagtcatgg

SEQ ID NO: 439148 - DNA, 15 bp, Homo sapiens
ttgcatctagtcatg

SEQ ID NO: 439149 - DNA, 15 bp, Homo sapiens
cttgcatctagtcat

SEQ ID NO: 439150 - DNA, 15 bp, Homo sapiens
gcttgcatctagtca

SEQ ID NO: 439151 - DNA, 15 bp, Homo sapiens
tgcttgcatctagtc

SEQ ID NO: 439152 - DNA, 15 bp, Homo sapiens
gtgcttgcatctagt

SEQ ID NO: 439153 - DNA, 15 bp, Homo sapiens
cgtgcttgcatctag

SEQ ID NO: 439154 - DNA, 15 bp, Homo sapiens
gcgtgcttgcatcta

SEQ ID NO: 439155 - DNA, 15 bp, Homo sapiens
agcgtgcttgcatct

SEQ ID NO: 439156 - DNA, 15 bp, Homo sapiens
aagcgtgcttgcatc

SEQ ID NO: 439157 - DNA, 15 bp, Homo sapiens
aaagcgtgcttgcat

SEQ ID NO: 439158 - DNA, 15 bp, Homo sapiens
gaaagcgtgcttgca

SEQ ID NO: 439159 - DNA, 15 bp, Homo sapiens
agaaagcgtgcttgc

SEQ ID NO: 439160 - DNA, 15 bp, Homo sapiens
cagaaagcgtgcttg

SEQ ID NO: 439161 - DNA, 15 bp, Homo sapiens
gcagaaagcgtgctt

SEQ ID NO: 439162 - DNA, 15 bp, Homo sapiens
agcagaaagcgtgct

SEQ ID NO: 439163 - DNA, 15 bp, Homo sapiens
aagcagaaagcgtgc

SEQ ID NO: 439164 - DNA, 15 bp, Homo sapiens
gaagcagaaagcgtg

SEQ ID NO: 439165 - DNA, 15 bp, Homo sapiens
agaagcagaaagcgt

SEQ ID NO: 439166 - DNA, 15 bp, Homo sapiens
cagaagcagaaagcg

SEQ ID NO: 439167 - DNA, 15 bp, Homo sapiens
gcagaagcagaaagc

SEQ ID NO: 439168 - DNA, 15 bp, Homo sapiens
agcagaagcagaaag

SEQ ID NO: 439169 - DNA, 15 bp, Homo sapiens
cagcagaagcagaaa

SEQ ID NO: 439170 - DNA, 15 bp, Homo sapiens
ccagcagaagcagaa

SEQ ID NO: 439171 - DNA, 15 bp, Homo sapiens
cccagcagaagcaga

SEQ ID NO: 439172 - DNA, 15 bp, Homo sapiens
ccccagcagaagcag

SEQ ID NO: 439173 - DNA, 15 bp, Homo sapiens
accccagcagaagca

SEQ ID NO: 439174 - DNA, 15 bp, Homo sapiens
aaccccagcagaagc

SEQ ID NO: 439175 - DNA, 15 bp, Homo sapiens
aaaccccagcagaag

SEQ ID NO: 439176 - DNA, 15 bp, Homo sapiens
aaaaccccagcagaa

SEQ ID NO: 439177 - DNA, 15 bp, Homo sapiens
aaaaaccccagcaga

SEQ ID NO: 439178 - DNA, 15 bp, Homo sapiens
caaaaaccccagcag

SEQ ID NO: 439179 - DNA, 15 bp, Homo sapiens
gcaaaaaccccagca

SEQ ID NO: 439180 - DNA, 15 bp, Homo sapiens
agcaaaaaccccagc

SEQ ID NO: 439181 - DNA, 15 bp, Homo sapiens
cagcaaaaaccccag

SEQ ID NO: 439182 - DNA, 15 bp, Homo sapiens
ccagcaaaaacccca

SEQ ID NO: 439183 - DNA, 15 bp, Homo sapiens
gccagcaaaaacccc

SEQ ID NO: 439184 - DNA, 15 bp, Homo sapiens
ggccagcaaaaaccc

SEQ ID NO: 439185 - DNA, 15 bp, Homo sapiens
aggccagcaaaaacc

SEQ ID NO: 439186 - DNA, 15 bp, Homo sapiens
gaggccagcaaaaac

SEQ ID NO: 439187 - DNA, 15 bp, Homo sapiens
cgaggccagcaaaaa

SEQ ID NO: 439188 - DNA, 15 bp, Homo sapiens
ccgaggccagcaaaa

SEQ ID NO: 439189 - DNA, 15 bp, Homo sapiens
accgaggccagcaaa

SEQ ID NO: 439190 - DNA, 15 bp, Homo sapiens
gaccgaggccagcaa

SEQ ID NO: 439191 - DNA, 15 bp, Homo sapiens
ggaccgaggccagca

SEQ ID NO: 439192 - DNA, 15 bp, Homo sapiens
cggaccgaggccagc

SEQ ID NO: 439193 - DNA, 15 bp, Homo sapiens
acggaccgaggccag

SEQ ID NO: 439194 - DNA, 15 bp, Homo sapiens
cacggaccgaggcca

SEQ ID NO: 439195 - DNA, 15 bp, Homo sapiens
ccacggaccgaggcc

SEQ ID NO: 439196 - DNA, 15 bp, Homo sapiens
cccacggaccgaggc

SEQ ID NO: 439197 - DNA, 15 bp, Homo sapiens
ccccacggaccgagg

SEQ ID NO: 439198 - DNA, 15 bp, Homo sapiens
accccacggaccgag

SEQ ID NO: 439199 - DNA, 15 bp, Homo sapiens
gaccccacggaccga

SEQ ID NO: 439200 - DNA, 15 bp, Homo sapiens
tgaccccacggaccg

SEQ ID NO: 439201 - DNA, 15 bp, Homo sapiens
gtgaccccacggacc

SEQ ID NO: 439202 - DNA, 15 bp, Homo sapiens
agtgaccccacggac

SEQ ID NO: 439203 - DNA, 15 bp, Homo sapiens
gagtgaccccacgga

SEQ ID NO: 439204 - DNA, 15 bp, Homo sapiens
tgagtgaccccacgg

SEQ ID NO: 439205 - DNA, 15 bp, Homo sapiens
ctgagtgaccccacg

SEQ ID NO: 439206 - DNA, 15 bp, Homo sapiens
tctgagtgaccccac

SEQ ID NO: 439207 - DNA, 15 bp, Homo sapiens
ctctgagtgacccca

SEQ ID NO: 439208 - DNA, 15 bp, Homo sapiens
cctctgagtgacccc

SEQ ID NO: 439209 - DNA, 15 bp, Homo sapiens
acctctgagtgaccc

SEQ ID NO: 439210 - DNA, 15 bp, Homo sapiens
aacctctgagtgacc

SEQ ID NO: 439211 - DNA, 15 bp, Homo sapiens
gaacctctgagtgac

SEQ ID NO: 439212 - DNA, 15 bp, Homo sapiens
ggaacctctgagtga

SEQ ID NO: 439213 - DNA, 15 bp, Homo sapiens
tggaacctctgagtg

SEQ ID NO: 439214 - DNA, 15 bp, Homo sapiens
atggaacctctgagt

SEQ ID NO: 439215 - DNA, 15 bp, Homo sapiens
catggaacctctgag

SEQ ID NO: 439216 - DNA, 15 bp, Homo sapiens
gcatggaacctctga

SEQ ID NO: 439217 - DNA, 15 bp, Homo sapiens
tgcatggaacctctg

SEQ ID NO: 439218 - DNA, 15 bp, Homo sapiens
ctgcatggaacctct

SEQ ID NO: 439219 - DNA, 15 bp, Homo sapiens
actgcatggaacctc

SEQ ID NO: 439220 - DNA, 15 bp, Homo sapiens
tactgcatggaacct

SEQ ID NO: 439221 - DNA, 15 bp, Homo sapiens
ctactgcatggaacc

SEQ ID NO: 439222 - DNA, 15 bp, Homo sapiens
tctactgcatggaac

SEQ ID NO: 439223 - DNA, 15 bp, Homo sapiens
ttctactgcatggaa

SEQ ID NO: 439224 - DNA, 15 bp, Homo sapiens
cttctactgcatgga

SEQ ID NO: 439225 - DNA, 15 bp, Homo sapiens
acttctactgcatgg

SEQ ID NO: 439226 - DNA, 15 bp, Homo sapiens
aacttctactgcatg

SEQ ID NO: 439227 - DNA, 15 bp, Homo sapiens
aaacttctactgcat

SEQ ID NO: 439228 - DNA, 15 bp, Homo sapiens
caaacttctactgca

SEQ ID NO: 439229 - DNA, 15 bp, Homo sapiens
ccaaacttctactgc

SEQ ID NO: 439230 - DNA, 15 bp, Homo sapiens
tccaaacttctactg

SEQ ID NO: 439231 - DNA, 15 bp, Homo sapiens
ctccaaacttctact

SEQ ID NO: 439232 - DNA, 15 bp, Homo sapiens
tctccaaacttctac

SEQ ID NO: 439233 - DNA, 15 bp, Homo sapiens
ctctccaaacttcta

SEQ ID NO: 439234 - DNA, 15 bp, Homo sapiens
gctctccaaacttct

SEQ ID NO: 439235 - DNA, 15 bp, Homo sapiens
agctctccaaacttc

SEQ ID NO: 439236 - DNA, 15 bp, Homo sapiens
gagctctccaaactt

SEQ ID NO: 439237 - DNA, 15 bp, Homo sapiens
tgagctctccaaact

SEQ ID NO: 439238 - DNA, 15 bp, Homo sapiens
atgagctctccaaac

SEQ ID NO: 439239 - DNA, 15 bp, Homo sapiens
catgagctctccaaa

SEQ ID NO: 439240 - DNA, 15 bp, Homo sapiens
gcatgagctctccaa

SEQ ID NO: 439241 - DNA, 15 bp, Homo sapiens
agcatgagctctcca

SEQ ID NO: 439242 - DNA, 15 bp, Homo sapiens
tagcatgagctctcc

SEQ ID NO: 439243 - DNA, 15 bp, Homo sapiens
atagcatgagctctc

SEQ ID NO: 439244 - DNA, 15 bp, Homo sapiens
aatagcatgagctct

SEQ ID NO: 439245 - DNA, 15 bp, Homo sapiens
caatagcatgagctc

SEQ ID NO: 439246 - DNA, 15 bp, Homo sapiens
ccaatagcatgagct

SEQ ID NO: 439247 - DNA, 15 bp, Homo sapiens
gccaatagcatgagc

SEQ ID NO: 439248 - DNA, 15 bp, Homo sapiens
agccaatagcatgag

SEQ ID NO: 439249 - DNA, 15 bp, Homo sapiens
gagccaatagcatga

SEQ ID NO: 439250 - DNA, 15 bp, Homo sapiens
tgagccaatagcatg

SEQ ID NO: 439251 - DNA, 15 bp, Homo sapiens
gtgagccaatagcat

SEQ ID NO: 439252 - DNA, 15 bp, Homo sapiens
agtgagccaatagca

SEQ ID NO: 439253 - DNA, 15 bp, Homo sapiens
cagtgagccaatagc

SEQ ID NO: 439254 - DNA, 15 bp, Homo sapiens
acagtgagccaatag

SEQ ID NO: 439255 - DNA, 15 bp, Homo sapiens
cacagtgagccaata

SEQ ID NO: 439256 - DNA, 15 bp, Homo sapiens
ccacagtgagccaat

SEQ ID NO: 439257 - DNA, 15 bp, Homo sapiens
accacagtgagccaa

SEQ ID NO: 439258 - DNA, 15 bp, Homo sapiens
aaccacagtgagcca

SEQ ID NO: 439259 - DNA, 15 bp, Homo sapiens
aaaccacagtgagcc

SEQ ID NO: 439260 - DNA, 15 bp, Homo sapiens
aaaaccacagtgagc

SEQ ID NO: 439261 - DNA, 15 bp, Homo sapiens
taaaaccacagtgag

SEQ ID NO: 439262 - DNA, 15 bp, Homo sapiens
ataaaaccacagtga

SEQ ID NO: 439263 - DNA, 15 bp, Homo sapiens
cataaaaccacagtg

SEQ ID NO: 439264 - DNA, 15 bp, Homo sapiens
ccataaaaccacagt

SEQ ID NO: 439265 - DNA, 15 bp, Homo sapiens
cccataaaaccacag

SEQ ID NO: 439266 - DNA, 15 bp, Homo sapiens
gcccataaaaccaca

SEQ ID NO: 439267 - DNA, 15 bp, Homo sapiens
ggcccataaaaccac

SEQ ID NO: 439268 - DNA, 15 bp, Homo sapiens
gggcccataaaacca

SEQ ID NO: 439269 - DNA, 15 bp, Homo sapiens
agggcccataaaacc

SEQ ID NO: 439270 - DNA, 15 bp, Homo sapiens
tagggcccataaaac

SEQ ID NO: 439271 - DNA, 15 bp, Homo sapiens
ctagggcccataaaa

SEQ ID NO: 439272 - DNA, 15 bp, Homo sapiens
tctagggcccataaa

SEQ ID NO: 439273 - DNA, 15 bp, Homo sapiens
atctagggcccataa

SEQ ID NO: 439274 - DNA, 15 bp, Homo sapiens
catctagggcccata

SEQ ID NO: 439275 - DNA, 15 bp, Homo sapiens
acatctagggcccat

SEQ ID NO: 439276 - DNA, 15 bp, Homo sapiens
cacatctagggccca

SEQ ID NO: 439277 - DNA, 15 bp, Homo sapiens
acacatctagggccc

SEQ ID NO: 439278 - DNA, 15 bp, Homo sapiens
tacacatctagggcc

SEQ ID NO: 439279 - DNA, 15 bp, Homo sapiens
ctacacatctagggc

SEQ ID NO: 439280 - DNA, 15 bp, Homo sapiens
tctacacatctaggg

SEQ ID NO: 439281 - DNA, 15 bp, Homo sapiens
atctacacatctagg

SEQ ID NO: 439282 - DNA, 15 bp, Homo sapiens
catctacacatctag

SEQ ID NO: 439283 - DNA, 15 bp, Homo sapiens
gcatctacacatcta

SEQ ID NO: 439284 - DNA, 15 bp, Homo sapiens
agcatctacacatct

SEQ ID NO: 439285 - DNA, 15 bp, Homo sapiens
aagcatctacacatc

SEQ ID NO: 439286 - DNA, 15 bp, Homo sapiens
gaagcatctacacat

SEQ ID NO: 439287 - DNA, 15 bp, Homo sapiens
ggaagcatctacaca

SEQ ID NO: 439288 - DNA, 15 bp, Homo sapiens
cggaagcatctacac

SEQ ID NO: 439289 - DNA, 15 bp, Homo sapiens
ccggaagcatctaca

SEQ ID NO: 439290 - DNA, 15 bp, Homo sapiens
cccggaagcatctac

SEQ ID NO: 439291 - DNA, 15 bp, Homo sapiens
acccggaagcatcta

SEQ ID NO: 439292 - DNA, 15 bp, Homo sapiens
aacccggaagcatct

SEQ ID NO: 439293 - DNA, 15 bp, Homo sapiens
caacccggaagcatc

SEQ ID NO: 439294 - DNA, 15 bp, Homo sapiens
tcaacccggaagcat

SEQ ID NO: 439295 - DNA, 15 bp, Homo sapiens
atcaacccggaagca

SEQ ID NO: 439296 - DNA, 15 bp, Homo sapiens
catcaacccggaagc

SEQ ID NO: 439297 - DNA, 15 bp, Homo sapiens
gcatcaacccggaag

SEQ ID NO: 439298 - DNA, 15 bp, Homo sapiens
ggcatcaacccggaa

SEQ ID NO: 439299 - DNA, 15 bp, Homo sapiens
gggcatcaacccgga

SEQ ID NO: 439300 - DNA, 15 bp, Homo sapiens
tgggcatcaacccgg

SEQ ID NO: 439301 - DNA, 15 bp, Homo sapiens
ttgggcatcaacccg

SEQ ID NO: 439302 - DNA, 15 bp, Homo sapiens
cttgggcatcaaccc

SEQ ID NO: 439303 - DNA, 15 bp, Homo sapiens
gcttgggcatcaacc

SEQ ID NO: 439304 - DNA, 15 bp, Homo sapiens
tgcttgggcatcaac

SEQ ID NO: 439305 - DNA, 15 bp, Homo sapiens
ctgcttgggcatcaa

SEQ ID NO: 439306 - DNA, 15 bp, Homo sapiens
actgcttgggcatca

SEQ ID NO: 439307 - DNA, 15 bp, Homo sapiens
cactgcttgggcatc

SEQ ID NO: 439308 - DNA, 15 bp, Homo sapiens
ccactgcttgggcat

SEQ ID NO: 439309 - DNA, 15 bp, Homo sapiens
accactgcttgggca

SEQ ID NO: 439310 - DNA, 15 bp, Homo sapiens
gaccactgcttgggc

SEQ ID NO: 439311 - DNA, 15 bp, Homo sapiens
ggaccactgcttggg

SEQ ID NO: 439312 - DNA, 15 bp, Homo sapiens
gggaccactgcttgg

SEQ ID NO: 439313 - DNA, 15 bp, Homo sapiens
tgggaccactgcttg

SEQ ID NO: 439314 - DNA, 15 bp, Homo sapiens
gtgggaccactgctt

SEQ ID NO: 439315 - DNA, 15 bp, Homo sapiens
ggtgggaccactgct

SEQ ID NO: 439316 - DNA, 15 bp, Homo sapiens
aggtgggaccactgc

SEQ ID NO: 439317 - DNA, 15 bp, Homo sapiens
caggtgggaccactg

SEQ ID NO: 439318 - DNA, 15 bp, Homo sapiens
ccaggtgggaccact

SEQ ID NO: 439319 - DNA, 15 bp, Homo sapiens
tccaggtgggaccac

SEQ ID NO: 439320 - DNA, 15 bp, Homo sapiens
atccaggtgggacca

SEQ ID NO: 439321 - DNA, 15 bp, Homo sapiens
catccaggtgggacc

SEQ ID NO: 439322 - DNA, 15 bp, Homo sapiens
ccatccaggtgggac

SEQ ID NO: 439323 - DNA, 15 bp, Homo sapiens
accatccaggtggga

SEQ ID NO: 439324 - DNA, 15 bp, Homo sapiens
aaccatccaggtggg

SEQ ID NO: 439325 - DNA, 15 bp, Homo sapiens
aaaccatccaggtgg

SEQ ID NO: 439326 - DNA, 15 bp, Homo sapiens
aaaaccatccaggtg

SEQ ID NO: 439327 - DNA, 15 bp, Homo sapiens
aaaaaccatccaggt

SEQ ID NO: 439328 - DNA, 15 bp, Homo sapiens
caaaaaccatccagg

SEQ ID NO: 439329 - DNA, 15 bp, Homo sapiens
acaaaaaccatccag

SEQ ID NO: 439330 - DNA, 15 bp, Homo sapiens
gacaaaaaccatcca

SEQ ID NO: 439331 - DNA, 15 bp, Homo sapiens
agacaaaaaccatcc

SEQ ID NO: 439332 - DNA, 15 bp, Homo sapiens
aagacaaaaaccatc

SEQ ID NO: 439333 - DNA, 15 bp, Homo sapiens
aaagacaaaaaccat

SEQ ID NO: 439334 - DNA, 15 bp, Homo sapiens
gaaagacaaaaacca

SEQ ID NO: 439335 - DNA, 15 bp, Homo sapiens
agaaagacaaaaacc

SEQ ID NO: 439336 - DNA, 15 bp, Homo sapiens
cagaaagacaaaaac

SEQ ID NO: 439337 - DNA, 15 bp, Homo sapiens
gcagaaagacaaaaa

SEQ ID NO: 439338 - DNA, 15 bp, Homo sapiens
agcagaaagacaaaa

SEQ ID NO: 439339 - DNA, 15 bp, Homo sapiens
aagcagaaagacaaa

SEQ ID NO: 439340 - DNA, 15 bp, Homo sapiens
aaagcagaaagacaa

SEQ ID NO: 439341 - DNA, 15 bp, Homo sapiens
aaaagcagaaagaca

SEQ ID NO: 439342 - DNA, 15 bp, Homo sapiens
gaaaagcagaaagac

SEQ ID NO: 439343 - DNA, 15 bp, Homo sapiens
tgaaaagcagaaaga

SEQ ID NO: 439344 - DNA, 15 bp, Homo sapiens
ctgaaaagcagaaag

SEQ ID NO: 439345 - DNA, 15 bp, Homo sapiens
tctgaaaagcagaaa

SEQ ID NO: 439346 - DNA, 15 bp, Homo sapiens
atctgaaaagcagaa

SEQ ID NO: 439347 - DNA, 15 bp, Homo sapiens
aatctgaaaagcaga

SEQ ID NO: 439348 - DNA, 15 bp, Homo sapiens
gaatctgaaaagcag

SEQ ID NO: 439349 - DNA, 15 bp, Homo sapiens
agaatctgaaaagca

SEQ ID NO: 439350 - DNA, 15 bp, Homo sapiens
gagaatctgaaaagc

SEQ ID NO: 439351 - DNA, 15 bp, Homo sapiens
agagaatctgaaaag

SEQ ID NO: 439352 - DNA, 15 bp, Homo sapiens
gagagaatctgaaaa

SEQ ID NO: 439353 - DNA, 15 bp, Homo sapiens
ggagagaatctgaaa

SEQ ID NO: 439354 - DNA, 15 bp, Homo sapiens
aggagagaatctgaa

SEQ ID NO: 439355 - DNA, 15 bp, Homo sapiens
caggagagaatctga

SEQ ID NO: 439356 - DNA, 15 bp, Homo sapiens
tcaggagagaatctg

SEQ ID NO: 439357 - DNA, 15 bp, Homo sapiens
ctcaggagagaatct

SEQ ID NO: 439358 - DNA, 15 bp, Homo sapiens
cctcaggagagaatc

SEQ ID NO: 439359 - DNA, 15 bp, Homo sapiens
gcctcaggagagaat

SEQ ID NO: 439360 - DNA, 15 bp, Homo sapiens
agcctcaggagagaa

SEQ ID NO: 439361 - DNA, 15 bp, Homo sapiens
cagcctcaggagaga

SEQ ID NO: 439362 - DNA, 15 bp, Homo sapiens
gcagcctcaggagag

SEQ ID NO: 439363 - DNA, 15 bp, Homo sapiens
tgcagcctcaggaga

SEQ ID NO: 439364 - DNA, 15 bp, Homo sapiens
atgcagcctcaggag

SEQ ID NO: 439365 - DNA, 15 bp, Homo sapiens
gatgcagcctcagga

SEQ ID NO: 439366 - DNA, 15 bp, Homo sapiens
agatgcagcctcagg

SEQ ID NO: 439367 - DNA, 15 bp, Homo sapiens
gagatgcagcctcag

SEQ ID NO: 439368 - DNA, 15 bp, Homo sapiens
cgagatgcagcctca

SEQ ID NO: 439369 - DNA, 15 bp, Homo sapiens
ccgagatgcagcctc

SEQ ID NO: 439370 - DNA, 15 bp, Homo sapiens
gccgagatgcagcct

SEQ ID NO: 439371 - DNA, 15 bp, Homo sapiens
cgccgagatgcagcc

SEQ ID NO: 439372 - DNA, 15 bp, Homo sapiens
ccgccgagatgcagc

SEQ ID NO: 439373 - DNA, 15 bp, Homo sapiens
cccgccgagatgcag

SEQ ID NO: 439374 - DNA, 15 bp, Homo sapiens
ccccgccgagatgca

SEQ ID NO: 439375 - DNA, 15 bp, Homo sapiens
cccccgccgagatgc

SEQ ID NO: 439376 - DNA, 15 bp, Homo sapiens
gcccccgccgagatg

SEQ ID NO: 439377 - DNA, 15 bp, Homo sapiens
agcccccgccgagat

SEQ ID NO: 439378 - DNA, 15 bp, Homo sapiens
cagcccccgccgaga

SEQ ID NO: 439379 - DNA, 15 bp, Homo sapiens
tcagcccccgccgag

SEQ ID NO: 439380 - DNA, 15 bp, Homo sapiens
ctcagcccccgccga

SEQ ID NO: 439381 - DNA, 15 bp, Homo sapiens
gctcagcccccgccg

SEQ ID NO: 439382 - DNA, 15 bp, Homo sapiens
tgctcagcccccgcc

SEQ ID NO: 439383 - DNA, 15 bp, Homo sapiens
gtgctcagcccccgc

SEQ ID NO: 439384 - DNA, 15 bp, Homo sapiens
tgtgctcagcccccg

SEQ ID NO: 439385 - DNA, 15 bp, Homo sapiens
ctgtgctcagccccc

SEQ ID NO: 439386 - DNA, 15 bp, Homo sapiens
gctgtgctcagcccc

SEQ ID NO: 439387 - DNA, 15 bp, Homo sapiens
tgctgtgctcagccc

SEQ ID NO: 439388 - DNA, 15 bp, Homo sapiens
ctgctgtgctcagcc

SEQ ID NO: 439389 - DNA, 15 bp, Homo sapiens
tctgctgtgctcagc

SEQ ID NO: 439390 - DNA, 15 bp, Homo sapiens
ctctgctgtgctcag

SEQ ID NO: 439391 - DNA, 15 bp, Homo sapiens
tctctgctgtgctca

SEQ ID NO: 439392 - DNA, 15 bp, Homo sapiens
atctctgctgtgctc

SEQ ID NO: 439393 - DNA, 15 bp, Homo sapiens
catctctgctgtgct

SEQ ID NO: 439394 - DNA, 15 bp, Homo sapiens
tcatctctgctgtgc

SEQ ID NO: 439395 - DNA, 15 bp, Homo sapiens
ttcatctctgctgtg

SEQ ID NO: 439396 - DNA, 15 bp, Homo sapiens
attcatctctgctgt

SEQ ID NO: 439397 - DNA, 15 bp, Homo sapiens
cattcatctctgctg

SEQ ID NO: 439398 - DNA, 15 bp, Homo sapiens
gcattcatctctgct

SEQ ID NO: 439399 - DNA, 15 bp, Homo sapiens
tgcattcatctctgc

SEQ ID NO: 439400 - DNA, 15 bp, Homo sapiens
ctgcattcatctctg

SEQ ID NO: 439401 - DNA, 15 bp, Homo sapiens
actgcattcatctct

SEQ ID NO: 439402 - DNA, 15 bp, Homo sapiens
tactgcattcatctc

SEQ ID NO: 439403 - DNA, 15 bp, Homo sapiens
ctactgcattcatct

SEQ ID NO: 439404 - DNA, 15 bp, Homo sapiens
tctactgcattcatc

SEQ ID NO: 439405 - DNA, 15 bp, Homo sapiens
ctctactgcattcat

SEQ ID NO: 439406 - DNA, 15 bp, Homo sapiens
cctctactgcattca

SEQ ID NO: 439407 - DNA, 15 bp, Homo sapiens
gcctctactgcattc

SEQ ID NO: 439408 - DNA, 15 bp, Homo sapiens
ggcctctactgcatt

SEQ ID NO: 439409 - DNA, 15 bp, Homo sapiens
tggcctctactgcat

SEQ ID NO: 439410 - DNA, 15 bp, Homo sapiens
atggcctctactgca

SEQ ID NO: 439411 - DNA, 15 bp, Homo sapiens
aatggcctctactgc

SEQ ID NO: 439412 - DNA, 15 bp, Homo sapiens
gaatggcctctactg

SEQ ID NO: 439413 - DNA, 15 bp, Homo sapiens
tgaatggcctctact

SEQ ID NO: 439414 - DNA, 15 bp, Homo sapiens
atgaatggcctctac

SEQ ID NO: 439415 - DNA, 15 bp, Homo sapiens
tatgaatggcctcta

SEQ ID NO: 439416 - DNA, 15 bp, Homo sapiens
ctatgaatggcctct

SEQ ID NO: 439417 - DNA, 15 bp, Homo sapiens
tctatgaatggcctc

SEQ ID NO: 439418 - DNA, 15 bp, Homo sapiens
ctctatgaatggcct

SEQ ID NO: 439419 - DNA, 15 bp, Homo sapiens
gctctatgaatggcc

SEQ ID NO: 439420 - DNA, 15 bp, Homo sapiens
agctctatgaatggc

SEQ ID NO: 439421 - DNA, 15 bp, Homo sapiens
cagctctatgaatgg

SEQ ID NO: 439422 - DNA, 15 bp, Homo sapiens
acagctctatgaatg

SEQ ID NO: 439423 - DNA, 15 bp, Homo sapiens
cacagctctatgaat

SEQ ID NO: 439424 - DNA, 15 bp, Homo sapiens
ccacagctctatgaa

SEQ ID NO: 439425 - DNA, 15 bp, Homo sapiens
tccacagctctatga

SEQ ID NO: 439426 - DNA, 15 bp, Homo sapiens
ttccacagctctatg

SEQ ID NO: 439427 - DNA, 15 bp, Homo sapiens
attccacagctctat

SEQ ID NO: 439428 - DNA, 15 bp, Homo sapiens
aattccacagctcta

SEQ ID NO: 439429 - DNA, 15 bp, Homo sapiens
gaattccacagctct

SEQ ID NO: 439430 - DNA, 15 bp, Homo sapiens
tgaattccacagctc

SEQ ID NO: 439431 - DNA, 15 bp, Homo sapiens
ttgaattccacagct

SEQ ID NO: 439432 - DNA, 15 bp, Homo sapiens
attgaattccacagc

SEQ ID NO: 439433 - DNA, 15 bp, Homo sapiens
gattgaattccacag

SEQ ID NO: 439434 - DNA, 15 bp, Homo sapiens
ggattgaattccaca

SEQ ID NO: 439435 - DNA, 15 bp, Homo sapiens
aggattgaattccac

SEQ ID NO: 439436 - DNA, 15 bp, Homo sapiens
gaggattgaattcca

SEQ ID NO: 439437 - DNA, 15 bp, Homo sapiens
tgaggattgaattcc

SEQ ID NO: 439438 - DNA, 15 bp, Homo sapiens
atgaggattgaattc

SEQ ID NO: 439439 - DNA, 15 bp, Homo sapiens
catgaggattgaatt

SEQ ID NO: 439440 - DNA, 15 bp, Homo sapiens
acatgaggattgaat

SEQ ID NO: 439441 - DNA, 15 bp, Homo sapiens
cacatgaggattgaa

SEQ ID NO: 439442 - DNA, 15 bp, Homo sapiens
gcacatgaggattga

SEQ ID NO: 439443 - DNA, 15 bp, Homo sapiens
ggcacatgaggattg

SEQ ID NO: 439444 - DNA, 15 bp, Homo sapiens
tggcacatgaggatt

SEQ ID NO: 439445 - DNA, 15 bp, Homo sapiens
ttggcacatgaggat

SEQ ID NO: 439446 - DNA, 15 bp, Homo sapiens
tttggcacatgagga

SEQ ID NO: 439447 - DNA, 15 bp, Homo sapiens
ttttggcacatgagg

SEQ ID NO: 439448 - DNA, 15 bp, Homo sapiens
cttttggcacatgag

SEQ ID NO: 439449 - DNA, 15 bp, Homo sapiens
acttttggcacatga

SEQ ID NO: 439450 - DNA, 15 bp, Homo sapiens
cacttttggcacatg

SEQ ID NO: 439451 - DNA, 15 bp, Homo sapiens
tcacttttggcacat

SEQ ID NO: 439452 - DNA, 15 bp, Homo sapiens
ctcacttttggcaca

SEQ ID NO: 439453 - DNA, 15 bp, Homo sapiens
actcacttttggcac

SEQ ID NO: 439454 - DNA, 15 bp, Homo sapiens
gactcacttttggca

SEQ ID NO: 439455 - DNA, 15 bp, Homo sapiens
agactcacttttggc

SEQ ID NO: 439456 - DNA, 15 bp, Homo sapiens
cagactcacttttgg

SEQ ID NO: 439457 - DNA, 15 bp, Homo sapiens
acagactcacttttg

SEQ ID NO: 439458 - DNA, 15 bp, Homo sapiens
cacagactcactttt

SEQ ID NO: 439459 - DNA, 15 bp, Homo sapiens
ccacagactcacttt

SEQ ID NO: 439460 - DNA, 15 bp, Homo sapiens
tccacagactcactt

SEQ ID NO: 439461 - DNA, 15 bp, Homo sapiens
ttccacagactcact

SEQ ID NO: 439462 - DNA, 15 bp, Homo sapiens
attccacagactcac

SEQ ID NO: 439463 - DNA, 15 bp, Homo sapiens
gattccacagactca

SEQ ID NO: 439464 - DNA, 15 bp, Homo sapiens
ggattccacagactc

SEQ ID NO: 439465 - DNA, 15 bp, Homo sapiens
gggattccacagact

SEQ ID NO: 439466 - DNA, 15 bp, Homo sapiens
ggggattccacagac

SEQ ID NO: 439467 - DNA, 15 bp, Homo sapiens
tggggattccacaga

SEQ ID NO: 439468 - DNA, 15 bp, Homo sapiens
gtggggattccacag

SEQ ID NO: 439469 - DNA, 15 bp, Homo sapiens
tgtggggattccaca

SEQ ID NO: 439470 - DNA, 15 bp, Homo sapiens
ctgtggggattccac

SEQ ID NO: 439471 - DNA, 15 bp, Homo sapiens
cctgtggggattcca

SEQ ID NO: 439472 - DNA, 15 bp, Homo sapiens
tcctgtggggattcc

SEQ ID NO: 439473 - DNA, 15 bp, Homo sapiens
ttcctgtggggattc

SEQ ID NO: 439474 - DNA, 15 bp, Homo sapiens
gttcctgtggggatt

SEQ ID NO: 439475 - DNA, 15 bp, Homo sapiens
agttcctgtggggat

SEQ ID NO: 439476 - DNA, 15 bp, Homo sapiens
gagttcctgtgggga

SEQ ID NO: 439477 - DNA, 15 bp, Homo sapiens
cgagttcctgtgggg

SEQ ID NO: 439478 - DNA, 15 bp, Homo sapiens
acgagttcctgtggg

SEQ ID NO: 439479 - DNA, 15 bp, Homo sapiens
aacgagttcctgtgg

SEQ ID NO: 439480 - DNA, 15 bp, Homo sapiens
taacgagttcctgtg

SEQ ID NO: 439481 - DNA, 15 bp, Homo sapiens
ataacgagttcctgt

SEQ ID NO: 439482 - DNA, 15 bp, Homo sapiens
cataacgagttcctg

SEQ ID NO: 439483 - DNA, 15 bp, Homo sapiens
tcataacgagttcct

SEQ ID NO: 439484 - DNA, 15 bp, Homo sapiens
atcataacgagttcc

SEQ ID NO: 439485 - DNA, 15 bp, Homo sapiens
tatcataacgagttc

SEQ ID NO: 439486 - DNA, 15 bp, Homo sapiens
ctatcataacgagtt

SEQ ID NO: 439487 - DNA, 15 bp, Homo sapiens
gctatcataacgagt

SEQ ID NO: 439488 - DNA, 15 bp, Homo sapiens
tgctatcataacgag

SEQ ID NO: 439489 - DNA, 15 bp, Homo sapiens
ctgctatcataacga

SEQ ID NO: 439490 - DNA, 15 bp, Homo sapiens
tctgctatcataacg

SEQ ID NO: 439491 - DNA, 15 bp, Homo sapiens
ctctgctatcataac

SEQ ID NO: 439492 - DNA, 15 bp, Homo sapiens
tctctgctatcataa

SEQ ID NO: 439493 - DNA, 15 bp, Homo sapiens
ttctctgctatcata

SEQ ID NO: 439494 - DNA, 15 bp, Homo sapiens
tttctctgctatcat

SEQ ID NO: 439495 - DNA, 15 bp, Homo sapiens
ctttctctgctatca

SEQ ID NO: 439496 - DNA, 15 bp, Homo sapiens
gctttctctgctatc

SEQ ID NO: 439497 - DNA, 15 bp, Homo sapiens
tgctttctctgctat

SEQ ID NO: 439498 - DNA, 15 bp, Homo sapiens
atgctttctctgcta

SEQ ID NO: 439499 - DNA, 15 bp, Homo sapiens
aatgctttctctgct

SEQ ID NO: 439500 - DNA, 15 bp, Homo sapiens
gaatgctttctctgc

SEQ ID NO: 439501 - DNA, 15 bp, Homo sapiens
tgaatgctttctctg

SEQ ID NO: 439502 - DNA, 15 bp, Homo sapiens
atgaatgctttctct

SEQ ID NO: 439503 - DNA, 15 bp, Homo sapiens
aatgaatgctttctc

SEQ ID NO: 439504 - DNA, 15 bp, Homo sapiens
caatgaatgctttct

SEQ ID NO: 439505 - DNA, 15 bp, Homo sapiens
tcaatgaatgctttc

SEQ ID NO: 439506 - DNA, 15 bp, Homo sapiens
gtcaatgaatgcttt

SEQ ID NO: 439507 - DNA, 15 bp, Homo sapiens
ggtcaatgaatgctt

SEQ ID NO: 439508 - DNA, 15 bp, Homo sapiens
tggtcaatgaatgct

SEQ ID NO: 439509 - DNA, 15 bp, Homo sapiens
gtggtcaatgaatgc

SEQ ID NO: 439510 - DNA, 15 bp, Homo sapiens
tgtggtcaatgaatg

SEQ ID NO: 439511 - DNA, 15 bp, Homo sapiens
ctgtggtcaatgaat

SEQ ID NO: 439512 - DNA, 15 bp, Homo sapiens
actgtggtcaatgaa

SEQ ID NO: 439513 - DNA, 15 bp, Homo sapiens
cactgtggtcaatga

SEQ ID NO: 439514 - DNA, 15 bp, Homo sapiens
acactgtggtcaatg

SEQ ID NO: 439515 - DNA, 15 bp, Homo sapiens
aacactgtggtcaat

SEQ ID NO: 439516 - DNA, 15 bp, Homo sapiens
caacactgtggtcaa

SEQ ID NO: 439517 - DNA, 15 bp, Homo sapiens
acaacactgtggtca

SEQ ID NO: 439518 - DNA, 15 bp, Homo sapiens
tacaacactgtggtc

SEQ ID NO: 439519 - DNA, 15 bp, Homo sapiens
atacaacactgtggt

SEQ ID NO: 439520 - DNA, 15 bp, Homo sapiens
gatacaacactgtgg

SEQ ID NO: 439521 - DNA, 15 bp, Homo sapiens
agatacaacactgtg

SEQ ID NO: 439522 - DNA, 15 bp, Homo sapiens
gagatacaacactgt

SEQ ID NO: 439523 - DNA, 15 bp, Homo sapiens
tgagatacaacactg

SEQ ID NO: 439524 - DNA, 15 bp, Homo sapiens
ttgagatacaacact

SEQ ID NO: 439525 - DNA, 15 bp, Homo sapiens
cttgagatacaacac

SEQ ID NO: 439526 - DNA, 15 bp, Homo sapiens
acttgagatacaaca

SEQ ID NO: 439527 - DNA, 15 bp, Homo sapiens
tacttgagatacaac

SEQ ID NO: 439528 - DNA, 15 bp, Homo sapiens
gtacttgagatacaa

SEQ ID NO: 439529 - DNA, 15 bp, Homo sapiens
tgtacttgagataca

SEQ ID NO: 439530 - DNA, 15 bp, Homo sapiens
gtgtacttgagatac

SEQ ID NO: 439531 - DNA, 15 bp, Homo sapiens
ggtgtacttgagata

SEQ ID NO: 439532 - DNA, 15 bp, Homo sapiens
cggtgtacttgagat

SEQ ID NO: 439533 - DNA, 15 bp, Homo sapiens
gcggtgtacttgaga

SEQ ID NO: 439534 - DNA, 15 bp, Homo sapiens
agcggtgtacttgag

SEQ ID NO: 439535 - DNA, 15 bp, Homo sapiens
aagcggtgtacttga

SEQ ID NO: 439536 - DNA, 15 bp, Homo sapiens
taagcggtgtacttg

SEQ ID NO: 439537 - DNA, 15 bp, Homo sapiens
ataagcggtgtactt

SEQ ID NO: 439538 - DNA, 15 bp, Homo sapiens
tataagcggtgtact

SEQ ID NO: 439539 - DNA, 15 bp, Homo sapiens
ttataagcggtgtac

SEQ ID NO: 439540 - DNA, 15 bp, Homo sapiens
tttataagcggtgta

SEQ ID NO: 439541 - DNA, 15 bp, Homo sapiens
ttttataagcggtgt

SEQ ID NO: 439542 - DNA, 15 bp, Homo sapiens
tttttataagcggtg

SEQ ID NO: 439543 - DNA, 15 bp, Homo sapiens
ttttttataagcggt

SEQ ID NO: 439544 - DNA, 15 bp, Homo sapiens
tttttttataagcgg

SEQ ID NO: 439545 - DNA, 15 bp, Homo sapiens
atttttttataagcg

SEQ ID NO: 439546 - DNA, 15 bp, Homo sapiens
catttttttataagc

SEQ ID NO: 439547 - DNA, 15 bp, Homo sapiens
tcatttttttataag

SEQ ID NO: 439548 - DNA, 15 bp, Homo sapiens
ttcatttttttataa

SEQ ID NO: 439549 - DNA, 15 bp, Homo sapiens
attcatttttttata

SEQ ID NO: 439550 - DNA, 15 bp, Homo sapiens
aattcatttttttat

SEQ ID NO: 439551 - DNA, 15 bp, Homo sapiens
caattcattttttta

SEQ ID NO: 439552 - DNA, 15 bp, Homo sapiens
gcaattcattttttt

SEQ ID NO: 439553 - DNA, 15 bp, Homo sapiens
tgcaattcatttttt

SEQ ID NO: 439554 - DNA, 15 bp, Homo sapiens
ttgcaattcattttt

SEQ ID NO: 439555 - DNA, 15 bp, Homo sapiens
gttgcaattcatttt

SEQ ID NO: 439556 - DNA, 15 bp, Homo sapiens
ggttgcaattcattt

SEQ ID NO: 439557 - DNA, 15 bp, Homo sapiens
tggttgcaattcatt

SEQ ID NO: 439558 - DNA, 15 bp, Homo sapiens
ttggttgcaattcat

SEQ ID NO: 439559 - DNA, 15 bp, Homo sapiens
gttggttgcaattca

SEQ ID NO: 439560 - DNA, 15 bp, Homo sapiens
tgttggttgcaattc

SEQ ID NO: 439561 - DNA, 15 bp, Homo sapiens
ttgttggttgcaatt

SEQ ID NO: 439562 - DNA, 15 bp, Homo sapiens
tttgttggttgcaat

SEQ ID NO: 439563 - DNA, 15 bp, Homo sapiens
atttgttggttgcaa

SEQ ID NO: 439564 - DNA, 15 bp, Homo sapiens
catttgttggttgca

SEQ ID NO: 439565 - DNA, 15 bp, Homo sapiens
acatttgttggttgc

SEQ ID NO: 439566 - DNA, 15 bp, Homo sapiens
aacatttgttggttg

SEQ ID NO: 439567 - DNA, 15 bp, Homo sapiens
caacatttgttggtt

SEQ ID NO: 439568 - DNA, 15 bp, Homo sapiens
tcaacatttgttggt

SEQ ID NO: 439569 - DNA, 15 bp, Homo sapiens
ctcaacatttgttgg

SEQ ID NO: 439570 - DNA, 15 bp, Homo sapiens
tctcaacatttgttg

SEQ ID NO: 439571 - DNA, 15 bp, Homo sapiens
gtctcaacatttgtt

SEQ ID NO: 439572 - DNA, 15 bp, Homo sapiens
ggtctcaacatttgt

SEQ ID NO: 439573 - DNA, 15 bp, Homo sapiens
gggtctcaacatttg

SEQ ID NO: 439574 - DNA, 15 bp, Homo sapiens
agggtctcaacattt

SEQ ID NO: 439575 - DNA, 15 bp, Homo sapiens
cagggtctcaacatt

SEQ ID NO: 439576 - DNA, 15 bp, Homo sapiens
acagggtctcaacat

SEQ ID NO: 439577 - DNA, 15 bp, Homo sapiens
tacagggtctcaaca

SEQ ID NO: 439578 - DNA, 15 bp, Homo sapiens
atacagggtctcaac

SEQ ID NO: 439579 - DNA, 15 bp, Homo sapiens
tatacagggtctcaa

SEQ ID NO: 439580 - DNA, 15 bp, Homo sapiens
ttatacagggtctca

SEQ ID NO: 439581 - DNA, 15 bp, Homo sapiens
attatacagggtctc

SEQ ID NO: 439582 - DNA, 15 bp, Homo sapiens
cattatacagggtct

SEQ ID NO: 439583 - DNA, 15 bp, Homo sapiens
acattatacagggtc

SEQ ID NO: 439584 - DNA, 15 bp, Homo sapiens
tacattatacagggt

SEQ ID NO: 439585 - DNA, 15 bp, Homo sapiens
atacattatacaggg

SEQ ID NO: 439586 - DNA, 15 bp, Homo sapiens
catacattatacagg

SEQ ID NO: 439587 - DNA, 15 bp, Homo sapiens
ccatacattatacag

SEQ ID NO: 439588 - DNA, 15 bp, Homo sapiens
cccatacattataca

SEQ ID NO: 439589 - DNA, 15 bp, Homo sapiens
gcccatacattatac

SEQ ID NO: 439590 - DNA, 15 bp, Homo sapiens
tgcccatacattata

SEQ ID NO: 439591 - DNA, 15 bp, Homo sapiens
atgcccatacattat

SEQ ID NO: 439592 - DNA, 15 bp, Homo sapiens
aatgcccatacatta

SEQ ID NO: 439593 - DNA, 15 bp, Homo sapiens
taatgcccatacatt

SEQ ID NO: 439594 - DNA, 15 bp, Homo sapiens
ctaatgcccatacat

SEQ ID NO: 439595 - DNA, 15 bp, Homo sapiens
gctaatgcccataca

SEQ ID NO: 439596 - DNA, 15 bp, Homo sapiens
ggctaatgcccatac

SEQ ID NO: 439597 - DNA, 15 bp, Homo sapiens
aggctaatgcccata

SEQ ID NO: 439598 - DNA, 15 bp, Homo sapiens
gaggctaatgcccat

SEQ ID NO: 439599 - DNA, 15 bp, Homo sapiens
tgaggctaatgccca

SEQ ID NO: 439600 - DNA, 15 bp, Homo sapiens
atgaggctaatgccc

SEQ ID NO: 439601 - DNA, 15 bp, Homo sapiens
aatgaggctaatgcc

SEQ ID NO: 439602 - DNA, 15 bp, Homo sapiens
aaatgaggctaatgc

SEQ ID NO: 439603 - DNA, 15 bp, Homo sapiens
aaaatgaggctaatg

SEQ ID NO: 439604 - DNA, 15 bp, Homo sapiens
taaaatgaggctaat

SEQ ID NO: 439605 - DNA, 15 bp, Homo sapiens
ttaaaatgaggctaa

SEQ ID NO: 439606 - DNA, 15 bp, Homo sapiens
cttaaaatgaggcta

SEQ ID NO: 439607 - DNA, 15 bp, Homo sapiens
gcttaaaatgaggct

SEQ ID NO: 439608 - DNA, 15 bp, Homo sapiens
ttttgcttaaaatga

SEQ ID NO: 439609 - DNA, 15 bp, Homo sapiens
cttttgcttaaaatg

SEQ ID NO: 439610 - DNA, 15 bp, Homo sapiens
gcttttgcttaaaat

SEQ ID NO: 439611 - DNA, 15 bp, Homo sapiens
agcttttgcttaaaa

SEQ ID NO: 439612 - DNA, 15 bp, Homo sapiens
tagcttttgcttaaa

SEQ ID NO: 439613 - DNA, 15 bp, Homo sapiens
atagcttttgcttaa

SEQ ID NO: 439614 - DNA, 15 bp, Homo sapiens
tatagcttttgctta

SEQ ID NO: 439615 - DNA, 15 bp, Homo sapiens
gtatagcttttgctt

SEQ ID NO: 439616 - DNA, 15 bp, Homo sapiens
agtatagcttttgct

SEQ ID NO: 439617 - DNA, 15 bp, Homo sapiens
gagtatagcttttgc

SEQ ID NO: 439618 - DNA, 15 bp, Homo sapiens
tgagtatagcttttg

SEQ ID NO: 439619 - DNA, 15 bp, Homo sapiens
ttgagtatagctttt

SEQ ID NO: 439620 - DNA, 15 bp, Homo sapiens
cttgagtatagcttt

SEQ ID NO: 439621 - DNA, 15 bp, Homo sapiens
tcttgagtatagctt

SEQ ID NO: 439622 - DNA, 15 bp, Homo sapiens
ctcttgagtatagct

SEQ ID NO: 439623 - DNA, 15 bp, Homo sapiens
cctcttgagtatagc

SEQ ID NO: 439624 - DNA, 15 bp, Homo sapiens
gcctcttgagtatag

SEQ ID NO: 439625 - DNA, 15 bp, Homo sapiens
agcctcttgagtata

SEQ ID NO: 439626 - DNA, 15 bp, Homo sapiens
aagcctcttgagtat

SEQ ID NO: 439627 - DNA, 15 bp, Homo sapiens
aaagcctcttgagta

SEQ ID NO: 439628 - DNA, 15 bp, Homo sapiens
caaagcctcttgagt

SEQ ID NO: 439629 - DNA, 15 bp, Homo sapiens
ccaaagcctcttgag

SEQ ID NO: 439630 - DNA, 15 bp, Homo sapiens
cccaaagcctcttga

SEQ ID NO: 439631 - DNA, 15 bp, Homo sapiens
ccccaaagcctcttg

SEQ ID NO: 439632 - DNA, 15 bp, Homo sapiens
gccccaaagcctctt

SEQ ID NO: 439633 - DNA, 15 bp, Homo sapiens
tgccccaaagcctct

SEQ ID NO: 439634 - DNA, 15 bp, Homo sapiens
ctgccccaaagcctc

SEQ ID NO: 439635 - DNA, 15 bp, Homo sapiens
tctgccccaaagcct

SEQ ID NO: 439636 - DNA, 15 bp, Homo sapiens
atctgccccaaagcc

SEQ ID NO: 439637 - DNA, 15 bp, Homo sapiens
aatctgccccaaagc

SEQ ID NO: 439638 - DNA, 15 bp, Homo sapiens
aaatctgccccaaag

SEQ ID NO: 439639 - DNA, 15 bp, Homo sapiens
gaaatctgccccaaa

SEQ ID NO: 439640 - DNA, 15 bp, Homo sapiens
ggaaatctgccccaa

SEQ ID NO: 439641 - DNA, 15 bp, Homo sapiens
tggaaatctgcccca

SEQ ID NO: 439642 - DNA, 15 bp, Homo sapiens
ctggaaatctgcccc

SEQ ID NO: 439643 - DNA, 15 bp, Homo sapiens
tctggaaatctgccc

SEQ ID NO: 439644 - DNA, 15 bp, Homo sapiens
gtctggaaatctgcc

SEQ ID NO: 439645 - DNA, 15 bp, Homo sapiens
agtctggaaatctgc

SEQ ID NO: 439646 - DNA, 15 bp, Homo sapiens
aagtctggaaatctg

SEQ ID NO: 439647 - DNA, 15 bp, Homo sapiens
gaagtctggaaatct

SEQ ID NO: 439648 - DNA, 15 bp, Homo sapiens
tgaagtctggaaatc

SEQ ID NO: 439649 - DNA, 15 bp, Homo sapiens
gtgaagtctggaaat

SEQ ID NO: 439650 - DNA, 15 bp, Homo sapiens
agtgaagtctggaaa

SEQ ID NO: 439651 - DNA, 15 bp, Homo sapiens
aagtgaagtctggaa

SEQ ID NO: 439652 - DNA, 15 bp, Homo sapiens
taagtgaagtctgga

SEQ ID NO: 439653 - DNA, 15 bp, Homo sapiens
ttaagtgaagtctgg

SEQ ID NO: 439654 - DNA, 15 bp, Homo sapiens
attaagtgaagtctg

SEQ ID NO: 439655 - DNA, 15 bp, Homo sapiens
tattaagtgaagtct

SEQ ID NO: 439656 - DNA, 15 bp, Homo sapiens
ttattaagtgaagtc

SEQ ID NO: 439657 - DNA, 15 bp, Homo sapiens
cttattaagtgaagt

SEQ ID NO: 439658 - DNA, 15 bp, Homo sapiens
ccttattaagtgaag

SEQ ID NO: 439659 - DNA, 15 bp, Homo sapiens
cccttattaagtgaa

SEQ ID NO: 439660 - DNA, 15 bp, Homo sapiens
acccttattaagtga

SEQ ID NO: 439661 - DNA, 15 bp, Homo sapiens
tacccttattaagtg

SEQ ID NO: 439662 - DNA, 15 bp, Homo sapiens
ttacccttattaagt

SEQ ID NO: 439663 - DNA, 15 bp, Homo sapiens
tttacccttattaag

SEQ ID NO: 439664 - DNA, 15 bp, Homo sapiens
atttacccttattaa

SEQ ID NO: 439665 - DNA, 15 bp, Homo sapiens
gatttacccttatta

SEQ ID NO: 439666 - DNA, 15 bp, Homo sapiens
cgatttacccttatt

SEQ ID NO: 439667 - DNA, 15 bp, Homo sapiens
tcgatttacccttat

SEQ ID NO: 439668 - DNA, 15 bp, Homo sapiens
atcgatttaccctta

SEQ ID NO: 439669 - DNA, 15 bp, Homo sapiens
tatcgatttaccctt

SEQ ID NO: 439670 - DNA, 15 bp, Homo sapiens
ctatcgatttaccct

SEQ ID NO: 439671 - DNA, 15 bp, Homo sapiens
tctatcgatttaccc

SEQ ID NO: 439672 - DNA, 15 bp, Homo sapiens
gtctatcgatttacc

SEQ ID NO: 439673 - DNA, 15 bp, Homo sapiens
ggtctatcgatttac

SEQ ID NO: 439674 - DNA, 15 bp, Homo sapiens
aggtctatcgattta

SEQ ID NO: 439675 - DNA, 15 bp, Homo sapiens
gaggtctatcgattt

SEQ ID NO: 439676 - DNA, 15 bp, Homo sapiens
cgaggtctatcgatt

SEQ ID NO: 439677 - DNA, 15 bp, Homo sapiens
gcgaggtctatcgat

SEQ ID NO: 439678 - DNA, 15 bp, Homo sapiens
agcgaggtctatcga

SEQ ID NO: 439679 - DNA, 15 bp, Homo sapiens
aagcgaggtctatcg

SEQ ID NO: 439680 - DNA, 15 bp, Homo sapiens
taagcgaggtctatc

SEQ ID NO: 439681 - DNA, 15 bp, Homo sapiens
ctaagcgaggtctat

SEQ ID NO: 439682 - DNA, 15 bp, Homo sapiens
cctaagcgaggtcta

SEQ ID NO: 439683 - DNA, 15 bp, Homo sapiens
gcctaagcgaggtct

SEQ ID NO: 439684 - DNA, 15 bp, Homo sapiens
tgcctaagcgaggtc

SEQ ID NO: 439685 - DNA, 15 bp, Homo sapiens
ctgcctaagcgaggt

SEQ ID NO: 439686 - DNA, 15 bp, Homo sapiens
cctgcctaagcgagg

SEQ ID NO: 439687 - DNA, 15 bp, Homo sapiens
gcctgcctaagcgag

SEQ ID NO: 439688 - DNA, 15 bp, Homo sapiens
ggcctgcctaagcga

SEQ ID NO: 439689 - DNA, 15 bp, Homo sapiens
tggcctgcctaagcg

SEQ ID NO: 439690 - DNA, 15 bp, Homo sapiens
ctggcctgcctaagc

SEQ ID NO: 439691 - DNA, 15 bp, Homo sapiens
cctggcctgcctaag

SEQ ID NO: 439692 - DNA, 15 bp, Homo sapiens
tcctggcctgcctaa

SEQ ID NO: 439693 - DNA, 15 bp, Homo sapiens
ttcctggcctgccta

SEQ ID NO: 439694 - DNA, 15 bp, Homo sapiens
cttcctggcctgcct

SEQ ID NO: 439695 - DNA, 15 bp, Homo sapiens
gcttcctggcctgcc

SEQ ID NO: 439696 - DNA, 15 bp, Homo sapiens
ggcttcctggcctgc

SEQ ID NO: 439697 - DNA, 15 bp, Homo sapiens
aggcttcctggcctg

SEQ ID NO: 439698 - DNA, 15 bp, Homo sapiens
caggcttcctggcct

SEQ ID NO: 439699 - DNA, 15 bp, Homo sapiens
tcaggcttcctggcc

SEQ ID NO: 439700 - DNA, 15 bp, Homo sapiens
ttcaggcttcctggc

SEQ ID NO: 439701 - DNA, 15 bp, Homo sapiens
tttcaggcttcctgg

SEQ ID NO: 439702 - DNA, 15 bp, Homo sapiens
atttcaggcttcctg

SEQ ID NO: 439703 - DNA, 15 bp, Homo sapiens
aatttcaggcttcct

SEQ ID NO: 439704 - DNA, 15 bp, Homo sapiens
caatttcaggcttcc

SEQ ID NO: 439705 - DNA, 15 bp, Homo sapiens
ccaatttcaggcttc

SEQ ID NO: 439706 - DNA, 15 bp, Homo sapiens
gccaatttcaggctt

SEQ ID NO: 439707 - DNA, 15 bp, Homo sapiens
tgccaatttcaggct

SEQ ID NO: 439708 - DNA, 15 bp, Homo sapiens
ttgccaatttcaggc

SEQ ID NO: 439709 - DNA, 15 bp, Homo sapiens
tttgccaatttcagg

SEQ ID NO: 439710 - DNA, 15 bp, Homo sapiens
ttttgccaatttcag

SEQ ID NO: 439711 - DNA, 15 bp, Homo sapiens
tttttgccaatttca

SEQ ID NO: 439712 - DNA, 15 bp, Homo sapiens
ctttttgccaatttc

SEQ ID NO: 439713 - DNA, 15 bp, Homo sapiens
actttttgccaattt

SEQ ID NO: 439714 - DNA, 15 bp, Homo sapiens
tactttttgccaatt

SEQ ID NO: 439715 - DNA, 15 bp, Homo sapiens
ctactttttgccaat

SEQ ID NO: 439716 - DNA, 15 bp, Homo sapiens
tctactttttgccaa

SEQ ID NO: 439717 - DNA, 15 bp, Homo sapiens
atctactttttgcca

SEQ ID NO: 439718 - DNA, 15 bp, Homo sapiens
tatctactttttgcc

SEQ ID NO: 439719 - DNA, 15 bp, Homo sapiens
atatctactttttgc

SEQ ID NO: 439720 - DNA, 15 bp, Homo sapiens
gatatctactttttg

SEQ ID NO: 439721 - DNA, 15 bp, Homo sapiens
ggatatctacttttt

SEQ ID NO: 439722 - DNA, 15 bp, Homo sapiens
gggatatctactttt

SEQ ID NO: 439723 - DNA, 15 bp, Homo sapiens
cgggatatctacttt

SEQ ID NO: 439724 - DNA, 15 bp, Homo sapiens
ccgggatatctactt

SEQ ID NO: 439725 - DNA, 15 bp, Homo sapiens
cccgggatatctact

SEQ ID NO: 439726 - DNA, 15 bp, Homo sapiens
tcccgggatatctac

SEQ ID NO: 439727 - DNA, 15 bp, Homo sapiens
ctcccgggatatcta

SEQ ID NO: 439728 - DNA, 15 bp, Homo sapiens
actcccgggatatct

SEQ ID NO: 439729 - DNA, 15 bp, Homo sapiens
cactcccgggatatc

SEQ ID NO: 439730 - DNA, 15 bp, Homo sapiens
acactcccgggatat

SEQ ID NO: 439731 - DNA, 15 bp, Homo sapiens
aacactcccgggata

SEQ ID NO: 439732 - DNA, 15 bp, Homo sapiens
caacactcccgggat

SEQ ID NO: 439733 - DNA, 15 bp, Homo sapiens
tcaacactcccggga

SEQ ID NO: 439734 - DNA, 15 bp, Homo sapiens
gtcaacactcccggg

SEQ ID NO: 439735 - DNA, 15 bp, Homo sapiens
tgtcaacactcccgg

SEQ ID NO: 439736 - DNA, 15 bp, Homo sapiens
gtgtcaacactcccg

SEQ ID NO: 439737 - DNA, 15 bp, Homo sapiens
tgtgtcaacactccc

SEQ ID NO: 439738 - DNA, 15 bp, Homo sapiens
atgtgtcaacactcc

SEQ ID NO: 439739 - DNA, 15 bp, Homo sapiens
aatgtgtcaacactc

SEQ ID NO: 439740 - DNA, 15 bp, Homo sapiens
aaatgtgtcaacact

SEQ ID NO: 439741 - DNA, 15 bp, Homo sapiens
caaatgtgtcaacac

SEQ ID NO: 439742 - DNA, 15 bp, Homo sapiens
tcaaatgtgtcaaca

SEQ ID NO: 439743 - DNA, 15 bp, Homo sapiens
gtcaaatgtgtcaac

SEQ ID NO: 439744 - DNA, 15 bp, Homo sapiens
tgtcaaatgtgtcaa

SEQ ID NO: 439745 - DNA, 15 bp, Homo sapiens
ctgtcaaatgtgtca

SEQ ID NO: 439746 - DNA, 15 bp, Homo sapiens
cctgtcaaatgtgtc

SEQ ID NO: 439747 - DNA, 15 bp, Homo sapiens
tcctgtcaaatgtgt

SEQ ID NO: 439748 - DNA, 15 bp, Homo sapiens
ttcctgtcaaatgtg

SEQ ID NO: 439749 - DNA, 15 bp, Homo sapiens
attcctgtcaaatgt

SEQ ID NO: 439750 - DNA, 15 bp, Homo sapiens
aattcctgtcaaatg

SEQ ID NO: 439751 - DNA, 15 bp, Homo sapiens
aaattcctgtcaaat

SEQ ID NO: 439752 - DNA, 15 bp, Homo sapiens
gaaattcctgtcaaa

SEQ ID NO: 439753 - DNA, 15 bp, Homo sapiens
tgaaattcctgtcaa

SEQ ID NO: 439754 - DNA, 15 bp, Homo sapiens
gtgaaattcctgtca

SEQ ID NO: 439755 - DNA, 15 bp, Homo sapiens
tgtgaaattcctgtc

SEQ ID NO: 439756 - DNA, 15 bp, Homo sapiens
gtgtgaaattcctgt

SEQ ID NO: 439757 - DNA, 15 bp, Homo sapiens
ggtgtgaaattcctg

SEQ ID NO: 439758 - DNA, 15 bp, Homo sapiens
tggtgtgaaattcct

SEQ ID NO: 439759 - DNA, 15 bp, Homo sapiens
ctggtgtgaaattcc

SEQ ID NO: 439760 - DNA, 15 bp, Homo sapiens
actggtgtgaaattc

SEQ ID NO: 439761 - DNA, 15 bp, Homo sapiens
aactggtgtgaaatt

SEQ ID NO: 439762 - DNA, 15 bp, Homo sapiens
taactggtgtgaaat

SEQ ID NO: 439763 - DNA, 15 bp, Homo sapiens
ataactggtgtgaaa

SEQ ID NO: 439764 - DNA, 15 bp, Homo sapiens
cataactggtgtgaa

SEQ ID NO: 439765 - DNA, 15 bp, Homo sapiens
ccataactggtgtga

SEQ ID NO: 439766 - DNA, 15 bp, Homo sapiens
accataactggtgtg

SEQ ID NO: 439767 - DNA, 15 bp, Homo sapiens
gaccataactggtgt

SEQ ID NO: 439768 - DNA, 15 bp, Homo sapiens
agaccataactggtg

SEQ ID NO: 439769 - DNA, 15 bp, Homo sapiens
gagaccataactggt

SEQ ID NO: 439770 - DNA, 15 bp, Homo sapiens
tgagaccataactgg

SEQ ID NO: 439771 - DNA, 15 bp, Homo sapiens
gtgagaccataactg

SEQ ID NO: 439772 - DNA, 15 bp, Homo sapiens
tgtgagaccataact

SEQ ID NO: 439773 - DNA, 15 bp, Homo sapiens
atgtgagaccataac

SEQ ID NO: 439774 - DNA, 15 bp, Homo sapiens
tatgtgagaccataa

SEQ ID NO: 439775 - DNA, 15 bp, Homo sapiens
ctatgtgagaccata

SEQ ID NO: 439776 - DNA, 15 bp, Homo sapiens
tctatgtgagaccat

SEQ ID NO: 439777 - DNA, 15 bp, Homo sapiens
gtctatgtgagacca

SEQ ID NO: 439778 - DNA, 15 bp, Homo sapiens
ggtctatgtgagacc

SEQ ID NO: 439779 - DNA, 15 bp, Homo sapiens
tggtctatgtgagac

SEQ ID NO: 439780 - DNA, 15 bp, Homo sapiens
ttggtctatgtgaga

SEQ ID NO: 439781 - DNA, 15 bp, Homo sapiens
tttggtctatgtgag

SEQ ID NO: 439782 - DNA, 15 bp, Homo sapiens
gtttggtctatgtga

SEQ ID NO: 439783 - DNA, 15 bp, Homo sapiens
agtttggtctatgtg

SEQ ID NO: 439784 - DNA, 15 bp, Homo sapiens
gagtttggtctatgt

SEQ ID NO: 439785 - DNA, 15 bp, Homo sapiens
tgagtttggtctatg

SEQ ID NO: 439786 - DNA, 15 bp, Homo sapiens
ctgagtttggtctat

SEQ ID NO: 439787 - DNA, 15 bp, Homo sapiens
cctgagtttggtcta

SEQ ID NO: 439788 - DNA, 15 bp, Homo sapiens
tcctgagtttggtct

SEQ ID NO: 439789 - DNA, 15 bp, Homo sapiens
ttcctgagtttggtc

SEQ ID NO: 439790 - DNA, 15 bp, Homo sapiens
tttcctgagtttggt

SEQ ID NO: 439791 - DNA, 15 bp, Homo sapiens
atttcctgagtttgg

SEQ ID NO: 439792 - DNA, 15 bp, Homo sapiens
tatttcctgagtttg

SEQ ID NO: 439793 - DNA, 15 bp, Homo sapiens
ttatttcctgagttt

SEQ ID NO: 439794 - DNA, 15 bp, Homo sapiens
tttatttcctgagtt

SEQ ID NO: 439795 - DNA, 15 bp, Homo sapiens
atttatttcctgagt

SEQ ID NO: 439796 - DNA, 15 bp, Homo sapiens
catttatttcctgag

SEQ ID NO: 439797 - DNA, 15 bp, Homo sapiens
acatttatttcctga

SEQ ID NO: 439798 - DNA, 15 bp, Homo sapiens
aacatttatttcctg

SEQ ID NO: 439799 - DNA, 15 bp, Homo sapiens
caacatttatttcct

SEQ ID NO: 439800 - DNA, 15 bp, Homo sapiens
acaacatttatttcc

SEQ ID NO: 439801 - DNA, 15 bp, Homo sapiens
aacaacatttatttc

SEQ ID NO: 439802 - DNA, 15 bp, Homo sapiens
caacaacatttattt

SEQ ID NO: 439803 - DNA, 15 bp, Homo sapiens
acaacaacatttatt

SEQ ID NO: 439804 - DNA, 15 bp, Homo sapiens
cacaacaacatttat

SEQ ID NO: 439805 - DNA, 15 bp, Homo sapiens
tcacaacaacattta

SEQ ID NO: 439806 - DNA, 15 bp, Homo sapiens
ttcacaacaacattt

SEQ ID NO: 439807 - DNA, 15 bp, Homo sapiens
attcacaacaacatt

SEQ ID NO: 439808 - DNA, 15 bp, Homo sapiens
tattcacaacaacat

SEQ ID NO: 439809 - DNA, 15 bp, Homo sapiens
ttattcacaacaaca

SEQ ID NO: 439810 - DNA, 15 bp, Homo sapiens
tttattcacaacaac

SEQ ID NO: 439811 - DNA, 15 bp, Homo sapiens
ttttattcacaacaa

SEQ ID NO: 439812 - DNA, 15 bp, Homo sapiens
gttttattcacaaca

SEQ ID NO: 439813 - DNA, 15 bp, Homo sapiens
agttttattcacaac

SEQ ID NO: 439814 - DNA, 15 bp, Homo sapiens
cagttttattcacaa

SEQ ID NO: 439815 - DNA, 15 bp, Homo sapiens
ccagttttattcaca

SEQ ID NO: 439816 - DNA, 15 bp, Homo sapiens
accagttttattcac

SEQ ID NO: 439817 - DNA, 15 bp, Homo sapiens
taccagttttattca

SEQ ID NO: 439818 - DNA, 15 bp, Homo sapiens
ttaccagttttattc

SEQ ID NO: 439819 - DNA, 15 bp, Homo sapiens
tttaccagttttatt

SEQ ID NO: 439820 - DNA, 15 bp, Homo sapiens
ttttaccagttttat

SEQ ID NO: 439821 - DNA, 15 bp, Homo sapiens
tttttaccagtttta

SEQ ID NO: 439822 - DNA, 15 bp, Homo sapiens
ttttttaccagtttt

SEQ ID NO: 439823 - DNA, 15 bp, Homo sapiens
tttttttaccagttt

SEQ ID NO: 439824 - DNA, 15 bp, Homo sapiens
ttttttttaccagtt

SEQ ID NO: 439825 - DNA, 15 bp, Homo sapiens
tttttttttaccagt

SEQ ID NO: 439826 - DNA, 15 bp, Homo sapiens
ttttttttttaccag

SEQ ID NO: 439827 - DNA, 15 bp, Homo sapiens
attttttttttacca

SEQ ID NO: 439828 - DNA, 15 bp, Homo sapiens
tattttttttttacc

SEQ ID NO: 439829 - DNA, 15 bp, Homo sapiens
gtattttttttttac

SEQ ID NO: 439830 - DNA, 15 bp, Homo sapiens
agtatttttttttta

SEQ ID NO: 439831 - DNA, 15 bp, Homo sapiens
tagtatttttttttt

SEQ ID NO: 439832 - DNA, 15 bp, Homo sapiens
ttagtattttttttt

SEQ ID NO: 439833 - DNA, 15 bp, Homo sapiens
attagtatttttttt

SEQ ID NO: 439834 - DNA, 15 bp, Homo sapiens
cattagtattttttt

SEQ ID NO: 439835 - DNA, 15 bp, Homo sapiens
acattagtatttttt

SEQ ID NO: 439836 - DNA, 15 bp, Homo sapiens
cacattagtattttt

SEQ ID NO: 439837 - DNA, 15 bp, Homo sapiens
ccacattagtatttt

SEQ ID NO: 439838 - DNA, 15 bp, Homo sapiens
gccacattagtattt

SEQ ID NO: 439839 - DNA, 15 bp, Homo sapiens
tgccacattagtatt

SEQ ID NO: 439840 - DNA, 15 bp, Homo sapiens
atgccacattagtat

SEQ ID NO: 439841 - DNA, 15 bp, Homo sapiens
aatgccacattagta

SEQ ID NO: 439842 - DNA, 15 bp, Homo sapiens
gaatgccacattagt

SEQ ID NO: 439843 - DNA, 15 bp, Homo sapiens
ggaatgccacattag

SEQ ID NO: 439844 - DNA, 15 bp, Homo sapiens
cggaatgccacatta

SEQ ID NO: 439845 - DNA, 15 bp, Homo sapiens
acggaatgccacatt

SEQ ID NO: 439846 - DNA, 15 bp, Homo sapiens
cacggaatgccacat

SEQ ID NO: 439847 - DNA, 15 bp, Homo sapiens
acacggaatgccaca

SEQ ID NO: 439848 - DNA, 15 bp, Homo sapiens
gacacggaatgccac

SEQ ID NO: 439849 - DNA, 15 bp, Homo sapiens
agacacggaatgcca

SEQ ID NO: 439850 - DNA, 15 bp, Homo sapiens
gagacacggaatgcc

SEQ ID NO: 439851 - DNA, 15 bp, Homo sapiens
agagacacggaatgc

SEQ ID NO: 439852 - DNA, 15 bp, Homo sapiens
tagagacacggaatg

SEQ ID NO: 439853 - DNA, 15 bp, Homo sapiens
atagagacacggaat

SEQ ID NO: 439854 - DNA, 15 bp, Homo sapiens
tatagagacacggaa

SEQ ID NO: 439855 - DNA, 15 bp, Homo sapiens
ttatagagacacgga

SEQ ID NO: 439856 - DNA, 15 bp, Homo sapiens
tttatagagacacgg

SEQ ID NO: 439857 - DNA, 15 bp, Homo sapiens
atttatagagacacg

SEQ ID NO: 439858 - DNA, 15 bp, Homo sapiens
catttatagagacac

SEQ ID NO: 439859 - DNA, 15 bp, Homo sapiens
tcatttatagagaca

SEQ ID NO: 439860 - DNA, 15 bp, Homo sapiens
ttcatttatagagac

SEQ ID NO: 439861 - DNA, 15 bp, Homo sapiens
attcatttatagaga

SEQ ID NO: 439862 - DNA, 15 bp, Homo sapiens
cattcatttatagag

SEQ ID NO: 439863 - DNA, 15 bp, Homo sapiens
tcattcatttataga

SEQ ID NO: 439864 - DNA, 15 bp, Homo sapiens
atcattcatttatag

SEQ ID NO: 439865 - DNA, 15 bp, Homo sapiens
tatcattcatttata

SEQ ID NO: 439866 - DNA, 15 bp, Homo sapiens
ctatcattcatttat

SEQ ID NO: 439867 - DNA, 15 bp, Homo sapiens
actatcattcattta

SEQ ID NO: 439868 - DNA, 15 bp, Homo sapiens
tactatcattcattt

SEQ ID NO: 439869 - DNA, 15 bp, Homo sapiens
ttactatcattcatt

SEQ ID NO: 439870 - DNA, 15 bp, Homo sapiens
attactatcattcat

SEQ ID NO: 439871 - DNA, 15 bp, Homo sapiens
gattactatcattca

SEQ ID NO: 439872 - DNA, 15 bp, Homo sapiens
tgattactatcattc

SEQ ID NO: 439873 - DNA, 15 bp, Homo sapiens
ctgattactatcatt

SEQ ID NO: 439874 - DNA, 15 bp, Homo sapiens
actgattactatcat

SEQ ID NO: 439875 - DNA, 15 bp, Homo sapiens
tactgattactatca

SEQ ID NO: 439876 - DNA, 15 bp, Homo sapiens
atactgattactatc

SEQ ID NO: 439877 - DNA, 15 bp, Homo sapiens
aatactgattactat

SEQ ID NO: 439878 - DNA, 15 bp, Homo sapiens
caatactgattacta

SEQ ID NO: 439879 - DNA, 15 bp, Homo sapiens
ccaatactgattact

SEQ ID NO: 439880 - DNA, 15 bp, Homo sapiens
gccaatactgattac

SEQ ID NO: 439881 - DNA, 15 bp, Homo sapiens
tgccaatactgatta

SEQ ID NO: 439882 - DNA, 15 bp, Homo sapiens
ttgccaatactgatt

SEQ ID NO: 439883 - DNA, 15 bp, Homo sapiens
cttgccaatactgat

SEQ ID NO: 439884 - DNA, 15 bp, Homo sapiens
tcttgccaatactga

SEQ ID NO: 439885 - DNA, 15 bp, Homo sapiens
ttcttgccaatactg

SEQ ID NO: 439886 - DNA, 15 bp, Homo sapiens
tttcttgccaatact

SEQ ID NO: 439887 - DNA, 15 bp, Homo sapiens
ttttcttgccaatac

SEQ ID NO: 439888 - DNA, 15 bp, Homo sapiens
attttcttgccaata

SEQ ID NO: 439889 - DNA, 15 bp, Homo sapiens
tattttcttgccaat

SEQ ID NO: 439890 - DNA, 15 bp, Homo sapiens
ttattttcttgccaa

SEQ ID NO: 439891 - DNA, 15 bp, Homo sapiens
attattttcttgcca

SEQ ID NO: 439892 - DNA, 15 bp, Homo sapiens
tattattttcttgcc

SEQ ID NO: 439893 - DNA, 15 bp, Homo sapiens
ctattattttcttgc

SEQ ID NO: 439894 - DNA, 15 bp, Homo sapiens
tctattattttcttg

SEQ ID NO: 439895 - DNA, 15 bp, Homo sapiens
ctctattattttctt

SEQ ID NO: 439896 - DNA, 15 bp, Homo sapiens
tctctattattttct

SEQ ID NO: 439897 - DNA, 15 bp, Homo sapiens
ttctctattattttc

SEQ ID NO: 439898 - DNA, 15 bp, Homo sapiens
tttctctattatttt

SEQ ID NO: 439899 - DNA, 15 bp, Homo sapiens
ttttctctattattt

SEQ ID NO: 439900 - DNA, 15 bp, Homo sapiens
gttttctctattatt

SEQ ID NO: 439901 - DNA, 15 bp, Homo sapiens
agttttctctattat

SEQ ID NO: 439902 - DNA, 15 bp, Homo sapiens
aagttttctctatta

SEQ ID NO: 439903 - DNA, 15 bp, Homo sapiens
gaagttttctctatt

SEQ ID NO: 439904 - DNA, 15 bp, Homo sapiens
tgaagttttctctat

SEQ ID NO: 439905 - DNA, 15 bp, Homo sapiens
ttgaagttttctcta

SEQ ID NO: 439906 - DNA, 15 bp, Homo sapiens
tttgaagttttctct

SEQ ID NO: 439907 - DNA, 15 bp, Homo sapiens
ttttgaagttttctc

SEQ ID NO: 439908 - DNA, 15 bp, Homo sapiens
attttgaagttttct

SEQ ID NO: 439909 - DNA, 15 bp, Homo sapiens
tattttgaagttttc

SEQ ID NO: 439910 - DNA, 15 bp, Homo sapiens
atattttgaagtttt

SEQ ID NO: 439911 - DNA, 15 bp, Homo sapiens
catattttgaagttt

SEQ ID NO: 439912 - DNA, 15 bp, Homo sapiens
tcatattttgaagtt

SEQ ID NO: 439913 - DNA, 15 bp, Homo sapiens
ttcatattttgaagt

SEQ ID NO: 439914 - DNA, 15 bp, Homo sapiens
cttcatattttgaag

SEQ ID NO: 439915 - DNA, 15 bp, Homo sapiens
tcttcatattttgaa

SEQ ID NO: 439916 - DNA, 15 bp, Homo sapiens
ttcttcatattttga

SEQ ID NO: 439917 - DNA, 15 bp, Homo sapiens
cttcttcatattttg

SEQ ID NO: 439918 - DNA, 15 bp, Homo sapiens
acttcttcatatttt

SEQ ID NO: 439919 - DNA, 15 bp, Homo sapiens
tacttcttcatattt

SEQ ID NO: 439920 - DNA, 15 bp, Homo sapiens
atacttcttcatatt

SEQ ID NO: 439921 - DNA, 15 bp, Homo sapiens
aatacttcttcatat

SEQ ID NO: 439922 - DNA, 15 bp, Homo sapiens
aaatacttcttcata

SEQ ID NO: 439923 - DNA, 15 bp, Homo sapiens
aaaatacttcttcat

SEQ ID NO: 439924 - DNA, 15 bp, Homo sapiens
caaaatacttcttca

SEQ ID NO: 439925 - DNA, 15 bp, Homo sapiens
gcaaaatacttcttc

SEQ ID NO: 439926 - DNA, 15 bp, Homo sapiens
agcaaaatacttctt

SEQ ID NO: 439927 - DNA, 15 bp, Homo sapiens
aagcaaaatacttct

SEQ ID NO: 439928 - DNA, 15 bp, Homo sapiens
aaagcaaaatacttc

SEQ ID NO: 439929 - DNA, 15 bp, Homo sapiens
caaagcaaaatactt

SEQ ID NO: 439930 - DNA, 15 bp, Homo sapiens
acaaagcaaaatact

SEQ ID NO: 439931 - DNA, 15 bp, Homo sapiens
tacaaagcaaaatac

SEQ ID NO: 439932 - DNA, 15 bp, Homo sapiens
gtacaaagcaaaata

SEQ ID NO: 439933 - DNA, 15 bp, Homo sapiens
ggtacaaagcaaaat

SEQ ID NO: 439934 - DNA, 15 bp, Homo sapiens
tggtacaaagcaaaa

SEQ ID NO: 439935 - DNA, 15 bp, Homo sapiens
atggtacaaagcaaa

SEQ ID NO: 439936 - DNA, 15 bp, Homo sapiens
aatggtacaaagcaa

SEQ ID NO: 439937 - DNA, 15 bp, Homo sapiens
aaatggtacaaagca

SEQ ID NO: 439938 - DNA, 15 bp, Homo sapiens
aaaatggtacaaagc

SEQ ID NO: 439939 - DNA, 15 bp, Homo sapiens
taaaatggtacaaag

SEQ ID NO: 439940 - DNA, 15 bp, Homo sapiens
ttaaaatggtacaaa

SEQ ID NO: 439941 - DNA, 15 bp, Homo sapiens
attaaaatggtacaa

SEQ ID NO: 439942 - DNA, 15 bp, Homo sapiens
tattaaaatggtaca

SEQ ID NO: 439943 - DNA, 15 bp, Homo sapiens
ttattaaaatggtac

SEQ ID NO: 439944 - DNA, 15 bp, Homo sapiens
cttattaaaatggta

SEQ ID NO: 439945 - DNA, 15 bp, Homo sapiens
acttattaaaatggt

SEQ ID NO: 439946 - DNA, 15 bp, Homo sapiens
cacttattaaaatgg

SEQ ID NO: 439947 - DNA, 15 bp, Homo sapiens
acacttattaaaatg

SEQ ID NO: 439948 - DNA, 15 bp, Homo sapiens
tacacttattaaaat

SEQ ID NO: 439949 - DNA, 15 bp, Homo sapiens
atacacttattaaaa

SEQ ID NO: 439950 - DNA, 15 bp, Homo sapiens
tatacacttattaaa

SEQ ID NO: 439951 - DNA, 15 bp, Homo sapiens
atatacacttattaa

SEQ ID NO: 439952 - DNA, 15 bp, Homo sapiens
tatatacacttatta

SEQ ID NO: 439953 - DNA, 15 bp, Homo sapiens
ctatatacacttatt

SEQ ID NO: 439954 - DNA, 15 bp, Homo sapiens
actatatacacttat

SEQ ID NO: 439955 - DNA, 15 bp, Homo sapiens
tactatatacactta

SEQ ID NO: 439956 - DNA, 15 bp, Homo sapiens
ctactatatacactt

SEQ ID NO: 439957 - DNA, 15 bp, Homo sapiens
tctactatatacact

SEQ ID NO: 439958 - DNA, 15 bp, Homo sapiens
ttctactatatacac

SEQ ID NO: 439959 - DNA, 15 bp, Homo sapiens
tttctactatataca

SEQ ID NO: 439960 - DNA, 15 bp, Homo sapiens
ttttctactatatac

SEQ ID NO: 439961 - DNA, 15 bp, Homo sapiens
attttctactatata

SEQ ID NO: 439962 - DNA, 15 bp, Homo sapiens
tattttctactatat

SEQ ID NO: 439963 - DNA, 15 bp, Homo sapiens
atattttctactata

SEQ ID NO: 439964 - DNA, 15 bp, Homo sapiens
aatattttctactat

SEQ ID NO: 439965 - DNA, 15 bp, Homo sapiens
aaatattttctacta

SEQ ID NO: 439966 - DNA, 15 bp, Homo sapiens
caaatattttctact

SEQ ID NO: 439967 - DNA, 15 bp, Homo sapiens
acaaatattttctac

SEQ ID NO: 439968 - DNA, 15 bp, Homo sapiens
agacaaatattttct

SEQ ID NO: 439969 - DNA, 15 bp, Homo sapiens
aagacaaatattttc

SEQ ID NO: 439970 - DNA, 15 bp, Homo sapiens
taagacaaatatttt

SEQ ID NO: 439971 - DNA, 15 bp, Homo sapiens
ctaagacaaatattt

SEQ ID NO: 439972 - DNA, 15 bp, Homo sapiens
actaagacaaatatt

SEQ ID NO: 439973 - DNA, 15 bp, Homo sapiens
aactaagacaaatat

SEQ ID NO: 439974 - DNA, 15 bp, Homo sapiens
taactaagacaaata

SEQ ID NO: 439975 - DNA, 15 bp, Homo sapiens
ataactaagacaaat

SEQ ID NO: 439976 - DNA, 15 bp, Homo sapiens
aataactaagacaaa

SEQ ID NO: 439977 - DNA, 15 bp, Homo sapiens
taataactaagacaa

SEQ ID NO: 439978 - DNA, 15 bp, Homo sapiens
ttaataactaagaca

SEQ ID NO: 439979 - DNA, 15 bp, Homo sapiens
gttaataactaagac

SEQ ID NO: 439980 - DNA, 15 bp, Homo sapiens
ggttaataactaaga

SEQ ID NO: 439981 - DNA, 15 bp, Homo sapiens
tggttaataactaag

SEQ ID NO: 439982 - DNA, 15 bp, Homo sapiens
gtggttaataactaa

SEQ ID NO: 439983 - DNA, 15 bp, Homo sapiens
tgtggttaataacta

SEQ ID NO: 439984 - DNA, 15 bp, Homo sapiens
atgtggttaataact

SEQ ID NO: 439985 - DNA, 15 bp, Homo sapiens
catgtggttaataac

SEQ ID NO: 439986 - DNA, 15 bp, Homo sapiens
ccatgtggttaataa

SEQ ID NO: 439987 - DNA, 15 bp, Homo sapiens
accatgtggttaata

SEQ ID NO: 439988 - DNA, 15 bp, Homo sapiens
aaccatgtggttaat

SEQ ID NO: 439989 - DNA, 15 bp, Homo sapiens
caaccatgtggttaa

SEQ ID NO: 439990 - DNA, 15 bp, Homo sapiens
tcaaccatgtggtta

SEQ ID NO: 439991 - DNA, 15 bp, Homo sapiens
gtcaaccatgtggtt

SEQ ID NO: 439992 - DNA, 15 bp, Homo sapiens
ggtcaaccatgtggt

SEQ ID NO: 439993 - DNA, 15 bp, Homo sapiens
tggtcaaccatgtgg

SEQ ID NO: 439994 - DNA, 15 bp, Homo sapiens
ttggtcaaccatgtg

SEQ ID NO: 439995 - DNA, 15 bp, Homo sapiens
attggtcaaccatgt

SEQ ID NO: 439996 - DNA, 15 bp, Homo sapiens
aattggtcaaccatg

SEQ ID NO: 439997 - DNA, 15 bp, Homo sapiens
aaattggtcaaccat

SEQ ID NO: 439998 - DNA, 15 bp, Homo sapiens
taaattggtcaacca

SEQ ID NO: 439999 - DNA, 15 bp, Homo sapiens
ataaattggtcaacc

SEQ ID NO: 440000 - DNA, 15 bp, Homo sapiens
tataaattggtcaac

SEQ ID NO: 440001 - DNA, 15 bp, Homo sapiens
ttataaattggtcaa

SEQ ID NO: 440002 - DNA, 15 bp, Homo sapiens
tttataaattggtca

SEQ ID NO: 440003 - DNA, 15 bp, Homo sapiens
atttataaattggtc

SEQ ID NO: 440004 - DNA, 15 bp, Homo sapiens
tatttataaattggt

SEQ ID NO: 440005 - DNA, 15 bp, Homo sapiens
gtatttataaattgg

SEQ ID NO: 440006 - DNA, 15 bp, Homo sapiens
ggtatttataaattg

SEQ ID NO: 440007 - DNA, 15 bp, Homo sapiens
gggtatttataaatt

SEQ ID NO: 440008 - DNA, 15 bp, Homo sapiens
tgggtatttataaat

SEQ ID NO: 440009 - DNA, 15 bp, Homo sapiens
ttgggtatttataaa

SEQ ID NO: 440010 - DNA, 15 bp, Homo sapiens
attgggtatttataa

SEQ ID NO: 440011 - DNA, 15 bp, Homo sapiens
tattgggtatttata

SEQ ID NO: 440012 - DNA, 15 bp, Homo sapiens
atattgggtatttat

SEQ ID NO: 440013 - DNA, 15 bp, Homo sapiens
aatattgggtattta

SEQ ID NO: 440014 - DNA, 15 bp, Homo sapiens
aaatattgggtattt

SEQ ID NO: 440015 - DNA, 15 bp, Homo sapiens
gaaatattgggtatt

SEQ ID NO: 440016 - DNA, 15 bp, Homo sapiens
ggaaatattgggtat

SEQ ID NO: 440017 - DNA, 15 bp, Homo sapiens
tggaaatattgggta

SEQ ID NO: 440018 - DNA, 15 bp, Homo sapiens
ttggaaatattgggt

SEQ ID NO: 440019 - DNA, 15 bp, Homo sapiens
attggaaatattggg

SEQ ID NO: 440020 - DNA, 15 bp, Homo sapiens
aattggaaatattgg

SEQ ID NO: 440021 - DNA, 15 bp, Homo sapiens
aaattggaaatattg

SEQ ID NO: 440022 - DNA, 15 bp, Homo sapiens
aaaaaattggaaata

SEQ ID NO: 440023 - DNA, 15 bp, Homo sapiens
aaaaaaattggaaat

SEQ ID NO: 440024 - DNA, 15 bp, Homo sapiens
aaaaaaaattggaaa

SEQ ID NO: 440025 - DNA, 15 bp, Homo sapiens
gaaaaaaaattggaa

SEQ ID NO: 440026 - DNA, 15 bp, Homo sapiens
ggaaaaaaaattgga

SEQ ID NO: 440027 - DNA, 15 bp, Homo sapiens
aggaaaaaaaattgg

SEQ ID NO: 440028 - DNA, 15 bp, Homo sapiens
caggaaaaaaaattg

SEQ ID NO: 440029 - DNA, 15 bp, Homo sapiens
tcaggaaaaaaaatt

SEQ ID NO: 440030 - DNA, 15 bp, Homo sapiens
ttcaggaaaaaaaat

SEQ ID NO: 440031 - DNA, 15 bp, Homo sapiens
tttcaggaaaaaaaa

SEQ ID NO: 440032 - DNA, 15 bp, Homo sapiens
atttcaggaaaaaaa

SEQ ID NO: 440033 - DNA, 15 bp, Homo sapiens
aatttcaggaaaaaa

SEQ ID NO: 440034 - DNA, 15 bp, Homo sapiens
caatttcaggaaaaa

SEQ ID NO: 440035 - DNA, 15 bp, Homo sapiens
tcaatttcaggaaaa

SEQ ID NO: 440036 - DNA, 15 bp, Homo sapiens
atcaatttcaggaaa

SEQ ID NO: 440037 - DNA, 15 bp, Homo sapiens
aatcaatttcaggaa

SEQ ID NO: 440038 - DNA, 15 bp, Homo sapiens
aaatcaatttcagga

SEQ ID NO: 440039 - DNA, 15 bp, Homo sapiens
aaaatcaatttcagg

SEQ ID NO: 440040 - DNA, 15 bp, Homo sapiens
taaaatcaatttcag

SEQ ID NO: 440041 - DNA, 15 bp, Homo sapiens
ttaaaatcaatttca

SEQ ID NO: 440042 - DNA, 15 bp, Homo sapiens
cttaaaatcaatttc

SEQ ID NO: 440043 - DNA, 15 bp, Homo sapiens
ccttaaaatcaattt

SEQ ID NO: 440044 - DNA, 15 bp, Homo sapiens
cccttaaaatcaatt

SEQ ID NO: 440045 - DNA, 15 bp, Homo sapiens
tcccttaaaatcaat

SEQ ID NO: 440046 - DNA, 15 bp, Homo sapiens
ttcccttaaaatcaa

SEQ ID NO: 440047 - DNA, 15 bp, Homo sapiens
attcccttaaaatca

SEQ ID NO: 440048 - DNA, 15 bp, Homo sapiens
gattcccttaaaatc

SEQ ID NO: 440049 - DNA, 15 bp, Homo sapiens
tgattcccttaaaat

SEQ ID NO: 440050 - DNA, 15 bp, Homo sapiens
ttgattcccttaaaa

SEQ ID NO: 440051 - DNA, 15 bp, Homo sapiens
tttgattcccttaaa

SEQ ID NO: 440052 - DNA, 15 bp, Homo sapiens
atttgattcccttaa

SEQ ID NO: 440053 - DNA, 15 bp, Homo sapiens
gatttgattccctta

SEQ ID NO: 440054 - DNA, 15 bp, Homo sapiens
tgatttgattccctt

SEQ ID NO: 440055 - DNA, 15 bp, Homo sapiens
ctgatttgattccct

SEQ ID NO: 440056 - DNA, 15 bp, Homo sapiens
tctgatttgattccc

SEQ ID NO: 440057 - DNA, 15 bp, Homo sapiens
ctctgatttgattcc

SEQ ID NO: 440058 - DNA, 15 bp, Homo sapiens
gctctgatttgattc

SEQ ID NO: 440059 - DNA, 15 bp, Homo sapiens
tgctctgatttgatt

SEQ ID NO: 440060 - DNA, 15 bp, Homo sapiens
ctgctctgatttgat

SEQ ID NO: 440061 - DNA, 15 bp, Homo sapiens
cctgctctgatttga

SEQ ID NO: 440062 - DNA, 15 bp, Homo sapiens
ccctgctctgatttg

SEQ ID NO: 440063 - DNA, 15 bp, Homo sapiens
tccctgctctgattt

SEQ ID NO: 440064 - DNA, 15 bp, Homo sapiens
ttccctgctctgatt

SEQ ID NO: 440065 - DNA, 15 bp, Homo sapiens
attccctgctctgat

SEQ ID NO: 440066 - DNA, 15 bp, Homo sapiens
tattccctgctctga

SEQ ID NO: 440067 - DNA, 15 bp, Homo sapiens
atattccctgctctg

SEQ ID NO: 440068 - DNA, 15 bp, Homo sapiens
aatattccctgctct

SEQ ID NO: 440069 - DNA, 15 bp, Homo sapiens
aaatattccctgctc

SEQ ID NO: 440070 - DNA, 15 bp, Homo sapiens
gaaatattccctgct

SEQ ID NO: 440071 - DNA, 15 bp, Homo sapiens
agaaatattccctgc

SEQ ID NO: 440072 - DNA, 15 bp, Homo sapiens
cagaaatattccctg

SEQ ID NO: 440073 - DNA, 15 bp, Homo sapiens
acagaaatattccct

SEQ ID NO: 440074 - DNA, 15 bp, Homo sapiens
tacagaaatattccc

SEQ ID NO: 440075 - DNA, 15 bp, Homo sapiens
ttacagaaatattcc

SEQ ID NO: 440076 - DNA, 15 bp, Homo sapiens
attacagaaatattc

SEQ ID NO: 440077 - DNA, 15 bp, Homo sapiens
gattacagaaatatt

SEQ ID NO: 440078 - DNA, 15 bp, Homo sapiens
agattacagaaatat

SEQ ID NO: 440079 - DNA, 15 bp, Homo sapiens
aagattacagaaata

SEQ ID NO: 440080 - DNA, 15 bp, Homo sapiens
aaagattacagaaat

SEQ ID NO: 440081 - DNA, 15 bp, Homo sapiens
aaaagattacagaaa

SEQ ID NO: 440082 - DNA, 15 bp, Homo sapiens
taaaagattacagaa

SEQ ID NO: 440083 - DNA, 15 bp, Homo sapiens
ataaaagattacaga

SEQ ID NO: 440084 - DNA, 15 bp, Homo sapiens
aataaaagattacag

SEQ ID NO: 440085 - DNA, 15 bp, Homo sapiens
gaataaaagattaca

SEQ ID NO: 440086 - DNA, 15 bp, Homo sapiens
tgaataaaagattac

SEQ ID NO: 440087 - DNA, 15 bp, Homo sapiens
ctgaataaaagatta

SEQ ID NO: 440088 - DNA, 15 bp, Homo sapiens
cctgaataaaagatt

SEQ ID NO: 440089 - DNA, 15 bp, Homo sapiens
tcctgaataaaagat

SEQ ID NO: 440090 - DNA, 15 bp, Homo sapiens
ctcctgaataaaaga

SEQ ID NO: 440091 - DNA, 15 bp, Homo sapiens
tctcctgaataaaag

SEQ ID NO: 440092 - DNA, 15 bp, Homo sapiens
atctcctgaataaaa

SEQ ID NO: 440093 - DNA, 15 bp, Homo sapiens
catctcctgaataaa

SEQ ID NO: 440094 - DNA, 15 bp, Homo sapiens
tcatctcctgaataa

SEQ ID NO: 440095 - DNA, 15 bp, Homo sapiens
ttcatctcctgaata

SEQ ID NO: 440096 - DNA, 15 bp, Homo sapiens
attcatctcctgaat

SEQ ID NO: 440097 - DNA, 15 bp, Homo sapiens
cattcatctcctgaa

SEQ ID NO: 440098 - DNA, 15 bp, Homo sapiens
acattcatctcctga

SEQ ID NO: 440099 - DNA, 15 bp, Homo sapiens
cacattcatctcctg

SEQ ID NO: 440100 - DNA, 15 bp, Homo sapiens
acacattcatctcct

SEQ ID NO: 440101 - DNA, 15 bp, Homo sapiens
tacacattcatctcc

SEQ ID NO: 440102 - DNA, 15 bp, Homo sapiens
atacacattcatctc

SEQ ID NO: 440103 - DNA, 15 bp, Homo sapiens
aatacacattcatct

SEQ ID NO: 440104 - DNA, 15 bp, Homo sapiens
aaatacacattcatc

SEQ ID NO: 440105 - DNA, 15 bp, Homo sapiens
taaatacacattcat

SEQ ID NO: 440106 - DNA, 15 bp, Homo sapiens
ataaatacacattca

SEQ ID NO: 440107 - DNA, 15 bp, Homo sapiens
aataaatacacattc

SEQ ID NO: 440108 - DNA, 15 bp, Homo sapiens
taataaatacacatt

SEQ ID NO: 440109 - DNA, 15 bp, Homo sapiens
ataataaatacacat

SEQ ID NO: 440110 - DNA, 15 bp, Homo sapiens
aataataaatacaca

SEQ ID NO: 440111 - DNA, 15 bp, Homo sapiens
aaataataaatacac

SEQ ID NO: 440112 - DNA, 15 bp, Homo sapiens
taaataataaataca

SEQ ID NO: 440113 - DNA, 15 bp, Homo sapiens
gtaaataataaatac

SEQ ID NO: 440114 - DNA, 15 bp, Homo sapiens
ggtaaataataaata

SEQ ID NO: 440115 - DNA, 15 bp, Homo sapiens
aggtaaataataaat

SEQ ID NO: 440116 - DNA, 15 bp, Homo sapiens
taggtaaataataaa

SEQ ID NO: 440117 - DNA, 15 bp, Homo sapiens
ataggtaaataataa

SEQ ID NO: 440118 - DNA, 15 bp, Homo sapiens
tataggtaaataata

SEQ ID NO: 440119 - DNA, 15 bp, Homo sapiens
atataggtaaataat

SEQ ID NO: 440120 - DNA, 15 bp, Homo sapiens
aatataggtaaataa

SEQ ID NO: 440121 - DNA, 15 bp, Homo sapiens
aaatataggtaaata

SEQ ID NO: 440122 - DNA, 15 bp, Homo sapiens
taaatataggtaaat

SEQ ID NO: 440123 - DNA, 15 bp, Homo sapiens
ttaaatataggtaaa

SEQ ID NO: 440124 - DNA, 15 bp, Homo sapiens
gttaaatataggtaa

SEQ ID NO: 440125 - DNA, 15 bp, Homo sapiens
agttaaatataggta

SEQ ID NO: 440126 - DNA, 15 bp, Homo sapiens
gagttaaatataggt

SEQ ID NO: 440127 - DNA, 15 bp, Homo sapiens
ggagttaaatatagg

SEQ ID NO: 440128 - DNA, 15 bp, Homo sapiens
gggagttaaatatag

SEQ ID NO: 440129 - DNA, 15 bp, Homo sapiens
agggagttaaatata

SEQ ID NO: 440130 - DNA, 15 bp, Homo sapiens
cagggagttaaatat

SEQ ID NO: 440131 - DNA, 15 bp, Homo sapiens
gcagggagttaaata

SEQ ID NO: 440132 - DNA, 15 bp, Homo sapiens
agcagggagttaaat

SEQ ID NO: 440133 - DNA, 15 bp, Homo sapiens
gagcagggagttaaa

SEQ ID NO: 440134 - DNA, 15 bp, Homo sapiens
agagcagggagttaa

SEQ ID NO: 440135 - DNA, 15 bp, Homo sapiens
aagagcagggagtta

SEQ ID NO: 440136 - DNA, 15 bp, Homo sapiens
aaagagcagggagtt

SEQ ID NO: 440137 - DNA, 15 bp, Homo sapiens
aaaagagcagggagt

SEQ ID NO: 440138 - DNA, 15 bp, Homo sapiens
taaaagagcagggag

SEQ ID NO: 440139 - DNA, 15 bp, Homo sapiens
ctaaaagagcaggga

SEQ ID NO: 440140 - DNA, 15 bp, Homo sapiens
actaaaagagcaggg

SEQ ID NO: 440141 - DNA, 15 bp, Homo sapiens
tactaaaagagcagg

SEQ ID NO: 440142 - DNA, 15 bp, Homo sapiens
atactaaaagagcag

SEQ ID NO: 440143 - DNA, 15 bp, Homo sapiens
gatactaaaagagca

SEQ ID NO: 440144 - DNA, 15 bp, Homo sapiens
agatactaaaagagc

SEQ ID NO: 440145 - DNA, 15 bp, Homo sapiens
tagatactaaaagag

SEQ ID NO: 440146 - DNA, 15 bp, Homo sapiens
gtagatactaaaaga

SEQ ID NO: 440147 - DNA, 15 bp, Homo sapiens
tgtagatactaaaag

SEQ ID NO: 440148 - DNA, 15 bp, Homo sapiens
atgtagatactaaaa

SEQ ID NO: 440149 - DNA, 15 bp, Homo sapiens
catgtagatactaaa

SEQ ID NO: 440150 - DNA, 15 bp, Homo sapiens
gcatgtagatactaa

SEQ ID NO: 440151 - DNA, 15 bp, Homo sapiens
agcatgtagatacta

SEQ ID NO: 440152 - DNA, 15 bp, Homo sapiens
cagcatgtagatact

SEQ ID NO: 440153 - DNA, 15 bp, Homo sapiens
acagcatgtagatac

SEQ ID NO: 440154 - DNA, 15 bp, Homo sapiens
tacagcatgtagata

SEQ ID NO: 440155 - DNA, 15 bp, Homo sapiens
atacagcatgtagat

SEQ ID NO: 440156 - DNA, 15 bp, Homo sapiens
aatacagcatgtaga

SEQ ID NO: 440157 - DNA, 15 bp, Homo sapiens
taatacagcatgtag

SEQ ID NO: 440158 - DNA, 15 bp, Homo sapiens
gtaatacagcatgta

SEQ ID NO: 440159 - DNA, 15 bp, Homo sapiens
cgtaatacagcatgt

SEQ ID NO: 440160 - DNA, 15 bp, Homo sapiens
acgtaatacagcatg

SEQ ID NO: 440161 - DNA, 15 bp, Homo sapiens
tacgtaatacagcat

SEQ ID NO: 440162 - DNA, 15 bp, Homo sapiens
ttacgtaatacagca

SEQ ID NO: 440163 - DNA, 15 bp, Homo sapiens
attacgtaatacagc

SEQ ID NO: 440164 - DNA, 15 bp, Homo sapiens
aattacgtaatacag

SEQ ID NO: 440165 - DNA, 15 bp, Homo sapiens
taattacgtaataca

SEQ ID NO: 440166 - DNA, 15 bp, Homo sapiens
ataattacgtaatac

SEQ ID NO: 440167 - DNA, 15 bp, Homo sapiens
gataattacgtaata

SEQ ID NO: 440168 - DNA, 15 bp, Homo sapiens
tgataattacgtaat

SEQ ID NO: 440169 - DNA, 15 bp, Homo sapiens
atgataattacgtaa

SEQ ID NO: 440170 - DNA, 15 bp, Homo sapiens
gatgataattacgta

SEQ ID NO: 440171 - DNA, 15 bp, Homo sapiens
agatgataattacgt

SEQ ID NO: 440172 - DNA, 15 bp, Homo sapiens
aagatgataattacg

SEQ ID NO: 440173 - DNA, 15 bp, Homo sapiens
gaagatgataattac

SEQ ID NO: 440174 - DNA, 15 bp, Homo sapiens
agaagatgataatta

SEQ ID NO: 440175 - DNA, 15 bp, Homo sapiens
gagaagatgataatt

SEQ ID NO: 440176 - DNA, 15 bp, Homo sapiens
agagaagatgataat

SEQ ID NO: 440177 - DNA, 15 bp, Homo sapiens
cagagaagatgataa

SEQ ID NO: 440178 - DNA, 15 bp, Homo sapiens
tcagagaagatgata

SEQ ID NO: 440179 - DNA, 15 bp, Homo sapiens
ctcagagaagatgat

SEQ ID NO: 440180 - DNA, 15 bp, Homo sapiens
cctcagagaagatga

SEQ ID NO: 440181 - DNA, 15 bp, Homo sapiens
ccctcagagaagatg

SEQ ID NO: 440182 - DNA, 15 bp, Homo sapiens
tccctcagagaagat

SEQ ID NO: 440183 - DNA, 15 bp, Homo sapiens
ctccctcagagaaga

SEQ ID NO: 440184 - DNA, 15 bp, Homo sapiens
cctccctcagagaag

SEQ ID NO: 440185 - DNA, 15 bp, Homo sapiens
tcctccctcagagaa

SEQ ID NO: 440186 - DNA, 15 bp, Homo sapiens
ttcctccctcagaga

SEQ ID NO: 440187 - DNA, 15 bp, Homo sapiens
tttcctccctcagag

SEQ ID NO: 440188 - DNA, 15 bp, Homo sapiens
ttttcctccctcaga

SEQ ID NO: 440189 - DNA, 15 bp, Homo sapiens
tttttcctccctcag

SEQ ID NO: 440190 - DNA, 15 bp, Homo sapiens
ttttttcctccctca

SEQ ID NO: 440191 - DNA, 15 bp, Homo sapiens
tttttttcctccctc

SEQ ID NO: 440192 - DNA, 15 bp, Homo sapiens
ctttttttcctccct

SEQ ID NO: 440193 - DNA, 15 bp, Homo sapiens
actttttttcctccc

SEQ ID NO: 440194 - DNA, 15 bp, Homo sapiens
tactttttttcctcc

SEQ ID NO: 440195 - DNA, 15 bp, Homo sapiens
ctactttttttcctc

SEQ ID NO: 440196 - DNA, 15 bp, Homo sapiens
gctactttttttcct

SEQ ID NO: 440197 - DNA, 15 bp, Homo sapiens
agctactttttttcc

SEQ ID NO: 440198 - DNA, 15 bp, Homo sapiens
cagctactttttttc

SEQ ID NO: 440199 - DNA, 15 bp, Homo sapiens
tcagctacttttttt

SEQ ID NO: 440200 - DNA, 15 bp, Homo sapiens
ctcagctactttttt

SEQ ID NO: 440201 - DNA, 15 bp, Homo sapiens
tctcagctacttttt

SEQ ID NO: 440202 - DNA, 15 bp, Homo sapiens
ctctcagctactttt

SEQ ID NO: 440203 - DNA, 15 bp, Homo sapiens
gctctcagctacttt

SEQ ID NO: 440204 - DNA, 15 bp, Homo sapiens
ggctctcagctactt

SEQ ID NO: 440205 - DNA, 15 bp, Homo sapiens
tggctctcagctact

SEQ ID NO: 440206 - DNA, 15 bp, Homo sapiens
gtggctctcagctac

SEQ ID NO: 440207 - DNA, 15 bp, Homo sapiens
agtggctctcagcta

SEQ ID NO: 440208 - DNA, 15 bp, Homo sapiens
aagtggctctcagct

SEQ ID NO: 440209 - DNA, 15 bp, Homo sapiens
aaagtggctctcagc

SEQ ID NO: 440210 - DNA, 15 bp, Homo sapiens
gaaagtggctctcag

SEQ ID NO: 440211 - DNA, 15 bp, Homo sapiens
tgaaagtggctctca

SEQ ID NO: 440212 - DNA, 15 bp, Homo sapiens
ctgaaagtggctctc

SEQ ID NO: 440213 - DNA, 15 bp, Homo sapiens
actgaaagtggctct

SEQ ID NO: 440214 - DNA, 15 bp, Homo sapiens
gactgaaagtggctc

SEQ ID NO: 440215 - DNA, 15 bp, Homo sapiens
ggactgaaagtggct

SEQ ID NO: 440216 - DNA, 15 bp, Homo sapiens
gggactgaaagtggc

SEQ ID NO: 440217 - DNA, 15 bp, Homo sapiens
cgggactgaaagtgg

SEQ ID NO: 440218 - DNA, 15 bp, Homo sapiens
gcgggactgaaagtg

SEQ ID NO: 440219 - DNA, 15 bp, Homo sapiens
agcgggactgaaagt

SEQ ID NO: 440220 - DNA, 15 bp, Homo sapiens
tagcgggactgaaag

SEQ ID NO: 440221 - DNA, 15 bp, Homo sapiens
atagcgggactgaaa

SEQ ID NO: 440222 - DNA, 15 bp, Homo sapiens
aatagcgggactgaa

SEQ ID NO: 440223 - DNA, 15 bp, Homo sapiens
taatagcgggactga

SEQ ID NO: 440224 - DNA, 15 bp, Homo sapiens
ttaatagcgggactg

SEQ ID NO: 440225 - DNA, 15 bp, Homo sapiens
cttaatagcgggact

SEQ ID NO: 440226 - DNA, 15 bp, Homo sapiens
acttaatagcgggac

SEQ ID NO: 440227 - DNA, 15 bp, Homo sapiens
tacttaatagcggga

SEQ ID NO: 440228 - DNA, 15 bp, Homo sapiens
gtacttaatagcggg

SEQ ID NO: 440229 - DNA, 15 bp, Homo sapiens
tgtacttaatagcgg

SEQ ID NO: 440230 - DNA, 15 bp, Homo sapiens
atgtacttaatagcg

SEQ ID NO: 440231 - DNA, 15 bp, Homo sapiens
aatgtacttaatagc

SEQ ID NO: 440232 - DNA, 15 bp, Homo sapiens
aaatgtacttaatag

SEQ ID NO: 440233 - DNA, 15 bp, Homo sapiens
aaaatgtacttaata

SEQ ID NO: 440234 - DNA, 15 bp, Homo sapiens
caaaatgtacttaat

SEQ ID NO: 440235 - DNA, 15 bp, Homo sapiens
ccaaaatgtacttaa

SEQ ID NO: 440236 - DNA, 15 bp, Homo sapiens
gccaaaatgtactta

SEQ ID NO: 440237 - DNA, 15 bp, Homo sapiens
ggccaaaatgtactt

SEQ ID NO: 440238 - DNA, 15 bp, Homo sapiens
aggccaaaatgtact

SEQ ID NO: 440239 - DNA, 15 bp, Homo sapiens
gaggccaaaatgtac

SEQ ID NO: 440240 - DNA, 15 bp, Homo sapiens
agaggccaaaatgta

SEQ ID NO: 440241 - DNA, 15 bp, Homo sapiens
tagaggccaaaatgt

SEQ ID NO: 440242 - DNA, 15 bp, Homo sapiens
ttagaggccaaaatg

SEQ ID NO: 440243 - DNA, 15 bp, Homo sapiens
cttagaggccaaaat

SEQ ID NO: 440244 - DNA, 15 bp, Homo sapiens
tcttagaggccaaaa

SEQ ID NO: 440245 - DNA, 15 bp, Homo sapiens
ttcttagaggccaaa

SEQ ID NO: 440246 - DNA, 15 bp, Homo sapiens
tttcttagaggccaa

SEQ ID NO: 440247 - DNA, 15 bp, Homo sapiens
gtttcttagaggcca

SEQ ID NO: 440248 - DNA, 15 bp, Homo sapiens
agtttcttagaggcc

SEQ ID NO: 440249 - DNA, 15 bp, Homo sapiens
aagtttcttagaggc

SEQ ID NO: 440250 - DNA, 15 bp, Homo sapiens
gaagtttcttagagg

SEQ ID NO: 440251 - DNA, 15 bp, Homo sapiens
cgaagtttcttagag

SEQ ID NO: 440252 - DNA, 15 bp, Homo sapiens
acgaagtttcttaga

SEQ ID NO: 440253 - DNA, 15 bp, Homo sapiens
cacgaagtttcttag

SEQ ID NO: 440254 - DNA, 15 bp, Homo sapiens
acacgaagtttctta

SEQ ID NO: 440255 - DNA, 15 bp, Homo sapiens
cacacgaagtttctt

SEQ ID NO: 440256 - DNA, 15 bp, Homo sapiens
ccacacgaagtttct

SEQ ID NO: 440257 - DNA, 15 bp, Homo sapiens
accacacgaagtttc

SEQ ID NO: 440258 - DNA, 15 bp, Homo sapiens
aaccacacgaagttt

SEQ ID NO: 440259 - DNA, 15 bp, Homo sapiens
gaaccacacgaagtt

SEQ ID NO: 440260 - DNA, 15 bp, Homo sapiens
tgaaccacacgaagt

SEQ ID NO: 440261 - DNA, 15 bp, Homo sapiens
gtgaaccacacgaag

SEQ ID NO: 440262 - DNA, 15 bp, Homo sapiens
ggtgaaccacacgaa

SEQ ID NO: 440263 - DNA, 15 bp, Homo sapiens
aggtgaaccacacga

SEQ ID NO: 440264 - DNA, 15 bp, Homo sapiens
gaggtgaaccacacg

SEQ ID NO: 440265 - DNA, 15 bp, Homo sapiens
tgaggtgaaccacac

SEQ ID NO: 440266 - DNA, 15 bp, Homo sapiens
ctgaggtgaaccaca

SEQ ID NO: 440267 - DNA, 15 bp, Homo sapiens
cctgaggtgaaccac

SEQ ID NO: 440268 - DNA, 15 bp, Homo sapiens
acctgaggtgaacca

SEQ ID NO: 440269 - DNA, 15 bp, Homo sapiens
tacctgaggtgaacc

SEQ ID NO: 440270 - DNA, 15 bp, Homo sapiens
atacctgaggtgaac

SEQ ID NO: 440271 - DNA, 15 bp, Homo sapiens
catacctgaggtgaa

SEQ ID NO: 440272 - DNA, 15 bp, Homo sapiens
tcatacctgaggtga

SEQ ID NO: 440273 - DNA, 15 bp, Homo sapiens
gtcatacctgaggtg

SEQ ID NO: 440274 - DNA, 15 bp, Homo sapiens
tgtcatacctgaggt

SEQ ID NO: 440275 - DNA, 15 bp, Homo sapiens
ttgtcatacctgagg

SEQ ID NO: 440276 - DNA, 15 bp, Homo sapiens
cttgtcatacctgag

SEQ ID NO: 440277 - DNA, 15 bp, Homo sapiens
gcttgtcatacctga

SEQ ID NO: 440278 - DNA, 15 bp, Homo sapiens
ggcttgtcatacctg

SEQ ID NO: 440279 - DNA, 15 bp, Homo sapiens
tggcttgtcatacct

SEQ ID NO: 440280 - DNA, 15 bp, Homo sapiens
atggcttgtcatacc

SEQ ID NO: 440281 - DNA, 15 bp, Homo sapiens
tatggcttgtcatac

SEQ ID NO: 440282 - DNA, 15 bp, Homo sapiens
ttatggcttgtcata

SEQ ID NO: 440283 - DNA, 15 bp, Homo sapiens
gttatggcttgtcat

SEQ ID NO: 440284 - DNA, 15 bp, Homo sapiens
agttatggcttgtca

SEQ ID NO: 440285 - DNA, 15 bp, Homo sapiens
aagttatggcttgtc

SEQ ID NO: 440286 - DNA, 15 bp, Homo sapiens
gaagttatggcttgt

SEQ ID NO: 440287 - DNA, 15 bp, Homo sapiens
ggaagttatggcttg

SEQ ID NO: 440288 - DNA, 15 bp, Homo sapiens
aggaagttatggctt

SEQ ID NO: 440289 - DNA, 15 bp, Homo sapiens
aaggaagttatggct

SEQ ID NO: 440290 - DNA, 15 bp, Homo sapiens
caaggaagttatggc

SEQ ID NO: 440291 - DNA, 15 bp, Homo sapiens
ccaaggaagttatgg

SEQ ID NO: 440292 - DNA, 15 bp, Homo sapiens
gccaaggaagttatg

SEQ ID NO: 440293 - DNA, 15 bp, Homo sapiens
tgccaaggaagttat

SEQ ID NO: 440294 - DNA, 15 bp, Homo sapiens
ttgccaaggaagtta

SEQ ID NO: 440295 - DNA, 15 bp, Homo sapiens
tttgccaaggaagtt

SEQ ID NO: 440296 - DNA, 15 bp, Homo sapiens
ttttgccaaggaagt

SEQ ID NO: 440297 - DNA, 15 bp, Homo sapiens
attttgccaaggaag

SEQ ID NO: 440298 - DNA, 15 bp, Homo sapiens
cattttgccaaggaa

SEQ ID NO: 440299 - DNA, 15 bp, Homo sapiens
acattttgccaagga

SEQ ID NO: 440300 - DNA, 15 bp, Homo sapiens
gacattttgccaagg

SEQ ID NO: 440301 - DNA, 15 bp, Homo sapiens
agacattttgccaag

SEQ ID NO: 440302 - DNA, 15 bp, Homo sapiens
cagacattttgccaa

SEQ ID NO: 440303 - DNA, 15 bp, Homo sapiens
tcagacattttgcca

SEQ ID NO: 440304 - DNA, 15 bp, Homo sapiens
atcagacattttgcc

SEQ ID NO: 440305 - DNA, 15 bp, Homo sapiens
catcagacattttgc

SEQ ID NO: 440306 - DNA, 15 bp, Homo sapiens
tcatcagacattttg

SEQ ID NO: 440307 - DNA, 15 bp, Homo sapiens
ttcatcagacatttt

SEQ ID NO: 440308 - DNA, 15 bp, Homo sapiens
cttcatcagacattt

SEQ ID NO: 440309 - DNA, 15 bp, Homo sapiens
tcttcatcagacatt

SEQ ID NO: 440310 - DNA, 15 bp, Homo sapiens
gtcttcatcagacat

SEQ ID NO: 440311 - DNA, 15 bp, Homo sapiens
agtcttcatcagaca

SEQ ID NO: 440312 - DNA, 15 bp, Homo sapiens
aagtcttcatcagac

SEQ ID NO: 440313 - DNA, 15 bp, Homo sapiens
taagtcttcatcaga

SEQ ID NO: 440314 - DNA, 15 bp, Homo sapiens
ctaagtcttcatcag

SEQ ID NO: 440315 - DNA, 15 bp, Homo sapiens
actaagtcttcatca

SEQ ID NO: 440316 - DNA, 15 bp, Homo sapiens
cactaagtcttcatc

SEQ ID NO: 440317 - DNA, 15 bp, Homo sapiens
ccactaagtcttcat

SEQ ID NO: 440318 - DNA, 15 bp, Homo sapiens
accactaagtcttca

SEQ ID NO: 440319 - DNA, 15 bp, Homo sapiens
caccactaagtcttc

SEQ ID NO: 440320 - DNA, 15 bp, Homo sapiens
tcaccactaagtctt

SEQ ID NO: 440321 - DNA, 15 bp, Homo sapiens
ttcaccactaagtct

SEQ ID NO: 440322 - DNA, 15 bp, Homo sapiens
tttcaccactaagtc

SEQ ID NO: 440323 - DNA, 15 bp, Homo sapiens
ttttcaccactaagt

SEQ ID NO: 440324 - DNA, 15 bp, Homo sapiens
tttttcaccactaag

SEQ ID NO: 440325 - DNA, 15 bp, Homo sapiens
atttttcaccactaa

SEQ ID NO: 440326 - DNA, 15 bp, Homo sapiens
catttttcaccacta

SEQ ID NO: 440327 - DNA, 15 bp, Homo sapiens
tcatttttcaccact

SEQ ID NO: 440328 - DNA, 15 bp, Homo sapiens
gtcatttttcaccac

SEQ ID NO: 440329 - DNA, 15 bp, Homo sapiens
tgtcatttttcacca

SEQ ID NO: 440330 - DNA, 15 bp, Homo sapiens
ttgtcatttttcacc

SEQ ID NO: 440331 - DNA, 15 bp, Homo sapiens
tttgtcatttttcac

SEQ ID NO: 440332 - DNA, 15 bp, Homo sapiens
ctttgtcatttttca

SEQ ID NO: 440333 - DNA, 15 bp, Homo sapiens
cctttgtcatttttc

SEQ ID NO: 440334 - DNA, 15 bp, Homo sapiens
tcctttgtcattttt

SEQ ID NO: 440335 - DNA, 15 bp, Homo sapiens
ttcctttgtcatttt

SEQ ID NO: 440336 - DNA, 15 bp, Homo sapiens
cttcctttgtcattt

SEQ ID NO: 440337 - DNA, 15 bp, Homo sapiens
ccttcctttgtcatt

SEQ ID NO: 440338 - DNA, 15 bp, Homo sapiens
gccttcctttgtcat

SEQ ID NO: 440339 - DNA, 15 bp, Homo sapiens
agccttcctttgtca

SEQ ID NO: 440340 - DNA, 15 bp, Homo sapiens
cagccttcctttgtc

SEQ ID NO: 440341 - DNA, 15 bp, Homo sapiens
acagccttcctttgt

SEQ ID NO: 440342 - DNA, 15 bp, Homo sapiens
aacagccttcctttg

SEQ ID NO: 440343 - DNA, 15 bp, Homo sapiens
aaacagccttccttt

SEQ ID NO: 440344 - DNA, 15 bp, Homo sapiens
caaacagccttcctt

SEQ ID NO: 440345 - DNA, 15 bp, Homo sapiens
tcaaacagccttcct

SEQ ID NO: 440346 - DNA, 15 bp, Homo sapiens
gtcaaacagccttcc

SEQ ID NO: 440347 - DNA, 15 bp, Homo sapiens
agtcaaacagccttc

SEQ ID NO: 440348 - DNA, 15 bp, Homo sapiens
aagtcaaacagcctt

SEQ ID NO: 440349 - DNA, 15 bp, Homo sapiens
caagtcaaacagcct

SEQ ID NO: 440350 - DNA, 15 bp, Homo sapiens
acaagtcaaacagcc

SEQ ID NO: 440351 - DNA, 15 bp, Homo sapiens
cacaagtcaaacagc

SEQ ID NO: 440352 - DNA, 15 bp, Homo sapiens
acacaagtcaaacag

SEQ ID NO: 440353 - DNA, 15 bp, Homo sapiens
aacacaagtcaaaca

SEQ ID NO: 440354 - DNA, 15 bp, Homo sapiens
caacacaagtcaaac

SEQ ID NO: 440355 - DNA, 15 bp, Homo sapiens
acaacacaagtcaaa

SEQ ID NO: 440356 - DNA, 15 bp, Homo sapiens
tacaacacaagtcaa

SEQ ID NO: 440357 - DNA, 15 bp, Homo sapiens
ctacaacacaagtca

SEQ ID NO: 440358 - DNA, 15 bp, Homo sapiens
gctacaacacaagtc

SEQ ID NO: 440359 - DNA, 15 bp, Homo sapiens
tgctacaacacaagt

SEQ ID NO: 440360 - DNA, 15 bp, Homo sapiens
gtgctacaacacaag

SEQ ID NO: 440361 - DNA, 15 bp, Homo sapiens
agtgctacaacacaa

SEQ ID NO: 440362 - DNA, 15 bp, Homo sapiens
tagtgctacaacaca

SEQ ID NO: 440363 - DNA, 15 bp, Homo sapiens
atagtgctacaacac

SEQ ID NO: 440364 - DNA, 15 bp, Homo sapiens
tatagtgctacaaca

SEQ ID NO: 440365 - DNA, 15 bp, Homo sapiens
ctatagtgctacaac

SEQ ID NO: 440366 - DNA, 15 bp, Homo sapiens
gctatagtgctacaa

SEQ ID NO: 440367 - DNA, 15 bp, Homo sapiens
tgctatagtgctaca

SEQ ID NO: 440368 - DNA, 15 bp, Homo sapiens
ttgctatagtgctac

SEQ ID NO: 440369 - DNA, 15 bp, Homo sapiens
tttgctatagtgcta

SEQ ID NO: 440370 - DNA, 15 bp, Homo sapiens
ttttgctatagtgct

SEQ ID NO: 440371 - DNA, 15 bp, Homo sapiens
cttttgctatagtgc

SEQ ID NO: 440372 - DNA, 15 bp, Homo sapiens
ccttttgctatagtg

SEQ ID NO: 440373 - DNA, 15 bp, Homo sapiens
cccttttgctatagt

SEQ ID NO: 440374 - DNA, 15 bp, Homo sapiens
acccttttgctatag

SEQ ID NO: 440375 - DNA, 15 bp, Homo sapiens
cacccttttgctata

SEQ ID NO: 440376 - DNA, 15 bp, Homo sapiens
ccacccttttgctat

SEQ ID NO: 440377 - DNA, 15 bp, Homo sapiens
cccacccttttgcta

SEQ ID NO: 440378 - DNA, 15 bp, Homo sapiens
ccccacccttttgct

SEQ ID NO: 440379 - DNA, 15 bp, Homo sapiens
cccccacccttttgc

SEQ ID NO: 440380 - DNA, 15 bp, Homo sapiens
ccccccacccttttg

SEQ ID NO: 440381 - DNA, 15 bp, Homo sapiens
cccccccaccctttt

SEQ ID NO: 440382 - DNA, 15 bp, Homo sapiens
acccccccacccttt

SEQ ID NO: 440383 - DNA, 15 bp, Homo sapiens
tacccccccaccctt

SEQ ID NO: 440384 - DNA, 15 bp, Homo sapiens
atacccccccaccct

SEQ ID NO: 440385 - DNA, 15 bp, Homo sapiens
catacccccccaccc

SEQ ID NO: 440386 - DNA, 15 bp, Homo sapiens
tcatacccccccacc

SEQ ID NO: 440387 - DNA, 15 bp, Homo sapiens
ctcatacccccccac

SEQ ID NO: 440388 - DNA, 15 bp, Homo sapiens
actcataccccccca

SEQ ID NO: 440389 - DNA, 15 bp, Homo sapiens
cactcataccccccc

SEQ ID NO: 440390 - DNA, 15 bp, Homo sapiens
tcactcatacccccc

SEQ ID NO: 440391 - DNA, 15 bp, Homo sapiens
ctcactcataccccc

SEQ ID NO: 440392 - DNA, 15 bp, Homo sapiens
tctcactcatacccc

SEQ ID NO: 440393 - DNA, 15 bp, Homo sapiens
ctctcactcataccc

SEQ ID NO: 440394 - DNA, 15 bp, Homo sapiens
tctctcactcatacc

SEQ ID NO: 440395 - DNA, 15 bp, Homo sapiens
ctctctcactcatac

SEQ ID NO: 440396 - DNA, 15 bp, Homo sapiens
tctctctcactcata

SEQ ID NO: 440397 - DNA, 15 bp, Homo sapiens
ctctctctcactcat

SEQ ID NO: 440398 - DNA, 15 bp, Homo sapiens
tctctctctcactca

SEQ ID NO: 440399 - DNA, 15 bp, Homo sapiens
ctctctctctcactc

SEQ ID NO: 440400 - DNA, 15 bp, Homo sapiens
tctctctctctcact

SEQ ID NO: 440401 - DNA, 15 bp, Homo sapiens
ctctctctctctcac

SEQ ID NO: 440402 - DNA, 15 bp, Homo sapiens
atctctctctctctc

SEQ ID NO: 440403 - DNA, 15 bp, Homo sapiens
catctctctctctct

SEQ ID NO: 440404 - DNA, 15 bp, Homo sapiens
ccatctctctctctc

SEQ ID NO: 440405 - DNA, 15 bp, Homo sapiens
accatctctctctct

SEQ ID NO: 440406 - DNA, 15 bp, Homo sapiens
aaccatctctctctc

SEQ ID NO: 440407 - DNA, 15 bp, Homo sapiens
aaaccatctctctct

SEQ ID NO: 440408 - DNA, 15 bp, Homo sapiens
taaaccatctctctc

SEQ ID NO: 440409 - DNA, 15 bp, Homo sapiens
ataaaccatctctct

SEQ ID NO: 440410 - DNA, 15 bp, Homo sapiens
cataaaccatctctc

SEQ ID NO: 440411 - DNA, 15 bp, Homo sapiens
ccataaaccatctct

SEQ ID NO: 440412 - DNA, 15 bp, Homo sapiens
tccataaaccatctc

SEQ ID NO: 440413 - DNA, 15 bp, Homo sapiens
ctccataaaccatct

SEQ ID NO: 440414 - DNA, 15 bp, Homo sapiens
actccataaaccatc

SEQ ID NO: 440415 - DNA, 15 bp, Homo sapiens
aactccataaaccat

SEQ ID NO: 440416 - DNA, 15 bp, Homo sapiens
taactccataaacca

SEQ ID NO: 440417 - DNA, 15 bp, Homo sapiens
ttaactccataaacc

SEQ ID NO: 440418 - DNA, 15 bp, Homo sapiens
gttaactccataaac

SEQ ID NO: 440419 - DNA, 15 bp, Homo sapiens
agttaactccataaa

SEQ ID NO: 440420 - DNA, 15 bp, Homo sapiens
tagttaactccataa

SEQ ID NO: 440421 - DNA, 15 bp, Homo sapiens
gtagttaactccata

SEQ ID NO: 440422 - DNA, 15 bp, Homo sapiens
agtagttaactccat

SEQ ID NO: 440423 - DNA, 15 bp, Homo sapiens
aagtagttaactcca

SEQ ID NO: 440424 - DNA, 15 bp, Homo sapiens
aaagtagttaactcc

SEQ ID NO: 440425 - DNA, 15 bp, Homo sapiens
taaagtagttaactc

SEQ ID NO: 440426 - DNA, 15 bp, Homo sapiens
ataaagtagttaact

SEQ ID NO: 440427 - DNA, 15 bp, Homo sapiens
aataaagtagttaac

SEQ ID NO: 440428 - DNA, 15 bp, Homo sapiens
aaataaagtagttaa

SEQ ID NO: 440429 - DNA, 15 bp, Homo sapiens
aaaataaagtagtta

SEQ ID NO: 440430 - DNA, 15 bp, Homo sapiens
caaaataaagtagtt

SEQ ID NO: 440431 - DNA, 15 bp, Homo sapiens
acaaaataaagtagt

SEQ ID NO: 440432 - DNA, 15 bp, Homo sapiens
aacaaaataaagtag

SEQ ID NO: 440433 - DNA, 15 bp, Homo sapiens
caacaaaataaagta

SEQ ID NO: 440434 - DNA, 15 bp, Homo sapiens
tcaacaaaataaagt

SEQ ID NO: 440435 - DNA, 15 bp, Homo sapiens
atcaacaaaataaag

SEQ ID NO: 440436 - DNA, 15 bp, Homo sapiens
tatcaacaaaataaa

SEQ ID NO: 440437 - DNA, 15 bp, Homo sapiens
atatcaacaaaataa

SEQ ID NO: 440438 - DNA, 15 bp, Homo sapiens
aatatcaacaaaata

SEQ ID NO: 440439 - DNA, 15 bp, Homo sapiens
gaatatcaacaaaat

SEQ ID NO: 440440 - DNA, 15 bp, Homo sapiens
tgaatatcaacaaaa

SEQ ID NO: 440441 - DNA, 15 bp, Homo sapiens
ctgaatatcaacaaa

SEQ ID NO: 440442 - DNA, 15 bp, Homo sapiens
tctgaatatcaacaa

SEQ ID NO: 440443 - DNA, 15 bp, Homo sapiens
ctctgaatatcaaca

SEQ ID NO: 440444 - DNA, 15 bp, Homo sapiens
actctgaatatcaac

SEQ ID NO: 440445 - DNA, 15 bp, Homo sapiens
cactctgaatatcaa

SEQ ID NO: 440446 - DNA, 15 bp, Homo sapiens
tcactctgaatatca

SEQ ID NO: 440447 - DNA, 15 bp, Homo sapiens
gtcactctgaatatc

SEQ ID NO: 440448 - DNA, 15 bp, Homo sapiens
tgtcactctgaatat

SEQ ID NO: 440449 - DNA, 15 bp, Homo sapiens
ctgtcactctgaata

SEQ ID NO: 440450 - DNA, 15 bp, Homo sapiens
tctgtcactctgaat

SEQ ID NO: 440451 - DNA, 15 bp, Homo sapiens
ctctgtcactctgaa

SEQ ID NO: 440452 - DNA, 15 bp, Homo sapiens
tctctgtcactctga

SEQ ID NO: 440453 - DNA, 15 bp, Homo sapiens
atctctgtcactctg

SEQ ID NO: 440454 - DNA, 15 bp, Homo sapiens
tatctctgtcactct

SEQ ID NO: 440455 - DNA, 15 bp, Homo sapiens
ttatctctgtcactc

SEQ ID NO: 440456 - DNA, 15 bp, Homo sapiens
cttatctctgtcact

SEQ ID NO: 440457 - DNA, 15 bp, Homo sapiens
acttatctctgtcac

SEQ ID NO: 440458 - DNA, 15 bp, Homo sapiens
cacttatctctgtca

SEQ ID NO: 440459 - DNA, 15 bp, Homo sapiens
tcacttatctctgtc

SEQ ID NO: 440460 - DNA, 15 bp, Homo sapiens
atcacttatctctgt

SEQ ID NO: 440461 - DNA, 15 bp, Homo sapiens
gatcacttatctctg

SEQ ID NO: 440462 - DNA, 15 bp, Homo sapiens
agatcacttatctct

SEQ ID NO: 440463 - DNA, 15 bp, Homo sapiens
tagatcacttatctc

SEQ ID NO: 440464 - DNA, 15 bp, Homo sapiens
ttagatcacttatct

SEQ ID NO: 440465 - DNA, 15 bp, Homo sapiens
attagatcacttatc

SEQ ID NO: 440466 - DNA, 15 bp, Homo sapiens
tattagatcacttat

SEQ ID NO: 440467 - DNA, 15 bp, Homo sapiens
atattagatcactta

SEQ ID NO: 440468 - DNA, 15 bp, Homo sapiens
aatattagatcactt

SEQ ID NO: 440469 - DNA, 15 bp, Homo sapiens
gaatattagatcact

SEQ ID NO: 440470 - DNA, 15 bp, Homo sapiens
ggaatattagatcac

SEQ ID NO: 440471 - DNA, 15 bp, Homo sapiens
aggaatattagatca

SEQ ID NO: 440472 - DNA, 15 bp, Homo sapiens
caggaatattagatc

SEQ ID NO: 440473 - DNA, 15 bp, Homo sapiens
ccaggaatattagat

SEQ ID NO: 440474 - DNA, 15 bp, Homo sapiens
cccaggaatattaga

SEQ ID NO: 440475 - DNA, 15 bp, Homo sapiens
tcccaggaatattag

SEQ ID NO: 440476 - DNA, 15 bp, Homo sapiens
atcccaggaatatta

SEQ ID NO: 440477 - DNA, 15 bp, Homo sapiens
aatcccaggaatatt

SEQ ID NO: 440478 - DNA, 15 bp, Homo sapiens
aaatcccaggaatat

SEQ ID NO: 440479 - DNA, 15 bp, Homo sapiens
aaaatcccaggaata

SEQ ID NO: 440480 - DNA, 15 bp, Homo sapiens
taaaatcccaggaat

SEQ ID NO: 440481 - DNA, 15 bp, Homo sapiens
gtaaaatcccaggaa

SEQ ID NO: 440482 - DNA, 15 bp, Homo sapiens
agtaaaatcccagga

SEQ ID NO: 440483 - DNA, 15 bp, Homo sapiens
gagtaaaatcccagg

SEQ ID NO: 440484 - DNA, 15 bp, Homo sapiens
tgagtaaaatcccag

SEQ ID NO: 440485 - DNA, 15 bp, Homo sapiens
ttgagtaaaatccca

SEQ ID NO: 440486 - DNA, 15 bp, Homo sapiens
cttgagtaaaatccc

SEQ ID NO: 440487 - DNA, 15 bp, Homo sapiens
acttgagtaaaatcc

SEQ ID NO: 440488 - DNA, 15 bp, Homo sapiens
gacttgagtaaaatc

SEQ ID NO: 440489 - DNA, 15 bp, Homo sapiens
agacttgagtaaaat

SEQ ID NO: 440490 - DNA, 15 bp, Homo sapiens
tagacttgagtaaaa

SEQ ID NO: 440491 - DNA, 15 bp, Homo sapiens
ctagacttgagtaaa

SEQ ID NO: 440492 - DNA, 15 bp, Homo sapiens
cctagacttgagtaa

SEQ ID NO: 440493 - DNA, 15 bp, Homo sapiens
acctagacttgagta

SEQ ID NO: 440494 - DNA, 15 bp, Homo sapiens
gacctagacttgagt

SEQ ID NO: 440495 - DNA, 15 bp, Homo sapiens
tgacctagacttgag

SEQ ID NO: 440496 - DNA, 15 bp, Homo sapiens
atgacctagacttga

SEQ ID NO: 440497 - DNA, 15 bp, Homo sapiens
aatgacctagacttg

SEQ ID NO: 440498 - DNA, 15 bp, Homo sapiens
aaatgacctagactt

SEQ ID NO: 440499 - DNA, 15 bp, Homo sapiens
aaaatgacctagact

SEQ ID NO: 440500 - DNA, 15 bp, Homo sapiens
aaaaatgacctagac

SEQ ID NO: 440501 - DNA, 15 bp, Homo sapiens
aaaaaatgacctaga

SEQ ID NO: 440502 - DNA, 15 bp, Homo sapiens
aaaaaaatgacctag

SEQ ID NO: 440503 - DNA, 15 bp, Homo sapiens
gaaaaaaatgaccta

SEQ ID NO: 440504 - DNA, 15 bp, Homo sapiens
tgaaaaaaatgacct

SEQ ID NO: 440505 - DNA, 15 bp, Homo sapiens
gtgaaaaaaatgacc

SEQ ID NO: 440506 - DNA, 15 bp, Homo sapiens
agtgaaaaaaatgac

SEQ ID NO: 440507 - DNA, 15 bp, Homo sapiens
aagtgaaaaaaatga

SEQ ID NO: 440508 - DNA, 15 bp, Homo sapiens
taagtgaaaaaaatg

SEQ ID NO: 440509 - DNA, 15 bp, Homo sapiens
ctaagtgaaaaaaat

SEQ ID NO: 440510 - DNA, 15 bp, Homo sapiens
gctaagtgaaaaaaa

SEQ ID NO: 440511 - DNA, 15 bp, Homo sapiens
tgctaagtgaaaaaa

SEQ ID NO: 440512 - DNA, 15 bp, Homo sapiens
ctgctaagtgaaaaa

SEQ ID NO: 440513 - DNA, 15 bp, Homo sapiens
cctgctaagtgaaaa

SEQ ID NO: 440514 - DNA, 15 bp, Homo sapiens
tcctgctaagtgaaa

SEQ ID NO: 440515 - DNA, 15 bp, Homo sapiens
ttcctgctaagtgaa

SEQ ID NO: 440516 - DNA, 15 bp, Homo sapiens
tttcctgctaagtga

SEQ ID NO: 440517 - DNA, 15 bp, Homo sapiens
atttcctgctaagtg

SEQ ID NO: 440518 - DNA, 15 bp, Homo sapiens
aatttcctgctaagt

SEQ ID NO: 440519 - DNA, 15 bp, Homo sapiens
caatttcctgctaag

SEQ ID NO: 440520 - DNA, 15 bp, Homo sapiens
tcaatttcctgctaa

SEQ ID NO: 440521 - DNA, 15 bp, Homo sapiens
ttcaatttcctgcta

SEQ ID NO: 440522 - DNA, 15 bp, Homo sapiens
cttcaatttcctgct

SEQ ID NO: 440523 - DNA, 15 bp, Homo sapiens
tcttcaatttcctgc

SEQ ID NO: 440524 - DNA, 15 bp, Homo sapiens
ctcttcaatttcctg

SEQ ID NO: 440525 - DNA, 15 bp, Homo sapiens
actcttcaatttcct

SEQ ID NO: 440526 - DNA, 15 bp, Homo sapiens
cactcttcaatttcc

SEQ ID NO: 440527 - DNA, 15 bp, Homo sapiens
ccactcttcaatttc

SEQ ID NO: 440528 - DNA, 15 bp, Homo sapiens
accactcttcaattt

SEQ ID NO: 440529 - DNA, 15 bp, Homo sapiens
aaccactcttcaatt

SEQ ID NO: 440530 - DNA, 15 bp, Homo sapiens
gaaccactcttcaat

SEQ ID NO: 440531 - DNA, 15 bp, Homo sapiens
tgaaccactcttcaa

SEQ ID NO: 440532 - DNA, 15 bp, Homo sapiens
gtgaaccactcttca

SEQ ID NO: 440533 - DNA, 15 bp, Homo sapiens
agtgaaccactcttc

SEQ ID NO: 440534 - DNA, 15 bp, Homo sapiens
tagtgaaccactctt

SEQ ID NO: 440535 - DNA, 15 bp, Homo sapiens
atagtgaaccactct

SEQ ID NO: 440536 - DNA, 15 bp, Homo sapiens
catagtgaaccactc

SEQ ID NO: 440537 - DNA, 15 bp, Homo sapiens
gcatagtgaaccact

SEQ ID NO: 440538 - DNA, 15 bp, Homo sapiens
ggcatagtgaaccac

SEQ ID NO: 440539 - DNA, 15 bp, Homo sapiens
tggcatagtgaacca

SEQ ID NO: 440540 - DNA, 15 bp, Homo sapiens
gtggcatagtgaacc

SEQ ID NO: 440541 - DNA, 15 bp, Homo sapiens
tgtggcatagtgaac

SEQ ID NO: 440542 - DNA, 15 bp, Homo sapiens
atgtggcatagtgaa

SEQ ID NO: 440543 - DNA, 15 bp, Homo sapiens
aatgtggcatagtga

SEQ ID NO: 440544 - DNA, 15 bp, Homo sapiens
aaatgtggcatagtg

SEQ ID NO: 440545 - DNA, 15 bp, Homo sapiens
caaatgtggcatagt

SEQ ID NO: 440546 - DNA, 15 bp, Homo sapiens
gcaaatgtggcatag

SEQ ID NO: 440547 - DNA, 15 bp, Homo sapiens
tgcaaatgtggcata

SEQ ID NO: 440548 - DNA, 15 bp, Homo sapiens
atgcaaatgtggcat

SEQ ID NO: 440549 - DNA, 15 bp, Homo sapiens
tatgcaaatgtggca

SEQ ID NO: 440550 - DNA, 15 bp, Homo sapiens
ttatgcaaatgtggc

SEQ ID NO: 440551 - DNA, 15 bp, Homo sapiens
cttatgcaaatgtgg

SEQ ID NO: 440552 - DNA, 15 bp, Homo sapiens
ccttatgcaaatgtg

SEQ ID NO: 440553 - DNA, 15 bp, Homo sapiens
tccttatgcaaatgt

SEQ ID NO: 440554 - DNA, 15 bp, Homo sapiens
atccttatgcaaatg

SEQ ID NO: 440555 - DNA, 15 bp, Homo sapiens
catccttatgcaaat

SEQ ID NO: 440556 - DNA, 15 bp, Homo sapiens
acatccttatgcaaa

SEQ ID NO: 440557 - DNA, 15 bp, Homo sapiens
tacatccttatgcaa

SEQ ID NO: 440558 - DNA, 15 bp, Homo sapiens
atacatccttatgca

SEQ ID NO: 440559 - DNA, 15 bp, Homo sapiens
tatacatccttatgc

SEQ ID NO: 440560 - DNA, 15 bp, Homo sapiens
atatacatccttatg

SEQ ID NO: 440561 - DNA, 15 bp, Homo sapiens
tatatacatccttat

SEQ ID NO: 440562 - DNA, 15 bp, Homo sapiens
atatatacatcctta

SEQ ID NO: 440563 - DNA, 15 bp, Homo sapiens
aatatatacatcctt

SEQ ID NO: 440564 - DNA, 15 bp, Homo sapiens
gaatatatacatcct

SEQ ID NO: 440565 - DNA, 15 bp, Homo sapiens
ggaatatatacatcc

SEQ ID NO: 440566 - DNA, 15 bp, Homo sapiens
aggaatatatacatc

SEQ ID NO: 440567 - DNA, 15 bp, Homo sapiens
aaggaatatatacat

SEQ ID NO: 440568 - DNA, 15 bp, Homo sapiens
taaggaatatataca

SEQ ID NO: 440569 - DNA, 15 bp, Homo sapiens
ctaaggaatatatac

SEQ ID NO: 440570 - DNA, 15 bp, Homo sapiens
cctaaggaatatata

SEQ ID NO: 440571 - DNA, 15 bp, Homo sapiens
gcctaaggaatatat

SEQ ID NO: 440572 - DNA, 15 bp, Homo sapiens
ggcctaaggaatata

SEQ ID NO: 440573 - DNA, 15 bp, Homo sapiens
aggcctaaggaatat

SEQ ID NO: 440574 - DNA, 15 bp, Homo sapiens
taggcctaaggaata

SEQ ID NO: 440575 - DNA, 15 bp, Homo sapiens
ttaggcctaaggaat

SEQ ID NO: 440576 - DNA, 15 bp, Homo sapiens
attaggcctaaggaa

SEQ ID NO: 440577 - DNA, 15 bp, Homo sapiens
cattaggcctaagga

SEQ ID NO: 440578 - DNA, 15 bp, Homo sapiens
ccattaggcctaagg

SEQ ID NO: 440579 - DNA, 15 bp, Homo sapiens
cccattaggcctaag

SEQ ID NO: 440580 - DNA, 15 bp, Homo sapiens
acccattaggcctaa

SEQ ID NO: 440581 - DNA, 15 bp, Homo sapiens
tacccattaggccta

SEQ ID NO: 440582 - DNA, 15 bp, Homo sapiens
ttacccattaggcct

SEQ ID NO: 440583 - DNA, 15 bp, Homo sapiens
attacccattaggcc

SEQ ID NO: 440584 - DNA, 15 bp, Homo sapiens
cattacccattaggc

SEQ ID NO: 440585 - DNA, 15 bp, Homo sapiens
tcattacccattagg

SEQ ID NO: 440586 - DNA, 15 bp, Homo sapiens
gtcattacccattag

SEQ ID NO: 440587 - DNA, 15 bp, Homo sapiens
ggtcattacccatta

SEQ ID NO: 440588 - DNA, 15 bp, Homo sapiens
tggtcattacccatt

SEQ ID NO: 440589 - DNA, 15 bp, Homo sapiens
ttggtcattacccat

SEQ ID NO: 440590 - DNA, 15 bp, Homo sapiens
gttggtcattaccca

SEQ ID NO: 440591 - DNA, 15 bp, Homo sapiens
tgttggtcattaccc

SEQ ID NO: 440592 - DNA, 15 bp, Homo sapiens
atgttggtcattacc

SEQ ID NO: 440593 - DNA, 15 bp, Homo sapiens
tatgttggtcattac

SEQ ID NO: 440594 - DNA, 15 bp, Homo sapiens
ctatgttggtcatta

SEQ ID NO: 440595 - DNA, 15 bp, Homo sapiens
actatgttggtcatt

SEQ ID NO: 440596 - DNA, 15 bp, Homo sapiens
tactatgttggtcat

SEQ ID NO: 440597 - DNA, 15 bp, Homo sapiens
atactatgttggtca

SEQ ID NO: 440598 - DNA, 15 bp, Homo sapiens
aatactatgttggtc

SEQ ID NO: 440599 - DNA, 15 bp, Homo sapiens
aaatactatgttggt

SEQ ID NO: 440600 - DNA, 15 bp, Homo sapiens
caaatactatgttgg

SEQ ID NO: 440601 - DNA, 15 bp, Homo sapiens
gcaaatactatgttg

SEQ ID NO: 440602 - DNA, 15 bp, Homo sapiens
tgcaaatactatgtt

SEQ ID NO: 440603 - DNA, 15 bp, Homo sapiens
ctgcaaatactatgt

SEQ ID NO: 440604 - DNA, 15 bp, Homo sapiens
tctgcaaatactatg

SEQ ID NO: 440605 - DNA, 15 bp, Homo sapiens
atctgcaaatactat

SEQ ID NO: 440606 - DNA, 15 bp, Homo sapiens
aatctgcaaatacta

SEQ ID NO: 440607 - DNA, 15 bp, Homo sapiens
aaatctgcaaatact

SEQ ID NO: 440608 - DNA, 15 bp, Homo sapiens
taaatctgcaaatac

SEQ ID NO: 440609 - DNA, 15 bp, Homo sapiens
ataaatctgcaaata

SEQ ID NO: 440610 - DNA, 15 bp, Homo sapiens
cataaatctgcaaat

SEQ ID NO: 440611 - DNA, 15 bp, Homo sapiens
acataaatctgcaaa

SEQ ID NO: 440612 - DNA, 15 bp, Homo sapiens
tacataaatctgcaa

SEQ ID NO: 440613 - DNA, 15 bp, Homo sapiens
atacataaatctgca

SEQ ID NO: 440614 - DNA, 15 bp, Homo sapiens
aatacataaatctgc

SEQ ID NO: 440615 - DNA, 15 bp, Homo sapiens
caatacataaatctg

SEQ ID NO: 440616 - DNA, 15 bp, Homo sapiens
acaatacataaatct

SEQ ID NO: 440617 - DNA, 15 bp, Homo sapiens
gacaatacataaatc

SEQ ID NO: 440618 - DNA, 15 bp, Homo sapiens
ggacaatacataaat

SEQ ID NO: 440619 - DNA, 15 bp, Homo sapiens
tggacaatacataaa

SEQ ID NO: 440620 - DNA, 15 bp, Homo sapiens
atggacaatacataa

SEQ ID NO: 440621 - DNA, 15 bp, Homo sapiens
tatggacaatacata

SEQ ID NO: 440622 - DNA, 15 bp, Homo sapiens
atatggacaatacat

SEQ ID NO: 440623 - DNA, 15 bp, Homo sapiens
catatggacaataca

SEQ ID NO: 440624 - DNA, 15 bp, Homo sapiens
ccatatggacaatac

SEQ ID NO: 440625 - DNA, 15 bp, Homo sapiens
accatatggacaata

SEQ ID NO: 440626 - DNA, 15 bp, Homo sapiens
caccatatggacaat

SEQ ID NO: 440627 - DNA, 15 bp, Homo sapiens
gcaccatatggacaa

SEQ ID NO: 440628 - DNA, 15 bp, Homo sapiens
agcaccatatggaca

SEQ ID NO: 440629 - DNA, 15 bp, Homo sapiens
tagcaccatatggac

SEQ ID NO: 440630 - DNA, 15 bp, Homo sapiens
atagcaccatatgga

SEQ ID NO: 440631 - DNA, 15 bp, Homo sapiens
tatagcaccatatgg

SEQ ID NO: 440632 - DNA, 15 bp, Homo sapiens
ttatagcaccatatg

SEQ ID NO: 440633 - DNA, 15 bp, Homo sapiens
gttatagcaccatat

SEQ ID NO: 440634 - DNA, 15 bp, Homo sapiens
agttatagcaccata

SEQ ID NO: 440635 - DNA, 15 bp, Homo sapiens
tagttatagcaccat

SEQ ID NO: 440636 - DNA, 15 bp, Homo sapiens
atagttatagcacca

SEQ ID NO: 440637 - DNA, 15 bp, Homo sapiens
tatagttatagcacc

SEQ ID NO: 440638 - DNA, 15 bp, Homo sapiens
atatagttatagcac

SEQ ID NO: 440639 - DNA, 15 bp, Homo sapiens
gatatagttatagca

SEQ ID NO: 440640 - DNA, 15 bp, Homo sapiens
agatatagttatagc

SEQ ID NO: 440641 - DNA, 15 bp, Homo sapiens
gagatatagttatag

SEQ ID NO: 440642 - DNA, 15 bp, Homo sapiens
ggagatatagttata

SEQ ID NO: 440643 - DNA, 15 bp, Homo sapiens
aggagatatagttat

SEQ ID NO: 440644 - DNA, 15 bp, Homo sapiens
aaggagatatagtta

SEQ ID NO: 440645 - DNA, 15 bp, Homo sapiens
taaggagatatagtt

SEQ ID NO: 440646 - DNA, 15 bp, Homo sapiens
ataaggagatatagt

SEQ ID NO: 440647 - DNA, 15 bp, Homo sapiens
tataaggagatatag

SEQ ID NO: 440648 - DNA, 15 bp, Homo sapiens
atataaggagatata

SEQ ID NO: 440649 - DNA, 15 bp, Homo sapiens
tatataaggagatat

SEQ ID NO: 440650 - DNA, 15 bp, Homo sapiens
ggaacaacatttcac

SEQ ID NO: 440651 - DNA, 15 bp, Homo sapiens
tggaacaacatttca

SEQ ID NO: 440652 - DNA, 15 bp, Homo sapiens
atggaacaacatttc

SEQ ID NO: 440653 - DNA, 15 bp, Homo sapiens
catggaacaacattt

SEQ ID NO: 440654 - DNA, 15 bp, Homo sapiens
gcatggaacaacatt

SEQ ID NO: 440655 - DNA, 15 bp, Homo sapiens
agcatggaacaacat

SEQ ID NO: 440656 - DNA, 15 bp, Homo sapiens
aagcatggaacaaca

SEQ ID NO: 440657 - DNA, 15 bp, Homo sapiens
aaagcatggaacaac

SEQ ID NO: 440658 - DNA, 15 bp, Homo sapiens
aaaagcatggaacaa

SEQ ID NO: 440659 - DNA, 15 bp, Homo sapiens
gaaaagcatggaaca

SEQ ID NO: 440660 - DNA, 15 bp, Homo sapiens
agaaaagcatggaac

SEQ ID NO: 440661 - DNA, 15 bp, Homo sapiens
tagaaaagcatggaa

SEQ ID NO: 440662 - DNA, 15 bp, Homo sapiens
ttagaaaagcatgga

SEQ ID NO: 440663 - DNA, 15 bp, Homo sapiens
attagaaaagcatgg

SEQ ID NO: 440664 - DNA, 15 bp, Homo sapiens
aattagaaaagcatg

SEQ ID NO: 440665 - DNA, 15 bp, Homo sapiens
aaattagaaaagcat

SEQ ID NO: 440666 - DNA, 15 bp, Homo sapiens
taaattagaaaagca

SEQ ID NO: 440667 - DNA, 15 bp, Homo sapiens
ttaaattagaaaagc

SEQ ID NO: 440668 - DNA, 15 bp, Homo sapiens
tttaaattagaaaag

SEQ ID NO: 440669 - DNA, 15 bp, Homo sapiens
atttaaattagaaaa

SEQ ID NO: 440670 - DNA, 15 bp, Homo sapiens
catttaaattagaaa

SEQ ID NO: 440671 - DNA, 15 bp, Homo sapiens
acatttaaattagaa

SEQ ID NO: 440672 - DNA, 15 bp, Homo sapiens
aacatttaaattaga

SEQ ID NO: 440673 - DNA, 15 bp, Homo sapiens
caacatttaaattag

SEQ ID NO: 440674 - DNA, 15 bp, Homo sapiens
gcaacatttaaatta

SEQ ID NO: 440675 - DNA, 15 bp, Homo sapiens
tgcaacatttaaatt

SEQ ID NO: 440676 - DNA, 15 bp, Homo sapiens
gtgcaacatttaaat

SEQ ID NO: 440677 - DNA, 15 bp, Homo sapiens
tgtgcaacatttaaa

SEQ ID NO: 440678 - DNA, 15 bp, Homo sapiens
atgtgcaacatttaa

SEQ ID NO: 440679 - DNA, 15 bp, Homo sapiens
catgtgcaacattta

SEQ ID NO: 440680 - DNA, 15 bp, Homo sapiens
acatgtgcaacattt

SEQ ID NO: 440681 - DNA, 15 bp, Homo sapiens
aacatgtgcaacatt

SEQ ID NO: 440682 - DNA, 15 bp, Homo sapiens
caacatgtgcaacat

SEQ ID NO: 440683 - DNA, 15 bp, Homo sapiens
tcaacatgtgcaaca

SEQ ID NO: 440684 - DNA, 15 bp, Homo sapiens
ctcaacatgtgcaac

SEQ ID NO: 440685 - DNA, 15 bp, Homo sapiens
tctcaacatgtgcaa

SEQ ID NO: 440686 - DNA, 15 bp, Homo sapiens
ttctcaacatgtgca

SEQ ID NO: 440687 - DNA, 15 bp, Homo sapiens
gttctcaacatgtgc

SEQ ID NO: 440688 - DNA, 15 bp, Homo sapiens
agttctcaacatgtg

SEQ ID NO: 440689 - DNA, 15 bp, Homo sapiens
cagttctcaacatgt

SEQ ID NO: 440690 - DNA, 15 bp, Homo sapiens
tcagttctcaacatg

SEQ ID NO: 440691 - DNA, 15 bp, Homo sapiens
atcagttctcaacat

SEQ ID NO: 440692 - DNA, 15 bp, Homo sapiens
gatcagttctcaaca

SEQ ID NO: 440693 - DNA, 15 bp, Homo sapiens
agatcagttctcaac

SEQ ID NO: 440694 - DNA, 15 bp, Homo sapiens
aagatcagttctcaa

SEQ ID NO: 440695 - DNA, 15 bp, Homo sapiens
caagatcagttctca

SEQ ID NO: 440696 - DNA, 15 bp, Homo sapiens
gcaagatcagttctc

SEQ ID NO: 440697 - DNA, 15 bp, Homo sapiens
ggcaagatcagttct

SEQ ID NO: 440698 - DNA, 15 bp, Homo sapiens
tggcaagatcagttc

SEQ ID NO: 440699 - DNA, 15 bp, Homo sapiens
ctggcaagatcagtt

SEQ ID NO: 440700 - DNA, 15 bp, Homo sapiens
gctggcaagatcagt

SEQ ID NO: 440701 - DNA, 15 bp, Homo sapiens
ggctggcaagatcag

SEQ ID NO: 440702 - DNA, 15 bp, Homo sapiens
tggctggcaagatca

SEQ ID NO: 440703 - DNA, 15 bp, Homo sapiens
atggctggcaagatc

SEQ ID NO: 440704 - DNA, 15 bp, Homo sapiens
aatggctggcaagat

SEQ ID NO: 440705 - DNA, 15 bp, Homo sapiens
aaatggctggcaaga

SEQ ID NO: 440706 - DNA, 15 bp, Homo sapiens
aaaatggctggcaag

SEQ ID NO: 440707 - DNA, 15 bp, Homo sapiens
taaaatggctggcaa

SEQ ID NO: 440708 - DNA, 15 bp, Homo sapiens
ttaaaatggctggca

SEQ ID NO: 440709 - DNA, 15 bp, Homo sapiens
cttaaaatggctggc

SEQ ID NO: 440710 - DNA, 15 bp, Homo sapiens
gcttaaaatggctgg

SEQ ID NO: 440711 - DNA, 15 bp, Homo sapiens
ggcttaaaatggctg

SEQ ID NO: 440712 - DNA, 15 bp, Homo sapiens
aggcttaaaatggct

SEQ ID NO: 440713 - DNA, 15 bp, Homo sapiens
caggcttaaaatggc

SEQ ID NO: 440714 - DNA, 15 bp, Homo sapiens
ccaggcttaaaatgg

SEQ ID NO: 440715 - DNA, 15 bp, Homo sapiens
gccaggcttaaaatg

SEQ ID NO: 440716 - DNA, 15 bp, Homo sapiens
ggccaggcttaaaat

SEQ ID NO: 440717 - DNA, 15 bp, Homo sapiens
tggccaggcttaaaa

SEQ ID NO: 440718 - DNA, 15 bp, Homo sapiens
ttggccaggcttaaa

SEQ ID NO: 440719 - DNA, 15 bp, Homo sapiens
tttggccaggcttaa

SEQ ID NO: 440720 - DNA, 15 bp, Homo sapiens
ttttggccaggctta

SEQ ID NO: 440721 - DNA, 15 bp, Homo sapiens
tttttggccaggctt

SEQ ID NO: 440722 - DNA, 15 bp, Homo sapiens
gtttttggccaggct

SEQ ID NO: 440723 - DNA, 15 bp, Homo sapiens
tgtttttggccaggc

SEQ ID NO: 440724 - DNA, 15 bp, Homo sapiens
atgtttttggccagg

SEQ ID NO: 440725 - DNA, 15 bp, Homo sapiens
tatgtttttggccag

SEQ ID NO: 440726 - DNA, 15 bp, Homo sapiens
ttatgtttttggcca

SEQ ID NO: 440727 - DNA, 15 bp, Homo sapiens
gttatgtttttggcc

SEQ ID NO: 440728 - DNA, 15 bp, Homo sapiens
tgttatgtttttggc

SEQ ID NO: 440729 - DNA, 15 bp, Homo sapiens
gtgttatgtttttgg

SEQ ID NO: 440730 - DNA, 15 bp, Homo sapiens
tgtgttatgtttttg

SEQ ID NO: 440731 - DNA, 15 bp, Homo sapiens
atgtgttatgttttt

SEQ ID NO: 440732 - DNA, 15 bp, Homo sapiens
aatgtgttatgtttt

SEQ ID NO: 440733 - DNA, 15 bp, Homo sapiens
caatgtgttatgttt

SEQ ID NO: 440734 - DNA, 15 bp, Homo sapiens
acaatgtgttatgtt

SEQ ID NO: 440735 - DNA, 15 bp, Homo sapiens
aacaatgtgttatgt

SEQ ID NO: 440736 - DNA, 15 bp, Homo sapiens
caacaatgtgttatg

SEQ ID NO: 440737 - DNA, 15 bp, Homo sapiens
acaacaatgtgttat

SEQ ID NO: 440738 - DNA, 15 bp, Homo sapiens
aacaacaatgtgtta

SEQ ID NO: 440739 - DNA, 15 bp, Homo sapiens
taacaacaatgtgtt

SEQ ID NO: 440740 - DNA, 15 bp, Homo sapiens
ataacaacaatgtgt

SEQ ID NO: 440741 - DNA, 15 bp, Homo sapiens
aataacaacaatgtg

SEQ ID NO: 440742 - DNA, 15 bp, Homo sapiens
taataacaacaatgt

SEQ ID NO: 440743 - DNA, 15 bp, Homo sapiens
ctaataacaacaatg

SEQ ID NO: 440744 - DNA, 15 bp, Homo sapiens
gctaataacaacaat

SEQ ID NO: 440745 - DNA, 15 bp, Homo sapiens
aggctaataacaaca

SEQ ID NO: 440746 - DNA, 15 bp, Homo sapiens
aaggctaataacaac

SEQ ID NO: 440747 - DNA, 15 bp, Homo sapiens
gaaggctaataacaa

SEQ ID NO: 440748 - DNA, 15 bp, Homo sapiens
tgaaggctaataaca

SEQ ID NO: 440749 - DNA, 15 bp, Homo sapiens
atgaaggctaataac

SEQ ID NO: 440750 - DNA, 15 bp, Homo sapiens
gatgaaggctaataa

SEQ ID NO: 440751 - DNA, 15 bp, Homo sapiens
tgatgaaggctaata

SEQ ID NO: 440752 - DNA, 15 bp, Homo sapiens
atgatgaaggctaat

SEQ ID NO: 440753 - DNA, 15 bp, Homo sapiens
aatgatgaaggctaa

SEQ ID NO: 440754 - DNA, 15 bp, Homo sapiens
aaatgatgaaggcta

SEQ ID NO: 440755 - DNA, 15 bp, Homo sapiens
caaatgatgaaggct

SEQ ID NO: 440756 - DNA, 15 bp, Homo sapiens
ccaaatgatgaaggc

SEQ ID NO: 440757 - DNA, 15 bp, Homo sapiens
accaaatgatgaagg

SEQ ID NO: 440758 - DNA, 15 bp, Homo sapiens
aaccaaatgatgaag

SEQ ID NO: 440759 - DNA, 15 bp, Homo sapiens
taaccaaatgatgaa

SEQ ID NO: 440760 - DNA, 15 bp, Homo sapiens
ctaaccaaatgatga

SEQ ID NO: 440761 - DNA, 15 bp, Homo sapiens
cctaaccaaatgatg

SEQ ID NO: 440762 - DNA, 15 bp, Homo sapiens
ccctaaccaaatgat

SEQ ID NO: 440763 - DNA, 15 bp, Homo sapiens
gccctaaccaaatga

SEQ ID NO: 440764 - DNA, 15 bp, Homo sapiens
ggccctaaccaaatg

SEQ ID NO: 440765 - DNA, 15 bp, Homo sapiens
tggccctaaccaaat

SEQ ID NO: 440766 - DNA, 15 bp, Homo sapiens
ttggccctaaccaaa

SEQ ID NO: 440767 - DNA, 15 bp, Homo sapiens
gttggccctaaccaa

SEQ ID NO: 440768 - DNA, 15 bp, Homo sapiens
tgttggccctaacca

SEQ ID NO: 440769 - DNA, 15 bp, Homo sapiens
atgttggccctaacc

SEQ ID NO: 440770 - DNA, 15 bp, Homo sapiens
aatgttggccctaac

SEQ ID NO: 440771 - DNA, 15 bp, Homo sapiens
aaatgttggccctaa

SEQ ID NO: 440772 - DNA, 15 bp, Homo sapiens
aaaatgttggcccta

SEQ ID NO: 440773 - DNA, 15 bp, Homo sapiens
caaaatgttggccct

SEQ ID NO: 440774 - DNA, 15 bp, Homo sapiens
acaaaatgttggccc

SEQ ID NO: 440775 - DNA, 15 bp, Homo sapiens
aacaaaatgttggcc

SEQ ID NO: 440776 - DNA, 15 bp, Homo sapiens
aaacaaaatgttggc

SEQ ID NO: 440777 - DNA, 15 bp, Homo sapiens
caaacaaaatgttgg

SEQ ID NO: 440778 - DNA, 15 bp, Homo sapiens
ccaaacaaaatgttg

SEQ ID NO: 440779 - DNA, 15 bp, Homo sapiens
tccaaacaaaatgtt

SEQ ID NO: 440780 - DNA, 15 bp, Homo sapiens
ttccaaacaaaatgt

SEQ ID NO: 440781 - DNA, 15 bp, Homo sapiens
attccaaacaaaatg

SEQ ID NO: 440782 - DNA, 15 bp, Homo sapiens
aattccaaacaaaat

SEQ ID NO: 440783 - DNA, 15 bp, Homo sapiens
taattccaaacaaaa

SEQ ID NO: 440784 - DNA, 15 bp, Homo sapiens
ataattccaaacaaa

SEQ ID NO: 440785 - DNA, 15 bp, Homo sapiens
tataattccaaacaa

SEQ ID NO: 440786 - DNA, 15 bp, Homo sapiens
ttataattccaaaca

SEQ ID NO: 440787 - DNA, 15 bp, Homo sapiens
tttataattccaaac

SEQ ID NO: 440788 - DNA, 15 bp, Homo sapiens
ctttataattccaaa

SEQ ID NO: 440789 - DNA, 15 bp, Homo sapiens
cctttataattccaa

SEQ ID NO: 440790 - DNA, 15 bp, Homo sapiens
tcctttataattcca

SEQ ID NO: 440791 - DNA, 15 bp, Homo sapiens
ctcctttataattcc

SEQ ID NO: 440792 - DNA, 15 bp, Homo sapiens
actcctttataattc

SEQ ID NO: 440793 - DNA, 15 bp, Homo sapiens
cactcctttataatt

SEQ ID NO: 440794 - DNA, 15 bp, Homo sapiens
acactcctttataat

SEQ ID NO: 440795 - DNA, 15 bp, Homo sapiens
tacactcctttataa

SEQ ID NO: 440796 - DNA, 15 bp, Homo sapiens
ttacactcctttata

SEQ ID NO: 440797 - DNA, 15 bp, Homo sapiens
tttacactcctttat

SEQ ID NO: 440798 - DNA, 15 bp, Homo sapiens
atttacactccttta

SEQ ID NO: 440799 - DNA, 15 bp, Homo sapiens
gatttacactccttt

SEQ ID NO: 440800 - DNA, 15 bp, Homo sapiens
agatttacactcctt

SEQ ID NO: 440801 - DNA, 15 bp, Homo sapiens
gagatttacactcct

SEQ ID NO: 440802 - DNA, 15 bp, Homo sapiens
agagatttacactcc

SEQ ID NO: 440803 - DNA, 15 bp, Homo sapiens
aagagatttacactc

SEQ ID NO: 440804 - DNA, 15 bp, Homo sapiens
aaagagatttacact

SEQ ID NO: 440805 - DNA, 15 bp, Homo sapiens
aaaagagatttacac

SEQ ID NO: 440806 - DNA, 15 bp, Homo sapiens
taaaagagatttaca

SEQ ID NO: 440807 - DNA, 15 bp, Homo sapiens
ataaaagagatttac

SEQ ID NO: 440808 - DNA, 15 bp, Homo sapiens
tataaaagagattta

SEQ ID NO: 440809 - DNA, 15 bp, Homo sapiens
ctataaaagagattt

SEQ ID NO: 440810 - DNA, 15 bp, Homo sapiens
actataaaagagatt

SEQ ID NO: 440811 - DNA, 15 bp, Homo sapiens
gactataaaagagat

SEQ ID NO: 440812 - DNA, 15 bp, Homo sapiens
tgactataaaagaga

SEQ ID NO: 440813 - DNA, 15 bp, Homo sapiens
atgactataaaagag

SEQ ID NO: 440814 - DNA, 15 bp, Homo sapiens
tatgactataaaaga

SEQ ID NO: 440815 - DNA, 15 bp, Homo sapiens
ctatgactataaaag

SEQ ID NO: 440816 - DNA, 15 bp, Homo sapiens
gctatgactataaaa

SEQ ID NO: 440817 - DNA, 15 bp, Homo sapiens
ggctatgactataaa

SEQ ID NO: 440818 - DNA, 15 bp, Homo sapiens
cggctatgactataa

SEQ ID NO: 440819 - DNA, 15 bp, Homo sapiens
tcggctatgactata

SEQ ID NO: 440820 - DNA, 15 bp, Homo sapiens
atcggctatgactat

SEQ ID NO: 440821 - DNA, 15 bp, Homo sapiens
aatcggctatgacta

SEQ ID NO: 440822 - DNA, 15 bp, Homo sapiens
aaatcggctatgact

SEQ ID NO: 440823 - DNA, 15 bp, Homo sapiens
gaaatcggctatgac

SEQ ID NO: 440824 - DNA, 15 bp, Homo sapiens
agaaatcggctatga

SEQ ID NO: 440825 - DNA, 15 bp, Homo sapiens
cagaaatcggctatg

SEQ ID NO: 440826 - DNA, 15 bp, Homo sapiens
gcagaaatcggctat

SEQ ID NO: 440827 - DNA, 15 bp, Homo sapiens
ggcagaaatcggcta

SEQ ID NO: 440828 - DNA, 15 bp, Homo sapiens
tggcagaaatcggct

SEQ ID NO: 440829 - DNA, 15 bp, Homo sapiens
atggcagaaatcggc

SEQ ID NO: 440830 - DNA, 15 bp, Homo sapiens
tatggcagaaatcgg

SEQ ID NO: 440831 - DNA, 15 bp, Homo sapiens
ttatggcagaaatcg

SEQ ID NO: 440832 - DNA, 15 bp, Homo sapiens
cttatggcagaaatc

SEQ ID NO: 440833 - DNA, 15 bp, Homo sapiens
tcttatggcagaaat

SEQ ID NO: 440834 - DNA, 15 bp, Homo sapiens
atcttatggcagaaa

SEQ ID NO: 440835 - DNA, 15 bp, Homo sapiens
tatcttatggcagaa

SEQ ID NO: 440836 - DNA, 15 bp, Homo sapiens
ctatcttatggcaga

SEQ ID NO: 440837 - DNA, 15 bp, Homo sapiens
tctatcttatggcag

SEQ ID NO: 440838 - DNA, 15 bp, Homo sapiens
atctatcttatggca

SEQ ID NO: 440839 - DNA, 15 bp, Homo sapiens
tatctatcttatggc

SEQ ID NO: 440840 - DNA, 15 bp, Homo sapiens
ttatctatcttatgg

SEQ ID NO: 440841 - DNA, 15 bp, Homo sapiens
cttatctatcttatg

SEQ ID NO: 440842 - DNA, 15 bp, Homo sapiens
tcttatctatcttat

SEQ ID NO: 440843 - DNA, 15 bp, Homo sapiens
atcttatctatctta

SEQ ID NO: 440844 - DNA, 15 bp, Homo sapiens
catcttatctatctt

SEQ ID NO: 440845 - DNA, 15 bp, Homo sapiens
tcatcttatctatct

SEQ ID NO: 440846 - DNA, 15 bp, Homo sapiens
ctcatcttatctatc

SEQ ID NO: 440847 - DNA, 15 bp, Homo sapiens
tctcatcttatctat

SEQ ID NO: 440848 - DNA, 15 bp, Homo sapiens
ttctcatcttatcta

SEQ ID NO: 440849 - DNA, 15 bp, Homo sapiens
cttctcatcttatct

SEQ ID NO: 440850 - DNA, 15 bp, Homo sapiens
ccttctcatcttatc

SEQ ID NO: 440851 - DNA, 15 bp, Homo sapiens
gccttctcatcttat

SEQ ID NO: 440852 - DNA, 15 bp, Homo sapiens
tgccttctcatctta

SEQ ID NO: 440853 - DNA, 15 bp, Homo sapiens
ctgccttctcatctt

SEQ ID NO: 440854 - DNA, 15 bp, Homo sapiens
tctgccttctcatct

SEQ ID NO: 440855 - DNA, 15 bp, Homo sapiens
ctctgccttctcatc

SEQ ID NO: 440856 - DNA, 15 bp, Homo sapiens
actctgccttctcat

SEQ ID NO: 440857 - DNA, 15 bp, Homo sapiens
aactctgccttctca

SEQ ID NO: 440858 - DNA, 15 bp, Homo sapiens
caactctgccttctc

SEQ ID NO: 440859 - DNA, 15 bp, Homo sapiens
acaactctgccttct

SEQ ID NO: 440860 - DNA, 15 bp, Homo sapiens
aacaactctgccttc

SEQ ID NO: 440861 - DNA, 15 bp, Homo sapiens
aaacaactctgcctt

SEQ ID NO: 440862 - DNA, 15 bp, Homo sapiens
gaaacaactctgcct

SEQ ID NO: 440863 - DNA, 15 bp, Homo sapiens
ggaaacaactctgcc

SEQ ID NO: 440864 - DNA, 15 bp, Homo sapiens
aggaaacaactctgc

SEQ ID NO: 440865 - DNA, 15 bp, Homo sapiens
aaggaaacaactctg

SEQ ID NO: 440866 - DNA, 15 bp, Homo sapiens
caaggaaacaactct

SEQ ID NO: 440867 - DNA, 15 bp, Homo sapiens
tcaaggaaacaactc

SEQ ID NO: 440868 - DNA, 15 bp, Homo sapiens
atcaaggaaacaact

SEQ ID NO: 440869 - DNA, 15 bp, Homo sapiens
catcaaggaaacaac

SEQ ID NO: 440870 - DNA, 15 bp, Homo sapiens
acatcaaggaaacaa

SEQ ID NO: 440871 - DNA, 15 bp, Homo sapiens
tacatcaaggaaaca

SEQ ID NO: 440872 - DNA, 15 bp, Homo sapiens
atacatcaaggaaac

SEQ ID NO: 440873 - DNA, 15 bp, Homo sapiens
aatacatcaaggaaa

SEQ ID NO: 440874 - DNA, 15 bp, Homo sapiens
caatacatcaaggaa

SEQ ID NO: 440875 - DNA, 15 bp, Homo sapiens
gcaatacatcaagga

SEQ ID NO: 440876 - DNA, 15 bp, Homo sapiens
agcaatacatcaagg

SEQ ID NO: 440877 - DNA, 15 bp, Homo sapiens
aagcaatacatcaag

SEQ ID NO: 440878 - DNA, 15 bp, Homo sapiens
aaagcaatacatcaa

SEQ ID NO: 440879 - DNA, 15 bp, Homo sapiens
caaagcaatacatca

SEQ ID NO: 440880 - DNA, 15 bp, Homo sapiens
ccaaagcaatacatc

SEQ ID NO: 440881 - DNA, 15 bp, Homo sapiens
accaaagcaatacat

SEQ ID NO: 440882 - DNA, 15 bp, Homo sapiens
aaccaaagcaataca

SEQ ID NO: 440883 - DNA, 15 bp, Homo sapiens
taaccaaagcaatac

SEQ ID NO: 440884 - DNA, 15 bp, Homo sapiens
ctaaccaaagcaata

SEQ ID NO: 440885 - DNA, 15 bp, Homo sapiens
gctaaccaaagcaat

SEQ ID NO: 440886 - DNA, 15 bp, Homo sapiens
ggctaaccaaagcaa

SEQ ID NO: 440887 - DNA, 15 bp, Homo sapiens
aggctaaccaaagca

SEQ ID NO: 440888 - DNA, 15 bp, Homo sapiens
gaggctaaccaaagc

SEQ ID NO: 440889 - DNA, 15 bp, Homo sapiens
tgaggctaaccaaag

SEQ ID NO: 440890 - DNA, 15 bp, Homo sapiens
atgaggctaaccaaa

SEQ ID NO: 440891 - DNA, 15 bp, Homo sapiens
tatgaggctaaccaa

SEQ ID NO: 440892 - DNA, 15 bp, Homo sapiens
ttatgaggctaacca

SEQ ID NO: 440893 - DNA, 15 bp, Homo sapiens
cttatgaggctaacc

SEQ ID NO: 440894 - DNA, 15 bp, Homo sapiens
ccttatgaggctaac

SEQ ID NO: 440895 - DNA, 15 bp, Homo sapiens
gccttatgaggctaa

SEQ ID NO: 440896 - DNA, 15 bp, Homo sapiens
agccttatgaggcta

SEQ ID NO: 440897 - DNA, 15 bp, Homo sapiens
cagccttatgaggct

SEQ ID NO: 440898 - DNA, 15 bp, Homo sapiens
tcagccttatgaggc

SEQ ID NO: 440899 - DNA, 15 bp, Homo sapiens
atcagccttatgagg

SEQ ID NO: 440900 - DNA, 15 bp, Homo sapiens
aatcagccttatgag

SEQ ID NO: 440901 - DNA, 15 bp, Homo sapiens
taatcagccttatga

SEQ ID NO: 440902 - DNA, 15 bp, Homo sapiens
ctaatcagccttatg

SEQ ID NO: 440903 - DNA, 15 bp, Homo sapiens
cctaatcagccttat

SEQ ID NO: 440904 - DNA, 15 bp, Homo sapiens
gcctaatcagcctta

SEQ ID NO: 440905 - DNA, 15 bp, Homo sapiens
ggcctaatcagcctt

SEQ ID NO: 440906 - DNA, 15 bp, Homo sapiens
tggcctaatcagcct

SEQ ID NO: 440907 - DNA, 15 bp, Homo sapiens
ctggcctaatcagcc

SEQ ID NO: 440908 - DNA, 15 bp, Homo sapiens
cctggcctaatcagc

SEQ ID NO: 440909 - DNA, 15 bp, Homo sapiens
ccctggcctaatcag

SEQ ID NO: 440910 - DNA, 15 bp, Homo sapiens
tccctggcctaatca

SEQ ID NO: 440911 - DNA, 15 bp, Homo sapiens
atccctggcctaatc

SEQ ID NO: 440912 - DNA, 15 bp, Homo sapiens
catccctggcctaat

SEQ ID NO: 440913 - DNA, 15 bp, Homo sapiens
acatccctggcctaa

SEQ ID NO: 440914 - DNA, 15 bp, Homo sapiens
aacatccctggccta

SEQ ID NO: 440915 - DNA, 15 bp, Homo sapiens
gaacatccctggcct

SEQ ID NO: 440916 - DNA, 15 bp, Homo sapiens
tgaacatccctggcc

SEQ ID NO: 440917 - DNA, 15 bp, Homo sapiens
gtgaacatccctggc

SEQ ID NO: 440918 - DNA, 15 bp, Homo sapiens
agtgaacatccctgg

SEQ ID NO: 440919 - DNA, 15 bp, Homo sapiens
aagtgaacatccctg

SEQ ID NO: 440920 - DNA, 15 bp, Homo sapiens
aaagtgaacatccct

SEQ ID NO: 440921 - DNA, 15 bp, Homo sapiens
caaagtgaacatccc

SEQ ID NO: 440922 - DNA, 15 bp, Homo sapiens
tcaaagtgaacatcc

SEQ ID NO: 440923 - DNA, 15 bp, Homo sapiens
ctcaaagtgaacatc

SEQ ID NO: 440924 - DNA, 15 bp, Homo sapiens
tctcaaagtgaacat

SEQ ID NO: 440925 - DNA, 15 bp, Homo sapiens
ctctcaaagtgaaca

SEQ ID NO: 440926 - DNA, 15 bp, Homo sapiens
tctctcaaagtgaac

SEQ ID NO: 440927 - DNA, 15 bp, Homo sapiens
gtctctcaaagtgaa

SEQ ID NO: 440928 - DNA, 15 bp, Homo sapiens
agtctctcaaagtga

SEQ ID NO: 440929 - DNA, 15 bp, Homo sapiens
aagtctctcaaagtg

SEQ ID NO: 440930 - DNA, 15 bp, Homo sapiens
gaagtctctcaaagt

SEQ ID NO: 440931 - DNA, 15 bp, Homo sapiens
agaagtctctcaaag

SEQ ID NO: 440932 - DNA, 15 bp, Homo sapiens
aagaagtctctcaaa

SEQ ID NO: 440933 - DNA, 15 bp, Homo sapiens
caagaagtctctcaa

SEQ ID NO: 440934 - DNA, 15 bp, Homo sapiens
ccaagaagtctctca

SEQ ID NO: 440935 - DNA, 15 bp, Homo sapiens
cccaagaagtctctc

SEQ ID NO: 440936 - DNA, 15 bp, Homo sapiens
tcccaagaagtctct

SEQ ID NO: 440937 - DNA, 15 bp, Homo sapiens
ttcccaagaagtctc

SEQ ID NO: 440938 - DNA, 15 bp, Homo sapiens
cttcccaagaagtct

SEQ ID NO: 440939 - DNA, 15 bp, Homo sapiens
acttcccaagaagtc

SEQ ID NO: 440940 - DNA, 15 bp, Homo sapiens
tacttcccaagaagt

SEQ ID NO: 440941 - DNA, 15 bp, Homo sapiens
ttacttcccaagaag

SEQ ID NO: 440942 - DNA, 15 bp, Homo sapiens
cttacttcccaagaa

SEQ ID NO: 440943 - DNA, 15 bp, Homo sapiens
tcttacttcccaaga

SEQ ID NO: 440944 - DNA, 15 bp, Homo sapiens
atcttacttcccaag

SEQ ID NO: 440945 - DNA, 15 bp, Homo sapiens
aatcttacttcccaa

SEQ ID NO: 440946 - DNA, 15 bp, Homo sapiens
aaatcttacttccca

SEQ ID NO: 440947 - DNA, 15 bp, Homo sapiens
gaaatcttacttccc

SEQ ID NO: 440948 - DNA, 15 bp, Homo sapiens
tgaaatcttacttcc

SEQ ID NO: 440949 - DNA, 15 bp, Homo sapiens
ttgaaatcttacttc

SEQ ID NO: 440950 - DNA, 15 bp, Homo sapiens
attgaaatcttactt

SEQ ID NO: 440951 - DNA, 15 bp, Homo sapiens
cattgaaatcttact

SEQ ID NO: 440952 - DNA, 15 bp, Homo sapiens
acattgaaatcttac

SEQ ID NO: 440953 - DNA, 15 bp, Homo sapiens
tacattgaaatctta

SEQ ID NO: 440954 - DNA, 15 bp, Homo sapiens
ttacattgaaatctt

SEQ ID NO: 440955 - DNA, 15 bp, Homo sapiens
attacattgaaatct

SEQ ID NO: 440956 - DNA, 15 bp, Homo sapiens
aattacattgaaatc

SEQ ID NO: 440957 - DNA, 15 bp, Homo sapiens
gaattacattgaaat

SEQ ID NO: 440958 - DNA, 15 bp, Homo sapiens
tgaattacattgaaa

SEQ ID NO: 440959 - DNA, 15 bp, Homo sapiens
ttgaattacattgaa

SEQ ID NO: 440960 - DNA, 15 bp, Homo sapiens
gttgaattacattga

SEQ ID NO: 440961 - DNA, 15 bp, Homo sapiens
agttgaattacattg

SEQ ID NO: 440962 - DNA, 15 bp, Homo sapiens
aagttgaattacatt

SEQ ID NO: 440963 - DNA, 15 bp, Homo sapiens
taagttgaattacat

SEQ ID NO: 440964 - DNA, 15 bp, Homo sapiens
ttaagttgaattaca

SEQ ID NO: 440965 - DNA, 15 bp, Homo sapiens
tttaagttgaattac

SEQ ID NO: 440966 - DNA, 15 bp, Homo sapiens
ttttaagttgaatta

SEQ ID NO: 440967 - DNA, 15 bp, Homo sapiens
tttttaagttgaatt

SEQ ID NO: 440968 - DNA, 15 bp, Homo sapiens
ttttttaagttgaat

SEQ ID NO: 440969 - DNA, 15 bp, Homo sapiens
tttttttaagttgaa

SEQ ID NO: 440970 - DNA, 15 bp, Homo sapiens
atttttttaagttga

SEQ ID NO: 440971 - DNA, 15 bp, Homo sapiens
tatttttttaagttg

SEQ ID NO: 440972 - DNA, 15 bp, Homo sapiens
atatttttttaagtt

SEQ ID NO: 440973 - DNA, 15 bp, Homo sapiens
aatatttttttaagt

SEQ ID NO: 440974 - DNA, 15 bp, Homo sapiens
taatatttttttaag

SEQ ID NO: 440975 - DNA, 15 bp, Homo sapiens
gtaatatttttttaa

SEQ ID NO: 440976 - DNA, 15 bp, Homo sapiens
ggtaatattttttta

SEQ ID NO: 440977 - DNA, 15 bp, Homo sapiens
aggtaatattttttt

SEQ ID NO: 440978 - DNA, 15 bp, Homo sapiens
aaggtaatatttttt

SEQ ID NO: 440979 - DNA, 15 bp, Homo sapiens
caaggtaatattttt

SEQ ID NO: 440980 - DNA, 15 bp, Homo sapiens
tcaaggtaatatttt

SEQ ID NO: 440981 - DNA, 15 bp, Homo sapiens
atcaaggtaatattt

SEQ ID NO: 440982 - DNA, 15 bp, Homo sapiens
catcaaggtaatatt

SEQ ID NO: 440983 - DNA, 15 bp, Homo sapiens
acatcaaggtaatat

SEQ ID NO: 440984 - DNA, 15 bp, Homo sapiens
cacatcaaggtaata

SEQ ID NO: 440985 - DNA, 15 bp, Homo sapiens
gcacatcaaggtaat

SEQ ID NO: 440986 - DNA, 15 bp, Homo sapiens
tgcacatcaaggtaa

SEQ ID NO: 440987 - DNA, 15 bp, Homo sapiens
ttgcacatcaaggta

SEQ ID NO: 440988 - DNA, 15 bp, Homo sapiens
cttgcacatcaaggt

SEQ ID NO: 440989 - DNA, 15 bp, Homo sapiens
ccttgcacatcaagg

SEQ ID NO: 440990 - DNA, 15 bp, Homo sapiens
gccttgcacatcaag

SEQ ID NO: 440991 - DNA, 15 bp, Homo sapiens
agccttgcacatcaa

SEQ ID NO: 440992 - DNA, 15 bp, Homo sapiens
gagccttgcacatca

SEQ ID NO: 440993 - DNA, 15 bp, Homo sapiens
agagccttgcacatc

SEQ ID NO: 440994 - DNA, 15 bp, Homo sapiens
cagagccttgcacat

SEQ ID NO: 440995 - DNA, 15 bp, Homo sapiens
acagagccttgcaca

SEQ ID NO: 440996 - DNA, 15 bp, Homo sapiens
tacagagccttgcac

SEQ ID NO: 440997 - DNA, 15 bp, Homo sapiens
ctacagagccttgca

SEQ ID NO: 440998 - DNA, 15 bp, Homo sapiens
cctacagagccttgc

SEQ ID NO: 440999 - DNA, 15 bp, Homo sapiens
tcctacagagccttg

SEQ ID NO: 441000 - DNA, 15 bp, Homo sapiens
ctcctacagagcctt

SEQ ID NO: 441001 - DNA, 15 bp, Homo sapiens
cctcctacagagcct

SEQ ID NO: 441002 - DNA, 15 bp, Homo sapiens
acctcctacagagcc

SEQ ID NO: 441003 - DNA, 15 bp, Homo sapiens
cacctcctacagagc

SEQ ID NO: 441004 - DNA, 15 bp, Homo sapiens
acacctcctacagag

SEQ ID NO: 441005 - DNA, 15 bp, Homo sapiens
cacacctcctacaga

SEQ ID NO: 441006 - DNA, 15 bp, Homo sapiens
ccacacctcctacag

SEQ ID NO: 441007 - DNA, 15 bp, Homo sapiens
cccacacctcctaca

SEQ ID NO: 441008 - DNA, 15 bp, Homo sapiens
ccccacacctcctac

SEQ ID NO: 441009 - DNA, 15 bp, Homo sapiens
tccccacacctccta

SEQ ID NO: 441010 - DNA, 15 bp, Homo sapiens
ctccccacacctcct

SEQ ID NO: 441011 - DNA, 15 bp, Homo sapiens
cctccccacacctcc

SEQ ID NO: 441012 - DNA, 15 bp, Homo sapiens
ccctccccacacctc

SEQ ID NO: 441013 - DNA, 15 bp, Homo sapiens
cccctccccacacct

SEQ ID NO: 441014 - DNA, 15 bp, Homo sapiens
tcccctccccacacc

SEQ ID NO: 441015 - DNA, 15 bp, Homo sapiens
ttcccctccccacac

SEQ ID NO: 441016 - DNA, 15 bp, Homo sapiens
tttcccctccccaca

SEQ ID NO: 441017 - DNA, 15 bp, Homo sapiens
atttcccctccccac

SEQ ID NO: 441018 - DNA, 15 bp, Homo sapiens
aatttcccctcccca

SEQ ID NO: 441019 - DNA, 15 bp, Homo sapiens
taatttcccctcccc

SEQ ID NO: 441020 - DNA, 15 bp, Homo sapiens
ttaatttcccctccc

SEQ ID NO: 441021 - DNA, 15 bp, Homo sapiens
cttaatttcccctcc

SEQ ID NO: 441022 - DNA, 15 bp, Homo sapiens
ccttaatttcccctc

SEQ ID NO: 441023 - DNA, 15 bp, Homo sapiens
accttaatttcccct

SEQ ID NO: 441024 - DNA, 15 bp, Homo sapiens
caccttaatttcccc

SEQ ID NO: 441025 - DNA, 15 bp, Homo sapiens
gcaccttaatttccc

SEQ ID NO: 441026 - DNA, 15 bp, Homo sapiens
tgcaccttaatttcc

SEQ ID NO: 441027 - DNA, 15 bp, Homo sapiens
ctgcaccttaatttc

SEQ ID NO: 441028 - DNA, 15 bp, Homo sapiens
tctgcaccttaattt

SEQ ID NO: 441029 - DNA, 15 bp, Homo sapiens
atctgcaccttaatt

SEQ ID NO: 441030 - DNA, 15 bp, Homo sapiens
catctgcaccttaat

SEQ ID NO: 441031 - DNA, 15 bp, Homo sapiens
ccatctgcaccttaa

SEQ ID NO: 441032 - DNA, 15 bp, Homo sapiens
gccatctgcacctta

SEQ ID NO: 441033 - DNA, 15 bp, Homo sapiens
tgccatctgcacctt

SEQ ID NO: 441034 - DNA, 15 bp, Homo sapiens
ttgccatctgcacct

SEQ ID NO: 441035 - DNA, 15 bp, Homo sapiens
tttgccatctgcacc

SEQ ID NO: 441036 - DNA, 15 bp, Homo sapiens
ctttgccatctgcac

SEQ ID NO: 441037 - DNA, 15 bp, Homo sapiens
actttgccatctgca

SEQ ID NO: 441038 - DNA, 15 bp, Homo sapiens
aactttgccatctgc

SEQ ID NO: 441039 - DNA, 15 bp, Homo sapiens
gaactttgccatctg

SEQ ID NO: 441040 - DNA, 15 bp, Homo sapiens
tgaactttgccatct

SEQ ID NO: 441041 - DNA, 15 bp, Homo sapiens
atgaactttgccatc

SEQ ID NO: 441042 - DNA, 15 bp, Homo sapiens
catgaactttgccat

SEQ ID NO: 441043 - DNA, 15 bp, Homo sapiens
gcatgaactttgcca

SEQ ID NO: 441044 - DNA, 15 bp, Homo sapiens
agcatgaactttgcc

SEQ ID NO: 441045 - DNA, 15 bp, Homo sapiens
gagcatgaactttgc

SEQ ID NO: 441046 - DNA, 15 bp, Homo sapiens
agagcatgaactttg

SEQ ID NO: 441047 - DNA, 15 bp, Homo sapiens
aagagcatgaacttt

SEQ ID NO: 441048 - DNA, 15 bp, Homo sapiens
caagagcatgaactt

SEQ ID NO: 441049 - DNA, 15 bp, Homo sapiens
ccaagagcatgaact

SEQ ID NO: 441050 - DNA, 15 bp, Homo sapiens
cccaagagcatgaac

SEQ ID NO: 441051 - DNA, 15 bp, Homo sapiens
ccccaagagcatgaa

SEQ ID NO: 441052 - DNA, 15 bp, Homo sapiens
cccccaagagcatga

SEQ ID NO: 441053 - DNA, 15 bp, Homo sapiens
acccccaagagcatg

SEQ ID NO: 441054 - DNA, 15 bp, Homo sapiens
gacccccaagagcat

SEQ ID NO: 441055 - DNA, 15 bp, Homo sapiens
agacccccaagagca

SEQ ID NO: 441056 - DNA, 15 bp, Homo sapiens
aagacccccaagagc

SEQ ID NO: 441057 - DNA, 15 bp, Homo sapiens
taagacccccaagag

SEQ ID NO: 441058 - DNA, 15 bp, Homo sapiens
ataagacccccaaga

SEQ ID NO: 441059 - DNA, 15 bp, Homo sapiens
cataagacccccaag

SEQ ID NO: 441060 - DNA, 15 bp, Homo sapiens
tcataagacccccaa

SEQ ID NO: 441061 - DNA, 15 bp, Homo sapiens
atcataagaccccca

SEQ ID NO: 441062 - DNA, 15 bp, Homo sapiens
aatcataagaccccc

SEQ ID NO: 441063 - DNA, 15 bp, Homo sapiens
aaatcataagacccc

SEQ ID NO: 441064 - DNA, 15 bp, Homo sapiens
taaatcataagaccc

SEQ ID NO: 441065 - DNA, 15 bp, Homo sapiens
ctaaatcataagacc

SEQ ID NO: 441066 - DNA, 15 bp, Homo sapiens
gctaaatcataagac

SEQ ID NO: 441067 - DNA, 15 bp, Homo sapiens
tgctaaatcataaga

SEQ ID NO: 441068 - DNA, 15 bp, Homo sapiens
ctgctaaatcataag

SEQ ID NO: 441069 - DNA, 15 bp, Homo sapiens
tctgctaaatcataa

SEQ ID NO: 441070 - DNA, 15 bp, Homo sapiens
ctctgctaaatcata

SEQ ID NO: 441071 - DNA, 15 bp, Homo sapiens
cctctgctaaatcat

SEQ ID NO: 441072 - DNA, 15 bp, Homo sapiens
tcctctgctaaatca

SEQ ID NO: 441073 - DNA, 15 bp, Homo sapiens
ttcctctgctaaatc

SEQ ID NO: 441074 - DNA, 15 bp, Homo sapiens
gttcctctgctaaat

SEQ ID NO: 441075 - DNA, 15 bp, Homo sapiens
tgttcctctgctaaa

SEQ ID NO: 441076 - DNA, 15 bp, Homo sapiens
ttgttcctctgctaa

SEQ ID NO: 441077 - DNA, 15 bp, Homo sapiens
cttgttcctctgcta

SEQ ID NO: 441078 - DNA, 15 bp, Homo sapiens
tcttgttcctctgct

SEQ ID NO: 441079 - DNA, 15 bp, Homo sapiens
atcttgttcctctgc

SEQ ID NO: 441080 - DNA, 15 bp, Homo sapiens
tatcttgttcctctg

SEQ ID NO: 441081 - DNA, 15 bp, Homo sapiens
gtatcttgttcctct

SEQ ID NO: 441082 - DNA, 15 bp, Homo sapiens
tgtatcttgttcctc

SEQ ID NO: 441083 - DNA, 15 bp, Homo sapiens
gtgtatcttgttcct

SEQ ID NO: 441084 - DNA, 15 bp, Homo sapiens
tgtgtatcttgttcc

SEQ ID NO: 441085 - DNA, 15 bp, Homo sapiens
ttgtgtatcttgttc

SEQ ID NO: 441086 - DNA, 15 bp, Homo sapiens
attgtgtatcttgtt

SEQ ID NO: 441087 - DNA, 15 bp, Homo sapiens
tattgtgtatcttgt

SEQ ID NO: 441088 - DNA, 15 bp, Homo sapiens
ttattgtgtatcttg

SEQ ID NO: 441089 - DNA, 15 bp, Homo sapiens
gttattgtgtatctt

SEQ ID NO: 441090 - DNA, 15 bp, Homo sapiens
agttattgtgtatct

SEQ ID NO: 441091 - DNA, 15 bp, Homo sapiens
tagttattgtgtatc

SEQ ID NO: 441092 - DNA, 15 bp, Homo sapiens
ttagttattgtgtat

SEQ ID NO: 441093 - DNA, 15 bp, Homo sapiens
attagttattgtgta

SEQ ID NO: 441094 - DNA, 15 bp, Homo sapiens
tattagttattgtgt

SEQ ID NO: 441095 - DNA, 15 bp, Homo sapiens
atattagttattgtg

SEQ ID NO: 441096 - DNA, 15 bp, Homo sapiens
tatattagttattgt

SEQ ID NO: 441097 - DNA, 15 bp, Homo sapiens
ttatattagttattg

SEQ ID NO: 441098 - DNA, 15 bp, Homo sapiens
cttatattagttatt

SEQ ID NO: 441099 - DNA, 15 bp, Homo sapiens
ccttatattagttat

SEQ ID NO: 441100 - DNA, 15 bp, Homo sapiens
accttatattagtta

SEQ ID NO: 441101 - DNA, 15 bp, Homo sapiens
caccttatattagtt

SEQ ID NO: 441102 - DNA, 15 bp, Homo sapiens
ccaccttatattagt

SEQ ID NO: 441103 - DNA, 15 bp, Homo sapiens
gccaccttatattag

SEQ ID NO: 441104 - DNA, 15 bp, Homo sapiens
cgccaccttatatta

SEQ ID NO: 441105 - DNA, 15 bp, Homo sapiens
acgccaccttatatt

SEQ ID NO: 441106 - DNA, 15 bp, Homo sapiens
cacgccaccttatat

SEQ ID NO: 441107 - DNA, 15 bp, Homo sapiens
acacgccaccttata

SEQ ID NO: 441108 - DNA, 15 bp, Homo sapiens
cacacgccaccttat

SEQ ID NO: 441109 - DNA, 15 bp, Homo sapiens
tcacacgccacctta

SEQ ID NO: 441110 - DNA, 15 bp, Homo sapiens
atcacacgccacctt

SEQ ID NO: 441111 - DNA, 15 bp, Homo sapiens
aatcacacgccacct

SEQ ID NO: 441112 - DNA, 15 bp, Homo sapiens
taatcacacgccacc

SEQ ID NO: 441113 - DNA, 15 bp, Homo sapiens
ctaatcacacgccac

SEQ ID NO: 441114 - DNA, 15 bp, Homo sapiens
actaatcacacgcca

SEQ ID NO: 441115 - DNA, 15 bp, Homo sapiens
tactaatcacacgcc

SEQ ID NO: 441116 - DNA, 15 bp, Homo sapiens
gtactaatcacacgc

SEQ ID NO: 441117 - DNA, 15 bp, Homo sapiens
tgtactaatcacacg

SEQ ID NO: 441118 - DNA, 15 bp, Homo sapiens
gtgtactaatcacac

SEQ ID NO: 441119 - DNA, 15 bp, Homo sapiens
tgtgtactaatcaca

SEQ ID NO: 441120 - DNA, 15 bp, Homo sapiens
atgtgtactaatcac

SEQ ID NO: 441121 - DNA, 15 bp, Homo sapiens
tatgtgtactaatca

SEQ ID NO: 441122 - DNA, 15 bp, Homo sapiens
gtatgtgtactaatc

SEQ ID NO: 441123 - DNA, 15 bp, Homo sapiens
tgtatgtgtactaat

SEQ ID NO: 441124 - DNA, 15 bp, Homo sapiens
gtgtatgtgtactaa

SEQ ID NO: 441125 - DNA, 15 bp, Homo sapiens
tgtgtatgtgtacta

SEQ ID NO: 441126 - DNA, 15 bp, Homo sapiens
ttgtgtatgtgtact

SEQ ID NO: 441127 - DNA, 15 bp, Homo sapiens
tttgtgtatgtgtac

SEQ ID NO: 441128 - DNA, 15 bp, Homo sapiens
ctttgtgtatgtgta

SEQ ID NO: 441129 - DNA, 15 bp, Homo sapiens
tctttgtgtatgtgt

SEQ ID NO: 441130 - DNA, 15 bp, Homo sapiens
atctttgtgtatgtg

SEQ ID NO: 441131 - DNA, 15 bp, Homo sapiens
aatctttgtgtatgt

SEQ ID NO: 441132 - DNA, 15 bp, Homo sapiens
caatctttgtgtatg

SEQ ID NO: 441133 - DNA, 15 bp, Homo sapiens
ccaatctttgtgtat

SEQ ID NO: 441134 - DNA, 15 bp, Homo sapiens
tccaatctttgtgta

SEQ ID NO: 441135 - DNA, 15 bp, Homo sapiens
ctccaatctttgtgt

SEQ ID NO: 441136 - DNA, 15 bp, Homo sapiens
tctccaatctttgtg

SEQ ID NO: 441137 - DNA, 15 bp, Homo sapiens
ctctccaatctttgt

SEQ ID NO: 441138 - DNA, 15 bp, Homo sapiens
tctctccaatctttg

SEQ ID NO: 441139 - DNA, 15 bp, Homo sapiens
ttctctccaatcttt

SEQ ID NO: 441140 - DNA, 15 bp, Homo sapiens
gttctctccaatctt

SEQ ID NO: 441141 - DNA, 15 bp, Homo sapiens
agttctctccaatct

SEQ ID NO: 441142 - DNA, 15 bp, Homo sapiens
aagttctctccaatc

SEQ ID NO: 441143 - DNA, 15 bp, Homo sapiens
taagttctctccaat

SEQ ID NO: 441144 - DNA, 15 bp, Homo sapiens
ctaagttctctccaa

SEQ ID NO: 441145 - DNA, 15 bp, Homo sapiens
tctaagttctctcca

SEQ ID NO: 441146 - DNA, 15 bp, Homo sapiens
ctctaagttctctcc

SEQ ID NO: 441147 - DNA, 15 bp, Homo sapiens
cctctaagttctctc

SEQ ID NO: 441148 - DNA, 15 bp, Homo sapiens
tcctctaagttctct

SEQ ID NO: 441149 - DNA, 15 bp, Homo sapiens
ctcctctaagttctc

SEQ ID NO: 441150 - DNA, 15 bp, Homo sapiens
tctcctctaagttct

SEQ ID NO: 441151 - DNA, 15 bp, Homo sapiens
ttctcctctaagttc

SEQ ID NO: 441152 - DNA, 15 bp, Homo sapiens
tttctcctctaagtt

SEQ ID NO: 441153 - DNA, 15 bp, Homo sapiens
gtttctcctctaagt

SEQ ID NO: 441154 - DNA, 15 bp, Homo sapiens
tgtttctcctctaag

SEQ ID NO: 441155 - DNA, 15 bp, Homo sapiens
ctgtttctcctctaa

SEQ ID NO: 441156 - DNA, 15 bp, Homo sapiens
gctgtttctcctcta

SEQ ID NO: 441157 - DNA, 15 bp, Homo sapiens
tgctgtttctcctct

SEQ ID NO: 441158 - DNA, 15 bp, Homo sapiens
atgctgtttctcctc

SEQ ID NO: 441159 - DNA, 15 bp, Homo sapiens
aatgctgtttctcct

SEQ ID NO: 441160 - DNA, 15 bp, Homo sapiens
taatgctgtttctcc

SEQ ID NO: 441161 - DNA, 15 bp, Homo sapiens
gtaatgctgtttctc

SEQ ID NO: 441162 - DNA, 15 bp, Homo sapiens
ggtaatgctgtttct

SEQ ID NO: 441163 - DNA, 15 bp, Homo sapiens
aggtaatgctgtttc

SEQ ID NO: 441164 - DNA, 15 bp, Homo sapiens
gaggtaatgctgttt

SEQ ID NO: 441165 - DNA, 15 bp, Homo sapiens
tgaggtaatgctgtt

SEQ ID NO: 441166 - DNA, 15 bp, Homo sapiens
atgaggtaatgctgt

SEQ ID NO: 441167 - DNA, 15 bp, Homo sapiens
catgaggtaatgctg

SEQ ID NO: 441168 - DNA, 15 bp, Homo sapiens
ccatgaggtaatgct

SEQ ID NO: 441169 - DNA, 15 bp, Homo sapiens
gccatgaggtaatgc

SEQ ID NO: 441170 - DNA, 15 bp, Homo sapiens
ggccatgaggtaatg

SEQ ID NO: 441171 - DNA, 15 bp, Homo sapiens
aggccatgaggtaat

SEQ ID NO: 441172 - DNA, 15 bp, Homo sapiens
taggccatgaggtaa

SEQ ID NO: 441173 - DNA, 15 bp, Homo sapiens
ataggccatgaggta

SEQ ID NO: 441174 - DNA, 15 bp, Homo sapiens
cataggccatgaggt

SEQ ID NO: 441175 - DNA, 15 bp, Homo sapiens
acataggccatgagg

SEQ ID NO: 441176 - DNA, 15 bp, Homo sapiens
aacataggccatgag

SEQ ID NO: 441177 - DNA, 15 bp, Homo sapiens
aaacataggccatga

SEQ ID NO: 441178 - DNA, 15 bp, Homo sapiens
caaacataggccatg

SEQ ID NO: 441179 - DNA, 15 bp, Homo sapiens
ccaaacataggccat

SEQ ID NO: 441180 - DNA, 15 bp, Homo sapiens
cccaaacataggcca

SEQ ID NO: 441181 - DNA, 15 bp, Homo sapiens
ccccaaacataggcc

SEQ ID NO: 441182 - DNA, 15 bp, Homo sapiens
gccccaaacataggc

SEQ ID NO: 441183 - DNA, 15 bp, Homo sapiens
agccccaaacatagg

SEQ ID NO: 441184 - DNA, 15 bp, Homo sapiens
cagccccaaacatag

SEQ ID NO: 441185 - DNA, 15 bp, Homo sapiens
gcagccccaaacata

SEQ ID NO: 441186 - DNA, 15 bp, Homo sapiens
cgcagccccaaacat

SEQ ID NO: 441187 - DNA, 15 bp, Homo sapiens
ccgcagccccaaaca

SEQ ID NO: 441188 - DNA, 15 bp, Homo sapiens
tccgcagccccaaac

SEQ ID NO: 441189 - DNA, 15 bp, Homo sapiens
atccgcagccccaaa

SEQ ID NO: 441190 - DNA, 15 bp, Homo sapiens
catccgcagccccaa

SEQ ID NO: 441191 - DNA, 15 bp, Homo sapiens
tcatccgcagcccca

SEQ ID NO: 441192 - DNA, 15 bp, Homo sapiens
atcatccgcagcccc

SEQ ID NO: 441193 - DNA, 15 bp, Homo sapiens
catcatccgcagccc

SEQ ID NO: 441194 - DNA, 15 bp, Homo sapiens
acatcatccgcagcc

SEQ ID NO: 441195 - DNA, 15 bp, Homo sapiens
gacatcatccgcagc

SEQ ID NO: 441196 - DNA, 15 bp, Homo sapiens
ggacatcatccgcag

SEQ ID NO: 441197 - DNA, 15 bp, Homo sapiens
aggacatcatccgca

SEQ ID NO: 441198 - DNA, 15 bp, Homo sapiens
aaggacatcatccgc

SEQ ID NO: 441199 - DNA, 15 bp, Homo sapiens
caaggacatcatccg

SEQ ID NO: 441200 - DNA, 15 bp, Homo sapiens
tcaaggacatcatcc

SEQ ID NO: 441201 - DNA, 15 bp, Homo sapiens
ctcaaggacatcatc

SEQ ID NO: 441202 - DNA, 15 bp, Homo sapiens
cctcaaggacatcat

SEQ ID NO: 441203 - DNA, 15 bp, Homo sapiens
gcctcaaggacatca

SEQ ID NO: 441204 - DNA, 15 bp, Homo sapiens
ggcctcaaggacatc

SEQ ID NO: 441205 - DNA, 15 bp, Homo sapiens
tggcctcaaggacat

SEQ ID NO: 441206 - DNA, 15 bp, Homo sapiens
atggcctcaaggaca

SEQ ID NO: 441207 - DNA, 15 bp, Homo sapiens
tatggcctcaaggac

SEQ ID NO: 441208 - DNA, 15 bp, Homo sapiens
atatggcctcaagga

SEQ ID NO: 441209 - DNA, 15 bp, Homo sapiens
catatggcctcaagg

SEQ ID NO: 441210 - DNA, 15 bp, Homo sapiens
acatatggcctcaag

SEQ ID NO: 441211 - DNA, 15 bp, Homo sapiens
tacatatggcctcaa

SEQ ID NO: 441212 - DNA, 15 bp, Homo sapiens
atacatatggcctca

SEQ ID NO: 441213 - DNA, 15 bp, Homo sapiens
gatacatatggcctc

SEQ ID NO: 441214 - DNA, 15 bp, Homo sapiens
ggatacatatggcct

SEQ ID NO: 441215 - DNA, 15 bp, Homo sapiens
gggatacatatggcc

SEQ ID NO: 441216 - DNA, 15 bp, Homo sapiens
tgggatacatatggc

SEQ ID NO: 441217 - DNA, 15 bp, Homo sapiens
atgggatacatatgg

SEQ ID NO: 441218 - DNA, 15 bp, Homo sapiens
aatgggatacatatg

SEQ ID NO: 441219 - DNA, 15 bp, Homo sapiens
caatgggatacatat

SEQ ID NO: 441220 - DNA, 15 bp, Homo sapiens
tcaatgggatacata

SEQ ID NO: 441221 - DNA, 15 bp, Homo sapiens
atcaatgggatacat

SEQ ID NO: 441222 - DNA, 15 bp, Homo sapiens
gatcaatgggataca

SEQ ID NO: 441223 - DNA, 15 bp, Homo sapiens
ggatcaatgggatac

SEQ ID NO: 441224 - DNA, 15 bp, Homo sapiens
aggatcaatgggata

SEQ ID NO: 441225 - DNA, 15 bp, Homo sapiens
caggatcaatgggat

SEQ ID NO: 441226 - DNA, 15 bp, Homo sapiens
gcaggatcaatggga

SEQ ID NO: 441227 - DNA, 15 bp, Homo sapiens
tgcaggatcaatggg

SEQ ID NO: 441228 - DNA, 15 bp, Homo sapiens
ctgcaggatcaatgg

SEQ ID NO: 441229 - DNA, 15 bp, Homo sapiens
cctgcaggatcaatg

SEQ ID NO: 441230 - DNA, 15 bp, Homo sapiens
gcctgcaggatcaat

SEQ ID NO: 441231 - DNA, 15 bp, Homo sapiens
agcctgcaggatcaa

SEQ ID NO: 441232 - DNA, 15 bp, Homo sapiens
cagcctgcaggatca

SEQ ID NO: 441233 - DNA, 15 bp, Homo sapiens
tcagcctgcaggatc

SEQ ID NO: 441234 - DNA, 15 bp, Homo sapiens
ctcagcctgcaggat

SEQ ID NO: 441235 - DNA, 15 bp, Homo sapiens
actcagcctgcagga

SEQ ID NO: 441236 - DNA, 15 bp, Homo sapiens
tactcagcctgcagg

SEQ ID NO: 441237 - DNA, 15 bp, Homo sapiens
ttactcagcctgcag

SEQ ID NO: 441238 - DNA, 15 bp, Homo sapiens
cttactcagcctgca

SEQ ID NO: 441239 - DNA, 15 bp, Homo sapiens
gcttactcagcctgc

SEQ ID NO: 441240 - DNA, 15 bp, Homo sapiens
ggcttactcagcctg

SEQ ID NO: 441241 - DNA, 15 bp, Homo sapiens
tggcttactcagcct

SEQ ID NO: 441242 - DNA, 15 bp, Homo sapiens
atggcttactcagcc

SEQ ID NO: 441243 - DNA, 15 bp, Homo sapiens
gatggcttactcagc

SEQ ID NO: 441244 - DNA, 15 bp, Homo sapiens
ggatggcttactcag

SEQ ID NO: 441245 - DNA, 15 bp, Homo sapiens
cggatggcttactca

SEQ ID NO: 441246 - DNA, 15 bp, Homo sapiens
acggatggcttactc

SEQ ID NO: 441247 - DNA, 15 bp, Homo sapiens
gacggatggcttact

SEQ ID NO: 441248 - DNA, 15 bp, Homo sapiens
agacggatggcttac

SEQ ID NO: 441249 - DNA, 15 bp, Homo sapiens
gagacggatggctta

SEQ ID NO: 441250 - DNA, 15 bp, Homo sapiens
tgagacggatggctt

SEQ ID NO: 441251 - DNA, 15 bp, Homo sapiens
gtgagacggatggct

SEQ ID NO: 441252 - DNA, 15 bp, Homo sapiens
tgtgagacggatggc

SEQ ID NO: 441253 - DNA, 15 bp, Homo sapiens
gtgtgagacggatgg

SEQ ID NO: 441254 - DNA, 15 bp, Homo sapiens
tgtgtgagacggatg

SEQ ID NO: 441255 - DNA, 15 bp, Homo sapiens
gtgtgtgagacggat

SEQ ID NO: 441256 - DNA, 15 bp, Homo sapiens
tgtgtgtgagacgga

SEQ ID NO: 441257 - DNA, 15 bp, Homo sapiens
atgtgtgtgagacgg

SEQ ID NO: 441258 - DNA, 15 bp, Homo sapiens
tatgtgtgtgagacg

SEQ ID NO: 441259 - DNA, 15 bp, Homo sapiens
atatgtgtgtgagac

SEQ ID NO: 441260 - DNA, 15 bp, Homo sapiens
catatgtgtgtgaga

SEQ ID NO: 441261 - DNA, 15 bp, Homo sapiens
acatatgtgtgtgag

SEQ ID NO: 441262 - DNA, 15 bp, Homo sapiens
tacatatgtgtgtga

SEQ ID NO: 441263 - DNA, 15 bp, Homo sapiens
gtacatatgtgtgtg

SEQ ID NO: 441264 - DNA, 15 bp, Homo sapiens
agtacatatgtgtgt

SEQ ID NO: 441265 - DNA, 15 bp, Homo sapiens
tagtacatatgtgtg

SEQ ID NO: 441266 - DNA, 15 bp, Homo sapiens
gtagtacatatgtgt

SEQ ID NO: 441267 - DNA, 15 bp, Homo sapiens
agtagtacatatgtg

SEQ ID NO: 441268 - DNA, 15 bp, Homo sapiens
cagtagtacatatgt

SEQ ID NO: 441269 - DNA, 15 bp, Homo sapiens
acagtagtacatatg

SEQ ID NO: 441270 - DNA, 15 bp, Homo sapiens
aacagtagtacatat

SEQ ID NO: 441271 - DNA, 15 bp, Homo sapiens
aaacagtagtacata

SEQ ID NO: 441272 - DNA, 15 bp, Homo sapiens
aaaacagtagtacat

SEQ ID NO: 441273 - DNA, 15 bp, Homo sapiens
gaaaacagtagtaca

SEQ ID NO: 441274 - DNA, 15 bp, Homo sapiens
ggaaaacagtagtac

SEQ ID NO: 441275 - DNA, 15 bp, Homo sapiens
tggaaaacagtagta

SEQ ID NO: 441276 - DNA, 15 bp, Homo sapiens
ttggaaaacagtagt

SEQ ID NO: 441277 - DNA, 15 bp, Homo sapiens
tttggaaaacagtag

SEQ ID NO: 441278 - DNA, 15 bp, Homo sapiens
atttggaaaacagta

SEQ ID NO: 441279 - DNA, 15 bp, Homo sapiens
catttggaaaacagt

SEQ ID NO: 441280 - DNA, 15 bp, Homo sapiens
acatttggaaaacag

SEQ ID NO: 441281 - DNA, 15 bp, Homo sapiens
tacatttggaaaaca

SEQ ID NO: 441282 - DNA, 15 bp, Homo sapiens
atacatttggaaaac

SEQ ID NO: 441283 - DNA, 15 bp, Homo sapiens
aatacatttggaaaa

SEQ ID NO: 441284 - DNA, 15 bp, Homo sapiens
taatacatttggaaa

SEQ ID NO: 441285 - DNA, 15 bp, Homo sapiens
ataatacatttggaa

SEQ ID NO: 441286 - DNA, 15 bp, Homo sapiens
tataatacatttgga

SEQ ID NO: 441287 - DNA, 15 bp, Homo sapiens
atataatacatttgg

SEQ ID NO: 441288 - DNA, 15 bp, Homo sapiens
catataatacatttg

SEQ ID NO: 441289 - DNA, 15 bp, Homo sapiens
acatataatacattt

SEQ ID NO: 441290 - DNA, 15 bp, Homo sapiens
tacatataatacatt

SEQ ID NO: 441291 - DNA, 15 bp, Homo sapiens
ctacatataatacat

SEQ ID NO: 441292 - DNA, 15 bp, Homo sapiens
tctacatataataca

SEQ ID NO: 441293 - DNA, 15 bp, Homo sapiens
atctacatataatac

SEQ ID NO: 441294 - DNA, 15 bp, Homo sapiens
catctacatataata

SEQ ID NO: 441295 - DNA, 15 bp, Homo sapiens
gcatctacatataat

SEQ ID NO: 441296 - DNA, 15 bp, Homo sapiens
agcatctacatataa

SEQ ID NO: 441297 - DNA, 15 bp, Homo sapiens
gagcatctacatata

SEQ ID NO: 441298 - DNA, 15 bp, Homo sapiens
agagcatctacatat

SEQ ID NO: 441299 - DNA, 15 bp, Homo sapiens
cagagcatctacata

SEQ ID NO: 441300 - DNA, 15 bp, Homo sapiens
ccagagcatctacat

SEQ ID NO: 441301 - DNA, 15 bp, Homo sapiens
accagagcatctaca

SEQ ID NO: 441302 - DNA, 15 bp, Homo sapiens
caccagagcatctac

SEQ ID NO: 441303 - DNA, 15 bp, Homo sapiens
ccaccagagcatcta

SEQ ID NO: 441304 - DNA, 15 bp, Homo sapiens
gccaccagagcatct

SEQ ID NO: 441305 - DNA, 15 bp, Homo sapiens
ggccaccagagcatc

SEQ ID NO: 441306 - DNA, 15 bp, Homo sapiens
tggccaccagagcat

SEQ ID NO: 441307 - DNA, 15 bp, Homo sapiens
ttggccaccagagca

SEQ ID NO: 441308 - DNA, 15 bp, Homo sapiens
gttggccaccagagc

SEQ ID NO: 441309 - DNA, 15 bp, Homo sapiens
tgttggccaccagag

SEQ ID NO: 441310 - DNA, 15 bp, Homo sapiens
ttgttggccaccaga

SEQ ID NO: 441311 - DNA, 15 bp, Homo sapiens
attgttggccaccag

SEQ ID NO: 441312 - DNA, 15 bp, Homo sapiens
cattgttggccacca

SEQ ID NO: 441313 - DNA, 15 bp, Homo sapiens
gcattgttggccacc

SEQ ID NO: 441314 - DNA, 15 bp, Homo sapiens
agcattgttggccac

SEQ ID NO: 441315 - DNA, 15 bp, Homo sapiens
aagcattgttggcca

SEQ ID NO: 441316 - DNA, 15 bp, Homo sapiens
aaagcattgttggcc

SEQ ID NO: 441317 - DNA, 15 bp, Homo sapiens
aaaagcattgttggc

SEQ ID NO: 441318 - DNA, 15 bp, Homo sapiens
taaaagcattgttgg

SEQ ID NO: 441319 - DNA, 15 bp, Homo sapiens
ctaaaagcattgttg

SEQ ID NO: 441320 - DNA, 15 bp, Homo sapiens
tctaaaagcattgtt

SEQ ID NO: 441321 - DNA, 15 bp, Homo sapiens
atctaaaagcattgt

SEQ ID NO: 441322 - DNA, 15 bp, Homo sapiens
aatctaaaagcattg

SEQ ID NO: 441323 - DNA, 15 bp, Homo sapiens
taatctaaaagcatt

SEQ ID NO: 441324 - DNA, 15 bp, Homo sapiens
ttaatctaaaagcat

SEQ ID NO: 441325 - DNA, 15 bp, Homo sapiens
attaatctaaaagca

SEQ ID NO: 441326 - DNA, 15 bp, Homo sapiens
aattaatctaaaagc

SEQ ID NO: 441327 - DNA, 15 bp, Homo sapiens
aaattaatctaaaag

SEQ ID NO: 441328 - DNA, 15 bp, Homo sapiens
aaaattaatctaaaa

SEQ ID NO: 441329 - DNA, 15 bp, Homo sapiens
aaaaattaatctaaa

SEQ ID NO: 441330 - DNA, 15 bp, Homo sapiens
caaaaattaatctaa

SEQ ID NO: 441331 - DNA, 15 bp, Homo sapiens
acaaaaattaatcta

SEQ ID NO: 441332 - DNA, 15 bp, Homo sapiens
aacaaaaattaatct

SEQ ID NO: 441333 - DNA, 15 bp, Homo sapiens
caacaaaaattaatc

SEQ ID NO: 441334 - DNA, 15 bp, Homo sapiens
acaacaaaaattaat

SEQ ID NO: 441335 - DNA, 15 bp, Homo sapiens
tacaacaaaaattaa

SEQ ID NO: 441336 - DNA, 15 bp, Homo sapiens
atacaacaaaaatta

SEQ ID NO: 441337 - DNA, 15 bp, Homo sapiens
aatacaacaaaaatt

SEQ ID NO: 441338 - DNA, 15 bp, Homo sapiens
taatacaacaaaaat

SEQ ID NO: 441339 - DNA, 15 bp, Homo sapiens
gtaatacaacaaaaa

SEQ ID NO: 441340 - DNA, 15 bp, Homo sapiens
tgtaatacaacaaaa

SEQ ID NO: 441341 - DNA, 15 bp, Homo sapiens
atgtaatacaacaaa

SEQ ID NO: 441342 - DNA, 15 bp, Homo sapiens
aatgtaatacaacaa

SEQ ID NO: 441343 - DNA, 15 bp, Homo sapiens
aaatgtaatacaaca

SEQ ID NO: 441344 - DNA, 15 bp, Homo sapiens
taaatgtaatacaac

SEQ ID NO: 441345 - DNA, 15 bp, Homo sapiens
ataaatgtaatacaa

SEQ ID NO: 441346 - DNA, 15 bp, Homo sapiens
cataaatgtaataca

SEQ ID NO: 441347 - DNA, 15 bp, Homo sapiens
ccataaatgtaatac

SEQ ID NO: 441348 - DNA, 15 bp, Homo sapiens
accataaatgtaata

SEQ ID NO: 441349 - DNA, 15 bp, Homo sapiens
taccataaatgtaat

SEQ ID NO: 441350 - DNA, 15 bp, Homo sapiens
ctaccataaatgtaa

SEQ ID NO: 441351 - DNA, 15 bp, Homo sapiens
gctaccataaatgta

SEQ ID NO: 441352 - DNA, 15 bp, Homo sapiens
agctaccataaatgt

SEQ ID NO: 441353 - DNA, 15 bp, Homo sapiens
aagctaccataaatg

SEQ ID NO: 441354 - DNA, 15 bp, Homo sapiens
aaagctaccataaat

SEQ ID NO: 441355 - DNA, 15 bp, Homo sapiens
aaaagctaccataaa

SEQ ID NO: 441356 - DNA, 15 bp, Homo sapiens
aaaaagctaccataa

SEQ ID NO: 441357 - DNA, 15 bp, Homo sapiens
caaaaagctaccata

SEQ ID NO: 441358 - DNA, 15 bp, Homo sapiens
acaaaaagctaccat

SEQ ID NO: 441359 - DNA, 15 bp, Homo sapiens
gacaaaaagctacca

SEQ ID NO: 441360 - DNA, 15 bp, Homo sapiens
tgacaaaaagctacc

SEQ ID NO: 441361 - DNA, 15 bp, Homo sapiens
atgacaaaaagctac

SEQ ID NO: 441362 - DNA, 15 bp, Homo sapiens
tatgacaaaaagcta

SEQ ID NO: 441363 - DNA, 15 bp, Homo sapiens
atatgacaaaaagct

SEQ ID NO: 441364 - DNA, 15 bp, Homo sapiens
aatatgacaaaaagc

SEQ ID NO: 441365 - DNA, 15 bp, Homo sapiens
caatatgacaaaaag

SEQ ID NO: 441366 - DNA, 15 bp, Homo sapiens
acaatatgacaaaaa

SEQ ID NO: 441367 - DNA, 15 bp, Homo sapiens
tacaatatgacaaaa

SEQ ID NO: 441368 - DNA, 15 bp, Homo sapiens
atacaatatgacaaa

SEQ ID NO: 441369 - DNA, 15 bp, Homo sapiens
tatacaatatgacaa

SEQ ID NO: 441370 - DNA, 15 bp, Homo sapiens
atatacaatatgaca

SEQ ID NO: 441371 - DNA, 15 bp, Homo sapiens
aatatacaatatgac

SEQ ID NO: 441372 - DNA, 15 bp, Homo sapiens
aaatatacaatatga

SEQ ID NO: 441373 - DNA, 15 bp, Homo sapiens
aaaatatacaatatg

SEQ ID NO: 441374 - DNA, 15 bp, Homo sapiens
gaaaatatacaatat

SEQ ID NO: 441375 - DNA, 15 bp, Homo sapiens
tgaaaatatacaata

SEQ ID NO: 441376 - DNA, 15 bp, Homo sapiens
ctgaaaatatacaat

SEQ ID NO: 441377 - DNA, 15 bp, Homo sapiens
actgaaaatatacaa

SEQ ID NO: 441378 - DNA, 15 bp, Homo sapiens
gactgaaaatataca

SEQ ID NO: 441379 - DNA, 15 bp, Homo sapiens
tgactgaaaatatac

SEQ ID NO: 441380 - DNA, 15 bp, Homo sapiens
ctgactgaaaatata

SEQ ID NO: 441381 - DNA, 15 bp, Homo sapiens
actgactgaaaatat

SEQ ID NO: 441382 - DNA, 15 bp, Homo sapiens
tactgactgaaaata

SEQ ID NO: 441383 - DNA, 15 bp, Homo sapiens
ctactgactgaaaat

SEQ ID NO: 441384 - DNA, 15 bp, Homo sapiens
gctactgactgaaaa

SEQ ID NO: 441385 - DNA, 15 bp, Homo sapiens
agctactgactgaaa

SEQ ID NO: 441386 - DNA, 15 bp, Homo sapiens
tagctactgactgaa

SEQ ID NO: 441387 - DNA, 15 bp, Homo sapiens
gtagctactgactga

SEQ ID NO: 441388 - DNA, 15 bp, Homo sapiens
agtagctactgactg

SEQ ID NO: 441389 - DNA, 15 bp, Homo sapiens
tagtagctactgact

SEQ ID NO: 441390 - DNA, 15 bp, Homo sapiens
gtagtagctactgac

SEQ ID NO: 441391 - DNA, 15 bp, Homo sapiens
ggtagtagctactga

SEQ ID NO: 441392 - DNA, 15 bp, Homo sapiens
gggtagtagctactg

SEQ ID NO: 441393 - DNA, 15 bp, Homo sapiens
agggtagtagctact

SEQ ID NO: 441394 - DNA, 15 bp, Homo sapiens
cagggtagtagctac

SEQ ID NO: 441395 - DNA, 15 bp, Homo sapiens
tcagggtagtagcta

SEQ ID NO: 441396 - DNA, 15 bp, Homo sapiens
atcagggtagtagct

SEQ ID NO: 441397 - DNA, 15 bp, Homo sapiens
catcagggtagtagc

SEQ ID NO: 441398 - DNA, 15 bp, Homo sapiens
tcatcagggtagtag

SEQ ID NO: 441399 - DNA, 15 bp, Homo sapiens
atcatcagggtagta

SEQ ID NO: 441400 - DNA, 15 bp, Homo sapiens
aatcatcagggtagt

SEQ ID NO: 441401 - DNA, 15 bp, Homo sapiens
gaatcatcagggtag

SEQ ID NO: 441402 - DNA, 15 bp, Homo sapiens
ggaatcatcagggta

SEQ ID NO: 441403 - DNA, 15 bp, Homo sapiens
aggaatcatcagggt

SEQ ID NO: 441404 - DNA, 15 bp, Homo sapiens
caggaatcatcaggg

SEQ ID NO: 441405 - DNA, 15 bp, Homo sapiens
acaggaatcatcagg

SEQ ID NO: 441406 - DNA, 15 bp, Homo sapiens
gacaggaatcatcag

SEQ ID NO: 441407 - DNA, 15 bp, Homo sapiens
tgacaggaatcatca

SEQ ID NO: 441408 - DNA, 15 bp, Homo sapiens
atgacaggaatcatc

SEQ ID NO: 441409 - DNA, 15 bp, Homo sapiens
catgacaggaatcat

SEQ ID NO: 441410 - DNA, 15 bp, Homo sapiens
tcatgacaggaatca

SEQ ID NO: 441411 - DNA, 15 bp, Homo sapiens
ttcatgacaggaatc

SEQ ID NO: 441412 - DNA, 15 bp, Homo sapiens
gttcatgacaggaat

SEQ ID NO: 441413 - DNA, 15 bp, Homo sapiens
tgttcatgacaggaa

SEQ ID NO: 441414 - DNA, 15 bp, Homo sapiens
gtgttcatgacagga

SEQ ID NO: 441415 - DNA, 15 bp, Homo sapiens
ggtgttcatgacagg

SEQ ID NO: 441416 - DNA, 15 bp, Homo sapiens
aggtgttcatgacag

SEQ ID NO: 441417 - DNA, 15 bp, Homo sapiens
aaggtgttcatgaca

SEQ ID NO: 441418 - DNA, 15 bp, Homo sapiens
aaaggtgttcatgac

SEQ ID NO: 441419 - DNA, 15 bp, Homo sapiens
caaaggtgttcatga

SEQ ID NO: 441420 - DNA, 15 bp, Homo sapiens
tcaaaggtgttcatg

SEQ ID NO: 441421 - DNA, 15 bp, Homo sapiens
ttcaaaggtgttcat

SEQ ID NO: 441422 - DNA, 15 bp, Homo sapiens
tttcaaaggtgttca

SEQ ID NO: 441423 - DNA, 15 bp, Homo sapiens
atttcaaaggtgttc

SEQ ID NO: 441424 - DNA, 15 bp, Homo sapiens
aatttcaaaggtgtt

SEQ ID NO: 441425 - DNA, 15 bp, Homo sapiens
aaatttcaaaggtgt

SEQ ID NO: 441426 - DNA, 15 bp, Homo sapiens
aaaatttcaaaggtg

SEQ ID NO: 441427 - DNA, 15 bp, Homo sapiens
aaaaatttcaaaggt

SEQ ID NO: 441428 - DNA, 15 bp, Homo sapiens
aaaaaatttcaaagg

SEQ ID NO: 441429 - DNA, 15 bp, Homo sapiens
gaaaaaatttcaaag

SEQ ID NO: 441430 - DNA, 15 bp, Homo sapiens
tgaaaaaatttcaaa

SEQ ID NO: 441431 - DNA, 15 bp, Homo sapiens
atgaaaaaatttcaa

SEQ ID NO: 441432 - DNA, 15 bp, Homo sapiens
catgaaaaaatttca

SEQ ID NO: 441433 - DNA, 15 bp, Homo sapiens
acatgaaaaaatttc

SEQ ID NO: 441434 - DNA, 15 bp, Homo sapiens
aacatgaaaaaattt

SEQ ID NO: 441435 - DNA, 15 bp, Homo sapiens
taacatgaaaaaatt

SEQ ID NO: 441436 - DNA, 15 bp, Homo sapiens
ttaacatgaaaaaat

SEQ ID NO: 441437 - DNA, 15 bp, Homo sapiens
tttaacatgaaaaaa

SEQ ID NO: 441438 - DNA, 15 bp, Homo sapiens
ttttaacatgaaaaa

SEQ ID NO: 441439 - DNA, 15 bp, Homo sapiens
tttttaacatgaaaa

SEQ ID NO: 441440 - DNA, 15 bp, Homo sapiens
atttttaacatgaaa

SEQ ID NO: 441441 - DNA, 15 bp, Homo sapiens
aatttttaacatgaa

SEQ ID NO: 441442 - DNA, 15 bp, Homo sapiens
caatttttaacatga

SEQ ID NO: 441443 - DNA, 15 bp, Homo sapiens
ccaatttttaacatg

SEQ ID NO: 441444 - DNA, 15 bp, Homo sapiens
accaatttttaacat

SEQ ID NO: 441445 - DNA, 15 bp, Homo sapiens
gaccaatttttaaca

SEQ ID NO: 441446 - DNA, 15 bp, Homo sapiens
ggaccaatttttaac

SEQ ID NO: 441447 - DNA, 15 bp, Homo sapiens
tggaccaatttttaa

SEQ ID NO: 441448 - DNA, 15 bp, Homo sapiens
ctggaccaattttta

SEQ ID NO: 441449 - DNA, 15 bp, Homo sapiens
actggaccaattttt

SEQ ID NO: 441450 - DNA, 15 bp, Homo sapiens
aactggaccaatttt

SEQ ID NO: 441451 - DNA, 15 bp, Homo sapiens
taactggaccaattt

SEQ ID NO: 441452 - DNA, 15 bp, Homo sapiens
ataactggaccaatt

SEQ ID NO: 441453 - DNA, 15 bp, Homo sapiens
gataactggaccaat

SEQ ID NO: 441454 - DNA, 15 bp, Homo sapiens
ggataactggaccaa

SEQ ID NO: 441455 - DNA, 15 bp, Homo sapiens
tggataactggacca

SEQ ID NO: 441456 - DNA, 15 bp, Homo sapiens
ttggataactggacc

SEQ ID NO: 441457 - DNA, 15 bp, Homo sapiens
tttggataactggac

SEQ ID NO: 441458 - DNA, 15 bp, Homo sapiens
ctttggataactgga

SEQ ID NO: 441459 - DNA, 15 bp, Homo sapiens
tctttggataactgg

SEQ ID NO: 441460 - DNA, 15 bp, Homo sapiens
atctttggataactg

SEQ ID NO: 441461 - DNA, 15 bp, Homo sapiens
catctttggataact

SEQ ID NO: 441462 - DNA, 15 bp, Homo sapiens
tcatctttggataac

SEQ ID NO: 441463 - DNA, 15 bp, Homo sapiens
ttcatctttggataa

SEQ ID NO: 441464 - DNA, 15 bp, Homo sapiens
tttcatctttggata

SEQ ID NO: 441465 - DNA, 15 bp, Homo sapiens
ttttcatctttggat

SEQ ID NO: 441466 - DNA, 15 bp, Homo sapiens
tttttcatctttgga

SEQ ID NO: 441467 - DNA, 15 bp, Homo sapiens
gtttttcatctttgg

SEQ ID NO: 441468 - DNA, 15 bp, Homo sapiens
ggtttttcatctttg

SEQ ID NO: 441469 - DNA, 15 bp, Homo sapiens
tggtttttcatcttt

SEQ ID NO: 441470 - DNA, 15 bp, Homo sapiens
atggtttttcatctt

SEQ ID NO: 441471 - DNA, 15 bp, Homo sapiens
aatggtttttcatct

SEQ ID NO: 441472 - DNA, 15 bp, Homo sapiens
caatggtttttcatc

SEQ ID NO: 441473 - DNA, 15 bp, Homo sapiens
acaatggtttttcat

SEQ ID NO: 441474 - DNA, 15 bp, Homo sapiens
gacaatggtttttca

SEQ ID NO: 441475 - DNA, 15 bp, Homo sapiens
ggacaatggtttttc

SEQ ID NO: 441476 - DNA, 15 bp, Homo sapiens
tggacaatggttttt

SEQ ID NO: 441477 - DNA, 15 bp, Homo sapiens
gtggacaatggtttt

SEQ ID NO: 441478 - DNA, 15 bp, Homo sapiens
tgtggacaatggttt

SEQ ID NO: 441479 - DNA, 15 bp, Homo sapiens
ttgtggacaatggtt

SEQ ID NO: 441480 - DNA, 15 bp, Homo sapiens
gttgtggacaatggt

SEQ ID NO: 441481 - DNA, 15 bp, Homo sapiens
tgttgtggacaatgg

SEQ ID NO: 441482 - DNA, 15 bp, Homo sapiens
ctgttgtggacaatg

SEQ ID NO: 441483 - DNA, 15 bp, Homo sapiens
actgttgtggacaat

SEQ ID NO: 441484 - DNA, 15 bp, Homo sapiens
gactgttgtggacaa

SEQ ID NO: 441485 - DNA, 15 bp, Homo sapiens
tgactgttgtggaca

SEQ ID NO: 441486 - DNA, 15 bp, Homo sapiens
ttgactgttgtggac

SEQ ID NO: 441487 - DNA, 15 bp, Homo sapiens
attgactgttgtgga

SEQ ID NO: 441488 - DNA, 15 bp, Homo sapiens
cattgactgttgtgg

SEQ ID NO: 441489 - DNA, 15 bp, Homo sapiens
gcattgactgttgtg

SEQ ID NO: 441490 - DNA, 15 bp, Homo sapiens
agcattgactgttgt

SEQ ID NO: 441491 - DNA, 15 bp, Homo sapiens
cagcattgactgttg

SEQ ID NO: 441492 - DNA, 15 bp, Homo sapiens
acagcattgactgtt

SEQ ID NO: 441493 - DNA, 15 bp, Homo sapiens
gacagcattgactgt

SEQ ID NO: 441494 - DNA, 15 bp, Homo sapiens
ggacagcattgactg

SEQ ID NO: 441495 - DNA, 15 bp, Homo sapiens
tggacagcattgact

SEQ ID NO: 441496 - DNA, 15 bp, Homo sapiens
ttggacagcattgac

SEQ ID NO: 441497 - DNA, 15 bp, Homo sapiens
tttggacagcattga

SEQ ID NO: 441498 - DNA, 15 bp, Homo sapiens
ttttggacagcattg

SEQ ID NO: 441499 - DNA, 15 bp, Homo sapiens
cttttggacagcatt

SEQ ID NO: 441500 - DNA, 15 bp, Homo sapiens
tcttttggacagcat

SEQ ID NO: 441501 - DNA, 15 bp, Homo sapiens
gtcttttggacagca

SEQ ID NO: 441502 - DNA, 15 bp, Homo sapiens
agtcttttggacagc

SEQ ID NO: 441503 - DNA, 15 bp, Homo sapiens
aagtcttttggacag

SEQ ID NO: 441504 - DNA, 15 bp, Homo sapiens
aaagtcttttggaca

SEQ ID NO: 441505 - DNA, 15 bp, Homo sapiens
aaaagtcttttggac

SEQ ID NO: 441506 - DNA, 15 bp, Homo sapiens
gaaaagtcttttgga

SEQ ID NO: 441507 - DNA, 15 bp, Homo sapiens
ggaaaagtcttttgg

SEQ ID NO: 441508 - DNA, 15 bp, Homo sapiens
cggaaaagtcttttg

SEQ ID NO: 441509 - DNA, 15 bp, Homo sapiens
acggaaaagtctttt

SEQ ID NO: 441510 - DNA, 15 bp, Homo sapiens
cacggaaaagtcttt

SEQ ID NO: 441511 - DNA, 15 bp, Homo sapiens
tcacggaaaagtctt

SEQ ID NO: 441512 - DNA, 15 bp, Homo sapiens
atcacggaaaagtct

SEQ ID NO: 441513 - DNA, 15 bp, Homo sapiens
gatcacggaaaagtc

SEQ ID NO: 441514 - DNA, 15 bp, Homo sapiens
tgatcacggaaaagt

SEQ ID NO: 441515 - DNA, 15 bp, Homo sapiens
atgatcacggaaaag

SEQ ID NO: 441516 - DNA, 15 bp, Homo sapiens
catgatcacggaaaa

SEQ ID NO: 441517 - DNA, 15 bp, Homo sapiens
ccatgatcacggaaa

SEQ ID NO: 441518 - DNA, 15 bp, Homo sapiens
tccatgatcacggaa

SEQ ID NO: 441519 - DNA, 15 bp, Homo sapiens
ttccatgatcacgga

SEQ ID NO: 441520 - DNA, 15 bp, Homo sapiens
tttccatgatcacgg

SEQ ID NO: 441521 - DNA, 15 bp, Homo sapiens
atttccatgatcacg

SEQ ID NO: 441522 - DNA, 15 bp, Homo sapiens
tatttccatgatcac

SEQ ID NO: 441523 - DNA, 15 bp, Homo sapiens
atatttccatgatca

SEQ ID NO: 441524 - DNA, 15 bp, Homo sapiens
aatatttccatgatc

SEQ ID NO: 441525 - DNA, 15 bp, Homo sapiens
gaatatttccatgat

SEQ ID NO: 441526 - DNA, 15 bp, Homo sapiens
ggaatatttccatga

SEQ ID NO: 441527 - DNA, 15 bp, Homo sapiens
gggaatatttccatg

SEQ ID NO: 441528 - DNA, 15 bp, Homo sapiens
agggaatatttccat

SEQ ID NO: 441529 - DNA, 15 bp, Homo sapiens
cagggaatatttcca

SEQ ID NO: 441530 - DNA, 15 bp, Homo sapiens
gcagggaatatttcc

SEQ ID NO: 441531 - DNA, 15 bp, Homo sapiens
tgcagggaatatttc

SEQ ID NO: 441532 - DNA, 15 bp, Homo sapiens
atgcagggaatattt

SEQ ID NO: 441533 - DNA, 15 bp, Homo sapiens
aatgcagggaatatt

SEQ ID NO: 441534 - DNA, 15 bp, Homo sapiens
caatgcagggaatat

SEQ ID NO: 441535 - DNA, 15 bp, Homo sapiens
acaatgcagggaata

SEQ ID NO: 441536 - DNA, 15 bp, Homo sapiens
gacaatgcagggaat

SEQ ID NO: 441537 - DNA, 15 bp, Homo sapiens
ggacaatgcagggaa

SEQ ID NO: 441538 - DNA, 15 bp, Homo sapiens
tggacaatgcaggga

SEQ ID NO: 441539 - DNA, 15 bp, Homo sapiens
ttggacaatgcaggg

SEQ ID NO: 441540 - DNA, 15 bp, Homo sapiens
attggacaatgcagg

SEQ ID NO: 441541 - DNA, 15 bp, Homo sapiens
tattggacaatgcag

SEQ ID NO: 441542 - DNA, 15 bp, Homo sapiens
gtattggacaatgca

SEQ ID NO: 441543 - DNA, 15 bp, Homo sapiens
tgtattggacaatgc

SEQ ID NO: 441544 - DNA, 15 bp, Homo sapiens
ctgtattggacaatg

SEQ ID NO: 441545 - DNA, 15 bp, Homo sapiens
actgtattggacaat

SEQ ID NO: 441546 - DNA, 15 bp, Homo sapiens
tactgtattggacaa

SEQ ID NO: 441547 - DNA, 15 bp, Homo sapiens
ctactgtattggaca

SEQ ID NO: 441548 - DNA, 15 bp, Homo sapiens
actactgtattggac

SEQ ID NO: 441549 - DNA, 15 bp, Homo sapiens
aactactgtattgga

SEQ ID NO: 441550 - DNA, 15 bp, Homo sapiens
taactactgtattgg

SEQ ID NO: 441551 - DNA, 15 bp, Homo sapiens
ataactactgtattg

SEQ ID NO: 441552 - DNA, 15 bp, Homo sapiens
aataactactgtatt

SEQ ID NO: 441553 - DNA, 15 bp, Homo sapiens
taataactactgtat

SEQ ID NO: 441554 - DNA, 15 bp, Homo sapiens
ctaataactactgta

SEQ ID NO: 441555 - DNA, 15 bp, Homo sapiens
gctaataactactgt

SEQ ID NO: 441556 - DNA, 15 bp, Homo sapiens
ggctaataactactg

SEQ ID NO: 441557 - DNA, 15 bp, Homo sapiens
tggctaataactact

SEQ ID NO: 441558 - DNA, 15 bp, Homo sapiens
gtggctaataactac

SEQ ID NO: 441559 - DNA, 15 bp, Homo sapiens
tgtggctaataacta

SEQ ID NO: 441560 - DNA, 15 bp, Homo sapiens
atgtggctaataact

SEQ ID NO: 441561 - DNA, 15 bp, Homo sapiens
catgtggctaataac

SEQ ID NO: 441562 - DNA, 15 bp, Homo sapiens
gcatgtggctaataa

SEQ ID NO: 441563 - DNA, 15 bp, Homo sapiens
tgcatgtggctaata

SEQ ID NO: 441564 - DNA, 15 bp, Homo sapiens
ctgcatgtggctaat

SEQ ID NO: 441565 - DNA, 15 bp, Homo sapiens
gctgcatgtggctaa

SEQ ID NO: 441566 - DNA, 15 bp, Homo sapiens
tgctgcatgtggcta

SEQ ID NO: 441567 - DNA, 15 bp, Homo sapiens
gtgctgcatgtggct

SEQ ID NO: 441568 - DNA, 15 bp, Homo sapiens
ggtgctgcatgtggc

SEQ ID NO: 441569 - DNA, 15 bp, Homo sapiens
aggtgctgcatgtgg

SEQ ID NO: 441570 - DNA, 15 bp, Homo sapiens
caggtgctgcatgtg

SEQ ID NO: 441571 - DNA, 15 bp, Homo sapiens
tcaggtgctgcatgt

SEQ ID NO: 441572 - DNA, 15 bp, Homo sapiens
ctcaggtgctgcatg

SEQ ID NO: 441573 - DNA, 15 bp, Homo sapiens
gctcaggtgctgcat

SEQ ID NO: 441574 - DNA, 15 bp, Homo sapiens
tgctcaggtgctgca

SEQ ID NO: 441575 - DNA, 15 bp, Homo sapiens
gtgctcaggtgctgc

SEQ ID NO: 441576 - DNA, 15 bp, Homo sapiens
agtgctcaggtgctg

SEQ ID NO: 441577 - DNA, 15 bp, Homo sapiens
aagtgctcaggtgct

SEQ ID NO: 441578 - DNA, 15 bp, Homo sapiens
caagtgctcaggtgc

SEQ ID NO: 441579 - DNA, 15 bp, Homo sapiens
tcaagtgctcaggtg

SEQ ID NO: 441580 - DNA, 15 bp, Homo sapiens
ttcaagtgctcaggt

SEQ ID NO: 441581 - DNA, 15 bp, Homo sapiens
tttcaagtgctcagg

SEQ ID NO: 441582 - DNA, 15 bp, Homo sapiens
atttcaagtgctcag

SEQ ID NO: 441583 - DNA, 15 bp, Homo sapiens
tatttcaagtgctca

SEQ ID NO: 441584 - DNA, 15 bp, Homo sapiens
atatttcaagtgctc

SEQ ID NO: 441585 - DNA, 15 bp, Homo sapiens
catatttcaagtgct

SEQ ID NO: 441586 - DNA, 15 bp, Homo sapiens
ccatatttcaagtgc

SEQ ID NO: 441587 - DNA, 15 bp, Homo sapiens
gccatatttcaagtg

SEQ ID NO: 441588 - DNA, 15 bp, Homo sapiens
agccatatttcaagt

SEQ ID NO: 441589 - DNA, 15 bp, Homo sapiens
tagccatatttcaag

SEQ ID NO: 441590 - DNA, 15 bp, Homo sapiens
ctagccatatttcaa

SEQ ID NO: 441591 - DNA, 15 bp, Homo sapiens
actagccatatttca

SEQ ID NO: 441592 - DNA, 15 bp, Homo sapiens
cactagccatatttc

SEQ ID NO: 441593 - DNA, 15 bp, Homo sapiens
tcactagccatattt

SEQ ID NO: 441594 - DNA, 15 bp, Homo sapiens
ctcactagccatatt

SEQ ID NO: 441595 - DNA, 15 bp, Homo sapiens
tctcactagccatat

SEQ ID NO: 441596 - DNA, 15 bp, Homo sapiens
atctcactagccata

SEQ ID NO: 441597 - DNA, 15 bp, Homo sapiens
catctcactagccat

SEQ ID NO: 441598 - DNA, 15 bp, Homo sapiens
ccatctcactagcca

SEQ ID NO: 441599 - DNA, 15 bp, Homo sapiens
tccatctcactagcc

SEQ ID NO: 441600 - DNA, 15 bp, Homo sapiens
ctccatctcactagc

SEQ ID NO: 441601 - DNA, 15 bp, Homo sapiens
cctccatctcactag

SEQ ID NO: 441602 - DNA, 15 bp, Homo sapiens
tcctccatctcacta

SEQ ID NO: 441603 - DNA, 15 bp, Homo sapiens
ttcctccatctcact

SEQ ID NO: 441604 - DNA, 15 bp, Homo sapiens
tttcctccatctcac

SEQ ID NO: 441605 - DNA, 15 bp, Homo sapiens
atttcctccatctca

SEQ ID NO: 441606 - DNA, 15 bp, Homo sapiens
catttcctccatctc

SEQ ID NO: 441607 - DNA, 15 bp, Homo sapiens
tcatttcctccatct

SEQ ID NO: 441608 - DNA, 15 bp, Homo sapiens
ttcatttcctccatc

SEQ ID NO: 441609 - DNA, 15 bp, Homo sapiens
attcatttcctccat

SEQ ID NO: 441610 - DNA, 15 bp, Homo sapiens
aattcatttcctcca

SEQ ID NO: 441611 - DNA, 15 bp, Homo sapiens
aaattcatttcctcc

SEQ ID NO: 441612 - DNA, 15 bp, Homo sapiens
aaaattcatttcctc

SEQ ID NO: 441613 - DNA, 15 bp, Homo sapiens
aaaaattcatttcct

SEQ ID NO: 441614 - DNA, 15 bp, Homo sapiens
taaaaattcatttcc

SEQ ID NO: 441615 - DNA, 15 bp, Homo sapiens
ttaaaaattcatttc

SEQ ID NO: 441616 - DNA, 15 bp, Homo sapiens
attaaaaattcattt

SEQ ID NO: 441617 - DNA, 15 bp, Homo sapiens
aattaaaaattcatt

SEQ ID NO: 441618 - DNA, 15 bp, Homo sapiens
aaattaaaaattcat

SEQ ID NO: 441619 - DNA, 15 bp, Homo sapiens
aaaattaaaaattca

SEQ ID NO: 441620 - DNA, 15 bp, Homo sapiens
caaaattaaaaattc

SEQ ID NO: 441621 - DNA, 15 bp, Homo sapiens
acaaaattaaaaatt

SEQ ID NO: 441622 - DNA, 15 bp, Homo sapiens
aacaaaattaaaaat

SEQ ID NO: 441623 - DNA, 15 bp, Homo sapiens
aaacaaaattaaaaa

SEQ ID NO: 441624 - DNA, 15 bp, Homo sapiens
caaacaaaattaaaa

SEQ ID NO: 441625 - DNA, 15 bp, Homo sapiens
ccaaacaaaattaaa

SEQ ID NO: 441626 - DNA, 15 bp, Homo sapiens
accaaacaaaattaa

SEQ ID NO: 441627 - DNA, 15 bp, Homo sapiens
aaccaaacaaaatta

SEQ ID NO: 441628 - DNA, 15 bp, Homo sapiens
aaaccaaacaaaatt

SEQ ID NO: 441629 - DNA, 15 bp, Homo sapiens
aaaaccaaacaaaat

SEQ ID NO: 441630 - DNA, 15 bp, Homo sapiens
taaaaccaaacaaaa

SEQ ID NO: 441631 - DNA, 15 bp, Homo sapiens
ttaaaaccaaacaaa

SEQ ID NO: 441632 - DNA, 15 bp, Homo sapiens
gttaaaaccaaacaa

SEQ ID NO: 441633 - DNA, 15 bp, Homo sapiens
agttaaaaccaaaca

SEQ ID NO: 441634 - DNA, 15 bp, Homo sapiens
tagttaaaaccaaac

SEQ ID NO: 441635 - DNA, 15 bp, Homo sapiens
ttagttaaaaccaaa

SEQ ID NO: 441636 - DNA, 15 bp, Homo sapiens
attagttaaaaccaa

SEQ ID NO: 441637 - DNA, 15 bp, Homo sapiens
aattagttaaaacca

SEQ ID NO: 441638 - DNA, 15 bp, Homo sapiens
taattagttaaaacc

SEQ ID NO: 441639 - DNA, 15 bp, Homo sapiens
ttaattagttaaaac

SEQ ID NO: 441640 - DNA, 15 bp, Homo sapiens
tttaattagttaaaa

SEQ ID NO: 441641 - DNA, 15 bp, Homo sapiens
ttttaattagttaaa

SEQ ID NO: 441642 - DNA, 15 bp, Homo sapiens
attttaattagttaa

SEQ ID NO: 441643 - DNA, 15 bp, Homo sapiens
tattttaattagtta

SEQ ID NO: 441644 - DNA, 15 bp, Homo sapiens
atattttaattagtt

SEQ ID NO: 441645 - DNA, 15 bp, Homo sapiens
tatattttaattagt

SEQ ID NO: 441646 - DNA, 15 bp, Homo sapiens
ttatattttaattag

SEQ ID NO: 441647 - DNA, 15 bp, Homo sapiens
tttatattttaatta

SEQ ID NO: 441648 - DNA, 15 bp, Homo sapiens
atttatattttaatt

SEQ ID NO: 441649 - DNA, 15 bp, Homo sapiens
tatttatattttaat

SEQ ID NO: 441650 - DNA, 15 bp, Homo sapiens
ttatttatattttaa

SEQ ID NO: 441651 - DNA, 15 bp, Homo sapiens
gttatttatatttta

SEQ ID NO: 441652 - DNA, 15 bp, Homo sapiens
ggttatttatatttt

SEQ ID NO: 441653 - DNA, 15 bp, Homo sapiens
tggttatttatattt

SEQ ID NO: 441654 - DNA, 15 bp, Homo sapiens
gtggttatttatatt

SEQ ID NO: 441655 - DNA, 15 bp, Homo sapiens
tgtggttatttatat

SEQ ID NO: 441656 - DNA, 15 bp, Homo sapiens
atgtggttatttata

SEQ ID NO: 441657 - DNA, 15 bp, Homo sapiens
catgtggttatttat

SEQ ID NO: 441658 - DNA, 15 bp, Homo sapiens
gcatgtggttattta

SEQ ID NO: 441659 - DNA, 15 bp, Homo sapiens
tgcatgtggttattt

SEQ ID NO: 441660 - DNA, 15 bp, Homo sapiens
ctgcatgtggttatt

SEQ ID NO: 441661 - DNA, 15 bp, Homo sapiens
actgcatgtggttat

SEQ ID NO: 441662 - DNA, 15 bp, Homo sapiens
tactgcatgtggtta

SEQ ID NO: 441663 - DNA, 15 bp, Homo sapiens
ctactgcatgtggtt

SEQ ID NO: 441664 - DNA, 15 bp, Homo sapiens
tctactgcatgtggt

SEQ ID NO: 441665 - DNA, 15 bp, Homo sapiens
ttctactgcatgtgg

SEQ ID NO: 441666 - DNA, 15 bp, Homo sapiens
tttctactgcatgtg

SEQ ID NO: 441667 - DNA, 15 bp, Homo sapiens
gtttctactgcatgt

SEQ ID NO: 441668 - DNA, 15 bp, Homo sapiens
agtttctactgcatg

SEQ ID NO: 441669 - DNA, 15 bp, Homo sapiens
cagtttctactgcat

SEQ ID NO: 441670 - DNA, 15 bp, Homo sapiens
acagtttctactgca

SEQ ID NO: 441671 - DNA, 15 bp, Homo sapiens
gacagtttctactgc

SEQ ID NO: 441672 - DNA, 15 bp, Homo sapiens
cgacagtttctactg

SEQ ID NO: 441673 - DNA, 15 bp, Homo sapiens
acgacagtttctact

SEQ ID NO: 441674 - DNA, 15 bp, Homo sapiens
tacgacagtttctac

SEQ ID NO: 441675 - DNA, 15 bp, Homo sapiens
atacgacagtttcta

SEQ ID NO: 441676 - DNA, 15 bp, Homo sapiens
aatacgacagtttct

SEQ ID NO: 441677 - DNA, 15 bp, Homo sapiens
caatacgacagtttc

SEQ ID NO: 441678 - DNA, 15 bp, Homo sapiens
tcaatacgacagttt

SEQ ID NO: 441679 - DNA, 15 bp, Homo sapiens
ttcaatacgacagtt

SEQ ID NO: 441680 - DNA, 15 bp, Homo sapiens
tttcaatacgacagt

SEQ ID NO: 441681 - DNA, 15 bp, Homo sapiens
ttttcaatacgacag

SEQ ID NO: 441682 - DNA, 15 bp, Homo sapiens
gttttcaatacgaca

SEQ ID NO: 441683 - DNA, 15 bp, Homo sapiens
cgttttcaatacgac

SEQ ID NO: 441684 - DNA, 15 bp, Homo sapiens
ccgttttcaatacga

SEQ ID NO: 441685 - DNA, 15 bp, Homo sapiens
tccgttttcaatacg

SEQ ID NO: 441686 - DNA, 15 bp, Homo sapiens
atccgttttcaatac

SEQ ID NO: 441687 - DNA, 15 bp, Homo sapiens
catccgttttcaata

SEQ ID NO: 441688 - DNA, 15 bp, Homo sapiens
ccatccgttttcaat

SEQ ID NO: 441689 - DNA, 15 bp, Homo sapiens
gccatccgttttcaa

SEQ ID NO: 441690 - DNA, 15 bp, Homo sapiens
tgccatccgttttca

SEQ ID NO: 441691 - DNA, 15 bp, Homo sapiens
gtgccatccgttttc

SEQ ID NO: 441692 - DNA, 15 bp, Homo sapiens
tgtgccatccgtttt

SEQ ID NO: 441693 - DNA, 15 bp, Homo sapiens
atgtgccatccgttt

SEQ ID NO: 441694 - DNA, 15 bp, Homo sapiens
tatgtgccatccgtt

SEQ ID NO: 441695 - DNA, 15 bp, Homo sapiens
atatgtgccatccgt

SEQ ID NO: 441696 - DNA, 15 bp, Homo sapiens
gatatgtgccatccg

SEQ ID NO: 441697 - DNA, 15 bp, Homo sapiens
agatatgtgccatcc

SEQ ID NO: 441698 - DNA, 15 bp, Homo sapiens
tagatatgtgccatc

SEQ ID NO: 441699 - DNA, 15 bp, Homo sapiens
atagatatgtgccat

SEQ ID NO: 441700 - DNA, 15 bp, Homo sapiens
tatagatatgtgcca

SEQ ID NO: 441701 - DNA, 15 bp, Homo sapiens
ttatagatatgtgcc

SEQ ID NO: 441702 - DNA, 15 bp, Homo sapiens
attatagatatgtgc

SEQ ID NO: 441703 - DNA, 15 bp, Homo sapiens
cattatagatatgtg

SEQ ID NO: 441704 - DNA, 15 bp, Homo sapiens
acattatagatatgt

SEQ ID NO: 441705 - DNA, 15 bp, Homo sapiens
gacattatagatatg

SEQ ID NO: 441706 - DNA, 15 bp, Homo sapiens
ggacattatagatat

SEQ ID NO: 441707 - DNA, 15 bp, Homo sapiens
gggacattatagata

SEQ ID NO: 441708 - DNA, 15 bp, Homo sapiens
agggacattatagat

SEQ ID NO: 441709 - DNA, 15 bp, Homo sapiens
aagggacattataga

SEQ ID NO: 441710 - DNA, 15 bp, Homo sapiens
aaagggacattatag

SEQ ID NO: 441711 - DNA, 15 bp, Homo sapiens
caaagggacattata

SEQ ID NO: 441712 - DNA, 15 bp, Homo sapiens
acaaagggacattat

SEQ ID NO: 441713 - DNA, 15 bp, Homo sapiens
gacaaagggacatta

SEQ ID NO: 441714 - DNA, 15 bp, Homo sapiens
tgacaaagggacatt

SEQ ID NO: 441715 - DNA, 15 bp, Homo sapiens
ctgacaaagggacat

SEQ ID NO: 441716 - DNA, 15 bp, Homo sapiens
cctgacaaagggaca

SEQ ID NO: 441717 - DNA, 15 bp, Homo sapiens
tcctgacaaagggac

SEQ ID NO: 441718 - DNA, 15 bp, Homo sapiens
ttcctgacaaaggga

SEQ ID NO: 441719 - DNA, 15 bp, Homo sapiens
attcctgacaaaggg

SEQ ID NO: 441720 - DNA, 15 bp, Homo sapiens
aattcctgacaaagg

SEQ ID NO: 441721 - DNA, 15 bp, Homo sapiens
aaattcctgacaaag

SEQ ID NO: 441722 - DNA, 15 bp, Homo sapiens
aaaattcctgacaaa

SEQ ID NO: 441723 - DNA, 15 bp, Homo sapiens
gaaaattcctgacaa

SEQ ID NO: 441724 - DNA, 15 bp, Homo sapiens
agaaaattcctgaca

SEQ ID NO: 441725 - DNA, 15 bp, Homo sapiens
cagaaaattcctgac

SEQ ID NO: 441726 - DNA, 15 bp, Homo sapiens
tcagaaaattcctga

SEQ ID NO: 441727 - DNA, 15 bp, Homo sapiens
ttcagaaaattcctg

SEQ ID NO: 441728 - DNA, 15 bp, Homo sapiens
gttcagaaaattcct

SEQ ID NO: 441729 - DNA, 15 bp, Homo sapiens
agttcagaaaattcc

SEQ ID NO: 441730 - DNA, 15 bp, Homo sapiens
gagttcagaaaattc

SEQ ID NO: 441731 - DNA, 15 bp, Homo sapiens
agagttcagaaaatt

SEQ ID NO: 441732 - DNA, 15 bp, Homo sapiens
aagagttcagaaaat

SEQ ID NO: 441733 - DNA, 15 bp, Homo sapiens
gaagagttcagaaaa

SEQ ID NO: 441734 - DNA, 15 bp, Homo sapiens
ggaagagttcagaaa

SEQ ID NO: 441735 - DNA, 15 bp, Homo sapiens
gggaagagttcagaa

SEQ ID NO: 441736 - DNA, 15 bp, Homo sapiens
ggggaagagttcaga

SEQ ID NO: 441737 - DNA, 15 bp, Homo sapiens
aggggaagagttcag

SEQ ID NO: 441738 - DNA, 15 bp, Homo sapiens
gaggggaagagttca

SEQ ID NO: 441739 - DNA, 15 bp, Homo sapiens
ggaggggaagagttc

SEQ ID NO: 441740 - DNA, 15 bp, Homo sapiens
gggaggggaagagtt

SEQ ID NO: 441741 - DNA, 15 bp, Homo sapiens
ggggaggggaagagt

SEQ ID NO: 441742 - DNA, 15 bp, Homo sapiens
aggggaggggaagag

SEQ ID NO: 441743 - DNA, 15 bp, Homo sapiens
caggggaggggaaga

SEQ ID NO: 441744 - DNA, 15 bp, Homo sapiens
gcaggggaggggaag

SEQ ID NO: 441745 - DNA, 15 bp, Homo sapiens
ggcaggggaggggaa

SEQ ID NO: 441746 - DNA, 15 bp, Homo sapiens
tggcaggggagggga

SEQ ID NO: 441747 - DNA, 15 bp, Homo sapiens
ctggcaggggagggg

SEQ ID NO: 441748 - DNA, 15 bp, Homo sapiens
cctggcaggggaggg

SEQ ID NO: 441749 - DNA, 15 bp, Homo sapiens
acctggcaggggagg

SEQ ID NO: 441750 - DNA, 15 bp, Homo sapiens
aacctggcaggggag

SEQ ID NO: 441751 - DNA, 15 bp, Homo sapiens
caacctggcagggga

SEQ ID NO: 441752 - DNA, 15 bp, Homo sapiens
tcaacctggcagggg

SEQ ID NO: 441753 - DNA, 15 bp, Homo sapiens
gtcaacctggcaggg

SEQ ID NO: 441754 - DNA, 15 bp, Homo sapiens
agtcaacctggcagg

SEQ ID NO: 441755 - DNA, 15 bp, Homo sapiens
aagtcaacctggcag

SEQ ID NO: 441756 - DNA, 15 bp, Homo sapiens
caagtcaacctggca

SEQ ID NO: 441757 - DNA, 15 bp, Homo sapiens
gcaagtcaacctggc

SEQ ID NO: 441758 - DNA, 15 bp, Homo sapiens
ggcaagtcaacctgg

SEQ ID NO: 441759 - DNA, 15 bp, Homo sapiens
gggcaagtcaacctg

SEQ ID NO: 441760 - DNA, 15 bp, Homo sapiens
agggcaagtcaacct

SEQ ID NO: 441761 - DNA, 15 bp, Homo sapiens
cagggcaagtcaacc

SEQ ID NO: 441762 - DNA, 15 bp, Homo sapiens
gcagggcaagtcaac

SEQ ID NO: 441763 - DNA, 15 bp, Homo sapiens
ggcagggcaagtcaa

SEQ ID NO: 441764 - DNA, 15 bp, Homo sapiens
aggcagggcaagtca

SEQ ID NO: 441765 - DNA, 15 bp, Homo sapiens
gaggcagggcaagtc

SEQ ID NO: 441766 - DNA, 15 bp, Homo sapiens
ggaggcagggcaagt

SEQ ID NO: 441767 - DNA, 15 bp, Homo sapiens
aggaggcagggcaag

SEQ ID NO: 441768 - DNA, 15 bp, Homo sapiens
caggaggcagggcaa

SEQ ID NO: 441769 - DNA, 15 bp, Homo sapiens
gcaggaggcagggca

SEQ ID NO: 441770 - DNA, 15 bp, Homo sapiens
agcaggaggcagggc

SEQ ID NO: 441771 - DNA, 15 bp, Homo sapiens
tagcaggaggcaggg

SEQ ID NO: 441772 - DNA, 15 bp, Homo sapiens
ctagcaggaggcagg

SEQ ID NO: 441773 - DNA, 15 bp, Homo sapiens
actagcaggaggcag

SEQ ID NO: 441774 - DNA, 15 bp, Homo sapiens
aactagcaggaggca

SEQ ID NO: 441775 - DNA, 15 bp, Homo sapiens
aaactagcaggaggc

SEQ ID NO: 441776 - DNA, 15 bp, Homo sapiens
gaaactagcaggagg

SEQ ID NO: 441777 - DNA, 15 bp, Homo sapiens
agaaactagcaggag

SEQ ID NO: 441778 - DNA, 15 bp, Homo sapiens
aagaaactagcagga

SEQ ID NO: 441779 - DNA, 15 bp, Homo sapiens
aaagaaactagcagg

SEQ ID NO: 441780 - DNA, 15 bp, Homo sapiens
aaaagaaactagcag

SEQ ID NO: 441781 - DNA, 15 bp, Homo sapiens
gaaaagaaactagca

SEQ ID NO: 441782 - DNA, 15 bp, Homo sapiens
tgaaaagaaactagc

SEQ ID NO: 441783 - DNA, 15 bp, Homo sapiens
atgaaaagaaactag

SEQ ID NO: 441784 - DNA, 15 bp, Homo sapiens
aatgaaaagaaacta

SEQ ID NO: 441785 - DNA, 15 bp, Homo sapiens
aaatgaaaagaaact

SEQ ID NO: 441786 - DNA, 15 bp, Homo sapiens
aaaatgaaaagaaac

SEQ ID NO: 441787 - DNA, 15 bp, Homo sapiens
aaaaatgaaaagaaa

SEQ ID NO: 441788 - DNA, 15 bp, Homo sapiens
aaaaaatgaaaagaa

SEQ ID NO: 441789 - DNA, 15 bp, Homo sapiens
aaaaaaatgaaaaga

SEQ ID NO: 441790 - DNA, 15 bp, Homo sapiens
aaaaaaaatgaaaag

SEQ ID NO: 441791 - DNA, 15 bp, Homo sapiens
aaaaaaaaatgaaaa

SEQ ID NO: 441792 - DNA, 15 bp, Homo sapiens
aaaaaaaaaatgaaa

SEQ ID NO: 441793 - DNA, 15 bp, Homo sapiens
cctaaaaaaaaaaaa

SEQ ID NO: 441794 - DNA, 15 bp, Homo sapiens
gcctaaaaaaaaaaa

SEQ ID NO: 441795 - DNA, 15 bp, Homo sapiens
cgcctaaaaaaaaaa

SEQ ID NO: 441796 - DNA, 15 bp, Homo sapiens
ccgcctaaaaaaaaa

SEQ ID NO: 441797 - DNA, 15 bp, Homo sapiens
tccgcctaaaaaaaa

SEQ ID NO: 441798 - DNA, 15 bp, Homo sapiens
ctccgcctaaaaaaa

SEQ ID NO: 441799 - DNA, 15 bp, Homo sapiens
actccgcctaaaaaa

SEQ ID NO: 441800 - DNA, 15 bp, Homo sapiens
gactccgcctaaaaa

SEQ ID NO: 441801 - DNA, 15 bp, Homo sapiens
agactccgcctaaaa

SEQ ID NO: 441802 - DNA, 15 bp, Homo sapiens
aagactccgcctaaa

SEQ ID NO: 441803 - DNA, 15 bp, Homo sapiens
caagactccgcctaa

SEQ ID NO: 441804 - DNA, 15 bp, Homo sapiens
gcaagactccgccta

SEQ ID NO: 441805 - DNA, 15 bp, Homo sapiens
agcaagactccgcct

SEQ ID NO: 441806 - DNA, 15 bp, Homo sapiens
cagcaagactccgcc

SEQ ID NO: 441807 - DNA, 15 bp, Homo sapiens
acagcaagactccgc

SEQ ID NO: 441808 - DNA, 15 bp, Homo sapiens
cacagcaagactccg

SEQ ID NO: 441809 - DNA, 15 bp, Homo sapiens
acacagcaagactcc

SEQ ID NO: 441810 - DNA, 15 bp, Homo sapiens
aacacagcaagactc

SEQ ID NO: 441811 - DNA, 15 bp, Homo sapiens
caacacagcaagact

SEQ ID NO: 441812 - DNA, 15 bp, Homo sapiens
gcaacacagcaagac

SEQ ID NO: 441813 - DNA, 15 bp, Homo sapiens
ggcaacacagcaaga

SEQ ID NO: 441814 - DNA, 15 bp, Homo sapiens
gggcaacacagcaag

SEQ ID NO: 441815 - DNA, 15 bp, Homo sapiens
tgggcaacacagcaa

SEQ ID NO: 441816 - DNA, 15 bp, Homo sapiens
ctgggcaacacagca

SEQ ID NO: 441817 - DNA, 15 bp, Homo sapiens
cctgggcaacacagc

SEQ ID NO: 441818 - DNA, 15 bp, Homo sapiens
gcctgggcaacacag

SEQ ID NO: 441819 - DNA, 15 bp, Homo sapiens
agcctgggcaacaca

SEQ ID NO: 441820 - DNA, 15 bp, Homo sapiens
cagcctgggcaacac

SEQ ID NO: 441821 - DNA, 15 bp, Homo sapiens
agcgccactgcactc

SEQ ID NO: 441822 - DNA, 15 bp, Homo sapiens
tagcgccactgcact

SEQ ID NO: 441823 - DNA, 15 bp, Homo sapiens
atagcgccactgcac

SEQ ID NO: 441824 - DNA, 15 bp, Homo sapiens
gatagcgccactgca

SEQ ID NO: 441825 - DNA, 15 bp, Homo sapiens
agatagcgccactgc

SEQ ID NO: 441826 - DNA, 15 bp, Homo sapiens
aagatagcgccactg

SEQ ID NO: 441827 - DNA, 15 bp, Homo sapiens
caagatagcgccact

SEQ ID NO: 441828 - DNA, 15 bp, Homo sapiens
ccaagatagcgccac

SEQ ID NO: 441829 - DNA, 15 bp, Homo sapiens
gccaagatagcgcca

SEQ ID NO: 441830 - DNA, 15 bp, Homo sapiens
agccaagatagcgcc

SEQ ID NO: 441831 - DNA, 15 bp, Homo sapiens
gagccaagatagcgc

SEQ ID NO: 441832 - DNA, 15 bp, Homo sapiens
tgagccaagatagcg

SEQ ID NO: 441833 - DNA, 15 bp, Homo sapiens
gtgagccaagatagc

SEQ ID NO: 441834 - DNA, 15 bp, Homo sapiens
agtgagccaagatag

SEQ ID NO: 441835 - DNA, 15 bp, Homo sapiens
cagtgagccaagata

SEQ ID NO: 441836 - DNA, 15 bp, Homo sapiens
gggaggcagaggttg

SEQ ID NO: 441837 - DNA, 15 bp, Homo sapiens
tgggaggcagaggtt

SEQ ID NO: 441838 - DNA, 15 bp, Homo sapiens
ttgggaggcagaggt

SEQ ID NO: 441839 - DNA, 15 bp, Homo sapiens
aacttgggaggcaga

SEQ ID NO: 441840 - DNA, 15 bp, Homo sapiens
gaacttgggaggcag

SEQ ID NO: 441841 - DNA, 15 bp, Homo sapiens
tgaacttgggaggca

SEQ ID NO: 441842 - DNA, 15 bp, Homo sapiens
ttgaacttgggaggc

SEQ ID NO: 441843 - DNA, 15 bp, Homo sapiens
tttgaacttgggagg

SEQ ID NO: 441844 - DNA, 15 bp, Homo sapiens
gtttgaacttgggag

SEQ ID NO: 441845 - DNA, 15 bp, Homo sapiens
tgtttgaacttggga

SEQ ID NO: 441846 - DNA, 15 bp, Homo sapiens
ttgtttgaacttggg

SEQ ID NO: 441847 - DNA, 15 bp, Homo sapiens
attgtttgaacttgg

SEQ ID NO: 441848 - DNA, 15 bp, Homo sapiens
aattgtttgaacttg

SEQ ID NO: 441849 - DNA, 15 bp, Homo sapiens
gaattgtttgaactt

SEQ ID NO: 441850 - DNA, 15 bp, Homo sapiens
agaattgtttgaact

SEQ ID NO: 441851 - DNA, 15 bp, Homo sapiens
gagaattgtttgaac

SEQ ID NO: 441852 - DNA, 15 bp, Homo sapiens
agagaattgtttgaa

SEQ ID NO: 441853 - DNA, 15 bp, Homo sapiens
cagagaattgtttga

SEQ ID NO: 441854 - DNA, 15 bp, Homo sapiens
gcagagaattgtttg

SEQ ID NO: 441855 - DNA, 15 bp, Homo sapiens
ggcagagaattgttt

SEQ ID NO: 441856 - DNA, 15 bp, Homo sapiens
aggcagagaattgtt

SEQ ID NO: 441857 - DNA, 15 bp, Homo sapiens
aaggcagagaattgt

SEQ ID NO: 441858 - DNA, 15 bp, Homo sapiens
taaggcagagaattg

SEQ ID NO: 441859 - DNA, 15 bp, Homo sapiens
ctaaggcagagaatt

SEQ ID NO: 441860 - DNA, 15 bp, Homo sapiens
gctaaggcagagaat

SEQ ID NO: 441861 - DNA, 15 bp, Homo sapiens
ggctaaggcagagaa

SEQ ID NO: 441862 - DNA, 15 bp, Homo sapiens
aggctaaggcagaga

SEQ ID NO: 441863 - DNA, 15 bp, Homo sapiens
gaggctaaggcagag

SEQ ID NO: 441864 - DNA, 15 bp, Homo sapiens
ggaggctaaggcaga

SEQ ID NO: 441865 - DNA, 15 bp, Homo sapiens
gttcaggaggctaag

SEQ ID NO: 441866 - DNA, 15 bp, Homo sapiens
tgttcaggaggctaa

SEQ ID NO: 441867 - DNA, 15 bp, Homo sapiens
ctgttcaggaggcta

SEQ ID NO: 441868 - DNA, 15 bp, Homo sapiens
gctgttcaggaggct

SEQ ID NO: 441869 - DNA, 15 bp, Homo sapiens
agctgttcaggaggc

SEQ ID NO: 441870 - DNA, 15 bp, Homo sapiens
cagctgttcaggagg

SEQ ID NO: 441871 - DNA, 15 bp, Homo sapiens
ccagctgttcaggag

SEQ ID NO: 441872 - DNA, 15 bp, Homo sapiens
cccagctgttcagga

SEQ ID NO: 441873 - DNA, 15 bp, Homo sapiens
tcccagctgttcagg

SEQ ID NO: 441874 - DNA, 15 bp, Homo sapiens
atcccagctgttcag

SEQ ID NO: 441875 - DNA, 15 bp, Homo sapiens
aatcccagctgttca

SEQ ID NO: 441876 - DNA, 15 bp, Homo sapiens
caatcccagctgttc

SEQ ID NO: 441877 - DNA, 15 bp, Homo sapiens
acaatcccagctgtt

SEQ ID NO: 441878 - DNA, 15 bp, Homo sapiens
tacaatcccagctgt

SEQ ID NO: 441879 - DNA, 15 bp, Homo sapiens
ctacaatcccagctg

SEQ ID NO: 441880 - DNA, 15 bp, Homo sapiens
cctacaatcccagct

SEQ ID NO: 441881 - DNA, 15 bp, Homo sapiens
gcctacaatcccagc

SEQ ID NO: 441882 - DNA, 15 bp, Homo sapiens
tgcctacaatcccag

SEQ ID NO: 441883 - DNA, 15 bp, Homo sapiens
gtgcctacaatccca

SEQ ID NO: 441884 - DNA, 15 bp, Homo sapiens
ggtgcctacaatccc

SEQ ID NO: 441885 - DNA, 15 bp, Homo sapiens
gggtgcctacaatcc

SEQ ID NO: 441886 - DNA, 15 bp, Homo sapiens
tgggtgcctacaatc

SEQ ID NO: 441887 - DNA, 15 bp, Homo sapiens
gtgggtgcctacaat

SEQ ID NO: 441888 - DNA, 15 bp, Homo sapiens
ggtgggtgcctacaa

SEQ ID NO: 441889 - DNA, 15 bp, Homo sapiens
tggtgggtgcctaca

SEQ ID NO: 441890 - DNA, 15 bp, Homo sapiens
gtggtgggtgcctac

SEQ ID NO: 441891 - DNA, 15 bp, Homo sapiens
ggtggtgggtgccta

SEQ ID NO: 441892 - DNA, 15 bp, Homo sapiens
tgggcgtggtggtgg

SEQ ID NO: 441893 - DNA, 15 bp, Homo sapiens
ctgggcgtggtggtg

SEQ ID NO: 441894 - DNA, 15 bp, Homo sapiens
gctgggcgtggtggt

SEQ ID NO: 441895 - DNA, 15 bp, Homo sapiens
taaaactctgtctct

SEQ ID NO: 441896 - DNA, 15 bp, Homo sapiens
gtaaaactctgtctc

SEQ ID NO: 441897 - DNA, 15 bp, Homo sapiens
ggtaaaactctgtct

SEQ ID NO: 441898 - DNA, 15 bp, Homo sapiens
tggtaaaactctgtc

SEQ ID NO: 441899 - DNA, 15 bp, Homo sapiens
gtggtaaaactctgt

SEQ ID NO: 441900 - DNA, 15 bp, Homo sapiens
ggtggtaaaactctg

SEQ ID NO: 441901 - DNA, 15 bp, Homo sapiens
aggtggtaaaactct

SEQ ID NO: 441902 - DNA, 15 bp, Homo sapiens
aaggtggtaaaactc

SEQ ID NO: 441903 - DNA, 15 bp, Homo sapiens
caaggtggtaaaact

SEQ ID NO: 441904 - DNA, 15 bp, Homo sapiens
ccaaggtggtaaaac

SEQ ID NO: 441905 - DNA, 15 bp, Homo sapiens
gccaaggtggtaaaa

SEQ ID NO: 441906 - DNA, 15 bp, Homo sapiens
ggccaaggtggtaaa

SEQ ID NO: 441907 - DNA, 15 bp, Homo sapiens
tggccaaggtggtaa

SEQ ID NO: 441908 - DNA, 15 bp, Homo sapiens
ctggccaaggtggta

SEQ ID NO: 441909 - DNA, 15 bp, Homo sapiens
cctggccaaggtggt

SEQ ID NO: 441910 - DNA, 15 bp, Homo sapiens
gcctggccaaggtgg

SEQ ID NO: 441911 - DNA, 15 bp, Homo sapiens
agcctggccaaggtg

SEQ ID NO: 441912 - DNA, 15 bp, Homo sapiens
cagcctggccaaggt

SEQ ID NO: 441913 - DNA, 15 bp, Homo sapiens
ccagcctggccaagg

SEQ ID NO: 441914 - DNA, 15 bp, Homo sapiens
accagcctggccaag

SEQ ID NO: 441915 - DNA, 15 bp, Homo sapiens
cgaggtcaggagttc

SEQ ID NO: 441916 - DNA, 15 bp, Homo sapiens
acgaggtcaggagtt

SEQ ID NO: 441917 - DNA, 15 bp, Homo sapiens
cacgaggtcaggagt

SEQ ID NO: 441918 - DNA, 15 bp, Homo sapiens
cgggtggatcacgag

SEQ ID NO: 441919 - DNA, 15 bp, Homo sapiens
gcgggtggatcacga

SEQ ID NO: 441920 - DNA, 15 bp, Homo sapiens
ggcgggtggatcacg

SEQ ID NO: 441921 - DNA, 15 bp, Homo sapiens
tggcgggtggatcac

SEQ ID NO: 441922 - DNA, 15 bp, Homo sapiens
gtggcgggtggatca

SEQ ID NO: 441923 - DNA, 15 bp, Homo sapiens
cgtggcgggtggatc

SEQ ID NO: 441924 - DNA, 15 bp, Homo sapiens
tcgtggcgggtggat

SEQ ID NO: 441925 - DNA, 15 bp, Homo sapiens
gtcgtggcgggtgga

SEQ ID NO: 441926 - DNA, 15 bp, Homo sapiens
ggtcgtggcgggtgg

SEQ ID NO: 441927 - DNA, 15 bp, Homo sapiens
aggtcgtggcgggtg

SEQ ID NO: 441928 - DNA, 15 bp, Homo sapiens
gaggtcgtggcgggt

SEQ ID NO: 441929 - DNA, 15 bp, Homo sapiens
ggaggtcgtggcggg

SEQ ID NO: 441930 - DNA, 15 bp, Homo sapiens
gggaggtcgtggcgg

SEQ ID NO: 441931 - DNA, 15 bp, Homo sapiens
tgggaggtcgtggcg

SEQ ID NO: 441932 - DNA, 15 bp, Homo sapiens
ttgggaggtcgtggc

SEQ ID NO: 441933 - DNA, 15 bp, Homo sapiens
tttgggaggtcgtgg

SEQ ID NO: 441934 - DNA, 15 bp, Homo sapiens
ctttgggaggtcgtg

SEQ ID NO: 441935 - DNA, 15 bp, Homo sapiens
actttgggaggtcgt

SEQ ID NO: 441936 - DNA, 15 bp, Homo sapiens
cactttgggaggtcg

SEQ ID NO: 441937 - DNA, 15 bp, Homo sapiens
gcactttgggaggtc

SEQ ID NO: 441938 - DNA, 15 bp, Homo sapiens
gctgtaatctcagca

SEQ ID NO: 441939 - DNA, 15 bp, Homo sapiens
ggctgtaatctcagc

SEQ ID NO: 441940 - DNA, 15 bp, Homo sapiens
cggctgtaatctcag

SEQ ID NO: 441941 - DNA, 15 bp, Homo sapiens
acggctgtaatctca

SEQ ID NO: 441942 - DNA, 15 bp, Homo sapiens
cacggctgtaatctc

SEQ ID NO: 441943 - DNA, 15 bp, Homo sapiens
tcacggctgtaatct

SEQ ID NO: 441944 - DNA, 15 bp, Homo sapiens
ctcacggctgtaatc

SEQ ID NO: 441945 - DNA, 15 bp, Homo sapiens
gctcacggctgtaat

SEQ ID NO: 441946 - DNA, 15 bp, Homo sapiens
ggctcacggctgtaa

SEQ ID NO: 441947 - DNA, 15 bp, Homo sapiens
tggctcacggctgta

SEQ ID NO: 441948 - DNA, 15 bp, Homo sapiens
gtggctcacggctgt

SEQ ID NO: 441949 - DNA, 15 bp, Homo sapiens
ggtggctcacggctg

SEQ ID NO: 441950 - DNA, 15 bp, Homo sapiens
cggtggctcacggct

SEQ ID NO: 441951 - DNA, 15 bp, Homo sapiens
gcggtggctcacggc

SEQ ID NO: 441952 - DNA, 15 bp, Homo sapiens
cgcggtggctcacgg

SEQ ID NO: 441953 - DNA, 15 bp, Homo sapiens
gggctgggcgcggtg

SEQ ID NO: 441954 - DNA, 15 bp, Homo sapiens
agggctgggcgcggt

SEQ ID NO: 441955 - DNA, 15 bp, Homo sapiens
cagggctgggcgcgg

SEQ ID NO: 441956 - DNA, 15 bp, Homo sapiens
gcagggctgggcgcg

SEQ ID NO: 441957 - DNA, 15 bp, Homo sapiens
agcagggctgggcgc

SEQ ID NO: 441958 - DNA, 15 bp, Homo sapiens
tagcagggctgggcg

SEQ ID NO: 441959 - DNA, 15 bp, Homo sapiens
ctagcagggctgggc

SEQ ID NO: 441960 - DNA, 15 bp, Homo sapiens
actagcagggctggg

SEQ ID NO: 441961 - DNA, 15 bp, Homo sapiens
aactagcagggctgg

SEQ ID NO: 441962 - DNA, 15 bp, Homo sapiens
aaactagcagggctg

SEQ ID NO: 441963 - DNA, 15 bp, Homo sapiens
taaactagcagggct

SEQ ID NO: 441964 - DNA, 15 bp, Homo sapiens
ataaactagcagggc

SEQ ID NO: 441965 - DNA, 15 bp, Homo sapiens
aataaactagcaggg

SEQ ID NO: 441966 - DNA, 15 bp, Homo sapiens
aaataaactagcagg

SEQ ID NO: 441967 - DNA, 15 bp, Homo sapiens
aaaataaactagcag

SEQ ID NO: 441968 - DNA, 15 bp, Homo sapiens
gaaaataaactagca

SEQ ID NO: 441969 - DNA, 15 bp, Homo sapiens
agaaaataaactagc

SEQ ID NO: 441970 - DNA, 15 bp, Homo sapiens
tagaaaataaactag

SEQ ID NO: 441971 - DNA, 15 bp, Homo sapiens
gtagaaaataaacta

SEQ ID NO: 441972 - DNA, 15 bp, Homo sapiens
ggtagaaaataaact

SEQ ID NO: 441973 - DNA, 15 bp, Homo sapiens
gggtagaaaataaac

SEQ ID NO: 441974 - DNA, 15 bp, Homo sapiens
tgggtagaaaataaa

SEQ ID NO: 441975 - DNA, 15 bp, Homo sapiens
gtgggtagaaaataa

SEQ ID NO: 441976 - DNA, 15 bp, Homo sapiens
tgtgggtagaaaata

SEQ ID NO: 441977 - DNA, 15 bp, Homo sapiens
ttgtgggtagaaaat

SEQ ID NO: 441978 - DNA, 15 bp, Homo sapiens
tttgtgggtagaaaa

SEQ ID NO: 441979 - DNA, 15 bp, Homo sapiens
atttgtgggtagaaa

SEQ ID NO: 441980 - DNA, 15 bp, Homo sapiens
catttgtgggtagaa

SEQ ID NO: 441981 - DNA, 15 bp, Homo sapiens
acatttgtgggtaga

SEQ ID NO: 441982 - DNA, 15 bp, Homo sapiens
cacatttgtgggtag

SEQ ID NO: 441983 - DNA, 15 bp, Homo sapiens
ccacatttgtgggta

SEQ ID NO: 441984 - DNA, 15 bp, Homo sapiens
cccacatttgtgggt

SEQ ID NO: 441985 - DNA, 15 bp, Homo sapiens
acccacatttgtggg

SEQ ID NO: 441986 - DNA, 15 bp, Homo sapiens
cacccacatttgtgg

SEQ ID NO: 441987 - DNA, 15 bp, Homo sapiens
tcacccacatttgtg

SEQ ID NO: 441988 - DNA, 15 bp, Homo sapiens
gtcacccacatttgt

SEQ ID NO: 441989 - DNA, 15 bp, Homo sapiens
agtcacccacatttg

SEQ ID NO: 441990 - DNA, 15 bp, Homo sapiens
tagtcacccacattt

SEQ ID NO: 441991 - DNA, 15 bp, Homo sapiens
gtagtcacccacatt

SEQ ID NO: 441992 - DNA, 15 bp, Homo sapiens
ggtagtcacccacat

SEQ ID NO: 441993 - DNA, 15 bp, Homo sapiens
tggtagtcacccaca

SEQ ID NO: 441994 - DNA, 15 bp, Homo sapiens
ctggtagtcacccac

SEQ ID NO: 441995 - DNA, 15 bp, Homo sapiens
cctggtagtcaccca

SEQ ID NO: 441996 - DNA, 15 bp, Homo sapiens
gcctggtagtcaccc

SEQ ID NO: 441997 - DNA, 15 bp, Homo sapiens
ggcctggtagtcacc

SEQ ID NO: 441998 - DNA, 15 bp, Homo sapiens
gggcctggtagtcac

SEQ ID NO: 441999 - DNA, 15 bp, Homo sapiens
tgggcctggtagtca

SEQ ID NO: 442000 - DNA, 15 bp, Homo sapiens
gtgggcctggtagtc

SEQ ID NO: 442001 - DNA, 15 bp, Homo sapiens
agtgggcctggtagt

SEQ ID NO: 442002 - DNA, 15 bp, Homo sapiens
aagtgggcctggtag

SEQ ID NO: 442003 - DNA, 15 bp, Homo sapiens
gaagtgggcctggta

SEQ ID NO: 442004 - DNA, 15 bp, Homo sapiens
agaagtgggcctggt

SEQ ID NO: 442005 - DNA, 15 bp, Homo sapiens
aagaagtgggcctgg

SEQ ID NO: 442006 - DNA, 15 bp, Homo sapiens
gaagaagtgggcctg

SEQ ID NO: 442007 - DNA, 15 bp, Homo sapiens
agaagaagtgggcct

SEQ ID NO: 442008 - DNA, 15 bp, Homo sapiens
gagaagaagtgggcc

SEQ ID NO: 442009 - DNA, 15 bp, Homo sapiens
tgagaagaagtgggc

SEQ ID NO: 442010 - DNA, 15 bp, Homo sapiens
ctgagaagaagtggg

SEQ ID NO: 442011 - DNA, 15 bp, Homo sapiens
cctgagaagaagtgg

SEQ ID NO: 442012 - DNA, 15 bp, Homo sapiens
acctgagaagaagtg

SEQ ID NO: 442013 - DNA, 15 bp, Homo sapiens
cacctgagaagaagt

SEQ ID NO: 442014 - DNA, 15 bp, Homo sapiens
gcacctgagaagaag

SEQ ID NO: 442015 - DNA, 15 bp, Homo sapiens
ggcacctgagaagaa

SEQ ID NO: 442016 - DNA, 15 bp, Homo sapiens
gggcacctgagaaga

SEQ ID NO: 442017 - DNA, 15 bp, Homo sapiens
ggggcacctgagaag

SEQ ID NO: 442018 - DNA, 15 bp, Homo sapiens
aggggcacctgagaa

SEQ ID NO: 442019 - DNA, 15 bp, Homo sapiens
taggggcacctgaga

SEQ ID NO: 442020 - DNA, 15 bp, Homo sapiens
ataggggcacctgag

SEQ ID NO: 442021 - DNA, 15 bp, Homo sapiens
aataggggcacctga

SEQ ID NO: 442022 - DNA, 15 bp, Homo sapiens
gaataggggcacctg

SEQ ID NO: 442023 - DNA, 15 bp, Homo sapiens
ggaataggggcacct

SEQ ID NO: 442024 - DNA, 15 bp, Homo sapiens
aggaataggggcacc

SEQ ID NO: 442025 - DNA, 15 bp, Homo sapiens
caggaataggggcac

SEQ ID NO: 442026 - DNA, 15 bp, Homo sapiens
tcaggaataggggca

SEQ ID NO: 442027 - DNA, 15 bp, Homo sapiens
ttcaggaataggggc

SEQ ID NO: 442028 - DNA, 15 bp, Homo sapiens
cttcaggaatagggg

SEQ ID NO: 442029 - DNA, 15 bp, Homo sapiens
ccttcaggaataggg

SEQ ID NO: 442030 - DNA, 15 bp, Homo sapiens
accttcaggaatagg

SEQ ID NO: 442031 - DNA, 15 bp, Homo sapiens
aaccttcaggaatag

SEQ ID NO: 442032 - DNA, 15 bp, Homo sapiens
gaaccttcaggaata

SEQ ID NO: 442033 - DNA, 15 bp, Homo sapiens
agaaccttcaggaat

SEQ ID NO: 442034 - DNA, 15 bp, Homo sapiens
aagaaccttcaggaa

SEQ ID NO: 442035 - DNA, 15 bp, Homo sapiens
aaagaaccttcagga

SEQ ID NO: 442036 - DNA, 15 bp, Homo sapiens
taaagaaccttcagg

SEQ ID NO: 442037 - DNA, 15 bp, Homo sapiens
ctaaagaaccttcag

SEQ ID NO: 442038 - DNA, 15 bp, Homo sapiens
cctaaagaaccttca

SEQ ID NO: 442039 - DNA, 15 bp, Homo sapiens
gcctaaagaaccttc

SEQ ID NO: 442040 - DNA, 15 bp, Homo sapiens
agcctaaagaacctt

SEQ ID NO: 442041 - DNA, 15 bp, Homo sapiens
tagcctaaagaacct

SEQ ID NO: 442042 - DNA, 15 bp, Homo sapiens
ttagcctaaagaacc

SEQ ID NO: 442043 - DNA, 15 bp, Homo sapiens
cttagcctaaagaac

SEQ ID NO: 442044 - DNA, 15 bp, Homo sapiens
tcttagcctaaagaa

SEQ ID NO: 442045 - DNA, 15 bp, Homo sapiens
ctcttagcctaaaga

SEQ ID NO: 442046 - DNA, 15 bp, Homo sapiens
tctcttagcctaaag

SEQ ID NO: 442047 - DNA, 15 bp, Homo sapiens
ttctcttagcctaaa

SEQ ID NO: 442048 - DNA, 15 bp, Homo sapiens
cttctcttagcctaa

SEQ ID NO: 442049 - DNA, 15 bp, Homo sapiens
tcttctcttagccta

SEQ ID NO: 442050 - DNA, 15 bp, Homo sapiens
ctcttctcttagcct

SEQ ID NO: 442051 - DNA, 15 bp, Homo sapiens
actcttctcttagcc

SEQ ID NO: 442052 - DNA, 15 bp, Homo sapiens
aactcttctcttagc

SEQ ID NO: 442053 - DNA, 15 bp, Homo sapiens
gaactcttctcttag

SEQ ID NO: 442054 - DNA, 15 bp, Homo sapiens
agaactcttctctta

SEQ ID NO: 442055 - DNA, 15 bp, Homo sapiens
aagaactcttctctt

SEQ ID NO: 442056 - DNA, 15 bp, Homo sapiens
aaagaactcttctct

SEQ ID NO: 442057 - DNA, 15 bp, Homo sapiens
gaaagaactcttctc

SEQ ID NO: 442058 - DNA, 15 bp, Homo sapiens
tgaaagaactcttct

SEQ ID NO: 442059 - DNA, 15 bp, Homo sapiens
atgaaagaactcttc

SEQ ID NO: 442060 - DNA, 15 bp, Homo sapiens
tatgaaagaactctt

SEQ ID NO: 442061 - DNA, 15 bp, Homo sapiens
ctatgaaagaactct

SEQ ID NO: 442062 - DNA, 15 bp, Homo sapiens
tctatgaaagaactc

SEQ ID NO: 442063 - DNA, 15 bp, Homo sapiens
atctatgaaagaact

SEQ ID NO: 442064 - DNA, 15 bp, Homo sapiens
catctatgaaagaac

SEQ ID NO: 442065 - DNA, 15 bp, Homo sapiens
gcatctatgaaagaa

SEQ ID NO: 442066 - DNA, 15 bp, Homo sapiens
agcatctatgaaaga

SEQ ID NO: 442067 - DNA, 15 bp, Homo sapiens
aagcatctatgaaag

SEQ ID NO: 442068 - DNA, 15 bp, Homo sapiens
taagcatctatgaaa

SEQ ID NO: 442069 - DNA, 15 bp, Homo sapiens
ttaagcatctatgaa

SEQ ID NO: 442070 - DNA, 15 bp, Homo sapiens
attaagcatctatga

SEQ ID NO: 442071 - DNA, 15 bp, Homo sapiens
cattaagcatctatg

SEQ ID NO: 442072 - DNA, 15 bp, Homo sapiens
tcattaagcatctat

SEQ ID NO: 442073 - DNA, 15 bp, Homo sapiens
ttcattaagcatcta

SEQ ID NO: 442074 - DNA, 15 bp, Homo sapiens
tttcattaagcatct

SEQ ID NO: 442075 - DNA, 15 bp, Homo sapiens
atttcattaagcatc

SEQ ID NO: 442076 - DNA, 15 bp, Homo sapiens
catttcattaagcat

SEQ ID NO: 442077 - DNA, 15 bp, Homo sapiens
acatttcattaagca

SEQ ID NO: 442078 - DNA, 15 bp, Homo sapiens
cacatttcattaagc

SEQ ID NO: 442079 - DNA, 15 bp, Homo sapiens
tcacatttcattaag

SEQ ID NO: 442080 - DNA, 15 bp, Homo sapiens
ttcacatttcattaa

SEQ ID NO: 442081 - DNA, 15 bp, Homo sapiens
ctttcacatttcatt

SEQ ID NO: 442082 - DNA, 15 bp, Homo sapiens
gctttcacatttcat

SEQ ID NO: 442083 - DNA, 15 bp, Homo sapiens
ggctttcacatttca

SEQ ID NO: 442084 - DNA, 15 bp, Homo sapiens
aggctttcacatttc

SEQ ID NO: 442085 - DNA, 15 bp, Homo sapiens
aaggctttcacattt

SEQ ID NO: 442086 - DNA, 15 bp, Homo sapiens
aaaggctttcacatt

SEQ ID NO: 442087 - DNA, 15 bp, Homo sapiens
aaaaggctttcacat

SEQ ID NO: 442088 - DNA, 15 bp, Homo sapiens
gaaaaggctttcaca

SEQ ID NO: 442089 - DNA, 15 bp, Homo sapiens
agaaaaggctttcac

SEQ ID NO: 442090 - DNA, 15 bp, Homo sapiens
tagaaaaggctttca

SEQ ID NO: 442091 - DNA, 15 bp, Homo sapiens
ttagaaaaggctttc

SEQ ID NO: 442092 - DNA, 15 bp, Homo sapiens
attagaaaaggcttt

SEQ ID NO: 442093 - DNA, 15 bp, Homo sapiens
gattagaaaaggctt

SEQ ID NO: 442094 - DNA, 15 bp, Homo sapiens
tgattagaaaaggct

SEQ ID NO: 442095 - DNA, 15 bp, Homo sapiens
atgattagaaaaggc

SEQ ID NO: 442096 - DNA, 15 bp, Homo sapiens
tatgattagaaaagg

SEQ ID NO: 442097 - DNA, 15 bp, Homo sapiens
ctatgattagaaaag

SEQ ID NO: 442098 - DNA, 15 bp, Homo sapiens
tctatgattagaaaa

SEQ ID NO: 442099 - DNA, 15 bp, Homo sapiens
ttctatgattagaaa

SEQ ID NO: 442100 - DNA, 15 bp, Homo sapiens
tttctatgattagaa

SEQ ID NO: 442101 - DNA, 15 bp, Homo sapiens
atttctatgattaga

SEQ ID NO: 442102 - DNA, 15 bp, Homo sapiens
catttctatgattag

SEQ ID NO: 442103 - DNA, 15 bp, Homo sapiens
tcatttctatgatta

SEQ ID NO: 442104 - DNA, 15 bp, Homo sapiens
ttcatttctatgatt

SEQ ID NO: 442105 - DNA, 15 bp, Homo sapiens
tttcatttctatgat

SEQ ID NO: 442106 - DNA, 15 bp, Homo sapiens
ttttcatttctatga

SEQ ID NO: 442107 - DNA, 15 bp, Homo sapiens
cttttcatttctatg

SEQ ID NO: 442108 - DNA, 15 bp, Homo sapiens
tcttttcatttctat

SEQ ID NO: 442109 - DNA, 15 bp, Homo sapiens
ttcttttcatttcta

SEQ ID NO: 442110 - DNA, 15 bp, Homo sapiens
attcttttcatttct

SEQ ID NO: 442111 - DNA, 15 bp, Homo sapiens
cattcttttcatttc

SEQ ID NO: 442112 - DNA, 15 bp, Homo sapiens
ccattcttttcattt

SEQ ID NO: 442113 - DNA, 15 bp, Homo sapiens
accattcttttcatt

SEQ ID NO: 442114 - DNA, 15 bp, Homo sapiens
taccattcttttcat

SEQ ID NO: 442115 - DNA, 15 bp, Homo sapiens
ctaccattcttttca

SEQ ID NO: 442116 - DNA, 15 bp, Homo sapiens
actaccattcttttc

SEQ ID NO: 442117 - DNA, 15 bp, Homo sapiens
aactaccattctttt

SEQ ID NO: 442118 - DNA, 15 bp, Homo sapiens
aaactaccattcttt

SEQ ID NO: 442119 - DNA, 15 bp, Homo sapiens
taaactaccattctt

SEQ ID NO: 442120 - DNA, 15 bp, Homo sapiens
gtaaactaccattct

SEQ ID NO: 442121 - DNA, 15 bp, Homo sapiens
tgtaaactaccattc

SEQ ID NO: 442122 - DNA, 15 bp, Homo sapiens
gtgtaaactaccatt

SEQ ID NO: 442123 - DNA, 15 bp, Homo sapiens
agtgtaaactaccat

SEQ ID NO: 442124 - DNA, 15 bp, Homo sapiens
aagtgtaaactacca

SEQ ID NO: 442125 - DNA, 15 bp, Homo sapiens
aaagtgtaaactacc

SEQ ID NO: 442126 - DNA, 15 bp, Homo sapiens
aaaagtgtaaactac

SEQ ID NO: 442127 - DNA, 15 bp, Homo sapiens
gaaaagtgtaaacta

SEQ ID NO: 442128 - DNA, 15 bp, Homo sapiens
agaaaagtgtaaact

SEQ ID NO: 442129 - DNA, 15 bp, Homo sapiens
aagaaaagtgtaaac

SEQ ID NO: 442130 - DNA, 15 bp, Homo sapiens
aaagaaaagtgtaaa

SEQ ID NO: 442131 - DNA, 15 bp, Homo sapiens
aaaagaaaagtgtaa

SEQ ID NO: 442132 - DNA, 15 bp, Homo sapiens
taaaagaaaagtgta

SEQ ID NO: 442133 - DNA, 15 bp, Homo sapiens
ataaaagaaaagtgt

SEQ ID NO: 442134 - DNA, 15 bp, Homo sapiens
gataaaagaaaagtg

SEQ ID NO: 442135 - DNA, 15 bp, Homo sapiens
ggataaaagaaaagt

SEQ ID NO: 442136 - DNA, 15 bp, Homo sapiens
tggataaaagaaaag

SEQ ID NO: 442137 - DNA, 15 bp, Homo sapiens
gtggataaaagaaaa

SEQ ID NO: 442138 - DNA, 15 bp, Homo sapiens
ggtggataaaagaaa

SEQ ID NO: 442139 - DNA, 15 bp, Homo sapiens
tggtggataaaagaa

SEQ ID NO: 442140 - DNA, 15 bp, Homo sapiens
atggtggataaaaga

SEQ ID NO: 442141 - DNA, 15 bp, Homo sapiens
gatggtggataaaag

SEQ ID NO: 442142 - DNA, 15 bp, Homo sapiens
agatggtggataaaa

SEQ ID NO: 442143 - DNA, 15 bp, Homo sapiens
cagatggtggataaa

SEQ ID NO: 442144 - DNA, 15 bp, Homo sapiens
tcagatggtggataa

SEQ ID NO: 442145 - DNA, 15 bp, Homo sapiens
atcagatggtggata

SEQ ID NO: 442146 - DNA, 15 bp, Homo sapiens
aatcagatggtggat

SEQ ID NO: 442147 - DNA, 15 bp, Homo sapiens
caatcagatggtgga

SEQ ID NO: 442148 - DNA, 15 bp, Homo sapiens
acaatcagatggtgg

SEQ ID NO: 442149 - DNA, 15 bp, Homo sapiens
gacaatcagatggtg

SEQ ID NO: 442150 - DNA, 15 bp, Homo sapiens
tgacaatcagatggt

SEQ ID NO: 442151 - DNA, 15 bp, Homo sapiens
ctgacaatcagatgg

SEQ ID NO: 442152 - DNA, 15 bp, Homo sapiens
cctgacaatcagatg

SEQ ID NO: 442153 - DNA, 15 bp, Homo sapiens
ccctgacaatcagat

SEQ ID NO: 442154 - DNA, 15 bp, Homo sapiens
cccctgacaatcaga

SEQ ID NO: 442155 - DNA, 15 bp, Homo sapiens
gcccctgacaatcag

SEQ ID NO: 442156 - DNA, 15 bp, Homo sapiens
agcccctgacaatca

SEQ ID NO: 442157 - DNA, 15 bp, Homo sapiens
aagcccctgacaatc

SEQ ID NO: 442158 - DNA, 15 bp, Homo sapiens
aaagcccctgacaat

SEQ ID NO: 442159 - DNA, 15 bp, Homo sapiens
taaagcccctgacaa

SEQ ID NO: 442160 - DNA, 15 bp, Homo sapiens
ttaaagcccctgaca

SEQ ID NO: 442161 - DNA, 15 bp, Homo sapiens
cttaaagcccctgac

SEQ ID NO: 442162 - DNA, 15 bp, Homo sapiens
tcttaaagcccctga

SEQ ID NO: 442163 - DNA, 15 bp, Homo sapiens
ttcttaaagcccctg

SEQ ID NO: 442164 - DNA, 15 bp, Homo sapiens
cttcttaaagcccct

SEQ ID NO: 442165 - DNA, 15 bp, Homo sapiens
tcttcttaaagcccc

SEQ ID NO: 442166 - DNA, 15 bp, Homo sapiens
atcttcttaaagccc

SEQ ID NO: 442167 - DNA, 15 bp, Homo sapiens
aatcttcttaaagcc

SEQ ID NO: 442168 - DNA, 15 bp, Homo sapiens
aaatcttcttaaagc

SEQ ID NO: 442169 - DNA, 15 bp, Homo sapiens
gaaatcttcttaaag

SEQ ID NO: 442170 - DNA, 15 bp, Homo sapiens
agaaatcttcttaaa

SEQ ID NO: 442171 - DNA, 15 bp, Homo sapiens
cagaaatcttcttaa

SEQ ID NO: 442172 - DNA, 15 bp, Homo sapiens
acagaaatcttctta

SEQ ID NO: 442173 - DNA, 15 bp, Homo sapiens
tacagaaatcttctt

SEQ ID NO: 442174 - DNA, 15 bp, Homo sapiens
atacagaaatcttct

SEQ ID NO: 442175 - DNA, 15 bp, Homo sapiens
tatacagaaatcttc

SEQ ID NO: 442176 - DNA, 15 bp, Homo sapiens
gtatacagaaatctt

SEQ ID NO: 442177 - DNA, 15 bp, Homo sapiens
ggtatacagaaatct

SEQ ID NO: 442178 - DNA, 15 bp, Homo sapiens
aggtatacagaaatc

SEQ ID NO: 442179 - DNA, 15 bp, Homo sapiens
caggtatacagaaat

SEQ ID NO: 442180 - DNA, 15 bp, Homo sapiens
ccaggtatacagaaa

SEQ ID NO: 442181 - DNA, 15 bp, Homo sapiens
cccaggtatacagaa

SEQ ID NO: 442182 - DNA, 15 bp, Homo sapiens
tcccaggtatacaga

SEQ ID NO: 442183 - DNA, 15 bp, Homo sapiens
gtcccaggtatacag

SEQ ID NO: 442184 - DNA, 15 bp, Homo sapiens
tgtcccaggtataca

SEQ ID NO: 442185 - DNA, 15 bp, Homo sapiens
gtgtcccaggtatac

SEQ ID NO: 442186 - DNA, 15 bp, Homo sapiens
tgtgtcccaggtata

SEQ ID NO: 442187 - DNA, 15 bp, Homo sapiens
atgtgtcccaggtat

SEQ ID NO: 442188 - DNA, 15 bp, Homo sapiens
catgtgtcccaggta

SEQ ID NO: 442189 - DNA, 15 bp, Homo sapiens
tcatgtgtcccaggt

SEQ ID NO: 442190 - DNA, 15 bp, Homo sapiens
ctcatgtgtcccagg

SEQ ID NO: 442191 - DNA, 15 bp, Homo sapiens
actcatgtgtcccag

SEQ ID NO: 442192 - DNA, 15 bp, Homo sapiens
aactcatgtgtccca

SEQ ID NO: 442193 - DNA, 15 bp, Homo sapiens
taactcatgtgtccc

SEQ ID NO: 442194 - DNA, 15 bp, Homo sapiens
ctaactcatgtgtcc

SEQ ID NO: 442195 - DNA, 15 bp, Homo sapiens
actaactcatgtgtc

SEQ ID NO: 442196 - DNA, 15 bp, Homo sapiens
aactaactcatgtgt

SEQ ID NO: 442197 - DNA, 15 bp, Homo sapiens
caactaactcatgtg

SEQ ID NO: 442198 - DNA, 15 bp, Homo sapiens
acaactaactcatgt

SEQ ID NO: 442199 - DNA, 15 bp, Homo sapiens
aacaactaactcatg

SEQ ID NO: 442200 - DNA, 15 bp, Homo sapiens
aaacaactaactcat

SEQ ID NO: 442201 - DNA, 15 bp, Homo sapiens
aaaacaactaactca

SEQ ID NO: 442202 - DNA, 15 bp, Homo sapiens
gaaaacaactaactc

SEQ ID NO: 442203 - DNA, 15 bp, Homo sapiens
tgaaaacaactaact

SEQ ID NO: 442204 - DNA, 15 bp, Homo sapiens
atgaaaacaactaac

SEQ ID NO: 442205 - DNA, 15 bp, Homo sapiens
tatgaaaacaactaa

SEQ ID NO: 442206 - DNA, 15 bp, Homo sapiens
atatgaaaacaacta

SEQ ID NO: 442207 - DNA, 15 bp, Homo sapiens
aatatgaaaacaact

SEQ ID NO: 442208 - DNA, 15 bp, Homo sapiens
aaatatgaaaacaac

SEQ ID NO: 442209 - DNA, 15 bp, Homo sapiens
aaaatatgaaaacaa

SEQ ID NO: 442210 - DNA, 15 bp, Homo sapiens
taaaatatgaaaaca

SEQ ID NO: 442211 - DNA, 15 bp, Homo sapiens
ataaaatatgaaaac

SEQ ID NO: 442212 - DNA, 15 bp, Homo sapiens
cataaaatatgaaaa

SEQ ID NO: 442213 - DNA, 15 bp, Homo sapiens
acataaaatatgaaa

SEQ ID NO: 442214 - DNA, 15 bp, Homo sapiens
aacataaaatatgaa

SEQ ID NO: 442215 - DNA, 15 bp, Homo sapiens
aaacataaaatatga

SEQ ID NO: 442216 - DNA, 15 bp, Homo sapiens
gaaacataaaatatg

SEQ ID NO: 442217 - DNA, 15 bp, Homo sapiens
tgaaacataaaatat

SEQ ID NO: 442218 - DNA, 15 bp, Homo sapiens
ttgaaacataaaata

SEQ ID NO: 442219 - DNA, 15 bp, Homo sapiens
tttgaaacataaaat

SEQ ID NO: 442220 - DNA, 15 bp, Homo sapiens
atttgaaacataaaa

SEQ ID NO: 442221 - DNA, 15 bp, Homo sapiens
aatttgaaacataaa

SEQ ID NO: 442222 - DNA, 15 bp, Homo sapiens
aaatttgaaacataa

SEQ ID NO: 442223 - DNA, 15 bp, Homo sapiens
aaaatttgaaacata

SEQ ID NO: 442224 - DNA, 15 bp, Homo sapiens
taaaatttgaaacat

SEQ ID NO: 442225 - DNA, 15 bp, Homo sapiens
ataaaatttgaaaca

SEQ ID NO: 442226 - DNA, 15 bp, Homo sapiens
tataaaatttgaaac

SEQ ID NO: 442227 - DNA, 15 bp, Homo sapiens
ttataaaatttgaaa

SEQ ID NO: 442228 - DNA, 15 bp, Homo sapiens
tttataaaatttgaa

SEQ ID NO: 442229 - DNA, 15 bp, Homo sapiens
gtttataaaatttga

SEQ ID NO: 442230 - DNA, 15 bp, Homo sapiens
tgtttataaaatttg

SEQ ID NO: 442231 - DNA, 15 bp, Homo sapiens
atgtttataaaattt

SEQ ID NO: 442232 - DNA, 15 bp, Homo sapiens
catgtttataaaatt

SEQ ID NO: 442233 - DNA, 15 bp, Homo sapiens
tcatgtttataaaat

SEQ ID NO: 442234 - DNA, 15 bp, Homo sapiens
atcatgtttataaaa

SEQ ID NO: 442235 - DNA, 15 bp, Homo sapiens
gatcatgtttataaa

SEQ ID NO: 442236 - DNA, 15 bp, Homo sapiens
ggatcatgtttataa

SEQ ID NO: 442237 - DNA, 15 bp, Homo sapiens
aggatcatgtttata

SEQ ID NO: 442238 - DNA, 15 bp, Homo sapiens
aaggatcatgtttat

SEQ ID NO: 442239 - DNA, 15 bp, Homo sapiens
gaaggatcatgttta

SEQ ID NO: 442240 - DNA, 15 bp, Homo sapiens
agaaggatcatgttt

SEQ ID NO: 442241 - DNA, 15 bp, Homo sapiens
aagaaggatcatgtt

SEQ ID NO: 442242 - DNA, 15 bp, Homo sapiens
aaagaaggatcatgt

SEQ ID NO: 442243 - DNA, 15 bp, Homo sapiens
taaagaaggatcatg

SEQ ID NO: 442244 - DNA, 15 bp, Homo sapiens
ttaaagaaggatcat

SEQ ID NO: 442245 - DNA, 15 bp, Homo sapiens
tttaaagaaggatca

SEQ ID NO: 442246 - DNA, 15 bp, Homo sapiens
ttttaaagaaggatc

SEQ ID NO: 442247 - DNA, 15 bp, Homo sapiens
tttttaaagaaggat

SEQ ID NO: 442248 - DNA, 15 bp, Homo sapiens
atttttaaagaagga

SEQ ID NO: 442249 - DNA, 15 bp, Homo sapiens
aatttttaaagaagg

SEQ ID NO: 442250 - DNA, 15 bp, Homo sapiens
caatttttaaagaag

SEQ ID NO: 442251 - DNA, 15 bp, Homo sapiens
tcaatttttaaagaa

SEQ ID NO: 442252 - DNA, 15 bp, Homo sapiens
gtcaatttttaaaga

SEQ ID NO: 442253 - DNA, 15 bp, Homo sapiens
agtcaatttttaaag

SEQ ID NO: 442254 - DNA, 15 bp, Homo sapiens
tagtcaatttttaaa

SEQ ID NO: 442255 - DNA, 15 bp, Homo sapiens
atagtcaatttttaa

SEQ ID NO: 442256 - DNA, 15 bp, Homo sapiens
aatagtcaattttta

SEQ ID NO: 442257 - DNA, 15 bp, Homo sapiens
aaatagtcaattttt

SEQ ID NO: 442258 - DNA, 15 bp, Homo sapiens
caaatagtcaatttt

SEQ ID NO: 442259 - DNA, 15 bp, Homo sapiens
tcaaatagtcaattt

SEQ ID NO: 442260 - DNA, 15 bp, Homo sapiens
atcaaatagtcaatt

SEQ ID NO: 442261 - DNA, 15 bp, Homo sapiens
tatcaaatagtcaat

SEQ ID NO: 442262 - DNA, 15 bp, Homo sapiens
ttatcaaatagtcaa

SEQ ID NO: 442263 - DNA, 15 bp, Homo sapiens
tttatcaaatagtca

SEQ ID NO: 442264 - DNA, 15 bp, Homo sapiens
ccacatttatcaaat

SEQ ID NO: 442265 - DNA, 15 bp, Homo sapiens
accacatttatcaaa

SEQ ID NO: 442266 - DNA, 15 bp, Homo sapiens
caccacatttatcaa

SEQ ID NO: 442267 - DNA, 15 bp, Homo sapiens
ccaccacatttatca

SEQ ID NO: 442268 - DNA, 15 bp, Homo sapiens
gccaccacatttatc

SEQ ID NO: 442269 - DNA, 15 bp, Homo sapiens
agccaccacatttat

SEQ ID NO: 442270 - DNA, 15 bp, Homo sapiens
tagccaccacattta

SEQ ID NO: 442271 - DNA, 15 bp, Homo sapiens
atagccaccacattt

SEQ ID NO: 442272 - DNA, 15 bp, Homo sapiens
catagccaccacatt

SEQ ID NO: 442273 - DNA, 15 bp, Homo sapiens
tcatagccaccacat

SEQ ID NO: 442274 - DNA, 15 bp, Homo sapiens
ttcatagccaccaca

SEQ ID NO: 442275 - DNA, 15 bp, Homo sapiens
attcatagccaccac

SEQ ID NO: 442276 - DNA, 15 bp, Homo sapiens
tattcatagccacca

SEQ ID NO: 442277 - DNA, 15 bp, Homo sapiens
ttattcatagccacc

SEQ ID NO: 442278 - DNA, 15 bp, Homo sapiens
attattcatagccac

SEQ ID NO: 442279 - DNA, 15 bp, Homo sapiens
aattattcatagcca

SEQ ID NO: 442280 - DNA, 15 bp, Homo sapiens
taattattcatagcc

SEQ ID NO: 442281 - DNA, 15 bp, Homo sapiens
ctaattattcatagc

SEQ ID NO: 442282 - DNA, 15 bp, Homo sapiens
tctaattattcatag

SEQ ID NO: 442283 - DNA, 15 bp, Homo sapiens
ttctaattattcata

SEQ ID NO: 442284 - DNA, 15 bp, Homo sapiens
tttctaattattcat

SEQ ID NO: 442285 - DNA, 15 bp, Homo sapiens
ctttctaattattca

SEQ ID NO: 442286 - DNA, 15 bp, Homo sapiens
actttctaattattc

SEQ ID NO: 442287 - DNA, 15 bp, Homo sapiens
gactttctaattatt

SEQ ID NO: 442288 - DNA, 15 bp, Homo sapiens
tgactttctaattat

SEQ ID NO: 442289 - DNA, 15 bp, Homo sapiens
ctgactttctaatta

SEQ ID NO: 442290 - DNA, 15 bp, Homo sapiens
tctgactttctaatt

SEQ ID NO: 442291 - DNA, 15 bp, Homo sapiens
atctgactttctaat

SEQ ID NO: 442292 - DNA, 15 bp, Homo sapiens
gatctgactttctaa

SEQ ID NO: 442293 - DNA, 15 bp, Homo sapiens
tgatctgactttcta

SEQ ID NO: 442294 - DNA, 15 bp, Homo sapiens
ttgatctgactttct

SEQ ID NO: 442295 - DNA, 15 bp, Homo sapiens
tttgatctgactttc

SEQ ID NO: 442296 - DNA, 15 bp, Homo sapiens
ttttgatctgacttt

SEQ ID NO: 442297 - DNA, 15 bp, Homo sapiens
attttgatctgactt

SEQ ID NO: 442298 - DNA, 15 bp, Homo sapiens
gattttgatctgact

SEQ ID NO: 442299 - DNA, 15 bp, Homo sapiens
agattttgatctgac

SEQ ID NO: 442300 - DNA, 15 bp, Homo sapiens
aagattttgatctga

SEQ ID NO: 442301 - DNA, 15 bp, Homo sapiens
taagattttgatctg

SEQ ID NO: 442302 - DNA, 15 bp, Homo sapiens
ataagattttgatct

SEQ ID NO: 442303 - DNA, 15 bp, Homo sapiens
aataagattttgatc

SEQ ID NO: 442304 - DNA, 15 bp, Homo sapiens
gaataagattttgat

SEQ ID NO: 442305 - DNA, 15 bp, Homo sapiens
ggaataagattttga

SEQ ID NO: 442306 - DNA, 15 bp, Homo sapiens
tggaataagattttg

SEQ ID NO: 442307 - DNA, 15 bp, Homo sapiens
ctggaataagatttt

SEQ ID NO: 442308 - DNA, 15 bp, Homo sapiens
cctggaataagattt

SEQ ID NO: 442309 - DNA, 15 bp, Homo sapiens
ccctggaataagatt

SEQ ID NO: 442310 - DNA, 15 bp, Homo sapiens
gccctggaataagat

SEQ ID NO: 442311 - DNA, 15 bp, Homo sapiens
agccctggaataaga

SEQ ID NO: 442312 - DNA, 15 bp, Homo sapiens
gagccctggaataag

SEQ ID NO: 442313 - DNA, 15 bp, Homo sapiens
agagccctggaataa

SEQ ID NO: 442314 - DNA, 15 bp, Homo sapiens
gagagccctggaata

SEQ ID NO: 442315 - DNA, 15 bp, Homo sapiens
tgagagccctggaat

SEQ ID NO: 442316 - DNA, 15 bp, Homo sapiens
atgagagccctggaa

SEQ ID NO: 442317 - DNA, 15 bp, Homo sapiens
aatgagagccctgga

SEQ ID NO: 442318 - DNA, 15 bp, Homo sapiens
taatgagagccctgg

SEQ ID NO: 442319 - DNA, 15 bp, Homo sapiens
ctaatgagagccctg

SEQ ID NO: 442320 - DNA, 15 bp, Homo sapiens
cctaatgagagccct

SEQ ID NO: 442321 - DNA, 15 bp, Homo sapiens
gcctaatgagagccc

SEQ ID NO: 442322 - DNA, 15 bp, Homo sapiens
ggcctaatgagagcc

SEQ ID NO: 442323 - DNA, 15 bp, Homo sapiens
tggcctaatgagagc

SEQ ID NO: 442324 - DNA, 15 bp, Homo sapiens
ctggcctaatgagag

SEQ ID NO: 442325 - DNA, 15 bp, Homo sapiens
tctggcctaatgaga

SEQ ID NO: 442326 - DNA, 15 bp, Homo sapiens
ttctggcctaatgag

SEQ ID NO: 442327 - DNA, 15 bp, Homo sapiens
tttctggcctaatga

SEQ ID NO: 442328 - DNA, 15 bp, Homo sapiens
atttctggcctaatg

SEQ ID NO: 442329 - DNA, 15 bp, Homo sapiens
aatttctggcctaat

SEQ ID NO: 442330 - DNA, 15 bp, Homo sapiens
aaatttctggcctaa

SEQ ID NO: 442331 - DNA, 15 bp, Homo sapiens
gaaatttctggccta

SEQ ID NO: 442332 - DNA, 15 bp, Homo sapiens
ggaaatttctggcct

SEQ ID NO: 442333 - DNA, 15 bp, Homo sapiens
gggaaatttctggcc

SEQ ID NO: 442334 - DNA, 15 bp, Homo sapiens
agggaaatttctggc

SEQ ID NO: 442335 - DNA, 15 bp, Homo sapiens
aagggaaatttctgg

SEQ ID NO: 442336 - DNA, 15 bp, Homo sapiens
gaagggaaatttctg

SEQ ID NO: 442337 - DNA, 15 bp, Homo sapiens
agaagggaaatttct

SEQ ID NO: 442338 - DNA, 15 bp, Homo sapiens
gagaagggaaatttc

SEQ ID NO: 442339 - DNA, 15 bp, Homo sapiens
ggagaagggaaattt

SEQ ID NO: 442340 - DNA, 15 bp, Homo sapiens
aggagaagggaaatt

SEQ ID NO: 442341 - DNA, 15 bp, Homo sapiens
aaggagaagggaaat

SEQ ID NO: 442342 - DNA, 15 bp, Homo sapiens
aaaggagaagggaaa

SEQ ID NO: 442343 - DNA, 15 bp, Homo sapiens
caaaggagaagggaa

SEQ ID NO: 442344 - DNA, 15 bp, Homo sapiens
acaaaggagaaggga

SEQ ID NO: 442345 - DNA, 15 bp, Homo sapiens
aacaaaggagaaggg

SEQ ID NO: 442346 - DNA, 15 bp, Homo sapiens
aaacaaaggagaagg

SEQ ID NO: 442347 - DNA, 15 bp, Homo sapiens
aaaacaaaggagaag

SEQ ID NO: 442348 - DNA, 15 bp, Homo sapiens
aaaaacaaaggagaa

SEQ ID NO: 442349 - DNA, 15 bp, Homo sapiens
aaaaaacaaaggaga

SEQ ID NO: 442350 - DNA, 15 bp, Homo sapiens
aaaaaaacaaaggag

SEQ ID NO: 442351 - DNA, 15 bp, Homo sapiens
caaaaaaacaaagga

SEQ ID NO: 442352 - DNA, 15 bp, Homo sapiens
tcaaaaaaacaaagg

SEQ ID NO: 442353 - DNA, 15 bp, Homo sapiens
atcaaaaaaacaaag

SEQ ID NO: 442354 - DNA, 15 bp, Homo sapiens
catcaaaaaaacaaa

SEQ ID NO: 442355 - DNA, 15 bp, Homo sapiens
tcatcaaaaaaacaa

SEQ ID NO: 442356 - DNA, 15 bp, Homo sapiens
atcatcaaaaaaaca

SEQ ID NO: 442357 - DNA, 15 bp, Homo sapiens
catcatcaaaaaaac

SEQ ID NO: 442358 - DNA, 15 bp, Homo sapiens
tcatcatcaaaaaaa

SEQ ID NO: 442359 - DNA, 15 bp, Homo sapiens
atcatcatcaaaaaa

SEQ ID NO: 442360 - DNA, 15 bp, Homo sapiens
aatcatcatcaaaaa

SEQ ID NO: 442361 - DNA, 15 bp, Homo sapiens
caatcatcatcaaaa

SEQ ID NO: 442362 - DNA, 15 bp, Homo sapiens
acaatcatcatcaaa

SEQ ID NO: 442363 - DNA, 15 bp, Homo sapiens
aacaatcatcatcaa

SEQ ID NO: 442364 - DNA, 15 bp, Homo sapiens
taacaatcatcatca

SEQ ID NO: 442365 - DNA, 15 bp, Homo sapiens
ataacaatcatcatc

SEQ ID NO: 442366 - DNA, 15 bp, Homo sapiens
cataacaatcatcat

SEQ ID NO: 442367 - DNA, 15 bp, Homo sapiens
ccataacaatcatca

SEQ ID NO: 442368 - DNA, 15 bp, Homo sapiens
tccataacaatcatc

SEQ ID NO: 442369 - DNA, 15 bp, Homo sapiens
atccataacaatcat

SEQ ID NO: 442370 - DNA, 15 bp, Homo sapiens
tatccataacaatca

SEQ ID NO: 442371 - DNA, 15 bp, Homo sapiens
ttatccataacaatc

SEQ ID NO: 442372 - DNA, 15 bp, Homo sapiens
gttatccataacaat

SEQ ID NO: 442373 - DNA, 15 bp, Homo sapiens
ggttatccataacaa

SEQ ID NO: 442374 - DNA, 15 bp, Homo sapiens
tggttatccataaca

SEQ ID NO: 442375 - DNA, 15 bp, Homo sapiens
ttggttatccataac

SEQ ID NO: 442376 - DNA, 15 bp, Homo sapiens
tttggttatccataa

SEQ ID NO: 442377 - DNA, 15 bp, Homo sapiens
atttggttatccata

SEQ ID NO: 442378 - DNA, 15 bp, Homo sapiens
catttggttatccat

SEQ ID NO: 442379 - DNA, 15 bp, Homo sapiens
gcatttggttatcca

SEQ ID NO: 442380 - DNA, 15 bp, Homo sapiens
agcatttggttatcc

SEQ ID NO: 442381 - DNA, 15 bp, Homo sapiens
gagcatttggttatc

SEQ ID NO: 442382 - DNA, 15 bp, Homo sapiens
agagcatttggttat

SEQ ID NO: 442383 - DNA, 15 bp, Homo sapiens
aagagcatttggtta

SEQ ID NO: 442384 - DNA, 15 bp, Homo sapiens
gaagagcatttggtt

SEQ ID NO: 442385 - DNA, 15 bp, Homo sapiens
ggaagagcatttggt

SEQ ID NO: 442386 - DNA, 15 bp, Homo sapiens
aggaagagcatttgg

SEQ ID NO: 442387 - DNA, 15 bp, Homo sapiens
aaggaagagcatttg

SEQ ID NO: 442388 - DNA, 15 bp, Homo sapiens
taaggaagagcattt

SEQ ID NO: 442389 - DNA, 15 bp, Homo sapiens
ataaggaagagcatt

SEQ ID NO: 442390 - DNA, 15 bp, Homo sapiens
gataaggaagagcat

SEQ ID NO: 442391 - DNA, 15 bp, Homo sapiens
ggataaggaagagca

SEQ ID NO: 442392 - DNA, 15 bp, Homo sapiens
tggataaggaagagc

SEQ ID NO: 442393 - DNA, 15 bp, Homo sapiens
ttggataaggaagag

SEQ ID NO: 442394 - DNA, 15 bp, Homo sapiens
gttggataaggaaga

SEQ ID NO: 442395 - DNA, 15 bp, Homo sapiens
agttggataaggaag

SEQ ID NO: 442396 - DNA, 15 bp, Homo sapiens
aagttggataaggaa

SEQ ID NO: 442397 - DNA, 15 bp, Homo sapiens
taagttggataagga

SEQ ID NO: 442398 - DNA, 15 bp, Homo sapiens
gtaagttggataagg

SEQ ID NO: 442399 - DNA, 15 bp, Homo sapiens
agtaagttggataag

SEQ ID NO: 442400 - DNA, 15 bp, Homo sapiens
gagtaagttggataa

SEQ ID NO: 442401 - DNA, 15 bp, Homo sapiens
agagtaagttggata

SEQ ID NO: 442402 - DNA, 15 bp, Homo sapiens
cagagtaagttggat

SEQ ID NO: 442403 - DNA, 15 bp, Homo sapiens
ccagagtaagttgga

SEQ ID NO: 442404 - DNA, 15 bp, Homo sapiens
tccagagtaagttgg

SEQ ID NO: 442405 - DNA, 15 bp, Homo sapiens
ttccagagtaagttg

SEQ ID NO: 442406 - DNA, 15 bp, Homo sapiens
gttccagagtaagtt

SEQ ID NO: 442407 - DNA, 15 bp, Homo sapiens
tgttccagagtaagt

SEQ ID NO: 442408 - DNA, 15 bp, Homo sapiens
ttgttccagagtaag

SEQ ID NO: 442409 - DNA, 15 bp, Homo sapiens
attgttccagagtaa

SEQ ID NO: 442410 - DNA, 15 bp, Homo sapiens
aattgttccagagta

SEQ ID NO: 442411 - DNA, 15 bp, Homo sapiens
taattgttccagagt

SEQ ID NO: 442412 - DNA, 15 bp, Homo sapiens
ttaattgttccagag

SEQ ID NO: 442413 - DNA, 15 bp, Homo sapiens
attaattgttccaga

SEQ ID NO: 442414 - DNA, 15 bp, Homo sapiens
tattaattgttccag

SEQ ID NO: 442415 - DNA, 15 bp, Homo sapiens
gtattaattgttcca

SEQ ID NO: 442416 - DNA, 15 bp, Homo sapiens
tgtattaattgttcc

SEQ ID NO: 442417 - DNA, 15 bp, Homo sapiens
ctgtattaattgttc

SEQ ID NO: 442418 - DNA, 15 bp, Homo sapiens
actgtattaattgtt

SEQ ID NO: 442419 - DNA, 15 bp, Homo sapiens
aactgtattaattgt

SEQ ID NO: 442420 - DNA, 15 bp, Homo sapiens
gaactgtattaattg

SEQ ID NO: 442421 - DNA, 15 bp, Homo sapiens
tgaactgtattaatt

SEQ ID NO: 442422 - DNA, 15 bp, Homo sapiens
atgaactgtattaat

SEQ ID NO: 442423 - DNA, 15 bp, Homo sapiens
tatgaactgtattaa

SEQ ID NO: 442424 - DNA, 15 bp, Homo sapiens
ttatgaactgtatta

SEQ ID NO: 442425 - DNA, 15 bp, Homo sapiens
gttatgaactgtatt

SEQ ID NO: 442426 - DNA, 15 bp, Homo sapiens
tgttatgaactgtat

SEQ ID NO: 442427 - DNA, 15 bp, Homo sapiens
gtgttatgaactgta

SEQ ID NO: 442428 - DNA, 15 bp, Homo sapiens
agtgttatgaactgt

SEQ ID NO: 442429 - DNA, 15 bp, Homo sapiens
aagtgttatgaactg

SEQ ID NO: 442430 - DNA, 15 bp, Homo sapiens
aaagtgttatgaact

SEQ ID NO: 442431 - DNA, 15 bp, Homo sapiens
taaagtgttatgaac

SEQ ID NO: 442432 - DNA, 15 bp, Homo sapiens
gtaaagtgttatgaa

SEQ ID NO: 442433 - DNA, 15 bp, Homo sapiens
tgtaaagtgttatga

SEQ ID NO: 442434 - DNA, 15 bp, Homo sapiens
ttgtaaagtgttatg

SEQ ID NO: 442435 - DNA, 15 bp, Homo sapiens
cttgtaaagtgttat

SEQ ID NO: 442436 - DNA, 15 bp, Homo sapiens
acttgtaaagtgtta

SEQ ID NO: 442437 - DNA, 15 bp, Homo sapiens
aacttgtaaagtgtt

SEQ ID NO: 442438 - DNA, 15 bp, Homo sapiens
taacttgtaaagtgt

SEQ ID NO: 442439 - DNA, 15 bp, Homo sapiens
ataacttgtaaagtg

SEQ ID NO: 442440 - DNA, 15 bp, Homo sapiens
aataacttgtaaagt

SEQ ID NO: 442441 - DNA, 15 bp, Homo sapiens
aaataacttgtaaag

SEQ ID NO: 442442 - DNA, 15 bp, Homo sapiens
taaataacttgtaaa

SEQ ID NO: 442443 - DNA, 15 bp, Homo sapiens
ataaataacttgtaa

SEQ ID NO: 442444 - DNA, 15 bp, Homo sapiens
aataaataacttgta

SEQ ID NO: 442445 - DNA, 15 bp, Homo sapiens
aaataaataacttgt

SEQ ID NO: 442446 - DNA, 15 bp, Homo sapiens
aaaataaataacttg

SEQ ID NO: 442447 - DNA, 15 bp, Homo sapiens
aaaaataaataactt

SEQ ID NO: 442448 - DNA, 15 bp, Homo sapiens
aaaaaataaataact

SEQ ID NO: 442449 - DNA, 15 bp, Homo sapiens
aaaaaaataaataac

SEQ ID NO: 442450 - DNA, 15 bp, Homo sapiens
aaaaaaaataaataa

SEQ ID NO: 442451 - DNA, 15 bp, Homo sapiens
gaaaaaaaataaata

SEQ ID NO: 442452 - DNA, 15 bp, Homo sapiens
tgaaaaaaaataaat

SEQ ID NO: 442453 - DNA, 15 bp, Homo sapiens
atgaaaaaaaataaa

SEQ ID NO: 442454 - DNA, 15 bp, Homo sapiens
catgaaaaaaaataa

SEQ ID NO: 442455 - DNA, 15 bp, Homo sapiens
tcatgaaaaaaaata

SEQ ID NO: 442456 - DNA, 15 bp, Homo sapiens
gtcatgaaaaaaaat

SEQ ID NO: 442457 - DNA, 15 bp, Homo sapiens
agtcatgaaaaaaaa

SEQ ID NO: 442458 - DNA, 15 bp, Homo sapiens
gagtcatgaaaaaaa

SEQ ID NO: 442459 - DNA, 15 bp, Homo sapiens
cgagtcatgaaaaaa

SEQ ID NO: 442460 - DNA, 15 bp, Homo sapiens
acgagtcatgaaaaa

SEQ ID NO: 442461 - DNA, 15 bp, Homo sapiens
tacgagtcatgaaaa

SEQ ID NO: 442462 - DNA, 15 bp, Homo sapiens
ctacgagtcatgaaa

SEQ ID NO: 442463 - DNA, 15 bp, Homo sapiens
gctacgagtcatgaa

SEQ ID NO: 442464 - DNA, 15 bp, Homo sapiens
ggctacgagtcatga

SEQ ID NO: 442465 - DNA, 15 bp, Homo sapiens
aggctacgagtcatg

SEQ ID NO: 442466 - DNA, 15 bp, Homo sapiens
gaggctacgagtcat

SEQ ID NO: 442467 - DNA, 15 bp, Homo sapiens
cgaggctacgagtca

SEQ ID NO: 442468 - DNA, 15 bp, Homo sapiens
ccgaggctacgagtc

SEQ ID NO: 442469 - DNA, 15 bp, Homo sapiens
cccgaggctacgagt

SEQ ID NO: 442470 - DNA, 15 bp, Homo sapiens
ccccgaggctacgag

SEQ ID NO: 442471 - DNA, 15 bp, Homo sapiens
accccgaggctacga

SEQ ID NO: 442472 - DNA, 15 bp, Homo sapiens
gaccccgaggctacg

SEQ ID NO: 442473 - DNA, 15 bp, Homo sapiens
ggaccccgaggctac

SEQ ID NO: 442474 - DNA, 15 bp, Homo sapiens
aggaccccgaggcta

SEQ ID NO: 442475 - DNA, 15 bp, Homo sapiens
aaggaccccgaggct

SEQ ID NO: 442476 - DNA, 15 bp, Homo sapiens
aaaggaccccgaggc

SEQ ID NO: 442477 - DNA, 15 bp, Homo sapiens
taaaggaccccgagg

SEQ ID NO: 442478 - DNA, 15 bp, Homo sapiens
ttaaaggaccccgag

SEQ ID NO: 442479 - DNA, 15 bp, Homo sapiens
cttaaaggaccccga

SEQ ID NO: 442480 - DNA, 15 bp, Homo sapiens
tcttaaaggaccccg

SEQ ID NO: 442481 - DNA, 15 bp, Homo sapiens
gtcttaaaggacccc

SEQ ID NO: 442482 - DNA, 15 bp, Homo sapiens
agtcttaaaggaccc

SEQ ID NO: 442483 - DNA, 15 bp, Homo sapiens
tagtcttaaaggacc

SEQ ID NO: 442484 - DNA, 15 bp, Homo sapiens
atagtcttaaaggac

SEQ ID NO: 442485 - DNA, 15 bp, Homo sapiens
gatagtcttaaagga

SEQ ID NO: 442486 - DNA, 15 bp, Homo sapiens
tgatagtcttaaagg

SEQ ID NO: 442487 - DNA, 15 bp, Homo sapiens
gtgatagtcttaaag

SEQ ID NO: 442488 - DNA, 15 bp, Homo sapiens
agtgatagtcttaaa

SEQ ID NO: 442489 - DNA, 15 bp, Homo sapiens
cagtgatagtcttaa

SEQ ID NO: 442490 - DNA, 15 bp, Homo sapiens
ccagtgatagtctta

SEQ ID NO: 442491 - DNA, 15 bp, Homo sapiens
gccagtgatagtctt

SEQ ID NO: 442492 - DNA, 15 bp, Homo sapiens
tgccagtgatagtct

SEQ ID NO: 442493 - DNA, 15 bp, Homo sapiens
ctgccagtgatagtc

SEQ ID NO: 442494 - DNA, 15 bp, Homo sapiens
actgccagtgatagt

SEQ ID NO: 442495 - DNA, 15 bp, Homo sapiens
tactgccagtgatag

SEQ ID NO: 442496 - DNA, 15 bp, Homo sapiens
ctactgccagtgata

SEQ ID NO: 442497 - DNA, 15 bp, Homo sapiens
gctactgccagtgat

SEQ ID NO: 442498 - DNA, 15 bp, Homo sapiens
tgctactgccagtga

SEQ ID NO: 442499 - DNA, 15 bp, Homo sapiens
ttgctactgccagtg

SEQ ID NO: 442500 - DNA, 15 bp, Homo sapiens
attgctactgccagt

SEQ ID NO: 442501 - DNA, 15 bp, Homo sapiens
cattgctactgccag

SEQ ID NO: 442502 - DNA, 15 bp, Homo sapiens
acattgctactgcca

SEQ ID NO: 442503 - DNA, 15 bp, Homo sapiens
tacattgctactgcc

SEQ ID NO: 442504 - DNA, 15 bp, Homo sapiens
gtacattgctactgc

SEQ ID NO: 442505 - DNA, 15 bp, Homo sapiens
tgtacattgctactg

SEQ ID NO: 442506 - DNA, 15 bp, Homo sapiens
atgtacattgctact

SEQ ID NO: 442507 - DNA, 15 bp, Homo sapiens
aatgtacattgctac

SEQ ID NO: 442508 - DNA, 15 bp, Homo sapiens
aaatgtacattgcta

SEQ ID NO: 442509 - DNA, 15 bp, Homo sapiens
aaaatgtacattgct

SEQ ID NO: 442510 - DNA, 15 bp, Homo sapiens
taaaatgtacattgc

SEQ ID NO: 442511 - DNA, 15 bp, Homo sapiens
ttaaaatgtacattg

SEQ ID NO: 442512 - DNA, 15 bp, Homo sapiens
attaaaatgtacatt

SEQ ID NO: 442513 - DNA, 15 bp, Homo sapiens
cattaaaatgtacat

SEQ ID NO: 442514 - DNA, 15 bp, Homo sapiens
ccattaaaatgtaca

SEQ ID NO: 442515 - DNA, 15 bp, Homo sapiens
accattaaaatgtac

SEQ ID NO: 442516 - DNA, 15 bp, Homo sapiens
aaccattaaaatgta

SEQ ID NO: 442517 - DNA, 15 bp, Homo sapiens
gaaccattaaaatgt

SEQ ID NO: 442518 - DNA, 15 bp, Homo sapiens
ggaaccattaaaatg

SEQ ID NO: 442519 - DNA, 15 bp, Homo sapiens
aggaaccattaaaat

SEQ ID NO: 442520 - DNA, 15 bp, Homo sapiens
taggaaccattaaaa

SEQ ID NO: 442521 - DNA, 15 bp, Homo sapiens
ataggaaccattaaa

SEQ ID NO: 442522 - DNA, 15 bp, Homo sapiens
aataggaaccattaa

SEQ ID NO: 442523 - DNA, 15 bp, Homo sapiens
taataggaaccatta

SEQ ID NO: 442524 - DNA, 15 bp, Homo sapiens
ttaataggaaccatt

SEQ ID NO: 442525 - DNA, 15 bp, Homo sapiens
cttaataggaaccat

SEQ ID NO: 442526 - DNA, 15 bp, Homo sapiens
ccttaataggaacca

SEQ ID NO: 442527 - DNA, 15 bp, Homo sapiens
accttaataggaacc

SEQ ID NO: 442528 - DNA, 15 bp, Homo sapiens
taccttaataggaac

SEQ ID NO: 442529 - DNA, 15 bp, Homo sapiens
ttaccttaataggaa

SEQ ID NO: 442530 - DNA, 15 bp, Homo sapiens
gttaccttaatagga

SEQ ID NO: 442531 - DNA, 15 bp, Homo sapiens
tgttaccttaatagg

SEQ ID NO: 442532 - DNA, 15 bp, Homo sapiens
ttgttaccttaatag

SEQ ID NO: 442533 - DNA, 15 bp, Homo sapiens
tttgttaccttaata

SEQ ID NO: 442534 - DNA, 15 bp, Homo sapiens
ttttgttaccttaat

SEQ ID NO: 442535 - DNA, 15 bp, Homo sapiens
attttgttaccttaa

SEQ ID NO: 442536 - DNA, 15 bp, Homo sapiens
gattttgttacctta

SEQ ID NO: 442537 - DNA, 15 bp, Homo sapiens
tgattttgttacctt

SEQ ID NO: 442538 - DNA, 15 bp, Homo sapiens
gtgattttgttacct

SEQ ID NO: 442539 - DNA, 15 bp, Homo sapiens
tgtgattttgttacc

SEQ ID NO: 442540 - DNA, 15 bp, Homo sapiens
ttgtgattttgttac

SEQ ID NO: 442541 - DNA, 15 bp, Homo sapiens
cttgtgattttgtta

SEQ ID NO: 442542 - DNA, 15 bp, Homo sapiens
tcttgtgattttgtt

SEQ ID NO: 442543 - DNA, 15 bp, Homo sapiens
ctcttgtgattttgt

SEQ ID NO: 442544 - DNA, 15 bp, Homo sapiens
cctcttgtgattttg

SEQ ID NO: 442545 - DNA, 15 bp, Homo sapiens
tcctcttgtgatttt

SEQ ID NO: 442546 - DNA, 15 bp, Homo sapiens
atcctcttgtgattt

SEQ ID NO: 442547 - DNA, 15 bp, Homo sapiens
tatcctcttgtgatt

SEQ ID NO: 442548 - DNA, 15 bp, Homo sapiens
ctatcctcttgtgat

SEQ ID NO: 442549 - DNA, 15 bp, Homo sapiens
gctatcctcttgtga

SEQ ID NO: 442550 - DNA, 15 bp, Homo sapiens
ggctatcctcttgtg

SEQ ID NO: 442551 - DNA, 15 bp, Homo sapiens
tggctatcctcttgt

SEQ ID NO: 442552 - DNA, 15 bp, Homo sapiens
ctggctatcctcttg

SEQ ID NO: 442553 - DNA, 15 bp, Homo sapiens
cctggctatcctctt

SEQ ID NO: 442554 - DNA, 15 bp, Homo sapiens
acctggctatcctct

SEQ ID NO: 442555 - DNA, 15 bp, Homo sapiens
tacctggctatcctc

SEQ ID NO: 442556 - DNA, 15 bp, Homo sapiens
ttacctggctatcct

SEQ ID NO: 442557 - DNA, 15 bp, Homo sapiens
gttacctggctatcc

SEQ ID NO: 442558 - DNA, 15 bp, Homo sapiens
agttacctggctatc

SEQ ID NO: 442559 - DNA, 15 bp, Homo sapiens
gagttacctggctat

SEQ ID NO: 442560 - DNA, 15 bp, Homo sapiens
ggagttacctggcta

SEQ ID NO: 442561 - DNA, 15 bp, Homo sapiens
cggagttacctggct

SEQ ID NO: 442562 - DNA, 15 bp, Homo sapiens
tcggagttacctggc

SEQ ID NO: 442563 - DNA, 15 bp, Homo sapiens
ttcggagttacctgg

SEQ ID NO: 442564 - DNA, 15 bp, Homo sapiens
gttcggagttacctg

SEQ ID NO: 442565 - DNA, 15 bp, Homo sapiens
tgttcggagttacct

SEQ ID NO: 442566 - DNA, 15 bp, Homo sapiens
atgttcggagttacc

SEQ ID NO: 442567 - DNA, 15 bp, Homo sapiens
tatgttcggagttac

SEQ ID NO: 442568 - DNA, 15 bp, Homo sapiens
ttatgttcggagtta

SEQ ID NO: 442569 - DNA, 15 bp, Homo sapiens
tttatgttcggagtt

SEQ ID NO: 442570 - DNA, 15 bp, Homo sapiens
ttttatgttcggagt

SEQ ID NO: 442571 - DNA, 15 bp, Homo sapiens
attttatgttcggag

SEQ ID NO: 442572 - DNA, 15 bp, Homo sapiens
gattttatgttcgga

SEQ ID NO: 442573 - DNA, 15 bp, Homo sapiens
ggattttatgttcgg

SEQ ID NO: 442574 - DNA, 15 bp, Homo sapiens
tggattttatgttcg

SEQ ID NO: 442575 - DNA, 15 bp, Homo sapiens
gtggattttatgttc

SEQ ID NO: 442576 - DNA, 15 bp, Homo sapiens
ggtggattttatgtt

SEQ ID NO: 442577 - DNA, 15 bp, Homo sapiens
tggtggattttatgt

SEQ ID NO: 442578 - DNA, 15 bp, Homo sapiens
atggtggattttatg

SEQ ID NO: 442579 - DNA, 15 bp, Homo sapiens
tatggtggattttat

SEQ ID NO: 442580 - DNA, 15 bp, Homo sapiens
ttatggtggatttta

SEQ ID NO: 442581 - DNA, 15 bp, Homo sapiens
attatggtggatttt

SEQ ID NO: 442582 - DNA, 15 bp, Homo sapiens
tattatggtggattt

SEQ ID NO: 442583 - DNA, 15 bp, Homo sapiens
atattatggtggatt

SEQ ID NO: 442584 - DNA, 15 bp, Homo sapiens
tatattatggtggat

SEQ ID NO: 442585 - DNA, 15 bp, Homo sapiens
ttatattatggtgga

SEQ ID NO: 442586 - DNA, 15 bp, Homo sapiens
tttatattatggtgg

SEQ ID NO: 442587 - DNA, 15 bp, Homo sapiens
atttatattatggtg

SEQ ID NO: 442588 - DNA, 15 bp, Homo sapiens
tatttatattatggt

SEQ ID NO: 442589 - DNA, 15 bp, Homo sapiens
atatttatattatgg

SEQ ID NO: 442590 - DNA, 15 bp, Homo sapiens
tatatttatattatg

SEQ ID NO: 442591 - DNA, 15 bp, Homo sapiens
ttatatttatattat

SEQ ID NO: 442592 - DNA, 15 bp, Homo sapiens
attatatttatatta

SEQ ID NO: 442593 - DNA, 15 bp, Homo sapiens
aattatatttatatt

SEQ ID NO: 442594 - DNA, 15 bp, Homo sapiens
taattatatttatat

SEQ ID NO: 442595 - DNA, 15 bp, Homo sapiens
ataattatatttata

SEQ ID NO: 442596 - DNA, 15 bp, Homo sapiens
aataattatatttat

SEQ ID NO: 442597 - DNA, 15 bp, Homo sapiens
aaataattatattta

SEQ ID NO: 442598 - DNA, 15 bp, Homo sapiens
taaataattatattt

SEQ ID NO: 442599 - DNA, 15 bp, Homo sapiens
ataaataattatatt

SEQ ID NO: 442600 - DNA, 15 bp, Homo sapiens
tataaataattatat

SEQ ID NO: 442601 - DNA, 15 bp, Homo sapiens
atataaataattata

SEQ ID NO: 442602 - DNA, 15 bp, Homo sapiens
aatataaataattat

SEQ ID NO: 442603 - DNA, 15 bp, Homo sapiens
taatataaataatta

SEQ ID NO: 442604 - DNA, 15 bp, Homo sapiens
ataatataaataatt

SEQ ID NO: 442605 - DNA, 15 bp, Homo sapiens
cataatataaataat

SEQ ID NO: 442606 - DNA, 15 bp, Homo sapiens
ccataatataaataa

SEQ ID NO: 442607 - DNA, 15 bp, Homo sapiens
gccataatataaata

SEQ ID NO: 442608 - DNA, 15 bp, Homo sapiens
agccataatataaat

SEQ ID NO: 442609 - DNA, 15 bp, Homo sapiens
cagccataatataaa

SEQ ID NO: 442610 - DNA, 15 bp, Homo sapiens
tcagccataatataa

SEQ ID NO: 442611 - DNA, 15 bp, Homo sapiens
atcagccataatata

SEQ ID NO: 442612 - DNA, 15 bp, Homo sapiens
tatcagccataatat

SEQ ID NO: 442613 - DNA, 15 bp, Homo sapiens
atatcagccataata

SEQ ID NO: 442614 - DNA, 15 bp, Homo sapiens
aatatcagccataat

SEQ ID NO: 442615 - DNA, 15 bp, Homo sapiens
gaatatcagccataa

SEQ ID NO: 442616 - DNA, 15 bp, Homo sapiens
tgaatatcagccata

SEQ ID NO: 442617 - DNA, 15 bp, Homo sapiens
atgaatatcagccat

SEQ ID NO: 442618 - DNA, 15 bp, Homo sapiens
aatgaatatcagcca

SEQ ID NO: 442619 - DNA, 15 bp, Homo sapiens
taatgaatatcagcc

SEQ ID NO: 442620 - DNA, 15 bp, Homo sapiens
ataatgaatatcagc

SEQ ID NO: 442621 - DNA, 15 bp, Homo sapiens
tataatgaatatcag

SEQ ID NO: 442622 - DNA, 15 bp, Homo sapiens
ttataatgaatatca

SEQ ID NO: 442623 - DNA, 15 bp, Homo sapiens
tttataatgaatatc

SEQ ID NO: 442624 - DNA, 15 bp, Homo sapiens
gtttataatgaatat

SEQ ID NO: 442625 - DNA, 15 bp, Homo sapiens
tgtttataatgaata

SEQ ID NO: 442626 - DNA, 15 bp, Homo sapiens
atgtttataatgaat

SEQ ID NO: 442627 - DNA, 15 bp, Homo sapiens
tatgtttataatgaa

SEQ ID NO: 442628 - DNA, 15 bp, Homo sapiens
ctatgtttataatga

SEQ ID NO: 442629 - DNA, 15 bp, Homo sapiens
actatgtttataatg

SEQ ID NO: 442630 - DNA, 15 bp, Homo sapiens
cactatgtttataat

SEQ ID NO: 442631 - DNA, 15 bp, Homo sapiens
gcactatgtttataa

SEQ ID NO: 442632 - DNA, 15 bp, Homo sapiens
tgcactatgtttata

SEQ ID NO: 442633 - DNA, 15 bp, Homo sapiens
ttgcactatgtttat

SEQ ID NO: 442634 - DNA, 15 bp, Homo sapiens
tttgcactatgttta

SEQ ID NO: 442635 - DNA, 15 bp, Homo sapiens
atttgcactatgttt

SEQ ID NO: 442636 - DNA, 15 bp, Homo sapiens
aatttgcactatgtt

SEQ ID NO: 442637 - DNA, 15 bp, Homo sapiens
caatttgcactatgt

SEQ ID NO: 442638 - DNA, 15 bp, Homo sapiens
ccaatttgcactatg

SEQ ID NO: 442639 - DNA, 15 bp, Homo sapiens
tccaatttgcactat

SEQ ID NO: 442640 - DNA, 15 bp, Homo sapiens
atccaatttgcacta

SEQ ID NO: 442641 - DNA, 15 bp, Homo sapiens
aatccaatttgcact

SEQ ID NO: 442642 - DNA, 15 bp, Homo sapiens
caatccaatttgcac

SEQ ID NO: 442643 - DNA, 15 bp, Homo sapiens
gcaatccaatttgca

SEQ ID NO: 442644 - DNA, 15 bp, Homo sapiens
agcaatccaatttgc

SEQ ID NO: 442645 - DNA, 15 bp, Homo sapiens
cagcaatccaatttg

SEQ ID NO: 442646 - DNA, 15 bp, Homo sapiens
acagcaatccaattt

SEQ ID NO: 442647 - DNA, 15 bp, Homo sapiens
cacagcaatccaatt

SEQ ID NO: 442648 - DNA, 15 bp, Homo sapiens
acacagcaatccaat

SEQ ID NO: 442649 - DNA, 15 bp, Homo sapiens
tacacagcaatccaa

SEQ ID NO: 442650 - DNA, 15 bp, Homo sapiens
ttacacagcaatcca

SEQ ID NO: 442651 - DNA, 15 bp, Homo sapiens
attacacagcaatcc

SEQ ID NO: 442652 - DNA, 15 bp, Homo sapiens
aattacacagcaatc

SEQ ID NO: 442653 - DNA, 15 bp, Homo sapiens
gaattacacagcaat

SEQ ID NO: 442654 - DNA, 15 bp, Homo sapiens
agaattacacagcaa

SEQ ID NO: 442655 - DNA, 15 bp, Homo sapiens
gagaattacacagca

SEQ ID NO: 442656 - DNA, 15 bp, Homo sapiens
agagaattacacagc

SEQ ID NO: 442657 - DNA, 15 bp, Homo sapiens
tagagaattacacag

SEQ ID NO: 442658 - DNA, 15 bp, Homo sapiens
atagagaattacaca

SEQ ID NO: 442659 - DNA, 15 bp, Homo sapiens
aatagagaattacac

SEQ ID NO: 442660 - DNA, 15 bp, Homo sapiens
gaatagagaattaca

SEQ ID NO: 442661 - DNA, 15 bp, Homo sapiens
agaatagagaattac

SEQ ID NO: 442662 - DNA, 15 bp, Homo sapiens
aagaatagagaatta

SEQ ID NO: 442663 - DNA, 15 bp, Homo sapiens
taagaatagagaatt

SEQ ID NO: 442664 - DNA, 15 bp, Homo sapiens
ataagaatagagaat

SEQ ID NO: 442665 - DNA, 15 bp, Homo sapiens
aataagaatagagaa

SEQ ID NO: 442666 - DNA, 15 bp, Homo sapiens
aaataagaatagaga

SEQ ID NO: 442667 - DNA, 15 bp, Homo sapiens
aaaataagaatagag

SEQ ID NO: 442668 - DNA, 15 bp, Homo sapiens
aaaaataagaataga

SEQ ID NO: 442669 - DNA, 15 bp, Homo sapiens
gaaaaataagaatag

SEQ ID NO: 442670 - DNA, 15 bp, Homo sapiens
ggaaaaataagaata

SEQ ID NO: 442671 - DNA, 15 bp, Homo sapiens
cggaaaaataagaat

SEQ ID NO: 442672 - DNA, 15 bp, Homo sapiens
tcggaaaaataagaa

SEQ ID NO: 442673 - DNA, 15 bp, Homo sapiens
ttcggaaaaataaga

SEQ ID NO: 442674 - DNA, 15 bp, Homo sapiens
tttcggaaaaataag

SEQ ID NO: 442675 - DNA, 15 bp, Homo sapiens
ttttcggaaaaataa

SEQ ID NO: 442676 - DNA, 15 bp, Homo sapiens
cttttcggaaaaata

SEQ ID NO: 442677 - DNA, 15 bp, Homo sapiens
tcttttcggaaaaat

SEQ ID NO: 442678 - DNA, 15 bp, Homo sapiens
atcttttcggaaaaa

SEQ ID NO: 442679 - DNA, 15 bp, Homo sapiens
aatcttttcggaaaa

SEQ ID NO: 442680 - DNA, 15 bp, Homo sapiens
aaatcttttcggaaa

SEQ ID NO: 442681 - DNA, 15 bp, Homo sapiens
aaaatcttttcggaa

SEQ ID NO: 442682 - DNA, 15 bp, Homo sapiens
aaaaatcttttcgga

SEQ ID NO: 442683 - DNA, 15 bp, Homo sapiens
caaaaatcttttcgg

SEQ ID NO: 442684 - DNA, 15 bp, Homo sapiens
acaaaaatcttttcg

SEQ ID NO: 442685 - DNA, 15 bp, Homo sapiens
gacaaaaatcttttc

SEQ ID NO: 442686 - DNA, 15 bp, Homo sapiens
agacaaaaatctttt

SEQ ID NO: 442687 - DNA, 15 bp, Homo sapiens
aagacaaaaatcttt

SEQ ID NO: 442688 - DNA, 15 bp, Homo sapiens
caagacaaaaatctt

SEQ ID NO: 442689 - DNA, 15 bp, Homo sapiens
gcaagacaaaaatct

SEQ ID NO: 442690 - DNA, 15 bp, Homo sapiens
tgcaagacaaaaatc

SEQ ID NO: 442691 - DNA, 15 bp, Homo sapiens
gtgcaagacaaaaat

SEQ ID NO: 442692 - DNA, 15 bp, Homo sapiens
agtgcaagacaaaaa

SEQ ID NO: 442693 - DNA, 15 bp, Homo sapiens
cagtgcaagacaaaa

SEQ ID NO: 442694 - DNA, 15 bp, Homo sapiens
acagtgcaagacaaa

SEQ ID NO: 442695 - DNA, 15 bp, Homo sapiens
aacagtgcaagacaa

SEQ ID NO: 442696 - DNA, 15 bp, Homo sapiens
aaacagtgcaagaca

SEQ ID NO: 442697 - DNA, 15 bp, Homo sapiens
aaaacagtgcaagac

SEQ ID NO: 442698 - DNA, 15 bp, Homo sapiens
taaaacagtgcaaga

SEQ ID NO: 442699 - DNA, 15 bp, Homo sapiens
ttaaaacagtgcaag

SEQ ID NO: 442700 - DNA, 15 bp, Homo sapiens
tttaaaacagtgcaa

SEQ ID NO: 442701 - DNA, 15 bp, Homo sapiens
ttttaaaacagtgca

SEQ ID NO: 442702 - DNA, 15 bp, Homo sapiens
gttttaaaacagtgc

SEQ ID NO: 442703 - DNA, 15 bp, Homo sapiens
tgttttaaaacagtg

SEQ ID NO: 442704 - DNA, 15 bp, Homo sapiens
ttgttttaaaacagt

SEQ ID NO: 442705 - DNA, 15 bp, Homo sapiens
cttgttttaaaacag

SEQ ID NO: 442706 - DNA, 15 bp, Homo sapiens
tcttgttttaaaaca

SEQ ID NO: 442707 - DNA, 15 bp, Homo sapiens
gtcttgttttaaaac

SEQ ID NO: 442708 - DNA, 15 bp, Homo sapiens
tgtcttgttttaaaa

SEQ ID NO: 442709 - DNA, 15 bp, Homo sapiens
atgtcttgttttaaa

SEQ ID NO: 442710 - DNA, 15 bp, Homo sapiens
aatgtcttgttttaa

SEQ ID NO: 442711 - DNA, 15 bp, Homo sapiens
taatgtcttgtttta

SEQ ID NO: 442712 - DNA, 15 bp, Homo sapiens
ctaatgtcttgtttt

SEQ ID NO: 442713 - DNA, 15 bp, Homo sapiens
cctaatgtcttgttt

SEQ ID NO: 442714 - DNA, 15 bp, Homo sapiens
tcctaatgtcttgtt

SEQ ID NO: 442715 - DNA, 15 bp, Homo sapiens
ctcctaatgtcttgt

SEQ ID NO: 442716 - DNA, 15 bp, Homo sapiens
cctcctaatgtcttg

SEQ ID NO: 442717 - DNA, 15 bp, Homo sapiens
tcctcctaatgtctt

SEQ ID NO: 442718 - DNA, 15 bp, Homo sapiens
ttcctcctaatgtct

SEQ ID NO: 442719 - DNA, 15 bp, Homo sapiens
tttcctcctaatgtc

SEQ ID NO: 442720 - DNA, 15 bp, Homo sapiens
ctttcctcctaatgt

SEQ ID NO: 442721 - DNA, 15 bp, Homo sapiens
gctttcctcctaatg

SEQ ID NO: 442722 - DNA, 15 bp, Homo sapiens
tgctttcctcctaat

SEQ ID NO: 442723 - DNA, 15 bp, Homo sapiens
ctgctttcctcctaa

SEQ ID NO: 442724 - DNA, 15 bp, Homo sapiens
actgctttcctccta

SEQ ID NO: 442725 - DNA, 15 bp, Homo sapiens
tactgctttcctcct

SEQ ID NO: 442726 - DNA, 15 bp, Homo sapiens
ctactgctttcctcc

SEQ ID NO: 442727 - DNA, 15 bp, Homo sapiens
actactgctttcctc

SEQ ID NO: 442728 - DNA, 15 bp, Homo sapiens
aactactgctttcct

SEQ ID NO: 442729 - DNA, 15 bp, Homo sapiens
gaactactgctttcc

SEQ ID NO: 442730 - DNA, 15 bp, Homo sapiens
tgaactactgctttc

SEQ ID NO: 442731 - DNA, 15 bp, Homo sapiens
atgaactactgcttt

SEQ ID NO: 442732 - DNA, 15 bp, Homo sapiens
tatgaactactgctt

SEQ ID NO: 442733 - DNA, 15 bp, Homo sapiens
ctatgaactactgct

SEQ ID NO: 442734 - DNA, 15 bp, Homo sapiens
tctatgaactactgc

SEQ ID NO: 442735 - DNA, 15 bp, Homo sapiens
ttctatgaactactg

SEQ ID NO: 442736 - DNA, 15 bp, Homo sapiens
attctatgaactact

SEQ ID NO: 442737 - DNA, 15 bp, Homo sapiens
gattctatgaactac

SEQ ID NO: 442738 - DNA, 15 bp, Homo sapiens
ggattctatgaacta

SEQ ID NO: 442739 - DNA, 15 bp, Homo sapiens
tggattctatgaact

SEQ ID NO: 442740 - DNA, 15 bp, Homo sapiens
ttggattctatgaac

SEQ ID NO: 442741 - DNA, 15 bp, Homo sapiens
tttggattctatgaa

SEQ ID NO: 442742 - DNA, 15 bp, Homo sapiens
ttttggattctatga

SEQ ID NO: 442743 - DNA, 15 bp, Homo sapiens
tttttggattctatg

SEQ ID NO: 442744 - DNA, 15 bp, Homo sapiens
ctttttggattctat

SEQ ID NO: 442745 - DNA, 15 bp, Homo sapiens
cctttttggattcta

SEQ ID NO: 442746 - DNA, 15 bp, Homo sapiens
gcctttttggattct

SEQ ID NO: 442747 - DNA, 15 bp, Homo sapiens
tgcctttttggattc

SEQ ID NO: 442748 - DNA, 15 bp, Homo sapiens
ctgcctttttggatt

SEQ ID NO: 442749 - DNA, 15 bp, Homo sapiens
tctgcctttttggat

SEQ ID NO: 442750 - DNA, 15 bp, Homo sapiens
atctgcctttttgga

SEQ ID NO: 442751 - DNA, 15 bp, Homo sapiens
catctgcctttttgg

SEQ ID NO: 442752 - DNA, 15 bp, Homo sapiens
ccatctgcctttttg

SEQ ID NO: 442753 - DNA, 15 bp, Homo sapiens
gccatctgccttttt

SEQ ID NO: 442754 - DNA, 15 bp, Homo sapiens
ggccatctgcctttt

SEQ ID NO: 442755 - DNA, 15 bp, Homo sapiens
tggccatctgccttt

SEQ ID NO: 442756 - DNA, 15 bp, Homo sapiens
ctggccatctgcctt

SEQ ID NO: 442757 - DNA, 15 bp, Homo sapiens
tctggccatctgcct

SEQ ID NO: 442758 - DNA, 15 bp, Homo sapiens
ttctggccatctgcc

SEQ ID NO: 442759 - DNA, 15 bp, Homo sapiens
tttctggccatctgc

SEQ ID NO: 442760 - DNA, 15 bp, Homo sapiens
ctttctggccatctg

SEQ ID NO: 442761 - DNA, 15 bp, Homo sapiens
gctttctggccatct

SEQ ID NO: 442762 - DNA, 15 bp, Homo sapiens
agctttctggccatc

SEQ ID NO: 442763 - DNA, 15 bp, Homo sapiens
gagctttctggccat

SEQ ID NO: 442764 - DNA, 15 bp, Homo sapiens
agagctttctggcca

SEQ ID NO: 442765 - DNA, 15 bp, Homo sapiens
aagagctttctggcc

SEQ ID NO: 442766 - DNA, 15 bp, Homo sapiens
gaagagctttctggc

SEQ ID NO: 442767 - DNA, 15 bp, Homo sapiens
agaagagctttctgg

SEQ ID NO: 442768 - DNA, 15 bp, Homo sapiens
tagaagagctttctg

SEQ ID NO: 442769 - DNA, 15 bp, Homo sapiens
ctagaagagctttct

SEQ ID NO: 442770 - DNA, 15 bp, Homo sapiens
tctagaagagctttc

SEQ ID NO: 442771 - DNA, 15 bp, Homo sapiens
ttctagaagagcttt

SEQ ID NO: 442772 - DNA, 15 bp, Homo sapiens
gttctagaagagctt

SEQ ID NO: 442773 - DNA, 15 bp, Homo sapiens
agttctagaagagct

SEQ ID NO: 442774 - DNA, 15 bp, Homo sapiens
gagttctagaagagc

SEQ ID NO: 442775 - DNA, 15 bp, Homo sapiens
tgagttctagaagag

SEQ ID NO: 442776 - DNA, 15 bp, Homo sapiens
atgagttctagaaga

SEQ ID NO: 442777 - DNA, 15 bp, Homo sapiens
catgagttctagaag

SEQ ID NO: 442778 - DNA, 15 bp, Homo sapiens
acatgagttctagaa

SEQ ID NO: 442779 - DNA, 15 bp, Homo sapiens
aacatgagttctaga

SEQ ID NO: 442780 - DNA, 15 bp, Homo sapiens
aaacatgagttctag

SEQ ID NO: 442781 - DNA, 15 bp, Homo sapiens
caaacatgagttcta

SEQ ID NO: 442782 - DNA, 15 bp, Homo sapiens
tcaaacatgagttct

SEQ ID NO: 442783 - DNA, 15 bp, Homo sapiens
ctcaaacatgagttc

SEQ ID NO: 442784 - DNA, 15 bp, Homo sapiens
cctcaaacatgagtt

SEQ ID NO: 442785 - DNA, 15 bp, Homo sapiens
tcctcaaacatgagt

SEQ ID NO: 442786 - DNA, 15 bp, Homo sapiens
ctcctcaaacatgag

SEQ ID NO: 442787 - DNA, 15 bp, Homo sapiens
actcctcaaacatga

SEQ ID NO: 442788 - DNA, 15 bp, Homo sapiens
aactcctcaaacatg

SEQ ID NO: 442789 - DNA, 15 bp, Homo sapiens
gaactcctcaaacat

SEQ ID NO: 442790 - DNA, 15 bp, Homo sapiens
ggaactcctcaaaca

SEQ ID NO: 442791 - DNA, 15 bp, Homo sapiens
tggaactcctcaaac

SEQ ID NO: 442792 - DNA, 15 bp, Homo sapiens
gtggaactcctcaaa

SEQ ID NO: 442793 - DNA, 15 bp, Homo sapiens
ggtggaactcctcaa

SEQ ID NO: 442794 - DNA, 15 bp, Homo sapiens
tggtggaactcctca

SEQ ID NO: 442795 - DNA, 15 bp, Homo sapiens
ttggtggaactcctc

SEQ ID NO: 442796 - DNA, 15 bp, Homo sapiens
tttggtggaactcct

SEQ ID NO: 442797 - DNA, 15 bp, Homo sapiens
ttttggtggaactcc

SEQ ID NO: 442798 - DNA, 15 bp, Homo sapiens
attttggtggaactc

SEQ ID NO: 442799 - DNA, 15 bp, Homo sapiens
tattttggtggaact

SEQ ID NO: 442800 - DNA, 15 bp, Homo sapiens
ttattttggtggaac

SEQ ID NO: 442801 - DNA, 15 bp, Homo sapiens
gttattttggtggaa

SEQ ID NO: 442802 - DNA, 15 bp, Homo sapiens
tgttattttggtgga

SEQ ID NO: 442803 - DNA, 15 bp, Homo sapiens
ttgttattttggtgg

SEQ ID NO: 442804 - DNA, 15 bp, Homo sapiens
tttgttattttggtg

SEQ ID NO: 442805 - DNA, 15 bp, Homo sapiens
gtttgttattttggt

SEQ ID NO: 442806 - DNA, 15 bp, Homo sapiens
tgtttgttattttgg

SEQ ID NO: 442807 - DNA, 15 bp, Homo sapiens
gtgtttgttattttg

SEQ ID NO: 442808 - DNA, 15 bp, Homo sapiens
ggtgtttgttatttt

SEQ ID NO: 442809 - DNA, 15 bp, Homo sapiens
aggtgtttgttattt

SEQ ID NO: 442810 - DNA, 15 bp, Homo sapiens
gaggtgtttgttatt

SEQ ID NO: 442811 - DNA, 15 bp, Homo sapiens
agaggtgtttgttat

SEQ ID NO: 442812 - DNA, 15 bp, Homo sapiens
gagaggtgtttgtta

SEQ ID NO: 442813 - DNA, 15 bp, Homo sapiens
tgagaggtgtttgtt

SEQ ID NO: 442814 - DNA, 15 bp, Homo sapiens
atgagaggtgtttgt

SEQ ID NO: 442815 - DNA, 15 bp, Homo sapiens
catgagaggtgtttg

SEQ ID NO: 442816 - DNA, 15 bp, Homo sapiens
ccatgagaggtgttt

SEQ ID NO: 442817 - DNA, 15 bp, Homo sapiens
tccatgagaggtgtt

SEQ ID NO: 442818 - DNA, 15 bp, Homo sapiens
gtccatgagaggtgt

SEQ ID NO: 442819 - DNA, 15 bp, Homo sapiens
ggtccatgagaggtg

SEQ ID NO: 442820 - DNA, 15 bp, Homo sapiens
tggtccatgagaggt

SEQ ID NO: 442821 - DNA, 15 bp, Homo sapiens
ctggtccatgagagg

SEQ ID NO: 442822 - DNA, 15 bp, Homo sapiens
gctggtccatgagag

SEQ ID NO: 442823 - DNA, 15 bp, Homo sapiens
ggctggtccatgaga

SEQ ID NO: 442824 - DNA, 15 bp, Homo sapiens
aggctggtccatgag

SEQ ID NO: 442825 - DNA, 15 bp, Homo sapiens
caggctggtccatga

SEQ ID NO: 442826 - DNA, 15 bp, Homo sapiens
ccaggctggtccatg

SEQ ID NO: 442827 - DNA, 15 bp, Homo sapiens
tccaggctggtccat

SEQ ID NO: 442828 - DNA, 15 bp, Homo sapiens
ttccaggctggtcca

SEQ ID NO: 442829 - DNA, 15 bp, Homo sapiens
tttccaggctggtcc

SEQ ID NO: 442830 - DNA, 15 bp, Homo sapiens
atttccaggctggtc

SEQ ID NO: 442831 - DNA, 15 bp, Homo sapiens
catttccaggctggt

SEQ ID NO: 442832 - DNA, 15 bp, Homo sapiens
ccatttccaggctgg

SEQ ID NO: 442833 - DNA, 15 bp, Homo sapiens
cccatttccaggctg

SEQ ID NO: 442834 - DNA, 15 bp, Homo sapiens
acccatttccaggct

SEQ ID NO: 442835 - DNA, 15 bp, Homo sapiens
gacccatttccaggc

SEQ ID NO: 442836 - DNA, 15 bp, Homo sapiens
ggacccatttccagg

SEQ ID NO: 442837 - DNA, 15 bp, Homo sapiens
gggacccatttccag

SEQ ID NO: 442838 - DNA, 15 bp, Homo sapiens
tgggacccatttcca

SEQ ID NO: 442839 - DNA, 15 bp, Homo sapiens
ctgggacccatttcc

SEQ ID NO: 442840 - DNA, 15 bp, Homo sapiens
cctgggacccatttc

SEQ ID NO: 442841 - DNA, 15 bp, Homo sapiens
acctgggacccattt

SEQ ID NO: 442842 - DNA, 15 bp, Homo sapiens
gacctgggacccatt

SEQ ID NO: 442843 - DNA, 15 bp, Homo sapiens
agacctgggacccat

SEQ ID NO: 442844 - DNA, 15 bp, Homo sapiens
aagacctgggaccca

SEQ ID NO: 442845 - DNA, 15 bp, Homo sapiens
aaagacctgggaccc

SEQ ID NO: 442846 - DNA, 15 bp, Homo sapiens
gaaagacctgggacc

SEQ ID NO: 442847 - DNA, 15 bp, Homo sapiens
agaaagacctgggac

SEQ ID NO: 442848 - DNA, 15 bp, Homo sapiens
cagaaagacctggga

SEQ ID NO: 442849 - DNA, 15 bp, Homo sapiens
acagaaagacctggg

SEQ ID NO: 442850 - DNA, 15 bp, Homo sapiens
cacagaaagacctgg

SEQ ID NO: 442851 - DNA, 15 bp, Homo sapiens
ccacagaaagacctg

SEQ ID NO: 442852 - DNA, 15 bp, Homo sapiens
tccacagaaagacct

SEQ ID NO: 442853 - DNA, 15 bp, Homo sapiens
ctccacagaaagacc

SEQ ID NO: 442854 - DNA, 15 bp, Homo sapiens
actccacagaaagac

SEQ ID NO: 442855 - DNA, 15 bp, Homo sapiens
tactccacagaaaga

SEQ ID NO: 442856 - DNA, 15 bp, Homo sapiens
atactccacagaaag

SEQ ID NO: 442857 - DNA, 15 bp, Homo sapiens
catactccacagaaa

SEQ ID NO: 442858 - DNA, 15 bp, Homo sapiens
ccatactccacagaa

SEQ ID NO: 442859 - DNA, 15 bp, Homo sapiens
gccatactccacaga

SEQ ID NO: 442860 - DNA, 15 bp, Homo sapiens
agccatactccacag

SEQ ID NO: 442861 - DNA, 15 bp, Homo sapiens
aagccatactccaca

SEQ ID NO: 442862 - DNA, 15 bp, Homo sapiens
aaagccatactccac

SEQ ID NO: 442863 - DNA, 15 bp, Homo sapiens
gaaagccatactcca

SEQ ID NO: 442864 - DNA, 15 bp, Homo sapiens
agaaagccatactcc

SEQ ID NO: 442865 - DNA, 15 bp, Homo sapiens
tagaaagccatactc

SEQ ID NO: 442866 - DNA, 15 bp, Homo sapiens
atagaaagccatact

SEQ ID NO: 442867 - DNA, 15 bp, Homo sapiens
gatagaaagccatac

SEQ ID NO: 442868 - DNA, 15 bp, Homo sapiens
ggatagaaagccata

SEQ ID NO: 442869 - DNA, 15 bp, Homo sapiens
aggatagaaagccat

SEQ ID NO: 442870 - DNA, 15 bp, Homo sapiens
taggatagaaagcca

SEQ ID NO: 442871 - DNA, 15 bp, Homo sapiens
gtaggatagaaagcc

SEQ ID NO: 442872 - DNA, 15 bp, Homo sapiens
ggtaggatagaaagc

SEQ ID NO: 442873 - DNA, 15 bp, Homo sapiens
aggtaggatagaaag

SEQ ID NO: 442874 - DNA, 15 bp, Homo sapiens
gaggtaggatagaaa

SEQ ID NO: 442875 - DNA, 15 bp, Homo sapiens
ggaggtaggatagaa

SEQ ID NO: 442876 - DNA, 15 bp, Homo sapiens
aggaggtaggataga

SEQ ID NO: 442877 - DNA, 15 bp, Homo sapiens
gaggaggtaggatag

SEQ ID NO: 442878 - DNA, 15 bp, Homo sapiens
ggaggaggtaggata

SEQ ID NO: 442879 - DNA, 15 bp, Homo sapiens
gggaggaggtaggat

SEQ ID NO: 442880 - DNA, 15 bp, Homo sapiens
tgggaggaggtagga

SEQ ID NO: 442881 - DNA, 15 bp, Homo sapiens
ttgggaggaggtagg

SEQ ID NO: 442882 - DNA, 15 bp, Homo sapiens
cttgggaggaggtag

SEQ ID NO: 442883 - DNA, 15 bp, Homo sapiens
acttgggaggaggta

SEQ ID NO: 442884 - DNA, 15 bp, Homo sapiens
cacttgggaggaggt

SEQ ID NO: 442885 - DNA, 15 bp, Homo sapiens
acacttgggaggagg

SEQ ID NO: 442886 - DNA, 15 bp, Homo sapiens
cacacttgggaggag

SEQ ID NO: 442887 - DNA, 15 bp, Homo sapiens
tcacacttgggagga

SEQ ID NO: 442888 - DNA, 15 bp, Homo sapiens
gtcacacttgggagg

SEQ ID NO: 442889 - DNA, 15 bp, Homo sapiens
cgtcacacttgggag

SEQ ID NO: 442890 - DNA, 15 bp, Homo sapiens
tcgtcacacttggga

SEQ ID NO: 442891 - DNA, 15 bp, Homo sapiens
gtcgtcacacttggg

SEQ ID NO: 442892 - DNA, 15 bp, Homo sapiens
ggtcgtcacacttgg

SEQ ID NO: 442893 - DNA, 15 bp, Homo sapiens
cggtcgtcacacttg

SEQ ID NO: 442894 - DNA, 15 bp, Homo sapiens
acggtcgtcacactt

SEQ ID NO: 442895 - DNA, 15 bp, Homo sapiens
aacggtcgtcacact

SEQ ID NO: 442896 - DNA, 15 bp, Homo sapiens
taacggtcgtcacac

SEQ ID NO: 442897 - DNA, 15 bp, Homo sapiens
ataacggtcgtcaca

SEQ ID NO: 442898 - DNA, 15 bp, Homo sapiens
gataacggtcgtcac

SEQ ID NO: 442899 - DNA, 15 bp, Homo sapiens
tgataacggtcgtca

SEQ ID NO: 442900 - DNA, 15 bp, Homo sapiens
ctgataacggtcgtc

SEQ ID NO: 442901 - DNA, 15 bp, Homo sapiens
actgataacggtcgt

SEQ ID NO: 442902 - DNA, 15 bp, Homo sapiens
cactgataacggtcg

SEQ ID NO: 442903 - DNA, 15 bp, Homo sapiens
acactgataacggtc

SEQ ID NO: 442904 - DNA, 15 bp, Homo sapiens
gacactgataacggt

SEQ ID NO: 442905 - DNA, 15 bp, Homo sapiens
ggacactgataacgg

SEQ ID NO: 442906 - DNA, 15 bp, Homo sapiens
aggacactgataacg

SEQ ID NO: 442907 - DNA, 15 bp, Homo sapiens
gaggacactgataac

SEQ ID NO: 442908 - DNA, 15 bp, Homo sapiens
ggaggacactgataa

SEQ ID NO: 442909 - DNA, 15 bp, Homo sapiens
aggaggacactgata

SEQ ID NO: 442910 - DNA, 15 bp, Homo sapiens
caggaggacactgat

SEQ ID NO: 442911 - DNA, 15 bp, Homo sapiens
gcaggaggacactga

SEQ ID NO: 442912 - DNA, 15 bp, Homo sapiens
agcaggaggacactg

SEQ ID NO: 442913 - DNA, 15 bp, Homo sapiens
cagcaggaggacact

SEQ ID NO: 442914 - DNA, 15 bp, Homo sapiens
gcagcaggaggacac

SEQ ID NO: 442915 - DNA, 15 bp, Homo sapiens
agcagcaggaggaca

SEQ ID NO: 442916 - DNA, 15 bp, Homo sapiens
gagcagcaggaggac

SEQ ID NO: 442917 - DNA, 15 bp, Homo sapiens
agagcagcaggagga

SEQ ID NO: 442918 - DNA, 15 bp, Homo sapiens
gagagcagcaggagg

SEQ ID NO: 442919 - DNA, 15 bp, Homo sapiens
agagagcagcaggag

SEQ ID NO: 442920 - DNA, 15 bp, Homo sapiens
cagagagcagcagga

SEQ ID NO: 442921 - DNA, 15 bp, Homo sapiens
ccagagagcagcagg

SEQ ID NO: 442922 - DNA, 15 bp, Homo sapiens
cccagagagcagcag

SEQ ID NO: 442923 - DNA, 15 bp, Homo sapiens
acccagagagcagca

SEQ ID NO: 442924 - DNA, 15 bp, Homo sapiens
cacccagagagcagc

SEQ ID NO: 442925 - DNA, 15 bp, Homo sapiens
acacccagagagcag

SEQ ID NO: 442926 - DNA, 15 bp, Homo sapiens
gacacccagagagca

SEQ ID NO: 442927 - DNA, 15 bp, Homo sapiens
agacacccagagagc

SEQ ID NO: 442928 - DNA, 15 bp, Homo sapiens
gagacacccagagag

SEQ ID NO: 442929 - DNA, 15 bp, Homo sapiens
tgagacacccagaga

SEQ ID NO: 442930 - DNA, 15 bp, Homo sapiens
gtgagacacccagag

SEQ ID NO: 442931 - DNA, 15 bp, Homo sapiens
agtgagacacccaga

SEQ ID NO: 442932 - DNA, 15 bp, Homo sapiens
aagtgagacacccag

SEQ ID NO: 442933 - DNA, 15 bp, Homo sapiens
gaagtgagacaccca

SEQ ID NO: 442934 - DNA, 15 bp, Homo sapiens
ggaagtgagacaccc

SEQ ID NO: 442935 - DNA, 15 bp, Homo sapiens
gggaagtgagacacc

SEQ ID NO: 442936 - DNA, 15 bp, Homo sapiens
agggaagtgagacac

SEQ ID NO: 442937 - DNA, 15 bp, Homo sapiens
tagggaagtgagaca

SEQ ID NO: 442938 - DNA, 15 bp, Homo sapiens
gtagggaagtgagac

SEQ ID NO: 442939 - DNA, 15 bp, Homo sapiens
agtagggaagtgaga

SEQ ID NO: 442940 - DNA, 15 bp, Homo sapiens
gagtagggaagtgag

SEQ ID NO: 442941 - DNA, 15 bp, Homo sapiens
agagtagggaagtga

SEQ ID NO: 442942 - DNA, 15 bp, Homo sapiens
aagagtagggaagtg

SEQ ID NO: 442943 - DNA, 15 bp, Homo sapiens
gaagagtagggaagt

SEQ ID NO: 442944 - DNA, 15 bp, Homo sapiens
ggaagagtagggaag

SEQ ID NO: 442945 - DNA, 15 bp, Homo sapiens
aggaagagtagggaa

SEQ ID NO: 442946 - DNA, 15 bp, Homo sapiens
caggaagagtaggga

SEQ ID NO: 442947 - DNA, 15 bp, Homo sapiens
gcaggaagagtaggg

SEQ ID NO: 442948 - DNA, 15 bp, Homo sapiens
agcaggaagagtagg

SEQ ID NO: 442949 - DNA, 15 bp, Homo sapiens
aagcaggaagagtag

SEQ ID NO: 442950 - DNA, 15 bp, Homo sapiens
aaagcaggaagagta

SEQ ID NO: 442951 - DNA, 15 bp, Homo sapiens
caaagcaggaagagt

SEQ ID NO: 442952 - DNA, 15 bp, Homo sapiens
tcaaagcaggaagag

SEQ ID NO: 442953 - DNA, 15 bp, Homo sapiens
ctcaaagcaggaaga

SEQ ID NO: 442954 - DNA, 15 bp, Homo sapiens
cctcaaagcaggaag

SEQ ID NO: 442955 - DNA, 15 bp, Homo sapiens
gcctcaaagcaggaa

SEQ ID NO: 442956 - DNA, 15 bp, Homo sapiens
ggcctcaaagcagga

SEQ ID NO: 442957 - DNA, 15 bp, Homo sapiens
tggcctcaaagcagg

SEQ ID NO: 442958 - DNA, 15 bp, Homo sapiens
ctggcctcaaagcag

SEQ ID NO: 442959 - DNA, 15 bp, Homo sapiens
tctggcctcaaagca

SEQ ID NO: 442960 - DNA, 15 bp, Homo sapiens
ttctggcctcaaagc

SEQ ID NO: 442961 - DNA, 15 bp, Homo sapiens
cttctggcctcaaag

SEQ ID NO: 442962 - DNA, 15 bp, Homo sapiens
gcttctggcctcaaa

SEQ ID NO: 442963 - DNA, 15 bp, Homo sapiens
agcttctggcctcaa

SEQ ID NO: 442964 - DNA, 15 bp, Homo sapiens
aagcttctggcctca

SEQ ID NO: 442965 - DNA, 15 bp, Homo sapiens
caagcttctggcctc

SEQ ID NO: 442966 - DNA, 15 bp, Homo sapiens
ccaagcttctggcct

SEQ ID NO: 442967 - DNA, 15 bp, Homo sapiens
tccaagcttctggcc

SEQ ID NO: 442968 - DNA, 15 bp, Homo sapiens
ctccaagcttctggc

SEQ ID NO: 442969 - DNA, 15 bp, Homo sapiens
cctccaagcttctgg

SEQ ID NO: 442970 - DNA, 15 bp, Homo sapiens
acctccaagcttctg

SEQ ID NO: 442971 - DNA, 15 bp, Homo sapiens
aacctccaagcttct

SEQ ID NO: 442972 - DNA, 15 bp, Homo sapiens
aaacctccaagcttc

SEQ ID NO: 442973 - DNA, 15 bp, Homo sapiens
gaaacctccaagctt

SEQ ID NO: 442974 - DNA, 15 bp, Homo sapiens
agaaacctccaagct

SEQ ID NO: 442975 - DNA, 15 bp, Homo sapiens
aagaaacctccaagc

SEQ ID NO: 442976 - DNA, 15 bp, Homo sapiens
gaagaaacctccaag

SEQ ID NO: 442977 - DNA, 15 bp, Homo sapiens
tgaagaaacctccaa

SEQ ID NO: 442978 - DNA, 15 bp, Homo sapiens
ttgaagaaacctcca

SEQ ID NO: 442979 - DNA, 15 bp, Homo sapiens
tttgaagaaacctcc

SEQ ID NO: 442980 - DNA, 15 bp, Homo sapiens
atttgaagaaacctc

SEQ ID NO: 442981 - DNA, 15 bp, Homo sapiens
tatttgaagaaacct

SEQ ID NO: 442982 - DNA, 15 bp, Homo sapiens
atatttgaagaaacc

SEQ ID NO: 442983 - DNA, 15 bp, Homo sapiens
gatatttgaagaaac

SEQ ID NO: 442984 - DNA, 15 bp, Homo sapiens
tgatatttgaagaaa

SEQ ID NO: 442985 - DNA, 15 bp, Homo sapiens
ctgatatttgaagaa

SEQ ID NO: 442986 - DNA, 15 bp, Homo sapiens
tctgatatttgaaga

SEQ ID NO: 442987 - DNA, 15 bp, Homo sapiens
gtctgatatttgaag

SEQ ID NO: 442988 - DNA, 15 bp, Homo sapiens
ggtctgatatttgaa

SEQ ID NO: 442989 - DNA, 15 bp, Homo sapiens
gggtctgatatttga

SEQ ID NO: 442990 - DNA, 15 bp, Homo sapiens
tgggtctgatatttg

SEQ ID NO: 442991 - DNA, 15 bp, Homo sapiens
ctgggtctgatattt

SEQ ID NO: 442992 - DNA, 15 bp, Homo sapiens
tctgggtctgatatt

SEQ ID NO: 442993 - DNA, 15 bp, Homo sapiens
ctctgggtctgatat

SEQ ID NO: 442994 - DNA, 15 bp, Homo sapiens
cctctgggtctgata

SEQ ID NO: 442995 - DNA, 15 bp, Homo sapiens
ccctctgggtctgat

SEQ ID NO: 442996 - DNA, 15 bp, Homo sapiens
tccctctgggtctga

SEQ ID NO: 442997 - DNA, 15 bp, Homo sapiens
ctccctctgggtctg

SEQ ID NO: 442998 - DNA, 15 bp, Homo sapiens
cctccctctgggtct

SEQ ID NO: 442999 - DNA, 15 bp, Homo sapiens
tcctccctctgggtc

SEQ ID NO: 443000 - DNA, 15 bp, Homo sapiens
ttcctccctctgggt

SEQ ID NO: 443001 - DNA, 15 bp, Homo sapiens
cttcctccctctggg

SEQ ID NO: 443002 - DNA, 15 bp, Homo sapiens
ccttcctccctctgg

SEQ ID NO: 443003 - DNA, 15 bp, Homo sapiens
accttcctccctctg

SEQ ID NO: 443004 - DNA, 15 bp, Homo sapiens
aaccttcctccctct

SEQ ID NO: 443005 - DNA, 15 bp, Homo sapiens
aaaccttcctccctc

SEQ ID NO: 443006 - DNA, 15 bp, Homo sapiens
gaaaccttcctccct

SEQ ID NO: 443007 - DNA, 15 bp, Homo sapiens
tgaaaccttcctccc

SEQ ID NO: 443008 - DNA, 15 bp, Homo sapiens
ctgaaaccttcctcc

SEQ ID NO: 443009 - DNA, 15 bp, Homo sapiens
actgaaaccttcctc

SEQ ID NO: 443010 - DNA, 15 bp, Homo sapiens
aactgaaaccttcct

SEQ ID NO: 443011 - DNA, 15 bp, Homo sapiens
caactgaaaccttcc

SEQ ID NO: 443012 - DNA, 15 bp, Homo sapiens
gcaactgaaaccttc

SEQ ID NO: 443013 - DNA, 15 bp, Homo sapiens
agcaactgaaacctt

SEQ ID NO: 443014 - DNA, 15 bp, Homo sapiens
cagcaactgaaacct

SEQ ID NO: 443015 - DNA, 15 bp, Homo sapiens
tcagcaactgaaacc

SEQ ID NO: 443016 - DNA, 15 bp, Homo sapiens
ctcagcaactgaaac

SEQ ID NO: 443017 - DNA, 15 bp, Homo sapiens
gctcagcaactgaaa

SEQ ID NO: 443018 - DNA, 15 bp, Homo sapiens
ggctcagcaactgaa

SEQ ID NO: 443019 - DNA, 15 bp, Homo sapiens
tggctcagcaactga

SEQ ID NO: 443020 - DNA, 15 bp, Homo sapiens
ttggctcagcaactg

SEQ ID NO: 443021 - DNA, 15 bp, Homo sapiens
cttggctcagcaact

SEQ ID NO: 443022 - DNA, 15 bp, Homo sapiens
tcttggctcagcaac

SEQ ID NO: 443023 - DNA, 15 bp, Homo sapiens
atcttggctcagcaa

SEQ ID NO: 443024 - DNA, 15 bp, Homo sapiens
catcttggctcagca

SEQ ID NO: 443025 - DNA, 15 bp, Homo sapiens
gcatcttggctcagc

SEQ ID NO: 443026 - DNA, 15 bp, Homo sapiens
ggcatcttggctcag

SEQ ID NO: 443027 - DNA, 15 bp, Homo sapiens
aggcatcttggctca

SEQ ID NO: 443028 - DNA, 15 bp, Homo sapiens
caggcatcttggctc

SEQ ID NO: 443029 - DNA, 15 bp, Homo sapiens
gcaggcatcttggct

SEQ ID NO: 443030 - DNA, 15 bp, Homo sapiens
tgcaggcatcttggc

SEQ ID NO: 443031 - DNA, 15 bp, Homo sapiens
atgcaggcatcttgg

SEQ ID NO: 443032 - DNA, 15 bp, Homo sapiens
catgcaggcatcttg

SEQ ID NO: 443033 - DNA, 15 bp, Homo sapiens
acatgcaggcatctt

SEQ ID NO: 443034 - DNA, 15 bp, Homo sapiens
cacatgcaggcatct

SEQ ID NO: 443035 - DNA, 15 bp, Homo sapiens
acacatgcaggcatc

SEQ ID NO: 443036 - DNA, 15 bp, Homo sapiens
aacacatgcaggcat

SEQ ID NO: 443037 - DNA, 15 bp, Homo sapiens
gaacacatgcaggca

SEQ ID NO: 443038 - DNA, 15 bp, Homo sapiens
agaacacatgcaggc

SEQ ID NO: 443039 - DNA, 15 bp, Homo sapiens
gagaacacatgcagg

SEQ ID NO: 443040 - DNA, 15 bp, Homo sapiens
ggagaacacatgcag

SEQ ID NO: 443041 - DNA, 15 bp, Homo sapiens
aggagaacacatgca

SEQ ID NO: 443042 - DNA, 15 bp, Homo sapiens
caggagaacacatgc

SEQ ID NO: 443043 - DNA, 15 bp, Homo sapiens
ccaggagaacacatg

SEQ ID NO: 443044 - DNA, 15 bp, Homo sapiens
gccaggagaacacat

SEQ ID NO: 443045 - DNA, 15 bp, Homo sapiens
agccaggagaacaca

SEQ ID NO: 443046 - DNA, 15 bp, Homo sapiens
gagccaggagaacac

SEQ ID NO: 443047 - DNA, 15 bp, Homo sapiens
ggagccaggagaaca

SEQ ID NO: 443048 - DNA, 15 bp, Homo sapiens
aggagccaggagaac

SEQ ID NO: 443049 - DNA, 15 bp, Homo sapiens
caggagccaggagaa

SEQ ID NO: 443050 - DNA, 15 bp, Homo sapiens
gcaggagccaggaga

SEQ ID NO: 443051 - DNA, 15 bp, Homo sapiens
agcaggagccaggag

SEQ ID NO: 443052 - DNA, 15 bp, Homo sapiens
cagcaggagccagga

SEQ ID NO: 443053 - DNA, 15 bp, Homo sapiens
ccagcaggagccagg

SEQ ID NO: 443054 - DNA, 15 bp, Homo sapiens
cccagcaggagccag

SEQ ID NO: 443055 - DNA, 15 bp, Homo sapiens
gcccagcaggagcca

SEQ ID NO: 443056 - DNA, 15 bp, Homo sapiens
ggcccagcaggagcc

SEQ ID NO: 443057 - DNA, 15 bp, Homo sapiens
tggcccagcaggagc

SEQ ID NO: 443058 - DNA, 15 bp, Homo sapiens
atggcccagcaggag

SEQ ID NO: 443059 - DNA, 15 bp, Homo sapiens
tatggcccagcagga

SEQ ID NO: 443060 - DNA, 15 bp, Homo sapiens
gtatggcccagcagg

SEQ ID NO: 443061 - DNA, 15 bp, Homo sapiens
tgtatggcccagcag

SEQ ID NO: 443062 - DNA, 15 bp, Homo sapiens
gtgtatggcccagca

SEQ ID NO: 443063 - DNA, 15 bp, Homo sapiens
ggtgtatggcccagc

SEQ ID NO: 443064 - DNA, 15 bp, Homo sapiens
aggtgtatggcccag

SEQ ID NO: 443065 - DNA, 15 bp, Homo sapiens
gaggtgtatggccca

SEQ ID NO: 443066 - DNA, 15 bp, Homo sapiens
cgaggtgtatggccc

SEQ ID NO: 443067 - DNA, 15 bp, Homo sapiens
tcgaggtgtatggcc

SEQ ID NO: 443068 - DNA, 15 bp, Homo sapiens
gtcgaggtgtatggc

SEQ ID NO: 443069 - DNA, 15 bp, Homo sapiens
tgtcgaggtgtatgg

SEQ ID NO: 443070 - DNA, 15 bp, Homo sapiens
gtgtcgaggtgtatg

SEQ ID NO: 443071 - DNA, 15 bp, Homo sapiens
ggtgtcgaggtgtat

SEQ ID NO: 443072 - DNA, 15 bp, Homo sapiens
tggtgtcgaggtgta

SEQ ID NO: 443073 - DNA, 15 bp, Homo sapiens
ttggtgtcgaggtgt

SEQ ID NO: 443074 - DNA, 15 bp, Homo sapiens
gttggtgtcgaggtg

SEQ ID NO: 443075 - DNA, 15 bp, Homo sapiens
ggttggtgtcgaggt

SEQ ID NO: 443076 - DNA, 15 bp, Homo sapiens
cggttggtgtcgagg

SEQ ID NO: 443077 - DNA, 15 bp, Homo sapiens
acggttggtgtcgag

SEQ ID NO: 443078 - DNA, 15 bp, Homo sapiens
cacggttggtgtcga

SEQ ID NO: 443079 - DNA, 15 bp, Homo sapiens
gcacggttggtgtcg

SEQ ID NO: 443080 - DNA, 15 bp, Homo sapiens
ggcacggttggtgtc

SEQ ID NO: 443081 - DNA, 15 bp, Homo sapiens
tggcacggttggtgt

SEQ ID NO: 443082 - DNA, 15 bp, Homo sapiens
ttggcacggttggtg

SEQ ID NO: 443083 - DNA, 15 bp, Homo sapiens
attggcacggttggt

SEQ ID NO: 443084 - DNA, 15 bp, Homo sapiens
cattggcacggttgg

SEQ ID NO: 443085 - DNA, 15 bp, Homo sapiens
ccattggcacggttg

SEQ ID NO: 443086 - DNA, 15 bp, Homo sapiens
cccattggcacggtt

SEQ ID NO: 443087 - DNA, 15 bp, Homo sapiens
tcccattggcacggt

SEQ ID NO: 443088 - DNA, 15 bp, Homo sapiens
ctcccattggcacgg

SEQ ID NO: 443089 - DNA, 15 bp, Homo sapiens
tctcccattggcacg

SEQ ID NO: 443090 - DNA, 15 bp, Homo sapiens
ctctcccattggcac

SEQ ID NO: 443091 - DNA, 15 bp, Homo sapiens
cctctcccattggca

SEQ ID NO: 443092 - DNA, 15 bp, Homo sapiens
tcctctcccattggc

SEQ ID NO: 443093 - DNA, 15 bp, Homo sapiens
ttcctctcccattgg

SEQ ID NO: 443094 - DNA, 15 bp, Homo sapiens
cttcctctcccattg

SEQ ID NO: 443095 - DNA, 15 bp, Homo sapiens
gcttcctctcccatt

SEQ ID NO: 443096 - DNA, 15 bp, Homo sapiens
agcttcctctcccat

SEQ ID NO: 443097 - DNA, 15 bp, Homo sapiens
aagcttcctctccca

SEQ ID NO: 443098 - DNA, 15 bp, Homo sapiens
taagcttcctctccc

SEQ ID NO: 443099 - DNA, 15 bp, Homo sapiens
ttaagcttcctctcc

SEQ ID NO: 443100 - DNA, 15 bp, Homo sapiens
cttaagcttcctctc

SEQ ID NO: 443101 - DNA, 15 bp, Homo sapiens
ccttaagcttcctct

SEQ ID NO: 443102 - DNA, 15 bp, Homo sapiens
cccttaagcttcctc

SEQ ID NO: 443103 - DNA, 15 bp, Homo sapiens
gcccttaagcttcct

SEQ ID NO: 443104 - DNA, 15 bp, Homo sapiens
tgcccttaagcttcc

SEQ ID NO: 443105 - DNA, 15 bp, Homo sapiens
ttgcccttaagcttc

SEQ ID NO: 443106 - DNA, 15 bp, Homo sapiens
gttgcccttaagctt

SEQ ID NO: 443107 - DNA, 15 bp, Homo sapiens
agttgcccttaagct

SEQ ID NO: 443108 - DNA, 15 bp, Homo sapiens
cagttgcccttaagc

SEQ ID NO: 443109 - DNA, 15 bp, Homo sapiens
tcagttgcccttaag

SEQ ID NO: 443110 - DNA, 15 bp, Homo sapiens
ctcagttgcccttaa

SEQ ID NO: 443111 - DNA, 15 bp, Homo sapiens
cctcagttgccctta

SEQ ID NO: 443112 - DNA, 15 bp, Homo sapiens
ccctcagttgccctt

SEQ ID NO: 443113 - DNA, 15 bp, Homo sapiens
tccctcagttgccct

SEQ ID NO: 443114 - DNA, 15 bp, Homo sapiens
atccctcagttgccc

SEQ ID NO: 443115 - DNA, 15 bp, Homo sapiens
catccctcagttgcc

SEQ ID NO: 443116 - DNA, 15 bp, Homo sapiens
gcatccctcagttgc

SEQ ID NO: 443117 - DNA, 15 bp, Homo sapiens
ggcatccctcagttg

SEQ ID NO: 443118 - DNA, 15 bp, Homo sapiens
gggcatccctcagtt

SEQ ID NO: 443119 - DNA, 15 bp, Homo sapiens
tgggcatccctcagt

SEQ ID NO: 443120 - DNA, 15 bp, Homo sapiens
ttgggcatccctcag

SEQ ID NO: 443121 - DNA, 15 bp, Homo sapiens
tttgggcatccctca

SEQ ID NO: 443122 - DNA, 15 bp, Homo sapiens
ctttgggcatccctc

SEQ ID NO: 443123 - DNA, 15 bp, Homo sapiens
cctttgggcatccct

SEQ ID NO: 443124 - DNA, 15 bp, Homo sapiens
ccctttgggcatccc

SEQ ID NO: 443125 - DNA, 15 bp, Homo sapiens
accctttgggcatcc

SEQ ID NO: 443126 - DNA, 15 bp, Homo sapiens
taccctttgggcatc

SEQ ID NO: 443127 - DNA, 15 bp, Homo sapiens
gtaccctttgggcat

SEQ ID NO: 443128 - DNA, 15 bp, Homo sapiens
tgtaccctttgggca

SEQ ID NO: 443129 - DNA, 15 bp, Homo sapiens
ttgtaccctttgggc

SEQ ID NO: 443130 - DNA, 15 bp, Homo sapiens
tttgtaccctttggg

SEQ ID NO: 443131 - DNA, 15 bp, Homo sapiens
atttgtaccctttgg

SEQ ID NO: 443132 - DNA, 15 bp, Homo sapiens
gatttgtaccctttg

SEQ ID NO: 443133 - DNA, 15 bp, Homo sapiens
ggatttgtacccttt

SEQ ID NO: 443134 - DNA, 15 bp, Homo sapiens
aggatttgtaccctt

SEQ ID NO: 443135 - DNA, 15 bp, Homo sapiens
gaggatttgtaccct

SEQ ID NO: 443136 - DNA, 15 bp, Homo sapiens
tgaggatttgtaccc

SEQ ID NO: 443137 - DNA, 15 bp, Homo sapiens
ttgaggatttgtacc

SEQ ID NO: 443138 - DNA, 15 bp, Homo sapiens
gttgaggatttgtac

SEQ ID NO: 443139 - DNA, 15 bp, Homo sapiens
agttgaggatttgta

SEQ ID NO: 443140 - DNA, 15 bp, Homo sapiens
tagttgaggatttgt

SEQ ID NO: 443141 - DNA, 15 bp, Homo sapiens
ctagttgaggatttg

SEQ ID NO: 443142 - DNA, 15 bp, Homo sapiens
tctagttgaggattt

SEQ ID NO: 443143 - DNA, 15 bp, Homo sapiens
atctagttgaggatt

SEQ ID NO: 443144 - DNA, 15 bp, Homo sapiens
catctagttgaggat

SEQ ID NO: 443145 - DNA, 15 bp, Homo sapiens
tcatctagttgagga

SEQ ID NO: 443146 - DNA, 15 bp, Homo sapiens
gtcatctagttgagg

SEQ ID NO: 443147 - DNA, 15 bp, Homo sapiens
tgtcatctagttgag

SEQ ID NO: 443148 - DNA, 15 bp, Homo sapiens
ctgtcatctagttga

SEQ ID NO: 443149 - DNA, 15 bp, Homo sapiens
cctgtcatctagttg

SEQ ID NO: 443150 - DNA, 15 bp, Homo sapiens
ccctgtcatctagtt

SEQ ID NO: 443151 - DNA, 15 bp, Homo sapiens
tccctgtcatctagt

SEQ ID NO: 443152 - DNA, 15 bp, Homo sapiens
ttccctgtcatctag

SEQ ID NO: 443153 - DNA, 15 bp, Homo sapiens
tttccctgtcatcta

SEQ ID NO: 443154 - DNA, 15 bp, Homo sapiens
gtttccctgtcatct

SEQ ID NO: 443155 - DNA, 15 bp, Homo sapiens
tgtttccctgtcatc

SEQ ID NO: 443156 - DNA, 15 bp, Homo sapiens
atgtttccctgtcat

SEQ ID NO: 443157 - DNA, 15 bp, Homo sapiens
aatgtttccctgtca

SEQ ID NO: 443158 - DNA, 15 bp, Homo sapiens
caatgtttccctgtc

SEQ ID NO: 443159 - DNA, 15 bp, Homo sapiens
tcaatgtttccctgt

SEQ ID NO: 443160 - DNA, 15 bp, Homo sapiens
atcaatgtttccctg

SEQ ID NO: 443161 - DNA, 15 bp, Homo sapiens
tatcaatgtttccct

SEQ ID NO: 443162 - DNA, 15 bp, Homo sapiens
ctatcaatgtttccc

SEQ ID NO: 443163 - DNA, 15 bp, Homo sapiens
actatcaatgtttcc

SEQ ID NO: 443164 - DNA, 15 bp, Homo sapiens
aactatcaatgtttc

SEQ ID NO: 443165 - DNA, 15 bp, Homo sapiens
caactatcaatgttt

SEQ ID NO: 443166 - DNA, 15 bp, Homo sapiens
acaactatcaatgtt

SEQ ID NO: 443167 - DNA, 15 bp, Homo sapiens
cacaactatcaatgt

SEQ ID NO: 443168 - DNA, 15 bp, Homo sapiens
gcacaactatcaatg

SEQ ID NO: 443169 - DNA, 15 bp, Homo sapiens
ggcacaactatcaat

SEQ ID NO: 443170 - DNA, 15 bp, Homo sapiens
tggcacaactatcaa

SEQ ID NO: 443171 - DNA, 15 bp, Homo sapiens
atggcacaactatca

SEQ ID NO: 443172 - DNA, 15 bp, Homo sapiens
tatggcacaactatc

SEQ ID NO: 443173 - DNA, 15 bp, Homo sapiens
ctatggcacaactat

SEQ ID NO: 443174 - DNA, 15 bp, Homo sapiens
actatggcacaacta

SEQ ID NO: 443175 - DNA, 15 bp, Homo sapiens
gactatggcacaact

SEQ ID NO: 443176 - DNA, 15 bp, Homo sapiens
agactatggcacaac

SEQ ID NO: 443177 - DNA, 15 bp, Homo sapiens
gagactatggcacaa

SEQ ID NO: 443178 - DNA, 15 bp, Homo sapiens
ggagactatggcaca

SEQ ID NO: 443179 - DNA, 15 bp, Homo sapiens
tggagactatggcac

SEQ ID NO: 443180 - DNA, 15 bp, Homo sapiens
atggagactatggca

SEQ ID NO: 443181 - DNA, 15 bp, Homo sapiens
aatggagactatggc

SEQ ID NO: 443182 - DNA, 15 bp, Homo sapiens
gaatggagactatgg

SEQ ID NO: 443183 - DNA, 15 bp, Homo sapiens
agaatggagactatg

SEQ ID NO: 443184 - DNA, 15 bp, Homo sapiens
cagaatggagactat

SEQ ID NO: 443185 - DNA, 15 bp, Homo sapiens
acagaatggagacta

SEQ ID NO: 443186 - DNA, 15 bp, Homo sapiens
tacagaatggagact

SEQ ID NO: 443187 - DNA, 15 bp, Homo sapiens
atacagaatggagac

SEQ ID NO: 443188 - DNA, 15 bp, Homo sapiens
tatacagaatggaga

SEQ ID NO: 443189 - DNA, 15 bp, Homo sapiens
gtatacagaatggag

SEQ ID NO: 443190 - DNA, 15 bp, Homo sapiens
ggtatacagaatgga

SEQ ID NO: 443191 - DNA, 15 bp, Homo sapiens
tggtatacagaatgg

SEQ ID NO: 443192 - DNA, 15 bp, Homo sapiens
ctggtatacagaatg

SEQ ID NO: 443193 - DNA, 15 bp, Homo sapiens
cctggtatacagaat

SEQ ID NO: 443194 - DNA, 15 bp, Homo sapiens
tcctggtatacagaa

SEQ ID NO: 443195 - DNA, 15 bp, Homo sapiens
gtcctggtatacaga

SEQ ID NO: 443196 - DNA, 15 bp, Homo sapiens
agtcctggtatacag

SEQ ID NO: 443197 - DNA, 15 bp, Homo sapiens
gagtcctggtataca

SEQ ID NO: 443198 - DNA, 15 bp, Homo sapiens
agagtcctggtatac

SEQ ID NO: 443199 - DNA, 15 bp, Homo sapiens
aagagtcctggtata

SEQ ID NO: 443200 - DNA, 15 bp, Homo sapiens
gaagagtcctggtat

SEQ ID NO: 443201 - DNA, 15 bp, Homo sapiens
agaagagtcctggta

SEQ ID NO: 443202 - DNA, 15 bp, Homo sapiens
tagaagagtcctggt

SEQ ID NO: 443203 - DNA, 15 bp, Homo sapiens
gtagaagagtcctgg

SEQ ID NO: 443204 - DNA, 15 bp, Homo sapiens
ggtagaagagtcctg

SEQ ID NO: 443205 - DNA, 15 bp, Homo sapiens
aggtagaagagtcct

SEQ ID NO: 443206 - DNA, 15 bp, Homo sapiens
aaggtagaagagtcc

SEQ ID NO: 443207 - DNA, 15 bp, Homo sapiens
aaaggtagaagagtc

SEQ ID NO: 443208 - DNA, 15 bp, Homo sapiens
gaaaggtagaagagt

SEQ ID NO: 443209 - DNA, 15 bp, Homo sapiens
tgaaaggtagaagag

SEQ ID NO: 443210 - DNA, 15 bp, Homo sapiens
gtgaaaggtagaaga

SEQ ID NO: 443211 - DNA, 15 bp, Homo sapiens
agtgaaaggtagaag

SEQ ID NO: 443212 - DNA, 15 bp, Homo sapiens
cagtgaaaggtagaa

SEQ ID NO: 443213 - DNA, 15 bp, Homo sapiens
acagtgaaaggtaga

SEQ ID NO: 443214 - DNA, 15 bp, Homo sapiens
gacagtgaaaggtag

SEQ ID NO: 443215 - DNA, 15 bp, Homo sapiens
agacagtgaaaggta

SEQ ID NO: 443216 - DNA, 15 bp, Homo sapiens
aagacagtgaaaggt

SEQ ID NO: 443217 - DNA, 15 bp, Homo sapiens
aaagacagtgaaagg

SEQ ID NO: 443218 - DNA, 15 bp, Homo sapiens
gaaagacagtgaaag

SEQ ID NO: 443219 - DNA, 15 bp, Homo sapiens
tgaaagacagtgaaa

SEQ ID NO: 443220 - DNA, 15 bp, Homo sapiens
atgaaagacagtgaa

SEQ ID NO: 443221 - DNA, 15 bp, Homo sapiens
tatgaaagacagtga

SEQ ID NO: 443222 - DNA, 15 bp, Homo sapiens
ttatgaaagacagtg

SEQ ID NO: 443223 - DNA, 15 bp, Homo sapiens
tttatgaaagacagt

SEQ ID NO: 443224 - DNA, 15 bp, Homo sapiens
gtttatgaaagacag

SEQ ID NO: 443225 - DNA, 15 bp, Homo sapiens
agtttatgaaagaca

SEQ ID NO: 443226 - DNA, 15 bp, Homo sapiens
aagtttatgaaagac

SEQ ID NO: 443227 - DNA, 15 bp, Homo sapiens
gaagtttatgaaaga

SEQ ID NO: 443228 - DNA, 15 bp, Homo sapiens
ggaagtttatgaaag

SEQ ID NO: 443229 - DNA, 15 bp, Homo sapiens
tggaagtttatgaaa

SEQ ID NO: 443230 - DNA, 15 bp, Homo sapiens
gtggaagtttatgaa

SEQ ID NO: 443231 - DNA, 15 bp, Homo sapiens
cgtggaagtttatga

SEQ ID NO: 443232 - DNA, 15 bp, Homo sapiens
ccgtggaagtttatg

SEQ ID NO: 443233 - DNA, 15 bp, Homo sapiens
tccgtggaagtttat

SEQ ID NO: 443234 - DNA, 15 bp, Homo sapiens
gtccgtggaagttta

SEQ ID NO: 443235 - DNA, 15 bp, Homo sapiens
tgtccgtggaagttt

SEQ ID NO: 443236 - DNA, 15 bp, Homo sapiens
ctgtccgtggaagtt

SEQ ID NO: 443237 - DNA, 15 bp, Homo sapiens
tctgtccgtggaagt

SEQ ID NO: 443238 - DNA, 15 bp, Homo sapiens
ttctgtccgtggaag

SEQ ID NO: 443239 - DNA, 15 bp, Homo sapiens
tttctgtccgtggaa

SEQ ID NO: 443240 - DNA, 15 bp, Homo sapiens
ttttctgtccgtgga

SEQ ID NO: 443241 - DNA, 15 bp, Homo sapiens
tttttctgtccgtgg

SEQ ID NO: 443242 - DNA, 15 bp, Homo sapiens
atttttctgtccgtg

SEQ ID NO: 443243 - DNA, 15 bp, Homo sapiens
tatttttctgtccgt

SEQ ID NO: 443244 - DNA, 15 bp, Homo sapiens
gtatttttctgtccg

SEQ ID NO: 443245 - DNA, 15 bp, Homo sapiens
tgtatttttctgtcc

SEQ ID NO: 443246 - DNA, 15 bp, Homo sapiens
atgtatttttctgtc

SEQ ID NO: 443247 - DNA, 15 bp, Homo sapiens
tatgtatttttctgt

SEQ ID NO: 443248 - DNA, 15 bp, Homo sapiens
ctatgtatttttctg

SEQ ID NO: 443249 - DNA, 15 bp, Homo sapiens
cctatgtatttttct

SEQ ID NO: 443250 - DNA, 15 bp, Homo sapiens
gcctatgtatttttc

SEQ ID NO: 443251 - DNA, 15 bp, Homo sapiens
tgcctatgtattttt

SEQ ID NO: 443252 - DNA, 15 bp, Homo sapiens
ttgcctatgtatttt

SEQ ID NO: 443253 - DNA, 15 bp, Homo sapiens
attgcctatgtattt

SEQ ID NO: 443254 - DNA, 15 bp, Homo sapiens
aattgcctatgtatt

SEQ ID NO: 443255 - DNA, 15 bp, Homo sapiens
taattgcctatgtat

SEQ ID NO: 443256 - DNA, 15 bp, Homo sapiens
ataattgcctatgta

SEQ ID NO: 443257 - DNA, 15 bp, Homo sapiens
aataattgcctatgt

SEQ ID NO: 443258 - DNA, 15 bp, Homo sapiens
aaataattgcctatg

SEQ ID NO: 443259 - DNA, 15 bp, Homo sapiens
gaaataattgcctat

SEQ ID NO: 443260 - DNA, 15 bp, Homo sapiens
agaaataattgccta

SEQ ID NO: 443261 - DNA, 15 bp, Homo sapiens
cagaaataattgcct

SEQ ID NO: 443262 - DNA, 15 bp, Homo sapiens
tcagaaataattgcc

SEQ ID NO: 443263 - DNA, 15 bp, Homo sapiens
atcagaaataattgc

SEQ ID NO: 443264 - DNA, 15 bp, Homo sapiens
catcagaaataattg

SEQ ID NO: 443265 - DNA, 15 bp, Homo sapiens
gcatcagaaataatt

SEQ ID NO: 443266 - DNA, 15 bp, Homo sapiens
agcatcagaaataat

SEQ ID NO: 443267 - DNA, 15 bp, Homo sapiens
tagcatcagaaataa

SEQ ID NO: 443268 - DNA, 15 bp, Homo sapiens
ttagcatcagaaata

SEQ ID NO: 443269 - DNA, 15 bp, Homo sapiens
tttagcatcagaaat

SEQ ID NO: 443270 - DNA, 15 bp, Homo sapiens
ttttagcatcagaaa

SEQ ID NO: 443271 - DNA, 15 bp, Homo sapiens
attttagcatcagaa

SEQ ID NO: 443272 - DNA, 15 bp, Homo sapiens
aattttagcatcaga

SEQ ID NO: 443273 - DNA, 15 bp, Homo sapiens
aaattttagcatcag

SEQ ID NO: 443274 - DNA, 15 bp, Homo sapiens
aaaattttagcatca

SEQ ID NO: 443275 - DNA, 15 bp, Homo sapiens
aaaaattttagcatc

SEQ ID NO: 443276 - DNA, 15 bp, Homo sapiens
caaaaattttagcat

SEQ ID NO: 443277 - DNA, 15 bp, Homo sapiens
tcaaaaattttagca

SEQ ID NO: 443278 - DNA, 15 bp, Homo sapiens
ttcaaaaattttagc

SEQ ID NO: 443279 - DNA, 15 bp, Homo sapiens
gttcaaaaattttag

SEQ ID NO: 443280 - DNA, 15 bp, Homo sapiens
tgttcaaaaatttta

SEQ ID NO: 443281 - DNA, 15 bp, Homo sapiens
gtgttcaaaaatttt

SEQ ID NO: 443282 - DNA, 15 bp, Homo sapiens
ggtgttcaaaaattt

SEQ ID NO: 443283 - DNA, 15 bp, Homo sapiens
aggtgttcaaaaatt

SEQ ID NO: 443284 - DNA, 15 bp, Homo sapiens
aaggtgttcaaaaat

SEQ ID NO: 443285 - DNA, 15 bp, Homo sapiens
aaaggtgttcaaaaa

SEQ ID NO: 443286 - DNA, 15 bp, Homo sapiens
aaaaggtgttcaaaa

SEQ ID NO: 443287 - DNA, 15 bp, Homo sapiens
aaaaaggtgttcaaa

SEQ ID NO: 443288 - DNA, 15 bp, Homo sapiens
taaaaaggtgttcaa

SEQ ID NO: 443289 - DNA, 15 bp, Homo sapiens
ttaaaaaggtgttca

SEQ ID NO: 443290 - DNA, 15 bp, Homo sapiens
cttaaaaaggtgttc

SEQ ID NO: 443291 - DNA, 15 bp, Homo sapiens
gcttaaaaaggtgtt

SEQ ID NO: 443292 - DNA, 15 bp, Homo sapiens
cgcttaaaaaggtgt

SEQ ID NO: 443293 - DNA, 15 bp, Homo sapiens
gcgcttaaaaaggtg

SEQ ID NO: 443294 - DNA, 15 bp, Homo sapiens
agcgcttaaaaaggt

SEQ ID NO: 443295 - DNA, 15 bp, Homo sapiens
aagcgcttaaaaagg

SEQ ID NO: 443296 - DNA, 15 bp, Homo sapiens
caagcgcttaaaaag

SEQ ID NO: 443297 - DNA, 15 bp, Homo sapiens
tcaagcgcttaaaaa

SEQ ID NO: 443298 - DNA, 15 bp, Homo sapiens
atcaagcgcttaaaa

SEQ ID NO: 443299 - DNA, 15 bp, Homo sapiens
gatcaagcgcttaaa

SEQ ID NO: 443300 - DNA, 15 bp, Homo sapiens
agatcaagcgcttaa

SEQ ID NO: 443301 - DNA, 15 bp, Homo sapiens
aagatcaagcgctta

SEQ ID NO: 443302 - DNA, 15 bp, Homo sapiens
caagatcaagcgctt

SEQ ID NO: 443303 - DNA, 15 bp, Homo sapiens
gcaagatcaagcgct

SEQ ID NO: 443304 - DNA, 15 bp, Homo sapiens
agcaagatcaagcgc

SEQ ID NO: 443305 - DNA, 15 bp, Homo sapiens
cagcaagatcaagcg

SEQ ID NO: 443306 - DNA, 15 bp, Homo sapiens
acagcaagatcaagc

SEQ ID NO: 443307 - DNA, 15 bp, Homo sapiens
gacagcaagatcaag

SEQ ID NO: 443308 - DNA, 15 bp, Homo sapiens
ggacagcaagatcaa

SEQ ID NO: 443309 - DNA, 15 bp, Homo sapiens
tggacagcaagatca

SEQ ID NO: 443310 - DNA, 15 bp, Homo sapiens
atggacagcaagatc

SEQ ID NO: 443311 - DNA, 15 bp, Homo sapiens
tatggacagcaagat

SEQ ID NO: 443312 - DNA, 15 bp, Homo sapiens
atatggacagcaaga

SEQ ID NO: 443313 - DNA, 15 bp, Homo sapiens
gatatggacagcaag

SEQ ID NO: 443314 - DNA, 15 bp, Homo sapiens
ggatatggacagcaa

SEQ ID NO: 443315 - DNA, 15 bp, Homo sapiens
gggatatggacagca

SEQ ID NO: 443316 - DNA, 15 bp, Homo sapiens
agggatatggacagc

SEQ ID NO: 443317 - DNA, 15 bp, Homo sapiens
gagggatatggacag

SEQ ID NO: 443318 - DNA, 15 bp, Homo sapiens
agagggatatggaca

SEQ ID NO: 443319 - DNA, 15 bp, Homo sapiens
cagagggatatggac

SEQ ID NO: 443320 - DNA, 15 bp, Homo sapiens
acagagggatatgga

SEQ ID NO: 443321 - DNA, 15 bp, Homo sapiens
tacagagggatatgg

SEQ ID NO: 443322 - DNA, 15 bp, Homo sapiens
ctacagagggatatg

SEQ ID NO: 443323 - DNA, 15 bp, Homo sapiens
actacagagggatat

SEQ ID NO: 443324 - DNA, 15 bp, Homo sapiens
gactacagagggata

SEQ ID NO: 443325 - DNA, 15 bp, Homo sapiens
agactacagagggat

SEQ ID NO: 443326 - DNA, 15 bp, Homo sapiens
tagactacagaggga

SEQ ID NO: 443327 - DNA, 15 bp, Homo sapiens
gtagactacagaggg

SEQ ID NO: 443328 - DNA, 15 bp, Homo sapiens
agtagactacagagg

SEQ ID NO: 443329 - DNA, 15 bp, Homo sapiens
tagtagactacagag

SEQ ID NO: 443330 - DNA, 15 bp, Homo sapiens
ctagtagactacaga

SEQ ID NO: 443331 - DNA, 15 bp, Homo sapiens
actagtagactacag

SEQ ID NO: 443332 - DNA, 15 bp, Homo sapiens
gactagtagactaca

SEQ ID NO: 443333 - DNA, 15 bp, Homo sapiens
agactagtagactac

SEQ ID NO: 443334 - DNA, 15 bp, Homo sapiens
gagactagtagacta

SEQ ID NO: 443335 - DNA, 15 bp, Homo sapiens
ggagactagtagact

SEQ ID NO: 443336 - DNA, 15 bp, Homo sapiens
tggagactagtagac

SEQ ID NO: 443337 - DNA, 15 bp, Homo sapiens
atggagactagtaga

SEQ ID NO: 443338 - DNA, 15 bp, Homo sapiens
aatggagactagtag

SEQ ID NO: 443339 - DNA, 15 bp, Homo sapiens
aaatggagactagta

SEQ ID NO: 443340 - DNA, 15 bp, Homo sapiens
aaaatggagactagt

SEQ ID NO: 443341 - DNA, 15 bp, Homo sapiens
taaaatggagactag

SEQ ID NO: 443342 - DNA, 15 bp, Homo sapiens
gtaaaatggagacta

SEQ ID NO: 443343 - DNA, 15 bp, Homo sapiens
tgtaaaatggagact

SEQ ID NO: 443344 - DNA, 15 bp, Homo sapiens
ctgtaaaatggagac

SEQ ID NO: 443345 - DNA, 15 bp, Homo sapiens
cctgtaaaatggaga

SEQ ID NO: 443346 - DNA, 15 bp, Homo sapiens
tcctgtaaaatggag

SEQ ID NO: 443347 - DNA, 15 bp, Homo sapiens
ctcctgtaaaatgga

SEQ ID NO: 443348 - DNA, 15 bp, Homo sapiens
tctcctgtaaaatgg

SEQ ID NO: 443349 - DNA, 15 bp, Homo sapiens
atctcctgtaaaatg

SEQ ID NO: 443350 - DNA, 15 bp, Homo sapiens
aatctcctgtaaaat

SEQ ID NO: 443351 - DNA, 15 bp, Homo sapiens
caatctcctgtaaaa

SEQ ID NO: 443352 - DNA, 15 bp, Homo sapiens
gcaatctcctgtaaa

SEQ ID NO: 443353 - DNA, 15 bp, Homo sapiens
tgcaatctcctgtaa

SEQ ID NO: 443354 - DNA, 15 bp, Homo sapiens
atgcaatctcctgta

SEQ ID NO: 443355 - DNA, 15 bp, Homo sapiens
catgcaatctcctgt

SEQ ID NO: 443356 - DNA, 15 bp, Homo sapiens
ccatgcaatctcctg

SEQ ID NO: 443357 - DNA, 15 bp, Homo sapiens
cccatgcaatctcct

SEQ ID NO: 443358 - DNA, 15 bp, Homo sapiens
gcccatgcaatctcc

SEQ ID NO: 443359 - DNA, 15 bp, Homo sapiens
agcccatgcaatctc

SEQ ID NO: 443360 - DNA, 15 bp, Homo sapiens
cagcccatgcaatct

SEQ ID NO: 443361 - DNA, 15 bp, Homo sapiens
acagcccatgcaatc

SEQ ID NO: 443362 - DNA, 15 bp, Homo sapiens
aacagcccatgcaat

SEQ ID NO: 443363 - DNA, 15 bp, Homo sapiens
caacagcccatgcaa

SEQ ID NO: 443364 - DNA, 15 bp, Homo sapiens
acaacagcccatgca

SEQ ID NO: 443365 - DNA, 15 bp, Homo sapiens
aacaacagcccatgc

SEQ ID NO: 443366 - DNA, 15 bp, Homo sapiens
taacaacagcccatg

SEQ ID NO: 443367 - DNA, 15 bp, Homo sapiens
ataacaacagcccat

SEQ ID NO: 443368 - DNA, 15 bp, Homo sapiens
cataacaacagccca

SEQ ID NO: 443369 - DNA, 15 bp, Homo sapiens
acataacaacagccc

SEQ ID NO: 443370 - DNA, 15 bp, Homo sapiens
aacataacaacagcc

SEQ ID NO: 443371 - DNA, 15 bp, Homo sapiens
aaacataacaacagc

SEQ ID NO: 443372 - DNA, 15 bp, Homo sapiens
caaacataacaacag

SEQ ID NO: 443373 - DNA, 15 bp, Homo sapiens
acaaacataacaaca

SEQ ID NO: 443374 - DNA, 15 bp, Homo sapiens
gacaaacataacaac

SEQ ID NO: 443375 - DNA, 15 bp, Homo sapiens
agacaaacataacaa

SEQ ID NO: 443376 - DNA, 15 bp, Homo sapiens
aagacaaacataaca

SEQ ID NO: 443377 - DNA, 15 bp, Homo sapiens
aaagacaaacataac

SEQ ID NO: 443378 - DNA, 15 bp, Homo sapiens
caaagacaaacataa

SEQ ID NO: 443379 - DNA, 15 bp, Homo sapiens
ccaaagacaaacata

SEQ ID NO: 443380 - DNA, 15 bp, Homo sapiens
accaaagacaaacat

SEQ ID NO: 443381 - DNA, 15 bp, Homo sapiens
caccaaagacaaaca

SEQ ID NO: 443382 - DNA, 15 bp, Homo sapiens
ccaccaaagacaaac

SEQ ID NO: 443383 - DNA, 15 bp, Homo sapiens
accaccaaagacaaa

SEQ ID NO: 443384 - DNA, 15 bp, Homo sapiens
caccaccaaagacaa

SEQ ID NO: 443385 - DNA, 15 bp, Homo sapiens
ccaccaccaaagaca

SEQ ID NO: 443386 - DNA, 15 bp, Homo sapiens
accaccaccaaagac

SEQ ID NO: 443387 - DNA, 15 bp, Homo sapiens
caccaccaccaaaga

SEQ ID NO: 443388 - DNA, 15 bp, Homo sapiens
ccaccaccaccaaag

SEQ ID NO: 443389 - DNA, 15 bp, Homo sapiens
accaccaccaccaaa

SEQ ID NO: 443390 - DNA, 15 bp, Homo sapiens
caccaccaccaccaa

SEQ ID NO: 443391 - DNA, 15 bp, Homo sapiens
ccaccaccaccacca

SEQ ID NO: 443392 - DNA, 15 bp, Homo sapiens
cccaccaccaccacc

SEQ ID NO: 443393 - DNA, 15 bp, Homo sapiens
ccccaccaccaccac

SEQ ID NO: 443394 - DNA, 15 bp, Homo sapiens
accccaccaccacca

SEQ ID NO: 443395 - DNA, 15 bp, Homo sapiens
caccccaccaccacc

SEQ ID NO: 443396 - DNA, 15 bp, Homo sapiens
ccaccccaccaccac

SEQ ID NO: 443397 - DNA, 15 bp, Homo sapiens
cccaccccaccacca

SEQ ID NO: 443398 - DNA, 15 bp, Homo sapiens
acccaccccaccacc

SEQ ID NO: 443399 - DNA, 15 bp, Homo sapiens
cacccaccccaccac

SEQ ID NO: 443400 - DNA, 15 bp, Homo sapiens
acacccaccccacca

SEQ ID NO: 443401 - DNA, 15 bp, Homo sapiens
tacacccaccccacc

SEQ ID NO: 443402 - DNA, 15 bp, Homo sapiens
atacacccaccccac

SEQ ID NO: 443403 - DNA, 15 bp, Homo sapiens
catacacccacccca

SEQ ID NO: 443404 - DNA, 15 bp, Homo sapiens
acatacacccacccc

SEQ ID NO: 443405 - DNA, 15 bp, Homo sapiens
cacatacacccaccc

SEQ ID NO: 443406 - DNA, 15 bp, Homo sapiens
acacatacacccacc

SEQ ID NO: 443407 - DNA, 15 bp, Homo sapiens
cacacatacacccac

SEQ ID NO: 443408 - DNA, 15 bp, Homo sapiens
ccacacatacaccca

SEQ ID NO: 443409 - DNA, 15 bp, Homo sapiens
cccacacatacaccc

SEQ ID NO: 443410 - DNA, 15 bp, Homo sapiens
acccacacatacacc

SEQ ID NO: 443411 - DNA, 15 bp, Homo sapiens
cacccacacatacac

SEQ ID NO: 443412 - DNA, 15 bp, Homo sapiens
acacccacacataca

SEQ ID NO: 443413 - DNA, 15 bp, Homo sapiens
cacacccacacatac

SEQ ID NO: 443414 - DNA, 15 bp, Homo sapiens
acacacccacacata

SEQ ID NO: 443415 - DNA, 15 bp, Homo sapiens
cacacacccacacat

SEQ ID NO: 443416 - DNA, 15 bp, Homo sapiens
acacacacccacaca

SEQ ID NO: 443417 - DNA, 15 bp, Homo sapiens
cacacacacccacac

SEQ ID NO: 443418 - DNA, 15 bp, Homo sapiens
acacacacacccaca

SEQ ID NO: 443419 - DNA, 15 bp, Homo sapiens
cacacacacacccac

SEQ ID NO: 443420 - DNA, 15 bp, Homo sapiens
acacacacacaccca

SEQ ID NO: 443421 - DNA, 15 bp, Homo sapiens
cacacacacacaccc

SEQ ID NO: 443422 - DNA, 15 bp, Homo sapiens
acacacacacacacc

SEQ ID NO: 443423 - DNA, 15 bp, Homo sapiens
tgacacacacacaca

SEQ ID NO: 443424 - DNA, 15 bp, Homo sapiens
ctgacacacacacac

SEQ ID NO: 443425 - DNA, 15 bp, Homo sapiens
cctgacacacacaca

SEQ ID NO: 443426 - DNA, 15 bp, Homo sapiens
ccctgacacacacac

SEQ ID NO: 443427 - DNA, 15 bp, Homo sapiens
tccctgacacacaca

SEQ ID NO: 443428 - DNA, 15 bp, Homo sapiens
atccctgacacacac

SEQ ID NO: 443429 - DNA, 15 bp, Homo sapiens
catccctgacacaca

SEQ ID NO: 443430 - DNA, 15 bp, Homo sapiens
ccatccctgacacac

SEQ ID NO: 443431 - DNA, 15 bp, Homo sapiens
tccatccctgacaca

SEQ ID NO: 443432 - DNA, 15 bp, Homo sapiens
atccatccctgacac

SEQ ID NO: 443433 - DNA, 15 bp, Homo sapiens
gatccatccctgaca

SEQ ID NO: 443434 - DNA, 15 bp, Homo sapiens
ggatccatccctgac

SEQ ID NO: 443435 - DNA, 15 bp, Homo sapiens
tggatccatccctga

SEQ ID NO: 443436 - DNA, 15 bp, Homo sapiens
ctggatccatccctg

SEQ ID NO: 443437 - DNA, 15 bp, Homo sapiens
cctggatccatccct

SEQ ID NO: 443438 - DNA, 15 bp, Homo sapiens
tcctggatccatccc

SEQ ID NO: 443439 - DNA, 15 bp, Homo sapiens
ctcctggatccatcc

SEQ ID NO: 443440 - DNA, 15 bp, Homo sapiens
cctcctggatccatc

SEQ ID NO: 443441 - DNA, 15 bp, Homo sapiens
ccctcctggatccat

SEQ ID NO: 443442 - DNA, 15 bp, Homo sapiens
cccctcctggatcca

SEQ ID NO: 443443 - DNA, 15 bp, Homo sapiens
tcccctcctggatcc

SEQ ID NO: 443444 - DNA, 15 bp, Homo sapiens
ctcccctcctggatc

SEQ ID NO: 443445 - DNA, 15 bp, Homo sapiens
tctcccctcctggat

SEQ ID NO: 443446 - DNA, 15 bp, Homo sapiens
ttctcccctcctgga

SEQ ID NO: 443447 - DNA, 15 bp, Homo sapiens
attctcccctcctgg

SEQ ID NO: 443448 - DNA, 15 bp, Homo sapiens
cattctcccctcctg

SEQ ID NO: 443449 - DNA, 15 bp, Homo sapiens
gcattctcccctcct

SEQ ID NO: 443450 - DNA, 15 bp, Homo sapiens
ggcattctcccctcc

SEQ ID NO: 443451 - DNA, 15 bp, Homo sapiens
tggcattctcccctc

SEQ ID NO: 443452 - DNA, 15 bp, Homo sapiens
ctggcattctcccct

SEQ ID NO: 443453 - DNA, 15 bp, Homo sapiens
gctggcattctcccc

SEQ ID NO: 443454 - DNA, 15 bp, Homo sapiens
ggctggcattctccc

SEQ ID NO: 443455 - DNA, 15 bp, Homo sapiens
tggctggcattctcc

SEQ ID NO: 443456 - DNA, 15 bp, Homo sapiens
ctggctggcattctc

SEQ ID NO: 443457 - DNA, 15 bp, Homo sapiens
tctggctggcattct

SEQ ID NO: 443458 - DNA, 15 bp, Homo sapiens
ttctggctggcattc

SEQ ID NO: 443459 - DNA, 15 bp, Homo sapiens
tttctggctggcatt

SEQ ID NO: 443460 - DNA, 15 bp, Homo sapiens
ttttctggctggcat

SEQ ID NO: 443461 - DNA, 15 bp, Homo sapiens
cttttctggctggca

SEQ ID NO: 443462 - DNA, 15 bp, Homo sapiens
tcttttctggctggc

SEQ ID NO: 443463 - DNA, 15 bp, Homo sapiens
ttcttttctggctgg

SEQ ID NO: 443464 - DNA, 15 bp, Homo sapiens
tttcttttctggctg

SEQ ID NO: 443465 - DNA, 15 bp, Homo sapiens
ctttcttttctggct

SEQ ID NO: 443466 - DNA, 15 bp, Homo sapiens
cctttcttttctggc

SEQ ID NO: 443467 - DNA, 15 bp, Homo sapiens
acctttcttttctgg

SEQ ID NO: 443468 - DNA, 15 bp, Homo sapiens
aacctttcttttctg

SEQ ID NO: 443469 - DNA, 15 bp, Homo sapiens
taacctttcttttct

SEQ ID NO: 443470 - DNA, 15 bp, Homo sapiens
ttaacctttcttttc

SEQ ID NO: 443471 - DNA, 15 bp, Homo sapiens
gttaacctttctttt

SEQ ID NO: 443472 - DNA, 15 bp, Homo sapiens
tgttaacctttcttt

SEQ ID NO: 443473 - DNA, 15 bp, Homo sapiens
atgttaacctttctt

SEQ ID NO: 443474 - DNA, 15 bp, Homo sapiens
aatgttaacctttct

SEQ ID NO: 443475 - DNA, 15 bp, Homo sapiens
aaatgttaacctttc

SEQ ID NO: 443476 - DNA, 15 bp, Homo sapiens
caaatgttaaccttt

SEQ ID NO: 443477 - DNA, 15 bp, Homo sapiens
gcaaatgttaacctt

SEQ ID NO: 443478 - DNA, 15 bp, Homo sapiens
tgcaaatgttaacct

SEQ ID NO: 443479 - DNA, 15 bp, Homo sapiens
ttgcaaatgttaacc

SEQ ID NO: 443480 - DNA, 15 bp, Homo sapiens
attgcaaatgttaac

SEQ ID NO: 443481 - DNA, 15 bp, Homo sapiens
aattgcaaatgttaa

SEQ ID NO: 443482 - DNA, 15 bp, Homo sapiens
taattgcaaatgtta

SEQ ID NO: 443483 - DNA, 15 bp, Homo sapiens
ataattgcaaatgtt

SEQ ID NO: 443484 - DNA, 15 bp, Homo sapiens
tataattgcaaatgt

SEQ ID NO: 443485 - DNA, 15 bp, Homo sapiens
ttataattgcaaatg

SEQ ID NO: 443486 - DNA, 15 bp, Homo sapiens
tttataattgcaaat

SEQ ID NO: 443487 - DNA, 15 bp, Homo sapiens
ttttataattgcaaa

SEQ ID NO: 443488 - DNA, 15 bp, Homo sapiens
attttataattgcaa

SEQ ID NO: 443489 - DNA, 15 bp, Homo sapiens
tattttataattgca

SEQ ID NO: 443490 - DNA, 15 bp, Homo sapiens
ttattttataattgc

SEQ ID NO: 443491 - DNA, 15 bp, Homo sapiens
gttattttataattg

SEQ ID NO: 443492 - DNA, 15 bp, Homo sapiens
ggttattttataatt

SEQ ID NO: 443493 - DNA, 15 bp, Homo sapiens
aggttattttataat

SEQ ID NO: 443494 - DNA, 15 bp, Homo sapiens
aaggttattttataa

SEQ ID NO: 443495 - DNA, 15 bp, Homo sapiens
gaaggttattttata

SEQ ID NO: 443496 - DNA, 15 bp, Homo sapiens
tgaaggttattttat

SEQ ID NO: 443497 - DNA, 15 bp, Homo sapiens
ttgaaggttatttta

SEQ ID NO: 443498 - DNA, 15 bp, Homo sapiens
tttgaaggttatttt

SEQ ID NO: 443499 - DNA, 15 bp, Homo sapiens
ttttgaaggttattt

SEQ ID NO: 443500 - DNA, 15 bp, Homo sapiens
tttttgaaggttatt

SEQ ID NO: 443501 - DNA, 15 bp, Homo sapiens
atttttgaaggttat

SEQ ID NO: 443502 - DNA, 15 bp, Homo sapiens
aatttttgaaggtta

SEQ ID NO: 443503 - DNA, 15 bp, Homo sapiens
caatttttgaaggtt

SEQ ID NO: 443504 - DNA, 15 bp, Homo sapiens
gcaatttttgaaggt

SEQ ID NO: 443505 - DNA, 15 bp, Homo sapiens
agcaatttttgaagg

SEQ ID NO: 443506 - DNA, 15 bp, Homo sapiens
gagcaatttttgaag

SEQ ID NO: 443507 - DNA, 15 bp, Homo sapiens
ggagcaatttttgaa

SEQ ID NO: 443508 - DNA, 15 bp, Homo sapiens
gggagcaatttttga

SEQ ID NO: 443509 - DNA, 15 bp, Homo sapiens
agggagcaatttttg

SEQ ID NO: 443510 - DNA, 15 bp, Homo sapiens
tagggagcaattttt

SEQ ID NO: 443511 - DNA, 15 bp, Homo sapiens
atagggagcaatttt

SEQ ID NO: 443512 - DNA, 15 bp, Homo sapiens
gatagggagcaattt

SEQ ID NO: 443513 - DNA, 15 bp, Homo sapiens
agatagggagcaatt

SEQ ID NO: 443514 - DNA, 15 bp, Homo sapiens
tagatagggagcaat

SEQ ID NO: 443515 - DNA, 15 bp, Homo sapiens
atagatagggagcaa

SEQ ID NO: 443516 - DNA, 15 bp, Homo sapiens
gatagatagggagca

SEQ ID NO: 443517 - DNA, 15 bp, Homo sapiens
ggatagatagggagc

SEQ ID NO: 443518 - DNA, 15 bp, Homo sapiens
aggatagatagggag

SEQ ID NO: 443519 - DNA, 15 bp, Homo sapiens
taggatagataggga

SEQ ID NO: 443520 - DNA, 15 bp, Homo sapiens
ataggatagataggg

SEQ ID NO: 443521 - DNA, 15 bp, Homo sapiens
tataggatagatagg

SEQ ID NO: 443522 - DNA, 15 bp, Homo sapiens
ctataggatagatag

SEQ ID NO: 443523 - DNA, 15 bp, Homo sapiens
actataggatagata

SEQ ID NO: 443524 - DNA, 15 bp, Homo sapiens
tactataggatagat

SEQ ID NO: 443525 - DNA, 15 bp, Homo sapiens
ttactataggataga

SEQ ID NO: 443526 - DNA, 15 bp, Homo sapiens
tttactataggatag

SEQ ID NO: 443527 - DNA, 15 bp, Homo sapiens
ttttactataggata

SEQ ID NO: 443528 - DNA, 15 bp, Homo sapiens
gttttactataggat

SEQ ID NO: 443529 - DNA, 15 bp, Homo sapiens
tgttttactatagga

SEQ ID NO: 443530 - DNA, 15 bp, Homo sapiens
ttgttttactatagg

SEQ ID NO: 443531 - DNA, 15 bp, Homo sapiens
tttgttttactatag

SEQ ID NO: 443532 - DNA, 15 bp, Homo sapiens
ttttgttttactata

SEQ ID NO: 443533 - DNA, 15 bp, Homo sapiens
cttttgttttactat

SEQ ID NO: 443534 - DNA, 15 bp, Homo sapiens
tcttttgttttacta

SEQ ID NO: 443535 - DNA, 15 bp, Homo sapiens
ttcttttgttttact

SEQ ID NO: 443536 - DNA, 15 bp, Homo sapiens
attcttttgttttac

SEQ ID NO: 443537 - DNA, 15 bp, Homo sapiens
tattcttttgtttta

SEQ ID NO: 443538 - DNA, 15 bp, Homo sapiens
ttattcttttgtttt

SEQ ID NO: 443539 - DNA, 15 bp, Homo sapiens
tttattcttttgttt

SEQ ID NO: 443540 - DNA, 15 bp, Homo sapiens
ttttattcttttgtt

SEQ ID NO: 443541 - DNA, 15 bp, Homo sapiens
tttttattcttttgt

SEQ ID NO: 443542 - DNA, 15 bp, Homo sapiens
atttttattcttttg

SEQ ID NO: 443543 - DNA, 15 bp, Homo sapiens
catttttattctttt

SEQ ID NO: 443544 - DNA, 15 bp, Homo sapiens
ccatttttattcttt

SEQ ID NO: 443545 - DNA, 15 bp, Homo sapiens
tccatttttattctt

SEQ ID NO: 443546 - DNA, 15 bp, Homo sapiens
ttccatttttattct

SEQ ID NO: 443547 - DNA, 15 bp, Homo sapiens
tttccatttttattc

SEQ ID NO: 443548 - DNA, 15 bp, Homo sapiens
gtttccatttttatt

SEQ ID NO: 443549 - DNA, 15 bp, Homo sapiens
cgtttccatttttat

SEQ ID NO: 443550 - DNA, 15 bp, Homo sapiens
acgtttccattttta

SEQ ID NO: 443551 - DNA, 15 bp, Homo sapiens
tacgtttccattttt

SEQ ID NO: 443552 - DNA, 15 bp, Homo sapiens
ctacgtttccatttt

SEQ ID NO: 443553 - DNA, 15 bp, Homo sapiens
actacgtttccattt

SEQ ID NO: 443554 - DNA, 15 bp, Homo sapiens
gactacgtttccatt

SEQ ID NO: 443555 - DNA, 15 bp, Homo sapiens
agactacgtttccat

SEQ ID NO: 443556 - DNA, 15 bp, Homo sapiens
aagactacgtttcca

SEQ ID NO: 443557 - DNA, 15 bp, Homo sapiens
aaagactacgtttcc

SEQ ID NO: 443558 - DNA, 15 bp, Homo sapiens
aaaagactacgtttc

SEQ ID NO: 443559 - DNA, 15 bp, Homo sapiens
gaaaagactacgttt

SEQ ID NO: 443560 - DNA, 15 bp, Homo sapiens
agaaaagactacgtt

SEQ ID NO: 443561 - DNA, 15 bp, Homo sapiens
gagaaaagactacgt

SEQ ID NO: 443562 - DNA, 15 bp, Homo sapiens
tgagaaaagactacg

SEQ ID NO: 443563 - DNA, 15 bp, Homo sapiens
ctgagaaaagactac

SEQ ID NO: 443564 - DNA, 15 bp, Homo sapiens
gctgagaaaagacta

SEQ ID NO: 443565 - DNA, 15 bp, Homo sapiens
ggctgagaaaagact

SEQ ID NO: 443566 - DNA, 15 bp, Homo sapiens
gggctgagaaaagac

SEQ ID NO: 443567 - DNA, 15 bp, Homo sapiens
ggggctgagaaaaga

SEQ ID NO: 443568 - DNA, 15 bp, Homo sapiens
gggggctgagaaaag

SEQ ID NO: 443569 - DNA, 15 bp, Homo sapiens
cgggggctgagaaaa

SEQ ID NO: 443570 - DNA, 15 bp, Homo sapiens
ccgggggctgagaaa

SEQ ID NO: 443571 - DNA, 15 bp, Homo sapiens
cccgggggctgagaa

SEQ ID NO: 443572 - DNA, 15 bp, Homo sapiens
tcccgggggctgaga

SEQ ID NO: 443573 - DNA, 15 bp, Homo sapiens
ttcccgggggctgag

SEQ ID NO: 443574 - DNA, 15 bp, Homo sapiens
cttcccgggggctga

SEQ ID NO: 443575 - DNA, 15 bp, Homo sapiens
acttcccgggggctg

SEQ ID NO: 443576 - DNA, 15 bp, Homo sapiens
tacttcccgggggct

SEQ ID NO: 443577 - DNA, 15 bp, Homo sapiens
atacttcccgggggc

SEQ ID NO: 443578 - DNA, 15 bp, Homo sapiens
tatacttcccggggg

SEQ ID NO: 443579 - DNA, 15 bp, Homo sapiens
atatacttcccgggg

SEQ ID NO: 443580 - DNA, 15 bp, Homo sapiens
gatatacttcccggg

SEQ ID NO: 443581 - DNA, 15 bp, Homo sapiens
ggatatacttcccgg

SEQ ID NO: 443582 - DNA, 15 bp, Homo sapiens
tggatatacttcccg

SEQ ID NO: 443583 - DNA, 15 bp, Homo sapiens
atggatatacttccc

SEQ ID NO: 443584 - DNA, 15 bp, Homo sapiens
aatggatatacttcc

SEQ ID NO: 443585 - DNA, 15 bp, Homo sapiens
gaatggatatacttc

SEQ ID NO: 443586 - DNA, 15 bp, Homo sapiens
agaatggatatactt

SEQ ID NO: 443587 - DNA, 15 bp, Homo sapiens
aagaatggatatact

SEQ ID NO: 443588 - DNA, 15 bp, Homo sapiens
caagaatggatatac

SEQ ID NO: 443589 - DNA, 15 bp, Homo sapiens
gcaagaatggatata

SEQ ID NO: 443590 - DNA, 15 bp, Homo sapiens
ggcaagaatggatat

SEQ ID NO: 443591 - DNA, 15 bp, Homo sapiens
gggcaagaatggata

SEQ ID NO: 443592 - DNA, 15 bp, Homo sapiens
agggcaagaatggat

SEQ ID NO: 443593 - DNA, 15 bp, Homo sapiens
cagggcaagaatgga

SEQ ID NO: 443594 - DNA, 15 bp, Homo sapiens
acagggcaagaatgg

SEQ ID NO: 443595 - DNA, 15 bp, Homo sapiens
tacagggcaagaatg

SEQ ID NO: 443596 - DNA, 15 bp, Homo sapiens
gtacagggcaagaat

SEQ ID NO: 443597 - DNA, 15 bp, Homo sapiens
agtacagggcaagaa

SEQ ID NO: 443598 - DNA, 15 bp, Homo sapiens
gagtacagggcaaga

SEQ ID NO: 443599 - DNA, 15 bp, Homo sapiens
ggagtacagggcaag

SEQ ID NO: 443600 - DNA, 15 bp, Homo sapiens
aggagtacagggcaa

SEQ ID NO: 443601 - DNA, 15 bp, Homo sapiens
taggagtacagggca

SEQ ID NO: 443602 - DNA, 15 bp, Homo sapiens
gtaggagtacagggc

SEQ ID NO: 443603 - DNA, 15 bp, Homo sapiens
ggtaggagtacaggg

SEQ ID NO: 443604 - DNA, 15 bp, Homo sapiens
gggtaggagtacagg

SEQ ID NO: 443605 - DNA, 15 bp, Homo sapiens
tgggtaggagtacag

SEQ ID NO: 443606 - DNA, 15 bp, Homo sapiens
gtgggtaggagtaca

SEQ ID NO: 443607 - DNA, 15 bp, Homo sapiens
agtgggtaggagtac

SEQ ID NO: 443608 - DNA, 15 bp, Homo sapiens
aagtgggtaggagta

SEQ ID NO: 443609 - DNA, 15 bp, Homo sapiens
aaagtgggtaggagt

SEQ ID NO: 443610 - DNA, 15 bp, Homo sapiens
caaagtgggtaggag

SEQ ID NO: 443611 - DNA, 15 bp, Homo sapiens
acaaagtgggtagga

SEQ ID NO: 443612 - DNA, 15 bp, Homo sapiens
tacaaagtgggtagg

SEQ ID NO: 443613 - DNA, 15 bp, Homo sapiens
ctacaaagtgggtag

SEQ ID NO: 443614 - DNA, 15 bp, Homo sapiens
tctacaaagtgggta

SEQ ID NO: 443615 - DNA, 15 bp, Homo sapiens
ttctacaaagtgggt

SEQ ID NO: 443616 - DNA, 15 bp, Homo sapiens
cttctacaaagtggg

SEQ ID NO: 443617 - DNA, 15 bp, Homo sapiens
tcttctacaaagtgg

SEQ ID NO: 443618 - DNA, 15 bp, Homo sapiens
atcttctacaaagtg

SEQ ID NO: 443619 - DNA, 15 bp, Homo sapiens
tatcttctacaaagt

SEQ ID NO: 443620 - DNA, 15 bp, Homo sapiens
ctatcttctacaaag

SEQ ID NO: 443621 - DNA, 15 bp, Homo sapiens
gctatcttctacaaa

SEQ ID NO: 443622 - DNA, 15 bp, Homo sapiens
tgctatcttctacaa

SEQ ID NO: 443623 - DNA, 15 bp, Homo sapiens
ttgctatcttctaca

SEQ ID NO: 443624 - DNA, 15 bp, Homo sapiens
attgctatcttctac

SEQ ID NO: 443625 - DNA, 15 bp, Homo sapiens
cattgctatcttcta

SEQ ID NO: 443626 - DNA, 15 bp, Homo sapiens
tcattgctatcttct

SEQ ID NO: 443627 - DNA, 15 bp, Homo sapiens
ttcattgctatcttc

SEQ ID NO: 443628 - DNA, 15 bp, Homo sapiens
cttcattgctatctt

SEQ ID NO: 443629 - DNA, 15 bp, Homo sapiens
tcttcattgctatct

SEQ ID NO: 443630 - DNA, 15 bp, Homo sapiens
ctcttcattgctatc

SEQ ID NO: 443631 - DNA, 15 bp, Homo sapiens
cctcttcattgctat

SEQ ID NO: 443632 - DNA, 15 bp, Homo sapiens
acctcttcattgcta

SEQ ID NO: 443633 - DNA, 15 bp, Homo sapiens
cacctcttcattgct

SEQ ID NO: 443634 - DNA, 15 bp, Homo sapiens
acacctcttcattgc

SEQ ID NO: 443635 - DNA, 15 bp, Homo sapiens
tacacctcttcattg

SEQ ID NO: 443636 - DNA, 15 bp, Homo sapiens
gtacacctcttcatt

SEQ ID NO: 443637 - DNA, 15 bp, Homo sapiens
cgtacacctcttcat

SEQ ID NO: 443638 - DNA, 15 bp, Homo sapiens
gcgtacacctcttca

SEQ ID NO: 443639 - DNA, 15 bp, Homo sapiens
agcgtacacctcttc

SEQ ID NO: 443640 - DNA, 15 bp, Homo sapiens
cagcgtacacctctt

SEQ ID NO: 443641 - DNA, 15 bp, Homo sapiens
tcagcgtacacctct

SEQ ID NO: 443642 - DNA, 15 bp, Homo sapiens
ctcagcgtacacctc

SEQ ID NO: 443643 - DNA, 15 bp, Homo sapiens
tctcagcgtacacct

SEQ ID NO: 443644 - DNA, 15 bp, Homo sapiens
gtctcagcgtacacc

SEQ ID NO: 443645 - DNA, 15 bp, Homo sapiens
ggtctcagcgtacac

SEQ ID NO: 443646 - DNA, 15 bp, Homo sapiens
gggtctcagcgtaca

SEQ ID NO: 443647 - DNA, 15 bp, Homo sapiens
ggggtctcagcgtac

SEQ ID NO: 443648 - DNA, 15 bp, Homo sapiens
gggggtctcagcgta

SEQ ID NO: 443649 - DNA, 15 bp, Homo sapiens
tgggggtctcagcgt

SEQ ID NO: 443650 - DNA, 15 bp, Homo sapiens
atgggggtctcagcg

SEQ ID NO: 443651 - DNA, 15 bp, Homo sapiens
gatgggggtctcagc

SEQ ID NO: 443652 - DNA, 15 bp, Homo sapiens
ggatgggggtctcag

SEQ ID NO: 443653 - DNA, 15 bp, Homo sapiens
gggatgggggtctca

SEQ ID NO: 443654 - DNA, 15 bp, Homo sapiens
ggggatgggggtctc

SEQ ID NO: 443655 - DNA, 15 bp, Homo sapiens
aggggatgggggtct

SEQ ID NO: 443656 - DNA, 15 bp, Homo sapiens
taggggatgggggtc

SEQ ID NO: 443657 - DNA, 15 bp, Homo sapiens
gtaggggatgggggt

SEQ ID NO: 443658 - DNA, 15 bp, Homo sapiens
ggtaggggatggggg

SEQ ID NO: 443659 - DNA, 15 bp, Homo sapiens
gggtaggggatgggg

SEQ ID NO: 443660 - DNA, 15 bp, Homo sapiens
ggggtaggggatggg

SEQ ID NO: 443661 - DNA, 15 bp, Homo sapiens
tggggtaggggatgg

SEQ ID NO: 443662 - DNA, 15 bp, Homo sapiens
ttggggtaggggatg

SEQ ID NO: 443663 - DNA, 15 bp, Homo sapiens
gttggggtaggggat

SEQ ID NO: 443664 - DNA, 15 bp, Homo sapiens
agttggggtagggga

SEQ ID NO: 443665 - DNA, 15 bp, Homo sapiens
gagttggggtagggg

SEQ ID NO: 443666 - DNA, 15 bp, Homo sapiens
ggagttggggtaggg

SEQ ID NO: 443667 - DNA, 15 bp, Homo sapiens
gggagttggggtagg

SEQ ID NO: 443668 - DNA, 15 bp, Homo sapiens
agggagttggggtag

SEQ ID NO: 443669 - DNA, 15 bp, Homo sapiens
tagggagttggggta

SEQ ID NO: 443670 - DNA, 15 bp, Homo sapiens
ctagggagttggggt

SEQ ID NO: 443671 - DNA, 15 bp, Homo sapiens
actagggagttgggg

SEQ ID NO: 443672 - DNA, 15 bp, Homo sapiens
gactagggagttggg

SEQ ID NO: 443673 - DNA, 15 bp, Homo sapiens
agactagggagttgg

SEQ ID NO: 443674 - DNA, 15 bp, Homo sapiens
aagactagggagttg

SEQ ID NO: 443675 - DNA, 15 bp, Homo sapiens
gaagactagggagtt

SEQ ID NO: 443676 - DNA, 15 bp, Homo sapiens
cgaagactagggagt

SEQ ID NO: 443677 - DNA, 15 bp, Homo sapiens
ccgaagactagggag

SEQ ID NO: 443678 - DNA, 15 bp, Homo sapiens
cccgaagactaggga

SEQ ID NO: 443679 - DNA, 15 bp, Homo sapiens
tcccgaagactaggg

SEQ ID NO: 443680 - DNA, 15 bp, Homo sapiens
ttcccgaagactagg

SEQ ID NO: 443681 - DNA, 15 bp, Homo sapiens
tttcccgaagactag

SEQ ID NO: 443682 - DNA, 15 bp, Homo sapiens
ctttcccgaagacta

SEQ ID NO: 443683 - DNA, 15 bp, Homo sapiens
cctttcccgaagact

SEQ ID NO: 443684 - DNA, 15 bp, Homo sapiens
tcctttcccgaagac

SEQ ID NO: 443685 - DNA, 15 bp, Homo sapiens
atcctttcccgaaga

SEQ ID NO: 443686 - DNA, 15 bp, Homo sapiens
gatcctttcccgaag

SEQ ID NO: 443687 - DNA, 15 bp, Homo sapiens
cgatcctttcccgaa

SEQ ID NO: 443688 - DNA, 15 bp, Homo sapiens
tcgatcctttcccga

SEQ ID NO: 443689 - DNA, 15 bp, Homo sapiens
ttcgatcctttcccg

SEQ ID NO: 443690 - DNA, 15 bp, Homo sapiens
cttcgatcctttccc

SEQ ID NO: 443691 - DNA, 15 bp, Homo sapiens
tcttcgatcctttcc

SEQ ID NO: 443692 - DNA, 15 bp, Homo sapiens
ctcttcgatcctttc

SEQ ID NO: 443693 - DNA, 15 bp, Homo sapiens
actcttcgatccttt

SEQ ID NO: 443694 - DNA, 15 bp, Homo sapiens
cactcttcgatcctt

SEQ ID NO: 443695 - DNA, 15 bp, Homo sapiens
acactcttcgatcct

SEQ ID NO: 443696 - DNA, 15 bp, Homo sapiens
gacactcttcgatcc

SEQ ID NO: 443697 - DNA, 15 bp, Homo sapiens
tgacactcttcgatc

SEQ ID NO: 443698 - DNA, 15 bp, Homo sapiens
gtgacactcttcgat

SEQ ID NO: 443699 - DNA, 15 bp, Homo sapiens
tgtgacactcttcga

SEQ ID NO: 443700 - DNA, 15 bp, Homo sapiens
ctgtgacactcttcg

SEQ ID NO: 443701 - DNA, 15 bp, Homo sapiens
actgtgacactcttc

SEQ ID NO: 443702 - DNA, 15 bp, Homo sapiens
aactgtgacactctt

SEQ ID NO: 443703 - DNA, 15 bp, Homo sapiens
aaactgtgacactct

SEQ ID NO: 443704 - DNA, 15 bp, Homo sapiens
caaactgtgacactc

SEQ ID NO: 443705 - DNA, 15 bp, Homo sapiens
ccaaactgtgacact

SEQ ID NO: 443706 - DNA, 15 bp, Homo sapiens
cccaaactgtgacac

SEQ ID NO: 443707 - DNA, 15 bp, Homo sapiens
ccccaaactgtgaca

SEQ ID NO: 443708 - DNA, 15 bp, Homo sapiens
accccaaactgtgac

SEQ ID NO: 443709 - DNA, 15 bp, Homo sapiens
gaccccaaactgtga

SEQ ID NO: 443710 - DNA, 15 bp, Homo sapiens
agaccccaaactgtg

SEQ ID NO: 443711 - DNA, 15 bp, Homo sapiens
tagaccccaaactgt

SEQ ID NO: 443712 - DNA, 15 bp, Homo sapiens
atagaccccaaactg

SEQ ID NO: 443713 - DNA, 15 bp, Homo sapiens
tatagaccccaaact

SEQ ID NO: 443714 - DNA, 15 bp, Homo sapiens
ttatagaccccaaac

SEQ ID NO: 443715 - DNA, 15 bp, Homo sapiens
attatagaccccaaa

SEQ ID NO: 443716 - DNA, 15 bp, Homo sapiens
cattatagaccccaa

SEQ ID NO: 443717 - DNA, 15 bp, Homo sapiens
gcattatagacccca

SEQ ID NO: 443718 - DNA, 15 bp, Homo sapiens
agcattatagacccc

SEQ ID NO: 443719 - DNA, 15 bp, Homo sapiens
gagcattatagaccc

SEQ ID NO: 443720 - DNA, 15 bp, Homo sapiens
ggagcattatagacc

SEQ ID NO: 443721 - DNA, 15 bp, Homo sapiens
gggagcattatagac

SEQ ID NO: 443722 - DNA, 15 bp, Homo sapiens
ggggagcattataga

SEQ ID NO: 443723 - DNA, 15 bp, Homo sapiens
aggggagcattatag

SEQ ID NO: 443724 - DNA, 15 bp, Homo sapiens
gaggggagcattata

SEQ ID NO: 443725 - DNA, 15 bp, Homo sapiens
ggaggggagcattat

SEQ ID NO: 443726 - DNA, 15 bp, Homo sapiens
gggaggggagcatta

SEQ ID NO: 443727 - DNA, 15 bp, Homo sapiens
agggaggggagcatt

SEQ ID NO: 443728 - DNA, 15 bp, Homo sapiens
aagggaggggagcat

SEQ ID NO: 443729 - DNA, 15 bp, Homo sapiens
caagggaggggagca

SEQ ID NO: 443730 - DNA, 15 bp, Homo sapiens
ccaagggaggggagc

SEQ ID NO: 443731 - DNA, 15 bp, Homo sapiens
cccaagggaggggag

SEQ ID NO: 443732 - DNA, 15 bp, Homo sapiens
acccaagggagggga

SEQ ID NO: 443733 - DNA, 15 bp, Homo sapiens
gacccaagggagggg

SEQ ID NO: 443734 - DNA, 15 bp, Homo sapiens
agacccaagggaggg

SEQ ID NO: 443735 - DNA, 15 bp, Homo sapiens
aagacccaagggagg

SEQ ID NO: 443736 - DNA, 15 bp, Homo sapiens
gaagacccaagggag

SEQ ID NO: 443737 - DNA, 15 bp, Homo sapiens
ggaagacccaaggga

SEQ ID NO: 443738 - DNA, 15 bp, Homo sapiens
gggaagacccaaggg

SEQ ID NO: 443739 - DNA, 15 bp, Homo sapiens
tgggaagacccaagg

SEQ ID NO: 443740 - DNA, 15 bp, Homo sapiens
atgggaagacccaag

SEQ ID NO: 443741 - DNA, 15 bp, Homo sapiens
catgggaagacccaa

SEQ ID NO: 443742 - DNA, 15 bp, Homo sapiens
gcatgggaagaccca

SEQ ID NO: 443743 - DNA, 15 bp, Homo sapiens
agcatgggaagaccc

SEQ ID NO: 443744 - DNA, 15 bp, Homo sapiens
gagcatgggaagacc

SEQ ID NO: 443745 - DNA, 15 bp, Homo sapiens
agagcatgggaagac

SEQ ID NO: 443746 - DNA, 15 bp, Homo sapiens
cagagcatgggaaga

SEQ ID NO: 443747 - DNA, 15 bp, Homo sapiens
ccagagcatgggaag

SEQ ID NO: 443748 - DNA, 15 bp, Homo sapiens
gccagagcatgggaa

SEQ ID NO: 443749 - DNA, 15 bp, Homo sapiens
agccagagcatggga

SEQ ID NO: 443750 - DNA, 15 bp, Homo sapiens
cagccagagcatggg

SEQ ID NO: 443751 - DNA, 15 bp, Homo sapiens
gcagccagagcatgg

SEQ ID NO: 443752 - DNA, 15 bp, Homo sapiens
ggcagccagagcatg

SEQ ID NO: 443753 - DNA, 15 bp, Homo sapiens
tggcagccagagcat

SEQ ID NO: 443754 - DNA, 15 bp, Homo sapiens
gtggcagccagagca

SEQ ID NO: 443755 - DNA, 15 bp, Homo sapiens
ggtggcagccagagc

SEQ ID NO: 443756 - DNA, 15 bp, Homo sapiens
gggtggcagccagag

SEQ ID NO: 443757 - DNA, 15 bp, Homo sapiens
agggtggcagccaga

SEQ ID NO: 443758 - DNA, 15 bp, Homo sapiens
aagggtggcagccag

SEQ ID NO: 443759 - DNA, 15 bp, Homo sapiens
gaagggtggcagcca

SEQ ID NO: 443760 - DNA, 15 bp, Homo sapiens
ggaagggtggcagcc

SEQ ID NO: 443761 - DNA, 15 bp, Homo sapiens
aggaagggtggcagc

SEQ ID NO: 443762 - DNA, 15 bp, Homo sapiens
gaggaagggtggcag

SEQ ID NO: 443763 - DNA, 15 bp, Homo sapiens
ggaggaagggtggca

SEQ ID NO: 443764 - DNA, 15 bp, Homo sapiens
gggaggaagggtggc

SEQ ID NO: 443765 - DNA, 15 bp, Homo sapiens
agggaggaagggtgg

SEQ ID NO: 443766 - DNA, 15 bp, Homo sapiens
cagggaggaagggtg

SEQ ID NO: 443767 - DNA, 15 bp, Homo sapiens
acagggaggaagggt

SEQ ID NO: 443768 - DNA, 15 bp, Homo sapiens
tacagggaggaaggg

SEQ ID NO: 443769 - DNA, 15 bp, Homo sapiens
ctacagggaggaagg

SEQ ID NO: 443770 - DNA, 15 bp, Homo sapiens
gctacagggaggaag

SEQ ID NO: 443771 - DNA, 15 bp, Homo sapiens
tgctacagggaggaa

SEQ ID NO: 443772 - DNA, 15 bp, Homo sapiens
gtgctacagggagga

SEQ ID NO: 443773 - DNA, 15 bp, Homo sapiens
ggtgctacagggagg

SEQ ID NO: 443774 - DNA, 15 bp, Homo sapiens
aggtgctacagggag

SEQ ID NO: 443775 - DNA, 15 bp, Homo sapiens
caggtgctacaggga

SEQ ID NO: 443776 - DNA, 15 bp, Homo sapiens
tcaggtgctacaggg

SEQ ID NO: 443777 - DNA, 15 bp, Homo sapiens
ctcaggtgctacagg

SEQ ID NO: 443778 - DNA, 15 bp, Homo sapiens
gctcaggtgctacag

SEQ ID NO: 443779 - DNA, 15 bp, Homo sapiens
tgctcaggtgctaca

SEQ ID NO: 443780 - DNA, 15 bp, Homo sapiens
ctgctcaggtgctac

SEQ ID NO: 443781 - DNA, 15 bp, Homo sapiens
gctgctcaggtgcta

SEQ ID NO: 443782 - DNA, 15 bp, Homo sapiens
agctgctcaggtgct

SEQ ID NO: 443783 - DNA, 15 bp, Homo sapiens
cagctgctcaggtgc

SEQ ID NO: 443784 - DNA, 15 bp, Homo sapiens
acagctgctcaggtg

SEQ ID NO: 443785 - DNA, 15 bp, Homo sapiens
cacagctgctcaggt

SEQ ID NO: 443786 - DNA, 15 bp, Homo sapiens
ccacagctgctcagg

SEQ ID NO: 443787 - DNA, 15 bp, Homo sapiens
cccacagctgctcag

SEQ ID NO: 443788 - DNA, 15 bp, Homo sapiens
acccacagctgctca

SEQ ID NO: 443789 - DNA, 15 bp, Homo sapiens
cacccacagctgctc

SEQ ID NO: 443790 - DNA, 15 bp, Homo sapiens
ccacccacagctgct

SEQ ID NO: 443791 - DNA, 15 bp, Homo sapiens
gccacccacagctgc

SEQ ID NO: 443792 - DNA, 15 bp, Homo sapiens
agccacccacagctg

SEQ ID NO: 443793 - DNA, 15 bp, Homo sapiens
gagccacccacagct

SEQ ID NO: 443794 - DNA, 15 bp, Homo sapiens
agagccacccacagc

SEQ ID NO: 443795 - DNA, 15 bp, Homo sapiens
aagagccacccacag

SEQ ID NO: 443796 - DNA, 15 bp, Homo sapiens
aaagagccacccaca

SEQ ID NO: 443797 - DNA, 15 bp, Homo sapiens
aaaagagccacccac

SEQ ID NO: 443798 - DNA, 15 bp, Homo sapiens
gaaaagagccaccca

SEQ ID NO: 443799 - DNA, 15 bp, Homo sapiens
tgaaaagagccaccc

SEQ ID NO: 443800 - DNA, 15 bp, Homo sapiens
atgaaaagagccacc

SEQ ID NO: 443801 - DNA, 15 bp, Homo sapiens
tatgaaaagagccac

SEQ ID NO: 443802 - DNA, 15 bp, Homo sapiens
ctatgaaaagagcca

SEQ ID NO: 443803 - DNA, 15 bp, Homo sapiens
cctatgaaaagagcc

SEQ ID NO: 443804 - DNA, 15 bp, Homo sapiens
tcctatgaaaagagc

SEQ ID NO: 443805 - DNA, 15 bp, Homo sapiens
gtcctatgaaaagag

SEQ ID NO: 443806 - DNA, 15 bp, Homo sapiens
tgtcctatgaaaaga

SEQ ID NO: 443807 - DNA, 15 bp, Homo sapiens
ttgtcctatgaaaag

SEQ ID NO: 443808 - DNA, 15 bp, Homo sapiens
cttgtcctatgaaaa

SEQ ID NO: 443809 - DNA, 15 bp, Homo sapiens
tcttgtcctatgaaa

SEQ ID NO: 443810 - DNA, 15 bp, Homo sapiens
atcttgtcctatgaa

SEQ ID NO: 443811 - DNA, 15 bp, Homo sapiens
aatcttgtcctatga

SEQ ID NO: 443812 - DNA, 15 bp, Homo sapiens
aaatcttgtcctatg

SEQ ID NO: 443813 - DNA, 15 bp, Homo sapiens
aaaatcttgtcctat

SEQ ID NO: 443814 - DNA, 15 bp, Homo sapiens
aaaaatcttgtccta

SEQ ID NO: 443815 - DNA, 15 bp, Homo sapiens
gaaaaatcttgtcct

SEQ ID NO: 443816 - DNA, 15 bp, Homo sapiens
agaaaaatcttgtcc

SEQ ID NO: 443817 - DNA, 15 bp, Homo sapiens
gagaaaaatcttgtc

SEQ ID NO: 443818 - DNA, 15 bp, Homo sapiens
ggagaaaaatcttgt

SEQ ID NO: 443819 - DNA, 15 bp, Homo sapiens
aggagaaaaatcttg

SEQ ID NO: 443820 - DNA, 15 bp, Homo sapiens
aaggagaaaaatctt

SEQ ID NO: 443821 - DNA, 15 bp, Homo sapiens
caaggagaaaaatct

SEQ ID NO: 443822 - DNA, 15 bp, Homo sapiens
tcaaggagaaaaatc

SEQ ID NO: 443823 - DNA, 15 bp, Homo sapiens
atcaaggagaaaaat

SEQ ID NO: 443824 - DNA, 15 bp, Homo sapiens
tatcaaggagaaaaa

SEQ ID NO: 443825 - DNA, 15 bp, Homo sapiens
gtatcaaggagaaaa

SEQ ID NO: 443826 - DNA, 15 bp, Homo sapiens
tgtatcaaggagaaa

SEQ ID NO: 443827 - DNA, 15 bp, Homo sapiens
atgtatcaaggagaa

SEQ ID NO: 443828 - DNA, 15 bp, Homo sapiens
catgtatcaaggaga

SEQ ID NO: 443829 - DNA, 15 bp, Homo sapiens
acatgtatcaaggag

SEQ ID NO: 443830 - DNA, 15 bp, Homo sapiens
cacatgtatcaagga

SEQ ID NO: 443831 - DNA, 15 bp, Homo sapiens
acacatgtatcaagg

SEQ ID NO: 443832 - DNA, 15 bp, Homo sapiens
tacacatgtatcaag

SEQ ID NO: 443833 - DNA, 15 bp, Homo sapiens
atacacatgtatcaa

SEQ ID NO: 443834 - DNA, 15 bp, Homo sapiens
tatacacatgtatca

SEQ ID NO: 443835 - DNA, 15 bp, Homo sapiens
ctatacacatgtatc

SEQ ID NO: 443836 - DNA, 15 bp, Homo sapiens
tctatacacatgtat

SEQ ID NO: 443837 - DNA, 15 bp, Homo sapiens
ttctatacacatgta

SEQ ID NO: 443838 - DNA, 15 bp, Homo sapiens
tttctatacacatgt

SEQ ID NO: 443839 - DNA, 15 bp, Homo sapiens
ttttctatacacatg

SEQ ID NO: 443840 - DNA, 15 bp, Homo sapiens
tttttctatacacat

SEQ ID NO: 443841 - DNA, 15 bp, Homo sapiens
ttttttctatacaca

SEQ ID NO: 443842 - DNA, 15 bp, Homo sapiens
tttttttctatacac

SEQ ID NO: 443843 - DNA, 15 bp, Homo sapiens
atttttttctataca

SEQ ID NO: 443844 - DNA, 15 bp, Homo sapiens
tatttttttctatac

SEQ ID NO: 443845 - DNA, 15 bp, Homo sapiens
ttatttttttctata

SEQ ID NO: 443846 - DNA, 15 bp, Homo sapiens
attatttttttctat

SEQ ID NO: 443847 - DNA, 15 bp, Homo sapiens
cattatttttttcta

SEQ ID NO: 443848 - DNA, 15 bp, Homo sapiens
ccattatttttttct

SEQ ID NO: 443849 - DNA, 15 bp, Homo sapiens
tccattatttttttc

SEQ ID NO: 443850 - DNA, 15 bp, Homo sapiens
gtccattattttttt

SEQ ID NO: 443851 - DNA, 15 bp, Homo sapiens
tgtccattatttttt

SEQ ID NO: 443852 - DNA, 15 bp, Homo sapiens
ctgtccattattttt

SEQ ID NO: 443853 - DNA, 15 bp, Homo sapiens
actgtccattatttt

SEQ ID NO: 443854 - DNA, 15 bp, Homo sapiens
cactgtccattattt

SEQ ID NO: 443855 - DNA, 15 bp, Homo sapiens
gcactgtccattatt

SEQ ID NO: 443856 - DNA, 15 bp, Homo sapiens
agcactgtccattat

SEQ ID NO: 443857 - DNA, 15 bp, Homo sapiens
tagcactgtccatta

SEQ ID NO: 443858 - DNA, 15 bp, Homo sapiens
gtagcactgtccatt

SEQ ID NO: 443859 - DNA, 15 bp, Homo sapiens
agtagcactgtccat

SEQ ID NO: 443860 - DNA, 15 bp, Homo sapiens
gagtagcactgtcca

SEQ ID NO: 443861 - DNA, 15 bp, Homo sapiens
tgagtagcactgtcc

SEQ ID NO: 443862 - DNA, 15 bp, Homo sapiens
ttgagtagcactgtc

SEQ ID NO: 443863 - DNA, 15 bp, Homo sapiens
attgagtagcactgt

SEQ ID NO: 443864 - DNA, 15 bp, Homo sapiens
gattgagtagcactg

SEQ ID NO: 443865 - DNA, 15 bp, Homo sapiens
agattgagtagcact

SEQ ID NO: 443866 - DNA, 15 bp, Homo sapiens
gagattgagtagcac

SEQ ID NO: 443867 - DNA, 15 bp, Homo sapiens
tgagattgagtagca

SEQ ID NO: 443868 - DNA, 15 bp, Homo sapiens
ttgagattgagtagc

SEQ ID NO: 443869 - DNA, 15 bp, Homo sapiens
tttgagattgagtag

SEQ ID NO: 443870 - DNA, 15 bp, Homo sapiens
atttgagattgagta

SEQ ID NO: 443871 - DNA, 15 bp, Homo sapiens
gatttgagattgagt

SEQ ID NO: 443872 - DNA, 15 bp, Homo sapiens
agatttgagattgag

SEQ ID NO: 443873 - DNA, 15 bp, Homo sapiens
aagatttgagattga

SEQ ID NO: 443874 - DNA, 15 bp, Homo sapiens
aaagatttgagattg

SEQ ID NO: 443875 - DNA, 15 bp, Homo sapiens
gaaagatttgagatt

SEQ ID NO: 443876 - DNA, 15 bp, Homo sapiens
agaaagatttgagat

SEQ ID NO: 443877 - DNA, 15 bp, Homo sapiens
tagaaagatttgaga

SEQ ID NO: 443878 - DNA, 15 bp, Homo sapiens
ttagaaagatttgag

SEQ ID NO: 443879 - DNA, 15 bp, Homo sapiens
attagaaagatttga

SEQ ID NO: 443880 - DNA, 15 bp, Homo sapiens
cattagaaagatttg

SEQ ID NO: 443881 - DNA, 15 bp, Homo sapiens
gcattagaaagattt

SEQ ID NO: 443882 - DNA, 15 bp, Homo sapiens
tgcattagaaagatt

SEQ ID NO: 443883 - DNA, 15 bp, Homo sapiens
gtgcattagaaagat

SEQ ID NO: 443884 - DNA, 15 bp, Homo sapiens
agtgcattagaaaga

SEQ ID NO: 443885 - DNA, 15 bp, Homo sapiens
aagtgcattagaaag

SEQ ID NO: 443886 - DNA, 15 bp, Homo sapiens
caagtgcattagaaa

SEQ ID NO: 443887 - DNA, 15 bp, Homo sapiens
ccaagtgcattagaa

SEQ ID NO: 443888 - DNA, 15 bp, Homo sapiens
accaagtgcattaga

SEQ ID NO: 443889 - DNA, 15 bp, Homo sapiens
aaccaagtgcattag

SEQ ID NO: 443890 - DNA, 15 bp, Homo sapiens
aaaccaagtgcatta

SEQ ID NO: 443891 - DNA, 15 bp, Homo sapiens
taaaccaagtgcatt

SEQ ID NO: 443892 - DNA, 15 bp, Homo sapiens
ctaaaccaagtgcat

SEQ ID NO: 443893 - DNA, 15 bp, Homo sapiens
gctaaaccaagtgca

SEQ ID NO: 443894 - DNA, 15 bp, Homo sapiens
ggctaaaccaagtgc

SEQ ID NO: 443895 - DNA, 15 bp, Homo sapiens
tggctaaaccaagtg

SEQ ID NO: 443896 - DNA, 15 bp, Homo sapiens
gtggctaaaccaagt

SEQ ID NO: 443897 - DNA, 15 bp, Homo sapiens
tgtggctaaaccaag

SEQ ID NO: 443898 - DNA, 15 bp, Homo sapiens
atgtggctaaaccaa

SEQ ID NO: 443899 - DNA, 15 bp, Homo sapiens
tatgtggctaaacca

SEQ ID NO: 443900 - DNA, 15 bp, Homo sapiens
ttatgtggctaaacc

SEQ ID NO: 443901 - DNA, 15 bp, Homo sapiens
gttatgtggctaaac

SEQ ID NO: 443902 - DNA, 15 bp, Homo sapiens
agttatgtggctaaa

SEQ ID NO: 443903 - DNA, 15 bp, Homo sapiens
aagttatgtggctaa

SEQ ID NO: 443904 - DNA, 15 bp, Homo sapiens
gaagttatgtggcta

SEQ ID NO: 443905 - DNA, 15 bp, Homo sapiens
agaagttatgtggct

SEQ ID NO: 443906 - DNA, 15 bp, Homo sapiens
aagaagttatgtggc

SEQ ID NO: 443907 - DNA, 15 bp, Homo sapiens
taagaagttatgtgg

SEQ ID NO: 443908 - DNA, 15 bp, Homo sapiens
ttaagaagttatgtg

SEQ ID NO: 443909 - DNA, 15 bp, Homo sapiens
gttaagaagttatgt

SEQ ID NO: 443910 - DNA, 15 bp, Homo sapiens
ggttaagaagttatg

SEQ ID NO: 443911 - DNA, 15 bp, Homo sapiens
aggttaagaagttat

SEQ ID NO: 443912 - DNA, 15 bp, Homo sapiens
aaggttaagaagtta

SEQ ID NO: 443913 - DNA, 15 bp, Homo sapiens
gaaggttaagaagtt

SEQ ID NO: 443914 - DNA, 15 bp, Homo sapiens
tgaaggttaagaagt

SEQ ID NO: 443915 - DNA, 15 bp, Homo sapiens
atgaaggttaagaag

SEQ ID NO: 443916 - DNA, 15 bp, Homo sapiens
catgaaggttaagaa

SEQ ID NO: 443917 - DNA, 15 bp, Homo sapiens
acatgaaggttaaga

SEQ ID NO: 443918 - DNA, 15 bp, Homo sapiens
cacatgaaggttaag

SEQ ID NO: 443919 - DNA, 15 bp, Homo sapiens
acacatgaaggttaa

SEQ ID NO: 443920 - DNA, 15 bp, Homo sapiens
gacacatgaaggtta

SEQ ID NO: 443921 - DNA, 15 bp, Homo sapiens
agacacatgaaggtt

SEQ ID NO: 443922 - DNA, 15 bp, Homo sapiens
cagacacatgaaggt

SEQ ID NO: 443923 - DNA, 15 bp, Homo sapiens
acagacacatgaagg

SEQ ID NO: 443924 - DNA, 15 bp, Homo sapiens
aacagacacatgaag

SEQ ID NO: 443925 - DNA, 15 bp, Homo sapiens
aaacagacacatgaa

SEQ ID NO: 443926 - DNA, 15 bp, Homo sapiens
aaaacagacacatga

SEQ ID NO: 443927 - DNA, 15 bp, Homo sapiens
taaaacagacacatg

SEQ ID NO: 443928 - DNA, 15 bp, Homo sapiens
ataaaacagacacat

SEQ ID NO: 443929 - DNA, 15 bp, Homo sapiens
tataaaacagacaca

SEQ ID NO: 443930 - DNA, 15 bp, Homo sapiens
ttataaaacagacac

SEQ ID NO: 443931 - DNA, 15 bp, Homo sapiens
cttataaaacagaca

SEQ ID NO: 443932 - DNA, 15 bp, Homo sapiens
ccttataaaacagac

SEQ ID NO: 443933 - DNA, 15 bp, Homo sapiens
accttataaaacaga

SEQ ID NO: 443934 - DNA, 15 bp, Homo sapiens
aaccttataaaacag

SEQ ID NO: 443935 - DNA, 15 bp, Homo sapiens
aaaccttataaaaca

SEQ ID NO: 443936 - DNA, 15 bp, Homo sapiens
gaaaccttataaaac

SEQ ID NO: 443937 - DNA, 15 bp, Homo sapiens
tgaaaccttataaaa

SEQ ID NO: 443938 - DNA, 15 bp, Homo sapiens
atgaaaccttataaa

SEQ ID NO: 443939 - DNA, 15 bp, Homo sapiens
aatgaaaccttataa

SEQ ID NO: 443940 - DNA, 15 bp, Homo sapiens
gaatgaaaccttata

SEQ ID NO: 443941 - DNA, 15 bp, Homo sapiens
agaatgaaaccttat

SEQ ID NO: 443942 - DNA, 15 bp, Homo sapiens
cagaatgaaacctta

SEQ ID NO: 443943 - DNA, 15 bp, Homo sapiens
gcagaatgaaacctt

SEQ ID NO: 443944 - DNA, 15 bp, Homo sapiens
agcagaatgaaacct

SEQ ID NO: 443945 - DNA, 15 bp, Homo sapiens
aagcagaatgaaacc

SEQ ID NO: 443946 - DNA, 15 bp, Homo sapiens
gaagcagaatgaaac

SEQ ID NO: 443947 - DNA, 15 bp, Homo sapiens
ggaagcagaatgaaa

SEQ ID NO: 443948 - DNA, 15 bp, Homo sapiens
tggaagcagaatgaa

SEQ ID NO: 443949 - DNA, 15 bp, Homo sapiens
ttggaagcagaatga

SEQ ID NO: 443950 - DNA, 15 bp, Homo sapiens
tttggaagcagaatg

SEQ ID NO: 443951 - DNA, 15 bp, Homo sapiens
ttttggaagcagaat

SEQ ID NO: 443952 - DNA, 15 bp, Homo sapiens
attttggaagcagaa

SEQ ID NO: 443953 - DNA, 15 bp, Homo sapiens
aattttggaagcaga

SEQ ID NO: 443954 - DNA, 15 bp, Homo sapiens
taattttggaagcag

SEQ ID NO: 443955 - DNA, 15 bp, Homo sapiens
ataattttggaagca

SEQ ID NO: 443956 - DNA, 15 bp, Homo sapiens
tataattttggaagc

SEQ ID NO: 443957 - DNA, 15 bp, Homo sapiens
gtataattttggaag

SEQ ID NO: 443958 - DNA, 15 bp, Homo sapiens
ggtataattttggaa

SEQ ID NO: 443959 - DNA, 15 bp, Homo sapiens
tggtataattttgga

SEQ ID NO: 443960 - DNA, 15 bp, Homo sapiens
ttggtataattttgg

SEQ ID NO: 443961 - DNA, 15 bp, Homo sapiens
tttggtataattttg

SEQ ID NO: 443962 - DNA, 15 bp, Homo sapiens
atttggtataatttt

SEQ ID NO: 443963 - DNA, 15 bp, Homo sapiens
aatttggtataattt

SEQ ID NO: 443964 - DNA, 15 bp, Homo sapiens
taatttggtataatt

SEQ ID NO: 443965 - DNA, 15 bp, Homo sapiens
ataatttggtataat

SEQ ID NO: 443966 - DNA, 15 bp, Homo sapiens
aataatttggtataa

SEQ ID NO: 443967 - DNA, 15 bp, Homo sapiens
caataatttggtata

SEQ ID NO: 443968 - DNA, 15 bp, Homo sapiens
acaataatttggtat

SEQ ID NO: 443969 - DNA, 15 bp, Homo sapiens
cacaataatttggta

SEQ ID NO: 443970 - DNA, 15 bp, Homo sapiens
acacaataatttggt

SEQ ID NO: 443971 - DNA, 15 bp, Homo sapiens
gacacaataatttgg

SEQ ID NO: 443972 - DNA, 15 bp, Homo sapiens
agacacaataatttg

SEQ ID NO: 443973 - DNA, 15 bp, Homo sapiens
aagacacaataattt

SEQ ID NO: 443974 - DNA, 15 bp, Homo sapiens
gaagacacaataatt

SEQ ID NO: 443975 - DNA, 15 bp, Homo sapiens
agaagacacaataat

SEQ ID NO: 443976 - DNA, 15 bp, Homo sapiens
tagaagacacaataa

SEQ ID NO: 443977 - DNA, 15 bp, Homo sapiens
gtagaagacacaata

SEQ ID NO: 443978 - DNA, 15 bp, Homo sapiens
tgtagaagacacaat

SEQ ID NO: 443979 - DNA, 15 bp, Homo sapiens
atgtagaagacacaa

SEQ ID NO: 443980 - DNA, 15 bp, Homo sapiens
aatgtagaagacaca

SEQ ID NO: 443981 - DNA, 15 bp, Homo sapiens
aaatgtagaagacac

SEQ ID NO: 443982 - DNA, 15 bp, Homo sapiens
aaaatgtagaagaca

SEQ ID NO: 443983 - DNA, 15 bp, Homo sapiens
gaaaatgtagaagac

SEQ ID NO: 443984 - DNA, 15 bp, Homo sapiens
ggaaaatgtagaaga

SEQ ID NO: 443985 - DNA, 15 bp, Homo sapiens
aggaaaatgtagaag

SEQ ID NO: 443986 - DNA, 15 bp, Homo sapiens
aaggaaaatgtagaa

SEQ ID NO: 443987 - DNA, 15 bp, Homo sapiens
aaaggaaaatgtaga

SEQ ID NO: 443988 - DNA, 15 bp, Homo sapiens
taaaggaaaatgtag

SEQ ID NO: 443989 - DNA, 15 bp, Homo sapiens
ataaaggaaaatgta

SEQ ID NO: 443990 - DNA, 15 bp, Homo sapiens
cataaaggaaaatgt

SEQ ID NO: 443991 - DNA, 15 bp, Homo sapiens
gcataaaggaaaatg

SEQ ID NO: 443992 - DNA, 15 bp, Homo sapiens
agcataaaggaaaat

SEQ ID NO: 443993 - DNA, 15 bp, Homo sapiens
cagcataaaggaaaa

SEQ ID NO: 443994 - DNA, 15 bp, Homo sapiens
acagcataaaggaaa

SEQ ID NO: 443995 - DNA, 15 bp, Homo sapiens
aacagcataaaggaa

SEQ ID NO: 443996 - DNA, 15 bp, Homo sapiens
aaacagcataaagga

SEQ ID NO: 443997 - DNA, 15 bp, Homo sapiens
caaacagcataaagg

SEQ ID NO: 443998 - DNA, 15 bp, Homo sapiens
tcaaacagcataaag

SEQ ID NO: 443999 - DNA, 15 bp, Homo sapiens
ctcaaacagcataaa

SEQ ID NO: 444000 - DNA, 15 bp, Homo sapiens
actcaaacagcataa

SEQ ID NO: 444001 - DNA, 15 bp, Homo sapiens
gactcaaacagcata

SEQ ID NO: 444002 - DNA, 15 bp, Homo sapiens
agactcaaacagcat

SEQ ID NO: 444003 - DNA, 15 bp, Homo sapiens
aagactcaaacagca

SEQ ID NO: 444004 - DNA, 15 bp, Homo sapiens
taagactcaaacagc

SEQ ID NO: 444005 - DNA, 15 bp, Homo sapiens
ataagactcaaacag

SEQ ID NO: 444006 - DNA, 15 bp, Homo sapiens
cataagactcaaaca

SEQ ID NO: 444007 - DNA, 15 bp, Homo sapiens
acataagactcaaac

SEQ ID NO: 444008 - DNA, 15 bp, Homo sapiens
tacataagactcaaa

SEQ ID NO: 444009 - DNA, 15 bp, Homo sapiens
atacataagactcaa

SEQ ID NO: 444010 - DNA, 15 bp, Homo sapiens
aatacataagactca

SEQ ID NO: 444011 - DNA, 15 bp, Homo sapiens
aaatacataagactc

SEQ ID NO: 444012 - DNA, 15 bp, Homo sapiens
gaaatacataagact

SEQ ID NO: 444013 - DNA, 15 bp, Homo sapiens
agaaatacataagac

SEQ ID NO: 444014 - DNA, 15 bp, Homo sapiens
aagaaatacataaga

SEQ ID NO: 444015 - DNA, 15 bp, Homo sapiens
aaagaaatacataag

SEQ ID NO: 444016 - DNA, 15 bp, Homo sapiens
caaagaaatacataa

SEQ ID NO: 444017 - DNA, 15 bp, Homo sapiens
tcaaagaaatacata

SEQ ID NO: 444018 - DNA, 15 bp, Homo sapiens
atcaaagaaatacat

SEQ ID NO: 444019 - DNA, 15 bp, Homo sapiens
aatcaaagaaataca

SEQ ID NO: 444020 - DNA, 15 bp, Homo sapiens
taatcaaagaaatac

SEQ ID NO: 444021 - DNA, 15 bp, Homo sapiens
ctaatcaaagaaata

SEQ ID NO: 444022 - DNA, 15 bp, Homo sapiens
tctaatcaaagaaat

SEQ ID NO: 444023 - DNA, 15 bp, Homo sapiens
ctctaatcaaagaaa

SEQ ID NO: 444024 - DNA, 15 bp, Homo sapiens
tccagccttcagcac

SEQ ID NO: 444025 - DNA, 15 bp, Homo sapiens
atccagccttcagca

SEQ ID NO: 444026 - DNA, 15 bp, Homo sapiens
catccagccttcagc

SEQ ID NO: 444027 - DNA, 15 bp, Homo sapiens
ccatccagccttcag

SEQ ID NO: 444028 - DNA, 15 bp, Homo sapiens
tccatccagccttca

SEQ ID NO: 444029 - DNA, 15 bp, Homo sapiens
ctccatccagccttc

SEQ ID NO: 444030 - DNA, 15 bp, Homo sapiens
tctccatccagcctt

SEQ ID NO: 444031 - DNA, 15 bp, Homo sapiens
gtctccatccagcct

SEQ ID NO: 444032 - DNA, 15 bp, Homo sapiens
agtctccatccagcc

SEQ ID NO: 444033 - DNA, 15 bp, Homo sapiens
aagtctccatccagc

SEQ ID NO: 444034 - DNA, 15 bp, Homo sapiens
caagtctccatccag

SEQ ID NO: 444035 - DNA, 15 bp, Homo sapiens
gcaagtctccatcca

SEQ ID NO: 444036 - DNA, 15 bp, Homo sapiens
cgcaagtctccatcc

SEQ ID NO: 444037 - DNA, 15 bp, Homo sapiens
tcgcaagtctccatc

SEQ ID NO: 444038 - DNA, 15 bp, Homo sapiens
gtcgcaagtctccat

SEQ ID NO: 444039 - DNA, 15 bp, Homo sapiens
ggtcgcaagtctcca

SEQ ID NO: 444040 - DNA, 15 bp, Homo sapiens
tggtcgcaagtctcc

SEQ ID NO: 444041 - DNA, 15 bp, Homo sapiens
ctggtcgcaagtctc

SEQ ID NO: 444042 - DNA, 15 bp, Homo sapiens
gctggtcgcaagtct

SEQ ID NO: 444043 - DNA, 15 bp, Homo sapiens
tgctggtcgcaagtc

SEQ ID NO: 444044 - DNA, 15 bp, Homo sapiens
ctgctggtcgcaagt

SEQ ID NO: 444045 - DNA, 15 bp, Homo sapiens
tctgctggtcgcaag

SEQ ID NO: 444046 - DNA, 15 bp, Homo sapiens
atctgctggtcgcaa

SEQ ID NO: 444047 - DNA, 15 bp, Homo sapiens
catctgctggtcgca

SEQ ID NO: 444048 - DNA, 15 bp, Homo sapiens
ccatctgctggtcgc

SEQ ID NO: 444049 - DNA, 15 bp, Homo sapiens
cccatctgctggtcg

SEQ ID NO: 444050 - DNA, 15 bp, Homo sapiens
gcccatctgctggtc

SEQ ID NO: 444051 - DNA, 15 bp, Homo sapiens
ggcccatctgctggt

SEQ ID NO: 444052 - DNA, 15 bp, Homo sapiens
aggcccatctgctgg

SEQ ID NO: 444053 - DNA, 15 bp, Homo sapiens
gaggcccatctgctg

SEQ ID NO: 444054 - DNA, 15 bp, Homo sapiens
ggaggcccatctgct

SEQ ID NO: 444055 - DNA, 15 bp, Homo sapiens
tggaggcccatctgc

SEQ ID NO: 444056 - DNA, 15 bp, Homo sapiens
ttggaggcccatctg

SEQ ID NO: 444057 - DNA, 15 bp, Homo sapiens
tttggaggcccatct

SEQ ID NO: 444058 - DNA, 15 bp, Homo sapiens
ctttggaggcccatc

SEQ ID NO: 444059 - DNA, 15 bp, Homo sapiens
cctttggaggcccat

SEQ ID NO: 444060 - DNA, 15 bp, Homo sapiens
gcctttggaggccca

SEQ ID NO: 444061 - DNA, 15 bp, Homo sapiens
agcctttggaggccc

SEQ ID NO: 444062 - DNA, 15 bp, Homo sapiens
cagcctttggaggcc

SEQ ID NO: 444063 - DNA, 15 bp, Homo sapiens
ccagcctttggaggc

SEQ ID NO: 444064 - DNA, 15 bp, Homo sapiens
cccagcctttggagg

SEQ ID NO: 444065 - DNA, 15 bp, Homo sapiens
acccagcctttggag

SEQ ID NO: 444066 - DNA, 15 bp, Homo sapiens
gacccagcctttgga

SEQ ID NO: 444067 - DNA, 15 bp, Homo sapiens
tgacccagcctttgg

SEQ ID NO: 444068 - DNA, 15 bp, Homo sapiens
ctgacccagcctttg

SEQ ID NO: 444069 - DNA, 15 bp, Homo sapiens
tctgacccagccttt

SEQ ID NO: 444070 - DNA, 15 bp, Homo sapiens
atctgacccagcctt

SEQ ID NO: 444071 - DNA, 15 bp, Homo sapiens
catctgacccagcct

SEQ ID NO: 444072 - DNA, 15 bp, Homo sapiens
acatctgacccagcc

SEQ ID NO: 444073 - DNA, 15 bp, Homo sapiens
aacatctgacccagc

SEQ ID NO: 444074 - DNA, 15 bp, Homo sapiens
caacatctgacccag

SEQ ID NO: 444075 - DNA, 15 bp, Homo sapiens
ccaacatctgaccca

SEQ ID NO: 444076 - DNA, 15 bp, Homo sapiens
gccaacatctgaccc

SEQ ID NO: 444077 - DNA, 15 bp, Homo sapiens
agccaacatctgacc

SEQ ID NO: 444078 - DNA, 15 bp, Homo sapiens
tagccaacatctgac

SEQ ID NO: 444079 - DNA, 15 bp, Homo sapiens
atagccaacatctga

SEQ ID NO: 444080 - DNA, 15 bp, Homo sapiens
catagccaacatctg

SEQ ID NO: 444081 - DNA, 15 bp, Homo sapiens
ccatagccaacatct

SEQ ID NO: 444082 - DNA, 15 bp, Homo sapiens
accatagccaacatc

SEQ ID NO: 444083 - DNA, 15 bp, Homo sapiens
aaccatagccaacat

SEQ ID NO: 444084 - DNA, 15 bp, Homo sapiens
aaaccatagccaaca

SEQ ID NO: 444085 - DNA, 15 bp, Homo sapiens
caaaccatagccaac

SEQ ID NO: 444086 - DNA, 15 bp, Homo sapiens
acaaaccatagccaa

SEQ ID NO: 444087 - DNA, 15 bp, Homo sapiens
gacaaaccatagcca

SEQ ID NO: 444088 - DNA, 15 bp, Homo sapiens
tgacaaaccatagcc

SEQ ID NO: 444089 - DNA, 15 bp, Homo sapiens
ctgacaaaccatagc

SEQ ID NO: 444090 - DNA, 15 bp, Homo sapiens
cctgacaaaccatag

SEQ ID NO: 444091 - DNA, 15 bp, Homo sapiens
acctgacaaaccata

SEQ ID NO: 444092 - DNA, 15 bp, Homo sapiens
cacctgacaaaccat

SEQ ID NO: 444093 - DNA, 15 bp, Homo sapiens
acacctgacaaacca

SEQ ID NO: 444094 - DNA, 15 bp, Homo sapiens
cacacctgacaaacc

SEQ ID NO: 444095 - DNA, 15 bp, Homo sapiens
gcacacctgacaaac

SEQ ID NO: 444096 - DNA, 15 bp, Homo sapiens
agcacacctgacaaa

SEQ ID NO: 444097 - DNA, 15 bp, Homo sapiens
tagcacacctgacaa

SEQ ID NO: 444098 - DNA, 15 bp, Homo sapiens
atagcacacctgaca

SEQ ID NO: 444099 - DNA, 15 bp, Homo sapiens
aatagcacacctgac

SEQ ID NO: 444100 - DNA, 15 bp, Homo sapiens
aaatagcacacctga

SEQ ID NO: 444101 - DNA, 15 bp, Homo sapiens
aaaatagcacacctg

SEQ ID NO: 444102 - DNA, 15 bp, Homo sapiens
aaaaatagcacacct

SEQ ID NO: 444103 - DNA, 15 bp, Homo sapiens
aaaaaatagcacacc

SEQ ID NO: 444104 - DNA, 15 bp, Homo sapiens
gaaaaaatagcacac

SEQ ID NO: 444105 - DNA, 15 bp, Homo sapiens
tgaaaaaatagcaca

SEQ ID NO: 444106 - DNA, 15 bp, Homo sapiens
atgaaaaaatagcac

SEQ ID NO: 444107 - DNA, 15 bp, Homo sapiens
aatgaaaaaatagca

SEQ ID NO: 444108 - DNA, 15 bp, Homo sapiens
aaatgaaaaaatagc

SEQ ID NO: 444109 - DNA, 15 bp, Homo sapiens
gaaatgaaaaaatag

SEQ ID NO: 444110 - DNA, 15 bp, Homo sapiens
ggaaatgaaaaaata

SEQ ID NO: 444111 - DNA, 15 bp, Homo sapiens
gggaaatgaaaaaat

SEQ ID NO: 444112 - DNA, 15 bp, Homo sapiens
tgggaaatgaaaaaa

SEQ ID NO: 444113 - DNA, 15 bp, Homo sapiens
atgggaaatgaaaaa

SEQ ID NO: 444114 - DNA, 15 bp, Homo sapiens
tatgggaaatgaaaa

SEQ ID NO: 444115 - DNA, 15 bp, Homo sapiens
ctatgggaaatgaaa

SEQ ID NO: 444116 - DNA, 15 bp, Homo sapiens
cctatgggaaatgaa

SEQ ID NO: 444117 - DNA, 15 bp, Homo sapiens
gcctatgggaaatga

SEQ ID NO: 444118 - DNA, 15 bp, Homo sapiens
agcctatgggaaatg

SEQ ID NO: 444119 - DNA, 15 bp, Homo sapiens
aagcctatgggaaat

SEQ ID NO: 444120 - DNA, 15 bp, Homo sapiens
gaagcctatgggaaa

SEQ ID NO: 444121 - DNA, 15 bp, Homo sapiens
ggaagcctatgggaa

SEQ ID NO: 444122 - DNA, 15 bp, Homo sapiens
tggaagcctatggga

SEQ ID NO: 444123 - DNA, 15 bp, Homo sapiens
ttggaagcctatggg

SEQ ID NO: 444124 - DNA, 15 bp, Homo sapiens
gttggaagcctatgg

SEQ ID NO: 444125 - DNA, 15 bp, Homo sapiens
agttggaagcctatg

SEQ ID NO: 444126 - DNA, 15 bp, Homo sapiens
gagttggaagcctat

SEQ ID NO: 444127 - DNA, 15 bp, Homo sapiens
agagttggaagccta

SEQ ID NO: 444128 - DNA, 15 bp, Homo sapiens
aagagttggaagcct

SEQ ID NO: 444129 - DNA, 15 bp, Homo sapiens
aaagagttggaagcc

SEQ ID NO: 444130 - DNA, 15 bp, Homo sapiens
gaaagagttggaagc

SEQ ID NO: 444131 - DNA, 15 bp, Homo sapiens
ggaaagagttggaag

SEQ ID NO: 444132 - DNA, 15 bp, Homo sapiens
gggaaagagttggaa

SEQ ID NO: 444133 - DNA, 15 bp, Homo sapiens
tgggaaagagttgga

SEQ ID NO: 444134 - DNA, 15 bp, Homo sapiens
ttgggaaagagttgg

SEQ ID NO: 444135 - DNA, 15 bp, Homo sapiens
cttgggaaagagttg

SEQ ID NO: 444136 - DNA, 15 bp, Homo sapiens
gcttgggaaagagtt

SEQ ID NO: 444137 - DNA, 15 bp, Homo sapiens
agcttgggaaagagt

SEQ ID NO: 444138 - DNA, 15 bp, Homo sapiens
gagcttgggaaagag

SEQ ID NO: 444139 - DNA, 15 bp, Homo sapiens
agagcttgggaaaga

SEQ ID NO: 444140 - DNA, 15 bp, Homo sapiens
cagagcttgggaaag

SEQ ID NO: 444141 - DNA, 15 bp, Homo sapiens
ccagagcttgggaaa

SEQ ID NO: 444142 - DNA, 15 bp, Homo sapiens
tccagagcttgggaa

SEQ ID NO: 444143 - DNA, 15 bp, Homo sapiens
ctccagagcttggga

SEQ ID NO: 444144 - DNA, 15 bp, Homo sapiens
actccagagcttggg

SEQ ID NO: 444145 - DNA, 15 bp, Homo sapiens
gactccagagcttgg

SEQ ID NO: 444146 - DNA, 15 bp, Homo sapiens
tgactccagagcttg

SEQ ID NO: 444147 - DNA, 15 bp, Homo sapiens
ctgactccagagctt

SEQ ID NO: 444148 - DNA, 15 bp, Homo sapiens
actgactccagagct

SEQ ID NO: 444149 - DNA, 15 bp, Homo sapiens
cactgactccagagc

SEQ ID NO: 444150 - DNA, 15 bp, Homo sapiens
gcactgactccagag

SEQ ID NO: 444151 - DNA, 15 bp, Homo sapiens
ggcactgactccaga

SEQ ID NO: 444152 - DNA, 15 bp, Homo sapiens
tggcactgactccag

SEQ ID NO: 444153 - DNA, 15 bp, Homo sapiens
gtggcactgactcca

SEQ ID NO: 444154 - DNA, 15 bp, Homo sapiens
ggtggcactgactcc

SEQ ID NO: 444155 - DNA, 15 bp, Homo sapiens
tggtggcactgactc

SEQ ID NO: 444156 - DNA, 15 bp, Homo sapiens
atggtggcactgact

SEQ ID NO: 444157 - DNA, 15 bp, Homo sapiens
tatggtggcactgac

SEQ ID NO: 444158 - DNA, 15 bp, Homo sapiens
ttatggtggcactga

SEQ ID NO: 444159 - DNA, 15 bp, Homo sapiens
tttatggtggcactg

SEQ ID NO: 444160 - DNA, 15 bp, Homo sapiens
ctttatggtggcact

SEQ ID NO: 444161 - DNA, 15 bp, Homo sapiens
tctttatggtggcac

SEQ ID NO: 444162 - DNA, 15 bp, Homo sapiens
gtctttatggtggca

SEQ ID NO: 444163 - DNA, 15 bp, Homo sapiens
ggtctttatggtggc

SEQ ID NO: 444164 - DNA, 15 bp, Homo sapiens
aggtctttatggtgg

SEQ ID NO: 444165 - DNA, 15 bp, Homo sapiens
gaggtctttatggtg

SEQ ID NO: 444166 - DNA, 15 bp, Homo sapiens
ggaggtctttatggt

SEQ ID NO: 444167 - DNA, 15 bp, Homo sapiens
gggaggtctttatgg

SEQ ID NO: 444168 - DNA, 15 bp, Homo sapiens
ggggaggtctttatg

SEQ ID NO: 444169 - DNA, 15 bp, Homo sapiens
aggggaggtctttat

SEQ ID NO: 444170 - DNA, 15 bp, Homo sapiens
caggggaggtcttta

SEQ ID NO: 444171 - DNA, 15 bp, Homo sapiens
tcaggggaggtcttt

SEQ ID NO: 444172 - DNA, 15 bp, Homo sapiens
ctcaggggaggtctt

SEQ ID NO: 444173 - DNA, 15 bp, Homo sapiens
tctcaggggaggtct

SEQ ID NO: 444174 - DNA, 15 bp, Homo sapiens
ctctcaggggaggtc

SEQ ID NO: 444175 - DNA, 15 bp, Homo sapiens
actctcaggggaggt

SEQ ID NO: 444176 - DNA, 15 bp, Homo sapiens
cactctcaggggagg

SEQ ID NO: 444177 - DNA, 15 bp, Homo sapiens
gcactctcaggggag

SEQ ID NO: 444178 - DNA, 15 bp, Homo sapiens
tgcactctcagggga

SEQ ID NO: 444179 - DNA, 15 bp, Homo sapiens
ctgcactctcagggg

SEQ ID NO: 444180 - DNA, 15 bp, Homo sapiens
actgcactctcaggg

SEQ ID NO: 444181 - DNA, 15 bp, Homo sapiens
aactgcactctcagg

SEQ ID NO: 444182 - DNA, 15 bp, Homo sapiens
aaactgcactctcag

SEQ ID NO: 444183 - DNA, 15 bp, Homo sapiens
taaactgcactctca

SEQ ID NO: 444184 - DNA, 15 bp, Homo sapiens
gtaaactgcactctc

SEQ ID NO: 444185 - DNA, 15 bp, Homo sapiens
agtaaactgcactct

SEQ ID NO: 444186 - DNA, 15 bp, Homo sapiens
gagtaaactgcactc

SEQ ID NO: 444187 - DNA, 15 bp, Homo sapiens
ggagtaaactgcact

SEQ ID NO: 444188 - DNA, 15 bp, Homo sapiens
tggagtaaactgcac

SEQ ID NO: 444189 - DNA, 15 bp, Homo sapiens
ctggagtaaactgca

SEQ ID NO: 444190 - DNA, 15 bp, Homo sapiens
gctggagtaaactgc

SEQ ID NO: 444191 - DNA, 15 bp, Homo sapiens
ggctggagtaaactg

SEQ ID NO: 444192 - DNA, 15 bp, Homo sapiens
gggctggagtaaact

SEQ ID NO: 444193 - DNA, 15 bp, Homo sapiens
agggctggagtaaac

SEQ ID NO: 444194 - DNA, 15 bp, Homo sapiens
cagggctggagtaaa

SEQ ID NO: 444195 - DNA, 15 bp, Homo sapiens
tcagggctggagtaa

SEQ ID NO: 444196 - DNA, 15 bp, Homo sapiens
atcagggctggagta

SEQ ID NO: 444197 - DNA, 15 bp, Homo sapiens
tatcagggctggagt

SEQ ID NO: 444198 - DNA, 15 bp, Homo sapiens
atatcagggctggag

SEQ ID NO: 444199 - DNA, 15 bp, Homo sapiens
aatatcagggctgga

SEQ ID NO: 444200 - DNA, 15 bp, Homo sapiens
aaatatcagggctgg

SEQ ID NO: 444201 - DNA, 15 bp, Homo sapiens
gaaatatcagggctg

SEQ ID NO: 444202 - DNA, 15 bp, Homo sapiens
ggaaatatcagggct

SEQ ID NO: 444203 - DNA, 15 bp, Homo sapiens
gggaaatatcagggc

SEQ ID NO: 444204 - DNA, 15 bp, Homo sapiens
agggaaatatcaggg

SEQ ID NO: 444205 - DNA, 15 bp, Homo sapiens
aagggaaatatcagg

SEQ ID NO: 444206 - DNA, 15 bp, Homo sapiens
aaagggaaatatcag

SEQ ID NO: 444207 - DNA, 15 bp, Homo sapiens
aaaagggaaatatca

SEQ ID NO: 444208 - DNA, 15 bp, Homo sapiens
caaaagggaaatatc

SEQ ID NO: 444209 - DNA, 15 bp, Homo sapiens
ccaaaagggaaatat

SEQ ID NO: 444210 - DNA, 15 bp, Homo sapiens
accaaaagggaaata

SEQ ID NO: 444211 - DNA, 15 bp, Homo sapiens
gaccaaaagggaaat

SEQ ID NO: 444212 - DNA, 15 bp, Homo sapiens
agaccaaaagggaaa

SEQ ID NO: 444213 - DNA, 15 bp, Homo sapiens
aagaccaaaagggaa

SEQ ID NO: 444214 - DNA, 15 bp, Homo sapiens
gaagaccaaaaggga

SEQ ID NO: 444215 - DNA, 15 bp, Homo sapiens
agaagaccaaaaggg

SEQ ID NO: 444216 - DNA, 15 bp, Homo sapiens
gagaagaccaaaagg

SEQ ID NO: 444217 - DNA, 15 bp, Homo sapiens
ggagaagaccaaaag

SEQ ID NO: 444218 - DNA, 15 bp, Homo sapiens
tggagaagaccaaaa

SEQ ID NO: 444219 - DNA, 15 bp, Homo sapiens
gtggagaagaccaaa

SEQ ID NO: 444220 - DNA, 15 bp, Homo sapiens
tgtggagaagaccaa

SEQ ID NO: 444221 - DNA, 15 bp, Homo sapiens
ctgtggagaagacca

SEQ ID NO: 444222 - DNA, 15 bp, Homo sapiens
gctgtggagaagacc

SEQ ID NO: 444223 - DNA, 15 bp, Homo sapiens
agctgtggagaagac

SEQ ID NO: 444224 - DNA, 15 bp, Homo sapiens
aagctgtggagaaga

SEQ ID NO: 444225 - DNA, 15 bp, Homo sapiens
aaagctgtggagaag

SEQ ID NO: 444226 - DNA, 15 bp, Homo sapiens
gaaagctgtggagaa

SEQ ID NO: 444227 - DNA, 15 bp, Homo sapiens
ggaaagctgtggaga

SEQ ID NO: 444228 - DNA, 15 bp, Homo sapiens
tggaaagctgtggag

SEQ ID NO: 444229 - DNA, 15 bp, Homo sapiens
atggaaagctgtgga

SEQ ID NO: 444230 - DNA, 15 bp, Homo sapiens
catggaaagctgtgg

SEQ ID NO: 444231 - DNA, 15 bp, Homo sapiens
tcatggaaagctgtg

SEQ ID NO: 444232 - DNA, 15 bp, Homo sapiens
ttcatggaaagctgt

SEQ ID NO: 444233 - DNA, 15 bp, Homo sapiens
cttcatggaaagctg

SEQ ID NO: 444234 - DNA, 15 bp, Homo sapiens
acttcatggaaagct

SEQ ID NO: 444235 - DNA, 15 bp, Homo sapiens
gacttcatggaaagc

SEQ ID NO: 444236 - DNA, 15 bp, Homo sapiens
agacttcatggaaag

SEQ ID NO: 444237 - DNA, 15 bp, Homo sapiens
gagacttcatggaaa

SEQ ID NO: 444238 - DNA, 15 bp, Homo sapiens
tgagacttcatggaa

SEQ ID NO: 444239 - DNA, 15 bp, Homo sapiens
ctgagacttcatgga

SEQ ID NO: 444240 - DNA, 15 bp, Homo sapiens
actgagacttcatgg

SEQ ID NO: 444241 - DNA, 15 bp, Homo sapiens
aactgagacttcatg

SEQ ID NO: 444242 - DNA, 15 bp, Homo sapiens
aaactgagacttcat

SEQ ID NO: 444243 - DNA, 15 bp, Homo sapiens
taaactgagacttca

SEQ ID NO: 444244 - DNA, 15 bp, Homo sapiens
gtaaactgagacttc

SEQ ID NO: 444245 - DNA, 15 bp, Homo sapiens
ggtaaactgagactt

SEQ ID NO: 444246 - DNA, 15 bp, Homo sapiens
gggtaaactgagact

SEQ ID NO: 444247 - DNA, 15 bp, Homo sapiens
tgggtaaactgagac

SEQ ID NO: 444248 - DNA, 15 bp, Homo sapiens
ttgggtaaactgaga

SEQ ID NO: 444249 - DNA, 15 bp, Homo sapiens
tttgggtaaactgag

SEQ ID NO: 444250 - DNA, 15 bp, Homo sapiens
ctttgggtaaactga

SEQ ID NO: 444251 - DNA, 15 bp, Homo sapiens
tctttgggtaaactg

SEQ ID NO: 444252 - DNA, 15 bp, Homo sapiens
ttctttgggtaaact

SEQ ID NO: 444253 - DNA, 15 bp, Homo sapiens
cttctttgggtaaac

SEQ ID NO: 444254 - DNA, 15 bp, Homo sapiens
ccttctttgggtaaa

SEQ ID NO: 444255 - DNA, 15 bp, Homo sapiens
tccttctttgggtaa

SEQ ID NO: 444256 - DNA, 15 bp, Homo sapiens
ctccttctttgggta

SEQ ID NO: 444257 - DNA, 15 bp, Homo sapiens
gctccttctttgggt

SEQ ID NO: 444258 - DNA, 15 bp, Homo sapiens
agctccttctttggg

SEQ ID NO: 444259 - DNA, 15 bp, Homo sapiens
aagctccttctttgg

SEQ ID NO: 444260 - DNA, 15 bp, Homo sapiens
gaagctccttctttg

SEQ ID NO: 444261 - DNA, 15 bp, Homo sapiens
ggaagctccttcttt

SEQ ID NO: 444262 - DNA, 15 bp, Homo sapiens
gggaagctccttctt

SEQ ID NO: 444263 - DNA, 15 bp, Homo sapiens
agggaagctccttct

SEQ ID NO: 444264 - DNA, 15 bp, Homo sapiens
aagggaagctccttc

SEQ ID NO: 444265 - DNA, 15 bp, Homo sapiens
gaagggaagctcctt

SEQ ID NO: 444266 - DNA, 15 bp, Homo sapiens
agaagggaagctcct

SEQ ID NO: 444267 - DNA, 15 bp, Homo sapiens
aagaagggaagctcc

SEQ ID NO: 444268 - DNA, 15 bp, Homo sapiens
aaagaagggaagctc

SEQ ID NO: 444269 - DNA, 15 bp, Homo sapiens
taaagaagggaagct

SEQ ID NO: 444270 - DNA, 15 bp, Homo sapiens
ataaagaagggaagc

SEQ ID NO: 444271 - DNA, 15 bp, Homo sapiens
aataaagaagggaag

SEQ ID NO: 444272 - DNA, 15 bp, Homo sapiens
gaataaagaagggaa

SEQ ID NO: 444273 - DNA, 15 bp, Homo sapiens
agaataaagaaggga

SEQ ID NO: 444274 - DNA, 15 bp, Homo sapiens
gagaataaagaaggg

SEQ ID NO: 444275 - DNA, 15 bp, Homo sapiens
agagaataaagaagg

SEQ ID NO: 444276 - DNA, 15 bp, Homo sapiens
aagagaataaagaag

SEQ ID NO: 444277 - DNA, 15 bp, Homo sapiens
aaagagaataaagaa

SEQ ID NO: 444278 - DNA, 15 bp, Homo sapiens
taaagagaataaaga

SEQ ID NO: 444279 - DNA, 15 bp, Homo sapiens
gtaaagagaataaag

SEQ ID NO: 444280 - DNA, 15 bp, Homo sapiens
agtaaagagaataaa

SEQ ID NO: 444281 - DNA, 15 bp, Homo sapiens
cagtaaagagaataa

SEQ ID NO: 444282 - DNA, 15 bp, Homo sapiens
gcagtaaagagaata

SEQ ID NO: 444283 - DNA, 15 bp, Homo sapiens
agcagtaaagagaat

SEQ ID NO: 444284 - DNA, 15 bp, Homo sapiens
cagcagtaaagagaa

SEQ ID NO: 444285 - DNA, 15 bp, Homo sapiens
ccagcagtaaagaga

SEQ ID NO: 444286 - DNA, 15 bp, Homo sapiens
tccagcagtaaagag

SEQ ID NO: 444287 - DNA, 15 bp, Homo sapiens
atccagcagtaaaga

SEQ ID NO: 444288 - DNA, 15 bp, Homo sapiens
aatccagcagtaaag

SEQ ID NO: 444289 - DNA, 15 bp, Homo sapiens
taatccagcagtaaa

SEQ ID NO: 444290 - DNA, 15 bp, Homo sapiens
ataatccagcagtaa

SEQ ID NO: 444291 - DNA, 15 bp, Homo sapiens
cataatccagcagta

SEQ ID NO: 444292 - DNA, 15 bp, Homo sapiens
acataatccagcagt

SEQ ID NO: 444293 - DNA, 15 bp, Homo sapiens
aacataatccagcag

SEQ ID NO: 444294 - DNA, 15 bp, Homo sapiens
gaacataatccagca

SEQ ID NO: 444295 - DNA, 15 bp, Homo sapiens
ggaacataatccagc

SEQ ID NO: 444296 - DNA, 15 bp, Homo sapiens
aggaacataatccag

SEQ ID NO: 444297 - DNA, 15 bp, Homo sapiens
aaggaacataatcca

SEQ ID NO: 444298 - DNA, 15 bp, Homo sapiens
gaaggaacataatcc

SEQ ID NO: 444299 - DNA, 15 bp, Homo sapiens
tgaaggaacataatc

SEQ ID NO: 444300 - DNA, 15 bp, Homo sapiens
gtgaaggaacataat

SEQ ID NO: 444301 - DNA, 15 bp, Homo sapiens
tgtgaaggaacataa

SEQ ID NO: 444302 - DNA, 15 bp, Homo sapiens
ctgtgaaggaacata

SEQ ID NO: 444303 - DNA, 15 bp, Homo sapiens
gctgtgaaggaacat

SEQ ID NO: 444304 - DNA, 15 bp, Homo sapiens
ggctgtgaaggaaca

SEQ ID NO: 444305 - DNA, 15 bp, Homo sapiens
tggctgtgaaggaac

SEQ ID NO: 444306 - DNA, 15 bp, Homo sapiens
atggctgtgaaggaa

SEQ ID NO: 444307 - DNA, 15 bp, Homo sapiens
catggctgtgaagga

SEQ ID NO: 444308 - DNA, 15 bp, Homo sapiens
gcatggctgtgaagg

SEQ ID NO: 444309 - DNA, 15 bp, Homo sapiens
agcatggctgtgaag

SEQ ID NO: 444310 - DNA, 15 bp, Homo sapiens
cagcatggctgtgaa

SEQ ID NO: 444311 - DNA, 15 bp, Homo sapiens
ccagcatggctgtga

SEQ ID NO: 444312 - DNA, 15 bp, Homo sapiens
gccagcatggctgtg

SEQ ID NO: 444313 - DNA, 15 bp, Homo sapiens
ggccagcatggctgt

SEQ ID NO: 444314 - DNA, 15 bp, Homo sapiens
gggccagcatggctg

SEQ ID NO: 444315 - DNA, 15 bp, Homo sapiens
agggccagcatggct

SEQ ID NO: 444316 - DNA, 15 bp, Homo sapiens
gagggccagcatggc

SEQ ID NO: 444317 - DNA, 15 bp, Homo sapiens
ggagggccagcatgg

SEQ ID NO: 444318 - DNA, 15 bp, Homo sapiens
aggagggccagcatg

SEQ ID NO: 444319 - DNA, 15 bp, Homo sapiens
caggagggccagcat

SEQ ID NO: 444320 - DNA, 15 bp, Homo sapiens
tcaggagggccagca

SEQ ID NO: 444321 - DNA, 15 bp, Homo sapiens
gtcaggagggccagc

SEQ ID NO: 444322 - DNA, 15 bp, Homo sapiens
tgtcaggagggccag

SEQ ID NO: 444323 - DNA, 15 bp, Homo sapiens
gtgtcaggagggcca

SEQ ID NO: 444324 - DNA, 15 bp, Homo sapiens
tgtgtcaggagggcc

SEQ ID NO: 444325 - DNA, 15 bp, Homo sapiens
atgtgtcaggagggc

SEQ ID NO: 444326 - DNA, 15 bp, Homo sapiens
gatgtgtcaggaggg

SEQ ID NO: 444327 - DNA, 15 bp, Homo sapiens
tgatgtgtcaggagg

SEQ ID NO: 444328 - DNA, 15 bp, Homo sapiens
ctgatgtgtcaggag

SEQ ID NO: 444329 - DNA, 15 bp, Homo sapiens
actgatgtgtcagga

SEQ ID NO: 444330 - DNA, 15 bp, Homo sapiens
aactgatgtgtcagg

SEQ ID NO: 444331 - DNA, 15 bp, Homo sapiens
gaactgatgtgtcag

SEQ ID NO: 444332 - DNA, 15 bp, Homo sapiens
ggaactgatgtgtca

SEQ ID NO: 444333 - DNA, 15 bp, Homo sapiens
gggaactgatgtgtc

SEQ ID NO: 444334 - DNA, 15 bp, Homo sapiens
cgggaactgatgtgt

SEQ ID NO: 444335 - DNA, 15 bp, Homo sapiens
ccgggaactgatgtg

SEQ ID NO: 444336 - DNA, 15 bp, Homo sapiens
tccgggaactgatgt

SEQ ID NO: 444337 - DNA, 15 bp, Homo sapiens
ttccgggaactgatg

SEQ ID NO: 444338 - DNA, 15 bp, Homo sapiens
gttccgggaactgat

SEQ ID NO: 444339 - DNA, 15 bp, Homo sapiens
agttccgggaactga

SEQ ID NO: 444340 - DNA, 15 bp, Homo sapiens
aagttccgggaactg

SEQ ID NO: 444341 - DNA, 15 bp, Homo sapiens
taagttccgggaact

SEQ ID NO: 444342 - DNA, 15 bp, Homo sapiens
ataagttccgggaac

SEQ ID NO: 444343 - DNA, 15 bp, Homo sapiens
cataagttccgggaa

SEQ ID NO: 444344 - DNA, 15 bp, Homo sapiens
ccataagttccggga

SEQ ID NO: 444345 - DNA, 15 bp, Homo sapiens
cccataagttccggg

SEQ ID NO: 444346 - DNA, 15 bp, Homo sapiens
ccccataagttccgg

SEQ ID NO: 444347 - DNA, 15 bp, Homo sapiens
cccccataagttccg

SEQ ID NO: 444348 - DNA, 15 bp, Homo sapiens
acccccataagttcc

SEQ ID NO: 444349 - DNA, 15 bp, Homo sapiens
gacccccataagttc

SEQ ID NO: 444350 - DNA, 15 bp, Homo sapiens
agacccccataagtt

SEQ ID NO: 444351 - DNA, 15 bp, Homo sapiens
aagacccccataagt

SEQ ID NO: 444352 - DNA, 15 bp, Homo sapiens
gaagacccccataag

SEQ ID NO: 444353 - DNA, 15 bp, Homo sapiens
cgaagacccccataa

SEQ ID NO: 444354 - DNA, 15 bp, Homo sapiens
gcgaagacccccata

SEQ ID NO: 444355 - DNA, 15 bp, Homo sapiens
tgcgaagacccccat

SEQ ID NO: 444356 - DNA, 15 bp, Homo sapiens
ttgcgaagaccccca

SEQ ID NO: 444357 - DNA, 15 bp, Homo sapiens
tttgcgaagaccccc

SEQ ID NO: 444358 - DNA, 15 bp, Homo sapiens
ttttgcgaagacccc

SEQ ID NO: 444359 - DNA, 15 bp, Homo sapiens
cttttgcgaagaccc

SEQ ID NO: 444360 - DNA, 15 bp, Homo sapiens
gcttttgcgaagacc

SEQ ID NO: 444361 - DNA, 15 bp, Homo sapiens
agcttttgcgaagac

SEQ ID NO: 444362 - DNA, 15 bp, Homo sapiens
cagcttttgcgaaga

SEQ ID NO: 444363 - DNA, 15 bp, Homo sapiens
acagcttttgcgaag

SEQ ID NO: 444364 - DNA, 15 bp, Homo sapiens
cacagcttttgcgaa

SEQ ID NO: 444365 - DNA, 15 bp, Homo sapiens
tcacagcttttgcga

SEQ ID NO: 444366 - DNA, 15 bp, Homo sapiens
ctcacagcttttgcg

SEQ ID NO: 444367 - DNA, 15 bp, Homo sapiens
actcacagcttttgc

SEQ ID NO: 444368 - DNA, 15 bp, Homo sapiens
cactcacagcttttg

SEQ ID NO: 444369 - DNA, 15 bp, Homo sapiens
acactcacagctttt

SEQ ID NO: 444370 - DNA, 15 bp, Homo sapiens
aacactcacagcttt

SEQ ID NO: 444371 - DNA, 15 bp, Homo sapiens
aaacactcacagctt

SEQ ID NO: 444372 - DNA, 15 bp, Homo sapiens
caaacactcacagct

SEQ ID NO: 444373 - DNA, 15 bp, Homo sapiens
gcaaacactcacagc

SEQ ID NO: 444374 - DNA, 15 bp, Homo sapiens
ggcaaacactcacag

SEQ ID NO: 444375 - DNA, 15 bp, Homo sapiens
aggcaaacactcaca

SEQ ID NO: 444376 - DNA, 15 bp, Homo sapiens
taggcaaacactcac

SEQ ID NO: 444377 - DNA, 15 bp, Homo sapiens
ctaggcaaacactca

SEQ ID NO: 444378 - DNA, 15 bp, Homo sapiens
tctaggcaaacactc

SEQ ID NO: 444379 - DNA, 15 bp, Homo sapiens
ctctaggcaaacact

SEQ ID NO: 444380 - DNA, 15 bp, Homo sapiens
cctctaggcaaacac

SEQ ID NO: 444381 - DNA, 15 bp, Homo sapiens
ccctctaggcaaaca

SEQ ID NO: 444382 - DNA, 15 bp, Homo sapiens
tccctctaggcaaac

SEQ ID NO: 444383 - DNA, 15 bp, Homo sapiens
ctccctctaggcaaa

SEQ ID NO: 444384 - DNA, 15 bp, Homo sapiens
cctccctctaggcaa

SEQ ID NO: 444385 - DNA, 15 bp, Homo sapiens
gcctccctctaggca

SEQ ID NO: 444386 - DNA, 15 bp, Homo sapiens
ggcctccctctaggc

SEQ ID NO: 444387 - DNA, 15 bp, Homo sapiens
aggcctccctctagg

SEQ ID NO: 444388 - DNA, 15 bp, Homo sapiens
aaggcctccctctag

SEQ ID NO: 444389 - DNA, 15 bp, Homo sapiens
caaggcctccctcta

SEQ ID NO: 444390 - DNA, 15 bp, Homo sapiens
ccaaggcctccctct

SEQ ID NO: 444391 - DNA, 15 bp, Homo sapiens
cccaaggcctccctc

SEQ ID NO: 444392 - DNA, 15 bp, Homo sapiens
ccccaaggcctccct

SEQ ID NO: 444393 - DNA, 15 bp, Homo sapiens
tccccaaggcctccc

SEQ ID NO: 444394 - DNA, 15 bp, Homo sapiens
ttccccaaggcctcc

SEQ ID NO: 444395 - DNA, 15 bp, Homo sapiens
attccccaaggcctc

SEQ ID NO: 444396 - DNA, 15 bp, Homo sapiens
cattccccaaggcct

SEQ ID NO: 444397 - DNA, 15 bp, Homo sapiens
ccattccccaaggcc

SEQ ID NO: 444398 - DNA, 15 bp, Homo sapiens
tccattccccaaggc

SEQ ID NO: 444399 - DNA, 15 bp, Homo sapiens
atccattccccaagg

SEQ ID NO: 444400 - DNA, 15 bp, Homo sapiens
catccattccccaag

SEQ ID NO: 444401 - DNA, 15 bp, Homo sapiens
ccatccattccccaa

SEQ ID NO: 444402 - DNA, 15 bp, Homo sapiens
cccatccattcccca

SEQ ID NO: 444403 - DNA, 15 bp, Homo sapiens
ccccatccattcccc

SEQ ID NO: 444404 - DNA, 15 bp, Homo sapiens
tccccatccattccc

SEQ ID NO: 444405 - DNA, 15 bp, Homo sapiens
ttccccatccattcc

SEQ ID NO: 444406 - DNA, 15 bp, Homo sapiens
tttccccatccattc

SEQ ID NO: 444407 - DNA, 15 bp, Homo sapiens
ctttccccatccatt

SEQ ID NO: 444408 - DNA, 15 bp, Homo sapiens
gctttccccatccat

SEQ ID NO: 444409 - DNA, 15 bp, Homo sapiens
ggctttccccatcca

SEQ ID NO: 444410 - DNA, 15 bp, Homo sapiens
tggctttccccatcc

SEQ ID NO: 444411 - DNA, 15 bp, Homo sapiens
ttggctttccccatc

SEQ ID NO: 444412 - DNA, 15 bp, Homo sapiens
cttggctttccccat

SEQ ID NO: 444413 - DNA, 15 bp, Homo sapiens
ccttggctttcccca

SEQ ID NO: 444414 - DNA, 15 bp, Homo sapiens
cccttggctttcccc

SEQ ID NO: 444415 - DNA, 15 bp, Homo sapiens
gcccttggctttccc

SEQ ID NO: 444416 - DNA, 15 bp, Homo sapiens
tgcccttggctttcc

SEQ ID NO: 444417 - DNA, 15 bp, Homo sapiens
atgcccttggctttc

SEQ ID NO: 444418 - DNA, 15 bp, Homo sapiens
tatgcccttggcttt

SEQ ID NO: 444419 - DNA, 15 bp, Homo sapiens
ttatgcccttggctt

SEQ ID NO: 444420 - DNA, 15 bp, Homo sapiens
tttatgcccttggct

SEQ ID NO: 444421 - DNA, 15 bp, Homo sapiens
ttttatgcccttggc

SEQ ID NO: 444422 - DNA, 15 bp, Homo sapiens
cttttatgcccttgg

SEQ ID NO: 444423 - DNA, 15 bp, Homo sapiens
gcttttatgcccttg

SEQ ID NO: 444424 - DNA, 15 bp, Homo sapiens
tgcttttatgccctt

SEQ ID NO: 444425 - DNA, 15 bp, Homo sapiens
ctgcttttatgccct

SEQ ID NO: 444426 - DNA, 15 bp, Homo sapiens
gctgcttttatgccc

SEQ ID NO: 444427 - DNA, 15 bp, Homo sapiens
cgctgcttttatgcc

SEQ ID NO: 444428 - DNA, 15 bp, Homo sapiens
acgctgcttttatgc

SEQ ID NO: 444429 - DNA, 15 bp, Homo sapiens
cacgctgcttttatg

SEQ ID NO: 444430 - DNA, 15 bp, Homo sapiens
tcacgctgcttttat

SEQ ID NO: 444431 - DNA, 15 bp, Homo sapiens
ctcacgctgctttta

SEQ ID NO: 444432 - DNA, 15 bp, Homo sapiens
tctcacgctgctttt

SEQ ID NO: 444433 - DNA, 15 bp, Homo sapiens
ctctcacgctgcttt

SEQ ID NO: 444434 - DNA, 15 bp, Homo sapiens
tctctcacgctgctt

SEQ ID NO: 444435 - DNA, 15 bp, Homo sapiens
ttctctcacgctgct

SEQ ID NO: 444436 - DNA, 15 bp, Homo sapiens
tttctctcacgctgc

SEQ ID NO: 444437 - DNA, 15 bp, Homo sapiens
atttctctcacgctg

SEQ ID NO: 444438 - DNA, 15 bp, Homo sapiens
catttctctcacgct

SEQ ID NO: 444439 - DNA, 15 bp, Homo sapiens
ccatttctctcacgc

SEQ ID NO: 444440 - DNA, 15 bp, Homo sapiens
cccatttctctcacg

SEQ ID NO: 444441 - DNA, 15 bp, Homo sapiens
ccccatttctctcac

SEQ ID NO: 444442 - DNA, 15 bp, Homo sapiens
accccatttctctca

SEQ ID NO: 444443 - DNA, 15 bp, Homo sapiens
aaccccatttctctc

SEQ ID NO: 444444 - DNA, 15 bp, Homo sapiens
caaccccatttctct

SEQ ID NO: 444445 - DNA, 15 bp, Homo sapiens
gcaaccccatttctc

SEQ ID NO: 444446 - DNA, 15 bp, Homo sapiens
ggcaaccccatttct

SEQ ID NO: 444447 - DNA, 15 bp, Homo sapiens
aggcaaccccatttc

SEQ ID NO: 444448 - DNA, 15 bp, Homo sapiens
aaggcaaccccattt

SEQ ID NO: 444449 - DNA, 15 bp, Homo sapiens
taaggcaaccccatt

SEQ ID NO: 444450 - DNA, 15 bp, Homo sapiens
gtaaggcaaccccat

SEQ ID NO: 444451 - DNA, 15 bp, Homo sapiens
tgtaaggcaacccca

SEQ ID NO: 444452 - DNA, 15 bp, Homo sapiens
ctgtaaggcaacccc

SEQ ID NO: 444453 - DNA, 15 bp, Homo sapiens
tctgtaaggcaaccc

SEQ ID NO: 444454 - DNA, 15 bp, Homo sapiens
ttctgtaaggcaacc

SEQ ID NO: 444455 - DNA, 15 bp, Homo sapiens
tttctgtaaggcaac

SEQ ID NO: 444456 - DNA, 15 bp, Homo sapiens
atttctgtaaggcaa

SEQ ID NO: 444457 - DNA, 15 bp, Homo sapiens
catttctgtaaggca

SEQ ID NO: 444458 - DNA, 15 bp, Homo sapiens
ccatttctgtaaggc

SEQ ID NO: 444459 - DNA, 15 bp, Homo sapiens
cccatttctgtaagg

SEQ ID NO: 444460 - DNA, 15 bp, Homo sapiens
acccatttctgtaag

SEQ ID NO: 444461 - DNA, 15 bp, Homo sapiens
tacccatttctgtaa

SEQ ID NO: 444462 - DNA, 15 bp, Homo sapiens
gtacccatttctgta

SEQ ID NO: 444463 - DNA, 15 bp, Homo sapiens
cgtacccatttctgt

SEQ ID NO: 444464 - DNA, 15 bp, Homo sapiens
tcgtacccatttctg

SEQ ID NO: 444465 - DNA, 15 bp, Homo sapiens
ctcgtacccatttct

SEQ ID NO: 444466 - DNA, 15 bp, Homo sapiens
gctcgtacccatttc

SEQ ID NO: 444467 - DNA, 15 bp, Homo sapiens
ggctcgtacccattt

SEQ ID NO: 444468 - DNA, 15 bp, Homo sapiens
aggctcgtacccatt

SEQ ID NO: 444469 - DNA, 15 bp, Homo sapiens
caggctcgtacccat

SEQ ID NO: 444470 - DNA, 15 bp, Homo sapiens
gcaggctcgtaccca

SEQ ID NO: 444471 - DNA, 15 bp, Homo sapiens
tgcaggctcgtaccc

SEQ ID NO: 444472 - DNA, 15 bp, Homo sapiens
ttgcaggctcgtacc

SEQ ID NO: 444473 - DNA, 15 bp, Homo sapiens
tttgcaggctcgtac

SEQ ID NO: 444474 - DNA, 15 bp, Homo sapiens
ctttgcaggctcgta

SEQ ID NO: 444475 - DNA, 15 bp, Homo sapiens
tctttgcaggctcgt

SEQ ID NO: 444476 - DNA, 15 bp, Homo sapiens
atctttgcaggctcg

SEQ ID NO: 444477 - DNA, 15 bp, Homo sapiens
gatctttgcaggctc

SEQ ID NO: 444478 - DNA, 15 bp, Homo sapiens
tgatctttgcaggct

SEQ ID NO: 444479 - DNA, 15 bp, Homo sapiens
atgatctttgcaggc

SEQ ID NO: 444480 - DNA, 15 bp, Homo sapiens
aatgatctttgcagg

SEQ ID NO: 444481 - DNA, 15 bp, Homo sapiens
caatgatctttgcag

SEQ ID NO: 444482 - DNA, 15 bp, Homo sapiens
gcaatgatctttgca

SEQ ID NO: 444483 - DNA, 15 bp, Homo sapiens
agcaatgatctttgc

SEQ ID NO: 444484 - DNA, 15 bp, Homo sapiens
gagcaatgatctttg

SEQ ID NO: 444485 - DNA, 15 bp, Homo sapiens
tgagcaatgatcttt

SEQ ID NO: 444486 - DNA, 15 bp, Homo sapiens
gtgagcaatgatctt

SEQ ID NO: 444487 - DNA, 15 bp, Homo sapiens
ggtgagcaatgatct

SEQ ID NO: 444488 - DNA, 15 bp, Homo sapiens
tggtgagcaatgatc

SEQ ID NO: 444489 - DNA, 15 bp, Homo sapiens
atggtgagcaatgat

SEQ ID NO: 444490 - DNA, 15 bp, Homo sapiens
aatggtgagcaatga

SEQ ID NO: 444491 - DNA, 15 bp, Homo sapiens
aaatggtgagcaatg

SEQ ID NO: 444492 - DNA, 15 bp, Homo sapiens
taaatggtgagcaat

SEQ ID NO: 444493 - DNA, 15 bp, Homo sapiens
ttaaatggtgagcaa

SEQ ID NO: 444494 - DNA, 15 bp, Homo sapiens
attaaatggtgagca

SEQ ID NO: 444495 - DNA, 15 bp, Homo sapiens
aattaaatggtgagc

SEQ ID NO: 444496 - DNA, 15 bp, Homo sapiens
aaattaaatggtgag

SEQ ID NO: 444497 - DNA, 15 bp, Homo sapiens
aaaattaaatggtga

SEQ ID NO: 444498 - DNA, 15 bp, Homo sapiens
gaaaattaaatggtg

SEQ ID NO: 444499 - DNA, 15 bp, Homo sapiens
tgaaaattaaatggt

SEQ ID NO: 444500 - DNA, 15 bp, Homo sapiens
atgaaaattaaatgg

SEQ ID NO: 444501 - DNA, 15 bp, Homo sapiens
catgaaaattaaatg

SEQ ID NO: 444502 - DNA, 15 bp, Homo sapiens
tcatgaaaattaaat

SEQ ID NO: 444503 - DNA, 15 bp, Homo sapiens
atcatgaaaattaaa

SEQ ID NO: 444504 - DNA, 15 bp, Homo sapiens
gatcatgaaaattaa

SEQ ID NO: 444505 - DNA, 15 bp, Homo sapiens
cgatcatgaaaatta

SEQ ID NO: 444506 - DNA, 15 bp, Homo sapiens
acgatcatgaaaatt

SEQ ID NO: 444507 - DNA, 15 bp, Homo sapiens
gacgatcatgaaaat

SEQ ID NO: 444508 - DNA, 15 bp, Homo sapiens
tgacgatcatgaaaa

SEQ ID NO: 444509 - DNA, 15 bp, Homo sapiens
ttgacgatcatgaaa

SEQ ID NO: 444510 - DNA, 15 bp, Homo sapiens
attgacgatcatgaa

SEQ ID NO: 444511 - DNA, 15 bp, Homo sapiens
cattgacgatcatga

SEQ ID NO: 444512 - DNA, 15 bp, Homo sapiens
ccattgacgatcatg

SEQ ID NO: 444513 - DNA, 15 bp, Homo sapiens
tccattgacgatcat

SEQ ID NO: 444514 - DNA, 15 bp, Homo sapiens
ttccattgacgatca

SEQ ID NO: 444515 - DNA, 15 bp, Homo sapiens
attccattgacgatc

SEQ ID NO: 444516 - DNA, 15 bp, Homo sapiens
gattccattgacgat

SEQ ID NO: 444517 - DNA, 15 bp, Homo sapiens
tgattccattgacga

SEQ ID NO: 444518 - DNA, 15 bp, Homo sapiens
ttgattccattgacg

SEQ ID NO: 444519 - DNA, 15 bp, Homo sapiens
tttgattccattgac

SEQ ID NO: 444520 - DNA, 15 bp, Homo sapiens
ctttgattccattga

SEQ ID NO: 444521 - DNA, 15 bp, Homo sapiens
gctttgattccattg

SEQ ID NO: 444522 - DNA, 15 bp, Homo sapiens
tgctttgattccatt

SEQ ID NO: 444523 - DNA, 15 bp, Homo sapiens
atgctttgattccat

SEQ ID NO: 444524 - DNA, 15 bp, Homo sapiens
aatgctttgattcca

SEQ ID NO: 444525 - DNA, 15 bp, Homo sapiens
taatgctttgattcc

SEQ ID NO: 444526 - DNA, 15 bp, Homo sapiens
ttaatgctttgattc

SEQ ID NO: 444527 - DNA, 15 bp, Homo sapiens
cttaatgctttgatt

SEQ ID NO: 444528 - DNA, 15 bp, Homo sapiens
ccttaatgctttgat

SEQ ID NO: 444529 - DNA, 15 bp, Homo sapiens
cccttaatgctttga

SEQ ID NO: 444530 - DNA, 15 bp, Homo sapiens
acccttaatgctttg

SEQ ID NO: 444531 - DNA, 15 bp, Homo sapiens
gacccttaatgcttt

SEQ ID NO: 444532 - DNA, 15 bp, Homo sapiens
tgacccttaatgctt

SEQ ID NO: 444533 - DNA, 15 bp, Homo sapiens
ttgacccttaatgct

SEQ ID NO: 444534 - DNA, 15 bp, Homo sapiens
tttgacccttaatgc

SEQ ID NO: 444535 - DNA, 15 bp, Homo sapiens
atttgacccttaatg

SEQ ID NO: 444536 - DNA, 15 bp, Homo sapiens
catttgacccttaat

SEQ ID NO: 444537 - DNA, 15 bp, Homo sapiens
tcatttgacccttaa

SEQ ID NO: 444538 - DNA, 15 bp, Homo sapiens
ctcatttgaccctta

SEQ ID NO: 444539 - DNA, 15 bp, Homo sapiens
tctcatttgaccctt

SEQ ID NO: 444540 - DNA, 15 bp, Homo sapiens
ttctcatttgaccct

SEQ ID NO: 444541 - DNA, 15 bp, Homo sapiens
tttctcatttgaccc

SEQ ID NO: 444542 - DNA, 15 bp, Homo sapiens
ctttctcatttgacc

SEQ ID NO: 444543 - DNA, 15 bp, Homo sapiens
actttctcatttgac

SEQ ID NO: 444544 - DNA, 15 bp, Homo sapiens
cactttctcatttga

SEQ ID NO: 444545 - DNA, 15 bp, Homo sapiens
gcactttctcatttg

SEQ ID NO: 444546 - DNA, 15 bp, Homo sapiens
tgcactttctcattt

SEQ ID NO: 444547 - DNA, 15 bp, Homo sapiens
ctgcactttctcatt

SEQ ID NO: 444548 - DNA, 15 bp, Homo sapiens
cctgcactttctcat

SEQ ID NO: 444549 - DNA, 15 bp, Homo sapiens
acctgcactttctca

SEQ ID NO: 444550 - DNA, 15 bp, Homo sapiens
aacctgcactttctc

SEQ ID NO: 444551 - DNA, 15 bp, Homo sapiens
caacctgcactttct

SEQ ID NO: 444552 - DNA, 15 bp, Homo sapiens
acaacctgcactttc

SEQ ID NO: 444553 - DNA, 15 bp, Homo sapiens
aacaacctgcacttt

SEQ ID NO: 444554 - DNA, 15 bp, Homo sapiens
taacaacctgcactt

SEQ ID NO: 444555 - DNA, 15 bp, Homo sapiens
gtaacaacctgcact

SEQ ID NO: 444556 - DNA, 15 bp, Homo sapiens
agtaacaacctgcac

SEQ ID NO: 444557 - DNA, 15 bp, Homo sapiens
cagtaacaacctgca

SEQ ID NO: 444558 - DNA, 15 bp, Homo sapiens
gcagtaacaacctgc

SEQ ID NO: 444559 - DNA, 15 bp, Homo sapiens
tgcagtaacaacctg

SEQ ID NO: 444560 - DNA, 15 bp, Homo sapiens
atgcagtaacaacct

SEQ ID NO: 444561 - DNA, 15 bp, Homo sapiens
catgcagtaacaacc

SEQ ID NO: 444562 - DNA, 15 bp, Homo sapiens
gcatgcagtaacaac

SEQ ID NO: 444563 - DNA, 15 bp, Homo sapiens
ggcatgcagtaacaa

SEQ ID NO: 444564 - DNA, 15 bp, Homo sapiens
aggcatgcagtaaca

SEQ ID NO: 444565 - DNA, 15 bp, Homo sapiens
aaggcatgcagtaac

SEQ ID NO: 444566 - DNA, 15 bp, Homo sapiens
caaggcatgcagtaa

SEQ ID NO: 444567 - DNA, 15 bp, Homo sapiens
gcaaggcatgcagta

SEQ ID NO: 444568 - DNA, 15 bp, Homo sapiens
ggcaaggcatgcagt

SEQ ID NO: 444569 - DNA, 15 bp, Homo sapiens
aggcaaggcatgcag

SEQ ID NO: 444570 - DNA, 15 bp, Homo sapiens
gaggcaaggcatgca

SEQ ID NO: 444571 - DNA, 15 bp, Homo sapiens
tgaggcaaggcatgc

SEQ ID NO: 444572 - DNA, 15 bp, Homo sapiens
atgaggcaaggcatg

SEQ ID NO: 444573 - DNA, 15 bp, Homo sapiens
aatgaggcaaggcat

SEQ ID NO: 444574 - DNA, 15 bp, Homo sapiens
aaatgaggcaaggca

SEQ ID NO: 444575 - DNA, 15 bp, Homo sapiens
gaaatgaggcaaggc

SEQ ID NO: 444576 - DNA, 15 bp, Homo sapiens
tgaaatgaggcaagg

SEQ ID NO: 444577 - DNA, 15 bp, Homo sapiens
gtgaaatgaggcaag

SEQ ID NO: 444578 - DNA, 15 bp, Homo sapiens
tgtgaaatgaggcaa

SEQ ID NO: 444579 - DNA, 15 bp, Homo sapiens
ttgtgaaatgaggca

SEQ ID NO: 444580 - DNA, 15 bp, Homo sapiens
gttgtgaaatgaggc

SEQ ID NO: 444581 - DNA, 15 bp, Homo sapiens
tgttgtgaaatgagg

SEQ ID NO: 444582 - DNA, 15 bp, Homo sapiens
ttgttgtgaaatgag

SEQ ID NO: 444583 - DNA, 15 bp, Homo sapiens
tttgttgtgaaatga

SEQ ID NO: 444584 - DNA, 15 bp, Homo sapiens
atttgttgtgaaatg

SEQ ID NO: 444585 - DNA, 15 bp, Homo sapiens
aatttgttgtgaaat

SEQ ID NO: 444586 - DNA, 15 bp, Homo sapiens
gaatttgttgtgaaa

SEQ ID NO: 444587 - DNA, 15 bp, Homo sapiens
agaatttgttgtgaa

SEQ ID NO: 444588 - DNA, 15 bp, Homo sapiens
aagaatttgttgtga

SEQ ID NO: 444589 - DNA, 15 bp, Homo sapiens
taagaatttgttgtg

SEQ ID NO: 444590 - DNA, 15 bp, Homo sapiens
ctaagaatttgttgt

SEQ ID NO: 444591 - DNA, 15 bp, Homo sapiens
gctaagaatttgttg

SEQ ID NO: 444592 - DNA, 15 bp, Homo sapiens
tgctaagaatttgtt

SEQ ID NO: 444593 - DNA, 15 bp, Homo sapiens
ctgctaagaatttgt

SEQ ID NO: 444594 - DNA, 15 bp, Homo sapiens
actgctaagaatttg

SEQ ID NO: 444595 - DNA, 15 bp, Homo sapiens
aactgctaagaattt

SEQ ID NO: 444596 - DNA, 15 bp, Homo sapiens
aaactgctaagaatt

SEQ ID NO: 444597 - DNA, 15 bp, Homo sapiens
gaaactgctaagaat

SEQ ID NO: 444598 - DNA, 15 bp, Homo sapiens
ggaaactgctaagaa

SEQ ID NO: 444599 - DNA, 15 bp, Homo sapiens
tggaaactgctaaga

SEQ ID NO: 444600 - DNA, 15 bp, Homo sapiens
ttggaaactgctaag

SEQ ID NO: 444601 - DNA, 15 bp, Homo sapiens
tttggaaactgctaa

SEQ ID NO: 444602 - DNA, 15 bp, Homo sapiens
ttttggaaactgcta

SEQ ID NO: 444603 - DNA, 15 bp, Homo sapiens
tttttggaaactgct

SEQ ID NO: 444604 - DNA, 15 bp, Homo sapiens
ttttttggaaactgc

SEQ ID NO: 444605 - DNA, 15 bp, Homo sapiens
attttttggaaactg

SEQ ID NO: 444606 - DNA, 15 bp, Homo sapiens
cattttttggaaact

SEQ ID NO: 444607 - DNA, 15 bp, Homo sapiens
gcattttttggaaac

SEQ ID NO: 444608 - DNA, 15 bp, Homo sapiens
tgcattttttggaaa

SEQ ID NO: 444609 - DNA, 15 bp, Homo sapiens
ctgcattttttggaa

SEQ ID NO: 444610 - DNA, 15 bp, Homo sapiens
cctgcattttttgga

SEQ ID NO: 444611 - DNA, 15 bp, Homo sapiens
tcctgcattttttgg

SEQ ID NO: 444612 - DNA, 15 bp, Homo sapiens
ctcctgcattttttg

SEQ ID NO: 444613 - DNA, 15 bp, Homo sapiens
cctcctgcatttttt

SEQ ID NO: 444614 - DNA, 15 bp, Homo sapiens
acctcctgcattttt

SEQ ID NO: 444615 - DNA, 15 bp, Homo sapiens
gacctcctgcatttt

SEQ ID NO: 444616 - DNA, 15 bp, Homo sapiens
ggacctcctgcattt

SEQ ID NO: 444617 - DNA, 15 bp, Homo sapiens
tggacctcctgcatt

SEQ ID NO: 444618 - DNA, 15 bp, Homo sapiens
ttggacctcctgcat

SEQ ID NO: 444619 - DNA, 15 bp, Homo sapiens
tttggacctcctgca

SEQ ID NO: 444620 - DNA, 15 bp, Homo sapiens
ttttggacctcctgc

SEQ ID NO: 444621 - DNA, 15 bp, Homo sapiens
cttttggacctcctg

SEQ ID NO: 444622 - DNA, 15 bp, Homo sapiens
ccttttggacctcct

SEQ ID NO: 444623 - DNA, 15 bp, Homo sapiens
tccttttggacctcc

SEQ ID NO: 444624 - DNA, 15 bp, Homo sapiens
atccttttggacctc

SEQ ID NO: 444625 - DNA, 15 bp, Homo sapiens
catccttttggacct

SEQ ID NO: 444626 - DNA, 15 bp, Homo sapiens
ccatccttttggacc

SEQ ID NO: 444627 - DNA, 15 bp, Homo sapiens
tccatccttttggac

SEQ ID NO: 444628 - DNA, 15 bp, Homo sapiens
ttccatccttttgga

SEQ ID NO: 444629 - DNA, 15 bp, Homo sapiens
attccatccttttgg

SEQ ID NO: 444630 - DNA, 15 bp, Homo sapiens
cattccatccttttg

SEQ ID NO: 444631 - DNA, 15 bp, Homo sapiens
tcattccatcctttt

SEQ ID NO: 444632 - DNA, 15 bp, Homo sapiens
atcattccatccttt

SEQ ID NO: 444633 - DNA, 15 bp, Homo sapiens
aatcattccatcctt

SEQ ID NO: 444634 - DNA, 15 bp, Homo sapiens
aaatcattccatcct

SEQ ID NO: 444635 - DNA, 15 bp, Homo sapiens
taaatcattccatcc

SEQ ID NO: 444636 - DNA, 15 bp, Homo sapiens
ctaaatcattccatc

SEQ ID NO: 444637 - DNA, 15 bp, Homo sapiens
cctaaatcattccat

SEQ ID NO: 444638 - DNA, 15 bp, Homo sapiens
tcctaaatcattcca

SEQ ID NO: 444639 - DNA, 15 bp, Homo sapiens
ttcctaaatcattcc

SEQ ID NO: 444640 - DNA, 15 bp, Homo sapiens
tttcctaaatcattc

SEQ ID NO: 444641 - DNA, 15 bp, Homo sapiens
atttcctaaatcatt

SEQ ID NO: 444642 - DNA, 15 bp, Homo sapiens
gatttcctaaatcat

SEQ ID NO: 444643 - DNA, 15 bp, Homo sapiens
ggatttcctaaatca

SEQ ID NO: 444644 - DNA, 15 bp, Homo sapiens
aggatttcctaaatc

SEQ ID NO: 444645 - DNA, 15 bp, Homo sapiens
taggatttcctaaat

SEQ ID NO: 444646 - DNA, 15 bp, Homo sapiens
ctaggatttcctaaa

SEQ ID NO: 444647 - DNA, 15 bp, Homo sapiens
gctaggatttcctaa

SEQ ID NO: 444648 - DNA, 15 bp, Homo sapiens
tgctaggatttccta

SEQ ID NO: 444649 - DNA, 15 bp, Homo sapiens
ttgctaggatttcct

SEQ ID NO: 444650 - DNA, 15 bp, Homo sapiens
tttgctaggatttcc

SEQ ID NO: 444651 - DNA, 15 bp, Homo sapiens
atttgctaggatttc

SEQ ID NO: 444652 - DNA, 15 bp, Homo sapiens
catttgctaggattt

SEQ ID NO: 444653 - DNA, 15 bp, Homo sapiens
tcatttgctaggatt

SEQ ID NO: 444654 - DNA, 15 bp, Homo sapiens
ttcatttgctaggat

SEQ ID NO: 444655 - DNA, 15 bp, Homo sapiens
tttcatttgctagga

SEQ ID NO: 444656 - DNA, 15 bp, Homo sapiens
ttttcatttgctagg

SEQ ID NO: 444657 - DNA, 15 bp, Homo sapiens
attttcatttgctag

SEQ ID NO: 444658 - DNA, 15 bp, Homo sapiens
cattttcatttgcta

SEQ ID NO: 444659 - DNA, 15 bp, Homo sapiens
acattttcatttgct

SEQ ID NO: 444660 - DNA, 15 bp, Homo sapiens
cacattttcatttgc

SEQ ID NO: 444661 - DNA, 15 bp, Homo sapiens
acacattttcatttg

SEQ ID NO: 444662 - DNA, 15 bp, Homo sapiens
cacacattttcattt

SEQ ID NO: 444663 - DNA, 15 bp, Homo sapiens
ccacacattttcatt

SEQ ID NO: 444664 - DNA, 15 bp, Homo sapiens
cccacacattttcat

SEQ ID NO: 444665 - DNA, 15 bp, Homo sapiens
tcccacacattttca

SEQ ID NO: 444666 - DNA, 15 bp, Homo sapiens
ttcccacacattttc

SEQ ID NO: 444667 - DNA, 15 bp, Homo sapiens
cttcccacacatttt

SEQ ID NO: 444668 - DNA, 15 bp, Homo sapiens
acttcccacacattt

SEQ ID NO: 444669 - DNA, 15 bp, Homo sapiens
aacttcccacacatt

SEQ ID NO: 444670 - DNA, 15 bp, Homo sapiens
taacttcccacacat

SEQ ID NO: 444671 - DNA, 15 bp, Homo sapiens
gtaacttcccacaca

SEQ ID NO: 444672 - DNA, 15 bp, Homo sapiens
agtaacttcccacac

SEQ ID NO: 444673 - DNA, 15 bp, Homo sapiens
gagtaacttcccaca

SEQ ID NO: 444674 - DNA, 15 bp, Homo sapiens
cgagtaacttcccac

SEQ ID NO: 444675 - DNA, 15 bp, Homo sapiens
ccgagtaacttccca

SEQ ID NO: 444676 - DNA, 15 bp, Homo sapiens
accgagtaacttccc

SEQ ID NO: 444677 - DNA, 15 bp, Homo sapiens
aaccgagtaacttcc

SEQ ID NO: 444678 - DNA, 15 bp, Homo sapiens
aaaccgagtaacttc

SEQ ID NO: 444679 - DNA, 15 bp, Homo sapiens
aaaaccgagtaactt

SEQ ID NO: 444680 - DNA, 15 bp, Homo sapiens
gaaaaccgagtaact

SEQ ID NO: 444681 - DNA, 15 bp, Homo sapiens
agaaaaccgagtaac

SEQ ID NO: 444682 - DNA, 15 bp, Homo sapiens
cagaaaaccgagtaa

SEQ ID NO: 444683 - DNA, 15 bp, Homo sapiens
acagaaaaccgagta

SEQ ID NO: 444684 - DNA, 15 bp, Homo sapiens
tacagaaaaccgagt

SEQ ID NO: 444685 - DNA, 15 bp, Homo sapiens
ttacagaaaaccgag

SEQ ID NO: 444686 - DNA, 15 bp, Homo sapiens
tttacagaaaaccga

SEQ ID NO: 444687 - DNA, 15 bp, Homo sapiens
atttacagaaaaccg

SEQ ID NO: 444688 - DNA, 15 bp, Homo sapiens
aatttacagaaaacc

SEQ ID NO: 444689 - DNA, 15 bp, Homo sapiens
caatttacagaaaac

SEQ ID NO: 444690 - DNA, 15 bp, Homo sapiens
tcaatttacagaaaa

SEQ ID NO: 444691 - DNA, 15 bp, Homo sapiens
ttcaatttacagaaa

SEQ ID NO: 444692 - DNA, 15 bp, Homo sapiens
attcaatttacagaa

SEQ ID NO: 444693 - DNA, 15 bp, Homo sapiens
cattcaatttacaga

SEQ ID NO: 444694 - DNA, 15 bp, Homo sapiens
tcattcaatttacag

SEQ ID NO: 444695 - DNA, 15 bp, Homo sapiens
gtcattcaatttaca

SEQ ID NO: 444696 - DNA, 15 bp, Homo sapiens
tgtcattcaatttac

SEQ ID NO: 444697 - DNA, 15 bp, Homo sapiens
atgtcattcaattta

SEQ ID NO: 444698 - DNA, 15 bp, Homo sapiens
aatgtcattcaattt

SEQ ID NO: 444699 - DNA, 15 bp, Homo sapiens
taatgtcattcaatt

SEQ ID NO: 444700 - DNA, 15 bp, Homo sapiens
ataatgtcattcaat

SEQ ID NO: 444701 - DNA, 15 bp, Homo sapiens
aataatgtcattcaa

SEQ ID NO: 444702 - DNA, 15 bp, Homo sapiens
aaataatgtcattca

SEQ ID NO: 444703 - DNA, 15 bp, Homo sapiens
gaaataatgtcattc

SEQ ID NO: 444704 - DNA, 15 bp, Homo sapiens
ggaaataatgtcatt

SEQ ID NO: 444705 - DNA, 15 bp, Homo sapiens
tggaaataatgtcat

SEQ ID NO: 444706 - DNA, 15 bp, Homo sapiens
ttggaaataatgtca

SEQ ID NO: 444707 - DNA, 15 bp, Homo sapiens
attggaaataatgtc

SEQ ID NO: 444708 - DNA, 15 bp, Homo sapiens
gattggaaataatgt

SEQ ID NO: 444709 - DNA, 15 bp, Homo sapiens
cgattggaaataatg

SEQ ID NO: 444710 - DNA, 15 bp, Homo sapiens
acgattggaaataat

SEQ ID NO: 444711 - DNA, 15 bp, Homo sapiens
aacgattggaaataa

SEQ ID NO: 444712 - DNA, 15 bp, Homo sapiens
caacgattggaaata

SEQ ID NO: 444713 - DNA, 15 bp, Homo sapiens
ccaacgattggaaat

SEQ ID NO: 444714 - DNA, 15 bp, Homo sapiens
tccaacgattggaaa

SEQ ID NO: 444715 - DNA, 15 bp, Homo sapiens
atccaacgattggaa

SEQ ID NO: 444716 - DNA, 15 bp, Homo sapiens
tatccaacgattgga

SEQ ID NO: 444717 - DNA, 15 bp, Homo sapiens
atatccaacgattgg

SEQ ID NO: 444718 - DNA, 15 bp, Homo sapiens
aatatccaacgattg

SEQ ID NO: 444719 - DNA, 15 bp, Homo sapiens
caatatccaacgatt

SEQ ID NO: 444720 - DNA, 15 bp, Homo sapiens
acaatatccaacgat

SEQ ID NO: 444721 - DNA, 15 bp, Homo sapiens
cacaatatccaacga

SEQ ID NO: 444722 - DNA, 15 bp, Homo sapiens
ccacaatatccaacg

SEQ ID NO: 444723 - DNA, 15 bp, Homo sapiens
cccacaatatccaac

SEQ ID NO: 444724 - DNA, 15 bp, Homo sapiens
acccacaatatccaa

SEQ ID NO: 444725 - DNA, 15 bp, Homo sapiens
gacccacaatatcca

SEQ ID NO: 444726 - DNA, 15 bp, Homo sapiens
agacccacaatatcc

SEQ ID NO: 444727 - DNA, 15 bp, Homo sapiens
aagacccacaatatc

SEQ ID NO: 444728 - DNA, 15 bp, Homo sapiens
aaagacccacaatat

SEQ ID NO: 444729 - DNA, 15 bp, Homo sapiens
gaaagacccacaata

SEQ ID NO: 444730 - DNA, 15 bp, Homo sapiens
ggaaagacccacaat

SEQ ID NO: 444731 - DNA, 15 bp, Homo sapiens
aggaaagacccacaa

SEQ ID NO: 444732 - DNA, 15 bp, Homo sapiens
aaggaaagacccaca

SEQ ID NO: 444733 - DNA, 15 bp, Homo sapiens
taaggaaagacccac

SEQ ID NO: 444734 - DNA, 15 bp, Homo sapiens
ctaaggaaagaccca

SEQ ID NO: 444735 - DNA, 15 bp, Homo sapiens
actaaggaaagaccc

SEQ ID NO: 444736 - DNA, 15 bp, Homo sapiens
cactaaggaaagacc

SEQ ID NO: 444737 - DNA, 15 bp, Homo sapiens
tcactaaggaaagac

SEQ ID NO: 444738 - DNA, 15 bp, Homo sapiens
ttcactaaggaaaga

SEQ ID NO: 444739 - DNA, 15 bp, Homo sapiens
cttcactaaggaaag

SEQ ID NO: 444740 - DNA, 15 bp, Homo sapiens
ccttcactaaggaaa

SEQ ID NO: 444741 - DNA, 15 bp, Homo sapiens
tccttcactaaggaa

SEQ ID NO: 444742 - DNA, 15 bp, Homo sapiens
atccttcactaagga

SEQ ID NO: 444743 - DNA, 15 bp, Homo sapiens
catccttcactaagg

SEQ ID NO: 444744 - DNA, 15 bp, Homo sapiens
tcatccttcactaag

SEQ ID NO: 444745 - DNA, 15 bp, Homo sapiens
ctcatccttcactaa

SEQ ID NO: 444746 - DNA, 15 bp, Homo sapiens
tctcatccttcacta

SEQ ID NO: 444747 - DNA, 15 bp, Homo sapiens
atctcatccttcact

SEQ ID NO: 444748 - DNA, 15 bp, Homo sapiens
aatctcatccttcac

SEQ ID NO: 444749 - DNA, 15 bp, Homo sapiens
aaatctcatccttca

SEQ ID NO: 444750 - DNA, 15 bp, Homo sapiens
taaatctcatccttc

SEQ ID NO: 444751 - DNA, 15 bp, Homo sapiens
gtaaatctcatcctt

SEQ ID NO: 444752 - DNA, 15 bp, Homo sapiens
tgtaaatctcatcct

SEQ ID NO: 444753 - DNA, 15 bp, Homo sapiens
atgtaaatctcatcc

SEQ ID NO: 444754 - DNA, 15 bp, Homo sapiens
aatgtaaatctcatc

SEQ ID NO: 444755 - DNA, 15 bp, Homo sapiens
aaatgtaaatctcat

SEQ ID NO: 444756 - DNA, 15 bp, Homo sapiens
aaaatgtaaatctca

SEQ ID NO: 444757 - DNA, 15 bp, Homo sapiens
gaaaatgtaaatctc

SEQ ID NO: 444758 - DNA, 15 bp, Homo sapiens
tgaaaatgtaaatct

SEQ ID NO: 444759 - DNA, 15 bp, Homo sapiens
ttgaaaatgtaaatc

SEQ ID NO: 444760 - DNA, 15 bp, Homo sapiens
tttgaaaatgtaaat

SEQ ID NO: 444761 - DNA, 15 bp, Homo sapiens
ctttgaaaatgtaaa

SEQ ID NO: 444762 - DNA, 15 bp, Homo sapiens
tctttgaaaatgtaa

SEQ ID NO: 444763 - DNA, 15 bp, Homo sapiens
atctttgaaaatgta

SEQ ID NO: 444764 - DNA, 15 bp, Homo sapiens
catctttgaaaatgt

SEQ ID NO: 444765 - DNA, 15 bp, Homo sapiens
tcatctttgaaaatg

SEQ ID NO: 444766 - DNA, 15 bp, Homo sapiens
atcatctttgaaaat

SEQ ID NO: 444767 - DNA, 15 bp, Homo sapiens
aatcatctttgaaaa

SEQ ID NO: 444768 - DNA, 15 bp, Homo sapiens
aaatcatctttgaaa

SEQ ID NO: 444769 - DNA, 15 bp, Homo sapiens
taaatcatctttgaa

SEQ ID NO: 444770 - DNA, 15 bp, Homo sapiens
ttaaatcatctttga

SEQ ID NO: 444771 - DNA, 15 bp, Homo sapiens
tttaaatcatctttg

SEQ ID NO: 444772 - DNA, 15 bp, Homo sapiens
atttaaatcatcttt

SEQ ID NO: 444773 - DNA, 15 bp, Homo sapiens
tatttaaatcatctt

SEQ ID NO: 444774 - DNA, 15 bp, Homo sapiens
ttatttaaatcatct

SEQ ID NO: 444775 - DNA, 15 bp, Homo sapiens
attatttaaatcatc

SEQ ID NO: 444776 - DNA, 15 bp, Homo sapiens
aattatttaaatcat

SEQ ID NO: 444777 - DNA, 15 bp, Homo sapiens
aaattatttaaatca

SEQ ID NO: 444778 - DNA, 15 bp, Homo sapiens
aaaattatttaaatc

SEQ ID NO: 444779 - DNA, 15 bp, Homo sapiens
aaaaattatttaaat

SEQ ID NO: 444780 - DNA, 15 bp, Homo sapiens
aaaaaattatttaaa

SEQ ID NO: 444781 - DNA, 15 bp, Homo sapiens
aaaaaaattatttaa

SEQ ID NO: 444782 - DNA, 15 bp, Homo sapiens
aaaaaaaattattta

SEQ ID NO: 444783 - DNA, 15 bp, Homo sapiens
taaaaaaaattattt

SEQ ID NO: 444784 - DNA, 15 bp, Homo sapiens
ttaaaaaaaattatt

SEQ ID NO: 444785 - DNA, 15 bp, Homo sapiens
attaaaaaaaattat

SEQ ID NO: 444786 - DNA, 15 bp, Homo sapiens
cattaaaaaaaatta

SEQ ID NO: 444787 - DNA, 15 bp, Homo sapiens
ccattaaaaaaaatt

SEQ ID NO: 444788 - DNA, 15 bp, Homo sapiens
gccattaaaaaaaat

SEQ ID NO: 444789 - DNA, 15 bp, Homo sapiens
agccattaaaaaaaa

SEQ ID NO: 444790 - DNA, 15 bp, Homo sapiens
cagccattaaaaaaa

SEQ ID NO: 444791 - DNA, 15 bp, Homo sapiens
gcagccattaaaaaa

SEQ ID NO: 444792 - DNA, 15 bp, Homo sapiens
ttgcagccattaaaa

SEQ ID NO: 444793 - DNA, 15 bp, Homo sapiens
tttgcagccattaaa

SEQ ID NO: 444794 - DNA, 15 bp, Homo sapiens
gtttgcagccattaa

SEQ ID NO: 444795 - DNA, 15 bp, Homo sapiens
ggtttgcagccatta

SEQ ID NO: 444796 - DNA, 15 bp, Homo sapiens
gggtttgcagccatt

SEQ ID NO: 444797 - DNA, 15 bp, Homo sapiens
agggtttgcagccat

SEQ ID NO: 444798 - DNA, 15 bp, Homo sapiens
aagggtttgcagcca

SEQ ID NO: 444799 - DNA, 15 bp, Homo sapiens
caagggtttgcagcc

SEQ ID NO: 444800 - DNA, 15 bp, Homo sapiens
ccaagggtttgcagc

SEQ ID NO: 444801 - DNA, 15 bp, Homo sapiens
gccaagggtttgcag

SEQ ID NO: 444802 - DNA, 15 bp, Homo sapiens
agccaagggtttgca

SEQ ID NO: 444803 - DNA, 15 bp, Homo sapiens
aagccaagggtttgc

SEQ ID NO: 444804 - DNA, 15 bp, Homo sapiens
caagccaagggtttg

SEQ ID NO: 444805 - DNA, 15 bp, Homo sapiens
acaagccaagggttt

SEQ ID NO: 444806 - DNA, 15 bp, Homo sapiens
gacaagccaagggtt

SEQ ID NO: 444807 - DNA, 15 bp, Homo sapiens
agacaagccaagggt

SEQ ID NO: 444808 - DNA, 15 bp, Homo sapiens
tagacaagccaaggg

SEQ ID NO: 444809 - DNA, 15 bp, Homo sapiens
ttagacaagccaagg

SEQ ID NO: 444810 - DNA, 15 bp, Homo sapiens
cttagacaagccaag

SEQ ID NO: 444811 - DNA, 15 bp, Homo sapiens
ccttagacaagccaa

SEQ ID NO: 444812 - DNA, 15 bp, Homo sapiens
tccttagacaagcca

SEQ ID NO: 444813 - DNA, 15 bp, Homo sapiens
ttccttagacaagcc

SEQ ID NO: 444814 - DNA, 15 bp, Homo sapiens
attccttagacaagc

SEQ ID NO: 444815 - DNA, 15 bp, Homo sapiens
cattccttagacaag

SEQ ID NO: 444816 - DNA, 15 bp, Homo sapiens
tcattccttagacaa

SEQ ID NO: 444817 - DNA, 15 bp, Homo sapiens
ttcattccttagaca

SEQ ID NO: 444818 - DNA, 15 bp, Homo sapiens
gttcattccttagac

SEQ ID NO: 444819 - DNA, 15 bp, Homo sapiens
tgttcattccttaga

SEQ ID NO: 444820 - DNA, 15 bp, Homo sapiens
ctgttcattccttag

SEQ ID NO: 444821 - DNA, 15 bp, Homo sapiens
tctgttcattcctta

SEQ ID NO: 444822 - DNA, 15 bp, Homo sapiens
ctctgttcattcctt

SEQ ID NO: 444823 - DNA, 15 bp, Homo sapiens
cctctgttcattcct

SEQ ID NO: 444824 - DNA, 15 bp, Homo sapiens
ccctctgttcattcc

SEQ ID NO: 444825 - DNA, 15 bp, Homo sapiens
accctctgttcattc

SEQ ID NO: 444826 - DNA, 15 bp, Homo sapiens
caccctctgttcatt

SEQ ID NO: 444827 - DNA, 15 bp, Homo sapiens
acaccctctgttcat

SEQ ID NO: 444828 - DNA, 15 bp, Homo sapiens
tacaccctctgttca

SEQ ID NO: 444829 - DNA, 15 bp, Homo sapiens
ttacaccctctgttc

SEQ ID NO: 444830 - DNA, 15 bp, Homo sapiens
tttacaccctctgtt

SEQ ID NO: 444831 - DNA, 15 bp, Homo sapiens
ctttacaccctctgt

SEQ ID NO: 444832 - DNA, 15 bp, Homo sapiens
cctttacaccctctg

SEQ ID NO: 444833 - DNA, 15 bp, Homo sapiens
ccctttacaccctct

SEQ ID NO: 444834 - DNA, 15 bp, Homo sapiens
gccctttacaccctc

SEQ ID NO: 444835 - DNA, 15 bp, Homo sapiens
agccctttacaccct

SEQ ID NO: 444836 - DNA, 15 bp, Homo sapiens
aagccctttacaccc

SEQ ID NO: 444837 - DNA, 15 bp, Homo sapiens
taagccctttacacc

SEQ ID NO: 444838 - DNA, 15 bp, Homo sapiens
ataagccctttacac

SEQ ID NO: 444839 - DNA, 15 bp, Homo sapiens
aataagccctttaca

SEQ ID NO: 444840 - DNA, 15 bp, Homo sapiens
taataagccctttac

SEQ ID NO: 444841 - DNA, 15 bp, Homo sapiens
ttaataagcccttta

SEQ ID NO: 444842 - DNA, 15 bp, Homo sapiens
cttaataagcccttt

SEQ ID NO: 444843 - DNA, 15 bp, Homo sapiens
tcttaataagccctt

SEQ ID NO: 444844 - DNA, 15 bp, Homo sapiens
ttcttaataagccct

SEQ ID NO: 444845 - DNA, 15 bp, Homo sapiens
cttcttaataagccc

SEQ ID NO: 444846 - DNA, 15 bp, Homo sapiens
acttcttaataagcc

SEQ ID NO: 444847 - DNA, 15 bp, Homo sapiens
tacttcttaataagc

SEQ ID NO: 444848 - DNA, 15 bp, Homo sapiens
ttacttcttaataag

SEQ ID NO: 444849 - DNA, 15 bp, Homo sapiens
tttacttcttaataa

SEQ ID NO: 444850 - DNA, 15 bp, Homo sapiens
gtttacttcttaata

SEQ ID NO: 444851 - DNA, 15 bp, Homo sapiens
agtttacttcttaat

SEQ ID NO: 444852 - DNA, 15 bp, Homo sapiens
cagtttacttcttaa

SEQ ID NO: 444853 - DNA, 15 bp, Homo sapiens
tcagtttacttctta

SEQ ID NO: 444854 - DNA, 15 bp, Homo sapiens
ttcagtttacttctt

SEQ ID NO: 444855 - DNA, 15 bp, Homo sapiens
tttcagtttacttct

SEQ ID NO: 444856 - DNA, 15 bp, Homo sapiens
atttcagtttacttc

SEQ ID NO: 444857 - DNA, 15 bp, Homo sapiens
catttcagtttactt

SEQ ID NO: 444858 - DNA, 15 bp, Homo sapiens
tcatttcagtttact

SEQ ID NO: 444859 - DNA, 15 bp, Homo sapiens
gtcatttcagtttac

SEQ ID NO: 444860 - DNA, 15 bp, Homo sapiens
tgtcatttcagttta

SEQ ID NO: 444861 - DNA, 15 bp, Homo sapiens
atgtcatttcagttt

SEQ ID NO: 444862 - DNA, 15 bp, Homo sapiens
aatgtcatttcagtt

SEQ ID NO: 444863 - DNA, 15 bp, Homo sapiens
aaatgtcatttcagt

SEQ ID NO: 444864 - DNA, 15 bp, Homo sapiens
taaatgtcatttcag

SEQ ID NO: 444865 - DNA, 15 bp, Homo sapiens
ctaaatgtcatttca

SEQ ID NO: 444866 - DNA, 15 bp, Homo sapiens
tctaaatgtcatttc

SEQ ID NO: 444867 - DNA, 15 bp, Homo sapiens
ttctaaatgtcattt

SEQ ID NO: 444868 - DNA, 15 bp, Homo sapiens
tttctaaatgtcatt

SEQ ID NO: 444869 - DNA, 15 bp, Homo sapiens
atttctaaatgtcat

SEQ ID NO: 444870 - DNA, 15 bp, Homo sapiens
tatttctaaatgtca

SEQ ID NO: 444871 - DNA, 15 bp, Homo sapiens
atatttctaaatgtc

SEQ ID NO: 444872 - DNA, 15 bp, Homo sapiens
catatttctaaatgt

SEQ ID NO: 444873 - DNA, 15 bp, Homo sapiens
ccatatttctaaatg

SEQ ID NO: 444874 - DNA, 15 bp, Homo sapiens
tccatatttctaaat

SEQ ID NO: 444875 - DNA, 15 bp, Homo sapiens
ttccatatttctaaa

SEQ ID NO: 444876 - DNA, 15 bp, Homo sapiens
tttccatatttctaa

SEQ ID NO: 444877 - DNA, 15 bp, Homo sapiens
atttccatatttcta

SEQ ID NO: 444878 - DNA, 15 bp, Homo sapiens
gatttccatatttct

SEQ ID NO: 444879 - DNA, 15 bp, Homo sapiens
ggatttccatatttc

SEQ ID NO: 444880 - DNA, 15 bp, Homo sapiens
tggatttccatattt

SEQ ID NO: 444881 - DNA, 15 bp, Homo sapiens
atggatttccatatt

SEQ ID NO: 444882 - DNA, 15 bp, Homo sapiens
aatggatttccatat

SEQ ID NO: 444883 - DNA, 15 bp, Homo sapiens
taatggatttccata

SEQ ID NO: 444884 - DNA, 15 bp, Homo sapiens
ttaatggatttccat

SEQ ID NO: 444885 - DNA, 15 bp, Homo sapiens
cttaatggatttcca

SEQ ID NO: 444886 - DNA, 15 bp, Homo sapiens
tcttaatggatttcc

SEQ ID NO: 444887 - DNA, 15 bp, Homo sapiens
ctcttaatggatttc

SEQ ID NO: 444888 - DNA, 15 bp, Homo sapiens
actcttaatggattt

SEQ ID NO: 444889 - DNA, 15 bp, Homo sapiens
gactcttaatggatt

SEQ ID NO: 444890 - DNA, 15 bp, Homo sapiens
agactcttaatggat

SEQ ID NO: 444891 - DNA, 15 bp, Homo sapiens
aagactcttaatgga

SEQ ID NO: 444892 - DNA, 15 bp, Homo sapiens
aaagactcttaatgg

SEQ ID NO: 444893 - DNA, 15 bp, Homo sapiens
taaagactcttaatg

SEQ ID NO: 444894 - DNA, 15 bp, Homo sapiens
ttaaagactcttaat

SEQ ID NO: 444895 - DNA, 15 bp, Homo sapiens
cttaaagactcttaa

SEQ ID NO: 444896 - DNA, 15 bp, Homo sapiens
ccttaaagactctta

SEQ ID NO: 444897 - DNA, 15 bp, Homo sapiens
tccttaaagactctt

SEQ ID NO: 444898 - DNA, 15 bp, Homo sapiens
ctccttaaagactct

SEQ ID NO: 444899 - DNA, 15 bp, Homo sapiens
gctccttaaagactc

SEQ ID NO: 444900 - DNA, 15 bp, Homo sapiens
agctccttaaagact

SEQ ID NO: 444901 - DNA, 15 bp, Homo sapiens
aagctccttaaagac

SEQ ID NO: 444902 - DNA, 15 bp, Homo sapiens
caagctccttaaaga

SEQ ID NO: 444903 - DNA, 15 bp, Homo sapiens
ccaagctccttaaag

SEQ ID NO: 444904 - DNA, 15 bp, Homo sapiens
cccaagctccttaaa

SEQ ID NO: 444905 - DNA, 15 bp, Homo sapiens
ccccaagctccttaa

SEQ ID NO: 444906 - DNA, 15 bp, Homo sapiens
tccccaagctcctta

SEQ ID NO: 444907 - DNA, 15 bp, Homo sapiens
ctccccaagctcctt

SEQ ID NO: 444908 - DNA, 15 bp, Homo sapiens
tctccccaagctcct

SEQ ID NO: 444909 - DNA, 15 bp, Homo sapiens
ctctccccaagctcc

SEQ ID NO: 444910 - DNA, 15 bp, Homo sapiens
cctctccccaagctc

SEQ ID NO: 444911 - DNA, 15 bp, Homo sapiens
tcctctccccaagct

SEQ ID NO: 444912 - DNA, 15 bp, Homo sapiens
ctcctctccccaagc

SEQ ID NO: 444913 - DNA, 15 bp, Homo sapiens
gctcctctccccaag

SEQ ID NO: 444914 - DNA, 15 bp, Homo sapiens
agctcctctccccaa

SEQ ID NO: 444915 - DNA, 15 bp, Homo sapiens
aagctcctctcccca

SEQ ID NO: 444916 - DNA, 15 bp, Homo sapiens
aaagctcctctcccc

SEQ ID NO: 444917 - DNA, 15 bp, Homo sapiens
taaagctcctctccc

SEQ ID NO: 444918 - DNA, 15 bp, Homo sapiens
ttaaagctcctctcc

SEQ ID NO: 444919 - DNA, 15 bp, Homo sapiens
attaaagctcctctc

SEQ ID NO: 444920 - DNA, 15 bp, Homo sapiens
tattaaagctcctct

SEQ ID NO: 444921 - DNA, 15 bp, Homo sapiens
ttattaaagctcctc

SEQ ID NO: 444922 - DNA, 15 bp, Homo sapiens
cttattaaagctcct

SEQ ID NO: 444923 - DNA, 15 bp, Homo sapiens
tcttattaaagctcc

SEQ ID NO: 444924 - DNA, 15 bp, Homo sapiens
ttcttattaaagctc

SEQ ID NO: 444925 - DNA, 15 bp, Homo sapiens
tttcttattaaagct

SEQ ID NO: 444926 - DNA, 15 bp, Homo sapiens
ttttcttattaaagc

SEQ ID NO: 444927 - DNA, 15 bp, Homo sapiens
cttttcttattaaag

SEQ ID NO: 444928 - DNA, 15 bp, Homo sapiens
gcttttcttattaaa

SEQ ID NO: 444929 - DNA, 15 bp, Homo sapiens
ggcttttcttattaa

SEQ ID NO: 444930 - DNA, 15 bp, Homo sapiens
tggcttttcttatta

SEQ ID NO: 444931 - DNA, 15 bp, Homo sapiens
atggcttttcttatt

SEQ ID NO: 444932 - DNA, 15 bp, Homo sapiens
gatggcttttcttat

SEQ ID NO: 444933 - DNA, 15 bp, Homo sapiens
agatggcttttctta

SEQ ID NO: 444934 - DNA, 15 bp, Homo sapiens
cagatggcttttctt

SEQ ID NO: 444935 - DNA, 15 bp, Homo sapiens
gcagatggcttttct

SEQ ID NO: 444936 - DNA, 15 bp, Homo sapiens
tgcagatggcttttc

SEQ ID NO: 444937 - DNA, 15 bp, Homo sapiens
atgcagatggctttt

SEQ ID NO: 444938 - DNA, 15 bp, Homo sapiens
aatgcagatggcttt

SEQ ID NO: 444939 - DNA, 15 bp, Homo sapiens
caatgcagatggctt

SEQ ID NO: 444940 - DNA, 15 bp, Homo sapiens
tcaatgcagatggct

SEQ ID NO: 444941 - DNA, 15 bp, Homo sapiens
gtcaatgcagatggc

SEQ ID NO: 444942 - DNA, 15 bp, Homo sapiens
tgtcaatgcagatgg

SEQ ID NO: 444943 - DNA, 15 bp, Homo sapiens
ctgtcaatgcagatg

SEQ ID NO: 444944 - DNA, 15 bp, Homo sapiens
gctgtcaatgcagat

SEQ ID NO: 444945 - DNA, 15 bp, Homo sapiens
ggctgtcaatgcaga

SEQ ID NO: 444946 - DNA, 15 bp, Homo sapiens
tggctgtcaatgcag

SEQ ID NO: 444947 - DNA, 15 bp, Homo sapiens
ttggctgtcaatgca

SEQ ID NO: 444948 - DNA, 15 bp, Homo sapiens
cttggctgtcaatgc

SEQ ID NO: 444949 - DNA, 15 bp, Homo sapiens
tcttggctgtcaatg

SEQ ID NO: 444950 - DNA, 15 bp, Homo sapiens
ttcttggctgtcaat

SEQ ID NO: 444951 - DNA, 15 bp, Homo sapiens
gttcttggctgtcaa

SEQ ID NO: 444952 - DNA, 15 bp, Homo sapiens
ggttcttggctgtca

SEQ ID NO: 444953 - DNA, 15 bp, Homo sapiens
tggttcttggctgtc

SEQ ID NO: 444954 - DNA, 15 bp, Homo sapiens
atggttcttggctgt

SEQ ID NO: 444955 - DNA, 15 bp, Homo sapiens
aatggttcttggctg

SEQ ID NO: 444956 - DNA, 15 bp, Homo sapiens
caatggttcttggct

SEQ ID NO: 444957 - DNA, 15 bp, Homo sapiens
acaatggttcttggc

SEQ ID NO: 444958 - DNA, 15 bp, Homo sapiens
aacaatggttcttgg

SEQ ID NO: 444959 - DNA, 15 bp, Homo sapiens
aaacaatggttcttg

SEQ ID NO: 444960 - DNA, 15 bp, Homo sapiens
gaaacaatggttctt

SEQ ID NO: 444961 - DNA, 15 bp, Homo sapiens
agaaacaatggttct

SEQ ID NO: 444962 - DNA, 15 bp, Homo sapiens
aagaaacaatggttc

SEQ ID NO: 444963 - DNA, 15 bp, Homo sapiens
aaagaaacaatggtt

SEQ ID NO: 444964 - DNA, 15 bp, Homo sapiens
caaagaaacaatggt

SEQ ID NO: 444965 - DNA, 15 bp, Homo sapiens
acaaagaaacaatgg

SEQ ID NO: 444966 - DNA, 15 bp, Homo sapiens
aacaaagaaacaatg

SEQ ID NO: 444967 - DNA, 15 bp, Homo sapiens
caacaaagaaacaat

SEQ ID NO: 444968 - DNA, 15 bp, Homo sapiens
tcaacaaagaaacaa

SEQ ID NO: 444969 - DNA, 15 bp, Homo sapiens
ttcaacaaagaaaca

SEQ ID NO: 444970 - DNA, 15 bp, Homo sapiens
tttcaacaaagaaac

SEQ ID NO: 444971 - DNA, 15 bp, Homo sapiens
ttttcaacaaagaaa

SEQ ID NO: 444972 - DNA, 15 bp, Homo sapiens
gttttcaacaaagaa

SEQ ID NO: 444973 - DNA, 15 bp, Homo sapiens
agttttcaacaaaga

SEQ ID NO: 444974 - DNA, 15 bp, Homo sapiens
cagttttcaacaaag

SEQ ID NO: 444975 - DNA, 15 bp, Homo sapiens
tcagttttcaacaaa

SEQ ID NO: 444976 - DNA, 15 bp, Homo sapiens
gtcagttttcaacaa

SEQ ID NO: 444977 - DNA, 15 bp, Homo sapiens
ggtcagttttcaaca

SEQ ID NO: 444978 - DNA, 15 bp, Homo sapiens
tggtcagttttcaac

SEQ ID NO: 444979 - DNA, 15 bp, Homo sapiens
atggtcagttttcaa

SEQ ID NO: 444980 - DNA, 15 bp, Homo sapiens
aatggtcagttttca

SEQ ID NO: 444981 - DNA, 15 bp, Homo sapiens
aaatggtcagttttc

SEQ ID NO: 444982 - DNA, 15 bp, Homo sapiens
gaaatggtcagtttt

SEQ ID NO: 444983 - DNA, 15 bp, Homo sapiens
tgaaatggtcagttt

SEQ ID NO: 444984 - DNA, 15 bp, Homo sapiens
ttgaaatggtcagtt

SEQ ID NO: 444985 - DNA, 15 bp, Homo sapiens
gttgaaatggtcagt

SEQ ID NO: 444986 - DNA, 15 bp, Homo sapiens
ggttgaaatggtcag

SEQ ID NO: 444987 - DNA, 15 bp, Homo sapiens
aggttgaaatggtca

SEQ ID NO: 444988 - DNA, 15 bp, Homo sapiens
caggttgaaatggtc

SEQ ID NO: 444989 - DNA, 15 bp, Homo sapiens
gcaggttgaaatggt

SEQ ID NO: 444990 - DNA, 15 bp, Homo sapiens
tgcaggttgaaatgg

SEQ ID NO: 444991 - DNA, 15 bp, Homo sapiens
gtgcaggttgaaatg

SEQ ID NO: 444992 - DNA, 15 bp, Homo sapiens
tgtgcaggttgaaat

SEQ ID NO: 444993 - DNA, 15 bp, Homo sapiens
atgtgcaggttgaaa

SEQ ID NO: 444994 - DNA, 15 bp, Homo sapiens
catgtgcaggttgaa

SEQ ID NO: 444995 - DNA, 15 bp, Homo sapiens
gcatgtgcaggttga

SEQ ID NO: 444996 - DNA, 15 bp, Homo sapiens
tgcatgtgcaggttg

SEQ ID NO: 444997 - DNA, 15 bp, Homo sapiens
ctgcatgtgcaggtt

SEQ ID NO: 444998 - DNA, 15 bp, Homo sapiens
actgcatgtgcaggt

SEQ ID NO: 444999 - DNA, 15 bp, Homo sapiens
aactgcatgtgcagg

SEQ ID NO: 445000 - DNA, 15 bp, Homo sapiens
caactgcatgtgcag

SEQ ID NO: 445001 - DNA, 15 bp, Homo sapiens
tcaactgcatgtgca

SEQ ID NO: 445002 - DNA, 15 bp, Homo sapiens
ctcaactgcatgtgc

SEQ ID NO: 445003 - DNA, 15 bp, Homo sapiens
cctcaactgcatgtg

SEQ ID NO: 445004 - DNA, 15 bp, Homo sapiens
tcctcaactgcatgt

SEQ ID NO: 445005 - DNA, 15 bp, Homo sapiens
atcctcaactgcatg

SEQ ID NO: 445006 - DNA, 15 bp, Homo sapiens
tatcctcaactgcat

SEQ ID NO: 445007 - DNA, 15 bp, Homo sapiens
ttatcctcaactgca

SEQ ID NO: 445008 - DNA, 15 bp, Homo sapiens
cttatcctcaactgc

SEQ ID NO: 445009 - DNA, 15 bp, Homo sapiens
acttatcctcaactg

SEQ ID NO: 445010 - DNA, 15 bp, Homo sapiens
aacttatcctcaact

SEQ ID NO: 445011 - DNA, 15 bp, Homo sapiens
aaacttatcctcaac

SEQ ID NO: 445012 - DNA, 15 bp, Homo sapiens
taaacttatcctcaa

SEQ ID NO: 445013 - DNA, 15 bp, Homo sapiens
gtaaacttatcctca

SEQ ID NO: 445014 - DNA, 15 bp, Homo sapiens
agtaaacttatcctc

SEQ ID NO: 445015 - DNA, 15 bp, Homo sapiens
cagtaaacttatcct

SEQ ID NO: 445016 - DNA, 15 bp, Homo sapiens
tcagtaaacttatcc

SEQ ID NO: 445017 - DNA, 15 bp, Homo sapiens
atcagtaaacttatc

SEQ ID NO: 445018 - DNA, 15 bp, Homo sapiens
gatcagtaaacttat

SEQ ID NO: 445019 - DNA, 15 bp, Homo sapiens
agatcagtaaactta

SEQ ID NO: 445020 - DNA, 15 bp, Homo sapiens
aagatcagtaaactt

SEQ ID NO: 445021 - DNA, 15 bp, Homo sapiens
caagatcagtaaact

SEQ ID NO: 445022 - DNA, 15 bp, Homo sapiens
gcaagatcagtaaac

SEQ ID NO: 445023 - DNA, 15 bp, Homo sapiens
ggcaagatcagtaaa

SEQ ID NO: 445024 - DNA, 15 bp, Homo sapiens
tggcaagatcagtaa

SEQ ID NO: 445025 - DNA, 15 bp, Homo sapiens
gtggcaagatcagta

SEQ ID NO: 445026 - DNA, 15 bp, Homo sapiens
tgtggcaagatcagt

SEQ ID NO: 445027 - DNA, 15 bp, Homo sapiens
ctgtggcaagatcag

SEQ ID NO: 445028 - DNA, 15 bp, Homo sapiens
tctgtggcaagatca

SEQ ID NO: 445029 - DNA, 15 bp, Homo sapiens
atctgtggcaagatc

SEQ ID NO: 445030 - DNA, 15 bp, Homo sapiens
catctgtggcaagat

SEQ ID NO: 445031 - DNA, 15 bp, Homo sapiens
tcatctgtggcaaga

SEQ ID NO: 445032 - DNA, 15 bp, Homo sapiens
ctcatctgtggcaag

SEQ ID NO: 445033 - DNA, 15 bp, Homo sapiens
actcatctgtggcaa

SEQ ID NO: 445034 - DNA, 15 bp, Homo sapiens
aactcatctgtggca

SEQ ID NO: 445035 - DNA, 15 bp, Homo sapiens
aaactcatctgtggc

SEQ ID NO: 445036 - DNA, 15 bp, Homo sapiens
gaaactcatctgtgg

SEQ ID NO: 445037 - DNA, 15 bp, Homo sapiens
tgaaactcatctgtg

SEQ ID NO: 445038 - DNA, 15 bp, Homo sapiens
ttgaaactcatctgt

SEQ ID NO: 445039 - DNA, 15 bp, Homo sapiens
tttgaaactcatctg

SEQ ID NO: 445040 - DNA, 15 bp, Homo sapiens
gtttgaaactcatct

SEQ ID NO: 445041 - DNA, 15 bp, Homo sapiens
tgtttgaaactcatc

SEQ ID NO: 445042 - DNA, 15 bp, Homo sapiens
ctgtttgaaactcat

SEQ ID NO: 445043 - DNA, 15 bp, Homo sapiens
tctgtttgaaactca

SEQ ID NO: 445044 - DNA, 15 bp, Homo sapiens
ttctgtttgaaactc

SEQ ID NO: 445045 - DNA, 15 bp, Homo sapiens
cttctgtttgaaact

SEQ ID NO: 445046 - DNA, 15 bp, Homo sapiens
ccttctgtttgaaac

SEQ ID NO: 445047 - DNA, 15 bp, Homo sapiens
tccttctgtttgaaa

SEQ ID NO: 445048 - DNA, 15 bp, Homo sapiens
ttccttctgtttgaa

SEQ ID NO: 445049 - DNA, 15 bp, Homo sapiens
attccttctgtttga

SEQ ID NO: 445050 - DNA, 15 bp, Homo sapiens
tattccttctgtttg

SEQ ID NO: 445051 - DNA, 15 bp, Homo sapiens
ttattccttctgttt

SEQ ID NO: 445052 - DNA, 15 bp, Homo sapiens
cttattccttctgtt

SEQ ID NO: 445053 - DNA, 15 bp, Homo sapiens
ccttattccttctgt

SEQ ID NO: 445054 - DNA, 15 bp, Homo sapiens
tccttattccttctg

SEQ ID NO: 445055 - DNA, 15 bp, Homo sapiens
ttccttattccttct

SEQ ID NO: 445056 - DNA, 15 bp, Homo sapiens
tttccttattccttc

SEQ ID NO: 445057 - DNA, 15 bp, Homo sapiens
ttttccttattcctt

SEQ ID NO: 445058 - DNA, 15 bp, Homo sapiens
gttttccttattcct

SEQ ID NO: 445059 - DNA, 15 bp, Homo sapiens
tgttttccttattcc

SEQ ID NO: 445060 - DNA, 15 bp, Homo sapiens
ctgttttccttattc

SEQ ID NO: 445061 - DNA, 15 bp, Homo sapiens
actgttttccttatt

SEQ ID NO: 445062 - DNA, 15 bp, Homo sapiens
tactgttttccttat

SEQ ID NO: 445063 - DNA, 15 bp, Homo sapiens
atactgttttcctta

SEQ ID NO: 445064 - DNA, 15 bp, Homo sapiens
gatactgttttcctt

SEQ ID NO: 445065 - DNA, 15 bp, Homo sapiens
tgatactgttttcct

SEQ ID NO: 445066 - DNA, 15 bp, Homo sapiens
ttgatactgttttcc

SEQ ID NO: 445067 - DNA, 15 bp, Homo sapiens
attgatactgttttc

SEQ ID NO: 445068 - DNA, 15 bp, Homo sapiens
aattgatactgtttt

SEQ ID NO: 445069 - DNA, 15 bp, Homo sapiens
caattgatactgttt

SEQ ID NO: 445070 - DNA, 15 bp, Homo sapiens
acaattgatactgtt

SEQ ID NO: 445071 - DNA, 15 bp, Homo sapiens
aacaattgatactgt

SEQ ID NO: 445072 - DNA, 15 bp, Homo sapiens
aaacaattgatactg

SEQ ID NO: 445073 - DNA, 15 bp, Homo sapiens
gaaacaattgatact

SEQ ID NO: 445074 - DNA, 15 bp, Homo sapiens
ggaaacaattgatac

SEQ ID NO: 445075 - DNA, 15 bp, Homo sapiens
gggaaacaattgata

SEQ ID NO: 445076 - DNA, 15 bp, Homo sapiens
agggaaacaattgat

SEQ ID NO: 445077 - DNA, 15 bp, Homo sapiens
cagggaaacaattga

SEQ ID NO: 445078 - DNA, 15 bp, Homo sapiens
ccagggaaacaattg

SEQ ID NO: 445079 - DNA, 15 bp, Homo sapiens
tccagggaaacaatt

SEQ ID NO: 445080 - DNA, 15 bp, Homo sapiens
ttccagggaaacaat

SEQ ID NO: 445081 - DNA, 15 bp, Homo sapiens
gttccagggaaacaa

SEQ ID NO: 445082 - DNA, 15 bp, Homo sapiens
agttccagggaaaca

SEQ ID NO: 445083 - DNA, 15 bp, Homo sapiens
gagttccagggaaac

SEQ ID NO: 445084 - DNA, 15 bp, Homo sapiens
ggagttccagggaaa

SEQ ID NO: 445085 - DNA, 15 bp, Homo sapiens
tggagttccagggaa

SEQ ID NO: 445086 - DNA, 15 bp, Homo sapiens
atggagttccaggga

SEQ ID NO: 445087 - DNA, 15 bp, Homo sapiens
aatggagttccaggg

SEQ ID NO: 445088 - DNA, 15 bp, Homo sapiens
gaatggagttccagg

SEQ ID NO: 445089 - DNA, 15 bp, Homo sapiens
tgaatggagttccag

SEQ ID NO: 445090 - DNA, 15 bp, Homo sapiens
ctgaatggagttcca

SEQ ID NO: 445091 - DNA, 15 bp, Homo sapiens
tctgaatggagttcc

SEQ ID NO: 445092 - DNA, 15 bp, Homo sapiens
atctgaatggagttc

SEQ ID NO: 445093 - DNA, 15 bp, Homo sapiens
aatctgaatggagtt

SEQ ID NO: 445094 - DNA, 15 bp, Homo sapiens
aaatctgaatggagt

SEQ ID NO: 445095 - DNA, 15 bp, Homo sapiens
gaaatctgaatggag

SEQ ID NO: 445096 - DNA, 15 bp, Homo sapiens
tgaaatctgaatgga

SEQ ID NO: 445097 - DNA, 15 bp, Homo sapiens
ttgaaatctgaatgg

SEQ ID NO: 445098 - DNA, 15 bp, Homo sapiens
cttgaaatctgaatg

SEQ ID NO: 445099 - DNA, 15 bp, Homo sapiens
ccttgaaatctgaat

SEQ ID NO: 445100 - DNA, 15 bp, Homo sapiens
gccttgaaatctgaa

SEQ ID NO: 445101 - DNA, 15 bp, Homo sapiens
cgccttgaaatctga

SEQ ID NO: 445102 - DNA, 15 bp, Homo sapiens
tcgccttgaaatctg

SEQ ID NO: 445103 - DNA, 15 bp, Homo sapiens
ctcgccttgaaatct

SEQ ID NO: 445104 - DNA, 15 bp, Homo sapiens
actcgccttgaaatc

SEQ ID NO: 445105 - DNA, 15 bp, Homo sapiens
cactcgccttgaaat

SEQ ID NO: 445106 - DNA, 15 bp, Homo sapiens
gcactcgccttgaaa

SEQ ID NO: 445107 - DNA, 15 bp, Homo sapiens
tgcactcgccttgaa

SEQ ID NO: 445108 - DNA, 15 bp, Homo sapiens
ttgcactcgccttga

SEQ ID NO: 445109 - DNA, 15 bp, Homo sapiens
attgcactcgccttg

SEQ ID NO: 445110 - DNA, 15 bp, Homo sapiens
gattgcactcgcctt

SEQ ID NO: 445111 - DNA, 15 bp, Homo sapiens
tgattgcactcgcct

SEQ ID NO: 445112 - DNA, 15 bp, Homo sapiens
ctgattgcactcgcc

SEQ ID NO: 445113 - DNA, 15 bp, Homo sapiens
tctgattgcactcgc

SEQ ID NO: 445114 - DNA, 15 bp, Homo sapiens
ttctgattgcactcg

SEQ ID NO: 445115 - DNA, 15 bp, Homo sapiens
tttctgattgcactc

SEQ ID NO: 445116 - DNA, 15 bp, Homo sapiens
ctttctgattgcact

SEQ ID NO: 445117 - DNA, 15 bp, Homo sapiens
cctttctgattgcac

SEQ ID NO: 445118 - DNA, 15 bp, Homo sapiens
tcctttctgattgca

SEQ ID NO: 445119 - DNA, 15 bp, Homo sapiens
atcctttctgattgc

SEQ ID NO: 445120 - DNA, 15 bp, Homo sapiens
catcctttctgattg

SEQ ID NO: 445121 - DNA, 15 bp, Homo sapiens
tcatcctttctgatt

SEQ ID NO: 445122 - DNA, 15 bp, Homo sapiens
atcatcctttctgat

SEQ ID NO: 445123 - DNA, 15 bp, Homo sapiens
aatcatcctttctga

SEQ ID NO: 445124 - DNA, 15 bp, Homo sapiens
aaatcatcctttctg

SEQ ID NO: 445125 - DNA, 15 bp, Homo sapiens
gaaatcatcctttct

SEQ ID NO: 445126 - DNA, 15 bp, Homo sapiens
agaaatcatcctttc

SEQ ID NO: 445127 - DNA, 15 bp, Homo sapiens
tagaaatcatccttt

SEQ ID NO: 445128 - DNA, 15 bp, Homo sapiens
ttagaaatcatcctt

SEQ ID NO: 445129 - DNA, 15 bp, Homo sapiens
gttagaaatcatcct

SEQ ID NO: 445130 - DNA, 15 bp, Homo sapiens
agttagaaatcatcc

SEQ ID NO: 445131 - DNA, 15 bp, Homo sapiens
aagttagaaatcatc

SEQ ID NO: 445132 - DNA, 15 bp, Homo sapiens
caagttagaaatcat

SEQ ID NO: 445133 - DNA, 15 bp, Homo sapiens
ccaagttagaaatca

SEQ ID NO: 445134 - DNA, 15 bp, Homo sapiens
gccaagttagaaatc

SEQ ID NO: 445135 - DNA, 15 bp, Homo sapiens
agccaagttagaaat

SEQ ID NO: 445136 - DNA, 15 bp, Homo sapiens
cagccaagttagaaa

SEQ ID NO: 445137 - DNA, 15 bp, Homo sapiens
ccagccaagttagaa

SEQ ID NO: 445138 - DNA, 15 bp, Homo sapiens
cccagccaagttaga

SEQ ID NO: 445139 - DNA, 15 bp, Homo sapiens
acccagccaagttag

SEQ ID NO: 445140 - DNA, 15 bp, Homo sapiens
aacccagccaagtta

SEQ ID NO: 445141 - DNA, 15 bp, Homo sapiens
caacccagccaagtt

SEQ ID NO: 445142 - DNA, 15 bp, Homo sapiens
tcaacccagccaagt

SEQ ID NO: 445143 - DNA, 15 bp, Homo sapiens
atcaacccagccaag

SEQ ID NO: 445144 - DNA, 15 bp, Homo sapiens
aatcaacccagccaa

SEQ ID NO: 445145 - DNA, 15 bp, Homo sapiens
aaatcaacccagcca

SEQ ID NO: 445146 - DNA, 15 bp, Homo sapiens
taaatcaacccagcc

SEQ ID NO: 445147 - DNA, 15 bp, Homo sapiens
ttaaatcaacccagc

SEQ ID NO: 445148 - DNA, 15 bp, Homo sapiens
attaaatcaacccag

SEQ ID NO: 445149 - DNA, 15 bp, Homo sapiens
gattaaatcaaccca

SEQ ID NO: 445150 - DNA, 15 bp, Homo sapiens
ggattaaatcaaccc

SEQ ID NO: 445151 - DNA, 15 bp, Homo sapiens
gggattaaatcaacc

SEQ ID NO: 445152 - DNA, 15 bp, Homo sapiens
agggattaaatcaac

SEQ ID NO: 445153 - DNA, 15 bp, Homo sapiens
aagggattaaatcaa

SEQ ID NO: 445154 - DNA, 15 bp, Homo sapiens
aaagggattaaatca

SEQ ID NO: 445155 - DNA, 15 bp, Homo sapiens
gaaagggattaaatc

SEQ ID NO: 445156 - DNA, 15 bp, Homo sapiens
ggaaagggattaaat

SEQ ID NO: 445157 - DNA, 15 bp, Homo sapiens
tggaaagggattaaa

SEQ ID NO: 445158 - DNA, 15 bp, Homo sapiens
ctggaaagggattaa

SEQ ID NO: 445159 - DNA, 15 bp, Homo sapiens
tctggaaagggatta

SEQ ID NO: 445160 - DNA, 15 bp, Homo sapiens
atctggaaagggatt

SEQ ID NO: 445161 - DNA, 15 bp, Homo sapiens
catctggaaagggat

SEQ ID NO: 445162 - DNA, 15 bp, Homo sapiens
tcatctggaaaggga

SEQ ID NO: 445163 - DNA, 15 bp, Homo sapiens
atcatctggaaaggg

SEQ ID NO: 445164 - DNA, 15 bp, Homo sapiens
aatcatctggaaagg

SEQ ID NO: 445165 - DNA, 15 bp, Homo sapiens
caatcatctggaaag

SEQ ID NO: 445166 - DNA, 15 bp, Homo sapiens
tcaatcatctggaaa

SEQ ID NO: 445167 - DNA, 15 bp, Homo sapiens
gtcaatcatctggaa

SEQ ID NO: 445168 - DNA, 15 bp, Homo sapiens
tgtcaatcatctgga

SEQ ID NO: 445169 - DNA, 15 bp, Homo sapiens
atgtcaatcatctgg

SEQ ID NO: 445170 - DNA, 15 bp, Homo sapiens
aatgtcaatcatctg

SEQ ID NO: 445171 - DNA, 15 bp, Homo sapiens
aaatgtcaatcatct

SEQ ID NO: 445172 - DNA, 15 bp, Homo sapiens
aaaatgtcaatcatc

SEQ ID NO: 445173 - DNA, 15 bp, Homo sapiens
gaaaatgtcaatcat

SEQ ID NO: 445174 - DNA, 15 bp, Homo sapiens
agaaaatgtcaatca

SEQ ID NO: 445175 - DNA, 15 bp, Homo sapiens
cagaaaatgtcaatc

SEQ ID NO: 445176 - DNA, 15 bp, Homo sapiens
gcagaaaatgtcaat

SEQ ID NO: 445177 - DNA, 15 bp, Homo sapiens
agcagaaaatgtcaa

SEQ ID NO: 445178 - DNA, 15 bp, Homo sapiens
gagcagaaaatgtca

SEQ ID NO: 445179 - DNA, 15 bp, Homo sapiens
cgagcagaaaatgtc

SEQ ID NO: 445180 - DNA, 15 bp, Homo sapiens
ccgagcagaaaatgt

SEQ ID NO: 445181 - DNA, 15 bp, Homo sapiens
gccgagcagaaaatg

SEQ ID NO: 445182 - DNA, 15 bp, Homo sapiens
tgccgagcagaaaat

SEQ ID NO: 445183 - DNA, 15 bp, Homo sapiens
ctgccgagcagaaaa

SEQ ID NO: 445184 - DNA, 15 bp, Homo sapiens
tctgccgagcagaaa

SEQ ID NO: 445185 - DNA, 15 bp, Homo sapiens
ctctgccgagcagaa

SEQ ID NO: 445186 - DNA, 15 bp, Homo sapiens
actctgccgagcaga

SEQ ID NO: 445187 - DNA, 15 bp, Homo sapiens
aactctgccgagcag

SEQ ID NO: 445188 - DNA, 15 bp, Homo sapiens
gaactctgccgagca

SEQ ID NO: 445189 - DNA, 15 bp, Homo sapiens
tgaactctgccgagc

SEQ ID NO: 445190 - DNA, 15 bp, Homo sapiens
ctgaactctgccgag

SEQ ID NO: 445191 - DNA, 15 bp, Homo sapiens
cctgaactctgccga

SEQ ID NO: 445192 - DNA, 15 bp, Homo sapiens
ccctgaactctgccg

SEQ ID NO: 445193 - DNA, 15 bp, Homo sapiens
tccctgaactctgcc

SEQ ID NO: 445194 - DNA, 15 bp, Homo sapiens
gtccctgaactctgc

SEQ ID NO: 445195 - DNA, 15 bp, Homo sapiens
agtccctgaactctg

SEQ ID NO: 445196 - DNA, 15 bp, Homo sapiens
cagtccctgaactct

SEQ ID NO: 445197 - DNA, 15 bp, Homo sapiens
ccagtccctgaactc

SEQ ID NO: 445198 - DNA, 15 bp, Homo sapiens
tccagtccctgaact

SEQ ID NO: 445199 - DNA, 15 bp, Homo sapiens
ttccagtccctgaac

SEQ ID NO: 445200 - DNA, 15 bp, Homo sapiens
attccagtccctgaa

SEQ ID NO: 445201 - DNA, 15 bp, Homo sapiens
aattccagtccctga

SEQ ID NO: 445202 - DNA, 15 bp, Homo sapiens
caattccagtccctg

SEQ ID NO: 445203 - DNA, 15 bp, Homo sapiens
gcaattccagtccct

SEQ ID NO: 445204 - DNA, 15 bp, Homo sapiens
tgcaattccagtccc

SEQ ID NO: 445205 - DNA, 15 bp, Homo sapiens
ttgcaattccagtcc

SEQ ID NO: 445206 - DNA, 15 bp, Homo sapiens
cttgcaattccagtc

SEQ ID NO: 445207 - DNA, 15 bp, Homo sapiens
tcttgcaattccagt

SEQ ID NO: 445208 - DNA, 15 bp, Homo sapiens
ctcttgcaattccag

SEQ ID NO: 445209 - DNA, 15 bp, Homo sapiens
actcttgcaattcca

SEQ ID NO: 445210 - DNA, 15 bp, Homo sapiens
tactcttgcaattcc

SEQ ID NO: 445211 - DNA, 15 bp, Homo sapiens
atactcttgcaattc

SEQ ID NO: 445212 - DNA, 15 bp, Homo sapiens
aatactcttgcaatt

SEQ ID NO: 445213 - DNA, 15 bp, Homo sapiens
aaatactcttgcaat

SEQ ID NO: 445214 - DNA, 15 bp, Homo sapiens
aaaatactcttgcaa

SEQ ID NO: 445215 - DNA, 15 bp, Homo sapiens
gaaaatactcttgca

SEQ ID NO: 445216 - DNA, 15 bp, Homo sapiens
tgaaaatactcttgc

SEQ ID NO: 445217 - DNA, 15 bp, Homo sapiens
atgaaaatactcttg

SEQ ID NO: 445218 - DNA, 15 bp, Homo sapiens
catgaaaatactctt

SEQ ID NO: 445219 - DNA, 15 bp, Homo sapiens
gcatgaaaatactct

SEQ ID NO: 445220 - DNA, 15 bp, Homo sapiens
cgcatgaaaatactc

SEQ ID NO: 445221 - DNA, 15 bp, Homo sapiens
acgcatgaaaatact

SEQ ID NO: 445222 - DNA, 15 bp, Homo sapiens
cacgcatgaaaatac

SEQ ID NO: 445223 - DNA, 15 bp, Homo sapiens
acacgcatgaaaata

SEQ ID NO: 445224 - DNA, 15 bp, Homo sapiens
aacacgcatgaaaat

SEQ ID NO: 445225 - DNA, 15 bp, Homo sapiens
caacacgcatgaaaa

SEQ ID NO: 445226 - DNA, 15 bp, Homo sapiens
tcaacacgcatgaaa

SEQ ID NO: 445227 - DNA, 15 bp, Homo sapiens
ttcaacacgcatgaa

SEQ ID NO: 445228 - DNA, 15 bp, Homo sapiens
cttcaacacgcatga

SEQ ID NO: 445229 - DNA, 15 bp, Homo sapiens
tcttcaacacgcatg

SEQ ID NO: 445230 - DNA, 15 bp, Homo sapiens
atcttcaacacgcat

SEQ ID NO: 445231 - DNA, 15 bp, Homo sapiens
catcttcaacacgca

SEQ ID NO: 445232 - DNA, 15 bp, Homo sapiens
tcatcttcaacacgc

SEQ ID NO: 445233 - DNA, 15 bp, Homo sapiens
ttcatcttcaacacg

SEQ ID NO: 445234 - DNA, 15 bp, Homo sapiens
gttcatcttcaacac

SEQ ID NO: 445235 - DNA, 15 bp, Homo sapiens
agttcatcttcaaca

SEQ ID NO: 445236 - DNA, 15 bp, Homo sapiens
cagttcatcttcaac

SEQ ID NO: 445237 - DNA, 15 bp, Homo sapiens
ccagttcatcttcaa

SEQ ID NO: 445238 - DNA, 15 bp, Homo sapiens
tccagttcatcttca

SEQ ID NO: 445239 - DNA, 15 bp, Homo sapiens
ttccagttcatcttc

SEQ ID NO: 445240 - DNA, 15 bp, Homo sapiens
tttccagttcatctt

SEQ ID NO: 445241 - DNA, 15 bp, Homo sapiens
atttccagttcatct

SEQ ID NO: 445242 - DNA, 15 bp, Homo sapiens
gatttccagttcatc

SEQ ID NO: 445243 - DNA, 15 bp, Homo sapiens
ggatttccagttcat

SEQ ID NO: 445244 - DNA, 15 bp, Homo sapiens
gggatttccagttca

SEQ ID NO: 445245 - DNA, 15 bp, Homo sapiens
agggatttccagttc

SEQ ID NO: 445246 - DNA, 15 bp, Homo sapiens
gagggatttccagtt

SEQ ID NO: 445247 - DNA, 15 bp, Homo sapiens
ggagggatttccagt

SEQ ID NO: 445248 - DNA, 15 bp, Homo sapiens
cggagggatttccag

SEQ ID NO: 445249 - DNA, 15 bp, Homo sapiens
ccggagggatttcca

SEQ ID NO: 445250 - DNA, 15 bp, Homo sapiens
gccggagggatttcc

SEQ ID NO: 445251 - DNA, 15 bp, Homo sapiens
tgccggagggatttc

SEQ ID NO: 445252 - DNA, 15 bp, Homo sapiens
gtgccggagggattt

SEQ ID NO: 445253 - DNA, 15 bp, Homo sapiens
ggtgccggagggatt

SEQ ID NO: 445254 - DNA, 15 bp, Homo sapiens
aggtgccggagggat

SEQ ID NO: 445255 - DNA, 15 bp, Homo sapiens
gaggtgccggaggga

SEQ ID NO: 445256 - DNA, 15 bp, Homo sapiens
tgaggtgccggaggg

SEQ ID NO: 445257 - DNA, 15 bp, Homo sapiens
ttgaggtgccggagg

SEQ ID NO: 445258 - DNA, 15 bp, Homo sapiens
attgaggtgccggag

SEQ ID NO: 445259 - DNA, 15 bp, Homo sapiens
gattgaggtgccgga

SEQ ID NO: 445260 - DNA, 15 bp, Homo sapiens
agattgaggtgccgg

SEQ ID NO: 445261 - DNA, 15 bp, Homo sapiens
gagattgaggtgccg

SEQ ID NO: 445262 - DNA, 15 bp, Homo sapiens
tgagattgaggtgcc

SEQ ID NO: 445263 - DNA, 15 bp, Homo sapiens
ttgagattgaggtgc

SEQ ID NO: 445264 - DNA, 15 bp, Homo sapiens
gttgagattgaggtg

SEQ ID NO: 445265 - DNA, 15 bp, Homo sapiens
tgttgagattgaggt

SEQ ID NO: 445266 - DNA, 15 bp, Homo sapiens
atgttgagattgagg

SEQ ID NO: 445267 - DNA, 15 bp, Homo sapiens
aatgttgagattgag

SEQ ID NO: 445268 - DNA, 15 bp, Homo sapiens
aaatgttgagattga

SEQ ID NO: 445269 - DNA, 15 bp, Homo sapiens
gaaatgttgagattg

SEQ ID NO: 445270 - DNA, 15 bp, Homo sapiens
ggaaatgttgagatt

SEQ ID NO: 445271 - DNA, 15 bp, Homo sapiens
tggaaatgttgagat

SEQ ID NO: 445272 - DNA, 15 bp, Homo sapiens
ttggaaatgttgaga

SEQ ID NO: 445273 - DNA, 15 bp, Homo sapiens
tttggaaatgttgag

SEQ ID NO: 445274 - DNA, 15 bp, Homo sapiens
ttttggaaatgttga

SEQ ID NO: 445275 - DNA, 15 bp, Homo sapiens
gttttggaaatgttg

SEQ ID NO: 445276 - DNA, 15 bp, Homo sapiens
agttttggaaatgtt

SEQ ID NO: 445277 - DNA, 15 bp, Homo sapiens
cagttttggaaatgt

SEQ ID NO: 445278 - DNA, 15 bp, Homo sapiens
tcagttttggaaatg

SEQ ID NO: 445279 - DNA, 15 bp, Homo sapiens
ttcagttttggaaat

SEQ ID NO: 445280 - DNA, 15 bp, Homo sapiens
gttcagttttggaaa

SEQ ID NO: 445281 - DNA, 15 bp, Homo sapiens
agttcagttttggaa

SEQ ID NO: 445282 - DNA, 15 bp, Homo sapiens
gagttcagttttgga

SEQ ID NO: 445283 - DNA, 15 bp, Homo sapiens
tgagttcagttttgg

SEQ ID NO: 445284 - DNA, 15 bp, Homo sapiens
atgagttcagttttg

SEQ ID NO: 445285 - DNA, 15 bp, Homo sapiens
gatgagttcagtttt

SEQ ID NO: 445286 - DNA, 15 bp, Homo sapiens
tgatgagttcagttt

SEQ ID NO: 445287 - DNA, 15 bp, Homo sapiens
gtgatgagttcagtt

SEQ ID NO: 445288 - DNA, 15 bp, Homo sapiens
ggtgatgagttcagt

SEQ ID NO: 445289 - DNA, 15 bp, Homo sapiens
gggtgatgagttcag

SEQ ID NO: 445290 - DNA, 15 bp, Homo sapiens
ggggtgatgagttca

SEQ ID NO: 445291 - DNA, 15 bp, Homo sapiens
aggggtgatgagttc

SEQ ID NO: 445292 - DNA, 15 bp, Homo sapiens
gaggggtgatgagtt

SEQ ID NO: 445293 - DNA, 15 bp, Homo sapiens
agaggggtgatgagt

SEQ ID NO: 445294 - DNA, 15 bp, Homo sapiens
aagaggggtgatgag

SEQ ID NO: 445295 - DNA, 15 bp, Homo sapiens
gaagaggggtgatga

SEQ ID NO: 445296 - DNA, 15 bp, Homo sapiens
ggaagaggggtgatg

SEQ ID NO: 445297 - DNA, 15 bp, Homo sapiens
gggaagaggggtgat

SEQ ID NO: 445298 - DNA, 15 bp, Homo sapiens
ggggaagaggggtga

SEQ ID NO: 445299 - DNA, 15 bp, Homo sapiens
gggggaagaggggtg

SEQ ID NO: 445300 - DNA, 15 bp, Homo sapiens
tgggggaagaggggt

SEQ ID NO: 445301 - DNA, 15 bp, Homo sapiens
gtgggggaagagggg

SEQ ID NO: 445302 - DNA, 15 bp, Homo sapiens
ggtgggggaagaggg

SEQ ID NO: 445303 - DNA, 15 bp, Homo sapiens
tggtgggggaagagg

SEQ ID NO: 445304 - DNA, 15 bp, Homo sapiens
gtggtgggggaagag

SEQ ID NO: 445305 - DNA, 15 bp, Homo sapiens
ggtggtgggggaaga

SEQ ID NO: 445306 - DNA, 15 bp, Homo sapiens
tggtggtgggggaag

SEQ ID NO: 445307 - DNA, 15 bp, Homo sapiens
ttggtggtgggggaa

SEQ ID NO: 445308 - DNA, 15 bp, Homo sapiens
tttggtggtggggga

SEQ ID NO: 445309 - DNA, 15 bp, Homo sapiens
ttttggtggtggggg

SEQ ID NO: 445310 - DNA, 15 bp, Homo sapiens
gttttggtggtgggg

SEQ ID NO: 445311 - DNA, 15 bp, Homo sapiens
agttttggtggtggg

SEQ ID NO: 445312 - DNA, 15 bp, Homo sapiens
cagttttggtggtgg

SEQ ID NO: 445313 - DNA, 15 bp, Homo sapiens
gcagttttggtggtg

SEQ ID NO: 445314 - DNA, 15 bp, Homo sapiens
agcagttttggtggt

SEQ ID NO: 445315 - DNA, 15 bp, Homo sapiens
gagcagttttggtgg

SEQ ID NO: 445316 - DNA, 15 bp, Homo sapiens
ggagcagttttggtg

SEQ ID NO: 445317 - DNA, 15 bp, Homo sapiens
aggagcagttttggt

SEQ ID NO: 445318 - DNA, 15 bp, Homo sapiens
gaggagcagttttgg

SEQ ID NO: 445319 - DNA, 15 bp, Homo sapiens
ggaggagcagttttg

SEQ ID NO: 445320 - DNA, 15 bp, Homo sapiens
aggaggagcagtttt

SEQ ID NO: 445321 - DNA, 15 bp, Homo sapiens
gaggaggagcagttt

SEQ ID NO: 445322 - DNA, 15 bp, Homo sapiens
ggaggaggagcagtt

SEQ ID NO: 445323 - DNA, 15 bp, Homo sapiens
aggaggaggagcagt

SEQ ID NO: 445324 - DNA, 15 bp, Homo sapiens
caggaggaggagcag

SEQ ID NO: 445325 - DNA, 15 bp, Homo sapiens
acaggaggaggagca

SEQ ID NO: 445326 - DNA, 15 bp, Homo sapiens
tacaggaggaggagc

SEQ ID NO: 445327 - DNA, 15 bp, Homo sapiens
atacaggaggaggag

SEQ ID NO: 445328 - DNA, 15 bp, Homo sapiens
aatacaggaggagga

SEQ ID NO: 445329 - DNA, 15 bp, Homo sapiens
gaatacaggaggagg

SEQ ID NO: 445330 - DNA, 15 bp, Homo sapiens
ggaatacaggaggag

SEQ ID NO: 445331 - DNA, 15 bp, Homo sapiens
aggaatacaggagga

SEQ ID NO: 445332 - DNA, 15 bp, Homo sapiens
caggaatacaggagg

SEQ ID NO: 445333 - DNA, 15 bp, Homo sapiens
tcaggaatacaggag

SEQ ID NO: 445334 - DNA, 15 bp, Homo sapiens
gtcaggaatacagga

SEQ ID NO: 445335 - DNA, 15 bp, Homo sapiens
ggtcaggaatacagg

SEQ ID NO: 445336 - DNA, 15 bp, Homo sapiens
aggtcaggaatacag

SEQ ID NO: 445337 - DNA, 15 bp, Homo sapiens
gaggtcaggaataca

SEQ ID NO: 445338 - DNA, 15 bp, Homo sapiens
ggaggtcaggaatac

SEQ ID NO: 445339 - DNA, 15 bp, Homo sapiens
cggaggtcaggaata

SEQ ID NO: 445340 - DNA, 15 bp, Homo sapiens
gcggaggtcaggaat

SEQ ID NO: 445341 - DNA, 15 bp, Homo sapiens
ggcggaggtcaggaa

SEQ ID NO: 445342 - DNA, 15 bp, Homo sapiens
tggcggaggtcagga

SEQ ID NO: 445343 - DNA, 15 bp, Homo sapiens
atggcggaggtcagg

SEQ ID NO: 445344 - DNA, 15 bp, Homo sapiens
gatggcggaggtcag

SEQ ID NO: 445345 - DNA, 15 bp, Homo sapiens
ggatggcggaggtca

SEQ ID NO: 445346 - DNA, 15 bp, Homo sapiens
tggatggcggaggtc

SEQ ID NO: 445347 - DNA, 15 bp, Homo sapiens
gtggatggcggaggt

SEQ ID NO: 445348 - DNA, 15 bp, Homo sapiens
ggtggatggcggagg

SEQ ID NO: 445349 - DNA, 15 bp, Homo sapiens
gggtggatggcggag

SEQ ID NO: 445350 - DNA, 15 bp, Homo sapiens
ggggtggatggcgga

SEQ ID NO: 445351 - DNA, 15 bp, Homo sapiens
cggggtggatggcgg

SEQ ID NO: 445352 - DNA, 15 bp, Homo sapiens
acggggtggatggcg

SEQ ID NO: 445353 - DNA, 15 bp, Homo sapiens
aacggggtggatggc

SEQ ID NO: 445354 - DNA, 15 bp, Homo sapiens
caacggggtggatgg

SEQ ID NO: 445355 - DNA, 15 bp, Homo sapiens
gcaacggggtggatg

SEQ ID NO: 445356 - DNA, 15 bp, Homo sapiens
agcaacggggtggat

SEQ ID NO: 445357 - DNA, 15 bp, Homo sapiens
gagcaacggggtgga

SEQ ID NO: 445358 - DNA, 15 bp, Homo sapiens
tgagcaacggggtgg

SEQ ID NO: 445359 - DNA, 15 bp, Homo sapiens
ttgagcaacggggtg

SEQ ID NO: 445360 - DNA, 15 bp, Homo sapiens
cttgagcaacggggt

SEQ ID NO: 445361 - DNA, 15 bp, Homo sapiens
gcttgagcaacgggg

SEQ ID NO: 445362 - DNA, 15 bp, Homo sapiens
ggcttgagcaacggg

SEQ ID NO: 445363 - DNA, 15 bp, Homo sapiens
cggcttgagcaacgg

SEQ ID NO: 445364 - DNA, 15 bp, Homo sapiens
ccggcttgagcaacg

SEQ ID NO: 445365 - DNA, 15 bp, Homo sapiens
tccggcttgagcaac

SEQ ID NO: 445366 - DNA, 15 bp, Homo sapiens
ttccggcttgagcaa

SEQ ID NO: 445367 - DNA, 15 bp, Homo sapiens
tttccggcttgagca

SEQ ID NO: 445368 - DNA, 15 bp, Homo sapiens
gtttccggcttgagc

SEQ ID NO: 445369 - DNA, 15 bp, Homo sapiens
agtttccggcttgag

SEQ ID NO: 445370 - DNA, 15 bp, Homo sapiens
gagtttccggcttga

SEQ ID NO: 445371 - DNA, 15 bp, Homo sapiens
cgagtttccggcttg

SEQ ID NO: 445372 - DNA, 15 bp, Homo sapiens
ccgagtttccggctt

SEQ ID NO: 445373 - DNA, 15 bp, Homo sapiens
gccgagtttccggct

SEQ ID NO: 445374 - DNA, 15 bp, Homo sapiens
tgccgagtttccggc

SEQ ID NO: 445375 - DNA, 15 bp, Homo sapiens
ctgccgagtttccgg

SEQ ID NO: 445376 - DNA, 15 bp, Homo sapiens
gctgccgagtttccg

SEQ ID NO: 445377 - DNA, 15 bp, Homo sapiens
ggctgccgagtttcc

SEQ ID NO: 445378 - DNA, 15 bp, Homo sapiens
gggctgccgagtttc

SEQ ID NO: 445379 - DNA, 15 bp, Homo sapiens
agggctgccgagttt

SEQ ID NO: 445380 - DNA, 15 bp, Homo sapiens
aagggctgccgagtt

SEQ ID NO: 445381 - DNA, 15 bp, Homo sapiens
gaagggctgccgagt

SEQ ID NO: 445382 - DNA, 15 bp, Homo sapiens
ggaagggctgccgag

SEQ ID NO: 445383 - DNA, 15 bp, Homo sapiens
tggaagggctgccga

SEQ ID NO: 445384 - DNA, 15 bp, Homo sapiens
ttggaagggctgccg

SEQ ID NO: 445385 - DNA, 15 bp, Homo sapiens
tttggaagggctgcc

SEQ ID NO: 445386 - DNA, 15 bp, Homo sapiens
gtttggaagggctgc

SEQ ID NO: 445387 - DNA, 15 bp, Homo sapiens
agtttggaagggctg

SEQ ID NO: 445388 - DNA, 15 bp, Homo sapiens
gagtttggaagggct

SEQ ID NO: 445389 - DNA, 15 bp, Homo sapiens
agagtttggaagggc

SEQ ID NO: 445390 - DNA, 15 bp, Homo sapiens
aagagtttggaaggg

SEQ ID NO: 445391 - DNA, 15 bp, Homo sapiens
gaagagtttggaagg

SEQ ID NO: 445392 - DNA, 15 bp, Homo sapiens
ggaagagtttggaag

SEQ ID NO: 445393 - DNA, 15 bp, Homo sapiens
gggaagagtttggaa

SEQ ID NO: 445394 - DNA, 15 bp, Homo sapiens
agggaagagtttgga

SEQ ID NO: 445395 - DNA, 15 bp, Homo sapiens
gagggaagagtttgg

SEQ ID NO: 445396 - DNA, 15 bp, Homo sapiens
agagggaagagtttg

SEQ ID NO: 445397 - DNA, 15 bp, Homo sapiens
gagagggaagagttt

SEQ ID NO: 445398 - DNA, 15 bp, Homo sapiens
agagagggaagagtt

SEQ ID NO: 445399 - DNA, 15 bp, Homo sapiens
gagagagggaagagt

SEQ ID NO: 445400 - DNA, 15 bp, Homo sapiens
tgagagagggaagag

SEQ ID NO: 445401 - DNA, 15 bp, Homo sapiens
gtgagagagggaaga

SEQ ID NO: 445402 - DNA, 15 bp, Homo sapiens
agtgagagagggaag

SEQ ID NO: 445403 - DNA, 15 bp, Homo sapiens
gagtgagagagggaa

SEQ ID NO: 445404 - DNA, 15 bp, Homo sapiens
ggagtgagagaggga

SEQ ID NO: 445405 - DNA, 15 bp, Homo sapiens
gggagtgagagaggg

SEQ ID NO: 445406 - DNA, 15 bp, Homo sapiens
ggggagtgagagagg

SEQ ID NO: 445407 - DNA, 15 bp, Homo sapiens
tggggagtgagagag

SEQ ID NO: 445408 - DNA, 15 bp, Homo sapiens
gtggggagtgagaga

SEQ ID NO: 445409 - DNA, 15 bp, Homo sapiens
tgtggggagtgagag

SEQ ID NO: 445410 - DNA, 15 bp, Homo sapiens
atgtggggagtgaga

SEQ ID NO: 445411 - DNA, 15 bp, Homo sapiens
gatgtggggagtgag

SEQ ID NO: 445412 - DNA, 15 bp, Homo sapiens
ggatgtggggagtga

SEQ ID NO: 445413 - DNA, 15 bp, Homo sapiens
gggatgtggggagtg

SEQ ID NO: 445414 - DNA, 15 bp, Homo sapiens
tgggatgtggggagt

SEQ ID NO: 445415 - DNA, 15 bp, Homo sapiens
atgggatgtggggag

SEQ ID NO: 445416 - DNA, 15 bp, Homo sapiens
gatgggatgtgggga

SEQ ID NO: 445417 - DNA, 15 bp, Homo sapiens
cgatgggatgtgggg

SEQ ID NO: 445418 - DNA, 15 bp, Homo sapiens
acgatgggatgtggg

SEQ ID NO: 445419 - DNA, 15 bp, Homo sapiens
gacgatgggatgtgg

SEQ ID NO: 445420 - DNA, 15 bp, Homo sapiens
agacgatgggatgtg

SEQ ID NO: 445421 - DNA, 15 bp, Homo sapiens
gagacgatgggatgt

SEQ ID NO: 445422 - DNA, 15 bp, Homo sapiens
cgagacgatgggatg

SEQ ID NO: 445423 - DNA, 15 bp, Homo sapiens
ccgagacgatgggat

SEQ ID NO: 445424 - DNA, 15 bp, Homo sapiens
gccgagacgatggga

SEQ ID NO: 445425 - DNA, 15 bp, Homo sapiens
ggccgagacgatggg

SEQ ID NO: 445426 - DNA, 15 bp, Homo sapiens
aggccgagacgatgg

SEQ ID NO: 445427 - DNA, 15 bp, Homo sapiens
aaggccgagacgatg

SEQ ID NO: 445428 - DNA, 15 bp, Homo sapiens
gaaggccgagacgat

SEQ ID NO: 445429 - DNA, 15 bp, Homo sapiens
tgaaggccgagacga

SEQ ID NO: 445430 - DNA, 15 bp, Homo sapiens
gtgaaggccgagacg

SEQ ID NO: 445431 - DNA, 15 bp, Homo sapiens
tgtgaaggccgagac

SEQ ID NO: 445432 - DNA, 15 bp, Homo sapiens
ttgtgaaggccgaga

SEQ ID NO: 445433 - DNA, 15 bp, Homo sapiens
attgtgaaggccgag

SEQ ID NO: 445434 - DNA, 15 bp, Homo sapiens
gattgtgaaggccga

SEQ ID NO: 445435 - DNA, 15 bp, Homo sapiens
agattgtgaaggccg

SEQ ID NO: 445436 - DNA, 15 bp, Homo sapiens
cagattgtgaaggcc

SEQ ID NO: 445437 - DNA, 15 bp, Homo sapiens
acagattgtgaaggc

SEQ ID NO: 445438 - DNA, 15 bp, Homo sapiens
gacagattgtgaagg

SEQ ID NO: 445439 - DNA, 15 bp, Homo sapiens
tgacagattgtgaag

SEQ ID NO: 445440 - DNA, 15 bp, Homo sapiens
ctgacagattgtgaa

SEQ ID NO: 445441 - DNA, 15 bp, Homo sapiens
actgacagattgtga

SEQ ID NO: 445442 - DNA, 15 bp, Homo sapiens
aactgacagattgtg

SEQ ID NO: 445443 - DNA, 15 bp, Homo sapiens
gaactgacagattgt

SEQ ID NO: 445444 - DNA, 15 bp, Homo sapiens
agaactgacagattg

SEQ ID NO: 445445 - DNA, 15 bp, Homo sapiens
tagaactgacagatt

SEQ ID NO: 445446 - DNA, 15 bp, Homo sapiens
ttagaactgacagat

SEQ ID NO: 445447 - DNA, 15 bp, Homo sapiens
gttagaactgacaga

SEQ ID NO: 445448 - DNA, 15 bp, Homo sapiens
ggttagaactgacag

SEQ ID NO: 445449 - DNA, 15 bp, Homo sapiens
aggttagaactgaca

SEQ ID NO: 445450 - DNA, 15 bp, Homo sapiens
gaggttagaactgac

SEQ ID NO: 445451 - DNA, 15 bp, Homo sapiens
ggaggttagaactga

SEQ ID NO: 445452 - DNA, 15 bp, Homo sapiens
aggaggttagaactg

SEQ ID NO: 445453 - DNA, 15 bp, Homo sapiens
taggaggttagaact

SEQ ID NO: 445454 - DNA, 15 bp, Homo sapiens
ttaggaggttagaac

SEQ ID NO: 445455 - DNA, 15 bp, Homo sapiens
cttaggaggttagaa

SEQ ID NO: 445456 - DNA, 15 bp, Homo sapiens
gcttaggaggttaga

SEQ ID NO: 445457 - DNA, 15 bp, Homo sapiens
tgcttaggaggttag

SEQ ID NO: 445458 - DNA, 15 bp, Homo sapiens
ttgcttaggaggtta

SEQ ID NO: 445459 - DNA, 15 bp, Homo sapiens
gttgcttaggaggtt

SEQ ID NO: 445460 - DNA, 15 bp, Homo sapiens
agttgcttaggaggt

SEQ ID NO: 445461 - DNA, 15 bp, Homo sapiens
tagttgcttaggagg

SEQ ID NO: 445462 - DNA, 15 bp, Homo sapiens
ctagttgcttaggag

SEQ ID NO: 445463 - DNA, 15 bp, Homo sapiens
cctagttgcttagga

SEQ ID NO: 445464 - DNA, 15 bp, Homo sapiens
gcctagttgcttagg

SEQ ID NO: 445465 - DNA, 15 bp, Homo sapiens
ggcctagttgcttag

SEQ ID NO: 445466 - DNA, 15 bp, Homo sapiens
aggcctagttgctta

SEQ ID NO: 445467 - DNA, 15 bp, Homo sapiens
aaggcctagttgctt

SEQ ID NO: 445468 - DNA, 15 bp, Homo sapiens
gaaggcctagttgct

SEQ ID NO: 445469 - DNA, 15 bp, Homo sapiens
tgaaggcctagttgc

SEQ ID NO: 445470 - DNA, 15 bp, Homo sapiens
ctgaaggcctagttg

SEQ ID NO: 445471 - DNA, 15 bp, Homo sapiens
actgaaggcctagtt

SEQ ID NO: 445472 - DNA, 15 bp, Homo sapiens
tactgaaggcctagt

SEQ ID NO: 445473 - DNA, 15 bp, Homo sapiens
ttactgaaggcctag

SEQ ID NO: 445474 - DNA, 15 bp, Homo sapiens
tttactgaaggccta

SEQ ID NO: 445475 - DNA, 15 bp, Homo sapiens
atttactgaaggcct

SEQ ID NO: 445476 - DNA, 15 bp, Homo sapiens
catttactgaaggcc

SEQ ID NO: 445477 - DNA, 15 bp, Homo sapiens
acatttactgaaggc

SEQ ID NO: 445478 - DNA, 15 bp, Homo sapiens
cacatttactgaagg

SEQ ID NO: 445479 - DNA, 15 bp, Homo sapiens
tcacatttactgaag

SEQ ID NO: 445480 - DNA, 15 bp, Homo sapiens
atcacatttactgaa

SEQ ID NO: 445481 - DNA, 15 bp, Homo sapiens
aatcacatttactga

SEQ ID NO: 445482 - DNA, 15 bp, Homo sapiens
gaatcacatttactg

SEQ ID NO: 445483 - DNA, 15 bp, Homo sapiens
tgaatcacatttact

SEQ ID NO: 445484 - DNA, 15 bp, Homo sapiens
gtgaatcacatttac

SEQ ID NO: 445485 - DNA, 15 bp, Homo sapiens
ggtgaatcacattta

SEQ ID NO: 445486 - DNA, 15 bp, Homo sapiens
aggtgaatcacattt

SEQ ID NO: 445487 - DNA, 15 bp, Homo sapiens
gaggtgaatcacatt

SEQ ID NO: 445488 - DNA, 15 bp, Homo sapiens
agaggtgaatcacat

SEQ ID NO: 445489 - DNA, 15 bp, Homo sapiens
aagaggtgaatcaca

SEQ ID NO: 445490 - DNA, 15 bp, Homo sapiens
gaagaggtgaatcac

SEQ ID NO: 445491 - DNA, 15 bp, Homo sapiens
agaagaggtgaatca

SEQ ID NO: 445492 - DNA, 15 bp, Homo sapiens
aagaagaggtgaatc

SEQ ID NO: 445493 - DNA, 15 bp, Homo sapiens
aaagaagaggtgaat

SEQ ID NO: 445494 - DNA, 15 bp, Homo sapiens
gaaagaagaggtgaa

SEQ ID NO: 445495 - DNA, 15 bp, Homo sapiens
ggaaagaagaggtga

SEQ ID NO: 445496 - DNA, 15 bp, Homo sapiens
gggaaagaagaggtg

SEQ ID NO: 445497 - DNA, 15 bp, Homo sapiens
agggaaagaagaggt

SEQ ID NO: 445498 - DNA, 15 bp, Homo sapiens
gagggaaagaagagg

SEQ ID NO: 445499 - DNA, 15 bp, Homo sapiens
ggagggaaagaagag

SEQ ID NO: 445500 - DNA, 15 bp, Homo sapiens
aggagggaaagaaga

SEQ ID NO: 445501 - DNA, 15 bp, Homo sapiens
aaggagggaaagaag

SEQ ID NO: 445502 - DNA, 15 bp, Homo sapiens
aaaggagggaaagaa

SEQ ID NO: 445503 - DNA, 15 bp, Homo sapiens
aaaaggagggaaaga

SEQ ID NO: 445504 - DNA, 15 bp, Homo sapiens
gaaaaggagggaaag

SEQ ID NO: 445505 - DNA, 15 bp, Homo sapiens
ggaaaaggagggaaa

SEQ ID NO: 445506 - DNA, 15 bp, Homo sapiens
gggaaaaggagggaa

SEQ ID NO: 445507 - DNA, 15 bp, Homo sapiens
tgggaaaaggaggga

SEQ ID NO: 445508 - DNA, 15 bp, Homo sapiens
ttgggaaaaggaggg

SEQ ID NO: 445509 - DNA, 15 bp, Homo sapiens
tttgggaaaaggagg

SEQ ID NO: 445510 - DNA, 15 bp, Homo sapiens
ctttgggaaaaggag

SEQ ID NO: 445511 - DNA, 15 bp, Homo sapiens
gctttgggaaaagga

SEQ ID NO: 445512 - DNA, 15 bp, Homo sapiens
tgctttgggaaaagg

SEQ ID NO: 445513 - DNA, 15 bp, Homo sapiens
atgctttgggaaaag

SEQ ID NO: 445514 - DNA, 15 bp, Homo sapiens
gatgctttgggaaaa

SEQ ID NO: 445515 - DNA, 15 bp, Homo sapiens
ggatgctttgggaaa

SEQ ID NO: 445516 - DNA, 15 bp, Homo sapiens
gggatgctttgggaa

SEQ ID NO: 445517 - DNA, 15 bp, Homo sapiens
agggatgctttggga

SEQ ID NO: 445518 - DNA, 15 bp, Homo sapiens
gagggatgctttggg

SEQ ID NO: 445519 - DNA, 15 bp, Homo sapiens
agagggatgctttgg

SEQ ID NO: 445520 - DNA, 15 bp, Homo sapiens
aagagggatgctttg

SEQ ID NO: 445521 - DNA, 15 bp, Homo sapiens
taagagggatgcttt

SEQ ID NO: 445522 - DNA, 15 bp, Homo sapiens
ctaagagggatgctt

SEQ ID NO: 445523 - DNA, 15 bp, Homo sapiens
actaagagggatgct

SEQ ID NO: 445524 - DNA, 15 bp, Homo sapiens
gactaagagggatgc

SEQ ID NO: 445525 - DNA, 15 bp, Homo sapiens
agactaagagggatg

SEQ ID NO: 445526 - DNA, 15 bp, Homo sapiens
tagactaagagggat

SEQ ID NO: 445527 - DNA, 15 bp, Homo sapiens
ctagactaagaggga

SEQ ID NO: 445528 - DNA, 15 bp, Homo sapiens
cctagactaagaggg

SEQ ID NO: 445529 - DNA, 15 bp, Homo sapiens
acctagactaagagg

SEQ ID NO: 445530 - DNA, 15 bp, Homo sapiens
gacctagactaagag

SEQ ID NO: 445531 - DNA, 15 bp, Homo sapiens
ggacctagactaaga

SEQ ID NO: 445532 - DNA, 15 bp, Homo sapiens
aggacctagactaag

SEQ ID NO: 445533 - DNA, 15 bp, Homo sapiens
aaggacctagactaa

SEQ ID NO: 445534 - DNA, 15 bp, Homo sapiens
caaggacctagacta

SEQ ID NO: 445535 - DNA, 15 bp, Homo sapiens
acaaggacctagact

SEQ ID NO: 445536 - DNA, 15 bp, Homo sapiens
aacaaggacctagac

SEQ ID NO: 445537 - DNA, 15 bp, Homo sapiens
caacaaggacctaga

SEQ ID NO: 445538 - DNA, 15 bp, Homo sapiens
acaacaaggacctag

SEQ ID NO: 445539 - DNA, 15 bp, Homo sapiens
aacaacaaggaccta

SEQ ID NO: 445540 - DNA, 15 bp, Homo sapiens
aaacaacaaggacct

SEQ ID NO: 445541 - DNA, 15 bp, Homo sapiens
gaaacaacaaggacc

SEQ ID NO: 445542 - DNA, 15 bp, Homo sapiens
agaaacaacaaggac

SEQ ID NO: 445543 - DNA, 15 bp, Homo sapiens
aagaaacaacaagga

SEQ ID NO: 445544 - DNA, 15 bp, Homo sapiens
caagaaacaacaagg

SEQ ID NO: 445545 - DNA, 15 bp, Homo sapiens
gcaagaaacaacaag

SEQ ID NO: 445546 - DNA, 15 bp, Homo sapiens
ggcaagaaacaacaa

SEQ ID NO: 445547 - DNA, 15 bp, Homo sapiens
aggcaagaaacaaca

SEQ ID NO: 445548 - DNA, 15 bp, Homo sapiens
caggcaagaaacaac

SEQ ID NO: 445549 - DNA, 15 bp, Homo sapiens
tcaggcaagaaacaa

SEQ ID NO: 445550 - DNA, 15 bp, Homo sapiens
ttcaggcaagaaaca

SEQ ID NO: 445551 - DNA, 15 bp, Homo sapiens
gttcaggcaagaaac

SEQ ID NO: 445552 - DNA, 15 bp, Homo sapiens
agttcaggcaagaaa

SEQ ID NO: 445553 - DNA, 15 bp, Homo sapiens
gagttcaggcaagaa

SEQ ID NO: 445554 - DNA, 15 bp, Homo sapiens
ggagttcaggcaaga

SEQ ID NO: 445555 - DNA, 15 bp, Homo sapiens
aggagttcaggcaag

SEQ ID NO: 445556 - DNA, 15 bp, Homo sapiens
caggagttcaggcaa

SEQ ID NO: 445557 - DNA, 15 bp, Homo sapiens
gcaggagttcaggca

SEQ ID NO: 445558 - DNA, 15 bp, Homo sapiens
ggcaggagttcaggc

SEQ ID NO: 445559 - DNA, 15 bp, Homo sapiens
tggcaggagttcagg

SEQ ID NO: 445560 - DNA, 15 bp, Homo sapiens
atggcaggagttcag

SEQ ID NO: 445561 - DNA, 15 bp, Homo sapiens
tatggcaggagttca

SEQ ID NO: 445562 - DNA, 15 bp, Homo sapiens
ctatggcaggagttc

SEQ ID NO: 445563 - DNA, 15 bp, Homo sapiens
actatggcaggagtt

SEQ ID NO: 445564 - DNA, 15 bp, Homo sapiens
gactatggcaggagt

SEQ ID NO: 445565 - DNA, 15 bp, Homo sapiens
agactatggcaggag

SEQ ID NO: 445566 - DNA, 15 bp, Homo sapiens
aagactatggcagga

SEQ ID NO: 445567 - DNA, 15 bp, Homo sapiens
taagactatggcagg

SEQ ID NO: 445568 - DNA, 15 bp, Homo sapiens
ttaagactatggcag

SEQ ID NO: 445569 - DNA, 15 bp, Homo sapiens
gttaagactatggca

SEQ ID NO: 445570 - DNA, 15 bp, Homo sapiens
agttaagactatggc

SEQ ID NO: 445571 - DNA, 15 bp, Homo sapiens
cagttaagactatgg

SEQ ID NO: 445572 - DNA, 15 bp, Homo sapiens
ccagttaagactatg

SEQ ID NO: 445573 - DNA, 15 bp, Homo sapiens
accagttaagactat

SEQ ID NO: 445574 - DNA, 15 bp, Homo sapiens
gaccagttaagacta

SEQ ID NO: 445575 - DNA, 15 bp, Homo sapiens
agaccagttaagact

SEQ ID NO: 445576 - DNA, 15 bp, Homo sapiens
gagaccagttaagac

SEQ ID NO: 445577 - DNA, 15 bp, Homo sapiens
ggagaccagttaaga

SEQ ID NO: 445578 - DNA, 15 bp, Homo sapiens
aggagaccagttaag

SEQ ID NO: 445579 - DNA, 15 bp, Homo sapiens
aaggagaccagttaa

SEQ ID NO: 445580 - DNA, 15 bp, Homo sapiens
caaggagaccagtta

SEQ ID NO: 445581 - DNA, 15 bp, Homo sapiens
gcaaggagaccagtt

SEQ ID NO: 445582 - DNA, 15 bp, Homo sapiens
agcaaggagaccagt

SEQ ID NO: 445583 - DNA, 15 bp, Homo sapiens
aagcaaggagaccag

SEQ ID NO: 445584 - DNA, 15 bp, Homo sapiens
gaagcaaggagacca

SEQ ID NO: 445585 - DNA, 15 bp, Homo sapiens
ggaagcaaggagacc

SEQ ID NO: 445586 - DNA, 15 bp, Homo sapiens
aggaagcaaggagac

SEQ ID NO: 445587 - DNA, 15 bp, Homo sapiens
caggaagcaaggaga

SEQ ID NO: 445588 - DNA, 15 bp, Homo sapiens
acaggaagcaaggag

SEQ ID NO: 445589 - DNA, 15 bp, Homo sapiens
gacaggaagcaagga

SEQ ID NO: 445590 - DNA, 15 bp, Homo sapiens
agacaggaagcaagg

SEQ ID NO: 445591 - DNA, 15 bp, Homo sapiens
aagacaggaagcaag

SEQ ID NO: 445592 - DNA, 15 bp, Homo sapiens
taagacaggaagcaa

SEQ ID NO: 445593 - DNA, 15 bp, Homo sapiens
ataagacaggaagca

SEQ ID NO: 445594 - DNA, 15 bp, Homo sapiens
gataagacaggaagc

SEQ ID NO: 445595 - DNA, 15 bp, Homo sapiens
ggataagacaggaag

SEQ ID NO: 445596 - DNA, 15 bp, Homo sapiens
aggataagacaggaa

SEQ ID NO: 445597 - DNA, 15 bp, Homo sapiens
gaggataagacagga

SEQ ID NO: 445598 - DNA, 15 bp, Homo sapiens
ggaggataagacagg

SEQ ID NO: 445599 - DNA, 15 bp, Homo sapiens
tggaggataagacag

SEQ ID NO: 445600 - DNA, 15 bp, Homo sapiens
gtggaggataagaca

SEQ ID NO: 445601 - DNA, 15 bp, Homo sapiens
ggtggaggataagac

SEQ ID NO: 445602 - DNA, 15 bp, Homo sapiens
cggtggaggataaga

SEQ ID NO: 445603 - DNA, 15 bp, Homo sapiens
acggtggaggataag

SEQ ID NO: 445604 - DNA, 15 bp, Homo sapiens
gacggtggaggataa

SEQ ID NO: 445605 - DNA, 15 bp, Homo sapiens
agacggtggaggata

SEQ ID NO: 445606 - DNA, 15 bp, Homo sapiens
aagacggtggaggat

SEQ ID NO: 445607 - DNA, 15 bp, Homo sapiens
aaagacggtggagga

SEQ ID NO: 445608 - DNA, 15 bp, Homo sapiens
gaaagacggtggagg

SEQ ID NO: 445609 - DNA, 15 bp, Homo sapiens
agaaagacggtggag

SEQ ID NO: 445610 - DNA, 15 bp, Homo sapiens
aagaaagacggtgga

SEQ ID NO: 445611 - DNA, 15 bp, Homo sapiens
aaagaaagacggtgg

SEQ ID NO: 445612 - DNA, 15 bp, Homo sapiens
aaaagaaagacggtg

SEQ ID NO: 445613 - DNA, 15 bp, Homo sapiens
taaaagaaagacggt

SEQ ID NO: 445614 - DNA, 15 bp, Homo sapiens
ataaaagaaagacgg

SEQ ID NO: 445615 - DNA, 15 bp, Homo sapiens
tataaaagaaagacg

SEQ ID NO: 445616 - DNA, 15 bp, Homo sapiens
gtataaaagaaagac

SEQ ID NO: 445617 - DNA, 15 bp, Homo sapiens
agtataaaagaaaga

SEQ ID NO: 445618 - DNA, 15 bp, Homo sapiens
cagtataaaagaaag

SEQ ID NO: 445619 - DNA, 15 bp, Homo sapiens
tcagtataaaagaaa

SEQ ID NO: 445620 - DNA, 15 bp, Homo sapiens
gtcagtataaaagaa

SEQ ID NO: 445621 - DNA, 15 bp, Homo sapiens
tgtcagtataaaaga

SEQ ID NO: 445622 - DNA, 15 bp, Homo sapiens
gtgtcagtataaaag

SEQ ID NO: 445623 - DNA, 15 bp, Homo sapiens
tgtgtcagtataaaa

SEQ ID NO: 445624 - DNA, 15 bp, Homo sapiens
ttgtgtcagtataaa

SEQ ID NO: 445625 - DNA, 15 bp, Homo sapiens
cttgtgtcagtataa

SEQ ID NO: 445626 - DNA, 15 bp, Homo sapiens
tcttgtgtcagtata

SEQ ID NO: 445627 - DNA, 15 bp, Homo sapiens
ttcttgtgtcagtat

SEQ ID NO: 445628 - DNA, 15 bp, Homo sapiens
attcttgtgtcagta

SEQ ID NO: 445629 - DNA, 15 bp, Homo sapiens
cattcttgtgtcagt

SEQ ID NO: 445630 - DNA, 15 bp, Homo sapiens
ccattcttgtgtcag

SEQ ID NO: 445631 - DNA, 15 bp, Homo sapiens
accattcttgtgtca

SEQ ID NO: 445632 - DNA, 15 bp, Homo sapiens
gaccattcttgtgtc

SEQ ID NO: 445633 - DNA, 15 bp, Homo sapiens
agaccattcttgtgt

SEQ ID NO: 445634 - DNA, 15 bp, Homo sapiens
aagaccattcttgtg

SEQ ID NO: 445635 - DNA, 15 bp, Homo sapiens
aaagaccattcttgt

SEQ ID NO: 445636 - DNA, 15 bp, Homo sapiens
gaaagaccattcttg

SEQ ID NO: 445637 - DNA, 15 bp, Homo sapiens
agaaagaccattctt

SEQ ID NO: 445638 - DNA, 15 bp, Homo sapiens
cagaaagaccattct

SEQ ID NO: 445639 - DNA, 15 bp, Homo sapiens
tcagaaagaccattc

SEQ ID NO: 445640 - DNA, 15 bp, Homo sapiens
ttcagaaagaccatt

SEQ ID NO: 445641 - DNA, 15 bp, Homo sapiens
attcagaaagaccat

SEQ ID NO: 445642 - DNA, 15 bp, Homo sapiens
aattcagaaagacca

SEQ ID NO: 445643 - DNA, 15 bp, Homo sapiens
caattcagaaagacc

SEQ ID NO: 445644 - DNA, 15 bp, Homo sapiens
gcaattcagaaagac

SEQ ID NO: 445645 - DNA, 15 bp, Homo sapiens
tgcaattcagaaaga

SEQ ID NO: 445646 - DNA, 15 bp, Homo sapiens
gtgcaattcagaaag

SEQ ID NO: 445647 - DNA, 15 bp, Homo sapiens
tgtgcaattcagaaa

SEQ ID NO: 445648 - DNA, 15 bp, Homo sapiens
atgtgcaattcagaa

SEQ ID NO: 445649 - DNA, 15 bp, Homo sapiens
catgtgcaattcaga

SEQ ID NO: 445650 - DNA, 15 bp, Homo sapiens
acatgtgcaattcag

SEQ ID NO: 445651 - DNA, 15 bp, Homo sapiens
cacatgtgcaattca

SEQ ID NO: 445652 - DNA, 15 bp, Homo sapiens
tcacatgtgcaattc

SEQ ID NO: 445653 - DNA, 15 bp, Homo sapiens
ctcacatgtgcaatt

SEQ ID NO: 445654 - DNA, 15 bp, Homo sapiens
gctcacatgtgcaat

SEQ ID NO: 445655 - DNA, 15 bp, Homo sapiens
tgctcacatgtgcaa

SEQ ID NO: 445656 - DNA, 15 bp, Homo sapiens
atgctcacatgtgca

SEQ ID NO: 445657 - DNA, 15 bp, Homo sapiens
catgctcacatgtgc

SEQ ID NO: 445658 - DNA, 15 bp, Homo sapiens
acatgctcacatgtg

SEQ ID NO: 445659 - DNA, 15 bp, Homo sapiens
gacatgctcacatgt

SEQ ID NO: 445660 - DNA, 15 bp, Homo sapiens
tgacatgctcacatg

SEQ ID NO: 445661 - DNA, 15 bp, Homo sapiens
gtgacatgctcacat

SEQ ID NO: 445662 - DNA, 15 bp, Homo sapiens
agtgacatgctcaca

SEQ ID NO: 445663 - DNA, 15 bp, Homo sapiens
aagtgacatgctcac

SEQ ID NO: 445664 - DNA, 15 bp, Homo sapiens
gaagtgacatgctca

SEQ ID NO: 445665 - DNA, 15 bp, Homo sapiens
ggaagtgacatgctc

SEQ ID NO: 445666 - DNA, 15 bp, Homo sapiens
gggaagtgacatgct

SEQ ID NO: 445667 - DNA, 15 bp, Homo sapiens
agggaagtgacatgc

SEQ ID NO: 445668 - DNA, 15 bp, Homo sapiens
cagggaagtgacatg

SEQ ID NO: 445669 - DNA, 15 bp, Homo sapiens
gcagggaagtgacat

SEQ ID NO: 445670 - DNA, 15 bp, Homo sapiens
agcagggaagtgaca

SEQ ID NO: 445671 - DNA, 15 bp, Homo sapiens
aagcagggaagtgac

SEQ ID NO: 445672 - DNA, 15 bp, Homo sapiens
taagcagggaagtga

SEQ ID NO: 445673 - DNA, 15 bp, Homo sapiens
ttaagcagggaagtg

SEQ ID NO: 445674 - DNA, 15 bp, Homo sapiens
tttaagcagggaagt

SEQ ID NO: 445675 - DNA, 15 bp, Homo sapiens
atttaagcagggaag

SEQ ID NO: 445676 - DNA, 15 bp, Homo sapiens
aatttaagcagggaa

SEQ ID NO: 445677 - DNA, 15 bp, Homo sapiens
aaatttaagcaggga

SEQ ID NO: 445678 - DNA, 15 bp, Homo sapiens
gaaatttaagcaggg

SEQ ID NO: 445679 - DNA, 15 bp, Homo sapiens
agaaatttaagcagg

SEQ ID NO: 445680 - DNA, 15 bp, Homo sapiens
gagaaatttaagcag

SEQ ID NO: 445681 - DNA, 15 bp, Homo sapiens
ggagaaatttaagca

SEQ ID NO: 445682 - DNA, 15 bp, Homo sapiens
tggagaaatttaagc

SEQ ID NO: 445683 - DNA, 15 bp, Homo sapiens
ctggagaaatttaag

SEQ ID NO: 445684 - DNA, 15 bp, Homo sapiens
actggagaaatttaa

SEQ ID NO: 445685 - DNA, 15 bp, Homo sapiens
cactggagaaattta

SEQ ID NO: 445686 - DNA, 15 bp, Homo sapiens
ccactggagaaattt

SEQ ID NO: 445687 - DNA, 15 bp, Homo sapiens
tccactggagaaatt

SEQ ID NO: 445688 - DNA, 15 bp, Homo sapiens
atccactggagaaat

SEQ ID NO: 445689 - DNA, 15 bp, Homo sapiens
aatccactggagaaa

SEQ ID NO: 445690 - DNA, 15 bp, Homo sapiens
gaatccactggagaa

SEQ ID NO: 445691 - DNA, 15 bp, Homo sapiens
ggaatccactggaga

SEQ ID NO: 445692 - DNA, 15 bp, Homo sapiens
gggaatccactggag

SEQ ID NO: 445693 - DNA, 15 bp, Homo sapiens
tgggaatccactgga

SEQ ID NO: 445694 - DNA, 15 bp, Homo sapiens
ctgggaatccactgg

SEQ ID NO: 445695 - DNA, 15 bp, Homo sapiens
cctgggaatccactg

SEQ ID NO: 445696 - DNA, 15 bp, Homo sapiens
ccctgggaatccact

SEQ ID NO: 445697 - DNA, 15 bp, Homo sapiens
tccctgggaatccac

SEQ ID NO: 445698 - DNA, 15 bp, Homo sapiens
gtccctgggaatcca

SEQ ID NO: 445699 - DNA, 15 bp, Homo sapiens
agtccctgggaatcc

SEQ ID NO: 445700 - DNA, 15 bp, Homo sapiens
aagtccctgggaatc

SEQ ID NO: 445701 - DNA, 15 bp, Homo sapiens
gaagtccctgggaat

SEQ ID NO: 445702 - DNA, 15 bp, Homo sapiens
tgaagtccctgggaa

SEQ ID NO: 445703 - DNA, 15 bp, Homo sapiens
ctgaagtccctggga

SEQ ID NO: 445704 - DNA, 15 bp, Homo sapiens
cctgaagtccctggg

SEQ ID NO: 445705 - DNA, 15 bp, Homo sapiens
tcctgaagtccctgg

SEQ ID NO: 445706 - DNA, 15 bp, Homo sapiens
atcctgaagtccctg

SEQ ID NO: 445707 - DNA, 15 bp, Homo sapiens
gatcctgaagtccct

SEQ ID NO: 445708 - DNA, 15 bp, Homo sapiens
tgatcctgaagtccc

SEQ ID NO: 445709 - DNA, 15 bp, Homo sapiens
ttgatcctgaagtcc

SEQ ID NO: 445710 - DNA, 15 bp, Homo sapiens
cttgatcctgaagtc

SEQ ID NO: 445711 - DNA, 15 bp, Homo sapiens
acttgatcctgaagt

SEQ ID NO: 445712 - DNA, 15 bp, Homo sapiens
gacttgatcctgaag

SEQ ID NO: 445713 - DNA, 15 bp, Homo sapiens
ggacttgatcctgaa

SEQ ID NO: 445714 - DNA, 15 bp, Homo sapiens
aggacttgatcctga

SEQ ID NO: 445715 - DNA, 15 bp, Homo sapiens
taggacttgatcctg

SEQ ID NO: 445716 - DNA, 15 bp, Homo sapiens
ctaggacttgatcct

SEQ ID NO: 445717 - DNA, 15 bp, Homo sapiens
actaggacttgatcc

SEQ ID NO: 445718 - DNA, 15 bp, Homo sapiens
aactaggacttgatc

SEQ ID NO: 445719 - DNA, 15 bp, Homo sapiens
caactaggacttgat

SEQ ID NO: 445720 - DNA, 15 bp, Homo sapiens
acaactaggacttga

SEQ ID NO: 445721 - DNA, 15 bp, Homo sapiens
aacaactaggacttg

SEQ ID NO: 445722 - DNA, 15 bp, Homo sapiens
gaacaactaggactt

SEQ ID NO: 445723 - DNA, 15 bp, Homo sapiens
tgaacaactaggact

SEQ ID NO: 445724 - DNA, 15 bp, Homo sapiens
ctgaacaactaggac

SEQ ID NO: 445725 - DNA, 15 bp, Homo sapiens
gctgaacaactagga

SEQ ID NO: 445726 - DNA, 15 bp, Homo sapiens
tgctgaacaactagg

SEQ ID NO: 445727 - DNA, 15 bp, Homo sapiens
atgctgaacaactag

SEQ ID NO: 445728 - DNA, 15 bp, Homo sapiens
catgctgaacaacta

SEQ ID NO: 445729 - DNA, 15 bp, Homo sapiens
ccatgctgaacaact

SEQ ID NO: 445730 - DNA, 15 bp, Homo sapiens
gccatgctgaacaac

SEQ ID NO: 445731 - DNA, 15 bp, Homo sapiens
tgccatgctgaacaa

SEQ ID NO: 445732 - DNA, 15 bp, Homo sapiens
atgccatgctgaaca

SEQ ID NO: 445733 - DNA, 15 bp, Homo sapiens
gatgccatgctgaac

SEQ ID NO: 445734 - DNA, 15 bp, Homo sapiens
ggatgccatgctgaa

SEQ ID NO: 445735 - DNA, 15 bp, Homo sapiens
tggatgccatgctga

SEQ ID NO: 445736 - DNA, 15 bp, Homo sapiens
ttggatgccatgctg

SEQ ID NO: 445737 - DNA, 15 bp, Homo sapiens
cttggatgccatgct

SEQ ID NO: 445738 - DNA, 15 bp, Homo sapiens
tcttggatgccatgc

SEQ ID NO: 445739 - DNA, 15 bp, Homo sapiens
gtcttggatgccatg

SEQ ID NO: 445740 - DNA, 15 bp, Homo sapiens
agtcttggatgccat

SEQ ID NO: 445741 - DNA, 15 bp, Homo sapiens
gagtcttggatgcca

SEQ ID NO: 445742 - DNA, 15 bp, Homo sapiens
agagtcttggatgcc

SEQ ID NO: 445743 - DNA, 15 bp, Homo sapiens
aagagtcttggatgc

SEQ ID NO: 445744 - DNA, 15 bp, Homo sapiens
aaagagtcttggatg

SEQ ID NO: 445745 - DNA, 15 bp, Homo sapiens
taaagagtcttggat

SEQ ID NO: 445746 - DNA, 15 bp, Homo sapiens
ataaagagtcttgga

SEQ ID NO: 445747 - DNA, 15 bp, Homo sapiens
cataaagagtcttgg

SEQ ID NO: 445748 - DNA, 15 bp, Homo sapiens
tcataaagagtcttg

SEQ ID NO: 445749 - DNA, 15 bp, Homo sapiens
atcataaagagtctt

SEQ ID NO: 445750 - DNA, 15 bp, Homo sapiens
gatcataaagagtct

SEQ ID NO: 445751 - DNA, 15 bp, Homo sapiens
agatcataaagagtc

SEQ ID NO: 445752 - DNA, 15 bp, Homo sapiens
cagatcataaagagt

SEQ ID NO: 445753 - DNA, 15 bp, Homo sapiens
ccagatcataaagag

SEQ ID NO: 445754 - DNA, 15 bp, Homo sapiens
gccagatcataaaga

SEQ ID NO: 445755 - DNA, 15 bp, Homo sapiens
ggccagatcataaag

SEQ ID NO: 445756 - DNA, 15 bp, Homo sapiens
gggccagatcataaa

SEQ ID NO: 445757 - DNA, 15 bp, Homo sapiens
agggccagatcataa

SEQ ID NO: 445758 - DNA, 15 bp, Homo sapiens
aagggccagatcata

SEQ ID NO: 445759 - DNA, 15 bp, Homo sapiens
caagggccagatcat

SEQ ID NO: 445760 - DNA, 15 bp, Homo sapiens
gcaagggccagatca

SEQ ID NO: 445761 - DNA, 15 bp, Homo sapiens
agcaagggccagatc

SEQ ID NO: 445762 - DNA, 15 bp, Homo sapiens
aagcaagggccagat

SEQ ID NO: 445763 - DNA, 15 bp, Homo sapiens
taagcaagggccaga

SEQ ID NO: 445764 - DNA, 15 bp, Homo sapiens
gtaagcaagggccag

SEQ ID NO: 445765 - DNA, 15 bp, Homo sapiens
ggtaagcaagggcca

SEQ ID NO: 445766 - DNA, 15 bp, Homo sapiens
aggtaagcaagggcc

SEQ ID NO: 445767 - DNA, 15 bp, Homo sapiens
gaggtaagcaagggc

SEQ ID NO: 445768 - DNA, 15 bp, Homo sapiens
agaggtaagcaaggg

SEQ ID NO: 445769 - DNA, 15 bp, Homo sapiens
gagaggtaagcaagg

SEQ ID NO: 445770 - DNA, 15 bp, Homo sapiens
tgagaggtaagcaag

SEQ ID NO: 445771 - DNA, 15 bp, Homo sapiens
ctgagaggtaagcaa

SEQ ID NO: 445772 - DNA, 15 bp, Homo sapiens
gctgagaggtaagca

SEQ ID NO: 445773 - DNA, 15 bp, Homo sapiens
ggctgagaggtaagc

SEQ ID NO: 445774 - DNA, 15 bp, Homo sapiens
aggctgagaggtaag

SEQ ID NO: 445775 - DNA, 15 bp, Homo sapiens
aaggctgagaggtaa

SEQ ID NO: 445776 - DNA, 15 bp, Homo sapiens
taaggctgagaggta

SEQ ID NO: 445777 - DNA, 15 bp, Homo sapiens
ctaaggctgagaggt

SEQ ID NO: 445778 - DNA, 15 bp, Homo sapiens
gctaaggctgagagg

SEQ ID NO: 445779 - DNA, 15 bp, Homo sapiens
agctaaggctgagag

SEQ ID NO: 445780 - DNA, 15 bp, Homo sapiens
gagctaaggctgaga

SEQ ID NO: 445781 - DNA, 15 bp, Homo sapiens
agagctaaggctgag

SEQ ID NO: 445782 - DNA, 15 bp, Homo sapiens
gagagctaaggctga

SEQ ID NO: 445783 - DNA, 15 bp, Homo sapiens
ggagagctaaggctg

SEQ ID NO: 445784 - DNA, 15 bp, Homo sapiens
gggagagctaaggct

SEQ ID NO: 445785 - DNA, 15 bp, Homo sapiens
tgggagagctaaggc

SEQ ID NO: 445786 - DNA, 15 bp, Homo sapiens
ttgggagagctaagg

SEQ ID NO: 445787 - DNA, 15 bp, Homo sapiens
gttgggagagctaag

SEQ ID NO: 445788 - DNA, 15 bp, Homo sapiens
agttgggagagctaa

SEQ ID NO: 445789 - DNA, 15 bp, Homo sapiens
gagttgggagagcta

SEQ ID NO: 445790 - DNA, 15 bp, Homo sapiens
agagttgggagagct

SEQ ID NO: 445791 - DNA, 15 bp, Homo sapiens
aagagttgggagagc

SEQ ID NO: 445792 - DNA, 15 bp, Homo sapiens
caagagttgggagag

SEQ ID NO: 445793 - DNA, 15 bp, Homo sapiens
gcaagagttgggaga

SEQ ID NO: 445794 - DNA, 15 bp, Homo sapiens
tgcaagagttgggag

SEQ ID NO: 445795 - DNA, 15 bp, Homo sapiens
gtgcaagagttggga

SEQ ID NO: 445796 - DNA, 15 bp, Homo sapiens
tgtgcaagagttggg

SEQ ID NO: 445797 - DNA, 15 bp, Homo sapiens
ctgtgcaagagttgg

SEQ ID NO: 445798 - DNA, 15 bp, Homo sapiens
actgtgcaagagttg

SEQ ID NO: 445799 - DNA, 15 bp, Homo sapiens
gactgtgcaagagtt

SEQ ID NO: 445800 - DNA, 15 bp, Homo sapiens
tgactgtgcaagagt

SEQ ID NO: 445801 - DNA, 15 bp, Homo sapiens
gtgactgtgcaagag

SEQ ID NO: 445802 - DNA, 15 bp, Homo sapiens
agtgactgtgcaaga

SEQ ID NO: 445803 - DNA, 15 bp, Homo sapiens
cagtgactgtgcaag

SEQ ID NO: 445804 - DNA, 15 bp, Homo sapiens
gcagtgactgtgcaa

SEQ ID NO: 445805 - DNA, 15 bp, Homo sapiens
agcagtgactgtgca

SEQ ID NO: 445806 - DNA, 15 bp, Homo sapiens
gagcagtgactgtgc

SEQ ID NO: 445807 - DNA, 15 bp, Homo sapiens
agagcagtgactgtg

SEQ ID NO: 445808 - DNA, 15 bp, Homo sapiens
aagagcagtgactgt

SEQ ID NO: 445809 - DNA, 15 bp, Homo sapiens
gaagagcagtgactg

SEQ ID NO: 445810 - DNA, 15 bp, Homo sapiens
tgaagagcagtgact

SEQ ID NO: 445811 - DNA, 15 bp, Homo sapiens
ctgaagagcagtgac

SEQ ID NO: 445812 - DNA, 15 bp, Homo sapiens
gctgaagagcagtga

SEQ ID NO: 445813 - DNA, 15 bp, Homo sapiens
ggctgaagagcagtg

SEQ ID NO: 445814 - DNA, 15 bp, Homo sapiens
tggctgaagagcagt

SEQ ID NO: 445815 - DNA, 15 bp, Homo sapiens
atggctgaagagcag

SEQ ID NO: 445816 - DNA, 15 bp, Homo sapiens
tatggctgaagagca

SEQ ID NO: 445817 - DNA, 15 bp, Homo sapiens
ctatggctgaagagc

SEQ ID NO: 445818 - DNA, 15 bp, Homo sapiens
actatggctgaagag

SEQ ID NO: 445819 - DNA, 15 bp, Homo sapiens
cactatggctgaaga

SEQ ID NO: 445820 - DNA, 15 bp, Homo sapiens
ccactatggctgaag

SEQ ID NO: 445821 - DNA, 15 bp, Homo sapiens
tccactatggctgaa

SEQ ID NO: 445822 - DNA, 15 bp, Homo sapiens
atccactatggctga

SEQ ID NO: 445823 - DNA, 15 bp, Homo sapiens
gatccactatggctg

SEQ ID NO: 445824 - DNA, 15 bp, Homo sapiens
tgatccactatggct

SEQ ID NO: 445825 - DNA, 15 bp, Homo sapiens
gtgatccactatggc

SEQ ID NO: 445826 - DNA, 15 bp, Homo sapiens
agtgatccactatgg

SEQ ID NO: 445827 - DNA, 15 bp, Homo sapiens
gagtgatccactatg

SEQ ID NO: 445828 - DNA, 15 bp, Homo sapiens
tgagtgatccactat

SEQ ID NO: 445829 - DNA, 15 bp, Homo sapiens
gtgagtgatccacta

SEQ ID NO: 445830 - DNA, 15 bp, Homo sapiens
ggtgagtgatccact

SEQ ID NO: 445831 - DNA, 15 bp, Homo sapiens
tggtgagtgatccac

SEQ ID NO: 445832 - DNA, 15 bp, Homo sapiens
atggtgagtgatcca

SEQ ID NO: 445833 - DNA, 15 bp, Homo sapiens
aatggtgagtgatcc

SEQ ID NO: 445834 - DNA, 15 bp, Homo sapiens
gaatggtgagtgatc

SEQ ID NO: 445835 - DNA, 15 bp, Homo sapiens
ggaatggtgagtgat

SEQ ID NO: 445836 - DNA, 15 bp, Homo sapiens
gggaatggtgagtga

SEQ ID NO: 445837 - DNA, 15 bp, Homo sapiens
tgggaatggtgagtg

SEQ ID NO: 445838 - DNA, 15 bp, Homo sapiens
ctgggaatggtgagt

SEQ ID NO: 445839 - DNA, 15 bp, Homo sapiens
tctgggaatggtgag

SEQ ID NO: 445840 - DNA, 15 bp, Homo sapiens
atctgggaatggtga

SEQ ID NO: 445841 - DNA, 15 bp, Homo sapiens
catctgggaatggtg

SEQ ID NO: 445842 - DNA, 15 bp, Homo sapiens
acatctgggaatggt

SEQ ID NO: 445843 - DNA, 15 bp, Homo sapiens
tacatctgggaatgg

SEQ ID NO: 445844 - DNA, 15 bp, Homo sapiens
gtacatctgggaatg

SEQ ID NO: 445845 - DNA, 15 bp, Homo sapiens
ggtacatctgggaat

SEQ ID NO: 445846 - DNA, 15 bp, Homo sapiens
tggtacatctgggaa

SEQ ID NO: 445847 - DNA, 15 bp, Homo sapiens
ctggtacatctggga

SEQ ID NO: 445848 - DNA, 15 bp, Homo sapiens
cctggtacatctggg

SEQ ID NO: 445849 - DNA, 15 bp, Homo sapiens
gcctggtacatctgg

SEQ ID NO: 445850 - DNA, 15 bp, Homo sapiens
agcctggtacatctg

SEQ ID NO: 445851 - DNA, 15 bp, Homo sapiens
gagcctggtacatct

SEQ ID NO: 445852 - DNA, 15 bp, Homo sapiens
agagcctggtacatc

SEQ ID NO: 445853 - DNA, 15 bp, Homo sapiens
gagagcctggtacat

SEQ ID NO: 445854 - DNA, 15 bp, Homo sapiens
cgagagcctggtaca

SEQ ID NO: 445855 - DNA, 15 bp, Homo sapiens
gcgagagcctggtac

SEQ ID NO: 445856 - DNA, 15 bp, Homo sapiens
tgcgagagcctggta

SEQ ID NO: 445857 - DNA, 15 bp, Homo sapiens
gtgcgagagcctggt

SEQ ID NO: 445858 - DNA, 15 bp, Homo sapiens
tgtgcgagagcctgg

SEQ ID NO: 445859 - DNA, 15 bp, Homo sapiens
gtgtgcgagagcctg

SEQ ID NO: 445860 - DNA, 15 bp, Homo sapiens
ggtgtgcgagagcct

SEQ ID NO: 445861 - DNA, 15 bp, Homo sapiens
aggtgtgcgagagcc

SEQ ID NO: 445862 - DNA, 15 bp, Homo sapiens
gaggtgtgcgagagc

SEQ ID NO: 445863 - DNA, 15 bp, Homo sapiens
agaggtgtgcgagag

SEQ ID NO: 445864 - DNA, 15 bp, Homo sapiens
cagaggtgtgcgaga

SEQ ID NO: 445865 - DNA, 15 bp, Homo sapiens
gcagaggtgtgcgag

SEQ ID NO: 445866 - DNA, 15 bp, Homo sapiens
tgcagaggtgtgcga

SEQ ID NO: 445867 - DNA, 15 bp, Homo sapiens
gtgcagaggtgtgcg

SEQ ID NO: 445868 - DNA, 15 bp, Homo sapiens
ggtgcagaggtgtgc

SEQ ID NO: 445869 - DNA, 15 bp, Homo sapiens
aggtgcagaggtgtg

SEQ ID NO: 445870 - DNA, 15 bp, Homo sapiens
aaggtgcagaggtgt

SEQ ID NO: 445871 - DNA, 15 bp, Homo sapiens
aaaggtgcagaggtg

SEQ ID NO: 445872 - DNA, 15 bp, Homo sapiens
caaaggtgcagaggt

SEQ ID NO: 445873 - DNA, 15 bp, Homo sapiens
gcaaaggtgcagagg

SEQ ID NO: 445874 - DNA, 15 bp, Homo sapiens
tgcaaaggtgcagag

SEQ ID NO: 445875 - DNA, 15 bp, Homo sapiens
gtgcaaaggtgcaga

SEQ ID NO: 445876 - DNA, 15 bp, Homo sapiens
cgtgcaaaggtgcag

SEQ ID NO: 445877 - DNA, 15 bp, Homo sapiens
acgtgcaaaggtgca

SEQ ID NO: 445878 - DNA, 15 bp, Homo sapiens
cacgtgcaaaggtgc

SEQ ID NO: 445879 - DNA, 15 bp, Homo sapiens
gcacgtgcaaaggtg

SEQ ID NO: 445880 - DNA, 15 bp, Homo sapiens
agcacgtgcaaaggt

SEQ ID NO: 445881 - DNA, 15 bp, Homo sapiens
cagcacgtgcaaagg

SEQ ID NO: 445882 - DNA, 15 bp, Homo sapiens
acagcacgtgcaaag

SEQ ID NO: 445883 - DNA, 15 bp, Homo sapiens
aacagcacgtgcaaa

SEQ ID NO: 445884 - DNA, 15 bp, Homo sapiens
aaacagcacgtgcaa

SEQ ID NO: 445885 - DNA, 15 bp, Homo sapiens
caaacagcacgtgca

SEQ ID NO: 445886 - DNA, 15 bp, Homo sapiens
gcaaacagcacgtgc

SEQ ID NO: 445887 - DNA, 15 bp, Homo sapiens
agcaaacagcacgtg

SEQ ID NO: 445888 - DNA, 15 bp, Homo sapiens
cagcaaacagcacgt

SEQ ID NO: 445889 - DNA, 15 bp, Homo sapiens
acagcaaacagcacg

SEQ ID NO: 445890 - DNA, 15 bp, Homo sapiens
cacagcaaacagcac

SEQ ID NO: 445891 - DNA, 15 bp, Homo sapiens
gcacagcaaacagca

SEQ ID NO: 445892 - DNA, 15 bp, Homo sapiens
cgcacagcaaacagc

SEQ ID NO: 445893 - DNA, 15 bp, Homo sapiens
acgcacagcaaacag

SEQ ID NO: 445894 - DNA, 15 bp, Homo sapiens
cacgcacagcaaaca

SEQ ID NO: 445895 - DNA, 15 bp, Homo sapiens
ccacgcacagcaaac

SEQ ID NO: 445896 - DNA, 15 bp, Homo sapiens
tccacgcacagcaaa

SEQ ID NO: 445897 - DNA, 15 bp, Homo sapiens
ttccacgcacagcaa

SEQ ID NO: 445898 - DNA, 15 bp, Homo sapiens
attccacgcacagca

SEQ ID NO: 445899 - DNA, 15 bp, Homo sapiens
cattccacgcacagc

SEQ ID NO: 445900 - DNA, 15 bp, Homo sapiens
gcattccacgcacag

SEQ ID NO: 445901 - DNA, 15 bp, Homo sapiens
ggcattccacgcaca

SEQ ID NO: 445902 - DNA, 15 bp, Homo sapiens
gggcattccacgcac

SEQ ID NO: 445903 - DNA, 15 bp, Homo sapiens
agggcattccacgca

SEQ ID NO: 445904 - DNA, 15 bp, Homo sapiens
aagggcattccacgc

SEQ ID NO: 445905 - DNA, 15 bp, Homo sapiens
gaagggcattccacg

SEQ ID NO: 445906 - DNA, 15 bp, Homo sapiens
tgaagggcattccac

SEQ ID NO: 445907 - DNA, 15 bp, Homo sapiens
gtgaagggcattcca

SEQ ID NO: 445908 - DNA, 15 bp, Homo sapiens
agtgaagggcattcc

SEQ ID NO: 445909 - DNA, 15 bp, Homo sapiens
cagtgaagggcattc

SEQ ID NO: 445910 - DNA, 15 bp, Homo sapiens
acagtgaagggcatt

SEQ ID NO: 445911 - DNA, 15 bp, Homo sapiens
gacagtgaagggcat

SEQ ID NO: 445912 - DNA, 15 bp, Homo sapiens
tgacagtgaagggca

SEQ ID NO: 445913 - DNA, 15 bp, Homo sapiens
gtgacagtgaagggc

SEQ ID NO: 445914 - DNA, 15 bp, Homo sapiens
ggtgacagtgaaggg

SEQ ID NO: 445915 - DNA, 15 bp, Homo sapiens
tggtgacagtgaagg

SEQ ID NO: 445916 - DNA, 15 bp, Homo sapiens
gtggtgacagtgaag

SEQ ID NO: 445917 - DNA, 15 bp, Homo sapiens
ggtggtgacagtgaa

SEQ ID NO: 445918 - DNA, 15 bp, Homo sapiens
gggtggtgacagtga

SEQ ID NO: 445919 - DNA, 15 bp, Homo sapiens
agggtggtgacagtg

SEQ ID NO: 445920 - DNA, 15 bp, Homo sapiens
cagggtggtgacagt

SEQ ID NO: 445921 - DNA, 15 bp, Homo sapiens
gcagggtggtgacag

SEQ ID NO: 445922 - DNA, 15 bp, Homo sapiens
agcagggtggtgaca

SEQ ID NO: 445923 - DNA, 15 bp, Homo sapiens
gagcagggtggtgac

SEQ ID NO: 445924 - DNA, 15 bp, Homo sapiens
tgagcagggtggtga

SEQ ID NO: 445925 - DNA, 15 bp, Homo sapiens
atgagcagggtggtg

SEQ ID NO: 445926 - DNA, 15 bp, Homo sapiens
gatgagcagggtggt

SEQ ID NO: 445927 - DNA, 15 bp, Homo sapiens
ggatgagcagggtgg

SEQ ID NO: 445928 - DNA, 15 bp, Homo sapiens
tggatgagcagggtg

SEQ ID NO: 445929 - DNA, 15 bp, Homo sapiens
gtggatgagcagggt

SEQ ID NO: 445930 - DNA, 15 bp, Homo sapiens
agtggatgagcaggg

SEQ ID NO: 445931 - DNA, 15 bp, Homo sapiens
gagtggatgagcagg

SEQ ID NO: 445932 - DNA, 15 bp, Homo sapiens
agagtggatgagcag

SEQ ID NO: 445933 - DNA, 15 bp, Homo sapiens
tagagtggatgagca

SEQ ID NO: 445934 - DNA, 15 bp, Homo sapiens
gtagagtggatgagc

SEQ ID NO: 445935 - DNA, 15 bp, Homo sapiens
agtagagtggatgag

SEQ ID NO: 445936 - DNA, 15 bp, Homo sapiens
tagtagagtggatga

SEQ ID NO: 445937 - DNA, 15 bp, Homo sapiens
ttagtagagtggatg

SEQ ID NO: 445938 - DNA, 15 bp, Homo sapiens
attagtagagtggat

SEQ ID NO: 445939 - DNA, 15 bp, Homo sapiens
cattagtagagtgga

SEQ ID NO: 445940 - DNA, 15 bp, Homo sapiens
gcattagtagagtgg

SEQ ID NO: 445941 - DNA, 15 bp, Homo sapiens
ggcattagtagagtg

SEQ ID NO: 445942 - DNA, 15 bp, Homo sapiens
aggcattagtagagt

SEQ ID NO: 445943 - DNA, 15 bp, Homo sapiens
gaggcattagtagag

SEQ ID NO: 445944 - DNA, 15 bp, Homo sapiens
agaggcattagtaga

SEQ ID NO: 445945 - DNA, 15 bp, Homo sapiens
aagaggcattagtag

SEQ ID NO: 445946 - DNA, 15 bp, Homo sapiens
gaagaggcattagta

SEQ ID NO: 445947 - DNA, 15 bp, Homo sapiens
tgaagaggcattagt

SEQ ID NO: 445948 - DNA, 15 bp, Homo sapiens
atgaagaggcattag

SEQ ID NO: 445949 - DNA, 15 bp, Homo sapiens
aatgaagaggcatta

SEQ ID NO: 445950 - DNA, 15 bp, Homo sapiens
gaatgaagaggcatt

SEQ ID NO: 445951 - DNA, 15 bp, Homo sapiens
agaatgaagaggcat

SEQ ID NO: 445952 - DNA, 15 bp, Homo sapiens
aagaatgaagaggca

SEQ ID NO: 445953 - DNA, 15 bp, Homo sapiens
aaagaatgaagaggc

SEQ ID NO: 445954 - DNA, 15 bp, Homo sapiens
aaaagaatgaagagg

SEQ ID NO: 445955 - DNA, 15 bp, Homo sapiens
taaaagaatgaagag

SEQ ID NO: 445956 - DNA, 15 bp, Homo sapiens
ataaaagaatgaaga

SEQ ID NO: 445957 - DNA, 15 bp, Homo sapiens
tataaaagaatgaag

SEQ ID NO: 445958 - DNA, 15 bp, Homo sapiens
gtataaaagaatgaa

SEQ ID NO: 445959 - DNA, 15 bp, Homo sapiens
agtataaaagaatga

SEQ ID NO: 445960 - DNA, 15 bp, Homo sapiens
gagtataaaagaatg

SEQ ID NO: 445961 - DNA, 15 bp, Homo sapiens
tgagtataaaagaat

SEQ ID NO: 445962 - DNA, 15 bp, Homo sapiens
ctgagtataaaagaa

SEQ ID NO: 445963 - DNA, 15 bp, Homo sapiens
gctgagtataaaaga

SEQ ID NO: 445964 - DNA, 15 bp, Homo sapiens
agctgagtataaaag

SEQ ID NO: 445965 - DNA, 15 bp, Homo sapiens
aagctgagtataaaa

SEQ ID NO: 445966 - DNA, 15 bp, Homo sapiens
aaagctgagtataaa

SEQ ID NO: 445967 - DNA, 15 bp, Homo sapiens
gaaagctgagtataa

SEQ ID NO: 445968 - DNA, 15 bp, Homo sapiens
agaaagctgagtata

SEQ ID NO: 445969 - DNA, 15 bp, Homo sapiens
aagaaagctgagtat

SEQ ID NO: 445970 - DNA, 15 bp, Homo sapiens
aaagaaagctgagta

SEQ ID NO: 445971 - DNA, 15 bp, Homo sapiens
taaagaaagctgagt

SEQ ID NO: 445972 - DNA, 15 bp, Homo sapiens
ttaaagaaagctgag

SEQ ID NO: 445973 - DNA, 15 bp, Homo sapiens
tttaaagaaagctga

SEQ ID NO: 445974 - DNA, 15 bp, Homo sapiens
ctttaaagaaagctg

SEQ ID NO: 445975 - DNA, 15 bp, Homo sapiens
actttaaagaaagct

SEQ ID NO: 445976 - DNA, 15 bp, Homo sapiens
aactttaaagaaagc

SEQ ID NO: 445977 - DNA, 15 bp, Homo sapiens
gaactttaaagaaag

SEQ ID NO: 445978 - DNA, 15 bp, Homo sapiens
agaactttaaagaaa

SEQ ID NO: 445979 - DNA, 15 bp, Homo sapiens
aagaactttaaagaa

SEQ ID NO: 445980 - DNA, 15 bp, Homo sapiens
gaagaactttaaaga

SEQ ID NO: 445981 - DNA, 15 bp, Homo sapiens
agaagaactttaaag

SEQ ID NO: 445982 - DNA, 15 bp, Homo sapiens
tagaagaactttaaa

SEQ ID NO: 445983 - DNA, 15 bp, Homo sapiens
ttagaagaactttaa

SEQ ID NO: 445984 - DNA, 15 bp, Homo sapiens
cttagaagaacttta

SEQ ID NO: 445985 - DNA, 15 bp, Homo sapiens
gcttagaagaacttt

SEQ ID NO: 445986 - DNA, 15 bp, Homo sapiens
agcttagaagaactt

SEQ ID NO: 445987 - DNA, 15 bp, Homo sapiens
cagcttagaagaact

SEQ ID NO: 445988 - DNA, 15 bp, Homo sapiens
tcagcttagaagaac

SEQ ID NO: 445989 - DNA, 15 bp, Homo sapiens
ctcagcttagaagaa

SEQ ID NO: 445990 - DNA, 15 bp, Homo sapiens
actcagcttagaaga

SEQ ID NO: 445991 - DNA, 15 bp, Homo sapiens
aactcagcttagaag

SEQ ID NO: 445992 - DNA, 15 bp, Homo sapiens
taactcagcttagaa

SEQ ID NO: 445993 - DNA, 15 bp, Homo sapiens
ctaactcagcttaga

SEQ ID NO: 445994 - DNA, 15 bp, Homo sapiens
cctaactcagcttag

SEQ ID NO: 445995 - DNA, 15 bp, Homo sapiens
acctaactcagctta

SEQ ID NO: 445996 - DNA, 15 bp, Homo sapiens
cacctaactcagctt

SEQ ID NO: 445997 - DNA, 15 bp, Homo sapiens
acacctaactcagct

SEQ ID NO: 445998 - DNA, 15 bp, Homo sapiens
gacacctaactcagc

SEQ ID NO: 445999 - DNA, 15 bp, Homo sapiens
agacacctaactcag

SEQ ID NO: 446000 - DNA, 15 bp, Homo sapiens
cagacacctaactca

SEQ ID NO: 446001 - DNA, 15 bp, Homo sapiens
acagacacctaactc

SEQ ID NO: 446002 - DNA, 15 bp, Homo sapiens
gacagacacctaact

SEQ ID NO: 446003 - DNA, 15 bp, Homo sapiens
ggacagacacctaac

SEQ ID NO: 446004 - DNA, 15 bp, Homo sapiens
aggacagacacctaa

SEQ ID NO: 446005 - DNA, 15 bp, Homo sapiens
aaggacagacaccta

SEQ ID NO: 446006 - DNA, 15 bp, Homo sapiens
aaaggacagacacct

SEQ ID NO: 446007 - DNA, 15 bp, Homo sapiens
taaaggacagacacc

SEQ ID NO: 446008 - DNA, 15 bp, Homo sapiens
ataaaggacagacac

SEQ ID NO: 446009 - DNA, 15 bp, Homo sapiens
cataaaggacagaca

SEQ ID NO: 446010 - DNA, 15 bp, Homo sapiens
tcataaaggacagac

SEQ ID NO: 446011 - DNA, 15 bp, Homo sapiens
atcataaaggacaga

SEQ ID NO: 446012 - DNA, 15 bp, Homo sapiens
gatcataaaggacag

SEQ ID NO: 446013 - DNA, 15 bp, Homo sapiens
ggatcataaaggaca

SEQ ID NO: 446014 - DNA, 15 bp, Homo sapiens
gggatcataaaggac

SEQ ID NO: 446015 - DNA, 15 bp, Homo sapiens
cgggatcataaagga

SEQ ID NO: 446016 - DNA, 15 bp, Homo sapiens
gcgggatcataaagg

SEQ ID NO: 446017 - DNA, 15 bp, Homo sapiens
tgcgggatcataaag

SEQ ID NO: 446018 - DNA, 15 bp, Homo sapiens
ctgcgggatcataaa

SEQ ID NO: 446019 - DNA, 15 bp, Homo sapiens
actgcgggatcataa

SEQ ID NO: 446020 - DNA, 15 bp, Homo sapiens
tactgcgggatcata

SEQ ID NO: 446021 - DNA, 15 bp, Homo sapiens
atactgcgggatcat

SEQ ID NO: 446022 - DNA, 15 bp, Homo sapiens
aatactgcgggatca

SEQ ID NO: 446023 - DNA, 15 bp, Homo sapiens
gaatactgcgggatc

SEQ ID NO: 446024 - DNA, 15 bp, Homo sapiens
ggaatactgcgggat

SEQ ID NO: 446025 - DNA, 15 bp, Homo sapiens
tggaatactgcggga

SEQ ID NO: 446026 - DNA, 15 bp, Homo sapiens
atggaatactgcggg

SEQ ID NO: 446027 - DNA, 15 bp, Homo sapiens
catggaatactgcgg

SEQ ID NO: 446028 - DNA, 15 bp, Homo sapiens
tcatggaatactgcg

SEQ ID NO: 446029 - DNA, 15 bp, Homo sapiens
ttcatggaatactgc

SEQ ID NO: 446030 - DNA, 15 bp, Homo sapiens
attcatggaatactg

SEQ ID NO: 446031 - DNA, 15 bp, Homo sapiens
tattcatggaatact

SEQ ID NO: 446032 - DNA, 15 bp, Homo sapiens
gtattcatggaatac

SEQ ID NO: 446033 - DNA, 15 bp, Homo sapiens
cgtattcatggaata

SEQ ID NO: 446034 - DNA, 15 bp, Homo sapiens
acgtattcatggaat

SEQ ID NO: 446035 - DNA, 15 bp, Homo sapiens
tacgtattcatggaa

SEQ ID NO: 446036 - DNA, 15 bp, Homo sapiens
atacgtattcatgga

SEQ ID NO: 446037 - DNA, 15 bp, Homo sapiens
tatacgtattcatgg

SEQ ID NO: 446038 - DNA, 15 bp, Homo sapiens
atatacgtattcatg

SEQ ID NO: 446039 - DNA, 15 bp, Homo sapiens
aatatacgtattcat

SEQ ID NO: 446040 - DNA, 15 bp, Homo sapiens
gaatatacgtattca

SEQ ID NO: 446041 - DNA, 15 bp, Homo sapiens
agaatatacgtattc

SEQ ID NO: 446042 - DNA, 15 bp, Homo sapiens
gagaatatacgtatt

SEQ ID NO: 446043 - DNA, 15 bp, Homo sapiens
tgagaatatacgtat

SEQ ID NO: 446044 - DNA, 15 bp, Homo sapiens
gtgagaatatacgta

SEQ ID NO: 446045 - DNA, 15 bp, Homo sapiens
tgtgagaatatacgt

SEQ ID NO: 446046 - DNA, 15 bp, Homo sapiens
atgtgagaatatacg

SEQ ID NO: 446047 - DNA, 15 bp, Homo sapiens
aatgtgagaatatac

SEQ ID NO: 446048 - DNA, 15 bp, Homo sapiens
aaatgtgagaatata

SEQ ID NO: 446049 - DNA, 15 bp, Homo sapiens
taaatgtgagaatat

SEQ ID NO: 446050 - DNA, 15 bp, Homo sapiens
ataaatgtgagaata

SEQ ID NO: 446051 - DNA, 15 bp, Homo sapiens
aataaatgtgagaat

SEQ ID NO: 446052 - DNA, 15 bp, Homo sapiens
caataaatgtgagaa

SEQ ID NO: 446053 - DNA, 15 bp, Homo sapiens
acaataaatgtgaga

SEQ ID NO: 446054 - DNA, 15 bp, Homo sapiens
tacaataaatgtgag

SEQ ID NO: 446055 - DNA, 15 bp, Homo sapiens
gtacaataaatgtga

SEQ ID NO: 446056 - DNA, 15 bp, Homo sapiens
agtacaataaatgtg

SEQ ID NO: 446057 - DNA, 15 bp, Homo sapiens
cagtacaataaatgt

SEQ ID NO: 446058 - DNA, 15 bp, Homo sapiens
acagtacaataaatg

SEQ ID NO: 446059 - DNA, 15 bp, Homo sapiens
tacagtacaataaat

SEQ ID NO: 446060 - DNA, 15 bp, Homo sapiens
atacagtacaataaa

SEQ ID NO: 446061 - DNA, 15 bp, Homo sapiens
aatacagtacaataa

SEQ ID NO: 446062 - DNA, 15 bp, Homo sapiens
taatacagtacaata

SEQ ID NO: 446063 - DNA, 15 bp, Homo sapiens
ataatacagtacaat

SEQ ID NO: 446064 - DNA, 15 bp, Homo sapiens
tataatacagtacaa

SEQ ID NO: 446065 - DNA, 15 bp, Homo sapiens
ttataatacagtaca

SEQ ID NO: 446066 - DNA, 15 bp, Homo sapiens
attataatacagtac

SEQ ID NO: 446067 - DNA, 15 bp, Homo sapiens
aattataatacagta

SEQ ID NO: 446068 - DNA, 15 bp, Homo sapiens
caattataatacagt

SEQ ID NO: 446069 - DNA, 15 bp, Homo sapiens
acaattataatacag

SEQ ID NO: 446070 - DNA, 15 bp, Homo sapiens
aacaattataataca

SEQ ID NO: 446071 - DNA, 15 bp, Homo sapiens
caacaattataatac

SEQ ID NO: 446072 - DNA, 15 bp, Homo sapiens
tcaacaattataata

SEQ ID NO: 446073 - DNA, 15 bp, Homo sapiens
ttcaacaattataat

SEQ ID NO: 446074 - DNA, 15 bp, Homo sapiens
tttcaacaattataa

SEQ ID NO: 446075 - DNA, 15 bp, Homo sapiens
ttttcaacaattata

SEQ ID NO: 446076 - DNA, 15 bp, Homo sapiens
gttttcaacaattat

SEQ ID NO: 446077 - DNA, 15 bp, Homo sapiens
agttttcaacaatta

SEQ ID NO: 446078 - DNA, 15 bp, Homo sapiens
aagttttcaacaatt

SEQ ID NO: 446079 - DNA, 15 bp, Homo sapiens
caagttttcaacaat

SEQ ID NO: 446080 - DNA, 15 bp, Homo sapiens
acaagttttcaacaa

SEQ ID NO: 446081 - DNA, 15 bp, Homo sapiens
gacaagttttcaaca

SEQ ID NO: 446082 - DNA, 15 bp, Homo sapiens
agacaagttttcaac

SEQ ID NO: 446083 - DNA, 15 bp, Homo sapiens
cagacaagttttcaa

SEQ ID NO: 446084 - DNA, 15 bp, Homo sapiens
acagacaagttttca

SEQ ID NO: 446085 - DNA, 15 bp, Homo sapiens
gacagacaagttttc

SEQ ID NO: 446086 - DNA, 15 bp, Homo sapiens
ggacagacaagtttt

SEQ ID NO: 446087 - DNA, 15 bp, Homo sapiens
gggacagacaagttt

SEQ ID NO: 446088 - DNA, 15 bp, Homo sapiens
tgggacagacaagtt

SEQ ID NO: 446089 - DNA, 15 bp, Homo sapiens
atgggacagacaagt

SEQ ID NO: 446090 - DNA, 15 bp, Homo sapiens
aatgggacagacaag

SEQ ID NO: 446091 - DNA, 15 bp, Homo sapiens
aaatgggacagacaa

SEQ ID NO: 446092 - DNA, 15 bp, Homo sapiens
taaatgggacagaca

SEQ ID NO: 446093 - DNA, 15 bp, Homo sapiens
ctaaatgggacagac

SEQ ID NO: 446094 - DNA, 15 bp, Homo sapiens
tctaaatgggacaga

SEQ ID NO: 446095 - DNA, 15 bp, Homo sapiens
ttctaaatgggacag

SEQ ID NO: 446096 - DNA, 15 bp, Homo sapiens
attctaaatgggaca

SEQ ID NO: 446097 - DNA, 15 bp, Homo sapiens
cattctaaatgggac

SEQ ID NO: 446098 - DNA, 15 bp, Homo sapiens
acattctaaatggga

SEQ ID NO: 446099 - DNA, 15 bp, Homo sapiens
cacattctaaatggg

SEQ ID NO: 446100 - DNA, 15 bp, Homo sapiens
tcacattctaaatgg

SEQ ID NO: 446101 - DNA, 15 bp, Homo sapiens
ctcacattctaaatg

SEQ ID NO: 446102 - DNA, 15 bp, Homo sapiens
gctcacattctaaat

SEQ ID NO: 446103 - DNA, 15 bp, Homo sapiens
agctcacattctaaa

SEQ ID NO: 446104 - DNA, 15 bp, Homo sapiens
gagctcacattctaa

SEQ ID NO: 446105 - DNA, 15 bp, Homo sapiens
ggagctcacattcta

SEQ ID NO: 446106 - DNA, 15 bp, Homo sapiens
aggagctcacattct

SEQ ID NO: 446107 - DNA, 15 bp, Homo sapiens
aaggagctcacattc

SEQ ID NO: 446108 - DNA, 15 bp, Homo sapiens
caaggagctcacatt

SEQ ID NO: 446109 - DNA, 15 bp, Homo sapiens
tcaaggagctcacat

SEQ ID NO: 446110 - DNA, 15 bp, Homo sapiens
ctcaaggagctcaca

SEQ ID NO: 446111 - DNA, 15 bp, Homo sapiens
tctcaaggagctcac

SEQ ID NO: 446112 - DNA, 15 bp, Homo sapiens
ctctcaaggagctca

SEQ ID NO: 446113 - DNA, 15 bp, Homo sapiens
gctctcaaggagctc

SEQ ID NO: 446114 - DNA, 15 bp, Homo sapiens
tgctctcaaggagct

SEQ ID NO: 446115 - DNA, 15 bp, Homo sapiens
ctgctctcaaggagc

SEQ ID NO: 446116 - DNA, 15 bp, Homo sapiens
tctgctctcaaggag

SEQ ID NO: 446117 - DNA, 15 bp, Homo sapiens
ttctgctctcaagga

SEQ ID NO: 446118 - DNA, 15 bp, Homo sapiens
gttctgctctcaagg

SEQ ID NO: 446119 - DNA, 15 bp, Homo sapiens
cgttctgctctcaag

SEQ ID NO: 446120 - DNA, 15 bp, Homo sapiens
ccgttctgctctcaa

SEQ ID NO: 446121 - DNA, 15 bp, Homo sapiens
accgttctgctctca

SEQ ID NO: 446122 - DNA, 15 bp, Homo sapiens
caccgttctgctctc

SEQ ID NO: 446123 - DNA, 15 bp, Homo sapiens
acaccgttctgctct

SEQ ID NO: 446124 - DNA, 15 bp, Homo sapiens
gacaccgttctgctc

SEQ ID NO: 446125 - DNA, 15 bp, Homo sapiens
agacaccgttctgct

SEQ ID NO: 446126 - DNA, 15 bp, Homo sapiens
aagacaccgttctgc

SEQ ID NO: 446127 - DNA, 15 bp, Homo sapiens
gaagacaccgttctg

SEQ ID NO: 446128 - DNA, 15 bp, Homo sapiens
tgaagacaccgttct

SEQ ID NO: 446129 - DNA, 15 bp, Homo sapiens
atgaagacaccgttc

SEQ ID NO: 446130 - DNA, 15 bp, Homo sapiens
aatgaagacaccgtt

SEQ ID NO: 446131 - DNA, 15 bp, Homo sapiens
taatgaagacaccgt

SEQ ID NO: 446132 - DNA, 15 bp, Homo sapiens
ataatgaagacaccg

SEQ ID NO: 446133 - DNA, 15 bp, Homo sapiens
gataatgaagacacc

SEQ ID NO: 446134 - DNA, 15 bp, Homo sapiens
agataatgaagacac

SEQ ID NO: 446135 - DNA, 15 bp, Homo sapiens
gagataatgaagaca

SEQ ID NO: 446136 - DNA, 15 bp, Homo sapiens
agagataatgaagac

SEQ ID NO: 446137 - DNA, 15 bp, Homo sapiens
cagagataatgaaga

SEQ ID NO: 446138 - DNA, 15 bp, Homo sapiens
acagagataatgaag

SEQ ID NO: 446139 - DNA, 15 bp, Homo sapiens
tacagagataatgaa

SEQ ID NO: 446140 - DNA, 15 bp, Homo sapiens
atacagagataatga

SEQ ID NO: 446141 - DNA, 15 bp, Homo sapiens
gatacagagataatg

SEQ ID NO: 446142 - DNA, 15 bp, Homo sapiens
ggatacagagataat

SEQ ID NO: 446143 - DNA, 15 bp, Homo sapiens
gggatacagagataa

SEQ ID NO: 446144 - DNA, 15 bp, Homo sapiens
ggggatacagagata

SEQ ID NO: 446145 - DNA, 15 bp, Homo sapiens
tggggatacagagat

SEQ ID NO: 446146 - DNA, 15 bp, Homo sapiens
ttggggatacagaga

SEQ ID NO: 446147 - DNA, 15 bp, Homo sapiens
cttggggatacagag

SEQ ID NO: 446148 - DNA, 15 bp, Homo sapiens
ccttggggatacaga

SEQ ID NO: 446149 - DNA, 15 bp, Homo sapiens
gccttggggatacag

SEQ ID NO: 446150 - DNA, 15 bp, Homo sapiens
agccttggggataca

SEQ ID NO: 446151 - DNA, 15 bp, Homo sapiens
aagccttggggatac

SEQ ID NO: 446152 - DNA, 15 bp, Homo sapiens
aaagccttggggata

SEQ ID NO: 446153 - DNA, 15 bp, Homo sapiens
caaagccttggggat

SEQ ID NO: 446154 - DNA, 15 bp, Homo sapiens
gcaaagccttgggga

SEQ ID NO: 446155 - DNA, 15 bp, Homo sapiens
tgcaaagccttgggg

SEQ ID NO: 446156 - DNA, 15 bp, Homo sapiens
gtgcaaagccttggg

SEQ ID NO: 446157 - DNA, 15 bp, Homo sapiens
tgtgcaaagccttgg

SEQ ID NO: 446158 - DNA, 15 bp, Homo sapiens
ctgtgcaaagccttg

SEQ ID NO: 446159 - DNA, 15 bp, Homo sapiens
actgtgcaaagcctt

SEQ ID NO: 446160 - DNA, 15 bp, Homo sapiens
cactgtgcaaagcct

SEQ ID NO: 446161 - DNA, 15 bp, Homo sapiens
gcactgtgcaaagcc

SEQ ID NO: 446162 - DNA, 15 bp, Homo sapiens
ggcactgtgcaaagc

SEQ ID NO: 446163 - DNA, 15 bp, Homo sapiens
aggcactgtgcaaag

SEQ ID NO: 446164 - DNA, 15 bp, Homo sapiens
aaggcactgtgcaaa

SEQ ID NO: 446165 - DNA, 15 bp, Homo sapiens
caaggcactgtgcaa

SEQ ID NO: 446166 - DNA, 15 bp, Homo sapiens
gcaaggcactgtgca

SEQ ID NO: 446167 - DNA, 15 bp, Homo sapiens
agcaaggcactgtgc

SEQ ID NO: 446168 - DNA, 15 bp, Homo sapiens
gagcaaggcactgtg

SEQ ID NO: 446169 - DNA, 15 bp, Homo sapiens
tgagcaaggcactgt

SEQ ID NO: 446170 - DNA, 15 bp, Homo sapiens
atgagcaaggcactg

SEQ ID NO: 446171 - DNA, 15 bp, Homo sapiens
tatgagcaaggcact

SEQ ID NO: 446172 - DNA, 15 bp, Homo sapiens
ctatgagcaaggcac

SEQ ID NO: 446173 - DNA, 15 bp, Homo sapiens
actatgagcaaggca

SEQ ID NO: 446174 - DNA, 15 bp, Homo sapiens
tactatgagcaaggc

SEQ ID NO: 446175 - DNA, 15 bp, Homo sapiens
ctactatgagcaagg

SEQ ID NO: 446176 - DNA, 15 bp, Homo sapiens
cctactatgagcaag

SEQ ID NO: 446177 - DNA, 15 bp, Homo sapiens
acctactatgagcaa

SEQ ID NO: 446178 - DNA, 15 bp, Homo sapiens
aacctactatgagca

SEQ ID NO: 446179 - DNA, 15 bp, Homo sapiens
aaacctactatgagc

SEQ ID NO: 446180 - DNA, 15 bp, Homo sapiens
aaaacctactatgag

SEQ ID NO: 446181 - DNA, 15 bp, Homo sapiens
gaaaacctactatga

SEQ ID NO: 446182 - DNA, 15 bp, Homo sapiens
tgaaaacctactatg

SEQ ID NO: 446183 - DNA, 15 bp, Homo sapiens
ttgaaaacctactat

SEQ ID NO: 446184 - DNA, 15 bp, Homo sapiens
attgaaaacctacta

SEQ ID NO: 446185 - DNA, 15 bp, Homo sapiens
tattgaaaacctact

SEQ ID NO: 446186 - DNA, 15 bp, Homo sapiens
ttattgaaaacctac

SEQ ID NO: 446187 - DNA, 15 bp, Homo sapiens
tttattgaaaaccta

SEQ ID NO: 446188 - DNA, 15 bp, Homo sapiens
atttattgaaaacct

SEQ ID NO: 446189 - DNA, 15 bp, Homo sapiens
catttattgaaaacc

SEQ ID NO: 446190 - DNA, 15 bp, Homo sapiens
tcatttattgaaaac

SEQ ID NO: 446191 - DNA, 15 bp, Homo sapiens
atcatttattgaaaa

SEQ ID NO: 446192 - DNA, 15 bp, Homo sapiens
aatcatttattgaaa

SEQ ID NO: 446193 - DNA, 15 bp, Homo sapiens
taatcatttattgaa

SEQ ID NO: 446194 - DNA, 15 bp, Homo sapiens
ataatcatttattga

SEQ ID NO: 446195 - DNA, 15 bp, Homo sapiens
aataatcatttattg

SEQ ID NO: 446196 - DNA, 15 bp, Homo sapiens
taataatcatttatt

SEQ ID NO: 446197 - DNA, 15 bp, Homo sapiens
ttaataatcatttat

SEQ ID NO: 446198 - DNA, 15 bp, Homo sapiens
tttaataatcattta

SEQ ID NO: 446199 - DNA, 15 bp, Homo sapiens
atttaataatcattt

SEQ ID NO: 446200 - DNA, 15 bp, Homo sapiens
tatttaataatcatt

SEQ ID NO: 446201 - DNA, 15 bp, Homo sapiens
ttatttaataatcat

SEQ ID NO: 446202 - DNA, 15 bp, Homo sapiens
tttatttaataatca

SEQ ID NO: 446203 - DNA, 15 bp, Homo sapiens
atttatttaataatc

SEQ ID NO: 446204 - DNA, 15 bp, Homo sapiens
tatttatttaataat

SEQ ID NO: 446205 - DNA, 15 bp, Homo sapiens
ttatttatttaataa

SEQ ID NO: 446206 - DNA, 15 bp, Homo sapiens
attatttatttaata

SEQ ID NO: 446207 - DNA, 15 bp, Homo sapiens
tattatttatttaat

SEQ ID NO: 446208 - DNA, 15 bp, Homo sapiens
ttattatttatttaa

SEQ ID NO: 446209 - DNA, 15 bp, Homo sapiens
tttattatttattta

SEQ ID NO: 446210 - DNA, 15 bp, Homo sapiens
atttattatttattt

SEQ ID NO: 446211 - DNA, 15 bp, Homo sapiens
catttattatttatt

SEQ ID NO: 446212 - DNA, 15 bp, Homo sapiens
ccatttattatttat

SEQ ID NO: 446213 - DNA, 15 bp, Homo sapiens
accatttattattta

SEQ ID NO: 446214 - DNA, 15 bp, Homo sapiens
taccatttattattt

SEQ ID NO: 446215 - DNA, 15 bp, Homo sapiens
ctaccatttattatt

SEQ ID NO: 446216 - DNA, 15 bp, Homo sapiens
actaccatttattat

SEQ ID NO: 446217 - DNA, 15 bp, Homo sapiens
cactaccatttatta

SEQ ID NO: 446218 - DNA, 15 bp, Homo sapiens
ccactaccatttatt

SEQ ID NO: 446219 - DNA, 15 bp, Homo sapiens
accactaccatttat

SEQ ID NO: 446220 - DNA, 15 bp, Homo sapiens
gaccactaccattta

SEQ ID NO: 446221 - DNA, 15 bp, Homo sapiens
agaccactaccattt

SEQ ID NO: 446222 - DNA, 15 bp, Homo sapiens
gagaccactaccatt

SEQ ID NO: 446223 - DNA, 15 bp, Homo sapiens
agagaccactaccat

SEQ ID NO: 446224 - DNA, 15 bp, Homo sapiens
cagagaccactacca

SEQ ID NO: 446225 - DNA, 15 bp, Homo sapiens
gcagagaccactacc

SEQ ID NO: 446226 - DNA, 15 bp, Homo sapiens
tgcagagaccactac

SEQ ID NO: 446227 - DNA, 15 bp, Homo sapiens
ctgcagagaccacta

SEQ ID NO: 446228 - DNA, 15 bp, Homo sapiens
tctgcagagaccact

SEQ ID NO: 446229 - DNA, 15 bp, Homo sapiens
ttctgcagagaccac

SEQ ID NO: 446230 - DNA, 15 bp, Homo sapiens
tttctgcagagacca

SEQ ID NO: 446231 - DNA, 15 bp, Homo sapiens
ctttctgcagagacc

SEQ ID NO: 446232 - DNA, 15 bp, Homo sapiens
tctttctgcagagac

SEQ ID NO: 446233 - DNA, 15 bp, Homo sapiens
ttctttctgcagaga

SEQ ID NO: 446234 - DNA, 15 bp, Homo sapiens
attctttctgcagag

SEQ ID NO: 446235 - DNA, 15 bp, Homo sapiens
gattctttctgcaga

SEQ ID NO: 446236 - DNA, 15 bp, Homo sapiens
tgattctttctgcag

SEQ ID NO: 446237 - DNA, 15 bp, Homo sapiens
ttgattctttctgca

SEQ ID NO: 446238 - DNA, 15 bp, Homo sapiens
attgattctttctgc

SEQ ID NO: 446239 - DNA, 15 bp, Homo sapiens
cattgattctttctg

SEQ ID NO: 446240 - DNA, 15 bp, Homo sapiens
ccattgattctttct

SEQ ID NO: 446241 - DNA, 15 bp, Homo sapiens
tccattgattctttc

SEQ ID NO: 446242 - DNA, 15 bp, Homo sapiens
ttccattgattcttt

SEQ ID NO: 446243 - DNA, 15 bp, Homo sapiens
tttccattgattctt

SEQ ID NO: 446244 - DNA, 15 bp, Homo sapiens
ttttccattgattct

SEQ ID NO: 446245 - DNA, 15 bp, Homo sapiens
tttttccattgattc

SEQ ID NO: 446246 - DNA, 15 bp, Homo sapiens
atttttccattgatt

SEQ ID NO: 446247 - DNA, 15 bp, Homo sapiens
gatttttccattgat

SEQ ID NO: 446248 - DNA, 15 bp, Homo sapiens
tgatttttccattga

SEQ ID NO: 446249 - DNA, 15 bp, Homo sapiens
ctgatttttccattg

SEQ ID NO: 446250 - DNA, 15 bp, Homo sapiens
tctgatttttccatt

SEQ ID NO: 446251 - DNA, 15 bp, Homo sapiens
atctgatttttccat

SEQ ID NO: 446252 - DNA, 15 bp, Homo sapiens
tatctgatttttcca

SEQ ID NO: 446253 - DNA, 15 bp, Homo sapiens
gtatctgatttttcc

SEQ ID NO: 446254 - DNA, 15 bp, Homo sapiens
tgtatctgatttttc

SEQ ID NO: 446255 - DNA, 15 bp, Homo sapiens
ctgtatctgattttt

SEQ ID NO: 446256 - DNA, 15 bp, Homo sapiens
gctgtatctgatttt

SEQ ID NO: 446257 - DNA, 15 bp, Homo sapiens
agctgtatctgattt

SEQ ID NO: 446258 - DNA, 15 bp, Homo sapiens
aagctgtatctgatt

SEQ ID NO: 446259 - DNA, 15 bp, Homo sapiens
taagctgtatctgat

SEQ ID NO: 446260 - DNA, 15 bp, Homo sapiens
ctaagctgtatctga

SEQ ID NO: 446261 - DNA, 15 bp, Homo sapiens
actaagctgtatctg

SEQ ID NO: 446262 - DNA, 15 bp, Homo sapiens
tactaagctgtatct

SEQ ID NO: 446263 - DNA, 15 bp, Homo sapiens
atactaagctgtatc

SEQ ID NO: 446264 - DNA, 15 bp, Homo sapiens
aatactaagctgtat

SEQ ID NO: 446265 - DNA, 15 bp, Homo sapiens
aaatactaagctgta

SEQ ID NO: 446266 - DNA, 15 bp, Homo sapiens
aaaatactaagctgt

SEQ ID NO: 446267 - DNA, 15 bp, Homo sapiens
aaaaatactaagctg

SEQ ID NO: 446268 - DNA, 15 bp, Homo sapiens
aaaaaatactaagct

SEQ ID NO: 446269 - DNA, 15 bp, Homo sapiens
aaaaaaatactaagc

SEQ ID NO: 446270 - DNA, 15 bp, Homo sapiens
aaaaaaaatactaag

SEQ ID NO: 446271 - DNA, 15 bp, Homo sapiens
aaaaaaaaatactaa

SEQ ID NO: 446272 - DNA, 15 bp, Homo sapiens
gaaaaaaaaatacta

SEQ ID NO: 446273 - DNA, 15 bp, Homo sapiens
agaaaaaaaaatact

SEQ ID NO: 446274 - DNA, 15 bp, Homo sapiens
gagaaaaaaaaatac

SEQ ID NO: 446275 - DNA, 15 bp, Homo sapiens
agagaaaaaaaaata

SEQ ID NO: 446276 - DNA, 15 bp, Homo sapiens
aagagaaaaaaaaat

SEQ ID NO: 446277 - DNA, 15 bp, Homo sapiens
gaagagaaaaaaaaa

SEQ ID NO: 446278 - DNA, 15 bp, Homo sapiens
agaagagaaaaaaaa

SEQ ID NO: 446279 - DNA, 15 bp, Homo sapiens
aagaagagaaaaaaa

SEQ ID NO: 446280 - DNA, 15 bp, Homo sapiens
caagaagagaaaaaa

SEQ ID NO: 446281 - DNA, 15 bp, Homo sapiens
acaagaagagaaaaa

SEQ ID NO: 446282 - DNA, 15 bp, Homo sapiens
tacaagaagagaaaa

SEQ ID NO: 446283 - DNA, 15 bp, Homo sapiens
atacaagaagagaaa

SEQ ID NO: 446284 - DNA, 15 bp, Homo sapiens
tatacaagaagagaa

SEQ ID NO: 446285 - DNA, 15 bp, Homo sapiens
gtatacaagaagaga

SEQ ID NO: 446286 - DNA, 15 bp, Homo sapiens
agtatacaagaagag

SEQ ID NO: 446287 - DNA, 15 bp, Homo sapiens
aagtatacaagaaga

SEQ ID NO: 446288 - DNA, 15 bp, Homo sapiens
taagtatacaagaag

SEQ ID NO: 446289 - DNA, 15 bp, Homo sapiens
ataagtatacaagaa

SEQ ID NO: 446290 - DNA, 15 bp, Homo sapiens
tataagtatacaaga

SEQ ID NO: 446291 - DNA, 15 bp, Homo sapiens
ttataagtatacaag

SEQ ID NO: 446292 - DNA, 15 bp, Homo sapiens
attataagtatacaa

SEQ ID NO: 446293 - DNA, 15 bp, Homo sapiens
gattataagtataca

SEQ ID NO: 446294 - DNA, 15 bp, Homo sapiens
tgattataagtatac

SEQ ID NO: 446295 - DNA, 15 bp, Homo sapiens
atgattataagtata

SEQ ID NO: 446296 - DNA, 15 bp, Homo sapiens
tatgattataagtat

SEQ ID NO: 446297 - DNA, 15 bp, Homo sapiens
ctatgattataagta

SEQ ID NO: 446298 - DNA, 15 bp, Homo sapiens
gctatgattataagt

SEQ ID NO: 446299 - DNA, 15 bp, Homo sapiens
ggctatgattataag

SEQ ID NO: 446300 - DNA, 15 bp, Homo sapiens
aggctatgattataa

SEQ ID NO: 446301 - DNA, 15 bp, Homo sapiens
gaggctatgattata

SEQ ID NO: 446302 - DNA, 15 bp, Homo sapiens
agaggctatgattat

SEQ ID NO: 446303 - DNA, 15 bp, Homo sapiens
aagaggctatgatta

SEQ ID NO: 446304 - DNA, 15 bp, Homo sapiens
taagaggctatgatt

SEQ ID NO: 446305 - DNA, 15 bp, Homo sapiens
ctaagaggctatgat

SEQ ID NO: 446306 - DNA, 15 bp, Homo sapiens
tctaagaggctatga

SEQ ID NO: 446307 - DNA, 15 bp, Homo sapiens
ctctaagaggctatg

SEQ ID NO: 446308 - DNA, 15 bp, Homo sapiens
actctaagaggctat

SEQ ID NO: 446309 - DNA, 15 bp, Homo sapiens
aactctaagaggcta

SEQ ID NO: 446310 - DNA, 15 bp, Homo sapiens
caactctaagaggct

SEQ ID NO: 446311 - DNA, 15 bp, Homo sapiens
tcaactctaagaggc

SEQ ID NO: 446312 - DNA, 15 bp, Homo sapiens
ttcaactctaagagg

SEQ ID NO: 446313 - DNA, 15 bp, Homo sapiens
tttcaactctaagag

SEQ ID NO: 446314 - DNA, 15 bp, Homo sapiens
ctttcaactctaaga

SEQ ID NO: 446315 - DNA, 15 bp, Homo sapiens
cctttcaactctaag

SEQ ID NO: 446316 - DNA, 15 bp, Homo sapiens
ccctttcaactctaa

SEQ ID NO: 446317 - DNA, 15 bp, Homo sapiens
tccctttcaactcta

SEQ ID NO: 446318 - DNA, 15 bp, Homo sapiens
gtccctttcaactct

SEQ ID NO: 446319 - DNA, 15 bp, Homo sapiens
ggtccctttcaactc

SEQ ID NO: 446320 - DNA, 15 bp, Homo sapiens
aggtccctttcaact

SEQ ID NO: 446321 - DNA, 15 bp, Homo sapiens
caggtccctttcaac

SEQ ID NO: 446322 - DNA, 15 bp, Homo sapiens
tcaggtccctttcaa

SEQ ID NO: 446323 - DNA, 15 bp, Homo sapiens
ttcaggtccctttca

SEQ ID NO: 446324 - DNA, 15 bp, Homo sapiens
cttcaggtccctttc

SEQ ID NO: 446325 - DNA, 15 bp, Homo sapiens
gcttcaggtcccttt

SEQ ID NO: 446326 - DNA, 15 bp, Homo sapiens
tgcttcaggtccctt

SEQ ID NO: 446327 - DNA, 15 bp, Homo sapiens
ttgcttcaggtccct

SEQ ID NO: 446328 - DNA, 15 bp, Homo sapiens
tttgcttcaggtccc

SEQ ID NO: 446329 - DNA, 15 bp, Homo sapiens
atttgcttcaggtcc

SEQ ID NO: 446330 - DNA, 15 bp, Homo sapiens
aatttgcttcaggtc

SEQ ID NO: 446331 - DNA, 15 bp, Homo sapiens
caatttgcttcaggt

SEQ ID NO: 446332 - DNA, 15 bp, Homo sapiens
gcaatttgcttcagg

SEQ ID NO: 446333 - DNA, 15 bp, Homo sapiens
ggcaatttgcttcag

SEQ ID NO: 446334 - DNA, 15 bp, Homo sapiens
aggcaatttgcttca

SEQ ID NO: 446335 - DNA, 15 bp, Homo sapiens
aaggcaatttgcttc

SEQ ID NO: 446336 - DNA, 15 bp, Homo sapiens
aaaggcaatttgctt

SEQ ID NO: 446337 - DNA, 15 bp, Homo sapiens
taaaggcaatttgct

SEQ ID NO: 446338 - DNA, 15 bp, Homo sapiens
ttaaaggcaatttgc

SEQ ID NO: 446339 - DNA, 15 bp, Homo sapiens
attaaaggcaatttg

SEQ ID NO: 446340 - DNA, 15 bp, Homo sapiens
tattaaaggcaattt

SEQ ID NO: 446341 - DNA, 15 bp, Homo sapiens
ctattaaaggcaatt

SEQ ID NO: 446342 - DNA, 15 bp, Homo sapiens
gctattaaaggcaat

SEQ ID NO: 446343 - DNA, 15 bp, Homo sapiens
tgctattaaaggcaa

SEQ ID NO: 446344 - DNA, 15 bp, Homo sapiens
ttgctattaaaggca

SEQ ID NO: 446345 - DNA, 15 bp, Homo sapiens
gttgctattaaaggc

SEQ ID NO: 446346 - DNA, 15 bp, Homo sapiens
ggttgctattaaagg

SEQ ID NO: 446347 - DNA, 15 bp, Homo sapiens
gggttgctattaaag

SEQ ID NO: 446348 - DNA, 15 bp, Homo sapiens
agggttgctattaaa

SEQ ID NO: 446349 - DNA, 15 bp, Homo sapiens
cagggttgctattaa

SEQ ID NO: 446350 - DNA, 15 bp, Homo sapiens
tcagggttgctatta

SEQ ID NO: 446351 - DNA, 15 bp, Homo sapiens
ctcagggttgctatt

SEQ ID NO: 446352 - DNA, 15 bp, Homo sapiens
actcagggttgctat

SEQ ID NO: 446353 - DNA, 15 bp, Homo sapiens
cactcagggttgcta

SEQ ID NO: 446354 - DNA, 15 bp, Homo sapiens
ccactcagggttgct

SEQ ID NO: 446355 - DNA, 15 bp, Homo sapiens
tccactcagggttgc

SEQ ID NO: 446356 - DNA, 15 bp, Homo sapiens
ctccactcagggttg

SEQ ID NO: 446357 - DNA, 15 bp, Homo sapiens
cctccactcagggtt

SEQ ID NO: 446358 - DNA, 15 bp, Homo sapiens
acctccactcagggt

SEQ ID NO: 446359 - DNA, 15 bp, Homo sapiens
gacctccactcaggg

SEQ ID NO: 446360 - DNA, 15 bp, Homo sapiens
tgacctccactcagg

SEQ ID NO: 446361 - DNA, 15 bp, Homo sapiens
gtgacctccactcag

SEQ ID NO: 446362 - DNA, 15 bp, Homo sapiens
ggtgacctccactca

SEQ ID NO: 446363 - DNA, 15 bp, Homo sapiens
aggtgacctccactc

SEQ ID NO: 446364 - DNA, 15 bp, Homo sapiens
taggtgacctccact

SEQ ID NO: 446365 - DNA, 15 bp, Homo sapiens
ctaggtgacctccac

SEQ ID NO: 446366 - DNA, 15 bp, Homo sapiens
tctaggtgacctcca

SEQ ID NO: 446367 - DNA, 15 bp, Homo sapiens
gtctaggtgacctcc

SEQ ID NO: 446368 - DNA, 15 bp, Homo sapiens
agtctaggtgacctc

SEQ ID NO: 446369 - DNA, 15 bp, Homo sapiens
gagtctaggtgacct

SEQ ID NO: 446370 - DNA, 15 bp, Homo sapiens
tgagtctaggtgacc

SEQ ID NO: 446371 - DNA, 15 bp, Homo sapiens
atgagtctaggtgac

SEQ ID NO: 446372 - DNA, 15 bp, Homo sapiens
gatgagtctaggtga

SEQ ID NO: 446373 - DNA, 15 bp, Homo sapiens
agatgagtctaggtg

SEQ ID NO: 446374 - DNA, 15 bp, Homo sapiens
aagatgagtctaggt

SEQ ID NO: 446375 - DNA, 15 bp, Homo sapiens
caagatgagtctagg

SEQ ID NO: 446376 - DNA, 15 bp, Homo sapiens
tcaagatgagtctag

SEQ ID NO: 446377 - DNA, 15 bp, Homo sapiens
ttcaagatgagtcta

SEQ ID NO: 446378 - DNA, 15 bp, Homo sapiens
attcaagatgagtct

SEQ ID NO: 446379 - DNA, 15 bp, Homo sapiens
tattcaagatgagtc

SEQ ID NO: 446380 - DNA, 15 bp, Homo sapiens
gtattcaagatgagt

SEQ ID NO: 446381 - DNA, 15 bp, Homo sapiens
agtattcaagatgag

SEQ ID NO: 446382 - DNA, 15 bp, Homo sapiens
aagtattcaagatga

SEQ ID NO: 446383 - DNA, 15 bp, Homo sapiens
aaagtattcaagatg

SEQ ID NO: 446384 - DNA, 15 bp, Homo sapiens
gaaagtattcaagat

SEQ ID NO: 446385 - DNA, 15 bp, Homo sapiens
tgaaagtattcaaga

SEQ ID NO: 446386 - DNA, 15 bp, Homo sapiens
ctgaaagtattcaag

SEQ ID NO: 446387 - DNA, 15 bp, Homo sapiens
actgaaagtattcaa

SEQ ID NO: 446388 - DNA, 15 bp, Homo sapiens
cactgaaagtattca

SEQ ID NO: 446389 - DNA, 15 bp, Homo sapiens
tcactgaaagtattc

SEQ ID NO: 446390 - DNA, 15 bp, Homo sapiens
atcactgaaagtatt

SEQ ID NO: 446391 - DNA, 15 bp, Homo sapiens
catcactgaaagtat

SEQ ID NO: 446392 - DNA, 15 bp, Homo sapiens
ccatcactgaaagta

SEQ ID NO: 446393 - DNA, 15 bp, Homo sapiens
cccatcactgaaagt

SEQ ID NO: 446394 - DNA, 15 bp, Homo sapiens
ccccatcactgaaag

SEQ ID NO: 446395 - DNA, 15 bp, Homo sapiens
gccccatcactgaaa

SEQ ID NO: 446396 - DNA, 15 bp, Homo sapiens
tgccccatcactgaa

SEQ ID NO: 446397 - DNA, 15 bp, Homo sapiens
gtgccccatcactga

SEQ ID NO: 446398 - DNA, 15 bp, Homo sapiens
agtgccccatcactg

SEQ ID NO: 446399 - DNA, 15 bp, Homo sapiens
gagtgccccatcact

SEQ ID NO: 446400 - DNA, 15 bp, Homo sapiens
tgagtgccccatcac

SEQ ID NO: 446401 - DNA, 15 bp, Homo sapiens
gtgagtgccccatca

SEQ ID NO: 446402 - DNA, 15 bp, Homo sapiens
tgtgagtgccccatc

SEQ ID NO: 446403 - DNA, 15 bp, Homo sapiens
atgtgagtgccccat

SEQ ID NO: 446404 - DNA, 15 bp, Homo sapiens
tatgtgagtgcccca

SEQ ID NO: 446405 - DNA, 15 bp, Homo sapiens
atatgtgagtgcccc

SEQ ID NO: 446406 - DNA, 15 bp, Homo sapiens
aatatgtgagtgccc

SEQ ID NO: 446407 - DNA, 15 bp, Homo sapiens
aaatatgtgagtgcc

SEQ ID NO: 446408 - DNA, 15 bp, Homo sapiens
taaatatgtgagtgc

SEQ ID NO: 446409 - DNA, 15 bp, Homo sapiens
ataaatatgtgagtg

SEQ ID NO: 446410 - DNA, 15 bp, Homo sapiens
tataaatatgtgagt

SEQ ID NO: 446411 - DNA, 15 bp, Homo sapiens
ttataaatatgtgag

SEQ ID NO: 446412 - DNA, 15 bp, Homo sapiens
tttataaatatgtga

SEQ ID NO: 446413 - DNA, 15 bp, Homo sapiens
gtttataaatatgtg

SEQ ID NO: 446414 - DNA, 15 bp, Homo sapiens
tgtttataaatatgt

SEQ ID NO: 446415 - DNA, 15 bp, Homo sapiens
atgtttataaatatg

SEQ ID NO: 446416 - DNA, 15 bp, Homo sapiens
gatgtttataaatat

SEQ ID NO: 446417 - DNA, 15 bp, Homo sapiens
tgatgtttataaata

SEQ ID NO: 446418 - DNA, 15 bp, Homo sapiens
ttgatgtttataaat

SEQ ID NO: 446419 - DNA, 15 bp, Homo sapiens
tttgatgtttataaa

SEQ ID NO: 446420 - DNA, 15 bp, Homo sapiens
ctttgatgtttataa

SEQ ID NO: 446421 - DNA, 15 bp, Homo sapiens
gctttgatgtttata

SEQ ID NO: 446422 - DNA, 15 bp, Homo sapiens
ggctttgatgtttat

SEQ ID NO: 446423 - DNA, 15 bp, Homo sapiens
gggctttgatgttta

SEQ ID NO: 446424 - DNA, 15 bp, Homo sapiens
tgggctttgatgttt

SEQ ID NO: 446425 - DNA, 15 bp, Homo sapiens
atgggctttgatgtt

SEQ ID NO: 446426 - DNA, 15 bp, Homo sapiens
aatgggctttgatgt

SEQ ID NO: 446427 - DNA, 15 bp, Homo sapiens
aaatgggctttgatg

SEQ ID NO: 446428 - DNA, 15 bp, Homo sapiens
caaatgggctttgat

SEQ ID NO: 446429 - DNA, 15 bp, Homo sapiens
tcaaatgggctttga

SEQ ID NO: 446430 - DNA, 15 bp, Homo sapiens
atcaaatgggctttg

SEQ ID NO: 446431 - DNA, 15 bp, Homo sapiens
aatcaaatgggcttt

SEQ ID NO: 446432 - DNA, 15 bp, Homo sapiens
taatcaaatgggctt

SEQ ID NO: 446433 - DNA, 15 bp, Homo sapiens
ataatcaaatgggct

SEQ ID NO: 446434 - DNA, 15 bp, Homo sapiens
aataatcaaatgggc

SEQ ID NO: 446435 - DNA, 15 bp, Homo sapiens
caataatcaaatggg

SEQ ID NO: 446436 - DNA, 15 bp, Homo sapiens
ccaataatcaaatgg

SEQ ID NO: 446437 - DNA, 15 bp, Homo sapiens
tccaataatcaaatg

SEQ ID NO: 446438 - DNA, 15 bp, Homo sapiens
atccaataatcaaat

SEQ ID NO: 446439 - DNA, 15 bp, Homo sapiens
catccaataatcaaa

SEQ ID NO: 446440 - DNA, 15 bp, Homo sapiens
tcatccaataatcaa

SEQ ID NO: 446441 - DNA, 15 bp, Homo sapiens
gtcatccaataatca

SEQ ID NO: 446442 - DNA, 15 bp, Homo sapiens
agtcatccaataatc

SEQ ID NO: 446443 - DNA, 15 bp, Homo sapiens
gagtcatccaataat

SEQ ID NO: 446444 - DNA, 15 bp, Homo sapiens
tgagtcatccaataa

SEQ ID NO: 446445 - DNA, 15 bp, Homo sapiens
ctgagtcatccaata

SEQ ID NO: 446446 - DNA, 15 bp, Homo sapiens
tctgagtcatccaat

SEQ ID NO: 446447 - DNA, 15 bp, Homo sapiens
ttctgagtcatccaa

SEQ ID NO: 446448 - DNA, 15 bp, Homo sapiens
gttctgagtcatcca

SEQ ID NO: 446449 - DNA, 15 bp, Homo sapiens
agttctgagtcatcc

SEQ ID NO: 446450 - DNA, 15 bp, Homo sapiens
aagttctgagtcatc

SEQ ID NO: 446451 - DNA, 15 bp, Homo sapiens
aaagttctgagtcat

SEQ ID NO: 446452 - DNA, 15 bp, Homo sapiens
aaaagttctgagtca

SEQ ID NO: 446453 - DNA, 15 bp, Homo sapiens
gaaaagttctgagtc

SEQ ID NO: 446454 - DNA, 15 bp, Homo sapiens
ggaaaagttctgagt

SEQ ID NO: 446455 - DNA, 15 bp, Homo sapiens
aggaaaagttctgag

SEQ ID NO: 446456 - DNA, 15 bp, Homo sapiens
aaggaaaagttctga

SEQ ID NO: 446457 - DNA, 15 bp, Homo sapiens
caaggaaaagttctg

SEQ ID NO: 446458 - DNA, 15 bp, Homo sapiens
acaaggaaaagttct

SEQ ID NO: 446459 - DNA, 15 bp, Homo sapiens
tacaaggaaaagttc

SEQ ID NO: 446460 - DNA, 15 bp, Homo sapiens
gtacaaggaaaagtt

SEQ ID NO: 446461 - DNA, 15 bp, Homo sapiens
agtacaaggaaaagt

SEQ ID NO: 446462 - DNA, 15 bp, Homo sapiens
cagtacaaggaaaag

SEQ ID NO: 446463 - DNA, 15 bp, Homo sapiens
acagtacaaggaaaa

SEQ ID NO: 446464 - DNA, 15 bp, Homo sapiens
tacagtacaaggaaa

SEQ ID NO: 446465 - DNA, 15 bp, Homo sapiens
ttacagtacaaggaa

SEQ ID NO: 446466 - DNA, 15 bp, Homo sapiens
tttacagtacaagga

SEQ ID NO: 446467 - DNA, 15 bp, Homo sapiens
ttttacagtacaagg

SEQ ID NO: 446468 - DNA, 15 bp, Homo sapiens
tttttacagtacaag

SEQ ID NO: 446469 - DNA, 15 bp, Homo sapiens
atttttacagtacaa

SEQ ID NO: 446470 - DNA, 15 bp, Homo sapiens
gatttttacagtaca

SEQ ID NO: 446471 - DNA, 15 bp, Homo sapiens
agatttttacagtac

SEQ ID NO: 446472 - DNA, 15 bp, Homo sapiens
cagatttttacagta

SEQ ID NO: 446473 - DNA, 15 bp, Homo sapiens
gcagatttttacagt

SEQ ID NO: 446474 - DNA, 15 bp, Homo sapiens
ggcagatttttacag

SEQ ID NO: 446475 - DNA, 15 bp, Homo sapiens
aggcagatttttaca

SEQ ID NO: 446476 - DNA, 15 bp, Homo sapiens
gaggcagatttttac

SEQ ID NO: 446477 - DNA, 15 bp, Homo sapiens
ggaggcagattttta

SEQ ID NO: 446478 - DNA, 15 bp, Homo sapiens
gggaggcagattttt

SEQ ID NO: 446479 - DNA, 15 bp, Homo sapiens
agggaggcagatttt

SEQ ID NO: 446480 - DNA, 15 bp, Homo sapiens
aagggaggcagattt

SEQ ID NO: 446481 - DNA, 15 bp, Homo sapiens
aaagggaggcagatt

SEQ ID NO: 446482 - DNA, 15 bp, Homo sapiens
caaagggaggcagat

SEQ ID NO: 446483 - DNA, 15 bp, Homo sapiens
ccaaagggaggcaga

SEQ ID NO: 446484 - DNA, 15 bp, Homo sapiens
accaaagggaggcag

SEQ ID NO: 446485 - DNA, 15 bp, Homo sapiens
aaccaaagggaggca

SEQ ID NO: 446486 - DNA, 15 bp, Homo sapiens
aaaccaaagggaggc

SEQ ID NO: 446487 - DNA, 15 bp, Homo sapiens
gaaaccaaagggagg

SEQ ID NO: 446488 - DNA, 15 bp, Homo sapiens
ggaaaccaaagggag

SEQ ID NO: 446489 - DNA, 15 bp, Homo sapiens
tggaaaccaaaggga

SEQ ID NO: 446490 - DNA, 15 bp, Homo sapiens
gtggaaaccaaaggg

SEQ ID NO: 446491 - DNA, 15 bp, Homo sapiens
agtggaaaccaaagg

SEQ ID NO: 446492 - DNA, 15 bp, Homo sapiens
aagtggaaaccaaag

SEQ ID NO: 446493 - DNA, 15 bp, Homo sapiens
taagtggaaaccaaa

SEQ ID NO: 446494 - DNA, 15 bp, Homo sapiens
ataagtggaaaccaa

SEQ ID NO: 446495 - DNA, 15 bp, Homo sapiens
aataagtggaaacca

SEQ ID NO: 446496 - DNA, 15 bp, Homo sapiens
gaataagtggaaacc

SEQ ID NO: 446497 - DNA, 15 bp, Homo sapiens
ggaataagtggaaac

SEQ ID NO: 446498 - DNA, 15 bp, Homo sapiens
aggaataagtggaaa

SEQ ID NO: 446499 - DNA, 15 bp, Homo sapiens
taggaataagtggaa

SEQ ID NO: 446500 - DNA, 15 bp, Homo sapiens
ataggaataagtgga

SEQ ID NO: 446501 - DNA, 15 bp, Homo sapiens
aataggaataagtgg

SEQ ID NO: 446502 - DNA, 15 bp, Homo sapiens
gaataggaataagtg

SEQ ID NO: 446503 - DNA, 15 bp, Homo sapiens
agaataggaataagt

SEQ ID NO: 446504 - DNA, 15 bp, Homo sapiens
tagaataggaataag

SEQ ID NO: 446505 - DNA, 15 bp, Homo sapiens
atagaataggaataa

SEQ ID NO: 446506 - DNA, 15 bp, Homo sapiens
tatagaataggaata

SEQ ID NO: 446507 - DNA, 15 bp, Homo sapiens
atatagaataggaat

SEQ ID NO: 446508 - DNA, 15 bp, Homo sapiens
aatatagaataggaa

SEQ ID NO: 446509 - DNA, 15 bp, Homo sapiens
caatatagaatagga

SEQ ID NO: 446510 - DNA, 15 bp, Homo sapiens
tcaatatagaatagg

SEQ ID NO: 446511 - DNA, 15 bp, Homo sapiens
ctcaatatagaatag

SEQ ID NO: 446512 - DNA, 15 bp, Homo sapiens
cctcaatatagaata

SEQ ID NO: 446513 - DNA, 15 bp, Homo sapiens
ccctcaatatagaat

SEQ ID NO: 446514 - DNA, 15 bp, Homo sapiens
accctcaatatagaa

SEQ ID NO: 446515 - DNA, 15 bp, Homo sapiens
taccctcaatataga

SEQ ID NO: 446516 - DNA, 15 bp, Homo sapiens
gtaccctcaatatag

SEQ ID NO: 446517 - DNA, 15 bp, Homo sapiens
tgtaccctcaatata

SEQ ID NO: 446518 - DNA, 15 bp, Homo sapiens
gtgtaccctcaatat

SEQ ID NO: 446519 - DNA, 15 bp, Homo sapiens
ggtgtaccctcaata

SEQ ID NO: 446520 - DNA, 15 bp, Homo sapiens
tggtgtaccctcaat

SEQ ID NO: 446521 - DNA, 15 bp, Homo sapiens
ttggtgtaccctcaa

SEQ ID NO: 446522 - DNA, 15 bp, Homo sapiens
cttggtgtaccctca

SEQ ID NO: 446523 - DNA, 15 bp, Homo sapiens
gcttggtgtaccctc

SEQ ID NO: 446524 - DNA, 15 bp, Homo sapiens
tgcttggtgtaccct

SEQ ID NO: 446525 - DNA, 15 bp, Homo sapiens
ctgcttggtgtaccc

SEQ ID NO: 446526 - DNA, 15 bp, Homo sapiens
gctgcttggtgtacc

SEQ ID NO: 446527 - DNA, 15 bp, Homo sapiens
ggctgcttggtgtac

SEQ ID NO: 446528 - DNA, 15 bp, Homo sapiens
gggctgcttggtgta

SEQ ID NO: 446529 - DNA, 15 bp, Homo sapiens
agggctgcttggtgt

SEQ ID NO: 446530 - DNA, 15 bp, Homo sapiens
gagggctgcttggtg

SEQ ID NO: 446531 - DNA, 15 bp, Homo sapiens
ggagggctgcttggt

SEQ ID NO: 446532 - DNA, 15 bp, Homo sapiens
aggagggctgcttgg

SEQ ID NO: 446533 - DNA, 15 bp, Homo sapiens
aaggagggctgcttg

SEQ ID NO: 446534 - DNA, 15 bp, Homo sapiens
gaaggagggctgctt

SEQ ID NO: 446535 - DNA, 15 bp, Homo sapiens
ggaaggagggctgct

SEQ ID NO: 446536 - DNA, 15 bp, Homo sapiens
aggaaggagggctgc

SEQ ID NO: 446537 - DNA, 15 bp, Homo sapiens
gaggaaggagggctg

SEQ ID NO: 446538 - DNA, 15 bp, Homo sapiens
agaggaaggagggct

SEQ ID NO: 446539 - DNA, 15 bp, Homo sapiens
aagaggaaggagggc

SEQ ID NO: 446540 - DNA, 15 bp, Homo sapiens
caagaggaaggaggg

SEQ ID NO: 446541 - DNA, 15 bp, Homo sapiens
gcaagaggaaggagg

SEQ ID NO: 446542 - DNA, 15 bp, Homo sapiens
tgcaagaggaaggag

SEQ ID NO: 446543 - DNA, 15 bp, Homo sapiens
ttgcaagaggaagga

SEQ ID NO: 446544 - DNA, 15 bp, Homo sapiens
tttgcaagaggaagg

SEQ ID NO: 446545 - DNA, 15 bp, Homo sapiens
atttgcaagaggaag

SEQ ID NO: 446546 - DNA, 15 bp, Homo sapiens
aatttgcaagaggaa

SEQ ID NO: 446547 - DNA, 15 bp, Homo sapiens
gaatttgcaagagga

SEQ ID NO: 446548 - DNA, 15 bp, Homo sapiens
agaatttgcaagagg

SEQ ID NO: 446549 - DNA, 15 bp, Homo sapiens
aagaatttgcaagag

SEQ ID NO: 446550 - DNA, 15 bp, Homo sapiens
taagaatttgcaaga

SEQ ID NO: 446551 - DNA, 15 bp, Homo sapiens
ctaagaatttgcaag

SEQ ID NO: 446552 - DNA, 15 bp, Homo sapiens
cctaagaatttgcaa

SEQ ID NO: 446553 - DNA, 15 bp, Homo sapiens
tcctaagaatttgca

SEQ ID NO: 446554 - DNA, 15 bp, Homo sapiens
gtcctaagaatttgc

SEQ ID NO: 446555 - DNA, 15 bp, Homo sapiens
tgtcctaagaatttg

SEQ ID NO: 446556 - DNA, 15 bp, Homo sapiens
ctgtcctaagaattt

SEQ ID NO: 446557 - DNA, 15 bp, Homo sapiens
gctgtcctaagaatt

SEQ ID NO: 446558 - DNA, 15 bp, Homo sapiens
agctgtcctaagaat

SEQ ID NO: 446559 - DNA, 15 bp, Homo sapiens
gagctgtcctaagaa

SEQ ID NO: 446560 - DNA, 15 bp, Homo sapiens
tgagctgtcctaaga

SEQ ID NO: 446561 - DNA, 15 bp, Homo sapiens
gtgagctgtcctaag

SEQ ID NO: 446562 - DNA, 15 bp, Homo sapiens
agtgagctgtcctaa

SEQ ID NO: 446563 - DNA, 15 bp, Homo sapiens
gagtgagctgtccta

SEQ ID NO: 446564 - DNA, 15 bp, Homo sapiens
tgagtgagctgtcct

SEQ ID NO: 446565 - DNA, 15 bp, Homo sapiens
atgagtgagctgtcc

SEQ ID NO: 446566 - DNA, 15 bp, Homo sapiens
aatgagtgagctgtc

SEQ ID NO: 446567 - DNA, 15 bp, Homo sapiens
gaatgagtgagctgt

SEQ ID NO: 446568 - DNA, 15 bp, Homo sapiens
tgaatgagtgagctg

SEQ ID NO: 446569 - DNA, 15 bp, Homo sapiens
atgaatgagtgagct

SEQ ID NO: 446570 - DNA, 15 bp, Homo sapiens
catgaatgagtgagc

SEQ ID NO: 446571 - DNA, 15 bp, Homo sapiens
ccatgaatgagtgag

SEQ ID NO: 446572 - DNA, 15 bp, Homo sapiens
gccatgaatgagtga

SEQ ID NO: 446573 - DNA, 15 bp, Homo sapiens
ggccatgaatgagtg

SEQ ID NO: 446574 - DNA, 15 bp, Homo sapiens
tggccatgaatgagt

SEQ ID NO: 446575 - DNA, 15 bp, Homo sapiens
gtggccatgaatgag

SEQ ID NO: 446576 - DNA, 15 bp, Homo sapiens
ggtggccatgaatga

SEQ ID NO: 446577 - DNA, 15 bp, Homo sapiens
aggtggccatgaatg

SEQ ID NO: 446578 - DNA, 15 bp, Homo sapiens
gaggtggccatgaat

SEQ ID NO: 446579 - DNA, 15 bp, Homo sapiens
agaggtggccatgaa

SEQ ID NO: 446580 - DNA, 15 bp, Homo sapiens
tagaggtggccatga

SEQ ID NO: 446581 - DNA, 15 bp, Homo sapiens
ttagaggtggccatg

SEQ ID NO: 446582 - DNA, 15 bp, Homo sapiens
gttagaggtggccat

SEQ ID NO: 446583 - DNA, 15 bp, Homo sapiens
ggttagaggtggcca

SEQ ID NO: 446584 - DNA, 15 bp, Homo sapiens
tggttagaggtggcc

SEQ ID NO: 446585 - DNA, 15 bp, Homo sapiens
ttggttagaggtggc

SEQ ID NO: 446586 - DNA, 15 bp, Homo sapiens
gttggttagaggtgg

SEQ ID NO: 446587 - DNA, 15 bp, Homo sapiens
agttggttagaggtg

SEQ ID NO: 446588 - DNA, 15 bp, Homo sapiens
tagttggttagaggt

SEQ ID NO: 446589 - DNA, 15 bp, Homo sapiens
gtagttggttagagg

SEQ ID NO: 446590 - DNA, 15 bp, Homo sapiens
ggtagttggttagag

SEQ ID NO: 446591 - DNA, 15 bp, Homo sapiens
aggtagttggttaga

SEQ ID NO: 446592 - DNA, 15 bp, Homo sapiens
caggtagttggttag

SEQ ID NO: 446593 - DNA, 15 bp, Homo sapiens
gcaggtagttggtta

SEQ ID NO: 446594 - DNA, 15 bp, Homo sapiens
agcaggtagttggtt

SEQ ID NO: 446595 - DNA, 15 bp, Homo sapiens
aagcaggtagttggt

SEQ ID NO: 446596 - DNA, 15 bp, Homo sapiens
aaagcaggtagttgg

SEQ ID NO: 446597 - DNA, 15 bp, Homo sapiens
aaaagcaggtagttg

SEQ ID NO: 446598 - DNA, 15 bp, Homo sapiens
aaaaagcaggtagtt

SEQ ID NO: 446599 - DNA, 15 bp, Homo sapiens
gaaaaagcaggtagt

SEQ ID NO: 446600 - DNA, 15 bp, Homo sapiens
ggaaaaagcaggtag

SEQ ID NO: 446601 - DNA, 15 bp, Homo sapiens
aggaaaaagcaggta

SEQ ID NO: 446602 - DNA, 15 bp, Homo sapiens
gaggaaaaagcaggt

SEQ ID NO: 446603 - DNA, 15 bp, Homo sapiens
ggaggaaaaagcagg

SEQ ID NO: 446604 - DNA, 15 bp, Homo sapiens
tggaggaaaaagcag

SEQ ID NO: 446605 - DNA, 15 bp, Homo sapiens
ctggaggaaaaagca

SEQ ID NO: 446606 - DNA, 15 bp, Homo sapiens
cctggaggaaaaagc

SEQ ID NO: 446607 - DNA, 15 bp, Homo sapiens
acctggaggaaaaag

SEQ ID NO: 446608 - DNA, 15 bp, Homo sapiens
tacctggaggaaaaa

SEQ ID NO: 446609 - DNA, 15 bp, Homo sapiens
ctacctggaggaaaa

SEQ ID NO: 446610 - DNA, 15 bp, Homo sapiens
tctacctggaggaaa

SEQ ID NO: 446611 - DNA, 15 bp, Homo sapiens
ttctacctggaggaa

SEQ ID NO: 446612 - DNA, 15 bp, Homo sapiens
attctacctggagga

SEQ ID NO: 446613 - DNA, 15 bp, Homo sapiens
tattctacctggagg

SEQ ID NO: 446614 - DNA, 15 bp, Homo sapiens
atattctacctggag

SEQ ID NO: 446615 - DNA, 15 bp, Homo sapiens
gatattctacctgga

SEQ ID NO: 446616 - DNA, 15 bp, Homo sapiens
agatattctacctgg

SEQ ID NO: 446617 - DNA, 15 bp, Homo sapiens
aagatattctacctg

SEQ ID NO: 446618 - DNA, 15 bp, Homo sapiens
taagatattctacct

SEQ ID NO: 446619 - DNA, 15 bp, Homo sapiens
gtaagatattctacc

SEQ ID NO: 446620 - DNA, 15 bp, Homo sapiens
tgtaagatattctac

SEQ ID NO: 446621 - DNA, 15 bp, Homo sapiens
atgtaagatattcta

SEQ ID NO: 446622 - DNA, 15 bp, Homo sapiens
aatgtaagatattct

SEQ ID NO: 446623 - DNA, 15 bp, Homo sapiens
aaatgtaagatattc

SEQ ID NO: 446624 - DNA, 15 bp, Homo sapiens
gaaatgtaagatatt

SEQ ID NO: 446625 - DNA, 15 bp, Homo sapiens
ggaaatgtaagatat

SEQ ID NO: 446626 - DNA, 15 bp, Homo sapiens
aggaaatgtaagata

SEQ ID NO: 446627 - DNA, 15 bp, Homo sapiens
aaggaaatgtaagat

SEQ ID NO: 446628 - DNA, 15 bp, Homo sapiens
taaggaaatgtaaga

SEQ ID NO: 446629 - DNA, 15 bp, Homo sapiens
ttaaggaaatgtaag

SEQ ID NO: 446630 - DNA, 15 bp, Homo sapiens
cttaaggaaatgtaa

SEQ ID NO: 446631 - DNA, 15 bp, Homo sapiens
acttaaggaaatgta

SEQ ID NO: 446632 - DNA, 15 bp, Homo sapiens
gacttaaggaaatgt

SEQ ID NO: 446633 - DNA, 15 bp, Homo sapiens
agacttaaggaaatg

SEQ ID NO: 446634 - DNA, 15 bp, Homo sapiens
aagacttaaggaaat

SEQ ID NO: 446635 - DNA, 15 bp, Homo sapiens
gaagacttaaggaaa

SEQ ID NO: 446636 - DNA, 15 bp, Homo sapiens
agaagacttaaggaa

SEQ ID NO: 446637 - DNA, 15 bp, Homo sapiens
cagaagacttaagga

SEQ ID NO: 446638 - DNA, 15 bp, Homo sapiens
acagaagacttaagg

SEQ ID NO: 446639 - DNA, 15 bp, Homo sapiens
cacagaagacttaag

SEQ ID NO: 446640 - DNA, 15 bp, Homo sapiens
gcacagaagacttaa

SEQ ID NO: 446641 - DNA, 15 bp, Homo sapiens
tgcacagaagactta

SEQ ID NO: 446642 - DNA, 15 bp, Homo sapiens
atgcacagaagactt

SEQ ID NO: 446643 - DNA, 15 bp, Homo sapiens
catgcacagaagact

SEQ ID NO: 446644 - DNA, 15 bp, Homo sapiens
tcatgcacagaagac

SEQ ID NO: 446645 - DNA, 15 bp, Homo sapiens
gtcatgcacagaaga

SEQ ID NO: 446646 - DNA, 15 bp, Homo sapiens
tgtcatgcacagaag

SEQ ID NO: 446647 - DNA, 15 bp, Homo sapiens
atgtcatgcacagaa

SEQ ID NO: 446648 - DNA, 15 bp, Homo sapiens
catgtcatgcacaga

SEQ ID NO: 446649 - DNA, 15 bp, Homo sapiens
tcatgtcatgcacag

SEQ ID NO: 446650 - DNA, 15 bp, Homo sapiens
atcatgtcatgcaca

SEQ ID NO: 446651 - DNA, 15 bp, Homo sapiens
aatcatgtcatgcac

SEQ ID NO: 446652 - DNA, 15 bp, Homo sapiens
aaatcatgtcatgca

SEQ ID NO: 446653 - DNA, 15 bp, Homo sapiens
gaaatcatgtcatgc

SEQ ID NO: 446654 - DNA, 15 bp, Homo sapiens
agaaatcatgtcatg

SEQ ID NO: 446655 - DNA, 15 bp, Homo sapiens
tagaaatcatgtcat

SEQ ID NO: 446656 - DNA, 15 bp, Homo sapiens
gtagaaatcatgtca

SEQ ID NO: 446657 - DNA, 15 bp, Homo sapiens
tgtagaaatcatgtc

SEQ ID NO: 446658 - DNA, 15 bp, Homo sapiens
gtgtagaaatcatgt

SEQ ID NO: 446659 - DNA, 15 bp, Homo sapiens
ggtgtagaaatcatg

SEQ ID NO: 446660 - DNA, 15 bp, Homo sapiens
gggtgtagaaatcat

SEQ ID NO: 446661 - DNA, 15 bp, Homo sapiens
tgggtgtagaaatca

SEQ ID NO: 446662 - DNA, 15 bp, Homo sapiens
atgggtgtagaaatc

SEQ ID NO: 446663 - DNA, 15 bp, Homo sapiens
aatgggtgtagaaat

SEQ ID NO: 446664 - DNA, 15 bp, Homo sapiens
taatgggtgtagaaa

SEQ ID NO: 446665 - DNA, 15 bp, Homo sapiens
ataatgggtgtagaa

SEQ ID NO: 446666 - DNA, 15 bp, Homo sapiens
gataatgggtgtaga

SEQ ID NO: 446667 - DNA, 15 bp, Homo sapiens
tgataatgggtgtag

SEQ ID NO: 446668 - DNA, 15 bp, Homo sapiens
gtgataatgggtgta

SEQ ID NO: 446669 - DNA, 15 bp, Homo sapiens
ggtgataatgggtgt

SEQ ID NO: 446670 - DNA, 15 bp, Homo sapiens
gggtgataatgggtg

SEQ ID NO: 446671 - DNA, 15 bp, Homo sapiens
tgggtgataatgggt

SEQ ID NO: 446672 - DNA, 15 bp, Homo sapiens
atgggtgataatggg

SEQ ID NO: 446673 - DNA, 15 bp, Homo sapiens
tatgggtgataatgg

SEQ ID NO: 446674 - DNA, 15 bp, Homo sapiens
atatgggtgataatg

SEQ ID NO: 446675 - DNA, 15 bp, Homo sapiens
aatatgggtgataat

SEQ ID NO: 446676 - DNA, 15 bp, Homo sapiens
caatatgggtgataa

SEQ ID NO: 446677 - DNA, 15 bp, Homo sapiens
gcaatatgggtgata

SEQ ID NO: 446678 - DNA, 15 bp, Homo sapiens
agcaatatgggtgat

SEQ ID NO: 446679 - DNA, 15 bp, Homo sapiens
cagcaatatgggtga

SEQ ID NO: 446680 - DNA, 15 bp, Homo sapiens
gcagcaatatgggtg

SEQ ID NO: 446681 - DNA, 15 bp, Homo sapiens
ggcagcaatatgggt

SEQ ID NO: 446682 - DNA, 15 bp, Homo sapiens
aggcagcaatatggg

SEQ ID NO: 446683 - DNA, 15 bp, Homo sapiens
aaggcagcaatatgg

SEQ ID NO: 446684 - DNA, 15 bp, Homo sapiens
caaggcagcaatatg

SEQ ID NO: 446685 - DNA, 15 bp, Homo sapiens
ccaaggcagcaatat

SEQ ID NO: 446686 - DNA, 15 bp, Homo sapiens
tccaaggcagcaata

SEQ ID NO: 446687 - DNA, 15 bp, Homo sapiens
atccaaggcagcaat

SEQ ID NO: 446688 - DNA, 15 bp, Homo sapiens
catccaaggcagcaa

SEQ ID NO: 446689 - DNA, 15 bp, Homo sapiens
acatccaaggcagca

SEQ ID NO: 446690 - DNA, 15 bp, Homo sapiens
aacatccaaggcagc

SEQ ID NO: 446691 - DNA, 15 bp, Homo sapiens
gaacatccaaggcag

SEQ ID NO: 446692 - DNA, 15 bp, Homo sapiens
ggaacatccaaggca

SEQ ID NO: 446693 - DNA, 15 bp, Homo sapiens
aggaacatccaaggc

SEQ ID NO: 446694 - DNA, 15 bp, Homo sapiens
aaggaacatccaagg

SEQ ID NO: 446695 - DNA, 15 bp, Homo sapiens
taaggaacatccaag

SEQ ID NO: 446696 - DNA, 15 bp, Homo sapiens
ctaaggaacatccaa

SEQ ID NO: 446697 - DNA, 15 bp, Homo sapiens
actaaggaacatcca

SEQ ID NO: 446698 - DNA, 15 bp, Homo sapiens
aactaaggaacatcc

SEQ ID NO: 446699 - DNA, 15 bp, Homo sapiens
aaactaaggaacatc

SEQ ID NO: 446700 - DNA, 15 bp, Homo sapiens
taaactaaggaacat

SEQ ID NO: 446701 - DNA, 15 bp, Homo sapiens
ataaactaaggaaca

SEQ ID NO: 446702 - DNA, 15 bp, Homo sapiens
cataaactaaggaac

SEQ ID NO: 446703 - DNA, 15 bp, Homo sapiens
ccataaactaaggaa

SEQ ID NO: 446704 - DNA, 15 bp, Homo sapiens
cccataaactaagga

SEQ ID NO: 446705 - DNA, 15 bp, Homo sapiens
gcccataaactaagg

SEQ ID NO: 446706 - DNA, 15 bp, Homo sapiens
ggcccataaactaag

SEQ ID NO: 446707 - DNA, 15 bp, Homo sapiens
aggcccataaactaa

SEQ ID NO: 446708 - DNA, 15 bp, Homo sapiens
taggcccataaacta

SEQ ID NO: 446709 - DNA, 15 bp, Homo sapiens
gtaggcccataaact

SEQ ID NO: 446710 - DNA, 15 bp, Homo sapiens
tgtaggcccataaac

SEQ ID NO: 446711 - DNA, 15 bp, Homo sapiens
gtgtaggcccataaa

SEQ ID NO: 446712 - DNA, 15 bp, Homo sapiens
agtgtaggcccataa

SEQ ID NO: 446713 - DNA, 15 bp, Homo sapiens
tagtgtaggcccata

SEQ ID NO: 446714 - DNA, 15 bp, Homo sapiens
gtagtgtaggcccat

SEQ ID NO: 446715 - DNA, 15 bp, Homo sapiens
agtagtgtaggccca

SEQ ID NO: 446716 - DNA, 15 bp, Homo sapiens
aagtagtgtaggccc

SEQ ID NO: 446717 - DNA, 15 bp, Homo sapiens
caagtagtgtaggcc

SEQ ID NO: 446718 - DNA, 15 bp, Homo sapiens
acaagtagtgtaggc

SEQ ID NO: 446719 - DNA, 15 bp, Homo sapiens
aacaagtagtgtagg

SEQ ID NO: 446720 - DNA, 15 bp, Homo sapiens
taacaagtagtgtag

SEQ ID NO: 446721 - DNA, 15 bp, Homo sapiens
ataacaagtagtgta

SEQ ID NO: 446722 - DNA, 15 bp, Homo sapiens
aataacaagtagtgt

SEQ ID NO: 446723 - DNA, 15 bp, Homo sapiens
aaataacaagtagtg

SEQ ID NO: 446724 - DNA, 15 bp, Homo sapiens
aaaataacaagtagt

SEQ ID NO: 446725 - DNA, 15 bp, Homo sapiens
gaaaataacaagtag

SEQ ID NO: 446726 - DNA, 15 bp, Homo sapiens
agaaaataacaagta

SEQ ID NO: 446727 - DNA, 15 bp, Homo sapiens
aagaaaataacaagt

SEQ ID NO: 446728 - DNA, 15 bp, Homo sapiens
gaagaaaataacaag

SEQ ID NO: 446729 - DNA, 15 bp, Homo sapiens
agaagaaaataacaa

SEQ ID NO: 446730 - DNA, 15 bp, Homo sapiens
tagaagaaaataaca

SEQ ID NO: 446731 - DNA, 15 bp, Homo sapiens
gtagaagaaaataac

SEQ ID NO: 446732 - DNA, 15 bp, Homo sapiens
agtagaagaaaataa

SEQ ID NO: 446733 - DNA, 15 bp, Homo sapiens
gagtagaagaaaata

SEQ ID NO: 446734 - DNA, 15 bp, Homo sapiens
ggagtagaagaaaat

SEQ ID NO: 446735 - DNA, 15 bp, Homo sapiens
gggagtagaagaaaa

SEQ ID NO: 446736 - DNA, 15 bp, Homo sapiens
agggagtagaagaaa

SEQ ID NO: 446737 - DNA, 15 bp, Homo sapiens
tagggagtagaagaa

SEQ ID NO: 446738 - DNA, 15 bp, Homo sapiens
ctagggagtagaaga

SEQ ID NO: 446739 - DNA, 15 bp, Homo sapiens
gctagggagtagaag

SEQ ID NO: 446740 - DNA, 15 bp, Homo sapiens
ggctagggagtagaa

SEQ ID NO: 446741 - DNA, 15 bp, Homo sapiens
tggctagggagtaga

SEQ ID NO: 446742 - DNA, 15 bp, Homo sapiens
ttggctagggagtag

SEQ ID NO: 446743 - DNA, 15 bp, Homo sapiens
attggctagggagta

SEQ ID NO: 446744 - DNA, 15 bp, Homo sapiens
gattggctagggagt

SEQ ID NO: 446745 - DNA, 15 bp, Homo sapiens
agattggctagggag

SEQ ID NO: 446746 - DNA, 15 bp, Homo sapiens
gagattggctaggga

SEQ ID NO: 446747 - DNA, 15 bp, Homo sapiens
agagattggctaggg

SEQ ID NO: 446748 - DNA, 15 bp, Homo sapiens
cagagattggctagg

SEQ ID NO: 446749 - DNA, 15 bp, Homo sapiens
tcagagattggctag

SEQ ID NO: 446750 - DNA, 15 bp, Homo sapiens
ctcagagattggcta

SEQ ID NO: 446751 - DNA, 15 bp, Homo sapiens
actcagagattggct

SEQ ID NO: 446752 - DNA, 15 bp, Homo sapiens
tactcagagattggc

SEQ ID NO: 446753 - DNA, 15 bp, Homo sapiens
ttactcagagattgg

SEQ ID NO: 446754 - DNA, 15 bp, Homo sapiens
tttactcagagattg

SEQ ID NO: 446755 - DNA, 15 bp, Homo sapiens
ttttactcagagatt

SEQ ID NO: 446756 - DNA, 15 bp, Homo sapiens
cttttactcagagat

SEQ ID NO: 446757 - DNA, 15 bp, Homo sapiens
acttttactcagaga

SEQ ID NO: 446758 - DNA, 15 bp, Homo sapiens
tacttttactcagag

SEQ ID NO: 446759 - DNA, 15 bp, Homo sapiens
ctacttttactcaga

SEQ ID NO: 446760 - DNA, 15 bp, Homo sapiens
actacttttactcag

SEQ ID NO: 446761 - DNA, 15 bp, Homo sapiens
aactacttttactca

SEQ ID NO: 446762 - DNA, 15 bp, Homo sapiens
caactacttttactc

SEQ ID NO: 446763 - DNA, 15 bp, Homo sapiens
gcaactacttttact

SEQ ID NO: 446764 - DNA, 15 bp, Homo sapiens
ggcaactacttttac

SEQ ID NO: 446765 - DNA, 15 bp, Homo sapiens
tggcaactactttta

SEQ ID NO: 446766 - DNA, 15 bp, Homo sapiens
ttggcaactactttt

SEQ ID NO: 446767 - DNA, 15 bp, Homo sapiens
tttggcaactacttt

SEQ ID NO: 446768 - DNA, 15 bp, Homo sapiens
ttttggcaactactt

SEQ ID NO: 446769 - DNA, 15 bp, Homo sapiens
gttttggcaactact

SEQ ID NO: 446770 - DNA, 15 bp, Homo sapiens
agttttggcaactac

SEQ ID NO: 446771 - DNA, 15 bp, Homo sapiens
gagttttggcaacta

SEQ ID NO: 446772 - DNA, 15 bp, Homo sapiens
agagttttggcaact

SEQ ID NO: 446773 - DNA, 15 bp, Homo sapiens
cagagttttggcaac

SEQ ID NO: 446774 - DNA, 15 bp, Homo sapiens
tcagagttttggcaa

SEQ ID NO: 446775 - DNA, 15 bp, Homo sapiens
ctcagagttttggca

SEQ ID NO: 446776 - DNA, 15 bp, Homo sapiens
actcagagttttggc

SEQ ID NO: 446777 - DNA, 15 bp, Homo sapiens
tactcagagttttgg

SEQ ID NO: 446778 - DNA, 15 bp, Homo sapiens
ctactcagagttttg

SEQ ID NO: 446779 - DNA, 15 bp, Homo sapiens
tctactcagagtttt

SEQ ID NO: 446780 - DNA, 15 bp, Homo sapiens
ctctactcagagttt

SEQ ID NO: 446781 - DNA, 15 bp, Homo sapiens
actctactcagagtt

SEQ ID NO: 446782 - DNA, 15 bp, Homo sapiens
cactctactcagagt

SEQ ID NO: 446783 - DNA, 15 bp, Homo sapiens
acactctactcagag

SEQ ID NO: 446784 - DNA, 15 bp, Homo sapiens
cacactctactcaga

SEQ ID NO: 446785 - DNA, 15 bp, Homo sapiens
tcacactctactcag

SEQ ID NO: 446786 - DNA, 15 bp, Homo sapiens
gtcacactctactca

SEQ ID NO: 446787 - DNA, 15 bp, Homo sapiens
agtcacactctactc

SEQ ID NO: 446788 - DNA, 15 bp, Homo sapiens
aagtcacactctact

SEQ ID NO: 446789 - DNA, 15 bp, Homo sapiens
taagtcacactctac

SEQ ID NO: 446790 - DNA, 15 bp, Homo sapiens
ctaagtcacactcta

SEQ ID NO: 446791 - DNA, 15 bp, Homo sapiens
actaagtcacactct

SEQ ID NO: 446792 - DNA, 15 bp, Homo sapiens
tactaagtcacactc

SEQ ID NO: 446793 - DNA, 15 bp, Homo sapiens
ttactaagtcacact

SEQ ID NO: 446794 - DNA, 15 bp, Homo sapiens
tttactaagtcacac

SEQ ID NO: 446795 - DNA, 15 bp, Homo sapiens
ttttactaagtcaca

SEQ ID NO: 446796 - DNA, 15 bp, Homo sapiens
attttactaagtcac

SEQ ID NO: 446797 - DNA, 15 bp, Homo sapiens
aattttactaagtca

SEQ ID NO: 446798 - DNA, 15 bp, Homo sapiens
aaattttactaagtc

SEQ ID NO: 446799 - DNA, 15 bp, Homo sapiens
taaattttactaagt

SEQ ID NO: 446800 - DNA, 15 bp, Homo sapiens
ttaaattttactaag

SEQ ID NO: 446801 - DNA, 15 bp, Homo sapiens
tttaaattttactaa

SEQ ID NO: 446802 - DNA, 15 bp, Homo sapiens
ttttaaattttacta

SEQ ID NO: 446803 - DNA, 15 bp, Homo sapiens
attttaaattttact

SEQ ID NO: 446804 - DNA, 15 bp, Homo sapiens
tattttaaattttac

SEQ ID NO: 446805 - DNA, 15 bp, Homo sapiens
ttattttaaatttta

SEQ ID NO: 446806 - DNA, 15 bp, Homo sapiens
cttattttaaatttt

SEQ ID NO: 446807 - DNA, 15 bp, Homo sapiens
tcttattttaaattt

SEQ ID NO: 446808 - DNA, 15 bp, Homo sapiens
ttcttattttaaatt

SEQ ID NO: 446809 - DNA, 15 bp, Homo sapiens
attcttattttaaat

SEQ ID NO: 446810 - DNA, 15 bp, Homo sapiens
tattcttattttaaa

SEQ ID NO: 446811 - DNA, 15 bp, Homo sapiens
atattcttattttaa

SEQ ID NO: 446812 - DNA, 15 bp, Homo sapiens
tatattcttatttta

SEQ ID NO: 446813 - DNA, 15 bp, Homo sapiens
atatattcttatttt

SEQ ID NO: 446814 - DNA, 15 bp, Homo sapiens
aatatattcttattt

SEQ ID NO: 446815 - DNA, 15 bp, Homo sapiens
aaatatattcttatt

SEQ ID NO: 446816 - DNA, 15 bp, Homo sapiens
taaatatattcttat

SEQ ID NO: 446817 - DNA, 15 bp, Homo sapiens
gtaaatatattctta

SEQ ID NO: 446818 - DNA, 15 bp, Homo sapiens
tgtaaatatattctt

SEQ ID NO: 446819 - DNA, 15 bp, Homo sapiens
atgtaaatatattct

SEQ ID NO: 446820 - DNA, 15 bp, Homo sapiens
aatgtaaatatattc

SEQ ID NO: 446821 - DNA, 15 bp, Homo sapiens
taatgtaaatatatt

SEQ ID NO: 446822 - DNA, 15 bp, Homo sapiens
ttaatgtaaatatat

SEQ ID NO: 446823 - DNA, 15 bp, Homo sapiens
tttaatgtaaatata

SEQ ID NO: 446824 - DNA, 15 bp, Homo sapiens
gtttaatgtaaatat

SEQ ID NO: 446825 - DNA, 15 bp, Homo sapiens
tgtttaatgtaaata

SEQ ID NO: 446826 - DNA, 15 bp, Homo sapiens
ttgtttaatgtaaat

SEQ ID NO: 446827 - DNA, 15 bp, Homo sapiens
attgtttaatgtaaa

SEQ ID NO: 446828 - DNA, 15 bp, Homo sapiens
aattgtttaatgtaa

SEQ ID NO: 446829 - DNA, 15 bp, Homo sapiens
taattgtttaatgta

SEQ ID NO: 446830 - DNA, 15 bp, Homo sapiens
ataattgtttaatgt

SEQ ID NO: 446831 - DNA, 15 bp, Homo sapiens
aataattgtttaatg

SEQ ID NO: 446832 - DNA, 15 bp, Homo sapiens
caataattgtttaat

SEQ ID NO: 446833 - DNA, 15 bp, Homo sapiens
gcaataattgtttaa

SEQ ID NO: 446834 - DNA, 15 bp, Homo sapiens
agcaataattgttta

SEQ ID NO: 446835 - DNA, 15 bp, Homo sapiens
gagcaataattgttt

SEQ ID NO: 446836 - DNA, 15 bp, Homo sapiens
agagcaataattgtt

SEQ ID NO: 446837 - DNA, 15 bp, Homo sapiens
aagagcaataattgt

SEQ ID NO: 446838 - DNA, 15 bp, Homo sapiens
aaagagcaataattg

SEQ ID NO: 446839 - DNA, 15 bp, Homo sapiens
aaaagagcaataatt

SEQ ID NO: 446840 - DNA, 15 bp, Homo sapiens
taaaagagcaataat

SEQ ID NO: 446841 - DNA, 15 bp, Homo sapiens
ataaaagagcaataa

SEQ ID NO: 446842 - DNA, 15 bp, Homo sapiens
cataaaagagcaata

SEQ ID NO: 446843 - DNA, 15 bp, Homo sapiens
acataaaagagcaat

SEQ ID NO: 446844 - DNA, 15 bp, Homo sapiens
aacataaaagagcaa

SEQ ID NO: 446845 - DNA, 15 bp, Homo sapiens
aaacataaaagagca

SEQ ID NO: 446846 - DNA, 15 bp, Homo sapiens
aaaacataaaagagc

SEQ ID NO: 446847 - DNA, 15 bp, Homo sapiens
gaaaacataaaagag

SEQ ID NO: 446848 - DNA, 15 bp, Homo sapiens
agaaaacataaaaga

SEQ ID NO: 446849 - DNA, 15 bp, Homo sapiens
cagaaaacataaaag

SEQ ID NO: 446850 - DNA, 15 bp, Homo sapiens
acagaaaacataaaa

SEQ ID NO: 446851 - DNA, 15 bp, Homo sapiens
aacagaaaacataaa

SEQ ID NO: 446852 - DNA, 15 bp, Homo sapiens
aaacagaaaacataa

SEQ ID NO: 446853 - DNA, 15 bp, Homo sapiens
aaaacagaaaacata

SEQ ID NO: 446854 - DNA, 15 bp, Homo sapiens
aaaaacagaaaacat

SEQ ID NO: 446855 - DNA, 15 bp, Homo sapiens
gaaaaacagaaaaca

SEQ ID NO: 446856 - DNA, 15 bp, Homo sapiens
agaaaaacagaaaac

SEQ ID NO: 446857 - DNA, 15 bp, Homo sapiens
cagaaaaacagaaaa

SEQ ID NO: 446858 - DNA, 15 bp, Homo sapiens
acagaaaaacagaaa

SEQ ID NO: 446859 - DNA, 15 bp, Homo sapiens
aacagaaaaacagaa

SEQ ID NO: 446860 - DNA, 15 bp, Homo sapiens
taacagaaaaacaga

SEQ ID NO: 446861 - DNA, 15 bp, Homo sapiens
ttaacagaaaaacag

SEQ ID NO: 446862 - DNA, 15 bp, Homo sapiens
tttaacagaaaaaca

SEQ ID NO: 446863 - DNA, 15 bp, Homo sapiens
gtttaacagaaaaac

SEQ ID NO: 446864 - DNA, 15 bp, Homo sapiens
tgtttaacagaaaaa

SEQ ID NO: 446865 - DNA, 15 bp, Homo sapiens
atgtttaacagaaaa

SEQ ID NO: 446866 - DNA, 15 bp, Homo sapiens
aatgtttaacagaaa

SEQ ID NO: 446867 - DNA, 15 bp, Homo sapiens
aaatgtttaacagaa

SEQ ID NO: 446868 - DNA, 15 bp, Homo sapiens
aaaatgtttaacaga

SEQ ID NO: 446869 - DNA, 15 bp, Homo sapiens
aaaaatgtttaacag

SEQ ID NO: 446870 - DNA, 15 bp, Homo sapiens
taaaaatgtttaaca

SEQ ID NO: 446871 - DNA, 15 bp, Homo sapiens
ctaaaaatgtttaac

SEQ ID NO: 446872 - DNA, 15 bp, Homo sapiens
tctaaaaatgtttaa

SEQ ID NO: 446873 - DNA, 15 bp, Homo sapiens
ctctaaaaatgttta

SEQ ID NO: 446874 - DNA, 15 bp, Homo sapiens
gctctaaaaatgttt

SEQ ID NO: 446875 - DNA, 15 bp, Homo sapiens
tgctctaaaaatgtt

SEQ ID NO: 446876 - DNA, 15 bp, Homo sapiens
atgctctaaaaatgt

SEQ ID NO: 446877 - DNA, 15 bp, Homo sapiens
tatgctctaaaaatg

SEQ ID NO: 446878 - DNA, 15 bp, Homo sapiens
atatgctctaaaaat

SEQ ID NO: 446879 - DNA, 15 bp, Homo sapiens
aatatgctctaaaaa

SEQ ID NO: 446880 - DNA, 15 bp, Homo sapiens
aaatatgctctaaaa

SEQ ID NO: 446881 - DNA, 15 bp, Homo sapiens
caaatatgctctaaa

SEQ ID NO: 446882 - DNA, 15 bp, Homo sapiens
acaaatatgctctaa

SEQ ID NO: 446883 - DNA, 15 bp, Homo sapiens
tacaaatatgctcta

SEQ ID NO: 446884 - DNA, 15 bp, Homo sapiens
ttacaaatatgctct

SEQ ID NO: 446885 - DNA, 15 bp, Homo sapiens
tttacaaatatgctc

SEQ ID NO: 446886 - DNA, 15 bp, Homo sapiens
ttttacaaatatgct

SEQ ID NO: 446887 - DNA, 15 bp, Homo sapiens
tttttacaaatatgc

SEQ ID NO: 446888 - DNA, 15 bp, Homo sapiens
atttttacaaatatg

SEQ ID NO: 446889 - DNA, 15 bp, Homo sapiens
tatttttacaaatat

SEQ ID NO: 446890 - DNA, 15 bp, Homo sapiens
atatttttacaaata

SEQ ID NO: 446891 - DNA, 15 bp, Homo sapiens
catatttttacaaat

SEQ ID NO: 446892 - DNA, 15 bp, Homo sapiens
acatatttttacaaa

SEQ ID NO: 446893 - DNA, 15 bp, Homo sapiens
gacatatttttacaa

SEQ ID NO: 446894 - DNA, 15 bp, Homo sapiens
tgacatatttttaca

SEQ ID NO: 446895 - DNA, 15 bp, Homo sapiens
atgacatatttttac

SEQ ID NO: 446896 - DNA, 15 bp, Homo sapiens
aatgacatattttta

SEQ ID NO: 446897 - DNA, 15 bp, Homo sapiens
taatgacatattttt

SEQ ID NO: 446898 - DNA, 15 bp, Homo sapiens
ctaatgacatatttt

SEQ ID NO: 446899 - DNA, 15 bp, Homo sapiens
actaatgacatattt

SEQ ID NO: 446900 - DNA, 15 bp, Homo sapiens
gactaatgacatatt

SEQ ID NO: 446901 - DNA, 15 bp, Homo sapiens
ggactaatgacatat

SEQ ID NO: 446902 - DNA, 15 bp, Homo sapiens
tggactaatgacata

SEQ ID NO: 446903 - DNA, 15 bp, Homo sapiens
ctggactaatgacat

SEQ ID NO: 446904 - DNA, 15 bp, Homo sapiens
actggactaatgaca

SEQ ID NO: 446905 - DNA, 15 bp, Homo sapiens
tactggactaatgac

SEQ ID NO: 446906 - DNA, 15 bp, Homo sapiens
atactggactaatga

SEQ ID NO: 446907 - DNA, 15 bp, Homo sapiens
aatactggactaatg

SEQ ID NO: 446908 - DNA, 15 bp, Homo sapiens
gaatactggactaat

SEQ ID NO: 446909 - DNA, 15 bp, Homo sapiens
agaatactggactaa

SEQ ID NO: 446910 - DNA, 15 bp, Homo sapiens
aagaatactggacta

SEQ ID NO: 446911 - DNA, 15 bp, Homo sapiens
gaagaatactggact

SEQ ID NO: 446912 - DNA, 15 bp, Homo sapiens
tgaagaatactggac

SEQ ID NO: 446913 - DNA, 15 bp, Homo sapiens
atgaagaatactgga

SEQ ID NO: 446914 - DNA, 15 bp, Homo sapiens
aatgaagaatactgg

SEQ ID NO: 446915 - DNA, 15 bp, Homo sapiens
taatgaagaatactg

SEQ ID NO: 446916 - DNA, 15 bp, Homo sapiens
ttaatgaagaatact

SEQ ID NO: 446917 - DNA, 15 bp, Homo sapiens
tttaatgaagaatac

SEQ ID NO: 446918 - DNA, 15 bp, Homo sapiens
gtttaatgaagaata

SEQ ID NO: 446919 - DNA, 15 bp, Homo sapiens
agtttaatgaagaat

SEQ ID NO: 446920 - DNA, 15 bp, Homo sapiens
tagtttaatgaagaa

SEQ ID NO: 446921 - DNA, 15 bp, Homo sapiens
ttagtttaatgaaga

SEQ ID NO: 446922 - DNA, 15 bp, Homo sapiens
gttagtttaatgaag

SEQ ID NO: 446923 - DNA, 15 bp, Homo sapiens
agttagtttaatgaa

SEQ ID NO: 446924 - DNA, 15 bp, Homo sapiens
cagttagtttaatga

SEQ ID NO: 446925 - DNA, 15 bp, Homo sapiens
acagttagtttaatg

SEQ ID NO: 446926 - DNA, 15 bp, Homo sapiens
tacagttagtttaat

SEQ ID NO: 446927 - DNA, 15 bp, Homo sapiens
ttacagttagtttaa

SEQ ID NO: 446928 - DNA, 15 bp, Homo sapiens
attacagttagttta

SEQ ID NO: 446929 - DNA, 15 bp, Homo sapiens
tattacagttagttt

SEQ ID NO: 446930 - DNA, 15 bp, Homo sapiens
ctattacagttagtt

SEQ ID NO: 446931 - DNA, 15 bp, Homo sapiens
gctattacagttagt

SEQ ID NO: 446932 - DNA, 15 bp, Homo sapiens
tgctattacagttag

SEQ ID NO: 446933 - DNA, 15 bp, Homo sapiens
gtgctattacagtta

SEQ ID NO: 446934 - DNA, 15 bp, Homo sapiens
agtgctattacagtt

SEQ ID NO: 446935 - DNA, 15 bp, Homo sapiens
aagtgctattacagt

SEQ ID NO: 446936 - DNA, 15 bp, Homo sapiens
caagtgctattacag

SEQ ID NO: 446937 - DNA, 15 bp, Homo sapiens
ccaagtgctattaca

SEQ ID NO: 446938 - DNA, 15 bp, Homo sapiens
accaagtgctattac

SEQ ID NO: 446939 - DNA, 15 bp, Homo sapiens
caccaagtgctatta

SEQ ID NO: 446940 - DNA, 15 bp, Homo sapiens
ccaccaagtgctatt

SEQ ID NO: 446941 - DNA, 15 bp, Homo sapiens
cccaccaagtgctat

SEQ ID NO: 446942 - DNA, 15 bp, Homo sapiens
tcccaccaagtgcta

SEQ ID NO: 446943 - DNA, 15 bp, Homo sapiens
ctcccaccaagtgct

SEQ ID NO: 446944 - DNA, 15 bp, Homo sapiens
actcccaccaagtgc

SEQ ID NO: 446945 - DNA, 15 bp, Homo sapiens
aactcccaccaagtg

SEQ ID NO: 446946 - DNA, 15 bp, Homo sapiens
aaactcccaccaagt

SEQ ID NO: 446947 - DNA, 15 bp, Homo sapiens
aaaactcccaccaag

SEQ ID NO: 446948 - DNA, 15 bp, Homo sapiens
caaaactcccaccaa

SEQ ID NO: 446949 - DNA, 15 bp, Homo sapiens
tcaaaactcccacca

SEQ ID NO: 446950 - DNA, 15 bp, Homo sapiens
ttcaaaactcccacc

SEQ ID NO: 446951 - DNA, 15 bp, Homo sapiens
attcaaaactcccac

SEQ ID NO: 446952 - DNA, 15 bp, Homo sapiens
gattcaaaactccca

SEQ ID NO: 446953 - DNA, 15 bp, Homo sapiens
tgattcaaaactccc

SEQ ID NO: 446954 - DNA, 15 bp, Homo sapiens
ctgattcaaaactcc

SEQ ID NO: 446955 - DNA, 15 bp, Homo sapiens
actgattcaaaactc

SEQ ID NO: 446956 - DNA, 15 bp, Homo sapiens
tactgattcaaaact

SEQ ID NO: 446957 - DNA, 15 bp, Homo sapiens
ctactgattcaaaac

SEQ ID NO: 446958 - DNA, 15 bp, Homo sapiens
tctactgattcaaaa

SEQ ID NO: 446959 - DNA, 15 bp, Homo sapiens
ctctactgattcaaa

SEQ ID NO: 446960 - DNA, 15 bp, Homo sapiens
tctctactgattcaa

SEQ ID NO: 446961 - DNA, 15 bp, Homo sapiens
atctctactgattca

SEQ ID NO: 446962 - DNA, 15 bp, Homo sapiens
aatctctactgattc

SEQ ID NO: 446963 - DNA, 15 bp, Homo sapiens
gaatctctactgatt

SEQ ID NO: 446964 - DNA, 15 bp, Homo sapiens
ggaatctctactgat

SEQ ID NO: 446965 - DNA, 15 bp, Homo sapiens
gggaatctctactga

SEQ ID NO: 446966 - DNA, 15 bp, Homo sapiens
tgggaatctctactg

SEQ ID NO: 446967 - DNA, 15 bp, Homo sapiens
ctgggaatctctact

SEQ ID NO: 446968 - DNA, 15 bp, Homo sapiens
gctgggaatctctac

SEQ ID NO: 446969 - DNA, 15 bp, Homo sapiens
ggctgggaatctcta

SEQ ID NO: 446970 - DNA, 15 bp, Homo sapiens
aggctgggaatctct

SEQ ID NO: 446971 - DNA, 15 bp, Homo sapiens
gaggctgggaatctc

SEQ ID NO: 446972 - DNA, 15 bp, Homo sapiens
ggaggctgggaatct

SEQ ID NO: 446973 - DNA, 15 bp, Homo sapiens
tggaggctgggaatc

SEQ ID NO: 446974 - DNA, 15 bp, Homo sapiens
ctggaggctgggaat

SEQ ID NO: 446975 - DNA, 15 bp, Homo sapiens
actggaggctgggaa

SEQ ID NO: 446976 - DNA, 15 bp, Homo sapiens
gactggaggctggga

SEQ ID NO: 446977 - DNA, 15 bp, Homo sapiens
agactggaggctggg

SEQ ID NO: 446978 - DNA, 15 bp, Homo sapiens
tagactggaggctgg

SEQ ID NO: 446979 - DNA, 15 bp, Homo sapiens
atagactggaggctg

SEQ ID NO: 446980 - DNA, 15 bp, Homo sapiens
tatagactggaggct

SEQ ID NO: 446981 - DNA, 15 bp, Homo sapiens
atatagactggaggc

SEQ ID NO: 446982 - DNA, 15 bp, Homo sapiens
tatatagactggagg

SEQ ID NO: 446983 - DNA, 15 bp, Homo sapiens
atatatagactggag

SEQ ID NO: 446984 - DNA, 15 bp, Homo sapiens
aatatatagactgga

SEQ ID NO: 446985 - DNA, 15 bp, Homo sapiens
gaatatatagactgg

SEQ ID NO: 446986 - DNA, 15 bp, Homo sapiens
tgaatatatagactg

SEQ ID NO: 446987 - DNA, 15 bp, Homo sapiens
gtgaatatatagact

SEQ ID NO: 446988 - DNA, 15 bp, Homo sapiens
ggtgaatatatagac

SEQ ID NO: 446989 - DNA, 15 bp, Homo sapiens
aggtgaatatataga

SEQ ID NO: 446990 - DNA, 15 bp, Homo sapiens
caggtgaatatatag

SEQ ID NO: 446991 - DNA, 15 bp, Homo sapiens
ccaggtgaatatata

SEQ ID NO: 446992 - DNA, 15 bp, Homo sapiens
gccaggtgaatatat

SEQ ID NO: 446993 - DNA, 15 bp, Homo sapiens
ggccaggtgaatata

SEQ ID NO: 446994 - DNA, 15 bp, Homo sapiens
cggccaggtgaatat

SEQ ID NO: 446995 - DNA, 15 bp, Homo sapiens
gcggccaggtgaata

SEQ ID NO: 446996 - DNA, 15 bp, Homo sapiens
tgcggccaggtgaat

SEQ ID NO: 446997 - DNA, 15 bp, Homo sapiens
gtgcggccaggtgaa

SEQ ID NO: 446998 - DNA, 15 bp, Homo sapiens
ggtgcggccaggtga

SEQ ID NO: 446999 - DNA, 15 bp, Homo sapiens
tggtgcggccaggtg

SEQ ID NO: 447000 - DNA, 15 bp, Homo sapiens
gtggtgcggccaggt

SEQ ID NO: 447001 - DNA, 15 bp, Homo sapiens
ggtggtgcggccagg

SEQ ID NO: 447002 - DNA, 15 bp, Homo sapiens
tggtggtgcggccag

SEQ ID NO: 447003 - DNA, 15 bp, Homo sapiens
ctggtggtgcggcca

SEQ ID NO: 447004 - DNA, 15 bp, Homo sapiens
tctggtggtgcggcc

SEQ ID NO: 447005 - DNA, 15 bp, Homo sapiens
ttctggtggtgcggc

SEQ ID NO: 447006 - DNA, 15 bp, Homo sapiens
tttctggtggtgcgg

SEQ ID NO: 447007 - DNA, 15 bp, Homo sapiens
atttctggtggtgcg

SEQ ID NO: 447008 - DNA, 15 bp, Homo sapiens
gatttctggtggtgc

SEQ ID NO: 447009 - DNA, 15 bp, Homo sapiens
ggatttctggtggtg

SEQ ID NO: 447010 - DNA, 15 bp, Homo sapiens
tggatttctggtggt

SEQ ID NO: 447011 - DNA, 15 bp, Homo sapiens
ttggatttctggtgg

SEQ ID NO: 447012 - DNA, 15 bp, Homo sapiens
tttggatttctggtg

SEQ ID NO: 447013 - DNA, 15 bp, Homo sapiens
ttttggatttctggt

SEQ ID NO: 447014 - DNA, 15 bp, Homo sapiens
attttggatttctgg

SEQ ID NO: 447015 - DNA, 15 bp, Homo sapiens
gattttggatttctg

SEQ ID NO: 447016 - DNA, 15 bp, Homo sapiens
agattttggatttct

SEQ ID NO: 447017 - DNA, 15 bp, Homo sapiens
aagattttggatttc

SEQ ID NO: 447018 - DNA, 15 bp, Homo sapiens
caagattttggattt

SEQ ID NO: 447019 - DNA, 15 bp, Homo sapiens
tcaagattttggatt

SEQ ID NO: 447020 - DNA, 15 bp, Homo sapiens
ctcaagattttggat

SEQ ID NO: 447021 - DNA, 15 bp, Homo sapiens
actcaagattttgga

SEQ ID NO: 447022 - DNA, 15 bp, Homo sapiens
tactcaagattttgg

SEQ ID NO: 447023 - DNA, 15 bp, Homo sapiens
atactcaagattttg

SEQ ID NO: 447024 - DNA, 15 bp, Homo sapiens
aatactcaagatttt

SEQ ID NO: 447025 - DNA, 15 bp, Homo sapiens
taatactcaagattt

SEQ ID NO: 447026 - DNA, 15 bp, Homo sapiens
ctaatactcaagatt

SEQ ID NO: 447027 - DNA, 15 bp, Homo sapiens
gctaatactcaagat

SEQ ID NO: 447028 - DNA, 15 bp, Homo sapiens
tgctaatactcaaga

SEQ ID NO: 447029 - DNA, 15 bp, Homo sapiens
ctgctaatactcaag

SEQ ID NO: 447030 - DNA, 15 bp, Homo sapiens
cctgctaatactcaa

SEQ ID NO: 447031 - DNA, 15 bp, Homo sapiens
tcctgctaatactca

SEQ ID NO: 447032 - DNA, 15 bp, Homo sapiens
ctcctgctaatactc

SEQ ID NO: 447033 - DNA, 15 bp, Homo sapiens
cctcctgctaatact

SEQ ID NO: 447034 - DNA, 15 bp, Homo sapiens
acctcctgctaatac

SEQ ID NO: 447035 - DNA, 15 bp, Homo sapiens
tacctcctgctaata

SEQ ID NO: 447036 - DNA, 15 bp, Homo sapiens
atacctcctgctaat

SEQ ID NO: 447037 - DNA, 15 bp, Homo sapiens
gatacctcctgctaa

SEQ ID NO: 447038 - DNA, 15 bp, Homo sapiens
agatacctcctgcta

SEQ ID NO: 447039 - DNA, 15 bp, Homo sapiens
cagatacctcctgct

SEQ ID NO: 447040 - DNA, 15 bp, Homo sapiens
acagatacctcctgc

SEQ ID NO: 447041 - DNA, 15 bp, Homo sapiens
tacagatacctcctg

SEQ ID NO: 447042 - DNA, 15 bp, Homo sapiens
atacagatacctcct

SEQ ID NO: 447043 - DNA, 15 bp, Homo sapiens
aatacagatacctcc

SEQ ID NO: 447044 - DNA, 15 bp, Homo sapiens
aaatacagatacctc

SEQ ID NO: 447045 - DNA, 15 bp, Homo sapiens
aaaatacagatacct

SEQ ID NO: 447046 - DNA, 15 bp, Homo sapiens
aaaaatacagatacc

SEQ ID NO: 447047 - DNA, 15 bp, Homo sapiens
gaaaaatacagatac

SEQ ID NO: 447048 - DNA, 15 bp, Homo sapiens
tgaaaaatacagata

SEQ ID NO: 447049 - DNA, 15 bp, Homo sapiens
gtgaaaaatacagat

SEQ ID NO: 447050 - DNA, 15 bp, Homo sapiens
tgtgaaaaatacaga

SEQ ID NO: 447051 - DNA, 15 bp, Homo sapiens
ttgtgaaaaatacag

SEQ ID NO: 447052 - DNA, 15 bp, Homo sapiens
tttgtgaaaaataca

SEQ ID NO: 447053 - DNA, 15 bp, Homo sapiens
ctttgtgaaaaatac

SEQ ID NO: 447054 - DNA, 15 bp, Homo sapiens
gctttgtgaaaaata

SEQ ID NO: 447055 - DNA, 15 bp, Homo sapiens
ggctttgtgaaaaat

SEQ ID NO: 447056 - DNA, 15 bp, Homo sapiens
gggctttgtgaaaaa

SEQ ID NO: 447057 - DNA, 15 bp, Homo sapiens
ggggctttgtgaaaa

SEQ ID NO: 447058 - DNA, 15 bp, Homo sapiens
gggggctttgtgaaa

SEQ ID NO: 447059 - DNA, 15 bp, Homo sapiens
tgggggctttgtgaa

SEQ ID NO: 447060 - DNA, 15 bp, Homo sapiens
ctgggggctttgtga

SEQ ID NO: 447061 - DNA, 15 bp, Homo sapiens
gctgggggctttgtg

SEQ ID NO: 447062 - DNA, 15 bp, Homo sapiens
tgctgggggctttgt

SEQ ID NO: 447063 - DNA, 15 bp, Homo sapiens
atgctgggggctttg

SEQ ID NO: 447064 - DNA, 15 bp, Homo sapiens
tatgctgggggcttt

SEQ ID NO: 447065 - DNA, 15 bp, Homo sapiens
atatgctgggggctt

SEQ ID NO: 447066 - DNA, 15 bp, Homo sapiens
aatatgctgggggct

SEQ ID NO: 447067 - DNA, 15 bp, Homo sapiens
gaatatgctgggggc

SEQ ID NO: 447068 - DNA, 15 bp, Homo sapiens
agaatatgctggggg

SEQ ID NO: 447069 - DNA, 15 bp, Homo sapiens
cagaatatgctgggg

SEQ ID NO: 447070 - DNA, 15 bp, Homo sapiens
tcagaatatgctggg

SEQ ID NO: 447071 - DNA, 15 bp, Homo sapiens
ctcagaatatgctgg

SEQ ID NO: 447072 - DNA, 15 bp, Homo sapiens
cctcagaatatgctg

SEQ ID NO: 447073 - DNA, 15 bp, Homo sapiens
tcctcagaatatgct

SEQ ID NO: 447074 - DNA, 15 bp, Homo sapiens
atcctcagaatatgc

SEQ ID NO: 447075 - DNA, 15 bp, Homo sapiens
catcctcagaatatg

SEQ ID NO: 447076 - DNA, 15 bp, Homo sapiens
ccatcctcagaatat

SEQ ID NO: 447077 - DNA, 15 bp, Homo sapiens
tccatcctcagaata

SEQ ID NO: 447078 - DNA, 15 bp, Homo sapiens
ctccatcctcagaat

SEQ ID NO: 447079 - DNA, 15 bp, Homo sapiens
tctccatcctcagaa

SEQ ID NO: 447080 - DNA, 15 bp, Homo sapiens
atctccatcctcaga

SEQ ID NO: 447081 - DNA, 15 bp, Homo sapiens
aatctccatcctcag

SEQ ID NO: 447082 - DNA, 15 bp, Homo sapiens
caatctccatcctca

SEQ ID NO: 447083 - DNA, 15 bp, Homo sapiens
tcaatctccatcctc

SEQ ID NO: 447084 - DNA, 15 bp, Homo sapiens
atcaatctccatcct

SEQ ID NO: 447085 - DNA, 15 bp, Homo sapiens
catcaatctccatcc

SEQ ID NO: 447086 - DNA, 15 bp, Homo sapiens
ccatcaatctccatc

SEQ ID NO: 447087 - DNA, 15 bp, Homo sapiens
gccatcaatctccat

SEQ ID NO: 447088 - DNA, 15 bp, Homo sapiens
tgccatcaatctcca

SEQ ID NO: 447089 - DNA, 15 bp, Homo sapiens
atgccatcaatctcc

SEQ ID NO: 447090 - DNA, 15 bp, Homo sapiens
aatgccatcaatctc

SEQ ID NO: 447091 - DNA, 15 bp, Homo sapiens
gaatgccatcaatct

SEQ ID NO: 447092 - DNA, 15 bp, Homo sapiens
agaatgccatcaatc

SEQ ID NO: 447093 - DNA, 15 bp, Homo sapiens
gagaatgccatcaat

SEQ ID NO: 447094 - DNA, 15 bp, Homo sapiens
ggagaatgccatcaa

SEQ ID NO: 447095 - DNA, 15 bp, Homo sapiens
gggagaatgccatca

SEQ ID NO: 447096 - DNA, 15 bp, Homo sapiens
cgggagaatgccatc

SEQ ID NO: 447097 - DNA, 15 bp, Homo sapiens
acgggagaatgccat

SEQ ID NO: 447098 - DNA, 15 bp, Homo sapiens
gacgggagaatgcca

SEQ ID NO: 447099 - DNA, 15 bp, Homo sapiens
agacgggagaatgcc

SEQ ID NO: 447100 - DNA, 15 bp, Homo sapiens
gagacgggagaatgc

SEQ ID NO: 447101 - DNA, 15 bp, Homo sapiens
ggagacgggagaatg

SEQ ID NO: 447102 - DNA, 15 bp, Homo sapiens
aggagacgggagaat

SEQ ID NO: 447103 - DNA, 15 bp, Homo sapiens
aaggagacgggagaa

SEQ ID NO: 447104 - DNA, 15 bp, Homo sapiens
gaaggagacgggaga

SEQ ID NO: 447105 - DNA, 15 bp, Homo sapiens
ggaaggagacgggag

SEQ ID NO: 447106 - DNA, 15 bp, Homo sapiens
tggaaggagacggga

SEQ ID NO: 447107 - DNA, 15 bp, Homo sapiens
ctggaaggagacggg

SEQ ID NO: 447108 - DNA, 15 bp, Homo sapiens
cctggaaggagacgg

SEQ ID NO: 447109 - DNA, 15 bp, Homo sapiens
ccctggaaggagacg

SEQ ID NO: 447110 - DNA, 15 bp, Homo sapiens
tccctggaaggagac

SEQ ID NO: 447111 - DNA, 15 bp, Homo sapiens
gtccctggaaggaga

SEQ ID NO: 447112 - DNA, 15 bp, Homo sapiens
tgtccctggaaggag

SEQ ID NO: 447113 - DNA, 15 bp, Homo sapiens
gtgtccctggaagga

SEQ ID NO: 447114 - DNA, 15 bp, Homo sapiens
agtgtccctggaagg

SEQ ID NO: 447115 - DNA, 15 bp, Homo sapiens
cagtgtccctggaag

SEQ ID NO: 447116 - DNA, 15 bp, Homo sapiens
gcagtgtccctggaa

SEQ ID NO: 447117 - DNA, 15 bp, Homo sapiens
agcagtgtccctgga

SEQ ID NO: 447118 - DNA, 15 bp, Homo sapiens
aagcagtgtccctgg

SEQ ID NO: 447119 - DNA, 15 bp, Homo sapiens
caagcagtgtccctg

SEQ ID NO: 447120 - DNA, 15 bp, Homo sapiens
ccaagcagtgtccct

SEQ ID NO: 447121 - DNA, 15 bp, Homo sapiens
tccaagcagtgtccc

SEQ ID NO: 447122 - DNA, 15 bp, Homo sapiens
ttccaagcagtgtcc

SEQ ID NO: 447123 - DNA, 15 bp, Homo sapiens
tttccaagcagtgtc

SEQ ID NO: 447124 - DNA, 15 bp, Homo sapiens
ctttccaagcagtgt

SEQ ID NO: 447125 - DNA, 15 bp, Homo sapiens
gctttccaagcagtg

SEQ ID NO: 447126 - DNA, 15 bp, Homo sapiens
agctttccaagcagt

SEQ ID NO: 447127 - DNA, 15 bp, Homo sapiens
cagctttccaagcag

SEQ ID NO: 447128 - DNA, 15 bp, Homo sapiens
tcagctttccaagca

SEQ ID NO: 447129 - DNA, 15 bp, Homo sapiens
ttcagctttccaagc

SEQ ID NO: 447130 - DNA, 15 bp, Homo sapiens
gttcagctttccaag

SEQ ID NO: 447131 - DNA, 15 bp, Homo sapiens
ggttcagctttccaa

SEQ ID NO: 447132 - DNA, 15 bp, Homo sapiens
aggttcagctttcca

SEQ ID NO: 447133 - DNA, 15 bp, Homo sapiens
aaggttcagctttcc

SEQ ID NO: 447134 - DNA, 15 bp, Homo sapiens
gaaggttcagctttc

SEQ ID NO: 447135 - DNA, 15 bp, Homo sapiens
cgaaggttcagcttt

SEQ ID NO: 447136 - DNA, 15 bp, Homo sapiens
tcgaaggttcagctt

SEQ ID NO: 447137 - DNA, 15 bp, Homo sapiens
ctcgaaggttcagct

SEQ ID NO: 447138 - DNA, 15 bp, Homo sapiens
gctcgaaggttcagc

SEQ ID NO: 447139 - DNA, 15 bp, Homo sapiens
tgctcgaaggttcag

SEQ ID NO: 447140 - DNA, 15 bp, Homo sapiens
ctgctcgaaggttca

SEQ ID NO: 447141 - DNA, 15 bp, Homo sapiens
gctgctcgaaggttc

SEQ ID NO: 447142 - DNA, 15 bp, Homo sapiens
ggctgctcgaaggtt

SEQ ID NO: 447143 - DNA, 15 bp, Homo sapiens
tggctgctcgaaggt

SEQ ID NO: 447144 - DNA, 15 bp, Homo sapiens
gtggctgctcgaagg

SEQ ID NO: 447145 - DNA, 15 bp, Homo sapiens
agtggctgctcgaag

SEQ ID NO: 447146 - DNA, 15 bp, Homo sapiens
aagtggctgctcgaa

SEQ ID NO: 447147 - DNA, 15 bp, Homo sapiens
caagtggctgctcga

SEQ ID NO: 447148 - DNA, 15 bp, Homo sapiens
gcaagtggctgctcg

SEQ ID NO: 447149 - DNA, 15 bp, Homo sapiens
tgcaagtggctgctc

SEQ ID NO: 447150 - DNA, 15 bp, Homo sapiens
ctgcaagtggctgct

SEQ ID NO: 447151 - DNA, 15 bp, Homo sapiens
gctgcaagtggctgc

SEQ ID NO: 447152 - DNA, 15 bp, Homo sapiens
agctgcaagtggctg

SEQ ID NO: 447153 - DNA, 15 bp, Homo sapiens
cagctgcaagtggct

SEQ ID NO: 447154 - DNA, 15 bp, Homo sapiens
gcagctgcaagtggc

SEQ ID NO: 447155 - DNA, 15 bp, Homo sapiens
tgcagctgcaagtgg

SEQ ID NO: 447156 - DNA, 15 bp, Homo sapiens
atgcagctgcaagtg

SEQ ID NO: 447157 - DNA, 15 bp, Homo sapiens
catgcagctgcaagt

SEQ ID NO: 447158 - DNA, 15 bp, Homo sapiens
ccatgcagctgcaag
